United States Patent Application Publication US 2007/0042381 A1 - sequence listing, part 42

SEQ ID NO: 1878047 - RNA, 12 nt, Human
gaucucugcagg

SEQ ID NO: 1878048 - RNA, 12 nt, Human
gauccagccugg

SEQ ID NO: 1878049 - RNA, 23 nt, Human
gauccagcccugaguuccuagcc

SEQ ID NO: 1878050 - RNA, 19 nt, Human
gcaagugagagcugggugu

SEQ ID NO: 1878051 - RNA, 18 nt, Human
gcaagugagagcugggug

SEQ ID NO: 1878052 - RNA, 20 nt, Human
gcacucagaagacacugaug

SEQ ID NO: 1878053 - RNA, 13 nt, Human
gcagaacagugau

SEQ ID NO: 1878054 - RNA, 12 nt, Human
gcagaacaguga

SEQ ID NO: 1878055 - RNA, 17 nt, Human
gcagaaacgaagccauc

SEQ ID NO: 1878056 - RNA, 23 nt, Human
gcagaaacgaagccaucuuucuu

SEQ ID NO: 1878057 - RNA, 16 nt, Human
gcagaaaauugccuaa

SEQ ID NO: 1878058 - RNA, 22 nt, Human
gcacuuuguucuggcucuucca

SEQ ID NO: 1878059 - RNA, 15 nt, Human
gcacuccccugcugg

SEQ ID NO: 1878060 - RNA, 18 nt, Human
gcacuuuguucuggcucu

SEQ ID NO: 1878061 - RNA, 19 nt, Human
gcacuuuguucuggcucuu

SEQ ID NO: 1878062 - RNA, 13 nt, Human
gcacuccccugcu

SEQ ID NO: 1878063 - RNA, 14 nt, Human
gcacuccccugcug

SEQ ID NO: 1878064 - RNA, 14 nt, Human
gcacuccagccugg

SEQ ID NO: 1878065 - RNA, 15 nt, Human
gcacuccagccuggg

SEQ ID NO: 1878066 - RNA, 22 nt, Human
gcagaacagugauuaccaggga

SEQ ID NO: 1878067 - RNA, 18 nt, Human
gcagaacagugauuacca

SEQ ID NO: 1878068 - RNA, 19 nt, Human
gcagaacuaaacucauuua

SEQ ID NO: 1878069 - RNA, 21 nt, Human
gcagaacuaaacucauuuaua

SEQ ID NO: 1878070 - RNA, 19 nt, Human
gcagagcugcgggcugggu

SEQ ID NO: 1878071 - RNA, 17 nt, Human
gcagagcugcgggcugg

SEQ ID NO: 1878072 - RNA, 21 nt, Human
gcagaggaaagcaaaggagau

SEQ ID NO: 1878073 - RNA, 12 nt, Human
gcagaggagggg

SEQ ID NO: 1878074 - RNA, 14 nt, Human
gcagaggaggggcc

SEQ ID NO: 1878075 - RNA, 21 nt, Human
gcagaggaggggccgcugcca

SEQ ID NO: 1878076 - RNA, 15 nt, Human
gcagaggaggggccg

SEQ ID NO: 1878077 - RNA, 13 nt, Human
gcagaggaaagca

SEQ ID NO: 1878078 - RNA, 14 nt, Human
gcagaggaaagcaa

SEQ ID NO: 1878079 - RNA, 18 nt, Human
gcagaggaaagcaaagga

SEQ ID NO: 1878080 - RNA, 20 nt, Human
gcagaggaaagcaaaggaga

SEQ ID NO: 1878081 - RNA, 17 nt, Human
gcagcauauucaggaag

SEQ ID NO: 1878082 - RNA, 18 nt, Human
gcagcauauucaggaagc

SEQ ID NO: 1878083 - RNA, 19 nt, Human
gcagcauauucaggaagcu

SEQ ID NO: 1878084 - RNA, 23 nt, Human
gcagcauauucaggaagcucagg

SEQ ID NO: 1878085 - RNA, 14 nt, Human
gcagagggcacaga

SEQ ID NO: 1878086 - RNA, 12 nt, Human
gcagccaggaca

SEQ ID NO: 1878087 - RNA, 20 nt, Human
gcagccaggccacuggcccc

SEQ ID NO: 1878088 - RNA, 23 nt, Human
gcagccagccgugagugcagacc

SEQ ID NO: 1878089 - RNA, 22 nt, Human
gcagccagccgugagugcagac

SEQ ID NO: 1878090 - RNA, 13 nt, Human
gcagccagccgug

SEQ ID NO: 1878091 - RNA, 15 nt, Human
gcagccacauuccug

SEQ ID NO: 1878092 - RNA, 18 nt, Human
gcagcccaccccucaaca

SEQ ID NO: 1878093 - RNA, 18 nt, Human
gcauacguacacauuuua

SEQ ID NO: 1878094 - RNA, 22 nt, Human
gcaguuggccagagagccuggu

SEQ ID NO: 1878095 - RNA, 14 nt, Human
gcaguuggccagag

SEQ ID NO: 1878096 - RNA, 17 nt, Human
gcauacguacacauuuu

SEQ ID NO: 1878097 - RNA, 16 nt, Human
gcauacguacacauuu

SEQ ID NO: 1878098 - RNA, 15 nt, Human
gcauacguacacauu

SEQ ID NO: 1878099 - RNA, 13 nt, Human
gcaguuuaaagca

SEQ ID NO: 1878100 - RNA, 17 nt, Human
gcagucuguccaggcuc

SEQ ID NO: 1878101 - RNA, 13 nt, Human
gcagugagcagag

SEQ ID NO: 1878102 - RNA, 20 nt, Human
gcagcucuggacagccccac

SEQ ID NO: 1878103 - RNA, 12 nt, Human
gcagcucucccc

SEQ ID NO: 1878104 - RNA, 18 nt, Human
gcagcugaaauaugcugg

SEQ ID NO: 1878105 - RNA, 19 nt, Human
gcagcugaaauaugcuggc

SEQ ID NO: 1878106 - RNA, 22 nt, Human
gcagcugaaauaugcuggcugg

SEQ ID NO: 1878107 - RNA, 18 nt, Human
gcauccuccacaauagca

SEQ ID NO: 1878108 - RNA, 19 nt, Human
gcauccuaaagauaaagcc

SEQ ID NO: 1878109 - RNA, 20 nt, Human
gcauccuaaagauaaagcca

SEQ ID NO: 1878110 - RNA, 16 nt, Human
gcauccccugccucca

SEQ ID NO: 1878111 - RNA, 14 nt, Human
gcauccccugccuc

SEQ ID NO: 1878112 - RNA, 15 nt, Human
gcauccccugccucc

SEQ ID NO: 1878113 - RNA, 17 nt, Human
gcauccccugccuccau

SEQ ID NO: 1878114 - RNA, 13 nt, Human
gcauccccugccu

SEQ ID NO: 1878115 - RNA, 23 nt, Human
gcauccacuucuuucagcagacu

SEQ ID NO: 1878116 - RNA, 18 nt, Human
gcauccaguaucuugaag

SEQ ID NO: 1878117 - RNA, 14 nt, Human
gcauccaguaucuu

SEQ ID NO: 1878118 - RNA, 17 nt, Human
gcauccaguaucuugaa

SEQ ID NO: 1878119 - RNA, 20 nt, Human
gcaucuagcaugucgucaaa

SEQ ID NO: 1878120 - RNA, 13 nt, Human
gcauccuggcacc

SEQ ID NO: 1878121 - RNA, 14 nt, Human
gcauccuggcaccc

SEQ ID NO: 1878122 - RNA, 21 nt, Human
gcauggcugccaaugggagcu

SEQ ID NO: 1878123 - RNA, 15 nt, Human
gcauggucacacacu

SEQ ID NO: 1878124 - RNA, 18 nt, Human
gcauggucacacacugau

SEQ ID NO: 1878125 - RNA, 15 nt, Human
gcauggugccccagg

SEQ ID NO: 1878126 - RNA, 16 nt, Human
gcauggugccccagga

SEQ ID NO: 1878127 - RNA, 17 nt, Human
gcauggugccccaggac

SEQ ID NO: 1878128 - RNA, 18 nt, Human
gcauggugccccaggacc

SEQ ID NO: 1878129 - RNA, 19 nt, Human
gcauggugccccaggacca

SEQ ID NO: 1878130 - RNA, 20 nt, Human
gcauggugccccaggaccag

SEQ ID NO: 1878131 - RNA, 21 nt, Human
gcauggugccccaggaccagc

SEQ ID NO: 1878132 - RNA, 23 nt, Human
gcauggugccccaggaccagcuc

SEQ ID NO: 1878133 - RNA, 15 nt, Human
gcauuuacuuugugu

SEQ ID NO: 1878134 - RNA, 22 nt, Human
gcauuuaaaagauacaguuacu

SEQ ID NO: 1878135 - RNA, 18 nt, Human
gcauuuaaaagauacagu

SEQ ID NO: 1878136 - RNA, 17 nt, Human
gcauuuaaaagauacag

SEQ ID NO: 1878137 - RNA, 16 nt, Human
gcauuuaaaagauaca

SEQ ID NO: 1878138 - RNA, 16 nt, Human
gcauugugggaagggg

SEQ ID NO: 1878139 - RNA, 18 nt, Human
gcauugugggaaggggag

SEQ ID NO: 1878140 - RNA, 19 nt, Human
gcaugugaugagaggaaau

SEQ ID NO: 1878141 - RNA, 18 nt, Human
gcaugugaugagaggaaa

SEQ ID NO: 1878142 - RNA, 21 nt, Human
gcaugugaugagaggaaauca

SEQ ID NO: 1878143 - RNA, 13 nt, Human
gcauugugggaag

SEQ ID NO: 1878144 - RNA, 15 nt, Human
gcauugugggaaggg

SEQ ID NO: 1878145 - RNA, 21 nt, Human
gacacagcucuucuccaggcu

SEQ ID NO: 1878146 - RNA, 20 nt, Human
gacacagcucuucuccaggc

SEQ ID NO: 1878147 - RNA, 19 nt, Human
gacacagcucuucuccagg

SEQ ID NO: 1878148 - RNA, 12 nt, Human
gacacagcucuu

SEQ ID NO: 1878149 - RNA, 18 nt, Human
gacaaaguuccaaaaugc

SEQ ID NO: 1878150 - RNA, 20 nt, Human
gacaaaguuccaaaaugcca

SEQ ID NO: 1878151 - RNA, 15 nt, Human
gacaaagucaagcca

SEQ ID NO: 1878152 - RNA, 19 nt, Human
gacacagaaaauguugaga

SEQ ID NO: 1878153 - RNA, 21 nt, Human
gacacagaaaauguugagaau

SEQ ID NO: 1878154 - RNA, 20 nt, Human
gacaaagaggccuuuaacca

SEQ ID NO: 1878155 - RNA, 14 nt, Human
gacaaaaagcuacu

SEQ ID NO: 1878156 - RNA, 23 nt, Human
gaauucaaacuggggccuccaga

SEQ ID NO: 1878157 - RNA, 16 nt, Human
gaauucaaacuggggc

SEQ ID NO: 1878158 - RNA, 18 nt, Human
gaauucaaacuggggccu

SEQ ID NO: 1878159 - RNA, 21 nt, Human
gaauucaaacuggggccucca

SEQ ID NO: 1878160 - RNA, 22 nt, Human
gaauucaaacuggggccuccag

SEQ ID NO: 1878161 - RNA, 18 nt, Human
gaauuauuuuaaaagaua

SEQ ID NO: 1878162 - RNA, 16 nt, Human
gaauuauuuuaaaaga

SEQ ID NO: 1878163 - RNA, 13 nt, Human
gaauuauuuuaaa

SEQ ID NO: 1878164 - RNA, 15 nt, Human
gaauuagcugcuucu

SEQ ID NO: 1878165 - RNA, 14 nt, Human
gaauuaugaaacuu

SEQ ID NO: 1878166 - RNA, 19 nt, Human
gaauguuugccucugccuc

SEQ ID NO: 1878167 - RNA, 18 nt, Human
gaauguuugccucugccu

SEQ ID NO: 1878168 - RNA, 15 nt, Human
gaauguuuuaaauuc

SEQ ID NO: 1878169 - RNA, 16 nt, Human
gaauguuuuaaauucu

SEQ ID NO: 1878170 - RNA, 15 nt, Human
gaauuaacacaugau

SEQ ID NO: 1878171 - RNA, 14 nt, Human
gaauuaacacauga

SEQ ID NO: 1878172 - RNA, 21 nt, Human
gaauuaaguuagggaauggca

SEQ ID NO: 1878173 - RNA, 18 nt, Human
gaauuaaguuagggaaug

SEQ ID NO: 1878174 - RNA, 18 nt, Human
gaaugcacaaacagaggc

SEQ ID NO: 1878175 - RNA, 17 nt, Human
gaauguuugccucugcc

SEQ ID NO: 1878176 - RNA, 16 nt, Human
gaauguuugccucugc

SEQ ID NO: 1878177 - RNA, 19 nt, Human
gaaugcacaaacagaggcc

SEQ ID NO: 1878178 - RNA, 15 nt, Human
gaauguuugccucug

SEQ ID NO: 1878179 - RNA, 20 nt, Human
gaaugaugauccuaggcauu

SEQ ID NO: 1878180 - RNA, 14 nt, Human
gaaugaugccauga

SEQ ID NO: 1878181 - RNA, 14 nt, Human
gaaugauuaauuaa

SEQ ID NO: 1878182 - RNA, 20 nt, Human
gaaugaauggcuaagcaaaa

SEQ ID NO: 1878183 - RNA, 15 nt, Human
gaaugaauggcuaag

SEQ ID NO: 1878184 - RNA, 14 nt, Human
gaaugaauggcuaa

SEQ ID NO: 1878185 - RNA, 22 nt, Human
gaauauugcugauggugcaaug

SEQ ID NO: 1878186 - RNA, 23 nt, Human
gaauauugcugauggugcaauga

SEQ ID NO: 1878187 - RNA, 24 nt, Human
gaauauugcugauggugcaaugac

SEQ ID NO: 1878188 - RNA, 15 nt, Human
gaauauauaaccagu

SEQ ID NO: 1878189 - RNA, 11 nt, Human
gaauauugcug

SEQ ID NO: 1878190 - RNA, 12 nt, Human
gaauauugcuga

SEQ ID NO: 1878191 - RNA, 13 nt, Human
gaauauugcugau

SEQ ID NO: 1878192 - RNA, 22 nt, Human
gaauaucuccgucaacucauau

SEQ ID NO: 1878193 - RNA, 23 nt, Human
gacauugcggacagccacggcca

SEQ ID NO: 1878194 - RNA, 17 nt, Human
gacauugcggacagcca

SEQ ID NO: 1878195 - RNA, 23 nt, Human
gacauuggcaccuaauccaggca

SEQ ID NO: 1878196 - RNA, 14 nt, Human
gacauugcguuuga

SEQ ID NO: 1878197 - RNA, 21 nt, Human
gacauugcguuugaccuuuua

SEQ ID NO: 1878198 - RNA, 16 nt, Human
gacacugggaggccag

SEQ ID NO: 1878199 - RNA, 17 nt, Human
gacacugggaggccagu

SEQ ID NO: 1878200 - RNA, 23 nt, Human
gacacugggaggccagugagcca

SEQ ID NO: 1878201 - RNA, 18 nt, Human
gacagcuccuucuguccu

SEQ ID NO: 1878202 - RNA, 17 nt, Human
gacagcuccuucugucc

SEQ ID NO: 1878203 - RNA, 16 nt, Human
gacagcuccuucuguc

SEQ ID NO: 1878204 - RNA, 16 nt, Human
gacagcccgggcucug

SEQ ID NO: 1878205 - RNA, 14 nt, Human
gacagcccgggcuc

SEQ ID NO: 1878206 - RNA, 14 nt, Human
gacagccccacccu

SEQ ID NO: 1878207 - RNA, 15 nt, Human
gacagccccacccug

SEQ ID NO: 1878208 - RNA, 19 nt, Human
gacagcuccuucuguccua

SEQ ID NO: 1878209 - RNA, 12 nt, Human
gacagcucugca

SEQ ID NO: 1878210 - RNA, 10 nt, Human
gacagcucuu

SEQ ID NO: 1878211 - RNA, 12 nt, Human
gacagucccugc

SEQ ID NO: 1878212 - RNA, 11 nt, Human
gacagcucuua

SEQ ID NO: 1878213 - RNA, 14 nt, Human
gacagucccugcca

SEQ ID NO: 1878214 - RNA, 15 nt, Human
gacagucccugccaa

SEQ ID NO: 1878215 - RNA, 16 nt, Human
gacagucccugccaau

SEQ ID NO: 1878216 - RNA, 20 nt, Human
gacagucccugccaauggac

SEQ ID NO: 1878217 - RNA, 17 nt, Human
gacauguuuuccgugaa

SEQ ID NO: 1878218 - RNA, 18 nt, Human
gacgcugugcugcccugc

SEQ ID NO: 1878219 - RNA, 16 nt, Human
gacgcugugcugcccu

SEQ ID NO: 1878220 - RNA, 17 nt, Human
gacgcugugcugcccug

SEQ ID NO: 1878221 - RNA, 22 nt, Human
gacgcuacccgggaagggggcu

SEQ ID NO: 1878222 - RNA, 23 nt, Human
gacgcuacccgggaagggggcug

SEQ ID NO: 1878223 - RNA, 14 nt, Human
gacgcucucuggcc

SEQ ID NO: 1878224 - RNA, 21 nt, Human
gaccucaguuuuaucauuuuc

SEQ ID NO: 1878225 - RNA, 20 nt, Human
gaccucaguuuuaucauuuu

SEQ ID NO: 1878226 - RNA, 13 nt, Human
gaccucagggcac

SEQ ID NO: 1878227 - RNA, 16 nt, Human
gaccuccaagccacug

SEQ ID NO: 1878228 - RNA, 22 nt, Human
gaccucugcagcaauaaagcag

SEQ ID NO: 1878229 - RNA, 18 nt, Human
gaccucugcagcaauaaa

SEQ ID NO: 1878230 - RNA, 16 nt, Human
gaccucugcagcaaua

SEQ ID NO: 1878231 - RNA, 23 nt, Human
gacgccacagcccagccacggac

SEQ ID NO: 1878232 - RNA, 22 nt, Human
gacgccacagcccagccacgga

SEQ ID NO: 1878233 - RNA, 13 nt, Human
gaccucugccuga

SEQ ID NO: 1878234 - RNA, 12 nt, Human
gacgccauccca

SEQ ID NO: 1878235 - RNA, 13 nt, Human
gacgccaucccag

SEQ ID NO: 1878236 - RNA, 15 nt, Human
gacgccaucccagcc

SEQ ID NO: 1878237 - RNA, 21 nt, Human
gacgccaucccagccccaaug

SEQ ID NO: 1878238 - RNA, 21 nt, Human
gaccucaggugauccacccac

SEQ ID NO: 1878239 - RNA, 20 nt, Human
gaccucaggugauccaccca

SEQ ID NO: 1878240 - RNA, 19 nt, Human
gaccucaggugauccaccc

SEQ ID NO: 1878241 - RNA, 21 nt, Human
gaccucaggugagaagcagag

SEQ ID NO: 1878242 - RNA, 19 nt, Human
gaccucaggccugggggcu

SEQ ID NO: 1878243 - RNA, 18 nt, Human
gaccucaggugagaagca

SEQ ID NO: 1878244 - RNA, 19 nt, Human
gaccucaggugagaagcag

SEQ ID NO: 1878245 - RNA, 14 nt, Human
gaccucaggccugg

SEQ ID NO: 1878246 - RNA, 16 nt, Human
gacccugaaggggcca

SEQ ID NO: 1878247 - RNA, 14 nt, Human
gagcaucaggccag

SEQ ID NO: 1878248 - RNA, 21 nt, Human
gagcaugccuggauggggcug

SEQ ID NO: 1878249 - RNA, 13 nt, Human
gagcaugccugga

SEQ ID NO: 1878250 - RNA, 15 nt, Human
gagcaucaggccagg

SEQ ID NO: 1878251 - RNA, 16 nt, Human
gagcaucaggccaggc

SEQ ID NO: 1878252 - RNA, 13 nt, Human
gagcaucaggcca

SEQ ID NO: 1878253 - RNA, 17 nt, Human
gagccccgaggccuucu

SEQ ID NO: 1878254 - RNA, 14 nt, Human
gagccccgaggccu

SEQ ID NO: 1878255 - RNA, 13 nt, Human
gagccccgaggcc

SEQ ID NO: 1878256 - RNA, 12 nt, Human
gagcccugggag

SEQ ID NO: 1878257 - RNA, 22 nt, Human
gagccccuucugcucagcucug

SEQ ID NO: 1878258 - RNA, 17 nt, Human
gagccccuucugcucag

SEQ ID NO: 1878259 - RNA, 20 nt, Human
gagccccuucugcucagcuc

SEQ ID NO: 1878260 - RNA, 21 nt, Human
gagccccuucugcucagcucu

SEQ ID NO: 1878261 - RNA, 20 nt, Human
gagccccugucuagagaggg

SEQ ID NO: 1878262 - RNA, 21 nt, Human
gagccccugucuagagaggga

SEQ ID NO: 1878263 - RNA, 22 nt, Human
gagccccugucuagagagggag

SEQ ID NO: 1878264 - RNA, 16 nt, Human
gagcccugggaggcuc

SEQ ID NO: 1878265 - RNA, 18 nt, Human
gagcccugggaggcucug

SEQ ID NO: 1878266 - RNA, 19 nt, Human
gagcccugggaggcucugg

SEQ ID NO: 1878267 - RNA, 20 nt, Human
gagcccugggaggcucugga

SEQ ID NO: 1878268 - RNA, 14 nt, Human
gagcccugguggca

SEQ ID NO: 1878269 - RNA, 13 nt, Human
gagcccugguggc

SEQ ID NO: 1878270 - RNA, 23 nt, Human
gagcuggccgcgccaaauaaugu

SEQ ID NO: 1878271 - RNA, 13 nt, Human
gagcuggccccgc

SEQ ID NO: 1878272 - RNA, 14 nt, Human
gagcuggccccgcc

SEQ ID NO: 1878273 - RNA, 16 nt, Human
gagcuggccccgccgc

SEQ ID NO: 1878274 - RNA, 17 nt, Human
gagcuggccccgccgcc

SEQ ID NO: 1878275 - RNA, 23 nt, Human
gaggggcagauggaaaggagccu

SEQ ID NO: 1878276 - RNA, 12 nt, Human
gaggggagaagc

SEQ ID NO: 1878277 - RNA, 14 nt, Human
gagggccugcaagg

SEQ ID NO: 1878278 - RNA, 17 nt, Human
gagggccugcaagggag

SEQ ID NO: 1878279 - RNA, 21 nt, Human
gagggccugcaagggagugag

SEQ ID NO: 1878280 - RNA, 19 nt, Human
gaggcauuuguuugaacug

SEQ ID NO: 1878281 - RNA, 22 nt, Human
gaggcaugugaugagaggaaau

SEQ ID NO: 1878282 - RNA, 20 nt, Human
gaggcaugugaugagaggaa

SEQ ID NO: 1878283 - RNA, 21 nt, Human
gaggcaugugaugagaggaaa

SEQ ID NO: 1878284 - RNA, 21 nt, Human
gaggcauuuguuugaacugau

SEQ ID NO: 1878285 - RNA, 15 nt, Human
gaggcuccacuuggu

SEQ ID NO: 1878286 - RNA, 17 nt, Human
gaggcuccacuuggucu

SEQ ID NO: 1878287 - RNA, 20 nt, Human
gaggcucuggagcccacugu

SEQ ID NO: 1878288 - RNA, 18 nt, Human
gaggcugagaugggagaa

SEQ ID NO: 1878289 - RNA, 16 nt, Human
gaggcugaggcaagag

SEQ ID NO: 1878290 - RNA, 22 nt, Human
gaggacaguauuuguggggagg

SEQ ID NO: 1878291 - RNA, 20 nt, Human
gaggacauaaugggguccug

SEQ ID NO: 1878292 - RNA, 20 nt, Human
gaggacgcucucuggccuuc

SEQ ID NO: 1878293 - RNA, 21 nt, Human
gaggacgcucucuggccuucg

SEQ ID NO: 1878294 - RNA, 23 nt, Human
gaggacuuuucuuuguggcuucc

SEQ ID NO: 1878295 - RNA, 20 nt, Human
gaggacuuuucuuuguggcu

SEQ ID NO: 1878296 - RNA, 16 nt, Human
gaggacuuuucuuugu

SEQ ID NO: 1878297 - RNA, 14 nt, Human
gaggagaaacugga

SEQ ID NO: 1878298 - RNA, 12 nt, Human
gaggagaaacug

SEQ ID NO: 1878299 - RNA, 12 nt, Human
gaggagagagga

SEQ ID NO: 1878300 - RNA, 14 nt, Human
gaggagagaggacc

SEQ ID NO: 1878301 - RNA, 15 nt, Human
gaggagagaggaccc

SEQ ID NO: 1878302 - RNA, 18 nt, Human
gaggcagggucucacucu

SEQ ID NO: 1878303 - RNA, 20 nt, Human
gaggcagggucucacucugu

SEQ ID NO: 1878304 - RNA, 19 nt, Human
gaggcagggucucacucug

SEQ ID NO: 1878305 - RNA, 22 nt, Human
gaggcagggucucacucugucg

SEQ ID NO: 1878306 - RNA, 14 nt, Human
gagauuggaaggaa

SEQ ID NO: 1878307 - RNA, 21 nt, Human
gagauugugccccugcacucc

SEQ ID NO: 1878308 - RNA, 17 nt, Human
gagauucaguuuucauu

SEQ ID NO: 1878309 - RNA, 16 nt, Human
gagaugcuagaacucc

SEQ ID NO: 1878310 - RNA, 18 nt, Human
gagagggaggcaagcccu

SEQ ID NO: 1878311 - RNA, 20 nt, Human
gagaugcuagaacucccuuu

SEQ ID NO: 1878312 - RNA, 20 nt, Human
gagagcugggugucaagagg

SEQ ID NO: 1878313 - RNA, 12 nt, Human
gagaggaaauca

SEQ ID NO: 1878314 - RNA, 15 nt, Human
gagaggacccccuga

SEQ ID NO: 1878315 - RNA, 20 nt, Human
gagaggcaauggcuccuuca

SEQ ID NO: 1878316 - RNA, 16 nt, Human
gagaggcccucuggag

SEQ ID NO: 1878317 - RNA, 20 nt, Human
gagaggcccucuggaguggc

SEQ ID NO: 1878318 - RNA, 23 nt, Human
gagaggcccucuggaguggccac

SEQ ID NO: 1878319 - RNA, 13 nt, Human
gagagcugggugu

SEQ ID NO: 1878320 - RNA, 15 nt, Human
gagagcuagcagcag

SEQ ID NO: 1878321 - RNA, 21 nt, Human
gagagcuagcagcagggaggg

SEQ ID NO: 1878322 - RNA, 18 nt, Human
gagagccuuccaggggug

SEQ ID NO: 1878323 - RNA, 20 nt, Human
gagagccuuccagggguggg

SEQ ID NO: 1878324 - RNA, 20 nt, Human
gagacuccucaguucuugcc

SEQ ID NO: 1878325 - RNA, 13 nt, Human
gagacuccugcag

SEQ ID NO: 1878326 - RNA, 14 nt, Human
gagacuccugcagg

SEQ ID NO: 1878327 - RNA, 15 nt, Human
gagagccuuccaggg

SEQ ID NO: 1878328 - RNA, 16 nt, Human
gagagccuuccagggg

SEQ ID NO: 1878329 - RNA, 20 nt, Human
gacuuuuccaacccucauca

SEQ ID NO: 1878330 - RNA, 19 nt, Human
gacuuuuuuuuuuuauaau

SEQ ID NO: 1878331 - RNA, 10 nt, Human
gagaaaaaga

SEQ ID NO: 1878332 - RNA, 14 nt, Human
gagaaaaagaaaug

SEQ ID NO: 1878333 - RNA, 15 nt, Human
gagaaaaagaaaugc

SEQ ID NO: 1878334 - RNA, 16 nt, Human
gagaaaaagaaaugca

SEQ ID NO: 1878335 - RNA, 12 nt, Human
gagaaaaagacc

SEQ ID NO: 1878336 - RNA, 15 nt, Human
gagaaaacagaccua

SEQ ID NO: 1878337 - RNA, 14 nt, Human
gacuuuuccaaccc

SEQ ID NO: 1878338 - RNA, 19 nt, Human
gacuuuuccaacccucauc

SEQ ID NO: 1878339 - RNA, 18 nt, Human
gagaaguucauauuucuu

SEQ ID NO: 1878340 - RNA, 19 nt, Human
gagaccuggcacuggaugc

SEQ ID NO: 1878341 - RNA, 18 nt, Human
gagacgggggcagagagg

SEQ ID NO: 1878342 - RNA, 19 nt, Human
gagacggagucccaccuug

SEQ ID NO: 1878343 - RNA, 16 nt, Human
gagacggagucccacc

SEQ ID NO: 1878344 - RNA, 19 nt, Human
gagaccuggacacaggccu

SEQ ID NO: 1878345 - RNA, 20 nt, Human
gagaccuggacacaggccug

SEQ ID NO: 1878346 - RNA, 14 nt, Human
gagacggaguccca

SEQ ID NO: 1878347 - RNA, 20 nt, Human
gagaccgggguauccugggg

SEQ ID NO: 1878348 - RNA, 23 nt, Human
gagaaugaaagggcccagagagg

SEQ ID NO: 1878349 - RNA, 15 nt, Human
gagaaugaaagggcc

SEQ ID NO: 1878350 - RNA, 21 nt, Human
gagaaucuacccccagaucca

SEQ ID NO: 1878351 - RNA, 22 nt, Human
gcccaggccccugccacccugg

SEQ ID NO: 1878352 - RNA, 21 nt, Human
gcccaggccccugccacccug

SEQ ID NO: 1878353 - RNA, 20 nt, Human
gcccaggccccugccacccu

SEQ ID NO: 1878354 - RNA, 12 nt, Human
gcccaggccccu

SEQ ID NO: 1878355 - RNA, 11 nt, Human
gcccaggcccc

SEQ ID NO: 1878356 - RNA, 11 nt, Human
gcccaggcagg

SEQ ID NO: 1878357 - RNA, 14 nt, Human
gcccaggaugcugc

SEQ ID NO: 1878358 - RNA, 18 nt, Human
gcccaggaccaucauccu

SEQ ID NO: 1878359 - RNA, 18 nt, Human
gcauuuacuuuguguuca

SEQ ID NO: 1878360 - RNA, 19 nt, Human
gcauuuaggccaugggaca

SEQ ID NO: 1878361 - RNA, 17 nt, Human
gcauuuacugugucuuu

SEQ ID NO: 1878362 - RNA, 18 nt, Human
gcauuuacugugucuuug

SEQ ID NO: 1878363 - RNA, 15 nt, Human
gcccacgcccccacu

SEQ ID NO: 1878364 - RNA, 16 nt, Human
gcccacgcccccacug

SEQ ID NO: 1878365 - RNA, 17 nt, Human
gcccacgcccccacugg

SEQ ID NO: 1878366 - RNA, 21 nt, Human
gcccacgcccccacuggugac

SEQ ID NO: 1878367 - RNA, 13 nt, Human
gcccacuucugcc

SEQ ID NO: 1878368 - RNA, 17 nt, Human
gcccacuguccugggcc

SEQ ID NO: 1878369 - RNA, 18 nt, Human
gcccacuguccugggccu

SEQ ID NO: 1878370 - RNA, 21 nt, Human
gcccacuguccugggccugca

SEQ ID NO: 1878371 - RNA, 23 nt, Human
gcccacuguccugggccugcaga

SEQ ID NO: 1878372 - RNA, 24 nt, Human
gcccacuguccugggccugcagaa

SEQ ID NO: 1878373 - RNA, 24 nt, Human
gcccaggaaaggcuccaggagcag

SEQ ID NO: 1878374 - RNA, 22 nt, Human
gcccaggaaaggcuccaggagc

SEQ ID NO: 1878375 - RNA, 23 nt, Human
gcccaggaaaggcuccaggagca

SEQ ID NO: 1878376 - RNA, 21 nt, Human
gcccacgcuggagugcaguga

SEQ ID NO: 1878377 - RNA, 19 nt, Human
gcccacgcuggagugcagu

SEQ ID NO: 1878378 - RNA, 23 nt, Human
gcccacgcuggagugcagugagc

SEQ ID NO: 1878379 - RNA, 15 nt, Human
gcccacuguacuugc

SEQ ID NO: 1878380 - RNA, 20 nt, Human
gcccacuguacuugcucuug

SEQ ID NO: 1878381 - RNA, 22 nt, Human
gcccacuguacuugcucuugau

SEQ ID NO: 1878382 - RNA, 15 nt, Human
gcccacuguccuggg

SEQ ID NO: 1878383 - RNA, 20 nt, Human
gccccaaaacucuccucugc

SEQ ID NO: 1878384 - RNA, 21 nt, Human
gccccaaaacucuccucugcu

SEQ ID NO: 1878385 - RNA, 11 nt, Human
gccccaaaagg

SEQ ID NO: 1878386 - RNA, 16 nt, Human
gccccugcugguucag

SEQ ID NO: 1878387 - RNA, 15 nt, Human
gccccugcugguuca

SEQ ID NO: 1878388 - RNA, 12 nt, Human
gccccuggcagc

SEQ ID NO: 1878389 - RNA, 15 nt, Human
gccccuggcagcccc

SEQ ID NO: 1878390 - RNA, 12 nt, Human
gccccugcuggu

SEQ ID NO: 1878391 - RNA, 11 nt, Human
gcccccugccc

SEQ ID NO: 1878392 - RNA, 17 nt, Human
gcccccaggacugggcc

SEQ ID NO: 1878393 - RNA, 16 nt, Human
gcccccaggacugggc

SEQ ID NO: 1878394 - RNA, 15 nt, Human
gcccccaggacuggg

SEQ ID NO: 1878395 - RNA, 14 nt, Human
gcccccaggacugg

SEQ ID NO: 1878396 - RNA, 13 nt, Human
gcccccaggacug

SEQ ID NO: 1878397 - RNA, 12 nt, Human
gcccccaggacu

SEQ ID NO: 1878398 - RNA, 21 nt, Human
gcccccagcuaagaaccugga

SEQ ID NO: 1878399 - RNA, 22 nt, Human
gcccccagcuaagaaccuggaa

SEQ ID NO: 1878400 - RNA, 23 nt, Human
gcccccagcuaagaaccuggaac

SEQ ID NO: 1878401 - RNA, 15 nt, Human
gcccccagcuaagaa

SEQ ID NO: 1878402 - RNA, 22 nt, Human
gccucauguccacugguucuuc

SEQ ID NO: 1878403 - RNA, 13 nt, Human
gccucgaacuggc

SEQ ID NO: 1878404 - RNA, 22 nt, Human
gccuccuuugugaggaagccgc

SEQ ID NO: 1878405 - RNA, 16 nt, Human
gccucgaacuggcugc

SEQ ID NO: 1878406 - RNA, 16 nt, Human
gccucgaaacacagaa

SEQ ID NO: 1878407 - RNA, 17 nt, Human
gccuccagaacucacug

SEQ ID NO: 1878408 - RNA, 15 nt, Human
gccuccauccugagg

SEQ ID NO: 1878409 - RNA, 14 nt, Human
gccuccauccugag

SEQ ID NO: 1878410 - RNA, 13 nt, Human
gccuccauccuga

SEQ ID NO: 1878411 - RNA, 12 nt, Human
gccuccagaacu

SEQ ID NO: 1878412 - RNA, 19 nt, Human
gccuagcauacguacacau

SEQ ID NO: 1878413 - RNA, 12 nt, Human
gccuagcauacg

SEQ ID NO: 1878414 - RNA, 17 nt, Human
gccuacaggagugagca

SEQ ID NO: 1878415 - RNA, 22 nt, Human
gccuacagcuuugaucccugac

SEQ ID NO: 1878416 - RNA, 23 nt, Human
gccuacagcuuugaucccugaca

SEQ ID NO: 1878417 - RNA, 13 nt, Human
gcccugugcucca

SEQ ID NO: 1878418 - RNA, 18 nt, Human
gcccugcgguagauggga

SEQ ID NO: 1878419 - RNA, 14 nt, Human
gcccugcccaccug

SEQ ID NO: 1878420 - RNA, 15 nt, Human
gcccugcccaccugg

SEQ ID NO: 1878421 - RNA, 21 nt, Human
gcccugugggcccccaaaugg

SEQ ID NO: 1878422 - RNA, 23 nt, Human
gcccuuaccugccaggaagccag

SEQ ID NO: 1878423 - RNA, 19 nt, Human
gcccuuagcagggaaacag

SEQ ID NO: 1878424 - RNA, 16 nt, Human
gcccugugggccccca

SEQ ID NO: 1878425 - RNA, 17 nt, Human
gcccugugggcccccaa

SEQ ID NO: 1878426 - RNA, 21 nt, Human
gcccuuaccugccaggaagcc

SEQ ID NO: 1878427 - RNA, 22 nt, Human
gcccuuaccugccaggaagcca

SEQ ID NO: 1878428 - RNA, 16 nt, Human
gccuacaggagugagc

SEQ ID NO: 1878429 - RNA, 21 nt, Human
gccccugcugguucaggguug

SEQ ID NO: 1878430 - RNA, 16 nt, Human
gccccuggcagccccu

SEQ ID NO: 1878431 - RNA, 17 nt, Human
gccccuggcagccccug

SEQ ID NO: 1878432 - RNA, 20 nt, Human
gcucagggccuggcucaggu

SEQ ID NO: 1878433 - RNA, 16 nt, Human
gcucagagcaguguuu

SEQ ID NO: 1878434 - RNA, 18 nt, Human
gcucagaggcgcacugug

SEQ ID NO: 1878435 - RNA, 19 nt, Human
gcucagaggcgcacuguga

SEQ ID NO: 1878436 - RNA, 20 nt, Human
gcucagaggcgcacugugac

SEQ ID NO: 1878437 - RNA, 21 nt, Human
gcucagaggcgcacugugacc

SEQ ID NO: 1878438 - RNA, 21 nt, Human
gcucacugcuaagaauauuug

SEQ ID NO: 1878439 - RNA, 22 nt, Human
gcucaggagcccugggaggcuc

SEQ ID NO: 1878440 - RNA, 23 nt, Human
gcucaggagcccugggaggcucu

SEQ ID NO: 1878441 - RNA, 13 nt, Human
gcucaggaguuug

SEQ ID NO: 1878442 - RNA, 18 nt, Human
gcucagggccuggcucag

SEQ ID NO: 1878443 - RNA, 19 nt, Human
gcucagggccuggcucagg

SEQ ID NO: 1878444 - RNA, 20 nt, Human
gcuaggaccccuccaugugg

SEQ ID NO: 1878445 - RNA, 22 nt, Human
gcuaggaccccuccaugugggc

SEQ ID NO: 1878446 - RNA, 21 nt, Human
gcuaggaauuguguuuauaau

SEQ ID NO: 1878447 - RNA, 16 nt, Human
gcuaguugggcuuccu

SEQ ID NO: 1878448 - RNA, 14 nt, Human
gcuaguugggcuuc

SEQ ID NO: 1878449 - RNA, 18 nt, Human
gcuauuaaaacucuuuua

SEQ ID NO: 1878450 - RNA, 19 nt, Human
gcuauuaaaacucuuuuaa

SEQ ID NO: 1878451 - RNA, 18 nt, Human
gcuauucaguaauaacuc

SEQ ID NO: 1878452 - RNA, 22 nt, Human
gcuaagugauccucccaccuca

SEQ ID NO: 1878453 - RNA, 18 nt, Human
gcuaagugauccucccac

SEQ ID NO: 1878454 - RNA, 23 nt, Human
gcgauucuucugcuucagccucc

SEQ ID NO: 1878455 - RNA, 21 nt, Human
gcgcagcauauucaggaagcu

SEQ ID NO: 1878456 - RNA, 22 nt, Human
gcgauucuucugcuucagccuc

SEQ ID NO: 1878457 - RNA, 12 nt, Human
gccuugccagag

SEQ ID NO: 1878458 - RNA, 23 nt, Human
gccuugaccauucuccaccugcc

SEQ ID NO: 1878459 - RNA, 23 nt, Human
gccuugaacuuugaccucugcag

SEQ ID NO: 1878460 - RNA, 16 nt, Human
gccuugaccauucucc

SEQ ID NO: 1878461 - RNA, 22 nt, Human
gccuugaccauucuccaccugc

SEQ ID NO: 1878462 - RNA, 17 nt, Human
gccuggcucccaggaca

SEQ ID NO: 1878463 - RNA, 18 nt, Human
gccuggcucccaggacac

SEQ ID NO: 1878464 - RNA, 16 nt, Human
gccuggcucccaggac

SEQ ID NO: 1878465 - RNA, 23 nt, Human
gccuggcuccaaacccucgaggc

SEQ ID NO: 1878466 - RNA, 22 nt, Human
gccucuguccccuucucucauc

SEQ ID NO: 1878467 - RNA, 21 nt, Human
gccucuguccccuucucucau

SEQ ID NO: 1878468 - RNA, 20 nt, Human
gccucuguccccuucucuca

SEQ ID NO: 1878469 - RNA, 19 nt, Human
gccucuguccccuucucuc

SEQ ID NO: 1878470 - RNA, 18 nt, Human
gccucuguccccuucucu

SEQ ID NO: 1878471 - RNA, 15 nt, Human
gccucuguccccuuc

SEQ ID NO: 1878472 - RNA, 23 nt, Human
gccugggaucccucauccucaua

SEQ ID NO: 1878473 - RNA, 11 nt, Human
gccugggcaga

SEQ ID NO: 1878474 - RNA, 19 nt, Human
gccugugccucugggacug

SEQ ID NO: 1878475 - RNA, 17 nt, Human
gccuguucagcuccagc

SEQ ID NO: 1878476 - RNA, 16 nt, Human
gccuguucagcuccag

SEQ ID NO: 1878477 - RNA, 15 nt, Human
gccuguucagcucca

SEQ ID NO: 1878478 - RNA, 16 nt, Human
gccuucucugaaggac

SEQ ID NO: 1878479 - RNA, 15 nt, Human
gccuucucugaagga

SEQ ID NO: 1878480 - RNA, 15 nt, Human
gccuucuaaaggugu

SEQ ID NO: 1878481 - RNA, 21 nt, Human
gccuucuuuucucccuuuuaa

SEQ ID NO: 1878482 - RNA, 15 nt, Human
gccuucuuuugauua

SEQ ID NO: 1878483 - RNA, 14 nt, Human
gccuugaacuuuga

SEQ ID NO: 1878484 - RNA, 22 nt, Human
gccuucuuuugauuauguuuuu

SEQ ID NO: 1878485 - RNA, 13 nt, Human
gcggauggccgga

SEQ ID NO: 1878486 - RNA, 22 nt, Human
gcggcucccggggcagggcagc

SEQ ID NO: 1878487 - RNA, 15 nt, Human
gcggcuggacuugga

SEQ ID NO: 1878488 - RNA, 15 nt, Human
gcggcucccggggca

SEQ ID NO: 1878489 - RNA, 16 nt, Human
gcggccuuuggcuuca

SEQ ID NO: 1878490 - RNA, 16 nt, Human
gcggcggagcuggccc

SEQ ID NO: 1878491 - RNA, 18 nt, Human
gcggcggagcuggccccg

SEQ ID NO: 1878492 - RNA, 20 nt, Human
gcggcggagcuggccccgcc

SEQ ID NO: 1878493 - RNA, 18 nt, Human
gcguggacucugcacaug

SEQ ID NO: 1878494 - RNA, 17 nt, Human
gcguggacucugcacau

SEQ ID NO: 1878495 - RNA, 14 nt, Human
gcguggacucugca

SEQ ID NO: 1878496 - RNA, 13 nt, Human
gcguggacucugc

SEQ ID NO: 1878497 - RNA, 14 nt, Human
gcgggagccucccu

SEQ ID NO: 1878498 - RNA, 19 nt, Human
gcgggaauggcagcugcca

SEQ ID NO: 1878499 - RNA, 15 nt, Human
gcggcuggcagccca

SEQ ID NO: 1878500 - RNA, 16 nt, Human
gcggcuggacuuggag

SEQ ID NO: 1878501 - RNA, 20 nt, Human
gcuguaguccucauaaaaag

SEQ ID NO: 1878502 - RNA, 19 nt, Human
gcuguaucccaugagccuc

SEQ ID NO: 1878503 - RNA, 17 nt, Human
gcuguaucccaugagcc

SEQ ID NO: 1878504 - RNA, 20 nt, Human
gcuguuggcugggggccuca

SEQ ID NO: 1878505 - RNA, 16 nt, Human
gcuguuggcugggggc

SEQ ID NO: 1878506 - RNA, 15 nt, Human
gcuguuggcuggggg

SEQ ID NO: 1878507 - RNA, 17 nt, Human
gcugugcugcccugccc

SEQ ID NO: 1878508 - RNA, 15 nt, Human
gcugugcugcccugc

SEQ ID NO: 1878509 - RNA, 16 nt, Human
gcugugcugcccugcc

SEQ ID NO: 1878510 - RNA, 13 nt, Human
gcugugcucugga

SEQ ID NO: 1878511 - RNA, 18 nt, Human
gcugugcacaaaguggca

SEQ ID NO: 1878512 - RNA, 16 nt, Human
gcugugcucuggacag

SEQ ID NO: 1878513 - RNA, 15 nt, Human
gcugugcucuggaca

SEQ ID NO: 1878514 - RNA, 18 nt, Human
gcugugcucuggacaggc

SEQ ID NO: 1878515 - RNA, 14 nt, Human
gcugugcugcccug

SEQ ID NO: 1878516 - RNA, 22 nt, Human
gcugggguggggaccucaggcc

SEQ ID NO: 1878517 - RNA, 23 nt, Human
gcugggguggggaccucaggccu

SEQ ID NO: 1878518 - RNA, 18 nt, Human
gcuggguucuacccaggu

SEQ ID NO: 1878519 - RNA, 17 nt, Human
gcuggguucuacccagg

SEQ ID NO: 1878520 - RNA, 20 nt, Human
gcuggguucuacccaggugc

SEQ ID NO: 1878521 - RNA, 21 nt, Human
gcuggguucuacccaggugcu

SEQ ID NO: 1878522 - RNA, 23 nt, Human
gcuggcuguuggcugggggccuc

SEQ ID NO: 1878523 - RNA, 20 nt, Human
gcuggcuguuggcugggggc

SEQ ID NO: 1878524 - RNA, 20 nt, Human
gcugggaauaagugccagga

SEQ ID NO: 1878525 - RNA, 12 nt, Human
gcugggccccug

SEQ ID NO: 1878526 - RNA, 13 nt, Human
gcugggccccugc

SEQ ID NO: 1878527 - RNA, 14 nt, Human
gcugggccccugcc

SEQ ID NO: 1878528 - RNA, 18 nt, Human
gcugggccccugccucuc

SEQ ID NO: 1878529 - RNA, 20 nt, Human
gcugggccccugccucucug

SEQ ID NO: 1878530 - RNA, 17 nt, Human
gcugggguggggaccuc

SEQ ID NO: 1878531 - RNA, 19 nt, Human
gcugggguggggaccucag

SEQ ID NO: 1878532 - RNA, 12 nt, Human
gcugcugaaggc

SEQ ID NO: 1878533 - RNA, 14 nt, Human
gcuggcgugcagug

SEQ ID NO: 1878534 - RNA, 13 nt, Human
gcuggacuuggag

SEQ ID NO: 1878535 - RNA, 19 nt, Human
gcuggcuguuggcuggggg

SEQ ID NO: 1878536 - RNA, 18 nt, Human
gcuggcuguuggcugggg

SEQ ID NO: 1878537 - RNA, 18 nt, Human
gcuggcgugcaguggugc

SEQ ID NO: 1878538 - RNA, 15 nt, Human
gcuggcgugcagugg

SEQ ID NO: 1878539 - RNA, 15 nt, Human
gcugagcaaacaugu

SEQ ID NO: 1878540 - RNA, 23 nt, Human
gcugagggugagugggugaauaa

SEQ ID NO: 1878541 - RNA, 19 nt, Human
gcugaggccacacucagca

SEQ ID NO: 1878542 - RNA, 21 nt, Human
gcugaggccacacucagcaca

SEQ ID NO: 1878543 - RNA, 14 nt, Human
gcugaggugggagg

SEQ ID NO: 1878544 - RNA, 15 nt, Human
gcugaggcaauucua

SEQ ID NO: 1878545 - RNA, 14 nt, Human
gcugaggcaauucu

SEQ ID NO: 1878546 - RNA, 13 nt, Human
gcugagccccugu

SEQ ID NO: 1878547 - RNA, 15 nt, Human
gcugagccccugucu

SEQ ID NO: 1878548 - RNA, 22 nt, Human
gcugagccccugucuagagagg

SEQ ID NO: 1878549 - RNA, 23 nt, Human
gcugagccccugucuagagaggg

SEQ ID NO: 1878550 - RNA, 18 nt, Human
gcugcacccucaggcagg

SEQ ID NO: 1878551 - RNA, 19 nt, Human
gcugcacccucaggcaggu

SEQ ID NO: 1878552 - RNA, 13 nt, Human
gcugcaccggcug

SEQ ID NO: 1878553 - RNA, 12 nt, Human
gcugcaagguuu

SEQ ID NO: 1878554 - RNA, 19 nt, Human
gcugcaagguuuaggcugg

SEQ ID NO: 1878555 - RNA, 21 nt, Human
gcugcaagguuuaggcuggug

SEQ ID NO: 1878556 - RNA, 14 nt, Human
gcugccucauuuag

SEQ ID NO: 1878557 - RNA, 21 nt, Human
gcugccucauuuagagaggaa

SEQ ID NO: 1878558 - RNA, 21 nt, Human
gcugccuccccucuccuuccu

SEQ ID NO: 1878559 - RNA, 16 nt, Human
gcugccucucccauca

SEQ ID NO: 1878560 - RNA, 20 nt, Human
gcugccugggaucccucauc

SEQ ID NO: 1878561 - RNA, 13 nt, Human
gcugccuguucag

SEQ ID NO: 1878562 - RNA, 12 nt, Human
gcugccuguuca

SEQ ID NO: 1878563 - RNA, 17 nt, Human
gcugccuguucagcucc

SEQ ID NO: 1878564 - RNA, 21 nt, Human
gcugccugggaucccucaucc

SEQ ID NO: 1878565 - RNA, 20 nt, Human
gcugccccuggcagccccug

SEQ ID NO: 1878566 - RNA, 18 nt, Human
gcugccccuggcagcccc

SEQ ID NO: 1878567 - RNA, 19 nt, Human
gcugccccuggcagccccu

SEQ ID NO: 1878568 - RNA, 23 nt, Human
gcugcagccaggccacuggcccc

SEQ ID NO: 1878569 - RNA, 15 nt, Human
gcugcagccaggcca

SEQ ID NO: 1878570 - RNA, 22 nt, Human
gcugccccucaucucucugccc

SEQ ID NO: 1878571 - RNA, 23 nt, Human
ggaaaucaccgaaaacguggcug

SEQ ID NO: 1878572 - RNA, 21 nt, Human
ggaagccagcaggcucucagg

SEQ ID NO: 1878573 - RNA, 18 nt, Human
ggaagccgcuggggccag

SEQ ID NO: 1878574 - RNA, 22 nt, Human
ggaagccagcaggcucucaggc

SEQ ID NO: 1878575 - RNA, 23 nt, Human
ggaagccagcaggcucucaggcc

SEQ ID NO: 1878576 - RNA, 12 nt, Human
ggacaccgggca

SEQ ID NO: 1878577 - RNA, 15 nt, Human
ggacacccccucgcu

SEQ ID NO: 1878578 - RNA, 13 nt, Human
ggacacccuguga

SEQ ID NO: 1878579 - RNA, 23 nt, Human
ggacacccugugauggggcccug

SEQ ID NO: 1878580 - RNA, 17 nt, Human
ggacagggaggugaccc

SEQ ID NO: 1878581 - RNA, 13 nt, Human
ggacaggcuggcu

SEQ ID NO: 1878582 - RNA, 15 nt, Human
ggacaggcuggcucc

SEQ ID NO: 1878583 - RNA, 23 nt, Human
ggacaggcuggcuccagaugcag

SEQ ID NO: 1878584 - RNA, 18 nt, Human
ggacaguauuugugggga

SEQ ID NO: 1878585 - RNA, 17 nt, Human
ggacaggggcaggagga

SEQ ID NO: 1878586 - RNA, 19 nt, Human
ggacaguauuuguggggag

SEQ ID NO: 1878587 - RNA, 13 nt, Human
ggacauggacaag

SEQ ID NO: 1878588 - RNA, 14 nt, Human
ggacauggacaagg

SEQ ID NO: 1878589 - RNA, 16 nt, Human
ggacaugcgguagcca

SEQ ID NO: 1878590 - RNA, 19 nt, Human
ggacaugcgguagccagca

SEQ ID NO: 1878591 - RNA, 21 nt, Human
ggacaugcgguagccagcaca

SEQ ID NO: 1878592 - RNA, 12 nt, Human
ggacaguggcag

SEQ ID NO: 1878593 - RNA, 13 nt, Human
ggacaguggcagg

SEQ ID NO: 1878594 - RNA, 14 nt, Human
ggacaguggcagga

SEQ ID NO: 1878595 - RNA, 14 nt, Human
ggacaucagcuggu

SEQ ID NO: 1878596 - RNA, 20 nt, Human
ggacauccccccgccaaaag

SEQ ID NO: 1878597 - RNA, 16 nt, Human
ggacaguggcaggaca

SEQ ID NO: 1878598 - RNA, 17 nt, Human
ggacaguggcaggacag

SEQ ID NO: 1878599 - RNA, 19 nt, Human
ggacauaaugggguccugg

SEQ ID NO: 1878600 - RNA, 23 nt, Human
ggacauaaugggguccuggccau

SEQ ID NO: 1878601 - RNA, 18 nt, Human
ggacauagcgaauacaaa

SEQ ID NO: 1878602 - RNA, 13 nt, Human
ggacacaggccug

SEQ ID NO: 1878603 - RNA, 18 nt, Human
ggacacaggccugcucuc

SEQ ID NO: 1878604 - RNA, 13 nt, Human
ggacacagcucuu

SEQ ID NO: 1878605 - RNA, 12 nt, Human
ggacacccugug

SEQ ID NO: 1878606 - RNA, 12 nt, Human
ggaaucaagauu

SEQ ID NO: 1878607 - RNA, 18 nt, Human
ggaaugaagcaaugcuuc

SEQ ID NO: 1878608 - RNA, 19 nt, Human
ggaaugaaugucaguguga

SEQ ID NO: 1878609 - RNA, 12 nt, Human
ggacacagcucu

SEQ ID NO: 1878610 - RNA, 20 nt, Human
ggaaugagauuaauuccuuu

SEQ ID NO: 1878611 - RNA, 16 nt, Human
ggaauauauaaccagu

SEQ ID NO: 1878612 - RNA, 16 nt, Human
ggaauaccuguccccc

SEQ ID NO: 1878613 - RNA, 19 nt, Human
ggaauaccugucccccuga

SEQ ID NO: 1878614 - RNA, 19 nt, Human
ggaauacucuuauaucuau

SEQ ID NO: 1878615 - RNA, 12 nt, Human
ggaauacuuuuu

SEQ ID NO: 1878616 - RNA, 17 nt, Human
ggaauacuuuuuguuau

SEQ ID NO: 1878617 - RNA, 22 nt, Human
ggaagcucagggccuggcucag

SEQ ID NO: 1878618 - RNA, 21 nt, Human
ggaagcucagggccuggcuca

SEQ ID NO: 1878619 - RNA, 15 nt, Human
ggaauaccugucccc

SEQ ID NO: 1878620 - RNA, 16 nt, Human
ggaagcucagggccug

SEQ ID NO: 1878621 - RNA, 17 nt, Human
ggaagcucagggccugg

SEQ ID NO: 1878622 - RNA, 20 nt, Human
ggaagccgugcucgccccag

SEQ ID NO: 1878623 - RNA, 18 nt, Human
gcuuugcuuucugcucag

SEQ ID NO: 1878624 - RNA, 19 nt, Human
gcuuugcuuucugcucagc

SEQ ID NO: 1878625 - RNA, 12 nt, Human
gcuuugcugcug

SEQ ID NO: 1878626 - RNA, 18 nt, Human
gcuuugcugcugaaggcu

SEQ ID NO: 1878627 - RNA, 19 nt, Human
gcuuugcugcugaaggcuc

SEQ ID NO: 1878628 - RNA, 16 nt, Human
gcuuaacuucacauau

SEQ ID NO: 1878629 - RNA, 13 nt, Human
gcuguuuccauag

SEQ ID NO: 1878630 - RNA, 16 nt, Human
gcuucuucagagacuc

SEQ ID NO: 1878631 - RNA, 12 nt, Human
gcuuaaugaaaa

SEQ ID NO: 1878632 - RNA, 17 nt, Human
gcuuaacuucacauauu

SEQ ID NO: 1878633 - RNA, 19 nt, Human
gcuucuucagagacuccug

SEQ ID NO: 1878634 - RNA, 21 nt, Human
gcuucuucagagacuccugca

SEQ ID NO: 1878635 - RNA, 23 nt, Human
gcuucuucagagacuccugcagg

SEQ ID NO: 1878636 - RNA, 17 nt, Human
gcuugaccgugaggcca

SEQ ID NO: 1878637 - RNA, 18 nt, Human
gcuugaccgugaggccag

SEQ ID NO: 1878638 - RNA, 19 nt, Human
gcuugaccgugaggccaga

SEQ ID NO: 1878639 - RNA, 23 nt, Human
gcuugggcuucauccuccucaga

SEQ ID NO: 1878640 - RNA, 16 nt, Human
gcuuggggaccagagc

SEQ ID NO: 1878641 - RNA, 23 nt, Human
gcuuucuacccagcgagcccugg

SEQ ID NO: 1878642 - RNA, 12 nt, Human
gcuuugauucau

SEQ ID NO: 1878643 - RNA, 15 nt, Human
gcuuugauucauagu

SEQ ID NO: 1878644 - RNA, 20 nt, Human
gcuuugauucauaguaacuu

SEQ ID NO: 1878645 - RNA, 19 nt, Human
gcuuugcaaccauuuucau

SEQ ID NO: 1878646 - RNA, 22 nt, Human
gcuuucuacccagcgagcccug

SEQ ID NO: 1878647 - RNA, 19 nt, Human
gcuuucuacccagcgagcc

SEQ ID NO: 1878648 - RNA, 13 nt, Human
gcuuucuacccag

SEQ ID NO: 1878649 - RNA, 22 nt, Human
gcuuggggaccagagcugccac

SEQ ID NO: 1878650 - RNA, 17 nt, Human
gcuuggggaccagagcu

SEQ ID NO: 1878651 - RNA, 18 nt, Human
gcuuggggaccagagcug

SEQ ID NO: 1878652 - RNA, 20 nt, Human
gcuuggggaccagagcugcc

SEQ ID NO: 1878653 - RNA, 21 nt, Human
gcuuggggaccagagcugcca

SEQ ID NO: 1878654 - RNA, 20 nt, Human
gcuuuucccuuuuuuuaagu

SEQ ID NO: 1878655 - RNA, 21 nt, Human
gcuuuucccuuuuuuuaagua

SEQ ID NO: 1878656 - RNA, 22 nt, Human
gcuuuuccucaaagggagagag

SEQ ID NO: 1878657 - RNA, 17 nt, Human
gcuuuucuuucuaccaa

SEQ ID NO: 1878658 - RNA, 16 nt, Human
ggaaaaaauaacaaug

SEQ ID NO: 1878659 - RNA, 19 nt, Human
gcuuuugugcauuaucuag

SEQ ID NO: 1878660 - RNA, 13 nt, Human
gcuuuugugcauu

SEQ ID NO: 1878661 - RNA, 15 nt, Human
gcuuuuuaauauuga

SEQ ID NO: 1878662 - RNA, 17 nt, Human
gcuuuugugucuuacau

SEQ ID NO: 1878663 - RNA, 20 nt, Human
ggaaacagcuaaugggacac

SEQ ID NO: 1878664 - RNA, 19 nt, Human
ggaaaaaaaucguccaggg

SEQ ID NO: 1878665 - RNA, 13 nt, Human
ggaaacagaggcu

SEQ ID NO: 1878666 - RNA, 15 nt, Human
ggaaacccagcucug

SEQ ID NO: 1878667 - RNA, 21 nt, Human
ggaaacuaggugcauauuuau

SEQ ID NO: 1878668 - RNA, 17 nt, Human
ggaaacuggaugagguc

SEQ ID NO: 1878669 - RNA, 16 nt, Human
ggaaagcccugugcuc

SEQ ID NO: 1878670 - RNA, 19 nt, Human
ggaaaggagccuaggccag

SEQ ID NO: 1878671 - RNA, 21 nt, Human
ggaaaggagccuaggccaggu

SEQ ID NO: 1878672 - RNA, 19 nt, Human
ggaaagcaaaggagauugg

SEQ ID NO: 1878673 - RNA, 16 nt, Human
ggaaagaguaggaaga

SEQ ID NO: 1878674 - RNA, 17 nt, Human
ggaaagaguaggaagac

SEQ ID NO: 1878675 - RNA, 20 nt, Human
ggaaagacuuuuccaacccu

SEQ ID NO: 1878676 - RNA, 14 nt, Human
ggaaagaggcucug

SEQ ID NO: 1878677 - RNA, 15 nt, Human
ggcucacugcagccu

SEQ ID NO: 1878678 - RNA, 14 nt, Human
ggcucacugcagcc

SEQ ID NO: 1878679 - RNA, 13 nt, Human
ggcucacugcagc

SEQ ID NO: 1878680 - RNA, 19 nt, Human
ggcucccggggcagggcag

SEQ ID NO: 1878681 - RNA, 13 nt, Human
ggcucccuuccca

SEQ ID NO: 1878682 - RNA, 15 nt, Human
ggcucuuccaggcug

SEQ ID NO: 1878683 - RNA, 17 nt, Human
ggcucuuccaggcuggg

SEQ ID NO: 1878684 - RNA, 18 nt, Human
ggcucuuccaggcuggga

SEQ ID NO: 1878685 - RNA, 19 nt, Human
ggcucuugaacugagcuug

SEQ ID NO: 1878686 - RNA, 18 nt, Human
ggcucuugaacugagcuu

SEQ ID NO: 1878687 - RNA, 20 nt, Human
ggcucuugaacugagcuugg

SEQ ID NO: 1878688 - RNA, 12 nt, Human
ggcuggcaugau

SEQ ID NO: 1878689 - RNA, 22 nt, Human
ggcuggcaugauccaagcaaga

SEQ ID NO: 1878690 - RNA, 22 nt, Human
ggcugaccacagcacagccaac

SEQ ID NO: 1878691 - RNA, 13 nt, Human
ggcuggccuggcc

SEQ ID NO: 1878692 - RNA, 14 nt, Human
ggcuggccuggccc

SEQ ID NO: 1878693 - RNA, 15 nt, Human
ggcuggccuggcccc

SEQ ID NO: 1878694 - RNA, 20 nt, Human
ggcuggccucccaaaugagc

SEQ ID NO: 1878695 - RNA, 11 nt, Human
aaaaaaaccaa

SEQ ID NO: 1878696 - RNA, 11 nt, Human
aaaaaaagaaa

SEQ ID NO: 1878697 - RNA, 14 nt, Human
aaaaaaagaucugu

SEQ ID NO: 1878698 - RNA, 11 nt, Human
aaaaaaagaca

SEQ ID NO: 1878699 - RNA, 22 nt, Human
aaaaaacugcugacuguuuucu

SEQ ID NO: 1878700 - RNA, 12 nt, Human
aaaaaagaaaau

SEQ ID NO: 1878701 - RNA, 23 nt, Human
aaaaaguuuugcccuuuuuaagg

SEQ ID NO: 1878702 - RNA, 13 nt, Human
aaaaauacaaaaa

SEQ ID NO: 1878703 - RNA, 14 nt, Human
ggcuggguuggagg

SEQ ID NO: 1878704 - RNA, 22 nt, Human
ggcuggguucuacccaggugcu

SEQ ID NO: 1878705 - RNA, 14 nt, Human
aaaaauaaaaaaca

SEQ ID NO: 1878706 - RNA, 19 nt, Human
aaaaaguuugguucugugu

SEQ ID NO: 1878707 - RNA, 21 nt, Human
aaaaaggaugcacagaguugu

SEQ ID NO: 1878708 - RNA, 12 nt, Human
aaaaaggcagga

SEQ ID NO: 1878709 - RNA, 14 nt, Human
aaaaaggaggaaga

SEQ ID NO: 1878710 - RNA, 17 nt, Human
ggccucccacagacuca

SEQ ID NO: 1878711 - RNA, 21 nt, Human
ggccgcccgggcccagaggag

SEQ ID NO: 1878712 - RNA, 17 nt, Human
ggccgcccgggcccaga

SEQ ID NO: 1878713 - RNA, 22 nt, Human
ggccgcgccaaauaaugucucu

SEQ ID NO: 1878714 - RNA, 13 nt, Human
ggccucagugcca

SEQ ID NO: 1878715 - RNA, 17 nt, Human
ggccucccaacucaccc

SEQ ID NO: 1878716 - RNA, 18 nt, Human
ggccucccaacucacccc

SEQ ID NO: 1878717 - RNA, 19 nt, Human
ggccucccaacucacccca

SEQ ID NO: 1878718 - RNA, 23 nt, Human
ggccucccaacucaccccagccc

SEQ ID NO: 1878719 - RNA, 14 nt, Human
ggccucccacagac

SEQ ID NO: 1878720 - RNA, 16 nt, Human
ggccucccacagacuc

SEQ ID NO: 1878721 - RNA, 20 nt, Human
ggccucccaacucaccccag

SEQ ID NO: 1878722 - RNA, 22 nt, Human
ggccucccaacucaccccagcc

SEQ ID NO: 1878723 - RNA, 16 nt, Human
ggccagaugcaccagc

SEQ ID NO: 1878724 - RNA, 15 nt, Human
ggccagaugcaccag

SEQ ID NO: 1878725 - RNA, 22 nt, Human
ggccagagggagugacagaggc

SEQ ID NO: 1878726 - RNA, 17 nt, Human
ggccagauccagccugg

SEQ ID NO: 1878727 - RNA, 18 nt, Human
ggccagauccagccuggg

SEQ ID NO: 1878728 - RNA, 17 nt, Human
ggccagaugcaccagcc

SEQ ID NO: 1878729 - RNA, 13 nt, Human
ggccccagccucc

SEQ ID NO: 1878730 - RNA, 21 nt, Human
ggccccugccucucugcaggu

SEQ ID NO: 1878731 - RNA, 13 nt, Human
ggccccugccucu

SEQ ID NO: 1878732 - RNA, 17 nt, Human
ggccccugccucucugc

SEQ ID NO: 1878733 - RNA, 18 nt, Human
ggccccugccucucugca

SEQ ID NO: 1878734 - RNA, 19 nt, Human
ggccccugccucucugcag

SEQ ID NO: 1878735 - RNA, 16 nt, Human
ggccugcaagggagug

SEQ ID NO: 1878736 - RNA, 14 nt, Human
ggccugcacaguga

SEQ ID NO: 1878737 - RNA, 14 nt, Human
ggccuggcagcuca

SEQ ID NO: 1878738 - RNA, 16 nt, Human
ggccuggcagcucagc

SEQ ID NO: 1878739 - RNA, 15 nt, Human
ggccuggccagaugc

SEQ ID NO: 1878740 - RNA, 12 nt, Human
ggccuggccaga

SEQ ID NO: 1878741 - RNA, 16 nt, Human
ggccuggccagaugca

SEQ ID NO: 1878742 - RNA, 20 nt, Human
ggccugccuccagggcugga

SEQ ID NO: 1878743 - RNA, 19 nt, Human
ggccugccuccagggcugg

SEQ ID NO: 1878744 - RNA, 18 nt, Human
ggccugccuccagggcug

SEQ ID NO: 1878745 - RNA, 13 nt, Human
ggccugcuccaga

SEQ ID NO: 1878746 - RNA, 14 nt, Human
ggccugcuccagac

SEQ ID NO: 1878747 - RNA, 15 nt, Human
ggccugcuccagacc

SEQ ID NO: 1878748 - RNA, 16 nt, Human
ggccugcuccagaccu

SEQ ID NO: 1878749 - RNA, 17 nt, Human
ggccugcuccagaccug

SEQ ID NO: 1878750 - RNA, 18 nt, Human
ggccugcuccagaccuga

SEQ ID NO: 1878751 - RNA, 20 nt, Human
ggcuaagcuucacuguaaaa

SEQ ID NO: 1878752 - RNA, 21 nt, Human
ggcuaaacauccaauauuuuc

SEQ ID NO: 1878753 - RNA, 21 nt, Human
ggcgaucgcggcggagcuggc

SEQ ID NO: 1878754 - RNA, 21 nt, Human
ggcgucuguucccccuucaca

SEQ ID NO: 1878755 - RNA, 16 nt, Human
ggccuucggccuccau

SEQ ID NO: 1878756 - RNA, 22 nt, Human
ggccuucggccuccauccugag

SEQ ID NO: 1878757 - RNA, 18 nt, Human
ggccuucggccuccaucc

SEQ ID NO: 1878758 - RNA, 20 nt, Human
ggcuaagugauccucccacc

SEQ ID NO: 1878759 - RNA, 16 nt, Human
ggcuaauguacugcau

SEQ ID NO: 1878760 - RNA, 13 nt, Human
ggcuaauuuuugu

SEQ ID NO: 1878761 - RNA, 13 nt, Human
ggcuaccuuugua

SEQ ID NO: 1878762 - RNA, 14 nt, Human
ggcuaccuuuguau

SEQ ID NO: 1878763 - RNA, 16 nt, Human
ggcuagagguucaaag

SEQ ID NO: 1878764 - RNA, 18 nt, Human
ggcacaccgggcacucag

SEQ ID NO: 1878765 - RNA, 18 nt, Human
ggcacaucagcacgauuu

SEQ ID NO: 1878766 - RNA, 19 nt, Human
ggcacacgccucccacugg

SEQ ID NO: 1878767 - RNA, 12 nt, Human
ggcacacgccuc

SEQ ID NO: 1878768 - RNA, 15 nt, Human
ggcacacgccuccca

SEQ ID NO: 1878769 - RNA, 17 nt, Human
ggcacacgccucccacu

SEQ ID NO: 1878770 - RNA, 18 nt, Human
ggcacacgccucccacug

SEQ ID NO: 1878771 - RNA, 16 nt, Human
ggcacugcuuccagug

SEQ ID NO: 1878772 - RNA, 10 nt, Human
ggcaaaauaa

SEQ ID NO: 1878773 - RNA, 23 nt, Human
ggcaaaaggaucuuuguggccaa

SEQ ID NO: 1878774 - RNA, 20 nt, Human
ggauuucaugauuucauuuc

SEQ ID NO: 1878775 - RNA, 23 nt, Human
ggauuuccugcuuugggaagccg

SEQ ID NO: 1878776 - RNA, 16 nt, Human
ggauuuuugucuugug

SEQ ID NO: 1878777 - RNA, 14 nt, Human
ggauuuuugucuug

SEQ ID NO: 1878778 - RNA, 15 nt, Human
ggcaaaaaggcagga

SEQ ID NO: 1878779 - RNA, 22 nt, Human
ggcagccuggcucccaggacac

SEQ ID NO: 1878780 - RNA, 14 nt, Human
ggcagcgccaggcu

SEQ ID NO: 1878781 - RNA, 19 nt, Human
ggcagccuggcucccagga

SEQ ID NO: 1878782 - RNA, 18 nt, Human
ggcagccuggcucccagg

SEQ ID NO: 1878783 - RNA, 14 nt, Human
ggcagccuggcucc

SEQ ID NO: 1878784 - RNA, 21 nt, Human
ggcagccuggcucccaggaca

SEQ ID NO: 1878785 - RNA, 20 nt, Human
ggcagccuggcucccaggac

SEQ ID NO: 1878786 - RNA, 18 nt, Human
ggcaggaggaucacuuga

SEQ ID NO: 1878787 - RNA, 21 nt, Human
ggcagcgccaggcugaccaca

SEQ ID NO: 1878788 - RNA, 22 nt, Human
ggcagggccgcccgggcccaga

SEQ ID NO: 1878789 - RNA, 18 nt, Human
ggcagggccaacccuucu

SEQ ID NO: 1878790 - RNA, 20 nt, Human
ggcaggggagggucagccag

SEQ ID NO: 1878791 - RNA, 22 nt, Human
ggcaggggagggucagccaggg

SEQ ID NO: 1878792 - RNA, 22 nt, Human
ggcagggagcggccggccagcc

SEQ ID NO: 1878793 - RNA, 21 nt, Human
ggcagccccauucugccugcc

SEQ ID NO: 1878794 - RNA, 20 nt, Human
ggcagccccauucugccugc

SEQ ID NO: 1878795 - RNA, 16 nt, Human
ggcagccccauucugc

SEQ ID NO: 1878796 - RNA, 22 nt, Human
ggcagccccauucugccugccc

SEQ ID NO: 1878797 - RNA, 22 nt, Human
ggcacugcuuccagugaggcuc

SEQ ID NO: 1878798 - RNA, 20 nt, Human
ggcacugcuuccagugaggc

SEQ ID NO: 1878799 - RNA, 14 nt, Human
ggcagccaggccac

SEQ ID NO: 1878800 - RNA, 13 nt, Human
ggcagccaggcca

SEQ ID NO: 1878801 - RNA, 14 nt, Human
ggcauuugcugaau

SEQ ID NO: 1878802 - RNA, 11 nt, Human
ggcauuuccua

SEQ ID NO: 1878803 - RNA, 21 nt, Human
ggccagagagccuggugcugc

SEQ ID NO: 1878804 - RNA, 18 nt, Human
ggccagagagccuggugc

SEQ ID NO: 1878805 - RNA, 22 nt, Human
ggccagagagccuggugcugcu

SEQ ID NO: 1878806 - RNA, 18 nt, Human
ggccagagacacaagccu

SEQ ID NO: 1878807 - RNA, 19 nt, Human
ggccagagggagugacaga

SEQ ID NO: 1878808 - RNA, 17 nt, Human
ggccagagggagugaca

SEQ ID NO: 1878809 - RNA, 17 nt, Human
ggccagagacacaagcc

SEQ ID NO: 1878810 - RNA, 15 nt, Human
ggccagaccugcaga

SEQ ID NO: 1878811 - RNA, 18 nt, Human
ggccagaccugcagacgc

SEQ ID NO: 1878812 - RNA, 22 nt, Human
ggccagaccugcagacgcccag

SEQ ID NO: 1878813 - RNA, 13 nt, Human
ggccaaggagcug

SEQ ID NO: 1878814 - RNA, 18 nt, Human
ggccagacaugccacaag

SEQ ID NO: 1878815 - RNA, 17 nt, Human
ggcauuuguuugaacug

SEQ ID NO: 1878816 - RNA, 14 nt, Human
ggccaaaggaagca

SEQ ID NO: 1878817 - RNA, 16 nt, Human
ggccaaaggaagcaca

SEQ ID NO: 1878818 - RNA, 19 nt, Human
ggccaaaggaagcacaugc

SEQ ID NO: 1878819 - RNA, 22 nt, Human
ggaggugggauccuccaggugc

SEQ ID NO: 1878820 - RNA, 23 nt, Human
ggaggugggauccuccaggugca

SEQ ID NO: 1878821 - RNA, 22 nt, Human
ggagguaaggaauaccuguccc

SEQ ID NO: 1878822 - RNA, 21 nt, Human
ggagggugacgggggugaacu

SEQ ID NO: 1878823 - RNA, 15 nt, Human
ggaggcucuggagcc

SEQ ID NO: 1878824 - RNA, 15 nt, Human
ggaggcucagguccc

SEQ ID NO: 1878825 - RNA, 20 nt, Human
ggaggcuaaagcccagagac

SEQ ID NO: 1878826 - RNA, 13 nt, Human
ggaggggggaggu

SEQ ID NO: 1878827 - RNA, 14 nt, Human
ggaggggggaggug

SEQ ID NO: 1878828 - RNA, 15 nt, Human
ggaguggccacagaa

SEQ ID NO: 1878829 - RNA, 16 nt, Human
ggaguggccacagaaa

SEQ ID NO: 1878830 - RNA, 12 nt, Human
ggagugggccca

SEQ ID NO: 1878831 - RNA, 22 nt, Human
ggagugggcccaaugcacuuug

SEQ ID NO: 1878832 - RNA, 22 nt, Human
ggaguggggaagugaucuuuug

SEQ ID NO: 1878833 - RNA, 13 nt, Human
ggagugugugucu

SEQ ID NO: 1878834 - RNA, 15 nt, Human
ggaguuaagaccugg

SEQ ID NO: 1878835 - RNA, 16 nt, Human
ggaguuaagaccuggc

SEQ ID NO: 1878836 - RNA, 18 nt, Human
ggaguuaagaccuggcag

SEQ ID NO: 1878837 - RNA, 23 nt, Human
ggaguuaagaccuggcagcucug

SEQ ID NO: 1878838 - RNA, 12 nt, Human
ggaguuaucuaa

SEQ ID NO: 1878839 - RNA, 11 nt, Human
ggaguguguaa

SEQ ID NO: 1878840 - RNA, 22 nt, Human
ggaguguguaauuuaaaauugu

SEQ ID NO: 1878841 - RNA, 15 nt, Human
ggaguguacucccag

SEQ ID NO: 1878842 - RNA, 18 nt, Human
ggaguguacucccagggc

SEQ ID NO: 1878843 - RNA, 19 nt, Human
ggaguguacucccagggcu

SEQ ID NO: 1878844 - RNA, 18 nt, Human
ggaucucuugagccuggg

SEQ ID NO: 1878845 - RNA, 21 nt, Human
ggaucuuuggacagaagcagc

SEQ ID NO: 1878846 - RNA, 18 nt, Human
ggaucuauacuugcuuug

SEQ ID NO: 1878847 - RNA, 16 nt, Human
ggaguucaucuugaau

SEQ ID NO: 1878848 - RNA, 15 nt, Human
ggauccugagccaga

SEQ ID NO: 1878849 - RNA, 16 nt, Human
ggauccugagccagau

SEQ ID NO: 1878850 - RNA, 18 nt, Human
ggauccugagccagauuu

SEQ ID NO: 1878851 - RNA, 19 nt, Human
ggauccugagccagauuuc

SEQ ID NO: 1878852 - RNA, 20 nt, Human
ggauccugagccagauuuca

SEQ ID NO: 1878853 - RNA, 23 nt, Human
ggauccugagccagauuucacuc

SEQ ID NO: 1878854 - RNA, 12 nt, Human
ggauuuaacaga

SEQ ID NO: 1878855 - RNA, 15 nt, Human
ggaugguguucaaaa

SEQ ID NO: 1878856 - RNA, 16 nt, Human
ggauuguccccgaccc

SEQ ID NO: 1878857 - RNA, 20 nt, Human
ggauuguccccgacccuugc

SEQ ID NO: 1878858 - RNA, 17 nt, Human
ggauuuaacagaaaugu

SEQ ID NO: 1878859 - RNA, 16 nt, Human
ggauuuaacagaaaug

SEQ ID NO: 1878860 - RNA, 22 nt, Human
ggauuuaacagaaauguacagc

SEQ ID NO: 1878861 - RNA, 14 nt, Human
ggauuguaguccca

SEQ ID NO: 1878862 - RNA, 13 nt, Human
ggauuguccccga

SEQ ID NO: 1878863 - RNA, 22 nt, Human
ggaucuuuggacagaagcagcu

SEQ ID NO: 1878864 - RNA, 15 nt, Human
ggaucuuuguggcca

SEQ ID NO: 1878865 - RNA, 14 nt, Human
ggaugaaaaaauaa

SEQ ID NO: 1878866 - RNA, 15 nt, Human
ggaugggggaacuca

SEQ ID NO: 1878867 - RNA, 17 nt, Human
ggaugggggaacucaga

SEQ ID NO: 1878868 - RNA, 16 nt, Human
ggaucuuuguggccaa

SEQ ID NO: 1878869 - RNA, 17 nt, Human
ggaucuuuguggccaag

SEQ ID NO: 1878870 - RNA, 21 nt, Human
ggaugggggaacucagaucca

SEQ ID NO: 1878871 - RNA, 22 nt, Human
ggaugggggaacucagauccag

SEQ ID NO: 1878872 - RNA, 23 nt, Human
ggaugggggaacucagauccagg

SEQ ID NO: 1878873 - RNA, 20 nt, Human
gggccgccagggagaccugg

SEQ ID NO: 1878874 - RNA, 17 nt, Human
gggccauguugugccuc

SEQ ID NO: 1878875 - RNA, 16 nt, Human
gggccauucuccacag

SEQ ID NO: 1878876 - RNA, 18 nt, Human
gggccauucuccacagca

SEQ ID NO: 1878877 - RNA, 20 nt, Human
gggccgcccgggcccagagg

SEQ ID NO: 1878878 - RNA, 23 nt, Human
gggccgccagggagaccuggaca

SEQ ID NO: 1878879 - RNA, 13 nt, Human
gggccgcugccac

SEQ ID NO: 1878880 - RNA, 14 nt, Human
gggccgcugccacc

SEQ ID NO: 1878881 - RNA, 15 nt, Human
gggccgcugccaccc

SEQ ID NO: 1878882 - RNA, 21 nt, Human
gggccgcugccacccaccucc

SEQ ID NO: 1878883 - RNA, 17 nt, Human
gggccgggcagaggggc

SEQ ID NO: 1878884 - RNA, 12 nt, Human
gggccaggagcc

SEQ ID NO: 1878885 - RNA, 13 nt, Human
gggccagauccag

SEQ ID NO: 1878886 - RNA, 14 nt, Human
gggccagauccagc

SEQ ID NO: 1878887 - RNA, 16 nt, Human
gggccagauccagccu

SEQ ID NO: 1878888 - RNA, 17 nt, Human
gggccagauccagccug

SEQ ID NO: 1878889 - RNA, 15 nt, Human
gggccagagccaggg

SEQ ID NO: 1878890 - RNA, 11 nt, Human
gggccagagcc

SEQ ID NO: 1878891 - RNA, 12 nt, Human
gggccagagcca

SEQ ID NO: 1878892 - RNA, 13 nt, Human
gggccagagccag

SEQ ID NO: 1878893 - RNA, 14 nt, Human
gggccagagccagg

SEQ ID NO: 1878894 - RNA, 13 nt, Human
gggccaggagccu

SEQ ID NO: 1878895 - RNA, 14 nt, Human
gggccaggagccuc

SEQ ID NO: 1878896 - RNA, 18 nt, Human
gggccagauccagccugg

SEQ ID NO: 1878897 - RNA, 15 nt, Human
gggcgugguggugag

SEQ ID NO: 1878898 - RNA, 17 nt, Human
gggcgucuguucccccu

SEQ ID NO: 1878899 - RNA, 21 nt, Human
gggcggugagaggggaacaga

SEQ ID NO: 1878900 - RNA, 16 nt, Human
gggccugcgagggcag

SEQ ID NO: 1878901 - RNA, 13 nt, Human
gggccugcuccag

SEQ ID NO: 1878902 - RNA, 14 nt, Human
gggccugcuccaga

SEQ ID NO: 1878903 - RNA, 15 nt, Human
gggccugcuccagac

SEQ ID NO: 1878904 - RNA, 17 nt, Human
gggccugcuccagaccu

SEQ ID NO: 1878905 - RNA, 18 nt, Human
gggccugcuccagaccug

SEQ ID NO: 1878906 - RNA, 18 nt, Human
gggccucuuaugggcugg

SEQ ID NO: 1878907 - RNA, 22 nt, Human
gggccucgguguggagaagcgg

SEQ ID NO: 1878908 - RNA, 14 nt, Human
gggccucagugcca

SEQ ID NO: 1878909 - RNA, 13 nt, Human
gggccucagugcc

SEQ ID NO: 1878910 - RNA, 15 nt, Human
gggccucagugccac

SEQ ID NO: 1878911 - RNA, 17 nt, Human
gggcuggguucuaccca

SEQ ID NO: 1878912 - RNA, 18 nt, Human
aaaaugguuuaaaugguc

SEQ ID NO: 1878913 - RNA, 16 nt, Human
aaaaugguuuaaaugg

SEQ ID NO: 1878914 - RNA, 23 nt, Human
aaaauggcuucagaauuaaaacu

SEQ ID NO: 1878915 - RNA, 20 nt, Human
gggcugcaccggcuggccug

SEQ ID NO: 1878916 - RNA, 21 nt, Human
gggcugcaccggcuggccugg

SEQ ID NO: 1878917 - RNA, 15 nt, Human
gggcugggcagagga

SEQ ID NO: 1878918 - RNA, 19 nt, Human
gggcucagcggggacagcu

SEQ ID NO: 1878919 - RNA, 17 nt, Human
gggcucagcggggacag

SEQ ID NO: 1878920 - RNA, 18 nt, Human
gggcuaguugggcuuccu

SEQ ID NO: 1878921 - RNA, 22 nt, Human
gggcucagcaaaagaugcuucu

SEQ ID NO: 1878922 - RNA, 15 nt, Human
gggcuaguugggcuu

SEQ ID NO: 1878923 - RNA, 21 nt, Human
gggcucagcggggacagcucc

SEQ ID NO: 1878924 - RNA, 10 nt, Human
gggcuccaga

SEQ ID NO: 1878925 - RNA, 13 nt, Human
gggcuccagacac

SEQ ID NO: 1878926 - RNA, 17 nt, Human
gggcugcaccggcuggc

SEQ ID NO: 1878927 - RNA, 19 nt, Human
gggcugcaccggcuggccu

SEQ ID NO: 1878928 - RNA, 16 nt, Human
aaaauaucauucagca

SEQ ID NO: 1878929 - RNA, 14 nt, Human
aaaauaucauucag

SEQ ID NO: 1878930 - RNA, 13 nt, Human
aaaauaucauuca

SEQ ID NO: 1878931 - RNA, 13 nt, Human
aaaauagacacuc

SEQ ID NO: 1878932 - RNA, 16 nt, Human
aaaauauuuuccugcc

SEQ ID NO: 1878933 - RNA, 13 nt, Human
aaaauauuuauaa

SEQ ID NO: 1878934 - RNA, 21 nt, Human
aaaauauuuauaaaacuucuc

SEQ ID NO: 1878935 - RNA, 14 nt, Human
aaaauauuuaaagg

SEQ ID NO: 1878936 - RNA, 16 nt, Human
aaaauggaaccaggcu

SEQ ID NO: 1878937 - RNA, 22 nt, Human
aaaaugcuuuuuauuucugcau

SEQ ID NO: 1878938 - RNA, 20 nt, Human
aaaauggaagacagcucuua

SEQ ID NO: 1878939 - RNA, 22 nt, Human
gggccacuucuggguggggcag

SEQ ID NO: 1878940 - RNA, 16 nt, Human
gggccagacaugccac

SEQ ID NO: 1878941 - RNA, 13 nt, Human
aaaaugcuuuuua

SEQ ID NO: 1878942 - RNA, 18 nt, Human
aaaaugcuuuuuauuucu

SEQ ID NO: 1878943 - RNA, 19 nt, Human
aaaaugcuuuuuauuucug

SEQ ID NO: 1878944 - RNA, 23 nt, Human
aaaaugauguguacccaaacgug

SEQ ID NO: 1878945 - RNA, 18 nt, Human
aaaaugcagcagggaugc

SEQ ID NO: 1878946 - RNA, 18 nt, Human
aaaaugcaacaacaugua

SEQ ID NO: 1878947 - RNA, 11 nt, Human
aaaaugagaaa

SEQ ID NO: 1878948 - RNA, 12 nt, Human
aaaaugagaaau

SEQ ID NO: 1878949 - RNA, 19 nt, Human
aaaauauuuugaucuucaa

SEQ ID NO: 1878950 - RNA, 15 nt, Human
aaaaucugcuaggga

SEQ ID NO: 1878951 - RNA, 15 nt, Human
aaaauauuuugaucu

SEQ ID NO: 1878952 - RNA, 17 nt, Human
aaaauauuuugaucuuc

SEQ ID NO: 1878953 - RNA, 13 nt, Human
aaaauaccaagga

SEQ ID NO: 1878954 - RNA, 19 nt, Human
aaaauaaccggauauauac

SEQ ID NO: 1878955 - RNA, 16 nt, Human
aaaauaagaauagaaa

SEQ ID NO: 1878956 - RNA, 11 nt, Human
aaaaggcagga

SEQ ID NO: 1878957 - RNA, 19 nt, Human
aaaaggaucuuuguggcca

SEQ ID NO: 1878958 - RNA, 20 nt, Human
aaaaggaucuuuguggccaa

SEQ ID NO: 1878959 - RNA, 23 nt, Human
aaaaggaucuuuguggccaagga

SEQ ID NO: 1878960 - RNA, 17 nt, Human
aaaagguuaauaaagua

SEQ ID NO: 1878961 - RNA, 16 nt, Human
aaaagguuaauaaagu

SEQ ID NO: 1878962 - RNA, 22 nt, Human
aaaaggagccaauuuaaagaaa

SEQ ID NO: 1878963 - RNA, 13 nt, Human
aaaaggaugcaca

SEQ ID NO: 1878964 - RNA, 22 nt, Human
aaaaggaugcacagaguuguua

SEQ ID NO: 1878965 - RNA, 19 nt, Human
aaaaggaugcacagaguug

SEQ ID NO: 1878966 - RNA, 15 nt, Human
aaaaggaugcacaga

SEQ ID NO: 1878967 - RNA, 14 nt, Human
aaaaggaugcacag

SEQ ID NO: 1878968 - RNA, 13 nt, Human
ggguccagaagga

SEQ ID NO: 1878969 - RNA, 17 nt, Human
ggguccagaaggagaca

SEQ ID NO: 1878970 - RNA, 21 nt, Human
gggucaugcccuccucuccca

SEQ ID NO: 1878971 - RNA, 13 nt, Human
ggguccuggccau

SEQ ID NO: 1878972 - RNA, 15 nt, Human
ggguccuggccaucc

SEQ ID NO: 1878973 - RNA, 16 nt, Human
ggguccuggccauccc

SEQ ID NO: 1878974 - RNA, 17 nt, Human
ggguccuggccauccca

SEQ ID NO: 1878975 - RNA, 19 nt, Human
aaacauuuugucauauaag

SEQ ID NO: 1878976 - RNA, 13 nt, Human
aaacauuuucaca

SEQ ID NO: 1878977 - RNA, 14 nt, Human
aaacauuuucacac

SEQ ID NO: 1878978 - RNA, 16 nt, Human
aaacauuuucacacaa

SEQ ID NO: 1878979 - RNA, 22 nt, Human
aaacauuuucacacaauacaau

SEQ ID NO: 1878980 - RNA, 22 nt, Human
gggucacucuggcagcucagag

SEQ ID NO: 1878981 - RNA, 12 nt, Human
gggucaaggaau

SEQ ID NO: 1878982 - RNA, 18 nt, Human
gggucauagauguuuccu

SEQ ID NO: 1878983 - RNA, 14 nt, Human
gggucaugcccucc

SEQ ID NO: 1878984 - RNA, 16 nt, Human
gggucaugcccuccuc

SEQ ID NO: 1878985 - RNA, 18 nt, Human
gggucauucauggccugg

SEQ ID NO: 1878986 - RNA, 21 nt, Human
gggucaucuguaccucugccu

SEQ ID NO: 1878987 - RNA, 14 nt, Human
gggucacucuggca

SEQ ID NO: 1878988 - RNA, 20 nt, Human
gggucacucuggcagcucag

SEQ ID NO: 1878989 - RNA, 11 nt, Human
gggguccuggc

SEQ ID NO: 1878990 - RNA, 13 nt, Human
gggguccuggcca

SEQ ID NO: 1878991 - RNA, 14 nt, Human
gggguccuggccau

SEQ ID NO: 1878992 - RNA, 18 nt, Human
aaaccuuauuguaccucu

SEQ ID NO: 1878993 - RNA, 16 nt, Human
aaaccuuauuguaccu

SEQ ID NO: 1878994 - RNA, 17 nt, Human
aaaccuuauuguaccuc

SEQ ID NO: 1878995 - RNA, 22 nt, Human
aaaccugugucucugagaguag

SEQ ID NO: 1878996 - RNA, 20 nt, Human
aaaccuucacacacagacug

SEQ ID NO: 1878997 - RNA, 11 nt, Human
aaaccuucaca

SEQ ID NO: 1878998 - RNA, 18 nt, Human
aaacgaagccaucuuucu

SEQ ID NO: 1878999 - RNA, 19 nt, Human
aaacgaagccaucuuucuu

SEQ ID NO: 1879000 - RNA, 18 nt, Human
aaaccugggauucaggaa

SEQ ID NO: 1879001 - RNA, 21 nt, Human
aaaccugggauucaggaaugu

SEQ ID NO: 1879002 - RNA, 15 nt, Human
aaaccagaggcagcu

SEQ ID NO: 1879003 - RNA, 19 nt, Human
aaaccaccagaagcccaga

SEQ ID NO: 1879004 - RNA, 15 nt, Human
aaaccaaaaacugaa

SEQ ID NO: 1879005 - RNA, 18 nt, Human
aaaccaccagaagcccag

SEQ ID NO: 1879006 - RNA, 15 nt, Human
aaaccaccagaagcc

SEQ ID NO: 1879007 - RNA, 14 nt, Human
ggggaccagagcug

SEQ ID NO: 1879008 - RNA, 17 nt, Human
ggggcccaugaaagagg

SEQ ID NO: 1879009 - RNA, 18 nt, Human
aaaauguauguguaagua

SEQ ID NO: 1879010 - RNA, 19 nt, Human
aaaauguaaaggagucaaa

SEQ ID NO: 1879011 - RNA, 12 nt, Human
ggggaccagagc

SEQ ID NO: 1879012 - RNA, 13 nt, Human
ggggaccagagcu

SEQ ID NO: 1879013 - RNA, 21 nt, Human
ggggucacucuggcagcucag

SEQ ID NO: 1879014 - RNA, 17 nt, Human
gggguccagggagcagg

SEQ ID NO: 1879015 - RNA, 18 nt, Human
ggggucaugcccuccucu

SEQ ID NO: 1879016 - RNA, 19 nt, Human
ggggucaugcccuccucuc

SEQ ID NO: 1879017 - RNA, 21 nt, Human
ggggucaugcccuccucuccc

SEQ ID NO: 1879018 - RNA, 13 nt, Human
ggggguggccucc

SEQ ID NO: 1879019 - RNA, 15 nt, Human
gggggcugggcagag

SEQ ID NO: 1879020 - RNA, 22 nt, Human
gggggcuucauacacaugagau

SEQ ID NO: 1879021 - RNA, 11 nt, Human
gggggcuggga

SEQ ID NO: 1879022 - RNA, 17 nt, Human
gggggaucacagccucu

SEQ ID NO: 1879023 - RNA, 13 nt, Human
ggggcccggccag

SEQ ID NO: 1879024 - RNA, 15 nt, Human
ggggcccggccagcc

SEQ ID NO: 1879025 - RNA, 15 nt, Human
ggggcccugccuccu

SEQ ID NO: 1879026 - RNA, 21 nt, Human
gguccagaaggagacaggcag

SEQ ID NO: 1879027 - RNA, 22 nt, Human
ggucauacuaucuacucuccuc

SEQ ID NO: 1879028 - RNA, 16 nt, Human
ggucauagcagugcuu

SEQ ID NO: 1879029 - RNA, 21 nt, Human
ggucauacuaucuacucuccu

SEQ ID NO: 1879030 - RNA, 14 nt, Human
ggucagugcaaaua

SEQ ID NO: 1879031 - RNA, 19 nt, Human
gguaucaggugcugccauc

SEQ ID NO: 1879032 - RNA, 22 nt, Human
aaacuugauguguuaucucuua

SEQ ID NO: 1879033 - RNA, 17 nt, Human
aaacuuccccaucuucu

SEQ ID NO: 1879034 - RNA, 19 nt, Human
gguccaggauuccucuuuu

SEQ ID NO: 1879035 - RNA, 23 nt, Human
aaacuuccagugcaacacugaag

SEQ ID NO: 1879036 - RNA, 14 nt, Human
gguaucaggugcug

SEQ ID NO: 1879037 - RNA, 13 nt, Human
gguauagaaaugc

SEQ ID NO: 1879038 - RNA, 20 nt, Human
gguaggguaagugagagagg

SEQ ID NO: 1879039 - RNA, 20 nt, Human
gguaaggaauaccugucccc

SEQ ID NO: 1879040 - RNA, 18 nt, Human
gguaggaacugcugggcu

SEQ ID NO: 1879041 - RNA, 13 nt, Human
gguaaaauacuuc

SEQ ID NO: 1879042 - RNA, 13 nt, Human
gguaacaggcaga

SEQ ID NO: 1879043 - RNA, 22 nt, Human
gguaaaucagacuaugaaguuu

SEQ ID NO: 1879044 - RNA, 18 nt, Human
ggguuuuccaaugugacu

SEQ ID NO: 1879045 - RNA, 20 nt, Human
ggguuuugccauguuggcca

SEQ ID NO: 1879046 - RNA, 23 nt, Human
ggguuuugccauguuggccaggc

SEQ ID NO: 1879047 - RNA, 19 nt, Human
gggugggacacccugugau

SEQ ID NO: 1879048 - RNA, 14 nt, Human
aaacuuaaucuaaa

SEQ ID NO: 1879049 - RNA, 19 nt, Human
aaacuuaaucuaaauggaa

SEQ ID NO: 1879050 - RNA, 15 nt, Human
gggugggacacccug

SEQ ID NO: 1879051 - RNA, 18 nt, Human
gggugggacacccuguga

SEQ ID NO: 1879052 - RNA, 21 nt, Human
aaacguggcugcuucaaggau

SEQ ID NO: 1879053 - RNA, 13 nt, Human
aaacgcagacacu

SEQ ID NO: 1879054 - RNA, 14 nt, Human
aaacuaaaaauaau

SEQ ID NO: 1879055 - RNA, 21 nt, Human
aaacuguucccaccugcugga

SEQ ID NO: 1879056 - RNA, 20 nt, Human
aaacuguucccaccugcugg

SEQ ID NO: 1879057 - RNA, 14 nt, Human
guaaucaauguuuc

SEQ ID NO: 1879058 - RNA, 16 nt, Human
guaaucccagcuacuu

SEQ ID NO: 1879059 - RNA, 20 nt, Human
guaaucccagcuacuuggga

SEQ ID NO: 1879060 - RNA, 23 nt, Human
guaauccuagcacuuugggaggc

SEQ ID NO: 1879061 - RNA, 22 nt, Human
guaauccucaagaaauaaaagg

SEQ ID NO: 1879062 - RNA, 20 nt, Human
guaauuugugauacaaugcu

SEQ ID NO: 1879063 - RNA, 17 nt, Human
guaauuugugauacaau

SEQ ID NO: 1879064 - RNA, 15 nt, Human
guaauuugugauaca

SEQ ID NO: 1879065 - RNA, 21 nt, Human
guaauuuuuuuaucgucacug

SEQ ID NO: 1879066 - RNA, 21 nt, Human
guaacccuggugguugcuguu

SEQ ID NO: 1879067 - RNA, 23 nt, Human
guaacccagauuuugcuguauau

SEQ ID NO: 1879068 - RNA, 14 nt, Human
guaacccugguggu

SEQ ID NO: 1879069 - RNA, 14 nt, Human
aaauaaugugaaac

SEQ ID NO: 1879070 - RNA, 22 nt, Human
aaauaaugugaaacuggauuaa

SEQ ID NO: 1879071 - RNA, 22 nt, Human
aaaguguauuuuuuuacuaaua

SEQ ID NO: 1879072 - RNA, 13 nt, Human
guaaaccuuuuau

SEQ ID NO: 1879073 - RNA, 16 nt, Human
guaaacgcugucccua

SEQ ID NO: 1879074 - RNA, 20 nt, Human
guaaacgcugucccuaguaa

SEQ ID NO: 1879075 - RNA, 20 nt, Human
guaacaggaaaauuuuaaaa

SEQ ID NO: 1879076 - RNA, 16 nt, Human
guaacaagccacccca

SEQ ID NO: 1879077 - RNA, 19 nt, Human
guaacaggaaaauuuuaaa

SEQ ID NO: 1879078 - RNA, 15 nt, Human
guaaagcuagaaaug

SEQ ID NO: 1879079 - RNA, 16 nt, Human
guaaagcuagaaauga

SEQ ID NO: 1879080 - RNA, 13 nt, Human
guaacaaaugaac

SEQ ID NO: 1879081 - RNA, 16 nt, Human
guaaauuuggcuucug

SEQ ID NO: 1879082 - RNA, 13 nt, Human
guaaauuuggcuu

SEQ ID NO: 1879083 - RNA, 15 nt, Human
guaaauuuggcuucu

SEQ ID NO: 1879084 - RNA, 14 nt, Human
guaaaguccccaga

SEQ ID NO: 1879085 - RNA, 15 nt, Human
aaauaucauucagca

SEQ ID NO: 1879086 - RNA, 14 nt, Human
aaauaucauucagc

SEQ ID NO: 1879087 - RNA, 13 nt, Human
aaauaucauucag

SEQ ID NO: 1879088 - RNA, 16 nt, Human
aaauaucauucagcaa

SEQ ID NO: 1879089 - RNA, 17 nt, Human
aaauaucauucagcaac

SEQ ID NO: 1879090 - RNA, 22 nt, Human
aaauauauuuaagauaauuaua

SEQ ID NO: 1879091 - RNA, 16 nt, Human
aaauauauuuuaagac

SEQ ID NO: 1879092 - RNA, 22 nt, Human
aaauauauuuuaagacgaaaca

SEQ ID NO: 1879093 - RNA, 12 nt, Human
aaauauauuuaa

SEQ ID NO: 1879094 - RNA, 21 nt, Human
aaauauauuuaagauaauuau

SEQ ID NO: 1879095 - RNA, 20 nt, Human
aaauauauuuaagauaauua

SEQ ID NO: 1879096 - RNA, 18 nt, Human
aaauauaugcuaagucuu

SEQ ID NO: 1879097 - RNA, 14 nt, Human
aaauauauaucaaa

SEQ ID NO: 1879098 - RNA, 16 nt, Human
guacacacacauacac

SEQ ID NO: 1879099 - RNA, 19 nt, Human
aaauaccagccaguaaaug

SEQ ID NO: 1879100 - RNA, 21 nt, Human
aaauaccagccaguaaauggg

SEQ ID NO: 1879101 - RNA, 20 nt, Human
aaauaccagccaguaaaugg

SEQ ID NO: 1879102 - RNA, 15 nt, Human
aaauauaggaacuua

SEQ ID NO: 1879103 - RNA, 21 nt, Human
aaauacgugggcauucaaaug

SEQ ID NO: 1879104 - RNA, 20 nt, Human
aaauacgugggcauucaaau

SEQ ID NO: 1879105 - RNA, 19 nt, Human
aaauauuaagaaagacuau

SEQ ID NO: 1879106 - RNA, 12 nt, Human
aaauauugucuu

SEQ ID NO: 1879107 - RNA, 17 nt, Human
aaauauugucuuuuugu

SEQ ID NO: 1879108 - RNA, 20 nt, Human
aaauauugucuuuuuguaug

SEQ ID NO: 1879109 - RNA, 19 nt, Human
aaaucagccugcuccagcu

SEQ ID NO: 1879110 - RNA, 21 nt, Human
aaaucagccugcuccagcugu

SEQ ID NO: 1879111 - RNA, 23 nt, Human
aaaucagccugcuccagcuguuc

SEQ ID NO: 1879112 - RNA, 15 nt, Human
aaauauggacacuua

SEQ ID NO: 1879113 - RNA, 16 nt, Human
aaauauggacacuuaa

SEQ ID NO: 1879114 - RNA, 20 nt, Human
aaauauggacacuuaauacu

SEQ ID NO: 1879115 - RNA, 13 nt, Human
aaauauggaacuu

SEQ ID NO: 1879116 - RNA, 16 nt, Human
aaauauggaacuuaca

SEQ ID NO: 1879117 - RNA, 17 nt, Human
aaauauggaacuuacau

SEQ ID NO: 1879118 - RNA, 18 nt, Human
aaauauggaacuuacauu

SEQ ID NO: 1879119 - RNA, 21 nt, Human
aaauauggaacuuacauuguu

SEQ ID NO: 1879120 - RNA, 12 nt, Human
aaauaucugaaa

SEQ ID NO: 1879121 - RNA, 14 nt, Human
aaauaucugaaaau

SEQ ID NO: 1879122 - RNA, 17 nt, Human
aaauaucugaaaaugua

SEQ ID NO: 1879123 - RNA, 18 nt, Human
aaauaucugaaaauguau

SEQ ID NO: 1879124 - RNA, 19 nt, Human
aaauaucugaaaauguaug

SEQ ID NO: 1879125 - RNA, 21 nt, Human
aaauaucugaaaauguaugug

SEQ ID NO: 1879126 - RNA, 22 nt, Human
aaauaucugaaaauguaugugu

SEQ ID NO: 1879127 - RNA, 23 nt, Human
aaauaucugaaaauguaugugua

SEQ ID NO: 1879128 - RNA, 23 nt, Human
aaauaucugagcucuuugcacua

SEQ ID NO: 1879129 - RNA, 15 nt, Human
aaagcagcguuucua

SEQ ID NO: 1879130 - RNA, 12 nt, Human
aaagcagccacg

SEQ ID NO: 1879131 - RNA, 15 nt, Human
aaagcagccacgagg

SEQ ID NO: 1879132 - RNA, 16 nt, Human
aaagcuaggccuggcc

SEQ ID NO: 1879133 - RNA, 14 nt, Human
aaagcuaggccugg

SEQ ID NO: 1879134 - RNA, 13 nt, Human
aaagcagugcaug

SEQ ID NO: 1879135 - RNA, 14 nt, Human
aaagcuagaaauga

SEQ ID NO: 1879136 - RNA, 16 nt, Human
aaagcagugcaugcug

SEQ ID NO: 1879137 - RNA, 17 nt, Human
aaagcuaggccuggcca

SEQ ID NO: 1879138 - RNA, 12 nt, Human
aaagcugccagc

SEQ ID NO: 1879139 - RNA, 13 nt, Human
aaagcugccagcc

SEQ ID NO: 1879140 - RNA, 22 nt, Human
aaagcugccagccgagauagcc

SEQ ID NO: 1879141 - RNA, 17 nt, Human
aaagcuguauuuugaaa

SEQ ID NO: 1879142 - RNA, 15 nt, Human
aaagcuguauuuuga

SEQ ID NO: 1879143 - RNA, 14 nt, Human
aaagcuguguggca

SEQ ID NO: 1879144 - RNA, 23 nt, Human
aaagcuguggccagcuuguuauu

SEQ ID NO: 1879145 - RNA, 14 nt, Human
gguggcaccagcag

SEQ ID NO: 1879146 - RNA, 20 nt, Human
gguggcaccagcagccugga

SEQ ID NO: 1879147 - RNA, 16 nt, Human
aaagcagaacagugau

SEQ ID NO: 1879148 - RNA, 19 nt, Human
aaacuuuaugcuaagugaa

SEQ ID NO: 1879149 - RNA, 12 nt, Human
aaacuuuaugcu

SEQ ID NO: 1879150 - RNA, 20 nt, Human
aaagggcccagagagggugg

SEQ ID NO: 1879151 - RNA, 18 nt, Human
aaagguucaugcaaacuu

SEQ ID NO: 1879152 - RNA, 14 nt, Human
aaagguguuguccc

SEQ ID NO: 1879153 - RNA, 18 nt, Human
aaagguguugucccuucu

SEQ ID NO: 1879154 - RNA, 19 nt, Human
aaagguuguuuugaaacug

SEQ ID NO: 1879155 - RNA, 14 nt, Human
aaaggugauaucca

SEQ ID NO: 1879156 - RNA, 12 nt, Human
gguggcuggguu

SEQ ID NO: 1879157 - RNA, 18 nt, Human
gguggcuggguuggaggg

SEQ ID NO: 1879158 - RNA, 21 nt, Human
aaaguaaaaacaaagaaauua

SEQ ID NO: 1879159 - RNA, 13 nt, Human
aaagguuuugagc

SEQ ID NO: 1879160 - RNA, 19 nt, Human
gguggggaccucaggccug

SEQ ID NO: 1879161 - RNA, 13 nt, Human
ggugggacacccu

SEQ ID NO: 1879162 - RNA, 16 nt, Human
ggugggacacccugug

SEQ ID NO: 1879163 - RNA, 17 nt, Human
ggugggacacccuguga

SEQ ID NO: 1879164 - RNA, 20 nt, Human
ggugggaggaucucuugagc

SEQ ID NO: 1879165 - RNA, 22 nt, Human
gguucccuuuuuuggcugcuga

SEQ ID NO: 1879166 - RNA, 23 nt, Human
gguucccuuugacgccaucccag

SEQ ID NO: 1879167 - RNA, 16 nt, Human
gguucccaagcucaga

SEQ ID NO: 1879168 - RNA, 20 nt, Human
gguucggauuugggguggau

SEQ ID NO: 1879169 - RNA, 17 nt, Human
gguucccauuugcuccu

SEQ ID NO: 1879170 - RNA, 13 nt, Human
gguucccaagcuc

SEQ ID NO: 1879171 - RNA, 16 nt, Human
gguuccagccugccac

SEQ ID NO: 1879172 - RNA, 15 nt, Human
gguuccagccugcca

SEQ ID NO: 1879173 - RNA, 19 nt, Human
gguguuuccuggcacugcu

SEQ ID NO: 1879174 - RNA, 17 nt, Human
gguguuuccuggcacug

SEQ ID NO: 1879175 - RNA, 11 nt, Human
gguguggggga

SEQ ID NO: 1879176 - RNA, 13 nt, Human
ggugugggggaag

SEQ ID NO: 1879177 - RNA, 15 nt, Human
gguguggugcagugu

SEQ ID NO: 1879178 - RNA, 17 nt, Human
gguguggugcaguguga

SEQ ID NO: 1879179 - RNA, 17 nt, Human
gguguugacaugugcuu

SEQ ID NO: 1879180 - RNA, 13 nt, Human
ggugggggccucg

SEQ ID NO: 1879181 - RNA, 18 nt, Human
gguggggggcuucauaca

SEQ ID NO: 1879182 - RNA, 16 nt, Human
gguggggggcuucaua

SEQ ID NO: 1879183 - RNA, 14 nt, Human
gguguggagaagcg

SEQ ID NO: 1879184 - RNA, 23 nt, Human
gguguggagaagcggcuggcagc

SEQ ID NO: 1879185 - RNA, 12 nt, Human
gguguggagaag

SEQ ID NO: 1879186 - RNA, 20 nt, Human
gguuuguaaauuaacuuuua

SEQ ID NO: 1879187 - RNA, 22 nt, Human
gguuuguuuagaagaagugugu

SEQ ID NO: 1879188 - RNA, 17 nt, Human
gguuuucacauuggaaa

SEQ ID NO: 1879189 - RNA, 22 nt, Human
gguuucuaaagcugccagccga

SEQ ID NO: 1879190 - RNA, 16 nt, Human
gguuucuaaagcugcc

SEQ ID NO: 1879191 - RNA, 15 nt, Human
gguuucagaaaugug

SEQ ID NO: 1879192 - RNA, 21 nt, Human
aaaguaucccuacuguaauuu

SEQ ID NO: 1879193 - RNA, 20 nt, Human
aaaguagaagucuuagaugu

SEQ ID NO: 1879194 - RNA, 22 nt, Human
aaaguagaagucuuagauguau

SEQ ID NO: 1879195 - RNA, 18 nt, Human
aaaguacacuguuucaaa

SEQ ID NO: 1879196 - RNA, 19 nt, Human
aaaguacacuguuucaaac

SEQ ID NO: 1879197 - RNA, 20 nt, Human
aaagugguauagaaaugcug

SEQ ID NO: 1879198 - RNA, 17 nt, Human
aaagugguauagaaaug

SEQ ID NO: 1879199 - RNA, 16 nt, Human
aaagugguauagaaau

SEQ ID NO: 1879200 - RNA, 21 nt, Human
aaaguguauuuuuuuacuaau

SEQ ID NO: 1879201 - RNA, 14 nt, Human
aaaguguauuuuuu

SEQ ID NO: 1879202 - RNA, 21 nt, Human
aaaguauccugcuucugauau

SEQ ID NO: 1879203 - RNA, 17 nt, Human
aaagugggcuugauucu

SEQ ID NO: 1879204 - RNA, 16 nt, Human
auuucagcagcugcag

SEQ ID NO: 1879205 - RNA, 15 nt, Human
auuucagauuuguga

SEQ ID NO: 1879206 - RNA, 23 nt, Human
auuucagacucccauuccugaag

SEQ ID NO: 1879207 - RNA, 18 nt, Human
auuucagacucccauucc

SEQ ID NO: 1879208 - RNA, 14 nt, Human
auuuauacaaauua

SEQ ID NO: 1879209 - RNA, 15 nt, Human
auuuauacuggcaug

SEQ ID NO: 1879210 - RNA, 16 nt, Human
auuuauacuggcaugc

SEQ ID NO: 1879211 - RNA, 17 nt, Human
auuuauacuguauauau

SEQ ID NO: 1879212 - RNA, 14 nt, Human
auuuaaugaaagac

SEQ ID NO: 1879213 - RNA, 18 nt, Human
auuuauacaaauuagaaa

SEQ ID NO: 1879214 - RNA, 16 nt, Human
auuucuguuuagauaa

SEQ ID NO: 1879215 - RNA, 14 nt, Human
auuucuguuuagau

SEQ ID NO: 1879216 - RNA, 12 nt, Human
auuucuguuuag

SEQ ID NO: 1879217 - RNA, 17 nt, Human
auuucaucugcucuccu

SEQ ID NO: 1879218 - RNA, 16 nt, Human
auuucaucugcucucc

SEQ ID NO: 1879219 - RNA, 15 nt, Human
auuucaucugcucuc

SEQ ID NO: 1879220 - RNA, 14 nt, Human
auuucaucugcucu

SEQ ID NO: 1879221 - RNA, 11 nt, Human
auuucaucugc

SEQ ID NO: 1879222 - RNA, 16 nt, Human
auuguaaggaaugauu

SEQ ID NO: 1879223 - RNA, 18 nt, Human
auuguaagcaugcacaaa

SEQ ID NO: 1879224 - RNA, 16 nt, Human
auuguaaauugaauca

SEQ ID NO: 1879225 - RNA, 17 nt, Human
auuguaaauugaaucag

SEQ ID NO: 1879226 - RNA, 23 nt, Human
auuguaaauugaaucaguauaaa

SEQ ID NO: 1879227 - RNA, 15 nt, Human
auuguaaggaaugau

SEQ ID NO: 1879228 - RNA, 18 nt, Human
auugauccagaaagaaaa

SEQ ID NO: 1879229 - RNA, 19 nt, Human
auugauccagaaagaaaac

SEQ ID NO: 1879230 - RNA, 22 nt, Human
auugauccagaaagaaaacuug

SEQ ID NO: 1879231 - RNA, 13 nt, Human
auuguaaaauggu

SEQ ID NO: 1879232 - RNA, 18 nt, Human
auugaugggauuugguca

SEQ ID NO: 1879233 - RNA, 14 nt, Human
auuguaaaacaggu

SEQ ID NO: 1879234 - RNA, 19 nt, Human
auuguucuuaguuugcagu

SEQ ID NO: 1879235 - RNA, 24 nt, Human
auuguuccagcaguuuucaaguca

SEQ ID NO: 1879236 - RNA, 13 nt, Human
auuguacaguuuu

SEQ ID NO: 1879237 - RNA, 19 nt, Human
auuguacacaccuuauauu

SEQ ID NO: 1879238 - RNA, 17 nt, Human
auucuugccaaauauaa

SEQ ID NO: 1879239 - RNA, 14 nt, Human
auucugagagcugu

SEQ ID NO: 1879240 - RNA, 13 nt, Human
auucugagagcug

SEQ ID NO: 1879241 - RNA, 16 nt, Human
auucucuccuguaccu

SEQ ID NO: 1879242 - RNA, 21 nt, Human
auucucuccuguaccucuuga

SEQ ID NO: 1879243 - RNA, 19 nt, Human
auucucuccuguaccucuu

SEQ ID NO: 1879244 - RNA, 21 nt, Human
auuccugaugcuucuucagag

SEQ ID NO: 1879245 - RNA, 13 nt, Human
auuccugaacagg

SEQ ID NO: 1879246 - RNA, 15 nt, Human
auuccugaagaacca

SEQ ID NO: 1879247 - RNA, 17 nt, Human
auuccucuuuucucugc

SEQ ID NO: 1879248 - RNA, 13 nt, Human
auuccucuuugcu

SEQ ID NO: 1879249 - RNA, 14 nt, Human
auuccucuuugcuu

SEQ ID NO: 1879250 - RNA, 15 nt, Human
auuccucuuugcuuu

SEQ ID NO: 1879251 - RNA, 16 nt, Human
auuccucuuugcuuug

SEQ ID NO: 1879252 - RNA, 17 nt, Human
auuccucuuugcuuugc

SEQ ID NO: 1879253 - RNA, 18 nt, Human
auuccucuuugcuuugcu

SEQ ID NO: 1879254 - RNA, 12 nt, Human
auuccucuuuuc

SEQ ID NO: 1879255 - RNA, 15 nt, Human
auuccucuuuucucu

SEQ ID NO: 1879256 - RNA, 16 nt, Human
auuccugaagaaccag

SEQ ID NO: 1879257 - RNA, 19 nt, Human
auuccugaagaaccagucc

SEQ ID NO: 1879258 - RNA, 17 nt, Human
auucuuuccugaggcug

SEQ ID NO: 1879259 - RNA, 22 nt, Human
auucuuuccugaggcugggcuc

SEQ ID NO: 1879260 - RNA, 17 nt, Human
auucuuucgaaagaaga

SEQ ID NO: 1879261 - RNA, 19 nt, Human
auucuuugaccuguuggga

SEQ ID NO: 1879262 - RNA, 15 nt, Human
auucuuucugauaac

SEQ ID NO: 1879263 - RNA, 16 nt, Human
auugauccagaaagaa

SEQ ID NO: 1879264 - RNA, 17 nt, Human
auugauccagaaagaaa

SEQ ID NO: 1879265 - RNA, 17 nt, Human
auugagcugcagaaacg

SEQ ID NO: 1879266 - RNA, 13 nt, Human
auugauauuugug

SEQ ID NO: 1879267 - RNA, 16 nt, Human
auugauauuugugcau

SEQ ID NO: 1879268 - RNA, 18 nt, Human
auugauauuugugcauuu

SEQ ID NO: 1879269 - RNA, 22 nt, Human
auugauauuugugcauuuucua

SEQ ID NO: 1879270 - RNA, 19 nt, Human
auugauauuugugcauuuu

SEQ ID NO: 1879271 - RNA, 18 nt, Human
auucacaagacccaaaag

SEQ ID NO: 1879272 - RNA, 14 nt, Human
auucacaaacuuuu

SEQ ID NO: 1879273 - RNA, 22 nt, Human
auucacaaacuuuuauacucuu

SEQ ID NO: 1879274 - RNA, 21 nt, Human
auucaauuguaaauugaauca

SEQ ID NO: 1879275 - RNA, 22 nt, Human
auucaauuguaaauugaaucag

SEQ ID NO: 1879276 - RNA, 13 nt, Human
auucacaaacuuu

SEQ ID NO: 1879277 - RNA, 18 nt, Human
auuaaauucuugcaaagu

SEQ ID NO: 1879278 - RNA, 14 nt, Human
auuaaauucuugca

SEQ ID NO: 1879279 - RNA, 20 nt, Human
auuaaauucuugcaaaguau

SEQ ID NO: 1879280 - RNA, 20 nt, Human
auuauguguguuuuaaaaug

SEQ ID NO: 1879281 - RNA, 21 nt, Human
auuauguguguuuuaaaauga

SEQ ID NO: 1879282 - RNA, 15 nt, Human
auuauguguguuuua

SEQ ID NO: 1879283 - RNA, 17 nt, Human
auucacaaacuuuuaua

SEQ ID NO: 1879284 - RNA, 20 nt, Human
auucauauuuacuucuuaua

SEQ ID NO: 1879285 - RNA, 16 nt, Human
auucaucccaacuguc

SEQ ID NO: 1879286 - RNA, 18 nt, Human
auucauauuuacuucuua

SEQ ID NO: 1879287 - RNA, 19 nt, Human
auucauauuuacuucuuau

SEQ ID NO: 1879288 - RNA, 12 nt, Human
auuccucuggga

SEQ ID NO: 1879289 - RNA, 13 nt, Human
auuccucugggaa

SEQ ID NO: 1879290 - RNA, 22 nt, Human
auuccucugggaauguuacauu

SEQ ID NO: 1879291 - RNA, 20 nt, Human
auuccaaagaguagaauugc

SEQ ID NO: 1879292 - RNA, 22 nt, Human
auucaucucucuuuaauauaaa

SEQ ID NO: 1879293 - RNA, 17 nt, Human
auucaucucucuuuaau

SEQ ID NO: 1879294 - RNA, 17 nt, Human
auucaucccaacugucu

SEQ ID NO: 1879295 - RNA, 18 nt, Human
auuuugauccaagcuggu

SEQ ID NO: 1879296 - RNA, 21 nt, Human
auuuuaucuuugauucuccuu

SEQ ID NO: 1879297 - RNA, 20 nt, Human
auuuuaucuuugauucuccu

SEQ ID NO: 1879298 - RNA, 15 nt, Human
auuuuaucuuugauu

SEQ ID NO: 1879299 - RNA, 13 nt, Human
auuuuaucuuuga

SEQ ID NO: 1879300 - RNA, 23 nt, Human
auuuuaucuuugauucuccuuca

SEQ ID NO: 1879301 - RNA, 22 nt, Human
auuuuaucuuugauucuccuuc

SEQ ID NO: 1879302 - RNA, 12 nt, Human
auuuucuuuaau

SEQ ID NO: 1879303 - RNA, 15 nt, Human
auuuucuuuaaugcu

SEQ ID NO: 1879304 - RNA, 18 nt, Human
auuuucuuuaaugcuuuu

SEQ ID NO: 1879305 - RNA, 19 nt, Human
auuuucuuuaaugcuuuua

SEQ ID NO: 1879306 - RNA, 16 nt, Human
auuuguuugaacugau

SEQ ID NO: 1879307 - RNA, 14 nt, Human
auuuguuugaacug

SEQ ID NO: 1879308 - RNA, 20 nt, Human
auuuguuugaacugauaaag

SEQ ID NO: 1879309 - RNA, 14 nt, Human
auuuuauaauucug

SEQ ID NO: 1879310 - RNA, 15 nt, Human
auuuuauacauuaac

SEQ ID NO: 1879311 - RNA, 13 nt, Human
auuuguuugaacu

SEQ ID NO: 1879312 - RNA, 13 nt, Human
auuuuuaaagaaa

SEQ ID NO: 1879313 - RNA, 20 nt, Human
auuuuuaaagaaaaguuuug

SEQ ID NO: 1879314 - RNA, 17 nt, Human
auuuuuuuuuccuucag

SEQ ID NO: 1879315 - RNA, 21 nt, Human
auuuuuacguuugaagacauu

SEQ ID NO: 1879316 - RNA, 23 nt, Human
caaaaaaaccucuuaauauucug

SEQ ID NO: 1879317 - RNA, 12 nt, Human
caaaagcugcuc

SEQ ID NO: 1879318 - RNA, 12 nt, Human
auuuuuuuuucc

SEQ ID NO: 1879319 - RNA, 13 nt, Human
auuuuuuuuuccu

SEQ ID NO: 1879320 - RNA, 16 nt, Human
auuuuuuuuuccuuca

SEQ ID NO: 1879321 - RNA, 13 nt, Human
auuuuuaagugcu

SEQ ID NO: 1879322 - RNA, 19 nt, Human
caaaagcugggcagguugg

SEQ ID NO: 1879323 - RNA, 14 nt, Human
caaaagcugcucag

SEQ ID NO: 1879324 - RNA, 15 nt, Human
caaaagcugggcagg

SEQ ID NO: 1879325 - RNA, 14 nt, Human
caaaccacacugga

SEQ ID NO: 1879326 - RNA, 22 nt, Human
caaaccaccagaagcccagaau

SEQ ID NO: 1879327 - RNA, 20 nt, Human
caaaccaccagaagcccaga

SEQ ID NO: 1879328 - RNA, 16 nt, Human
caaaccaccagaagcc

SEQ ID NO: 1879329 - RNA, 15 nt, Human
caaaccaccagaagc

SEQ ID NO: 1879330 - RNA, 15 nt, Human
caaaccacacuggac

SEQ ID NO: 1879331 - RNA, 17 nt, Human
caacccccagccugcua

SEQ ID NO: 1879332 - RNA, 16 nt, Human
caacccccagccugcu

SEQ ID NO: 1879333 - RNA, 15 nt, Human
caacccccagccugc

SEQ ID NO: 1879334 - RNA, 19 nt, Human
caacccaaauguucaucaa

SEQ ID NO: 1879335 - RNA, 21 nt, Human
caaccacuaagaauucaaacu

SEQ ID NO: 1879336 - RNA, 17 nt, Human
caacucaccccagcccc

SEQ ID NO: 1879337 - RNA, 16 nt, Human
caacucaccccagccc

SEQ ID NO: 1879338 - RNA, 13 nt, Human
caacucaccccag

SEQ ID NO: 1879339 - RNA, 15 nt, Human
caacucaccccagcc

SEQ ID NO: 1879340 - RNA, 22 nt, Human
caagacccuuguggucccaccc

SEQ ID NO: 1879341 - RNA, 18 nt, Human
caagacccuugugguccc

SEQ ID NO: 1879342 - RNA, 19 nt, Human
caagacccuugugguccca

SEQ ID NO: 1879343 - RNA, 23 nt, Human
caagaauuucuaggacugaauua

SEQ ID NO: 1879344 - RNA, 18 nt, Human
caaccacugcgaccacaa

SEQ ID NO: 1879345 - RNA, 23 nt, Human
caacaaaccuguuucugcagcca

SEQ ID NO: 1879346 - RNA, 12 nt, Human
caacacaaagag

SEQ ID NO: 1879347 - RNA, 13 nt, Human
caacacaaagaga

SEQ ID NO: 1879348 - RNA, 15 nt, Human
caacacaaagagaaa

SEQ ID NO: 1879349 - RNA, 16 nt, Human
caacacaaagagaaaa

SEQ ID NO: 1879350 - RNA, 20 nt, Human
caacacaaagagaaaaagaa

SEQ ID NO: 1879351 - RNA, 22 nt, Human
caacacaaagagaaaaagaaau

SEQ ID NO: 1879352 - RNA, 23 nt, Human
caacacaaagagaaaaagaaaug

SEQ ID NO: 1879353 - RNA, 21 nt, Human
caaaucugcuuuuuaaagaau

SEQ ID NO: 1879354 - RNA, 22 nt, Human
caaaugagggucuugguuccag

SEQ ID NO: 1879355 - RNA, 23 nt, Human
caaaucuaggaaaauauuuugau

SEQ ID NO: 1879356 - RNA, 20 nt, Human
caaaucuaggaaaauauuuu

SEQ ID NO: 1879357 - RNA, 22 nt, Human
caaauccagccugcugccugcu

SEQ ID NO: 1879358 - RNA, 20 nt, Human
caaauccuugugggaaaaga

SEQ ID NO: 1879359 - RNA, 17 nt, Human
caaaucagcugcuacua

SEQ ID NO: 1879360 - RNA, 16 nt, Human
caaagucaagccacau

SEQ ID NO: 1879361 - RNA, 13 nt, Human
caaagaugcagcc

SEQ ID NO: 1879362 - RNA, 20 nt, Human
caaagaucuguccucagccu

SEQ ID NO: 1879363 - RNA, 21 nt, Human
caaagaucuguccucagccuu

SEQ ID NO: 1879364 - RNA, 14 nt, Human
caaagaugcagccg

SEQ ID NO: 1879365 - RNA, 20 nt, Human
caaaguacacuguuucaaac

SEQ ID NO: 1879366 - RNA, 16 nt, Human
caaaguacacuguuuc

SEQ ID NO: 1879367 - RNA, 21 nt, Human
caaaguacacuguuucaaacu

SEQ ID NO: 1879368 - RNA, 22 nt, Human
caacaccucugcacaagcugca

SEQ ID NO: 1879369 - RNA, 20 nt, Human
caacaccuuguuucccucuc

SEQ ID NO: 1879370 - RNA, 12 nt, Human
cacaagccaggg

SEQ ID NO: 1879371 - RNA, 15 nt, Human
cacaagccagggugu

SEQ ID NO: 1879372 - RNA, 14 nt, Human
cacaagccuucggc

SEQ ID NO: 1879373 - RNA, 12 nt, Human
caauuuaaaaaa

SEQ ID NO: 1879374 - RNA, 14 nt, Human
cacaagacccuugu

SEQ ID NO: 1879375 - RNA, 16 nt, Human
cacaagacccuugugg

SEQ ID NO: 1879376 - RNA, 12 nt, Human
caauuuaaagca

SEQ ID NO: 1879377 - RNA, 23 nt, Human
caaugcuggcuguuggcuggggg

SEQ ID NO: 1879378 - RNA, 22 nt, Human
caaugcuggcuguuggcugggg

SEQ ID NO: 1879379 - RNA, 19 nt, Human
caauauuuauuauuuucac

SEQ ID NO: 1879380 - RNA, 19 nt, Human
caauucuuacaaacaugug

SEQ ID NO: 1879381 - RNA, 18 nt, Human
caauucuuacaaacaugu

SEQ ID NO: 1879382 - RNA, 17 nt, Human
caauucuuacaaacaug

SEQ ID NO: 1879383 - RNA, 22 nt, Human
caaugcugugcccuaaagugua

SEQ ID NO: 1879384 - RNA, 13 nt, Human
caaguauuauacc

SEQ ID NO: 1879385 - RNA, 15 nt, Human
caaguugaauugagg

SEQ ID NO: 1879386 - RNA, 17 nt, Human
caaguuguucaaacauu

SEQ ID NO: 1879387 - RNA, 22 nt, Human
caaguaauccaccugccucggc

SEQ ID NO: 1879388 - RNA, 20 nt, Human
caagauucccaggaguucug

SEQ ID NO: 1879389 - RNA, 21 nt, Human
caagauucccaggaguucugc

SEQ ID NO: 1879390 - RNA, 14 nt, Human
caagauucccagga

SEQ ID NO: 1879391 - RNA, 15 nt, Human
caagauucccaggag

SEQ ID NO: 1879392 - RNA, 16 nt, Human
caagauucccaggagu

SEQ ID NO: 1879393 - RNA, 19 nt, Human
caagauucccaggaguucu

SEQ ID NO: 1879394 - RNA, 13 nt, Human
caagauucccagg

SEQ ID NO: 1879395 - RNA, 16 nt, Human
caaguagcauuuacug

SEQ ID NO: 1879396 - RNA, 17 nt, Human
caaguagcauuuacugu

SEQ ID NO: 1879397 - RNA, 21 nt, Human
caauaaaaaaaagaaaugaaa

SEQ ID NO: 1879398 - RNA, 13 nt, Human
caauaaaaaaaag

SEQ ID NO: 1879399 - RNA, 16 nt, Human
caauaaaaaaaagaaa

SEQ ID NO: 1879400 - RNA, 19 nt, Human
caauaaaaaaaagaaauga

SEQ ID NO: 1879401 - RNA, 20 nt, Human
caauaaaaaaaagaaaugaa

SEQ ID NO: 1879402 - RNA, 17 nt, Human
cacaucuugcucugcug

SEQ ID NO: 1879403 - RNA, 16 nt, Human
cacaucuugcucugcu

SEQ ID NO: 1879404 - RNA, 13 nt, Human
cacaucuaagccu

SEQ ID NO: 1879405 - RNA, 14 nt, Human
cacaucuaagccug

SEQ ID NO: 1879406 - RNA, 22 nt, Human
cacaucagcacgauuucuguuu

SEQ ID NO: 1879407 - RNA, 24 nt, Human
cacaucagcuccacuuucagugaa

SEQ ID NO: 1879408 - RNA, 21 nt, Human
cacaucagcacgauuucuguu

SEQ ID NO: 1879409 - RNA, 20 nt, Human
cacaucagcacgauuucugu

SEQ ID NO: 1879410 - RNA, 18 nt, Human
cacaucuugcucugcuga

SEQ ID NO: 1879411 - RNA, 19 nt, Human
cacaucuugcucugcugac

SEQ ID NO: 1879412 - RNA, 17 nt, Human
cacaucuaagccugaag

SEQ ID NO: 1879413 - RNA, 16 nt, Human
cacauuuggaauacuu

SEQ ID NO: 1879414 - RNA, 17 nt, Human
cacauuuggaauacuuu

SEQ ID NO: 1879415 - RNA, 19 nt, Human
cacauuuggaauacuuuuu

SEQ ID NO: 1879416 - RNA, 14 nt, Human
cacauuuuucagau

SEQ ID NO: 1879417 - RNA, 15 nt, Human
cacauuuuauuuuau

SEQ ID NO: 1879418 - RNA, 21 nt, Human
cacauuuuuuaaaugcaccug

SEQ ID NO: 1879419 - RNA, 17 nt, Human
cacauuuuuuaaaugca

SEQ ID NO: 1879420 - RNA, 14 nt, Human
cacauuuuucuuag

SEQ ID NO: 1879421 - RNA, 13 nt, Human
cacauuuuucuua

SEQ ID NO: 1879422 - RNA, 18 nt, Human
cacauuuuucagauauaa

SEQ ID NO: 1879423 - RNA, 17 nt, Human
caccaacauacucccau

SEQ ID NO: 1879424 - RNA, 20 nt, Human
caccaacauacucccaucug

SEQ ID NO: 1879425 - RNA, 21 nt, Human
caccaacauacucccaucugu

SEQ ID NO: 1879426 - RNA, 23 nt, Human
cacccaggagccccgaggccuuc

SEQ ID NO: 1879427 - RNA, 20 nt, Human
cacccaggagccccgaggcc

SEQ ID NO: 1879428 - RNA, 19 nt, Human
cacccagcccacuucugcc

SEQ ID NO: 1879429 - RNA, 24 nt, Human
cacccaggagccccgaggccuucu

SEQ ID NO: 1879430 - RNA, 21 nt, Human
caccagcccuuagcagggaaa

SEQ ID NO: 1879431 - RNA, 15 nt, Human
caccagcagccugga

SEQ ID NO: 1879432 - RNA, 15 nt, Human
caccagcauuccuuu

SEQ ID NO: 1879433 - RNA, 14 nt, Human
caccagcauuccuu

SEQ ID NO: 1879434 - RNA, 23 nt, Human
caccaacauacucccaucuguga

SEQ ID NO: 1879435 - RNA, 14 nt, Human
caccagcagccugg

SEQ ID NO: 1879436 - RNA, 12 nt, Human
caccagcagccu

SEQ ID NO: 1879437 - RNA, 17 nt, Human
cacccagcccacuucug

SEQ ID NO: 1879438 - RNA, 16 nt, Human
cacccagcccacuucu

SEQ ID NO: 1879439 - RNA, 17 nt, Human
caccaggaaccucuuca

SEQ ID NO: 1879440 - RNA, 19 nt, Human
cacaguauuacuucugcua

SEQ ID NO: 1879441 - RNA, 18 nt, Human
cacaguauuacuucugcu

SEQ ID NO: 1879442 - RNA, 16 nt, Human
cacaguauuacuucug

SEQ ID NO: 1879443 - RNA, 14 nt, Human
cacaggucuuuccu

SEQ ID NO: 1879444 - RNA, 16 nt, Human
cacaguagucuugaug

SEQ ID NO: 1879445 - RNA, 13 nt, Human
cacaguagucuug

SEQ ID NO: 1879446 - RNA, 15 nt, Human
cacaggucuuuccua

SEQ ID NO: 1879447 - RNA, 10 nt, Human
cacagcucuu

SEQ ID NO: 1879448 - RNA, 23 nt, Human
cacagcucuguccugggagugag

SEQ ID NO: 1879449 - RNA, 20 nt, Human
cacagcucuguccugggagu

SEQ ID NO: 1879450 - RNA, 22 nt, Human
cacagcuaacauggaaguacua

SEQ ID NO: 1879451 - RNA, 23 nt, Human
cacagguaugaccuucuaggaag

SEQ ID NO: 1879452 - RNA, 19 nt, Human
cacagacccugcccugugg

SEQ ID NO: 1879453 - RNA, 20 nt, Human
cacagacccugcccuguggg

SEQ ID NO: 1879454 - RNA, 21 nt, Human
cacagacccugcccugugggc

SEQ ID NO: 1879455 - RNA, 22 nt, Human
cacagacccugcccugugggcc

SEQ ID NO: 1879456 - RNA, 15 nt, Human
cacagcuaacaugga

SEQ ID NO: 1879457 - RNA, 16 nt, Human
cacagcuaacauggaa

SEQ ID NO: 1879458 - RNA, 21 nt, Human
caccuugugucuguacacgug

SEQ ID NO: 1879459 - RNA, 17 nt, Human
caccuugugucuguaca

SEQ ID NO: 1879460 - RNA, 15 nt, Human
caccuugugucugua

SEQ ID NO: 1879461 - RNA, 14 nt, Human
caccuuugaagaag

SEQ ID NO: 1879462 - RNA, 17 nt, Human
caccuuuguccccaccg

SEQ ID NO: 1879463 - RNA, 14 nt, Human
caccuuugucccca

SEQ ID NO: 1879464 - RNA, 15 nt, Human
caccuuuguccccac

SEQ ID NO: 1879465 - RNA, 13 nt, Human
caccuuggcucaa

SEQ ID NO: 1879466 - RNA, 14 nt, Human
caccuuggcucaag

SEQ ID NO: 1879467 - RNA, 17 nt, Human
caccuuggcaccagaca

SEQ ID NO: 1879468 - RNA, 19 nt, Human
caccuugacagggcacacc

SEQ ID NO: 1879469 - RNA, 17 nt, Human
caccugccagggacaga

SEQ ID NO: 1879470 - RNA, 23 nt, Human
caccucaagaagaagaggggcau

SEQ ID NO: 1879471 - RNA, 13 nt, Human
caccugccaggga

SEQ ID NO: 1879472 - RNA, 14 nt, Human
caccugccagggac

SEQ ID NO: 1879473 - RNA, 16 nt, Human
caccugccagggacag

SEQ ID NO: 1879474 - RNA, 13 nt, Human
caccuauuuccau

SEQ ID NO: 1879475 - RNA, 15 nt, Human
caccuaaagcagcca

SEQ ID NO: 1879476 - RNA, 22 nt, Human
caccuaaauaaccaaucuacaa

SEQ ID NO: 1879477 - RNA, 23 nt, Human
caccuaaauaaccaaucuacaau

SEQ ID NO: 1879478 - RNA, 17 nt, Human
caccuaaagcagccagc

SEQ ID NO: 1879479 - RNA, 14 nt, Human
caccuaaagcagcc

SEQ ID NO: 1879480 - RNA, 21 nt, Human
caccuacaugagguacugaga

SEQ ID NO: 1879481 - RNA, 17 nt, Human
caccuaauccaggcaga

SEQ ID NO: 1879482 - RNA, 13 nt, Human
caccguucugugc

SEQ ID NO: 1879483 - RNA, 14 nt, Human
caccguucugugca

SEQ ID NO: 1879484 - RNA, 15 nt, Human
caccguucugugcac

SEQ ID NO: 1879485 - RNA, 23 nt, Human
cacuacggaauaguuggcuagga

SEQ ID NO: 1879486 - RNA, 15 nt, Human
cacuaauacaccagg

SEQ ID NO: 1879487 - RNA, 20 nt, Human
cacggagggugacgggggug

SEQ ID NO: 1879488 - RNA, 19 nt, Human
cacggagcccagcccuccc

SEQ ID NO: 1879489 - RNA, 16 nt, Human
cacggccaggccagag

SEQ ID NO: 1879490 - RNA, 15 nt, Human
cacggccaggccaga

SEQ ID NO: 1879491 - RNA, 14 nt, Human
cacggccaggccag

SEQ ID NO: 1879492 - RNA, 19 nt, Human
cacucuuauugcccacgcu

SEQ ID NO: 1879493 - RNA, 18 nt, Human
cacucuuauugcccacgc

SEQ ID NO: 1879494 - RNA, 17 nt, Human
cacucuuauugcccacg

SEQ ID NO: 1879495 - RNA, 18 nt, Human
cacuccccgaagucuuuu

SEQ ID NO: 1879496 - RNA, 19 nt, Human
cacuccccgaagucuuuug

SEQ ID NO: 1879497 - RNA, 17 nt, Human
cacucuugaaaaaugca

SEQ ID NO: 1879498 - RNA, 16 nt, Human
cacucuuggagccugc

SEQ ID NO: 1879499 - RNA, 15 nt, Human
cacucuuggagccug

SEQ ID NO: 1879500 - RNA, 14 nt, Human
cacucuuggagccu

SEQ ID NO: 1879501 - RNA, 13 nt, Human
cacucuucucagc

SEQ ID NO: 1879502 - RNA, 16 nt, Human
cacugaaauauacaca

SEQ ID NO: 1879503 - RNA, 20 nt, Human
cacugaaauauacacacagc

SEQ ID NO: 1879504 - RNA, 14 nt, Human
cacucuucucagcc

SEQ ID NO: 1879505 - RNA, 17 nt, Human
cacucuucucagccacu

SEQ ID NO: 1879506 - RNA, 19 nt, Human
cacucuuggagccugcaga

SEQ ID NO: 1879507 - RNA, 17 nt, Human
cacucuuggagccugca

SEQ ID NO: 1879508 - RNA, 17 nt, Human
cacuguugcccaggcug

SEQ ID NO: 1879509 - RNA, 19 nt, Human
cacuguuucaaacuuuacu

SEQ ID NO: 1879510 - RNA, 23 nt, Human
cacuuguccagcugagcgccagg

SEQ ID NO: 1879511 - RNA, 20 nt, Human
cacuuggucugugagaugcu

SEQ ID NO: 1879512 - RNA, 17 nt, Human
cacuuggucugugagau

SEQ ID NO: 1879513 - RNA, 17 nt, Human
cacuugugauuauuuau

SEQ ID NO: 1879514 - RNA, 16 nt, Human
cacuguugcccaggcu

SEQ ID NO: 1879515 - RNA, 15 nt, Human
cacuguugcccaggc

SEQ ID NO: 1879516 - RNA, 14 nt, Human
cacuguugcccagg

SEQ ID NO: 1879517 - RNA, 17 nt, Human
cacuggugacaugucuu

SEQ ID NO: 1879518 - RNA, 23 nt, Human
cacuggggauugggccccugcca

SEQ ID NO: 1879519 - RNA, 23 nt, Human
cacugggcuuggggaccagagcu

SEQ ID NO: 1879520 - RNA, 18 nt, Human
cacuggggauugggcccc

SEQ ID NO: 1879521 - RNA, 17 nt, Human
cacuggggauugggccc

SEQ ID NO: 1879522 - RNA, 16 nt, Human
cacuggggauugggcc

SEQ ID NO: 1879523 - RNA, 15 nt, Human
cacuggggauugggc

SEQ ID NO: 1879524 - RNA, 22 nt, Human
cacugggcuuggggaccagagc

SEQ ID NO: 1879525 - RNA, 19 nt, Human
cacuuucagugaaagcauc

SEQ ID NO: 1879526 - RNA, 18 nt, Human
cacuuucagugaaagcau

SEQ ID NO: 1879527 - RNA, 17 nt, Human
cacuuucagugaaagca

SEQ ID NO: 1879528 - RNA, 22 nt, Human
cagaaguuucugccgcagcccu

SEQ ID NO: 1879529 - RNA, 20 nt, Human
cagaaguuucugccgcagcc

SEQ ID NO: 1879530 - RNA, 21 nt, Human
cagaaguuucugccgcagccc

SEQ ID NO: 1879531 - RNA, 21 nt, Human
cagaauaaacuggcagcucag

SEQ ID NO: 1879532 - RNA, 15 nt, Human
cagaauagccacauu

SEQ ID NO: 1879533 - RNA, 19 nt, Human
cagaauagauagcacugaa

SEQ ID NO: 1879534 - RNA, 21 nt, Human
cagaauagccacauuuggaau

SEQ ID NO: 1879535 - RNA, 22 nt, Human
cagaauagccacauuuggaaua

SEQ ID NO: 1879536 - RNA, 22 nt, Human
cagaauacuguuaaaggaaaaa

SEQ ID NO: 1879537 - RNA, 14 nt, Human
cagaauacacuuaa

SEQ ID NO: 1879538 - RNA, 17 nt, Human
cagaaauguguuaucac

SEQ ID NO: 1879539 - RNA, 11 nt, Human
cagaacacugu

SEQ ID NO: 1879540 - RNA, 19 nt, Human
cagggcucccacagagaca

SEQ ID NO: 1879541 - RNA, 15 nt, Human
cagggcucccacaga

SEQ ID NO: 1879542 - RNA, 16 nt, Human
cagggcugaggccucu

SEQ ID NO: 1879543 - RNA, 18 nt, Human
cagggcucccacagagac

SEQ ID NO: 1879544 - RNA, 15 nt, Human
cagggcuggacugag

SEQ ID NO: 1879545 - RNA, 14 nt, Human
cagggcuggacuga

SEQ ID NO: 1879546 - RNA, 18 nt, Human
cagggcugaggccucuca

SEQ ID NO: 1879547 - RNA, 20 nt, Human
caggggaaaaucagccugcu

SEQ ID NO: 1879548 - RNA, 18 nt, Human
cagggcuggacugaggcc

SEQ ID NO: 1879549 - RNA, 19 nt, Human
caggggaaaaucagccugc

SEQ ID NO: 1879550 - RNA, 19 nt, Human
cagggcuggacugaggccu

SEQ ID NO: 1879551 - RNA, 17 nt, Human
cagggcuggacugaggc

SEQ ID NO: 1879552 - RNA, 16 nt, Human
cagggcuggacugagg

SEQ ID NO: 1879553 - RNA, 23 nt, Human
cagggcucagcggggacagcucc

SEQ ID NO: 1879554 - RNA, 21 nt, Human
cagggcucagcggggacagcu

SEQ ID NO: 1879555 - RNA, 16 nt, Human
cagggaugguguucaa

SEQ ID NO: 1879556 - RNA, 13 nt, Human
cagggaugcccug

SEQ ID NO: 1879557 - RNA, 14 nt, Human
cagggaugcccugg

SEQ ID NO: 1879558 - RNA, 16 nt, Human
cagggaugcccuggag

SEQ ID NO: 1879559 - RNA, 20 nt, Human
cagggaugcccuggaggugg

SEQ ID NO: 1879560 - RNA, 21 nt, Human
cagggaugcccuggagguggc

SEQ ID NO: 1879561 - RNA, 22 nt, Human
cagggaugcccuggagguggcu

SEQ ID NO: 1879562 - RNA, 23 nt, Human
cagggaugcccuggagguggcug

SEQ ID NO: 1879563 - RNA, 18 nt, Human
cagggagcugcaggggca

SEQ ID NO: 1879564 - RNA, 15 nt, Human
cagggagcggccggc

SEQ ID NO: 1879565 - RNA, 17 nt, Human
cagggagcggccggcca

SEQ ID NO: 1879566 - RNA, 19 nt, Human
cagggagcggccggccagc

SEQ ID NO: 1879567 - RNA, 21 nt, Human
cagggagcggccggccagccc

SEQ ID NO: 1879568 - RNA, 23 nt, Human
cagggagcggccggccagccccu

SEQ ID NO: 1879569 - RNA, 14 nt, Human
cagggagcugcagg

SEQ ID NO: 1879570 - RNA, 15 nt, Human
cagggagcugcaggg

SEQ ID NO: 1879571 - RNA, 17 nt, Human
cagggagcugcaggggc

SEQ ID NO: 1879572 - RNA, 20 nt, Human
caggcugggcuucaguggca

SEQ ID NO: 1879573 - RNA, 15 nt, Human
caggcugggagagcc

SEQ ID NO: 1879574 - RNA, 12 nt, Human
caggcugggaga

SEQ ID NO: 1879575 - RNA, 14 nt, Human
caggcugggagagc

SEQ ID NO: 1879576 - RNA, 22 nt, Human
caggcugggcuucaguggcagc

SEQ ID NO: 1879577 - RNA, 21 nt, Human
caggcugggcuucaguggcag

SEQ ID NO: 1879578 - RNA, 20 nt, Human
cagggagcauuuuccuccau

SEQ ID NO: 1879579 - RNA, 22 nt, Human
cagggagccuuugguucuggcc

SEQ ID NO: 1879580 - RNA, 16 nt, Human
caggcuggcuccagau

SEQ ID NO: 1879581 - RNA, 20 nt, Human
caggcuggcuccagaugcag

SEQ ID NO: 1879582 - RNA, 17 nt, Human
caggcuggcuccagaug

SEQ ID NO: 1879583 - RNA, 18 nt, Human
caggcuggcuccagaugc

SEQ ID NO: 1879584 - RNA, 16 nt, Human
caggccagagggagug

SEQ ID NO: 1879585 - RNA, 20 nt, Human
caggccaggcccucugccca

SEQ ID NO: 1879586 - RNA, 19 nt, Human
caggccaggcccucugccc

SEQ ID NO: 1879587 - RNA, 17 nt, Human
caggccaggcccucugc

SEQ ID NO: 1879588 - RNA, 18 nt, Human
caggccaggcccucugcc

SEQ ID NO: 1879589 - RNA, 17 nt, Human
caggccagcugcuuggg

SEQ ID NO: 1879590 - RNA, 19 nt, Human
caggccagcugcuugggcu

SEQ ID NO: 1879591 - RNA, 21 nt, Human
caggccagcugcuugggcuuc

SEQ ID NO: 1879592 - RNA, 23 nt, Human
caggccagcugcuugggcuucau

SEQ ID NO: 1879593 - RNA, 14 nt, Human
caggcagauccagg

SEQ ID NO: 1879594 - RNA, 15 nt, Human
caggccagagggagu

SEQ ID NO: 1879595 - RNA, 13 nt, Human
caggccagaggga

SEQ ID NO: 1879596 - RNA, 18 nt, Human
caggcagauacaggaaaa

SEQ ID NO: 1879597 - RNA, 13 nt, Human
caggcagauccag

SEQ ID NO: 1879598 - RNA, 22 nt, Human
caggugcacaagcuccaagcuc

SEQ ID NO: 1879599 - RNA, 21 nt, Human
caggugcacaagcuccaagcu

SEQ ID NO: 1879600 - RNA, 21 nt, Human
cagguuggugggggccucggu

SEQ ID NO: 1879601 - RNA, 23 nt, Human
caguaaagaacaucccuccuggg

SEQ ID NO: 1879602 - RNA, 14 nt, Human
cagguuuaagcugu

SEQ ID NO: 1879603 - RNA, 12 nt, Human
cagguuuuccug

SEQ ID NO: 1879604 - RNA, 16 nt, Human
cagguuuuccugaaga

SEQ ID NO: 1879605 - RNA, 23 nt, Human
caggugauccacccaccucagcc

SEQ ID NO: 1879606 - RNA, 22 nt, Human
caggugauccacccaccucagc

SEQ ID NO: 1879607 - RNA, 15 nt, Human
caggugcacaagcuc

SEQ ID NO: 1879608 - RNA, 15 nt, Human
caggugcaaccaggg

SEQ ID NO: 1879609 - RNA, 18 nt, Human
caggugcaaccagggagc

SEQ ID NO: 1879610 - RNA, 24 nt, Human
caggugcaaccagggagcugcagg

SEQ ID NO: 1879611 - RNA, 17 nt, Human
caggugcacaagcucca

SEQ ID NO: 1879612 - RNA, 18 nt, Human
caggugcacaagcuccaa

SEQ ID NO: 1879613 - RNA, 19 nt, Human
caggugcacaagcuccaag

SEQ ID NO: 1879614 - RNA, 20 nt, Human
caggugcacaagcuccaagc

SEQ ID NO: 1879615 - RNA, 21 nt, Human
caggugauccacccaccucag

SEQ ID NO: 1879616 - RNA, 15 nt, Human
cagucacauuccaag

SEQ ID NO: 1879617 - RNA, 15 nt, Human
cagucaauauuuuua

SEQ ID NO: 1879618 - RNA, 14 nt, Human
cagucaauuaacaa

SEQ ID NO: 1879619 - RNA, 15 nt, Human
cagucaauuaacaau

SEQ ID NO: 1879620 - RNA, 12 nt, Human
cagucacagcca

SEQ ID NO: 1879621 - RNA, 13 nt, Human
cagucacagccac

SEQ ID NO: 1879622 - RNA, 14 nt, Human
cagucacagccacc

SEQ ID NO: 1879623 - RNA, 16 nt, Human
cagucacagccacccc

SEQ ID NO: 1879624 - RNA, 17 nt, Human
cagucacugaauuccau

SEQ ID NO: 1879625 - RNA, 17 nt, Human
cagucuggaaugcagug

SEQ ID NO: 1879626 - RNA, 15 nt, Human
cagucuggaaugcag

SEQ ID NO: 1879627 - RNA, 13 nt, Human
cagugcaugcugu

SEQ ID NO: 1879628 - RNA, 14 nt, Human
cagugcaugcuguc

SEQ ID NO: 1879629 - RNA, 23 nt, Human
cagugggagcugccuguucagcu

SEQ ID NO: 1879630 - RNA, 20 nt, Human
cagugggagcugccuguuca

SEQ ID NO: 1879631 - RNA, 17 nt, Human
cagugcccacaggauca

SEQ ID NO: 1879632 - RNA, 15 nt, Human
cagugcccacaggau

SEQ ID NO: 1879633 - RNA, 13 nt, Human
cagugcccacagg

SEQ ID NO: 1879634 - RNA, 16 nt, Human
cagugcaugcuguccc

SEQ ID NO: 1879635 - RNA, 17 nt, Human
cagugcaugcugucccu

SEQ ID NO: 1879636 - RNA, 21 nt, Human
caguggugcgaucuggguuca

SEQ ID NO: 1879637 - RNA, 18 nt, Human
caguggugguuuucuguu

SEQ ID NO: 1879638 - RNA, 20 nt, Human
caguggugcgaucuggguuc

SEQ ID NO: 1879639 - RNA, 14 nt, Human
caguggggaaugaa

SEQ ID NO: 1879640 - RNA, 21 nt, Human
cagugggccuggccagcaggu

SEQ ID NO: 1879641 - RNA, 15 nt, Human
cagugggccuggcca

SEQ ID NO: 1879642 - RNA, 14 nt, Human
cagugggccuggcc

SEQ ID NO: 1879643 - RNA, 11 nt, Human
cagccaggaca

SEQ ID NO: 1879644 - RNA, 16 nt, Human
cagccaggacaccggg

SEQ ID NO: 1879645 - RNA, 12 nt, Human
cagccaggacac

SEQ ID NO: 1879646 - RNA, 20 nt, Human
cagccaggacaccgggcagg

SEQ ID NO: 1879647 - RNA, 14 nt, Human
cagccagccgugag

SEQ ID NO: 1879648 - RNA, 20 nt, Human
cagcaucauggagguuugaa

SEQ ID NO: 1879649 - RNA, 23 nt, Human
cagccagggccugcgagggcagc

SEQ ID NO: 1879650 - RNA, 16 nt, Human
cagccagggccugcga

SEQ ID NO: 1879651 - RNA, 21 nt, Human
cagccagggccugcgagggca

SEQ ID NO: 1879652 - RNA, 22 nt, Human
cagccagggccugcgagggcag

SEQ ID NO: 1879653 - RNA, 13 nt, Human
cagcauaauacuu

SEQ ID NO: 1879654 - RNA, 20 nt, Human
cagcaguuuucaagucaaau

SEQ ID NO: 1879655 - RNA, 17 nt, Human
cagcauagaaguaacuu

SEQ ID NO: 1879656 - RNA, 17 nt, Human
cagauugcaacaggcug

SEQ ID NO: 1879657 - RNA, 20 nt, Human
cagauucuuuccugaggcug

SEQ ID NO: 1879658 - RNA, 22 nt, Human
cagauucuuuccugaggcuggg

SEQ ID NO: 1879659 - RNA, 20 nt, Human
cagcacgauuucuguuuaga

SEQ ID NO: 1879660 - RNA, 19 nt, Human
cagcacgauuucuguuuag

SEQ ID NO: 1879661 - RNA, 18 nt, Human
cagcacgauuucuguuua

SEQ ID NO: 1879662 - RNA, 16 nt, Human
cagcacgauuucuguu

SEQ ID NO: 1879663 - RNA, 15 nt, Human
cagaucauccagaag

SEQ ID NO: 1879664 - RNA, 23 nt, Human
cagaucauuaucagccugugcca

SEQ ID NO: 1879665 - RNA, 16 nt, Human
cagaucaguguaccau

SEQ ID NO: 1879666 - RNA, 22 nt, Human
cagaggggguggccucccaacu

SEQ ID NO: 1879667 - RNA, 23 nt, Human
cagaggggguggccucccaacuc

SEQ ID NO: 1879668 - RNA, 21 nt, Human
cagaguaauccaagcaaaugu

SEQ ID NO: 1879669 - RNA, 16 nt, Human
cagagguugcagugag

SEQ ID NO: 1879670 - RNA, 17 nt, Human
cagagguugcagugagc

SEQ ID NO: 1879671 - RNA, 15 nt, Human
cagauucuuuccuga

SEQ ID NO: 1879672 - RNA, 17 nt, Human
cagauucuuuccugagg

SEQ ID NO: 1879673 - RNA, 18 nt, Human
cagauucuuuccugaggc

SEQ ID NO: 1879674 - RNA, 19 nt, Human
cagauucuuuccugaggcu

SEQ ID NO: 1879675 - RNA, 20 nt, Human
cagcugugcucuggacaggc

SEQ ID NO: 1879676 - RNA, 19 nt, Human
cagcugugcucuggacagg

SEQ ID NO: 1879677 - RNA, 24 nt, Human
cagcugugcucuggacaggcaugu

SEQ ID NO: 1879678 - RNA, 21 nt, Human
cagcuguuuaugcauagauaa

SEQ ID NO: 1879679 - RNA, 19 nt, Human
cagcugagggugagugggu

SEQ ID NO: 1879680 - RNA, 23 nt, Human
cagcugagugaaaaaucugugga

SEQ ID NO: 1879681 - RNA, 12 nt, Human
cagcugaguugu

SEQ ID NO: 1879682 - RNA, 18 nt, Human
cagcugagugaaaaaucu

SEQ ID NO: 1879683 - RNA, 13 nt, Human
cagcugaugacuc

SEQ ID NO: 1879684 - RNA, 15 nt, Human
cagcugaugacucaa

SEQ ID NO: 1879685 - RNA, 16 nt, Human
cagcugaugacucaag

SEQ ID NO: 1879686 - RNA, 21 nt, Human
cagcugaugacucaagauucc

SEQ ID NO: 1879687 - RNA, 22 nt, Human
cagcugaugacucaagauuccc

SEQ ID NO: 1879688 - RNA, 23 nt, Human
cagcugaugacucaagauuccca

SEQ ID NO: 1879689 - RNA, 14 nt, Human
cagcugaugaguua

SEQ ID NO: 1879690 - RNA, 20 nt, Human
cagcugaugaguuacagccu

SEQ ID NO: 1879691 - RNA, 12 nt, Human
cagcugccuggg

SEQ ID NO: 1879692 - RNA, 13 nt, Human
cagcugccuggga

SEQ ID NO: 1879693 - RNA, 14 nt, Human
cagcugccugggau

SEQ ID NO: 1879694 - RNA, 21 nt, Human
cagcuccggccuguccuccaa

SEQ ID NO: 1879695 - RNA, 16 nt, Human
cagcuccggccugucc

SEQ ID NO: 1879696 - RNA, 16 nt, Human
caggaaaagcugcuga

SEQ ID NO: 1879697 - RNA, 15 nt, Human
caggaaaagcugcug

SEQ ID NO: 1879698 - RNA, 18 nt, Human
caggaaaagcugcugaca

SEQ ID NO: 1879699 - RNA, 21 nt, Human
cagcggggacagcuccuucug

SEQ ID NO: 1879700 - RNA, 12 nt, Human
cagcgccuuucc

SEQ ID NO: 1879701 - RNA, 13 nt, Human
cagcgccuuuccc

SEQ ID NO: 1879702 - RNA, 19 nt, Human
cagcggggacagcuccuuc

SEQ ID NO: 1879703 - RNA, 18 nt, Human
cagcggggacagcuccuu

SEQ ID NO: 1879704 - RNA, 12 nt, Human
cagccugcucca

SEQ ID NO: 1879705 - RNA, 15 nt, Human
cagccugcuccagcu

SEQ ID NO: 1879706 - RNA, 18 nt, Human
cagcgccaggcugaccac

SEQ ID NO: 1879707 - RNA, 19 nt, Human
cagcgccaggcugaccaca

SEQ ID NO: 1879708 - RNA, 20 nt, Human
cagcgccaggcugaccacag

SEQ ID NO: 1879709 - RNA, 21 nt, Human
cagcgccaggcugaccacagc

SEQ ID NO: 1879710 - RNA, 22 nt, Human
cagcgccaggcugaccacagca

SEQ ID NO: 1879711 - RNA, 19 nt, Human
cagccugcuaauuccccag

SEQ ID NO: 1879712 - RNA, 17 nt, Human
cagccucugaaaaccaa

SEQ ID NO: 1879713 - RNA, 19 nt, Human
cagccgagauagccaaggc

SEQ ID NO: 1879714 - RNA, 20 nt, Human
cagccgagauagccaaggcc

SEQ ID NO: 1879715 - RNA, 23 nt, Human
cauucuaggccuccuggcccagg

SEQ ID NO: 1879716 - RNA, 22 nt, Human
cauucuacuugcucuggaccug

SEQ ID NO: 1879717 - RNA, 23 nt, Human
cauucuacuugcucuggaccugc

SEQ ID NO: 1879718 - RNA, 13 nt, Human
cauucuccaccug

SEQ ID NO: 1879719 - RNA, 14 nt, Human
cauucuccaccugc

SEQ ID NO: 1879720 - RNA, 16 nt, Human
cauucuccaccugcca

SEQ ID NO: 1879721 - RNA, 18 nt, Human
cauucuccacagcaaccc

SEQ ID NO: 1879722 - RNA, 15 nt, Human
cauucuccacagcaa

SEQ ID NO: 1879723 - RNA, 17 nt, Human
cauucuccacagcaacc

SEQ ID NO: 1879724 - RNA, 13 nt, Human
cauucuaaugaug

SEQ ID NO: 1879725 - RNA, 22 nt, Human
cauucuaaugauggcccauucu

SEQ ID NO: 1879726 - RNA, 14 nt, Human
cauucguucugugg

SEQ ID NO: 1879727 - RNA, 16 nt, Human
cauucgguguggugca

SEQ ID NO: 1879728 - RNA, 15 nt, Human
cauucuacugaaaag

SEQ ID NO: 1879729 - RNA, 11 nt, Human
cauucuacuug

SEQ ID NO: 1879730 - RNA, 12 nt, Human
cauucuacuugc

SEQ ID NO: 1879731 - RNA, 19 nt, Human
cauucuaaugauggcccau

SEQ ID NO: 1879732 - RNA, 13 nt, Human
cauucuacuugcu

SEQ ID NO: 1879733 - RNA, 14 nt, Human
cauucuacuugcuc

SEQ ID NO: 1879734 - RNA, 15 nt, Human
cauucuacuugcucu

SEQ ID NO: 1879735 - RNA, 16 nt, Human
cauucuacuugcucug

SEQ ID NO: 1879736 - RNA, 17 nt, Human
cauucuacuugcucugg

SEQ ID NO: 1879737 - RNA, 18 nt, Human
cauucuacuugcucugga

SEQ ID NO: 1879738 - RNA, 20 nt, Human
cauucuacuugcucuggacc

SEQ ID NO: 1879739 - RNA, 21 nt, Human
cauucuacuugcucuggaccu

SEQ ID NO: 1879740 - RNA, 13 nt, Human
cauguugugccuc

SEQ ID NO: 1879741 - RNA, 18 nt, Human
cauguugugccucccugg

SEQ ID NO: 1879742 - RNA, 19 nt, Human
cauguugugccucccuggu

SEQ ID NO: 1879743 - RNA, 21 nt, Human
cauguugugccucccugguga

SEQ ID NO: 1879744 - RNA, 20 nt, Human
cauguugugccucccuggug

SEQ ID NO: 1879745 - RNA, 15 nt, Human
cauguuggccaggcu

SEQ ID NO: 1879746 - RNA, 14 nt, Human
cauguuggccaggc

SEQ ID NO: 1879747 - RNA, 16 nt, Human
cauguuggccaggcug

SEQ ID NO: 1879748 - RNA, 13 nt, Human
cauguagcccccu

SEQ ID NO: 1879749 - RNA, 17 nt, Human
cauguagcccccuggcc

SEQ ID NO: 1879750 - RNA, 18 nt, Human
cauguagcccccuggccu

SEQ ID NO: 1879751 - RNA, 20 nt, Human
cauguagcccccuggccucu

SEQ ID NO: 1879752 - RNA, 21 nt, Human
cauguagcccccuggccucug

SEQ ID NO: 1879753 - RNA, 22 nt, Human
cauguagcccccuggccucugu

SEQ ID NO: 1879754 - RNA, 14 nt, Human
cauguagaaaacaa

SEQ ID NO: 1879755 - RNA, 22 nt, Human
cauggcuauaaacaauuacaug

SEQ ID NO: 1879756 - RNA, 17 nt, Human
cauggcugccaauggga

SEQ ID NO: 1879757 - RNA, 17 nt, Human
cauggcucccccuccac

SEQ ID NO: 1879758 - RNA, 14 nt, Human
caugggaaugaaug

SEQ ID NO: 1879759 - RNA, 15 nt, Human
caugggaaugaaugu

SEQ ID NO: 1879760 - RNA, 16 nt, Human
caugggaaugaauguc

SEQ ID NO: 1879761 - RNA, 17 nt, Human
caugggaaugaauguca

SEQ ID NO: 1879762 - RNA, 13 nt, Human
caugauguuuucc

SEQ ID NO: 1879763 - RNA, 20 nt, Human
caugauuuacagagaaguga

SEQ ID NO: 1879764 - RNA, 12 nt, Human
caugauuuccuu

SEQ ID NO: 1879765 - RNA, 14 nt, Human
caugauuuccuuga

SEQ ID NO: 1879766 - RNA, 16 nt, Human
caugauuuccuugaau

SEQ ID NO: 1879767 - RNA, 17 nt, Human
caugauuuccuugaaug

SEQ ID NO: 1879768 - RNA, 23 nt, Human
caugcuacacacugcauguuugu

SEQ ID NO: 1879769 - RNA, 20 nt, Human
caugcuacacacugcauguu

SEQ ID NO: 1879770 - RNA, 14 nt, Human
caugcuacacacug

SEQ ID NO: 1879771 - RNA, 18 nt, Human
caugauuuccuugaaugu

SEQ ID NO: 1879772 - RNA, 20 nt, Human
caugauggcaacagaucugg

SEQ ID NO: 1879773 - RNA, 20 nt, Human
cauauggacucugcacauga

SEQ ID NO: 1879774 - RNA, 17 nt, Human
cauauggacucugcaca

SEQ ID NO: 1879775 - RNA, 15 nt, Human
cauauggacucugca

SEQ ID NO: 1879776 - RNA, 18 nt, Human
cauauggacucugcacau

SEQ ID NO: 1879777 - RNA, 22 nt, Human
caguggugguuuucuguucuuu

SEQ ID NO: 1879778 - RNA, 21 nt, Human
caguggugguuuucuguucuu

SEQ ID NO: 1879779 - RNA, 20 nt, Human
caguggugguuuucuguucu

SEQ ID NO: 1879780 - RNA, 19 nt, Human
caguggugguuuucuguuc

SEQ ID NO: 1879781 - RNA, 18 nt, Human
cauauucuguuggccagu

SEQ ID NO: 1879782 - RNA, 17 nt, Human
cauauucuguuggccag

SEQ ID NO: 1879783 - RNA, 16 nt, Human
cauauuaccacagaca

SEQ ID NO: 1879784 - RNA, 14 nt, Human
cauauuaauacaau

SEQ ID NO: 1879785 - RNA, 23 nt, Human
cauauuaauacaaugaugcuauu

SEQ ID NO: 1879786 - RNA, 15 nt, Human
cauccuggcacccgg

SEQ ID NO: 1879787 - RNA, 12 nt, Human
caucacuucccu

SEQ ID NO: 1879788 - RNA, 14 nt, Human
caucacuucccuac

SEQ ID NO: 1879789 - RNA, 15 nt, Human
cauccccugugggaa

SEQ ID NO: 1879790 - RNA, 21 nt, Human
cauccccuguagagugggagc

SEQ ID NO: 1879791 - RNA, 22 nt, Human
cauccuggcacccggccccugc

SEQ ID NO: 1879792 - RNA, 12 nt, Human
cauccuggaaua

SEQ ID NO: 1879793 - RNA, 13 nt, Human
caucgcacugugg

SEQ ID NO: 1879794 - RNA, 14 nt, Human
caucgcacugugga

SEQ ID NO: 1879795 - RNA, 13 nt, Human
caucgccagacaa

SEQ ID NO: 1879796 - RNA, 16 nt, Human
caucgccagcugauga

SEQ ID NO: 1879797 - RNA, 20 nt, Human
caucgccagcugaugacuca

SEQ ID NO: 1879798 - RNA, 21 nt, Human
caucgccagcugaugacucaa

SEQ ID NO: 1879799 - RNA, 20 nt, Human
caucugcucuccuuccugga

SEQ ID NO: 1879800 - RNA, 18 nt, Human
caucugcucuccuuccug

SEQ ID NO: 1879801 - RNA, 16 nt, Human
caucugcucuccuucc

SEQ ID NO: 1879802 - RNA, 16 nt, Human
caucuggaaucuggag

SEQ ID NO: 1879803 - RNA, 21 nt, Human
caucuggaaucuggagaccag

SEQ ID NO: 1879804 - RNA, 17 nt, Human
caucugugcacugccca

SEQ ID NO: 1879805 - RNA, 18 nt, Human
caucugugcacugcccau

SEQ ID NO: 1879806 - RNA, 21 nt, Human
caucugugcacugcccaugga

SEQ ID NO: 1879807 - RNA, 14 nt, Human
ccaaucauuuuaau

SEQ ID NO: 1879808 - RNA, 12 nt, Human
ccaaucauuuua

SEQ ID NO: 1879809 - RNA, 22 nt, Human
ccaauauuuucuuuaaugcuuu

SEQ ID NO: 1879810 - RNA, 17 nt, Human
ccaauauuuaccagacc

SEQ ID NO: 1879811 - RNA, 20 nt, Human
ccaauauuuucuuuaaugcu

SEQ ID NO: 1879812 - RNA, 22 nt, Human
ccaaucauuuuaauuauuauuc

SEQ ID NO: 1879813 - RNA, 15 nt, Human
ccaaucauauuaaua

SEQ ID NO: 1879814 - RNA, 15 nt, Human
ccaaugauggucacc

SEQ ID NO: 1879815 - RNA, 14 nt, Human
ccaaugcacuuugu

SEQ ID NO: 1879816 - RNA, 13 nt, Human
ccaagcucugcuc

SEQ ID NO: 1879817 - RNA, 17 nt, Human
ccaagcucugcuccucu

SEQ ID NO: 1879818 - RNA, 12 nt, Human
ccaagcucugcu

SEQ ID NO: 1879819 - RNA, 18 nt, Human
ccaagcucugcuccucuc

SEQ ID NO: 1879820 - RNA, 23 nt, Human
ccaagcugccuccccucuccuuc

SEQ ID NO: 1879821 - RNA, 16 nt, Human
ccaacucaccccagcc

SEQ ID NO: 1879822 - RNA, 17 nt, Human
ccaacucaccccagccc

SEQ ID NO: 1879823 - RNA, 18 nt, Human
ccaacucaccccagcccc

SEQ ID NO: 1879824 - RNA, 18 nt, Human
ccaaauguucaucaauga

SEQ ID NO: 1879825 - RNA, 21 nt, Human
ccaacucuagcuggggguggg

SEQ ID NO: 1879826 - RNA, 14 nt, Human
ccaacucuagcugg

SEQ ID NO: 1879827 - RNA, 23 nt, Human
ccaaauggaaaugggcagagcag

SEQ ID NO: 1879828 - RNA, 14 nt, Human
ccaacucaccccag

SEQ ID NO: 1879829 - RNA, 17 nt, Human
ccaaauguucaucaaug

SEQ ID NO: 1879830 - RNA, 17 nt, Human
ccaaugggagcucaugg

SEQ ID NO: 1879831 - RNA, 15 nt, Human
ccaauguaggagcug

SEQ ID NO: 1879832 - RNA, 19 nt, Human
ccaaugugaacagcggcug

SEQ ID NO: 1879833 - RNA, 17 nt, Human
ccaauguaggagcugcc

SEQ ID NO: 1879834 - RNA, 20 nt, Human
ccaauguaggagcugccuug

SEQ ID NO: 1879835 - RNA, 22 nt, Human
cauuuuuuuuaagaaaaaggau

SEQ ID NO: 1879836 - RNA, 20 nt, Human
ccaaaacucuccucugcugc

SEQ ID NO: 1879837 - RNA, 21 nt, Human
ccaaaacucuccucugcugcu

SEQ ID NO: 1879838 - RNA, 22 nt, Human
ccaaaagaagcccccagcuaag

SEQ ID NO: 1879839 - RNA, 16 nt, Human
cauuuguguugaagag

SEQ ID NO: 1879840 - RNA, 12 nt, Human
cauuuguauauu

SEQ ID NO: 1879841 - RNA, 20 nt, Human
cauuuguguugaagagguuu

SEQ ID NO: 1879842 - RNA, 17 nt, Human
cauuuuuuuccaggcug

SEQ ID NO: 1879843 - RNA, 15 nt, Human
cauuuuuuuccaggc

SEQ ID NO: 1879844 - RNA, 18 nt, Human
cauuuuuuuccaggcugg

SEQ ID NO: 1879845 - RNA, 21 nt, Human
ccaccuuugaagaaguaagga

SEQ ID NO: 1879846 - RNA, 17 nt, Human
ccaccgccuccuacagc

SEQ ID NO: 1879847 - RNA, 13 nt, Human
ccaccgcccagag

SEQ ID NO: 1879848 - RNA, 17 nt, Human
ccaccgcccagagaccc

SEQ ID NO: 1879849 - RNA, 13 nt, Human
ccaccgccuccua

SEQ ID NO: 1879850 - RNA, 13 nt, Human
ccaccgcagacag

SEQ ID NO: 1879851 - RNA, 18 nt, Human
ccaccgaagccgccugug

SEQ ID NO: 1879852 - RNA, 22 nt, Human
ccaccgcagacaggaccaggga

SEQ ID NO: 1879853 - RNA, 16 nt, Human
ccacgcccccacuggu

SEQ ID NO: 1879854 - RNA, 17 nt, Human
ccacgcccccacuggug

SEQ ID NO: 1879855 - RNA, 18 nt, Human
ccacgcccccacugguga

SEQ ID NO: 1879856 - RNA, 19 nt, Human
ccacgcccccacuggugac

SEQ ID NO: 1879857 - RNA, 23 nt, Human
ccacagcgcuggccgggaccccg

SEQ ID NO: 1879858 - RNA, 14 nt, Human
ccacagcacagcca

SEQ ID NO: 1879859 - RNA, 19 nt, Human
ccacagcaaccccaggcug

SEQ ID NO: 1879860 - RNA, 20 nt, Human
ccacagcaaccccaggcuga

SEQ ID NO: 1879861 - RNA, 15 nt, Human
ccaccaucaagccac

SEQ ID NO: 1879862 - RNA, 17 nt, Human
ccaccacacccagccca

SEQ ID NO: 1879863 - RNA, 21 nt, Human
ccaccacacugauccagcccu

SEQ ID NO: 1879864 - RNA, 13 nt, Human
ccaccaucaagcc

SEQ ID NO: 1879865 - RNA, 14 nt, Human
ccaccaucaagcca

SEQ ID NO: 1879866 - RNA, 17 nt, Human
ccacucccugcaaccug

SEQ ID NO: 1879867 - RNA, 14 nt, Human
ccacuccuccuagc

SEQ ID NO: 1879868 - RNA, 22 nt, Human
ccugccucccgcccccuuggcu

SEQ ID NO: 1879869 - RNA, 19 nt, Human
ccugccucgaacuggcugc

SEQ ID NO: 1879870 - RNA, 23 nt, Human
ccugccuccagggcuggacugag

SEQ ID NO: 1879871 - RNA, 14 nt, Human
ccugccuccauccu

SEQ ID NO: 1879872 - RNA, 17 nt, Human
ccugccuccauccuagu

SEQ ID NO: 1879873 - RNA, 21 nt, Human
ccugccuccagggcuggacug

SEQ ID NO: 1879874 - RNA, 20 nt, Human
ccugccuccagggcuggacu

SEQ ID NO: 1879875 - RNA, 17 nt, Human
ccugccuccagggcugg

SEQ ID NO: 1879876 - RNA, 16 nt, Human
ccugccuccagggcug

SEQ ID NO: 1879877 - RNA, 15 nt, Human
ccugccuccagggcu

SEQ ID NO: 1879878 - RNA, 15 nt, Human
ccugccuccaggaac

SEQ ID NO: 1879879 - RNA, 20 nt, Human
ccugccuccaggaaccacac

SEQ ID NO: 1879880 - RNA, 23 nt, Human
ccugccucgaacuggcugcaaag

SEQ ID NO: 1879881 - RNA, 21 nt, Human
ccugccucgaacuggcugcaa

SEQ ID NO: 1879882 - RNA, 17 nt, Human
ccugcugcaguugccag

SEQ ID NO: 1879883 - RNA, 19 nt, Human
ccugcugcaguugccaguc

SEQ ID NO: 1879884 - RNA, 21 nt, Human
ccugcugcaguugccagucac

SEQ ID NO: 1879885 - RNA, 20 nt, Human
ccugcugcaguugccaguca

SEQ ID NO: 1879886 - RNA, 12 nt, Human
ccugccuccagg

SEQ ID NO: 1879887 - RNA, 14 nt, Human
ccugccuccaggaa

SEQ ID NO: 1879888 - RNA, 13 nt, Human
ccugcccaggccc

SEQ ID NO: 1879889 - RNA, 24 nt, Human
ccugccccaacucuccccugaccu

SEQ ID NO: 1879890 - RNA, 20 nt, Human
ccugccccaaucccuuuauu

SEQ ID NO: 1879891 - RNA, 12 nt, Human
ccugcccaccug

SEQ ID NO: 1879892 - RNA, 13 nt, Human
ccugcccaccugg

SEQ ID NO: 1879893 - RNA, 14 nt, Human
ccugcccaccuggc

SEQ ID NO: 1879894 - RNA, 20 nt, Human
ccugcccaccuggccucugc

SEQ ID NO: 1879895 - RNA, 19 nt, Human
ccugcacuugcagacucua

SEQ ID NO: 1879896 - RNA, 18 nt, Human
ccugcacuugcagacucu

SEQ ID NO: 1879897 - RNA, 17 nt, Human
ccugcacuugcagacuc

SEQ ID NO: 1879898 - RNA, 16 nt, Human
ccugcacuugcagacu

SEQ ID NO: 1879899 - RNA, 16 nt, Human
ccucuuucccucccuu

SEQ ID NO: 1879900 - RNA, 13 nt, Human
ccucuuucccucc

SEQ ID NO: 1879901 - RNA, 20 nt, Human
ccugaccacgcuuucuagcu

SEQ ID NO: 1879902 - RNA, 11 nt, Human
ccucuuucccu

SEQ ID NO: 1879903 - RNA, 20 nt, Human
ccuguaaucauauaauaaau

SEQ ID NO: 1879904 - RNA, 15 nt, Human
ccuguaaucacagcu

SEQ ID NO: 1879905 - RNA, 18 nt, Human
ccuguaaucccagcacuu

SEQ ID NO: 1879906 - RNA, 15 nt, Human
ccugguuuagccugg

SEQ ID NO: 1879907 - RNA, 16 nt, Human
ccugguucucaucuuu

SEQ ID NO: 1879908 - RNA, 15 nt, Human
ccugguucucaucuu

SEQ ID NO: 1879909 - RNA, 14 nt, Human
ccugguucucaucu

SEQ ID NO: 1879910 - RNA, 23 nt, Human
ccuggugggccaacaaagaacac

SEQ ID NO: 1879911 - RNA, 16 nt, Human
ccugggggcucucaug

SEQ ID NO: 1879912 - RNA, 14 nt, Human
ccuggugggccaac

SEQ ID NO: 1879913 - RNA, 21 nt, Human
ccugguggcagugggagcugc

SEQ ID NO: 1879914 - RNA, 18 nt, Human
ccugggggcugggcagag

SEQ ID NO: 1879915 - RNA, 12 nt, Human
ccugggggcucu

SEQ ID NO: 1879916 - RNA, 13 nt, Human
ccugggggcucuc

SEQ ID NO: 1879917 - RNA, 14 nt, Human
ccugggggcucuca

SEQ ID NO: 1879918 - RNA, 12 nt, Human
ccugggccugca

SEQ ID NO: 1879919 - RNA, 15 nt, Human
ccugucuaaugaaac

SEQ ID NO: 1879920 - RNA, 22 nt, Human
ccugucuaaugaaaccuguguc

SEQ ID NO: 1879921 - RNA, 14 nt, Human
ccugucuagagagg

SEQ ID NO: 1879922 - RNA, 16 nt, Human
ccugucuagagaggga

SEQ ID NO: 1879923 - RNA, 17 nt, Human
ccugucuagagagggag

SEQ ID NO: 1879924 - RNA, 15 nt, Human
ccugucugccagggc

SEQ ID NO: 1879925 - RNA, 14 nt, Human
ccuggccucugugc

SEQ ID NO: 1879926 - RNA, 22 nt, Human
ccuggccucugcacuccccugc

SEQ ID NO: 1879927 - RNA, 13 nt, Human
ccuggccucugug

SEQ ID NO: 1879928 - RNA, 22 nt, Human
ccuggccuagcauacguacaca

SEQ ID NO: 1879929 - RNA, 20 nt, Human
ccuggccucugcacuccccu

SEQ ID NO: 1879930 - RNA, 21 nt, Human
ccuggccucugcacuccccug

SEQ ID NO: 1879931 - RNA, 17 nt, Human
ccucccaccucagccuc

SEQ ID NO: 1879932 - RNA, 15 nt, Human
ccucccaccucagcc

SEQ ID NO: 1879933 - RNA, 19 nt, Human
ccuccaaccuggggggcag

SEQ ID NO: 1879934 - RNA, 19 nt, Human
ccuccaacaccaagcacag

SEQ ID NO: 1879935 - RNA, 16 nt, Human
ccucccaucucacaca

SEQ ID NO: 1879936 - RNA, 13 nt, Human
ccucccaucucac

SEQ ID NO: 1879937 - RNA, 20 nt, Human
ccucagccuggccagacaca

SEQ ID NO: 1879938 - RNA, 21 nt, Human
ccucagccuggccagacacag

SEQ ID NO: 1879939 - RNA, 22 nt, Human
ccucagccuggccagacacagg

SEQ ID NO: 1879940 - RNA, 17 nt, Human
ccucagccuugccagag

SEQ ID NO: 1879941 - RNA, 18 nt, Human
ccucagccuugccagaga

SEQ ID NO: 1879942 - RNA, 19 nt, Human
ccucagccuugccagagau

SEQ ID NO: 1879943 - RNA, 20 nt, Human
ccucagccuugccagagauc

SEQ ID NO: 1879944 - RNA, 21 nt, Human
ccucagccuugccagagaucc

SEQ ID NO: 1879945 - RNA, 14 nt, Human
ccggccccugcugg

SEQ ID NO: 1879946 - RNA, 15 nt, Human
cccuucgcuccugug

SEQ ID NO: 1879947 - RNA, 14 nt, Human
cccuucgcuccugu

SEQ ID NO: 1879948 - RNA, 21 nt, Human
cccuucucuccagccccugga

SEQ ID NO: 1879949 - RNA, 22 nt, Human
cccuucucuccagccccuggau

SEQ ID NO: 1879950 - RNA, 23 nt, Human
ccgcaggauuugggcucuuggaa

SEQ ID NO: 1879951 - RNA, 15 nt, Human
ccgcagugugcacua

SEQ ID NO: 1879952 - RNA, 23 nt, Human
ccgcagugugcacuaaggggccc

SEQ ID NO: 1879953 - RNA, 22 nt, Human
ccgcagugugcacuaaggggcc

SEQ ID NO: 1879954 - RNA, 13 nt, Human
ccgcauccccugc

SEQ ID NO: 1879955 - RNA, 14 nt, Human
ccgcauccccugcc

SEQ ID NO: 1879956 - RNA, 15 nt, Human
ccgcauccccugccu

SEQ ID NO: 1879957 - RNA, 16 nt, Human
ccgcauccccugccuc

SEQ ID NO: 1879958 - RNA, 17 nt, Human
ccgcauccccugccucc

SEQ ID NO: 1879959 - RNA, 18 nt, Human
ccgcauccccugccucca

SEQ ID NO: 1879960 - RNA, 22 nt, Human
ccgcauccccugccuccauccu

SEQ ID NO: 1879961 - RNA, 13 nt, Human
ccggccccugcug

SEQ ID NO: 1879962 - RNA, 13 nt, Human
cccuucgcuccug

SEQ ID NO: 1879963 - RNA, 20 nt, Human
cccugugauggggcccugcc

SEQ ID NO: 1879964 - RNA, 18 nt, Human
cccugugauggggcccug

SEQ ID NO: 1879965 - RNA, 19 nt, Human
cccugugauggggcccugc

SEQ ID NO: 1879966 - RNA, 17 nt, Human
cccugugauggggcccu

SEQ ID NO: 1879967 - RNA, 16 nt, Human
cccugucuagagaggg

SEQ ID NO: 1879968 - RNA, 17 nt, Human
cccugucuagagaggga

SEQ ID NO: 1879969 - RNA, 20 nt, Human
cccugucuagagagggaggc

SEQ ID NO: 1879970 - RNA, 16 nt, Human
cccugucugccagggc

SEQ ID NO: 1879971 - RNA, 16 nt, Human
cccugucuaaugaaac

SEQ ID NO: 1879972 - RNA, 12 nt, Human
cccugucuagag

SEQ ID NO: 1879973 - RNA, 20 nt, Human
cccugucucaaaaaaagaaa

SEQ ID NO: 1879974 - RNA, 23 nt, Human
cccugucucaaaaaaagaaaaag

SEQ ID NO: 1879975 - RNA, 23 nt, Human
ccagcguggcgcaguggcccuga

SEQ ID NO: 1879976 - RNA, 13 nt, Human
ccagcuaagaacc

SEQ ID NO: 1879977 - RNA, 14 nt, Human
ccagcuaagaaccu

SEQ ID NO: 1879978 - RNA, 15 nt, Human
ccagcuaagaaccug

SEQ ID NO: 1879979 - RNA, 17 nt, Human
ccagcuaagaaccugga

SEQ ID NO: 1879980 - RNA, 18 nt, Human
ccagcuaagaaccuggaa

SEQ ID NO: 1879981 - RNA, 19 nt, Human
ccagcuaagaaccuggaac

SEQ ID NO: 1879982 - RNA, 17 nt, Human
ccagcuacaccuuucuc

SEQ ID NO: 1879983 - RNA, 13 nt, Human
ccagcucaggaca

SEQ ID NO: 1879984 - RNA, 19 nt, Human
ccagcucaggacagaugcc

SEQ ID NO: 1879985 - RNA, 23 nt, Human
ccagcucaggacagaugccacac

SEQ ID NO: 1879986 - RNA, 20 nt, Human
ccagcucaggacagaugcca

SEQ ID NO: 1879987 - RNA, 19 nt, Human
ccagcagccuggacccugu

SEQ ID NO: 1879988 - RNA, 20 nt, Human
ccagcagccuggacccugug

SEQ ID NO: 1879989 - RNA, 15 nt, Human
ccagcagccuggacc

SEQ ID NO: 1879990 - RNA, 14 nt, Human
ccagcagccuggac

SEQ ID NO: 1879991 - RNA, 10 nt, Human
ccagccccuu

SEQ ID NO: 1879992 - RNA, 21 nt, Human
ccagccccuggccccaggacc

SEQ ID NO: 1879993 - RNA, 23 nt, Human
ccagccccuggccccaggaccug

SEQ ID NO: 1879994 - RNA, 21 nt, Human
ccagccccuggaugcagccuc

SEQ ID NO: 1879995 - RNA, 13 nt, Human
ccagccccuggcc

SEQ ID NO: 1879996 - RNA, 21 nt, Human
ccaggaaaggcuccaggagca

SEQ ID NO: 1879997 - RNA, 22 nt, Human
ccaggaaaggcuccaggagcag

SEQ ID NO: 1879998 - RNA, 23 nt, Human
ccaggaaaggcuccaggagcagc

SEQ ID NO: 1879999 - RNA, 23 nt, Human
ccagcagagcaccuuagacaguc

SEQ ID NO: 1880000 - RNA, 19 nt, Human
ccagcagagcaccuuagac

SEQ ID NO: 1880001 - RNA, 20 nt, Human
ccacucucccccacccccuc

SEQ ID NO: 1880002 - RNA, 21 nt, Human
ccaggaguguggccacguggg

SEQ ID NO: 1880003 - RNA, 18 nt, Human
ccaggauuccucuuuucu

SEQ ID NO: 1880004 - RNA, 15 nt, Human
ccaggauuccucuuu

SEQ ID NO: 1880005 - RNA, 13 nt, Human
ccaggcugggaga

SEQ ID NO: 1880006 - RNA, 14 nt, Human
ccaggcugggagag

SEQ ID NO: 1880007 - RNA, 15 nt, Human
ccaggcugggagagc

SEQ ID NO: 1880008 - RNA, 17 nt, Human
ccaggcugggagagccu

SEQ ID NO: 1880009 - RNA, 18 nt, Human
ccaggcugggagagccuu

SEQ ID NO: 1880010 - RNA, 21 nt, Human
ccaggcugggagagccuucca

SEQ ID NO: 1880011 - RNA, 22 nt, Human
ccaggcugggagagccuuccag

SEQ ID NO: 1880012 - RNA, 21 nt, Human
ccagucacugugagcucccag

SEQ ID NO: 1880013 - RNA, 17 nt, Human
ccaguccccccacccuc

SEQ ID NO: 1880014 - RNA, 15 nt, Human
ccaguccccccaccc

SEQ ID NO: 1880015 - RNA, 12 nt, Human
ccagucaccccg

SEQ ID NO: 1880016 - RNA, 13 nt, Human
ccagucaccccgg

SEQ ID NO: 1880017 - RNA, 20 nt, Human
ccagucaccccggccaccug

SEQ ID NO: 1880018 - RNA, 21 nt, Human
ccagucaccccggccaccugc

SEQ ID NO: 1880019 - RNA, 22 nt, Human
ccagggggccagucccugaggc

SEQ ID NO: 1880020 - RNA, 13 nt, Human
ccauuuccugaga

SEQ ID NO: 1880021 - RNA, 18 nt, Human
ccauuuauacaaauuaga

SEQ ID NO: 1880022 - RNA, 21 nt, Human
ccauugaaggcuuaaacccau

SEQ ID NO: 1880023 - RNA, 17 nt, Human
ccauugaaggcuuaaac

SEQ ID NO: 1880024 - RNA, 12 nt, Human
ccauugaaggcu

SEQ ID NO: 1880025 - RNA, 11 nt, Human
ccauugaaggc

SEQ ID NO: 1880026 - RNA, 17 nt, Human
ccauucuuucugauaac

SEQ ID NO: 1880027 - RNA, 15 nt, Human
ccauucuuuuguaau

SEQ ID NO: 1880028 - RNA, 16 nt, Human
ccauucuuuuguaauu

SEQ ID NO: 1880029 - RNA, 18 nt, Human
ccauucuuuuguaauuua

SEQ ID NO: 1880030 - RNA, 22 nt, Human
ccauucuuuuguaauuuaaaug

SEQ ID NO: 1880031 - RNA, 12 nt, Human
ccauucuuucug

SEQ ID NO: 1880032 - RNA, 13 nt, Human
ccauucuuucuga

SEQ ID NO: 1880033 - RNA, 15 nt, Human
ccaugggccuccugu

SEQ ID NO: 1880034 - RNA, 14 nt, Human
ccaugggccuccug

SEQ ID NO: 1880035 - RNA, 23 nt, Human
ccaucccaaacccuucagugcca

SEQ ID NO: 1880036 - RNA, 12 nt, Human
ccaucccagccc

SEQ ID NO: 1880037 - RNA, 13 nt, Human
ccaugggccuccu

SEQ ID NO: 1880038 - RNA, 16 nt, Human
ccaugaguccccuguu

SEQ ID NO: 1880039 - RNA, 14 nt, Human
ccaugaguccccug

SEQ ID NO: 1880040 - RNA, 15 nt, Human
ccaugaguccccugu

SEQ ID NO: 1880041 - RNA, 19 nt, Human
ccaugagccucagcauccu

SEQ ID NO: 1880042 - RNA, 13 nt, Human
ccaugaguccccu

SEQ ID NO: 1880043 - RNA, 18 nt, Human
ccaugagccucagcaucc

SEQ ID NO: 1880044 - RNA, 14 nt, Human
ccaugagccucagc

SEQ ID NO: 1880045 - RNA, 16 nt, Human
ccauccccuguagagu

SEQ ID NO: 1880046 - RNA, 22 nt, Human
ccauccccuguagagugggagc

SEQ ID NO: 1880047 - RNA, 17 nt, Human
ccauccccgcagugugc

SEQ ID NO: 1880048 - RNA, 14 nt, Human
ccauccccgcagug

SEQ ID NO: 1880049 - RNA, 23 nt, Human
cccagcugugcucuggacaggca

SEQ ID NO: 1880050 - RNA, 21 nt, Human
cccagcugugcucuggacagg

SEQ ID NO: 1880051 - RNA, 11 nt, Human
cccagcuguuu

SEQ ID NO: 1880052 - RNA, 22 nt, Human
cccagcuuaaaggggcuagagu

SEQ ID NO: 1880053 - RNA, 19 nt, Human
cccaggaaaggcuccagga

SEQ ID NO: 1880054 - RNA, 23 nt, Human
cccaggaaaggcuccaggagcag

SEQ ID NO: 1880055 - RNA, 21 nt, Human
cccaggaaaggcuccaggagc

SEQ ID NO: 1880056 - RNA, 22 nt, Human
cccaggaaaggcuccaggagca

SEQ ID NO: 1880057 - RNA, 15 nt, Human
cccaggcuuagucac

SEQ ID NO: 1880058 - RNA, 20 nt, Human
cccaggcuuagucacugaga

SEQ ID NO: 1880059 - RNA, 21 nt, Human
cccaggcuggcgugcaguggu

SEQ ID NO: 1880060 - RNA, 14 nt, Human
cccagcccacuucu

SEQ ID NO: 1880061 - RNA, 17 nt, Human
cccagcccacuucugcc

SEQ ID NO: 1880062 - RNA, 24 nt, Human
cccagcacugaggaagaacggggc

SEQ ID NO: 1880063 - RNA, 15 nt, Human
cccagcacuuuggga

SEQ ID NO: 1880064 - RNA, 15 nt, Human
cccagcacugaggaa

SEQ ID NO: 1880065 - RNA, 15 nt, Human
ccauuucucuccuca

SEQ ID NO: 1880066 - RNA, 12 nt, Human
ccauuucuauuu

SEQ ID NO: 1880067 - RNA, 13 nt, Human
ccauuucuauuua

SEQ ID NO: 1880068 - RNA, 14 nt, Human
ccauuucuauuuau

SEQ ID NO: 1880069 - RNA, 17 nt, Human
ccauuucuauuuauuua

SEQ ID NO: 1880070 - RNA, 11 nt, Human
ccauuucucuc

SEQ ID NO: 1880071 - RNA, 22 nt, Human
cccauucugccugcccaggccc

SEQ ID NO: 1880072 - RNA, 21 nt, Human
cccauucugccugcccaggcc

SEQ ID NO: 1880073 - RNA, 20 nt, Human
cccauucugccugcccaggc

SEQ ID NO: 1880074 - RNA, 19 nt, Human
cccauuucuauuuauuuac

SEQ ID NO: 1880075 - RNA, 20 nt, Human
cccauuucuauuuauuuacu

SEQ ID NO: 1880076 - RNA, 17 nt, Human
ccccauccucuguacag

SEQ ID NO: 1880077 - RNA, 20 nt, Human
ccccagcaagugagagcugg

SEQ ID NO: 1880078 - RNA, 19 nt, Human
ccccagcaagugagagcug

SEQ ID NO: 1880079 - RNA, 22 nt, Human
ccccauccucuguacagagccc

SEQ ID NO: 1880080 - RNA, 19 nt, Human
ccccauccucuguacagag

SEQ ID NO: 1880081 - RNA, 21 nt, Human
ccccauccucuguacagagcc

SEQ ID NO: 1880082 - RNA, 17 nt, Human
ccccagcaagugagagc

SEQ ID NO: 1880083 - RNA, 23 nt, Human
ccccagauugcaacaggcugggc

SEQ ID NO: 1880084 - RNA, 22 nt, Human
ccccagauugcaacaggcuggg

SEQ ID NO: 1880085 - RNA, 21 nt, Human
ccccagauugcaacaggcugg

SEQ ID NO: 1880086 - RNA, 23 nt, Human
cccauucugccugcccaggcccc

SEQ ID NO: 1880087 - RNA, 15 nt, Human
cccauuucuauuuau

SEQ ID NO: 1880088 - RNA, 16 nt, Human
cccauuucuauuuauu

SEQ ID NO: 1880089 - RNA, 17 nt, Human
cccauuucuauuuauuu

SEQ ID NO: 1880090 - RNA, 22 nt, Human
cccagggcuuacggcccuggcc

SEQ ID NO: 1880091 - RNA, 17 nt, Human
ccccuucgcuccugugu

SEQ ID NO: 1880092 - RNA, 15 nt, Human
ccccuucgcuccugu

SEQ ID NO: 1880093 - RNA, 14 nt, Human
ccccuucgcuccug

SEQ ID NO: 1880094 - RNA, 19 nt, Human
ccccuucgcuccugugucu

SEQ ID NO: 1880095 - RNA, 16 nt, Human
ccccuucucucaucuc

SEQ ID NO: 1880096 - RNA, 13 nt, Human
ccccuucucucau

SEQ ID NO: 1880097 - RNA, 20 nt, Human
ccccugaccugugagcccag

SEQ ID NO: 1880098 - RNA, 15 nt, Human
ccccugaccugugag

SEQ ID NO: 1880099 - RNA, 18 nt, Human
ccccugcacuccagccug

SEQ ID NO: 1880100 - RNA, 14 nt, Human
ccccauucugccug

SEQ ID NO: 1880101 - RNA, 13 nt, Human
ccccauucugccu

SEQ ID NO: 1880102 - RNA, 15 nt, Human
ccccauucugccugc

SEQ ID NO: 1880103 - RNA, 13 nt, Human
ccccaugcacugu

SEQ ID NO: 1880104 - RNA, 19 nt, Human
ccccaugcacugugaagga

SEQ ID NO: 1880105 - RNA, 23 nt, Human
ccccaugcacugugaaggacccu

SEQ ID NO: 1880106 - RNA, 12 nt, Human
cccggcugcgga

SEQ ID NO: 1880107 - RNA, 12 nt, Human
cccgggaagggg

SEQ ID NO: 1880108 - RNA, 17 nt, Human
ccccuucugacccaugc

SEQ ID NO: 1880109 - RNA, 14 nt, Human
ccccuucugcucag

SEQ ID NO: 1880110 - RNA, 19 nt, Human
ccccuucugcucagcucug

SEQ ID NO: 1880111 - RNA, 20 nt, Human
ccccuucugcucagcucugg

SEQ ID NO: 1880112 - RNA, 21 nt, Human
ccccuucugcucagcucuggg

SEQ ID NO: 1880113 - RNA, 17 nt, Human
cccucaagaggaaguga

SEQ ID NO: 1880114 - RNA, 15 nt, Human
cccucagagugcaag

SEQ ID NO: 1880115 - RNA, 21 nt, Human
cggcucccggggcagggcagc

SEQ ID NO: 1880116 - RNA, 17 nt, Human
cgggccacagagaaagu

SEQ ID NO: 1880117 - RNA, 11 nt, Human
cgggcucagca

SEQ ID NO: 1880118 - RNA, 15 nt, Human
cgggcgcacugccuc

SEQ ID NO: 1880119 - RNA, 16 nt, Human
cgggcgcacugccucu

SEQ ID NO: 1880120 - RNA, 17 nt, Human
cgggcgcacugccucuc

SEQ ID NO: 1880121 - RNA, 22 nt, Human
cgggcgcacugccucucacagc

SEQ ID NO: 1880122 - RNA, 15 nt, Human
cgggcucagcaaaag

SEQ ID NO: 1880123 - RNA, 18 nt, Human
cgggcgcacugccucuca

SEQ ID NO: 1880124 - RNA, 14 nt, Human
cgggcucugccucc

SEQ ID NO: 1880125 - RNA, 16 nt, Human
cgggcucugccuccca

SEQ ID NO: 1880126 - RNA, 15 nt, Human
cggggacagcuccuu

SEQ ID NO: 1880127 - RNA, 18 nt, Human
cgguguggagaagcggcu

SEQ ID NO: 1880128 - RNA, 20 nt, Human
cgguguggugcagugugaaa

SEQ ID NO: 1880129 - RNA, 17 nt, Human
cgggcucugccucccau

SEQ ID NO: 1880130 - RNA, 14 nt, Human
cggggacagcuccu

SEQ ID NO: 1880131 - RNA, 22 nt, Human
cggcucccggggcagggcagcc

SEQ ID NO: 1880132 - RNA, 14 nt, Human
cgggccacagagaa

SEQ ID NO: 1880133 - RNA, 12 nt, Human
cgggccacagag

SEQ ID NO: 1880134 - RNA, 16 nt, Human
cggcuccaggcuccuu

SEQ ID NO: 1880135 - RNA, 15 nt, Human
cggcuccaggcuccu

SEQ ID NO: 1880136 - RNA, 14 nt, Human
cggcuccaggcucc

SEQ ID NO: 1880137 - RNA, 13 nt, Human
cggcuccaggcuc

SEQ ID NO: 1880138 - RNA, 15 nt, Human
cggcuccacuaggac

SEQ ID NO: 1880139 - RNA, 12 nt, Human
cggcuccaggcu

SEQ ID NO: 1880140 - RNA, 17 nt, Human
cggcucacugcagccuc

SEQ ID NO: 1880141 - RNA, 16 nt, Human
cggcucacugcagccu

SEQ ID NO: 1880142 - RNA, 14 nt, Human
cggcucacugcagc

SEQ ID NO: 1880143 - RNA, 15 nt, Human
cggcucacugcagcc

SEQ ID NO: 1880144 - RNA, 20 nt, Human
cggagucccaccuuggcugc

SEQ ID NO: 1880145 - RNA, 18 nt, Human
cggagucccaccuuggcu

SEQ ID NO: 1880146 - RNA, 16 nt, Human
cggagucccaccuugg

SEQ ID NO: 1880147 - RNA, 13 nt, Human
cggagcuggcccc

SEQ ID NO: 1880148 - RNA, 16 nt, Human
cggagcuggccccgcc

SEQ ID NO: 1880149 - RNA, 21 nt, Human
cggagcuggccccgccgccug

SEQ ID NO: 1880150 - RNA, 16 nt, Human
cgcugccacccaccuc

SEQ ID NO: 1880151 - RNA, 17 nt, Human
cgcugccacccaccucc

SEQ ID NO: 1880152 - RNA, 20 nt, Human
cgcugccacccaccucccug

SEQ ID NO: 1880153 - RNA, 15 nt, Human
cgccucccacugggg

SEQ ID NO: 1880154 - RNA, 17 nt, Human
cgccuggguccagggga

SEQ ID NO: 1880155 - RNA, 14 nt, Human
cgugcacacaccag

SEQ ID NO: 1880156 - RNA, 18 nt, Human
cgugauuuugcuguagaa

SEQ ID NO: 1880157 - RNA, 22 nt, Human
cgugaucaaagccacacucugg

SEQ ID NO: 1880158 - RNA, 20 nt, Human
cguguaaccauggacccaau

SEQ ID NO: 1880159 - RNA, 17 nt, Human
cgugaguccuggcaugg

SEQ ID NO: 1880160 - RNA, 17 nt, Human
cgugaggccagagacac

SEQ ID NO: 1880161 - RNA, 16 nt, Human
cgugaguccuggcaug

SEQ ID NO: 1880162 - RNA, 16 nt, Human
cguaaagcuagaaaug

SEQ ID NO: 1880163 - RNA, 14 nt, Human
cguaaaauuaagaa

SEQ ID NO: 1880164 - RNA, 18 nt, Human
cgguguggugcaguguga

SEQ ID NO: 1880165 - RNA, 16 nt, Human
cgguuuuacugcagcu

SEQ ID NO: 1880166 - RNA, 18 nt, Human
cgcaggagcacacccagc

SEQ ID NO: 1880167 - RNA, 23 nt, Human
cgcaggagcacacccagccccca

SEQ ID NO: 1880168 - RNA, 22 nt, Human
cgcaggauucuuccucccuccc

SEQ ID NO: 1880169 - RNA, 19 nt, Human
cgcauggucacacacugau

SEQ ID NO: 1880170 - RNA, 16 nt, Human
cgcauggucacacacu

SEQ ID NO: 1880171 - RNA, 14 nt, Human
cgauagugguggug

SEQ ID NO: 1880172 - RNA, 20 nt, Human
cgagucauucguucugugga

SEQ ID NO: 1880173 - RNA, 13 nt, Human
cgaguccaagcug

SEQ ID NO: 1880174 - RNA, 14 nt, Human
cgaguccaagcugg

SEQ ID NO: 1880175 - RNA, 15 nt, Human
cgaguccaagcuggg

SEQ ID NO: 1880176 - RNA, 15 nt, Human
cgauauacucuagau

SEQ ID NO: 1880177 - RNA, 18 nt, Human
cgagucauucguucugug

SEQ ID NO: 1880178 - RNA, 19 nt, Human
cgagucauucguucugugg

SEQ ID NO: 1880179 - RNA, 17 nt, Human
cgccagauucuuuccug

SEQ ID NO: 1880180 - RNA, 19 nt, Human
cgccaaauaaugucucugu

SEQ ID NO: 1880181 - RNA, 17 nt, Human
cgccaaauaaugucucu

SEQ ID NO: 1880182 - RNA, 14 nt, Human
cgccucccacuggg

SEQ ID NO: 1880183 - RNA, 13 nt, Human
cgccucccacugg

SEQ ID NO: 1880184 - RNA, 19 nt, Human
cgccuggcugcagccugcg

SEQ ID NO: 1880185 - RNA, 16 nt, Human
cgaccuuggccgcacc

SEQ ID NO: 1880186 - RNA, 11 nt, Human
cgaccuuggcc

SEQ ID NO: 1880187 - RNA, 23 nt, Human
cgacgccacagcccagccacgga

SEQ ID NO: 1880188 - RNA, 15 nt, Human
cgacgccacagccca

SEQ ID NO: 1880189 - RNA, 14 nt, Human
cgaccuuggccgca

SEQ ID NO: 1880190 - RNA, 19 nt, Human
cgacccuugccgucuaccu

SEQ ID NO: 1880191 - RNA, 20 nt, Human
cgacccuugccgucuaccug

SEQ ID NO: 1880192 - RNA, 14 nt, Human
cgacuaauuucaaa

SEQ ID NO: 1880193 - RNA, 18 nt, Human
cgacucuauagacucuag

SEQ ID NO: 1880194 - RNA, 20 nt, Human
cgacucuauagacucuagga

SEQ ID NO: 1880195 - RNA, 17 nt, Human
cgacugccaucuuggac

SEQ ID NO: 1880196 - RNA, 17 nt, Human
cgacugcccggcagggu

SEQ ID NO: 1880197 - RNA, 17 nt, Human
cgacacugggaggccag

SEQ ID NO: 1880198 - RNA, 16 nt, Human
cgacagcauuuuccuc

SEQ ID NO: 1880199 - RNA, 13 nt, Human
cgacaaugcaaac

SEQ ID NO: 1880200 - RNA, 12 nt, Human
cgacaaugcaaa

SEQ ID NO: 1880201 - RNA, 21 nt, Human
ccuuuuuuagaguugauacua

SEQ ID NO: 1880202 - RNA, 16 nt, Human
cgaauuuuaaaagaug

SEQ ID NO: 1880203 - RNA, 13 nt, Human
ccuuuuuuaaaag

SEQ ID NO: 1880204 - RNA, 20 nt, Human
ccuuuuuuaaaaguaaaugu

SEQ ID NO: 1880205 - RNA, 19 nt, Human
ccuuucauuuacuguggcu

SEQ ID NO: 1880206 - RNA, 18 nt, Human
ccuuucauuuacuguggc

SEQ ID NO: 1880207 - RNA, 22 nt, Human
ccuuucauuuacuguggcuucu

SEQ ID NO: 1880208 - RNA, 16 nt, Human
ccuuucauuuacugug

SEQ ID NO: 1880209 - RNA, 14 nt, Human
ccuuucauuuacug

SEQ ID NO: 1880210 - RNA, 15 nt, Human
ccuuuugagugccuu

SEQ ID NO: 1880211 - RNA, 17 nt, Human
ccuuuugagugccuuac

SEQ ID NO: 1880212 - RNA, 21 nt, Human
ccuuucaauaggaaaaacuga

SEQ ID NO: 1880213 - RNA, 14 nt, Human
ccuuuacggacacc

SEQ ID NO: 1880214 - RNA, 19 nt, Human
ccuuuacggacacccccuc

SEQ ID NO: 1880215 - RNA, 13 nt, Human
ccuuuaaugcauc

SEQ ID NO: 1880216 - RNA, 16 nt, Human
ccuugccgucuaccug

SEQ ID NO: 1880217 - RNA, 23 nt, Human
cuagcauacguacacauuuuauu

SEQ ID NO: 1880218 - RNA, 21 nt, Human
cuagcauacguacacauuuua

SEQ ID NO: 1880219 - RNA, 23 nt, Human
cuagaauuugauaugugaacagu

SEQ ID NO: 1880220 - RNA, 22 nt, Human
cuagaauuuauucaauuccucu

SEQ ID NO: 1880221 - RNA, 23 nt, Human
cuagaauuuauucaauuccucug

SEQ ID NO: 1880222 - RNA, 22 nt, Human
cuagaagauuuugaaauuuuua

SEQ ID NO: 1880223 - RNA, 13 nt, Human
cuagaacucccuu

SEQ ID NO: 1880224 - RNA, 12 nt, Human
cuagaacucccu

SEQ ID NO: 1880225 - RNA, 20 nt, Human
cuacucauacuuaagcaaaa

SEQ ID NO: 1880226 - RNA, 21 nt, Human
cuacucauacuuaagcaaaag

SEQ ID NO: 1880227 - RNA, 17 nt, Human
cuaccuuuguauucucu

SEQ ID NO: 1880228 - RNA, 18 nt, Human
cuacaugagguacugaga

SEQ ID NO: 1880229 - RNA, 20 nt, Human
cuacaugagguacugagagu

SEQ ID NO: 1880230 - RNA, 20 nt, Human
cuacaguccucccaucucac

SEQ ID NO: 1880231 - RNA, 19 nt, Human
cuacaguugaaaaacagcu

SEQ ID NO: 1880232 - RNA, 21 nt, Human
cuacaguugaaaaacagcuga

SEQ ID NO: 1880233 - RNA, 14 nt, Human
cuacaguguacagu

SEQ ID NO: 1880234 - RNA, 13 nt, Human
cuacaguguacag

SEQ ID NO: 1880235 - RNA, 22 nt, Human
cuacaguugaaaaacagcugag

SEQ ID NO: 1880236 - RNA, 19 nt, Human
cuacaguccucccaucuca

SEQ ID NO: 1880237 - RNA, 18 nt, Human
cuaauuucaaaaugcuuu

SEQ ID NO: 1880238 - RNA, 19 nt, Human
cuaauuucaaaaugcuuuu

SEQ ID NO: 1880239 - RNA, 22 nt, Human
cuaauuucaaaaugcuuuuuau

SEQ ID NO: 1880240 - RNA, 17 nt, Human
cuaauuucaaaaugcuu

SEQ ID NO: 1880241 - RNA, 21 nt, Human
cuaauuuaucuugucucuggg

SEQ ID NO: 1880242 - RNA, 17 nt, Human
cuaauuuauaaaaaggu

SEQ ID NO: 1880243 - RNA, 23 nt, Human
cuaagugauccucccaccucagc

SEQ ID NO: 1880244 - RNA, 20 nt, Human
cuaaguuuuuauggcuuuug

SEQ ID NO: 1880245 - RNA, 21 nt, Human
cuaagugguacuaacuuuccu

SEQ ID NO: 1880246 - RNA, 23 nt, Human
cuaaguuuuuauggcuuuugugc

SEQ ID NO: 1880247 - RNA, 22 nt, Human
cuaauucuuugaccuguuggga

SEQ ID NO: 1880248 - RNA, 21 nt, Human
cuaauucuuugaccuguuggg

SEQ ID NO: 1880249 - RNA, 14 nt, Human
cuaauuuauaaaaa

SEQ ID NO: 1880250 - RNA, 13 nt, Human
cuaauuuauaaaa

SEQ ID NO: 1880251 - RNA, 17 nt, Human
cuaauucuugcauauuu

SEQ ID NO: 1880252 - RNA, 20 nt, Human
cucaaacucuugaccucagg

SEQ ID NO: 1880253 - RNA, 13 nt, Human
cucaaacuccuga

SEQ ID NO: 1880254 - RNA, 14 nt, Human
cucaaacuccugac

SEQ ID NO: 1880255 - RNA, 11 nt, Human
cucaauauuuu

SEQ ID NO: 1880256 - RNA, 15 nt, Human
cucaaugcacugaca

SEQ ID NO: 1880257 - RNA, 13 nt, Human
cucaaugcacuga

SEQ ID NO: 1880258 - RNA, 13 nt, Human
cucaauauuuucc

SEQ ID NO: 1880259 - RNA, 18 nt, Human
cuaucucccccagcccca

SEQ ID NO: 1880260 - RNA, 16 nt, Human
cuaucucccccagccc

SEQ ID NO: 1880261 - RNA, 17 nt, Human
cuaucucccccagcccc

SEQ ID NO: 1880262 - RNA, 19 nt, Human
cuauuaaggugauauauuu

SEQ ID NO: 1880263 - RNA, 23 nt, Human
cuauuaaggugauauauuuaaaa

SEQ ID NO: 1880264 - RNA, 21 nt, Human
cuauuaaggugauauauuuaa

SEQ ID NO: 1880265 - RNA, 18 nt, Human
cucaaaagcugggcaggu

SEQ ID NO: 1880266 - RNA, 17 nt, Human
cucaaaaaaagaaaaag

SEQ ID NO: 1880267 - RNA, 18 nt, Human
cuaucguaaaauuaagaa

SEQ ID NO: 1880268 - RNA, 17 nt, Human
cuaucguaaaauuaaga

SEQ ID NO: 1880269 - RNA, 14 nt, Human
cuaucuaaauguug

SEQ ID NO: 1880270 - RNA, 15 nt, Human
cuaucucccccagcc

SEQ ID NO: 1880271 - RNA, 15 nt, Human
cuaucuacucuccuc

SEQ ID NO: 1880272 - RNA, 16 nt, Human
cuaucuacucuccuca

SEQ ID NO: 1880273 - RNA, 17 nt, Human
cuaucuacucuccucau

SEQ ID NO: 1880274 - RNA, 21 nt, Human
cuaguuugauuaaauucuugc

SEQ ID NO: 1880275 - RNA, 22 nt, Human
cuaguuugauuaaauucuugca

SEQ ID NO: 1880276 - RNA, 15 nt, Human
cuaguuugauuaaau

SEQ ID NO: 1880277 - RNA, 13 nt, Human
cuaguuugauuaa

SEQ ID NO: 1880278 - RNA, 22 nt, Human
cuaguuguuugauucagacagc

SEQ ID NO: 1880279 - RNA, 23 nt, Human
cuaguuguuugauucagacagcu

SEQ ID NO: 1880280 - RNA, 12 nt, Human
cuagccagagga

SEQ ID NO: 1880281 - RNA, 19 nt, Human
cuagccaccgccuccuaca

SEQ ID NO: 1880282 - RNA, 13 nt, Human
cuagccagaggag

SEQ ID NO: 1880283 - RNA, 15 nt, Human
cuagccagaggagag

SEQ ID NO: 1880284 - RNA, 16 nt, Human
cuccaacucagaaggg

SEQ ID NO: 1880285 - RNA, 18 nt, Human
cuccaaccuggggggcag

SEQ ID NO: 1880286 - RNA, 13 nt, Human
cuccaagaauuuc

SEQ ID NO: 1880287 - RNA, 21 nt, Human
cuccaaccugcaaagaucugu

SEQ ID NO: 1880288 - RNA, 16 nt, Human
cucauguucugcuuuc

SEQ ID NO: 1880289 - RNA, 15 nt, Human
cucauguucugcuuu

SEQ ID NO: 1880290 - RNA, 16 nt, Human
cucaugccccuggcug

SEQ ID NO: 1880291 - RNA, 17 nt, Human
cucaugccccuggcugg

SEQ ID NO: 1880292 - RNA, 15 nt, Human
cuccaagaccuucuc

SEQ ID NO: 1880293 - RNA, 14 nt, Human
cuccaagaauuucu

SEQ ID NO: 1880294 - RNA, 22 nt, Human
cuccaagaccuucuccuucacc

SEQ ID NO: 1880295 - RNA, 13 nt, Human
cuccaagcaggac

SEQ ID NO: 1880296 - RNA, 14 nt, Human
cuccaagcaggaca

SEQ ID NO: 1880297 - RNA, 22 nt, Human
cuccaagcaggacauggacaag

SEQ ID NO: 1880298 - RNA, 24 nt, Human
cuccaagcaggacauggacaagga

SEQ ID NO: 1880299 - RNA, 23 nt, Human
cuccaagcccaguucagcuuggg

SEQ ID NO: 1880300 - RNA, 13 nt, Human
cuccaagccagcg

SEQ ID NO: 1880301 - RNA, 13 nt, Human
cuccaagcuccca

SEQ ID NO: 1880302 - RNA, 14 nt, Human
cuccaagcucccag

SEQ ID NO: 1880303 - RNA, 15 nt, Human
cuccaagcucccagg

SEQ ID NO: 1880304 - RNA, 16 nt, Human
cuccaagcucccaggc

SEQ ID NO: 1880305 - RNA, 22 nt, Human
cuccacuuggucugugagaugc

SEQ ID NO: 1880306 - RNA, 21 nt, Human
cuccacuuggucugugagaug

SEQ ID NO: 1880307 - RNA, 17 nt, Human
cuccacuuggucuguga

SEQ ID NO: 1880308 - RNA, 16 nt, Human
cuccacuuggucugug

SEQ ID NO: 1880309 - RNA, 15 nt, Human
cuccacuuggucugu

SEQ ID NO: 1880310 - RNA, 13 nt, Human
cuccacuuggucu

SEQ ID NO: 1880311 - RNA, 14 nt, Human
cucaugccccuggc

SEQ ID NO: 1880312 - RNA, 23 nt, Human
cucaguacuuuggaggccccuau

SEQ ID NO: 1880313 - RNA, 12 nt, Human
cucaguacuuug

SEQ ID NO: 1880314 - RNA, 17 nt, Human
cucaguacuuuggaggc

SEQ ID NO: 1880315 - RNA, 18 nt, Human
cucaguacuuuggaggcc

SEQ ID NO: 1880316 - RNA, 19 nt, Human
cucaguacuuuggaggccc

SEQ ID NO: 1880317 - RNA, 20 nt, Human
cucaguacuuuggaggcccc

SEQ ID NO: 1880318 - RNA, 21 nt, Human
cucaguacuuuggaggccccu

SEQ ID NO: 1880319 - RNA, 20 nt, Human
cuccacuuucuagccagagg

SEQ ID NO: 1880320 - RNA, 16 nt, Human
cuccacuuucuagcca

SEQ ID NO: 1880321 - RNA, 19 nt, Human
cuccacuuucuagccagag

SEQ ID NO: 1880322 - RNA, 23 nt, Human
cuccacuuggucugugagaugcu

SEQ ID NO: 1880323 - RNA, 12 nt, Human
cuccccauggag

SEQ ID NO: 1880324 - RNA, 17 nt, Human
cuccccauggagccagc

SEQ ID NO: 1880325 - RNA, 16 nt, Human
cuccagggcuggacug

SEQ ID NO: 1880326 - RNA, 15 nt, Human
cuccagggcuggacu

SEQ ID NO: 1880327 - RNA, 14 nt, Human
cuccagggcuggac

SEQ ID NO: 1880328 - RNA, 13 nt, Human
cuccagggcugga

SEQ ID NO: 1880329 - RNA, 12 nt, Human
cuccagggcugg

SEQ ID NO: 1880330 - RNA, 20 nt, Human
cuccagggcuggacugaggc

SEQ ID NO: 1880331 - RNA, 19 nt, Human
cuccagggcuggacugagg

SEQ ID NO: 1880332 - RNA, 18 nt, Human
cuccagggcuggacugag

SEQ ID NO: 1880333 - RNA, 17 nt, Human
cuccagggcuggacuga

SEQ ID NO: 1880334 - RNA, 21 nt, Human
cuccagggcuggacugaggcc

SEQ ID NO: 1880335 - RNA, 14 nt, Human
cucucacauuacug

SEQ ID NO: 1880336 - RNA, 13 nt, Human
cucucacauuacu

SEQ ID NO: 1880337 - RNA, 17 nt, Human
cucucacagcugaguug

SEQ ID NO: 1880338 - RNA, 16 nt, Human
cucguucucccuggga

SEQ ID NO: 1880339 - RNA, 21 nt, Human
cucuaaagaguuuauuuuaag

SEQ ID NO: 1880340 - RNA, 21 nt, Human
cucgugguaggacuguagaaa

SEQ ID NO: 1880341 - RNA, 14 nt, Human
cucguucucccugg

SEQ ID NO: 1880342 - RNA, 15 nt, Human
cucgaacuggcugca

SEQ ID NO: 1880343 - RNA, 14 nt, Human
cucgaacuggcugc

SEQ ID NO: 1880344 - RNA, 13 nt, Human
cucgaacuggcug

SEQ ID NO: 1880345 - RNA, 15 nt, Human
cucccccccaugcac

SEQ ID NO: 1880346 - RNA, 13 nt, Human
cucccccccaugc

SEQ ID NO: 1880347 - RNA, 22 nt, Human
cucccccagccccauccucugu

SEQ ID NO: 1880348 - RNA, 15 nt, Human
cucccccagccccau

SEQ ID NO: 1880349 - RNA, 20 nt, Human
cucccccagccccauccucu

SEQ ID NO: 1880350 - RNA, 14 nt, Human
cuccucuuccaggc

SEQ ID NO: 1880351 - RNA, 16 nt, Human
cuccuggcccacugca

SEQ ID NO: 1880352 - RNA, 18 nt, Human
cuccuggcccacugcauc

SEQ ID NO: 1880353 - RNA, 16 nt, Human
cuccucugcugcuggc

SEQ ID NO: 1880354 - RNA, 18 nt, Human
cuccucugcugcuggcug

SEQ ID NO: 1880355 - RNA, 12 nt, Human
cuccuacagccc

SEQ ID NO: 1880356 - RNA, 16 nt, Human
cugaccugguccacag

SEQ ID NO: 1880357 - RNA, 17 nt, Human
cugaccugguccacagg

SEQ ID NO: 1880358 - RNA, 18 nt, Human
cugaccugguccacaggg

SEQ ID NO: 1880359 - RNA, 20 nt, Human
cugaccugguccacagggca

SEQ ID NO: 1880360 - RNA, 21 nt, Human
cugaccugguccacagggcac

SEQ ID NO: 1880361 - RNA, 23 nt, Human
cugagacagcccgggcucugccu

SEQ ID NO: 1880362 - RNA, 21 nt, Human
cugagacucgcgacaaugcaa

SEQ ID NO: 1880363 - RNA, 21 nt, Human
cugacccaugcugcccuguga

SEQ ID NO: 1880364 - RNA, 22 nt, Human
cugacccaugcugcccugugag

SEQ ID NO: 1880365 - RNA, 22 nt, Human
cugagaggacuuuucuuugugg

SEQ ID NO: 1880366 - RNA, 21 nt, Human
cugagaggacuuuucuuugug

SEQ ID NO: 1880367 - RNA, 12 nt, Human
cugagaggccac

SEQ ID NO: 1880368 - RNA, 17 nt, Human
cugagaguagagucacu

SEQ ID NO: 1880369 - RNA, 22 nt, Human
cugagacucgcgacaaugcaaa

SEQ ID NO: 1880370 - RNA, 12 nt, Human
cugagagaaaua

SEQ ID NO: 1880371 - RNA, 20 nt, Human
cugaguagcuggauuacagg

SEQ ID NO: 1880372 - RNA, 20 nt, Human
cugaggaauccagacccggc

SEQ ID NO: 1880373 - RNA, 17 nt, Human
cugaggaauccagaccc

SEQ ID NO: 1880374 - RNA, 20 nt, Human
cugaggacacuaaccacgcu

SEQ ID NO: 1880375 - RNA, 21 nt, Human
cugaggaauccagacccggcu

SEQ ID NO: 1880376 - RNA, 23 nt, Human
cugaggacacuaaccacgcugga

SEQ ID NO: 1880377 - RNA, 21 nt, Human
cugagaucaaaacgguuuuac

SEQ ID NO: 1880378 - RNA, 18 nt, Human
cugagaucucugcaggaa

SEQ ID NO: 1880379 - RNA, 17 nt, Human
cugagaucucugcagga

SEQ ID NO: 1880380 - RNA, 16 nt, Human
cugagaucucugcagg

SEQ ID NO: 1880381 - RNA, 14 nt, Human
cugagcuuucugcu

SEQ ID NO: 1880382 - RNA, 15 nt, Human
cugagcuuucugcua

SEQ ID NO: 1880383 - RNA, 19 nt, Human
cugaguagcuggauuacag

SEQ ID NO: 1880384 - RNA, 21 nt, Human
cugaguacguugugcauuugg

SEQ ID NO: 1880385 - RNA, 12 nt, Human
cugaggugggag

SEQ ID NO: 1880386 - RNA, 20 nt, Human
cugaguacguugugcauuug

SEQ ID NO: 1880387 - RNA, 19 nt, Human
cugaguacguugugcauuu

SEQ ID NO: 1880388 - RNA, 17 nt, Human
cugaguacguugugcau

SEQ ID NO: 1880389 - RNA, 18 nt, Human
cugaguacguugugcauu

SEQ ID NO: 1880390 - RNA, 18 nt, Human
cucuucaaggacuuucug

SEQ ID NO: 1880391 - RNA, 17 nt, Human
cucuuagcuccccucca

SEQ ID NO: 1880392 - RNA, 15 nt, Human
cucuuagcuccccuc

SEQ ID NO: 1880393 - RNA, 18 nt, Human
cucuuagcuccccuccaa

SEQ ID NO: 1880394 - RNA, 19 nt, Human
cucuuagcuccccuccaac

SEQ ID NO: 1880395 - RNA, 14 nt, Human
cucuucaaucucuu

SEQ ID NO: 1880396 - RNA, 19 nt, Human
cucuucagaucucuaacuu

SEQ ID NO: 1880397 - RNA, 18 nt, Human
cucuucagaucucuaacu

SEQ ID NO: 1880398 - RNA, 13 nt, Human
cucuuauugccca

SEQ ID NO: 1880399 - RNA, 21 nt, Human
cucuuagcauuuuaauuagau

SEQ ID NO: 1880400 - RNA, 14 nt, Human
cucuuagauggauu

SEQ ID NO: 1880401 - RNA, 20 nt, Human
cucuuauugcccacgcugga

SEQ ID NO: 1880402 - RNA, 19 nt, Human
cucuuauugcccacgcugg

SEQ ID NO: 1880403 - RNA, 15 nt, Human
cucuuauugcccacg

SEQ ID NO: 1880404 - RNA, 14 nt, Human
cucuuauugcccac

SEQ ID NO: 1880405 - RNA, 21 nt, Human
cucuucagaaagugugcuuua

SEQ ID NO: 1880406 - RNA, 14 nt, Human
cucugucagucaca

SEQ ID NO: 1880407 - RNA, 16 nt, Human
cucugucagucacagc

SEQ ID NO: 1880408 - RNA, 17 nt, Human
cucugucagucacagcc

SEQ ID NO: 1880409 - RNA, 19 nt, Human
cucugucagucacagccac

SEQ ID NO: 1880410 - RNA, 20 nt, Human
cucugucagucacagccacc

SEQ ID NO: 1880411 - RNA, 16 nt, Human
cucugcugacagacac

SEQ ID NO: 1880412 - RNA, 14 nt, Human
cucugcugacagac

SEQ ID NO: 1880413 - RNA, 13 nt, Human
cucugcugacaga

SEQ ID NO: 1880414 - RNA, 13 nt, Human
cucugcuccccag

SEQ ID NO: 1880415 - RNA, 14 nt, Human
cucugguccauaga

SEQ ID NO: 1880416 - RNA, 20 nt, Human
cucugcuccucuccccagca

SEQ ID NO: 1880417 - RNA, 18 nt, Human
cucugcuccucuccccag

SEQ ID NO: 1880418 - RNA, 13 nt, Human
cucugcuccucuc

SEQ ID NO: 1880419 - RNA, 14 nt, Human
cucugcaggucccu

SEQ ID NO: 1880420 - RNA, 15 nt, Human
cucugcaggucccua

SEQ ID NO: 1880421 - RNA, 16 nt, Human
cucugcaggucccuaa

SEQ ID NO: 1880422 - RNA, 17 nt, Human
cucugcaggucccuaau

SEQ ID NO: 1880423 - RNA, 13 nt, Human
cucugcagcaaua

SEQ ID NO: 1880424 - RNA, 21 nt, Human
cucugcacuccccugcugggu

SEQ ID NO: 1880425 - RNA, 18 nt, Human
cucugcacuccccugcug

SEQ ID NO: 1880426 - RNA, 20 nt, Human
cucugcacuccccugcuggg

SEQ ID NO: 1880427 - RNA, 15 nt, Human
cucuccccugaccug

SEQ ID NO: 1880428 - RNA, 17 nt, Human
cucuccccugaccugug

SEQ ID NO: 1880429 - RNA, 17 nt, Human
cucuugagccuugaacu

SEQ ID NO: 1880430 - RNA, 16 nt, Human
cucuugagccuugaac

SEQ ID NO: 1880431 - RNA, 18 nt, Human
cucuugagccuugaacuu

SEQ ID NO: 1880432 - RNA, 23 nt, Human
cucuugagccuugaacuuugacc

SEQ ID NO: 1880433 - RNA, 22 nt, Human
cugacaacacucauugaccuga

SEQ ID NO: 1880434 - RNA, 23 nt, Human
cugacaacacucauugaccugag

SEQ ID NO: 1880435 - RNA, 19 nt, Human
cugaaggccccgcccaggc

SEQ ID NO: 1880436 - RNA, 17 nt, Human
cugaaggcuggguucug

SEQ ID NO: 1880437 - RNA, 21 nt, Human
cugaaggccccgcccaggcuu

SEQ ID NO: 1880438 - RNA, 23 nt, Human
cugaaggacauugcggacagcca

SEQ ID NO: 1880439 - RNA, 23 nt, Human
cugaagccuuugcauuuuggaga

SEQ ID NO: 1880440 - RNA, 21 nt, Human
cugaagcuaucguaaaauuaa

SEQ ID NO: 1880441 - RNA, 22 nt, Human
cugaagcuaucguaaaauuaag

SEQ ID NO: 1880442 - RNA, 19 nt, Human
cugaagccuuucuuuugga

SEQ ID NO: 1880443 - RNA, 22 nt, Human
cugaaaauugaugggauuuggu

SEQ ID NO: 1880444 - RNA, 15 nt, Human
cugaaacaacuugga

SEQ ID NO: 1880445 - RNA, 16 nt, Human
cugaaacaacuuggaa

SEQ ID NO: 1880446 - RNA, 20 nt, Human
cugaaacaacuuggaaagau

SEQ ID NO: 1880447 - RNA, 13 nt, Human
cucuugaugccug

SEQ ID NO: 1880448 - RNA, 15 nt, Human
cucuugaugccuggc

SEQ ID NO: 1880449 - RNA, 16 nt, Human
cucuugaugccuggcg

SEQ ID NO: 1880450 - RNA, 21 nt, Human
cucuugaugccuggcggggug

SEQ ID NO: 1880451 - RNA, 21 nt, Human
cucuugauuauccauauugag

SEQ ID NO: 1880452 - RNA, 12 nt, Human
cucuuuucucug

SEQ ID NO: 1880453 - RNA, 21 nt, Human
cucuuuugcuuuauuccagaa

SEQ ID NO: 1880454 - RNA, 22 nt, Human
gugucuguacacguguccugua

SEQ ID NO: 1880455 - RNA, 21 nt, Human
gugucuguacacguguccugu

SEQ ID NO: 1880456 - RNA, 16 nt, Human
gugucuguacacgugu

SEQ ID NO: 1880457 - RNA, 13 nt, Human
gugucuguacacg

SEQ ID NO: 1880458 - RNA, 12 nt, Human
gugucuguacac

SEQ ID NO: 1880459 - RNA, 19 nt, Human
gugucagguggggcagcuu

SEQ ID NO: 1880460 - RNA, 23 nt, Human
gugugaaccaccacacccagccc

SEQ ID NO: 1880461 - RNA, 18 nt, Human
gugucagguggggcagcu

SEQ ID NO: 1880462 - RNA, 14 nt, Human
gugucagguggggc

SEQ ID NO: 1880463 - RNA, 22 nt, Human
gugucaccugaagacucauucu

SEQ ID NO: 1880464 - RNA, 14 nt, Human
gugucaccugaaga

SEQ ID NO: 1880465 - RNA, 17 nt, Human
guguauuuaacagggag

SEQ ID NO: 1880466 - RNA, 18 nt, Human
guguauuuaacagggagg

SEQ ID NO: 1880467 - RNA, 20 nt, Human
aagcaaaugugaaucauuuu

SEQ ID NO: 1880468 - RNA, 14 nt, Human
aagcaaaaagugau

SEQ ID NO: 1880469 - RNA, 17 nt, Human
aagcaacccaaauguuc

SEQ ID NO: 1880470 - RNA, 21 nt, Human
guguaugugggggucugugug

SEQ ID NO: 1880471 - RNA, 13 nt, Human
guguauguggggg

SEQ ID NO: 1880472 - RNA, 23 nt, Human
aagauggcacuuauaaccaaagc

SEQ ID NO: 1880473 - RNA, 23 nt, Human
aagaucaaaagguuaauaaagua

SEQ ID NO: 1880474 - RNA, 20 nt, Human
aagaucaaaagguuaauaaa

SEQ ID NO: 1880475 - RNA, 15 nt, Human
gugcugcugcugcug

SEQ ID NO: 1880476 - RNA, 14 nt, Human
gugcugcugcugcu

SEQ ID NO: 1880477 - RNA, 23 nt, Human
gugguucacucuuggagccugca

SEQ ID NO: 1880478 - RNA, 22 nt, Human
gugguucacucuuggagccugc

SEQ ID NO: 1880479 - RNA, 15 nt, Human
gugguuucagaaaug

SEQ ID NO: 1880480 - RNA, 18 nt, Human
gugguugcuguuuuccuc

SEQ ID NO: 1880481 - RNA, 23 nt, Human
gugcugcccugcccaccuggccu

SEQ ID NO: 1880482 - RNA, 19 nt, Human
gugcugcggagcaagagga

SEQ ID NO: 1880483 - RNA, 20 nt, Human
gugguugcuguuuuccuccc

SEQ ID NO: 1880484 - RNA, 19 nt, Human
gugguugcuguuuuccucc

SEQ ID NO: 1880485 - RNA, 13 nt, Human
gugguugugaucc

SEQ ID NO: 1880486 - RNA, 21 nt, Human
aagagggagggagggcuccag

SEQ ID NO: 1880487 - RNA, 22 nt, Human
aagagggagggagggcuccaga

SEQ ID NO: 1880488 - RNA, 14 nt, Human
aagaggcagggucu

SEQ ID NO: 1880489 - RNA, 11 nt, Human
aagaggcaggg

SEQ ID NO: 1880490 - RNA, 17 nt, Human
aagauagcuucacccca

SEQ ID NO: 1880491 - RNA, 18 nt, Human
aagaggugugcaagagag

SEQ ID NO: 1880492 - RNA, 16 nt, Human
aagaggugugcaagag

SEQ ID NO: 1880493 - RNA, 15 nt, Human
aagcacgaaauguua

SEQ ID NO: 1880494 - RNA, 16 nt, Human
aagcacuaaacaaaga

SEQ ID NO: 1880495 - RNA, 17 nt, Human
aagcaccuccugccucg

SEQ ID NO: 1880496 - RNA, 16 nt, Human
aagcaccuccugccuc

SEQ ID NO: 1880497 - RNA, 15 nt, Human
aagcaccuccugccu

SEQ ID NO: 1880498 - RNA, 14 nt, Human
aagcaccuccugcc

SEQ ID NO: 1880499 - RNA, 13 nt, Human
aagcaccuccugc

SEQ ID NO: 1880500 - RNA, 21 nt, Human
aagcacaugccucucucaggc

SEQ ID NO: 1880501 - RNA, 16 nt, Human
guguuucuuuaguuuu

SEQ ID NO: 1880502 - RNA, 13 nt, Human
guguuucuuuagu

SEQ ID NO: 1880503 - RNA, 13 nt, Human
gugugaaugaaca

SEQ ID NO: 1880504 - RNA, 16 nt, Human
gugugaauaaagugcu

SEQ ID NO: 1880505 - RNA, 16 nt, Human
aagcacacuugacauc

SEQ ID NO: 1880506 - RNA, 21 nt, Human
aagcacaaugucucacauggg

SEQ ID NO: 1880507 - RNA, 19 nt, Human
aagcacacucauccccuca

SEQ ID NO: 1880508 - RNA, 12 nt, Human
guguuugaagca

SEQ ID NO: 1880509 - RNA, 14 nt, Human
aagcacaugccucu

SEQ ID NO: 1880510 - RNA, 11 nt, Human
aagcacagcag

SEQ ID NO: 1880511 - RNA, 16 nt, Human
aagcacagcagccugg

SEQ ID NO: 1880512 - RNA, 15 nt, Human
aagcacaugccucuc

SEQ ID NO: 1880513 - RNA, 16 nt, Human
aagcacaugccucucu

SEQ ID NO: 1880514 - RNA, 19 nt, Human
aagcacaugccucucucag

SEQ ID NO: 1880515 - RNA, 20 nt, Human
aagcacaugccucucucagg

SEQ ID NO: 1880516 - RNA, 20 nt, Human
aagccaaagcuaggccuggc

SEQ ID NO: 1880517 - RNA, 18 nt, Human
aagccaaagcuaggccug

SEQ ID NO: 1880518 - RNA, 17 nt, Human
aagccaaagcuaggccu

SEQ ID NO: 1880519 - RNA, 12 nt, Human
aagccaaagagu

SEQ ID NO: 1880520 - RNA, 23 nt, Human
aagcaugcacaaauucugucucu

SEQ ID NO: 1880521 - RNA, 12 nt, Human
aagcaugugaga

SEQ ID NO: 1880522 - RNA, 15 nt, Human
aagcauguguuugca

SEQ ID NO: 1880523 - RNA, 19 nt, Human
guuauuauauuuacaaaug

SEQ ID NO: 1880524 - RNA, 19 nt, Human
guuagagguucccuuugac

SEQ ID NO: 1880525 - RNA, 13 nt, Human
guuacuguaauuc

SEQ ID NO: 1880526 - RNA, 13 nt, Human
guuauuuaaagaa

SEQ ID NO: 1880527 - RNA, 20 nt, Human
guuauuggccuuuucuauuc

SEQ ID NO: 1880528 - RNA, 20 nt, Human
guuauuauauuuacaaaugg

SEQ ID NO: 1880529 - RNA, 12 nt, Human
guuaauaaaagu

SEQ ID NO: 1880530 - RNA, 18 nt, Human
aagcccaauauuauaauu

SEQ ID NO: 1880531 - RNA, 18 nt, Human
guuaaucauuagguguga

SEQ ID NO: 1880532 - RNA, 16 nt, Human
aagccucccacgacug

SEQ ID NO: 1880533 - RNA, 15 nt, Human
aagccuccuccagcc

SEQ ID NO: 1880534 - RNA, 18 nt, Human
aagccuggucagcccaaa

SEQ ID NO: 1880535 - RNA, 15 nt, Human
aagccuguuuaagag

SEQ ID NO: 1880536 - RNA, 18 nt, Human
aagccuguuuaagagaca

SEQ ID NO: 1880537 - RNA, 16 nt, Human
aagccuuccacacuca

SEQ ID NO: 1880538 - RNA, 23 nt, Human
guucagcuuguaaauagcucagg

SEQ ID NO: 1880539 - RNA, 12 nt, Human
guucagcuuggg

SEQ ID NO: 1880540 - RNA, 22 nt, Human
guucaggguuggccccugcccg

SEQ ID NO: 1880541 - RNA, 21 nt, Human
guucaggguuggccccugccc

SEQ ID NO: 1880542 - RNA, 20 nt, Human
guucaggguuggccccugcc

SEQ ID NO: 1880543 - RNA, 21 nt, Human
aagccgugauuuucauugcug

SEQ ID NO: 1880544 - RNA, 22 nt, Human
aagccgugcucgccccagcagg

SEQ ID NO: 1880545 - RNA, 23 nt, Human
aagccuaaaagugggcuugauuc

SEQ ID NO: 1880546 - RNA, 18 nt, Human
guucagguaacaggcaga

SEQ ID NO: 1880547 - RNA, 17 nt, Human
guucagguaacaggcag

SEQ ID NO: 1880548 - RNA, 14 nt, Human
guucuaguugcuug

SEQ ID NO: 1880549 - RNA, 19 nt, Human
guucuagcauggcugccaa

SEQ ID NO: 1880550 - RNA, 14 nt, Human
guucucugaggaca

SEQ ID NO: 1880551 - RNA, 15 nt, Human
guucucugcccucca

SEQ ID NO: 1880552 - RNA, 12 nt, Human
guucucugagga

SEQ ID NO: 1880553 - RNA, 15 nt, Human
guucucucuucucca

SEQ ID NO: 1880554 - RNA, 16 nt, Human
guucuuaagacgugau

SEQ ID NO: 1880555 - RNA, 13 nt, Human
guucuuaauucuu

SEQ ID NO: 1880556 - RNA, 17 nt, Human
guucucugcccuccaag

SEQ ID NO: 1880557 - RNA, 18 nt, Human
guucucugcccuccaaga

SEQ ID NO: 1880558 - RNA, 17 nt, Human
guucuuaauucuuagcu

SEQ ID NO: 1880559 - RNA, 14 nt, Human
guucuuaauucuua

SEQ ID NO: 1880560 - RNA, 14 nt, Human
guucuugguuugua

SEQ ID NO: 1880561 - RNA, 17 nt, Human
guucuugccacuuuuuu

SEQ ID NO: 1880562 - RNA, 18 nt, Human
guucuugguuuguaaauu

SEQ ID NO: 1880563 - RNA, 15 nt, Human
guucuugguuuguaa

SEQ ID NO: 1880564 - RNA, 14 nt, Human
guugauagcacaga

SEQ ID NO: 1880565 - RNA, 19 nt, Human
guugauagcacagacccug

SEQ ID NO: 1880566 - RNA, 20 nt, Human
guugacuugacagaacacug

SEQ ID NO: 1880567 - RNA, 19 nt, Human
guugacuugacagaacacu

SEQ ID NO: 1880568 - RNA, 16 nt, Human
guugagaaucccaaau

SEQ ID NO: 1880569 - RNA, 19 nt, Human
guugagaaucccaaauuug

SEQ ID NO: 1880570 - RNA, 17 nt, Human
aagcucugcuccucucc

SEQ ID NO: 1880571 - RNA, 19 nt, Human
aagcucuugaagacacuga

SEQ ID NO: 1880572 - RNA, 20 nt, Human
aagcucuugaagacacugaa

SEQ ID NO: 1880573 - RNA, 17 nt, Human
aagcucuugaagacacu

SEQ ID NO: 1880574 - RNA, 22 nt, Human
aagcucagaggcgcacugugac

SEQ ID NO: 1880575 - RNA, 23 nt, Human
aagcucagaggcgcacugugacc

SEQ ID NO: 1880576 - RNA, 18 nt, Human
aagcuauaaauuccucuu

SEQ ID NO: 1880577 - RNA, 21 nt, Human
aagcuuccaugauucuauuua

SEQ ID NO: 1880578 - RNA, 13 nt, Human
aagcuuccuuggc

SEQ ID NO: 1880579 - RNA, 11 nt, Human
aagcuuagaac

SEQ ID NO: 1880580 - RNA, 10 nt, Human
aagcuuagaa

SEQ ID NO: 1880581 - RNA, 21 nt, Human
aagcucuugaagacacugaaa

SEQ ID NO: 1880582 - RNA, 12 nt, Human
guuccccagaga

SEQ ID NO: 1880583 - RNA, 13 nt, Human
guuccccagagaa

SEQ ID NO: 1880584 - RNA, 21 nt, Human
guucccccuucacaaagccca

SEQ ID NO: 1880585 - RNA, 14 nt, Human
guuccccagagaaa

SEQ ID NO: 1880586 - RNA, 19 nt, Human
aagcuuuuaugugaaacau

SEQ ID NO: 1880587 - RNA, 21 nt, Human
aagcuuuuaugugaaacaugu

SEQ ID NO: 1880588 - RNA, 21 nt, Human
guucccuuuuuuggcugcuga

SEQ ID NO: 1880589 - RNA, 22 nt, Human
guucccuuuuuuggcugcugaa

SEQ ID NO: 1880590 - RNA, 11 nt, Human
aaguauuuugc

SEQ ID NO: 1880591 - RNA, 21 nt, Human
aagucacuggccaguggcugg

SEQ ID NO: 1880592 - RNA, 15 nt, Human
aagucaaauuaauaa

SEQ ID NO: 1880593 - RNA, 19 nt, Human
aagucaaauuaauaaucuu

SEQ ID NO: 1880594 - RNA, 21 nt, Human
aaguauucuuauuuaaugaaa

SEQ ID NO: 1880595 - RNA, 19 nt, Human
aaguauuauaccuuuuuua

SEQ ID NO: 1880596 - RNA, 16 nt, Human
aaguauuauaccuuuu

SEQ ID NO: 1880597 - RNA, 23 nt, Human
aaguauucuuauuuaaugaaaga

SEQ ID NO: 1880598 - RNA, 21 nt, Human
aaguauugcugaguccaacaa

SEQ ID NO: 1880599 - RNA, 20 nt, Human
aaguacuucuccacccugcu

SEQ ID NO: 1880600 - RNA, 19 nt, Human
aaguacuucuccacccugc

SEQ ID NO: 1880601 - RNA, 18 nt, Human
aaguacuucuccacccug

SEQ ID NO: 1880602 - RNA, 15 nt, Human
aaguauuauaccuuu

SEQ ID NO: 1880603 - RNA, 14 nt, Human
aaguacuauaauuu

SEQ ID NO: 1880604 - RNA, 17 nt, Human
aaguacuauaauuuacc

SEQ ID NO: 1880605 - RNA, 13 nt, Human
aaguacuauguau

SEQ ID NO: 1880606 - RNA, 22 nt, Human
guuuuaaggaugcuuguacaua

SEQ ID NO: 1880607 - RNA, 19 nt, Human
guuuuaacuagaauuuauu

SEQ ID NO: 1880608 - RNA, 19 nt, Human
guuuuaauuuauacuggca

SEQ ID NO: 1880609 - RNA, 21 nt, Human
guuuuaauuuauacuggcaug

SEQ ID NO: 1880610 - RNA, 19 nt, Human
guuuucuguucuuucuggc

SEQ ID NO: 1880611 - RNA, 21 nt, Human
guuuugaaggcaaaauugcaa

SEQ ID NO: 1880612 - RNA, 16 nt, Human
guuuucuguucuuucu

SEQ ID NO: 1880613 - RNA, 15 nt, Human
guuuucuguucuuuc

SEQ ID NO: 1880614 - RNA, 14 nt, Human
guuuucuguucuuu

SEQ ID NO: 1880615 - RNA, 20 nt, Human
aaguaauaugcacacauuuu

SEQ ID NO: 1880616 - RNA, 18 nt, Human
aaguaauaugcacacauu

SEQ ID NO: 1880617 - RNA, 17 nt, Human
aaguaauaugcacacau

SEQ ID NO: 1880618 - RNA, 13 nt, Human
aaguaacuuuaaa

SEQ ID NO: 1880619 - RNA, 21 nt, Human
aaguaauaugcacacauuuuu

SEQ ID NO: 1880620 - RNA, 19 nt, Human
guuuggacaaaauggaaua

SEQ ID NO: 1880621 - RNA, 15 nt, Human
guuuuaaagcuucca

SEQ ID NO: 1880622 - RNA, 22 nt, Human
guuuuaaagaccugacaccuuu

SEQ ID NO: 1880623 - RNA, 12 nt, Human
guuuuaaauucu

SEQ ID NO: 1880624 - RNA, 22 nt, Human
guuucaauuccaccugcaauca

SEQ ID NO: 1880625 - RNA, 17 nt, Human
guuucaaacuuuacuau

SEQ ID NO: 1880626 - RNA, 14 nt, Human
guuuaugauuccac

SEQ ID NO: 1880627 - RNA, 21 nt, Human
guuuaagugacugauggcuaa

SEQ ID NO: 1880628 - RNA, 17 nt, Human
aaggaaacccagcucug

SEQ ID NO: 1880629 - RNA, 22 nt, Human
aaggaaacccagcucuggucca

SEQ ID NO: 1880630 - RNA, 23 nt, Human
guuguuugauucagacagcugcc

SEQ ID NO: 1880631 - RNA, 16 nt, Human
aaggcugggggaagaa

SEQ ID NO: 1880632 - RNA, 14 nt, Human
aaggcugggggaag

SEQ ID NO: 1880633 - RNA, 13 nt, Human
guuucagaaaugu

SEQ ID NO: 1880634 - RNA, 11 nt, Human
guuucagaaau

SEQ ID NO: 1880635 - RNA, 19 nt, Human
aaggcugggggaagaagcu

SEQ ID NO: 1880636 - RNA, 22 nt, Human
aaggcugggggaagaagcucuc

SEQ ID NO: 1880637 - RNA, 20 nt, Human
aaggcugucaauuacaggaa

SEQ ID NO: 1880638 - RNA, 16 nt, Human
aaggggacccccgccc

SEQ ID NO: 1880639 - RNA, 20 nt, Human
aaggggacccccgcccccug

SEQ ID NO: 1880640 - RNA, 15 nt, Human
aaggcuuaaacccau

SEQ ID NO: 1880641 - RNA, 13 nt, Human
aaggggagaguaa

SEQ ID NO: 1880642 - RNA, 12 nt, Human
aagggggcuggg

SEQ ID NO: 1880643 - RNA, 23 nt, Human
aagggggcugggacaugggaaag

SEQ ID NO: 1880644 - RNA, 17 nt, Human
aaggggguggugucucc

SEQ ID NO: 1880645 - RNA, 21 nt, Human
aagggguaggauuacuaggug

SEQ ID NO: 1880646 - RNA, 16 nt, Human
aagguuucugaaaauu

SEQ ID NO: 1880647 - RNA, 18 nt, Human
aagguuugguccagccug

SEQ ID NO: 1880648 - RNA, 18 nt, Human
aaguaacuuuaaauuaug

SEQ ID NO: 1880649 - RNA, 17 nt, Human
aaguuuccccaccagug

SEQ ID NO: 1880650 - RNA, 19 nt, Human
aaguuauuuuuaauuuggu

SEQ ID NO: 1880651 - RNA, 18 nt, Human
aaguuuccuuccagccca

SEQ ID NO: 1880652 - RNA, 19 nt, Human
aaguuuccuuccagcccag

SEQ ID NO: 1880653 - RNA, 20 nt, Human
aaguuuccuuccagcccaga

SEQ ID NO: 1880654 - RNA, 21 nt, Human
aaguuuccuuccagcccagaa

SEQ ID NO: 1880655 - RNA, 19 nt, Human
aaguuucugccgcagcccu

SEQ ID NO: 1880656 - RNA, 21 nt, Human
aaguuucugccgcagcccugc

SEQ ID NO: 1880657 - RNA, 16 nt, Human
aaguuugauuucauua

SEQ ID NO: 1880658 - RNA, 15 nt, Human
aaguuugauuucauu

SEQ ID NO: 1880659 - RNA, 9 nt, Human
uaaaauggu

SEQ ID NO: 1880660 - RNA, 20 nt, Human
aaguuugagaucagccuggg

SEQ ID NO: 1880661 - RNA, 16 nt, Human
uaaaauguaucuucca

SEQ ID NO: 1880662 - RNA, 16 nt, Human
uaaaauugugaugugu

SEQ ID NO: 1880663 - RNA, 15 nt, Human
uaaaauugugaugug

SEQ ID NO: 1880664 - RNA, 23 nt, Human
aaguguauuuuuuuacuaauaga

SEQ ID NO: 1880665 - RNA, 12 nt, Human
aagugccagaaa

SEQ ID NO: 1880666 - RNA, 12 nt, Human
aaguguguguuu

SEQ ID NO: 1880667 - RNA, 13 nt, Human
aagugugguagag

SEQ ID NO: 1880668 - RNA, 23 nt, Human
aagugugcuuuaugcugaaacag

SEQ ID NO: 1880669 - RNA, 20 nt, Human
aagugugggucugugugugu

SEQ ID NO: 1880670 - RNA, 18 nt, Human
aagugugggucugugugu

SEQ ID NO: 1880671 - RNA, 17 nt, Human
aagugugggucugugug

SEQ ID NO: 1880672 - RNA, 10 nt, Human
aagugugggu

SEQ ID NO: 1880673 - RNA, 21 nt, Human
aagugugcuuuaugcugaaac

SEQ ID NO: 1880674 - RNA, 14 nt, Human
aaguuacacauuuu

SEQ ID NO: 1880675 - RNA, 16 nt, Human
aaguguguguuuuuca

SEQ ID NO: 1880676 - RNA, 21 nt, Human
aaguguguguuuuucauaaag

SEQ ID NO: 1880677 - RNA, 20 nt, Human
aaguuaugggaauaccugug

SEQ ID NO: 1880678 - RNA, 16 nt, Human
uaaaauaucauucagc

SEQ ID NO: 1880679 - RNA, 17 nt, Human
uaaaauaucauucagca

SEQ ID NO: 1880680 - RNA, 15 nt, Human
uaaaauaucauucag

SEQ ID NO: 1880681 - RNA, 14 nt, Human
uaaaauaucauuca

SEQ ID NO: 1880682 - RNA, 23 nt, Human
aagugauccucccaccucagccu

SEQ ID NO: 1880683 - RNA, 21 nt, Human
aagugauucuccugccucagc

SEQ ID NO: 1880684 - RNA, 22 nt, Human
aagugcaauaaaucugacccag

SEQ ID NO: 1880685 - RNA, 23 nt, Human
aagugcaauaaaucugacccagu

SEQ ID NO: 1880686 - RNA, 20 nt, Human
aagugauccucccaccucag

SEQ ID NO: 1880687 - RNA, 19 nt, Human
aagugauccucccaccuca

SEQ ID NO: 1880688 - RNA, 13 nt, Human
aagugauccuccc

SEQ ID NO: 1880689 - RNA, 21 nt, Human
uaaaauaccagccaguaaaug

SEQ ID NO: 1880690 - RNA, 13 nt, Human
uaaaagucuugug

SEQ ID NO: 1880691 - RNA, 19 nt, Human
uaaaagaaagaaagaaaaa

SEQ ID NO: 1880692 - RNA, 13 nt, Human
uaaaacuuuuuau

SEQ ID NO: 1880693 - RNA, 23 nt, Human
uaaaacuuuuuauauuuuauaca

SEQ ID NO: 1880694 - RNA, 20 nt, Human
uaaaaguacauguuaaacuu

SEQ ID NO: 1880695 - RNA, 19 nt, Human
uaaaagugggcuugauucu

SEQ ID NO: 1880696 - RNA, 14 nt, Human
uaaaauaaauauug

SEQ ID NO: 1880697 - RNA, 18 nt, Human
uaaaauaaauauugucuu

SEQ ID NO: 1880698 - RNA, 17 nt, Human
uaaaauaaauauugucu

SEQ ID NO: 1880699 - RNA, 20 nt, Human
uaaaaagcuuccaugauucu

SEQ ID NO: 1880700 - RNA, 21 nt, Human
uaaaaaaaaaccugagcccca

SEQ ID NO: 1880701 - RNA, 22 nt, Human
uaaaaaugagguacucuccugg

SEQ ID NO: 1880702 - RNA, 15 nt, Human
uaaaaaugagguacu

SEQ ID NO: 1880703 - RNA, 23 nt, Human
uaaaaaucucaaauuucuaaauc

SEQ ID NO: 1880704 - RNA, 13 nt, Human
uaaaacccaagug

SEQ ID NO: 1880705 - RNA, 15 nt, Human
uaaaacuacaaaaau

SEQ ID NO: 1880706 - RNA, 14 nt, Human
uaaaacucuuuuaa

SEQ ID NO: 1880707 - RNA, 18 nt, Human
uaaaacuggcuuuggcuu

SEQ ID NO: 1880708 - RNA, 17 nt, Human
uaaaacuggcuuuggcu

SEQ ID NO: 1880709 - RNA, 15 nt, Human
uaaaacuuuuuaaaa

SEQ ID NO: 1880710 - RNA, 12 nt, Human
uaaaacuuuuua

SEQ ID NO: 1880711 - RNA, 20 nt, Human
uaaaacuucucaagauacug

SEQ ID NO: 1880712 - RNA, 13 nt, Human
aacauucaggagc

SEQ ID NO: 1880713 - RNA, 14 nt, Human
aacauucaggagcu

SEQ ID NO: 1880714 - RNA, 22 nt, Human
aacauauaauguuguuauuuaa

SEQ ID NO: 1880715 - RNA, 17 nt, Human
aacauguauaauauuuu

SEQ ID NO: 1880716 - RNA, 21 nt, Human
aacaguuuuuuaugcuaauca

SEQ ID NO: 1880717 - RNA, 21 nt, Human
aacauauaauguuguuauuua

SEQ ID NO: 1880718 - RNA, 18 nt, Human
aacauauaauguuguuau

SEQ ID NO: 1880719 - RNA, 13 nt, Human
aacauauaauguu

SEQ ID NO: 1880720 - RNA, 14 nt, Human
aacauaaagcaaau

SEQ ID NO: 1880721 - RNA, 19 nt, Human
aacauaaagcaaauagaca

SEQ ID NO: 1880722 - RNA, 18 nt, Human
aacaguccauugaaaggg

SEQ ID NO: 1880723 - RNA, 15 nt, Human
guccgugcugacagc

SEQ ID NO: 1880724 - RNA, 19 nt, Human
guccgugcugacagcugcu

SEQ ID NO: 1880725 - RNA, 20 nt, Human
guccgugcugacagcugcuc

SEQ ID NO: 1880726 - RNA, 21 nt, Human
guccgugcugacagcugcucc

SEQ ID NO: 1880727 - RNA, 22 nt, Human
guccgugcugacagcugcuccu

SEQ ID NO: 1880728 - RNA, 22 nt, Human
gucuaugggacucaaugcacug

SEQ ID NO: 1880729 - RNA, 20 nt, Human
gucuauuuacggaacucaaa

SEQ ID NO: 1880730 - RNA, 23 nt, Human
gucuaggcaggaccuguggccaa

SEQ ID NO: 1880731 - RNA, 23 nt, Human
gucuagccuauguggauuuuuuc

SEQ ID NO: 1880732 - RNA, 20 nt, Human
gucuagauggcuccucucag

SEQ ID NO: 1880733 - RNA, 21 nt, Human
gucuagauggcuccucucagu

SEQ ID NO: 1880734 - RNA, 18 nt, Human
gucgcgcaccgaaaaacu

SEQ ID NO: 1880735 - RNA, 14 nt, Human
gucuaccugagggg

SEQ ID NO: 1880736 - RNA, 13 nt, Human
gucuaccugaggg

SEQ ID NO: 1880737 - RNA, 15 nt, Human
gucuaccugaggggc

SEQ ID NO: 1880738 - RNA, 16 nt, Human
gucuaccugaggggcc

SEQ ID NO: 1880739 - RNA, 14 nt, Human
guccucuuuucuga

SEQ ID NO: 1880740 - RNA, 20 nt, Human
guccucuuuacaugaaacua

SEQ ID NO: 1880741 - RNA, 19 nt, Human
guccugcugcaguugccag

SEQ ID NO: 1880742 - RNA, 16 nt, Human
guccuggcaugggaau

SEQ ID NO: 1880743 - RNA, 12 nt, Human
gucgaggcagga

SEQ ID NO: 1880744 - RNA, 15 nt, Human
gucgagucaaaaugu

SEQ ID NO: 1880745 - RNA, 16 nt, Human
gucgaggacagggagg

SEQ ID NO: 1880746 - RNA, 16 nt, Human
aacacuguucucugcc

SEQ ID NO: 1880747 - RNA, 17 nt, Human
aacacuguucucugccc

SEQ ID NO: 1880748 - RNA, 18 nt, Human
aacacuguucucugcccu

SEQ ID NO: 1880749 - RNA, 17 nt, Human
gucauuugagcagggcu

SEQ ID NO: 1880750 - RNA, 19 nt, Human
aacacuguucucugcccuc

SEQ ID NO: 1880751 - RNA, 21 nt, Human
aacacucacauuuauucugcu

SEQ ID NO: 1880752 - RNA, 21 nt, Human
aacacugggagaaaugaaaaa

SEQ ID NO: 1880753 - RNA, 17 nt, Human
aacacucauugaccuga

SEQ ID NO: 1880754 - RNA, 19 nt, Human
aacacaaacgggcucagca

SEQ ID NO: 1880755 - RNA, 13 nt, Human
aacacaaacugua

SEQ ID NO: 1880756 - RNA, 15 nt, Human
aacacaaacuguaaa

SEQ ID NO: 1880757 - RNA, 16 nt, Human
aacacaaacuguaaau

SEQ ID NO: 1880758 - RNA, 19 nt, Human
aacacaaacuguaaauaaa

SEQ ID NO: 1880759 - RNA, 20 nt, Human
aacacaaagagaaaaagaaa

SEQ ID NO: 1880760 - RNA, 17 nt, Human
aaauuucucuacugucu

SEQ ID NO: 1880761 - RNA, 19 nt, Human
aaauuucuaaaucuccaaa

SEQ ID NO: 1880762 - RNA, 23 nt, Human
guccaugaagauguagaggagaa

SEQ ID NO: 1880763 - RNA, 22 nt, Human
guccaugaagauguagaggaga

SEQ ID NO: 1880764 - RNA, 19 nt, Human
gucauuugagcagggcuca

SEQ ID NO: 1880765 - RNA, 15 nt, Human
gucccaccccacaca

SEQ ID NO: 1880766 - RNA, 22 nt, Human
guccccaccgcagacaggacca

SEQ ID NO: 1880767 - RNA, 22 nt, Human
guccccagacuccaccaagccu

SEQ ID NO: 1880768 - RNA, 20 nt, Human
gucccaccccacacacgcca

SEQ ID NO: 1880769 - RNA, 18 nt, Human
guccccaccgcagacagg

SEQ ID NO: 1880770 - RNA, 19 nt, Human
gucccugguggcagcucac

SEQ ID NO: 1880771 - RNA, 15 nt, Human
gucccuaauaaagcu

SEQ ID NO: 1880772 - RNA, 18 nt, Human
gucccugguggcagcuca

SEQ ID NO: 1880773 - RNA, 18 nt, Human
gucccuuacgugaguccu

SEQ ID NO: 1880774 - RNA, 19 nt, Human
gucccuuacgugaguccug

SEQ ID NO: 1880775 - RNA, 12 nt, Human
gucccuaauaaa

SEQ ID NO: 1880776 - RNA, 22 nt, Human
guccccuguuuguuucugaaag

SEQ ID NO: 1880777 - RNA, 18 nt, Human
guccccuguuuguuucug

SEQ ID NO: 1880778 - RNA, 12 nt, Human
guccccagagaa

SEQ ID NO: 1880779 - RNA, 23 nt, Human
guccccagagaaagcgcagaugc

SEQ ID NO: 1880780 - RNA, 15 nt, Human
gucagaaacaggacc

SEQ ID NO: 1880781 - RNA, 23 nt, Human
gucagaaguuucugccgcagccc

SEQ ID NO: 1880782 - RNA, 21 nt, Human
gucagaaguuucugccgcagc

SEQ ID NO: 1880783 - RNA, 21 nt, Human
gucacugcuuaacuucacaua

SEQ ID NO: 1880784 - RNA, 15 nt, Human
gucacugcuuaacuu

SEQ ID NO: 1880785 - RNA, 15 nt, Human
gucacugcucuggac

SEQ ID NO: 1880786 - RNA, 22 nt, Human
gucagguggggcagcuugaggg

SEQ ID NO: 1880787 - RNA, 18 nt, Human
gucagguggggcagcuug

SEQ ID NO: 1880788 - RNA, 17 nt, Human
gucagguggggcagcuu

SEQ ID NO: 1880789 - RNA, 16 nt, Human
gucagguggggcagcu

SEQ ID NO: 1880790 - RNA, 12 nt, Human
aaauuucuaaau

SEQ ID NO: 1880791 - RNA, 15 nt, Human
aaauuucuaaaucuc

SEQ ID NO: 1880792 - RNA, 13 nt, Human
aaauuucuaaauc

SEQ ID NO: 1880793 - RNA, 13 nt, Human
gucagguuugagu

SEQ ID NO: 1880794 - RNA, 23 nt, Human
gucacauggccuaugcacauaug

SEQ ID NO: 1880795 - RNA, 21 nt, Human
gucacauggccuaugcacaua

SEQ ID NO: 1880796 - RNA, 18 nt, Human
gucacauuccugaacagg

SEQ ID NO: 1880797 - RNA, 22 nt, Human
gucaccaaaucagcugcuacua

SEQ ID NO: 1880798 - RNA, 12 nt, Human
gucacaggcagg

SEQ ID NO: 1880799 - RNA, 20 nt, Human
gucacaggaaguagaggagg

SEQ ID NO: 1880800 - RNA, 21 nt, Human
gucaauuuuguuauguauauu

SEQ ID NO: 1880801 - RNA, 23 nt, Human
gucacaaagaacauguagaaaac

SEQ ID NO: 1880802 - RNA, 15 nt, Human
gucacaggaaguaga

SEQ ID NO: 1880803 - RNA, 13 nt, Human
gucacaggaagua

SEQ ID NO: 1880804 - RNA, 22 nt, Human
gucaauuacaggaaguacugga

SEQ ID NO: 1880805 - RNA, 23 nt, Human
gucacucuggcagcucagagagg

SEQ ID NO: 1880806 - RNA, 15 nt, Human
gucaccaagcccagu

SEQ ID NO: 1880807 - RNA, 12 nt, Human
gucaccaagccc

SEQ ID NO: 1880808 - RNA, 14 nt, Human
gucacugagacagc

SEQ ID NO: 1880809 - RNA, 15 nt, Human
gucacugagacagcc

SEQ ID NO: 1880810 - RNA, 16 nt, Human
gucacugagacagccc

SEQ ID NO: 1880811 - RNA, 10 nt, Human
gucacugcuu

SEQ ID NO: 1880812 - RNA, 17 nt, Human
gucacugagacagcccg

SEQ ID NO: 1880813 - RNA, 18 nt, Human
gucacugagacagcccgg

SEQ ID NO: 1880814 - RNA, 21 nt, Human
gucacugagacagcccgggcu

SEQ ID NO: 1880815 - RNA, 23 nt, Human
gucacugagacagcccgggcucu

SEQ ID NO: 1880816 - RNA, 13 nt, Human
guauuuauaaaua

SEQ ID NO: 1880817 - RNA, 16 nt, Human
guauuuacgcuuugau

SEQ ID NO: 1880818 - RNA, 17 nt, Human
guauuuacgcuuugauu

SEQ ID NO: 1880819 - RNA, 19 nt, Human
guauuuacgcuuugauuca

SEQ ID NO: 1880820 - RNA, 20 nt, Human
guauuguuugggauccuauu

SEQ ID NO: 1880821 - RNA, 9 nt, Human
guauuuaac

SEQ ID NO: 1880822 - RNA, 23 nt, Human
guauuguuugggauccuauugaa

SEQ ID NO: 1880823 - RNA, 21 nt, Human
aaaugucucuuuaaugucaca

SEQ ID NO: 1880824 - RNA, 16 nt, Human
aaaugucuauuaaggu

SEQ ID NO: 1880825 - RNA, 17 nt, Human
aaauguauauauguaua

SEQ ID NO: 1880826 - RNA, 18 nt, Human
aaauguaugauuacauca

SEQ ID NO: 1880827 - RNA, 17 nt, Human
aaauguaucuuauucac

SEQ ID NO: 1880828 - RNA, 14 nt, Human
aaauguaucuucca

SEQ ID NO: 1880829 - RNA, 14 nt, Human
aaauguaucuuauu

SEQ ID NO: 1880830 - RNA, 16 nt, Human
aaaucauucauuuucu

SEQ ID NO: 1880831 - RNA, 21 nt, Human
guauucucuccuguaccucuu

SEQ ID NO: 1880832 - RNA, 18 nt, Human
guauucucuccuguaccu

SEQ ID NO: 1880833 - RNA, 17 nt, Human
aaauuguauuacaaauc

SEQ ID NO: 1880834 - RNA, 17 nt, Human
aaauuccaagugauuga

SEQ ID NO: 1880835 - RNA, 14 nt, Human
aaauucacaaacuu

SEQ ID NO: 1880836 - RNA, 15 nt, Human
aaauucacaaacuuu

SEQ ID NO: 1880837 - RNA, 17 nt, Human
aaauucaauuguaaauu

SEQ ID NO: 1880838 - RNA, 19 nt, Human
aaauucaauuguaaauuga

SEQ ID NO: 1880839 - RNA, 20 nt, Human
aaauucaauuguaaauugaa

SEQ ID NO: 1880840 - RNA, 23 nt, Human
aaauucaauuguaaauugaauca

SEQ ID NO: 1880841 - RNA, 17 nt, Human
aaauucacaaacuuuua

SEQ ID NO: 1880842 - RNA, 18 nt, Human
aaauucacaaacuuuuau

SEQ ID NO: 1880843 - RNA, 16 nt, Human
aaauuccccacccuga

SEQ ID NO: 1880844 - RNA, 20 nt, Human
aaauucccaacaaacauuga

SEQ ID NO: 1880845 - RNA, 21 nt, Human
aaauuaggauguaaaucugcu

SEQ ID NO: 1880846 - RNA, 23 nt, Human
aaauuaugugccagauuuaugca

SEQ ID NO: 1880847 - RNA, 15 nt, Human
aaauucaauuguaaa

SEQ ID NO: 1880848 - RNA, 21 nt, Human
aaauucaacguuaauaauucu

SEQ ID NO: 1880849 - RNA, 20 nt, Human
gucucuuuuuuuggcccagg

SEQ ID NO: 1880850 - RNA, 21 nt, Human
gucucuuuuuuuggcccaggc

SEQ ID NO: 1880851 - RNA, 22 nt, Human
gucucuuucaugaguuuuuccc

SEQ ID NO: 1880852 - RNA, 14 nt, Human
gucucaaaaaaaca

SEQ ID NO: 1880853 - RNA, 12 nt, Human
gucuauuugaga

SEQ ID NO: 1880854 - RNA, 17 nt, Human
gucucaaaaaaagaaaa

SEQ ID NO: 1880855 - RNA, 19 nt, Human
gucucaaaaaaagaaaaag

SEQ ID NO: 1880856 - RNA, 14 nt, Human
gucugacaggcaau

SEQ ID NO: 1880857 - RNA, 13 nt, Human
gucugacaggcaa

SEQ ID NO: 1880858 - RNA, 12 nt, Human
gucugacaggca

SEQ ID NO: 1880859 - RNA, 18 nt, Human
gucugacaggcaaugcug

SEQ ID NO: 1880860 - RNA, 15 nt, Human
gucugacaggcaaug

SEQ ID NO: 1880861 - RNA, 20 nt, Human
gucugacaggcaaugcuggc

SEQ ID NO: 1880862 - RNA, 14 nt, Human
gucuggaaguccaa

SEQ ID NO: 1880863 - RNA, 19 nt, Human
gucuuauauauuguagaua

SEQ ID NO: 1880864 - RNA, 16 nt, Human
gucuggaaugcagugg

SEQ ID NO: 1880865 - RNA, 15 nt, Human
gucuggaaugcagug

SEQ ID NO: 1880866 - RNA, 18 nt, Human
gucuggaaugcaguggua

SEQ ID NO: 1880867 - RNA, 21 nt, Human
gucuugugacuagugcugaag

SEQ ID NO: 1880868 - RNA, 20 nt, Human
gucuugugacuagugcugaa

SEQ ID NO: 1880869 - RNA, 19 nt, Human
gucuugugacuagugcuga

SEQ ID NO: 1880870 - RNA, 13 nt, Human
gucuugugacuag

SEQ ID NO: 1880871 - RNA, 22 nt, Human
gucuucaaccagggauuguuuc

SEQ ID NO: 1880872 - RNA, 20 nt, Human
gucuuguguuucuuuaguuu

SEQ ID NO: 1880873 - RNA, 22 nt, Human
gucuuuccacuccuccuagcca

SEQ ID NO: 1880874 - RNA, 12 nt, Human
aacuauggccug

SEQ ID NO: 1880875 - RNA, 18 nt, Human
aacuauggaucagaauag

SEQ ID NO: 1880876 - RNA, 12 nt, Human
aacguggcugcu

SEQ ID NO: 1880877 - RNA, 13 nt, Human
aacguggcugcuu

SEQ ID NO: 1880878 - RNA, 17 nt, Human
aacguuuuuccuguucu

SEQ ID NO: 1880879 - RNA, 21 nt, Human
aacuaggugcauauuuauaaa

SEQ ID NO: 1880880 - RNA, 17 nt, Human
aacuagggaagauaaua

SEQ ID NO: 1880881 - RNA, 15 nt, Human
aaccuuauuguaccu

SEQ ID NO: 1880882 - RNA, 16 nt, Human
aaccuuauuguaccuc

SEQ ID NO: 1880883 - RNA, 17 nt, Human
aaccuuauuguaccucu

SEQ ID NO: 1880884 - RNA, 18 nt, Human
aaccuuauuguaccucuc

SEQ ID NO: 1880885 - RNA, 19 nt, Human
aaccuuauuguaccucucu

SEQ ID NO: 1880886 - RNA, 12 nt, Human
aaccuggggggc

SEQ ID NO: 1880887 - RNA, 14 nt, Human
aaccugggauucag

SEQ ID NO: 1880888 - RNA, 17 nt, Human
aaccugggauucaggaa

SEQ ID NO: 1880889 - RNA, 20 nt, Human
aaccugggauucaggaaugu

SEQ ID NO: 1880890 - RNA, 21 nt, Human
aaccugggauucaggaaugug

SEQ ID NO: 1880891 - RNA, 12 nt, Human
gucuuuccuaga

SEQ ID NO: 1880892 - RNA, 15 nt, Human
aacgucuuaaauauu

SEQ ID NO: 1880893 - RNA, 17 nt, Human
aaccuucuggccuccca

SEQ ID NO: 1880894 - RNA, 19 nt, Human
aaccuucacacacagacug

SEQ ID NO: 1880895 - RNA, 14 nt, Human
aacgucuuaaauau

SEQ ID NO: 1880896 - RNA, 12 nt, Human
aacgucuuaaau

SEQ ID NO: 1880897 - RNA, 12 nt, Human
aaccuucuggcc

SEQ ID NO: 1880898 - RNA, 13 nt, Human
aacgucugugcca

SEQ ID NO: 1880899 - RNA, 16 nt, Human
gugagacucugucuca

SEQ ID NO: 1880900 - RNA, 14 nt, Human
gugagacucugucu

SEQ ID NO: 1880901 - RNA, 22 nt, Human
gugagacucgagaacuuucauu

SEQ ID NO: 1880902 - RNA, 20 nt, Human
gugagacucgagaacuuuca

SEQ ID NO: 1880903 - RNA, 17 nt, Human
gugagacucgagaacuu

SEQ ID NO: 1880904 - RNA, 22 nt, Human
gugagacccugucucaaaaaaa

SEQ ID NO: 1880905 - RNA, 19 nt, Human
gugacaugucuuuucuugc

SEQ ID NO: 1880906 - RNA, 19 nt, Human
gugaaguuuaauugacuua

SEQ ID NO: 1880907 - RNA, 23 nt, Human
gugaauaauacaguaucucaggg

SEQ ID NO: 1880908 - RNA, 15 nt, Human
gugaaguugcuucuu

SEQ ID NO: 1880909 - RNA, 13 nt, Human
gugaauaaagugc

SEQ ID NO: 1880910 - RNA, 22 nt, Human
gugacagagugagacucugucu

SEQ ID NO: 1880911 - RNA, 20 nt, Human
gugacagagugagacucugu

SEQ ID NO: 1880912 - RNA, 23 nt, Human
gugacagaggcagccccauucug

SEQ ID NO: 1880913 - RNA, 14 nt, Human
gugaauaaagugcu

SEQ ID NO: 1880914 - RNA, 20 nt, Human
aacugauuuuuuuuuccuuc

SEQ ID NO: 1880915 - RNA, 21 nt, Human
aacugauuuuuuuuuccuuca

SEQ ID NO: 1880916 - RNA, 13 nt, Human
aacucuuuuaaca

SEQ ID NO: 1880917 - RNA, 14 nt, Human
aacucuuuuaacag

SEQ ID NO: 1880918 - RNA, 22 nt, Human
aacugauuuuuuuuuccuucag

SEQ ID NO: 1880919 - RNA, 23 nt, Human
aacugauuuuuuuuuccuucagu

SEQ ID NO: 1880920 - RNA, 16 nt, Human
aacugcauuggcuuug

SEQ ID NO: 1880921 - RNA, 18 nt, Human
aacugccaaaaugcucua

SEQ ID NO: 1880922 - RNA, 17 nt, Human
aacucuugauuauccau

SEQ ID NO: 1880923 - RNA, 11 nt, Human
aacucuugauu

SEQ ID NO: 1880924 - RNA, 22 nt, Human
aacucuccucugcugcuggcug

SEQ ID NO: 1880925 - RNA, 23 nt, Human
aacucuccucugcugcuggcugg

SEQ ID NO: 1880926 - RNA, 12 nt, Human
aacucucugaac

SEQ ID NO: 1880927 - RNA, 18 nt, Human
gugagacucugucucaaa

SEQ ID NO: 1880928 - RNA, 12 nt, Human
gugaggcucugc

SEQ ID NO: 1880929 - RNA, 13 nt, Human
gugaggcucugcc

SEQ ID NO: 1880930 - RNA, 14 nt, Human
gugaggcucugccc

SEQ ID NO: 1880931 - RNA, 15 nt, Human
gugaggcucugcccu

SEQ ID NO: 1880932 - RNA, 16 nt, Human
gugaggcucugcccuu

SEQ ID NO: 1880933 - RNA, 17 nt, Human
gugaggcucugcccuug

SEQ ID NO: 1880934 - RNA, 19 nt, Human
gugagucaccaagcccagu

SEQ ID NO: 1880935 - RNA, 17 nt, Human
gugagggagggcuguca

SEQ ID NO: 1880936 - RNA, 19 nt, Human
aacucuccucugcugcugg

SEQ ID NO: 1880937 - RNA, 21 nt, Human
aacucuccucugcugcuggcu

SEQ ID NO: 1880938 - RNA, 17 nt, Human
gugagucaccaagccca

SEQ ID NO: 1880939 - RNA, 23 nt, Human
gugaguacuacaguccucccauc

SEQ ID NO: 1880940 - RNA, 18 nt, Human
gugaggcucugcccuugg

SEQ ID NO: 1880941 - RNA, 14 nt, Human
gugcuccuccuugg

SEQ ID NO: 1880942 - RNA, 14 nt, Human
gugcucgccccagc

SEQ ID NO: 1880943 - RNA, 16 nt, Human
gugcucgccccagcag

SEQ ID NO: 1880944 - RNA, 14 nt, Human
gugcucgcccugcg

SEQ ID NO: 1880945 - RNA, 22 nt, Human
gugcuccauggcugccaucuca

SEQ ID NO: 1880946 - RNA, 18 nt, Human
gugcuccauggcugccau

SEQ ID NO: 1880947 - RNA, 19 nt, Human
gugcucaggagcccuggga

SEQ ID NO: 1880948 - RNA, 18 nt, Human
gugcucaggagcccuggg

SEQ ID NO: 1880949 - RNA, 19 nt, Human
gugcuaucucccccagccc

SEQ ID NO: 1880950 - RNA, 16 nt, Human
gugcucaggagcccug

SEQ ID NO: 1880951 - RNA, 14 nt, Human
gugcucuggacagg

SEQ ID NO: 1880952 - RNA, 13 nt, Human
gugcucuggacag

SEQ ID NO: 1880953 - RNA, 16 nt, Human
gugcucugaucaucca

SEQ ID NO: 1880954 - RNA, 15 nt, Human
gugcucuccaagccc

SEQ ID NO: 1880955 - RNA, 12 nt, Human
gugcugcccugc

SEQ ID NO: 1880956 - RNA, 13 nt, Human
gugcugcccugcc

SEQ ID NO: 1880957 - RNA, 14 nt, Human
gugcugcccugccc

SEQ ID NO: 1880958 - RNA, 15 nt, Human
gugcugcccugccca

SEQ ID NO: 1880959 - RNA, 17 nt, Human
gugcuaggaacacuccu

SEQ ID NO: 1880960 - RNA, 15 nt, Human
gugcuaucuccccca

SEQ ID NO: 1880961 - RNA, 18 nt, Human
gugcuaucucccccagcc

SEQ ID NO: 1880962 - RNA, 16 nt, Human
gugcuacaggggccag

SEQ ID NO: 1880963 - RNA, 19 nt, Human
gugcuacaggggccagaag

SEQ ID NO: 1880964 - RNA, 20 nt, Human
gugcuacaggggccagaaga

SEQ ID NO: 1880965 - RNA, 14 nt, Human
aagaagagaaagaa

SEQ ID NO: 1880966 - RNA, 14 nt, Human
aagaagagccacag

SEQ ID NO: 1880967 - RNA, 15 nt, Human
aagaagagccacagu

SEQ ID NO: 1880968 - RNA, 22 nt, Human
aagaaaauaguggugugauuug

SEQ ID NO: 1880969 - RNA, 21 nt, Human
aagaaaauaguggugugauuu

SEQ ID NO: 1880970 - RNA, 15 nt, Human
aagaaaauaguggug

SEQ ID NO: 1880971 - RNA, 13 nt, Human
aagaaaacaucua

SEQ ID NO: 1880972 - RNA, 16 nt, Human
aagaaaacaucuauuc

SEQ ID NO: 1880973 - RNA, 16 nt, Human
aagaaaauaccaagga

SEQ ID NO: 1880974 - RNA, 19 nt, Human
aagaaagcccuuaggaaga

SEQ ID NO: 1880975 - RNA, 16 nt, Human
aagaaagaaaaucagg

SEQ ID NO: 1880976 - RNA, 13 nt, Human
aagaaagaaaauc

SEQ ID NO: 1880977 - RNA, 14 nt, Human
aagaaagaaaauca

SEQ ID NO: 1880978 - RNA, 17 nt, Human
aagaaaaaugagccugg

SEQ ID NO: 1880979 - RNA, 18 nt, Human
aagaaaaaugagccuggc

SEQ ID NO: 1880980 - RNA, 19 nt, Human
aagaaaaaauauuuucccu

SEQ ID NO: 1880981 - RNA, 13 nt, Human
aagaaaaagaaaa

SEQ ID NO: 1880982 - RNA, 18 nt, Human
aagaaaaagaaaaagaaa

SEQ ID NO: 1880983 - RNA, 19 nt, Human
gugccagauuuaugcauau

SEQ ID NO: 1880984 - RNA, 23 nt, Human
aacuuuaccuuuuuuauacauaa

SEQ ID NO: 1880985 - RNA, 22 nt, Human
aacuuuaccuuuuuuauacaua

SEQ ID NO: 1880986 - RNA, 21 nt, Human
aacuuuaccuuuuuuauacau

SEQ ID NO: 1880987 - RNA, 21 nt, Human
gugcauuuggugguuucagaa

SEQ ID NO: 1880988 - RNA, 23 nt, Human
gugccaaaaacaacaacaaaaug

SEQ ID NO: 1880989 - RNA, 19 nt, Human
gugcauuugaggucuguuc

SEQ ID NO: 1880990 - RNA, 17 nt, Human
gugcauuugaggucugu

SEQ ID NO: 1880991 - RNA, 21 nt, Human
gugcacaugcacgugugugca

SEQ ID NO: 1880992 - RNA, 23 nt, Human
gugcacaagcuccaagcucccag

SEQ ID NO: 1880993 - RNA, 18 nt, Human
gugcaaugaccuuucaau

SEQ ID NO: 1880994 - RNA, 13 nt, Human
gugcacaagcucc

SEQ ID NO: 1880995 - RNA, 16 nt, Human
gugcacaagcuccaag

SEQ ID NO: 1880996 - RNA, 21 nt, Human
gugcacaagcuccaagcuccc

SEQ ID NO: 1880997 - RNA, 20 nt, Human
gugaucuuuuguucccaucc

SEQ ID NO: 1880998 - RNA, 15 nt, Human
gugaucucagaucag

SEQ ID NO: 1880999 - RNA, 14 nt, Human
gugaucucagauca

SEQ ID NO: 1881000 - RNA, 10 nt, Human
gugauguguc

SEQ ID NO: 1881001 - RNA, 15 nt, Human
gugaugugaagccaa

SEQ ID NO: 1881002 - RNA, 17 nt, Human
gugauuaccagggacug

SEQ ID NO: 1881003 - RNA, 16 nt, Human
gugauuaccagggacu

SEQ ID NO: 1881004 - RNA, 11 nt, Human
gugauuaccag

SEQ ID NO: 1881005 - RNA, 19 nt, Human
gugcaauaaaucugaccca

SEQ ID NO: 1881006 - RNA, 21 nt, Human
gugcaauaaaucugacccagu

SEQ ID NO: 1881007 - RNA, 22 nt, Human
gugcaauaaaucugacccagug

SEQ ID NO: 1881008 - RNA, 23 nt, Human
gugcaauaaaucugacccagugc

SEQ ID NO: 1881009 - RNA, 22 nt, Human
aacuucaccauauuaccacaga

SEQ ID NO: 1881010 - RNA, 22 nt, Human
aacuucacauauugauuuccgu

SEQ ID NO: 1881011 - RNA, 14 nt, Human
aacuucacauauug

SEQ ID NO: 1881012 - RNA, 13 nt, Human
aacuucagacaua

SEQ ID NO: 1881013 - RNA, 21 nt, Human
aacuugagaacuuuauuucca

SEQ ID NO: 1881014 - RNA, 18 nt, Human
aacuugagaacuuuauuu

SEQ ID NO: 1881015 - RNA, 22 nt, Human
aacuugagaacuuuauuuccaa

SEQ ID NO: 1881016 - RNA, 21 nt, Human
acaaagaugggugaaggcugg

SEQ ID NO: 1881017 - RNA, 22 nt, Human
acaaagaugggugaaggcuggc

SEQ ID NO: 1881018 - RNA, 12 nt, Human
acaaagcagcca

SEQ ID NO: 1881019 - RNA, 18 nt, Human
acaaaggcaaagggucca

SEQ ID NO: 1881020 - RNA, 13 nt, Human
acaaagcagccac

SEQ ID NO: 1881021 - RNA, 22 nt, Human
acaaaggaugcccaaagaugca

SEQ ID NO: 1881022 - RNA, 14 nt, Human
acaaagggcccaga

SEQ ID NO: 1881023 - RNA, 18 nt, Human
acaaaaggauaaugaaua

SEQ ID NO: 1881024 - RNA, 22 nt, Human
acaaaagcaugugagacugguu

SEQ ID NO: 1881025 - RNA, 11 nt, Human
acaaaagcaug

SEQ ID NO: 1881026 - RNA, 21 nt, Human
aauuguguuuauaauuuuaaa

SEQ ID NO: 1881027 - RNA, 20 nt, Human
aauuguguuuauaauuuuaa

SEQ ID NO: 1881028 - RNA, 16 nt, Human
aauuguuacaaauugu

SEQ ID NO: 1881029 - RNA, 19 nt, Human
uagaggagaaacuggaacu

SEQ ID NO: 1881030 - RNA, 15 nt, Human
uagauauaugcucug

SEQ ID NO: 1881031 - RNA, 22 nt, Human
uagaggagaaacuggaacucuc

SEQ ID NO: 1881032 - RNA, 19 nt, Human
uagauauaugcucugcaug

SEQ ID NO: 1881033 - RNA, 15 nt, Human
uagccagaggacugu

SEQ ID NO: 1881034 - RNA, 18 nt, Human
acaaauuuacagagacag

SEQ ID NO: 1881035 - RNA, 19 nt, Human
acaaauuuacagagacaga

SEQ ID NO: 1881036 - RNA, 18 nt, Human
uagccagcacacagggca

SEQ ID NO: 1881037 - RNA, 19 nt, Human
uagccagcacacagggcag

SEQ ID NO: 1881038 - RNA, 20 nt, Human
uagccagcacacagggcagu

SEQ ID NO: 1881039 - RNA, 16 nt, Human
acaaauuuuuauuucu

SEQ ID NO: 1881040 - RNA, 18 nt, Human
acaaauuuuuauuucuaa

SEQ ID NO: 1881041 - RNA, 11 nt, Human
uagccagagga

SEQ ID NO: 1881042 - RNA, 15 nt, Human
uagccagaggagaga

SEQ ID NO: 1881043 - RNA, 16 nt, Human
uagccacauuuggaau

SEQ ID NO: 1881044 - RNA, 23 nt, Human
acaacacucauugaccugaggcc

SEQ ID NO: 1881045 - RNA, 21 nt, Human
acaacacucauugaccugagg

SEQ ID NO: 1881046 - RNA, 21 nt, Human
acaaauuuuuauuucuaaaau

SEQ ID NO: 1881047 - RNA, 19 nt, Human
acaagaccacguuucuaaa

SEQ ID NO: 1881048 - RNA, 19 nt, Human
acaagacccuugugguccc

SEQ ID NO: 1881049 - RNA, 20 nt, Human
acaagacccaaaaggcagaa

SEQ ID NO: 1881050 - RNA, 19 nt, Human
uagcauggcugccaauggg

SEQ ID NO: 1881051 - RNA, 14 nt, Human
uagauggcuccucu

SEQ ID NO: 1881052 - RNA, 14 nt, Human
uagauggauucucc

SEQ ID NO: 1881053 - RNA, 16 nt, Human
uagaugcuggcccagg

SEQ ID NO: 1881054 - RNA, 18 nt, Human
uagaugcuggcccagggc

SEQ ID NO: 1881055 - RNA, 21 nt, Human
uagaugcuggcccagggccca

SEQ ID NO: 1881056 - RNA, 22 nt, Human
uagaugcuggcccagggcccag

SEQ ID NO: 1881057 - RNA, 13 nt, Human
uagaugcuggccc

SEQ ID NO: 1881058 - RNA, 14 nt, Human
uagaugcuggccca

SEQ ID NO: 1881059 - RNA, 15 nt, Human
uagaugcuggcccag

SEQ ID NO: 1881060 - RNA, 21 nt, Human
uagccaaggccaaaggaagca

SEQ ID NO: 1881061 - RNA, 22 nt, Human
uagcauuuugcuaaaugugaau

SEQ ID NO: 1881062 - RNA, 14 nt, Human
uagccaaggccaaa

SEQ ID NO: 1881063 - RNA, 16 nt, Human
uagcauuuugcuaaau

SEQ ID NO: 1881064 - RNA, 20 nt, Human
uaggaggaccagagcuacug

SEQ ID NO: 1881065 - RNA, 23 nt, Human
uaggagcugccuuggcucagaca

SEQ ID NO: 1881066 - RNA, 18 nt, Human
uaggagcugccuuggcuc

SEQ ID NO: 1881067 - RNA, 14 nt, Human
uaggacuguagaaa

SEQ ID NO: 1881068 - RNA, 13 nt, Human
uaggacuguagaa

SEQ ID NO: 1881069 - RNA, 12 nt, Human
uaggagaagcca

SEQ ID NO: 1881070 - RNA, 15 nt, Human
uaggagaagccagga

SEQ ID NO: 1881071 - RNA, 16 nt, Human
uaggagaagccaggaa

SEQ ID NO: 1881072 - RNA, 21 nt, Human
uagcuuacaagccagcuggag

SEQ ID NO: 1881073 - RNA, 13 nt, Human
uagcuguugagcu

SEQ ID NO: 1881074 - RNA, 16 nt, Human
uagcuguugagcuguu

SEQ ID NO: 1881075 - RNA, 17 nt, Human
uagcuguugagcuguuu

SEQ ID NO: 1881076 - RNA, 19 nt, Human
uaggacucaaaguuucaga

SEQ ID NO: 1881077 - RNA, 21 nt, Human
uagggaaggauacaaaagcau

SEQ ID NO: 1881078 - RNA, 12 nt, Human
uaggcauuuccu

SEQ ID NO: 1881079 - RNA, 21 nt, Human
uagggaauggcacagcccaaa

SEQ ID NO: 1881080 - RNA, 14 nt, Human
uaggcauuguggga

SEQ ID NO: 1881081 - RNA, 16 nt, Human
uaggcauuugcugaau

SEQ ID NO: 1881082 - RNA, 20 nt, Human
uaggcauuugcugaauacag

SEQ ID NO: 1881083 - RNA, 18 nt, Human
uaggagggaguuaucuaa

SEQ ID NO: 1881084 - RNA, 21 nt, Human
uaggagggaguuaucuaaaag

SEQ ID NO: 1881085 - RNA, 16 nt, Human
uaggagggaguuaucu

SEQ ID NO: 1881086 - RNA, 14 nt, Human
acaaggagggcaca

SEQ ID NO: 1881087 - RNA, 21 nt, Human
acaaggauagaugcuggccca

SEQ ID NO: 1881088 - RNA, 15 nt, Human
acaaggacuuccugu

SEQ ID NO: 1881089 - RNA, 16 nt, Human
acaaggauagaugcug

SEQ ID NO: 1881090 - RNA, 17 nt, Human
acaaggauagaugcugg

SEQ ID NO: 1881091 - RNA, 18 nt, Human
acaaggauagaugcuggc

SEQ ID NO: 1881092 - RNA, 18 nt, Human
acaagaccacguuucuaa

SEQ ID NO: 1881093 - RNA, 21 nt, Human
acaauaaguuaacuauuuuau

SEQ ID NO: 1881094 - RNA, 14 nt, Human
acaauaccuuauuu

SEQ ID NO: 1881095 - RNA, 12 nt, Human
acaaugacuuac

SEQ ID NO: 1881096 - RNA, 19 nt, Human
acaaugacuuacuguacau

SEQ ID NO: 1881097 - RNA, 20 nt, Human
acaaugacuaauucuugcau

SEQ ID NO: 1881098 - RNA, 18 nt, Human
acaaugacuuacuguaca

SEQ ID NO: 1881099 - RNA, 17 nt, Human
acaaugacuuacuguac

SEQ ID NO: 1881100 - RNA, 14 nt, Human
acacauaccuuugg

SEQ ID NO: 1881101 - RNA, 15 nt, Human
acacauacccucuuc

SEQ ID NO: 1881102 - RNA, 17 nt, Human
acacauaccuuugguua

SEQ ID NO: 1881103 - RNA, 13 nt, Human
acacauaugaggg

SEQ ID NO: 1881104 - RNA, 17 nt, Human
acacauaugagggggaa

SEQ ID NO: 1881105 - RNA, 19 nt, Human
uauaaaagccuguuuaaga

SEQ ID NO: 1881106 - RNA, 22 nt, Human
uauaaaagggacugagaaauuu

SEQ ID NO: 1881107 - RNA, 19 nt, Human
uauaaaaauaaaaaacacu

SEQ ID NO: 1881108 - RNA, 20 nt, Human
uauaaaagccuguuuaagag

SEQ ID NO: 1881109 - RNA, 20 nt, Human
uaguuccaccaucaagccac

SEQ ID NO: 1881110 - RNA, 15 nt, Human
uaguuacuauaugcc

SEQ ID NO: 1881111 - RNA, 18 nt, Human
uauaaaaagcuuccauga

SEQ ID NO: 1881112 - RNA, 20 nt, Human
acacauuuuauuuuauuaug

SEQ ID NO: 1881113 - RNA, 19 nt, Human
acacauuuuauuuuauuau

SEQ ID NO: 1881114 - RNA, 14 nt, Human
acacauuuuauuuu

SEQ ID NO: 1881115 - RNA, 21 nt, Human
acacaugagcaucaggccagg

SEQ ID NO: 1881116 - RNA, 18 nt, Human
acacaugauccugcaauu

SEQ ID NO: 1881117 - RNA, 17 nt, Human
acaccauugaaggcuua

SEQ ID NO: 1881118 - RNA, 17 nt, Human
acacccucaaccucuuc

SEQ ID NO: 1881119 - RNA, 18 nt, Human
acacccucaaccucuucu

SEQ ID NO: 1881120 - RNA, 22 nt, Human
acacucacauuuauucugcuca

SEQ ID NO: 1881121 - RNA, 20 nt, Human
acacucacauuuauucugcu

SEQ ID NO: 1881122 - RNA, 15 nt, Human
uauaaguguguguuu

SEQ ID NO: 1881123 - RNA, 15 nt, Human
acacucaaaagcugg

SEQ ID NO: 1881124 - RNA, 17 nt, Human
acacuaugguauuugag

SEQ ID NO: 1881125 - RNA, 18 nt, Human
acacuaugguauuugagu

SEQ ID NO: 1881126 - RNA, 19 nt, Human
acacuaugguauuugagug

SEQ ID NO: 1881127 - RNA, 22 nt, Human
acacuaugguauuugaguguuu

SEQ ID NO: 1881128 - RNA, 16 nt, Human
acaccgggcacucaga

SEQ ID NO: 1881129 - RNA, 21 nt, Human
acaccucugcacaagcugcac

SEQ ID NO: 1881130 - RNA, 20 nt, Human
acacuaaccacgcuggaccu

SEQ ID NO: 1881131 - RNA, 23 nt, Human
acaccuuuuauugacacagaaaa

SEQ ID NO: 1881132 - RNA, 21 nt, Human
acaccuuuuauugacacagaa

SEQ ID NO: 1881133 - RNA, 14 nt, Human
acaccuuucuccuu

SEQ ID NO: 1881134 - RNA, 17 nt, Human
acaccuuucuccuuugu

SEQ ID NO: 1881135 - RNA, 22 nt, Human
acaccuuucuccuuuguacuuu

SEQ ID NO: 1881136 - RNA, 15 nt, Human
acaccuuauauuuac

SEQ ID NO: 1881137 - RNA, 23 nt, Human
uaguaccaaucauuuuaauuauu

SEQ ID NO: 1881138 - RNA, 16 nt, Human
uaguaccauuuauaca

SEQ ID NO: 1881139 - RNA, 16 nt, Human
uaguaccaaucauuuu

SEQ ID NO: 1881140 - RNA, 19 nt, Human
uaguaacuucuuauggaau

SEQ ID NO: 1881141 - RNA, 18 nt, Human
uaguaacuucuuauggaa

SEQ ID NO: 1881142 - RNA, 18 nt, Human
acacaguauuacuucugc

SEQ ID NO: 1881143 - RNA, 15 nt, Human
acacacugaugcuua

SEQ ID NO: 1881144 - RNA, 17 nt, Human
acacacugaugcuuaga

SEQ ID NO: 1881145 - RNA, 22 nt, Human
acacaguauuacuucugcuaca

SEQ ID NO: 1881146 - RNA, 19 nt, Human
acacaguauuacuucugcu

SEQ ID NO: 1881147 - RNA, 20 nt, Human
acacagugugaauaaagugc

SEQ ID NO: 1881148 - RNA, 21 nt, Human
uagugaaucacguaaagcuag

SEQ ID NO: 1881149 - RNA, 23 nt, Human
uaguuaagacaugauuuccuuga

SEQ ID NO: 1881150 - RNA, 14 nt, Human
uaguuaagacauga

SEQ ID NO: 1881151 - RNA, 19 nt, Human
uaguuaagacaugauuucc

SEQ ID NO: 1881152 - RNA, 21 nt, Human
uaguuaagacaugauuuccuu

SEQ ID NO: 1881153 - RNA, 18 nt, Human
uaguaccauuuauacaaa

SEQ ID NO: 1881154 - RNA, 19 nt, Human
uaguaccauuuauacaaau

SEQ ID NO: 1881155 - RNA, 20 nt, Human
uaguaccauuuauacaaauu

SEQ ID NO: 1881156 - RNA, 21 nt, Human
uaguccgugcugacagcugcu

SEQ ID NO: 1881157 - RNA, 22 nt, Human
uaguccgugcugacagcugcuc

SEQ ID NO: 1881158 - RNA, 23 nt, Human
uaguccgugcugacagcugcucc

SEQ ID NO: 1881159 - RNA, 19 nt, Human
acaaugugaaaagaaaaau

SEQ ID NO: 1881160 - RNA, 15 nt, Human
acaauguauuuucuu

SEQ ID NO: 1881161 - RNA, 12 nt, Human
acaaugugaacu

SEQ ID NO: 1881162 - RNA, 17 nt, Human
acaaugugaaaagaaaa

SEQ ID NO: 1881163 - RNA, 23 nt, Human
acacaaugugucuuucuuuuugg

SEQ ID NO: 1881164 - RNA, 17 nt, Human
acaaugugaacuuuauu

SEQ ID NO: 1881165 - RNA, 17 nt, Human
acacaaugugucuuucu

SEQ ID NO: 1881166 - RNA, 19 nt, Human
acaauggauaggcacagga

SEQ ID NO: 1881167 - RNA, 24 nt, Human
acaaugcugugcccuaaaguguau

SEQ ID NO: 1881168 - RNA, 23 nt, Human
acaaugcugugcccuaaagugua

SEQ ID NO: 1881169 - RNA, 22 nt, Human
acaaugcugugcccuaaagugu

SEQ ID NO: 1881170 - RNA, 21 nt, Human
acaaugcugugcccuaaagug

SEQ ID NO: 1881171 - RNA, 21 nt, Human
acacacgcgugcacacaccag

SEQ ID NO: 1881172 - RNA, 20 nt, Human
acacaccagagcccaccuug

SEQ ID NO: 1881173 - RNA, 15 nt, Human
acacaccagagccca

SEQ ID NO: 1881174 - RNA, 14 nt, Human
acacaccagagccc

SEQ ID NO: 1881175 - RNA, 21 nt, Human
acacacugcauguuugugauu

SEQ ID NO: 1881176 - RNA, 13 nt, Human
acacacugaugcu

SEQ ID NO: 1881177 - RNA, 22 nt, Human
acacacacgcgugcacacacca

SEQ ID NO: 1881178 - RNA, 14 nt, Human
acacacagcucugu

SEQ ID NO: 1881179 - RNA, 13 nt, Human
acacacagcucug

SEQ ID NO: 1881180 - RNA, 17 nt, Human
acacacagcucuguccu

SEQ ID NO: 1881181 - RNA, 19 nt, Human
acacacagcucuguccugg

SEQ ID NO: 1881182 - RNA, 13 nt, Human
uaugcuaaucagg

SEQ ID NO: 1881183 - RNA, 20 nt, Human
uaugccuuugauguauuuuc

SEQ ID NO: 1881184 - RNA, 17 nt, Human
uaugcuaaaauacauuu

SEQ ID NO: 1881185 - RNA, 17 nt, Human
uaugccugggcagaagg

SEQ ID NO: 1881186 - RNA, 22 nt, Human
uaugccguuacuuuucauauuu

SEQ ID NO: 1881187 - RNA, 24 nt, Human
uaugcauuugaaaauuuugauguu

SEQ ID NO: 1881188 - RNA, 23 nt, Human
uaugcauuugaaaauuuugaugu

SEQ ID NO: 1881189 - RNA, 11 nt, Human
uaugcauuuga

SEQ ID NO: 1881190 - RNA, 23 nt, Human
uauggcuuuugugcauuaucuag

SEQ ID NO: 1881191 - RNA, 20 nt, Human
uauggggauagaugugugga

SEQ ID NO: 1881192 - RNA, 15 nt, Human
uaugcuuauacacuu

SEQ ID NO: 1881193 - RNA, 17 nt, Human
uauggcuuuugugcauu

SEQ ID NO: 1881194 - RNA, 21 nt, Human
uauggcuuuugugcauuaucu

SEQ ID NO: 1881195 - RNA, 18 nt, Human
uauggcuuuugugcauua

SEQ ID NO: 1881196 - RNA, 19 nt, Human
uaucuuugauucuccuuca

SEQ ID NO: 1881197 - RNA, 22 nt, Human
uaucuuugauucuccuucagcc

SEQ ID NO: 1881198 - RNA, 18 nt, Human
acagcccgggcucugccu

SEQ ID NO: 1881199 - RNA, 19 nt, Human
acagcccgggcucugccuc

SEQ ID NO: 1881200 - RNA, 20 nt, Human
acagcccgggcucugccucc

SEQ ID NO: 1881201 - RNA, 21 nt, Human
acagcaaggagauuuacaacu

SEQ ID NO: 1881202 - RNA, 17 nt, Human
acagcccgggcucugcc

SEQ ID NO: 1881203 - RNA, 12 nt, Human
acagaucuggaa

SEQ ID NO: 1881204 - RNA, 23 nt, Human
acagaucgaaccguuuugaagcu

SEQ ID NO: 1881205 - RNA, 14 nt, Human
acagagcccacgcc

SEQ ID NO: 1881206 - RNA, 15 nt, Human
acagagcccacgccc

SEQ ID NO: 1881207 - RNA, 18 nt, Human
acagagcccacgccccca

SEQ ID NO: 1881208 - RNA, 19 nt, Human
acagagcccacgcccccac

SEQ ID NO: 1881209 - RNA, 17 nt, Human
acagcaaggagauuuac

SEQ ID NO: 1881210 - RNA, 14 nt, Human
acagaucuggaacc

SEQ ID NO: 1881211 - RNA, 16 nt, Human
acagaucuggaaccuc

SEQ ID NO: 1881212 - RNA, 20 nt, Human
acagaucuggaaccucagcc

SEQ ID NO: 1881213 - RNA, 21 nt, Human
acagaucuggaaccucagccu

SEQ ID NO: 1881214 - RNA, 22 nt, Human
acagaucuggaaccucagccug

SEQ ID NO: 1881215 - RNA, 14 nt, Human
acagaugaauguau

SEQ ID NO: 1881216 - RNA, 17 nt, Human
acagaugaauguauuua

SEQ ID NO: 1881217 - RNA, 18 nt, Human
acagaugccacacaagga

SEQ ID NO: 1881218 - RNA, 23 nt, Human
uaucaagcuaauaaaauaucauu

SEQ ID NO: 1881219 - RNA, 15 nt, Human
uaucaagcuaauaaa

SEQ ID NO: 1881220 - RNA, 13 nt, Human
uaucaagcuaaua

SEQ ID NO: 1881221 - RNA, 12 nt, Human
uaucaagcuaau

SEQ ID NO: 1881222 - RNA, 17 nt, Human
uauccauauugagucaa

SEQ ID NO: 1881223 - RNA, 15 nt, Human
uaucuauauuuuaca

SEQ ID NO: 1881224 - RNA, 18 nt, Human
acagagaaaguacuucuc

SEQ ID NO: 1881225 - RNA, 11 nt, Human
acagagaaagu

SEQ ID NO: 1881226 - RNA, 13 nt, Human
uaucucccccagc

SEQ ID NO: 1881227 - RNA, 15 nt, Human
uaucuccaagaccag

SEQ ID NO: 1881228 - RNA, 16 nt, Human
uaucucccccagcccc

SEQ ID NO: 1881229 - RNA, 14 nt, Human
uaucucccccagcc

SEQ ID NO: 1881230 - RNA, 23 nt, Human
uaucuauauuuuacauaaauuua

SEQ ID NO: 1881231 - RNA, 13 nt, Human
acagacccugccc

SEQ ID NO: 1881232 - RNA, 14 nt, Human
acagacccugcccu

SEQ ID NO: 1881233 - RNA, 15 nt, Human
acagacccugcccug

SEQ ID NO: 1881234 - RNA, 16 nt, Human
uauauuuaguaucuuu

SEQ ID NO: 1881235 - RNA, 23 nt, Human
uauauuuagcuccaaaccuucac

SEQ ID NO: 1881236 - RNA, 19 nt, Human
uauauuguguuuguguauu

SEQ ID NO: 1881237 - RNA, 18 nt, Human
uauauuguguuuguguau

SEQ ID NO: 1881238 - RNA, 17 nt, Human
uauaaguguguguuuuu

SEQ ID NO: 1881239 - RNA, 23 nt, Human
uauaaguguguguuuuucauaaa

SEQ ID NO: 1881240 - RNA, 13 nt, Human
uauacaaauuaga

SEQ ID NO: 1881241 - RNA, 14 nt, Human
uauacaaauuagaa

SEQ ID NO: 1881242 - RNA, 16 nt, Human
uauacaaauuagaaaa

SEQ ID NO: 1881243 - RNA, 18 nt, Human
uauacaaauuagaaaaug

SEQ ID NO: 1881244 - RNA, 17 nt, Human
uauacaaauuagaaaau

SEQ ID NO: 1881245 - RNA, 18 nt, Human
uauaauuuuuuucaauau

SEQ ID NO: 1881246 - RNA, 21 nt, Human
uauaauuuuuuucaauauuua

SEQ ID NO: 1881247 - RNA, 17 nt, Human
acagaaauguacagcaa

SEQ ID NO: 1881248 - RNA, 16 nt, Human
acagaaauguacagca

SEQ ID NO: 1881249 - RNA, 14 nt, Human
acagaaauguacag

SEQ ID NO: 1881250 - RNA, 20 nt, Human
acagaaaauggaagacagcu

SEQ ID NO: 1881251 - RNA, 17 nt, Human
acagaaaauucuucucc

SEQ ID NO: 1881252 - RNA, 21 nt, Human
uaugucuuggacacuguacaa

SEQ ID NO: 1881253 - RNA, 19 nt, Human
uaugucuuggacacuguac

SEQ ID NO: 1881254 - RNA, 17 nt, Human
uaugucuuggacacugu

SEQ ID NO: 1881255 - RNA, 14 nt, Human
uaugucuuggacac

SEQ ID NO: 1881256 - RNA, 14 nt, Human
uaugugaaacaugu

SEQ ID NO: 1881257 - RNA, 22 nt, Human
acaggcauguucucugaggaca

SEQ ID NO: 1881258 - RNA, 20 nt, Human
acaggcauguucucugagga

SEQ ID NO: 1881259 - RNA, 19 nt, Human
acaggcauguucucugagg

SEQ ID NO: 1881260 - RNA, 18 nt, Human
acaggcauguucucugag

SEQ ID NO: 1881261 - RNA, 15 nt, Human
acaggcauguucucu

SEQ ID NO: 1881262 - RNA, 17 nt, Human
uaugugaaacauguuuc

SEQ ID NO: 1881263 - RNA, 22 nt, Human
uaugugaacaguuguguuugaa

SEQ ID NO: 1881264 - RNA, 12 nt, Human
uaugugaacagu

SEQ ID NO: 1881265 - RNA, 15 nt, Human
uaugugaaacaaugu

SEQ ID NO: 1881266 - RNA, 23 nt, Human
uaugugccagauuuaugcauauu

SEQ ID NO: 1881267 - RNA, 20 nt, Human
uauguggaguucaucuugaa

SEQ ID NO: 1881268 - RNA, 16 nt, Human
uauguggaaguguggg

SEQ ID NO: 1881269 - RNA, 12 nt, Human
uauguggaagug

SEQ ID NO: 1881270 - RNA, 17 nt, Human
uauguuuuuuaaaauau

SEQ ID NO: 1881271 - RNA, 15 nt, Human
uauguuuuuuuucug

SEQ ID NO: 1881272 - RNA, 22 nt, Human
uauguuuuuuuucugcuggaaa

SEQ ID NO: 1881273 - RNA, 18 nt, Human
uauguuuuuguguauuug

SEQ ID NO: 1881274 - RNA, 14 nt, Human
uauguuuuugugua

SEQ ID NO: 1881275 - RNA, 15 nt, Human
uauuaaaacucuuuu

SEQ ID NO: 1881276 - RNA, 17 nt, Human
acaggaaaagcugcuga

SEQ ID NO: 1881277 - RNA, 16 nt, Human
acaggaaaagcugcug

SEQ ID NO: 1881278 - RNA, 15 nt, Human
acaggaaaagcugcu

SEQ ID NO: 1881279 - RNA, 13 nt, Human
acaggaaguacug

SEQ ID NO: 1881280 - RNA, 17 nt, Human
acaggaaguagaggagg

SEQ ID NO: 1881281 - RNA, 21 nt, Human
acagcggcuggacuuggaggu

SEQ ID NO: 1881282 - RNA, 22 nt, Human
acagcggcuggacuuggaggua

SEQ ID NO: 1881283 - RNA, 13 nt, Human
acagcuaacaugg

SEQ ID NO: 1881284 - RNA, 21 nt, Human
acagcuuugcugcugaaggcu

SEQ ID NO: 1881285 - RNA, 15 nt, Human
acagcuuugcugcug

SEQ ID NO: 1881286 - RNA, 11 nt, Human
acagcuuugcu

SEQ ID NO: 1881287 - RNA, 12 nt, Human
acagcuuugcug

SEQ ID NO: 1881288 - RNA, 13 nt, Human
acaggcaggucca

SEQ ID NO: 1881289 - RNA, 14 nt, Human
acaggaucagucug

SEQ ID NO: 1881290 - RNA, 16 nt, Human
acaggagugagcacua

SEQ ID NO: 1881291 - RNA, 16 nt, Human
acaggcagguccaggg

SEQ ID NO: 1881292 - RNA, 14 nt, Human
acaggcagguccag

SEQ ID NO: 1881293 - RNA, 14 nt, Human
acaggcauguucuc

SEQ ID NO: 1881294 - RNA, 23 nt, Human
acaggaccagggauuuccaugau

SEQ ID NO: 1881295 - RNA, 22 nt, Human
acaggacaugcgguagccagca

SEQ ID NO: 1881296 - RNA, 14 nt, Human
acaggacacaguca

SEQ ID NO: 1881297 - RNA, 15 nt, Human
acaggacacagucag

SEQ ID NO: 1881298 - RNA, 16 nt, Human
acaggacacagucaga

SEQ ID NO: 1881299 - RNA, 23 nt, Human
acaggcugggcuucaguggcagc

SEQ ID NO: 1881300 - RNA, 22 nt, Human
acaggcugggcuucaguggcag

SEQ ID NO: 1881301 - RNA, 12 nt, Human
acaggcugggcu

SEQ ID NO: 1881302 - RNA, 21 nt, Human
acagggaggacgcucucuggc

SEQ ID NO: 1881303 - RNA, 20 nt, Human
acagggaggacgcucucugg

SEQ ID NO: 1881304 - RNA, 22 nt, Human
acagggacugaaaaccucuccu

SEQ ID NO: 1881305 - RNA, 20 nt, Human
acagggcacaccgggcacuc

SEQ ID NO: 1881306 - RNA, 12 nt, Human
acagggcacacc

SEQ ID NO: 1881307 - RNA, 10 nt, Human
acagggaggg

SEQ ID NO: 1881308 - RNA, 12 nt, Human
acagggagggga

SEQ ID NO: 1881309 - RNA, 14 nt, Human
acaguagucuugau

SEQ ID NO: 1881310 - RNA, 23 nt, Human
acaguagucuugaugaccaaagu

SEQ ID NO: 1881311 - RNA, 15 nt, Human
acagucagauuucca

SEQ ID NO: 1881312 - RNA, 21 nt, Human
acagucagauuuccagucucc

SEQ ID NO: 1881313 - RNA, 21 nt, Human
uauucagcucauggacuucug

SEQ ID NO: 1881314 - RNA, 18 nt, Human
uauucaauuccucuggga

SEQ ID NO: 1881315 - RNA, 14 nt, Human
uauucaauuccucu

SEQ ID NO: 1881316 - RNA, 15 nt, Human
uauucaauuccucug

SEQ ID NO: 1881317 - RNA, 16 nt, Human
uauucaauuccucugg

SEQ ID NO: 1881318 - RNA, 17 nt, Human
uauucaauuccucuggg

SEQ ID NO: 1881319 - RNA, 16 nt, Human
uauucaauauccuuug

SEQ ID NO: 1881320 - RNA, 16 nt, Human
uauucaggaagcucag

SEQ ID NO: 1881321 - RNA, 14 nt, Human
uauucaggaagcuc

SEQ ID NO: 1881322 - RNA, 20 nt, Human
uauucaguaauaacucuacc

SEQ ID NO: 1881323 - RNA, 13 nt, Human
uauuacuucugcu

SEQ ID NO: 1881324 - RNA, 14 nt, Human
uauuacuucugcua

SEQ ID NO: 1881325 - RNA, 21 nt, Human
uauuagggagaaaauucaauu

SEQ ID NO: 1881326 - RNA, 15 nt, Human
uauuagggagaaaau

SEQ ID NO: 1881327 - RNA, 16 nt, Human
uauuagggagaaaauu

SEQ ID NO: 1881328 - RNA, 14 nt, Human
uauuaguaccauag

SEQ ID NO: 1881329 - RNA, 18 nt, Human
uacauguguagccugugc

SEQ ID NO: 1881330 - RNA, 19 nt, Human
uacauguguagccugugca

SEQ ID NO: 1881331 - RNA, 16 nt, Human
uacauguguagccugu

SEQ ID NO: 1881332 - RNA, 13 nt, Human
uacauucuguuaa

SEQ ID NO: 1881333 - RNA, 21 nt, Human
aauuaagaaaggauaaaguug

SEQ ID NO: 1881334 - RNA, 15 nt, Human
aauuaagagagucua

SEQ ID NO: 1881335 - RNA, 19 nt, Human
aauuaagaaggcaaaaaug

SEQ ID NO: 1881336 - RNA, 23 nt, Human
aauuaagaaggcaaaaauguaaa

SEQ ID NO: 1881337 - RNA, 13 nt, Human
aauuaagaaggca

SEQ ID NO: 1881338 - RNA, 14 nt, Human
aauuaagaaggcaa

SEQ ID NO: 1881339 - RNA, 16 nt, Human
aauuaagaaggcaaaa

SEQ ID NO: 1881340 - RNA, 21 nt, Human
aauguucucucuucuccaccu

SEQ ID NO: 1881341 - RNA, 11 nt, Human
aauuaacuuuu

SEQ ID NO: 1881342 - RNA, 16 nt, Human
aauguuaacauuuuug

SEQ ID NO: 1881343 - RNA, 16 nt, Human
uacaggugugagucac

SEQ ID NO: 1881344 - RNA, 18 nt, Human
uacagaugaauguauuua

SEQ ID NO: 1881345 - RNA, 22 nt, Human
uacagaugaauguauuuauuug

SEQ ID NO: 1881346 - RNA, 24 nt, Human
uacauaaugcgugcauaccacuuu

SEQ ID NO: 1881347 - RNA, 23 nt, Human
uacauaaugcgugcauaccacuu

SEQ ID NO: 1881348 - RNA, 21 nt, Human
uacauaaugcgugcauaccac

SEQ ID NO: 1881349 - RNA, 22 nt, Human
uacauauaagugauugcugguu

SEQ ID NO: 1881350 - RNA, 12 nt, Human
uacauaucuuua

SEQ ID NO: 1881351 - RNA, 16 nt, Human
uacauaucuuuauuaa

SEQ ID NO: 1881352 - RNA, 22 nt, Human
uacauaucuuuauuaaucacua

SEQ ID NO: 1881353 - RNA, 19 nt, Human
uacauccaaagcagacagc

SEQ ID NO: 1881354 - RNA, 20 nt, Human
uacauccaaagcagacagcu

SEQ ID NO: 1881355 - RNA, 23 nt, Human
uacauccaaagcagacagcucca

SEQ ID NO: 1881356 - RNA, 15 nt, Human
aaugugaaacuggau

SEQ ID NO: 1881357 - RNA, 14 nt, Human
aaugugaaacugga

SEQ ID NO: 1881358 - RNA, 19 nt, Human
aaugugaaaagaaaaauga

SEQ ID NO: 1881359 - RNA, 17 nt, Human
aaugugccuaguucuuu

SEQ ID NO: 1881360 - RNA, 19 nt, Human
aauguauguguaaguauuc

SEQ ID NO: 1881361 - RNA, 20 nt, Human
aauguauguguaaguauucu

SEQ ID NO: 1881362 - RNA, 14 nt, Human
uacauacaccagca

SEQ ID NO: 1881363 - RNA, 22 nt, Human
aauguauuacaguggggaauga

SEQ ID NO: 1881364 - RNA, 17 nt, Human
uacacguguccuguagu

SEQ ID NO: 1881365 - RNA, 13 nt, Human
uacacguguccug

SEQ ID NO: 1881366 - RNA, 22 nt, Human
uacagacaacaaaccuguuucu

SEQ ID NO: 1881367 - RNA, 19 nt, Human
uacacauuuuauuuuauua

SEQ ID NO: 1881368 - RNA, 22 nt, Human
uacacauuuuauuuuauuaugc

SEQ ID NO: 1881369 - RNA, 21 nt, Human
uacacauuuuauuuuauuaug

SEQ ID NO: 1881370 - RNA, 23 nt, Human
uacacauuuuauuuuauuaugca

SEQ ID NO: 1881371 - RNA, 15 nt, Human
uacacuaaaagguga

SEQ ID NO: 1881372 - RNA, 12 nt, Human
aauggcagccuu

SEQ ID NO: 1881373 - RNA, 20 nt, Human
aauggcacagcccaaagaag

SEQ ID NO: 1881374 - RNA, 17 nt, Human
aauggcacagcccaaag

SEQ ID NO: 1881375 - RNA, 16 nt, Human
aauggcagccuuggca

SEQ ID NO: 1881376 - RNA, 19 nt, Human
aauggcacagcccaaagaa

SEQ ID NO: 1881377 - RNA, 13 nt, Human
aauggcuccuuca

SEQ ID NO: 1881378 - RNA, 20 nt, Human
aauggcgucuggaaguccaa

SEQ ID NO: 1881379 - RNA, 23 nt, Human
aaugcuguacaucuauuuuggau

SEQ ID NO: 1881380 - RNA, 13 nt, Human
aaugcccagcccc

SEQ ID NO: 1881381 - RNA, 12 nt, Human
aaugcuguacau

SEQ ID NO: 1881382 - RNA, 13 nt, Human
aaugcuguacauc

SEQ ID NO: 1881383 - RNA, 15 nt, Human
aaugcuguacaucua

SEQ ID NO: 1881384 - RNA, 17 nt, Human
aaugcuguacaucuauu

SEQ ID NO: 1881385 - RNA, 11 nt, Human
aaugcccagcc

SEQ ID NO: 1881386 - RNA, 12 nt, Human
aaugcccagccc

SEQ ID NO: 1881387 - RNA, 16 nt, Human
aaugcuucaucccuuu

SEQ ID NO: 1881388 - RNA, 14 nt, Human
aauggaaacugaaa

SEQ ID NO: 1881389 - RNA, 20 nt, Human
aauggaaaugggcagagcag

SEQ ID NO: 1881390 - RNA, 21 nt, Human
aauggaaaugggcagagcaga

SEQ ID NO: 1881391 - RNA, 14 nt, Human
aauggaaccacucu

SEQ ID NO: 1881392 - RNA, 23 nt, Human
aauggacguguuaugacuccaga

SEQ ID NO: 1881393 - RNA, 20 nt, Human
aauggacuaacuugucuuug

SEQ ID NO: 1881394 - RNA, 22 nt, Human
aaugcacuuuguucuggcucuu

SEQ ID NO: 1881395 - RNA, 22 nt, Human
uacaaugugaacuuuauuaaau

SEQ ID NO: 1881396 - RNA, 20 nt, Human
aaugcagcagggaugcccug

SEQ ID NO: 1881397 - RNA, 22 nt, Human
aaugcagcagggaugcccugga

SEQ ID NO: 1881398 - RNA, 21 nt, Human
aaugccauggacagaagaagg

SEQ ID NO: 1881399 - RNA, 21 nt, Human
uacaaugcugugcccuaaagu

SEQ ID NO: 1881400 - RNA, 18 nt, Human
aaugaccuuucaauagga

SEQ ID NO: 1881401 - RNA, 16 nt, Human
aaugaccuuucaauag

SEQ ID NO: 1881402 - RNA, 17 nt, Human
aaugaccuuucaauagg

SEQ ID NO: 1881403 - RNA, 21 nt, Human
aaugcacuuuguucuggcucu

SEQ ID NO: 1881404 - RNA, 14 nt, Human
uacaaugugaacuu

SEQ ID NO: 1881405 - RNA, 15 nt, Human
uacaaugugaacuuu

SEQ ID NO: 1881406 - RNA, 16 nt, Human
uacaaugugaacuuua

SEQ ID NO: 1881407 - RNA, 17 nt, Human
uacaaugugaacuuuau

SEQ ID NO: 1881408 - RNA, 20 nt, Human
uacaaugugaacuuuauuaa

SEQ ID NO: 1881409 - RNA, 21 nt, Human
uacaaugugaacuuuauuaaa

SEQ ID NO: 1881410 - RNA, 14 nt, Human
uacuauauuuaugg

SEQ ID NO: 1881411 - RNA, 13 nt, Human
uacuacuccugua

SEQ ID NO: 1881412 - RNA, 16 nt, Human
uacguuugaagacauu

SEQ ID NO: 1881413 - RNA, 22 nt, Human
uacguuugaagacauugcacca

SEQ ID NO: 1881414 - RNA, 17 nt, Human
uacuacuccuguaggaa

SEQ ID NO: 1881415 - RNA, 14 nt, Human
uacuauguaucaau

SEQ ID NO: 1881416 - RNA, 14 nt, Human
uacucuccucaucu

SEQ ID NO: 1881417 - RNA, 16 nt, Human
uacucuccucaucucu

SEQ ID NO: 1881418 - RNA, 22 nt, Human
uacucuccuggaaauauuaaga

SEQ ID NO: 1881419 - RNA, 23 nt, Human
uacucuccuggaaauauuaagaa

SEQ ID NO: 1881420 - RNA, 23 nt, Human
uacuauggcccuggccuagcaua

SEQ ID NO: 1881421 - RNA, 15 nt, Human
uacuaucuacucucc

SEQ ID NO: 1881422 - RNA, 17 nt, Human
uacuaucuacucuccuc

SEQ ID NO: 1881423 - RNA, 12 nt, Human
uacuauguauca

SEQ ID NO: 1881424 - RNA, 13 nt, Human
uacuauguaucaa

SEQ ID NO: 1881425 - RNA, 22 nt, Human
uacgccaggggaaaaucagccu

SEQ ID NO: 1881426 - RNA, 13 nt, Human
aauuccucuggga

SEQ ID NO: 1881427 - RNA, 14 nt, Human
aauuccucugggaa

SEQ ID NO: 1881428 - RNA, 18 nt, Human
uacgggaggguaaggcug

SEQ ID NO: 1881429 - RNA, 12 nt, Human
uacguacacauu

SEQ ID NO: 1881430 - RNA, 16 nt, Human
uacguugugcauuugg

SEQ ID NO: 1881431 - RNA, 15 nt, Human
uacguugugcauuug

SEQ ID NO: 1881432 - RNA, 14 nt, Human
uacguacacauuuu

SEQ ID NO: 1881433 - RNA, 13 nt, Human
uacguacacauuu

SEQ ID NO: 1881434 - RNA, 21 nt, Human
aauugcauuuuuuaaaacaag

SEQ ID NO: 1881435 - RNA, 20 nt, Human
aauugcauuuuuuaaaacaa

SEQ ID NO: 1881436 - RNA, 19 nt, Human
aauugaugggauuugguca

SEQ ID NO: 1881437 - RNA, 23 nt, Human
uacuguaauuugugauacaaugc

SEQ ID NO: 1881438 - RNA, 21 nt, Human
uacuguacaugaaaacacauu

SEQ ID NO: 1881439 - RNA, 22 nt, Human
uacuguacaugaaaacacauuu

SEQ ID NO: 1881440 - RNA, 21 nt, Human
aauugacccacaagaaaugaa

SEQ ID NO: 1881441 - RNA, 14 nt, Human
aauugacuuauuua

SEQ ID NO: 1881442 - RNA, 22 nt, Human
aauugacccacaagaaaugaaa

SEQ ID NO: 1881443 - RNA, 12 nt, Human
uacucuguguca

SEQ ID NO: 1881444 - RNA, 21 nt, Human
uacucugugucagguggggca

SEQ ID NO: 1881445 - RNA, 16 nt, Human
uacuggagaaaaugga

SEQ ID NO: 1881446 - RNA, 21 nt, Human
uacucugcuuuuuuucuacug

SEQ ID NO: 1881447 - RNA, 19 nt, Human
uacuguaaggcaaucaugg

SEQ ID NO: 1881448 - RNA, 18 nt, Human
uacuguaauuugugauac

SEQ ID NO: 1881449 - RNA, 20 nt, Human
uacuguaauuugugauacaa

SEQ ID NO: 1881450 - RNA, 19 nt, Human
uacuguaauuugugauaca

SEQ ID NO: 1881451 - RNA, 18 nt, Human
uacuguaaggcaaucaug

SEQ ID NO: 1881452 - RNA, 22 nt, Human
uacuggcaaaaggaucuuugug

SEQ ID NO: 1881453 - RNA, 18 nt, Human
uacuggcaaaaggaucuu

SEQ ID NO: 1881454 - RNA, 22 nt, Human
aauuauuauuuauauauguauu

SEQ ID NO: 1881455 - RNA, 16 nt, Human
aauuauuauuuggccc

SEQ ID NO: 1881456 - RNA, 22 nt, Human
aauuaguaggcucauuuacugu

SEQ ID NO: 1881457 - RNA, 21 nt, Human
aauuaguaggcucauuuacug

SEQ ID NO: 1881458 - RNA, 20 nt, Human
aauucaaacuggggccucca

SEQ ID NO: 1881459 - RNA, 18 nt, Human
aauuccaagugauugaaa

SEQ ID NO: 1881460 - RNA, 18 nt, Human
aauucaacguuaauaauu

SEQ ID NO: 1881461 - RNA, 21 nt, Human
aauucaacguuaauaauucug

SEQ ID NO: 1881462 - RNA, 19 nt, Human
aauucacaaacuuuuauac

SEQ ID NO: 1881463 - RNA, 14 nt, Human
aauucacaaacuuu

SEQ ID NO: 1881464 - RNA, 22 nt, Human
aauuccacuuauaggaauugac

SEQ ID NO: 1881465 - RNA, 12 nt, Human
aauuccccagau

SEQ ID NO: 1881466 - RNA, 14 nt, Human
aauuccccacccug

SEQ ID NO: 1881467 - RNA, 17 nt, Human
aauucccaacaaacauu

SEQ ID NO: 1881468 - RNA, 21 nt, Human
aauuaccuugagccaguaauu

SEQ ID NO: 1881469 - RNA, 11 nt, Human
aauuacaggaa

SEQ ID NO: 1881470 - RNA, 15 nt, Human
uaccuguauucccag

SEQ ID NO: 1881471 - RNA, 15 nt, Human
aauuagccaagugug

SEQ ID NO: 1881472 - RNA, 13 nt, Human
aauuacucaggaa

SEQ ID NO: 1881473 - RNA, 19 nt, Human
aauuacucaggaagaacac

SEQ ID NO: 1881474 - RNA, 14 nt, Human
aauuagcugcuucu

SEQ ID NO: 1881475 - RNA, 15 nt, Human
aauuagcugcuucua

SEQ ID NO: 1881476 - RNA, 23 nt, Human
uaccugccaggaagccagcaggc

SEQ ID NO: 1881477 - RNA, 18 nt, Human
uaccugccaggaagccag

SEQ ID NO: 1881478 - RNA, 20 nt, Human
uaccugccaggaagccagca

SEQ ID NO: 1881479 - RNA, 10 nt, Human
uaccuguccc

SEQ ID NO: 1881480 - RNA, 13 nt, Human
uaccugucccccu

SEQ ID NO: 1881481 - RNA, 14 nt, Human
uaccugucccccug

SEQ ID NO: 1881482 - RNA, 16 nt, Human
uaccugucccccugac

SEQ ID NO: 1881483 - RNA, 17 nt, Human
uaccugucccccugaca

SEQ ID NO: 1881484 - RNA, 19 nt, Human
uaaucuuuucacaaauaaa

SEQ ID NO: 1881485 - RNA, 18 nt, Human
uaaucuuuucacaaauaa

SEQ ID NO: 1881486 - RNA, 17 nt, Human
uaaucuuuucacaaaua

SEQ ID NO: 1881487 - RNA, 16 nt, Human
uaaucuuuucacaaau

SEQ ID NO: 1881488 - RNA, 15 nt, Human
uaaucuuuucacaaa

SEQ ID NO: 1881489 - RNA, 17 nt, Human
uaaugaaugaaacauuu

SEQ ID NO: 1881490 - RNA, 14 nt, Human
uaauauuuuuaauu

SEQ ID NO: 1881491 - RNA, 15 nt, Human
uaauauuuuuaauua

SEQ ID NO: 1881492 - RNA, 17 nt, Human
uaauccaggcagaucca

SEQ ID NO: 1881493 - RNA, 18 nt, Human
uaauccaggcagauccag

SEQ ID NO: 1881494 - RNA, 19 nt, Human
uaauccaggcagauccagg

SEQ ID NO: 1881495 - RNA, 14 nt, Human
uaaucccagcaauu

SEQ ID NO: 1881496 - RNA, 22 nt, Human
uaauccaggcagauccaggacu

SEQ ID NO: 1881497 - RNA, 23 nt, Human
uaauccaggcagauccaggacua

SEQ ID NO: 1881498 - RNA, 19 nt, Human
uaaucccagcacuuuggga

SEQ ID NO: 1881499 - RNA, 14 nt, Human
uaaucccagcuacu

SEQ ID NO: 1881500 - RNA, 19 nt, Human
uaaucccagcuacuuggga

SEQ ID NO: 1881501 - RNA, 16 nt, Human
uaauagacaauuuauu

SEQ ID NO: 1881502 - RNA, 14 nt, Human
uaauagacaauuua

SEQ ID NO: 1881503 - RNA, 19 nt, Human
uaauacaccacuacauucu

SEQ ID NO: 1881504 - RNA, 18 nt, Human
uaauacaccacuacauuc

SEQ ID NO: 1881505 - RNA, 16 nt, Human
uaauacaccacuacau

SEQ ID NO: 1881506 - RNA, 22 nt, Human
aaucuuaucaagaguugugaca

SEQ ID NO: 1881507 - RNA, 15 nt, Human
aaucuuaucaugguc

SEQ ID NO: 1881508 - RNA, 21 nt, Human
aaucuuaucauggucucaguc

SEQ ID NO: 1881509 - RNA, 19 nt, Human
uaauagcgucauaacuaga

SEQ ID NO: 1881510 - RNA, 22 nt, Human
uaauagacaauuuauuauggca

SEQ ID NO: 1881511 - RNA, 18 nt, Human
uaauagacaauuuauuau

SEQ ID NO: 1881512 - RNA, 17 nt, Human
uaauagacuaaaugaaa

SEQ ID NO: 1881513 - RNA, 23 nt, Human
aaugaauguuuacacucuuugua

SEQ ID NO: 1881514 - RNA, 22 nt, Human
aaugaaugucagugugacugau

SEQ ID NO: 1881515 - RNA, 13 nt, Human
aaugacacagucu

SEQ ID NO: 1881516 - RNA, 22 nt, Human
aaugaauggcuaagcaaaaugu

SEQ ID NO: 1881517 - RNA, 13 nt, Human
aaugaaugucagu

SEQ ID NO: 1881518 - RNA, 13 nt, Human
aaucuuucugcag

SEQ ID NO: 1881519 - RNA, 17 nt, Human
aaugaaacauuuuguca

SEQ ID NO: 1881520 - RNA, 16 nt, Human
aaugaaagacuguaca

SEQ ID NO: 1881521 - RNA, 17 nt, Human
aaugaaagacuguacaa

SEQ ID NO: 1881522 - RNA, 17 nt, Human
aaugaaaccugugucuc

SEQ ID NO: 1881523 - RNA, 14 nt, Human
aaugaaacuuggau

SEQ ID NO: 1881524 - RNA, 18 nt, Human
uaaugucacaggcagguc

SEQ ID NO: 1881525 - RNA, 19 nt, Human
uaaugucucugugagacuc

SEQ ID NO: 1881526 - RNA, 11 nt, Human
uaaugucucug

SEQ ID NO: 1881527 - RNA, 22 nt, Human
uaaugucuguaucacucugugu

SEQ ID NO: 1881528 - RNA, 13 nt, Human
uaauguacugcau

SEQ ID NO: 1881529 - RNA, 15 nt, Human
aaucuuuaauuuuac

SEQ ID NO: 1881530 - RNA, 16 nt, Human
aaucuuuaauuuuaca

SEQ ID NO: 1881531 - RNA, 21 nt, Human
aaucauauaauaaauguacau

SEQ ID NO: 1881532 - RNA, 18 nt, Human
aaucauauaauaaaugua

SEQ ID NO: 1881533 - RNA, 15 nt, Human
aaucaucuuugugaa

SEQ ID NO: 1881534 - RNA, 19 nt, Human
aaucauauuaauacaauga

SEQ ID NO: 1881535 - RNA, 12 nt, Human
uaauaaacacuc

SEQ ID NO: 1881536 - RNA, 18 nt, Human
uaauaaacacucuugaaa

SEQ ID NO: 1881537 - RNA, 16 nt, Human
uaaguuguuauuucag

SEQ ID NO: 1881538 - RNA, 13 nt, Human
uaaguacuaugua

SEQ ID NO: 1881539 - RNA, 16 nt, Human
uaaguacuauguauca

SEQ ID NO: 1881540 - RNA, 17 nt, Human
uaaguacuauguaucaa

SEQ ID NO: 1881541 - RNA, 19 nt, Human
uaaguacuauguaucaaug

SEQ ID NO: 1881542 - RNA, 20 nt, Human
uaaguauucuuauuuaauga

SEQ ID NO: 1881543 - RNA, 19 nt, Human
uaaguauucuuauuuaaug

SEQ ID NO: 1881544 - RNA, 15 nt, Human
uaagcuuugacacug

SEQ ID NO: 1881545 - RNA, 19 nt, Human
aaucuuauaauuuaaaaua

SEQ ID NO: 1881546 - RNA, 19 nt, Human
aaucuacacuccagugaga

SEQ ID NO: 1881547 - RNA, 15 nt, Human
aaucuggagaccagg

SEQ ID NO: 1881548 - RNA, 13 nt, Human
aauccuuuacugu

SEQ ID NO: 1881549 - RNA, 14 nt, Human
aauccuggggaaca

SEQ ID NO: 1881550 - RNA, 11 nt, Human
aauccuggcug

SEQ ID NO: 1881551 - RNA, 21 nt, Human
aauccuggggaacauagaacu

SEQ ID NO: 1881552 - RNA, 12 nt, Human
aauccgcccauc

SEQ ID NO: 1881553 - RNA, 23 nt, Human
aaucccuuuauuacccccuccuu

SEQ ID NO: 1881554 - RNA, 19 nt, Human
aaucccuuuauuacccccu

SEQ ID NO: 1881555 - RNA, 23 nt, Human
aaucauuaggugugacugaauuu

SEQ ID NO: 1881556 - RNA, 17 nt, Human
aaucauuaggugugacu

SEQ ID NO: 1881557 - RNA, 15 nt, Human
aaucauuagguguga

SEQ ID NO: 1881558 - RNA, 20 nt, Human
aauaucagcaagucucuuua

SEQ ID NO: 1881559 - RNA, 13 nt, Human
aauaucagacuuu

SEQ ID NO: 1881560 - RNA, 24 nt, Human
aauauauuuguguauuuaacaggg

SEQ ID NO: 1881561 - RNA, 18 nt, Human
aauauauuuuaagacgaa

SEQ ID NO: 1881562 - RNA, 19 nt, Human
aauauauuuguguauuuaa

SEQ ID NO: 1881563 - RNA, 21 nt, Human
aauauauuuguguauuuaaca

SEQ ID NO: 1881564 - RNA, 23 nt, Human
uaacauauaauguuguuauuuaa

SEQ ID NO: 1881565 - RNA, 14 nt, Human
uaacauauaauguu

SEQ ID NO: 1881566 - RNA, 23 nt, Human
uaacauggacaugaucuucuuua

SEQ ID NO: 1881567 - RNA, 17 nt, Human
uaacauguaauuaagua

SEQ ID NO: 1881568 - RNA, 18 nt, Human
uaacauggacaugaucuu

SEQ ID NO: 1881569 - RNA, 13 nt, Human
aauaguuggcuag

SEQ ID NO: 1881570 - RNA, 22 nt, Human
aauaguugaaccuauuucucuu

SEQ ID NO: 1881571 - RNA, 21 nt, Human
uaaaauuuggccaaacaagug

SEQ ID NO: 1881572 - RNA, 13 nt, Human
aauauauuugugu

SEQ ID NO: 1881573 - RNA, 14 nt, Human
aauauauuugugua

SEQ ID NO: 1881574 - RNA, 14 nt, Human
aauauauuuuaaga

SEQ ID NO: 1881575 - RNA, 15 nt, Human
aauauauuuuaagac

SEQ ID NO: 1881576 - RNA, 22 nt, Human
aauaguggugugauuuggggau

SEQ ID NO: 1881577 - RNA, 16 nt, Human
aauaguggugugauuu

SEQ ID NO: 1881578 - RNA, 20 nt, Human
uaacgauaaaagacagugaa

SEQ ID NO: 1881579 - RNA, 18 nt, Human
uaacauggugugcuucuu

SEQ ID NO: 1881580 - RNA, 20 nt, Human
uaacuagaacugaauuuugu

SEQ ID NO: 1881581 - RNA, 17 nt, Human
uaacuagaacugaauuu

SEQ ID NO: 1881582 - RNA, 15 nt, Human
uaacuagaauuuauu

SEQ ID NO: 1881583 - RNA, 17 nt, Human
uaacuagaauuuauuca

SEQ ID NO: 1881584 - RNA, 18 nt, Human
uaacuagaauuuauucaa

SEQ ID NO: 1881585 - RNA, 14 nt, Human
uaacuagaacugaa

SEQ ID NO: 1881586 - RNA, 12 nt, Human
uaacuagaacug

SEQ ID NO: 1881587 - RNA, 14 nt, Human
uaacuucaccauau

SEQ ID NO: 1881588 - RNA, 17 nt, Human
uaacuuccaauuuacau

SEQ ID NO: 1881589 - RNA, 21 nt, Human
uaacuucacauauugauuucc

SEQ ID NO: 1881590 - RNA, 22 nt, Human
uaacuuaaaagaacauguauau

SEQ ID NO: 1881591 - RNA, 18 nt, Human
uaagaagugaaaaucuac

SEQ ID NO: 1881592 - RNA, 13 nt, Human
uaagaauauuuga

SEQ ID NO: 1881593 - RNA, 13 nt, Human
uaagacaaauaug

SEQ ID NO: 1881594 - RNA, 14 nt, Human
uaagaauauuugaa

SEQ ID NO: 1881595 - RNA, 15 nt, Human
uaagaauauuugaau

SEQ ID NO: 1881596 - RNA, 16 nt, Human
uaagacaugauuuccu

SEQ ID NO: 1881597 - RNA, 16 nt, Human
uaacuuucugaaauaa

SEQ ID NO: 1881598 - RNA, 23 nt, Human
uaacuucuuauggaauugauuug

SEQ ID NO: 1881599 - RNA, 18 nt, Human
aauauuugguuuuccugu

SEQ ID NO: 1881600 - RNA, 23 nt, Human
aauauuuugaucuucaacaaauu

SEQ ID NO: 1881601 - RNA, 13 nt, Human
aauauuuugaucu

SEQ ID NO: 1881602 - RNA, 20 nt, Human
aauauuuugaucuucaacaa

SEQ ID NO: 1881603 - RNA, 21 nt, Human
aauauuuugaucuucaacaaa

SEQ ID NO: 1881604 - RNA, 14 nt, Human
aauauuuuuagaua

SEQ ID NO: 1881605 - RNA, 22 nt, Human
uaagcuguuacugucuucagua

SEQ ID NO: 1881606 - RNA, 11 nt, Human
uaagcuguuuc

SEQ ID NO: 1881607 - RNA, 16 nt, Human
uaagcuguuuccauag

SEQ ID NO: 1881608 - RNA, 13 nt, Human
uaagcagaggagg

SEQ ID NO: 1881609 - RNA, 15 nt, Human
uaagcagaggagggg

SEQ ID NO: 1881610 - RNA, 16 nt, Human
uaagcagaggaggggc

SEQ ID NO: 1881611 - RNA, 17 nt, Human
uaagcagaggaggggcc

SEQ ID NO: 1881612 - RNA, 18 nt, Human
uaagcacacuugacauca

SEQ ID NO: 1881613 - RNA, 12 nt, Human
aauauuccagag

SEQ ID NO: 1881614 - RNA, 10 nt, Human
aauauucugg

SEQ ID NO: 1881615 - RNA, 15 nt, Human
uaagagaaaugagcu

SEQ ID NO: 1881616 - RNA, 17 nt, Human
uaagacaugauuuccuu

SEQ ID NO: 1881617 - RNA, 19 nt, Human
uaagacaugauuuccuuga

SEQ ID NO: 1881618 - RNA, 17 nt, Human
aauaugcacacauuuuu

SEQ ID NO: 1881619 - RNA, 16 nt, Human
aauaugcacacauuuu

SEQ ID NO: 1881620 - RNA, 22 nt, Human
aauaugcacacauuuuuuaaau

SEQ ID NO: 1881621 - RNA, 12 nt, Human
aauauuuagugu

SEQ ID NO: 1881622 - RNA, 13 nt, Human
aauauuuauaaaa

SEQ ID NO: 1881623 - RNA, 16 nt, Human
aauauuuauaaaacuu

SEQ ID NO: 1881624 - RNA, 17 nt, Human
aauauuuauaaaacuuc

SEQ ID NO: 1881625 - RNA, 14 nt, Human
aauauuugaaugua

SEQ ID NO: 1881626 - RNA, 23 nt, Human
aauauuugaauguaugcuucaua

SEQ ID NO: 1881627 - RNA, 21 nt, Human
aauauuugaauguaugcuuca

SEQ ID NO: 1881628 - RNA, 19 nt, Human
aauauuuauaaaacuucuc

SEQ ID NO: 1881629 - RNA, 14 nt, Human
aauauuguacaguu

SEQ ID NO: 1881630 - RNA, 15 nt, Human
aauauugacuuuguc

SEQ ID NO: 1881631 - RNA, 16 nt, Human
aauauugacuuugucu

SEQ ID NO: 1881632 - RNA, 14 nt, Human
aauauugacuuugu

SEQ ID NO: 1881633 - RNA, 23 nt, Human
aauauuguacaguuuuuauugcu

SEQ ID NO: 1881634 - RNA, 13 nt, Human
aauauugucuuuu

SEQ ID NO: 1881635 - RNA, 17 nt, Human
aauauuguacaguuuuu

SEQ ID NO: 1881636 - RNA, 15 nt, Human
aauauuguacaguuu

SEQ ID NO: 1881637 - RNA, 21 nt, Human
aauauugucuuuuuguauguc

SEQ ID NO: 1881638 - RNA, 16 nt, Human
ucaauucuugccaaau

SEQ ID NO: 1881639 - RNA, 13 nt, Human
ucaauuguaaauu

SEQ ID NO: 1881640 - RNA, 14 nt, Human
ucaauuguaaauug

SEQ ID NO: 1881641 - RNA, 18 nt, Human
ucaauuguaaauugaauc

SEQ ID NO: 1881642 - RNA, 16 nt, Human
accaaagcgaauuuua

SEQ ID NO: 1881643 - RNA, 21 nt, Human
accaaaguccuuuuuuuccau

SEQ ID NO: 1881644 - RNA, 17 nt, Human
ucacaaaggaugcccaa

SEQ ID NO: 1881645 - RNA, 21 nt, Human
ucacaaacuuuuauacucuuu

SEQ ID NO: 1881646 - RNA, 12 nt, Human
ucacaaagccca

SEQ ID NO: 1881647 - RNA, 15 nt, Human
ucacaaagcccaagg

SEQ ID NO: 1881648 - RNA, 14 nt, Human
ucacaaaaaagaag

SEQ ID NO: 1881649 - RNA, 15 nt, Human
ucacaaacuuuuaua

SEQ ID NO: 1881650 - RNA, 17 nt, Human
ucacaaacuuuuauacu

SEQ ID NO: 1881651 - RNA, 20 nt, Human
ucaauuuccaagagcugagg

SEQ ID NO: 1881652 - RNA, 18 nt, Human
ucaauuuccaagagcuga

SEQ ID NO: 1881653 - RNA, 13 nt, Human
ucaauuuccaaga

SEQ ID NO: 1881654 - RNA, 16 nt, Human
ucacaaccugaaccua

SEQ ID NO: 1881655 - RNA, 19 nt, Human
ucacaaccugaaccuagga

SEQ ID NO: 1881656 - RNA, 16 nt, Human
ucacaaagcccaaggg

SEQ ID NO: 1881657 - RNA, 14 nt, Human
ucacaaccugaacc

SEQ ID NO: 1881658 - RNA, 20 nt, Human
ucacagaugggugcuuggag

SEQ ID NO: 1881659 - RNA, 23 nt, Human
ucacagcaagucacuggccagug

SEQ ID NO: 1881660 - RNA, 13 nt, Human
ucacagccucuga

SEQ ID NO: 1881661 - RNA, 16 nt, Human
ucacaguucucuccuu

SEQ ID NO: 1881662 - RNA, 20 nt, Human
ucacaguucucuccuucuuc

SEQ ID NO: 1881663 - RNA, 21 nt, Human
ucaccauguuggccaggcugg

SEQ ID NO: 1881664 - RNA, 15 nt, Human
ucaccauguuggcca

SEQ ID NO: 1881665 - RNA, 22 nt, Human
ucacaguucuuugggccagaca

SEQ ID NO: 1881666 - RNA, 19 nt, Human
ucacaguucuuugggccag

SEQ ID NO: 1881667 - RNA, 20 nt, Human
ucacaguucuuugggccaga

SEQ ID NO: 1881668 - RNA, 19 nt, Human
accacaucuugcucugcug

SEQ ID NO: 1881669 - RNA, 18 nt, Human
accacaucuugcucugcu

SEQ ID NO: 1881670 - RNA, 17 nt, Human
accacaucuugcucugc

SEQ ID NO: 1881671 - RNA, 18 nt, Human
accacaugugcacaugca

SEQ ID NO: 1881672 - RNA, 24 nt, Human
accacauuggagauguuuaguaau

SEQ ID NO: 1881673 - RNA, 20 nt, Human
accaccacacccagcccacu

SEQ ID NO: 1881674 - RNA, 15 nt, Human
accaccacacccagc

SEQ ID NO: 1881675 - RNA, 16 nt, Human
ucacugugagcuccca

SEQ ID NO: 1881676 - RNA, 15 nt, Human
ucacugucuuuccua

SEQ ID NO: 1881677 - RNA, 16 nt, Human
ucacugucuuuccuag

SEQ ID NO: 1881678 - RNA, 17 nt, Human
ucacugucuuuccuaga

SEQ ID NO: 1881679 - RNA, 15 nt, Human
ucacugcagccucaa

SEQ ID NO: 1881680 - RNA, 23 nt, Human
ucacuguugcccaggcuggcgug

SEQ ID NO: 1881681 - RNA, 14 nt, Human
ucacugcagccuca

SEQ ID NO: 1881682 - RNA, 22 nt, Human
ucacugagacagcccgggcucu

SEQ ID NO: 1881683 - RNA, 17 nt, Human
ucacugagacagcccgg

SEQ ID NO: 1881684 - RNA, 21 nt, Human
ucacugagacagcccgggcuc

SEQ ID NO: 1881685 - RNA, 16 nt, Human
ucacugagacagcccg

SEQ ID NO: 1881686 - RNA, 17 nt, Human
accaguguuguggauuu

SEQ ID NO: 1881687 - RNA, 15 nt, Human
accaguguuguggau

SEQ ID NO: 1881688 - RNA, 17 nt, Human
accaguccccccacccu

SEQ ID NO: 1881689 - RNA, 16 nt, Human
accagucauuuuucag

SEQ ID NO: 1881690 - RNA, 15 nt, Human
accaguccccccacc

SEQ ID NO: 1881691 - RNA, 14 nt, Human
accagucauuuuuc

SEQ ID NO: 1881692 - RNA, 15 nt, Human
accagucauuuuuca

SEQ ID NO: 1881693 - RNA, 10 nt, Human
ucacuugagu

SEQ ID NO: 1881694 - RNA, 22 nt, Human
ucacuugaggucaggaguuccu

SEQ ID NO: 1881695 - RNA, 23 nt, Human
ucacuugaacccgggaggcagag

SEQ ID NO: 1881696 - RNA, 12 nt, Human
ucacuugagacc

SEQ ID NO: 1881697 - RNA, 18 nt, Human
ucacguaaagcuagaaau

SEQ ID NO: 1881698 - RNA, 23 nt, Human
ucacuacccuaauagacuaaaug

SEQ ID NO: 1881699 - RNA, 23 nt, Human
ucacguuuuguuuugugccaacc

SEQ ID NO: 1881700 - RNA, 20 nt, Human
ucacguaaagcuagaaauga

SEQ ID NO: 1881701 - RNA, 19 nt, Human
ucacguaaagcuagaaaug

SEQ ID NO: 1881702 - RNA, 22 nt, Human
ucacguuucauguaauccucaa

SEQ ID NO: 1881703 - RNA, 22 nt, Human
accagcgugugacuacuccccc

SEQ ID NO: 1881704 - RNA, 15 nt, Human
accacucaaaggcca

SEQ ID NO: 1881705 - RNA, 23 nt, Human
accagcuaagaaaagauuuuaau

SEQ ID NO: 1881706 - RNA, 22 nt, Human
accagcuaagaaaagauuuuaa

SEQ ID NO: 1881707 - RNA, 13 nt, Human
accagcucaggac

SEQ ID NO: 1881708 - RNA, 14 nt, Human
accagcucaggaca

SEQ ID NO: 1881709 - RNA, 15 nt, Human
accagcucaggacag

SEQ ID NO: 1881710 - RNA, 16 nt, Human
accagcucaggacaga

SEQ ID NO: 1881711 - RNA, 15 nt, Human
accacuacauucugu

SEQ ID NO: 1881712 - RNA, 13 nt, Human
accaccagaagcc

SEQ ID NO: 1881713 - RNA, 16 nt, Human
accacuacauucuguu

SEQ ID NO: 1881714 - RNA, 17 nt, Human
accacuacauucuguua

SEQ ID NO: 1881715 - RNA, 20 nt, Human
accagcugaaaguugggacu

SEQ ID NO: 1881716 - RNA, 23 nt, Human
accagcucaggacagaugccaca

SEQ ID NO: 1881717 - RNA, 12 nt, Human
accagcugaaag

SEQ ID NO: 1881718 - RNA, 17 nt, Human
accaggaaccucuucag

SEQ ID NO: 1881719 - RNA, 20 nt, Human
ucaagucggaucuaguccag

SEQ ID NO: 1881720 - RNA, 22 nt, Human
ucaaguccucuuuucugagagg

SEQ ID NO: 1881721 - RNA, 20 nt, Human
ucaacugccaaaaugcucua

SEQ ID NO: 1881722 - RNA, 22 nt, Human
ucaauaucuuuuuuuuaauaaa

SEQ ID NO: 1881723 - RNA, 14 nt, Human
ucaauauccuuugc

SEQ ID NO: 1881724 - RNA, 16 nt, Human
ucaauauccuuugccu

SEQ ID NO: 1881725 - RNA, 23 nt, Human
ucaaugaaugaaugaauggcuaa

SEQ ID NO: 1881726 - RNA, 10 nt, Human
ucaauauuua

SEQ ID NO: 1881727 - RNA, 11 nt, Human
ucaauauuuau

SEQ ID NO: 1881728 - RNA, 20 nt, Human
ucaauauuuauuauuuucac

SEQ ID NO: 1881729 - RNA, 12 nt, Human
ucaauauuuauu

SEQ ID NO: 1881730 - RNA, 13 nt, Human
ucaauauuuauua

SEQ ID NO: 1881731 - RNA, 21 nt, Human
acauuuuuuaaaugcaccugg

SEQ ID NO: 1881732 - RNA, 17 nt, Human
acauuuuuuaaaugcac

SEQ ID NO: 1881733 - RNA, 16 nt, Human
acauuuuuuaaaugca

SEQ ID NO: 1881734 - RNA, 14 nt, Human
acauuuuuuaaaug

SEQ ID NO: 1881735 - RNA, 11 nt, Human
acauuuuguau

SEQ ID NO: 1881736 - RNA, 18 nt, Human
acauuuuggugagaaaug

SEQ ID NO: 1881737 - RNA, 19 nt, Human
acauuuuuaagugcugcau

SEQ ID NO: 1881738 - RNA, 23 nt, Human
acauuuuuaagugcugcauuuaa

SEQ ID NO: 1881739 - RNA, 22 nt, Human
acauuuuuaagugcugcauuua

SEQ ID NO: 1881740 - RNA, 21 nt, Human
acauuuuuaagugcugcauuu

SEQ ID NO: 1881741 - RNA, 14 nt, Human
acauugcaauagaa

SEQ ID NO: 1881742 - RNA, 16 nt, Human
acauugcaauagaaau

SEQ ID NO: 1881743 - RNA, 15 nt, Human
acauugcaauagaaa

SEQ ID NO: 1881744 - RNA, 16 nt, Human
acauuguuaaaauaaa

SEQ ID NO: 1881745 - RNA, 17 nt, Human
acauuguugagcuauug

SEQ ID NO: 1881746 - RNA, 16 nt, Human
acauuguucaauuaga

SEQ ID NO: 1881747 - RNA, 20 nt, Human
acauuguucaauuagaauag

SEQ ID NO: 1881748 - RNA, 20 nt, Human
acauuuuauuuuauuaugca

SEQ ID NO: 1881749 - RNA, 19 nt, Human
acauuuuauuuuauuaugc

SEQ ID NO: 1881750 - RNA, 14 nt, Human
acauuuuauuuuau

SEQ ID NO: 1881751 - RNA, 18 nt, Human
acauuuuauuuuauuaug

SEQ ID NO: 1881752 - RNA, 17 nt, Human
acauuuuggugagaaau

SEQ ID NO: 1881753 - RNA, 14 nt, Human
acauuguugagcua

SEQ ID NO: 1881754 - RNA, 13 nt, Human
acauuuucacaca

SEQ ID NO: 1881755 - RNA, 15 nt, Human
acauuuucacacaau

SEQ ID NO: 1881756 - RNA, 20 nt, Human
acauuuucacacaauacaau

SEQ ID NO: 1881757 - RNA, 23 nt, Human
acaugaaucccacccacauguga

SEQ ID NO: 1881758 - RNA, 21 nt, Human
acaugaaucccacccacaugu

SEQ ID NO: 1881759 - RNA, 20 nt, Human
acaugaaucccacccacaug

SEQ ID NO: 1881760 - RNA, 20 nt, Human
acaugagguacugagaguga

SEQ ID NO: 1881761 - RNA, 20 nt, Human
acaugaauauuuaguguuca

SEQ ID NO: 1881762 - RNA, 12 nt, Human
acagucccugcc

SEQ ID NO: 1881763 - RNA, 20 nt, Human
acagucagauuuccagucuc

SEQ ID NO: 1881764 - RNA, 21 nt, Human
acaugcuacacacugcauguu

SEQ ID NO: 1881765 - RNA, 15 nt, Human
acaugcuacacacug

SEQ ID NO: 1881766 - RNA, 23 nt, Human
acaugagguacugagagugaaca

SEQ ID NO: 1881767 - RNA, 20 nt, Human
acaugcgguagccagcacac

SEQ ID NO: 1881768 - RNA, 22 nt, Human
acaugcgguagccagcacacag

SEQ ID NO: 1881769 - RNA, 23 nt, Human
acaugcgguagccagcacacagg

SEQ ID NO: 1881770 - RNA, 18 nt, Human
acaugcgguagccagcac

SEQ ID NO: 1881771 - RNA, 15 nt, Human
acauguaauuaagua

SEQ ID NO: 1881772 - RNA, 21 nt, Human
acaugguaaacgcugucccua

SEQ ID NO: 1881773 - RNA, 17 nt, Human
acauguaauuaaguacu

SEQ ID NO: 1881774 - RNA, 19 nt, Human
acauguaauuaaguacuau

SEQ ID NO: 1881775 - RNA, 21 nt, Human
acauguaauuaaguacuaugu

SEQ ID NO: 1881776 - RNA, 22 nt, Human
acauguaauuaaguacuaugua

SEQ ID NO: 1881777 - RNA, 22 nt, Human
acauggcuggagcuagaauuug

SEQ ID NO: 1881778 - RNA, 13 nt, Human
ucaaauuucuaaa

SEQ ID NO: 1881779 - RNA, 17 nt, Human
ucaaccaaugccaaaaa

SEQ ID NO: 1881780 - RNA, 16 nt, Human
ucaacaaauugcccuu

SEQ ID NO: 1881781 - RNA, 20 nt, Human
ucaacugcaucaagauguga

SEQ ID NO: 1881782 - RNA, 19 nt, Human
ucaacugccaaaaugcucu

SEQ ID NO: 1881783 - RNA, 18 nt, Human
ucaacccccauuucuauu

SEQ ID NO: 1881784 - RNA, 17 nt, Human
ucaaccagggauuguuu

SEQ ID NO: 1881785 - RNA, 20 nt, Human
ucaaccagggauuguuucug

SEQ ID NO: 1881786 - RNA, 22 nt, Human
ucaaccagggauuguuucuguu

SEQ ID NO: 1881787 - RNA, 14 nt, Human
ucaaccagcagaug

SEQ ID NO: 1881788 - RNA, 14 nt, Human
acauuccugaugcu

SEQ ID NO: 1881789 - RNA, 15 nt, Human
acauuccugaacagg

SEQ ID NO: 1881790 - RNA, 14 nt, Human
acauuccugaacag

SEQ ID NO: 1881791 - RNA, 23 nt, Human
acauguaauuaaguacuauguau

SEQ ID NO: 1881792 - RNA, 18 nt, Human
acauguagaaaacaaaau

SEQ ID NO: 1881793 - RNA, 15 nt, Human
acauguccaagaagc

SEQ ID NO: 1881794 - RNA, 19 nt, Human
acauguccaagaagcccag

SEQ ID NO: 1881795 - RNA, 20 nt, Human
acccgggcagggcucccaca

SEQ ID NO: 1881796 - RNA, 19 nt, Human
acccucgaggcggaucuuu

SEQ ID NO: 1881797 - RNA, 16 nt, Human
acccugaaagcccuga

SEQ ID NO: 1881798 - RNA, 18 nt, Human
acccugaaagcccugagc

SEQ ID NO: 1881799 - RNA, 14 nt, Human
acccugaggcccag

SEQ ID NO: 1881800 - RNA, 18 nt, Human
acccugaaggggccauga

SEQ ID NO: 1881801 - RNA, 12 nt, Human
acccugaagggg

SEQ ID NO: 1881802 - RNA, 17 nt, Human
acccugaaggggccaug

SEQ ID NO: 1881803 - RNA, 12 nt, Human
acccuucuuuuc

SEQ ID NO: 1881804 - RNA, 17 nt, Human
acccugcccugugggcc

SEQ ID NO: 1881805 - RNA, 22 nt, Human
acccugcccugugggcccccaa

SEQ ID NO: 1881806 - RNA, 15 nt, Human
acccugaggcccaga

SEQ ID NO: 1881807 - RNA, 16 nt, Human
acccugaggcccagag

SEQ ID NO: 1881808 - RNA, 17 nt, Human
acccugaggcccagagg

SEQ ID NO: 1881809 - RNA, 15 nt, Human
acccugcccuguggg

SEQ ID NO: 1881810 - RNA, 15 nt, Human
accgaaaacguggcu

SEQ ID NO: 1881811 - RNA, 19 nt, Human
accgaaaaacuaaaaauaa

SEQ ID NO: 1881812 - RNA, 17 nt, Human
acccuugccgucuaccu

SEQ ID NO: 1881813 - RNA, 20 nt, Human
acccuuguggucccacccca

SEQ ID NO: 1881814 - RNA, 23 nt, Human
acccuuguggucccaccccacac

SEQ ID NO: 1881815 - RNA, 17 nt, Human
acccgggaggcagaggu

SEQ ID NO: 1881816 - RNA, 12 nt, Human
acccgggaaggg

SEQ ID NO: 1881817 - RNA, 13 nt, Human
acccgggaagggg

SEQ ID NO: 1881818 - RNA, 20 nt, Human
acccggccccugcugguuca

SEQ ID NO: 1881819 - RNA, 17 nt, Human
acccggccccugcuggu

SEQ ID NO: 1881820 - RNA, 22 nt, Human
acccggccccugcugguucagg

SEQ ID NO: 1881821 - RNA, 16 nt, Human
acccggccccugcugg

SEQ ID NO: 1881822 - RNA, 15 nt, Human
acccggccccugcug

SEQ ID NO: 1881823 - RNA, 14 nt, Human
acccggccccugcu

SEQ ID NO: 1881824 - RNA, 22 nt, Human
ucagguaacaggcagauacagg

SEQ ID NO: 1881825 - RNA, 21 nt, Human
ucagguaacaggcagauacag

SEQ ID NO: 1881826 - RNA, 23 nt, Human
ucagguaacaggcagauacagga

SEQ ID NO: 1881827 - RNA, 16 nt, Human
ucaggguuggccccug

SEQ ID NO: 1881828 - RNA, 19 nt, Human
ucagggucccugguggcag

SEQ ID NO: 1881829 - RNA, 23 nt, Human
ucaggccaggcccucugcccacu

SEQ ID NO: 1881830 - RNA, 22 nt, Human
ucagcuuguaaauagcucaggu

SEQ ID NO: 1881831 - RNA, 21 nt, Human
ucagcuuguaaauagcucagg

SEQ ID NO: 1881832 - RNA, 15 nt, Human
ucagcuccagcucac

SEQ ID NO: 1881833 - RNA, 14 nt, Human
ucagcuccagcuca

SEQ ID NO: 1881834 - RNA, 21 nt, Human
ucaggccaggcccucugccca

SEQ ID NO: 1881835 - RNA, 22 nt, Human
ucaggccaggcccucugcccac

SEQ ID NO: 1881836 - RNA, 20 nt, Human
ucaggccaggcccucugccc

SEQ ID NO: 1881837 - RNA, 15 nt, Human
accccaguuuuuguu

SEQ ID NO: 1881838 - RNA, 18 nt, Human
accccaucucuacaaaaa

SEQ ID NO: 1881839 - RNA, 19 nt, Human
acccccuccuucagacacc

SEQ ID NO: 1881840 - RNA, 16 nt, Human
acccccucgcuuggac

SEQ ID NO: 1881841 - RNA, 12 nt, Human
acccccuccuuc

SEQ ID NO: 1881842 - RNA, 15 nt, Human
acccccuccuucaga

SEQ ID NO: 1881843 - RNA, 16 nt, Human
acccccuccuucagac

SEQ ID NO: 1881844 - RNA, 17 nt, Human
acccccuccuucagaca

SEQ ID NO: 1881845 - RNA, 11 nt, Human
acccccuccuu

SEQ ID NO: 1881846 - RNA, 23 nt, Human
ucagcggggacagcuccuucugu

SEQ ID NO: 1881847 - RNA, 21 nt, Human
ucagcggggacagcuccuucu

SEQ ID NO: 1881848 - RNA, 20 nt, Human
ucagcggggacagcuccuuc

SEQ ID NO: 1881849 - RNA, 19 nt, Human
ucagcggggacagcuccuu

SEQ ID NO: 1881850 - RNA, 12 nt, Human
ucagcuccagcu

SEQ ID NO: 1881851 - RNA, 18 nt, Human
ucagcuccacuuucagug

SEQ ID NO: 1881852 - RNA, 16 nt, Human
accccuggugguucac

SEQ ID NO: 1881853 - RNA, 15 nt, Human
accccugggggcucu

SEQ ID NO: 1881854 - RNA, 16 nt, Human
accccugggggcucuc

SEQ ID NO: 1881855 - RNA, 17 nt, Human
accccugggggcucuca

SEQ ID NO: 1881856 - RNA, 18 nt, Human
accauaauguuacauuau

SEQ ID NO: 1881857 - RNA, 15 nt, Human
accauaauguuacau

SEQ ID NO: 1881858 - RNA, 13 nt, Human
accauaauguuac

SEQ ID NO: 1881859 - RNA, 12 nt, Human
ucagauuugaac

SEQ ID NO: 1881860 - RNA, 21 nt, Human
ucagauuugaacucuucaauc

SEQ ID NO: 1881861 - RNA, 18 nt, Human
accaguguuguggauuua

SEQ ID NO: 1881862 - RNA, 15 nt, Human
ucagcaaaagaugcu

SEQ ID NO: 1881863 - RNA, 19 nt, Human
ucagccacccugaggccuc

SEQ ID NO: 1881864 - RNA, 20 nt, Human
ucagccacccugaggccucu

SEQ ID NO: 1881865 - RNA, 12 nt, Human
ucagccagcacu

SEQ ID NO: 1881866 - RNA, 14 nt, Human
ucagccagcacuug

SEQ ID NO: 1881867 - RNA, 23 nt, Human
ucagccagcacuuguccagcuga

SEQ ID NO: 1881868 - RNA, 22 nt, Human
ucagauuugccuuauuggcagc

SEQ ID NO: 1881869 - RNA, 17 nt, Human
ucagauuugccuuauug

SEQ ID NO: 1881870 - RNA, 22 nt, Human
accccagccccaaaacucuccu

SEQ ID NO: 1881871 - RNA, 13 nt, Human
accccagccccaa

SEQ ID NO: 1881872 - RNA, 17 nt, Human
accccacacacgccaga

SEQ ID NO: 1881873 - RNA, 23 nt, Human
acccaggagccccgaggccuucu

SEQ ID NO: 1881874 - RNA, 19 nt, Human
acccaggagccccgaggcc

SEQ ID NO: 1881875 - RNA, 14 nt, Human
ucagccagagaagc

SEQ ID NO: 1881876 - RNA, 23 nt, Human
ucaugauuucauuucaacuguuu

SEQ ID NO: 1881877 - RNA, 17 nt, Human
ucaugauuucauuucaa

SEQ ID NO: 1881878 - RNA, 14 nt, Human
ucaugcaaacuuua

SEQ ID NO: 1881879 - RNA, 17 nt, Human
ucaugaaagauucaaug

SEQ ID NO: 1881880 - RNA, 16 nt, Human
ucaugaaagauucaau

SEQ ID NO: 1881881 - RNA, 20 nt, Human
ucaucuacucauuuaaagua

SEQ ID NO: 1881882 - RNA, 13 nt, Human
ucaucuaggauuu

SEQ ID NO: 1881883 - RNA, 17 nt, Human
ucaucgccagacaacug

SEQ ID NO: 1881884 - RNA, 14 nt, Human
ucaucgaaucuacu

SEQ ID NO: 1881885 - RNA, 21 nt, Human
ucaucgaaucuacuaauucca

SEQ ID NO: 1881886 - RNA, 16 nt, Human
ucaucccaacugucuu

SEQ ID NO: 1881887 - RNA, 17 nt, Human
ucaugugaaaucauuca

SEQ ID NO: 1881888 - RNA, 16 nt, Human
ucaugugaaaucauuc

SEQ ID NO: 1881889 - RNA, 23 nt, Human
ucaugcaaacuuuauuuuguguu

SEQ ID NO: 1881890 - RNA, 17 nt, Human
ucauguuuacagaggac

SEQ ID NO: 1881891 - RNA, 17 nt, Human
accgcagacaggaccag

SEQ ID NO: 1881892 - RNA, 12 nt, Human
accgcagacagg

SEQ ID NO: 1881893 - RNA, 16 nt, Human
accgcagacaggacca

SEQ ID NO: 1881894 - RNA, 22 nt, Human
accuagaaauugacacaagugg

SEQ ID NO: 1881895 - RNA, 15 nt, Human
accuaggggcgccgc

SEQ ID NO: 1881896 - RNA, 12 nt, Human
accuauuuccau

SEQ ID NO: 1881897 - RNA, 11 nt, Human
accuauuucuc

SEQ ID NO: 1881898 - RNA, 14 nt, Human
accuauuucucuuu

SEQ ID NO: 1881899 - RNA, 19 nt, Human
accuauuucucuuucuuua

SEQ ID NO: 1881900 - RNA, 22 nt, Human
accuauuucucuuucuuuacaa

SEQ ID NO: 1881901 - RNA, 14 nt, Human
accucaccuagaaa

SEQ ID NO: 1881902 - RNA, 15 nt, Human
accucaccuagaaau

SEQ ID NO: 1881903 - RNA, 20 nt, Human
accucccacaaaggagagcu

SEQ ID NO: 1881904 - RNA, 19 nt, Human
ucaguuuuaucauuuucaa

SEQ ID NO: 1881905 - RNA, 17 nt, Human
ucaguuuuaucauuuuc

SEQ ID NO: 1881906 - RNA, 16 nt, Human
ucaguuuuaucauuuu

SEQ ID NO: 1881907 - RNA, 15 nt, Human
ucaguuuuugugaaa

SEQ ID NO: 1881908 - RNA, 17 nt, Human
ucaguuuuugugaaaag

SEQ ID NO: 1881909 - RNA, 16 nt, Human
ucaguuuucaggagug

SEQ ID NO: 1881910 - RNA, 12 nt, Human
ucaguuuucauu

SEQ ID NO: 1881911 - RNA, 13 nt, Human
ucaguuuucauuu

SEQ ID NO: 1881912 - RNA, 11 nt, Human
ucaguggcagc

SEQ ID NO: 1881913 - RNA, 15 nt, Human
ucaguggauuuccca

SEQ ID NO: 1881914 - RNA, 16 nt, Human
ucagugccuuauggaa

SEQ ID NO: 1881915 - RNA, 18 nt, Human
ucagugccuuauggaaca

SEQ ID NO: 1881916 - RNA, 13 nt, Human
ucaguggcagcug

SEQ ID NO: 1881917 - RNA, 12 nt, Human
ucaguggcagcu

SEQ ID NO: 1881918 - RNA, 17 nt, Human
ucaguggcgagaaauaa

SEQ ID NO: 1881919 - RNA, 12 nt, Human
ucagugccacua

SEQ ID NO: 1881920 - RNA, 16 nt, Human
ucagugccaaaaacaa

SEQ ID NO: 1881921 - RNA, 12 nt, Human
ucaguaugugga

SEQ ID NO: 1881922 - RNA, 16 nt, Human
ucaguauguggaagug

SEQ ID NO: 1881923 - RNA, 14 nt, Human
ucaguauguggaag

SEQ ID NO: 1881924 - RNA, 17 nt, Human
accgaaaacguggcugc

SEQ ID NO: 1881925 - RNA, 19 nt, Human
accgaaaacguggcugcuu

SEQ ID NO: 1881926 - RNA, 15 nt, Human
ucaguauaaacaaag

SEQ ID NO: 1881927 - RNA, 17 nt, Human
ucaguauaaacaaaguu

SEQ ID NO: 1881928 - RNA, 9 nt, Human
ucagugccu

SEQ ID NO: 1881929 - RNA, 10 nt, Human
ucagugccuu

SEQ ID NO: 1881930 - RNA, 11 nt, Human
ucagugccuua

SEQ ID NO: 1881931 - RNA, 12 nt, Human
ucagugccuuau

SEQ ID NO: 1881932 - RNA, 14 nt, Human
ucagugccuuaugg

SEQ ID NO: 1881933 - RNA, 15 nt, Human
ucagugccuuaugga

SEQ ID NO: 1881934 - RNA, 16 nt, Human
ucauauaauaaaugua

SEQ ID NO: 1881935 - RNA, 15 nt, Human
ucauauaauaaaugu

SEQ ID NO: 1881936 - RNA, 18 nt, Human
ucauauaagauucauauu

SEQ ID NO: 1881937 - RNA, 21 nt, Human
ucauaguaugguggcuggguu

SEQ ID NO: 1881938 - RNA, 19 nt, Human
ucauaguaugguggcuggg

SEQ ID NO: 1881939 - RNA, 18 nt, Human
ucauaguaugguggcugg

SEQ ID NO: 1881940 - RNA, 15 nt, Human
ucauaguaugguggc

SEQ ID NO: 1881941 - RNA, 14 nt, Human
ucauaaccuagccu

SEQ ID NO: 1881942 - RNA, 20 nt, Human
ucauaaaaagcaaaacaaaa

SEQ ID NO: 1881943 - RNA, 16 nt, Human
ucauaaauuuaugguu

SEQ ID NO: 1881944 - RNA, 22 nt, Human
ucauauguaccauguacaugaa

SEQ ID NO: 1881945 - RNA, 14 nt, Human
ucauauugaauaua

SEQ ID NO: 1881946 - RNA, 21 nt, Human
ucauauguaccauguacauga

SEQ ID NO: 1881947 - RNA, 20 nt, Human
ucauaugcaaagcauauuaa

SEQ ID NO: 1881948 - RNA, 15 nt, Human
ucauauuuacuucuu

SEQ ID NO: 1881949 - RNA, 23 nt, Human
ucauauuuacuucuuauacauuu

SEQ ID NO: 1881950 - RNA, 13 nt, Human
ucauauuugcacu

SEQ ID NO: 1881951 - RNA, 14 nt, Human
ucauauuugcacua

SEQ ID NO: 1881952 - RNA, 15 nt, Human
ucauauuuucaugcu

SEQ ID NO: 1881953 - RNA, 16 nt, Human
acgaaauguuauuuuu

SEQ ID NO: 1881954 - RNA, 23 nt, Human
acgaaauguuauuuuuuaauuau

SEQ ID NO: 1881955 - RNA, 13 nt, Human
acgaaauguuauu

SEQ ID NO: 1881956 - RNA, 12 nt, Human
acgaaauguuau

SEQ ID NO: 1881957 - RNA, 15 nt, Human
acgaauauugcugau

SEQ ID NO: 1881958 - RNA, 18 nt, Human
acgaauauugcugauggu

SEQ ID NO: 1881959 - RNA, 13 nt, Human
acgaaacccacuc

SEQ ID NO: 1881960 - RNA, 23 nt, Human
uccaggcugggagagccuuccag

SEQ ID NO: 1881961 - RNA, 13 nt, Human
uccaggcugguuc

SEQ ID NO: 1881962 - RNA, 11 nt, Human
uccaggcuggu

SEQ ID NO: 1881963 - RNA, 22 nt, Human
uccaggcuccuuuagcgcccag

SEQ ID NO: 1881964 - RNA, 12 nt, Human
uccaggcuccuu

SEQ ID NO: 1881965 - RNA, 20 nt, Human
uccaggcugggagagccuuc

SEQ ID NO: 1881966 - RNA, 21 nt, Human
uccaggcugggagagccuucc

SEQ ID NO: 1881967 - RNA, 10 nt, Human
uccaggcucc

SEQ ID NO: 1881968 - RNA, 22 nt, Human
uccaggauuccucuuuucucug

SEQ ID NO: 1881969 - RNA, 18 nt, Human
uccaggauuccucuuuuc

SEQ ID NO: 1881970 - RNA, 15 nt, Human
uccaggauuccucuu

SEQ ID NO: 1881971 - RNA, 14 nt, Human
uccagaauuuccca

SEQ ID NO: 1881972 - RNA, 15 nt, Human
uccagaauuucccaa

SEQ ID NO: 1881973 - RNA, 22 nt, Human
uccagcccugaguuccuagcca

SEQ ID NO: 1881974 - RNA, 20 nt, Human
uccagcccugaguuccuagc

SEQ ID NO: 1881975 - RNA, 20 nt, Human
uccagccugcugccugcuuu

SEQ ID NO: 1881976 - RNA, 13 nt, Human
uccagccugccac

SEQ ID NO: 1881977 - RNA, 11 nt, Human
uccagccuggg

SEQ ID NO: 1881978 - RNA, 21 nt, Human
uccacugugccaugugccagg

SEQ ID NO: 1881979 - RNA, 21 nt, Human
uccagaaugcuguacaucuau

SEQ ID NO: 1881980 - RNA, 18 nt, Human
uccagaaugcuguacauc

SEQ ID NO: 1881981 - RNA, 22 nt, Human
uccacugguucuucuuggucuc

SEQ ID NO: 1881982 - RNA, 18 nt, Human
uccacucucccccacccc

SEQ ID NO: 1881983 - RNA, 16 nt, Human
uccacucucccccacc

SEQ ID NO: 1881984 - RNA, 14 nt, Human
uccacucuccccca

SEQ ID NO: 1881985 - RNA, 13 nt, Human
uccacucuccccc

SEQ ID NO: 1881986 - RNA, 12 nt, Human
uccacucucccc

SEQ ID NO: 1881987 - RNA, 13 nt, Human
accuuuuuuauac

SEQ ID NO: 1881988 - RNA, 16 nt, Human
accuuuuauugacaca

SEQ ID NO: 1881989 - RNA, 15 nt, Human
accuuuuauguagua

SEQ ID NO: 1881990 - RNA, 20 nt, Human
accuuuuauguaguaauuga

SEQ ID NO: 1881991 - RNA, 20 nt, Human
accuuuuauugacacagaaa

SEQ ID NO: 1881992 - RNA, 20 nt, Human
accuugaacuggguacuugu

SEQ ID NO: 1881993 - RNA, 15 nt, Human
accuuucuccuuugu

SEQ ID NO: 1881994 - RNA, 16 nt, Human
accuuucuccuuugua

SEQ ID NO: 1881995 - RNA, 19 nt, Human
accuugaaaacuuuaugcu

SEQ ID NO: 1881996 - RNA, 20 nt, Human
accuugaaaauaagaauaga

SEQ ID NO: 1881997 - RNA, 20 nt, Human
ucauucccuucgacagcauu

SEQ ID NO: 1881998 - RNA, 21 nt, Human
ucauucccuucgacagcauuu

SEQ ID NO: 1881999 - RNA, 23 nt, Human
ucauucccuucgacagcauuuuc

SEQ ID NO: 1882000 - RNA, 22 nt, Human
ucauucccuucgacagcauuuu

SEQ ID NO: 1882001 - RNA, 22 nt, Human
accuuuguuugcaucugaaaau

SEQ ID NO: 1882002 - RNA, 18 nt, Human
accuuuguccccaccgca

SEQ ID NO: 1882003 - RNA, 17 nt, Human
accuuugacaaagguaa

SEQ ID NO: 1882004 - RNA, 18 nt, Human
accuuugacaaagguaaa

SEQ ID NO: 1882005 - RNA, 17 nt, Human
accuuuguccccaccgc

SEQ ID NO: 1882006 - RNA, 23 nt, Human
accuuucuccuuuguacuuugug

SEQ ID NO: 1882007 - RNA, 19 nt, Human
accuuucuccuuuguacuu

SEQ ID NO: 1882008 - RNA, 20 nt, Human
accuuucuccuuuguacuuu

SEQ ID NO: 1882009 - RNA, 24 nt, Human
acgcggcucccggggcagggcagc

SEQ ID NO: 1882010 - RNA, 20 nt, Human
acgcgugcacacaccagagc

SEQ ID NO: 1882011 - RNA, 21 nt, Human
acgcuacccgggaagggggcu

SEQ ID NO: 1882012 - RNA, 20 nt, Human
acgccuguaaucccagcacu

SEQ ID NO: 1882013 - RNA, 21 nt, Human
acgaauauugcugauggugca

SEQ ID NO: 1882014 - RNA, 15 nt, Human
acgccucccacuggg

SEQ ID NO: 1882015 - RNA, 14 nt, Human
acgccucccacugg

SEQ ID NO: 1882016 - RNA, 13 nt, Human
acgcuggaccuug

SEQ ID NO: 1882017 - RNA, 15 nt, Human
acgcucucuacucug

SEQ ID NO: 1882018 - RNA, 18 nt, Human
acgcucucuacucugcuu

SEQ ID NO: 1882019 - RNA, 14 nt, Human
acgcucucuggccu

SEQ ID NO: 1882020 - RNA, 11 nt, Human
acgcucucugg

SEQ ID NO: 1882021 - RNA, 16 nt, Human
acgcuggagugcagug

SEQ ID NO: 1882022 - RNA, 15 nt, Human
acgcuggagugcagu

SEQ ID NO: 1882023 - RNA, 23 nt, Human
acgcuggaccuugaacuggguac

SEQ ID NO: 1882024 - RNA, 20 nt, Human
acgcuggaccuugaacuggg

SEQ ID NO: 1882025 - RNA, 18 nt, Human
acgcuggagugcagugag

SEQ ID NO: 1882026 - RNA, 17 nt, Human
acgcuggagugcaguga

SEQ ID NO: 1882027 - RNA, 23 nt, Human
acggagucccaccuuggcugcag

SEQ ID NO: 1882028 - RNA, 22 nt, Human
acggcuccacuaggacuucaaa

SEQ ID NO: 1882029 - RNA, 18 nt, Human
acggccacaucaaagagg

SEQ ID NO: 1882030 - RNA, 13 nt, Human
acggccacaucaa

SEQ ID NO: 1882031 - RNA, 18 nt, Human
acggcucgauuucuccag

SEQ ID NO: 1882032 - RNA, 19 nt, Human
acggcucgauuucuccagg

SEQ ID NO: 1882033 - RNA, 18 nt, Human
acggcuuuuacuuaaacc

SEQ ID NO: 1882034 - RNA, 11 nt, Human
acggcugggca

SEQ ID NO: 1882035 - RNA, 22 nt, Human
acggcugggcacacgccuccca

SEQ ID NO: 1882036 - RNA, 14 nt, Human
uccaguaucuugaa

SEQ ID NO: 1882037 - RNA, 15 nt, Human
uccaguaucuugaag

SEQ ID NO: 1882038 - RNA, 15 nt, Human
uccaguaaucuaaua

SEQ ID NO: 1882039 - RNA, 19 nt, Human
uccaguaaucuaauauggc

SEQ ID NO: 1882040 - RNA, 12 nt, Human
acggccaggcca

SEQ ID NO: 1882041 - RNA, 18 nt, Human
acggcucacugcagccuc

SEQ ID NO: 1882042 - RNA, 17 nt, Human
acggcucacugcagccu

SEQ ID NO: 1882043 - RNA, 16 nt, Human
acggcucacugcagcc

SEQ ID NO: 1882044 - RNA, 13 nt, Human
acggccaggccag

SEQ ID NO: 1882045 - RNA, 22 nt, Human
uccagugaggcucugcccuugg

SEQ ID NO: 1882046 - RNA, 23 nt, Human
uccagugaggcucugcccuuggu

SEQ ID NO: 1882047 - RNA, 18 nt, Human
uccagugcaacacugaag

SEQ ID NO: 1882048 - RNA, 16 nt, Human
uccagugaggcucugc

SEQ ID NO: 1882049 - RNA, 19 nt, Human
uccagucuccaccaggaac

SEQ ID NO: 1882050 - RNA, 15 nt, Human
uccagugaggcucug

SEQ ID NO: 1882051 - RNA, 18 nt, Human
uccagugagacagcucug

SEQ ID NO: 1882052 - RNA, 16 nt, Human
uccaguaucuugaaga

SEQ ID NO: 1882053 - RNA, 18 nt, Human
uccaguaucuugaagacu

SEQ ID NO: 1882054 - RNA, 15 nt, Human
uccagucuccaccag

SEQ ID NO: 1882055 - RNA, 16 nt, Human
uccagucuccaccagg

SEQ ID NO: 1882056 - RNA, 13 nt, Human
acuaucugcuuuu

SEQ ID NO: 1882057 - RNA, 12 nt, Human
acuaucugcuuu

SEQ ID NO: 1882058 - RNA, 19 nt, Human
acuaucuacucuccucauc

SEQ ID NO: 1882059 - RNA, 17 nt, Human
acuaucuacucuccuca

SEQ ID NO: 1882060 - RNA, 16 nt, Human
acuaucuaaauguuga

SEQ ID NO: 1882061 - RNA, 21 nt, Human
acuaucuaaauguugaaagau

SEQ ID NO: 1882062 - RNA, 15 nt, Human
acuaucuacucuccu

SEQ ID NO: 1882063 - RNA, 16 nt, Human
acuaucuacucuccuc

SEQ ID NO: 1882064 - RNA, 22 nt, Human
acuauagccuaggugacagagu

SEQ ID NO: 1882065 - RNA, 20 nt, Human
acuauagccuaggugacaga

SEQ ID NO: 1882066 - RNA, 15 nt, Human
acuagagcuuucuuu

SEQ ID NO: 1882067 - RNA, 18 nt, Human
acuagagggaccucuccc

SEQ ID NO: 1882068 - RNA, 19 nt, Human
acuagagggaccucuccca

SEQ ID NO: 1882069 - RNA, 23 nt, Human
acuauauuugggccugcuccaga

SEQ ID NO: 1882070 - RNA, 22 nt, Human
acuauauuugggccugcuccag

SEQ ID NO: 1882071 - RNA, 18 nt, Human
acuauagccuaggugaca

SEQ ID NO: 1882072 - RNA, 21 nt, Human
acucaauguuacuaucugcuu

SEQ ID NO: 1882073 - RNA, 16 nt, Human
acucaaguagcauuua

SEQ ID NO: 1882074 - RNA, 21 nt, Human
acucacaaccugaaccuagga

SEQ ID NO: 1882075 - RNA, 16 nt, Human
acucaaugcacugaca

SEQ ID NO: 1882076 - RNA, 15 nt, Human
acucaaguagcauuu

SEQ ID NO: 1882077 - RNA, 14 nt, Human
acucaagcccgcgg

SEQ ID NO: 1882078 - RNA, 17 nt, Human
acucaagauucccagga

SEQ ID NO: 1882079 - RNA, 18 nt, Human
acucaagauucccaggag

SEQ ID NO: 1882080 - RNA, 23 nt, Human
acucaagauucccaggaguucug

SEQ ID NO: 1882081 - RNA, 19 nt, Human
acucaagauucccaggagu

SEQ ID NO: 1882082 - RNA, 14 nt, Human
acuauguugcccag

SEQ ID NO: 1882083 - RNA, 22 nt, Human
acuauggcccuggccuagcaua

SEQ ID NO: 1882084 - RNA, 16 nt, Human
acuauguugcccaggc

SEQ ID NO: 1882085 - RNA, 15 nt, Human
acuauguugcccagg

SEQ ID NO: 1882086 - RNA, 17 nt, Human
acuauguugcccaggca

SEQ ID NO: 1882087 - RNA, 15 nt, Human
acuaugguauuugag

SEQ ID NO: 1882088 - RNA, 16 nt, Human
acuaugguauuugagu

SEQ ID NO: 1882089 - RNA, 15 nt, Human
acucaagauucccag

SEQ ID NO: 1882090 - RNA, 16 nt, Human
acucaagauucccagg

SEQ ID NO: 1882091 - RNA, 23 nt, Human
uccccacccugaaagcccugagc

SEQ ID NO: 1882092 - RNA, 15 nt, Human
uccccaccgcagaca

SEQ ID NO: 1882093 - RNA, 16 nt, Human
uccccaccgcagacag

SEQ ID NO: 1882094 - RNA, 18 nt, Human
uccccaggaggccagccu

SEQ ID NO: 1882095 - RNA, 12 nt, Human
uccccacccuga

SEQ ID NO: 1882096 - RNA, 16 nt, Human
ucccagcuacaccuuu

SEQ ID NO: 1882097 - RNA, 16 nt, Human
ucccagcuaccucaac

SEQ ID NO: 1882098 - RNA, 18 nt, Human
ucccauugucccucugcc

SEQ ID NO: 1882099 - RNA, 19 nt, Human
ucccauugucccucugccc

SEQ ID NO: 1882100 - RNA, 21 nt, Human
ucccauugucccucugcccca

SEQ ID NO: 1882101 - RNA, 19 nt, Human
ucccagcuacuugggaggc

SEQ ID NO: 1882102 - RNA, 17 nt, Human
ucccagcuacuugggag

SEQ ID NO: 1882103 - RNA, 18 nt, Human
ucccagcuacuugggagg

SEQ ID NO: 1882104 - RNA, 16 nt, Human
ucccagcuacuuggga

SEQ ID NO: 1882105 - RNA, 16 nt, Human
ucccccagccccaucc

SEQ ID NO: 1882106 - RNA, 15 nt, Human
acuacugcaccauuu

SEQ ID NO: 1882107 - RNA, 13 nt, Human
ucccccagcccca

SEQ ID NO: 1882108 - RNA, 15 nt, Human
ucccccagccccauc

SEQ ID NO: 1882109 - RNA, 11 nt, Human
ucccccagccc

SEQ ID NO: 1882110 - RNA, 15 nt, Human
uccccaggggaguug

SEQ ID NO: 1882111 - RNA, 20 nt, Human
uccccaggaggccagccuug

SEQ ID NO: 1882112 - RNA, 21 nt, Human
uccccaggaggccagccuuga

SEQ ID NO: 1882113 - RNA, 15 nt, Human
acuaauuuuaaaaug

SEQ ID NO: 1882114 - RNA, 20 nt, Human
acuacaaacaaaauuucuau

SEQ ID NO: 1882115 - RNA, 18 nt, Human
acuacaaacaaaauuucu

SEQ ID NO: 1882116 - RNA, 22 nt, Human
acguuucuaaaggcuaccuuug

SEQ ID NO: 1882117 - RNA, 22 nt, Human
acguuugaagacauugcaccag

SEQ ID NO: 1882118 - RNA, 18 nt, Human
ucccagauacuugggggg

SEQ ID NO: 1882119 - RNA, 21 nt, Human
ucccagauuggcucacacuga

SEQ ID NO: 1882120 - RNA, 20 nt, Human
ucccagauuggcucacacug

SEQ ID NO: 1882121 - RNA, 19 nt, Human
ucccagauuggcucacacu

SEQ ID NO: 1882122 - RNA, 18 nt, Human
ucccagauuggcucacac

SEQ ID NO: 1882123 - RNA, 22 nt, Human
ucccagauuggcucacacugag

SEQ ID NO: 1882124 - RNA, 16 nt, Human
ucccagauacuugggg

SEQ ID NO: 1882125 - RNA, 18 nt, Human
acuacagaaaaaccagag

SEQ ID NO: 1882126 - RNA, 19 nt, Human
uccauccugaggcuccacu

SEQ ID NO: 1882127 - RNA, 16 nt, Human
uccagugucucggagg

SEQ ID NO: 1882128 - RNA, 15 nt, Human
uccauccugaggcuc

SEQ ID NO: 1882129 - RNA, 12 nt, Human
uccauccugagg

SEQ ID NO: 1882130 - RNA, 17 nt, Human
uccaguguccuuagaac

SEQ ID NO: 1882131 - RNA, 18 nt, Human
uccaguguccuuagaaca

SEQ ID NO: 1882132 - RNA, 21 nt, Human
uccaguguccuuagaacauuu

SEQ ID NO: 1882133 - RNA, 20 nt, Human
uccaguguccuuagaacauu

SEQ ID NO: 1882134 - RNA, 18 nt, Human
acguaaagcuagaaauga

SEQ ID NO: 1882135 - RNA, 17 nt, Human
acguaaagcuagaaaug

SEQ ID NO: 1882136 - RNA, 18 nt, Human
acguaaugaaacuuggau

SEQ ID NO: 1882137 - RNA, 13 nt, Human
acguugugcauuu

SEQ ID NO: 1882138 - RNA, 15 nt, Human
acguugugcauuugg

SEQ ID NO: 1882139 - RNA, 14 nt, Human
acguugugcauuug

SEQ ID NO: 1882140 - RNA, 16 nt, Human
acguuucuaaaggcua

SEQ ID NO: 1882141 - RNA, 15 nt, Human
acguuucuaaaggcu

SEQ ID NO: 1882142 - RNA, 19 nt, Human
acguggcugcuucaaggau

SEQ ID NO: 1882143 - RNA, 21 nt, Human
acguggcugcuucaaggaucc

SEQ ID NO: 1882144 - RNA, 18 nt, Human
acguggcugcuucaagga

SEQ ID NO: 1882145 - RNA, 17 nt, Human
acguggcugcuucaagg

SEQ ID NO: 1882146 - RNA, 14 nt, Human
acugagccuuguaa

SEQ ID NO: 1882147 - RNA, 14 nt, Human
acugcaacuucugc

SEQ ID NO: 1882148 - RNA, 16 nt, Human
acugcaacuucugccu

SEQ ID NO: 1882149 - RNA, 21 nt, Human
acugauaaagaugagugagca

SEQ ID NO: 1882150 - RNA, 13 nt, Human
acugauaaagaug

SEQ ID NO: 1882151 - RNA, 14 nt, Human
acugcaccgggcca

SEQ ID NO: 1882152 - RNA, 18 nt, Human
acugcaccauuuaaaaac

SEQ ID NO: 1882153 - RNA, 20 nt, Human
acugcacuauagccuaggug

SEQ ID NO: 1882154 - RNA, 16 nt, Human
acugcaccgggccaca

SEQ ID NO: 1882155 - RNA, 16 nt, Human
acugcaagaaaaugau

SEQ ID NO: 1882156 - RNA, 19 nt, Human
uccugaugcuucuucagag

SEQ ID NO: 1882157 - RNA, 20 nt, Human
uccugaugcuucuucagaga

SEQ ID NO: 1882158 - RNA, 21 nt, Human
uccugaugcuucuucagagac

SEQ ID NO: 1882159 - RNA, 21 nt, Human
acugcacuauagccuagguga

SEQ ID NO: 1882160 - RNA, 14 nt, Human
acugcacuccagcc

SEQ ID NO: 1882161 - RNA, 17 nt, Human
acugcacuccagccugg

SEQ ID NO: 1882162 - RNA, 18 nt, Human
acugcacuccagccuggg

SEQ ID NO: 1882163 - RNA, 19 nt, Human
acugcacuccagccugggu

SEQ ID NO: 1882164 - RNA, 20 nt, Human
acugcacuccagccugggug

SEQ ID NO: 1882165 - RNA, 15 nt, Human
uccuggaaauauuaa

SEQ ID NO: 1882166 - RNA, 18 nt, Human
uccugcuuugggaagccg

SEQ ID NO: 1882167 - RNA, 23 nt, Human
uccuggaagugcuaauuuugaaa

SEQ ID NO: 1882168 - RNA, 22 nt, Human
uccuggaauaucuccgucaacu

SEQ ID NO: 1882169 - RNA, 17 nt, Human
uccugggagugagcugg

SEQ ID NO: 1882170 - RNA, 14 nt, Human
uccugggagugagc

SEQ ID NO: 1882171 - RNA, 12 nt, Human
uccugggaguga

SEQ ID NO: 1882172 - RNA, 15 nt, Human
uccugggagcuuuug

SEQ ID NO: 1882173 - RNA, 13 nt, Human
uccugcugggcag

SEQ ID NO: 1882174 - RNA, 22 nt, Human
uccugcuguaaauuuggcuucu

SEQ ID NO: 1882175 - RNA, 21 nt, Human
uccugcugcaguugccaguca

SEQ ID NO: 1882176 - RNA, 12 nt, Human
uccugcaggcag

SEQ ID NO: 1882177 - RNA, 13 nt, Human
uccugcaggcagc

SEQ ID NO: 1882178 - RNA, 14 nt, Human
uccugcaggcagcc

SEQ ID NO: 1882179 - RNA, 14 nt, Human
acucuuuguaagag

SEQ ID NO: 1882180 - RNA, 13 nt, Human
acucuuuguaaga

SEQ ID NO: 1882181 - RNA, 12 nt, Human
acucuuuugcuu

SEQ ID NO: 1882182 - RNA, 14 nt, Human
acucuuuugcuuua

SEQ ID NO: 1882183 - RNA, 20 nt, Human
acucuuuugcuuuauuccag

SEQ ID NO: 1882184 - RNA, 19 nt, Human
acucuuucuauuguuucuu

SEQ ID NO: 1882185 - RNA, 15 nt, Human
acucuuguuuccuua

SEQ ID NO: 1882186 - RNA, 16 nt, Human
acugaacauuccagag

SEQ ID NO: 1882187 - RNA, 13 nt, Human
acugaacauucca

SEQ ID NO: 1882188 - RNA, 18 nt, Human
acugaacucacuuuccuc

SEQ ID NO: 1882189 - RNA, 22 nt, Human
acugaacaccauugaaggcuua

SEQ ID NO: 1882190 - RNA, 21 nt, Human
acugaacaccauugaaggcuu

SEQ ID NO: 1882191 - RNA, 20 nt, Human
acugaacaccauugaaggcu

SEQ ID NO: 1882192 - RNA, 21 nt, Human
acucuuuugcuuuauuccaga

SEQ ID NO: 1882193 - RNA, 19 nt, Human
acugaacaccauugaaggc

SEQ ID NO: 1882194 - RNA, 22 nt, Human
uccucuuuggucuacacugugc

SEQ ID NO: 1882195 - RNA, 15 nt, Human
uccucuuugcuuugc

SEQ ID NO: 1882196 - RNA, 16 nt, Human
uccucuuugcuuugcu

SEQ ID NO: 1882197 - RNA, 17 nt, Human
uccugaaacaacuugga

SEQ ID NO: 1882198 - RNA, 20 nt, Human
uccucuuugcuuugcuuucu

SEQ ID NO: 1882199 - RNA, 23 nt, Human
uccucuuugcuuugcuuucugcu

SEQ ID NO: 1882200 - RNA, 19 nt, Human
uccucuuuccaucuacccu

SEQ ID NO: 1882201 - RNA, 19 nt, Human
uccucuuuggucuacacug

SEQ ID NO: 1882202 - RNA, 21 nt, Human
uccucuuuggucuacacugug

SEQ ID NO: 1882203 - RNA, 11 nt, Human
uccucccuccc

SEQ ID NO: 1882204 - RNA, 14 nt, Human
uccucccucccucu

SEQ ID NO: 1882205 - RNA, 11 nt, Human
uccucuuucca

SEQ ID NO: 1882206 - RNA, 12 nt, Human
uccucuuuccau

SEQ ID NO: 1882207 - RNA, 17 nt, Human
acugaccugguccacag

SEQ ID NO: 1882208 - RNA, 21 nt, Human
acugaccugguccacagggca

SEQ ID NO: 1882209 - RNA, 22 nt, Human
acugaccugguccacagggcac

SEQ ID NO: 1882210 - RNA, 19 nt, Human
acugaccuugaugagcugu

SEQ ID NO: 1882211 - RNA, 13 nt, Human
acugaccuugaug

SEQ ID NO: 1882212 - RNA, 15 nt, Human
acugacugcagggac

SEQ ID NO: 1882213 - RNA, 12 nt, Human
acugagaaauuu

SEQ ID NO: 1882214 - RNA, 17 nt, Human
acugagaaauuuauaaa

SEQ ID NO: 1882215 - RNA, 21 nt, Human
acugagaaauuuauaaacuuu

SEQ ID NO: 1882216 - RNA, 15 nt, Human
acugagacagcccgg

SEQ ID NO: 1882217 - RNA, 20 nt, Human
acugagaauguaagaacuac

SEQ ID NO: 1882218 - RNA, 19 nt, Human
acugagaauguaagaacua

SEQ ID NO: 1882219 - RNA, 18 nt, Human
acugagacagcccgggcu

SEQ ID NO: 1882220 - RNA, 21 nt, Human
acugagacagcccgggcucug

SEQ ID NO: 1882221 - RNA, 22 nt, Human
acugagacagcccgggcucugc

SEQ ID NO: 1882222 - RNA, 23 nt, Human
acugagacagcccgggcucugcc

SEQ ID NO: 1882223 - RNA, 18 nt, Human
acugagagugaacaaauu

SEQ ID NO: 1882224 - RNA, 20 nt, Human
acugagauccuuccuuuuga

SEQ ID NO: 1882225 - RNA, 14 nt, Human
acucuuaaucaaau

SEQ ID NO: 1882226 - RNA, 19 nt, Human
acucuuagauggauucucc

SEQ ID NO: 1882227 - RNA, 17 nt, Human
acucuuaggaagagaaa

SEQ ID NO: 1882228 - RNA, 14 nt, Human
acucuugaccucag

SEQ ID NO: 1882229 - RNA, 22 nt, Human
acucuuauaucuauauuuuaca

SEQ ID NO: 1882230 - RNA, 18 nt, Human
acucuuauaucuauauuu

SEQ ID NO: 1882231 - RNA, 17 nt, Human
acucuuauaucuauauu

SEQ ID NO: 1882232 - RNA, 16 nt, Human
acucuuauaucuauau

SEQ ID NO: 1882233 - RNA, 19 nt, Human
acucuuaggaagagaaacc

SEQ ID NO: 1882234 - RNA, 20 nt, Human
acucuuaggaagagaaacca

SEQ ID NO: 1882235 - RNA, 16 nt, Human
acucuugaccucaggu

SEQ ID NO: 1882236 - RNA, 15 nt, Human
acucuugaccucagg

SEQ ID NO: 1882237 - RNA, 19 nt, Human
acucuuauaucuauauuuu

SEQ ID NO: 1882238 - RNA, 16 nt, Human
acucuugauuauccau

SEQ ID NO: 1882239 - RNA, 14 nt, Human
acucuuggagccug

SEQ ID NO: 1882240 - RNA, 16 nt, Human
acucuuggagccugca

SEQ ID NO: 1882241 - RNA, 15 nt, Human
acucuuggagccugc

SEQ ID NO: 1882242 - RNA, 23 nt, Human
acucuuggagccugcagagcugc

SEQ ID NO: 1882243 - RNA, 22 nt, Human
acucuuggagccugcagagcug

SEQ ID NO: 1882244 - RNA, 22 nt, Human
uccucauaguaugguggcuggg

SEQ ID NO: 1882245 - RNA, 22 nt, Human
uccucagguggccaugccucag

SEQ ID NO: 1882246 - RNA, 18 nt, Human
uccucagguggccaugcc

SEQ ID NO: 1882247 - RNA, 23 nt, Human
uccucauacccacccccacccaa

SEQ ID NO: 1882248 - RNA, 13 nt, Human
uccucagguggcc

SEQ ID NO: 1882249 - RNA, 16 nt, Human
uccucagguggccaug

SEQ ID NO: 1882250 - RNA, 21 nt, Human
uccucagccuugccagagauc

SEQ ID NO: 1882251 - RNA, 20 nt, Human
uccucagccuugccagagau

SEQ ID NO: 1882252 - RNA, 18 nt, Human
uccucagccuugccagag

SEQ ID NO: 1882253 - RNA, 23 nt, Human
acuccuugaaaacacuguucucu

SEQ ID NO: 1882254 - RNA, 24 nt, Human
acuccuugaaaacacuguucucug

SEQ ID NO: 1882255 - RNA, 14 nt, Human
acucuccuccagag

SEQ ID NO: 1882256 - RNA, 17 nt, Human
acucuccuccagaguca

SEQ ID NO: 1882257 - RNA, 22 nt, Human
acucucccccacccccuccccg

SEQ ID NO: 1882258 - RNA, 20 nt, Human
acucucccccacccccuccc

SEQ ID NO: 1882259 - RNA, 12 nt, Human
acucuccucugc

SEQ ID NO: 1882260 - RNA, 14 nt, Human
acucuccucaucuc

SEQ ID NO: 1882261 - RNA, 15 nt, Human
acucuccucaucucu

SEQ ID NO: 1882262 - RNA, 13 nt, Human
acucuccucugcu

SEQ ID NO: 1882263 - RNA, 14 nt, Human
acucuccucugcug

SEQ ID NO: 1882264 - RNA, 16 nt, Human
acucuccucugcugcu

SEQ ID NO: 1882265 - RNA, 18 nt, Human
acucuccuggaaauauua

SEQ ID NO: 1882266 - RNA, 15 nt, Human
acucuccuugguguc

SEQ ID NO: 1882267 - RNA, 14 nt, Human
acucuggcaaagcu

SEQ ID NO: 1882268 - RNA, 15 nt, Human
acucuggcaaagcuu

SEQ ID NO: 1882269 - RNA, 16 nt, Human
acucuggcaaagcuuu

SEQ ID NO: 1882270 - RNA, 17 nt, Human
acucuggcaaagcuuuu

SEQ ID NO: 1882271 - RNA, 23 nt, Human
acucuggcaaagcuuuuagaaau

SEQ ID NO: 1882272 - RNA, 13 nt, Human
acucuggcagcuc

SEQ ID NO: 1882273 - RNA, 15 nt, Human
acucuggcagcucag

SEQ ID NO: 1882274 - RNA, 16 nt, Human
acucuccuuggugucg

SEQ ID NO: 1882275 - RNA, 23 nt, Human
acucuccuuggugucgggcauga

SEQ ID NO: 1882276 - RNA, 18 nt, Human
acucucugaaccccuccc

SEQ ID NO: 1882277 - RNA, 11 nt, Human
acucugagacu

SEQ ID NO: 1882278 - RNA, 22 nt, Human
acucugagacucgcgacaaugc

SEQ ID NO: 1882279 - RNA, 19 nt, Human
acucucugaaccccucccu

SEQ ID NO: 1882280 - RNA, 21 nt, Human
acucucugaaccccucccucc

SEQ ID NO: 1882281 - RNA, 19 nt, Human
acuccagugagacagcucu

SEQ ID NO: 1882282 - RNA, 13 nt, Human
acucaccccagcc

SEQ ID NO: 1882283 - RNA, 21 nt, Human
acucacaccugaacugaacac

SEQ ID NO: 1882284 - RNA, 16 nt, Human
acucaccccagcccca

SEQ ID NO: 1882285 - RNA, 14 nt, Human
acucaccccagccc

SEQ ID NO: 1882286 - RNA, 15 nt, Human
acucaccccagcccc

SEQ ID NO: 1882287 - RNA, 11 nt, Human
acuccuggccu

SEQ ID NO: 1882288 - RNA, 13 nt, Human
acuccuccuagcc

SEQ ID NO: 1882289 - RNA, 16 nt, Human
ucccugguggcagcuc

SEQ ID NO: 1882290 - RNA, 17 nt, Human
ucccugguggcagcuca

SEQ ID NO: 1882291 - RNA, 18 nt, Human
ucccugguggcagcucac

SEQ ID NO: 1882292 - RNA, 19 nt, Human
ucccugguggcagcucacc

SEQ ID NO: 1882293 - RNA, 20 nt, Human
ucccugguggcagcucaccu

SEQ ID NO: 1882294 - RNA, 21 nt, Human
ucccugguggcagcucaccuc

SEQ ID NO: 1882295 - RNA, 22 nt, Human
acuccugcaggcagccaggcca

SEQ ID NO: 1882296 - RNA, 15 nt, Human
acuccugcaggcagc

SEQ ID NO: 1882297 - RNA, 16 nt, Human
acuccugcaggcagcc

SEQ ID NO: 1882298 - RNA, 17 nt, Human
acuccucaguucuugcc

SEQ ID NO: 1882299 - RNA, 22 nt, Human
acuccucaguucuugccacuuu

SEQ ID NO: 1882300 - RNA, 12 nt, Human
acuccugcaggc

SEQ ID NO: 1882301 - RNA, 14 nt, Human
acuccugcaggcag

SEQ ID NO: 1882302 - RNA, 14 nt, Human
acuccuggccucaa

SEQ ID NO: 1882303 - RNA, 13 nt, Human
acuccuggccuca

SEQ ID NO: 1882304 - RNA, 12 nt, Human
acuccuggccuc

SEQ ID NO: 1882305 - RNA, 13 nt, Human
uccuaggcauuug

SEQ ID NO: 1882306 - RNA, 15 nt, Human
uccuacucuguguca

SEQ ID NO: 1882307 - RNA, 14 nt, Human
uccuacucuguguc

SEQ ID NO: 1882308 - RNA, 13 nt, Human
uccuacucugugu

SEQ ID NO: 1882309 - RNA, 16 nt, Human
ucccuuuuuuuaagua

SEQ ID NO: 1882310 - RNA, 21 nt, Human
ucccuuuuuuuaaguaaggaa

SEQ ID NO: 1882311 - RNA, 16 nt, Human
ucccuuugacgccauc

SEQ ID NO: 1882312 - RNA, 18 nt, Human
ucccuuugacgccauccc

SEQ ID NO: 1882313 - RNA, 22 nt, Human
ucccugguggcagcucaccucu

SEQ ID NO: 1882314 - RNA, 23 nt, Human
ucccugguggcagcucaccucuc

SEQ ID NO: 1882315 - RNA, 14 nt, Human
acuccugcuguaaa

SEQ ID NO: 1882316 - RNA, 19 nt, Human
ucccuuggauuguccccga

SEQ ID NO: 1882317 - RNA, 20 nt, Human
ucccuuggauuguccccgac

SEQ ID NO: 1882318 - RNA, 13 nt, Human
ucccuuuuuuuaa

SEQ ID NO: 1882319 - RNA, 23 nt, Human
ucccuuuuuuggcugcugaaggc

SEQ ID NO: 1882320 - RNA, 20 nt, Human
ucccuuuuuuggcugcugaa

SEQ ID NO: 1882321 - RNA, 22 nt, Human
ucccuuuuuuggcugcugaagg

SEQ ID NO: 1882322 - RNA, 21 nt, Human
ucccuuugacgccaucccagc

SEQ ID NO: 1882323 - RNA, 19 nt, Human
ucccuuugacgccauccca

SEQ ID NO: 1882324 - RNA, 17 nt, Human
ucccuuuuuuggcugcu

SEQ ID NO: 1882325 - RNA, 19 nt, Human
ucccuuuuuuggcugcuga

SEQ ID NO: 1882326 - RNA, 21 nt, Human
agaaauaugcacaauagcagu

SEQ ID NO: 1882327 - RNA, 16 nt, Human
agaaauauggaacuua

SEQ ID NO: 1882328 - RNA, 14 nt, Human
agaaauauggacac

SEQ ID NO: 1882329 - RNA, 17 nt, Human
agaaauauggaacuuac

SEQ ID NO: 1882330 - RNA, 20 nt, Human
agaaauauggaacuuacauu

SEQ ID NO: 1882331 - RNA, 17 nt, Human
agaaauauggacacuua

SEQ ID NO: 1882332 - RNA, 22 nt, Human
agaaauauggaacuuacauugu

SEQ ID NO: 1882333 - RNA, 20 nt, Human
agaaagcccuuaggaagaau

SEQ ID NO: 1882334 - RNA, 22 nt, Human
agaaagcccuuaggaagaauuu

SEQ ID NO: 1882335 - RNA, 14 nt, Human
agaaaugcaaaaau

SEQ ID NO: 1882336 - RNA, 16 nt, Human
agaaaugcaaaaaucu

SEQ ID NO: 1882337 - RNA, 19 nt, Human
ucuccuuuguacuuugugc

SEQ ID NO: 1882338 - RNA, 20 nt, Human
ucuccuuuguacuuugugcu

SEQ ID NO: 1882339 - RNA, 13 nt, Human
ucugaagccucac

SEQ ID NO: 1882340 - RNA, 21 nt, Human
ucugaaggacauugcggacag

SEQ ID NO: 1882341 - RNA, 22 nt, Human
ucugaaggacauugcggacagc

SEQ ID NO: 1882342 - RNA, 21 nt, Human
ucugaagcuuuaccagcugaa

SEQ ID NO: 1882343 - RNA, 10 nt, Human
ucugaauuau

SEQ ID NO: 1882344 - RNA, 15 nt, Human
ucugacacacagcuc

SEQ ID NO: 1882345 - RNA, 14 nt, Human
ucugacacacagcu

SEQ ID NO: 1882346 - RNA, 13 nt, Human
ucugacacacagc

SEQ ID NO: 1882347 - RNA, 15 nt, Human
ucugaauuauuuucu

SEQ ID NO: 1882348 - RNA, 20 nt, Human
ucugcagggccgccagggag

SEQ ID NO: 1882349 - RNA, 13 nt, Human
ucugcaggucccu

SEQ ID NO: 1882350 - RNA, 11 nt, Human
ucugcaggucc

SEQ ID NO: 1882351 - RNA, 12 nt, Human
ucugcagguccc

SEQ ID NO: 1882352 - RNA, 15 nt, Human
agaaauguacagcaa

SEQ ID NO: 1882353 - RNA, 14 nt, Human
agaaauguacagca

SEQ ID NO: 1882354 - RNA, 17 nt, Human
ucugcacuccccugcug

SEQ ID NO: 1882355 - RNA, 16 nt, Human
ucugcacuccccugcu

SEQ ID NO: 1882356 - RNA, 14 nt, Human
ucugcacuccccug

SEQ ID NO: 1882357 - RNA, 15 nt, Human
ucugcacuccccugc

SEQ ID NO: 1882358 - RNA, 17 nt, Human
ucugcagcaauaaagca

SEQ ID NO: 1882359 - RNA, 15 nt, Human
ucugcagauaaacag

SEQ ID NO: 1882360 - RNA, 18 nt, Human
ucugcagauaaacaguag

SEQ ID NO: 1882361 - RNA, 21 nt, Human
ucugaucauccacugugccau

SEQ ID NO: 1882362 - RNA, 22 nt, Human
ucugaguggcuucacuccugcu

SEQ ID NO: 1882363 - RNA, 18 nt, Human
ucugagugaaccuguaua

SEQ ID NO: 1882364 - RNA, 21 nt, Human
ucugaguggcuucacuccugc

SEQ ID NO: 1882365 - RNA, 17 nt, Human
ucugaucauccacugug

SEQ ID NO: 1882366 - RNA, 17 nt, Human
ucugaguggcuucacuc

SEQ ID NO: 1882367 - RNA, 13 nt, Human
ucugagugaaccu

SEQ ID NO: 1882368 - RNA, 22 nt, Human
ucugagacucgcgacaaugcaa

SEQ ID NO: 1882369 - RNA, 21 nt, Human
ucugagacucgcgacaaugca

SEQ ID NO: 1882370 - RNA, 20 nt, Human
ucugagugaaccuguauaag

SEQ ID NO: 1882371 - RNA, 21 nt, Human
agaaauucugucauagaaagu

SEQ ID NO: 1882372 - RNA, 23 nt, Human
agaaauucugucauagaaagugc

SEQ ID NO: 1882373 - RNA, 19 nt, Human
agaacuguguuucaaguuc

SEQ ID NO: 1882374 - RNA, 20 nt, Human
agaacuguguuucaaguuca

SEQ ID NO: 1882375 - RNA, 21 nt, Human
agaacuguguuucaaguucaa

SEQ ID NO: 1882376 - RNA, 22 nt, Human
agaacugccuuuggcagaguuc

SEQ ID NO: 1882377 - RNA, 18 nt, Human
agaagaaauucugucaua

SEQ ID NO: 1882378 - RNA, 22 nt, Human
agaagaaauucugucauagaaa

SEQ ID NO: 1882379 - RNA, 14 nt, Human
agaagaaguguguc

SEQ ID NO: 1882380 - RNA, 12 nt, Human
agaagcccagga

SEQ ID NO: 1882381 - RNA, 16 nt, Human
agaagcccaggaaagg

SEQ ID NO: 1882382 - RNA, 18 nt, Human
agaagcccaggaaaggcu

SEQ ID NO: 1882383 - RNA, 20 nt, Human
agaagcccaggaaaggcucc

SEQ ID NO: 1882384 - RNA, 21 nt, Human
agaagcccaggaaaggcucca

SEQ ID NO: 1882385 - RNA, 22 nt, Human
agaagcccaggaaaggcuccag

SEQ ID NO: 1882386 - RNA, 17 nt, Human
ucugcccacucccugca

SEQ ID NO: 1882387 - RNA, 18 nt, Human
agaagauuuugaaauuuu

SEQ ID NO: 1882388 - RNA, 22 nt, Human
agaagauucuucccauucucca

SEQ ID NO: 1882389 - RNA, 18 nt, Human
agaagccacaggccugag

SEQ ID NO: 1882390 - RNA, 21 nt, Human
agaagcccaauauuauaauuu

SEQ ID NO: 1882391 - RNA, 17 nt, Human
agaagccacaggccuga

SEQ ID NO: 1882392 - RNA, 11 nt, Human
agaagcccaga

SEQ ID NO: 1882393 - RNA, 13 nt, Human
agaagcccagaau

SEQ ID NO: 1882394 - RNA, 12 nt, Human
agaagcccagaa

SEQ ID NO: 1882395 - RNA, 16 nt, Human
agaagccacaggccug

SEQ ID NO: 1882396 - RNA, 13 nt, Human
ucugcuucagccu

SEQ ID NO: 1882397 - RNA, 15 nt, Human
ucugcucauucuaau

SEQ ID NO: 1882398 - RNA, 15 nt, Human
ucugcuucagccucc

SEQ ID NO: 1882399 - RNA, 14 nt, Human
ucugcuucagccuc

SEQ ID NO: 1882400 - RNA, 20 nt, Human
ucugcucacauaucugucau

SEQ ID NO: 1882401 - RNA, 19 nt, Human
ucugcucacauaucuguca

SEQ ID NO: 1882402 - RNA, 20 nt, Human
ucugcgucucugcuuuaaag

SEQ ID NO: 1882403 - RNA, 22 nt, Human
ucugccugcccaggccccugcc

SEQ ID NO: 1882404 - RNA, 21 nt, Human
ucugccugcccaggccccugc

SEQ ID NO: 1882405 - RNA, 23 nt, Human
ucugccgcagcccugcagagggc

SEQ ID NO: 1882406 - RNA, 22 nt, Human
ucugccgcagcccugcagaggg

SEQ ID NO: 1882407 - RNA, 19 nt, Human
ucugcgucucugcuuuaaa

SEQ ID NO: 1882408 - RNA, 16 nt, Human
ucugcgugcagggaca

SEQ ID NO: 1882409 - RNA, 14 nt, Human
ucugccgcagcccu

SEQ ID NO: 1882410 - RNA, 15 nt, Human
ucugccgcagcccug

SEQ ID NO: 1882411 - RNA, 18 nt, Human
ucugcccacucccugcaa

SEQ ID NO: 1882412 - RNA, 21 nt, Human
ucugcccacucccugcaaccu

SEQ ID NO: 1882413 - RNA, 19 nt, Human
ucugcccuccaagaccuuc

SEQ ID NO: 1882414 - RNA, 18 nt, Human
ucugggauaaguaaguuu

SEQ ID NO: 1882415 - RNA, 19 nt, Human
ucugggaguggggaaguga

SEQ ID NO: 1882416 - RNA, 20 nt, Human
agaauucaaacuggggccuc

SEQ ID NO: 1882417 - RNA, 21 nt, Human
agaauuaucuaauuuauaaaa

SEQ ID NO: 1882418 - RNA, 20 nt, Human
agaauuaucuaauuuauaaa

SEQ ID NO: 1882419 - RNA, 18 nt, Human
agaauuaucuaauuuaua

SEQ ID NO: 1882420 - RNA, 15 nt, Human
agaauuaacacauga

SEQ ID NO: 1882421 - RNA, 23 nt, Human
agaauuaacacaugauccugcaa

SEQ ID NO: 1882422 - RNA, 17 nt, Human
agaauuaucuaauuuau

SEQ ID NO: 1882423 - RNA, 15 nt, Human
agaauuaucuaauuu

SEQ ID NO: 1882424 - RNA, 14 nt, Human
agaauuaucuaauu

SEQ ID NO: 1882425 - RNA, 16 nt, Human
agaauguaagaacuac

SEQ ID NO: 1882426 - RNA, 15 nt, Human
agaauguaagaacua

SEQ ID NO: 1882427 - RNA, 13 nt, Human
agaaugucaguau

SEQ ID NO: 1882428 - RNA, 19 nt, Human
agaauauuugguuuuccug

SEQ ID NO: 1882429 - RNA, 16 nt, Human
agaauauuuauuaccu

SEQ ID NO: 1882430 - RNA, 19 nt, Human
agaauauuuauuaccucug

SEQ ID NO: 1882431 - RNA, 22 nt, Human
agaauauuuauuaccucugaua

SEQ ID NO: 1882432 - RNA, 11 nt, Human
agaauauuuau

SEQ ID NO: 1882433 - RNA, 19 nt, Human
agaaucagucuugcagcug

SEQ ID NO: 1882434 - RNA, 12 nt, Human
agaauccaaacu

SEQ ID NO: 1882435 - RNA, 14 nt, Human
agaauccaaacuug

SEQ ID NO: 1882436 - RNA, 16 nt, Human
agaauccaaacuugga

SEQ ID NO: 1882437 - RNA, 21 nt, Human
agaauccaaacuuggauuuuu

SEQ ID NO: 1882438 - RNA, 15 nt, Human
agaaucccaaauuug

SEQ ID NO: 1882439 - RNA, 17 nt, Human
agaaucccaaauuugau

SEQ ID NO: 1882440 - RNA, 18 nt, Human
agaaucccaaauuugauu

SEQ ID NO: 1882441 - RNA, 19 nt, Human
agaaucccaaauuugauug

SEQ ID NO: 1882442 - RNA, 15 nt, Human
agaauggggugcaug

SEQ ID NO: 1882443 - RNA, 15 nt, Human
agaaggcaaaaaugu

SEQ ID NO: 1882444 - RNA, 21 nt, Human
agaaguuucugccgcagcccu

SEQ ID NO: 1882445 - RNA, 22 nt, Human
agaaguuucugccgcagcccug

SEQ ID NO: 1882446 - RNA, 23 nt, Human
agaaguuucugccgcagcccugc

SEQ ID NO: 1882447 - RNA, 17 nt, Human
agaauagccacauuugg

SEQ ID NO: 1882448 - RNA, 20 nt, Human
agaauacuguuaaaggaaaa

SEQ ID NO: 1882449 - RNA, 22 nt, Human
agaauagaaauaaaggauguga

SEQ ID NO: 1882450 - RNA, 12 nt, Human
agaauaaaauuu

SEQ ID NO: 1882451 - RNA, 14 nt, Human
agaauaaaauuuuu

SEQ ID NO: 1882452 - RNA, 17 nt, Human
agaauaaaauuuuuaau

SEQ ID NO: 1882453 - RNA, 12 nt, Human
agaauaauaaau

SEQ ID NO: 1882454 - RNA, 16 nt, Human
agaauaauaaauauuu

SEQ ID NO: 1882455 - RNA, 19 nt, Human
agaauacuguuaaaggaaa

SEQ ID NO: 1882456 - RNA, 17 nt, Human
ucuguuggccaguguga

SEQ ID NO: 1882457 - RNA, 12 nt, Human
ucuguuggccag

SEQ ID NO: 1882458 - RNA, 16 nt, Human
ucuguugcccaggcug

SEQ ID NO: 1882459 - RNA, 22 nt, Human
ucuguucuuuccaaaguacacu

SEQ ID NO: 1882460 - RNA, 16 nt, Human
ucuguugcaagugcaa

SEQ ID NO: 1882461 - RNA, 13 nt, Human
ucuguucuuucca

SEQ ID NO: 1882462 - RNA, 13 nt, Human
ucuguuuagauaa

SEQ ID NO: 1882463 - RNA, 16 nt, Human
ucuguugucaccuuca

SEQ ID NO: 1882464 - RNA, 17 nt, Human
ucuguugucaccuucac

SEQ ID NO: 1882465 - RNA, 18 nt, Human
ucuguugucaccuucacc

SEQ ID NO: 1882466 - RNA, 14 nt, Human
ucuguuuacagugu

SEQ ID NO: 1882467 - RNA, 22 nt, Human
ucugugaaaggaaagagggagg

SEQ ID NO: 1882468 - RNA, 21 nt, Human
ucugggccauucuccacagca

SEQ ID NO: 1882469 - RNA, 22 nt, Human
ucugugagaugcuagaacuccc

SEQ ID NO: 1882470 - RNA, 17 nt, Human
ucugugagaugcuagaa

SEQ ID NO: 1882471 - RNA, 23 nt, Human
ucugugagaugcuagaacucccu

SEQ ID NO: 1882472 - RNA, 21 nt, Human
ucugugagacucgagaacuuu

SEQ ID NO: 1882473 - RNA, 17 nt, Human
ucugugagacucgagaa

SEQ ID NO: 1882474 - RNA, 14 nt, Human
ucugugagaugcua

SEQ ID NO: 1882475 - RNA, 17 nt, Human
ucugugaacgauuuaga

SEQ ID NO: 1882476 - RNA, 21 nt, Human
ucugugaacgauuuagaaaga

SEQ ID NO: 1882477 - RNA, 16 nt, Human
agacacaggcccggcu

SEQ ID NO: 1882478 - RNA, 13 nt, Human
agacacaggauga

SEQ ID NO: 1882479 - RNA, 13 nt, Human
agacacaggcccg

SEQ ID NO: 1882480 - RNA, 12 nt, Human
agacacaggccc

SEQ ID NO: 1882481 - RNA, 21 nt, Human
agaauuugauaugugaacagu

SEQ ID NO: 1882482 - RNA, 22 nt, Human
agaauuugauaugugaacaguu

SEQ ID NO: 1882483 - RNA, 17 nt, Human
agacaccuugacagggc

SEQ ID NO: 1882484 - RNA, 18 nt, Human
agacaccuugacagggca

SEQ ID NO: 1882485 - RNA, 16 nt, Human
agacacauguccaaga

SEQ ID NO: 1882486 - RNA, 20 nt, Human
agacacauguccaagaagcc

SEQ ID NO: 1882487 - RNA, 14 nt, Human
agacacauaugagg

SEQ ID NO: 1882488 - RNA, 21 nt, Human
agacacagucauacugucacu

SEQ ID NO: 1882489 - RNA, 16 nt, Human
agacacauaugagggg

SEQ ID NO: 1882490 - RNA, 19 nt, Human
agacacaucgcacugugga

SEQ ID NO: 1882491 - RNA, 21 nt, Human
ucuauugauaauuuagacauu

SEQ ID NO: 1882492 - RNA, 13 nt, Human
ucuauucucucca

SEQ ID NO: 1882493 - RNA, 23 nt, Human
ucuaugggacucaaugcacugac

SEQ ID NO: 1882494 - RNA, 16 nt, Human
ucuauagacucuagga

SEQ ID NO: 1882495 - RNA, 22 nt, Human
ucuauguuuacaaauggacaua

SEQ ID NO: 1882496 - RNA, 15 nt, Human
ucuauacuugcuuug

SEQ ID NO: 1882497 - RNA, 13 nt, Human
ucuauagacucua

SEQ ID NO: 1882498 - RNA, 14 nt, Human
ucucaccuccugcu

SEQ ID NO: 1882499 - RNA, 15 nt, Human
ucucaccuccugcug

SEQ ID NO: 1882500 - RNA, 16 nt, Human
ucucaccuccugcugg

SEQ ID NO: 1882501 - RNA, 17 nt, Human
ucucaccuccugcuggg

SEQ ID NO: 1882502 - RNA, 19 nt, Human
ucucacuauguugcccagg

SEQ ID NO: 1882503 - RNA, 17 nt, Human
ucucacuauguugccca

SEQ ID NO: 1882504 - RNA, 18 nt, Human
ucuauuuuggauuguaua

SEQ ID NO: 1882505 - RNA, 15 nt, Human
ucuauuuuggauugu

SEQ ID NO: 1882506 - RNA, 15 nt, Human
ucuauuuaaguaaaa

SEQ ID NO: 1882507 - RNA, 13 nt, Human
ucuauuuauaugu

SEQ ID NO: 1882508 - RNA, 18 nt, Human
ucuauuuauauguacaug

SEQ ID NO: 1882509 - RNA, 15 nt, Human
ucuauuuaucuucau

SEQ ID NO: 1882510 - RNA, 19 nt, Human
ucuauuuaucuucauuuga

SEQ ID NO: 1882511 - RNA, 13 nt, Human
ucuauuuauguuu

SEQ ID NO: 1882512 - RNA, 15 nt, Human
ucuauuuauguuugc

SEQ ID NO: 1882513 - RNA, 15 nt, Human
ucuauuuauuuacug

SEQ ID NO: 1882514 - RNA, 22 nt, Human
ucuauuuauuuacugagcuucu

SEQ ID NO: 1882515 - RNA, 18 nt, Human
ucuaguugcuuguaaaau

SEQ ID NO: 1882516 - RNA, 23 nt, Human
ucuaguuguuugauucagacagc

SEQ ID NO: 1882517 - RNA, 21 nt, Human
ucuaguuugauuaaauucuug

SEQ ID NO: 1882518 - RNA, 22 nt, Human
ucuaguuugauuaaauucuugc

SEQ ID NO: 1882519 - RNA, 13 nt, Human
ucuauaaaccgaa

SEQ ID NO: 1882520 - RNA, 13 nt, Human
ucuauaaggccau

SEQ ID NO: 1882521 - RNA, 14 nt, Human
ucuauaaggccaua

SEQ ID NO: 1882522 - RNA, 16 nt, Human
ucuauaaggccauaaa

SEQ ID NO: 1882523 - RNA, 22 nt, Human
ucuauaaggccauaaaacaggu

SEQ ID NO: 1882524 - RNA, 22 nt, Human
ucuaguuguuugauucagacag

SEQ ID NO: 1882525 - RNA, 12 nt, Human
ucuaggaagacu

SEQ ID NO: 1882526 - RNA, 13 nt, Human
ucuagccagagga

SEQ ID NO: 1882527 - RNA, 16 nt, Human
ucuagccaaaugguuu

SEQ ID NO: 1882528 - RNA, 14 nt, Human
ucuagacuaaaaga

SEQ ID NO: 1882529 - RNA, 16 nt, Human
acuucaucccucuggg

SEQ ID NO: 1882530 - RNA, 21 nt, Human
acuucccccaaauuuaaagaa

SEQ ID NO: 1882531 - RNA, 24 nt, Human
acuucauauugcugagagaaauau

SEQ ID NO: 1882532 - RNA, 14 nt, Human
acuucauauugcug

SEQ ID NO: 1882533 - RNA, 22 nt, Human
acuucauauugcugagagaaau

SEQ ID NO: 1882534 - RNA, 13 nt, Human
ucuagauacugua

SEQ ID NO: 1882535 - RNA, 18 nt, Human
ucuagcauggcugccaau

SEQ ID NO: 1882536 - RNA, 23 nt, Human
ucuagagagggaggcaagcccug

SEQ ID NO: 1882537 - RNA, 13 nt, Human
ucuagagagggag

SEQ ID NO: 1882538 - RNA, 20 nt, Human
ucuaauaccucugugugcuc

SEQ ID NO: 1882539 - RNA, 19 nt, Human
ucuaauagaacucaguuuu

SEQ ID NO: 1882540 - RNA, 19 nt, Human
ucuacccagcgagcccugg

SEQ ID NO: 1882541 - RNA, 17 nt, Human
ucuaauaccucugugug

SEQ ID NO: 1882542 - RNA, 16 nt, Human
ucuaauaccucugugu

SEQ ID NO: 1882543 - RNA, 14 nt, Human
ucuaauaccucugu

SEQ ID NO: 1882544 - RNA, 21 nt, Human
ucuacagaggccaugggccuc

SEQ ID NO: 1882545 - RNA, 18 nt, Human
uccugggagugagcuggu

SEQ ID NO: 1882546 - RNA, 16 nt, Human
acuguucucugcccuc

SEQ ID NO: 1882547 - RNA, 17 nt, Human
acuguucucugcccucc

SEQ ID NO: 1882548 - RNA, 18 nt, Human
acuguucccaccugcugg

SEQ ID NO: 1882549 - RNA, 19 nt, Human
acuguucucugcccuccaa

SEQ ID NO: 1882550 - RNA, 18 nt, Human
acuguucucugcccucca

SEQ ID NO: 1882551 - RNA, 21 nt, Human
ucuacccuggcacuauaaugu

SEQ ID NO: 1882552 - RNA, 23 nt, Human
ucuacagguuuggguacaagugg

SEQ ID NO: 1882553 - RNA, 20 nt, Human
ucuacccagcgagcccuggu

SEQ ID NO: 1882554 - RNA, 14 nt, Human
ucuacccaggugcu

SEQ ID NO: 1882555 - RNA, 19 nt, Human
ucuacccuggcacuauaau

SEQ ID NO: 1882556 - RNA, 14 nt, Human
ucuacccuggcacu

SEQ ID NO: 1882557 - RNA, 16 nt, Human
acuuauucucaagaag

SEQ ID NO: 1882558 - RNA, 15 nt, Human
acuuagguguggggg

SEQ ID NO: 1882559 - RNA, 23 nt, Human
acuuaugaccucuuccuuuagga

SEQ ID NO: 1882560 - RNA, 13 nt, Human
acuuaugauuuca

SEQ ID NO: 1882561 - RNA, 16 nt, Human
acuuaugauuucaugu

SEQ ID NO: 1882562 - RNA, 17 nt, Human
acuuaugauuucaugug

SEQ ID NO: 1882563 - RNA, 11 nt, Human
acuuauuaaau

SEQ ID NO: 1882564 - RNA, 22 nt, Human
acuuacuguacaugaaaacaca

SEQ ID NO: 1882565 - RNA, 16 nt, Human
acuuacuguacaugaa

SEQ ID NO: 1882566 - RNA, 21 nt, Human
acuuacuguacaugaaaacac

SEQ ID NO: 1882567 - RNA, 17 nt, Human
acuuacacuuuaugcac

SEQ ID NO: 1882568 - RNA, 20 nt, Human
acuuaaauaaugugaaacug

SEQ ID NO: 1882569 - RNA, 16 nt, Human
acuuacacuuuaugca

SEQ ID NO: 1882570 - RNA, 22 nt, Human
acuuaaucuaaauggaaccacu

SEQ ID NO: 1882571 - RNA, 19 nt, Human
acuuaaucuaaauggaacc

SEQ ID NO: 1882572 - RNA, 17 nt, Human
acuuaaucuaaauggaa

SEQ ID NO: 1882573 - RNA, 13 nt, Human
acuuaagcacacu

SEQ ID NO: 1882574 - RNA, 13 nt, Human
acuuaagcaaaag

SEQ ID NO: 1882575 - RNA, 18 nt, Human
ucucaccuccugcugggc

SEQ ID NO: 1882576 - RNA, 23 nt, Human
ucucacuauguugcccaggcagg

SEQ ID NO: 1882577 - RNA, 22 nt, Human
ucucacuauguugcccaggcag

SEQ ID NO: 1882578 - RNA, 21 nt, Human
ucucacuauguugcccaggca

SEQ ID NO: 1882579 - RNA, 20 nt, Human
ucucacuauguugcccaggc

SEQ ID NO: 1882580 - RNA, 22 nt, Human
acuugcagacucuacagaggcc

SEQ ID NO: 1882581 - RNA, 19 nt, Human
acuugcagacucuacagag

SEQ ID NO: 1882582 - RNA, 23 nt, Human
acuugcagacucuacagaggcca

SEQ ID NO: 1882583 - RNA, 16 nt, Human
acuugcucuugaugcc

SEQ ID NO: 1882584 - RNA, 17 nt, Human
acuugcucuugaugccu

SEQ ID NO: 1882585 - RNA, 18 nt, Human
acuugcucuugaugccug

SEQ ID NO: 1882586 - RNA, 20 nt, Human
acuugcucuugaugccuggc

SEQ ID NO: 1882587 - RNA, 22 nt, Human
acuuguggacacagcucuucuc

SEQ ID NO: 1882588 - RNA, 19 nt, Human
acuuguggacacagcucuu

SEQ ID NO: 1882589 - RNA, 20 nt, Human
acuugucuuuggacccugag

SEQ ID NO: 1882590 - RNA, 18 nt, Human
acuugucuuuggacccug

SEQ ID NO: 1882591 - RNA, 21 nt, Human
acuugucuuuggacccugagg

SEQ ID NO: 1882592 - RNA, 14 nt, Human
acuugcuuuuaaaa

SEQ ID NO: 1882593 - RNA, 18 nt, Human
acuuguauuauguguguu

SEQ ID NO: 1882594 - RNA, 19 nt, Human
acuuguauuauguguguuu

SEQ ID NO: 1882595 - RNA, 12 nt, Human
ucucaggccaaa

SEQ ID NO: 1882596 - RNA, 12 nt, Human
ucucaggccagc

SEQ ID NO: 1882597 - RNA, 13 nt, Human
ucucaggccagcu

SEQ ID NO: 1882598 - RNA, 10 nt, Human
ucucaggcca

SEQ ID NO: 1882599 - RNA, 14 nt, Human
ucucauuugucaca

SEQ ID NO: 1882600 - RNA, 22 nt, Human
ucucauuucaccccucccuuuc

SEQ ID NO: 1882601 - RNA, 19 nt, Human
ucucauuucaccccucccu

SEQ ID NO: 1882602 - RNA, 17 nt, Human
ucucauuucaccccucc

SEQ ID NO: 1882603 - RNA, 16 nt, Human
ucucauuucaccccuc

SEQ ID NO: 1882604 - RNA, 16 nt, Human
ucucauuugucacaca

SEQ ID NO: 1882605 - RNA, 13 nt, Human
ucuccaaaauaaa

SEQ ID NO: 1882606 - RNA, 15 nt, Human
ucuccaagcaggaca

SEQ ID NO: 1882607 - RNA, 16 nt, Human
ucuccaagcaggacau

SEQ ID NO: 1882608 - RNA, 21 nt, Human
ucucaggccagcugcuugggc

SEQ ID NO: 1882609 - RNA, 17 nt, Human
ucucaggccagcugcuu

SEQ ID NO: 1882610 - RNA, 18 nt, Human
ucucaggccagcugcuug

SEQ ID NO: 1882611 - RNA, 18 nt, Human
ucucauguuuucaacugc

SEQ ID NO: 1882612 - RNA, 19 nt, Human
ucucauguuuucaacugcc

SEQ ID NO: 1882613 - RNA, 17 nt, Human
ucucauguuuucaacug

SEQ ID NO: 1882614 - RNA, 17 nt, Human
agaaaaaauauuuuccc

SEQ ID NO: 1882615 - RNA, 14 nt, Human
ucuccuucaccuuu

SEQ ID NO: 1882616 - RNA, 15 nt, Human
ucuccuucaccuuug

SEQ ID NO: 1882617 - RNA, 21 nt, Human
ucuccuuguguuacuaaguuu

SEQ ID NO: 1882618 - RNA, 13 nt, Human
ucuccuuguguua

SEQ ID NO: 1882619 - RNA, 16 nt, Human
ucuccuucaccuuugu

SEQ ID NO: 1882620 - RNA, 18 nt, Human
ucuccuucaccuuugucc

SEQ ID NO: 1882621 - RNA, 23 nt, Human
acuuuuguucuugguuuguaaau

SEQ ID NO: 1882622 - RNA, 15 nt, Human
acuuuuguucuuggu

SEQ ID NO: 1882623 - RNA, 13 nt, Human
acuuuguucugcu

SEQ ID NO: 1882624 - RNA, 11 nt, Human
acuuuuuacaa

SEQ ID NO: 1882625 - RNA, 17 nt, Human
acuuuuuauauuuuaua

SEQ ID NO: 1882626 - RNA, 21 nt, Human
acuuuuuauauuuuauacauu

SEQ ID NO: 1882627 - RNA, 13 nt, Human
acuuuuguucuug

SEQ ID NO: 1882628 - RNA, 12 nt, Human
acuuuuguucuu

SEQ ID NO: 1882629 - RNA, 21 nt, Human
acuuuguuaguuucuccaagc

SEQ ID NO: 1882630 - RNA, 14 nt, Human
acuuuguucuggcu

SEQ ID NO: 1882631 - RNA, 20 nt, Human
acuuuguuaguuucuccaag

SEQ ID NO: 1882632 - RNA, 13 nt, Human
acuuugaccucug

SEQ ID NO: 1882633 - RNA, 12 nt, Human
acuuugaccucu

SEQ ID NO: 1882634 - RNA, 23 nt, Human
ucuccgaccagacaccuugacag

SEQ ID NO: 1882635 - RNA, 17 nt, Human
ucuccgaccagacaccu

SEQ ID NO: 1882636 - RNA, 14 nt, Human
ucuccucaucucua

SEQ ID NO: 1882637 - RNA, 15 nt, Human
ucuccucaucucuaa

SEQ ID NO: 1882638 - RNA, 16 nt, Human
ucuccucauguucugc

SEQ ID NO: 1882639 - RNA, 14 nt, Human
ucuccccagcccag

SEQ ID NO: 1882640 - RNA, 15 nt, Human
ucuccccagcccaga

SEQ ID NO: 1882641 - RNA, 16 nt, Human
ucuccccagcccagag

SEQ ID NO: 1882642 - RNA, 17 nt, Human
ucuccccagcccagaga

SEQ ID NO: 1882643 - RNA, 18 nt, Human
ucuccccagcccagagac

SEQ ID NO: 1882644 - RNA, 19 nt, Human
ucuccccagcccagagaca

SEQ ID NO: 1882645 - RNA, 12 nt, Human
ucuccacccugc

SEQ ID NO: 1882646 - RNA, 14 nt, Human
ucuccacagcaacc

SEQ ID NO: 1882647 - RNA, 19 nt, Human
ucuccacagcaaccccagg

SEQ ID NO: 1882648 - RNA, 16 nt, Human
ucuccaccaggaaccu

SEQ ID NO: 1882649 - RNA, 18 nt, Human
ucuccaccaggaaccucu

SEQ ID NO: 1882650 - RNA, 22 nt, Human
ucuccaccagucauuuuucaga

SEQ ID NO: 1882651 - RNA, 23 nt, Human
ucuccccagcaagugagagcugg

SEQ ID NO: 1882652 - RNA, 18 nt, Human
ucuccaagcaggacaugg

SEQ ID NO: 1882653 - RNA, 19 nt, Human
ucuccaagcaggacaugga

SEQ ID NO: 1882654 - RNA, 20 nt, Human
ucuccaauuuuuuuuuccuu

SEQ ID NO: 1882655 - RNA, 17 nt, Human
ucuccucugcugcuggc

SEQ ID NO: 1882656 - RNA, 18 nt, Human
ucuccucugcugcuggcu

SEQ ID NO: 1882657 - RNA, 15 nt, Human
ucuccuccagaguca

SEQ ID NO: 1882658 - RNA, 18 nt, Human
ucuccucaucucuaacag

SEQ ID NO: 1882659 - RNA, 15 nt, Human
ucuccucugcugcug

SEQ ID NO: 1882660 - RNA, 16 nt, Human
ucuccucugcugcugg

SEQ ID NO: 1882661 - RNA, 12 nt, Human
acuuuaccuuuu

SEQ ID NO: 1882662 - RNA, 14 nt, Human
acuuucugaaauaa

SEQ ID NO: 1882663 - RNA, 20 nt, Human
acuuucugaaauaacauggc

SEQ ID NO: 1882664 - RNA, 21 nt, Human
ugacuagugcugaagcuuauu

SEQ ID NO: 1882665 - RNA, 22 nt, Human
ugacuagugcugaagcuuauua

SEQ ID NO: 1882666 - RNA, 18 nt, Human
ugacuagugcugaagcuu

SEQ ID NO: 1882667 - RNA, 17 nt, Human
ugacuagugcugaagcu

SEQ ID NO: 1882668 - RNA, 15 nt, Human
ugacuagugcugaag

SEQ ID NO: 1882669 - RNA, 14 nt, Human
ugacuagugcugaa

SEQ ID NO: 1882670 - RNA, 12 nt, Human
ugaccuuucaau

SEQ ID NO: 1882671 - RNA, 13 nt, Human
ugaccuuucaaua

SEQ ID NO: 1882672 - RNA, 21 nt, Human
ugacuguuuucucuugagagg

SEQ ID NO: 1882673 - RNA, 19 nt, Human
ugacuauuuuucagaaucu

SEQ ID NO: 1882674 - RNA, 15 nt, Human
ugaccugguccacag

SEQ ID NO: 1882675 - RNA, 20 nt, Human
ugaccugguccacagggcac

SEQ ID NO: 1882676 - RNA, 15 nt, Human
ugaccuuuaagagaa

SEQ ID NO: 1882677 - RNA, 18 nt, Human
ugaccuugaugagcugug

SEQ ID NO: 1882678 - RNA, 19 nt, Human
ugaccuugaugagcugugc

SEQ ID NO: 1882679 - RNA, 22 nt, Human
ugaccuugaugagcugugcaca

SEQ ID NO: 1882680 - RNA, 16 nt, Human
ugaccugccaggcaca

SEQ ID NO: 1882681 - RNA, 19 nt, Human
ugaccugccaggcacacug

SEQ ID NO: 1882682 - RNA, 15 nt, Human
ugacuuaagaagccu

SEQ ID NO: 1882683 - RNA, 20 nt, Human
ugacuuacuguacaugaaaa

SEQ ID NO: 1882684 - RNA, 12 nt, Human
ugacuuacugua

SEQ ID NO: 1882685 - RNA, 15 nt, Human
agauuaauuccuuuc

SEQ ID NO: 1882686 - RNA, 13 nt, Human
agauucauauuua

SEQ ID NO: 1882687 - RNA, 16 nt, Human
agauucauauuuacuu

SEQ ID NO: 1882688 - RNA, 19 nt, Human
agauucauauuuacuucuu

SEQ ID NO: 1882689 - RNA, 16 nt, Human
agauucccaggaguuc

SEQ ID NO: 1882690 - RNA, 13 nt, Human
agauucccaggag

SEQ ID NO: 1882691 - RNA, 14 nt, Human
agauucccaggagu

SEQ ID NO: 1882692 - RNA, 12 nt, Human
agauucccagga

SEQ ID NO: 1882693 - RNA, 15 nt, Human
agauucccaggaguu

SEQ ID NO: 1882694 - RNA, 19 nt, Human
agauuucacucuccuuggu

SEQ ID NO: 1882695 - RNA, 17 nt, Human
agauuucacucuccuug

SEQ ID NO: 1882696 - RNA, 21 nt, Human
agauuucaucugcucuccuuc

SEQ ID NO: 1882697 - RNA, 20 nt, Human
agauuucaucugcucuccuu

SEQ ID NO: 1882698 - RNA, 19 nt, Human
agauuucaucugcucuccu

SEQ ID NO: 1882699 - RNA, 18 nt, Human
agauuucaucugcucucc

SEQ ID NO: 1882700 - RNA, 15 nt, Human
agauuucaucugcuc

SEQ ID NO: 1882701 - RNA, 13 nt, Human
agauuucaucugc

SEQ ID NO: 1882702 - RNA, 23 nt, Human
agauuucaucugcucuccuuccu

SEQ ID NO: 1882703 - RNA, 19 nt, Human
agauuuuaaucaaguugaa

SEQ ID NO: 1882704 - RNA, 14 nt, Human
agauuuuaauuuug

SEQ ID NO: 1882705 - RNA, 17 nt, Human
agauuuuaauuuugaau

SEQ ID NO: 1882706 - RNA, 21 nt, Human
agauuuuaauuuugaauaaau

SEQ ID NO: 1882707 - RNA, 22 nt, Human
ugacagggcacaccgggcacuc

SEQ ID NO: 1882708 - RNA, 15 nt, Human
ugacagcuuugcugc

SEQ ID NO: 1882709 - RNA, 16 nt, Human
ugacagcuuugcugcu

SEQ ID NO: 1882710 - RNA, 17 nt, Human
ugacagcuuugcugcug

SEQ ID NO: 1882711 - RNA, 18 nt, Human
ugacagcuuugcugcuga

SEQ ID NO: 1882712 - RNA, 15 nt, Human
ugacagguuugggac

SEQ ID NO: 1882713 - RNA, 21 nt, Human
ugacagcuuugcugcugaagg

SEQ ID NO: 1882714 - RNA, 20 nt, Human
ugacagcuuugcugcugaag

SEQ ID NO: 1882715 - RNA, 19 nt, Human
ugacaggcaaugcuggcug

SEQ ID NO: 1882716 - RNA, 17 nt, Human
ugacaggcaaugcuggc

SEQ ID NO: 1882717 - RNA, 13 nt, Human
ugacagcuuugcu

SEQ ID NO: 1882718 - RNA, 14 nt, Human
ugacagcuuugcug

SEQ ID NO: 1882719 - RNA, 13 nt, Human
ugacauuucuuug

SEQ ID NO: 1882720 - RNA, 14 nt, Human
ugacauuucuuugu

SEQ ID NO: 1882721 - RNA, 12 nt, Human
ugacauuucuuu

SEQ ID NO: 1882722 - RNA, 15 nt, Human
ugacauucaccugcc

SEQ ID NO: 1882723 - RNA, 18 nt, Human
ugacauucaccugcccca

SEQ ID NO: 1882724 - RNA, 12 nt, Human
ugacauucaccu

SEQ ID NO: 1882725 - RNA, 16 nt, Human
ugacacgaauauugcu

SEQ ID NO: 1882726 - RNA, 22 nt, Human
ugacagagugagacucugucuc

SEQ ID NO: 1882727 - RNA, 15 nt, Human
ugacacuuaaaaaug

SEQ ID NO: 1882728 - RNA, 19 nt, Human
ugacacgaauauugcugau

SEQ ID NO: 1882729 - RNA, 20 nt, Human
ugacaccuuucauaaucuuu

SEQ ID NO: 1882730 - RNA, 23 nt, Human
ugacaccuuucauaaucuuugcu

SEQ ID NO: 1882731 - RNA, 19 nt, Human
agaugcuagaacucccuuu

SEQ ID NO: 1882732 - RNA, 20 nt, Human
agaugcaaugacucaggaca

SEQ ID NO: 1882733 - RNA, 21 nt, Human
agauguagccccucuccugga

SEQ ID NO: 1882734 - RNA, 18 nt, Human
agaugcuggcccagggcc

SEQ ID NO: 1882735 - RNA, 19 nt, Human
agaugcuggcccagggccc

SEQ ID NO: 1882736 - RNA, 14 nt, Human
agaugcuggcccag

SEQ ID NO: 1882737 - RNA, 15 nt, Human
agaugcuggcccagg

SEQ ID NO: 1882738 - RNA, 16 nt, Human
agaugcuggcccaggg

SEQ ID NO: 1882739 - RNA, 17 nt, Human
agaugcuggcccagggc

SEQ ID NO: 1882740 - RNA, 22 nt, Human
agauguagccccucuccuggaa

SEQ ID NO: 1882741 - RNA, 22 nt, Human
agaugcuagaacucccuuucaa

SEQ ID NO: 1882742 - RNA, 21 nt, Human
agaugcuagaacucccuuuca

SEQ ID NO: 1882743 - RNA, 16 nt, Human
agaucguucucugccu

SEQ ID NO: 1882744 - RNA, 18 nt, Human
agaucucuaacuucacca

SEQ ID NO: 1882745 - RNA, 13 nt, Human
agcaagucucuuu

SEQ ID NO: 1882746 - RNA, 14 nt, Human
agcaagucaggguu

SEQ ID NO: 1882747 - RNA, 16 nt, Human
agcaagugagacccug

SEQ ID NO: 1882748 - RNA, 16 nt, Human
agcaagugagagcugg

SEQ ID NO: 1882749 - RNA, 15 nt, Human
agcaagugagagcug

SEQ ID NO: 1882750 - RNA, 15 nt, Human
agcaagucagaauag

SEQ ID NO: 1882751 - RNA, 20 nt, Human
agcaaggguucccucaagag

SEQ ID NO: 1882752 - RNA, 14 nt, Human
agcaaggagauuua

SEQ ID NO: 1882753 - RNA, 19 nt, Human
agcaaggagauuuacaacu

SEQ ID NO: 1882754 - RNA, 17 nt, Human
agcaaggagauuuacaa

SEQ ID NO: 1882755 - RNA, 13 nt, Human
ugagccacugcac

SEQ ID NO: 1882756 - RNA, 12 nt, Human
ugagccacugca

SEQ ID NO: 1882757 - RNA, 21 nt, Human
ugagauuucaucugcucuccu

SEQ ID NO: 1882758 - RNA, 19 nt, Human
ugagauuucaucugcucuc

SEQ ID NO: 1882759 - RNA, 18 nt, Human
ugagauuucaucugcucu

SEQ ID NO: 1882760 - RNA, 14 nt, Human
ugagauuucaucug

SEQ ID NO: 1882761 - RNA, 22 nt, Human
ugagauuucaucugcucuccuu

SEQ ID NO: 1882762 - RNA, 14 nt, Human
ugagccacugcacc

SEQ ID NO: 1882763 - RNA, 18 nt, Human
ugagccagauuucacucu

SEQ ID NO: 1882764 - RNA, 19 nt, Human
ugagccagauuucacucuc

SEQ ID NO: 1882765 - RNA, 20 nt, Human
ugagccagauuucacucucc

SEQ ID NO: 1882766 - RNA, 21 nt, Human
ugagccagauuucacucuccu

SEQ ID NO: 1882767 - RNA, 17 nt, Human
agcaagugagagcuggg

SEQ ID NO: 1882768 - RNA, 21 nt, Human
agcacagcuucauuuccugug

SEQ ID NO: 1882769 - RNA, 18 nt, Human
agcacaugccucucucag

SEQ ID NO: 1882770 - RNA, 16 nt, Human
agcacaugccucucuc

SEQ ID NO: 1882771 - RNA, 19 nt, Human
agcacaugccucucucagg

SEQ ID NO: 1882772 - RNA, 20 nt, Human
agcacaugccucucucaggc

SEQ ID NO: 1882773 - RNA, 21 nt, Human
agcacaugccucucucaggcc

SEQ ID NO: 1882774 - RNA, 22 nt, Human
agcacaugccucucucaggcca

SEQ ID NO: 1882775 - RNA, 16 nt, Human
agcaccaucucuccuc

SEQ ID NO: 1882776 - RNA, 22 nt, Human
agcaccaaaagcuuaccaaggg

SEQ ID NO: 1882777 - RNA, 23 nt, Human
agcacaugccucucucaggccaa

SEQ ID NO: 1882778 - RNA, 15 nt, Human
agcaccguucugugc

SEQ ID NO: 1882779 - RNA, 16 nt, Human
agcaccguucugugca

SEQ ID NO: 1882780 - RNA, 17 nt, Human
agcaccguucugugcac

SEQ ID NO: 1882781 - RNA, 16 nt, Human
agcaccuccugccucg

SEQ ID NO: 1882782 - RNA, 14 nt, Human
agcaccuccugccu

SEQ ID NO: 1882783 - RNA, 13 nt, Human
agcaccuccugcc

SEQ ID NO: 1882784 - RNA, 21 nt, Human
agcaccuacaguguacagucu

SEQ ID NO: 1882785 - RNA, 19 nt, Human
agcaccuacaguguacagu

SEQ ID NO: 1882786 - RNA, 15 nt, Human
agcaccuacagugua

SEQ ID NO: 1882787 - RNA, 14 nt, Human
agcaccuacagugu

SEQ ID NO: 1882788 - RNA, 22 nt, Human
agcaccuacaguguacagucuu

SEQ ID NO: 1882789 - RNA, 18 nt, Human
agcaccguucugugcaca

SEQ ID NO: 1882790 - RNA, 21 nt, Human
ugagacagaguuuucacucuu

SEQ ID NO: 1882791 - RNA, 13 nt, Human
ugagacagcccgg

SEQ ID NO: 1882792 - RNA, 11 nt, Human
ugagacagagu

SEQ ID NO: 1882793 - RNA, 22 nt, Human
ugagacacggagcccagcccuc

SEQ ID NO: 1882794 - RNA, 15 nt, Human
ugagaauguaagaac

SEQ ID NO: 1882795 - RNA, 21 nt, Human
ugagacacggagcccagcccu

SEQ ID NO: 1882796 - RNA, 17 nt, Human
ugagacacggagcccag

SEQ ID NO: 1882797 - RNA, 12 nt, Human
ugagaaucuacc

SEQ ID NO: 1882798 - RNA, 21 nt, Human
ugagaaucuacccccagaucc

SEQ ID NO: 1882799 - RNA, 13 nt, Human
ugagaaucccaaa

SEQ ID NO: 1882800 - RNA, 20 nt, Human
ugagaaucccaaauuugauu

SEQ ID NO: 1882801 - RNA, 21 nt, Human
ugagaaucccaaauuugauug

SEQ ID NO: 1882802 - RNA, 22 nt, Human
ugagaaucccaaauuugauuga

SEQ ID NO: 1882803 - RNA, 19 nt, Human
ugagaagcuuuugaauaaa

SEQ ID NO: 1882804 - RNA, 20 nt, Human
ugagacucugucucaaaaaa

SEQ ID NO: 1882805 - RNA, 20 nt, Human
ugagacucugucucagucca

SEQ ID NO: 1882806 - RNA, 22 nt, Human
ugagacagcccgggcucugccu

SEQ ID NO: 1882807 - RNA, 12 nt, Human
ugagacagcucu

SEQ ID NO: 1882808 - RNA, 17 nt, Human
ugagacagcccgggcuc

SEQ ID NO: 1882809 - RNA, 18 nt, Human
ugagacagcccgggcucu

SEQ ID NO: 1882810 - RNA, 19 nt, Human
ugagacagcccgggcucug

SEQ ID NO: 1882811 - RNA, 20 nt, Human
ugagacagcccgggcucugc

SEQ ID NO: 1882812 - RNA, 22 nt, Human
ugagagaaauauggaacuuaca

SEQ ID NO: 1882813 - RNA, 14 nt, Human
ugagagcugggugu

SEQ ID NO: 1882814 - RNA, 10 nt, Human
ugagaggaaa

SEQ ID NO: 1882815 - RNA, 17 nt, Human
ugagagcugugcaucag

SEQ ID NO: 1882816 - RNA, 11 nt, Human
ugagaggaaau

SEQ ID NO: 1882817 - RNA, 12 nt, Human
ugagaggaaauc

SEQ ID NO: 1882818 - RNA, 13 nt, Human
ugagaggaaauca

SEQ ID NO: 1882819 - RNA, 14 nt, Human
ugagaggaaaucac

SEQ ID NO: 1882820 - RNA, 23 nt, Human
ugagaggacuuuucuuuguggcu

SEQ ID NO: 1882821 - RNA, 17 nt, Human
ugagaggaaaucaccga

SEQ ID NO: 1882822 - RNA, 23 nt, Human
ugagauguagccccucuccugga

SEQ ID NO: 1882823 - RNA, 14 nt, Human
ugagauguguucac

SEQ ID NO: 1882824 - RNA, 14 nt, Human
ugagauuaauuccu

SEQ ID NO: 1882825 - RNA, 16 nt, Human
ugagauuaauuccuuu

SEQ ID NO: 1882826 - RNA, 13 nt, Human
ugagauuucaucu

SEQ ID NO: 1882827 - RNA, 22 nt, Human
ugaagaagcuaaauccuuuacu

SEQ ID NO: 1882828 - RNA, 13 nt, Human
ugaagacagagcu

SEQ ID NO: 1882829 - RNA, 23 nt, Human
ugaagacaaugacuuacuguaca

SEQ ID NO: 1882830 - RNA, 22 nt, Human
ugaagacaaugacuuacuguac

SEQ ID NO: 1882831 - RNA, 11 nt, Human
ugaacuccugg

SEQ ID NO: 1882832 - RNA, 20 nt, Human
ugaacucacuuuccuccuga

SEQ ID NO: 1882833 - RNA, 19 nt, Human
ugaagaaccagucccccca

SEQ ID NO: 1882834 - RNA, 20 nt, Human
ugaagaaccaguccccccac

SEQ ID NO: 1882835 - RNA, 13 nt, Human
ugaagaacaugug

SEQ ID NO: 1882836 - RNA, 14 nt, Human
ugaagaacauguga

SEQ ID NO: 1882837 - RNA, 18 nt, Human
ugaacccgggaggcagag

SEQ ID NO: 1882838 - RNA, 22 nt, Human
ugaacccauauuuguacaccaa

SEQ ID NO: 1882839 - RNA, 22 nt, Human
ugaaccaccacacccagcccac

SEQ ID NO: 1882840 - RNA, 18 nt, Human
ugaacaaauuuacagaga

SEQ ID NO: 1882841 - RNA, 21 nt, Human
ugaaccaccacacccagccca

SEQ ID NO: 1882842 - RNA, 13 nt, Human
ugaacaaauuuac

SEQ ID NO: 1882843 - RNA, 16 nt, Human
agagauugugguuuca

SEQ ID NO: 1882844 - RNA, 17 nt, Human
ugaaauaaaacuggcuu

SEQ ID NO: 1882845 - RNA, 19 nt, Human
ugaaauaaaacuggcuuug

SEQ ID NO: 1882846 - RNA, 22 nt, Human
ugaaauaaaacuggcuuuggcu

SEQ ID NO: 1882847 - RNA, 17 nt, Human
ugaaauaacauggccuu

SEQ ID NO: 1882848 - RNA, 16 nt, Human
ugaaauaacauggccu

SEQ ID NO: 1882849 - RNA, 23 nt, Human
ugaaauaaacgucuuaaauauuc

SEQ ID NO: 1882850 - RNA, 22 nt, Human
ugaaauaaacgucuuaaauauu

SEQ ID NO: 1882851 - RNA, 18 nt, Human
ugaaauaaacgucuuaaa

SEQ ID NO: 1882852 - RNA, 13 nt, Human
ugaaauaaacguc

SEQ ID NO: 1882853 - RNA, 14 nt, Human
ugaaauaagccaga

SEQ ID NO: 1882854 - RNA, 20 nt, Human
ugaaauuuuuauuaaauuau

SEQ ID NO: 1882855 - RNA, 21 nt, Human
ugaaauuuccugggagcuuuu

SEQ ID NO: 1882856 - RNA, 19 nt, Human
ugaaauuuuuauuaaauua

SEQ ID NO: 1882857 - RNA, 15 nt, Human
ugaaauuuccuggga

SEQ ID NO: 1882858 - RNA, 16 nt, Human
ugaacaaagcagccac

SEQ ID NO: 1882859 - RNA, 17 nt, Human
ugaacaaagcagccacg

SEQ ID NO: 1882860 - RNA, 14 nt, Human
ugaacaaagcagcc

SEQ ID NO: 1882861 - RNA, 15 nt, Human
ugaacaaagcagcca

SEQ ID NO: 1882862 - RNA, 20 nt, Human
ugaaauuuuugguuauaaau

SEQ ID NO: 1882863 - RNA, 17 nt, Human
ugaaguacucauacaug

SEQ ID NO: 1882864 - RNA, 12 nt, Human
ugaaguaccacc

SEQ ID NO: 1882865 - RNA, 13 nt, Human
ugaagucacacag

SEQ ID NO: 1882866 - RNA, 12 nt, Human
ugaauaauacag

SEQ ID NO: 1882867 - RNA, 23 nt, Human
ugaauaauguaagacaaauaugu

SEQ ID NO: 1882868 - RNA, 13 nt, Human
ugaauaauacagu

SEQ ID NO: 1882869 - RNA, 18 nt, Human
ugaauauuuaguguucau

SEQ ID NO: 1882870 - RNA, 19 nt, Human
ugaauauuuucauuaaaag

SEQ ID NO: 1882871 - RNA, 21 nt, Human
ugaauauuuucauuaaaagcu

SEQ ID NO: 1882872 - RNA, 22 nt, Human
ugaaguaauaugcacacauuuu

SEQ ID NO: 1882873 - RNA, 21 nt, Human
ugaaguaauaugcacacauuu

SEQ ID NO: 1882874 - RNA, 20 nt, Human
ugaaguaauaugcacacauu

SEQ ID NO: 1882875 - RNA, 16 nt, Human
ugaaguaauaugcaca

SEQ ID NO: 1882876 - RNA, 15 nt, Human
ugaaguaauaugcac

SEQ ID NO: 1882877 - RNA, 13 nt, Human
ugaagcaaacaca

SEQ ID NO: 1882878 - RNA, 14 nt, Human
ugaagcaaacacau

SEQ ID NO: 1882879 - RNA, 15 nt, Human
ugaagcaaacacauu

SEQ ID NO: 1882880 - RNA, 18 nt, Human
ugaagguuucugaaaauu

SEQ ID NO: 1882881 - RNA, 17 nt, Human
ugaagggccagagccag

SEQ ID NO: 1882882 - RNA, 15 nt, Human
ugaagggccagagcc

SEQ ID NO: 1882883 - RNA, 16 nt, Human
ugaagggccagagcca

SEQ ID NO: 1882884 - RNA, 12 nt, Human
ugaagggccaga

SEQ ID NO: 1882885 - RNA, 14 nt, Human
ugaagggccagagc

SEQ ID NO: 1882886 - RNA, 16 nt, Human
ugaagggauaugugaa

SEQ ID NO: 1882887 - RNA, 22 nt, Human
agaguaauccaagcaaauguga

SEQ ID NO: 1882888 - RNA, 20 nt, Human
agaguaauccaagcaaaugu

SEQ ID NO: 1882889 - RNA, 18 nt, Human
agaguaauccaagcaaau

SEQ ID NO: 1882890 - RNA, 20 nt, Human
agagguucaaagauauuuug

SEQ ID NO: 1882891 - RNA, 19 nt, Human
agagguucaaagauauuuu

SEQ ID NO: 1882892 - RNA, 16 nt, Human
agagguucaaagauau

SEQ ID NO: 1882893 - RNA, 15 nt, Human
agagggagugacaga

SEQ ID NO: 1882894 - RNA, 15 nt, Human
agagggagguaagga

SEQ ID NO: 1882895 - RNA, 20 nt, Human
agagggagugacagaggcag

SEQ ID NO: 1882896 - RNA, 13 nt, Human
agagguucaaaga

SEQ ID NO: 1882897 - RNA, 22 nt, Human
agaggcugccucucccaucacu

SEQ ID NO: 1882898 - RNA, 16 nt, Human
agaggcugcagccagg

SEQ ID NO: 1882899 - RNA, 19 nt, Human
agaggcugaggcuggcaca

SEQ ID NO: 1882900 - RNA, 21 nt, Human
agaggcugaggcuggcacagg

SEQ ID NO: 1882901 - RNA, 23 nt, Human
agaggcagccccauucugccugc

SEQ ID NO: 1882902 - RNA, 21 nt, Human
agaggcagggucucacucugu

SEQ ID NO: 1882903 - RNA, 22 nt, Human
agaggcagccccauucugccug

SEQ ID NO: 1882904 - RNA, 21 nt, Human
agaggcagccccauucugccu

SEQ ID NO: 1882905 - RNA, 13 nt, Human
agaggcauuuccc

SEQ ID NO: 1882906 - RNA, 14 nt, Human
agaggcauuucccc

SEQ ID NO: 1882907 - RNA, 21 nt, Human
agaggcccucuggaguggcca

SEQ ID NO: 1882908 - RNA, 24 nt, Human
agaggcccucuggaguggccacua

SEQ ID NO: 1882909 - RNA, 22 nt, Human
agaggcccucuggaguggccac

SEQ ID NO: 1882910 - RNA, 23 nt, Human
agaggcccucuggaguggccacu

SEQ ID NO: 1882911 - RNA, 22 nt, Human
agaggccugccuccagggcugg

SEQ ID NO: 1882912 - RNA, 21 nt, Human
agaggccugccuccagggcug

SEQ ID NO: 1882913 - RNA, 20 nt, Human
agaggccugccuccagggcu

SEQ ID NO: 1882914 - RNA, 19 nt, Human
agacucuacccauauuaca

SEQ ID NO: 1882915 - RNA, 21 nt, Human
agacucuaggacauaaauuag

SEQ ID NO: 1882916 - RNA, 13 nt, Human
agacuccugcagg

SEQ ID NO: 1882917 - RNA, 11 nt, Human
agacuccucag

SEQ ID NO: 1882918 - RNA, 23 nt, Human
agacuccugacugucucccggga

SEQ ID NO: 1882919 - RNA, 17 nt, Human
agacucccauuccugaa

SEQ ID NO: 1882920 - RNA, 19 nt, Human
agacucccauuccugaaga

SEQ ID NO: 1882921 - RNA, 23 nt, Human
agacucccauuccugaagaacca

SEQ ID NO: 1882922 - RNA, 17 nt, Human
agacuccucaguucuug

SEQ ID NO: 1882923 - RNA, 13 nt, Human
agacucugucuaa

SEQ ID NO: 1882924 - RNA, 18 nt, Human
agacucugucuaaaaaac

SEQ ID NO: 1882925 - RNA, 20 nt, Human
agacucugucuaaaaaacaa

SEQ ID NO: 1882926 - RNA, 21 nt, Human
agacucugucuaaaaaacaaa

SEQ ID NO: 1882927 - RNA, 15 nt, Human
ucuuuaaugucacag

SEQ ID NO: 1882928 - RNA, 22 nt, Human
agacaggcaagcaccuccugcc

SEQ ID NO: 1882929 - RNA, 20 nt, Human
agacaggcaagcaccuccug

SEQ ID NO: 1882930 - RNA, 19 nt, Human
ucuuuaaugucacaggcag

SEQ ID NO: 1882931 - RNA, 18 nt, Human
ucuuuaaugucacaggca

SEQ ID NO: 1882932 - RNA, 20 nt, Human
ucuuucccugcuuaaugaaa

SEQ ID NO: 1882933 - RNA, 13 nt, Human
ucuuuaaugcuuu

SEQ ID NO: 1882934 - RNA, 16 nt, Human
ucuuuaaugcuuuuau

SEQ ID NO: 1882935 - RNA, 11 nt, Human
ucuuuaaugcu

SEQ ID NO: 1882936 - RNA, 12 nt, Human
ucuuuccugagg

SEQ ID NO: 1882937 - RNA, 15 nt, Human
ucuuuccuccuucca

SEQ ID NO: 1882938 - RNA, 22 nt, Human
ucuuuccuagauggcagucacu

SEQ ID NO: 1882939 - RNA, 14 nt, Human
ucuuuccuccuucc

SEQ ID NO: 1882940 - RNA, 12 nt, Human
ucuuuccuccuu

SEQ ID NO: 1882941 - RNA, 23 nt, Human
ucuuuccuaaggcugcaagguuu

SEQ ID NO: 1882942 - RNA, 19 nt, Human
ucuuuccuagauggcaguc

SEQ ID NO: 1882943 - RNA, 17 nt, Human
ucuuuccuaaggcugca

SEQ ID NO: 1882944 - RNA, 16 nt, Human
agacuccaccaagccu

SEQ ID NO: 1882945 - RNA, 12 nt, Human
agacuccaccaa

SEQ ID NO: 1882946 - RNA, 17 nt, Human
ucuuuuuuuggcccagg

SEQ ID NO: 1882947 - RNA, 15 nt, Human
ucuuuuuuucuuugg

SEQ ID NO: 1882948 - RNA, 21 nt, Human
ucuuuuuucuaaaguaaaaac

SEQ ID NO: 1882949 - RNA, 22 nt, Human
ucuuuuuucuaaaguaaaaaca

SEQ ID NO: 1882950 - RNA, 14 nt, Human
ucuuuguggcuucc

SEQ ID NO: 1882951 - RNA, 16 nt, Human
ucuuugugaaggccuc

SEQ ID NO: 1882952 - RNA, 11 nt, Human
ucuuugugaag

SEQ ID NO: 1882953 - RNA, 16 nt, Human
ucuuugugcuuuggcu

SEQ ID NO: 1882954 - RNA, 13 nt, Human
ucuuuguggccaa

SEQ ID NO: 1882955 - RNA, 14 nt, Human
ucuuuguggccaag

SEQ ID NO: 1882956 - RNA, 22 nt, Human
ucuuuguggccaaggagcugcu

SEQ ID NO: 1882957 - RNA, 23 nt, Human
ucuuuguggccaaggagcugcua

SEQ ID NO: 1882958 - RNA, 16 nt, Human
ucuuuguaaugaaaac

SEQ ID NO: 1882959 - RNA, 14 nt, Human
ucuuuguacagaca

SEQ ID NO: 1882960 - RNA, 15 nt, Human
ucuuuguacagacaa

SEQ ID NO: 1882961 - RNA, 20 nt, Human
ucuuuguacagacaacaaac

SEQ ID NO: 1882962 - RNA, 15 nt, Human
agagacagaaagcag

SEQ ID NO: 1882963 - RNA, 14 nt, Human
agagacagaaagca

SEQ ID NO: 1882964 - RNA, 20 nt, Human
agacugguuccauggccucu

SEQ ID NO: 1882965 - RNA, 14 nt, Human
agacuguacaaagu

SEQ ID NO: 1882966 - RNA, 17 nt, Human
agacuuuggaaagacuu

SEQ ID NO: 1882967 - RNA, 15 nt, Human
agacuuuggaaagag

SEQ ID NO: 1882968 - RNA, 15 nt, Human
agacuuuuaugauac

SEQ ID NO: 1882969 - RNA, 15 nt, Human
agacuuuuccaaccc

SEQ ID NO: 1882970 - RNA, 12 nt, Human
agacuuuuauga

SEQ ID NO: 1882971 - RNA, 19 nt, Human
agacuuuggaaagaguagg

SEQ ID NO: 1882972 - RNA, 19 nt, Human
agacuuuucuuucagccaa

SEQ ID NO: 1882973 - RNA, 16 nt, Human
agagacacaagccuuc

SEQ ID NO: 1882974 - RNA, 19 nt, Human
agagacacaagccuucggc

SEQ ID NO: 1882975 - RNA, 13 nt, Human
ugaaagaaaauaa

SEQ ID NO: 1882976 - RNA, 18 nt, Human
ugaaacuggauuaaacuu

SEQ ID NO: 1882977 - RNA, 17 nt, Human
ugaaacuggauuaaacu

SEQ ID NO: 1882978 - RNA, 14 nt, Human
ugaaaauuaacaug

SEQ ID NO: 1882979 - RNA, 18 nt, Human
ugaaaauuaacacugcuu

SEQ ID NO: 1882980 - RNA, 16 nt, Human
ugaaaauuaacacugc

SEQ ID NO: 1882981 - RNA, 15 nt, Human
ugaaaauuaacacug

SEQ ID NO: 1882982 - RNA, 14 nt, Human
ugaaaauuaacacu

SEQ ID NO: 1882983 - RNA, 18 nt, Human
ugaaaaugcaacaacaug

SEQ ID NO: 1882984 - RNA, 21 nt, Human
ugaaaaugcaacaacauguau

SEQ ID NO: 1882985 - RNA, 20 nt, Human
ugaaaaugcaacaacaugua

SEQ ID NO: 1882986 - RNA, 23 nt, Human
ugaaaaugcaacaacauguauaa

SEQ ID NO: 1882987 - RNA, 23 nt, Human
ucuuuuuuuuuuuuuaaagacag

SEQ ID NO: 1882988 - RNA, 13 nt, Human
ugaaaacacauuu

SEQ ID NO: 1882989 - RNA, 12 nt, Human
ugaaaacacauu

SEQ ID NO: 1882990 - RNA, 14 nt, Human
ugaaaacacauuuu

SEQ ID NO: 1882991 - RNA, 20 nt, Human
ugaaaacacauuuuucuuag

SEQ ID NO: 1882992 - RNA, 19 nt, Human
ugaaaacacauuuuucuua

SEQ ID NO: 1882993 - RNA, 17 nt, Human
ugaaaacacauuuuucu

SEQ ID NO: 1882994 - RNA, 15 nt, Human
ugaaaacacauuuuu

SEQ ID NO: 1882995 - RNA, 16 nt, Human
ugaaaauaagaauaga

SEQ ID NO: 1882996 - RNA, 15 nt, Human
agagacuccugcagg

SEQ ID NO: 1882997 - RNA, 12 nt, Human
agagacuccugc

SEQ ID NO: 1882998 - RNA, 13 nt, Human
agagacuccugca

SEQ ID NO: 1882999 - RNA, 14 nt, Human
agagacuccugcag

SEQ ID NO: 1883000 - RNA, 18 nt, Human
agagauccaaaagaagcc

SEQ ID NO: 1883001 - RNA, 22 nt, Human
agagaccaucccugaaggcccc

SEQ ID NO: 1883002 - RNA, 23 nt, Human
agagaccaucccugaaggccccg

SEQ ID NO: 1883003 - RNA, 19 nt, Human
agagaccaucccugaaggc

SEQ ID NO: 1883004 - RNA, 21 nt, Human
agagaccaucccugaaggccc

SEQ ID NO: 1883005 - RNA, 18 nt, Human
ugaaagaggaaugaagua

SEQ ID NO: 1883006 - RNA, 18 nt, Human
agagaccaucccugaagg

SEQ ID NO: 1883007 - RNA, 18 nt, Human
ugaaagacuguacaaagu

SEQ ID NO: 1883008 - RNA, 19 nt, Human
ugaaagacuguacaaagua

SEQ ID NO: 1883009 - RNA, 22 nt, Human
ugaaagacuguacaaaguagaa

SEQ ID NO: 1883010 - RNA, 17 nt, Human
ugaaagaggaaugaagu

SEQ ID NO: 1883011 - RNA, 16 nt, Human
ugaaagacuguacaaa

SEQ ID NO: 1883012 - RNA, 22 nt, Human
ugaaagaaaauaccaaggaaca

SEQ ID NO: 1883013 - RNA, 24 nt, Human
uguccuguaguugcguggacucug

SEQ ID NO: 1883014 - RNA, 12 nt, Human
uguccuuagaac

SEQ ID NO: 1883015 - RNA, 18 nt, Human
uguccuuagaacauuuua

SEQ ID NO: 1883016 - RNA, 12 nt, Human
ugucccuuuucc

SEQ ID NO: 1883017 - RNA, 14 nt, Human
ugucccugcacuug

SEQ ID NO: 1883018 - RNA, 14 nt, Human
ugucccucugcccc

SEQ ID NO: 1883019 - RNA, 15 nt, Human
ugucccucugcccca

SEQ ID NO: 1883020 - RNA, 16 nt, Human
ugucccucugccccau

SEQ ID NO: 1883021 - RNA, 21 nt, Human
ugucccuaguaaaaauacaaa

SEQ ID NO: 1883022 - RNA, 17 nt, Human
uguccagcugagcgcca

SEQ ID NO: 1883023 - RNA, 21 nt, Human
uguccagcugagcgccaggau

SEQ ID NO: 1883024 - RNA, 11 nt, Human
uguccagcucc

SEQ ID NO: 1883025 - RNA, 12 nt, Human
uguccagcucca

SEQ ID NO: 1883026 - RNA, 16 nt, Human
uguccagcuccaaccu

SEQ ID NO: 1883027 - RNA, 20 nt, Human
uguccagcuccaaccugcaa

SEQ ID NO: 1883028 - RNA, 23 nt, Human
uguccagcuccaaccugcaaaga

SEQ ID NO: 1883029 - RNA, 16 nt, Human
ugucagccauuccugu

SEQ ID NO: 1883030 - RNA, 20 nt, Human
agucccaccuuggcugcagg

SEQ ID NO: 1883031 - RNA, 23 nt, Human
agucccaccuuggcugcagggag

SEQ ID NO: 1883032 - RNA, 21 nt, Human
agucccaccuuggcugcaggg

SEQ ID NO: 1883033 - RNA, 21 nt, Human
aguccauauuucaauuuccaa

SEQ ID NO: 1883034 - RNA, 14 nt, Human
aguccccuguuugu

SEQ ID NO: 1883035 - RNA, 19 nt, Human
aguccccuguuuguuucug

SEQ ID NO: 1883036 - RNA, 13 nt, Human
aguccccagagaa

SEQ ID NO: 1883037 - RNA, 23 nt, Human
aguccauauuucaauuuccaaga

SEQ ID NO: 1883038 - RNA, 19 nt, Human
agucagggguucccuuuuu

SEQ ID NO: 1883039 - RNA, 21 nt, Human
agucagucauucagauaugau

SEQ ID NO: 1883040 - RNA, 15 nt, Human
agucagucauucaga

SEQ ID NO: 1883041 - RNA, 15 nt, Human
agucaucauucccuu

SEQ ID NO: 1883042 - RNA, 23 nt, Human
agucacauggccuaugcacauau

SEQ ID NO: 1883043 - RNA, 21 nt, Human
agucacagaacaaauguuugu

SEQ ID NO: 1883044 - RNA, 13 nt, Human
agucacagccacc

SEQ ID NO: 1883045 - RNA, 20 nt, Human
agucacauuccaagccucau

SEQ ID NO: 1883046 - RNA, 15 nt, Human
agucacugagacagc

SEQ ID NO: 1883047 - RNA, 16 nt, Human
agucacugagacagcc

SEQ ID NO: 1883048 - RNA, 17 nt, Human
agucacugagacagccc

SEQ ID NO: 1883049 - RNA, 15 nt, Human
ugucagcauagaagu

SEQ ID NO: 1883050 - RNA, 21 nt, Human
aguauuuaauucauguugccu

SEQ ID NO: 1883051 - RNA, 21 nt, Human
aguagcugggacuacaggcac

SEQ ID NO: 1883052 - RNA, 19 nt, Human
aguagcugggacuacaggc

SEQ ID NO: 1883053 - RNA, 22 nt, Human
aguagcugggacuacaggcacc

SEQ ID NO: 1883054 - RNA, 17 nt, Human
aguagcuggauuacagg

SEQ ID NO: 1883055 - RNA, 14 nt, Human
aguauuauaccuuu

SEQ ID NO: 1883056 - RNA, 15 nt, Human
aguauuauaccuuuu

SEQ ID NO: 1883057 - RNA, 15 nt, Human
uguagagccaggguc

SEQ ID NO: 1883058 - RNA, 12 nt, Human
uguagagccagg

SEQ ID NO: 1883059 - RNA, 14 nt, Human
agguuugaguagag

SEQ ID NO: 1883060 - RNA, 23 nt, Human
agguuuggacaaaauggaauacu

SEQ ID NO: 1883061 - RNA, 22 nt, Human
uguauccauccauggggcugau

SEQ ID NO: 1883062 - RNA, 21 nt, Human
agguuugggaccccugguggu

SEQ ID NO: 1883063 - RNA, 17 nt, Human
agguuugguccagccug

SEQ ID NO: 1883064 - RNA, 16 nt, Human
agguuugggaccccug

SEQ ID NO: 1883065 - RNA, 16 nt, Human
uguaucccaugagccu

SEQ ID NO: 1883066 - RNA, 15 nt, Human
uguaucccaugagcc

SEQ ID NO: 1883067 - RNA, 14 nt, Human
uguauguguaagua

SEQ ID NO: 1883068 - RNA, 22 nt, Human
uguaugugggggucuguguguu

SEQ ID NO: 1883069 - RNA, 21 nt, Human
uguaugugggggucugugugu

SEQ ID NO: 1883070 - RNA, 21 nt, Human
uguauuaaguuguuaauaaaa

SEQ ID NO: 1883071 - RNA, 11 nt, Human
uguauuaugug

SEQ ID NO: 1883072 - RNA, 14 nt, Human
ugucaaagugguga

SEQ ID NO: 1883073 - RNA, 15 nt, Human
ugucaaaguggugag

SEQ ID NO: 1883074 - RNA, 16 nt, Human
ugucaaaguggugaga

SEQ ID NO: 1883075 - RNA, 19 nt, Human
ugucaaaguggugagaggc

SEQ ID NO: 1883076 - RNA, 17 nt, Human
ugucaacaugaacaaau

SEQ ID NO: 1883077 - RNA, 14 nt, Human
aguagcugggacua

SEQ ID NO: 1883078 - RNA, 13 nt, Human
aguagcugggacu

SEQ ID NO: 1883079 - RNA, 15 nt, Human
ugucuuggacacugu

SEQ ID NO: 1883080 - RNA, 13 nt, Human
ugucuuggacacu

SEQ ID NO: 1883081 - RNA, 18 nt, Human
ugucuuguguuucuuuag

SEQ ID NO: 1883082 - RNA, 17 nt, Human
ugucuuuaaaugcugcu

SEQ ID NO: 1883083 - RNA, 15 nt, Human
ugugaaccaccacac

SEQ ID NO: 1883084 - RNA, 22 nt, Human
ugugaacaguuguguuugaagc

SEQ ID NO: 1883085 - RNA, 23 nt, Human
ugugaaccaccacacccagccca

SEQ ID NO: 1883086 - RNA, 22 nt, Human
ugugaaccaccacacccagccc

SEQ ID NO: 1883087 - RNA, 17 nt, Human
ugugaaccaccacaccc

SEQ ID NO: 1883088 - RNA, 16 nt, Human
ugugaaccaccacacc

SEQ ID NO: 1883089 - RNA, 21 nt, Human
ugugaacgauuuagaaagaag

SEQ ID NO: 1883090 - RNA, 21 nt, Human
ugucuuuccacuccuccuagc

SEQ ID NO: 1883091 - RNA, 17 nt, Human
ugucuucucccugcaca

SEQ ID NO: 1883092 - RNA, 15 nt, Human
ugucuucauagcaga

SEQ ID NO: 1883093 - RNA, 21 nt, Human
ugucuugcaauggcagccuug

SEQ ID NO: 1883094 - RNA, 20 nt, Human
ugucuugcaauggcagccuu

SEQ ID NO: 1883095 - RNA, 18 nt, Human
ugucuugcaauggcagcc

SEQ ID NO: 1883096 - RNA, 17 nt, Human
ugucuugcaauggcagc

SEQ ID NO: 1883097 - RNA, 15 nt, Human
ugucuugcaauggca

SEQ ID NO: 1883098 - RNA, 23 nt, Human
aguccccuguuuguuucugaaag

SEQ ID NO: 1883099 - RNA, 13 nt, Human
agucccugccaau

SEQ ID NO: 1883100 - RNA, 14 nt, Human
agucccugccaaug

SEQ ID NO: 1883101 - RNA, 16 nt, Human
agucccugccaaugga

SEQ ID NO: 1883102 - RNA, 21 nt, Human
ugucuccuggcgguuccucgu

SEQ ID NO: 1883103 - RNA, 11 nt, Human
ugucuccuggc

SEQ ID NO: 1883104 - RNA, 22 nt, Human
ugucucuggauuauauuaugaa

SEQ ID NO: 1883105 - RNA, 13 nt, Human
ugucucugagagu

SEQ ID NO: 1883106 - RNA, 20 nt, Human
ugucucgugguaggacugua

SEQ ID NO: 1883107 - RNA, 19 nt, Human
ugucucgugguaggacugu

SEQ ID NO: 1883108 - RNA, 18 nt, Human
ugucucgugguaggacug

SEQ ID NO: 1883109 - RNA, 21 nt, Human
ugucucgugguaggacuguag

SEQ ID NO: 1883110 - RNA, 17 nt, Human
ugucucuacuaaaaaua

SEQ ID NO: 1883111 - RNA, 21 nt, Human
ugucucuuuaaugucacaggc

SEQ ID NO: 1883112 - RNA, 22 nt, Human
ugucucuugguccugcugcagu

SEQ ID NO: 1883113 - RNA, 22 nt, Human
ugucucuuuaaugucacaggca

SEQ ID NO: 1883114 - RNA, 13 nt, Human
ugucucuuucaug

SEQ ID NO: 1883115 - RNA, 18 nt, Human
ugucucuugguccugcug

SEQ ID NO: 1883116 - RNA, 19 nt, Human
ugucucuugguccugcugc

SEQ ID NO: 1883117 - RNA, 20 nt, Human
ugucucuugguccugcugca

SEQ ID NO: 1883118 - RNA, 21 nt, Human
ugucucuugguccugcugcag

SEQ ID NO: 1883119 - RNA, 23 nt, Human
ugucucugggcuuggggcuuccu

SEQ ID NO: 1883120 - RNA, 13 nt, Human
ugucucugugaga

SEQ ID NO: 1883121 - RNA, 15 nt, Human
agugagccacuccgg

SEQ ID NO: 1883122 - RNA, 16 nt, Human
agugagccgagauugu

SEQ ID NO: 1883123 - RNA, 15 nt, Human
ugugauggggcccug

SEQ ID NO: 1883124 - RNA, 16 nt, Human
ugugauggggcccugc

SEQ ID NO: 1883125 - RNA, 14 nt, Human
agugagagcugggu

SEQ ID NO: 1883126 - RNA, 17 nt, Human
ugugauggggcccugcc

SEQ ID NO: 1883127 - RNA, 18 nt, Human
ugugauggggcccugccu

SEQ ID NO: 1883128 - RNA, 15 nt, Human
ugugaugugaagcca

SEQ ID NO: 1883129 - RNA, 11 nt, Human
ugugauguguc

SEQ ID NO: 1883130 - RNA, 11 nt, Human
ugugauuuuuu

SEQ ID NO: 1883131 - RNA, 17 nt, Human
agugaaagaaaauaaca

SEQ ID NO: 1883132 - RNA, 14 nt, Human
agugagacagcucu

SEQ ID NO: 1883133 - RNA, 17 nt, Human
agucuuuuguucgcaug

SEQ ID NO: 1883134 - RNA, 13 nt, Human
agugagacucugu

SEQ ID NO: 1883135 - RNA, 21 nt, Human
agugagacccugucucaaaaa

SEQ ID NO: 1883136 - RNA, 17 nt, Human
agugagacccugucuca

SEQ ID NO: 1883137 - RNA, 14 nt, Human
agugaaagcaucac

SEQ ID NO: 1883138 - RNA, 17 nt, Human
agugagacucugucuca

SEQ ID NO: 1883139 - RNA, 16 nt, Human
agugagacucugucuc

SEQ ID NO: 1883140 - RNA, 22 nt, Human
agugagacucugucucaaaaaa

SEQ ID NO: 1883141 - RNA, 19 nt, Human
agucuccaaagucucugga

SEQ ID NO: 1883142 - RNA, 14 nt, Human
ugugagcccagcug

SEQ ID NO: 1883143 - RNA, 15 nt, Human
ugugagcccagcugg

SEQ ID NO: 1883144 - RNA, 14 nt, Human
agucuccaccagga

SEQ ID NO: 1883145 - RNA, 15 nt, Human
agucuccaccaggaa

SEQ ID NO: 1883146 - RNA, 16 nt, Human
agucuccaccaggaac

SEQ ID NO: 1883147 - RNA, 22 nt, Human
ugugagaugcuagaacucccuu

SEQ ID NO: 1883148 - RNA, 10 nt, Human
ugugaagcca

SEQ ID NO: 1883149 - RNA, 20 nt, Human
ugugaagccaauucagacag

SEQ ID NO: 1883150 - RNA, 21 nt, Human
ugugaagccaauucagacagg

SEQ ID NO: 1883151 - RNA, 19 nt, Human
ugugagcacaaagguagcu

SEQ ID NO: 1883152 - RNA, 22 nt, Human
ugugaagcacagaccccuucca

SEQ ID NO: 1883153 - RNA, 13 nt, Human
agucuuuuccaug

SEQ ID NO: 1883154 - RNA, 15 nt, Human
agucuuuuccaugaa

SEQ ID NO: 1883155 - RNA, 22 nt, Human
agucuuuuguucgcauggucac

SEQ ID NO: 1883156 - RNA, 11 nt, Human
agugaaaaagg

SEQ ID NO: 1883157 - RNA, 17 nt, Human
agugaaaaaggaggaag

SEQ ID NO: 1883158 - RNA, 20 nt, Human
agugaaaaaggaggaagaga

SEQ ID NO: 1883159 - RNA, 23 nt, Human
agugaaaaaggaggaagagaaaa

SEQ ID NO: 1883160 - RNA, 16 nt, Human
agucuguuuuguaaag

SEQ ID NO: 1883161 - RNA, 15 nt, Human
agucuguuuuguaaa

SEQ ID NO: 1883162 - RNA, 22 nt, Human
uguacauuagucauucaauaaa

SEQ ID NO: 1883163 - RNA, 14 nt, Human
uguacauuaauuac

SEQ ID NO: 1883164 - RNA, 21 nt, Human
uguacauguguagccugugca

SEQ ID NO: 1883165 - RNA, 20 nt, Human
uguacauguguagccugugc

SEQ ID NO: 1883166 - RNA, 17 nt, Human
uguacauguguagccug

SEQ ID NO: 1883167 - RNA, 20 nt, Human
uguacaugaaaacacauuuu

SEQ ID NO: 1883168 - RNA, 19 nt, Human
uguacaugaaaacacauuu

SEQ ID NO: 1883169 - RNA, 18 nt, Human
uguacaugaaaacacauu

SEQ ID NO: 1883170 - RNA, 17 nt, Human
uguacaugaaaacacau

SEQ ID NO: 1883171 - RNA, 19 nt, Human
uguacuugcucuugaugcc

SEQ ID NO: 1883172 - RNA, 15 nt, Human
uguacuugcucuuga

SEQ ID NO: 1883173 - RNA, 21 nt, Human
uguagaagucacauuccugaa

SEQ ID NO: 1883174 - RNA, 15 nt, Human
uguagaagcauggug

SEQ ID NO: 1883175 - RNA, 15 nt, Human
uguaaggcaaucaug

SEQ ID NO: 1883176 - RNA, 16 nt, Human
uguaauuugugauaca

SEQ ID NO: 1883177 - RNA, 18 nt, Human
uguaaggaaugauuaauu

SEQ ID NO: 1883178 - RNA, 21 nt, Human
uguaauuugugauacaaugcu

SEQ ID NO: 1883179 - RNA, 17 nt, Human
uguaauuugugauacaa

SEQ ID NO: 1883180 - RNA, 16 nt, Human
uguaauuuuauaugaa

SEQ ID NO: 1883181 - RNA, 19 nt, Human
uguacaaaguagaagucuu

SEQ ID NO: 1883182 - RNA, 23 nt, Human
uguacaaaguagaagucuuagau

SEQ ID NO: 1883183 - RNA, 14 nt, Human
uguacaucuauuuu

SEQ ID NO: 1883184 - RNA, 20 nt, Human
aggugugagucaccaagccc

SEQ ID NO: 1883185 - RNA, 14 nt, Human
aggugugagucacc

SEQ ID NO: 1883186 - RNA, 20 nt, Human
aggugugacugaauuucuuu

SEQ ID NO: 1883187 - RNA, 22 nt, Human
aggugugaaccaccacacccag

SEQ ID NO: 1883188 - RNA, 23 nt, Human
aggugugaaccaccacacccagc

SEQ ID NO: 1883189 - RNA, 18 nt, Human
aggugugacugaauuucu

SEQ ID NO: 1883190 - RNA, 13 nt, Human
agguggggcagcu

SEQ ID NO: 1883191 - RNA, 22 nt, Human
aggugcaacaagguccucuguc

SEQ ID NO: 1883192 - RNA, 14 nt, Human
agguggggcagcuu

SEQ ID NO: 1883193 - RNA, 23 nt, Human
agguggggucacucuggcagcuc

SEQ ID NO: 1883194 - RNA, 16 nt, Human
agguggggcagcuuga

SEQ ID NO: 1883195 - RNA, 15 nt, Human
agguguuacuguaau

SEQ ID NO: 1883196 - RNA, 16 nt, Human
agguguuacuguaauu

SEQ ID NO: 1883197 - RNA, 15 nt, Human
agguguugucccuuc

SEQ ID NO: 1883198 - RNA, 16 nt, Human
agguguugucccuucu

SEQ ID NO: 1883199 - RNA, 13 nt, Human
uguaaggaaugau

SEQ ID NO: 1883200 - RNA, 18 nt, Human
uguaagaacuacaaacaa

SEQ ID NO: 1883201 - RNA, 14 nt, Human
uguaaggaaugauu

SEQ ID NO: 1883202 - RNA, 15 nt, Human
uguaaggaaugauua

SEQ ID NO: 1883203 - RNA, 22 nt, Human
uguaagcucuacugaggugcua

SEQ ID NO: 1883204 - RNA, 15 nt, Human
ugguuuucuguucuu

SEQ ID NO: 1883205 - RNA, 13 nt, Human
ugguuuucuguuc

SEQ ID NO: 1883206 - RNA, 23 nt, Human
aggugauccacccaccucagccu

SEQ ID NO: 1883207 - RNA, 21 nt, Human
aggugauccacccaccucagc

SEQ ID NO: 1883208 - RNA, 18 nt, Human
ugguuuuaguugcaacuu

SEQ ID NO: 1883209 - RNA, 12 nt, Human
ugguuuucuguu

SEQ ID NO: 1883210 - RNA, 13 nt, Human
ugguuuuccugua

SEQ ID NO: 1883211 - RNA, 21 nt, Human
ugguuuguaaauuaacuuuua

SEQ ID NO: 1883212 - RNA, 17 nt, Human
ugguuugcaaggaagcc

SEQ ID NO: 1883213 - RNA, 15 nt, Human
ugguuugcaaggaag

SEQ ID NO: 1883214 - RNA, 20 nt, Human
ugguuuuaacaacugugcuu

SEQ ID NO: 1883215 - RNA, 15 nt, Human
ugguuucagaaaugu

SEQ ID NO: 1883216 - RNA, 14 nt, Human
ugguuucagaaaug

SEQ ID NO: 1883217 - RNA, 18 nt, Human
ugguuuaacuucugccug

SEQ ID NO: 1883218 - RNA, 15 nt, Human
ugguuucgaacuccu

SEQ ID NO: 1883219 - RNA, 15 nt, Human
ugguguuuccuggca

SEQ ID NO: 1883220 - RNA, 17 nt, Human
ugguguuuccuggcacu

SEQ ID NO: 1883221 - RNA, 13 nt, Human
ugguuaaugccau

SEQ ID NO: 1883222 - RNA, 16 nt, Human
ugguuaagcuuugaca

SEQ ID NO: 1883223 - RNA, 17 nt, Human
ugguucacucuuggagc

SEQ ID NO: 1883224 - RNA, 23 nt, Human
ugguucaggguuggccccugccc

SEQ ID NO: 1883225 - RNA, 15 nt, Human
ugguuuaauuuaaag

SEQ ID NO: 1883226 - RNA, 22 nt, Human
ugguucaggguuggccccugcc

SEQ ID NO: 1883227 - RNA, 20 nt, Human
ugguucaggguuggccccug

SEQ ID NO: 1883228 - RNA, 22 nt, Human
ugguucacucuuggagccugca

SEQ ID NO: 1883229 - RNA, 21 nt, Human
ugguucacucuuggagccugc

SEQ ID NO: 1883230 - RNA, 20 nt, Human
ugguucacucuuggagccug

SEQ ID NO: 1883231 - RNA, 12 nt, Human
ugguggcagcug

SEQ ID NO: 1883232 - RNA, 22 nt, Human
ugguguucaaaaaacuuguaaa

SEQ ID NO: 1883233 - RNA, 21 nt, Human
ugguguucaaaaaacuuguaa

SEQ ID NO: 1883234 - RNA, 15 nt, Human
ugguggcagagugga

SEQ ID NO: 1883235 - RNA, 12 nt, Human
ugguggcagcuc

SEQ ID NO: 1883236 - RNA, 16 nt, Human
ugguggcagcucaccu

SEQ ID NO: 1883237 - RNA, 19 nt, Human
ugguggcagcucaccucuc

SEQ ID NO: 1883238 - RNA, 20 nt, Human
ugguggcagcucaccucucc

SEQ ID NO: 1883239 - RNA, 23 nt, Human
ugguggcagcucaccucucccuu

SEQ ID NO: 1883240 - RNA, 22 nt, Human
ugguccaugggccauaugaaaa

SEQ ID NO: 1883241 - RNA, 19 nt, Human
ugguccauagagagcaaga

SEQ ID NO: 1883242 - RNA, 13 nt, Human
uggucccacccca

SEQ ID NO: 1883243 - RNA, 12 nt, Human
uggucuguguga

SEQ ID NO: 1883244 - RNA, 22 nt, Human
uggucugugagaugcuagaacu

SEQ ID NO: 1883245 - RNA, 16 nt, Human
uggucuuauuuguaaa

SEQ ID NO: 1883246 - RNA, 18 nt, Human
uggucugacccacugcuu

SEQ ID NO: 1883247 - RNA, 16 nt, Human
uggucugggacucucu

SEQ ID NO: 1883248 - RNA, 20 nt, Human
uggugaacauugcaauagaa

SEQ ID NO: 1883249 - RNA, 15 nt, Human
uggugaacauugcaa

SEQ ID NO: 1883250 - RNA, 19 nt, Human
uggugaacagaacaaaagg

SEQ ID NO: 1883251 - RNA, 21 nt, Human
aggguggugaccucugccuga

SEQ ID NO: 1883252 - RNA, 19 nt, Human
aggguggugaccucugccu

SEQ ID NO: 1883253 - RNA, 18 nt, Human
aggguggugaccucugcc

SEQ ID NO: 1883254 - RNA, 17 nt, Human
aggguggugaccucugc

SEQ ID NO: 1883255 - RNA, 15 nt, Human
aggguugggcuggug

SEQ ID NO: 1883256 - RNA, 17 nt, Human
aggguuggccccugccc

SEQ ID NO: 1883257 - RNA, 14 nt, Human
aggguuggccccug

SEQ ID NO: 1883258 - RNA, 13 nt, Human
aggguuggccccu

SEQ ID NO: 1883259 - RNA, 14 nt, Human
uggugaaaccuccu

SEQ ID NO: 1883260 - RNA, 18 nt, Human
aggguuauugcauuugga

SEQ ID NO: 1883261 - RNA, 15 nt, Human
aggucagugcaaaua

SEQ ID NO: 1883262 - RNA, 21 nt, Human
aggucaaggcugcagugagcc

SEQ ID NO: 1883263 - RNA, 23 nt, Human
aggucauuuuuuuuaagaaaaag

SEQ ID NO: 1883264 - RNA, 22 nt, Human
aggucauuuuuuuuaagaaaaa

SEQ ID NO: 1883265 - RNA, 15 nt, Human
aggucaggaguucga

SEQ ID NO: 1883266 - RNA, 22 nt, Human
aggucauacuaucuacucuccu

SEQ ID NO: 1883267 - RNA, 21 nt, Human
aggucuugaacuccuggccuc

SEQ ID NO: 1883268 - RNA, 20 nt, Human
aggucuugaacuccuggccu

SEQ ID NO: 1883269 - RNA, 22 nt, Human
aggucuugaacuccuggccuca

SEQ ID NO: 1883270 - RNA, 17 nt, Human
agguaugcaaucaaauc

SEQ ID NO: 1883271 - RNA, 20 nt, Human
agguaugaccuucuaggaag

SEQ ID NO: 1883272 - RNA, 23 nt, Human
agguaugaccuucuaggaagcuc

SEQ ID NO: 1883273 - RNA, 22 nt, Human
agguaugaccuucuaggaagcu

SEQ ID NO: 1883274 - RNA, 23 nt, Human
agguagcuuugagguggaagagg

SEQ ID NO: 1883275 - RNA, 20 nt, Human
aggguuuauguuuaggaugu

SEQ ID NO: 1883276 - RNA, 17 nt, Human
aggguugggcugguguc

SEQ ID NO: 1883277 - RNA, 14 nt, Human
aggguuggagcagu

SEQ ID NO: 1883278 - RNA, 20 nt, Human
agguagaccugucuccuggc

SEQ ID NO: 1883279 - RNA, 22 nt, Human
agguagaauuaucuaauuuaua

SEQ ID NO: 1883280 - RNA, 14 nt, Human
ugggaaucaagauu

SEQ ID NO: 1883281 - RNA, 15 nt, Human
ugggaauaccugugg

SEQ ID NO: 1883282 - RNA, 23 nt, Human
ugggaauaagugccaggauggaa

SEQ ID NO: 1883283 - RNA, 22 nt, Human
aggggacccccgcccccugccc

SEQ ID NO: 1883284 - RNA, 15 nt, Human
aggggacccccgccc

SEQ ID NO: 1883285 - RNA, 18 nt, Human
aggggacccccgcccccu

SEQ ID NO: 1883286 - RNA, 19 nt, Human
aggggacccccgcccccug

SEQ ID NO: 1883287 - RNA, 14 nt, Human
aggggacccccgcc

SEQ ID NO: 1883288 - RNA, 16 nt, Human
aggggauagagagaga

SEQ ID NO: 1883289 - RNA, 16 nt, Human
aggggaguugugucug

SEQ ID NO: 1883290 - RNA, 19 nt, Human
aggggagggucagccaggg

SEQ ID NO: 1883291 - RNA, 18 nt, Human
aggggagggucagccagg

SEQ ID NO: 1883292 - RNA, 15 nt, Human
aggggaggccuucca

SEQ ID NO: 1883293 - RNA, 13 nt, Human
agggggcugggac

SEQ ID NO: 1883294 - RNA, 19 nt, Human
aggggucgacuucgggcug

SEQ ID NO: 1883295 - RNA, 21 nt, Human
aggggucgacuucgggcuggc

SEQ ID NO: 1883296 - RNA, 14 nt, Human
aggggggaagauca

SEQ ID NO: 1883297 - RNA, 17 nt, Human
aggggggaagaucaggu

SEQ ID NO: 1883298 - RNA, 16 nt, Human
aggguaucaggugcug

SEQ ID NO: 1883299 - RNA, 18 nt, Human
aggguaucaggugcugcc

SEQ ID NO: 1883300 - RNA, 22 nt, Human
agggucuugguuccagccugcc

SEQ ID NO: 1883301 - RNA, 19 nt, Human
aggguacuaaggaaucuuu

SEQ ID NO: 1883302 - RNA, 13 nt, Human
ugguccacagggc

SEQ ID NO: 1883303 - RNA, 14 nt, Human
ugguccacagggca

SEQ ID NO: 1883304 - RNA, 15 nt, Human
ugguccacagggcac

SEQ ID NO: 1883305 - RNA, 21 nt, Human
ugguccacagggcaccugcca

SEQ ID NO: 1883306 - RNA, 15 nt, Human
ugguccauagagagc

SEQ ID NO: 1883307 - RNA, 16 nt, Human
ugguccauagagagca

SEQ ID NO: 1883308 - RNA, 14 nt, Human
ugguccagccuggu

SEQ ID NO: 1883309 - RNA, 17 nt, Human
ugguaauucuuauucuu

SEQ ID NO: 1883310 - RNA, 19 nt, Human
ugguaaacgcugucccuag

SEQ ID NO: 1883311 - RNA, 23 nt, Human
uggucaccaaaucagcugcuacu

SEQ ID NO: 1883312 - RNA, 21 nt, Human
uggucaccaaaucagcugcua

SEQ ID NO: 1883313 - RNA, 14 nt, Human
ugggugaaggcugg

SEQ ID NO: 1883314 - RNA, 15 nt, Human
ugggugaaggcuggc

SEQ ID NO: 1883315 - RNA, 16 nt, Human
ugggugaaggcuggca

SEQ ID NO: 1883316 - RNA, 14 nt, Human
uggguggaugccug

SEQ ID NO: 1883317 - RNA, 23 nt, Human
uggguggaugccugguggcagcu

SEQ ID NO: 1883318 - RNA, 20 nt, Human
agggugcaguaucaugcccu

SEQ ID NO: 1883319 - RNA, 15 nt, Human
ugggucugugugugu

SEQ ID NO: 1883320 - RNA, 13 nt, Human
ugggucugugugu

SEQ ID NO: 1883321 - RNA, 21 nt, Human
auaaguuucugggaccucagu

SEQ ID NO: 1883322 - RNA, 21 nt, Human
auaauacaccacuacauucug

SEQ ID NO: 1883323 - RNA, 23 nt, Human
auaauacaccacuacauucuguu

SEQ ID NO: 1883324 - RNA, 23 nt, Human
auaaguucuaguugcuuguaaaa

SEQ ID NO: 1883325 - RNA, 22 nt, Human
auaaguuaacuuccaauuuaca

SEQ ID NO: 1883326 - RNA, 22 nt, Human
auaagaaccuuuugagugccuu

SEQ ID NO: 1883327 - RNA, 11 nt, Human
uuaccucugau

SEQ ID NO: 1883328 - RNA, 21 nt, Human
uuaccucugauaccucaaccc

SEQ ID NO: 1883329 - RNA, 23 nt, Human
auaagaaccuuuugagugccuua

SEQ ID NO: 1883330 - RNA, 17 nt, Human
auaaguuaacuuccaau

SEQ ID NO: 1883331 - RNA, 14 nt, Human
auaaugaauacuuu

SEQ ID NO: 1883332 - RNA, 14 nt, Human
auaauucuacuuug

SEQ ID NO: 1883333 - RNA, 19 nt, Human
auaauacaguaucucaggg

SEQ ID NO: 1883334 - RNA, 18 nt, Human
auaaucaucucugucaca

SEQ ID NO: 1883335 - RNA, 23 nt, Human
uuagauggauucuccacucaguu

SEQ ID NO: 1883336 - RNA, 16 nt, Human
uuagauggauucucca

SEQ ID NO: 1883337 - RNA, 17 nt, Human
uuagauggauucuccac

SEQ ID NO: 1883338 - RNA, 12 nt, Human
uuagcagacagg

SEQ ID NO: 1883339 - RNA, 21 nt, Human
uuagcagcagccuuuaaugca

SEQ ID NO: 1883340 - RNA, 19 nt, Human
auaauucugggaagcaaaa

SEQ ID NO: 1883341 - RNA, 15 nt, Human
auaauuguauauaug

SEQ ID NO: 1883342 - RNA, 15 nt, Human
auaaaugucuguuga

SEQ ID NO: 1883343 - RNA, 12 nt, Human
auaaaugucugu

SEQ ID NO: 1883344 - RNA, 12 nt, Human
auaaauaacuuu

SEQ ID NO: 1883345 - RNA, 12 nt, Human
auaaauaaaugu

SEQ ID NO: 1883346 - RNA, 13 nt, Human
auaaauaaaguuu

SEQ ID NO: 1883347 - RNA, 19 nt, Human
auaaauaaaguuuguugaa

SEQ ID NO: 1883348 - RNA, 13 nt, Human
auaaauuauaagu

SEQ ID NO: 1883349 - RNA, 15 nt, Human
auaaauguuaagaaa

SEQ ID NO: 1883350 - RNA, 16 nt, Human
auaaauguuaagaaaa

SEQ ID NO: 1883351 - RNA, 20 nt, Human
auaaccaaagcccaaagugg

SEQ ID NO: 1883352 - RNA, 16 nt, Human
auaaccaaucuacaau

SEQ ID NO: 1883353 - RNA, 20 nt, Human
auaaccaguguuguggauuu

SEQ ID NO: 1883354 - RNA, 20 nt, Human
auaacugcaaagugaaguug

SEQ ID NO: 1883355 - RNA, 13 nt, Human
auaacugcccagc

SEQ ID NO: 1883356 - RNA, 23 nt, Human
auaacugcccagcggacaguggc

SEQ ID NO: 1883357 - RNA, 23 nt, Human
uuaccauuuugggguacccacug

SEQ ID NO: 1883358 - RNA, 16 nt, Human
uuacccacacacagau

SEQ ID NO: 1883359 - RNA, 18 nt, Human
uuacaggaaguacuggag

SEQ ID NO: 1883360 - RNA, 22 nt, Human
uuacaggaaguacuggagaaaa

SEQ ID NO: 1883361 - RNA, 15 nt, Human
uuacaggaaguacug

SEQ ID NO: 1883362 - RNA, 16 nt, Human
uuacaggaaguacugg

SEQ ID NO: 1883363 - RNA, 19 nt, Human
auaacuggaggaauuuucu

SEQ ID NO: 1883364 - RNA, 12 nt, Human
auaaacuaaaga

SEQ ID NO: 1883365 - RNA, 17 nt, Human
auaaacuaaagaaaaau

SEQ ID NO: 1883366 - RNA, 18 nt, Human
auaaacgucuuaaauauu

SEQ ID NO: 1883367 - RNA, 16 nt, Human
auaaacgucuuaaaua

SEQ ID NO: 1883368 - RNA, 15 nt, Human
auaaacgucuuaaau

SEQ ID NO: 1883369 - RNA, 18 nt, Human
auaaacuggcagcucagc

SEQ ID NO: 1883370 - RNA, 15 nt, Human
auaaacuuuaccuuu

SEQ ID NO: 1883371 - RNA, 13 nt, Human
auaaacuuuaccu

SEQ ID NO: 1883372 - RNA, 22 nt, Human
auaaagugcugcggagcaagag

SEQ ID NO: 1883373 - RNA, 23 nt, Human
auaaagugcugcggagcaagagg

SEQ ID NO: 1883374 - RNA, 24 nt, Human
auaaagugcugcggagcaagagga

SEQ ID NO: 1883375 - RNA, 13 nt, Human
auaaauaaaacau

SEQ ID NO: 1883376 - RNA, 23 nt, Human
auaaacacucuugaaaaaugcau

SEQ ID NO: 1883377 - RNA, 18 nt, Human
auaaacacucuugaaaaa

SEQ ID NO: 1883378 - RNA, 22 nt, Human
auaaacauuuguagcauccucu

SEQ ID NO: 1883379 - RNA, 16 nt, Human
auaaaccgaacugaug

SEQ ID NO: 1883380 - RNA, 17 nt, Human
uuauauauguauuuaua

SEQ ID NO: 1883381 - RNA, 14 nt, Human
uuauauauguauuu

SEQ ID NO: 1883382 - RNA, 22 nt, Human
uuauauauauuuuuuucugaaa

SEQ ID NO: 1883383 - RNA, 19 nt, Human
uuauauauauauauauuuc

SEQ ID NO: 1883384 - RNA, 21 nt, Human
uuauauagggaucaaccagcu

SEQ ID NO: 1883385 - RNA, 15 nt, Human
auacaaaagcaugug

SEQ ID NO: 1883386 - RNA, 13 nt, Human
auacaaaagcaug

SEQ ID NO: 1883387 - RNA, 12 nt, Human
auacaaaagcau

SEQ ID NO: 1883388 - RNA, 22 nt, Human
auacaaaaaaaaaaaaaaauua

SEQ ID NO: 1883389 - RNA, 20 nt, Human
auaauuuuuuucaauauuua

SEQ ID NO: 1883390 - RNA, 21 nt, Human
auaauuuuuuucaauauuuau

SEQ ID NO: 1883391 - RNA, 22 nt, Human
auaauuuuuuucaauauuuauu

SEQ ID NO: 1883392 - RNA, 14 nt, Human
uuagcaguaaaaua

SEQ ID NO: 1883393 - RNA, 16 nt, Human
uuagcaguaaaauagc

SEQ ID NO: 1883394 - RNA, 19 nt, Human
uuagcaguaaaauagcuga

SEQ ID NO: 1883395 - RNA, 10 nt, Human
uuagccugga

SEQ ID NO: 1883396 - RNA, 18 nt, Human
uuauacuuuguaaagaca

SEQ ID NO: 1883397 - RNA, 15 nt, Human
uuauagaauauuuau

SEQ ID NO: 1883398 - RNA, 23 nt, Human
uuauagaauauuuauuaccucug

SEQ ID NO: 1883399 - RNA, 21 nt, Human
uuauaccuguguauuuuuuaa

SEQ ID NO: 1883400 - RNA, 16 nt, Human
uuauacucuuucugua

SEQ ID NO: 1883401 - RNA, 14 nt, Human
uuauacuggcaugc

SEQ ID NO: 1883402 - RNA, 16 nt, Human
uuauagccgaaaugau

SEQ ID NO: 1883403 - RNA, 21 nt, Human
auacaguucggugagcuacaa

SEQ ID NO: 1883404 - RNA, 22 nt, Human
auacaggaaaagcugcugacag

SEQ ID NO: 1883405 - RNA, 20 nt, Human
auacaggaaaagcugcugac

SEQ ID NO: 1883406 - RNA, 19 nt, Human
auacaggaaaagcugcuga

SEQ ID NO: 1883407 - RNA, 14 nt, Human
auacaggaaaagcu

SEQ ID NO: 1883408 - RNA, 15 nt, Human
auacaaauuagaaaa

SEQ ID NO: 1883409 - RNA, 17 nt, Human
auacaaauuagaaaaug

SEQ ID NO: 1883410 - RNA, 14 nt, Human
auacaaauuagaaa

SEQ ID NO: 1883411 - RNA, 18 nt, Human
auacaaauuagaaaaugu

SEQ ID NO: 1883412 - RNA, 15 nt, Human
auacaacacaaagag

SEQ ID NO: 1883413 - RNA, 16 nt, Human
auacaacacaaagaga

SEQ ID NO: 1883414 - RNA, 20 nt, Human
auacauaaacaagaccacgu

SEQ ID NO: 1883415 - RNA, 21 nt, Human
auacauaucuuuauuaaucac

SEQ ID NO: 1883416 - RNA, 17 nt, Human
auacauucuguaauaca

SEQ ID NO: 1883417 - RNA, 16 nt, Human
auacauuugauaaagu

SEQ ID NO: 1883418 - RNA, 24 nt, Human
auaccaaauagcuucuguuuuguu

SEQ ID NO: 1883419 - RNA, 16 nt, Human
uuaucaaaacuuucuu

SEQ ID NO: 1883420 - RNA, 15 nt, Human
uuaucaaaacuuucu

SEQ ID NO: 1883421 - RNA, 15 nt, Human
uuaucaacaauagug

SEQ ID NO: 1883422 - RNA, 20 nt, Human
uuaucaagcuaauaaaauau

SEQ ID NO: 1883423 - RNA, 13 nt, Human
uuaucaagcuaau

SEQ ID NO: 1883424 - RNA, 23 nt, Human
uuaucaagaguugugacaacuuc

SEQ ID NO: 1883425 - RNA, 22 nt, Human
uuaucaagaguugugacaacuu

SEQ ID NO: 1883426 - RNA, 14 nt, Human
uuaucaacauuugu

SEQ ID NO: 1883427 - RNA, 23 nt, Human
uuaucagucauaacuaaauaaag

SEQ ID NO: 1883428 - RNA, 21 nt, Human
uuaucagucauaacuaaauaa

SEQ ID NO: 1883429 - RNA, 23 nt, Human
uuaucagucaauauuuuuagaua

SEQ ID NO: 1883430 - RNA, 14 nt, Human
uuaucagucaauau

SEQ ID NO: 1883431 - RNA, 15 nt, Human
uuaucagucaauauu

SEQ ID NO: 1883432 - RNA, 17 nt, Human
uuaucaugugaaaucau

SEQ ID NO: 1883433 - RNA, 18 nt, Human
uuaucaugugaaaucauu

SEQ ID NO: 1883434 - RNA, 20 nt, Human
uuaucaugugaaaucauuca

SEQ ID NO: 1883435 - RNA, 22 nt, Human
uuaucaugugaaaucauucauu

SEQ ID NO: 1883436 - RNA, 19 nt, Human
uuaucauggucucagucau

SEQ ID NO: 1883437 - RNA, 19 nt, Human
auaccagccaguaaauggg

SEQ ID NO: 1883438 - RNA, 21 nt, Human
auacuaaccagcagaaaugcc

SEQ ID NO: 1883439 - RNA, 20 nt, Human
auacuacaguuuguuaguau

SEQ ID NO: 1883440 - RNA, 16 nt, Human
auacuacaguuuguua

SEQ ID NO: 1883441 - RNA, 15 nt, Human
auacuacaguuuguu

SEQ ID NO: 1883442 - RNA, 13 nt, Human
auacuacaguuug

SEQ ID NO: 1883443 - RNA, 14 nt, Human
auacuaccuugaaa

SEQ ID NO: 1883444 - RNA, 15 nt, Human
auacuaccuugaaaa

SEQ ID NO: 1883445 - RNA, 17 nt, Human
auacuaccuugaaaaua

SEQ ID NO: 1883446 - RNA, 16 nt, Human
uguuguaaacauuucu

SEQ ID NO: 1883447 - RNA, 13 nt, Human
uguugucagcuga

SEQ ID NO: 1883448 - RNA, 13 nt, Human
uguugucaccuuc

SEQ ID NO: 1883449 - RNA, 13 nt, Human
uguugggccagga

SEQ ID NO: 1883450 - RNA, 18 nt, Human
uguugggagugaggaugu

SEQ ID NO: 1883451 - RNA, 16 nt, Human
uguugggccaggagcc

SEQ ID NO: 1883452 - RNA, 19 nt, Human
aguucgagaccagccuggc

SEQ ID NO: 1883453 - RNA, 21 nt, Human
aguuauuuuuauuuauuuaaa

SEQ ID NO: 1883454 - RNA, 17 nt, Human
aguuccuagccaccgcc

SEQ ID NO: 1883455 - RNA, 21 nt, Human
aguucgaugggcccaauucuu

SEQ ID NO: 1883456 - RNA, 17 nt, Human
aguucgagaccagccug

SEQ ID NO: 1883457 - RNA, 20 nt, Human
aguuauuauauuuacaaaug

SEQ ID NO: 1883458 - RNA, 17 nt, Human
aguuaucuaaaagaaau

SEQ ID NO: 1883459 - RNA, 20 nt, Human
uguucuuuccaaaguacacu

SEQ ID NO: 1883460 - RNA, 18 nt, Human
uguucuuuccaaaguaca

SEQ ID NO: 1883461 - RNA, 17 nt, Human
aguguuuaacuugucaa

SEQ ID NO: 1883462 - RNA, 17 nt, Human
aguuacccaaauuaaga

SEQ ID NO: 1883463 - RNA, 18 nt, Human
aguuacccaaauuaagag

SEQ ID NO: 1883464 - RNA, 17 nt, Human
aguuagggaauggcaca

SEQ ID NO: 1883465 - RNA, 16 nt, Human
aguuacuagguaacuu

SEQ ID NO: 1883466 - RNA, 18 nt, Human
uguuauuuuuuaauuauu

SEQ ID NO: 1883467 - RNA, 14 nt, Human
uguucaaacauuua

SEQ ID NO: 1883468 - RNA, 19 nt, Human
uguucccauccucuucuuu

SEQ ID NO: 1883469 - RNA, 20 nt, Human
uguucccauguagcccccug

SEQ ID NO: 1883470 - RNA, 20 nt, Human
uguuauguagugugcuuuuu

SEQ ID NO: 1883471 - RNA, 17 nt, Human
aguguacagucuuguau

SEQ ID NO: 1883472 - RNA, 23 nt, Human
aguguacauggaauaacauguaa

SEQ ID NO: 1883473 - RNA, 16 nt, Human
aguguaccauuugccu

SEQ ID NO: 1883474 - RNA, 19 nt, Human
aguguagcauccuaaagau

SEQ ID NO: 1883475 - RNA, 13 nt, Human
uguucugggacac

SEQ ID NO: 1883476 - RNA, 12 nt, Human
uguucugggaca

SEQ ID NO: 1883477 - RNA, 14 nt, Human
uguuccccagagaa

SEQ ID NO: 1883478 - RNA, 13 nt, Human
uguuccccagaga

SEQ ID NO: 1883479 - RNA, 15 nt, Human
uguucugggacacag

SEQ ID NO: 1883480 - RNA, 14 nt, Human
uguucugggacaca

SEQ ID NO: 1883481 - RNA, 16 nt, Human
uguucuuaauucuuag

SEQ ID NO: 1883482 - RNA, 14 nt, Human
uguucuuaauucuu

SEQ ID NO: 1883483 - RNA, 16 nt, Human
uguucuuaagacguga

SEQ ID NO: 1883484 - RNA, 18 nt, Human
uguucuugguuuguaaau

SEQ ID NO: 1883485 - RNA, 17 nt, Human
uguucuugguuuguaaa

SEQ ID NO: 1883486 - RNA, 14 nt, Human
uguucuuuccaaag

SEQ ID NO: 1883487 - RNA, 13 nt, Human
uguucuuuccaaa

SEQ ID NO: 1883488 - RNA, 19 nt, Human
uguucuugguuuguaaauu

SEQ ID NO: 1883489 - RNA, 16 nt, Human
aguggugcgaucuggg

SEQ ID NO: 1883490 - RNA, 21 nt, Human
agugguuccuaauccucuagg

SEQ ID NO: 1883491 - RNA, 19 nt, Human
agugggugaauaauacagu

SEQ ID NO: 1883492 - RNA, 14 nt, Human
agugggucccagau

SEQ ID NO: 1883493 - RNA, 16 nt, Human
aguguacagucuugua

SEQ ID NO: 1883494 - RNA, 15 nt, Human
aguguacagucuugu

SEQ ID NO: 1883495 - RNA, 13 nt, Human
aguguacagucuu

SEQ ID NO: 1883496 - RNA, 21 nt, Human
aguguacauggaauaacaugu

SEQ ID NO: 1883497 - RNA, 22 nt, Human
aguguacauggaauaacaugua

SEQ ID NO: 1883498 - RNA, 13 nt, Human
aguggcagcugcu

SEQ ID NO: 1883499 - RNA, 12 nt, Human
aguggcagcugc

SEQ ID NO: 1883500 - RNA, 20 nt, Human
aguggcagcugcuuuugucu

SEQ ID NO: 1883501 - RNA, 14 nt, Human
aguggcagcugcuu

SEQ ID NO: 1883502 - RNA, 17 nt, Human
aguggcaggacaggaaa

SEQ ID NO: 1883503 - RNA, 13 nt, Human
aguggcaggacag

SEQ ID NO: 1883504 - RNA, 16 nt, Human
aguggcaggacaggaa

SEQ ID NO: 1883505 - RNA, 18 nt, Human
agugggggaucacagccu

SEQ ID NO: 1883506 - RNA, 13 nt, Human
agugggugaauaa

SEQ ID NO: 1883507 - RNA, 18 nt, Human
agugggugaauaauacag

SEQ ID NO: 1883508 - RNA, 19 nt, Human
agugggggaguggccacag

SEQ ID NO: 1883509 - RNA, 20 nt, Human
agugggggaguggccacaga

SEQ ID NO: 1883510 - RNA, 13 nt, Human
aguggcauaaaaa

SEQ ID NO: 1883511 - RNA, 14 nt, Human
aguucuugugccau

SEQ ID NO: 1883512 - RNA, 13 nt, Human
aguucuugugcca

SEQ ID NO: 1883513 - RNA, 12 nt, Human
aguucuugugcc

SEQ ID NO: 1883514 - RNA, 14 nt, Human
aguugauagcacag

SEQ ID NO: 1883515 - RNA, 16 nt, Human
aguucuuugggccaga

SEQ ID NO: 1883516 - RNA, 17 nt, Human
aguucuuugggccagac

SEQ ID NO: 1883517 - RNA, 15 nt, Human
aguucuuugggccag

SEQ ID NO: 1883518 - RNA, 15 nt, Human
aguugauagcacaga

SEQ ID NO: 1883519 - RNA, 19 nt, Human
aguugauagcacagacccu

SEQ ID NO: 1883520 - RNA, 20 nt, Human
aguugauagcacagacccug

SEQ ID NO: 1883521 - RNA, 21 nt, Human
aguugauagcacagacccugc

SEQ ID NO: 1883522 - RNA, 22 nt, Human
aguugauagcacagacccugcc

SEQ ID NO: 1883523 - RNA, 23 nt, Human
aguugauagcacagacccugccc

SEQ ID NO: 1883524 - RNA, 18 nt, Human
aguucuuugggccagaca

SEQ ID NO: 1883525 - RNA, 19 nt, Human
aguucuuugggccagacau

SEQ ID NO: 1883526 - RNA, 13 nt, Human
aguugauucagcu

SEQ ID NO: 1883527 - RNA, 23 nt, Human
aguugaucuggaacccagacuca

SEQ ID NO: 1883528 - RNA, 13 nt, Human
aguugaucuggaa

SEQ ID NO: 1883529 - RNA, 15 nt, Human
aguugaucuggaacc

SEQ ID NO: 1883530 - RNA, 17 nt, Human
aguugaucuggaaccca

SEQ ID NO: 1883531 - RNA, 18 nt, Human
aguugaucuggaacccag

SEQ ID NO: 1883532 - RNA, 19 nt, Human
aguugaucuggaacccaga

SEQ ID NO: 1883533 - RNA, 20 nt, Human
aguugaucuggaacccagac

SEQ ID NO: 1883534 - RNA, 21 nt, Human
aguugaucuggaacccagacu

SEQ ID NO: 1883535 - RNA, 19 nt, Human
aguugcaacuuuguauaaa

SEQ ID NO: 1883536 - RNA, 23 nt, Human
aguugauucagcucugcaagaau

SEQ ID NO: 1883537 - RNA, 14 nt, Human
aguugauucagcuc

SEQ ID NO: 1883538 - RNA, 15 nt, Human
aguugauucagcucu

SEQ ID NO: 1883539 - RNA, 17 nt, Human
aguugauucagcucugc

SEQ ID NO: 1883540 - RNA, 18 nt, Human
aguugauucagcucugca

SEQ ID NO: 1883541 - RNA, 20 nt, Human
uguuugccuucuacuuuuaa

SEQ ID NO: 1883542 - RNA, 15 nt, Human
uguuuggggaugaga

SEQ ID NO: 1883543 - RNA, 19 nt, Human
uguuuggggaugagaaagg

SEQ ID NO: 1883544 - RNA, 22 nt, Human
uguuuuaauuuauacuggcaug

SEQ ID NO: 1883545 - RNA, 14 nt, Human
uguugucagcugaa

SEQ ID NO: 1883546 - RNA, 12 nt, Human
uguugucccuuc

SEQ ID NO: 1883547 - RNA, 13 nt, Human
uguugucccuucu

SEQ ID NO: 1883548 - RNA, 16 nt, Human
uguuugccucugccuc

SEQ ID NO: 1883549 - RNA, 14 nt, Human
uguuugccucugcc

SEQ ID NO: 1883550 - RNA, 15 nt, Human
uguuugcaucugaaa

SEQ ID NO: 1883551 - RNA, 15 nt, Human
uguuuucaguguaca

SEQ ID NO: 1883552 - RNA, 17 nt, Human
uguuuucaguguacaug

SEQ ID NO: 1883553 - RNA, 16 nt, Human
uguuuuccgugaaaac

SEQ ID NO: 1883554 - RNA, 19 nt, Human
uguuuuccgugaaaacgga

SEQ ID NO: 1883555 - RNA, 14 nt, Human
uguuuuccucccuu

SEQ ID NO: 1883556 - RNA, 21 nt, Human
uguuuuccucccuucugcuac

SEQ ID NO: 1883557 - RNA, 22 nt, Human
uguuuuccucccuucugcuacu

SEQ ID NO: 1883558 - RNA, 15 nt, Human
uguuuucucuugaga

SEQ ID NO: 1883559 - RNA, 23 nt, Human
uguuuuccucccuucugcuacug

SEQ ID NO: 1883560 - RNA, 16 nt, Human
aguucucuccuucuuc

SEQ ID NO: 1883561 - RNA, 20 nt, Human
aguucucuucacucaaggau

SEQ ID NO: 1883562 - RNA, 13 nt, Human
aguucucuccuuc

SEQ ID NO: 1883563 - RNA, 12 nt, Human
aguucucuccuu

SEQ ID NO: 1883564 - RNA, 19 nt, Human
aguuuccuuccagcccaga

SEQ ID NO: 1883565 - RNA, 12 nt, Human
aguuuccugaaa

SEQ ID NO: 1883566 - RNA, 15 nt, Human
aguuucguuuucaaa

SEQ ID NO: 1883567 - RNA, 16 nt, Human
aguuucguuuucaaaa

SEQ ID NO: 1883568 - RNA, 21 nt, Human
aguuucuccaagcaggacaug

SEQ ID NO: 1883569 - RNA, 13 nt, Human
aguuucuccaagc

SEQ ID NO: 1883570 - RNA, 15 nt, Human
aguuucuccaagcag

SEQ ID NO: 1883571 - RNA, 16 nt, Human
uuaaauucuugcaaag

SEQ ID NO: 1883572 - RNA, 23 nt, Human
uuaaauucuccaguuuuuuguua

SEQ ID NO: 1883573 - RNA, 13 nt, Human
uuaaauucuugca

SEQ ID NO: 1883574 - RNA, 15 nt, Human
aguuuauuuuaagac

SEQ ID NO: 1883575 - RNA, 15 nt, Human
aguuucaaccaugaa

SEQ ID NO: 1883576 - RNA, 20 nt, Human
aguuuuaucauuuucaaaau

SEQ ID NO: 1883577 - RNA, 14 nt, Human
aguuuuaucauuuu

SEQ ID NO: 1883578 - RNA, 15 nt, Human
aguuuuaucauuuuc

SEQ ID NO: 1883579 - RNA, 22 nt, Human
aguuuucacucuuauugcccac

SEQ ID NO: 1883580 - RNA, 21 nt, Human
aguuuucaagucaaauuaaua

SEQ ID NO: 1883581 - RNA, 22 nt, Human
aguuuucaagucaaauuaauaa

SEQ ID NO: 1883582 - RNA, 17 nt, Human
aguuuucaccucgaauu

SEQ ID NO: 1883583 - RNA, 18 nt, Human
aguuuucccuugaggaaa

SEQ ID NO: 1883584 - RNA, 20 nt, Human
aguuuucccuugaggaaaca

SEQ ID NO: 1883585 - RNA, 22 nt, Human
aguugcauagguuuaauaauuu

SEQ ID NO: 1883586 - RNA, 20 nt, Human
aguugccagucaccccggcc

SEQ ID NO: 1883587 - RNA, 21 nt, Human
uuaaaaaaauugguuggagaa

SEQ ID NO: 1883588 - RNA, 17 nt, Human
uuaaaacaacacucaca

SEQ ID NO: 1883589 - RNA, 20 nt, Human
uuaaaaaugguuuaaauggu

SEQ ID NO: 1883590 - RNA, 18 nt, Human
uuaaaaaguggaaaaaua

SEQ ID NO: 1883591 - RNA, 22 nt, Human
uuaaauaaugugaaacuggauu

SEQ ID NO: 1883592 - RNA, 19 nt, Human
uuaaauaaugugaaacugg

SEQ ID NO: 1883593 - RNA, 21 nt, Human
uuaaauaaugugaaacuggau

SEQ ID NO: 1883594 - RNA, 20 nt, Human
uuaaauaaugugaaacugga

SEQ ID NO: 1883595 - RNA, 13 nt, Human
uuaaauaaaucau

SEQ ID NO: 1883596 - RNA, 15 nt, Human
uuaaauaaaucauaa

SEQ ID NO: 1883597 - RNA, 17 nt, Human
uuaaaccgccaaggcug

SEQ ID NO: 1883598 - RNA, 17 nt, Human
agccagaggacugugau

SEQ ID NO: 1883599 - RNA, 13 nt, Human
agccagaggacug

SEQ ID NO: 1883600 - RNA, 14 nt, Human
agccagaggacugu

SEQ ID NO: 1883601 - RNA, 10 nt, Human
agccagagga

SEQ ID NO: 1883602 - RNA, 11 nt, Human
agccagaggag

SEQ ID NO: 1883603 - RNA, 19 nt, Human
agccacugcaccgggccac

SEQ ID NO: 1883604 - RNA, 18 nt, Human
agccacugcaccgggcca

SEQ ID NO: 1883605 - RNA, 20 nt, Human
agccacugcaccgggccaca

SEQ ID NO: 1883606 - RNA, 16 nt, Human
agccacugcaccgggc

SEQ ID NO: 1883607 - RNA, 15 nt, Human
agccacgguguucug

SEQ ID NO: 1883608 - RNA, 20 nt, Human
ugauuaaccacuucagcuga

SEQ ID NO: 1883609 - RNA, 19 nt, Human
ugauuaaauucuugcaaag

SEQ ID NO: 1883610 - RNA, 15 nt, Human
ugauggugcaaugac

SEQ ID NO: 1883611 - RNA, 13 nt, Human
ugauggugcaaug

SEQ ID NO: 1883612 - RNA, 20 nt, Human
ugauuaaauucuugcaaagu

SEQ ID NO: 1883613 - RNA, 19 nt, Human
ugauuaaccacuucagcug

SEQ ID NO: 1883614 - RNA, 18 nt, Human
ugaugaacucuuaaucaa

SEQ ID NO: 1883615 - RNA, 16 nt, Human
ugauccuggaggccca

SEQ ID NO: 1883616 - RNA, 17 nt, Human
ugauccuggaggcccag

SEQ ID NO: 1883617 - RNA, 18 nt, Human
ugauccuggaggcccagu

SEQ ID NO: 1883618 - RNA, 14 nt, Human
ugaugaccaaaguc

SEQ ID NO: 1883619 - RNA, 14 nt, Human
ugaugacucaagau

SEQ ID NO: 1883620 - RNA, 15 nt, Human
ugaugacucaagauu

SEQ ID NO: 1883621 - RNA, 22 nt, Human
ugaugacucaagauucccagga

SEQ ID NO: 1883622 - RNA, 21 nt, Human
ugauccucccaccucagccuc

SEQ ID NO: 1883623 - RNA, 16 nt, Human
ugauccucccaccuca

SEQ ID NO: 1883624 - RNA, 22 nt, Human
ugauccucccaccucagccucc

SEQ ID NO: 1883625 - RNA, 14 nt, Human
ugauccuggaggcc

SEQ ID NO: 1883626 - RNA, 15 nt, Human
ugauccuggaggccc

SEQ ID NO: 1883627 - RNA, 15 nt, Human
ugauccucccaccuc

SEQ ID NO: 1883628 - RNA, 16 nt, Human
ugauccuaguuccacc

SEQ ID NO: 1883629 - RNA, 16 nt, Human
agcaccugaacaguuu

SEQ ID NO: 1883630 - RNA, 13 nt, Human
ugaugagaggaaa

SEQ ID NO: 1883631 - RNA, 14 nt, Human
ugaugagaggaaau

SEQ ID NO: 1883632 - RNA, 15 nt, Human
ugaugagaggaaauc

SEQ ID NO: 1883633 - RNA, 16 nt, Human
ugaugagaggaaauca

SEQ ID NO: 1883634 - RNA, 23 nt, Human
ugaugcuucuucagagacuccug

SEQ ID NO: 1883635 - RNA, 23 nt, Human
ugaugacucaagauucccaggag

SEQ ID NO: 1883636 - RNA, 14 nt, Human
ugauggggcccugc

SEQ ID NO: 1883637 - RNA, 15 nt, Human
ugauggggcccugcc

SEQ ID NO: 1883638 - RNA, 16 nt, Human
ugauggggcccugccu

SEQ ID NO: 1883639 - RNA, 19 nt, Human
ugauggggcccugccuccu

SEQ ID NO: 1883640 - RNA, 14 nt, Human
ugaugggauuuggu

SEQ ID NO: 1883641 - RNA, 15 nt, Human
ugauuucauuaauac

SEQ ID NO: 1883642 - RNA, 18 nt, Human
ugauuuccguuaaaauac

SEQ ID NO: 1883643 - RNA, 22 nt, Human
ugauuuccguuaaaauaccagc

SEQ ID NO: 1883644 - RNA, 21 nt, Human
ugauuucagcaccuacagugu

SEQ ID NO: 1883645 - RNA, 21 nt, Human
ugauuuaggagaagccaggaa

SEQ ID NO: 1883646 - RNA, 22 nt, Human
ugauuuaggagaagccaggaau

SEQ ID NO: 1883647 - RNA, 16 nt, Human
ugauuuaggagaagcc

SEQ ID NO: 1883648 - RNA, 20 nt, Human
ugauuuaggagaagccagga

SEQ ID NO: 1883649 - RNA, 17 nt, Human
ugauuuggggauauuuu

SEQ ID NO: 1883650 - RNA, 17 nt, Human
ugauuugaagaacaugu

SEQ ID NO: 1883651 - RNA, 19 nt, Human
ugauuugaagaacauguga

SEQ ID NO: 1883652 - RNA, 20 nt, Human
ugauuuggugaccaacuguc

SEQ ID NO: 1883653 - RNA, 13 nt, Human
ugauuuggugacc

SEQ ID NO: 1883654 - RNA, 19 nt, Human
ugauuuggugaccaacugu

SEQ ID NO: 1883655 - RNA, 23 nt, Human
ugauuuccuugaauguggcuuga

SEQ ID NO: 1883656 - RNA, 17 nt, Human
ugauuuccuugaaugug

SEQ ID NO: 1883657 - RNA, 19 nt, Human
ugauuuccuugaauguggc

SEQ ID NO: 1883658 - RNA, 13 nt, Human
ugauuuccuugaa

SEQ ID NO: 1883659 - RNA, 14 nt, Human
ugauuuccuugaau

SEQ ID NO: 1883660 - RNA, 15 nt, Human
ugauuuccuugaaug

SEQ ID NO: 1883661 - RNA, 16 nt, Human
ugauuuccuugaaugu

SEQ ID NO: 1883662 - RNA, 15 nt, Human
agcccagccacggac

SEQ ID NO: 1883663 - RNA, 11 nt, Human
agcccagccac

SEQ ID NO: 1883664 - RNA, 17 nt, Human
agcccagcugggucagg

SEQ ID NO: 1883665 - RNA, 19 nt, Human
agcccagcugggucaggca

SEQ ID NO: 1883666 - RNA, 20 nt, Human
agcccagcugggucaggcag

SEQ ID NO: 1883667 - RNA, 21 nt, Human
agcccagcugggucaggcagg

SEQ ID NO: 1883668 - RNA, 14 nt, Human
agcccaggaaaggc

SEQ ID NO: 1883669 - RNA, 21 nt, Human
ugauucauaaugacuuaagca

SEQ ID NO: 1883670 - RNA, 16 nt, Human
ugauucauaguaacuu

SEQ ID NO: 1883671 - RNA, 18 nt, Human
ugauucauaguaacuucu

SEQ ID NO: 1883672 - RNA, 18 nt, Human
agcccaggaaaggcucca

SEQ ID NO: 1883673 - RNA, 16 nt, Human
ugauucauaaugacuu

SEQ ID NO: 1883674 - RNA, 13 nt, Human
ugauucuccugcc

SEQ ID NO: 1883675 - RNA, 12 nt, Human
ugauuccuuccu

SEQ ID NO: 1883676 - RNA, 23 nt, Human
ugauucccaagcucugcuccucu

SEQ ID NO: 1883677 - RNA, 22 nt, Human
ugauucccaagcucugcuccuc

SEQ ID NO: 1883678 - RNA, 19 nt, Human
ugauucauaguaacuucuu

SEQ ID NO: 1883679 - RNA, 14 nt, Human
ugauuccuuccugu

SEQ ID NO: 1883680 - RNA, 21 nt, Human
agccaguaaaugggggugcau

SEQ ID NO: 1883681 - RNA, 22 nt, Human
agccaguaaaugggggugcauu

SEQ ID NO: 1883682 - RNA, 18 nt, Human
agccaucaaaaugcuuuu

SEQ ID NO: 1883683 - RNA, 13 nt, Human
agccaguaaaugg

SEQ ID NO: 1883684 - RNA, 15 nt, Human
agccagggccugcga

SEQ ID NO: 1883685 - RNA, 14 nt, Human
agccagcucccucu

SEQ ID NO: 1883686 - RNA, 15 nt, Human
agccagcucccucua

SEQ ID NO: 1883687 - RNA, 17 nt, Human
agccagcucccucuauu

SEQ ID NO: 1883688 - RNA, 19 nt, Human
agccagcucccucuauuua

SEQ ID NO: 1883689 - RNA, 22 nt, Human
agccagcgggaauggcagcugc

SEQ ID NO: 1883690 - RNA, 22 nt, Human
agccagcucccucuauuuaugu

SEQ ID NO: 1883691 - RNA, 15 nt, Human
agcccacuucugcca

SEQ ID NO: 1883692 - RNA, 14 nt, Human
agcccacuucugcc

SEQ ID NO: 1883693 - RNA, 13 nt, Human
agcccacuucugc

SEQ ID NO: 1883694 - RNA, 15 nt, Human
agcccacuguccugg

SEQ ID NO: 1883695 - RNA, 17 nt, Human
agcccacuguccugggc

SEQ ID NO: 1883696 - RNA, 18 nt, Human
agcccacuguccugggcc

SEQ ID NO: 1883697 - RNA, 19 nt, Human
agcccacuguccugggccu

SEQ ID NO: 1883698 - RNA, 20 nt, Human
agcccacuguccugggccug

SEQ ID NO: 1883699 - RNA, 22 nt, Human
agcccacuguccugggccugca

SEQ ID NO: 1883700 - RNA, 23 nt, Human
agcccacuguccugggccugcag

SEQ ID NO: 1883701 - RNA, 14 nt, Human
agcccacuguacuu

SEQ ID NO: 1883702 - RNA, 16 nt, Human
agcccacuguacuugc

SEQ ID NO: 1883703 - RNA, 14 nt, Human
agcccacuguccug

SEQ ID NO: 1883704 - RNA, 21 nt, Human
agccaugagaugauacaucca

SEQ ID NO: 1883705 - RNA, 19 nt, Human
ugcagaccccuuggccagc

SEQ ID NO: 1883706 - RNA, 17 nt, Human
ugcagaccccuuggcca

SEQ ID NO: 1883707 - RNA, 14 nt, Human
ugcagacgcccaga

SEQ ID NO: 1883708 - RNA, 22 nt, Human
ugcagacaggcaagcaccuccu

SEQ ID NO: 1883709 - RNA, 15 nt, Human
ugcagaagacaguau

SEQ ID NO: 1883710 - RNA, 14 nt, Human
ugcagaagacagua

SEQ ID NO: 1883711 - RNA, 16 nt, Human
ugcacucuagccuggg

SEQ ID NO: 1883712 - RNA, 19 nt, Human
ugcacuccccugcugggug

SEQ ID NO: 1883713 - RNA, 16 nt, Human
ugcacuccccugcugg

SEQ ID NO: 1883714 - RNA, 17 nt, Human
ugcacuccccugcuggg

SEQ ID NO: 1883715 - RNA, 15 nt, Human
ugcacacauuuuuua

SEQ ID NO: 1883716 - RNA, 13 nt, Human
ugcacacauuuuu

SEQ ID NO: 1883717 - RNA, 12 nt, Human
ugcacacauuuu

SEQ ID NO: 1883718 - RNA, 11 nt, Human
ugcacacauuu

SEQ ID NO: 1883719 - RNA, 17 nt, Human
agccgagaucacgccac

SEQ ID NO: 1883720 - RNA, 21 nt, Human
agccgagauagccaaggccaa

SEQ ID NO: 1883721 - RNA, 20 nt, Human
agccgagauagccaaggcca

SEQ ID NO: 1883722 - RNA, 21 nt, Human
agcccuuagcagggaaacagc

SEQ ID NO: 1883723 - RNA, 23 nt, Human
agcccuguugacacaggucuuuc

SEQ ID NO: 1883724 - RNA, 17 nt, Human
agcccuguugacacagg

SEQ ID NO: 1883725 - RNA, 18 nt, Human
agcccuguugacacaggu

SEQ ID NO: 1883726 - RNA, 20 nt, Human
agcccuguugacacaggucu

SEQ ID NO: 1883727 - RNA, 21 nt, Human
agcccuguugacacaggucuu

SEQ ID NO: 1883728 - RNA, 17 nt, Human
agcccuugcauugcaga

SEQ ID NO: 1883729 - RNA, 16 nt, Human
agcccuuagcagggaa

SEQ ID NO: 1883730 - RNA, 17 nt, Human
ugcagacucuacagagg

SEQ ID NO: 1883731 - RNA, 16 nt, Human
ugcagacucuacagag

SEQ ID NO: 1883732 - RNA, 18 nt, Human
ugcagacucuacagaggc

SEQ ID NO: 1883733 - RNA, 23 nt, Human
agccucugaaaaccaauguucuc

SEQ ID NO: 1883734 - RNA, 13 nt, Human
agccucugcuccc

SEQ ID NO: 1883735 - RNA, 23 nt, Human
ugcagccucaaccuccugggcua

SEQ ID NO: 1883736 - RNA, 22 nt, Human
ugcagccucaaccuccugggcu

SEQ ID NO: 1883737 - RNA, 21 nt, Human
ugcagccucaaccuccugggc

SEQ ID NO: 1883738 - RNA, 20 nt, Human
ugcagccucaaccuccuggg

SEQ ID NO: 1883739 - RNA, 15 nt, Human
agccucugcucccca

SEQ ID NO: 1883740 - RNA, 16 nt, Human
agccucugcuccccag

SEQ ID NO: 1883741 - RNA, 18 nt, Human
agccgagaucacgccacu

SEQ ID NO: 1883742 - RNA, 19 nt, Human
agccucaaccuccugggcu

SEQ ID NO: 1883743 - RNA, 20 nt, Human
agccucaaccuccugggcua

SEQ ID NO: 1883744 - RNA, 17 nt, Human
agccucacaguccuuac

SEQ ID NO: 1883745 - RNA, 18 nt, Human
agccucacaguccuuacc

SEQ ID NO: 1883746 - RNA, 21 nt, Human
ugcaaaccaucauugaaaucu

SEQ ID NO: 1883747 - RNA, 20 nt, Human
ugcaauaaaucugacccagu

SEQ ID NO: 1883748 - RNA, 21 nt, Human
ugcaauaaaucugacccagug

SEQ ID NO: 1883749 - RNA, 23 nt, Human
ugcaauaaaucugacccagugcc

SEQ ID NO: 1883750 - RNA, 22 nt, Human
agccccauucugccugcccagg

SEQ ID NO: 1883751 - RNA, 21 nt, Human
agccccauucugccugcccag

SEQ ID NO: 1883752 - RNA, 18 nt, Human
agccccaaaacucuccuc

SEQ ID NO: 1883753 - RNA, 20 nt, Human
agccccauucugccugccca

SEQ ID NO: 1883754 - RNA, 16 nt, Human
agccccaaaacucucc

SEQ ID NO: 1883755 - RNA, 17 nt, Human
agccccaaaacucuccu

SEQ ID NO: 1883756 - RNA, 21 nt, Human
agcccaggccuccuacagcuu

SEQ ID NO: 1883757 - RNA, 23 nt, Human
agccccauucugccugcccaggc

SEQ ID NO: 1883758 - RNA, 13 nt, Human
agcccccccuucc

SEQ ID NO: 1883759 - RNA, 15 nt, Human
agcccccccuuccac

SEQ ID NO: 1883760 - RNA, 14 nt, Human
agcccccuggccuc

SEQ ID NO: 1883761 - RNA, 15 nt, Human
agcccccuggccucu

SEQ ID NO: 1883762 - RNA, 15 nt, Human
agcccgcggggacau

SEQ ID NO: 1883763 - RNA, 20 nt, Human
agcccgcggggacauuggga

SEQ ID NO: 1883764 - RNA, 16 nt, Human
agcccugguggcagug

SEQ ID NO: 1883765 - RNA, 15 nt, Human
agcccugguggcagu

SEQ ID NO: 1883766 - RNA, 14 nt, Human
agcccugguggcag

SEQ ID NO: 1883767 - RNA, 18 nt, Human
ugcacacaccagagccca

SEQ ID NO: 1883768 - RNA, 17 nt, Human
ugcacacaccagagccc

SEQ ID NO: 1883769 - RNA, 21 nt, Human
ugcacacaccagagcccaccu

SEQ ID NO: 1883770 - RNA, 22 nt, Human
ugcacacaccagagcccaccuu

SEQ ID NO: 1883771 - RNA, 21 nt, Human
agcuccccgcuucugccugca

SEQ ID NO: 1883772 - RNA, 20 nt, Human
agcuccccgcuucugccugc

SEQ ID NO: 1883773 - RNA, 23 nt, Human
agcuccuucuguccuacucugug

SEQ ID NO: 1883774 - RNA, 22 nt, Human
agcuccuucuguccuacucugu

SEQ ID NO: 1883775 - RNA, 19 nt, Human
agcuccagcucaccagccc

SEQ ID NO: 1883776 - RNA, 18 nt, Human
agcuccagcucaccagcc

SEQ ID NO: 1883777 - RNA, 21 nt, Human
agcuccagcucaccagcccca

SEQ ID NO: 1883778 - RNA, 23 nt, Human
agcucugcccauccugccccuga

SEQ ID NO: 1883779 - RNA, 17 nt, Human
agcucuggacagcccca

SEQ ID NO: 1883780 - RNA, 18 nt, Human
agcucuggacagccccac

SEQ ID NO: 1883781 - RNA, 21 nt, Human
agcucuggacagccccacccu

SEQ ID NO: 1883782 - RNA, 16 nt, Human
ugcccuaaugucugua

SEQ ID NO: 1883783 - RNA, 21 nt, Human
ugcccuccagcucuuuccucc

SEQ ID NO: 1883784 - RNA, 16 nt, Human
ugcccuccucucccau

SEQ ID NO: 1883785 - RNA, 12 nt, Human
ugcccuccucuc

SEQ ID NO: 1883786 - RNA, 14 nt, Human
ugcccuccucuccc

SEQ ID NO: 1883787 - RNA, 15 nt, Human
ugcccuccucuccca

SEQ ID NO: 1883788 - RNA, 21 nt, Human
ugcccuccccucucugcaccg

SEQ ID NO: 1883789 - RNA, 14 nt, Human
ugcccuccccucuc

SEQ ID NO: 1883790 - RNA, 17 nt, Human
ugcccuccccucucugc

SEQ ID NO: 1883791 - RNA, 17 nt, Human
agcuccagcucaccagc

SEQ ID NO: 1883792 - RNA, 13 nt, Human
agcuccagcucac

SEQ ID NO: 1883793 - RNA, 15 nt, Human
agcuccacccuggcc

SEQ ID NO: 1883794 - RNA, 17 nt, Human
agcuccacccuggccga

SEQ ID NO: 1883795 - RNA, 14 nt, Human
ugcccugcccaccu

SEQ ID NO: 1883796 - RNA, 17 nt, Human
agcuccaagcucccagg

SEQ ID NO: 1883797 - RNA, 18 nt, Human
agcuccaagcucccaggc

SEQ ID NO: 1883798 - RNA, 19 nt, Human
agcuccaagcucccaggca

SEQ ID NO: 1883799 - RNA, 22 nt, Human
ugccucccaucacccgcuaaga

SEQ ID NO: 1883800 - RNA, 21 nt, Human
ugccucaggaggcaggaccuu

SEQ ID NO: 1883801 - RNA, 16 nt, Human
ugccucaggccucugu

SEQ ID NO: 1883802 - RNA, 18 nt, Human
ugccucaggccucugugc

SEQ ID NO: 1883803 - RNA, 18 nt, Human
ugccucaggaggcaggac

SEQ ID NO: 1883804 - RNA, 17 nt, Human
ugccucagccuccugag

SEQ ID NO: 1883805 - RNA, 15 nt, Human
ugccucagcccugac

SEQ ID NO: 1883806 - RNA, 11 nt, Human
ugccucucugc

SEQ ID NO: 1883807 - RNA, 12 nt, Human
ugccucucugca

SEQ ID NO: 1883808 - RNA, 17 nt, Human
ugccucucucaggccaa

SEQ ID NO: 1883809 - RNA, 19 nt, Human
ugcccuuaccugccaggaa

SEQ ID NO: 1883810 - RNA, 20 nt, Human
ugccgcagcccugcagaggg

SEQ ID NO: 1883811 - RNA, 15 nt, Human
ugccucaccccuugc

SEQ ID NO: 1883812 - RNA, 17 nt, Human
agcucuucuccaggcug

SEQ ID NO: 1883813 - RNA, 16 nt, Human
agcucuucuccaggcu

SEQ ID NO: 1883814 - RNA, 15 nt, Human
agcucuucuccaggc

SEQ ID NO: 1883815 - RNA, 15 nt, Human
ugcccugugggcccc

SEQ ID NO: 1883816 - RNA, 18 nt, Human
ugcccugugggcccccaa

SEQ ID NO: 1883817 - RNA, 22 nt, Human
ugcccuuaccugccaggaagcc

SEQ ID NO: 1883818 - RNA, 12 nt, Human
ugcccugugcaa

SEQ ID NO: 1883819 - RNA, 22 nt, Human
agcugcuuuugucuaugggacu

SEQ ID NO: 1883820 - RNA, 13 nt, Human
agcugccuguuca

SEQ ID NO: 1883821 - RNA, 24 nt, Human
agcugcuuuugucuaugggacuca

SEQ ID NO: 1883822 - RNA, 23 nt, Human
agcugcuuuugucuaugggacuc

SEQ ID NO: 1883823 - RNA, 14 nt, Human
agcugccugugccu

SEQ ID NO: 1883824 - RNA, 19 nt, Human
ugccugcccaggccccugc

SEQ ID NO: 1883825 - RNA, 18 nt, Human
ugccugcccaggccccug

SEQ ID NO: 1883826 - RNA, 17 nt, Human
ugccugcccaggccccu

SEQ ID NO: 1883827 - RNA, 12 nt, Human
ugccucugccuc

SEQ ID NO: 1883828 - RNA, 11 nt, Human
ugccucugccu

SEQ ID NO: 1883829 - RNA, 21 nt, Human
ugccucucugcaggucccuaa

SEQ ID NO: 1883830 - RNA, 16 nt, Human
ugccucugacacacag

SEQ ID NO: 1883831 - RNA, 14 nt, Human
ugccucugacacac

SEQ ID NO: 1883832 - RNA, 15 nt, Human
ugccucucugcaggu

SEQ ID NO: 1883833 - RNA, 23 nt, Human
ugccucucugcaggucccuaaua

SEQ ID NO: 1883834 - RNA, 12 nt, Human
ugcauucuagua

SEQ ID NO: 1883835 - RNA, 20 nt, Human
ugcauuuaaaagauacaguu

SEQ ID NO: 1883836 - RNA, 11 nt, Human
ugcauucuccc

SEQ ID NO: 1883837 - RNA, 21 nt, Human
ugcauucucccuccuucccuu

SEQ ID NO: 1883838 - RNA, 18 nt, Human
ugcauuugaggucuguuc

SEQ ID NO: 1883839 - RNA, 19 nt, Human
ugcauuugaggucuguucu

SEQ ID NO: 1883840 - RNA, 22 nt, Human
agcgcuggccgggaccccgagc

SEQ ID NO: 1883841 - RNA, 20 nt, Human
agcggacaguggcaggacag

SEQ ID NO: 1883842 - RNA, 19 nt, Human
agcggacaucagcugguca

SEQ ID NO: 1883843 - RNA, 14 nt, Human
agcggacaguggca

SEQ ID NO: 1883844 - RNA, 15 nt, Human
agcggacaguggcag

SEQ ID NO: 1883845 - RNA, 16 nt, Human
agcggacaguggcagg

SEQ ID NO: 1883846 - RNA, 17 nt, Human
agcggacaguggcagga

SEQ ID NO: 1883847 - RNA, 16 nt, Human
agcgcuggccgggacc

SEQ ID NO: 1883848 - RNA, 18 nt, Human
agccuuccagggguggga

SEQ ID NO: 1883849 - RNA, 15 nt, Human
agccuugaacuuuga

SEQ ID NO: 1883850 - RNA, 22 nt, Human
agcgauucuucugcuucagccu

SEQ ID NO: 1883851 - RNA, 15 nt, Human
agccuugccagagau

SEQ ID NO: 1883852 - RNA, 17 nt, Human
agccuugccagagaucc

SEQ ID NO: 1883853 - RNA, 19 nt, Human
agccuugccagagauccaa

SEQ ID NO: 1883854 - RNA, 23 nt, Human
agccuugaccauucuccaccugc

SEQ ID NO: 1883855 - RNA, 13 nt, Human
agccuugccagag

SEQ ID NO: 1883856 - RNA, 14 nt, Human
agccuugccagaga

SEQ ID NO: 1883857 - RNA, 22 nt, Human
agccuugaacuuugaccucugc

SEQ ID NO: 1883858 - RNA, 16 nt, Human
agccuugaacuuugac

SEQ ID NO: 1883859 - RNA, 23 nt, Human
agccuugaacuuugaccucugca

SEQ ID NO: 1883860 - RNA, 22 nt, Human
agccuugaccauucuccaccug

SEQ ID NO: 1883861 - RNA, 20 nt, Human
agcggggacagcuccuucug

SEQ ID NO: 1883862 - RNA, 19 nt, Human
agcggggacagcuccuucu

SEQ ID NO: 1883863 - RNA, 23 nt, Human
agcggcuggcagcccaccccuca

SEQ ID NO: 1883864 - RNA, 20 nt, Human
agcgggaauggcagcugcca

SEQ ID NO: 1883865 - RNA, 21 nt, Human
agcggcuggacuuggagguag

SEQ ID NO: 1883866 - RNA, 22 nt, Human
agcggggacagcuccuucuguc

SEQ ID NO: 1883867 - RNA, 17 nt, Human
agcgggagccucccugc

SEQ ID NO: 1883868 - RNA, 13 nt, Human
agcggcuggcagc

SEQ ID NO: 1883869 - RNA, 18 nt, Human
ugccagcuuaucucaggg

SEQ ID NO: 1883870 - RNA, 14 nt, Human
ugccagagauccaa

SEQ ID NO: 1883871 - RNA, 21 nt, Human
ugcauuugaggucuguucuuu

SEQ ID NO: 1883872 - RNA, 20 nt, Human
ugcauuugaggucuguucuu

SEQ ID NO: 1883873 - RNA, 15 nt, Human
ugccagcugcacuga

SEQ ID NO: 1883874 - RNA, 20 nt, Human
ugcccuaaaguguauuuuuu

SEQ ID NO: 1883875 - RNA, 23 nt, Human
ugccccgaacauguuuuucuucu

SEQ ID NO: 1883876 - RNA, 12 nt, Human
ugccccauucuu

SEQ ID NO: 1883877 - RNA, 18 nt, Human
ugccccauucuuuuguaa

SEQ ID NO: 1883878 - RNA, 20 nt, Human
ugccccauccuccagcaggg

SEQ ID NO: 1883879 - RNA, 21 nt, Human
ugccccauccuccagcaggga

SEQ ID NO: 1883880 - RNA, 22 nt, Human
ugcccccgcauccccugccucc

SEQ ID NO: 1883881 - RNA, 18 nt, Human
ugcccccgcauccccugc

SEQ ID NO: 1883882 - RNA, 20 nt, Human
ugcccccgcauccccugccu

SEQ ID NO: 1883883 - RNA, 21 nt, Human
ugcccccgcauccccugccuc

SEQ ID NO: 1883884 - RNA, 18 nt, Human
ugcccaggccccugccac

SEQ ID NO: 1883885 - RNA, 17 nt, Human
ugcccaggccccugcca

SEQ ID NO: 1883886 - RNA, 15 nt, Human
ugcccaggccccugc

SEQ ID NO: 1883887 - RNA, 19 nt, Human
ugcccaacccuucccucac

SEQ ID NO: 1883888 - RNA, 17 nt, Human
ugcccaaagaugcagcc

SEQ ID NO: 1883889 - RNA, 20 nt, Human
ugcccaaagaugcagccggu

SEQ ID NO: 1883890 - RNA, 19 nt, Human
ugcccaaaguuuuauuuuu

SEQ ID NO: 1883891 - RNA, 14 nt, Human
ugccauuuugcauu

SEQ ID NO: 1883892 - RNA, 13 nt, Human
ugcccagccccuu

SEQ ID NO: 1883893 - RNA, 12 nt, Human
ugcccagccccu

SEQ ID NO: 1883894 - RNA, 16 nt, Human
ugcccagccccuucug

SEQ ID NO: 1883895 - RNA, 17 nt, Human
ugcccagccccuucuga

SEQ ID NO: 1883896 - RNA, 17 nt, Human
agcucaggugucccugc

SEQ ID NO: 1883897 - RNA, 15 nt, Human
agcuccaagaauuuc

SEQ ID NO: 1883898 - RNA, 22 nt, Human
agcuccaaccugcaaagaucug

SEQ ID NO: 1883899 - RNA, 15 nt, Human
agcuccaagcuccca

SEQ ID NO: 1883900 - RNA, 18 nt, Human
agcuccaagaauuucuag

SEQ ID NO: 1883901 - RNA, 16 nt, Human
agcuccaagcucccag

SEQ ID NO: 1883902 - RNA, 20 nt, Human
agcucagggccuggcucagg

SEQ ID NO: 1883903 - RNA, 14 nt, Human
agcucagggccugg

SEQ ID NO: 1883904 - RNA, 13 nt, Human
agcucaggaucuc

SEQ ID NO: 1883905 - RNA, 19 nt, Human
agcucagggccuggcucag

SEQ ID NO: 1883906 - RNA, 19 nt, Human
agcuauucaguaauaacuc

SEQ ID NO: 1883907 - RNA, 12 nt, Human
agcucagggccu

SEQ ID NO: 1883908 - RNA, 13 nt, Human
agcucagggccug

SEQ ID NO: 1883909 - RNA, 13 nt, Human
agcgugagccacu

SEQ ID NO: 1883910 - RNA, 21 nt, Human
agcuaggccuggccagaugca

SEQ ID NO: 1883911 - RNA, 17 nt, Human
agcuacccgcagaguuc

SEQ ID NO: 1883912 - RNA, 17 nt, Human
agcuaucguaaaauuaa

SEQ ID NO: 1883913 - RNA, 14 nt, Human
aggacugugaugcc

SEQ ID NO: 1883914 - RNA, 20 nt, Human
aggacugugaugcccugccc

SEQ ID NO: 1883915 - RNA, 21 nt, Human
aggacugugaugcccugcccu

SEQ ID NO: 1883916 - RNA, 20 nt, Human
aggacuuccuguccagcucc

SEQ ID NO: 1883917 - RNA, 19 nt, Human
aggacuuauuuaaacucug

SEQ ID NO: 1883918 - RNA, 21 nt, Human
aggacuuccuguccagcucca

SEQ ID NO: 1883919 - RNA, 18 nt, Human
aggacauugcggacagcc

SEQ ID NO: 1883920 - RNA, 17 nt, Human
aggacauugcggacagc

SEQ ID NO: 1883921 - RNA, 15 nt, Human
aggacauugcggaca

SEQ ID NO: 1883922 - RNA, 23 nt, Human
aggacauugcggacagccacggc

SEQ ID NO: 1883923 - RNA, 19 nt, Human
aggacauugcggacagcca

SEQ ID NO: 1883924 - RNA, 20 nt, Human
aggacugaauuaugaaacuu

SEQ ID NO: 1883925 - RNA, 19 nt, Human
aggacugaauuaugaaacu

SEQ ID NO: 1883926 - RNA, 17 nt, Human
aggacuuucugaagccu

SEQ ID NO: 1883927 - RNA, 11 nt, Human
aggagaaacug

SEQ ID NO: 1883928 - RNA, 23 nt, Human
aggacuuuucuuuguggcuuccu

SEQ ID NO: 1883929 - RNA, 17 nt, Human
aggagauuggaaggaac

SEQ ID NO: 1883930 - RNA, 17 nt, Human
aggagaaacuggaacuc

SEQ ID NO: 1883931 - RNA, 22 nt, Human
aggagccccgaggccuucucug

SEQ ID NO: 1883932 - RNA, 18 nt, Human
aggagcauuuuuuaaaaa

SEQ ID NO: 1883933 - RNA, 18 nt, Human
aggagcccugggaggcuc

SEQ ID NO: 1883934 - RNA, 14 nt, Human
aggagcagccacau

SEQ ID NO: 1883935 - RNA, 19 nt, Human
ugcuugggcuucauccucc

SEQ ID NO: 1883936 - RNA, 15 nt, Human
uggaaauauuaagaa

SEQ ID NO: 1883937 - RNA, 21 nt, Human
uggaaaggagccuaggccagg

SEQ ID NO: 1883938 - RNA, 22 nt, Human
uggaaaggagccuaggccaggu

SEQ ID NO: 1883939 - RNA, 21 nt, Human
ugcuuggaggaaggaaaccca

SEQ ID NO: 1883940 - RNA, 12 nt, Human
ugcuugggcuuc

SEQ ID NO: 1883941 - RNA, 16 nt, Human
ugcuugggcuucaucc

SEQ ID NO: 1883942 - RNA, 19 nt, Human
aggagcccugggaggcucu

SEQ ID NO: 1883943 - RNA, 19 nt, Human
aggauuuugauccaagcug

SEQ ID NO: 1883944 - RNA, 15 nt, Human
aggcaaaaauguaaa

SEQ ID NO: 1883945 - RNA, 19 nt, Human
aggaugcccaaagaugcag

SEQ ID NO: 1883946 - RNA, 20 nt, Human
aggaugaucuaggaagacuu

SEQ ID NO: 1883947 - RNA, 14 nt, Human
aggaugcccaaaga

SEQ ID NO: 1883948 - RNA, 17 nt, Human
aggcaacucaucuuagg

SEQ ID NO: 1883949 - RNA, 13 nt, Human
aggcaaaauugca

SEQ ID NO: 1883950 - RNA, 17 nt, Human
aggcaaaauugcaaauc

SEQ ID NO: 1883951 - RNA, 16 nt, Human
aggcaacauccaaaau

SEQ ID NO: 1883952 - RNA, 23 nt, Human
uggaauugauuugcauugaacac

SEQ ID NO: 1883953 - RNA, 22 nt, Human
uggaauuggguggggggcuuca

SEQ ID NO: 1883954 - RNA, 14 nt, Human
uggacccugaggcc

SEQ ID NO: 1883955 - RNA, 12 nt, Human
uggacccugagg

SEQ ID NO: 1883956 - RNA, 13 nt, Human
uggacccugaggc

SEQ ID NO: 1883957 - RNA, 18 nt, Human
uggacacagcucuucucc

SEQ ID NO: 1883958 - RNA, 16 nt, Human
uggacacagcucuucu

SEQ ID NO: 1883959 - RNA, 15 nt, Human
uggacacagcucuuc

SEQ ID NO: 1883960 - RNA, 14 nt, Human
uggacccagacaca

SEQ ID NO: 1883961 - RNA, 16 nt, Human
aggaugaucuaggaag

SEQ ID NO: 1883962 - RNA, 17 nt, Human
aggaugaucuaggaaga

SEQ ID NO: 1883963 - RNA, 18 nt, Human
aggaucuuuguggccaag

SEQ ID NO: 1883964 - RNA, 20 nt, Human
aggaucuuuguggccaagga

SEQ ID NO: 1883965 - RNA, 13 nt, Human
aggaucuuuugaa

SEQ ID NO: 1883966 - RNA, 13 nt, Human
aggaucuuugugg

SEQ ID NO: 1883967 - RNA, 15 nt, Human
aggaucuuuguggcc

SEQ ID NO: 1883968 - RNA, 16 nt, Human
aggaucuuuguggcca

SEQ ID NO: 1883969 - RNA, 17 nt, Human
aggaucuuuguggccaa

SEQ ID NO: 1883970 - RNA, 17 nt, Human
aggauccugagccagau

SEQ ID NO: 1883971 - RNA, 18 nt, Human
aggauccugagccagauu

SEQ ID NO: 1883972 - RNA, 21 nt, Human
aggaucucuugagccugggag

SEQ ID NO: 1883973 - RNA, 22 nt, Human
aggaucucuugagccugggagg

SEQ ID NO: 1883974 - RNA, 21 nt, Human
aggauacaaaagcaugugaga

SEQ ID NO: 1883975 - RNA, 18 nt, Human
aggauaauuagcaucuca

SEQ ID NO: 1883976 - RNA, 15 nt, Human
aggauccugagccag

SEQ ID NO: 1883977 - RNA, 16 nt, Human
aggauccugagccaga

SEQ ID NO: 1883978 - RNA, 20 nt, Human
uggaaauauuaagaaagacu

SEQ ID NO: 1883979 - RNA, 23 nt, Human
uggaaaugggcagagcagagacc

SEQ ID NO: 1883980 - RNA, 22 nt, Human
uggaaauuaggauguaaaucug

SEQ ID NO: 1883981 - RNA, 18 nt, Human
aggagcugccuuggcuca

SEQ ID NO: 1883982 - RNA, 19 nt, Human
aggagcugccuuggcucag

SEQ ID NO: 1883983 - RNA, 11 nt, Human
aggagcugcua

SEQ ID NO: 1883984 - RNA, 23 nt, Human
aggagcugccuuggcucagacau

SEQ ID NO: 1883985 - RNA, 21 nt, Human
aggagcugccuuggcucagac

SEQ ID NO: 1883986 - RNA, 22 nt, Human
aggagcugccuuggcucagaca

SEQ ID NO: 1883987 - RNA, 14 nt, Human
aggaggcaggaccu

SEQ ID NO: 1883988 - RNA, 13 nt, Human
aggagcugcuaua

SEQ ID NO: 1883989 - RNA, 19 nt, Human
aggagcugcuauagccugg

SEQ ID NO: 1883990 - RNA, 20 nt, Human
aggagcugcuauagccuggg

SEQ ID NO: 1883991 - RNA, 21 nt, Human
aggagcugcuauagccugggg

SEQ ID NO: 1883992 - RNA, 11 nt, Human
aggaauuuaaa

SEQ ID NO: 1883993 - RNA, 23 nt, Human
aggaauugacccacaagaaauga

SEQ ID NO: 1883994 - RNA, 23 nt, Human
aggaauuguguuuauaauuuuaa

SEQ ID NO: 1883995 - RNA, 15 nt, Human
aggaauuucccagga

SEQ ID NO: 1883996 - RNA, 17 nt, Human
aggaauuucccaggacc

SEQ ID NO: 1883997 - RNA, 18 nt, Human
aggaauuucccaggaccc

SEQ ID NO: 1883998 - RNA, 19 nt, Human
aggaauuucccaggacccu

SEQ ID NO: 1883999 - RNA, 20 nt, Human
aggaauuucccaggacccug

SEQ ID NO: 1884000 - RNA, 21 nt, Human
aggaauuucccaggacccuga

SEQ ID NO: 1884001 - RNA, 19 nt, Human
aggaaggaaacccagcucu

SEQ ID NO: 1884002 - RNA, 15 nt, Human
aggaaggagaggaga

SEQ ID NO: 1884003 - RNA, 18 nt, Human
aggaaggaaacccagcuc

SEQ ID NO: 1884004 - RNA, 17 nt, Human
aggaagccagcaggcuc

SEQ ID NO: 1884005 - RNA, 18 nt, Human
aggaagccagcaggcucu

SEQ ID NO: 1884006 - RNA, 14 nt, Human
aggaagccagcagg

SEQ ID NO: 1884007 - RNA, 15 nt, Human
aggaagccagcaggc

SEQ ID NO: 1884008 - RNA, 13 nt, Human
aggaagacuuugg

SEQ ID NO: 1884009 - RNA, 14 nt, Human
aggaagacuuugga

SEQ ID NO: 1884010 - RNA, 23 nt, Human
aggaagcacaugccucucucagg

SEQ ID NO: 1884011 - RNA, 24 nt, Human
aggaagcacaugccucucucaggc

SEQ ID NO: 1884012 - RNA, 16 nt, Human
ugcugagucugaaggc

SEQ ID NO: 1884013 - RNA, 17 nt, Human
ugcugagucugaaggcu

SEQ ID NO: 1884014 - RNA, 18 nt, Human
ugcugagucugaaggcug

SEQ ID NO: 1884015 - RNA, 21 nt, Human
ugcugagucugaaggcugggu

SEQ ID NO: 1884016 - RNA, 22 nt, Human
ugcugagucugaaggcuggguu

SEQ ID NO: 1884017 - RNA, 23 nt, Human
ugcugagucugaaggcuggguuc

SEQ ID NO: 1884018 - RNA, 13 nt, Human
aggaagacuucau

SEQ ID NO: 1884019 - RNA, 19 nt, Human
aggaagacuucaucccucu

SEQ ID NO: 1884020 - RNA, 18 nt, Human
agcugggacuacaggcac

SEQ ID NO: 1884021 - RNA, 16 nt, Human
agcugggacuacaggc

SEQ ID NO: 1884022 - RNA, 19 nt, Human
agcugggacuacaggcacc

SEQ ID NO: 1884023 - RNA, 22 nt, Human
ugcuauuguagagccagagguc

SEQ ID NO: 1884024 - RNA, 16 nt, Human
ugcuccagcuguucag

SEQ ID NO: 1884025 - RNA, 19 nt, Human
ugcuccagcuguucagcug

SEQ ID NO: 1884026 - RNA, 20 nt, Human
ugcuccagcuguucagcugg

SEQ ID NO: 1884027 - RNA, 12 nt, Human
ugcuccagaccu

SEQ ID NO: 1884028 - RNA, 14 nt, Human
ugcuccagaccuga

SEQ ID NO: 1884029 - RNA, 21 nt, Human
ugcuccagaccugauccugga

SEQ ID NO: 1884030 - RNA, 22 nt, Human
ugcugacggccagggagaagcu

SEQ ID NO: 1884031 - RNA, 14 nt, Human
ugcugacggccagg

SEQ ID NO: 1884032 - RNA, 15 nt, Human
ugcugacggccaggg

SEQ ID NO: 1884033 - RNA, 17 nt, Human
ugcugacggccagggag

SEQ ID NO: 1884034 - RNA, 20 nt, Human
ugcugacggccagggagaag

SEQ ID NO: 1884035 - RNA, 15 nt, Human
ugcugagucugaagg

SEQ ID NO: 1884036 - RNA, 14 nt, Human
ugcugagucugaag

SEQ ID NO: 1884037 - RNA, 12 nt, Human
ugcucugcuuca

SEQ ID NO: 1884038 - RNA, 16 nt, Human
ugcucugcuugacaac

SEQ ID NO: 1884039 - RNA, 21 nt, Human
ugcucugcuugacaacaucug

SEQ ID NO: 1884040 - RNA, 18 nt, Human
ugcugacauucaccugcc

SEQ ID NO: 1884041 - RNA, 22 nt, Human
ugcucugcugacagacacaggc

SEQ ID NO: 1884042 - RNA, 21 nt, Human
ugcucugcugacagacacagg

SEQ ID NO: 1884043 - RNA, 13 nt, Human
ugcuuauacacuu

SEQ ID NO: 1884044 - RNA, 17 nt, Human
ugcugugaaauucccaa

SEQ ID NO: 1884045 - RNA, 12 nt, Human
ugcuucaaggau

SEQ ID NO: 1884046 - RNA, 14 nt, Human
ugcuucagccuccc

SEQ ID NO: 1884047 - RNA, 13 nt, Human
ugcuucagccucc

SEQ ID NO: 1884048 - RNA, 16 nt, Human
ugcuucaaggauccug

SEQ ID NO: 1884049 - RNA, 18 nt, Human
ugcuucaaggauccugag

SEQ ID NO: 1884050 - RNA, 19 nt, Human
ugcuucaaggauccugagc

SEQ ID NO: 1884051 - RNA, 19 nt, Human
aggacacuaaccacgcugg

SEQ ID NO: 1884052 - RNA, 23 nt, Human
aggacacuaaccacgcuggaccu

SEQ ID NO: 1884053 - RNA, 14 nt, Human
ugcuucaucccuuu

SEQ ID NO: 1884054 - RNA, 16 nt, Human
ugcuucauacagggau

SEQ ID NO: 1884055 - RNA, 15 nt, Human
ugcuucauacaggga

SEQ ID NO: 1884056 - RNA, 14 nt, Human
ugcuucauacaggg

SEQ ID NO: 1884057 - RNA, 11 nt, Human
ugcuucauaca

SEQ ID NO: 1884058 - RNA, 22 nt, Human
aggacagggaggugaccccagg

SEQ ID NO: 1884059 - RNA, 20 nt, Human
aggacauccccccgccaaaa

SEQ ID NO: 1884060 - RNA, 24 nt, Human
aggacauaaugggguccuggccau

SEQ ID NO: 1884061 - RNA, 20 nt, Human
aggacaugcgguagccagca

SEQ ID NO: 1884062 - RNA, 22 nt, Human
aggacaugcgguagccagcaca

SEQ ID NO: 1884063 - RNA, 18 nt, Human
ugcuggcuguuggcuggg

SEQ ID NO: 1884064 - RNA, 16 nt, Human
ugcuggcugguuagag

SEQ ID NO: 1884065 - RNA, 12 nt, Human
ugcuggcccagg

SEQ ID NO: 1884066 - RNA, 13 nt, Human
ugcuggcccaggg

SEQ ID NO: 1884067 - RNA, 14 nt, Human
ugcuggcccagggc

SEQ ID NO: 1884068 - RNA, 16 nt, Human
ugcuggcccagggccc

SEQ ID NO: 1884069 - RNA, 17 nt, Human
ugcuggcccagggccca

SEQ ID NO: 1884070 - RNA, 18 nt, Human
ugcuggcccagggcccag

SEQ ID NO: 1884071 - RNA, 19 nt, Human
ugcuggcccagggcccaga

SEQ ID NO: 1884072 - RNA, 20 nt, Human
ugcuggcccagggcccagag

SEQ ID NO: 1884073 - RNA, 21 nt, Human
ugcuggcccagggcccagagc

SEQ ID NO: 1884074 - RNA, 22 nt, Human
ugcuggcccagggcccagagcc

SEQ ID NO: 1884075 - RNA, 23 nt, Human
ugcuggcccagggcccagagccc

SEQ ID NO: 1884076 - RNA, 12 nt, Human
ugcugcccugug

SEQ ID NO: 1884077 - RNA, 13 nt, Human
ugcugcccuguga

SEQ ID NO: 1884078 - RNA, 14 nt, Human
ugcugcccugugag

SEQ ID NO: 1884079 - RNA, 20 nt, Human
aggaauuuuauuuuuuucug

SEQ ID NO: 1884080 - RNA, 15 nt, Human
ugcugcccugugagu

SEQ ID NO: 1884081 - RNA, 14 nt, Human
ugcuggagcucugc

SEQ ID NO: 1884082 - RNA, 13 nt, Human
ugcuggagcucug

SEQ ID NO: 1884083 - RNA, 12 nt, Human
ugcuguccucag

SEQ ID NO: 1884084 - RNA, 14 nt, Human
ugcuguccucaggu

SEQ ID NO: 1884085 - RNA, 18 nt, Human
ugcuguccucagguggcc

SEQ ID NO: 1884086 - RNA, 21 nt, Human
ugcuguccucagguggccaug

SEQ ID NO: 1884087 - RNA, 19 nt, Human
ugcuguccucagguggcca

SEQ ID NO: 1884088 - RNA, 15 nt, Human
ugcuguacaucuauu

SEQ ID NO: 1884089 - RNA, 16 nt, Human
ugcuguacaucuauuu

SEQ ID NO: 1884090 - RNA, 17 nt, Human
ugcuguacaucuauuuu

SEQ ID NO: 1884091 - RNA, 21 nt, Human
ugcuguacaucuauuuuggau

SEQ ID NO: 1884092 - RNA, 15 nt, Human
ugcuguagacauuug

SEQ ID NO: 1884093 - RNA, 14 nt, Human
aggccuccuggccc

SEQ ID NO: 1884094 - RNA, 21 nt, Human
aggccucucauuccagaggaa

SEQ ID NO: 1884095 - RNA, 13 nt, Human
aggccucgcagga

SEQ ID NO: 1884096 - RNA, 14 nt, Human
aggccucgcaggaa

SEQ ID NO: 1884097 - RNA, 17 nt, Human
aggccucgcaggaagac

SEQ ID NO: 1884098 - RNA, 19 nt, Human
aggccucuggaaagcaaag

SEQ ID NO: 1884099 - RNA, 15 nt, Human
aggccucugugccgc

SEQ ID NO: 1884100 - RNA, 16 nt, Human
aggccucagccagaga

SEQ ID NO: 1884101 - RNA, 14 nt, Human
aggccucagccaga

SEQ ID NO: 1884102 - RNA, 15 nt, Human
aggccucagccagag

SEQ ID NO: 1884103 - RNA, 14 nt, Human
aggccagaccugca

SEQ ID NO: 1884104 - RNA, 15 nt, Human
aggcccaaagccucg

SEQ ID NO: 1884105 - RNA, 13 nt, Human
aggcccaaagccu

SEQ ID NO: 1884106 - RNA, 12 nt, Human
aggcccaaagcc

SEQ ID NO: 1884107 - RNA, 15 nt, Human
aggcccucugcccac

SEQ ID NO: 1884108 - RNA, 13 nt, Human
aggccucagccag

SEQ ID NO: 1884109 - RNA, 13 nt, Human
aggcccucugccc

SEQ ID NO: 1884110 - RNA, 14 nt, Human
aggcccucugccca

SEQ ID NO: 1884111 - RNA, 17 nt, Human
uggccaggcuggucuca

SEQ ID NO: 1884112 - RNA, 15 nt, Human
uggccaggcuggucu

SEQ ID NO: 1884113 - RNA, 15 nt, Human
uggccaaggagcugc

SEQ ID NO: 1884114 - RNA, 16 nt, Human
uggccaaggagcugcu

SEQ ID NO: 1884115 - RNA, 17 nt, Human
uggccaaggagcugcua

SEQ ID NO: 1884116 - RNA, 18 nt, Human
uggccaaggagcugcuau

SEQ ID NO: 1884117 - RNA, 19 nt, Human
uggccaaggagcugcuaua

SEQ ID NO: 1884118 - RNA, 16 nt, Human
uggccaaguucuuagu

SEQ ID NO: 1884119 - RNA, 12 nt, Human
uggcaugggaau

SEQ ID NO: 1884120 - RNA, 15 nt, Human
uggcaugggaaugaa

SEQ ID NO: 1884121 - RNA, 20 nt, Human
aggccugccuccagggcugg

SEQ ID NO: 1884122 - RNA, 19 nt, Human
aggccugccuccagggcug

SEQ ID NO: 1884123 - RNA, 17 nt, Human
aggccugccuccagggc

SEQ ID NO: 1884124 - RNA, 21 nt, Human
aggccugccuccagggcugga

SEQ ID NO: 1884125 - RNA, 16 nt, Human
uggcaugauccaagca

SEQ ID NO: 1884126 - RNA, 18 nt, Human
uggccuggcacacaucag

SEQ ID NO: 1884127 - RNA, 16 nt, Human
uggccuggcacacauc

SEQ ID NO: 1884128 - RNA, 12 nt, Human
uggccuggcaca

SEQ ID NO: 1884129 - RNA, 14 nt, Human
uggccucugcacuc

SEQ ID NO: 1884130 - RNA, 15 nt, Human
uggccucugcacucc

SEQ ID NO: 1884131 - RNA, 17 nt, Human
uggccucugcacucccc

SEQ ID NO: 1884132 - RNA, 18 nt, Human
uggccucugcacuccccu

SEQ ID NO: 1884133 - RNA, 21 nt, Human
aggccuggccagaugcaccag

SEQ ID NO: 1884134 - RNA, 17 nt, Human
aggccuggccagaugca

SEQ ID NO: 1884135 - RNA, 16 nt, Human
aggccuggccagaugc

SEQ ID NO: 1884136 - RNA, 15 nt, Human
aggccuggccagaug

SEQ ID NO: 1884137 - RNA, 23 nt, Human
aggccuggccagaugcaccagcc

SEQ ID NO: 1884138 - RNA, 22 nt, Human
aggccuggccagaugcaccagc

SEQ ID NO: 1884139 - RNA, 12 nt, Human
uggccuggcccc

SEQ ID NO: 1884140 - RNA, 23 nt, Human
aggccugggggcugggcagagga

SEQ ID NO: 1884141 - RNA, 22 nt, Human
uggccgcaccuaaagcagccag

SEQ ID NO: 1884142 - RNA, 21 nt, Human
uggccgcaccuaaagcagcca

SEQ ID NO: 1884143 - RNA, 17 nt, Human
uggccgaguccaagcug

SEQ ID NO: 1884144 - RNA, 19 nt, Human
uggccgaguccaagcuggg

SEQ ID NO: 1884145 - RNA, 23 nt, Human
uggccgcaccuaaagcagccagc

SEQ ID NO: 1884146 - RNA, 23 nt, Human
uggccgcgccaaauaaugucucu

SEQ ID NO: 1884147 - RNA, 22 nt, Human
uggccgcgccaaauaaugucuc

SEQ ID NO: 1884148 - RNA, 21 nt, Human
uggccgcgccaaauaaugucu

SEQ ID NO: 1884149 - RNA, 15 nt, Human
uggccgggaccccga

SEQ ID NO: 1884150 - RNA, 17 nt, Human
uggccgggaccccgagc

SEQ ID NO: 1884151 - RNA, 23 nt, Human
uggccgggaccccgagccuggcu

SEQ ID NO: 1884152 - RNA, 21 nt, Human
uggccccugcccggcugcgga

SEQ ID NO: 1884153 - RNA, 23 nt, Human
uggccaguggcuggaucugugag

SEQ ID NO: 1884154 - RNA, 16 nt, Human
uggccaguggcuggau

SEQ ID NO: 1884155 - RNA, 15 nt, Human
uggccaguggcugga

SEQ ID NO: 1884156 - RNA, 14 nt, Human
uggccaguggcugg

SEQ ID NO: 1884157 - RNA, 14 nt, Human
uggcacccaagacc

SEQ ID NO: 1884158 - RNA, 21 nt, Human
uggcacaucagcacgauuucu

SEQ ID NO: 1884159 - RNA, 15 nt, Human
uggcacccggccccu

SEQ ID NO: 1884160 - RNA, 16 nt, Human
uggcacccggccccug

SEQ ID NO: 1884161 - RNA, 21 nt, Human
uggcagaguugaagacagagc

SEQ ID NO: 1884162 - RNA, 23 nt, Human
uggcacccaagaccucagggcac

SEQ ID NO: 1884163 - RNA, 22 nt, Human
uggcagaguugaagacagagcu

SEQ ID NO: 1884164 - RNA, 12 nt, Human
uggauguucuga

SEQ ID NO: 1884165 - RNA, 22 nt, Human
uggauuaaacuuaaucuaaaug

SEQ ID NO: 1884166 - RNA, 20 nt, Human
uggcacaucagcacgauuuc

SEQ ID NO: 1884167 - RNA, 18 nt, Human
uggcaccagcagccugga

SEQ ID NO: 1884168 - RNA, 13 nt, Human
uggcagccuuggc

SEQ ID NO: 1884169 - RNA, 17 nt, Human
aggccacacucagcaca

SEQ ID NO: 1884170 - RNA, 18 nt, Human
aggccacacucagcacaa

SEQ ID NO: 1884171 - RNA, 12 nt, Human
aggccagagaca

SEQ ID NO: 1884172 - RNA, 12 nt, Human
aggccagaccug

SEQ ID NO: 1884173 - RNA, 19 nt, Human
uggcagccucccauccagg

SEQ ID NO: 1884174 - RNA, 20 nt, Human
uggcagccucccauccaggg

SEQ ID NO: 1884175 - RNA, 21 nt, Human
uggcagccucccauccagggc

SEQ ID NO: 1884176 - RNA, 22 nt, Human
uggcagccucccauccagggcc

SEQ ID NO: 1884177 - RNA, 20 nt, Human
aggccacaagacccuugugg

SEQ ID NO: 1884178 - RNA, 12 nt, Human
uggcagccccug

SEQ ID NO: 1884179 - RNA, 18 nt, Human
uggacgagaaaacaauaa

SEQ ID NO: 1884180 - RNA, 22 nt, Human
uggaccuuuccugaggaagagg

SEQ ID NO: 1884181 - RNA, 11 nt, Human
uggaccugccc

SEQ ID NO: 1884182 - RNA, 13 nt, Human
aggccaaaaaaau

SEQ ID NO: 1884183 - RNA, 16 nt, Human
aggccaaacucaccug

SEQ ID NO: 1884184 - RNA, 18 nt, Human
aggcauuuguuugaacug

SEQ ID NO: 1884185 - RNA, 20 nt, Human
aggccaaacucaccugcccc

SEQ ID NO: 1884186 - RNA, 14 nt, Human
aggccaaaggaagc

SEQ ID NO: 1884187 - RNA, 15 nt, Human
aggccaaaggaagca

SEQ ID NO: 1884188 - RNA, 23 nt, Human
aggccaaaggaagcacaugccuc

SEQ ID NO: 1884189 - RNA, 20 nt, Human
aggccaaaggaagcacaugc

SEQ ID NO: 1884190 - RNA, 22 nt, Human
aggccaacccaaaauaagcagg

SEQ ID NO: 1884191 - RNA, 14 nt, Human
aggccaagaaacgu

SEQ ID NO: 1884192 - RNA, 17 nt, Human
aggccaagaaacgucuu

SEQ ID NO: 1884193 - RNA, 18 nt, Human
aggccaaggugggaggau

SEQ ID NO: 1884194 - RNA, 19 nt, Human
uggaugccugguggcagcu

SEQ ID NO: 1884195 - RNA, 18 nt, Human
uggaugccugguggcagc

SEQ ID NO: 1884196 - RNA, 20 nt, Human
uggaugccugguggcagcug

SEQ ID NO: 1884197 - RNA, 23 nt, Human
uggaugggggaacucagauccag

SEQ ID NO: 1884198 - RNA, 16 nt, Human
uggaguucaucuugaa

SEQ ID NO: 1884199 - RNA, 17 nt, Human
uggaguucaucuugaau

SEQ ID NO: 1884200 - RNA, 15 nt, Human
uggaugccugguggc

SEQ ID NO: 1884201 - RNA, 20 nt, Human
uggaguucaucuugaauugu

SEQ ID NO: 1884202 - RNA, 14 nt, Human
uggagucauucuca

SEQ ID NO: 1884203 - RNA, 15 nt, Human
uggagucauucucau

SEQ ID NO: 1884204 - RNA, 15 nt, Human
aggccacaagacccu

SEQ ID NO: 1884205 - RNA, 21 nt, Human
aggccaagaaacgucuucuaa

SEQ ID NO: 1884206 - RNA, 12 nt, Human
aggcuggcauga

SEQ ID NO: 1884207 - RNA, 16 nt, Human
aggcuggcacaggaca

SEQ ID NO: 1884208 - RNA, 17 nt, Human
aggcuggcacaggacau

SEQ ID NO: 1884209 - RNA, 18 nt, Human
aggcuggcacaggacaug

SEQ ID NO: 1884210 - RNA, 14 nt, Human
aggcuggcacagga

SEQ ID NO: 1884211 - RNA, 17 nt, Human
aggcuggcgugcagugg

SEQ ID NO: 1884212 - RNA, 13 nt, Human
aggcuggcgugca

SEQ ID NO: 1884213 - RNA, 18 nt, Human
aggcucuggagcccacug

SEQ ID NO: 1884214 - RNA, 19 nt, Human
aggcucuggagcccacugu

SEQ ID NO: 1884215 - RNA, 14 nt, Human
aggcucuggagccc

SEQ ID NO: 1884216 - RNA, 15 nt, Human
aggcucuggagccca

SEQ ID NO: 1884217 - RNA, 13 nt, Human
aggcucuggagcc

SEQ ID NO: 1884218 - RNA, 16 nt, Human
aggcucugcccuuggu

SEQ ID NO: 1884219 - RNA, 14 nt, Human
aggcugcuuagaau

SEQ ID NO: 1884220 - RNA, 14 nt, Human
aggcugcuuuccaa

SEQ ID NO: 1884221 - RNA, 13 nt, Human
aggcugcuuucca

SEQ ID NO: 1884222 - RNA, 22 nt, Human
aggcugcuuagaauccaaacuu

SEQ ID NO: 1884223 - RNA, 21 nt, Human
aggcugcuuuccaaagccaau

SEQ ID NO: 1884224 - RNA, 19 nt, Human
aggcugcuuuccaaagcca

SEQ ID NO: 1884225 - RNA, 18 nt, Human
aggcugcuuuccaaagcc

SEQ ID NO: 1884226 - RNA, 17 nt, Human
aggcugcuuuccaaagc

SEQ ID NO: 1884227 - RNA, 15 nt, Human
aggcugcuuuccaaa

SEQ ID NO: 1884228 - RNA, 19 nt, Human
aggcuccuuuagcgcccag

SEQ ID NO: 1884229 - RNA, 12 nt, Human
aggcucgagcau

SEQ ID NO: 1884230 - RNA, 21 nt, Human
aggcucgagcaugccuggaug

SEQ ID NO: 1884231 - RNA, 20 nt, Human
aggcucucaacaggggagag

SEQ ID NO: 1884232 - RNA, 15 nt, Human
aggcucgagcaugcc

SEQ ID NO: 1884233 - RNA, 17 nt, Human
aggcucgagcaugccug

SEQ ID NO: 1884234 - RNA, 18 nt, Human
aggcucgagcaugccugg

SEQ ID NO: 1884235 - RNA, 19 nt, Human
aggcucgagcaugccugga

SEQ ID NO: 1884236 - RNA, 21 nt, Human
aggcucucaggccagcugcuu

SEQ ID NO: 1884237 - RNA, 11 nt, Human
aggcucugccc

SEQ ID NO: 1884238 - RNA, 12 nt, Human
aggcucugcccu

SEQ ID NO: 1884239 - RNA, 13 nt, Human
aggcucugcccuu

SEQ ID NO: 1884240 - RNA, 14 nt, Human
aggcucugcccuug

SEQ ID NO: 1884241 - RNA, 15 nt, Human
aggcucugcccuugg

SEQ ID NO: 1884242 - RNA, 11 nt, Human
aggcucucagg

SEQ ID NO: 1884243 - RNA, 12 nt, Human
aggcucucaggc

SEQ ID NO: 1884244 - RNA, 14 nt, Human
aggcucucaggcca

SEQ ID NO: 1884245 - RNA, 15 nt, Human
aggcucucaggccag

SEQ ID NO: 1884246 - RNA, 16 nt, Human
aggcucucaggccagc

SEQ ID NO: 1884247 - RNA, 18 nt, Human
aggcucucaggccagcug

SEQ ID NO: 1884248 - RNA, 19 nt, Human
aggcucucaggccagcugc

SEQ ID NO: 1884249 - RNA, 20 nt, Human
aggcucucaggccagcugcu

SEQ ID NO: 1884250 - RNA, 20 nt, Human
aggcuggcgugcaguggugc

SEQ ID NO: 1884251 - RNA, 18 nt, Human
aggcuggcgugcaguggu

SEQ ID NO: 1884252 - RNA, 19 nt, Human
aggcuggcuccagaugcag

SEQ ID NO: 1884253 - RNA, 22 nt, Human
uggcuagagguucaaagauauu

SEQ ID NO: 1884254 - RNA, 14 nt, Human
aggcugggagagcc

SEQ ID NO: 1884255 - RNA, 15 nt, Human
uggcuagucaagcuc

SEQ ID NO: 1884256 - RNA, 22 nt, Human
uggcuauuagagaucaaccccu

SEQ ID NO: 1884257 - RNA, 19 nt, Human
uggcuaugcauuugaaaau

SEQ ID NO: 1884258 - RNA, 16 nt, Human
uggcuaugagggccuu

SEQ ID NO: 1884259 - RNA, 14 nt, Human
uggcuaugcauuug

SEQ ID NO: 1884260 - RNA, 22 nt, Human
uggcuagucaagcuccuccucc

SEQ ID NO: 1884261 - RNA, 23 nt, Human
uggcuagucaagcuccuccuccc

SEQ ID NO: 1884262 - RNA, 17 nt, Human
uggcuagucaagcuccu

SEQ ID NO: 1884263 - RNA, 18 nt, Human
uggcuagucaagcuccuc

SEQ ID NO: 1884264 - RNA, 20 nt, Human
uggcuagucaagcuccuccu

SEQ ID NO: 1884265 - RNA, 21 nt, Human
uggcuagucaagcuccuccuc

SEQ ID NO: 1884266 - RNA, 17 nt, Human
uggcuaugcauuugaaa

SEQ ID NO: 1884267 - RNA, 15 nt, Human
uggcuaugcauuuga

SEQ ID NO: 1884268 - RNA, 18 nt, Human
uggcucaaguccucuuuu

SEQ ID NO: 1884269 - RNA, 19 nt, Human
uggcucuuccaggcuggga

SEQ ID NO: 1884270 - RNA, 20 nt, Human
uggcucuuccaggcugggag

SEQ ID NO: 1884271 - RNA, 21 nt, Human
uggcucuuccaggcugggaga

SEQ ID NO: 1884272 - RNA, 12 nt, Human
uggcugcaaagg

SEQ ID NO: 1884273 - RNA, 22 nt, Human
uggcucuugaacugagcuugga

SEQ ID NO: 1884274 - RNA, 16 nt, Human
uggcucuugaacugag

SEQ ID NO: 1884275 - RNA, 14 nt, Human
uggcugcagggagu

SEQ ID NO: 1884276 - RNA, 13 nt, Human
uggcugcagggag

SEQ ID NO: 1884277 - RNA, 15 nt, Human
uggcugcagggaguc

SEQ ID NO: 1884278 - RNA, 18 nt, Human
uggcugccaaugggagcu

SEQ ID NO: 1884279 - RNA, 20 nt, Human
uggcugccaaugggagcuca

SEQ ID NO: 1884280 - RNA, 20 nt, Human
uggcugcaucccccccaccu

SEQ ID NO: 1884281 - RNA, 11 nt, Human
uggcugcugaa

SEQ ID NO: 1884282 - RNA, 22 nt, Human
uggcugccuugugaaggaauua

SEQ ID NO: 1884283 - RNA, 17 nt, Human
uggcugccucauuuaga

SEQ ID NO: 1884284 - RNA, 17 nt, Human
uggcuuaaaacaacacu

SEQ ID NO: 1884285 - RNA, 15 nt, Human
uggcuguuggcuggg

SEQ ID NO: 1884286 - RNA, 13 nt, Human
uggcuguuggcug

SEQ ID NO: 1884287 - RNA, 14 nt, Human
uggcugugucuccc

SEQ ID NO: 1884288 - RNA, 22 nt, Human
uggcuucacggaagagccuugc

SEQ ID NO: 1884289 - RNA, 23 nt, Human
uggcuucacggaagagccuugcg

SEQ ID NO: 1884290 - RNA, 14 nt, Human
uggcuucacuccug

SEQ ID NO: 1884291 - RNA, 16 nt, Human
uggcuucacuccugcu

SEQ ID NO: 1884292 - RNA, 23 nt, Human
uggcuucacuccugcuguaaauu

SEQ ID NO: 1884293 - RNA, 18 nt, Human
uggcuucacuccugcugu

SEQ ID NO: 1884294 - RNA, 19 nt, Human
uggcuucacuccugcugua

SEQ ID NO: 1884295 - RNA, 22 nt, Human
ugggaacuuauuaaauggaaac

SEQ ID NO: 1884296 - RNA, 19 nt, Human
ugggaaggggacccccgcc

SEQ ID NO: 1884297 - RNA, 15 nt, Human
ugggaagugaagacu

SEQ ID NO: 1884298 - RNA, 22 nt, Human
ugggaaggggacccccgccccc

SEQ ID NO: 1884299 - RNA, 16 nt, Human
ugggaaaggggaaguu

SEQ ID NO: 1884300 - RNA, 16 nt, Human
ugggaaaguauucugu

SEQ ID NO: 1884301 - RNA, 18 nt, Human
uucuucuagguucuaaaa

SEQ ID NO: 1884302 - RNA, 21 nt, Human
uucuucuagguucuaaaaauu

SEQ ID NO: 1884303 - RNA, 22 nt, Human
uucuucuccacuuucuagccag

SEQ ID NO: 1884304 - RNA, 11 nt, Human
uucuucucccu

SEQ ID NO: 1884305 - RNA, 20 nt, Human
uucuugccucuguccccuuc

SEQ ID NO: 1884306 - RNA, 18 nt, Human
uucuugccucuguccccu

SEQ ID NO: 1884307 - RNA, 17 nt, Human
uucuugcauauuuugua

SEQ ID NO: 1884308 - RNA, 14 nt, Human
uucuugcauauuuu

SEQ ID NO: 1884309 - RNA, 20 nt, Human
uucuugcauauuuuguaacu

SEQ ID NO: 1884310 - RNA, 12 nt, Human
uucuuucuggcu

SEQ ID NO: 1884311 - RNA, 20 nt, Human
uucuuucuggcuaugcauuu

SEQ ID NO: 1884312 - RNA, 17 nt, Human
uucuuucuggcuaugca

SEQ ID NO: 1884313 - RNA, 22 nt, Human
uucuuaaccagaucauugugaa

SEQ ID NO: 1884314 - RNA, 23 nt, Human
uucuuaaccagaucauugugaaa

SEQ ID NO: 1884315 - RNA, 18 nt, Human
uucuguuuagauaauaca

SEQ ID NO: 1884316 - RNA, 13 nt, Human
uucuguuuagaua

SEQ ID NO: 1884317 - RNA, 12 nt, Human
uucuguuuaacu

SEQ ID NO: 1884318 - RNA, 16 nt, Human
auccaagcaaauguga

SEQ ID NO: 1884319 - RNA, 16 nt, Human
uucugccugcccaggc

SEQ ID NO: 1884320 - RNA, 15 nt, Human
uucugccugcccagg

SEQ ID NO: 1884321 - RNA, 18 nt, Human
uucugccugccagcugca

SEQ ID NO: 1884322 - RNA, 19 nt, Human
uucugccugccagcugcac

SEQ ID NO: 1884323 - RNA, 15 nt, Human
auccaaagcagacag

SEQ ID NO: 1884324 - RNA, 22 nt, Human
uucugccugccagcugcacuga

SEQ ID NO: 1884325 - RNA, 17 nt, Human
auccagguucagcuugu

SEQ ID NO: 1884326 - RNA, 13 nt, Human
auccaauuggaua

SEQ ID NO: 1884327 - RNA, 15 nt, Human
auccaguaucuugaa

SEQ ID NO: 1884328 - RNA, 14 nt, Human
auccaguaucuuga

SEQ ID NO: 1884329 - RNA, 18 nt, Human
aucccaugagccucagca

SEQ ID NO: 1884330 - RNA, 17 nt, Human
aucccaugagccucagc

SEQ ID NO: 1884331 - RNA, 22 nt, Human
aucccugaaggccccgcccagg

SEQ ID NO: 1884332 - RNA, 17 nt, Human
aucccugaaggccccgc

SEQ ID NO: 1884333 - RNA, 16 nt, Human
aucccaugagccucag

SEQ ID NO: 1884334 - RNA, 12 nt, Human
aucccagcccca

SEQ ID NO: 1884335 - RNA, 11 nt, Human
aucccagcccc

SEQ ID NO: 1884336 - RNA, 19 nt, Human
aucccagcacuuugggagg

SEQ ID NO: 1884337 - RNA, 22 nt, Human
aucccagcacuuugggaggcug

SEQ ID NO: 1884338 - RNA, 20 nt, Human
auccauggggcugauuguau

SEQ ID NO: 1884339 - RNA, 18 nt, Human
uucucccugcacaagcca

SEQ ID NO: 1884340 - RNA, 20 nt, Human
uucucccuccuucccuuccu

SEQ ID NO: 1884341 - RNA, 23 nt, Human
uucuccccugcccccaggacugg

SEQ ID NO: 1884342 - RNA, 22 nt, Human
uucuccccugcccccaggacug

SEQ ID NO: 1884343 - RNA, 21 nt, Human
uucuccccugcccccaggacu

SEQ ID NO: 1884344 - RNA, 19 nt, Human
uucuccccugcccccagga

SEQ ID NO: 1884345 - RNA, 18 nt, Human
uucuccccugcccccagg

SEQ ID NO: 1884346 - RNA, 17 nt, Human
uucuccccugcccccag

SEQ ID NO: 1884347 - RNA, 16 nt, Human
uucuccccugccccca

SEQ ID NO: 1884348 - RNA, 15 nt, Human
uucuccccugccccc

SEQ ID NO: 1884349 - RNA, 12 nt, Human
aucauugaaauc

SEQ ID NO: 1884350 - RNA, 13 nt, Human
aucauugaaaucu

SEQ ID NO: 1884351 - RNA, 13 nt, Human
aucauugugaaau

SEQ ID NO: 1884352 - RNA, 15 nt, Human
aucauugugaaauua

SEQ ID NO: 1884353 - RNA, 19 nt, Human
aucauugugaaauuauuca

SEQ ID NO: 1884354 - RNA, 21 nt, Human
uucucuaguuugauuaaauuc

SEQ ID NO: 1884355 - RNA, 12 nt, Human
uucucucaucuc

SEQ ID NO: 1884356 - RNA, 17 nt, Human
uucucucaucucuuagc

SEQ ID NO: 1884357 - RNA, 13 nt, Human
uucucucaucucu

SEQ ID NO: 1884358 - RNA, 23 nt, Human
uucucucaucucuuagcuccccu

SEQ ID NO: 1884359 - RNA, 20 nt, Human
uucucucaucucuuagcucc

SEQ ID NO: 1884360 - RNA, 18 nt, Human
uucugaagcuuuaccagc

SEQ ID NO: 1884361 - RNA, 12 nt, Human
uucuccuuugua

SEQ ID NO: 1884362 - RNA, 14 nt, Human
uucuccuuuguacu

SEQ ID NO: 1884363 - RNA, 17 nt, Human
uucuccuuuguacuuug

SEQ ID NO: 1884364 - RNA, 19 nt, Human
uucugcagccacuauuguu

SEQ ID NO: 1884365 - RNA, 12 nt, Human
uucugccugcca

SEQ ID NO: 1884366 - RNA, 16 nt, Human
uucugccugccagcug

SEQ ID NO: 1884367 - RNA, 17 nt, Human
uucugccugccagcugc

SEQ ID NO: 1884368 - RNA, 17 nt, Human
uucugcauauguugaau

SEQ ID NO: 1884369 - RNA, 21 nt, Human
uucugcauauguugaauacuu

SEQ ID NO: 1884370 - RNA, 22 nt, Human
uucugcauauguugaauacuuu

SEQ ID NO: 1884371 - RNA, 23 nt, Human
uucugcauauguugaauacuuuu

SEQ ID NO: 1884372 - RNA, 15 nt, Human
uucugcaguaaaucu

SEQ ID NO: 1884373 - RNA, 18 nt, Human
uucugcaguaaaucuuuu

SEQ ID NO: 1884374 - RNA, 22 nt, Human
uucugcaguaaaucuuuuacaa

SEQ ID NO: 1884375 - RNA, 20 nt, Human
aucauauaauaaauguacau

SEQ ID NO: 1884376 - RNA, 16 nt, Human
aucauauaauaaaugu

SEQ ID NO: 1884377 - RNA, 15 nt, Human
aucauaaaacuugau

SEQ ID NO: 1884378 - RNA, 23 nt, Human
aucauccacugugccaugugcca

SEQ ID NO: 1884379 - RNA, 21 nt, Human
aucauccacugugccaugugc

SEQ ID NO: 1884380 - RNA, 16 nt, Human
aucauuaggugugacu

SEQ ID NO: 1884381 - RNA, 19 nt, Human
aucauuagggggaacucua

SEQ ID NO: 1884382 - RNA, 20 nt, Human
aucauuaucagccugugcca

SEQ ID NO: 1884383 - RNA, 19 nt, Human
aucagucugauucccaagc

SEQ ID NO: 1884384 - RNA, 15 nt, Human
aucaguguuggccau

SEQ ID NO: 1884385 - RNA, 15 nt, Human
aucaggugcugccau

SEQ ID NO: 1884386 - RNA, 23 nt, Human
aucacuugaacccgggaggcaga

SEQ ID NO: 1884387 - RNA, 19 nt, Human
aucaggugcugccauccag

SEQ ID NO: 1884388 - RNA, 17 nt, Human
aucaggugcugccaucc

SEQ ID NO: 1884389 - RNA, 21 nt, Human
aucacucugugucugaguggc

SEQ ID NO: 1884390 - RNA, 19 nt, Human
uugagaggcccugggguuc

SEQ ID NO: 1884391 - RNA, 24 nt, Human
uugaccauucuccaccugccaggg

SEQ ID NO: 1884392 - RNA, 21 nt, Human
uugagaaauauggacacuuaa

SEQ ID NO: 1884393 - RNA, 18 nt, Human
uugagaacuuuauuucca

SEQ ID NO: 1884394 - RNA, 15 nt, Human
uugagaagaaaacau

SEQ ID NO: 1884395 - RNA, 18 nt, Human
uugagaagaaaacaucua

SEQ ID NO: 1884396 - RNA, 22 nt, Human
uugagaagaccucaccuagaaa

SEQ ID NO: 1884397 - RNA, 18 nt, Human
uugaccauucuccaccug

SEQ ID NO: 1884398 - RNA, 19 nt, Human
uugaccauucuccaccugc

SEQ ID NO: 1884399 - RNA, 13 nt, Human
uugacaucaacug

SEQ ID NO: 1884400 - RNA, 19 nt, Human
uugacagggcacaccgggc

SEQ ID NO: 1884401 - RNA, 19 nt, Human
uugacacuuaaaaaugguu

SEQ ID NO: 1884402 - RNA, 18 nt, Human
uugacacuggaaugaguu

SEQ ID NO: 1884403 - RNA, 12 nt, Human
uugauaaaguaa

SEQ ID NO: 1884404 - RNA, 18 nt, Human
uugaguaaaauaaauauu

SEQ ID NO: 1884405 - RNA, 12 nt, Human
uugaguaaaaua

SEQ ID NO: 1884406 - RNA, 14 nt, Human
uugaguaaaauaaa

SEQ ID NO: 1884407 - RNA, 15 nt, Human
uugaggucuguucuu

SEQ ID NO: 1884408 - RNA, 16 nt, Human
uugaggucuguucuuu

SEQ ID NO: 1884409 - RNA, 13 nt, Human
aucuaagccugaa

SEQ ID NO: 1884410 - RNA, 17 nt, Human
uugacacuuaaaaaugg

SEQ ID NO: 1884411 - RNA, 22 nt, Human
uugaauauaauauauuugugua

SEQ ID NO: 1884412 - RNA, 20 nt, Human
uugaauauaauauauuugug

SEQ ID NO: 1884413 - RNA, 21 nt, Human
uugaauauaauauauuugugu

SEQ ID NO: 1884414 - RNA, 21 nt, Human
uugaauaaaaacuuugcuaaa

SEQ ID NO: 1884415 - RNA, 12 nt, Human
uugaauacuuuu

SEQ ID NO: 1884416 - RNA, 13 nt, Human
uugaauacuuuuu

SEQ ID NO: 1884417 - RNA, 18 nt, Human
uugaauauaaacacuaua

SEQ ID NO: 1884418 - RNA, 16 nt, Human
uugaauauaaacacua

SEQ ID NO: 1884419 - RNA, 15 nt, Human
uugaauauaaacacu

SEQ ID NO: 1884420 - RNA, 23 nt, Human
uugaaggugcugacggccaggga

SEQ ID NO: 1884421 - RNA, 15 nt, Human
uugaagggccagagc

SEQ ID NO: 1884422 - RNA, 17 nt, Human
uugaagggccagagcca

SEQ ID NO: 1884423 - RNA, 19 nt, Human
uugaagggccagagccagg

SEQ ID NO: 1884424 - RNA, 20 nt, Human
uugaagggccagagccaggg

SEQ ID NO: 1884425 - RNA, 15 nt, Human
aucuaaauguugaaa

SEQ ID NO: 1884426 - RNA, 19 nt, Human
aucuaaaagaaaugucuau

SEQ ID NO: 1884427 - RNA, 19 nt, Human
aucuaaauggaaccacucu

SEQ ID NO: 1884428 - RNA, 15 nt, Human
aucgugacaacacuu

SEQ ID NO: 1884429 - RNA, 14 nt, Human
aucgugacaacacu

SEQ ID NO: 1884430 - RNA, 23 nt, Human
aucguccagggagcauuuuccuc

SEQ ID NO: 1884431 - RNA, 14 nt, Human
aucgucacugcuua

SEQ ID NO: 1884432 - RNA, 18 nt, Human
aucgucacugcuuaacuu

SEQ ID NO: 1884433 - RNA, 12 nt, Human
aucguccaggga

SEQ ID NO: 1884434 - RNA, 13 nt, Human
aucguccagggag

SEQ ID NO: 1884435 - RNA, 21 nt, Human
uucuuuucuggaauguaauca

SEQ ID NO: 1884436 - RNA, 20 nt, Human
uucuuuugccguuauuaaaa

SEQ ID NO: 1884437 - RNA, 18 nt, Human
auccucuguacagagccc

SEQ ID NO: 1884438 - RNA, 20 nt, Human
auccucuguacagagcccac

SEQ ID NO: 1884439 - RNA, 13 nt, Human
auccucuucuuuu

SEQ ID NO: 1884440 - RNA, 18 nt, Human
auccucuucuuuuagcag

SEQ ID NO: 1884441 - RNA, 17 nt, Human
auccucuuugagugaag

SEQ ID NO: 1884442 - RNA, 18 nt, Human
auccugaaauagaggcua

SEQ ID NO: 1884443 - RNA, 20 nt, Human
auccucuucuuuuagcagua

SEQ ID NO: 1884444 - RNA, 11 nt, Human
auccugagcca

SEQ ID NO: 1884445 - RNA, 21 nt, Human
auccugaaauagaggcuaaau

SEQ ID NO: 1884446 - RNA, 12 nt, Human
auccugagccag

SEQ ID NO: 1884447 - RNA, 13 nt, Human
auccugagccaga

SEQ ID NO: 1884448 - RNA, 14 nt, Human
auccugagccagau

SEQ ID NO: 1884449 - RNA, 15 nt, Human
auccugagccagauu

SEQ ID NO: 1884450 - RNA, 17 nt, Human
auccugagccagauuuc

SEQ ID NO: 1884451 - RNA, 21 nt, Human
auccugagccagauuucacuc

SEQ ID NO: 1884452 - RNA, 18 nt, Human
auccugaggcuccacuug

SEQ ID NO: 1884453 - RNA, 16 nt, Human
auccugaggcuccacu

SEQ ID NO: 1884454 - RNA, 13 nt, Human
auccugaggcucc

SEQ ID NO: 1884455 - RNA, 11 nt, Human
auccugaggcu

SEQ ID NO: 1884456 - RNA, 13 nt, Human
auccugccccuga

SEQ ID NO: 1884457 - RNA, 22 nt, Human
auccugaggcuccacuuggucu

SEQ ID NO: 1884458 - RNA, 16 nt, Human
auccugcaauuccacu

SEQ ID NO: 1884459 - RNA, 12 nt, Human
aucguaaaauua

SEQ ID NO: 1884460 - RNA, 13 nt, Human
aucguaaaauuaa

SEQ ID NO: 1884461 - RNA, 14 nt, Human
aucguaaaauuaag

SEQ ID NO: 1884462 - RNA, 17 nt, Human
aucguaaaauuaagaaa

SEQ ID NO: 1884463 - RNA, 20 nt, Human
auccuggcugucgagaaaca

SEQ ID NO: 1884464 - RNA, 21 nt, Human
auccugggggacccaauguag

SEQ ID NO: 1884465 - RNA, 23 nt, Human
auccuggcacccggccccugcug

SEQ ID NO: 1884466 - RNA, 22 nt, Human
auccuggcacccggccccugcu

SEQ ID NO: 1884467 - RNA, 19 nt, Human
auccuggaggcccaguuca

SEQ ID NO: 1884468 - RNA, 20 nt, Human
auccuggaggcccaguucac

SEQ ID NO: 1884469 - RNA, 21 nt, Human
auccuggcacccggccccugc

SEQ ID NO: 1884470 - RNA, 20 nt, Human
auccuggcacccggccccug

SEQ ID NO: 1884471 - RNA, 19 nt, Human
auccuggcacccggccccu

SEQ ID NO: 1884472 - RNA, 17 nt, Human
auccuggcacccggccc

SEQ ID NO: 1884473 - RNA, 21 nt, Human
auccugcuucugauaugcagu

SEQ ID NO: 1884474 - RNA, 19 nt, Human
auccugcuucugauaugca

SEQ ID NO: 1884475 - RNA, 15 nt, Human
auccuggaguucugg

SEQ ID NO: 1884476 - RNA, 14 nt, Human
auccuggaggccca

SEQ ID NO: 1884477 - RNA, 15 nt, Human
auccuggaggcccag

SEQ ID NO: 1884478 - RNA, 16 nt, Human
auccuggaggcccagu

SEQ ID NO: 1884479 - RNA, 17 nt, Human
auccuggaggcccaguu

SEQ ID NO: 1884480 - RNA, 13 nt, Human
auauuuacaaaug

SEQ ID NO: 1884481 - RNA, 14 nt, Human
auauuguacaguuu

SEQ ID NO: 1884482 - RNA, 13 nt, Human
auauuguacaguu

SEQ ID NO: 1884483 - RNA, 14 nt, Human
auauugucuuuuug

SEQ ID NO: 1884484 - RNA, 17 nt, Human
auauugucuuuuuguau

SEQ ID NO: 1884485 - RNA, 13 nt, Human
auauuguuuucag

SEQ ID NO: 1884486 - RNA, 17 nt, Human
auauuguuuucagugua

SEQ ID NO: 1884487 - RNA, 15 nt, Human
auauugauaugcuua

SEQ ID NO: 1884488 - RNA, 18 nt, Human
auauucucacagcuccaa

SEQ ID NO: 1884489 - RNA, 12 nt, Human
auauuguacagu

SEQ ID NO: 1884490 - RNA, 17 nt, Human
auauuguaaaacaggua

SEQ ID NO: 1884491 - RNA, 16 nt, Human
auauuguaaaacaggu

SEQ ID NO: 1884492 - RNA, 22 nt, Human
auauugcugauggugcaaugac

SEQ ID NO: 1884493 - RNA, 17 nt, Human
auauugagucaaauggu

SEQ ID NO: 1884494 - RNA, 19 nt, Human
auauuggguuccauucuca

SEQ ID NO: 1884495 - RNA, 16 nt, Human
auauguucugacauaa

SEQ ID NO: 1884496 - RNA, 14 nt, Human
auauguugaauacu

SEQ ID NO: 1884497 - RNA, 19 nt, Human
uucccaggaguucugcuca

SEQ ID NO: 1884498 - RNA, 22 nt, Human
uuccagucuccaccaggaaccu

SEQ ID NO: 1884499 - RNA, 11 nt, Human
uuccagucucc

SEQ ID NO: 1884500 - RNA, 20 nt, Human
uuccagucuccaccaggaac

SEQ ID NO: 1884501 - RNA, 15 nt, Human
uuccagugaggcucu

SEQ ID NO: 1884502 - RNA, 16 nt, Human
uuccagugaggcucug

SEQ ID NO: 1884503 - RNA, 21 nt, Human
uucccagcuacaccuuucucc

SEQ ID NO: 1884504 - RNA, 11 nt, Human
uucccaggacc

SEQ ID NO: 1884505 - RNA, 12 nt, Human
uucccaggaccc

SEQ ID NO: 1884506 - RNA, 13 nt, Human
uucccaggacccu

SEQ ID NO: 1884507 - RNA, 19 nt, Human
uucccaggacccugaaggg

SEQ ID NO: 1884508 - RNA, 20 nt, Human
uucccaggacccugaagggg

SEQ ID NO: 1884509 - RNA, 20 nt, Human
uucccaggaguucugcucau

SEQ ID NO: 1884510 - RNA, 16 nt, Human
auauuaagaaagacua

SEQ ID NO: 1884511 - RNA, 15 nt, Human
auauuaagaaagacu

SEQ ID NO: 1884512 - RNA, 17 nt, Human
auauuaagaaagacuau

SEQ ID NO: 1884513 - RNA, 22 nt, Human
auauuaagaaagacuaucuaaa

SEQ ID NO: 1884514 - RNA, 17 nt, Human
auauuaccacagacaua

SEQ ID NO: 1884515 - RNA, 22 nt, Human
auauuaaagagaaagcccgcuu

SEQ ID NO: 1884516 - RNA, 15 nt, Human
auauguugaauacuu

SEQ ID NO: 1884517 - RNA, 16 nt, Human
auauguugaauacuuu

SEQ ID NO: 1884518 - RNA, 17 nt, Human
auauguugaauacuuuu

SEQ ID NO: 1884519 - RNA, 18 nt, Human
auauguugaauacuuuuu

SEQ ID NO: 1884520 - RNA, 19 nt, Human
aucaauguuucuucuaggu

SEQ ID NO: 1884521 - RNA, 16 nt, Human
aucaauucauaucuau

SEQ ID NO: 1884522 - RNA, 13 nt, Human
aucaauuuaaaaa

SEQ ID NO: 1884523 - RNA, 23 nt, Human
aucaauguaccuuuuuugguagu

SEQ ID NO: 1884524 - RNA, 17 nt, Human
aucacgccacugcacua

SEQ ID NO: 1884525 - RNA, 15 nt, Human
aucacgccacugcac

SEQ ID NO: 1884526 - RNA, 16 nt, Human
aucacucugugucuga

SEQ ID NO: 1884527 - RNA, 20 nt, Human
aucacucugugucugagugg

SEQ ID NO: 1884528 - RNA, 21 nt, Human
aucaacugcaucaagauguga

SEQ ID NO: 1884529 - RNA, 23 nt, Human
auauuuuuuaaaaaucuauauuu

SEQ ID NO: 1884530 - RNA, 17 nt, Human
auauuuuuuaaaaaucu

SEQ ID NO: 1884531 - RNA, 15 nt, Human
uucccuuuuuuuaag

SEQ ID NO: 1884532 - RNA, 13 nt, Human
uuccccuuuugca

SEQ ID NO: 1884533 - RNA, 16 nt, Human
auauuugguuuuccug

SEQ ID NO: 1884534 - RNA, 21 nt, Human
auauuugaauguaugcuucau

SEQ ID NO: 1884535 - RNA, 12 nt, Human
auauuugcacua

SEQ ID NO: 1884536 - RNA, 20 nt, Human
uuccuggcacugcuuccagu

SEQ ID NO: 1884537 - RNA, 22 nt, Human
uuccuggcacugcuuccaguga

SEQ ID NO: 1884538 - RNA, 22 nt, Human
uuccucuuuuuauuuaguuccu

SEQ ID NO: 1884539 - RNA, 22 nt, Human
uuccucuuugcuuugcuuucug

SEQ ID NO: 1884540 - RNA, 16 nt, Human
uuccucuuuucucugc

SEQ ID NO: 1884541 - RNA, 18 nt, Human
uuccugaaacaacuugga

SEQ ID NO: 1884542 - RNA, 19 nt, Human
uuccuggcacugcuuccag

SEQ ID NO: 1884543 - RNA, 12 nt, Human
uuccugaacagg

SEQ ID NO: 1884544 - RNA, 15 nt, Human
uuccucuuugcuuug

SEQ ID NO: 1884545 - RNA, 16 nt, Human
uuccucuuugcuuugc

SEQ ID NO: 1884546 - RNA, 15 nt, Human
uuccucucuccagau

SEQ ID NO: 1884547 - RNA, 14 nt, Human
uuccucucuccaga

SEQ ID NO: 1884548 - RNA, 21 nt, Human
uuccuaaauauauuuuaagac

SEQ ID NO: 1884549 - RNA, 14 nt, Human
uuccuaaggcugca

SEQ ID NO: 1884550 - RNA, 16 nt, Human
auauggccucaagauc

SEQ ID NO: 1884551 - RNA, 15 nt, Human
auauggccucaagau

SEQ ID NO: 1884552 - RNA, 23 nt, Human
auauggccacaguagucuugaug

SEQ ID NO: 1884553 - RNA, 20 nt, Human
auauguggaguucaucuuga

SEQ ID NO: 1884554 - RNA, 21 nt, Human
auauguggaguucaucuugaa

SEQ ID NO: 1884555 - RNA, 17 nt, Human
auauguagcagaaaggc

SEQ ID NO: 1884556 - RNA, 23 nt, Human
auauguaccuaacgaaguauccu

SEQ ID NO: 1884557 - RNA, 20 nt, Human
auauggggaugcagcauuau

SEQ ID NO: 1884558 - RNA, 16 nt, Human
auauggggaugcagca

SEQ ID NO: 1884559 - RNA, 22 nt, Human
uucaugcuguucaugaaagauu

SEQ ID NO: 1884560 - RNA, 20 nt, Human
uucaugcuguucaugaaaga

SEQ ID NO: 1884561 - RNA, 15 nt, Human
uucauuaaaagcuac

SEQ ID NO: 1884562 - RNA, 22 nt, Human
uuccaauuuacauacucugcuu

SEQ ID NO: 1884563 - RNA, 13 nt, Human
uucauucuugaaa

SEQ ID NO: 1884564 - RNA, 19 nt, Human
uucauucuugaaagcugug

SEQ ID NO: 1884565 - RNA, 16 nt, Human
uucauuaauucuauaa

SEQ ID NO: 1884566 - RNA, 21 nt, Human
uuccacaagagcccaggccuc

SEQ ID NO: 1884567 - RNA, 18 nt, Human
uuccaccaucaagccacc

SEQ ID NO: 1884568 - RNA, 13 nt, Human
uuccaggcuggga

SEQ ID NO: 1884569 - RNA, 15 nt, Human
uuccaggcugggaga

SEQ ID NO: 1884570 - RNA, 17 nt, Human
uuccaggcugggagagc

SEQ ID NO: 1884571 - RNA, 18 nt, Human
uuccagguuuaagcuguu

SEQ ID NO: 1884572 - RNA, 17 nt, Human
uuccagguuuaagcugu

SEQ ID NO: 1884573 - RNA, 19 nt, Human
uuccaguacaccuuucagc

SEQ ID NO: 1884574 - RNA, 13 nt, Human
auauaugcuaagu

SEQ ID NO: 1884575 - RNA, 15 nt, Human
uucaucaaugaauga

SEQ ID NO: 1884576 - RNA, 22 nt, Human
auauauguuuuaagaggcaggg

SEQ ID NO: 1884577 - RNA, 21 nt, Human
auauauguuuuaagaggcagg

SEQ ID NO: 1884578 - RNA, 15 nt, Human
auauauuuuaagacg

SEQ ID NO: 1884579 - RNA, 13 nt, Human
auauauuuuaauu

SEQ ID NO: 1884580 - RNA, 9 nt, Human
auauauuuc

SEQ ID NO: 1884581 - RNA, 21 nt, Human
uucaguaacccccacuggacu

SEQ ID NO: 1884582 - RNA, 14 nt, Human
uucaguaagccgug

SEQ ID NO: 1884583 - RNA, 17 nt, Human
uucagguaacaggcaga

SEQ ID NO: 1884584 - RNA, 20 nt, Human
uucauaucuauuuauuaaau

SEQ ID NO: 1884585 - RNA, 16 nt, Human
uucagugauuacuguc

SEQ ID NO: 1884586 - RNA, 17 nt, Human
uucauaguaacuucuua

SEQ ID NO: 1884587 - RNA, 16 nt, Human
uucagugaaagcauca

SEQ ID NO: 1884588 - RNA, 16 nt, Human
uucagaaauguguuau

SEQ ID NO: 1884589 - RNA, 22 nt, Human
uucagauauaaaagacugacca

SEQ ID NO: 1884590 - RNA, 13 nt, Human
uucagaagaaauu

SEQ ID NO: 1884591 - RNA, 18 nt, Human
uucagauaugauucaaau

SEQ ID NO: 1884592 - RNA, 17 nt, Human
uucagauaugauucaaa

SEQ ID NO: 1884593 - RNA, 16 nt, Human
uucagauaugauucaa

SEQ ID NO: 1884594 - RNA, 19 nt, Human
uucagauaugauucaaaug

SEQ ID NO: 1884595 - RNA, 16 nt, Human
uucagauuugccuuau

SEQ ID NO: 1884596 - RNA, 15 nt, Human
uucagccugccuucu

SEQ ID NO: 1884597 - RNA, 20 nt, Human
uucagccugccuucuuuucu

SEQ ID NO: 1884598 - RNA, 14 nt, Human
uucagccaagaauu

SEQ ID NO: 1884599 - RNA, 16 nt, Human
uucagguaacaggcag

SEQ ID NO: 1884600 - RNA, 15 nt, Human
uucagguaacaggca

SEQ ID NO: 1884601 - RNA, 22 nt, Human
uucaggguuggccccugcccgg

SEQ ID NO: 1884602 - RNA, 19 nt, Human
uucaggguuggccccugcc

SEQ ID NO: 1884603 - RNA, 17 nt, Human
uucaggguuggccccug

SEQ ID NO: 1884604 - RNA, 16 nt, Human
uucaggguuggccccu

SEQ ID NO: 1884605 - RNA, 14 nt, Human
uucaggguuggccc

SEQ ID NO: 1884606 - RNA, 16 nt, Human
auggaaccaggcuugg

SEQ ID NO: 1884607 - RNA, 17 nt, Human
auggaaccaggcuugga

SEQ ID NO: 1884608 - RNA, 21 nt, Human
auggaaguacuauaauuuacc

SEQ ID NO: 1884609 - RNA, 18 nt, Human
auggaacacucugagacu

SEQ ID NO: 1884610 - RNA, 17 nt, Human
auggaacacucugagac

SEQ ID NO: 1884611 - RNA, 14 nt, Human
auggaauaacaugu

SEQ ID NO: 1884612 - RNA, 15 nt, Human
auggaauaacaugua

SEQ ID NO: 1884613 - RNA, 22 nt, Human
augcuggcuguuggcugggggc

SEQ ID NO: 1884614 - RNA, 23 nt, Human
augcuguacaucuauuuuggauu

SEQ ID NO: 1884615 - RNA, 19 nt, Human
augcugugcccuaaagugu

SEQ ID NO: 1884616 - RNA, 13 nt, Human
augcugugaaauu

SEQ ID NO: 1884617 - RNA, 17 nt, Human
augcuuagauguuccag

SEQ ID NO: 1884618 - RNA, 19 nt, Human
uuuccagguuuaagcuguu

SEQ ID NO: 1884619 - RNA, 20 nt, Human
uuucauaguuggggucauag

SEQ ID NO: 1884620 - RNA, 12 nt, Human
uuucauaaucuu

SEQ ID NO: 1884621 - RNA, 14 nt, Human
uuucauaaucuuug

SEQ ID NO: 1884622 - RNA, 20 nt, Human
uuucccagcuacaccuuucu

SEQ ID NO: 1884623 - RNA, 11 nt, Human
uuucccaggac

SEQ ID NO: 1884624 - RNA, 14 nt, Human
uuucccaggacccu

SEQ ID NO: 1884625 - RNA, 16 nt, Human
uuucccaggacccuga

SEQ ID NO: 1884626 - RNA, 18 nt, Human
uuucccaggacccugaag

SEQ ID NO: 1884627 - RNA, 15 nt, Human
uuuccagucuccacc

SEQ ID NO: 1884628 - RNA, 20 nt, Human
uuuccagucuccaccaggaa

SEQ ID NO: 1884629 - RNA, 21 nt, Human
uuuccagucuccaccaggaac

SEQ ID NO: 1884630 - RNA, 24 nt, Human
uuucacucuuauugcccacgcugg

SEQ ID NO: 1884631 - RNA, 15 nt, Human
uuucacucuccuugg

SEQ ID NO: 1884632 - RNA, 15 nt, Human
uuucaguuuucagga

SEQ ID NO: 1884633 - RNA, 12 nt, Human
uuucauaaagca

SEQ ID NO: 1884634 - RNA, 17 nt, Human
uuuauuuuuuucugaau

SEQ ID NO: 1884635 - RNA, 14 nt, Human
uuucacucuccuug

SEQ ID NO: 1884636 - RNA, 22 nt, Human
uuucaccccucccuuucucccc

SEQ ID NO: 1884637 - RNA, 20 nt, Human
uuucaccccucccuuucucc

SEQ ID NO: 1884638 - RNA, 18 nt, Human
uuucaccccucccuuucu

SEQ ID NO: 1884639 - RNA, 17 nt, Human
uuucaccccucccuuuc

SEQ ID NO: 1884640 - RNA, 15 nt, Human
uuucaccccucccuu

SEQ ID NO: 1884641 - RNA, 14 nt, Human
uuucaccccucccu

SEQ ID NO: 1884642 - RNA, 13 nt, Human
uuucaccccuccc

SEQ ID NO: 1884643 - RNA, 13 nt, Human
uuuauauauguau

SEQ ID NO: 1884644 - RNA, 17 nt, Human
uuuauaugaagauaagu

SEQ ID NO: 1884645 - RNA, 19 nt, Human
uuuauaugaagauaagugu

SEQ ID NO: 1884646 - RNA, 14 nt, Human
uuuauguacaggau

SEQ ID NO: 1884647 - RNA, 19 nt, Human
uuuauguaguaauugacau

SEQ ID NO: 1884648 - RNA, 19 nt, Human
uuuauuaaauguagaaagu

SEQ ID NO: 1884649 - RNA, 15 nt, Human
uuuauuaaauacaaa

SEQ ID NO: 1884650 - RNA, 21 nt, Human
uuuauuaaauacaaaacuucc

SEQ ID NO: 1884651 - RNA, 19 nt, Human
uuuauuaaaugcccagccc

SEQ ID NO: 1884652 - RNA, 14 nt, Human
uuuaugugaaacau

SEQ ID NO: 1884653 - RNA, 15 nt, Human
uuuaugugaaacaug

SEQ ID NO: 1884654 - RNA, 13 nt, Human
uuuagauaauaca

SEQ ID NO: 1884655 - RNA, 18 nt, Human
uuuagaguugauacuaca

SEQ ID NO: 1884656 - RNA, 15 nt, Human
uuuagauaauacacc

SEQ ID NO: 1884657 - RNA, 18 nt, Human
augcuacacacugcaugu

SEQ ID NO: 1884658 - RNA, 17 nt, Human
augcuacacacugcaug

SEQ ID NO: 1884659 - RNA, 20 nt, Human
uuuaccuuuuuuauacauaa

SEQ ID NO: 1884660 - RNA, 19 nt, Human
uuuaccuuuuuuauacaua

SEQ ID NO: 1884661 - RNA, 14 nt, Human
uuuaccuuuuuuau

SEQ ID NO: 1884662 - RNA, 18 nt, Human
uuuacuaauagacaauuu

SEQ ID NO: 1884663 - RNA, 17 nt, Human
uuuacuaauagacaauu

SEQ ID NO: 1884664 - RNA, 14 nt, Human
uuuacuaauagaca

SEQ ID NO: 1884665 - RNA, 21 nt, Human
uuuaccuuuuuuauacauaaa

SEQ ID NO: 1884666 - RNA, 13 nt, Human
uuuacgcuuugau

SEQ ID NO: 1884667 - RNA, 18 nt, Human
uuuacgcuuugauucaua

SEQ ID NO: 1884668 - RNA, 13 nt, Human
uuuacggacaccc

SEQ ID NO: 1884669 - RNA, 17 nt, Human
uuuacggacacccccuc

SEQ ID NO: 1884670 - RNA, 13 nt, Human
augcuaagugaaa

SEQ ID NO: 1884671 - RNA, 13 nt, Human
augccucagcccu

SEQ ID NO: 1884672 - RNA, 14 nt, Human
augccguuacuuuu

SEQ ID NO: 1884673 - RNA, 20 nt, Human
augccguuacuuuucauauu

SEQ ID NO: 1884674 - RNA, 22 nt, Human
augccguuacuuuucauauuug

SEQ ID NO: 1884675 - RNA, 17 nt, Human
uuuaaagaaaaguuuug

SEQ ID NO: 1884676 - RNA, 15 nt, Human
uuuaaagaaaaguuu

SEQ ID NO: 1884677 - RNA, 13 nt, Human
uuuaaagaaaagu

SEQ ID NO: 1884678 - RNA, 21 nt, Human
uuuaaagaaaaguuuuguaaa

SEQ ID NO: 1884679 - RNA, 17 nt, Human
uuuaaaggcccuaucug

SEQ ID NO: 1884680 - RNA, 16 nt, Human
uuuaaagcuuccauug

SEQ ID NO: 1884681 - RNA, 15 nt, Human
uuuccuuccagccca

SEQ ID NO: 1884682 - RNA, 16 nt, Human
uuuccuuccagcccag

SEQ ID NO: 1884683 - RNA, 23 nt, Human
uuuccuucauucaacccaccugc

SEQ ID NO: 1884684 - RNA, 18 nt, Human
uuuccuucagugccuuau

SEQ ID NO: 1884685 - RNA, 21 nt, Human
uuuccuucagugccuuaugga

SEQ ID NO: 1884686 - RNA, 22 nt, Human
uuuccuucagugccuuauggaa

SEQ ID NO: 1884687 - RNA, 21 nt, Human
uuuccuucauucaacccaccu

SEQ ID NO: 1884688 - RNA, 12 nt, Human
uuuccugugucu

SEQ ID NO: 1884689 - RNA, 17 nt, Human
augggccuccugugugu

SEQ ID NO: 1884690 - RNA, 19 nt, Human
uuuccuuaaauuaucuaaa

SEQ ID NO: 1884691 - RNA, 11 nt, Human
uuuccuucagu

SEQ ID NO: 1884692 - RNA, 13 nt, Human
uuuccuuaaucca

SEQ ID NO: 1884693 - RNA, 16 nt, Human
uuuccuuaauccagcu

SEQ ID NO: 1884694 - RNA, 12 nt, Human
uuuccuucagug

SEQ ID NO: 1884695 - RNA, 15 nt, Human
uuuccuucagugccu

SEQ ID NO: 1884696 - RNA, 19 nt, Human
uuuccuuucauuuacugug

SEQ ID NO: 1884697 - RNA, 18 nt, Human
uuucgcaggauucuuccu

SEQ ID NO: 1884698 - RNA, 22 nt, Human
uuucgcaggauucuuccucccu

SEQ ID NO: 1884699 - RNA, 22 nt, Human
uuucgauucguuaagagagcaa

SEQ ID NO: 1884700 - RNA, 13 nt, Human
uuucguucaguua

SEQ ID NO: 1884701 - RNA, 15 nt, Human
uuucuaaacagagau

SEQ ID NO: 1884702 - RNA, 15 nt, Human
augggccuccugugu

SEQ ID NO: 1884703 - RNA, 15 nt, Human
augggcagagcagag

SEQ ID NO: 1884704 - RNA, 18 nt, Human
augggcacaaagggccca

SEQ ID NO: 1884705 - RNA, 20 nt, Human
augggcacaaagggcccaga

SEQ ID NO: 1884706 - RNA, 13 nt, Human
augggcagagcag

SEQ ID NO: 1884707 - RNA, 14 nt, Human
augggcagagcaga

SEQ ID NO: 1884708 - RNA, 21 nt, Human
augggcaacccccagccugcu

SEQ ID NO: 1884709 - RNA, 19 nt, Human
augggcaacccccagccug

SEQ ID NO: 1884710 - RNA, 23 nt, Human
augggagcugaggccacacucag

SEQ ID NO: 1884711 - RNA, 18 nt, Human
augggcaacccccagccu

SEQ ID NO: 1884712 - RNA, 13 nt, Human
augggagcucaug

SEQ ID NO: 1884713 - RNA, 22 nt, Human
augggaccuauaacugcccagc

SEQ ID NO: 1884714 - RNA, 15 nt, Human
augggaccuauaacu

SEQ ID NO: 1884715 - RNA, 21 nt, Human
auggacccaauauuuaccaga

SEQ ID NO: 1884716 - RNA, 18 nt, Human
auggaauugauuugcauu

SEQ ID NO: 1884717 - RNA, 19 nt, Human
auggaauugauuugcauug

SEQ ID NO: 1884718 - RNA, 19 nt, Human
auggacaugaucuucuuua

SEQ ID NO: 1884719 - RNA, 18 nt, Human
auggccucuucagaucuc

SEQ ID NO: 1884720 - RNA, 18 nt, Human
uuucuggaauguaaucaa

SEQ ID NO: 1884721 - RNA, 15 nt, Human
uuucuuuaaaaaaca

SEQ ID NO: 1884722 - RNA, 15 nt, Human
uuucugcucagcuuc

SEQ ID NO: 1884723 - RNA, 18 nt, Human
uuucugcucagcuucucc

SEQ ID NO: 1884724 - RNA, 19 nt, Human
uuucugcucagcuucuccu

SEQ ID NO: 1884725 - RNA, 19 nt, Human
uuucugcuggaaacagacu

SEQ ID NO: 1884726 - RNA, 22 nt, Human
uuucuuuucuggaauguaauca

SEQ ID NO: 1884727 - RNA, 16 nt, Human
uuucuuucacaaaaaa

SEQ ID NO: 1884728 - RNA, 13 nt, Human
uuucuuuguggcu

SEQ ID NO: 1884729 - RNA, 21 nt, Human
uuucuuuaguuuuugugaagu

SEQ ID NO: 1884730 - RNA, 13 nt, Human
uuucuuuaaugcu

SEQ ID NO: 1884731 - RNA, 18 nt, Human
uuucuuuaaugcuuuuau

SEQ ID NO: 1884732 - RNA, 15 nt, Human
uuucuuucacaaaaa

SEQ ID NO: 1884733 - RNA, 17 nt, Human
uuugaaacacuuugcau

SEQ ID NO: 1884734 - RNA, 19 nt, Human
uuugaaacacuuugcauaa

SEQ ID NO: 1884735 - RNA, 20 nt, Human
uuugaaagccccagaaauca

SEQ ID NO: 1884736 - RNA, 14 nt, Human
auggggcccugccu

SEQ ID NO: 1884737 - RNA, 13 nt, Human
auggggcccugcc

SEQ ID NO: 1884738 - RNA, 23 nt, Human
augggcuggguucuacccaggug

SEQ ID NO: 1884739 - RNA, 15 nt, Human
uuucuccagggucag

SEQ ID NO: 1884740 - RNA, 23 nt, Human
uuucuccauauuagauuuaccca

SEQ ID NO: 1884741 - RNA, 14 nt, Human
uuucugccgcagcc

SEQ ID NO: 1884742 - RNA, 16 nt, Human
uuucugccgcagcccu

SEQ ID NO: 1884743 - RNA, 17 nt, Human
uuucugcauauguugaa

SEQ ID NO: 1884744 - RNA, 13 nt, Human
uuucugcauaugu

SEQ ID NO: 1884745 - RNA, 16 nt, Human
uuucucaaagaaauuu

SEQ ID NO: 1884746 - RNA, 15 nt, Human
uuucucaaagaaauu

SEQ ID NO: 1884747 - RNA, 14 nt, Human
uuucucaaagaaau

SEQ ID NO: 1884748 - RNA, 21 nt, Human
uuucuaugacacaugcaaggu

SEQ ID NO: 1884749 - RNA, 15 nt, Human
uuucuaugacacaug

SEQ ID NO: 1884750 - RNA, 22 nt, Human
uuucuauuaaauuaaauuuugu

SEQ ID NO: 1884751 - RNA, 22 nt, Human
uuucuaggacugaauuaugaaa

SEQ ID NO: 1884752 - RNA, 17 nt, Human
uuucuaggacugaauua

SEQ ID NO: 1884753 - RNA, 21 nt, Human
uuucuaggacugaauuaugaa

SEQ ID NO: 1884754 - RNA, 16 nt, Human
uuucuaaacagagaug

SEQ ID NO: 1884755 - RNA, 18 nt, Human
augagaugccugaagcca

SEQ ID NO: 1884756 - RNA, 24 nt, Human
augagaugauacauccaaagcaga

SEQ ID NO: 1884757 - RNA, 23 nt, Human
augagaugauacauccaaagcag

SEQ ID NO: 1884758 - RNA, 16 nt, Human
augagaggaaaucacc

SEQ ID NO: 1884759 - RNA, 14 nt, Human
augagaggaaauca

SEQ ID NO: 1884760 - RNA, 15 nt, Human
augagaggaaaucac

SEQ ID NO: 1884761 - RNA, 12 nt, Human
augagaggaaau

SEQ ID NO: 1884762 - RNA, 13 nt, Human
augagaggaaauc

SEQ ID NO: 1884763 - RNA, 16 nt, Human
augagccucagcaucc

SEQ ID NO: 1884764 - RNA, 15 nt, Human
augagccucagcauc

SEQ ID NO: 1884765 - RNA, 12 nt, Human
augagccucagc

SEQ ID NO: 1884766 - RNA, 21 nt, Human
augagccaccgcgcccagccu

SEQ ID NO: 1884767 - RNA, 18 nt, Human
augagccaccgcgcccag

SEQ ID NO: 1884768 - RNA, 22 nt, Human
augagcaucaggccaggcccuc

SEQ ID NO: 1884769 - RNA, 15 nt, Human
augagcaucaggcca

SEQ ID NO: 1884770 - RNA, 17 nt, Human
augagauuaauuccuuu

SEQ ID NO: 1884771 - RNA, 16 nt, Human
augagcaucaggccag

SEQ ID NO: 1884772 - RNA, 17 nt, Human
augagcaucaggccagg

SEQ ID NO: 1884773 - RNA, 18 nt, Human
augagcaucaggccaggc

SEQ ID NO: 1884774 - RNA, 19 nt, Human
augagcaucaggccaggcc

SEQ ID NO: 1884775 - RNA, 20 nt, Human
augagcaucaggccaggccc

SEQ ID NO: 1884776 - RNA, 21 nt, Human
augagcaucaggccaggcccu

SEQ ID NO: 1884777 - RNA, 13 nt, Human
uugugaaauuauu

SEQ ID NO: 1884778 - RNA, 19 nt, Human
uugucccggauuuuuguua

SEQ ID NO: 1884779 - RNA, 15 nt, Human
uugucccucugcccc

SEQ ID NO: 1884780 - RNA, 16 nt, Human
uugucccucugcccca

SEQ ID NO: 1884781 - RNA, 18 nt, Human
uugucccugaagagaagg

SEQ ID NO: 1884782 - RNA, 17 nt, Human
uugucccucugccccau

SEQ ID NO: 1884783 - RNA, 17 nt, Human
uugucaccuucaccucc

SEQ ID NO: 1884784 - RNA, 18 nt, Human
uugucacacacuuuggcu

SEQ ID NO: 1884785 - RNA, 15 nt, Human
augauaaaacacaaa

SEQ ID NO: 1884786 - RNA, 17 nt, Human
augaguggcuuuaauga

SEQ ID NO: 1884787 - RNA, 13 nt, Human
augaguuuuuccc

SEQ ID NO: 1884788 - RNA, 18 nt, Human
augagccucagcauccug

SEQ ID NO: 1884789 - RNA, 17 nt, Human
augagccucagcauccu

SEQ ID NO: 1884790 - RNA, 19 nt, Human
augcaccuugugucuguac

SEQ ID NO: 1884791 - RNA, 18 nt, Human
augcaccuugugucugua

SEQ ID NO: 1884792 - RNA, 16 nt, Human
augcaccuugugucug

SEQ ID NO: 1884793 - RNA, 15 nt, Human
augcaccuugugucu

SEQ ID NO: 1884794 - RNA, 19 nt, Human
augcaccuggaauauauaa

SEQ ID NO: 1884795 - RNA, 22 nt, Human
augcaaggucauuuuuuuuaag

SEQ ID NO: 1884796 - RNA, 13 nt, Human
augcaagggacug

SEQ ID NO: 1884797 - RNA, 18 nt, Human
augcaagggacugugugu

SEQ ID NO: 1884798 - RNA, 14 nt, Human
augcaccuggaaua

SEQ ID NO: 1884799 - RNA, 16 nt, Human
augcaccuggaauaua

SEQ ID NO: 1884800 - RNA, 22 nt, Human
augcaaacuuuauuuuguguuu

SEQ ID NO: 1884801 - RNA, 16 nt, Human
augcaaggucauuuuu

SEQ ID NO: 1884802 - RNA, 14 nt, Human
augcaaggucauuu

SEQ ID NO: 1884803 - RNA, 15 nt, Human
augaucuucuuuaua

SEQ ID NO: 1884804 - RNA, 18 nt, Human
augaucuucuuuauaauu

SEQ ID NO: 1884805 - RNA, 16 nt, Human
augcaaaccaucauug

SEQ ID NO: 1884806 - RNA, 18 nt, Human
augcaaaccaucauugaa

SEQ ID NO: 1884807 - RNA, 19 nt, Human
augcaaaccaucauugaaa

SEQ ID NO: 1884808 - RNA, 20 nt, Human
augcaaaccaucauugaaau

SEQ ID NO: 1884809 - RNA, 21 nt, Human
augcaaaccaucauugaaauc

SEQ ID NO: 1884810 - RNA, 22 nt, Human
augcaaaccaucauugaaaucu

SEQ ID NO: 1884811 - RNA, 15 nt, Human
augaucacggcucac

SEQ ID NO: 1884812 - RNA, 19 nt, Human
augaucacggcucacugca

SEQ ID NO: 1884813 - RNA, 18 nt, Human
augaucacggcucacugc

SEQ ID NO: 1884814 - RNA, 23 nt, Human
augaucacggcucacugcagccu

SEQ ID NO: 1884815 - RNA, 16 nt, Human
augauccuaggcauuu

SEQ ID NO: 1884816 - RNA, 14 nt, Human
augaucuucuuuau

SEQ ID NO: 1884817 - RNA, 14 nt, Human
augaucugaaaaau

SEQ ID NO: 1884818 - RNA, 17 nt, Human
uugugaagguggaaaua

SEQ ID NO: 1884819 - RNA, 18 nt, Human
uugugaagguggaaauaa

SEQ ID NO: 1884820 - RNA, 22 nt, Human
uugugaaggccucgcaggaaga

SEQ ID NO: 1884821 - RNA, 19 nt, Human
uugugugugcucugcuuca

SEQ ID NO: 1884822 - RNA, 16 nt, Human
uugugugugggagugu

SEQ ID NO: 1884823 - RNA, 15 nt, Human
uuguuccccuccucc

SEQ ID NO: 1884824 - RNA, 14 nt, Human
uuguuccccuccuc

SEQ ID NO: 1884825 - RNA, 13 nt, Human
uuguuccccuccu

SEQ ID NO: 1884826 - RNA, 13 nt, Human
uugugugugggag

SEQ ID NO: 1884827 - RNA, 10 nt, Human
uugugugugg

SEQ ID NO: 1884828 - RNA, 16 nt, Human
uuguucgggugugcaa

SEQ ID NO: 1884829 - RNA, 17 nt, Human
uuguucgggugugcaau

SEQ ID NO: 1884830 - RNA, 23 nt, Human
uuguuccccuccuccacucuccc

SEQ ID NO: 1884831 - RNA, 20 nt, Human
uuguuccccuccuccacucu

SEQ ID NO: 1884832 - RNA, 19 nt, Human
uuguuccccuccuccacuc

SEQ ID NO: 1884833 - RNA, 18 nt, Human
uuguuccccuccuccacu

SEQ ID NO: 1884834 - RNA, 16 nt, Human
uuguuccccuccucca

SEQ ID NO: 1884835 - RNA, 16 nt, Human
aucuuuucacaaauaa

SEQ ID NO: 1884836 - RNA, 15 nt, Human
aucuuuucacaaaua

SEQ ID NO: 1884837 - RNA, 14 nt, Human
aucuuuucacaaau

SEQ ID NO: 1884838 - RNA, 13 nt, Human
aucuuuucacaaa

SEQ ID NO: 1884839 - RNA, 20 nt, Human
augaaagacuguacaaagua

SEQ ID NO: 1884840 - RNA, 17 nt, Human
aucuuuucacaaauaaa

SEQ ID NO: 1884841 - RNA, 14 nt, Human
augaaaugagguca

SEQ ID NO: 1884842 - RNA, 22 nt, Human
uuggcgcugccccuggcagccc

SEQ ID NO: 1884843 - RNA, 13 nt, Human
aucuuucugcaga

SEQ ID NO: 1884844 - RNA, 17 nt, Human
aucuuugugaaggccuc

SEQ ID NO: 1884845 - RNA, 13 nt, Human
aucuuugugaagg

SEQ ID NO: 1884846 - RNA, 13 nt, Human
aucuuuguggcca

SEQ ID NO: 1884847 - RNA, 14 nt, Human
aucuuuguggccaa

SEQ ID NO: 1884848 - RNA, 15 nt, Human
aucuuuguggccaag

SEQ ID NO: 1884849 - RNA, 22 nt, Human
aucuuuuacaacugccucgaaa

SEQ ID NO: 1884850 - RNA, 16 nt, Human
aucuuuguggccaagg

SEQ ID NO: 1884851 - RNA, 19 nt, Human
aucuuuguggccaaggagc

SEQ ID NO: 1884852 - RNA, 23 nt, Human
aucuuuguggccaaggagcugcu

SEQ ID NO: 1884853 - RNA, 14 nt, Human
uuggcugcagggag

SEQ ID NO: 1884854 - RNA, 23 nt, Human
uuggcuauuagagaucaaccccu

SEQ ID NO: 1884855 - RNA, 11 nt, Human
uuggcugcuga

SEQ ID NO: 1884856 - RNA, 15 nt, Human
uuggcugcugaaggc

SEQ ID NO: 1884857 - RNA, 22 nt, Human
uuggcuaggaccccuccaugug

SEQ ID NO: 1884858 - RNA, 22 nt, Human
uuggcuagagguucaaagauau

SEQ ID NO: 1884859 - RNA, 21 nt, Human
uuggcuagagguucaaagaua

SEQ ID NO: 1884860 - RNA, 18 nt, Human
uuggaaagaguaggaaga

SEQ ID NO: 1884861 - RNA, 23 nt, Human
uuggaaagaguaggaagacuuug

SEQ ID NO: 1884862 - RNA, 19 nt, Human
uuggccugaucagaccacg

SEQ ID NO: 1884863 - RNA, 17 nt, Human
uuggacggcugggcaca

SEQ ID NO: 1884864 - RNA, 19 nt, Human
aucuaauaccucugugugc

SEQ ID NO: 1884865 - RNA, 17 nt, Human
aucuaauaccucugugu

SEQ ID NO: 1884866 - RNA, 15 nt, Human
aucuaauaccucugu

SEQ ID NO: 1884867 - RNA, 20 nt, Human
uugcuaagugaggaugaaaa

SEQ ID NO: 1884868 - RNA, 15 nt, Human
uugcuaucuauugau

SEQ ID NO: 1884869 - RNA, 20 nt, Human
uugcuaugagcuggggaugu

SEQ ID NO: 1884870 - RNA, 19 nt, Human
uugcugaauacagaggcaa

SEQ ID NO: 1884871 - RNA, 23 nt, Human
uugcugaaggcuaaauucacagc

SEQ ID NO: 1884872 - RNA, 17 nt, Human
uugcugauggugcaaug

SEQ ID NO: 1884873 - RNA, 18 nt, Human
uugcugauggugcaauga

SEQ ID NO: 1884874 - RNA, 19 nt, Human
uugcugauggugcaaugac

SEQ ID NO: 1884875 - RNA, 14 nt, Human
uugcugagccucug

SEQ ID NO: 1884876 - RNA, 15 nt, Human
uugcugagccucugc

SEQ ID NO: 1884877 - RNA, 22 nt, Human
uugcugagccucugcuccccag

SEQ ID NO: 1884878 - RNA, 13 nt, Human
uugcuuguucucu

SEQ ID NO: 1884879 - RNA, 17 nt, Human
uuggaaagaguaggaag

SEQ ID NO: 1884880 - RNA, 16 nt, Human
uugcuuuuaaaaucca

SEQ ID NO: 1884881 - RNA, 20 nt, Human
augacacgaauauugcugau

SEQ ID NO: 1884882 - RNA, 19 nt, Human
augacacgaauauugcuga

SEQ ID NO: 1884883 - RNA, 23 nt, Human
augacaaaaucaucuuugugaag

SEQ ID NO: 1884884 - RNA, 17 nt, Human
augacaacuacagaaaa

SEQ ID NO: 1884885 - RNA, 13 nt, Human
uuguaaugaaaac

SEQ ID NO: 1884886 - RNA, 20 nt, Human
uuguaaggaaugauuaauua

SEQ ID NO: 1884887 - RNA, 22 nt, Human
uugggguacccacugcucuggu

SEQ ID NO: 1884888 - RNA, 17 nt, Human
uuggggucuggcagccu

SEQ ID NO: 1884889 - RNA, 19 nt, Human
uugguuaggcauuguggga

SEQ ID NO: 1884890 - RNA, 14 nt, Human
uugguucauuaauu

SEQ ID NO: 1884891 - RNA, 20 nt, Human
uugguucauuaauucuauaa

SEQ ID NO: 1884892 - RNA, 17 nt, Human
uugguuuuguuccccuc

SEQ ID NO: 1884893 - RNA, 14 nt, Human
uugguuuuguuccc

SEQ ID NO: 1884894 - RNA, 22 nt, Human
uuguaagcaugcacaaauucug

SEQ ID NO: 1884895 - RNA, 14 nt, Human
uuguaaggaaugau

SEQ ID NO: 1884896 - RNA, 18 nt, Human
uuguaaaaaaaaaaaaca

SEQ ID NO: 1884897 - RNA, 18 nt, Human
uugguuuuguuccccucc

SEQ ID NO: 1884898 - RNA, 13 nt, Human
augaaccacaucu

SEQ ID NO: 1884899 - RNA, 20 nt, Human
augaaccacaucuugcucug

SEQ ID NO: 1884900 - RNA, 17 nt, Human
uugggguacccacugcu

SEQ ID NO: 1884901 - RNA, 19 nt, Human
uuggggaagaacgaagcca

SEQ ID NO: 1884902 - RNA, 13 nt, Human
uugggccagacau

SEQ ID NO: 1884903 - RNA, 14 nt, Human
uugggccagacaug

SEQ ID NO: 1884904 - RNA, 20 nt, Human
uugggccugcuccagaccug

SEQ ID NO: 1884905 - RNA, 19 nt, Human
auuuuaauuauuauucuuc

SEQ ID NO: 1884906 - RNA, 13 nt, Human
auuuuaauuauua

SEQ ID NO: 1884907 - RNA, 23 nt, Human
auuuuaauuauuauucuucauaa

SEQ ID NO: 1884908 - RNA, 12 nt, Human
auuuuaauucau

SEQ ID NO: 1884909 - RNA, 24 nt, Human
auuuuaauucaucccaacugucuu

SEQ ID NO: 1884910 - RNA, 15 nt, Human
auuuuaauucaguug

SEQ ID NO: 1884911 - RNA, 17 nt, Human
auuuuacauaaauuuag

SEQ ID NO: 1884912 - RNA, 16 nt, Human
auuuuacauaaauuua

SEQ ID NO: 1884913 - RNA, 16 nt, Human
auuuuacuuuuuccug

SEQ ID NO: 1884914 - RNA, 17 nt, Human
auuuuacuuuuuccugg

SEQ ID NO: 1884915 - RNA, 17 nt, Human
auuuuaccuuugacaaa

SEQ ID NO: 1884916 - RNA, 23 nt, Human
auuugugaagguggaaauaaacu

SEQ ID NO: 1884917 - RNA, 14 nt, Human
auuugugauacaau

SEQ ID NO: 1884918 - RNA, 22 nt, Human
auuuucaguuauuauauuuaca

SEQ ID NO: 1884919 - RNA, 13 nt, Human
auuuucauuuguu

SEQ ID NO: 1884920 - RNA, 15 nt, Human
auuuucauuaaaagc

SEQ ID NO: 1884921 - RNA, 15 nt, Human
auuuuccucugcuuu

SEQ ID NO: 1884922 - RNA, 19 nt, Human
auuuuccucugcuuugaaa

SEQ ID NO: 1884923 - RNA, 21 nt, Human
auuuuauuuuuuucugaauua

SEQ ID NO: 1884924 - RNA, 21 nt, Human
auuuucaccuguuuuuaagcu

SEQ ID NO: 1884925 - RNA, 20 nt, Human
auuuucacacaauacaauaa

SEQ ID NO: 1884926 - RNA, 23 nt, Human
auugugaucagaccauaauguua

SEQ ID NO: 1884927 - RNA, 15 nt, Human
auugugauguguccu

SEQ ID NO: 1884928 - RNA, 14 nt, Human
auugugaugugucc

SEQ ID NO: 1884929 - RNA, 13 nt, Human
auugugauguguc

SEQ ID NO: 1884930 - RNA, 17 nt, Human
auuguccccgacccuug

SEQ ID NO: 1884931 - RNA, 19 nt, Human
auuguccccgacccuugcc

SEQ ID NO: 1884932 - RNA, 20 nt, Human
auuguccccgacccuugccg

SEQ ID NO: 1884933 - RNA, 13 nt, Human
auuguauucagag

SEQ ID NO: 1884934 - RNA, 15 nt, Human
auuguauuuguuucu

SEQ ID NO: 1884935 - RNA, 12 nt, Human
auugguguugac

SEQ ID NO: 1884936 - RNA, 18 nt, Human
auugugucucuugguccu

SEQ ID NO: 1884937 - RNA, 14 nt, Human
auugugucucuugg

SEQ ID NO: 1884938 - RNA, 17 nt, Human
auucuccuuguguuacu

SEQ ID NO: 1884939 - RNA, 23 nt, Human
auucuccuucagcccucaccccu

SEQ ID NO: 1884940 - RNA, 17 nt, Human
auucugcaguaaaucuu

SEQ ID NO: 1884941 - RNA, 18 nt, Human
auucugcaguaaaucuuu

SEQ ID NO: 1884942 - RNA, 20 nt, Human
auucugcaguaaaucuuuua

SEQ ID NO: 1884943 - RNA, 21 nt, Human
auucugcaguaaaucuuuuac

SEQ ID NO: 1884944 - RNA, 23 nt, Human
auucugcaguaaaucuuuuacaa

SEQ ID NO: 1884945 - RNA, 12 nt, Human
auucuggaguca

SEQ ID NO: 1884946 - RNA, 24 nt, Human
auucugucucuggauuauauuaug

SEQ ID NO: 1884947 - RNA, 17 nt, Human
auucugucauagaaagu

SEQ ID NO: 1884948 - RNA, 18 nt, Human
auucugucauagaaagug

SEQ ID NO: 1884949 - RNA, 15 nt, Human
auucuuaaaaaaaga

SEQ ID NO: 1884950 - RNA, 22 nt, Human
auucuuccucccucccucuuuc

SEQ ID NO: 1884951 - RNA, 13 nt, Human
auucuucuccacu

SEQ ID NO: 1884952 - RNA, 13 nt, Human
auucuuuuguaau

SEQ ID NO: 1884953 - RNA, 16 nt, Human
auucuuuuguaauuua

SEQ ID NO: 1884954 - RNA, 17 nt, Human
auucuuuuguaauuuaa

SEQ ID NO: 1884955 - RNA, 13 nt, Human
auucuuauuuaau

SEQ ID NO: 1884956 - RNA, 18 nt, Human
auucuuauucaaagaaau

SEQ ID NO: 1884957 - RNA, 14 nt, Human
auucuuauuuaaug

SEQ ID NO: 1884958 - RNA, 18 nt, Human
auucuuauuuaaugaaag

SEQ ID NO: 1884959 - RNA, 16 nt, Human
auucuuauuuuuuaaa

SEQ ID NO: 1884960 - RNA, 18 nt, Human
auugacccacaagaaaug

SEQ ID NO: 1884961 - RNA, 20 nt, Human
auuggguggggggcuucaua

SEQ ID NO: 1884962 - RNA, 22 nt, Human
auuggguggggggcuucauaca

SEQ ID NO: 1884963 - RNA, 18 nt, Human
auugggugggcaggaaaa

SEQ ID NO: 1884964 - RNA, 21 nt, Human
auuggguggggggcuucauac

SEQ ID NO: 1884965 - RNA, 15 nt, Human
auuggggucccucua

SEQ ID NO: 1884966 - RNA, 16 nt, Human
auugggccccugccag

SEQ ID NO: 1884967 - RNA, 15 nt, Human
auugggccccugcca

SEQ ID NO: 1884968 - RNA, 18 nt, Human
auuucauuucaacuguuu

SEQ ID NO: 1884969 - RNA, 16 nt, Human
auuucaaaaugcuuuu

SEQ ID NO: 1884970 - RNA, 13 nt, Human
auuucaaaaugcu

SEQ ID NO: 1884971 - RNA, 14 nt, Human
auuucaaaaugcuu

SEQ ID NO: 1884972 - RNA, 15 nt, Human
auuucaaaaugcuuu

SEQ ID NO: 1884973 - RNA, 21 nt, Human
auuucaaaaugcuuuuuauua

SEQ ID NO: 1884974 - RNA, 19 nt, Human
auuucauuuuuacccuuac

SEQ ID NO: 1884975 - RNA, 21 nt, Human
auuucauuuuguaacaaauga

SEQ ID NO: 1884976 - RNA, 17 nt, Human
auuuccagccaaagccu

SEQ ID NO: 1884977 - RNA, 23 nt, Human
auuucauuuuguaacaaaugaac

SEQ ID NO: 1884978 - RNA, 23 nt, Human
auuucccccaccccauuucucuc

SEQ ID NO: 1884979 - RNA, 21 nt, Human
auuucccccaccccauuucuc

SEQ ID NO: 1884980 - RNA, 13 nt, Human
auuuccagucucc

SEQ ID NO: 1884981 - RNA, 17 nt, Human
auuuccagucuccacca

SEQ ID NO: 1884982 - RNA, 14 nt, Human
auuugaaaauuuug

SEQ ID NO: 1884983 - RNA, 15 nt, Human
auuugaaaauuuuga

SEQ ID NO: 1884984 - RNA, 16 nt, Human
auuugaagaacaugug

SEQ ID NO: 1884985 - RNA, 16 nt, Human
auuuccguuaaaauac

SEQ ID NO: 1884986 - RNA, 15 nt, Human
auuuccguuaaaaua

SEQ ID NO: 1884987 - RNA, 16 nt, Human
auuuccccuuuugcau

SEQ ID NO: 1884988 - RNA, 15 nt, Human
auuuccccuuuugca

SEQ ID NO: 1884989 - RNA, 13 nt, Human
auuuauucugcuc

SEQ ID NO: 1884990 - RNA, 18 nt, Human
auuuauucaauuccucug

SEQ ID NO: 1884991 - RNA, 19 nt, Human
auuuauucaauuccucugg

SEQ ID NO: 1884992 - RNA, 14 nt, Human
auuuauuuauuauu

SEQ ID NO: 1884993 - RNA, 13 nt, Human
auuuauuuacaga

SEQ ID NO: 1884994 - RNA, 23 nt, Human
auuuauuuacagaugaauguauu

SEQ ID NO: 1884995 - RNA, 24 nt, Human
auuuauuuacugagcuucucugug

SEQ ID NO: 1884996 - RNA, 13 nt, Human
auuuauuuauuau

SEQ ID NO: 1884997 - RNA, 15 nt, Human
auuuauuaauugcuu

SEQ ID NO: 1884998 - RNA, 11 nt, Human
auuuauuauuu

SEQ ID NO: 1884999 - RNA, 13 nt, Human
auuuauuauuuau

SEQ ID NO: 1885000 - RNA, 19 nt, Human
auuuauuauuuauuuauua

SEQ ID NO: 1885001 - RNA, 14 nt, Human
auuuauuauuuuca

SEQ ID NO: 1885002 - RNA, 21 nt, Human
auuuauuauuuucaccuguuu

SEQ ID NO: 1885003 - RNA, 17 nt, Human
auuuauaaaaauaaaaa

SEQ ID NO: 1885004 - RNA, 22 nt, Human
auuuauaaaaauaaaaaacacu

SEQ ID NO: 1885005 - RNA, 16 nt, Human
auuuauaaaaaggugu

SEQ ID NO: 1885006 - RNA, 13 nt, Human
auuuaguguucau

SEQ ID NO: 1885007 - RNA, 20 nt, Human
auuuaguaucuuuuuauuca

SEQ ID NO: 1885008 - RNA, 18 nt, Human
auuuaguauuuuguuuca

SEQ ID NO: 1885009 - RNA, 16 nt, Human
auuuagagaggaaaag

SEQ ID NO: 1885010 - RNA, 13 nt, Human
auuuagauaugca

SEQ ID NO: 1885011 - RNA, 12 nt, Human
auuuaacagaaa

SEQ ID NO: 1885012 - RNA, 14 nt, Human
auuuaacagaaaug

SEQ ID NO: 1885013 - RNA, 14 nt, Human
auuuaaaaaaauca

SEQ ID NO: 1885014 - RNA, 22 nt, Human
auuuaaaaacaggcagcucaua

SEQ ID NO: 1885015 - RNA, 18 nt, Human
auuuaaaaauauuuuugg

SEQ ID NO: 1885016 - RNA, 14 nt, Human
auuuaaaaauauuu

SEQ ID NO: 1885017 - RNA, 17 nt, Human
auuuacuucuuauacau

SEQ ID NO: 1885018 - RNA, 12 nt, Human
auuuacuguuuu

SEQ ID NO: 1885019 - RNA, 15 nt, Human
auuuacugugucuuu

SEQ ID NO: 1885020 - RNA, 14 nt, Human
auuuacuucuuaua

SEQ ID NO: 1885021 - RNA, 16 nt, Human
auuuacuucuuauaca

SEQ ID NO: 1885022 - RNA, 15 nt, Human
auuuagaaauauaau

SEQ ID NO: 1885023 - RNA, 22 nt, Human
auuuagaaagaagcccaauauu

SEQ ID NO: 1885024 - RNA, 14 nt, Human
auuuauucugcuca

SEQ ID NO: 1885025 - RNA, 18 nt, Human
auucuaaaugaauguuua

SEQ ID NO: 1885026 - RNA, 17 nt, Human
auucuaaaugaauguuu

SEQ ID NO: 1885027 - RNA, 15 nt, Human
auucuaaaugaaugu

SEQ ID NO: 1885028 - RNA, 15 nt, Human
auucuauaaggccau

SEQ ID NO: 1885029 - RNA, 20 nt, Human
auucuauuuauauguacaug

SEQ ID NO: 1885030 - RNA, 19 nt, Human
auucuccaccugccaggga

SEQ ID NO: 1885031 - RNA, 20 nt, Human
auucuccaccugccagggac

SEQ ID NO: 1885032 - RNA, 22 nt, Human
auucuauuuauauguacaugag

SEQ ID NO: 1885033 - RNA, 13 nt, Human
auucuccugccuc

SEQ ID NO: 1885034 - RNA, 14 nt, Human
auucuccugccuca

SEQ ID NO: 1885035 - RNA, 11 nt, Human
auucuccugcc

SEQ ID NO: 1885036 - RNA, 21 nt, Human
auucuccaccugccagggaca

SEQ ID NO: 1885037 - RNA, 14 nt, Human
auucuccauuuguu

SEQ ID NO: 1885038 - RNA, 16 nt, Human
auucuccauuuguuau

SEQ ID NO: 1885039 - RNA, 18 nt, Human
auucuccauuuguuaucu

SEQ ID NO: 1885040 - RNA, 19 nt, Human
auucuccauuuguuaucug

SEQ ID NO: 1885041 - RNA, 17 nt, Human
auucuccugccucagcc

SEQ ID NO: 1885042 - RNA, 15 nt, Human
auucuccugccucag

SEQ ID NO: 1885043 - RNA, 19 nt, Human
auucuccugccucagccuc

SEQ ID NO: 1885044 - RNA, 20 nt, Human
auucuccugccucagccucc

SEQ ID NO: 1885045 - RNA, 18 nt, Human
auucuccugccucagccu

SEQ ID NO: 1885046 - RNA, 15 nt, Human
auucuccuucagccc

SEQ ID NO: 1885047 - RNA, 14 nt, Human
auucuccuucagcc

SEQ ID NO: 1885048 - RNA, 13 nt, Human
auucuccuucagc

SEQ ID NO: 1885049 - RNA, 16 nt, Human
auucuccuuguguuac

SEQ ID NO: 1885050 - RNA, 22 nt, Human
auucuccuucagcccucacccc

SEQ ID NO: 1885051 - RNA, 18 nt, Human
auucuccuucagcccuca

SEQ ID NO: 1885052 - RNA, 17 nt, Human
auucuccuucagcccuc

SEQ ID NO: 1885053 - RNA, 16 nt, Human
auucuccuucagcccu

SEQ ID NO: 1885054 - RNA, 15 nt, Human
auucccaagcucugc

SEQ ID NO: 1885055 - RNA, 14 nt, Human
auucccaagcucug

SEQ ID NO: 1885056 - RNA, 16 nt, Human
auucccaagcucugcu

SEQ ID NO: 1885057 - RNA, 16 nt, Human
auuccaacacugauuu

SEQ ID NO: 1885058 - RNA, 15 nt, Human
auucaguaauaacuc

SEQ ID NO: 1885059 - RNA, 19 nt, Human
auucaguaauaacucuacc

SEQ ID NO: 1885060 - RNA, 20 nt, Human
auucaggaagcucagggccu

SEQ ID NO: 1885061 - RNA, 18 nt, Human
auucagauaugauucaaa

SEQ ID NO: 1885062 - RNA, 17 nt, Human
auucaggaagcucaggg

SEQ ID NO: 1885063 - RNA, 19 nt, Human
auucaggaagcucagggcc

SEQ ID NO: 1885064 - RNA, 17 nt, Human
auucagaguugaugguu

SEQ ID NO: 1885065 - RNA, 14 nt, Human
auucaggaagcuca

SEQ ID NO: 1885066 - RNA, 13 nt, Human
auucagacaggca

SEQ ID NO: 1885067 - RNA, 14 nt, Human
auucagacaggcaa

SEQ ID NO: 1885068 - RNA, 12 nt, Human
auugaaaucuuu

SEQ ID NO: 1885069 - RNA, 20 nt, Human
auucagauaugauucaaaug

SEQ ID NO: 1885070 - RNA, 12 nt, Human
auguuguuauuu

SEQ ID NO: 1885071 - RNA, 17 nt, Human
auguuguuauuuaaaga

SEQ ID NO: 1885072 - RNA, 15 nt, Human
auguuguuauuuaaa

SEQ ID NO: 1885073 - RNA, 14 nt, Human
auguuguuauuuaa

SEQ ID NO: 1885074 - RNA, 13 nt, Human
auguuguuauuua

SEQ ID NO: 1885075 - RNA, 17 nt, Human
auguuuaguaaucauau

SEQ ID NO: 1885076 - RNA, 23 nt, Human
auuaaaacacaacaucuuuuucu

SEQ ID NO: 1885077 - RNA, 22 nt, Human
auuaaaaaucucaaauuucuaa

SEQ ID NO: 1885078 - RNA, 20 nt, Human
auuaaaaaucucaaauuucu

SEQ ID NO: 1885079 - RNA, 19 nt, Human
auuaaaaaucucaaauuuc

SEQ ID NO: 1885080 - RNA, 15 nt, Human
auuaaaaaucucaaa

SEQ ID NO: 1885081 - RNA, 11 nt, Human
auuaaaaccac

SEQ ID NO: 1885082 - RNA, 23 nt, Human
auuaaacucuucacaaaaucugu

SEQ ID NO: 1885083 - RNA, 14 nt, Human
uuuucaguuuucag

SEQ ID NO: 1885084 - RNA, 12 nt, Human
uuuucaguuuuc

SEQ ID NO: 1885085 - RNA, 11 nt, Human
uuuuauuuuau

SEQ ID NO: 1885086 - RNA, 20 nt, Human
uuuuaggccaaaaaaaugua

SEQ ID NO: 1885087 - RNA, 17 nt, Human
uuuuagggagcuggucu

SEQ ID NO: 1885088 - RNA, 13 nt, Human
uuuuauuaugcau

SEQ ID NO: 1885089 - RNA, 20 nt, Human
uuuucauuuaggugaggaag

SEQ ID NO: 1885090 - RNA, 16 nt, Human
uuuucauauuugcacu

SEQ ID NO: 1885091 - RNA, 18 nt, Human
uuuucauugaacagcaaa

SEQ ID NO: 1885092 - RNA, 21 nt, Human
auguuaaacuuacuuaguguu

SEQ ID NO: 1885093 - RNA, 17 nt, Human
auguucagaagaaauuc

SEQ ID NO: 1885094 - RNA, 16 nt, Human
auguucagaagaaauu

SEQ ID NO: 1885095 - RNA, 15 nt, Human
auguugcauagaaua

SEQ ID NO: 1885096 - RNA, 12 nt, Human
auguugcccagg

SEQ ID NO: 1885097 - RNA, 17 nt, Human
auguugcccaggcaggu

SEQ ID NO: 1885098 - RNA, 17 nt, Human
auguugcauagaauaaa

SEQ ID NO: 1885099 - RNA, 18 nt, Human
auguugcauagaauaaaa

SEQ ID NO: 1885100 - RNA, 18 nt, Human
auguucaucaaugaauga

SEQ ID NO: 1885101 - RNA, 20 nt, Human
auguugcccaggcaggucuu

SEQ ID NO: 1885102 - RNA, 20 nt, Human
auguugcccuguugcugccu

SEQ ID NO: 1885103 - RNA, 22 nt, Human
augugccagguuuuuggucuga

SEQ ID NO: 1885104 - RNA, 13 nt, Human
augugcuacaggg

SEQ ID NO: 1885105 - RNA, 15 nt, Human
augugcuacaggggc

SEQ ID NO: 1885106 - RNA, 19 nt, Human
augugcuacaggggccaga

SEQ ID NO: 1885107 - RNA, 21 nt, Human
augugcuacaggggccagaag

SEQ ID NO: 1885108 - RNA, 14 nt, Human
uuuuaauaaacacu

SEQ ID NO: 1885109 - RNA, 20 nt, Human
auggggcccugccuccuuug

SEQ ID NO: 1885110 - RNA, 10 nt, Human
augugugugu

SEQ ID NO: 1885111 - RNA, 23 nt, Human
auguguguuuuaaaaugagaaau

SEQ ID NO: 1885112 - RNA, 18 nt, Human
auguguguguguugugug

SEQ ID NO: 1885113 - RNA, 24 nt, Human
auguggaguucaucuugaauugua

SEQ ID NO: 1885114 - RNA, 18 nt, Human
auguggcaaggaaaaaca

SEQ ID NO: 1885115 - RNA, 17 nt, Human
auguggauuuuuuccua

SEQ ID NO: 1885116 - RNA, 20 nt, Human
auguggaguucaucuugaau

SEQ ID NO: 1885117 - RNA, 13 nt, Human
auguggaagugug

SEQ ID NO: 1885118 - RNA, 16 nt, Human
auguggaagugugggu

SEQ ID NO: 1885119 - RNA, 15 nt, Human
auguggaaguguggg

SEQ ID NO: 1885120 - RNA, 23 nt, Human
augugcuacaggggccagaagau

SEQ ID NO: 1885121 - RNA, 23 nt, Human
auguggaagugugggucugugug

SEQ ID NO: 1885122 - RNA, 22 nt, Human
auguggaagugugggucugugu

SEQ ID NO: 1885123 - RNA, 23 nt, Human
auuagucauucaauaaauuguaa

SEQ ID NO: 1885124 - RNA, 20 nt, Human
auuacccccuccuucagaca

SEQ ID NO: 1885125 - RNA, 21 nt, Human
auuacccccuccuucagacac

SEQ ID NO: 1885126 - RNA, 19 nt, Human
uuuuugugaaaagcuccau

SEQ ID NO: 1885127 - RNA, 20 nt, Human
uuuuuguagagccagggucu

SEQ ID NO: 1885128 - RNA, 19 nt, Human
uuuuuguagagccaggguc

SEQ ID NO: 1885129 - RNA, 15 nt, Human
uuuuuguguauuugu

SEQ ID NO: 1885130 - RNA, 22 nt, Human
uuuuuauggcuuuugugcauua

SEQ ID NO: 1885131 - RNA, 21 nt, Human
uuuuuauggcuuuugugcauu

SEQ ID NO: 1885132 - RNA, 20 nt, Human
uuuuuauggcuuuugugcau

SEQ ID NO: 1885133 - RNA, 23 nt, Human
uuuuuauugaaucuauuuaagua

SEQ ID NO: 1885134 - RNA, 20 nt, Human
auuaaguuguuaauaaaagu

SEQ ID NO: 1885135 - RNA, 19 nt, Human
auuaaguuguuaauaaaag

SEQ ID NO: 1885136 - RNA, 14 nt, Human
auuaaguacuaugu

SEQ ID NO: 1885137 - RNA, 14 nt, Human
auuaaguuguuaau

SEQ ID NO: 1885138 - RNA, 16 nt, Human
auuaaguacuauguau

SEQ ID NO: 1885139 - RNA, 12 nt, Human
auuaauaaucuu

SEQ ID NO: 1885140 - RNA, 13 nt, Human
auuaauaaucuua

SEQ ID NO: 1885141 - RNA, 16 nt, Human
auuaauaaucuuauua

SEQ ID NO: 1885142 - RNA, 20 nt, Human
auuaauacaaugaugcuauu

SEQ ID NO: 1885143 - RNA, 21 nt, Human
auuacaguggggaaugaagau

SEQ ID NO: 1885144 - RNA, 13 nt, Human
auuacccccuccu

SEQ ID NO: 1885145 - RNA, 18 nt, Human
auuacccccuccuucaga

SEQ ID NO: 1885146 - RNA, 19 nt, Human
auuacccccuccuucagac

SEQ ID NO: 1885147 - RNA, 15 nt, Human
uuuugccauuaaacu

SEQ ID NO: 1885148 - RNA, 23 nt, Human
uuuugccauguuggccaggcugg

SEQ ID NO: 1885149 - RNA, 20 nt, Human
uuuugcaucucacaaacaua

SEQ ID NO: 1885150 - RNA, 15 nt, Human
uuuugcauaauuuca

SEQ ID NO: 1885151 - RNA, 13 nt, Human
uuuugaucuucaa

SEQ ID NO: 1885152 - RNA, 18 nt, Human
uuuugaucuucaacaaau

SEQ ID NO: 1885153 - RNA, 12 nt, Human
uuuugauuaugu

SEQ ID NO: 1885154 - RNA, 19 nt, Human
uuuugaucuucaacaaauu

SEQ ID NO: 1885155 - RNA, 13 nt, Human
auuaaagacagag

SEQ ID NO: 1885156 - RNA, 17 nt, Human
uuuugauccaagcuggu

SEQ ID NO: 1885157 - RNA, 17 nt, Human
uuuugagugccuuacac

SEQ ID NO: 1885158 - RNA, 14 nt, Human
uuuugagcaugggu

SEQ ID NO: 1885159 - RNA, 22 nt, Human
uuuuuagacagagucucacugu

SEQ ID NO: 1885160 - RNA, 22 nt, Human
uuuuuacguuugaagacauugc

SEQ ID NO: 1885161 - RNA, 11 nt, Human
uuuuuacuaau

SEQ ID NO: 1885162 - RNA, 12 nt, Human
uuuuuaucaugu

SEQ ID NO: 1885163 - RNA, 20 nt, Human
uuuuuaucgucacugcuuaa

SEQ ID NO: 1885164 - RNA, 12 nt, Human
uuuuuauggcuu

SEQ ID NO: 1885165 - RNA, 23 nt, Human
uuuuuauacauaaacaagaccac

SEQ ID NO: 1885166 - RNA, 15 nt, Human
uuuuguuccacaagu

SEQ ID NO: 1885167 - RNA, 21 nt, Human
uuuuguuccacaaguuaaaua

SEQ ID NO: 1885168 - RNA, 19 nt, Human
uuuuguuucauauugaugu

SEQ ID NO: 1885169 - RNA, 12 nt, Human
uuuuguuucaua

SEQ ID NO: 1885170 - RNA, 14 nt, Human
uuuugcuguagaag

SEQ ID NO: 1885171 - RNA, 13 nt, Human
uuuugcuguagaa

SEQ ID NO: 1885172 - RNA, 12 nt, Human
uuuugcuguaua

SEQ ID NO: 1885173 - RNA, 13 nt, Human
uuuugcuguauau

SEQ ID NO: 1885174 - RNA, 20 nt, Human
uuuugugcauuaucuagaua

SEQ ID NO: 1885175 - RNA, 17 nt, Human
uuuugugcauuaucuag

SEQ ID NO: 1885176 - RNA, 23 nt, Human
uuuugugcauuaucuagauacug

SEQ ID NO: 1885177 - RNA, 18 nt, Human
uuuuguuaucagucaaua

SEQ ID NO: 1885178 - RNA, 22 nt, Human
cacauaugcaccuugugucugu

SEQ ID NO: 1885179 - RNA, 21 nt, Human
cacauaugcaccuugugucug

SEQ ID NO: 1885180 - RNA, 20 nt, Human
cacauaugcaccuugugucu

SEQ ID NO: 1885181 - RNA, 19 nt, Human
cacauaugcaccuuguguc

SEQ ID NO: 1885182 - RNA, 18 nt, Human
cacauaugcaccuugugu

SEQ ID NO: 1885183 - RNA, 13 nt, Human
cacauaugagggg

SEQ ID NO: 1885184 - RNA, 19 nt, Human
cacauacccucuucaugga

SEQ ID NO: 1885185 - RNA, 22 nt, Human
cacauacccucuucauggaugg

SEQ ID NO: 1885186 - RNA, 22 nt, Human
cacagcuucauuuccugugucu

SEQ ID NO: 1885187 - RNA, 21 nt, Human
cacagcuucauuuccuguguc

SEQ ID NO: 1885188 - RNA, 22 nt, Human
cacagcugggguggggaccuca

SEQ ID NO: 1885189 - RNA, 23 nt, Human
cacagcugggguggggaccucag

SEQ ID NO: 1885190 - RNA, 15 nt, Human
cacaggcagguccag

SEQ ID NO: 1885191 - RNA, 14 nt, Human
cacaggcaggucca

SEQ ID NO: 1885192 - RNA, 11 nt, Human
cacaggcaggu

SEQ ID NO: 1885193 - RNA, 14 nt, Human
cacaguucucuccu

SEQ ID NO: 1885194 - RNA, 15 nt, Human
cacaguucucuccuu

SEQ ID NO: 1885195 - RNA, 18 nt, Human
cacaguucuuugggccag

SEQ ID NO: 1885196 - RNA, 19 nt, Human
cacaguucuuugggccaga

SEQ ID NO: 1885197 - RNA, 20 nt, Human
cacaguucuuugggccagac

SEQ ID NO: 1885198 - RNA, 13 nt, Human
cacagugugaaua

SEQ ID NO: 1885199 - RNA, 22 nt, Human
cacagugugaauaaagugcugc

SEQ ID NO: 1885200 - RNA, 21 nt, Human
cacagugagucgaggacaggg

SEQ ID NO: 1885201 - RNA, 22 nt, Human
cacagugagucgaggacaggga

SEQ ID NO: 1885202 - RNA, 19 nt, Human
cacagugaucaaguuauuu

SEQ ID NO: 1885203 - RNA, 13 nt, Human
cacaguccuuacc

SEQ ID NO: 1885204 - RNA, 15 nt, Human
cacaguccuuaccag

SEQ ID NO: 1885205 - RNA, 21 nt, Human
cacaguccuuaccagcagagc

SEQ ID NO: 1885206 - RNA, 22 nt, Human
cacaguccuuaccagcagagca

SEQ ID NO: 1885207 - RNA, 21 nt, Human
cacaguucuuugggccagaca

SEQ ID NO: 1885208 - RNA, 19 nt, Human
caauguuacuaucugcuuu

SEQ ID NO: 1885209 - RNA, 15 nt, Human
caaugugauaaaacc

SEQ ID NO: 1885210 - RNA, 17 nt, Human
caaugugauaaaacccc

SEQ ID NO: 1885211 - RNA, 23 nt, Human
caauucucauuugucacacacuu

SEQ ID NO: 1885212 - RNA, 16 nt, Human
caauuacaggaaguac

SEQ ID NO: 1885213 - RNA, 17 nt, Human
caaugcacuuuguucug

SEQ ID NO: 1885214 - RNA, 21 nt, Human
caaugacuaauucuugcauau

SEQ ID NO: 1885215 - RNA, 22 nt, Human
caaugcacuuuguucuggcucu

SEQ ID NO: 1885216 - RNA, 19 nt, Human
caaugggagcugaggccac

SEQ ID NO: 1885217 - RNA, 23 nt, Human
caaugggagcugaggccacacuc

SEQ ID NO: 1885218 - RNA, 20 nt, Human
caaugcacuuuguucuggcu

SEQ ID NO: 1885219 - RNA, 21 nt, Human
caaugcacuuuguucuggcuc

SEQ ID NO: 1885220 - RNA, 21 nt, Human
caaugggagcugaggccacac

SEQ ID NO: 1885221 - RNA, 23 nt, Human
caauguagucagaauuagcugcu

SEQ ID NO: 1885222 - RNA, 22 nt, Human
caauguacuaggauacugcugc

SEQ ID NO: 1885223 - RNA, 21 nt, Human
caauguacuaggauacugcug

SEQ ID NO: 1885224 - RNA, 19 nt, Human
caauguagaggggaaaaga

SEQ ID NO: 1885225 - RNA, 12 nt, Human
caauaggaaaaa

SEQ ID NO: 1885226 - RNA, 13 nt, Human
caauaggaaaaac

SEQ ID NO: 1885227 - RNA, 16 nt, Human
caauaauugcagaacu

SEQ ID NO: 1885228 - RNA, 17 nt, Human
caauauucgcuguguca

SEQ ID NO: 1885229 - RNA, 13 nt, Human
caauauagcaaga

SEQ ID NO: 1885230 - RNA, 12 nt, Human
caauauagcaag

SEQ ID NO: 1885231 - RNA, 16 nt, Human
caauauugacuuuguc

SEQ ID NO: 1885232 - RNA, 14 nt, Human
caauauuguacagu

SEQ ID NO: 1885233 - RNA, 17 nt, Human
caauauugacuuugucu

SEQ ID NO: 1885234 - RNA, 14 nt, Human
caauauugacuuug

SEQ ID NO: 1885235 - RNA, 23 nt, Human
caaugaccuuucaauaggaaaaa

SEQ ID NO: 1885236 - RNA, 18 nt, Human
caaugacuuacuguacau

SEQ ID NO: 1885237 - RNA, 17 nt, Human
caaugacuuacuguaca

SEQ ID NO: 1885238 - RNA, 21 nt, Human
caaugaccuuucaauaggaaa

SEQ ID NO: 1885239 - RNA, 14 nt, Human
caaugacuaauucu

SEQ ID NO: 1885240 - RNA, 15 nt, Human
caaugacuuacugua

SEQ ID NO: 1885241 - RNA, 14 nt, Human
caauguucucucuu

SEQ ID NO: 1885242 - RNA, 14 nt, Human
caauaggaaaaacu

SEQ ID NO: 1885243 - RNA, 15 nt, Human
caaggagggcacagg

SEQ ID NO: 1885244 - RNA, 19 nt, Human
caaggagggugagugcaag

SEQ ID NO: 1885245 - RNA, 22 nt, Human
caaggagcugcuauagccuggg

SEQ ID NO: 1885246 - RNA, 20 nt, Human
caaggagggcacaggugucu

SEQ ID NO: 1885247 - RNA, 20 nt, Human
caaggagggugagugcaagg

SEQ ID NO: 1885248 - RNA, 17 nt, Human
caaggcugauuaaacca

SEQ ID NO: 1885249 - RNA, 11 nt, Human
caaggagcugc

SEQ ID NO: 1885250 - RNA, 13 nt, Human
caaggagcugcua

SEQ ID NO: 1885251 - RNA, 14 nt, Human
caaggacuuccugu

SEQ ID NO: 1885252 - RNA, 19 nt, Human
caaggacuuccuguccagc

SEQ ID NO: 1885253 - RNA, 21 nt, Human
caaggacuuccuguccagcuc

SEQ ID NO: 1885254 - RNA, 22 nt, Human
caaggacuuccuguccagcucc

SEQ ID NO: 1885255 - RNA, 23 nt, Human
caaggacuuccuguccagcucca

SEQ ID NO: 1885256 - RNA, 19 nt, Human
caagcuggucccacucagu

SEQ ID NO: 1885257 - RNA, 17 nt, Human
caagcuggucccacuca

SEQ ID NO: 1885258 - RNA, 22 nt, Human
caagccaccaacauacucccau

SEQ ID NO: 1885259 - RNA, 14 nt, Human
caagccagcuggag

SEQ ID NO: 1885260 - RNA, 22 nt, Human
caagccagcgggaauggcagcu

SEQ ID NO: 1885261 - RNA, 18 nt, Human
caagcaggacauggacaa

SEQ ID NO: 1885262 - RNA, 14 nt, Human
caagcaggacaugg

SEQ ID NO: 1885263 - RNA, 22 nt, Human
caagcgauucuucugcuucagc

SEQ ID NO: 1885264 - RNA, 20 nt, Human
caagcgauucuucugcuuca

SEQ ID NO: 1885265 - RNA, 12 nt, Human
caagccugguca

SEQ ID NO: 1885266 - RNA, 19 nt, Human
caagcgauucuucugcuuc

SEQ ID NO: 1885267 - RNA, 21 nt, Human
caagccugaccacgcuuucua

SEQ ID NO: 1885268 - RNA, 17 nt, Human
caagugagagcugggug

SEQ ID NO: 1885269 - RNA, 15 nt, Human
caagugagagcuggg

SEQ ID NO: 1885270 - RNA, 14 nt, Human
caagugagagcugg

SEQ ID NO: 1885271 - RNA, 21 nt, Human
caaguccucuuuucugagagg

SEQ ID NO: 1885272 - RNA, 18 nt, Human
caagugagagcugggugu

SEQ ID NO: 1885273 - RNA, 18 nt, Human
caaguggacucagggcag

SEQ ID NO: 1885274 - RNA, 23 nt, Human
caaguggacucagggcagcgcca

SEQ ID NO: 1885275 - RNA, 12 nt, Human
caaguggaccuu

SEQ ID NO: 1885276 - RNA, 21 nt, Human
caaguggaccuuaggccuucc

SEQ ID NO: 1885277 - RNA, 22 nt, Human
caaguggaccuuaggccuuccu

SEQ ID NO: 1885278 - RNA, 15 nt, Human
caaguggacucaggg

SEQ ID NO: 1885279 - RNA, 16 nt, Human
caaguggacucagggc

SEQ ID NO: 1885280 - RNA, 23 nt, Human
caaguggaccuuaggccuuccuc

SEQ ID NO: 1885281 - RNA, 14 nt, Human
caaguuaaauaaau

SEQ ID NO: 1885282 - RNA, 14 nt, Human
caaguccucuuuuc

SEQ ID NO: 1885283 - RNA, 20 nt, Human
caagguccucugucagucac

SEQ ID NO: 1885284 - RNA, 21 nt, Human
caagguccucugucagucaca

SEQ ID NO: 1885285 - RNA, 22 nt, Human
caagguccucugucagucacag

SEQ ID NO: 1885286 - RNA, 20 nt, Human
caaggucauuuuuuuuaaga

SEQ ID NO: 1885287 - RNA, 14 nt, Human
caaggucauuuuuu

SEQ ID NO: 1885288 - RNA, 18 nt, Human
caaggggcccaaauucuu

SEQ ID NO: 1885289 - RNA, 17 nt, Human
caaggggcccaaauucu

SEQ ID NO: 1885290 - RNA, 12 nt, Human
caaggcugcagu

SEQ ID NO: 1885291 - RNA, 15 nt, Human
caaggcugcagugag

SEQ ID NO: 1885292 - RNA, 23 nt, Human
caaggcugucaauuacaggaagu

SEQ ID NO: 1885293 - RNA, 17 nt, Human
caagcaccuccugccuc

SEQ ID NO: 1885294 - RNA, 16 nt, Human
caagcaccuccugccu

SEQ ID NO: 1885295 - RNA, 15 nt, Human
caagcaccuccugcc

SEQ ID NO: 1885296 - RNA, 23 nt, Human
caagacucugucuaaaaaacaaa

SEQ ID NO: 1885297 - RNA, 16 nt, Human
caagagcccaggccuc

SEQ ID NO: 1885298 - RNA, 16 nt, Human
caagaggcugcagcca

SEQ ID NO: 1885299 - RNA, 19 nt, Human
caagacgcugugcugcccu

SEQ ID NO: 1885300 - RNA, 18 nt, Human
caagacgcugugcugccc

SEQ ID NO: 1885301 - RNA, 23 nt, Human
caagacgcugugcugcccugccc

SEQ ID NO: 1885302 - RNA, 22 nt, Human
caagacucugucuaaaaaacaa

SEQ ID NO: 1885303 - RNA, 15 nt, Human
caagacucugucuca

SEQ ID NO: 1885304 - RNA, 14 nt, Human
caagagcccaggcc

SEQ ID NO: 1885305 - RNA, 15 nt, Human
caagagcccaggccu

SEQ ID NO: 1885306 - RNA, 18 nt, Human
caagacucuuuggacacu

SEQ ID NO: 1885307 - RNA, 20 nt, Human
caagaacuuuccaggaaggc

SEQ ID NO: 1885308 - RNA, 14 nt, Human
caagaccuucuccu

SEQ ID NO: 1885309 - RNA, 16 nt, Human
caagaccuucuccuuc

SEQ ID NO: 1885310 - RNA, 17 nt, Human
caagaccuucuccuuca

SEQ ID NO: 1885311 - RNA, 18 nt, Human
caagaccuucuccuucac

SEQ ID NO: 1885312 - RNA, 16 nt, Human
caagacgcugugcugc

SEQ ID NO: 1885313 - RNA, 17 nt, Human
caagacgcugugcugcc

SEQ ID NO: 1885314 - RNA, 22 nt, Human
caacacucacauuuauucugcu

SEQ ID NO: 1885315 - RNA, 18 nt, Human
caacacucauugaccuga

SEQ ID NO: 1885316 - RNA, 20 nt, Human
caacacucauugaccugagg

SEQ ID NO: 1885317 - RNA, 22 nt, Human
caacacucauugaccugaggcc

SEQ ID NO: 1885318 - RNA, 22 nt, Human
caaccccuucgcuccugugucu

SEQ ID NO: 1885319 - RNA, 21 nt, Human
caacacugauuuccccuuuug

SEQ ID NO: 1885320 - RNA, 23 nt, Human
caacacugauuuccccuuuugca

SEQ ID NO: 1885321 - RNA, 20 nt, Human
caacacugggaaacagaggc

SEQ ID NO: 1885322 - RNA, 13 nt, Human
caacgucugugcc

SEQ ID NO: 1885323 - RNA, 14 nt, Human
caacgucugugcca

SEQ ID NO: 1885324 - RNA, 14 nt, Human
caaccuccugggcu

SEQ ID NO: 1885325 - RNA, 15 nt, Human
caaccuccugggcua

SEQ ID NO: 1885326 - RNA, 22 nt, Human
auuuugguaaaauacuucuuga

SEQ ID NO: 1885327 - RNA, 23 nt, Human
auuuugggguacccacugcucug

SEQ ID NO: 1885328 - RNA, 22 nt, Human
auuuugggguacccacugcucu

SEQ ID NO: 1885329 - RNA, 16 nt, Human
caaaaaaugcuugcuu

SEQ ID NO: 1885330 - RNA, 23 nt, Human
auuuugguuuuguuccccuccuc

SEQ ID NO: 1885331 - RNA, 22 nt, Human
auuuugguuuuguuccccuccu

SEQ ID NO: 1885332 - RNA, 21 nt, Human
auuuugguuuuguuccccucc

SEQ ID NO: 1885333 - RNA, 17 nt, Human
auuuugguuuuguuccc

SEQ ID NO: 1885334 - RNA, 16 nt, Human
auuuugguuuuguucc

SEQ ID NO: 1885335 - RNA, 18 nt, Human
auuuugguccaaguugug

SEQ ID NO: 1885336 - RNA, 14 nt, Human
auuuuggugagaaa

SEQ ID NO: 1885337 - RNA, 15 nt, Human
auuuuggugagaaau

SEQ ID NO: 1885338 - RNA, 16 nt, Human
auuuuggugagaaaug

SEQ ID NO: 1885339 - RNA, 21 nt, Human
auuuuggugagaaaugggacu

SEQ ID NO: 1885340 - RNA, 21 nt, Human
auuuugggguacccacugcuc

SEQ ID NO: 1885341 - RNA, 22 nt, Human
auuuuggagaguuuccugaaac

SEQ ID NO: 1885342 - RNA, 21 nt, Human
auuuuggagaguuuccugaaa

SEQ ID NO: 1885343 - RNA, 20 nt, Human
auuuuggagaguuuccugaa

SEQ ID NO: 1885344 - RNA, 20 nt, Human
caaaaacauggccuuugcuu

SEQ ID NO: 1885345 - RNA, 13 nt, Human
caaaaaggcagga

SEQ ID NO: 1885346 - RNA, 21 nt, Human
caaaaacccagcaacagaaaa

SEQ ID NO: 1885347 - RNA, 22 nt, Human
caaaacugccucaggaggcagg

SEQ ID NO: 1885348 - RNA, 22 nt, Human
caaaacucuccucugcugcugg

SEQ ID NO: 1885349 - RNA, 20 nt, Human
caaaacucuccucugcugcu

SEQ ID NO: 1885350 - RNA, 21 nt, Human
caaaacucuccucugcugcug

SEQ ID NO: 1885351 - RNA, 17 nt, Human
caaaauaaaaaugaggu

SEQ ID NO: 1885352 - RNA, 23 nt, Human
caaaacuucagacauagaauuaa

SEQ ID NO: 1885353 - RNA, 18 nt, Human
caaaacagaggcacuuaa

SEQ ID NO: 1885354 - RNA, 13 nt, Human
caaaacccagacc

SEQ ID NO: 1885355 - RNA, 15 nt, Human
caaaacccagaccug

SEQ ID NO: 1885356 - RNA, 18 nt, Human
caaaacaaaaauuaggua

SEQ ID NO: 1885357 - RNA, 22 nt, Human
caaaacaaaaauuagguauuuu

SEQ ID NO: 1885358 - RNA, 23 nt, Human
caaaacaaaaauuagguauuuug

SEQ ID NO: 1885359 - RNA, 13 nt, Human
caaaacaaaacaa

SEQ ID NO: 1885360 - RNA, 17 nt, Human
caaaacaaaaauuaggu

SEQ ID NO: 1885361 - RNA, 16 nt, Human
caaaaauucucaguuc

SEQ ID NO: 1885362 - RNA, 11 nt, Human
caaaaauuagg

SEQ ID NO: 1885363 - RNA, 16 nt, Human
caaaaauuagguauuu

SEQ ID NO: 1885364 - RNA, 18 nt, Human
caaaaauuagguauuuug

SEQ ID NO: 1885365 - RNA, 15 nt, Human
caaaaauuagccggg

SEQ ID NO: 1885366 - RNA, 17 nt, Human
caaaaauuagccgggca

SEQ ID NO: 1885367 - RNA, 14 nt, Human
caaaaauauuuaua

SEQ ID NO: 1885368 - RNA, 22 nt, Human
caaaaauauuuauaaaacuucu

SEQ ID NO: 1885369 - RNA, 17 nt, Human
caaauuaucaagcuaau

SEQ ID NO: 1885370 - RNA, 16 nt, Human
caaauuaucaagcuaa

SEQ ID NO: 1885371 - RNA, 21 nt, Human
caaauuaucaagcuaauaaaa

SEQ ID NO: 1885372 - RNA, 20 nt, Human
caaauuaucaagcuaauaaa

SEQ ID NO: 1885373 - RNA, 18 nt, Human
caaauuaucaagcuaaua

SEQ ID NO: 1885374 - RNA, 14 nt, Human
caaaugucuauaaa

SEQ ID NO: 1885375 - RNA, 15 nt, Human
caaaugucuauaaac

SEQ ID NO: 1885376 - RNA, 23 nt, Human
caaaugguuuaacuucugccugu

SEQ ID NO: 1885377 - RNA, 11 nt, Human
caaauuucuaa

SEQ ID NO: 1885378 - RNA, 14 nt, Human
caaauuucuaaauc

SEQ ID NO: 1885379 - RNA, 12 nt, Human
caaauuucuaaa

SEQ ID NO: 1885380 - RNA, 21 nt, Human
caaauuguaagcaugcacaaa

SEQ ID NO: 1885381 - RNA, 19 nt, Human
caaaggguaucaggugcug

SEQ ID NO: 1885382 - RNA, 19 nt, Human
caaagugcugggauuacag

SEQ ID NO: 1885383 - RNA, 23 nt, Human
caaagugcugggauuacaggugu

SEQ ID NO: 1885384 - RNA, 20 nt, Human
caaagugcugggauuacagg

SEQ ID NO: 1885385 - RNA, 22 nt, Human
caaagggggaggcuaaagccca

SEQ ID NO: 1885386 - RNA, 20 nt, Human
caaauacgugggcauucaaa

SEQ ID NO: 1885387 - RNA, 22 nt, Human
caaauacgugggcauucaaaug

SEQ ID NO: 1885388 - RNA, 21 nt, Human
caaauacgugggcauucaaau

SEQ ID NO: 1885389 - RNA, 23 nt, Human
caaauacucauuuuaggaaaaaa

SEQ ID NO: 1885390 - RNA, 14 nt, Human
caaauacucuuagg

SEQ ID NO: 1885391 - RNA, 14 nt, Human
caaauggggccaga

SEQ ID NO: 1885392 - RNA, 15 nt, Human
caaauggggccagau

SEQ ID NO: 1885393 - RNA, 16 nt, Human
caaauggggccagauc

SEQ ID NO: 1885394 - RNA, 17 nt, Human
caaauggggccagaucc

SEQ ID NO: 1885395 - RNA, 18 nt, Human
caaauggggccagaucca

SEQ ID NO: 1885396 - RNA, 19 nt, Human
caaauggggccagauccag

SEQ ID NO: 1885397 - RNA, 20 nt, Human
caaauggggccagauccagc

SEQ ID NO: 1885398 - RNA, 23 nt, Human
caaauggggccagauccagccug

SEQ ID NO: 1885399 - RNA, 13 nt, Human
caaaugguaggca

SEQ ID NO: 1885400 - RNA, 15 nt, Human
caaaugguaggcauu

SEQ ID NO: 1885401 - RNA, 20 nt, Human
caaaugguaggcauuuccua

SEQ ID NO: 1885402 - RNA, 15 nt, Human
caaaauguaggguua

SEQ ID NO: 1885403 - RNA, 18 nt, Human
caaaauggauaaaaucug

SEQ ID NO: 1885404 - RNA, 23 nt, Human
caaaauggauaaaaucugauaug

SEQ ID NO: 1885405 - RNA, 14 nt, Human
caaaauaaaacuuu

SEQ ID NO: 1885406 - RNA, 12 nt, Human
caaaauaaaacu

SEQ ID NO: 1885407 - RNA, 18 nt, Human
caaaaugcucuagugccu

SEQ ID NO: 1885408 - RNA, 18 nt, Human
caaaaugcuuuuuauuuc

SEQ ID NO: 1885409 - RNA, 20 nt, Human
caaaaugcuuuuuauuucug

SEQ ID NO: 1885410 - RNA, 23 nt, Human
caaaaugcuuuuuauuucugcau

SEQ ID NO: 1885411 - RNA, 15 nt, Human
caaaauggauaaaau

SEQ ID NO: 1885412 - RNA, 16 nt, Human
caaaauuguuacaaau

SEQ ID NO: 1885413 - RNA, 16 nt, Human
caaaauugcaaaucuu

SEQ ID NO: 1885414 - RNA, 17 nt, Human
caaaauugcaaaucuug

SEQ ID NO: 1885415 - RNA, 15 nt, Human
caaacacauacagga

SEQ ID NO: 1885416 - RNA, 23 nt, Human
caaacacauuaagccuuccacac

SEQ ID NO: 1885417 - RNA, 22 nt, Human
caaaauugcaaaucuugaaauu

SEQ ID NO: 1885418 - RNA, 14 nt, Human
caaacccuucagug

SEQ ID NO: 1885419 - RNA, 20 nt, Human
caaacccuucagugccaaaa

SEQ ID NO: 1885420 - RNA, 13 nt, Human
caaacacauuaag

SEQ ID NO: 1885421 - RNA, 14 nt, Human
caaacgccuccccu

SEQ ID NO: 1885422 - RNA, 17 nt, Human
caaacgccuccccugcc

SEQ ID NO: 1885423 - RNA, 15 nt, Human
caaagcuaggccugg

SEQ ID NO: 1885424 - RNA, 20 nt, Human
caaagcgaauuuuaaaagau

SEQ ID NO: 1885425 - RNA, 19 nt, Human
caaagcuaggccuggccag

SEQ ID NO: 1885426 - RNA, 14 nt, Human
caaagcuaggccug

SEQ ID NO: 1885427 - RNA, 13 nt, Human
caaagcuaggccu

SEQ ID NO: 1885428 - RNA, 12 nt, Human
caaaggaagcac

SEQ ID NO: 1885429 - RNA, 13 nt, Human
caaaggaagcaca

SEQ ID NO: 1885430 - RNA, 18 nt, Human
caaaggguaucaggugcu

SEQ ID NO: 1885431 - RNA, 16 nt, Human
caaaggguaucaggug

SEQ ID NO: 1885432 - RNA, 22 nt, Human
caaaggccagaccugcagacgc

SEQ ID NO: 1885433 - RNA, 14 nt, Human
caaaggaagcacau

SEQ ID NO: 1885434 - RNA, 18 nt, Human
caaaggccagaccugcag

SEQ ID NO: 1885435 - RNA, 19 nt, Human
caaaggccagaccugcaga

SEQ ID NO: 1885436 - RNA, 20 nt, Human
caaaggccagaccugcagac

SEQ ID NO: 1885437 - RNA, 21 nt, Human
caaaggccagaccugcagacg

SEQ ID NO: 1885438 - RNA, 17 nt, Human
caaacucaccugccccu

SEQ ID NO: 1885439 - RNA, 20 nt, Human
caaacuaggggacaaagcaa

SEQ ID NO: 1885440 - RNA, 22 nt, Human
caaacuaggggacaaagcaaaa

SEQ ID NO: 1885441 - RNA, 21 nt, Human
caaacuggggccuccagaacu

SEQ ID NO: 1885442 - RNA, 12 nt, Human
caaacuguaaau

SEQ ID NO: 1885443 - RNA, 16 nt, Human
caaacuggggccucca

SEQ ID NO: 1885444 - RNA, 19 nt, Human
caaacuggggccuccagaa

SEQ ID NO: 1885445 - RNA, 21 nt, Human
caaacuguaaauaaaaagaaa

SEQ ID NO: 1885446 - RNA, 14 nt, Human
caaacuguaaauaa

SEQ ID NO: 1885447 - RNA, 20 nt, Human
caaacuguaaauaaaaagaa

SEQ ID NO: 1885448 - RNA, 17 nt, Human
caaagccuccuccagcc

SEQ ID NO: 1885449 - RNA, 18 nt, Human
caaagccuccuccagccg

SEQ ID NO: 1885450 - RNA, 19 nt, Human
caaagcgaauuuuaaaaga

SEQ ID NO: 1885451 - RNA, 14 nt, Human
caaagcgaauuuua

SEQ ID NO: 1885452 - RNA, 22 nt, Human
caaagccaaagcuaggccuggc

SEQ ID NO: 1885453 - RNA, 15 nt, Human
cacuggaugcagaaa

SEQ ID NO: 1885454 - RNA, 17 nt, Human
cacuggacugaccuggu

SEQ ID NO: 1885455 - RNA, 16 nt, Human
cacuggacugaccugg

SEQ ID NO: 1885456 - RNA, 19 nt, Human
cacuggacuccggcccucc

SEQ ID NO: 1885457 - RNA, 15 nt, Human
cacuggacuccggcc

SEQ ID NO: 1885458 - RNA, 16 nt, Human
cacuggacuccggccc

SEQ ID NO: 1885459 - RNA, 21 nt, Human
cacugcuuuuggucuguguga

SEQ ID NO: 1885460 - RNA, 17 nt, Human
cacuggaacacuaauga

SEQ ID NO: 1885461 - RNA, 20 nt, Human
cacugcuuuuggucugugug

SEQ ID NO: 1885462 - RNA, 22 nt, Human
cacugcuuccagugaggcucug

SEQ ID NO: 1885463 - RNA, 18 nt, Human
cacugcuuccagugaggc

SEQ ID NO: 1885464 - RNA, 19 nt, Human
cacugcuuccagugaggcu

SEQ ID NO: 1885465 - RNA, 20 nt, Human
cacugcuuccagugaggcuc

SEQ ID NO: 1885466 - RNA, 21 nt, Human
cacugcuuccagugaggcucu

SEQ ID NO: 1885467 - RNA, 13 nt, Human
cacugcuuaacuu

SEQ ID NO: 1885468 - RNA, 14 nt, Human
cacugcuuccagug

SEQ ID NO: 1885469 - RNA, 15 nt, Human
cacugcuuccaguga

SEQ ID NO: 1885470 - RNA, 16 nt, Human
cacugcuuccagugag

SEQ ID NO: 1885471 - RNA, 12 nt, Human
cacugcucuggu

SEQ ID NO: 1885472 - RNA, 18 nt, Human
cacugcuaagaauauuug

SEQ ID NO: 1885473 - RNA, 18 nt, Human
cacugcacuauagccuag

SEQ ID NO: 1885474 - RNA, 19 nt, Human
cacugcaccgggccacaga

SEQ ID NO: 1885475 - RNA, 18 nt, Human
cacugcaccgggccacag

SEQ ID NO: 1885476 - RNA, 16 nt, Human
cacugcaccgggccac

SEQ ID NO: 1885477 - RNA, 15 nt, Human
cacugcaccgggcca

SEQ ID NO: 1885478 - RNA, 14 nt, Human
cacugcaccgggcc

SEQ ID NO: 1885479 - RNA, 14 nt, Human
cacugccucucaca

SEQ ID NO: 1885480 - RNA, 15 nt, Human
cacugccucucacag

SEQ ID NO: 1885481 - RNA, 17 nt, Human
cacugccucucacagcu

SEQ ID NO: 1885482 - RNA, 16 nt, Human
cacugccucucacagc

SEQ ID NO: 1885483 - RNA, 17 nt, Human
cacugcccauggacagg

SEQ ID NO: 1885484 - RNA, 18 nt, Human
cacugcccauggacaggc

SEQ ID NO: 1885485 - RNA, 16 nt, Human
cacugacugcagggac

SEQ ID NO: 1885486 - RNA, 18 nt, Human
cacugagaauguaagaac

SEQ ID NO: 1885487 - RNA, 16 nt, Human
cacugagaauguaaga

SEQ ID NO: 1885488 - RNA, 12 nt, Human
cacugagacagc

SEQ ID NO: 1885489 - RNA, 13 nt, Human
cacugagacagcc

SEQ ID NO: 1885490 - RNA, 14 nt, Human
cacugagacagccc

SEQ ID NO: 1885491 - RNA, 17 nt, Human
cacugagacagcccggg

SEQ ID NO: 1885492 - RNA, 19 nt, Human
cacugagacagcccgggcu

SEQ ID NO: 1885493 - RNA, 22 nt, Human
cacugagacagcccgggcucug

SEQ ID NO: 1885494 - RNA, 13 nt, Human
cacugaccagaac

SEQ ID NO: 1885495 - RNA, 14 nt, Human
cacugaccagaacu

SEQ ID NO: 1885496 - RNA, 15 nt, Human
cacugaccagaacua

SEQ ID NO: 1885497 - RNA, 23 nt, Human
cacugacauuguuggccaaagcc

SEQ ID NO: 1885498 - RNA, 19 nt, Human
cacucugucgcccagucug

SEQ ID NO: 1885499 - RNA, 16 nt, Human
cacucugucgcccagu

SEQ ID NO: 1885500 - RNA, 15 nt, Human
cacucugucgcccag

SEQ ID NO: 1885501 - RNA, 16 nt, Human
cacucugggcuccaga

SEQ ID NO: 1885502 - RNA, 17 nt, Human
cacucugggcuccagag

SEQ ID NO: 1885503 - RNA, 23 nt, Human
cacucuggcagcucagagagggu

SEQ ID NO: 1885504 - RNA, 14 nt, Human
cacucugggcucca

SEQ ID NO: 1885505 - RNA, 15 nt, Human
cacucugggcuccag

SEQ ID NO: 1885506 - RNA, 20 nt, Human
cacucuggcagcucagagag

SEQ ID NO: 1885507 - RNA, 21 nt, Human
cacucuggcagcucagagagg

SEQ ID NO: 1885508 - RNA, 15 nt, Human
cacucuggcagcuca

SEQ ID NO: 1885509 - RNA, 16 nt, Human
cacucuggcagcucag

SEQ ID NO: 1885510 - RNA, 17 nt, Human
cacucuggcagcucaga

SEQ ID NO: 1885511 - RNA, 19 nt, Human
cacucuggcagcucagaga

SEQ ID NO: 1885512 - RNA, 23 nt, Human
cacugagacagcccgggcucugc

SEQ ID NO: 1885513 - RNA, 20 nt, Human
cacugagaauguaagaacua

SEQ ID NO: 1885514 - RNA, 19 nt, Human
cacugagaauguaagaacu

SEQ ID NO: 1885515 - RNA, 21 nt, Human
cacugagaauguaagaacuac

SEQ ID NO: 1885516 - RNA, 17 nt, Human
cacugagaucuguuuga

SEQ ID NO: 1885517 - RNA, 17 nt, Human
cacugaggaagaacggg

SEQ ID NO: 1885518 - RNA, 15 nt, Human
cacugaggaagaacg

SEQ ID NO: 1885519 - RNA, 14 nt, Human
cacugaggaagaac

SEQ ID NO: 1885520 - RNA, 13 nt, Human
cacugaggaagaa

SEQ ID NO: 1885521 - RNA, 24 nt, Human
cacugaugggcaacccccagccug

SEQ ID NO: 1885522 - RNA, 18 nt, Human
cacugaugggcaaccccc

SEQ ID NO: 1885523 - RNA, 14 nt, Human
cacugaugggcaac

SEQ ID NO: 1885524 - RNA, 16 nt, Human
cacugaugcuuagaug

SEQ ID NO: 1885525 - RNA, 19 nt, Human
cacugaugcugccccucau

SEQ ID NO: 1885526 - RNA, 15 nt, Human
cacugaugcuuagau

SEQ ID NO: 1885527 - RNA, 12 nt, Human
cacugaugcugc

SEQ ID NO: 1885528 - RNA, 17 nt, Human
cacugaugcugccccuc

SEQ ID NO: 1885529 - RNA, 16 nt, Human
cacugauccagcccug

SEQ ID NO: 1885530 - RNA, 15 nt, Human
cacugauccagcccu

SEQ ID NO: 1885531 - RNA, 14 nt, Human
cacugauccagccc

SEQ ID NO: 1885532 - RNA, 13 nt, Human
cacugcaaccucc

SEQ ID NO: 1885533 - RNA, 23 nt, Human
cacugauuuccccuuuugcauuc

SEQ ID NO: 1885534 - RNA, 15 nt, Human
cacugauuuccccuu

SEQ ID NO: 1885535 - RNA, 16 nt, Human
cacugcaaccuccgcc

SEQ ID NO: 1885536 - RNA, 14 nt, Human
cacugcaaccuccg

SEQ ID NO: 1885537 - RNA, 23 nt, Human
cacugcaaccuccgccucuuggg

SEQ ID NO: 1885538 - RNA, 17 nt, Human
cacugcaacuucugccu

SEQ ID NO: 1885539 - RNA, 16 nt, Human
cacugcaacuucugcc

SEQ ID NO: 1885540 - RNA, 20 nt, Human
cacuguacaagguaccccuu

SEQ ID NO: 1885541 - RNA, 19 nt, Human
cacuguacuugcucuugau

SEQ ID NO: 1885542 - RNA, 15 nt, Human
cacuguacuugcucu

SEQ ID NO: 1885543 - RNA, 18 nt, Human
cacuguacuugcucuuga

SEQ ID NO: 1885544 - RNA, 17 nt, Human
cacuggccccugagauc

SEQ ID NO: 1885545 - RNA, 16 nt, Human
cacugugagcucccag

SEQ ID NO: 1885546 - RNA, 17 nt, Human
cacugugagcucccagg

SEQ ID NO: 1885547 - RNA, 23 nt, Human
cacugugacccccagcuccggcc

SEQ ID NO: 1885548 - RNA, 17 nt, Human
cacugugaccuugagaa

SEQ ID NO: 1885549 - RNA, 14 nt, Human
cacugugccaugug

SEQ ID NO: 1885550 - RNA, 17 nt, Human
cacugugaaggacccuu

SEQ ID NO: 1885551 - RNA, 15 nt, Human
cacugugaaggaccc

SEQ ID NO: 1885552 - RNA, 14 nt, Human
cacugugaccccca

SEQ ID NO: 1885553 - RNA, 15 nt, Human
cacugugacccccag

SEQ ID NO: 1885554 - RNA, 19 nt, Human
cacugugacccccagcucc

SEQ ID NO: 1885555 - RNA, 20 nt, Human
cacugugacccccagcuccg

SEQ ID NO: 1885556 - RNA, 22 nt, Human
cacugugacccccagcuccggc

SEQ ID NO: 1885557 - RNA, 13 nt, Human
cacugugaagaga

SEQ ID NO: 1885558 - RNA, 13 nt, Human
cacugucuuuccu

SEQ ID NO: 1885559 - RNA, 13 nt, Human
cacugugaaggac

SEQ ID NO: 1885560 - RNA, 14 nt, Human
cacugugaaggacc

SEQ ID NO: 1885561 - RNA, 14 nt, Human
cacugucuugaaga

SEQ ID NO: 1885562 - RNA, 14 nt, Human
cacuguccuccaag

SEQ ID NO: 1885563 - RNA, 17 nt, Human
cacuguccuccaagcca

SEQ ID NO: 1885564 - RNA, 18 nt, Human
cacuguccuccaagccag

SEQ ID NO: 1885565 - RNA, 15 nt, Human
cacuguccugggccu

SEQ ID NO: 1885566 - RNA, 18 nt, Human
cacuguccugggccugca

SEQ ID NO: 1885567 - RNA, 15 nt, Human
cacuguuaucaaaac

SEQ ID NO: 1885568 - RNA, 15 nt, Human
cacugugugcuauuu

SEQ ID NO: 1885569 - RNA, 13 nt, Human
cacuguucucugc

SEQ ID NO: 1885570 - RNA, 14 nt, Human
cacuguucucugcc

SEQ ID NO: 1885571 - RNA, 15 nt, Human
cacuguucucugccc

SEQ ID NO: 1885572 - RNA, 16 nt, Human
cacuguucucugcccu

SEQ ID NO: 1885573 - RNA, 17 nt, Human
cacuguucucugcccuc

SEQ ID NO: 1885574 - RNA, 19 nt, Human
cacuguucucugcccucca

SEQ ID NO: 1885575 - RNA, 21 nt, Human
cacuguucucugcccuccaag

SEQ ID NO: 1885576 - RNA, 22 nt, Human
cacuguucucugcccuccaaga

SEQ ID NO: 1885577 - RNA, 22 nt, Human
cacugugagcucccaggugcag

SEQ ID NO: 1885578 - RNA, 18 nt, Human
cacugugccaugugccag

SEQ ID NO: 1885579 - RNA, 16 nt, Human
cacugugccaugugcc

SEQ ID NO: 1885580 - RNA, 15 nt, Human
cacugugccaugugc

SEQ ID NO: 1885581 - RNA, 13 nt, Human
cacugugcugagu

SEQ ID NO: 1885582 - RNA, 15 nt, Human
cacugugcugagucu

SEQ ID NO: 1885583 - RNA, 17 nt, Human
cacugugcugagucuga

SEQ ID NO: 1885584 - RNA, 20 nt, Human
cacugugcugagucugaagg

SEQ ID NO: 1885585 - RNA, 21 nt, Human
cacugugcugagucugaaggc

SEQ ID NO: 1885586 - RNA, 22 nt, Human
cacugugcugagucugaaggcu

SEQ ID NO: 1885587 - RNA, 14 nt, Human
cacuucacccugga

SEQ ID NO: 1885588 - RNA, 17 nt, Human
cacuucacgcuuucagc

SEQ ID NO: 1885589 - RNA, 18 nt, Human
cacuucaggucaggaguu

SEQ ID NO: 1885590 - RNA, 22 nt, Human
cacuucauucuugaaagcugug

SEQ ID NO: 1885591 - RNA, 12 nt, Human
cacuucagcuga

SEQ ID NO: 1885592 - RNA, 21 nt, Human
cacuucagcugacuuuucugu

SEQ ID NO: 1885593 - RNA, 21 nt, Human
cacuucgggaggucgaggcag

SEQ ID NO: 1885594 - RNA, 23 nt, Human
cacuucgggaggucgaggcagga

SEQ ID NO: 1885595 - RNA, 22 nt, Human
cacuucugccauauucuguugg

SEQ ID NO: 1885596 - RNA, 13 nt, Human
cacuucucuuccu

SEQ ID NO: 1885597 - RNA, 16 nt, Human
cacuucccuacaugga

SEQ ID NO: 1885598 - RNA, 22 nt, Human
cacuugcagacucuacagaggc

SEQ ID NO: 1885599 - RNA, 19 nt, Human
cacuugcagacucuacaga

SEQ ID NO: 1885600 - RNA, 18 nt, Human
cacuugcagacucuacag

SEQ ID NO: 1885601 - RNA, 14 nt, Human
cacuugcagacucu

SEQ ID NO: 1885602 - RNA, 24 nt, Human
cacuugcagacucuacagaggcca

SEQ ID NO: 1885603 - RNA, 22 nt, Human
cacuugccgcgucgcccuccca

SEQ ID NO: 1885604 - RNA, 19 nt, Human
cacuuucuagccagaggag

SEQ ID NO: 1885605 - RNA, 20 nt, Human
cacuuucuagccagaggaga

SEQ ID NO: 1885606 - RNA, 15 nt, Human
cacuuggucugugag

SEQ ID NO: 1885607 - RNA, 13 nt, Human
cacuugcagacuc

SEQ ID NO: 1885608 - RNA, 22 nt, Human
cacuugaggucaggaguuccua

SEQ ID NO: 1885609 - RNA, 18 nt, Human
cacuugaggucaggaguu

SEQ ID NO: 1885610 - RNA, 13 nt, Human
cacuugaguccag

SEQ ID NO: 1885611 - RNA, 19 nt, Human
cacuugacaucaacugcau

SEQ ID NO: 1885612 - RNA, 17 nt, Human
cacuugagaauuacccu

SEQ ID NO: 1885613 - RNA, 20 nt, Human
cacuugagaauuacccuuuu

SEQ ID NO: 1885614 - RNA, 16 nt, Human
cacuugacaucaacug

SEQ ID NO: 1885615 - RNA, 23 nt, Human
cacuugaacccgggaggcagagg

SEQ ID NO: 1885616 - RNA, 21 nt, Human
cacuugaacccgggaggcaga

SEQ ID NO: 1885617 - RNA, 20 nt, Human
cacuugaacccgggaggcag

SEQ ID NO: 1885618 - RNA, 19 nt, Human
cacuucuggguggggcagu

SEQ ID NO: 1885619 - RNA, 18 nt, Human
cacuucuggguggggcag

SEQ ID NO: 1885620 - RNA, 19 nt, Human
cacgcagccaggacaccgg

SEQ ID NO: 1885621 - RNA, 16 nt, Human
cacgcagccaggacac

SEQ ID NO: 1885622 - RNA, 15 nt, Human
cacgcagccaggaca

SEQ ID NO: 1885623 - RNA, 13 nt, Human
cacgcagccagga

SEQ ID NO: 1885624 - RNA, 21 nt, Human
cacgcagccaggacaccgggc

SEQ ID NO: 1885625 - RNA, 12 nt, Human
cacgcaggagca

SEQ ID NO: 1885626 - RNA, 19 nt, Human
cacgcaggagcacacccag

SEQ ID NO: 1885627 - RNA, 20 nt, Human
cacgcaggagcacacccagc

SEQ ID NO: 1885628 - RNA, 13 nt, Human
cacgccacugcac

SEQ ID NO: 1885629 - RNA, 15 nt, Human
cacgccacugcacua

SEQ ID NO: 1885630 - RNA, 19 nt, Human
cacgccagauucuuuccug

SEQ ID NO: 1885631 - RNA, 20 nt, Human
cacgccagauucuuuccuga

SEQ ID NO: 1885632 - RNA, 22 nt, Human
cacgccagauucuuuccugagg

SEQ ID NO: 1885633 - RNA, 23 nt, Human
cacgccagauucuuuccugaggc

SEQ ID NO: 1885634 - RNA, 13 nt, Human
cacgcccccacug

SEQ ID NO: 1885635 - RNA, 15 nt, Human
cacgcccccacuggu

SEQ ID NO: 1885636 - RNA, 17 nt, Human
cacgcccccacugguga

SEQ ID NO: 1885637 - RNA, 18 nt, Human
cacgcccccacuggugac

SEQ ID NO: 1885638 - RNA, 21 nt, Human
cacgcacaugcgaccccgagg

SEQ ID NO: 1885639 - RNA, 12 nt, Human
cacgcaccugcc

SEQ ID NO: 1885640 - RNA, 15 nt, Human
cacgcaccugccuca

SEQ ID NO: 1885641 - RNA, 17 nt, Human
cacgcacuucgggaggu

SEQ ID NO: 1885642 - RNA, 16 nt, Human
cacgcaccugccucag

SEQ ID NO: 1885643 - RNA, 16 nt, Human
cacgauuucuguuuag

SEQ ID NO: 1885644 - RNA, 14 nt, Human
cacgauuucuguuu

SEQ ID NO: 1885645 - RNA, 12 nt, Human
cacgauuucugu

SEQ ID NO: 1885646 - RNA, 17 nt, Human
cacgaaauguuauuuuu

SEQ ID NO: 1885647 - RNA, 22 nt, Human
caccuugaagaaccucucacuu

SEQ ID NO: 1885648 - RNA, 18 nt, Human
caccuugacagggcacac

SEQ ID NO: 1885649 - RNA, 16 nt, Human
caccuugacagggcac

SEQ ID NO: 1885650 - RNA, 15 nt, Human
caccuugacagggca

SEQ ID NO: 1885651 - RNA, 13 nt, Human
caccuugacaggg

SEQ ID NO: 1885652 - RNA, 17 nt, Human
cacgacugcccggcagg

SEQ ID NO: 1885653 - RNA, 16 nt, Human
cacgacugcccggcag

SEQ ID NO: 1885654 - RNA, 16 nt, Human
cacgaauauugcugau

SEQ ID NO: 1885655 - RNA, 19 nt, Human
cacgaauauugcugauggu

SEQ ID NO: 1885656 - RNA, 22 nt, Human
cacgaauauugcugauggugca

SEQ ID NO: 1885657 - RNA, 23 nt, Human
caccuucaguaacccccacugga

SEQ ID NO: 1885658 - RNA, 15 nt, Human
caccuuauauuuacg

SEQ ID NO: 1885659 - RNA, 10 nt, Human
caccuucacc

SEQ ID NO: 1885660 - RNA, 21 nt, Human
caccuuagacagucccugcca

SEQ ID NO: 1885661 - RNA, 23 nt, Human
caccuuagacagucccugccaau

SEQ ID NO: 1885662 - RNA, 14 nt, Human
caccuuagacaguc

SEQ ID NO: 1885663 - RNA, 16 nt, Human
caccuuagacaguccc

SEQ ID NO: 1885664 - RNA, 18 nt, Human
caccuuagacagucccug

SEQ ID NO: 1885665 - RNA, 19 nt, Human
caccuuagacagucccugc

SEQ ID NO: 1885666 - RNA, 19 nt, Human
caccuguuuuuaagcuguu

SEQ ID NO: 1885667 - RNA, 20 nt, Human
caccuguuuuuaagcuguuu

SEQ ID NO: 1885668 - RNA, 22 nt, Human
cacgggcagccuggcucccagg

SEQ ID NO: 1885669 - RNA, 18 nt, Human
cacgggcagccuggcucc

SEQ ID NO: 1885670 - RNA, 15 nt, Human
cacgggcagccuggc

SEQ ID NO: 1885671 - RNA, 14 nt, Human
cacgggcagccugg

SEQ ID NO: 1885672 - RNA, 12 nt, Human
cacgggcagccu

SEQ ID NO: 1885673 - RNA, 20 nt, Human
cacggcucacugcagccuca

SEQ ID NO: 1885674 - RNA, 19 nt, Human
cacggcucacugcagccuc

SEQ ID NO: 1885675 - RNA, 17 nt, Human
cacggcucacugcagcc

SEQ ID NO: 1885676 - RNA, 16 nt, Human
cacggcucacugcagc

SEQ ID NO: 1885677 - RNA, 17 nt, Human
cacgcuggaccuugaac

SEQ ID NO: 1885678 - RNA, 20 nt, Human
cacgcuggaccuugaacugg

SEQ ID NO: 1885679 - RNA, 21 nt, Human
cacgcgugcacacaccagagc

SEQ ID NO: 1885680 - RNA, 16 nt, Human
cacgcgugcacacacc

SEQ ID NO: 1885681 - RNA, 15 nt, Human
cacgcgugcacacac

SEQ ID NO: 1885682 - RNA, 23 nt, Human
cacgccuguaaucccagcaauuu

SEQ ID NO: 1885683 - RNA, 23 nt, Human
cacgcgugcacacaccagagccc

SEQ ID NO: 1885684 - RNA, 19 nt, Human
cacgccuguaauccuagca

SEQ ID NO: 1885685 - RNA, 20 nt, Human
cacgccuguaauccuagcac

SEQ ID NO: 1885686 - RNA, 22 nt, Human
cacgccucccacugggguccag

SEQ ID NO: 1885687 - RNA, 17 nt, Human
cacgccucccacugggg

SEQ ID NO: 1885688 - RNA, 18 nt, Human
cacgccucccacuggggu

SEQ ID NO: 1885689 - RNA, 13 nt, Human
cacgccucccacu

SEQ ID NO: 1885690 - RNA, 14 nt, Human
cacgccucccacug

SEQ ID NO: 1885691 - RNA, 15 nt, Human
cacgccucccacugg

SEQ ID NO: 1885692 - RNA, 16 nt, Human
cacgccucccacuggg

SEQ ID NO: 1885693 - RNA, 16 nt, Human
cacguguccuguaguu

SEQ ID NO: 1885694 - RNA, 15 nt, Human
cacguguccuguagu

SEQ ID NO: 1885695 - RNA, 19 nt, Human
cacguguggccuguucuuc

SEQ ID NO: 1885696 - RNA, 16 nt, Human
cacgugguccuaaucu

SEQ ID NO: 1885697 - RNA, 19 nt, Human
cacgugguccuaaucuucu

SEQ ID NO: 1885698 - RNA, 22 nt, Human
cacguucuuacuaguuucccuu

SEQ ID NO: 1885699 - RNA, 13 nt, Human
cacuaaacaaaga

SEQ ID NO: 1885700 - RNA, 15 nt, Human
cacguuuuguuuugu

SEQ ID NO: 1885701 - RNA, 18 nt, Human
cacguuuuguuuugugcc

SEQ ID NO: 1885702 - RNA, 23 nt, Human
cacguuucuaaaggcuaccuuug

SEQ ID NO: 1885703 - RNA, 14 nt, Human
cacguuucuaaagg

SEQ ID NO: 1885704 - RNA, 12 nt, Human
cacguuucuaaa

SEQ ID NO: 1885705 - RNA, 14 nt, Human
cacguacacacaca

SEQ ID NO: 1885706 - RNA, 19 nt, Human
cacguaaugaaacuuggau

SEQ ID NO: 1885707 - RNA, 16 nt, Human
cacguaaugaaacuug

SEQ ID NO: 1885708 - RNA, 19 nt, Human
cacguacacacacauacac

SEQ ID NO: 1885709 - RNA, 18 nt, Human
cacguacacacacauaca

SEQ ID NO: 1885710 - RNA, 20 nt, Human
cacucucccccacccccucc

SEQ ID NO: 1885711 - RNA, 18 nt, Human
cacucucccccacccccu

SEQ ID NO: 1885712 - RNA, 16 nt, Human
cacucucccccacccc

SEQ ID NO: 1885713 - RNA, 16 nt, Human
cacucgcauugacaca

SEQ ID NO: 1885714 - RNA, 13 nt, Human
cacuccugcugua

SEQ ID NO: 1885715 - RNA, 12 nt, Human
cacucuggcagc

SEQ ID NO: 1885716 - RNA, 13 nt, Human
cacucuggcagcu

SEQ ID NO: 1885717 - RNA, 14 nt, Human
cacucuggcagcuc

SEQ ID NO: 1885718 - RNA, 12 nt, Human
cacucuccuugg

SEQ ID NO: 1885719 - RNA, 12 nt, Human
cacucugagacu

SEQ ID NO: 1885720 - RNA, 23 nt, Human
cacucugagacucgcgacaaugc

SEQ ID NO: 1885721 - RNA, 14 nt, Human
cacuccuucacaga

SEQ ID NO: 1885722 - RNA, 21 nt, Human
cacuccuucacagaugggugc

SEQ ID NO: 1885723 - RNA, 11 nt, Human
cacuccugcug

SEQ ID NO: 1885724 - RNA, 12 nt, Human
cacuccugcugu

SEQ ID NO: 1885725 - RNA, 16 nt, Human
cacuccugcuguaaau

SEQ ID NO: 1885726 - RNA, 18 nt, Human
cacuccuccuagccaccc

SEQ ID NO: 1885727 - RNA, 13 nt, Human
cacuccuccuagc

SEQ ID NO: 1885728 - RNA, 17 nt, Human
cacucccugcaaccuga

SEQ ID NO: 1885729 - RNA, 16 nt, Human
cacucaguccauagca

SEQ ID NO: 1885730 - RNA, 16 nt, Human
cacucaggucuguuuu

SEQ ID NO: 1885731 - RNA, 22 nt, Human
cacucagcucuuggcuccacug

SEQ ID NO: 1885732 - RNA, 15 nt, Human
cacucauugaccuga

SEQ ID NO: 1885733 - RNA, 16 nt, Human
cacucauccccucacu

SEQ ID NO: 1885734 - RNA, 18 nt, Human
cacucauugaccugaggc

SEQ ID NO: 1885735 - RNA, 19 nt, Human
cacucauugaccugaggcc

SEQ ID NO: 1885736 - RNA, 20 nt, Human
cacucauugaccugaggccc

SEQ ID NO: 1885737 - RNA, 22 nt, Human
cacucauugaccugaggcccuu

SEQ ID NO: 1885738 - RNA, 12 nt, Human
cacucccugcaa

SEQ ID NO: 1885739 - RNA, 13 nt, Human
cacucccugcaac

SEQ ID NO: 1885740 - RNA, 16 nt, Human
cacucccugcaaccug

SEQ ID NO: 1885741 - RNA, 18 nt, Human
cacuaaccacgcuggacc

SEQ ID NO: 1885742 - RNA, 18 nt, Human
cacuaaggugugcucuga

SEQ ID NO: 1885743 - RNA, 12 nt, Human
cacuaaggggcc

SEQ ID NO: 1885744 - RNA, 13 nt, Human
cacuaaggggccc

SEQ ID NO: 1885745 - RNA, 23 nt, Human
cacuaaggggcccggccagccau

SEQ ID NO: 1885746 - RNA, 17 nt, Human
cacuaaggugugcucug

SEQ ID NO: 1885747 - RNA, 13 nt, Human
cacuaagcagagg

SEQ ID NO: 1885748 - RNA, 14 nt, Human
cacuaagcagagga

SEQ ID NO: 1885749 - RNA, 15 nt, Human
cacuaagcagaggag

SEQ ID NO: 1885750 - RNA, 16 nt, Human
cacuaagcagaggagg

SEQ ID NO: 1885751 - RNA, 17 nt, Human
cacuaagcagaggaggg

SEQ ID NO: 1885752 - RNA, 18 nt, Human
cacuaagcagaggagggg

SEQ ID NO: 1885753 - RNA, 20 nt, Human
cacuaagcagaggaggggcc

SEQ ID NO: 1885754 - RNA, 21 nt, Human
cacuaagcagaggaggggccg

SEQ ID NO: 1885755 - RNA, 16 nt, Human
cacuaaccacgcugga

SEQ ID NO: 1885756 - RNA, 15 nt, Human
cacuaaccacgcugg

SEQ ID NO: 1885757 - RNA, 14 nt, Human
cacuaaccacgcug

SEQ ID NO: 1885758 - RNA, 16 nt, Human
cacuaacaugauuugg

SEQ ID NO: 1885759 - RNA, 21 nt, Human
cacuaaauugacacuuaaaaa

SEQ ID NO: 1885760 - RNA, 21 nt, Human
cacuauagccuaggugacaga

SEQ ID NO: 1885761 - RNA, 14 nt, Human
cacuauagccuagg

SEQ ID NO: 1885762 - RNA, 18 nt, Human
cacuauaauguaagcucu

SEQ ID NO: 1885763 - RNA, 14 nt, Human
cacuauaauguaag

SEQ ID NO: 1885764 - RNA, 19 nt, Human
cacuauguugcccaggcag

SEQ ID NO: 1885765 - RNA, 18 nt, Human
cacuauguugcccaggca

SEQ ID NO: 1885766 - RNA, 17 nt, Human
cacuauguugcccaggc

SEQ ID NO: 1885767 - RNA, 16 nt, Human
cacuauguugcccagg

SEQ ID NO: 1885768 - RNA, 15 nt, Human
cacuauguugcccag

SEQ ID NO: 1885769 - RNA, 17 nt, Human
cacuaugguauuugagu

SEQ ID NO: 1885770 - RNA, 21 nt, Human
cacuauguugcccaggcaggu

SEQ ID NO: 1885771 - RNA, 20 nt, Human
cacuauguugcccaggcagg

SEQ ID NO: 1885772 - RNA, 15 nt, Human
cacucaaaagcuggg

SEQ ID NO: 1885773 - RNA, 17 nt, Human
cacucaaaagcugggca

SEQ ID NO: 1885774 - RNA, 18 nt, Human
cacucaaaagcugggcag

SEQ ID NO: 1885775 - RNA, 19 nt, Human
cacucaaaagcugggcagg

SEQ ID NO: 1885776 - RNA, 20 nt, Human
cacucaaaagcugggcaggu

SEQ ID NO: 1885777 - RNA, 12 nt, Human
cacucaaaggcc

SEQ ID NO: 1885778 - RNA, 15 nt, Human
cacucaaaggccaga

SEQ ID NO: 1885779 - RNA, 20 nt, Human
cacucaaaggccagaccugc

SEQ ID NO: 1885780 - RNA, 22 nt, Human
cacucaaaggccagaccugcag

SEQ ID NO: 1885781 - RNA, 23 nt, Human
cacucaaaggccagaccugcaga

SEQ ID NO: 1885782 - RNA, 17 nt, Human
cacucagaagacacuga

SEQ ID NO: 1885783 - RNA, 16 nt, Human
cacucagaagacacug

SEQ ID NO: 1885784 - RNA, 12 nt, Human
cacucagaagac

SEQ ID NO: 1885785 - RNA, 20 nt, Human
cacucacauuuauucugcuc

SEQ ID NO: 1885786 - RNA, 19 nt, Human
cacucacauuuauucugcu

SEQ ID NO: 1885787 - RNA, 19 nt, Human
cacucagaagacacugaug

SEQ ID NO: 1885788 - RNA, 18 nt, Human
cacucagaagacacugau

SEQ ID NO: 1885789 - RNA, 22 nt, Human
cacucagaagacacugaugggc

SEQ ID NO: 1885790 - RNA, 22 nt, Human
cacucagcacaaggccaucugg

SEQ ID NO: 1885791 - RNA, 13 nt, Human
cacucagcacaag

SEQ ID NO: 1885792 - RNA, 15 nt, Human
cacucagcacaaggc

SEQ ID NO: 1885793 - RNA, 12 nt, Human
cacucagcacaa

SEQ ID NO: 1885794 - RNA, 22 nt, Human
caccccugccucccgcccccuu

SEQ ID NO: 1885795 - RNA, 18 nt, Human
caccccucccuuucuccc

SEQ ID NO: 1885796 - RNA, 15 nt, Human
caccccucccuuucu

SEQ ID NO: 1885797 - RNA, 13 nt, Human
cacauauugauuu

SEQ ID NO: 1885798 - RNA, 20 nt, Human
caccccucaacaccucugca

SEQ ID NO: 1885799 - RNA, 12 nt, Human
caccccuggggg

SEQ ID NO: 1885800 - RNA, 14 nt, Human
caccccugggggcu

SEQ ID NO: 1885801 - RNA, 18 nt, Human
caccccugggggcucuca

SEQ ID NO: 1885802 - RNA, 18 nt, Human
caccccugguucucaucu

SEQ ID NO: 1885803 - RNA, 17 nt, Human
caccccugguucucauc

SEQ ID NO: 1885804 - RNA, 21 nt, Human
cacccggccccugcugguuca

SEQ ID NO: 1885805 - RNA, 18 nt, Human
cacccggccccugcuggu

SEQ ID NO: 1885806 - RNA, 17 nt, Human
cacccggccccugcugg

SEQ ID NO: 1885807 - RNA, 16 nt, Human
cacccggccccugcug

SEQ ID NO: 1885808 - RNA, 14 nt, Human
cacccggccccugc

SEQ ID NO: 1885809 - RNA, 13 nt, Human
cacccggccccug

SEQ ID NO: 1885810 - RNA, 12 nt, Human
cacccggccccu

SEQ ID NO: 1885811 - RNA, 19 nt, Human
cacccgcuaagagggaggg

SEQ ID NO: 1885812 - RNA, 18 nt, Human
cacccucaaccucuucug

SEQ ID NO: 1885813 - RNA, 22 nt, Human
caccgaaaacguggcugcuuca

SEQ ID NO: 1885814 - RNA, 14 nt, Human
caccgaaaaacuaa

SEQ ID NO: 1885815 - RNA, 19 nt, Human
caccgaaaacguggcugcu

SEQ ID NO: 1885816 - RNA, 21 nt, Human
caccgaaaacguggcugcuuc

SEQ ID NO: 1885817 - RNA, 15 nt, Human
caccgaaaacguggc

SEQ ID NO: 1885818 - RNA, 18 nt, Human
caccgaaaacguggcugc

SEQ ID NO: 1885819 - RNA, 12 nt, Human
caccgcagacag

SEQ ID NO: 1885820 - RNA, 13 nt, Human
caccgcagacagg

SEQ ID NO: 1885821 - RNA, 14 nt, Human
caccgcagacagga

SEQ ID NO: 1885822 - RNA, 15 nt, Human
caccgcagacaggac

SEQ ID NO: 1885823 - RNA, 17 nt, Human
caccgcagacaggacca

SEQ ID NO: 1885824 - RNA, 18 nt, Human
caccgcagacaggaccag

SEQ ID NO: 1885825 - RNA, 11 nt, Human
cacccugugau

SEQ ID NO: 1885826 - RNA, 12 nt, Human
cacccugugaug

SEQ ID NO: 1885827 - RNA, 15 nt, Human
cacccugugaugggg

SEQ ID NO: 1885828 - RNA, 18 nt, Human
cacccugugauggggccc

SEQ ID NO: 1885829 - RNA, 20 nt, Human
cacccugugauggggcccug

SEQ ID NO: 1885830 - RNA, 21 nt, Human
cacccugugauggggcccugc

SEQ ID NO: 1885831 - RNA, 22 nt, Human
cacccugugauggggcccugcc

SEQ ID NO: 1885832 - RNA, 23 nt, Human
cacccugugauggggcccugccu

SEQ ID NO: 1885833 - RNA, 20 nt, Human
cacauauugauuuccguuaa

SEQ ID NO: 1885834 - RNA, 15 nt, Human
caccugccacccugg

SEQ ID NO: 1885835 - RNA, 20 nt, Human
caccugccacccugggccug

SEQ ID NO: 1885836 - RNA, 23 nt, Human
caccugccacccugggccuggca

SEQ ID NO: 1885837 - RNA, 23 nt, Human
caccugcggugcuaucuccccca

SEQ ID NO: 1885838 - RNA, 20 nt, Human
caccuggaauauauaaccag

SEQ ID NO: 1885839 - RNA, 15 nt, Human
caccugcuggaguga

SEQ ID NO: 1885840 - RNA, 15 nt, Human
caccugaagacucau

SEQ ID NO: 1885841 - RNA, 14 nt, Human
caccugaagacuca

SEQ ID NO: 1885842 - RNA, 23 nt, Human
caccugaagacucauucuucugu

SEQ ID NO: 1885843 - RNA, 19 nt, Human
caccugaacugaacaccau

SEQ ID NO: 1885844 - RNA, 17 nt, Human
caccugaacugaacacc

SEQ ID NO: 1885845 - RNA, 13 nt, Human
caccugaacugaa

SEQ ID NO: 1885846 - RNA, 15 nt, Human
caccucucucacucc

SEQ ID NO: 1885847 - RNA, 17 nt, Human
caccucucucacuccuu

SEQ ID NO: 1885848 - RNA, 18 nt, Human
caccucucucacuccuug

SEQ ID NO: 1885849 - RNA, 19 nt, Human
caccucucucacuccuuga

SEQ ID NO: 1885850 - RNA, 18 nt, Human
caccucugcacaagcugc

SEQ ID NO: 1885851 - RNA, 19 nt, Human
caccucugcacaagcugca

SEQ ID NO: 1885852 - RNA, 22 nt, Human
caccucugcuacucaaguagca

SEQ ID NO: 1885853 - RNA, 23 nt, Human
caccuggccucugcacuccccug

SEQ ID NO: 1885854 - RNA, 17 nt, Human
caccuggccucugcacu

SEQ ID NO: 1885855 - RNA, 18 nt, Human
caccuggccucugcacuc

SEQ ID NO: 1885856 - RNA, 19 nt, Human
caccuggccucugcacucc

SEQ ID NO: 1885857 - RNA, 20 nt, Human
caccuggccucugcacuccc

SEQ ID NO: 1885858 - RNA, 12 nt, Human
caccuggccucu

SEQ ID NO: 1885859 - RNA, 13 nt, Human
caccuggccucug

SEQ ID NO: 1885860 - RNA, 14 nt, Human
caccuggccucugc

SEQ ID NO: 1885861 - RNA, 15 nt, Human
caccuggccucugca

SEQ ID NO: 1885862 - RNA, 21 nt, Human
caccuguaaucccagcuacuu

SEQ ID NO: 1885863 - RNA, 16 nt, Human
caccuguaaucccagc

SEQ ID NO: 1885864 - RNA, 18 nt, Human
caccuguaaucccagcac

SEQ ID NO: 1885865 - RNA, 14 nt, Human
caccgggcagggcc

SEQ ID NO: 1885866 - RNA, 13 nt, Human
caccgggcagggc

SEQ ID NO: 1885867 - RNA, 18 nt, Human
caccgggccacagagaaa

SEQ ID NO: 1885868 - RNA, 15 nt, Human
caccgggccacagag

SEQ ID NO: 1885869 - RNA, 22 nt, Human
caccgggcacucagaagacacu

SEQ ID NO: 1885870 - RNA, 15 nt, Human
caccgggcacucaga

SEQ ID NO: 1885871 - RNA, 14 nt, Human
caccguacugugga

SEQ ID NO: 1885872 - RNA, 15 nt, Human
caccgugggcaggga

SEQ ID NO: 1885873 - RNA, 14 nt, Human
caccggcuggccug

SEQ ID NO: 1885874 - RNA, 15 nt, Human
caccggcuggccugg

SEQ ID NO: 1885875 - RNA, 16 nt, Human
caccggcuggccuggc

SEQ ID NO: 1885876 - RNA, 14 nt, Human
caccgggcacucag

SEQ ID NO: 1885877 - RNA, 20 nt, Human
caccggcuggccuggccccu

SEQ ID NO: 1885878 - RNA, 17 nt, Human
caccggcuggccuggcc

SEQ ID NO: 1885879 - RNA, 18 nt, Human
caccggcuggccuggccc

SEQ ID NO: 1885880 - RNA, 21 nt, Human
caccgcagacaggaccaggga

SEQ ID NO: 1885881 - RNA, 17 nt, Human
caccgccuccuacagcc

SEQ ID NO: 1885882 - RNA, 10 nt, Human
caccucccug

SEQ ID NO: 1885883 - RNA, 11 nt, Human
caccuccugcc

SEQ ID NO: 1885884 - RNA, 13 nt, Human
caccuccugccuc

SEQ ID NO: 1885885 - RNA, 14 nt, Human
caccuccugcuggg

SEQ ID NO: 1885886 - RNA, 15 nt, Human
caccuccugcugggc

SEQ ID NO: 1885887 - RNA, 14 nt, Human
caccuccugccucg

SEQ ID NO: 1885888 - RNA, 12 nt, Human
caccucccugcc

SEQ ID NO: 1885889 - RNA, 13 nt, Human
caccucccugccu

SEQ ID NO: 1885890 - RNA, 14 nt, Human
caccucccugccuc

SEQ ID NO: 1885891 - RNA, 15 nt, Human
caccucccugccucc

SEQ ID NO: 1885892 - RNA, 17 nt, Human
caccucccugccuccag

SEQ ID NO: 1885893 - RNA, 17 nt, Human
caccuccugcugggcag

SEQ ID NO: 1885894 - RNA, 20 nt, Human
caccucgaauuuuguuuucu

SEQ ID NO: 1885895 - RNA, 23 nt, Human
caccuccuuucaagguaacugua

SEQ ID NO: 1885896 - RNA, 15 nt, Human
caccucgaauuuugu

SEQ ID NO: 1885897 - RNA, 13 nt, Human
caccucucccuug

SEQ ID NO: 1885898 - RNA, 19 nt, Human
caccucucccugacccugu

SEQ ID NO: 1885899 - RNA, 14 nt, Human
caccucucccuugg

SEQ ID NO: 1885900 - RNA, 17 nt, Human
caccucucccuuggauu

SEQ ID NO: 1885901 - RNA, 16 nt, Human
cacgccagauucuuuc

SEQ ID NO: 1885902 - RNA, 21 nt, Human
cagaggagcugggagccgggc

SEQ ID NO: 1885903 - RNA, 20 nt, Human
cagaggagcugggagccggg

SEQ ID NO: 1885904 - RNA, 18 nt, Human
cagaggagggcagcagaa

SEQ ID NO: 1885905 - RNA, 14 nt, Human
cagaggagggcagc

SEQ ID NO: 1885906 - RNA, 21 nt, Human
cagaggacugugaugcccugc

SEQ ID NO: 1885907 - RNA, 20 nt, Human
cagaggagagaggacccccu

SEQ ID NO: 1885908 - RNA, 11 nt, Human
cagaggcagcc

SEQ ID NO: 1885909 - RNA, 22 nt, Human
cagaggagggcagcagaagggg

SEQ ID NO: 1885910 - RNA, 13 nt, Human
cagaggaggggcc

SEQ ID NO: 1885911 - RNA, 14 nt, Human
cagaggaggggccg

SEQ ID NO: 1885912 - RNA, 19 nt, Human
cagaggaggggccgcugcc

SEQ ID NO: 1885913 - RNA, 20 nt, Human
cagaggaggggccgcugcca

SEQ ID NO: 1885914 - RNA, 14 nt, Human
cagaggacugugau

SEQ ID NO: 1885915 - RNA, 13 nt, Human
cagaggagagagg

SEQ ID NO: 1885916 - RNA, 15 nt, Human
cagaggagagaggac

SEQ ID NO: 1885917 - RNA, 19 nt, Human
cagaggagagaggaccccc

SEQ ID NO: 1885918 - RNA, 22 nt, Human
cagaggacaguauuugugggga

SEQ ID NO: 1885919 - RNA, 13 nt, Human
cagagccugcagu

SEQ ID NO: 1885920 - RNA, 13 nt, Human
cagaggaaggaga

SEQ ID NO: 1885921 - RNA, 12 nt, Human
cagagccugcag

SEQ ID NO: 1885922 - RNA, 23 nt, Human
cagagcccacgcccccacuggug

SEQ ID NO: 1885923 - RNA, 11 nt, Human
cagagcccagc

SEQ ID NO: 1885924 - RNA, 13 nt, Human
cagagcccagcuc

SEQ ID NO: 1885925 - RNA, 14 nt, Human
cagagcccagcucc

SEQ ID NO: 1885926 - RNA, 17 nt, Human
cagagcccacgccccca

SEQ ID NO: 1885927 - RNA, 19 nt, Human
cagagcccacgcccccacu

SEQ ID NO: 1885928 - RNA, 20 nt, Human
cagagcccacgcccccacug

SEQ ID NO: 1885929 - RNA, 21 nt, Human
cagagcccacgcccccacugg

SEQ ID NO: 1885930 - RNA, 20 nt, Human
cagagcccaccuuggcucaa

SEQ ID NO: 1885931 - RNA, 16 nt, Human
cagagcccacgccccc

SEQ ID NO: 1885932 - RNA, 19 nt, Human
cagagcccaccuuggcuca

SEQ ID NO: 1885933 - RNA, 17 nt, Human
cagagcccaccuuggcu

SEQ ID NO: 1885934 - RNA, 15 nt, Human
cagagcccaccuugg

SEQ ID NO: 1885935 - RNA, 23 nt, Human
cagagccaggggggugaggagcu

SEQ ID NO: 1885936 - RNA, 22 nt, Human
cagagcagugggccuggccagc

SEQ ID NO: 1885937 - RNA, 21 nt, Human
cagagcagugggccuggccag

SEQ ID NO: 1885938 - RNA, 20 nt, Human
cagagcagugggccuggcca

SEQ ID NO: 1885939 - RNA, 17 nt, Human
cagagcagugggccugg

SEQ ID NO: 1885940 - RNA, 15 nt, Human
cagagcagugggccu

SEQ ID NO: 1885941 - RNA, 23 nt, Human
cagagcaccuuagacagucccug

SEQ ID NO: 1885942 - RNA, 11 nt, Human
cagagcagaga

SEQ ID NO: 1885943 - RNA, 12 nt, Human
cagagcagagac

SEQ ID NO: 1885944 - RNA, 18 nt, Human
cagagcaccuuagacagu

SEQ ID NO: 1885945 - RNA, 19 nt, Human
cagagcaccuuagacaguc

SEQ ID NO: 1885946 - RNA, 21 nt, Human
cagagcaccuuagacaguccc

SEQ ID NO: 1885947 - RNA, 22 nt, Human
cagagcaccuuagacagucccu

SEQ ID NO: 1885948 - RNA, 13 nt, Human
cagagcagagacc

SEQ ID NO: 1885949 - RNA, 14 nt, Human
cagagcagagacca

SEQ ID NO: 1885950 - RNA, 15 nt, Human
cagagcagagaccau

SEQ ID NO: 1885951 - RNA, 17 nt, Human
cagagcagagaccaucc

SEQ ID NO: 1885952 - RNA, 18 nt, Human
cagagcagagaccauccc

SEQ ID NO: 1885953 - RNA, 19 nt, Human
cagagcagagaccaucccu

SEQ ID NO: 1885954 - RNA, 21 nt, Human
cagagcagagaccaucccuga

SEQ ID NO: 1885955 - RNA, 13 nt, Human
cagagacaaggag

SEQ ID NO: 1885956 - RNA, 14 nt, Human
cagagacacaagcc

SEQ ID NO: 1885957 - RNA, 15 nt, Human
cagagacacaagccu

SEQ ID NO: 1885958 - RNA, 20 nt, Human
cagagacaaggagggcacag

SEQ ID NO: 1885959 - RNA, 16 nt, Human
cagagacaaggagggc

SEQ ID NO: 1885960 - RNA, 16 nt, Human
cagagacacaagccuu

SEQ ID NO: 1885961 - RNA, 17 nt, Human
cagagacacaagccuuc

SEQ ID NO: 1885962 - RNA, 13 nt, Human
cagagaccauccc

SEQ ID NO: 1885963 - RNA, 14 nt, Human
cagagaccaucccu

SEQ ID NO: 1885964 - RNA, 16 nt, Human
cagagaccaucccuga

SEQ ID NO: 1885965 - RNA, 15 nt, Human
cagagacauacuuga

SEQ ID NO: 1885966 - RNA, 16 nt, Human
cagagacauacuugaa

SEQ ID NO: 1885967 - RNA, 17 nt, Human
cagagacauacuugaag

SEQ ID NO: 1885968 - RNA, 19 nt, Human
cagagacauacuugaaggg

SEQ ID NO: 1885969 - RNA, 20 nt, Human
cagagacauacuugaagggc

SEQ ID NO: 1885970 - RNA, 21 nt, Human
cagagacauacuugaagggcc

SEQ ID NO: 1885971 - RNA, 23 nt, Human
cagagacauacuugaagggccag

SEQ ID NO: 1885972 - RNA, 19 nt, Human
cagagaagcucucgggcua

SEQ ID NO: 1885973 - RNA, 21 nt, Human
cagagaagcuauaaauuccuc

SEQ ID NO: 1885974 - RNA, 23 nt, Human
cagagaagcuauaaauuccucuu

SEQ ID NO: 1885975 - RNA, 19 nt, Human
cagagaaaggggagcccac

SEQ ID NO: 1885976 - RNA, 21 nt, Human
cagagaaugaaagggcccaga

SEQ ID NO: 1885977 - RNA, 20 nt, Human
cagagaaugaaagggcccag

SEQ ID NO: 1885978 - RNA, 15 nt, Human
cagagaauucucuua

SEQ ID NO: 1885979 - RNA, 19 nt, Human
cagagaaugaaagggccca

SEQ ID NO: 1885980 - RNA, 22 nt, Human
cagagauaguggggagacuucu

SEQ ID NO: 1885981 - RNA, 19 nt, Human
cagagauccaaaagaagcc

SEQ ID NO: 1885982 - RNA, 20 nt, Human
cagagauccaaaagaagccc

SEQ ID NO: 1885983 - RNA, 21 nt, Human
cagagauccaaaagaagcccc

SEQ ID NO: 1885984 - RNA, 23 nt, Human
cagagauccaaaagaagccccca

SEQ ID NO: 1885985 - RNA, 16 nt, Human
cagagcaccuuagaca

SEQ ID NO: 1885986 - RNA, 14 nt, Human
cagagcaagugaga

SEQ ID NO: 1885987 - RNA, 20 nt, Human
cagagcaagugagacccugu

SEQ ID NO: 1885988 - RNA, 20 nt, Human
cagagcaagacucugucuca

SEQ ID NO: 1885989 - RNA, 21 nt, Human
cagagaccaucccugaaggcc

SEQ ID NO: 1885990 - RNA, 14 nt, Human
cagagaccauugca

SEQ ID NO: 1885991 - RNA, 17 nt, Human
cagagaccaucccugaa

SEQ ID NO: 1885992 - RNA, 18 nt, Human
cagagaccaucccugaag

SEQ ID NO: 1885993 - RNA, 19 nt, Human
cagagaccaucccugaagg

SEQ ID NO: 1885994 - RNA, 20 nt, Human
cagagaccaucccugaaggc

SEQ ID NO: 1885995 - RNA, 13 nt, Human
cagagacuccugc

SEQ ID NO: 1885996 - RNA, 14 nt, Human
cagagacuccugca

SEQ ID NO: 1885997 - RNA, 15 nt, Human
cagagacuccugcag

SEQ ID NO: 1885998 - RNA, 16 nt, Human
cagagacuccugcagg

SEQ ID NO: 1885999 - RNA, 17 nt, Human
cagagacuccugcaggc

SEQ ID NO: 1886000 - RNA, 18 nt, Human
cagagacuccugcaggca

SEQ ID NO: 1886001 - RNA, 19 nt, Human
cagagacuccugcaggcag

SEQ ID NO: 1886002 - RNA, 16 nt, Human
cagaugcaccagcccu

SEQ ID NO: 1886003 - RNA, 14 nt, Human
cagaugcaccagcc

SEQ ID NO: 1886004 - RNA, 13 nt, Human
cagaugcaccagc

SEQ ID NO: 1886005 - RNA, 14 nt, Human
cagaugcaaugacu

SEQ ID NO: 1886006 - RNA, 22 nt, Human
cagaugcaccagcccuuagcag

SEQ ID NO: 1886007 - RNA, 17 nt, Human
cagaugcaccagcccuu

SEQ ID NO: 1886008 - RNA, 13 nt, Human
cagaugcagggca

SEQ ID NO: 1886009 - RNA, 14 nt, Human
cagaugcagggcag

SEQ ID NO: 1886010 - RNA, 15 nt, Human
cagaugaauguauuu

SEQ ID NO: 1886011 - RNA, 19 nt, Human
cagaugaauguauuuauuu

SEQ ID NO: 1886012 - RNA, 23 nt, Human
cagaugaauguauuuauuuggga

SEQ ID NO: 1886013 - RNA, 22 nt, Human
cagauacaggaaaagcugcuga

SEQ ID NO: 1886014 - RNA, 21 nt, Human
cagauacaggaaaagcugcug

SEQ ID NO: 1886015 - RNA, 20 nt, Human
cagauacaggaaaagcugcu

SEQ ID NO: 1886016 - RNA, 20 nt, Human
cagaucucuaacuucaccau

SEQ ID NO: 1886017 - RNA, 24 nt, Human
cagaucugacaugauuccuuccug

SEQ ID NO: 1886018 - RNA, 14 nt, Human
cagaucuggaaccu

SEQ ID NO: 1886019 - RNA, 15 nt, Human
cagaucuggaaccuc

SEQ ID NO: 1886020 - RNA, 18 nt, Human
cagaucuggaaccucagc

SEQ ID NO: 1886021 - RNA, 19 nt, Human
cagaucuggaaccucagcc

SEQ ID NO: 1886022 - RNA, 20 nt, Human
cagaucuggaaccucagccu

SEQ ID NO: 1886023 - RNA, 21 nt, Human
cagaucuggaaccucagccug

SEQ ID NO: 1886024 - RNA, 22 nt, Human
cagaucuggaaccucagccugg

SEQ ID NO: 1886025 - RNA, 23 nt, Human
cagaucuggaaccucagccuggc

SEQ ID NO: 1886026 - RNA, 22 nt, Human
cagaucugacaugauuccuucc

SEQ ID NO: 1886027 - RNA, 23 nt, Human
cagaucugacaugauuccuuccu

SEQ ID NO: 1886028 - RNA, 19 nt, Human
cagaguuguuacauuuuua

SEQ ID NO: 1886029 - RNA, 18 nt, Human
cagaguuguuacauuuuu

SEQ ID NO: 1886030 - RNA, 15 nt, Human
cagaguuguuacauu

SEQ ID NO: 1886031 - RNA, 14 nt, Human
cagauaaacaguag

SEQ ID NO: 1886032 - RNA, 22 nt, Human
cagauaaagguucaugcaaacu

SEQ ID NO: 1886033 - RNA, 23 nt, Human
cagauaaauaguuuaugauucca

SEQ ID NO: 1886034 - RNA, 22 nt, Human
cagaguugaagacagagcuaca

SEQ ID NO: 1886035 - RNA, 14 nt, Human
cagaguuguuacau

SEQ ID NO: 1886036 - RNA, 17 nt, Human
cagaguugaagacagag

SEQ ID NO: 1886037 - RNA, 18 nt, Human
cagaguugaagacagagc

SEQ ID NO: 1886038 - RNA, 19 nt, Human
cagaguugaagacagagcu

SEQ ID NO: 1886039 - RNA, 20 nt, Human
cagaguugaagacagagcua

SEQ ID NO: 1886040 - RNA, 14 nt, Human
cagaguugaagaca

SEQ ID NO: 1886041 - RNA, 15 nt, Human
cagaguugaagacag

SEQ ID NO: 1886042 - RNA, 16 nt, Human
cagaguugaagacaga

SEQ ID NO: 1886043 - RNA, 20 nt, Human
cagagugagacucugucuca

SEQ ID NO: 1886044 - RNA, 19 nt, Human
cagagugagacucugucuc

SEQ ID NO: 1886045 - RNA, 18 nt, Human
cagagugcaagccccugc

SEQ ID NO: 1886046 - RNA, 23 nt, Human
cagagugcaagccccugcuccag

SEQ ID NO: 1886047 - RNA, 20 nt, Human
cagagugcaagccccugcuc

SEQ ID NO: 1886048 - RNA, 18 nt, Human
cagagugagacucugucu

SEQ ID NO: 1886049 - RNA, 17 nt, Human
cagagugagacucuguc

SEQ ID NO: 1886050 - RNA, 16 nt, Human
cagagugagacucugu

SEQ ID NO: 1886051 - RNA, 23 nt, Human
cagagucucacuguugcccaggc

SEQ ID NO: 1886052 - RNA, 22 nt, Human
cagagucucacuguugcccagg

SEQ ID NO: 1886053 - RNA, 23 nt, Human
cagagucucgcucuguugcccag

SEQ ID NO: 1886054 - RNA, 23 nt, Human
cagagggagugacagaggcagcc

SEQ ID NO: 1886055 - RNA, 22 nt, Human
cagagggagugacagaggcagc

SEQ ID NO: 1886056 - RNA, 21 nt, Human
cagagggagugacagaggcag

SEQ ID NO: 1886057 - RNA, 20 nt, Human
cagagggagugacagaggca

SEQ ID NO: 1886058 - RNA, 15 nt, Human
cagagggccugcaag

SEQ ID NO: 1886059 - RNA, 19 nt, Human
cagagggccugcaagggag

SEQ ID NO: 1886060 - RNA, 21 nt, Human
cagagucucacuguugcccag

SEQ ID NO: 1886061 - RNA, 20 nt, Human
cagagucucacuguugccca

SEQ ID NO: 1886062 - RNA, 19 nt, Human
cagagucucacuguugccc

SEQ ID NO: 1886063 - RNA, 17 nt, Human
cagagucucacuguugc

SEQ ID NO: 1886064 - RNA, 13 nt, Human
cagagucucacug

SEQ ID NO: 1886065 - RNA, 22 nt, Human
cagaggcagccccauucugccu

SEQ ID NO: 1886066 - RNA, 20 nt, Human
cagaggcagccccauucugc

SEQ ID NO: 1886067 - RNA, 19 nt, Human
cagaggcagccccauucug

SEQ ID NO: 1886068 - RNA, 18 nt, Human
cagaggcagccccauucu

SEQ ID NO: 1886069 - RNA, 15 nt, Human
cagaggcagccccau

SEQ ID NO: 1886070 - RNA, 14 nt, Human
cagaggcagcccca

SEQ ID NO: 1886071 - RNA, 13 nt, Human
cagaggcagcccc

SEQ ID NO: 1886072 - RNA, 12 nt, Human
cagaggcagccc

SEQ ID NO: 1886073 - RNA, 21 nt, Human
cagaggccaugggccuccugu

SEQ ID NO: 1886074 - RNA, 20 nt, Human
cagaggccaugggccuccug

SEQ ID NO: 1886075 - RNA, 16 nt, Human
cagaggccaugggccu

SEQ ID NO: 1886076 - RNA, 19 nt, Human
cagaggccaugggccuccu

SEQ ID NO: 1886077 - RNA, 23 nt, Human
cagaggcagccccauucugccug

SEQ ID NO: 1886078 - RNA, 19 nt, Human
cagagggagugacagaggc

SEQ ID NO: 1886079 - RNA, 18 nt, Human
cagagggagugacagagg

SEQ ID NO: 1886080 - RNA, 16 nt, Human
cagagggagugacaga

SEQ ID NO: 1886081 - RNA, 14 nt, Human
cagagggagugaca

SEQ ID NO: 1886082 - RNA, 23 nt, Human
cagaggcugccucucccaucacu

SEQ ID NO: 1886083 - RNA, 23 nt, Human
cagaggcgcaugaauuugugaag

SEQ ID NO: 1886084 - RNA, 17 nt, Human
cagaggcgcacugugac

SEQ ID NO: 1886085 - RNA, 13 nt, Human
cagaggcugccuc

SEQ ID NO: 1886086 - RNA, 18 nt, Human
cagaggcgcacugugacc

SEQ ID NO: 1886087 - RNA, 13 nt, Human
cagaggccccagc

SEQ ID NO: 1886088 - RNA, 14 nt, Human
cagaggccccagcc

SEQ ID NO: 1886089 - RNA, 16 nt, Human
cagaggccccagccuc

SEQ ID NO: 1886090 - RNA, 17 nt, Human
cagaggccccagccucc

SEQ ID NO: 1886091 - RNA, 13 nt, Human
cagaaacaggacc

SEQ ID NO: 1886092 - RNA, 18 nt, Human
cagaaagcagaacaguga

SEQ ID NO: 1886093 - RNA, 19 nt, Human
cagaaacuguucccaccug

SEQ ID NO: 1886094 - RNA, 19 nt, Human
cagaaagcagaacagugau

SEQ ID NO: 1886095 - RNA, 23 nt, Human
cagaacagugauuaccagggacu

SEQ ID NO: 1886096 - RNA, 21 nt, Human
cagaaaagaaaguucaugcuu

SEQ ID NO: 1886097 - RNA, 22 nt, Human
cagaaaaguugaauuuuacaug

SEQ ID NO: 1886098 - RNA, 20 nt, Human
cagaaaaguugaauuuuaca

SEQ ID NO: 1886099 - RNA, 17 nt, Human
cagaaaaguugaauuuu

SEQ ID NO: 1886100 - RNA, 16 nt, Human
cagaaaauggaagaca

SEQ ID NO: 1886101 - RNA, 20 nt, Human
cagaaaauggaagacagcuc

SEQ ID NO: 1886102 - RNA, 21 nt, Human
cagaaaauggaagacagcucu

SEQ ID NO: 1886103 - RNA, 22 nt, Human
cagaaaauggaagacagcucuu

SEQ ID NO: 1886104 - RNA, 23 nt, Human
cagaaaauggaagacagcucuua

SEQ ID NO: 1886105 - RNA, 14 nt, Human
cagaaaauguugag

SEQ ID NO: 1886106 - RNA, 18 nt, Human
cagaaaauguugagaauc

SEQ ID NO: 1886107 - RNA, 23 nt, Human
cagaaaauguugagaaucccaaa

SEQ ID NO: 1886108 - RNA, 14 nt, Human
cacuuuuguucuug

SEQ ID NO: 1886109 - RNA, 22 nt, Human
cacuuuuguucuugguuuguaa

SEQ ID NO: 1886110 - RNA, 20 nt, Human
cacuuugucgcccaggcugg

SEQ ID NO: 1886111 - RNA, 23 nt, Human
cacuuuuuuuuuuaaucuccacc

SEQ ID NO: 1886112 - RNA, 13 nt, Human
cagaaaaaccaga

SEQ ID NO: 1886113 - RNA, 12 nt, Human
cacuuugcauaa

SEQ ID NO: 1886114 - RNA, 20 nt, Human
cacuuuggauuucaucagac

SEQ ID NO: 1886115 - RNA, 22 nt, Human
cacuuucuagccagaggagaga

SEQ ID NO: 1886116 - RNA, 22 nt, Human
cacuuucucaugauuuacagag

SEQ ID NO: 1886117 - RNA, 16 nt, Human
cacuuugggaggccaa

SEQ ID NO: 1886118 - RNA, 23 nt, Human
cacuuugggaggccaaggagggc

SEQ ID NO: 1886119 - RNA, 12 nt, Human
cacuuugggagg

SEQ ID NO: 1886120 - RNA, 13 nt, Human
cacuuugggaggc

SEQ ID NO: 1886121 - RNA, 13 nt, Human
cacuuuguucugg

SEQ ID NO: 1886122 - RNA, 14 nt, Human
cacuuuguucuggc

SEQ ID NO: 1886123 - RNA, 16 nt, Human
cacuuuguucuggcuc

SEQ ID NO: 1886124 - RNA, 23 nt, Human
cacuuuguucuggcucuuccagg

SEQ ID NO: 1886125 - RNA, 19 nt, Human
cagaagggagcuagccaga

SEQ ID NO: 1886126 - RNA, 20 nt, Human
cagaagggagcuagccagag

SEQ ID NO: 1886127 - RNA, 21 nt, Human
cagaagggagcuagccagagg

SEQ ID NO: 1886128 - RNA, 21 nt, Human
cagaaggggguggugucucca

SEQ ID NO: 1886129 - RNA, 20 nt, Human
cagaaggggguggugucucc

SEQ ID NO: 1886130 - RNA, 19 nt, Human
cagaaggggguggugucuc

SEQ ID NO: 1886131 - RNA, 14 nt, Human
cagaaggggguggu

SEQ ID NO: 1886132 - RNA, 17 nt, Human
cagaaucucaaauaacu

SEQ ID NO: 1886133 - RNA, 18 nt, Human
cagaaucucaaauaacua

SEQ ID NO: 1886134 - RNA, 22 nt, Human
cagaaggagacaggcagagcug

SEQ ID NO: 1886135 - RNA, 13 nt, Human
cagaaggagacag

SEQ ID NO: 1886136 - RNA, 17 nt, Human
cagaaggagacaggcag

SEQ ID NO: 1886137 - RNA, 18 nt, Human
cagaaggagacaggcaga

SEQ ID NO: 1886138 - RNA, 16 nt, Human
cagaagcuucugccca

SEQ ID NO: 1886139 - RNA, 19 nt, Human
cagaaggaagacuucaucc

SEQ ID NO: 1886140 - RNA, 16 nt, Human
cagaaggaagacuuca

SEQ ID NO: 1886141 - RNA, 12 nt, Human
cagaagcuucca

SEQ ID NO: 1886142 - RNA, 17 nt, Human
cagaaggaagacuucau

SEQ ID NO: 1886143 - RNA, 18 nt, Human
cagaaggaagacuucauc

SEQ ID NO: 1886144 - RNA, 18 nt, Human
cagaagccugaugcugac

SEQ ID NO: 1886145 - RNA, 17 nt, Human
cagaagcuaagcugcag

SEQ ID NO: 1886146 - RNA, 23 nt, Human
cagaaccccuggcuccaggccag

SEQ ID NO: 1886147 - RNA, 19 nt, Human
cagaacuaaacucauuuau

SEQ ID NO: 1886148 - RNA, 20 nt, Human
cagaacuaaacucauuuaua

SEQ ID NO: 1886149 - RNA, 17 nt, Human
cagaacuaaacucauuu

SEQ ID NO: 1886150 - RNA, 18 nt, Human
cagaacuaaacucauuua

SEQ ID NO: 1886151 - RNA, 20 nt, Human
cagaacucaaauggggccag

SEQ ID NO: 1886152 - RNA, 21 nt, Human
cagaacucaaauggggccaga

SEQ ID NO: 1886153 - RNA, 22 nt, Human
cagaacucaaauggggccagau

SEQ ID NO: 1886154 - RNA, 15 nt, Human
cagaacucacugggg

SEQ ID NO: 1886155 - RNA, 18 nt, Human
cagaacucacuggggccu

SEQ ID NO: 1886156 - RNA, 21 nt, Human
cagaagacacugaugggcaac

SEQ ID NO: 1886157 - RNA, 20 nt, Human
cagaagauagcuucacccca

SEQ ID NO: 1886158 - RNA, 14 nt, Human
cagaagaaggcagc

SEQ ID NO: 1886159 - RNA, 15 nt, Human
cagaagaacccuggc

SEQ ID NO: 1886160 - RNA, 15 nt, Human
cagaagaaggcagca

SEQ ID NO: 1886161 - RNA, 14 nt, Human
cagaagcagcucuu

SEQ ID NO: 1886162 - RNA, 13 nt, Human
cagaagcagcucu

SEQ ID NO: 1886163 - RNA, 18 nt, Human
cagaagaugaacagacug

SEQ ID NO: 1886164 - RNA, 15 nt, Human
cagaagaugaacaga

SEQ ID NO: 1886165 - RNA, 20 nt, Human
cagaagcaacccaaauguuc

SEQ ID NO: 1886166 - RNA, 19 nt, Human
cagaagcaacccaaauguu

SEQ ID NO: 1886167 - RNA, 14 nt, Human
cagaagcccagaau

SEQ ID NO: 1886168 - RNA, 12 nt, Human
cagaagcccaga

SEQ ID NO: 1886169 - RNA, 11 nt, Human
cagaagcccag

SEQ ID NO: 1886170 - RNA, 16 nt, Human
cagaccauaauguuac

SEQ ID NO: 1886171 - RNA, 13 nt, Human
cagaccagcucuu

SEQ ID NO: 1886172 - RNA, 13 nt, Human
cagaccacggcuc

SEQ ID NO: 1886173 - RNA, 14 nt, Human
cagaccacaaaacu

SEQ ID NO: 1886174 - RNA, 20 nt, Human
cagaccacaaaacuuuucua

SEQ ID NO: 1886175 - RNA, 14 nt, Human
cagacauuggcacc

SEQ ID NO: 1886176 - RNA, 15 nt, Human
cagacccccuggaga

SEQ ID NO: 1886177 - RNA, 22 nt, Human
cagaccuaggauuucaugauuu

SEQ ID NO: 1886178 - RNA, 15 nt, Human
cagaccuaaugcucc

SEQ ID NO: 1886179 - RNA, 16 nt, Human
cagaccuaaugcuccu

SEQ ID NO: 1886180 - RNA, 17 nt, Human
cagaccuaaugcuccuu

SEQ ID NO: 1886181 - RNA, 18 nt, Human
cagaccuaaugcuccuug

SEQ ID NO: 1886182 - RNA, 16 nt, Human
cagaccccuuggccag

SEQ ID NO: 1886183 - RNA, 22 nt, Human
cagacccugcccugugggcccc

SEQ ID NO: 1886184 - RNA, 15 nt, Human
cagacccugcccugu

SEQ ID NO: 1886185 - RNA, 16 nt, Human
cagacccugcccugug

SEQ ID NO: 1886186 - RNA, 17 nt, Human
cagacccugcccugugg

SEQ ID NO: 1886187 - RNA, 21 nt, Human
cagacccugcccugugggccc

SEQ ID NO: 1886188 - RNA, 15 nt, Human
cagaccccuuggcca

SEQ ID NO: 1886189 - RNA, 13 nt, Human
cagaccccuuggc

SEQ ID NO: 1886190 - RNA, 14 nt, Human
cagacccggcugcg

SEQ ID NO: 1886191 - RNA, 12 nt, Human
cagacccggcug

SEQ ID NO: 1886192 - RNA, 16 nt, Human
cagacccggcugcgug

SEQ ID NO: 1886193 - RNA, 12 nt, Human
cagacccugccc

SEQ ID NO: 1886194 - RNA, 13 nt, Human
cagacccugcccu

SEQ ID NO: 1886195 - RNA, 14 nt, Human
cagacccugcccug

SEQ ID NO: 1886196 - RNA, 23 nt, Human
cagagaaaguacuucuccacccu

SEQ ID NO: 1886197 - RNA, 19 nt, Human
cagagaaaguacuucucca

SEQ ID NO: 1886198 - RNA, 18 nt, Human
cagagaaaggggagccca

SEQ ID NO: 1886199 - RNA, 17 nt, Human
cagagaaagcgcagaug

SEQ ID NO: 1886200 - RNA, 13 nt, Human
cagagaaagcgca

SEQ ID NO: 1886201 - RNA, 15 nt, Human
cagagaaagcgcaga

SEQ ID NO: 1886202 - RNA, 16 nt, Human
cagagaaagcgcagau

SEQ ID NO: 1886203 - RNA, 15 nt, Human
cagacuuccuugaga

SEQ ID NO: 1886204 - RNA, 24 nt, Human
cagacuuccuugagacacggagcc

SEQ ID NO: 1886205 - RNA, 14 nt, Human
cagacucagacauu

SEQ ID NO: 1886206 - RNA, 20 nt, Human
cagacucacaaccugaaccu

SEQ ID NO: 1886207 - RNA, 21 nt, Human
cagacucacaaccugaaccua

SEQ ID NO: 1886208 - RNA, 14 nt, Human
cagacucccauucc

SEQ ID NO: 1886209 - RNA, 16 nt, Human
cagacucauauuacug

SEQ ID NO: 1886210 - RNA, 17 nt, Human
cagacucccauuccuga

SEQ ID NO: 1886211 - RNA, 18 nt, Human
cagacucccauuccugaa

SEQ ID NO: 1886212 - RNA, 14 nt, Human
cagacgcccagauu

SEQ ID NO: 1886213 - RNA, 20 nt, Human
cagaccuuuuaacuccucaa

SEQ ID NO: 1886214 - RNA, 19 nt, Human
cagaccuguuagcagacag

SEQ ID NO: 1886215 - RNA, 20 nt, Human
cagaccuguuagcagacagg

SEQ ID NO: 1886216 - RNA, 13 nt, Human
cagaccugauccu

SEQ ID NO: 1886217 - RNA, 14 nt, Human
cagaccugauccug

SEQ ID NO: 1886218 - RNA, 17 nt, Human
cagaccugauccuggag

SEQ ID NO: 1886219 - RNA, 20 nt, Human
cagaccugauccuggaggcc

SEQ ID NO: 1886220 - RNA, 22 nt, Human
cagaccugauccuggaggccca

SEQ ID NO: 1886221 - RNA, 23 nt, Human
cagaccugauccuggaggcccag

SEQ ID NO: 1886222 - RNA, 20 nt, Human
cagaccugcagacgcccaga

SEQ ID NO: 1886223 - RNA, 22 nt, Human
cagacucaaaugcucagaccag

SEQ ID NO: 1886224 - RNA, 23 nt, Human
cagacucaaaugcucagaccagc

SEQ ID NO: 1886225 - RNA, 19 nt, Human
cagacucacaaccugaacc

SEQ ID NO: 1886226 - RNA, 22 nt, Human
cagacaccuugacagggcacac

SEQ ID NO: 1886227 - RNA, 20 nt, Human
cagacaccuugacagggcac

SEQ ID NO: 1886228 - RNA, 19 nt, Human
cagacaccuugacagggca

SEQ ID NO: 1886229 - RNA, 14 nt, Human
cagacacccucaac

SEQ ID NO: 1886230 - RNA, 15 nt, Human
cagacacccucaacc

SEQ ID NO: 1886231 - RNA, 21 nt, Human
cagacacccucaaccucuucu

SEQ ID NO: 1886232 - RNA, 20 nt, Human
cagacaguuaagagaaauga

SEQ ID NO: 1886233 - RNA, 19 nt, Human
cagacauacuaaccagcag

SEQ ID NO: 1886234 - RNA, 19 nt, Human
cagacauagaauuaacaca

SEQ ID NO: 1886235 - RNA, 17 nt, Human
cagacauagaauuaaca

SEQ ID NO: 1886236 - RNA, 18 nt, Human
cagacaugccacaaggac

SEQ ID NO: 1886237 - RNA, 12 nt, Human
cagacauguuuu

SEQ ID NO: 1886238 - RNA, 18 nt, Human
cagacauguuuuccguga

SEQ ID NO: 1886239 - RNA, 22 nt, Human
cagacauguuuuccgugaaaac

SEQ ID NO: 1886240 - RNA, 23 nt, Human
cagacacaggcccggcuccaggc

SEQ ID NO: 1886241 - RNA, 22 nt, Human
cagacacaggcccggcuccagg

SEQ ID NO: 1886242 - RNA, 21 nt, Human
cagacacaggcccggcuccag

SEQ ID NO: 1886243 - RNA, 18 nt, Human
cagacacaggcccggcuc

SEQ ID NO: 1886244 - RNA, 17 nt, Human
cagacacaggcccggcu

SEQ ID NO: 1886245 - RNA, 15 nt, Human
cagacacaggcccgg

SEQ ID NO: 1886246 - RNA, 14 nt, Human
cagacacaggcccg

SEQ ID NO: 1886247 - RNA, 13 nt, Human
cagacacaggccc

SEQ ID NO: 1886248 - RNA, 14 nt, Human
cagacacaugucca

SEQ ID NO: 1886249 - RNA, 14 nt, Human
cagacacaggcccu

SEQ ID NO: 1886250 - RNA, 15 nt, Human
cagacacaggcccuc

SEQ ID NO: 1886251 - RNA, 18 nt, Human
cagacacaggcccucccu

SEQ ID NO: 1886252 - RNA, 17 nt, Human
cagacacauguccaaga

SEQ ID NO: 1886253 - RNA, 21 nt, Human
cagacacauguccaagaagcc

SEQ ID NO: 1886254 - RNA, 22 nt, Human
cagacacauguccaagaagccc

SEQ ID NO: 1886255 - RNA, 23 nt, Human
cagacacauguccaagaagccca

SEQ ID NO: 1886256 - RNA, 12 nt, Human
cagacacccagg

SEQ ID NO: 1886257 - RNA, 13 nt, Human
cagacacccagga

SEQ ID NO: 1886258 - RNA, 14 nt, Human
cagacacccaggac

SEQ ID NO: 1886259 - RNA, 15 nt, Human
cagacacccaggacu

SEQ ID NO: 1886260 - RNA, 17 nt, Human
cagacacccaggacuua

SEQ ID NO: 1886261 - RNA, 22 nt, Human
cagacaaagcgugguggacaug

SEQ ID NO: 1886262 - RNA, 20 nt, Human
cagacaacaaaccuguuucu

SEQ ID NO: 1886263 - RNA, 24 nt, Human
cagaauuucccaaagcagugcaug

SEQ ID NO: 1886264 - RNA, 19 nt, Human
cagaauuuggguucugccu

SEQ ID NO: 1886265 - RNA, 12 nt, Human
cagacaaagcgu

SEQ ID NO: 1886266 - RNA, 17 nt, Human
cagaauuucccaaagca

SEQ ID NO: 1886267 - RNA, 18 nt, Human
cagaauuucccaaagcag

SEQ ID NO: 1886268 - RNA, 19 nt, Human
cagaauuucccaaagcagu

SEQ ID NO: 1886269 - RNA, 20 nt, Human
cagaauuucccaaagcagug

SEQ ID NO: 1886270 - RNA, 18 nt, Human
cagaaugcugcaggacuu

SEQ ID NO: 1886271 - RNA, 15 nt, Human
cagaaugaggcugcu

SEQ ID NO: 1886272 - RNA, 14 nt, Human
cagaaugaggcugc

SEQ ID NO: 1886273 - RNA, 18 nt, Human
cagaauggggugcaugaa

SEQ ID NO: 1886274 - RNA, 21 nt, Human
cagaaugcuguacaucuauuu

SEQ ID NO: 1886275 - RNA, 11 nt, Human
cagaaugcugu

SEQ ID NO: 1886276 - RNA, 16 nt, Human
cagaaugcuguacauc

SEQ ID NO: 1886277 - RNA, 17 nt, Human
cagaaugcuguacaucu

SEQ ID NO: 1886278 - RNA, 18 nt, Human
cagaaugcuguacaucua

SEQ ID NO: 1886279 - RNA, 14 nt, Human
cagaauuucccaaa

SEQ ID NO: 1886280 - RNA, 23 nt, Human
cagaauuggauacauacaccagc

SEQ ID NO: 1886281 - RNA, 11 nt, Human
cagaauucuca

SEQ ID NO: 1886282 - RNA, 18 nt, Human
cagaauucucuaguuuga

SEQ ID NO: 1886283 - RNA, 15 nt, Human
cagaauucucuaguu

SEQ ID NO: 1886284 - RNA, 16 nt, Human
cagacaacaaaccugu

SEQ ID NO: 1886285 - RNA, 14 nt, Human
cagcaagucucuuu

SEQ ID NO: 1886286 - RNA, 15 nt, Human
cagcaagucaggguu

SEQ ID NO: 1886287 - RNA, 12 nt, Human
cagcaagugaga

SEQ ID NO: 1886288 - RNA, 17 nt, Human
cagcaagugagagcugg

SEQ ID NO: 1886289 - RNA, 16 nt, Human
cagcaagugagagcug

SEQ ID NO: 1886290 - RNA, 15 nt, Human
cagcaagugagagcu

SEQ ID NO: 1886291 - RNA, 14 nt, Human
cagcaagugagagc

SEQ ID NO: 1886292 - RNA, 17 nt, Human
cagcaaggagauuuaca

SEQ ID NO: 1886293 - RNA, 18 nt, Human
cagcaaggagauuuacaa

SEQ ID NO: 1886294 - RNA, 21 nt, Human
cagcaagugagagcugggugu

SEQ ID NO: 1886295 - RNA, 19 nt, Human
cagcaagugagagcugggu

SEQ ID NO: 1886296 - RNA, 21 nt, Human
cagcaauaaagcagcguuucu

SEQ ID NO: 1886297 - RNA, 13 nt, Human
cagcaauaaagca

SEQ ID NO: 1886298 - RNA, 22 nt, Human
cagcaauaaagcagcguuucua

SEQ ID NO: 1886299 - RNA, 13 nt, Human
cagcacaaggcca

SEQ ID NO: 1886300 - RNA, 16 nt, Human
cagcacaaggccaucu

SEQ ID NO: 1886301 - RNA, 13 nt, Human
cagcacacagggc

SEQ ID NO: 1886302 - RNA, 14 nt, Human
cagcacacagggca

SEQ ID NO: 1886303 - RNA, 15 nt, Human
cagcacacagggcag

SEQ ID NO: 1886304 - RNA, 11 nt, Human
cagcagacuga

SEQ ID NO: 1886305 - RNA, 18 nt, Human
cagcagacugaucaggac

SEQ ID NO: 1886306 - RNA, 11 nt, Human
cagcagagcac

SEQ ID NO: 1886307 - RNA, 13 nt, Human
cagcagagcaccu

SEQ ID NO: 1886308 - RNA, 22 nt, Human
cagcagaaaugccuuacccuca

SEQ ID NO: 1886309 - RNA, 19 nt, Human
cagcagaaaugccuuaccc

SEQ ID NO: 1886310 - RNA, 17 nt, Human
cagcagaaggggguggu

SEQ ID NO: 1886311 - RNA, 13 nt, Human
cagcagaaggggg

SEQ ID NO: 1886312 - RNA, 17 nt, Human
cagcagaaaugccuuac

SEQ ID NO: 1886313 - RNA, 15 nt, Human
cagcagaaaugccuu

SEQ ID NO: 1886314 - RNA, 15 nt, Human
cagcacuuugggagg

SEQ ID NO: 1886315 - RNA, 16 nt, Human
cagcacuuugggaggc

SEQ ID NO: 1886316 - RNA, 18 nt, Human
cagcacuuguccagcuga

SEQ ID NO: 1886317 - RNA, 19 nt, Human
cagcacuuguccagcugag

SEQ ID NO: 1886318 - RNA, 13 nt, Human
cagcacuuauuua

SEQ ID NO: 1886319 - RNA, 15 nt, Human
cagcacuuguccagc

SEQ ID NO: 1886320 - RNA, 17 nt, Human
cagcacuuguccagcug

SEQ ID NO: 1886321 - RNA, 19 nt, Human
cagauuuugcuguauauuu

SEQ ID NO: 1886322 - RNA, 23 nt, Human
cagauuuugcuguauauuuguga

SEQ ID NO: 1886323 - RNA, 20 nt, Human
cagauuuuuuuuggacuguu

SEQ ID NO: 1886324 - RNA, 16 nt, Human
cagauuuugcuguaua

SEQ ID NO: 1886325 - RNA, 17 nt, Human
cagauuuugcuguauau

SEQ ID NO: 1886326 - RNA, 14 nt, Human
cagauucuuuccug

SEQ ID NO: 1886327 - RNA, 15 nt, Human
cagauuuuaauuuug

SEQ ID NO: 1886328 - RNA, 23 nt, Human
cagauuuuaauuuugaauaaaua

SEQ ID NO: 1886329 - RNA, 18 nt, Human
cagcaaaagaugcuucuc

SEQ ID NO: 1886330 - RNA, 13 nt, Human
cagcaaccccagg

SEQ ID NO: 1886331 - RNA, 16 nt, Human
cagcaaccccaggcug

SEQ ID NO: 1886332 - RNA, 17 nt, Human
cagcaaccccaggcuga

SEQ ID NO: 1886333 - RNA, 12 nt, Human
cagcaaccccag

SEQ ID NO: 1886334 - RNA, 14 nt, Human
cagcaacagaaaaa

SEQ ID NO: 1886335 - RNA, 17 nt, Human
cagcaacagaaaaaugg

SEQ ID NO: 1886336 - RNA, 13 nt, Human
cagcaacagaaaa

SEQ ID NO: 1886337 - RNA, 23 nt, Human
cagaugggugcuuggaggaagga

SEQ ID NO: 1886338 - RNA, 14 nt, Human
cagauguuuccaga

SEQ ID NO: 1886339 - RNA, 15 nt, Human
cagauguuuccagac

SEQ ID NO: 1886340 - RNA, 16 nt, Human
cagauguuuccagacu

SEQ ID NO: 1886341 - RNA, 19 nt, Human
cagauuaugagacacagga

SEQ ID NO: 1886342 - RNA, 21 nt, Human
cagauuaugagacacaggaug

SEQ ID NO: 1886343 - RNA, 18 nt, Human
cagauguuuccagacuuc

SEQ ID NO: 1886344 - RNA, 23 nt, Human
cagauguuuccagacuuccuuga

SEQ ID NO: 1886345 - RNA, 17 nt, Human
cagaugcagggcaguca

SEQ ID NO: 1886346 - RNA, 18 nt, Human
cagaugggugcuuggagg

SEQ ID NO: 1886347 - RNA, 14 nt, Human
cagauggaaaggag

SEQ ID NO: 1886348 - RNA, 16 nt, Human
cagauggaaaggagcc

SEQ ID NO: 1886349 - RNA, 15 nt, Human
cagcccagccacgga

SEQ ID NO: 1886350 - RNA, 13 nt, Human
cagcccagagaca

SEQ ID NO: 1886351 - RNA, 21 nt, Human
cagcccagagacauacuugaa

SEQ ID NO: 1886352 - RNA, 22 nt, Human
cagcccagagacauacuugaag

SEQ ID NO: 1886353 - RNA, 18 nt, Human
cagcccacuucugccaua

SEQ ID NO: 1886354 - RNA, 11 nt, Human
cagcccagaga

SEQ ID NO: 1886355 - RNA, 12 nt, Human
cagcccagagac

SEQ ID NO: 1886356 - RNA, 22 nt, Human
cagccccaaaacucuccucugc

SEQ ID NO: 1886357 - RNA, 20 nt, Human
cagccccaaaacucuccucu

SEQ ID NO: 1886358 - RNA, 21 nt, Human
cagccccaaaacucuccucug

SEQ ID NO: 1886359 - RNA, 15 nt, Human
cagcccacuucugcc

SEQ ID NO: 1886360 - RNA, 16 nt, Human
cagcccaccuggcuuu

SEQ ID NO: 1886361 - RNA, 15 nt, Human
cagcccaccccucaa

SEQ ID NO: 1886362 - RNA, 16 nt, Human
cagccaucaaaaugcu

SEQ ID NO: 1886363 - RNA, 17 nt, Human
cagccaucaaaaugcuu

SEQ ID NO: 1886364 - RNA, 17 nt, Human
cagccaugucugcauuu

SEQ ID NO: 1886365 - RNA, 17 nt, Human
cagcccaaagaaggaaa

SEQ ID NO: 1886366 - RNA, 23 nt, Human
cagcccaaaccaccagaagccca

SEQ ID NO: 1886367 - RNA, 21 nt, Human
cagcccaaaccaccagaagcc

SEQ ID NO: 1886368 - RNA, 20 nt, Human
cagcccaaaccaccagaagc

SEQ ID NO: 1886369 - RNA, 19 nt, Human
cagcccaaaccaccagaag

SEQ ID NO: 1886370 - RNA, 16 nt, Human
cagcccaaaccaccag

SEQ ID NO: 1886371 - RNA, 20 nt, Human
cagccacggacgcuggcucc

SEQ ID NO: 1886372 - RNA, 18 nt, Human
cagccacgaggugcaaca

SEQ ID NO: 1886373 - RNA, 21 nt, Human
cagccaccgaagccgccugug

SEQ ID NO: 1886374 - RNA, 19 nt, Human
cagccacauuccugaugcu

SEQ ID NO: 1886375 - RNA, 15 nt, Human
cagccacauuccuga

SEQ ID NO: 1886376 - RNA, 17 nt, Human
cagccacauuccugaug

SEQ ID NO: 1886377 - RNA, 14 nt, Human
cagccacauuccug

SEQ ID NO: 1886378 - RNA, 22 nt, Human
cagccacggccaggccagaggg

SEQ ID NO: 1886379 - RNA, 21 nt, Human
cagccacggccaggccagagg

SEQ ID NO: 1886380 - RNA, 19 nt, Human
cagccacggccaggccaga

SEQ ID NO: 1886381 - RNA, 18 nt, Human
cagccacggccaggccag

SEQ ID NO: 1886382 - RNA, 17 nt, Human
cagccacggccaggcca

SEQ ID NO: 1886383 - RNA, 16 nt, Human
cagccacggccaggcc

SEQ ID NO: 1886384 - RNA, 15 nt, Human
cagccacggccaggc

SEQ ID NO: 1886385 - RNA, 14 nt, Human
cagccacggccagg

SEQ ID NO: 1886386 - RNA, 23 nt, Human
cagccacggccaggccagaggga

SEQ ID NO: 1886387 - RNA, 22 nt, Human
cagccaguaaaugggggugcau

SEQ ID NO: 1886388 - RNA, 13 nt, Human
cagccaguaaaug

SEQ ID NO: 1886389 - RNA, 13 nt, Human
cagccaucaaaau

SEQ ID NO: 1886390 - RNA, 20 nt, Human
cagcauccuggcacccggcc

SEQ ID NO: 1886391 - RNA, 19 nt, Human
cagcauccuggcacccggc

SEQ ID NO: 1886392 - RNA, 21 nt, Human
cagcauccuggcacccggccc

SEQ ID NO: 1886393 - RNA, 21 nt, Human
cagcaucuuaccuucauaugc

SEQ ID NO: 1886394 - RNA, 17 nt, Human
cagcauugauauuugug

SEQ ID NO: 1886395 - RNA, 18 nt, Human
cagcauugauauuugugc

SEQ ID NO: 1886396 - RNA, 19 nt, Human
cagcauugauauuugugca

SEQ ID NO: 1886397 - RNA, 20 nt, Human
cagcauugauauuugugcau

SEQ ID NO: 1886398 - RNA, 15 nt, Human
cagccaaagccuccu

SEQ ID NO: 1886399 - RNA, 16 nt, Human
cagccaaagccuccuc

SEQ ID NO: 1886400 - RNA, 23 nt, Human
cagcauuuuccucugcuuugaaa

SEQ ID NO: 1886401 - RNA, 21 nt, Human
cagcauugauauuugugcauu

SEQ ID NO: 1886402 - RNA, 22 nt, Human
cagcauugauauuugugcauuu

SEQ ID NO: 1886403 - RNA, 13 nt, Human
cagcauuuuccuc

SEQ ID NO: 1886404 - RNA, 15 nt, Human
cagcauuuuccucug

SEQ ID NO: 1886405 - RNA, 18 nt, Human
cagccaaagccuccucca

SEQ ID NO: 1886406 - RNA, 21 nt, Human
cagccaaagccuccuccagcc

SEQ ID NO: 1886407 - RNA, 19 nt, Human
cagccaacacgcaccugcc

SEQ ID NO: 1886408 - RNA, 20 nt, Human
cagccaacacgcaccugccu

SEQ ID NO: 1886409 - RNA, 22 nt, Human
cagccaacacgcaccugccuca

SEQ ID NO: 1886410 - RNA, 23 nt, Human
cagccaacacgcaccugccucag

SEQ ID NO: 1886411 - RNA, 18 nt, Human
cagccaacuauggccugu

SEQ ID NO: 1886412 - RNA, 12 nt, Human
cagcaggcucuc

SEQ ID NO: 1886413 - RNA, 14 nt, Human
cagcaggcucucag

SEQ ID NO: 1886414 - RNA, 15 nt, Human
cagcaggcucucagg

SEQ ID NO: 1886415 - RNA, 19 nt, Human
cagcagccuggacccugug

SEQ ID NO: 1886416 - RNA, 22 nt, Human
cagcagccuggacccuguggau

SEQ ID NO: 1886417 - RNA, 17 nt, Human
cagcagcgccuuuccca

SEQ ID NO: 1886418 - RNA, 20 nt, Human
cagcagccuggggcuggccu

SEQ ID NO: 1886419 - RNA, 21 nt, Human
cagcagccuggggcuggccuc

SEQ ID NO: 1886420 - RNA, 17 nt, Human
cagcagccuuuaaugca

SEQ ID NO: 1886421 - RNA, 12 nt, Human
cagcagccugga

SEQ ID NO: 1886422 - RNA, 14 nt, Human
cagcagccuggacc

SEQ ID NO: 1886423 - RNA, 15 nt, Human
cagcagccuggaccc

SEQ ID NO: 1886424 - RNA, 18 nt, Human
cagcagccuggacccugu

SEQ ID NO: 1886425 - RNA, 17 nt, Human
cagcauccuggcacccg

SEQ ID NO: 1886426 - RNA, 16 nt, Human
cagcauccuggcaccc

SEQ ID NO: 1886427 - RNA, 15 nt, Human
cagcauccuggcacc

SEQ ID NO: 1886428 - RNA, 14 nt, Human
cagcauccuggcac

SEQ ID NO: 1886429 - RNA, 20 nt, Human
cagcagggagggcuucugcc

SEQ ID NO: 1886430 - RNA, 22 nt, Human
cagcagggaaaaugcagcaggg

SEQ ID NO: 1886431 - RNA, 23 nt, Human
cagcagggaaaaugcagcaggga

SEQ ID NO: 1886432 - RNA, 15 nt, Human
cagcagggaugcccu

SEQ ID NO: 1886433 - RNA, 24 nt, Human
cagcagggaaaaugcagcagggau

SEQ ID NO: 1886434 - RNA, 16 nt, Human
cagcagggaugcccug

SEQ ID NO: 1886435 - RNA, 18 nt, Human
cagcagggaugcccugga

SEQ ID NO: 1886436 - RNA, 21 nt, Human
cagcagggaugcccuggaggu

SEQ ID NO: 1886437 - RNA, 22 nt, Human
cagcagggaugcccuggaggug

SEQ ID NO: 1886438 - RNA, 16 nt, Human
cagcaggcucucaggc

SEQ ID NO: 1886439 - RNA, 17 nt, Human
cagcaggcucucaggcc

SEQ ID NO: 1886440 - RNA, 18 nt, Human
cagcaggcucucaggcca

SEQ ID NO: 1886441 - RNA, 19 nt, Human
cagcaggcucucaggccag

SEQ ID NO: 1886442 - RNA, 20 nt, Human
cagcaggcucucaggccagc

SEQ ID NO: 1886443 - RNA, 22 nt, Human
cagcaggcucucaggccagcug

SEQ ID NO: 1886444 - RNA, 18 nt, Human
cagcagggagggcuucug

SEQ ID NO: 1886445 - RNA, 14 nt, Human
cagcucaccagccc

SEQ ID NO: 1886446 - RNA, 18 nt, Human
cagccgucaccccugccu

SEQ ID NO: 1886447 - RNA, 21 nt, Human
cagccguguaaccauggaccc

SEQ ID NO: 1886448 - RNA, 21 nt, Human
cagcccuccccauggagccag

SEQ ID NO: 1886449 - RNA, 21 nt, Human
cagcccugaguuccuagccac

SEQ ID NO: 1886450 - RNA, 19 nt, Human
cagcccugaguuccuagcc

SEQ ID NO: 1886451 - RNA, 18 nt, Human
cagcccugaguuccuagc

SEQ ID NO: 1886452 - RNA, 13 nt, Human
cagcccugacccu

SEQ ID NO: 1886453 - RNA, 16 nt, Human
cagcccugacccugug

SEQ ID NO: 1886454 - RNA, 18 nt, Human
cagcccugcagagggcac

SEQ ID NO: 1886455 - RNA, 20 nt, Human
cagcccugcagagggcacag

SEQ ID NO: 1886456 - RNA, 13 nt, Human
cagcccugcagag

SEQ ID NO: 1886457 - RNA, 14 nt, Human
cagcccugcagagg

SEQ ID NO: 1886458 - RNA, 15 nt, Human
cagcccugcagaggg

SEQ ID NO: 1886459 - RNA, 16 nt, Human
cagcccugcagagggc

SEQ ID NO: 1886460 - RNA, 18 nt, Human
cagccucaaccuccuggg

SEQ ID NO: 1886461 - RNA, 17 nt, Human
cagccucaaccuccugg

SEQ ID NO: 1886462 - RNA, 21 nt, Human
cagccucaaccuccugggcua

SEQ ID NO: 1886463 - RNA, 20 nt, Human
cagccucaaccuccugggcu

SEQ ID NO: 1886464 - RNA, 19 nt, Human
cagccucaaccuccugggc

SEQ ID NO: 1886465 - RNA, 14 nt, Human
cagccucacagucc

SEQ ID NO: 1886466 - RNA, 15 nt, Human
cagccucacaguccu

SEQ ID NO: 1886467 - RNA, 20 nt, Human
cagccucacaguccuuacca

SEQ ID NO: 1886468 - RNA, 22 nt, Human
cagccucccgaauagcugggac

SEQ ID NO: 1886469 - RNA, 21 nt, Human
cagccucccgaauagcuggga

SEQ ID NO: 1886470 - RNA, 20 nt, Human
cagccucccgaauagcuggg

SEQ ID NO: 1886471 - RNA, 23 nt, Human
cagccucccauccagggccccca

SEQ ID NO: 1886472 - RNA, 16 nt, Human
cagccucccauccagg

SEQ ID NO: 1886473 - RNA, 18 nt, Human
cagccucccauccagggc

SEQ ID NO: 1886474 - RNA, 19 nt, Human
cagccucccauccagggcc

SEQ ID NO: 1886475 - RNA, 20 nt, Human
cagccucccauccagggccc

SEQ ID NO: 1886476 - RNA, 14 nt, Human
cagccucccaucca

SEQ ID NO: 1886477 - RNA, 23 nt, Human
cagccucccaaagugcugggauu

SEQ ID NO: 1886478 - RNA, 21 nt, Human
cagccucccaaagugcuggga

SEQ ID NO: 1886479 - RNA, 20 nt, Human
cagccucccaaagugcuggg

SEQ ID NO: 1886480 - RNA, 19 nt, Human
cagccucccaaagugcugg

SEQ ID NO: 1886481 - RNA, 14 nt, Human
cagccccauucugc

SEQ ID NO: 1886482 - RNA, 13 nt, Human
cagccccauucug

SEQ ID NO: 1886483 - RNA, 16 nt, Human
cagccccauccucugu

SEQ ID NO: 1886484 - RNA, 22 nt, Human
cagccccauccucuguacagag

SEQ ID NO: 1886485 - RNA, 22 nt, Human
cagccccaucccaaacccuuca

SEQ ID NO: 1886486 - RNA, 12 nt, Human
cagccccauccu

SEQ ID NO: 1886487 - RNA, 13 nt, Human
cagccccauccuc

SEQ ID NO: 1886488 - RNA, 14 nt, Human
cagccccauccucu

SEQ ID NO: 1886489 - RNA, 18 nt, Human
cagccccauucugccugc

SEQ ID NO: 1886490 - RNA, 23 nt, Human
cagccccuggaugcagccucaca

SEQ ID NO: 1886491 - RNA, 17 nt, Human
cagccccauucugccug

SEQ ID NO: 1886492 - RNA, 16 nt, Human
cagccccauucugccu

SEQ ID NO: 1886493 - RNA, 20 nt, Human
cagccccuguucuggcagag

SEQ ID NO: 1886494 - RNA, 13 nt, Human
cagccccuggccc

SEQ ID NO: 1886495 - RNA, 21 nt, Human
cagccccuggccccaggaccu

SEQ ID NO: 1886496 - RNA, 21 nt, Human
cagccccuguucuggcagagu

SEQ ID NO: 1886497 - RNA, 18 nt, Human
cagccccagugcccacag

SEQ ID NO: 1886498 - RNA, 17 nt, Human
cagccccagugcccaca

SEQ ID NO: 1886499 - RNA, 11 nt, Human
cagccccaucc

SEQ ID NO: 1886500 - RNA, 21 nt, Human
cagccccaucccaaacccuuc

SEQ ID NO: 1886501 - RNA, 16 nt, Human
cagccccagugcccac

SEQ ID NO: 1886502 - RNA, 15 nt, Human
cagccccagugccca

SEQ ID NO: 1886503 - RNA, 14 nt, Human
cagccccagugccc

SEQ ID NO: 1886504 - RNA, 13 nt, Human
cagccccagugcc

SEQ ID NO: 1886505 - RNA, 18 nt, Human
cagcccucauuggcucuu

SEQ ID NO: 1886506 - RNA, 20 nt, Human
cagcccuccccauggagcca

SEQ ID NO: 1886507 - RNA, 18 nt, Human
cagcccucaccccugguu

SEQ ID NO: 1886508 - RNA, 15 nt, Human
cagcccucaccccug

SEQ ID NO: 1886509 - RNA, 14 nt, Human
cagcccucaccccu

SEQ ID NO: 1886510 - RNA, 13 nt, Human
cagcccucacccc

SEQ ID NO: 1886511 - RNA, 21 nt, Human
cagcccgggcucugccuccca

SEQ ID NO: 1886512 - RNA, 22 nt, Human
cagcccgggcucugccucccau

SEQ ID NO: 1886513 - RNA, 17 nt, Human
cagcccgggcucugccu

SEQ ID NO: 1886514 - RNA, 18 nt, Human
cagcccgggcucugccuc

SEQ ID NO: 1886515 - RNA, 19 nt, Human
cagcccgggcucugccucc

SEQ ID NO: 1886516 - RNA, 20 nt, Human
cagcccgggcucugccuccc

SEQ ID NO: 1886517 - RNA, 24 nt, Human
cagccccuucugacccaugcugcc

SEQ ID NO: 1886518 - RNA, 18 nt, Human
cagccccuugagaaaccu

SEQ ID NO: 1886519 - RNA, 17 nt, Human
cagccccuugagaaacc

SEQ ID NO: 1886520 - RNA, 22 nt, Human
cagccccuucugacccaugcug

SEQ ID NO: 1886521 - RNA, 23 nt, Human
cagccccuucugacccaugcugc

SEQ ID NO: 1886522 - RNA, 16 nt, Human
cagccccuucugaccc

SEQ ID NO: 1886523 - RNA, 17 nt, Human
cagccccuucugaccca

SEQ ID NO: 1886524 - RNA, 19 nt, Human
cagccccuucugacccaug

SEQ ID NO: 1886525 - RNA, 21 nt, Human
cagccccuucugacccaugcu

SEQ ID NO: 1886526 - RNA, 13 nt, Human
cagcccgggcucu

SEQ ID NO: 1886527 - RNA, 14 nt, Human
cagcccgggcucug

SEQ ID NO: 1886528 - RNA, 15 nt, Human
cagcccgggcucugc

SEQ ID NO: 1886529 - RNA, 16 nt, Human
cagcccgggcucugcc

SEQ ID NO: 1886530 - RNA, 22 nt, Human
cagccuggccacgcagccagga

SEQ ID NO: 1886531 - RNA, 21 nt, Human
cagccuggccacgcagccagg

SEQ ID NO: 1886532 - RNA, 20 nt, Human
cagccuggccacgcagccag

SEQ ID NO: 1886533 - RNA, 19 nt, Human
cagccuggccacgcagcca

SEQ ID NO: 1886534 - RNA, 13 nt, Human
cagccuggccaga

SEQ ID NO: 1886535 - RNA, 14 nt, Human
cagccuggccagac

SEQ ID NO: 1886536 - RNA, 15 nt, Human
cagccuggccagaca

SEQ ID NO: 1886537 - RNA, 17 nt, Human
cagccuggccagacaca

SEQ ID NO: 1886538 - RNA, 18 nt, Human
cagccuggccagacacag

SEQ ID NO: 1886539 - RNA, 20 nt, Human
cagccuggccagacacaggc

SEQ ID NO: 1886540 - RNA, 21 nt, Human
cagccuggcucccaggacacg

SEQ ID NO: 1886541 - RNA, 19 nt, Human
cagccuggcucccaggaca

SEQ ID NO: 1886542 - RNA, 13 nt, Human
cagccuggcuccc

SEQ ID NO: 1886543 - RNA, 12 nt, Human
cagccuggcucc

SEQ ID NO: 1886544 - RNA, 20 nt, Human
cagccuggcucccaggacac

SEQ ID NO: 1886545 - RNA, 18 nt, Human
cagccuggccacgcagcc

SEQ ID NO: 1886546 - RNA, 17 nt, Human
cagccuggccacgcagc

SEQ ID NO: 1886547 - RNA, 15 nt, Human
cagccuggacccugu

SEQ ID NO: 1886548 - RNA, 19 nt, Human
cagccuggacccuguggau

SEQ ID NO: 1886549 - RNA, 23 nt, Human
cagccucccgaguagcugggacu

SEQ ID NO: 1886550 - RNA, 22 nt, Human
cagccucccgaguagcugggac

SEQ ID NO: 1886551 - RNA, 21 nt, Human
cagccucccgaguagcuggga

SEQ ID NO: 1886552 - RNA, 20 nt, Human
cagccucccgaguagcuggg

SEQ ID NO: 1886553 - RNA, 19 nt, Human
cagccucccgaguagcugg

SEQ ID NO: 1886554 - RNA, 23 nt, Human
cagccucccgaauagcugggacu

SEQ ID NO: 1886555 - RNA, 20 nt, Human
cagccuccugaguagcugga

SEQ ID NO: 1886556 - RNA, 20 nt, Human
cagccugcuccagcuguuca

SEQ ID NO: 1886557 - RNA, 12 nt, Human
cagccucccuga

SEQ ID NO: 1886558 - RNA, 14 nt, Human
cagccucccugaag

SEQ ID NO: 1886559 - RNA, 16 nt, Human
cagccucccugaagcc

SEQ ID NO: 1886560 - RNA, 17 nt, Human
cagccucccugaagccu

SEQ ID NO: 1886561 - RNA, 18 nt, Human
cagccucccugaagccuu

SEQ ID NO: 1886562 - RNA, 22 nt, Human
cagccuugaccauucuccaccu

SEQ ID NO: 1886563 - RNA, 23 nt, Human
cagccuugaccauucuccaccug

SEQ ID NO: 1886564 - RNA, 24 nt, Human
cagccuugaccauucuccaccugc

SEQ ID NO: 1886565 - RNA, 13 nt, Human
cagccuugccaga

SEQ ID NO: 1886566 - RNA, 14 nt, Human
cagccuugccagag

SEQ ID NO: 1886567 - RNA, 15 nt, Human
cagccuugccagaga

SEQ ID NO: 1886568 - RNA, 16 nt, Human
cagccuugccagagau

SEQ ID NO: 1886569 - RNA, 23 nt, Human
cagccugugucuuuaaaugcugc

SEQ ID NO: 1886570 - RNA, 14 nt, Human
cagccugugucuuu

SEQ ID NO: 1886571 - RNA, 17 nt, Human
cagccuugaccauucuc

SEQ ID NO: 1886572 - RNA, 20 nt, Human
cagccuugaccauucuccac

SEQ ID NO: 1886573 - RNA, 21 nt, Human
cagccuugaccauucuccacc

SEQ ID NO: 1886574 - RNA, 16 nt, Human
cagccugggcaaugug

SEQ ID NO: 1886575 - RNA, 19 nt, Human
cagccugggcaaugugaua

SEQ ID NO: 1886576 - RNA, 17 nt, Human
cagccuggggcuggccu

SEQ ID NO: 1886577 - RNA, 18 nt, Human
cagccuggggcuggccuc

SEQ ID NO: 1886578 - RNA, 21 nt, Human
cagccuggggcuggccuccca

SEQ ID NO: 1886579 - RNA, 15 nt, Human
cagccuggggucugg

SEQ ID NO: 1886580 - RNA, 19 nt, Human
cagccuggggucuggaguu

SEQ ID NO: 1886581 - RNA, 20 nt, Human
cagccuggucaacaugguga

SEQ ID NO: 1886582 - RNA, 19 nt, Human
cagccugguuuagccugga

SEQ ID NO: 1886583 - RNA, 16 nt, Human
cagcuaaugggacacu

SEQ ID NO: 1886584 - RNA, 15 nt, Human
cagcuaaugggacac

SEQ ID NO: 1886585 - RNA, 20 nt, Human
cagcuaacauggaaguacua

SEQ ID NO: 1886586 - RNA, 12 nt, Human
cagcgccaggcu

SEQ ID NO: 1886587 - RNA, 13 nt, Human
cagcuaagaaccu

SEQ ID NO: 1886588 - RNA, 12 nt, Human
cagcuaagaaaa

SEQ ID NO: 1886589 - RNA, 23 nt, Human
cagcuaagaaaagauuuuaauca

SEQ ID NO: 1886590 - RNA, 23 nt, Human
cagcuaagaaccuggaacuuggg

SEQ ID NO: 1886591 - RNA, 14 nt, Human
cagcuaagaaccug

SEQ ID NO: 1886592 - RNA, 16 nt, Human
cagcuaagaaccugga

SEQ ID NO: 1886593 - RNA, 18 nt, Human
cagcuaagaaccuggaac

SEQ ID NO: 1886594 - RNA, 19 nt, Human
cagcuaagaaccuggaacu

SEQ ID NO: 1886595 - RNA, 19 nt, Human
cagcuacuugggaggcuga

SEQ ID NO: 1886596 - RNA, 18 nt, Human
cagcuacaccuuucuccu

SEQ ID NO: 1886597 - RNA, 21 nt, Human
cagcuaccucaaccaaugcca

SEQ ID NO: 1886598 - RNA, 20 nt, Human
cagcgagcccugguggcagu

SEQ ID NO: 1886599 - RNA, 19 nt, Human
cagcgagcccugguggcag

SEQ ID NO: 1886600 - RNA, 17 nt, Human
cagcgagcccugguggc

SEQ ID NO: 1886601 - RNA, 16 nt, Human
cagcgagcccuggugg

SEQ ID NO: 1886602 - RNA, 13 nt, Human
cagcgagcccugg

SEQ ID NO: 1886603 - RNA, 13 nt, Human
cagcgaaugacaa

SEQ ID NO: 1886604 - RNA, 21 nt, Human
cagcgagcccugguggcagug

SEQ ID NO: 1886605 - RNA, 19 nt, Human
cagcuaacauggaaguacu

SEQ ID NO: 1886606 - RNA, 18 nt, Human
cagcuaacauggaaguac

SEQ ID NO: 1886607 - RNA, 19 nt, Human
cagcucaccagccccagug

SEQ ID NO: 1886608 - RNA, 17 nt, Human
cagcucaccagccccag

SEQ ID NO: 1886609 - RNA, 16 nt, Human
cagcucaccagcccca

SEQ ID NO: 1886610 - RNA, 15 nt, Human
cagcucaccagcccc

SEQ ID NO: 1886611 - RNA, 13 nt, Human
cagcucaccagcc

SEQ ID NO: 1886612 - RNA, 18 nt, Human
cagcuauugauauaaaua

SEQ ID NO: 1886613 - RNA, 13 nt, Human
cagcuauuuuuau

SEQ ID NO: 1886614 - RNA, 15 nt, Human
cagcuacuugggagg

SEQ ID NO: 1886615 - RNA, 16 nt, Human
cagcuacuugggaggc

SEQ ID NO: 1886616 - RNA, 21 nt, Human
cagcucaccagccccagugcc

SEQ ID NO: 1886617 - RNA, 20 nt, Human
cagcucaccagccccagugc

SEQ ID NO: 1886618 - RNA, 22 nt, Human
cagcucaccagccccagugccc

SEQ ID NO: 1886619 - RNA, 13 nt, Human
cagcucaccucuc

SEQ ID NO: 1886620 - RNA, 15 nt, Human
cagcucaccucuccc

SEQ ID NO: 1886621 - RNA, 16 nt, Human
cagcucaccucucccu

SEQ ID NO: 1886622 - RNA, 17 nt, Human
cagcucaccucucccuu

SEQ ID NO: 1886623 - RNA, 12 nt, Human
cagcucagagag

SEQ ID NO: 1886624 - RNA, 19 nt, Human
cagcucaccucucccuugg

SEQ ID NO: 1886625 - RNA, 20 nt, Human
cagcucaccucucccuugga

SEQ ID NO: 1886626 - RNA, 13 nt, Human
cagcucagcuucc

SEQ ID NO: 1886627 - RNA, 14 nt, Human
cagcucagcuuccc

SEQ ID NO: 1886628 - RNA, 12 nt, Human
cagcucaggaca

SEQ ID NO: 1886629 - RNA, 10 nt, Human
cagcucagga

SEQ ID NO: 1886630 - RNA, 13 nt, Human
cagcucaggacag

SEQ ID NO: 1886631 - RNA, 16 nt, Human
cagcucaggacagaug

SEQ ID NO: 1886632 - RNA, 18 nt, Human
cagcucaggacagaugcc

SEQ ID NO: 1886633 - RNA, 19 nt, Human
cagcucaggacagaugcca

SEQ ID NO: 1886634 - RNA, 22 nt, Human
cagcucaggacagaugccacac

SEQ ID NO: 1886635 - RNA, 11 nt, Human
cagcucaggau

SEQ ID NO: 1886636 - RNA, 13 nt, Human
cagcucaggaucu

SEQ ID NO: 1886637 - RNA, 13 nt, Human
cagcucagagagg

SEQ ID NO: 1886638 - RNA, 17 nt, Human
cagcucagagagggugg

SEQ ID NO: 1886639 - RNA, 19 nt, Human
cagcucagagaggguggga

SEQ ID NO: 1886640 - RNA, 20 nt, Human
cagcucagagagggugggag

SEQ ID NO: 1886641 - RNA, 23 nt, Human
cagcuccuucuguccuacucugu

SEQ ID NO: 1886642 - RNA, 21 nt, Human
cagcuccuucuguccuacucu

SEQ ID NO: 1886643 - RNA, 17 nt, Human
cagcuccuucuguccua

SEQ ID NO: 1886644 - RNA, 16 nt, Human
cagcuccuucuguccu

SEQ ID NO: 1886645 - RNA, 14 nt, Human
cagcucauaagagc

SEQ ID NO: 1886646 - RNA, 16 nt, Human
cagcucauaagagcca

SEQ ID NO: 1886647 - RNA, 14 nt, Human
cagcuccaaccugc

SEQ ID NO: 1886648 - RNA, 15 nt, Human
cagcucugcaagaau

SEQ ID NO: 1886649 - RNA, 16 nt, Human
cagcucugcaagaauu

SEQ ID NO: 1886650 - RNA, 21 nt, Human
cagcucugcaagaauugaagc

SEQ ID NO: 1886651 - RNA, 20 nt, Human
cagcucugcauacucauuag

SEQ ID NO: 1886652 - RNA, 17 nt, Human
cagcucuggacagcccc

SEQ ID NO: 1886653 - RNA, 18 nt, Human
cagcucuggacagcccca

SEQ ID NO: 1886654 - RNA, 21 nt, Human
cagcucuggacagccccaccc

SEQ ID NO: 1886655 - RNA, 23 nt, Human
cagcucuggacagccccacccug

SEQ ID NO: 1886656 - RNA, 12 nt, Human
cagcucuccccu

SEQ ID NO: 1886657 - RNA, 23 nt, Human
cagcucuucuccaggcuguaucc

SEQ ID NO: 1886658 - RNA, 19 nt, Human
cagcucuucuccaggcugu

SEQ ID NO: 1886659 - RNA, 18 nt, Human
cagcucuucuccaggcug

SEQ ID NO: 1886660 - RNA, 17 nt, Human
cagcucuucuccaggcu

SEQ ID NO: 1886661 - RNA, 16 nt, Human
cagcucuucuccaggc

SEQ ID NO: 1886662 - RNA, 15 nt, Human
cagcucuucuccagg

SEQ ID NO: 1886663 - RNA, 14 nt, Human
cagcucuucuccag

SEQ ID NO: 1886664 - RNA, 13 nt, Human
cagcucuucucca

SEQ ID NO: 1886665 - RNA, 23 nt, Human
cagcucuguccugggagugagcu

SEQ ID NO: 1886666 - RNA, 22 nt, Human
cagcucugggccauucuccaca

SEQ ID NO: 1886667 - RNA, 23 nt, Human
cagcucugggccauucuccacag

SEQ ID NO: 1886668 - RNA, 10 nt, Human
cagcucuuau

SEQ ID NO: 1886669 - RNA, 21 nt, Human
cagcucuuauauugccauuuc

SEQ ID NO: 1886670 - RNA, 18 nt, Human
cagcucuguccugggagu

SEQ ID NO: 1886671 - RNA, 17 nt, Human
cagcucuguccugggag

SEQ ID NO: 1886672 - RNA, 16 nt, Human
cagcucuguccuggga

SEQ ID NO: 1886673 - RNA, 14 nt, Human
cagcucuguccugg

SEQ ID NO: 1886674 - RNA, 13 nt, Human
cagcucuguccug

SEQ ID NO: 1886675 - RNA, 12 nt, Human
cagcucuguccu

SEQ ID NO: 1886676 - RNA, 22 nt, Human
cagcucugguccauagagagca

SEQ ID NO: 1886677 - RNA, 23 nt, Human
cagcucugguccauagagagcaa

SEQ ID NO: 1886678 - RNA, 10 nt, Human
cagcucuggu

SEQ ID NO: 1886679 - RNA, 13 nt, Human
cagcucuggucca

SEQ ID NO: 1886680 - RNA, 12 nt, Human
cagcucugggcc

SEQ ID NO: 1886681 - RNA, 19 nt, Human
cagcucugggccauucucc

SEQ ID NO: 1886682 - RNA, 16 nt, Human
cagcucugguccauag

SEQ ID NO: 1886683 - RNA, 17 nt, Human
cagcucugguccauaga

SEQ ID NO: 1886684 - RNA, 18 nt, Human
cagcucugguccauagag

SEQ ID NO: 1886685 - RNA, 21 nt, Human
cagcucugguccauagagagc

SEQ ID NO: 1886686 - RNA, 22 nt, Human
cagcugcuuuugucuaugggac

SEQ ID NO: 1886687 - RNA, 23 nt, Human
cagcugcuuuugucuaugggacu

SEQ ID NO: 1886688 - RNA, 18 nt, Human
cagcuggagaaauauggu

SEQ ID NO: 1886689 - RNA, 18 nt, Human
cagcuggggccaggcugg

SEQ ID NO: 1886690 - RNA, 19 nt, Human
cagcuggggccaggcuggg

SEQ ID NO: 1886691 - RNA, 20 nt, Human
cagcuggggccaggcugggu

SEQ ID NO: 1886692 - RNA, 21 nt, Human
cagcuggggccaggcuggguc

SEQ ID NO: 1886693 - RNA, 22 nt, Human
cagcuggggccaggcugggucg

SEQ ID NO: 1886694 - RNA, 21 nt, Human
cagcugggguggggaccucag

SEQ ID NO: 1886695 - RNA, 22 nt, Human
cagcugggguggggaccucagg

SEQ ID NO: 1886696 - RNA, 23 nt, Human
cagcugggguggggaccucaggc

SEQ ID NO: 1886697 - RNA, 14 nt, Human
cagcugggucaggc

SEQ ID NO: 1886698 - RNA, 15 nt, Human
cagcugggucaggca

SEQ ID NO: 1886699 - RNA, 16 nt, Human
cagcugggucaggcag

SEQ ID NO: 1886700 - RNA, 18 nt, Human
cagcugggucaggcaggg

SEQ ID NO: 1886701 - RNA, 20 nt, Human
cagcugggucaggcagggug

SEQ ID NO: 1886702 - RNA, 18 nt, Human
cagcugguugagguuuca

SEQ ID NO: 1886703 - RNA, 19 nt, Human
cagcuggugguaucugagu

SEQ ID NO: 1886704 - RNA, 24 nt, Human
cagcugcgguccacccaggagccc

SEQ ID NO: 1886705 - RNA, 23 nt, Human
cagcugcgguccacccaggagcc

SEQ ID NO: 1886706 - RNA, 22 nt, Human
cagcugcgguccacccaggagc

SEQ ID NO: 1886707 - RNA, 21 nt, Human
cagcugcgguccacccaggag

SEQ ID NO: 1886708 - RNA, 20 nt, Human
cagcugcgguccacccagga

SEQ ID NO: 1886709 - RNA, 19 nt, Human
cagcugcgguccacccagg

SEQ ID NO: 1886710 - RNA, 15 nt, Human
cagcugccugggauc

SEQ ID NO: 1886711 - RNA, 18 nt, Human
cagcugcgguccacccag

SEQ ID NO: 1886712 - RNA, 18 nt, Human
cagcugccugggaucccu

SEQ ID NO: 1886713 - RNA, 23 nt, Human
cagcugccugggaucccucaucc

SEQ ID NO: 1886714 - RNA, 16 nt, Human
cagcucuuggcuccac

SEQ ID NO: 1886715 - RNA, 17 nt, Human
cagcucuuggcuccacu

SEQ ID NO: 1886716 - RNA, 18 nt, Human
cagcucuuggcuccacug

SEQ ID NO: 1886717 - RNA, 13 nt, Human
cagcucuuuccuc

SEQ ID NO: 1886718 - RNA, 14 nt, Human
cagcucuuuccucc

SEQ ID NO: 1886719 - RNA, 16 nt, Human
cagcucuuuccuccuu

SEQ ID NO: 1886720 - RNA, 17 nt, Human
cagcucuuuccuccuuc

SEQ ID NO: 1886721 - RNA, 18 nt, Human
cagcucuuuccuccuucc

SEQ ID NO: 1886722 - RNA, 19 nt, Human
cagcucuuuccuccuucca

SEQ ID NO: 1886723 - RNA, 21 nt, Human
cagcucuuuccuccuuccaug

SEQ ID NO: 1886724 - RNA, 22 nt, Human
cagcucuuuccuccuuccaugg

SEQ ID NO: 1886725 - RNA, 19 nt, Human
cagcugaaauaugcuggcu

SEQ ID NO: 1886726 - RNA, 21 nt, Human
cagcugaaauaugcuggcugg

SEQ ID NO: 1886727 - RNA, 22 nt, Human
cagcugaaauaugcuggcugga

SEQ ID NO: 1886728 - RNA, 16 nt, Human
cagcugaauuaucuau

SEQ ID NO: 1886729 - RNA, 13 nt, Human
cagcugcuugggc

SEQ ID NO: 1886730 - RNA, 14 nt, Human
cagcugcuugggcu

SEQ ID NO: 1886731 - RNA, 15 nt, Human
cagcugcuugggcuu

SEQ ID NO: 1886732 - RNA, 16 nt, Human
cagcugcuugggcuuc

SEQ ID NO: 1886733 - RNA, 18 nt, Human
cagcugcuugggcuucau

SEQ ID NO: 1886734 - RNA, 19 nt, Human
cagcugcuugggcuucauc

SEQ ID NO: 1886735 - RNA, 21 nt, Human
cagcugcuugggcuucauccu

SEQ ID NO: 1886736 - RNA, 22 nt, Human
cagcugcuugggcuucauccuc

SEQ ID NO: 1886737 - RNA, 17 nt, Human
cagcugcuacuacuccu

SEQ ID NO: 1886738 - RNA, 12 nt, Human
cagcugcuccua

SEQ ID NO: 1886739 - RNA, 18 nt, Human
cagcugcuccuagaggga

SEQ ID NO: 1886740 - RNA, 19 nt, Human
cagcugcuccuagagggag

SEQ ID NO: 1886741 - RNA, 23 nt, Human
cagcugcuccuagagggaggggc

SEQ ID NO: 1886742 - RNA, 20 nt, Human
cagcuuguaaauagcucagg

SEQ ID NO: 1886743 - RNA, 19 nt, Human
cagcuuguaaauagcucag

SEQ ID NO: 1886744 - RNA, 18 nt, Human
cagcuuguaaauagcuca

SEQ ID NO: 1886745 - RNA, 22 nt, Human
cagcuuguaaauagcucaggug

SEQ ID NO: 1886746 - RNA, 21 nt, Human
cagcuuguaaauagcucaggu

SEQ ID NO: 1886747 - RNA, 17 nt, Human
cagcuuguuauuuauaa

SEQ ID NO: 1886748 - RNA, 23 nt, Human
cagcuuuccucaaaacuucagac

SEQ ID NO: 1886749 - RNA, 12 nt, Human
cagcuuuguuug

SEQ ID NO: 1886750 - RNA, 21 nt, Human
cagcuuuguuuguugucagcu

SEQ ID NO: 1886751 - RNA, 22 nt, Human
cagcuuuguuuguugucagcug

SEQ ID NO: 1886752 - RNA, 23 nt, Human
cagcuuuguuuguugucagcuga

SEQ ID NO: 1886753 - RNA, 16 nt, Human
cagcuuugaucccuga

SEQ ID NO: 1886754 - RNA, 17 nt, Human
cagcuuugaucccugac

SEQ ID NO: 1886755 - RNA, 20 nt, Human
cagcuuugaucccugacauc

SEQ ID NO: 1886756 - RNA, 13 nt, Human
cagcuuugcugcu

SEQ ID NO: 1886757 - RNA, 12 nt, Human
cagcuuugcugc

SEQ ID NO: 1886758 - RNA, 14 nt, Human
cagcuuugcugcug

SEQ ID NO: 1886759 - RNA, 17 nt, Human
caggaaaaacccgucaa

SEQ ID NO: 1886760 - RNA, 21 nt, Human
cagcuucauuuccugugucuu

SEQ ID NO: 1886761 - RNA, 20 nt, Human
cagcuucauuuccugugucu

SEQ ID NO: 1886762 - RNA, 18 nt, Human
cagcuucucauccugcag

SEQ ID NO: 1886763 - RNA, 20 nt, Human
cagcuucucauccugcaggc

SEQ ID NO: 1886764 - RNA, 19 nt, Human
cagcuucucauccugcagg

SEQ ID NO: 1886765 - RNA, 21 nt, Human
cagcuucucauccugcaggca

SEQ ID NO: 1886766 - RNA, 15 nt, Human
cagcuucuccugugu

SEQ ID NO: 1886767 - RNA, 16 nt, Human
cagcuucuccugugug

SEQ ID NO: 1886768 - RNA, 15 nt, Human
cagcuugaggguugg

SEQ ID NO: 1886769 - RNA, 14 nt, Human
cagcuugaggguug

SEQ ID NO: 1886770 - RNA, 18 nt, Human
cagcuugaccgugaggcc

SEQ ID NO: 1886771 - RNA, 19 nt, Human
cagcuugaccgugaggcca

SEQ ID NO: 1886772 - RNA, 20 nt, Human
cagcuugaccgugaggccag

SEQ ID NO: 1886773 - RNA, 21 nt, Human
cagcuugaccgugaggccaga

SEQ ID NO: 1886774 - RNA, 21 nt, Human
cagcuugaggguugggcuggu

SEQ ID NO: 1886775 - RNA, 20 nt, Human
cagcuugaggguugggcugg

SEQ ID NO: 1886776 - RNA, 19 nt, Human
cagcuugaggguugggcug

SEQ ID NO: 1886777 - RNA, 18 nt, Human
cagcuugaggguugggcu

SEQ ID NO: 1886778 - RNA, 19 nt, Human
cagcuugaucaaaggcaca

SEQ ID NO: 1886779 - RNA, 23 nt, Human
cagcuugaucaaaggcacacagc

SEQ ID NO: 1886780 - RNA, 22 nt, Human
caggaagacccaacacauggga

SEQ ID NO: 1886781 - RNA, 19 nt, Human
caggaagacccaacacaug

SEQ ID NO: 1886782 - RNA, 16 nt, Human
caggaaccacaccaca

SEQ ID NO: 1886783 - RNA, 19 nt, Human
caggaaccacaccacaucu

SEQ ID NO: 1886784 - RNA, 22 nt, Human
caggaagccagcaggcucucag

SEQ ID NO: 1886785 - RNA, 19 nt, Human
caggaagccagcaggcucu

SEQ ID NO: 1886786 - RNA, 21 nt, Human
caggaagccagcaggcucuca

SEQ ID NO: 1886787 - RNA, 14 nt, Human
caggaagccagcag

SEQ ID NO: 1886788 - RNA, 16 nt, Human
caggaagccagcaggc

SEQ ID NO: 1886789 - RNA, 17 nt, Human
caggaagccagcaggcu

SEQ ID NO: 1886790 - RNA, 18 nt, Human
caggaagccagcaggcuc

SEQ ID NO: 1886791 - RNA, 23 nt, Human
caggaagcucagggccuggcuca

SEQ ID NO: 1886792 - RNA, 20 nt, Human
caggaagcucagggccuggc

SEQ ID NO: 1886793 - RNA, 21 nt, Human
caggaagcucagggccuggcu

SEQ ID NO: 1886794 - RNA, 13 nt, Human
caggaagcucagg

SEQ ID NO: 1886795 - RNA, 14 nt, Human
caggaagcucaggg

SEQ ID NO: 1886796 - RNA, 15 nt, Human
caggaagcucagggc

SEQ ID NO: 1886797 - RNA, 16 nt, Human
caggaagcucagggcc

SEQ ID NO: 1886798 - RNA, 17 nt, Human
caggaagcucagggccu

SEQ ID NO: 1886799 - RNA, 18 nt, Human
caggaagcucagggccug

SEQ ID NO: 1886800 - RNA, 19 nt, Human
caggaagcucagggccugg

SEQ ID NO: 1886801 - RNA, 17 nt, Human
caggaccuguggccaag

SEQ ID NO: 1886802 - RNA, 20 nt, Human
caggaccuucgggcugugcc

SEQ ID NO: 1886803 - RNA, 22 nt, Human
caggaccuucgggcugugcccg

SEQ ID NO: 1886804 - RNA, 21 nt, Human
caggaccuucgggcugugccc

SEQ ID NO: 1886805 - RNA, 14 nt, Human
caggaccuggcugc

SEQ ID NO: 1886806 - RNA, 16 nt, Human
caggaccuggcugcca

SEQ ID NO: 1886807 - RNA, 17 nt, Human
caggaccuggcugccau

SEQ ID NO: 1886808 - RNA, 18 nt, Human
caggaccuggcugccaua

SEQ ID NO: 1886809 - RNA, 13 nt, Human
caggacacaguca

SEQ ID NO: 1886810 - RNA, 15 nt, Human
caggacacagucaga

SEQ ID NO: 1886811 - RNA, 16 nt, Human
caggaauguguggccu

SEQ ID NO: 1886812 - RNA, 17 nt, Human
caggaauguguggccug

SEQ ID NO: 1886813 - RNA, 19 nt, Human
caggaauguguggccugca

SEQ ID NO: 1886814 - RNA, 21 nt, Human
caggaauguguggccugcaca

SEQ ID NO: 1886815 - RNA, 23 nt, Human
caggaauguguggccugcacagu

SEQ ID NO: 1886816 - RNA, 16 nt, Human
caggaauuucccagga

SEQ ID NO: 1886817 - RNA, 17 nt, Human
caggaauuucccaggac

SEQ ID NO: 1886818 - RNA, 18 nt, Human
caggaauuucccaggacc

SEQ ID NO: 1886819 - RNA, 19 nt, Human
caggaauuucccaggaccc

SEQ ID NO: 1886820 - RNA, 20 nt, Human
caggaauuucccaggacccu

SEQ ID NO: 1886821 - RNA, 21 nt, Human
caggaauuucccaggacccug

SEQ ID NO: 1886822 - RNA, 16 nt, Human
caggaaguagaggagg

SEQ ID NO: 1886823 - RNA, 17 nt, Human
caggaaguacuggagaa

SEQ ID NO: 1886824 - RNA, 18 nt, Human
caggaaguacuggagaaa

SEQ ID NO: 1886825 - RNA, 20 nt, Human
caggaaguacuggagaaaau

SEQ ID NO: 1886826 - RNA, 15 nt, Human
caggaaguagaggag

SEQ ID NO: 1886827 - RNA, 12 nt, Human
caggaaguacug

SEQ ID NO: 1886828 - RNA, 14 nt, Human
caggaaguacugga

SEQ ID NO: 1886829 - RNA, 16 nt, Human
caggaaguacuggaga

SEQ ID NO: 1886830 - RNA, 15 nt, Human
caggaaggcuaaagg

SEQ ID NO: 1886831 - RNA, 22 nt, Human
caggaagcucagggccuggcuc

SEQ ID NO: 1886832 - RNA, 15 nt, Human
cagucauaacuaaau

SEQ ID NO: 1886833 - RNA, 19 nt, Human
caguauuacuucugcuaca

SEQ ID NO: 1886834 - RNA, 18 nt, Human
caguauuacuucugcuac

SEQ ID NO: 1886835 - RNA, 17 nt, Human
cagucagauuuccaguc

SEQ ID NO: 1886836 - RNA, 20 nt, Human
cagucagauuuccagucucc

SEQ ID NO: 1886837 - RNA, 23 nt, Human
cagucagauuuccagucuccacc

SEQ ID NO: 1886838 - RNA, 16 nt, Human
caguauuacuucugcu

SEQ ID NO: 1886839 - RNA, 12 nt, Human
caguauguggaa

SEQ ID NO: 1886840 - RNA, 16 nt, Human
caguccauagcagaga

SEQ ID NO: 1886841 - RNA, 14 nt, Human
caguccauugaaag

SEQ ID NO: 1886842 - RNA, 13 nt, Human
caguccaugaaga

SEQ ID NO: 1886843 - RNA, 21 nt, Human
cagucauuuuucagaccuuuu

SEQ ID NO: 1886844 - RNA, 20 nt, Human
cagucauucagauaugauuc

SEQ ID NO: 1886845 - RNA, 13 nt, Human
cagucauuggcug

SEQ ID NO: 1886846 - RNA, 17 nt, Human
cagucauuggcugucuc

SEQ ID NO: 1886847 - RNA, 21 nt, Human
cagucauuggcugucuccuag

SEQ ID NO: 1886848 - RNA, 20 nt, Human
cagucauuuuucagaccuuu

SEQ ID NO: 1886849 - RNA, 17 nt, Human
cagucauucagauauga

SEQ ID NO: 1886850 - RNA, 13 nt, Human
caguaucucaggg

SEQ ID NO: 1886851 - RNA, 20 nt, Human
caguaucaugcccugugcaa

SEQ ID NO: 1886852 - RNA, 17 nt, Human
caguaucaugcccugug

SEQ ID NO: 1886853 - RNA, 19 nt, Human
caguaucaugcccugugca

SEQ ID NO: 1886854 - RNA, 13 nt, Human
caguaucaugccc

SEQ ID NO: 1886855 - RNA, 16 nt, Human
caguaucaugcccugu

SEQ ID NO: 1886856 - RNA, 14 nt, Human
caguaucacugucu

SEQ ID NO: 1886857 - RNA, 22 nt, Human
caguaucacugucuuuccuaga

SEQ ID NO: 1886858 - RNA, 15 nt, Human
caguaucucagggcc

SEQ ID NO: 1886859 - RNA, 12 nt, Human
caguaucuugaa

SEQ ID NO: 1886860 - RNA, 18 nt, Human
caguaucuugaagacuuu

SEQ ID NO: 1886861 - RNA, 21 nt, Human
caguaucuugaagacuuuucu

SEQ ID NO: 1886862 - RNA, 12 nt, Human
caguauggcagc

SEQ ID NO: 1886863 - RNA, 12 nt, Human
caguagugauag

SEQ ID NO: 1886864 - RNA, 23 nt, Human
caguagucuugaugaccaaaguc

SEQ ID NO: 1886865 - RNA, 14 nt, Human
caguauaaacaaag

SEQ ID NO: 1886866 - RNA, 19 nt, Human
caguauaaacaaaguuacu

SEQ ID NO: 1886867 - RNA, 20 nt, Human
caguacuuuggaggccccua

SEQ ID NO: 1886868 - RNA, 16 nt, Human
caguacuuuggaggcc

SEQ ID NO: 1886869 - RNA, 19 nt, Human
caguacuuuggaggccccu

SEQ ID NO: 1886870 - RNA, 18 nt, Human
caguagcaguagaugcau

SEQ ID NO: 1886871 - RNA, 14 nt, Human
caguccccccaccc

SEQ ID NO: 1886872 - RNA, 20 nt, Human
caguccccccacccucauuc

SEQ ID NO: 1886873 - RNA, 17 nt, Human
cagucccugccaaugga

SEQ ID NO: 1886874 - RNA, 12 nt, Human
caguccucccau

SEQ ID NO: 1886875 - RNA, 13 nt, Human
caguccucccauc

SEQ ID NO: 1886876 - RNA, 14 nt, Human
caguccucccaucu

SEQ ID NO: 1886877 - RNA, 15 nt, Human
caguccucccaucuc

SEQ ID NO: 1886878 - RNA, 12 nt, Human
cagucccugcca

SEQ ID NO: 1886879 - RNA, 23 nt, Human
cagucccugaggcagguccccag

SEQ ID NO: 1886880 - RNA, 20 nt, Human
cagucccugaggcagguccc

SEQ ID NO: 1886881 - RNA, 14 nt, Human
cagucccugaggca

SEQ ID NO: 1886882 - RNA, 13 nt, Human
cagucccugccaa

SEQ ID NO: 1886883 - RNA, 14 nt, Human
cagucccugccaau

SEQ ID NO: 1886884 - RNA, 15 nt, Human
cagucccugccaaug

SEQ ID NO: 1886885 - RNA, 16 nt, Human
cagucccugccaaugg

SEQ ID NO: 1886886 - RNA, 13 nt, Human
cagugagccacuc

SEQ ID NO: 1886887 - RNA, 17 nt, Human
cagugagcagagaucac

SEQ ID NO: 1886888 - RNA, 24 nt, Human
cagugagccgagauugcaccacug

SEQ ID NO: 1886889 - RNA, 12 nt, Human
cagugaggcucu

SEQ ID NO: 1886890 - RNA, 13 nt, Human
cagugaggcucug

SEQ ID NO: 1886891 - RNA, 14 nt, Human
cagugaggcucugc

SEQ ID NO: 1886892 - RNA, 15 nt, Human
cagugaggcucugcc

SEQ ID NO: 1886893 - RNA, 16 nt, Human
cagugaggcucugccc

SEQ ID NO: 1886894 - RNA, 18 nt, Human
cagugagucgaggacagg

SEQ ID NO: 1886895 - RNA, 17 nt, Human
cagugagucgaggacag

SEQ ID NO: 1886896 - RNA, 21 nt, Human
cagugaggcucugcccuuggu

SEQ ID NO: 1886897 - RNA, 21 nt, Human
cagugagggagggcugucauc

SEQ ID NO: 1886898 - RNA, 17 nt, Human
cagugaggcucugcccu

SEQ ID NO: 1886899 - RNA, 18 nt, Human
cagugaggcucugcccuu

SEQ ID NO: 1886900 - RNA, 19 nt, Human
cagugaggcucugcccuug

SEQ ID NO: 1886901 - RNA, 20 nt, Human
cagugaggcucugcccuugg

SEQ ID NO: 1886902 - RNA, 15 nt, Human
cagugagacagcucu

SEQ ID NO: 1886903 - RNA, 14 nt, Human
cagugaaagcauca

SEQ ID NO: 1886904 - RNA, 13 nt, Human
cagugaaagcauc

SEQ ID NO: 1886905 - RNA, 20 nt, Human
cagugaaagaaaauaacaau

SEQ ID NO: 1886906 - RNA, 16 nt, Human
cagugaaagaaaauaa

SEQ ID NO: 1886907 - RNA, 17 nt, Human
cagucuuguauuaaguu

SEQ ID NO: 1886908 - RNA, 16 nt, Human
cagucuuggcucacug

SEQ ID NO: 1886909 - RNA, 18 nt, Human
cagucuugacgaguguga

SEQ ID NO: 1886910 - RNA, 22 nt, Human
cagucuuuaaucugagaggcca

SEQ ID NO: 1886911 - RNA, 19 nt, Human
cagucuggaaugcaguggu

SEQ ID NO: 1886912 - RNA, 12 nt, Human
caguccuuccac

SEQ ID NO: 1886913 - RNA, 23 nt, Human
cagucuuauagcaagacuguuag

SEQ ID NO: 1886914 - RNA, 16 nt, Human
caguccucccaucuca

SEQ ID NO: 1886915 - RNA, 17 nt, Human
caguccucccaucucac

SEQ ID NO: 1886916 - RNA, 15 nt, Human
caguccuuaccagca

SEQ ID NO: 1886917 - RNA, 18 nt, Human
caguccuuaccagcagag

SEQ ID NO: 1886918 - RNA, 19 nt, Human
caguccuuaccagcagagc

SEQ ID NO: 1886919 - RNA, 20 nt, Human
caguccuuaccagcagagca

SEQ ID NO: 1886920 - RNA, 21 nt, Human
caguccuuaccagcagagcac

SEQ ID NO: 1886921 - RNA, 18 nt, Human
cagucuggaaugcagugg

SEQ ID NO: 1886922 - RNA, 18 nt, Human
cagugauuaccagggacu

SEQ ID NO: 1886923 - RNA, 17 nt, Human
cagugauuaccagggac

SEQ ID NO: 1886924 - RNA, 12 nt, Human
cagugcccccac

SEQ ID NO: 1886925 - RNA, 15 nt, Human
cagugcccccacuga

SEQ ID NO: 1886926 - RNA, 17 nt, Human
cagugcccccacugacc

SEQ ID NO: 1886927 - RNA, 20 nt, Human
cagugcccccacugaccaga

SEQ ID NO: 1886928 - RNA, 21 nt, Human
cagugcccccacugaccagaa

SEQ ID NO: 1886929 - RNA, 22 nt, Human
cagugcccccacugaccagaac

SEQ ID NO: 1886930 - RNA, 23 nt, Human
cagugcccccacugaccagaacu

SEQ ID NO: 1886931 - RNA, 23 nt, Human
cagugagucgaggacagggaggu

SEQ ID NO: 1886932 - RNA, 22 nt, Human
cagugagucgaggacagggagg

SEQ ID NO: 1886933 - RNA, 20 nt, Human
cagugagucgaggacaggga

SEQ ID NO: 1886934 - RNA, 19 nt, Human
cagugagucgaggacaggg

SEQ ID NO: 1886935 - RNA, 15 nt, Human
cagugccgagaagga

SEQ ID NO: 1886936 - RNA, 18 nt, Human
cagugccgagaaggaagc

SEQ ID NO: 1886937 - RNA, 11 nt, Human
cagugccuuau

SEQ ID NO: 1886938 - RNA, 13 nt, Human
cagugccuuaugg

SEQ ID NO: 1886939 - RNA, 15 nt, Human
cagugccuuauggaa

SEQ ID NO: 1886940 - RNA, 16 nt, Human
cagugccuuauggaac

SEQ ID NO: 1886941 - RNA, 17 nt, Human
cagugccuuauggaaca

SEQ ID NO: 1886942 - RNA, 18 nt, Human
cagugccuuauggaacac

SEQ ID NO: 1886943 - RNA, 19 nt, Human
cagugccuuauggaacacu

SEQ ID NO: 1886944 - RNA, 20 nt, Human
cagugccuuauggaacacuc

SEQ ID NO: 1886945 - RNA, 21 nt, Human
cagugccuuauggaacacucu

SEQ ID NO: 1886946 - RNA, 22 nt, Human
cagugccuuauggaacacucug

SEQ ID NO: 1886947 - RNA, 13 nt, Human
cagugcuccagcc

SEQ ID NO: 1886948 - RNA, 23 nt, Human
cagugccuuauggaacacucuga

SEQ ID NO: 1886949 - RNA, 16 nt, Human
caggugaaacccaguc

SEQ ID NO: 1886950 - RNA, 14 nt, Human
caggucuuuccuaa

SEQ ID NO: 1886951 - RNA, 19 nt, Human
caggucuuuccuaaggcug

SEQ ID NO: 1886952 - RNA, 21 nt, Human
caggucuuuccuaaggcugca

SEQ ID NO: 1886953 - RNA, 20 nt, Human
caggucuucaucgaaucuac

SEQ ID NO: 1886954 - RNA, 13 nt, Human
caggucuuuccua

SEQ ID NO: 1886955 - RNA, 14 nt, Human
caggugaauuguuu

SEQ ID NO: 1886956 - RNA, 21 nt, Human
caggugagaagcagaggaagg

SEQ ID NO: 1886957 - RNA, 13 nt, Human
caggugagaagca

SEQ ID NO: 1886958 - RNA, 20 nt, Human
caggugagaagcagaggaag

SEQ ID NO: 1886959 - RNA, 19 nt, Human
cagguggccaugccucagc

SEQ ID NO: 1886960 - RNA, 13 nt, Human
cagguggccaugc

SEQ ID NO: 1886961 - RNA, 15 nt, Human
cagguggccaugccu

SEQ ID NO: 1886962 - RNA, 23 nt, Human
caggucuugaacuccuggccuca

SEQ ID NO: 1886963 - RNA, 22 nt, Human
caggucuugaacuccuggccuc

SEQ ID NO: 1886964 - RNA, 21 nt, Human
caggucuugaacuccuggccu

SEQ ID NO: 1886965 - RNA, 20 nt, Human
caggucuugaacuccuggcc

SEQ ID NO: 1886966 - RNA, 19 nt, Human
caggucuugaacuccuggc

SEQ ID NO: 1886967 - RNA, 18 nt, Human
caggucuugaacuccugg

SEQ ID NO: 1886968 - RNA, 19 nt, Human
caggucccuaauaaagcug

SEQ ID NO: 1886969 - RNA, 20 nt, Human
caggucccuaauaaagcugu

SEQ ID NO: 1886970 - RNA, 21 nt, Human
caggucccuaauaaagcugug

SEQ ID NO: 1886971 - RNA, 22 nt, Human
caggucccuaauaaagcugugu

SEQ ID NO: 1886972 - RNA, 11 nt, Human
caggucccuaa

SEQ ID NO: 1886973 - RNA, 12 nt, Human
caggucccuaau

SEQ ID NO: 1886974 - RNA, 13 nt, Human
caggucccuaaua

SEQ ID NO: 1886975 - RNA, 14 nt, Human
caggucccuaauaa

SEQ ID NO: 1886976 - RNA, 15 nt, Human
caggucccuaauaaa

SEQ ID NO: 1886977 - RNA, 16 nt, Human
caggucccuaauaaag

SEQ ID NO: 1886978 - RNA, 17 nt, Human
caggucccuaauaaagc

SEQ ID NO: 1886979 - RNA, 18 nt, Human
caggucccuaauaaagcu

SEQ ID NO: 1886980 - RNA, 20 nt, Human
caggucaggaguucgagacc

SEQ ID NO: 1886981 - RNA, 18 nt, Human
cagguauuuuauaauucu

SEQ ID NO: 1886982 - RNA, 23 nt, Human
cagguauuuuauaauucugggaa

SEQ ID NO: 1886983 - RNA, 19 nt, Human
cagguauuuuauaauucug

SEQ ID NO: 1886984 - RNA, 12 nt, Human
cagguccccaga

SEQ ID NO: 1886985 - RNA, 18 nt, Human
cagguccccagcuuuggc

SEQ ID NO: 1886986 - RNA, 13 nt, Human
cagguccccagac

SEQ ID NO: 1886987 - RNA, 21 nt, Human
cagguaacaggcagauacagg

SEQ ID NO: 1886988 - RNA, 20 nt, Human
cagguaacaggcagauacag

SEQ ID NO: 1886989 - RNA, 20 nt, Human
cagguaugaccuucuaggaa

SEQ ID NO: 1886990 - RNA, 19 nt, Human
cagguagaacacaagguca

SEQ ID NO: 1886991 - RNA, 20 nt, Human
cagguagaauuaucuaauuu

SEQ ID NO: 1886992 - RNA, 23 nt, Human
cagguagaauuaucuaauuuaua

SEQ ID NO: 1886993 - RNA, 22 nt, Human
cagguagaauuaucuaauuuau

SEQ ID NO: 1886994 - RNA, 18 nt, Human
cagguagaccugucuccu

SEQ ID NO: 1886995 - RNA, 19 nt, Human
cagguagaccugucuccug

SEQ ID NO: 1886996 - RNA, 21 nt, Human
cagguagaccugucuccuggc

SEQ ID NO: 1886997 - RNA, 18 nt, Human
cagggucagaaacaggac

SEQ ID NO: 1886998 - RNA, 19 nt, Human
cagggucagaaacaggacc

SEQ ID NO: 1886999 - RNA, 12 nt, Human
cagggucccugg

SEQ ID NO: 1887000 - RNA, 14 nt, Human
cagggucccuggug

SEQ ID NO: 1887001 - RNA, 15 nt, Human
cagggucccuggugg

SEQ ID NO: 1887002 - RNA, 18 nt, Human
cagggucccugguggcag

SEQ ID NO: 1887003 - RNA, 19 nt, Human
cagggucccugguggcagc

SEQ ID NO: 1887004 - RNA, 22 nt, Human
cagggucccugguggcagcuca

SEQ ID NO: 1887005 - RNA, 10 nt, Human
cagggucaga

SEQ ID NO: 1887006 - RNA, 16 nt, Human
cagggucagaaacagg

SEQ ID NO: 1887007 - RNA, 21 nt, Human
caggguauuccagagugggga

SEQ ID NO: 1887008 - RNA, 20 nt, Human
caggguauuccagagugggg

SEQ ID NO: 1887009 - RNA, 22 nt, Human
cagggguggcugccucauuuag

SEQ ID NO: 1887010 - RNA, 15 nt, Human
cagggucucacucug

SEQ ID NO: 1887011 - RNA, 23 nt, Human
cagggucucacuauguugcccag

SEQ ID NO: 1887012 - RNA, 22 nt, Human
cagggucucacuauguugccca

SEQ ID NO: 1887013 - RNA, 21 nt, Human
cagggucucacuauguugccc

SEQ ID NO: 1887014 - RNA, 23 nt, Human
cagggucccugguggcagcucac

SEQ ID NO: 1887015 - RNA, 18 nt, Human
caggguccuguagcccua

SEQ ID NO: 1887016 - RNA, 17 nt, Human
cagguaacaggcagaua

SEQ ID NO: 1887017 - RNA, 16 nt, Human
cagguaacaggcagau

SEQ ID NO: 1887018 - RNA, 15 nt, Human
cagguaacaggcaga

SEQ ID NO: 1887019 - RNA, 14 nt, Human
cagguaacaggcag

SEQ ID NO: 1887020 - RNA, 16 nt, Human
cagggucucacucugu

SEQ ID NO: 1887021 - RNA, 16 nt, Human
caggguuuugccaugu

SEQ ID NO: 1887022 - RNA, 14 nt, Human
caggggugggacac

SEQ ID NO: 1887023 - RNA, 15 nt, Human
caggggugggacacc

SEQ ID NO: 1887024 - RNA, 20 nt, Human
caggggugggacacccugug

SEQ ID NO: 1887025 - RNA, 21 nt, Human
caggggugggacacccuguga

SEQ ID NO: 1887026 - RNA, 18 nt, Human
caggugucugcccccucu

SEQ ID NO: 1887027 - RNA, 16 nt, Human
caggugugagucacca

SEQ ID NO: 1887028 - RNA, 21 nt, Human
caggugugagucaccaagccc

SEQ ID NO: 1887029 - RNA, 20 nt, Human
caggugugagucaccaagcc

SEQ ID NO: 1887030 - RNA, 23 nt, Human
caggugugaaccaccacacccag

SEQ ID NO: 1887031 - RNA, 22 nt, Human
caggugugaaccaccacaccca

SEQ ID NO: 1887032 - RNA, 19 nt, Human
caggugugaaccaccacac

SEQ ID NO: 1887033 - RNA, 16 nt, Human
caggugugaaccacca

SEQ ID NO: 1887034 - RNA, 23 nt, Human
caggugugagucaccaagcccag

SEQ ID NO: 1887035 - RNA, 22 nt, Human
caggugugagucaccaagccca

SEQ ID NO: 1887036 - RNA, 22 nt, Human
cagguguuacuguaauuccuca

SEQ ID NO: 1887037 - RNA, 12 nt, Human
cagguguucuuc

SEQ ID NO: 1887038 - RNA, 12 nt, Human
caggugugaacc

SEQ ID NO: 1887039 - RNA, 19 nt, Human
caggugucccugcacuugc

SEQ ID NO: 1887040 - RNA, 18 nt, Human
caggugucccugcacuug

SEQ ID NO: 1887041 - RNA, 16 nt, Human
caggugucccugcacu

SEQ ID NO: 1887042 - RNA, 15 nt, Human
caggugucccugcac

SEQ ID NO: 1887043 - RNA, 14 nt, Human
caguaacuaaagcu

SEQ ID NO: 1887044 - RNA, 21 nt, Human
caguaaaugggggugcauuug

SEQ ID NO: 1887045 - RNA, 22 nt, Human
caguaaaugggggugcauuuga

SEQ ID NO: 1887046 - RNA, 13 nt, Human
cagguucagcuug

SEQ ID NO: 1887047 - RNA, 14 nt, Human
cagguucccaagcu

SEQ ID NO: 1887048 - RNA, 15 nt, Human
cagguucccaagcuc

SEQ ID NO: 1887049 - RNA, 17 nt, Human
cagguucccaagcucag

SEQ ID NO: 1887050 - RNA, 12 nt, Human
cagguucagcuu

SEQ ID NO: 1887051 - RNA, 21 nt, Human
caguaauugguccgaucuuug

SEQ ID NO: 1887052 - RNA, 12 nt, Human
caguaauaacuc

SEQ ID NO: 1887053 - RNA, 13 nt, Human
caguaauaacucu

SEQ ID NO: 1887054 - RNA, 14 nt, Human
caggugucccugca

SEQ ID NO: 1887055 - RNA, 11 nt, Human
caggugucccu

SEQ ID NO: 1887056 - RNA, 20 nt, Human
caggugguuauggagagggu

SEQ ID NO: 1887057 - RNA, 18 nt, Human
caggugguuauggagagg

SEQ ID NO: 1887058 - RNA, 23 nt, Human
cagguggggucacucuggcagcu

SEQ ID NO: 1887059 - RNA, 19 nt, Human
cagguggggucacucuggc

SEQ ID NO: 1887060 - RNA, 20 nt, Human
cagguggggucacucuggca

SEQ ID NO: 1887061 - RNA, 21 nt, Human
cagguggggucacucuggcag

SEQ ID NO: 1887062 - RNA, 22 nt, Human
cagguggggucacucuggcagc

SEQ ID NO: 1887063 - RNA, 17 nt, Human
cagguggggcagcuuga

SEQ ID NO: 1887064 - RNA, 18 nt, Human
cagguggggucacucugg

SEQ ID NO: 1887065 - RNA, 16 nt, Human
cagguggggcagcuug

SEQ ID NO: 1887066 - RNA, 15 nt, Human
cagguggggcagcuu

SEQ ID NO: 1887067 - RNA, 14 nt, Human
cagguggggcagcu

SEQ ID NO: 1887068 - RNA, 13 nt, Human
cagguggggcagc

SEQ ID NO: 1887069 - RNA, 23 nt, Human
caggaguucaauaaaugucuguu

SEQ ID NO: 1887070 - RNA, 21 nt, Human
caggaguucgagaccagccug

SEQ ID NO: 1887071 - RNA, 21 nt, Human
caggaguucaauaaaugucug

SEQ ID NO: 1887072 - RNA, 17 nt, Human
caggaguggguugauuu

SEQ ID NO: 1887073 - RNA, 16 nt, Human
caggaguucugcucau

SEQ ID NO: 1887074 - RNA, 20 nt, Human
caggaguucugcucauucua

SEQ ID NO: 1887075 - RNA, 22 nt, Human
caggaguucugcucauucuaau

SEQ ID NO: 1887076 - RNA, 23 nt, Human
caggaguucgagaccagccuggc

SEQ ID NO: 1887077 - RNA, 14 nt, Human
caggaguucugcuc

SEQ ID NO: 1887078 - RNA, 15 nt, Human
caggaguucugcuca

SEQ ID NO: 1887079 - RNA, 19 nt, Human
caggaguuucguuuucaaa

SEQ ID NO: 1887080 - RNA, 21 nt, Human
caggaguuugagaccaaccug

SEQ ID NO: 1887081 - RNA, 22 nt, Human
caggaguuugagaccaaccugg

SEQ ID NO: 1887082 - RNA, 23 nt, Human
caggaguuugagaccaaccuggg

SEQ ID NO: 1887083 - RNA, 21 nt, Human
caggagcacacccagccccca

SEQ ID NO: 1887084 - RNA, 15 nt, Human
caggagcacacccag

SEQ ID NO: 1887085 - RNA, 16 nt, Human
caggagcacacccagc

SEQ ID NO: 1887086 - RNA, 19 nt, Human
caggagcacacccagcccc

SEQ ID NO: 1887087 - RNA, 20 nt, Human
caggagauggaaguugcagu

SEQ ID NO: 1887088 - RNA, 16 nt, Human
caggagacccacaggu

SEQ ID NO: 1887089 - RNA, 15 nt, Human
caggacuuaaaauga

SEQ ID NO: 1887090 - RNA, 20 nt, Human
caggagaacucauguuauuu

SEQ ID NO: 1887091 - RNA, 17 nt, Human
caggacgugggcugggc

SEQ ID NO: 1887092 - RNA, 16 nt, Human
caggacgugggcuggg

SEQ ID NO: 1887093 - RNA, 20 nt, Human
caggacuauauuugggccug

SEQ ID NO: 1887094 - RNA, 13 nt, Human
caggacugggcca

SEQ ID NO: 1887095 - RNA, 12 nt, Human
caggacugggcc

SEQ ID NO: 1887096 - RNA, 16 nt, Human
caggacugggccacuu

SEQ ID NO: 1887097 - RNA, 15 nt, Human
caggacugggccacu

SEQ ID NO: 1887098 - RNA, 20 nt, Human
caggacugggccacuucugg

SEQ ID NO: 1887099 - RNA, 12 nt, Human
caggagugagca

SEQ ID NO: 1887100 - RNA, 21 nt, Human
caggagucccugccaucaugu

SEQ ID NO: 1887101 - RNA, 15 nt, Human
caggagucccugcca

SEQ ID NO: 1887102 - RNA, 14 nt, Human
caggagucccugcc

SEQ ID NO: 1887103 - RNA, 20 nt, Human
caggagccuccugcccuuac

SEQ ID NO: 1887104 - RNA, 14 nt, Human
caggagccuccugc

SEQ ID NO: 1887105 - RNA, 17 nt, Human
caggagccuccugcccu

SEQ ID NO: 1887106 - RNA, 21 nt, Human
caggagcccugggaggcucug

SEQ ID NO: 1887107 - RNA, 18 nt, Human
caggagccccgaggccuu

SEQ ID NO: 1887108 - RNA, 16 nt, Human
caggagccccgaggcc

SEQ ID NO: 1887109 - RNA, 15 nt, Human
caggagccccgaggc

SEQ ID NO: 1887110 - RNA, 12 nt, Human
caggagcagcca

SEQ ID NO: 1887111 - RNA, 13 nt, Human
caggagcagccac

SEQ ID NO: 1887112 - RNA, 14 nt, Human
caggagcagccaca

SEQ ID NO: 1887113 - RNA, 19 nt, Human
caggagcagccacauuccu

SEQ ID NO: 1887114 - RNA, 22 nt, Human
caggagccccgaggccuucucu

SEQ ID NO: 1887115 - RNA, 20 nt, Human
caggagccccgaggccuucu

SEQ ID NO: 1887116 - RNA, 23 nt, Human
caggagccccgaggccuucucug

SEQ ID NO: 1887117 - RNA, 11 nt, Human
caggagcccug

SEQ ID NO: 1887118 - RNA, 14 nt, Human
caggagcccuggga

SEQ ID NO: 1887119 - RNA, 16 nt, Human
caggagcccugggagg

SEQ ID NO: 1887120 - RNA, 18 nt, Human
caggagcccugggaggcu

SEQ ID NO: 1887121 - RNA, 19 nt, Human
caggagcccugggaggcuc

SEQ ID NO: 1887122 - RNA, 23 nt, Human
caggcccaaauuaucaagcuaau

SEQ ID NO: 1887123 - RNA, 15 nt, Human
caggccccaggaaag

SEQ ID NO: 1887124 - RNA, 18 nt, Human
caggccccaggcagggcc

SEQ ID NO: 1887125 - RNA, 13 nt, Human
caggccccugcca

SEQ ID NO: 1887126 - RNA, 21 nt, Human
caggcccccagaaccccuggc

SEQ ID NO: 1887127 - RNA, 18 nt, Human
caggccaaacucaccugc

SEQ ID NO: 1887128 - RNA, 23 nt, Human
caggccaaacucaccugccccuc

SEQ ID NO: 1887129 - RNA, 17 nt, Human
caggccaagaaacgucu

SEQ ID NO: 1887130 - RNA, 13 nt, Human
caggccacaagac

SEQ ID NO: 1887131 - RNA, 17 nt, Human
caggccacaagacccuu

SEQ ID NO: 1887132 - RNA, 18 nt, Human
caggccacaagacccuug

SEQ ID NO: 1887133 - RNA, 21 nt, Human
caggccagggggccagucccu

SEQ ID NO: 1887134 - RNA, 20 nt, Human
caggccacaagacccuugug

SEQ ID NO: 1887135 - RNA, 21 nt, Human
caggccaggcccucugcccac

SEQ ID NO: 1887136 - RNA, 22 nt, Human
caggccaggcccucugcccacu

SEQ ID NO: 1887137 - RNA, 20 nt, Human
caggccccugccacccuggg

SEQ ID NO: 1887138 - RNA, 19 nt, Human
caggccccugccacccugg

SEQ ID NO: 1887139 - RNA, 17 nt, Human
caggccccugccacccu

SEQ ID NO: 1887140 - RNA, 15 nt, Human
caggccccugccacc

SEQ ID NO: 1887141 - RNA, 15 nt, Human
caggcccggcuccag

SEQ ID NO: 1887142 - RNA, 14 nt, Human
caggcccggcucca

SEQ ID NO: 1887143 - RNA, 13 nt, Human
caggcccggcucc

SEQ ID NO: 1887144 - RNA, 21 nt, Human
caggccccgugaggcaauggg

SEQ ID NO: 1887145 - RNA, 17 nt, Human
caggcaguuggccagag

SEQ ID NO: 1887146 - RNA, 15 nt, Human
caggcagggugcagu

SEQ ID NO: 1887147 - RNA, 12 nt, Human
caggcauccucc

SEQ ID NO: 1887148 - RNA, 17 nt, Human
caggcaugguggcccac

SEQ ID NO: 1887149 - RNA, 23 nt, Human
caggcaggucuugaacuccuggc

SEQ ID NO: 1887150 - RNA, 15 nt, Human
caggcaggugggaug

SEQ ID NO: 1887151 - RNA, 22 nt, Human
caggcaggucuugaacuccugg

SEQ ID NO: 1887152 - RNA, 13 nt, Human
caggcaggucuug

SEQ ID NO: 1887153 - RNA, 12 nt, Human
caggcaggucuu

SEQ ID NO: 1887154 - RNA, 19 nt, Human
caggcagguccaggguuug

SEQ ID NO: 1887155 - RNA, 15 nt, Human
caggcagguccaggg

SEQ ID NO: 1887156 - RNA, 14 nt, Human
caggcagguccagg

SEQ ID NO: 1887157 - RNA, 20 nt, Human
caggcauguucucugaggac

SEQ ID NO: 1887158 - RNA, 19 nt, Human
caggcauguucucugagga

SEQ ID NO: 1887159 - RNA, 18 nt, Human
caggcauguucucugagg

SEQ ID NO: 1887160 - RNA, 15 nt, Human
caggcauguucucug

SEQ ID NO: 1887161 - RNA, 13 nt, Human
caggcauucccca

SEQ ID NO: 1887162 - RNA, 15 nt, Human
caggcauuccccagg

SEQ ID NO: 1887163 - RNA, 16 nt, Human
caggcauuccccagga

SEQ ID NO: 1887164 - RNA, 17 nt, Human
caggcauuccccaggag

SEQ ID NO: 1887165 - RNA, 24 nt, Human
caggcauuccccaggaggccagcc

SEQ ID NO: 1887166 - RNA, 22 nt, Human
caggcauuccccaggaggccag

SEQ ID NO: 1887167 - RNA, 23 nt, Human
caggcauuccccaggaggccagc

SEQ ID NO: 1887168 - RNA, 18 nt, Human
caggcauuccccaggagg

SEQ ID NO: 1887169 - RNA, 19 nt, Human
caggcauuccccaggaggc

SEQ ID NO: 1887170 - RNA, 20 nt, Human
caggcauuccccaggaggcc

SEQ ID NO: 1887171 - RNA, 21 nt, Human
caggcauuccccaggaggcca

SEQ ID NO: 1887172 - RNA, 20 nt, Human
caggauucuuccucccuccc

SEQ ID NO: 1887173 - RNA, 21 nt, Human
caggcaagcaccuccugccuc

SEQ ID NO: 1887174 - RNA, 16 nt, Human
caggcaagcaccuccu

SEQ ID NO: 1887175 - RNA, 15 nt, Human
caggcaagcaccucc

SEQ ID NO: 1887176 - RNA, 14 nt, Human
caggcaagcaccuc

SEQ ID NO: 1887177 - RNA, 14 nt, Human
caggcagccaggcc

SEQ ID NO: 1887178 - RNA, 15 nt, Human
caggcagccaggcca

SEQ ID NO: 1887179 - RNA, 13 nt, Human
caggcagguccag

SEQ ID NO: 1887180 - RNA, 20 nt, Human
caggcagggccaacccuucu

SEQ ID NO: 1887181 - RNA, 22 nt, Human
caggcagggccaacccuucucc

SEQ ID NO: 1887182 - RNA, 22 nt, Human
caggcagcuuuuucucucccac

SEQ ID NO: 1887183 - RNA, 19 nt, Human
caggcagcuuuuucucucc

SEQ ID NO: 1887184 - RNA, 21 nt, Human
caggcagcucauaagagccac

SEQ ID NO: 1887185 - RNA, 22 nt, Human
caggcagcucauaagagccaca

SEQ ID NO: 1887186 - RNA, 23 nt, Human
caggcagcucauaagagccacag

SEQ ID NO: 1887187 - RNA, 16 nt, Human
caggcagccaggccac

SEQ ID NO: 1887188 - RNA, 17 nt, Human
caggcagccaggccaca

SEQ ID NO: 1887189 - RNA, 14 nt, Human
caggaucagucuga

SEQ ID NO: 1887190 - RNA, 13 nt, Human
caggaucagucug

SEQ ID NO: 1887191 - RNA, 21 nt, Human
caggauauucucacagcucca

SEQ ID NO: 1887192 - RNA, 18 nt, Human
caggaugaugacuaugga

SEQ ID NO: 1887193 - RNA, 20 nt, Human
caggaugaugacuauggaaa

SEQ ID NO: 1887194 - RNA, 18 nt, Human
caggaucucuuagcauuu

SEQ ID NO: 1887195 - RNA, 23 nt, Human
caggaucucuuagcauuuuaauu

SEQ ID NO: 1887196 - RNA, 14 nt, Human
caggaugaagcauu

SEQ ID NO: 1887197 - RNA, 15 nt, Human
caggaugaagcauuu

SEQ ID NO: 1887198 - RNA, 22 nt, Human
caggaugaugacuauggaaaga

SEQ ID NO: 1887199 - RNA, 23 nt, Human
caggauggccgggcgcgguggcu

SEQ ID NO: 1887200 - RNA, 15 nt, Human
caggaugcuuugguu

SEQ ID NO: 1887201 - RNA, 15 nt, Human
caggaugguaauucu

SEQ ID NO: 1887202 - RNA, 16 nt, Human
caggauuccucuuuuc

SEQ ID NO: 1887203 - RNA, 17 nt, Human
caggauuccucuuuucu

SEQ ID NO: 1887204 - RNA, 20 nt, Human
caggauuccucuuuucucug

SEQ ID NO: 1887205 - RNA, 22 nt, Human
caggauuccucuuuucucugcc

SEQ ID NO: 1887206 - RNA, 17 nt, Human
caggauucuuccucccu

SEQ ID NO: 1887207 - RNA, 18 nt, Human
caggauucuuccucccuc

SEQ ID NO: 1887208 - RNA, 14 nt, Human
caggaugguaauuc

SEQ ID NO: 1887209 - RNA, 21 nt, Human
caggcuuuuuuccagacucua

SEQ ID NO: 1887210 - RNA, 15 nt, Human
cagggaaaagcagcu

SEQ ID NO: 1887211 - RNA, 23 nt, Human
caggcuuuuuuaucaugugaaau

SEQ ID NO: 1887212 - RNA, 18 nt, Human
caggcuugccugcaggca

SEQ ID NO: 1887213 - RNA, 17 nt, Human
caggcuugccugcaggc

SEQ ID NO: 1887214 - RNA, 16 nt, Human
caggcuugccugcagg

SEQ ID NO: 1887215 - RNA, 15 nt, Human
caggcuugccugcag

SEQ ID NO: 1887216 - RNA, 22 nt, Human
caggcuuagucacugagacagc

SEQ ID NO: 1887217 - RNA, 23 nt, Human
caggcuuagucacugagacagcc

SEQ ID NO: 1887218 - RNA, 21 nt, Human
caggcuguaucccaugagccu

SEQ ID NO: 1887219 - RNA, 20 nt, Human
caggcuguaucccaugagcc

SEQ ID NO: 1887220 - RNA, 14 nt, Human
caggcuguauccca

SEQ ID NO: 1887221 - RNA, 19 nt, Human
caggcuggucucaaacucu

SEQ ID NO: 1887222 - RNA, 12 nt, Human
caggcuggucuc

SEQ ID NO: 1887223 - RNA, 23 nt, Human
caggcuggucucaaacuccugac

SEQ ID NO: 1887224 - RNA, 23 nt, Human
caggcuguaucccaugagccuca

SEQ ID NO: 1887225 - RNA, 22 nt, Human
caggcuguaucccaugagccuc

SEQ ID NO: 1887226 - RNA, 16 nt, Human
caggcuuagucacuga

SEQ ID NO: 1887227 - RNA, 17 nt, Human
caggcuuagucacugag

SEQ ID NO: 1887228 - RNA, 20 nt, Human
caggcuuagucacugagaca

SEQ ID NO: 1887229 - RNA, 21 nt, Human
caggcuuagucacugagacag

SEQ ID NO: 1887230 - RNA, 23 nt, Human
caggcugggcuucaguggcagcu

SEQ ID NO: 1887231 - RNA, 21 nt, Human
caggcugggucgcccuggacu

SEQ ID NO: 1887232 - RNA, 23 nt, Human
caggcugggucgcccuggacugu

SEQ ID NO: 1887233 - RNA, 22 nt, Human
caggcugaccacagcacagcca

SEQ ID NO: 1887234 - RNA, 15 nt, Human
caggcugaccacagc

SEQ ID NO: 1887235 - RNA, 17 nt, Human
caggcugaccacagcac

SEQ ID NO: 1887236 - RNA, 20 nt, Human
caggcugaccacagcacagc

SEQ ID NO: 1887237 - RNA, 21 nt, Human
caggcugaccacagcacagcc

SEQ ID NO: 1887238 - RNA, 18 nt, Human
caggcugaagcagguucc

SEQ ID NO: 1887239 - RNA, 14 nt, Human
caggcugaccacag

SEQ ID NO: 1887240 - RNA, 20 nt, Human
caggcuccuuuagcgcccag

SEQ ID NO: 1887241 - RNA, 19 nt, Human
caggcuccuuuagcgccca

SEQ ID NO: 1887242 - RNA, 14 nt, Human
caggcuccuuuagc

SEQ ID NO: 1887243 - RNA, 14 nt, Human
caggccgcccugcg

SEQ ID NO: 1887244 - RNA, 21 nt, Human
caggcuccuuuagcgcccagu

SEQ ID NO: 1887245 - RNA, 20 nt, Human
caggcucgggcuccccagcc

SEQ ID NO: 1887246 - RNA, 12 nt, Human
caggcucucagg

SEQ ID NO: 1887247 - RNA, 13 nt, Human
caggcucucaggc

SEQ ID NO: 1887248 - RNA, 14 nt, Human
caggcucucaggcc

SEQ ID NO: 1887249 - RNA, 15 nt, Human
caggcucucaggcca

SEQ ID NO: 1887250 - RNA, 16 nt, Human
caggcucucaggccag

SEQ ID NO: 1887251 - RNA, 21 nt, Human
caggcucucaggccagcugcu

SEQ ID NO: 1887252 - RNA, 23 nt, Human
caggcucucaggccagcugcuug

SEQ ID NO: 1887253 - RNA, 13 nt, Human
caggcucucaaca

SEQ ID NO: 1887254 - RNA, 14 nt, Human
caggcucucaacag

SEQ ID NO: 1887255 - RNA, 17 nt, Human
caggcucucaggccagc

SEQ ID NO: 1887256 - RNA, 18 nt, Human
caggcucucaggccagcu

SEQ ID NO: 1887257 - RNA, 19 nt, Human
caggcucucaggccagcug

SEQ ID NO: 1887258 - RNA, 20 nt, Human
caggcucucaggccagcugc

SEQ ID NO: 1887259 - RNA, 19 nt, Human
caggcccggcuccaggcuc

SEQ ID NO: 1887260 - RNA, 18 nt, Human
caggcccggcuccaggcu

SEQ ID NO: 1887261 - RNA, 16 nt, Human
caggcccggcuccagg

SEQ ID NO: 1887262 - RNA, 17 nt, Human
caggcccggcuccaggc

SEQ ID NO: 1887263 - RNA, 21 nt, Human
caggcccggcuccaggcuccu

SEQ ID NO: 1887264 - RNA, 20 nt, Human
caggcccggcuccaggcucc

SEQ ID NO: 1887265 - RNA, 22 nt, Human
caggcccggcuccaggcuccuu

SEQ ID NO: 1887266 - RNA, 13 nt, Human
caggcccucugcc

SEQ ID NO: 1887267 - RNA, 22 nt, Human
caggcccucccuguuccccaga

SEQ ID NO: 1887268 - RNA, 23 nt, Human
caggcccucccuguuccccagag

SEQ ID NO: 1887269 - RNA, 14 nt, Human
caggcccucugccc

SEQ ID NO: 1887270 - RNA, 15 nt, Human
caggcccucugccca

SEQ ID NO: 1887271 - RNA, 16 nt, Human
caggcccucugcccac

SEQ ID NO: 1887272 - RNA, 17 nt, Human
caggcccucugcccacu

SEQ ID NO: 1887273 - RNA, 19 nt, Human
caggcccucugcccacucc

SEQ ID NO: 1887274 - RNA, 20 nt, Human
caggcccucugcccacuccc

SEQ ID NO: 1887275 - RNA, 21 nt, Human
caggcccucugcccacucccu

SEQ ID NO: 1887276 - RNA, 22 nt, Human
caggcccucugcccacucccug

SEQ ID NO: 1887277 - RNA, 20 nt, Human
cagggcagccgucaccccug

SEQ ID NO: 1887278 - RNA, 13 nt, Human
cagggcagcgcca

SEQ ID NO: 1887279 - RNA, 14 nt, Human
cagggcagcgccag

SEQ ID NO: 1887280 - RNA, 15 nt, Human
cagggcagcgccagg

SEQ ID NO: 1887281 - RNA, 16 nt, Human
cagggcagcgccaggc

SEQ ID NO: 1887282 - RNA, 17 nt, Human
cagggcagcgccaggcu

SEQ ID NO: 1887283 - RNA, 18 nt, Human
cagggcagcgccaggcug

SEQ ID NO: 1887284 - RNA, 19 nt, Human
cagggcagcgccaggcuga

SEQ ID NO: 1887285 - RNA, 22 nt, Human
cagggcagcgccaggcugacca

SEQ ID NO: 1887286 - RNA, 15 nt, Human
cagggcaccugccac

SEQ ID NO: 1887287 - RNA, 21 nt, Human
cagggcacaccgggcacucag

SEQ ID NO: 1887288 - RNA, 19 nt, Human
cagggcacaccgggcacuc

SEQ ID NO: 1887289 - RNA, 17 nt, Human
cagggcacaccgggcac

SEQ ID NO: 1887290 - RNA, 15 nt, Human
cagggcacaccgggc

SEQ ID NO: 1887291 - RNA, 23 nt, Human
cagggcacaccgggcacucagaa

SEQ ID NO: 1887292 - RNA, 22 nt, Human
cagggcacaccgggcacucaga

SEQ ID NO: 1887293 - RNA, 15 nt, Human
cagggcacaggccau

SEQ ID NO: 1887294 - RNA, 18 nt, Human
cagggcacaggccaugga

SEQ ID NO: 1887295 - RNA, 14 nt, Human
cagggcacaccggg

SEQ ID NO: 1887296 - RNA, 18 nt, Human
cagggcaaugaugaauga

SEQ ID NO: 1887297 - RNA, 12 nt, Human
cagggagaagcu

SEQ ID NO: 1887298 - RNA, 13 nt, Human
cagggagaagcuc

SEQ ID NO: 1887299 - RNA, 18 nt, Human
cagggauuguuucuguuu

SEQ ID NO: 1887300 - RNA, 23 nt, Human
cagggacagaggggguggccucc

SEQ ID NO: 1887301 - RNA, 19 nt, Human
cagggacagaggccccagc

SEQ ID NO: 1887302 - RNA, 21 nt, Human
cagggacagaggccccagccu

SEQ ID NO: 1887303 - RNA, 23 nt, Human
cagggacagaggccccagccucc

SEQ ID NO: 1887304 - RNA, 20 nt, Human
cagggacugaaaaccucucc

SEQ ID NO: 1887305 - RNA, 21 nt, Human
cagggacugaaaaccucuccu

SEQ ID NO: 1887306 - RNA, 23 nt, Human
cagggacugaaaaccucuccuca

SEQ ID NO: 1887307 - RNA, 19 nt, Human
cagggacgaagaagagcca

SEQ ID NO: 1887308 - RNA, 22 nt, Human
cagggacgaagaagagccacag

SEQ ID NO: 1887309 - RNA, 23 nt, Human
cagggacgaagaagagccacagu

SEQ ID NO: 1887310 - RNA, 23 nt, Human
cagggccgcccgggcccagagga

SEQ ID NO: 1887311 - RNA, 22 nt, Human
cagggccgcccgggcccagagg

SEQ ID NO: 1887312 - RNA, 21 nt, Human
cagggccgcccgggcccagag

SEQ ID NO: 1887313 - RNA, 20 nt, Human
cagggccgcccgggcccaga

SEQ ID NO: 1887314 - RNA, 14 nt, Human
cagggccgccaggg

SEQ ID NO: 1887315 - RNA, 16 nt, Human
cagggccgccagggag

SEQ ID NO: 1887316 - RNA, 19 nt, Human
cagggccgcccgggcccag

SEQ ID NO: 1887317 - RNA, 22 nt, Human
cagggccgccagggagaccugg

SEQ ID NO: 1887318 - RNA, 13 nt, Human
cagggccugcgag

SEQ ID NO: 1887319 - RNA, 15 nt, Human
cagggcccccaucuc

SEQ ID NO: 1887320 - RNA, 16 nt, Human
cagggcccccaucuca

SEQ ID NO: 1887321 - RNA, 21 nt, Human
cagggcccccaucucaugccc

SEQ ID NO: 1887322 - RNA, 12 nt, Human
cagggcccagag

SEQ ID NO: 1887323 - RNA, 13 nt, Human
cagggcccagagc

SEQ ID NO: 1887324 - RNA, 14 nt, Human
cagggcccagagcc

SEQ ID NO: 1887325 - RNA, 15 nt, Human
cagggcccagagccc

SEQ ID NO: 1887326 - RNA, 16 nt, Human
cagggcccagagccca

SEQ ID NO: 1887327 - RNA, 18 nt, Human
cagggcccagagcccagc

SEQ ID NO: 1887328 - RNA, 19 nt, Human
cagggcccagagcccagcu

SEQ ID NO: 1887329 - RNA, 21 nt, Human
cagggcccagagcccagcucc

SEQ ID NO: 1887330 - RNA, 22 nt, Human
cagggcccagagcccagcucca

SEQ ID NO: 1887331 - RNA, 13 nt, Human
cagggccaacccu

SEQ ID NO: 1887332 - RNA, 21 nt, Human
cagggcagucauuggcugucu

SEQ ID NO: 1887333 - RNA, 18 nt, Human
cagggccaacccuucucc

SEQ ID NO: 1887334 - RNA, 19 nt, Human
caggggaggguagagcgga

SEQ ID NO: 1887335 - RNA, 18 nt, Human
caggggagggucagccag

SEQ ID NO: 1887336 - RNA, 20 nt, Human
caggggauuucaccacucaa

SEQ ID NO: 1887337 - RNA, 14 nt, Human
caggggcaggagga

SEQ ID NO: 1887338 - RNA, 19 nt, Human
caggggagggucagccagg

SEQ ID NO: 1887339 - RNA, 20 nt, Human
caggggagggucagccaggg

SEQ ID NO: 1887340 - RNA, 22 nt, Human
caggggagggucagccagggcc

SEQ ID NO: 1887341 - RNA, 14 nt, Human
caggggccagaaga

SEQ ID NO: 1887342 - RNA, 16 nt, Human
cagggccuggcucagg

SEQ ID NO: 1887343 - RNA, 19 nt, Human
cagggccuggcucaggugg

SEQ ID NO: 1887344 - RNA, 13 nt, Human
cagggccuggcuc

SEQ ID NO: 1887345 - RNA, 14 nt, Human
cagggccuggcuca

SEQ ID NO: 1887346 - RNA, 15 nt, Human
cagggccuggcucag

SEQ ID NO: 1887347 - RNA, 22 nt, Human
cagggggccagucccugaggca

SEQ ID NO: 1887348 - RNA, 15 nt, Human
caggggggugaggag

SEQ ID NO: 1887349 - RNA, 18 nt, Human
caggggggugaggagcug

SEQ ID NO: 1887350 - RNA, 19 nt, Human
caggggggugaggagcugg

SEQ ID NO: 1887351 - RNA, 17 nt, Human
cagggacacgggcagcc

SEQ ID NO: 1887352 - RNA, 21 nt, Human
cagggacacgggcagccuggc

SEQ ID NO: 1887353 - RNA, 15 nt, Human
cagggacacgggcag

SEQ ID NO: 1887354 - RNA, 16 nt, Human
cagggacacgggcagc

SEQ ID NO: 1887355 - RNA, 13 nt, Human
cagggacaaagag

SEQ ID NO: 1887356 - RNA, 17 nt, Human
cagggacaaagaggccu

SEQ ID NO: 1887357 - RNA, 18 nt, Human
cagggacaaagaggccuu

SEQ ID NO: 1887358 - RNA, 23 nt, Human
cagggacaaagaggccuuuaacc

SEQ ID NO: 1887359 - RNA, 13 nt, Human
cagggacagaggg

SEQ ID NO: 1887360 - RNA, 14 nt, Human
cagggacagaggcc

SEQ ID NO: 1887361 - RNA, 16 nt, Human
cagggacagaggcccc

SEQ ID NO: 1887362 - RNA, 18 nt, Human
cagggacagaggccccag

SEQ ID NO: 1887363 - RNA, 14 nt, Human
cagggacagagggg

SEQ ID NO: 1887364 - RNA, 20 nt, Human
cagggacagaggggguggcc

SEQ ID NO: 1887365 - RNA, 22 nt, Human
cagggaaacagcuaaugggaca

SEQ ID NO: 1887366 - RNA, 16 nt, Human
cagggaaacagcuaau

SEQ ID NO: 1887367 - RNA, 17 nt, Human
cagggaaaagcagcucu

SEQ ID NO: 1887368 - RNA, 19 nt, Human
cagggaaaagcagcucucc

SEQ ID NO: 1887369 - RNA, 20 nt, Human
cagggaaaagcagcucuccc

SEQ ID NO: 1887370 - RNA, 21 nt, Human
cagggaaaagcagcucucccc

SEQ ID NO: 1887371 - RNA, 20 nt, Human
cagggaaaaugcagcaggga

SEQ ID NO: 1887372 - RNA, 22 nt, Human
caucuucuuuuugaaaucagca

SEQ ID NO: 1887373 - RNA, 16 nt, Human
caucuugaauuguaag

SEQ ID NO: 1887374 - RNA, 21 nt, Human
caucuugaauuguaaggaaug

SEQ ID NO: 1887375 - RNA, 17 nt, Human
caucuugcucugcugac

SEQ ID NO: 1887376 - RNA, 16 nt, Human
caucuugcucugcuga

SEQ ID NO: 1887377 - RNA, 19 nt, Human
caucuugcucugcugacag

SEQ ID NO: 1887378 - RNA, 15 nt, Human
caucucuccuccuuu

SEQ ID NO: 1887379 - RNA, 22 nt, Human
caucucuaacagcucaggaucu

SEQ ID NO: 1887380 - RNA, 23 nt, Human
caucucuaacagcucaggaucuc

SEQ ID NO: 1887381 - RNA, 12 nt, Human
caucucugcuug

SEQ ID NO: 1887382 - RNA, 13 nt, Human
caucucugcuuga

SEQ ID NO: 1887383 - RNA, 20 nt, Human
caucucugcuugagucaggu

SEQ ID NO: 1887384 - RNA, 21 nt, Human
caucucugcuugagucagguu

SEQ ID NO: 1887385 - RNA, 14 nt, Human
caucucucuuuaau

SEQ ID NO: 1887386 - RNA, 16 nt, Human
caucucucugcccaac

SEQ ID NO: 1887387 - RNA, 18 nt, Human
caucucucugcccaaccc

SEQ ID NO: 1887388 - RNA, 13 nt, Human
caucucucugccc

SEQ ID NO: 1887389 - RNA, 15 nt, Human
caucucucugcccaa

SEQ ID NO: 1887390 - RNA, 14 nt, Human
caucugaccagcag

SEQ ID NO: 1887391 - RNA, 15 nt, Human
caucugaccagcagc

SEQ ID NO: 1887392 - RNA, 17 nt, Human
caucugaccagcagcgc

SEQ ID NO: 1887393 - RNA, 19 nt, Human
caucugaccagcagcgccu

SEQ ID NO: 1887394 - RNA, 21 nt, Human
caucugaccagcagcgccuuu

SEQ ID NO: 1887395 - RNA, 16 nt, Human
caucucuacaaaaagc

SEQ ID NO: 1887396 - RNA, 16 nt, Human
caucucuaacagcuca

SEQ ID NO: 1887397 - RNA, 18 nt, Human
caucucuaacagcucagg

SEQ ID NO: 1887398 - RNA, 19 nt, Human
caucucuaacagcucagga

SEQ ID NO: 1887399 - RNA, 20 nt, Human
caucucuaacagcucaggau

SEQ ID NO: 1887400 - RNA, 21 nt, Human
caucucuaacagcucaggauc

SEQ ID NO: 1887401 - RNA, 20 nt, Human
caugauccaagcaagacuga

SEQ ID NO: 1887402 - RNA, 21 nt, Human
caugaguuggggucuggcagc

SEQ ID NO: 1887403 - RNA, 23 nt, Human
caugaguuggggucuggcagccu

SEQ ID NO: 1887404 - RNA, 19 nt, Human
caugaguuggcugggaaua

SEQ ID NO: 1887405 - RNA, 15 nt, Human
caugcacucagcucu

SEQ ID NO: 1887406 - RNA, 16 nt, Human
caugcacucagcucuu

SEQ ID NO: 1887407 - RNA, 21 nt, Human
caugaugacaacuacagaaaa

SEQ ID NO: 1887408 - RNA, 23 nt, Human
caugaguccccuguuuguuucug

SEQ ID NO: 1887409 - RNA, 14 nt, Human
caugaguccccugu

SEQ ID NO: 1887410 - RNA, 15 nt, Human
caugaguccccuguu

SEQ ID NO: 1887411 - RNA, 13 nt, Human
caugaguccccug

SEQ ID NO: 1887412 - RNA, 19 nt, Human
caugagguacugagaguga

SEQ ID NO: 1887413 - RNA, 16 nt, Human
caugagguacugagag

SEQ ID NO: 1887414 - RNA, 23 nt, Human
caugaggaacaaggcaaggcugu

SEQ ID NO: 1887415 - RNA, 23 nt, Human
caugagccucagcauccuggcac

SEQ ID NO: 1887416 - RNA, 22 nt, Human
caugagccucagcauccuggca

SEQ ID NO: 1887417 - RNA, 16 nt, Human
caugaggaacaaggca

SEQ ID NO: 1887418 - RNA, 17 nt, Human
caugaggaacaaggcaa

SEQ ID NO: 1887419 - RNA, 20 nt, Human
caugaggaacaaggcaaggc

SEQ ID NO: 1887420 - RNA, 21 nt, Human
caugaggaacaaggcaaggcu

SEQ ID NO: 1887421 - RNA, 17 nt, Human
caugagaccacuguuau

SEQ ID NO: 1887422 - RNA, 19 nt, Human
caugagaccacuguuauca

SEQ ID NO: 1887423 - RNA, 18 nt, Human
caugagauaauaugcaga

SEQ ID NO: 1887424 - RNA, 13 nt, Human
caugagcaucagg

SEQ ID NO: 1887425 - RNA, 22 nt, Human
caugagaugauacauccaaagc

SEQ ID NO: 1887426 - RNA, 16 nt, Human
caugagaacaaacaga

SEQ ID NO: 1887427 - RNA, 19 nt, Human
caugaagauguagaggaga

SEQ ID NO: 1887428 - RNA, 21 nt, Human
caugaagaggaugcugugaaa

SEQ ID NO: 1887429 - RNA, 18 nt, Human
caugaagauguagaggag

SEQ ID NO: 1887430 - RNA, 18 nt, Human
caugaagaggaugcugug

SEQ ID NO: 1887431 - RNA, 21 nt, Human
caugagccucagcauccuggc

SEQ ID NO: 1887432 - RNA, 20 nt, Human
caugagccucagcauccugg

SEQ ID NO: 1887433 - RNA, 19 nt, Human
caugagccucagcauccug

SEQ ID NO: 1887434 - RNA, 18 nt, Human
caugagccucagcauccu

SEQ ID NO: 1887435 - RNA, 17 nt, Human
caugagccucagcaucc

SEQ ID NO: 1887436 - RNA, 15 nt, Human
caugagccucagcau

SEQ ID NO: 1887437 - RNA, 12 nt, Human
caugagccucag

SEQ ID NO: 1887438 - RNA, 15 nt, Human
caugagcaucaggcc

SEQ ID NO: 1887439 - RNA, 16 nt, Human
caugagcaucaggcca

SEQ ID NO: 1887440 - RNA, 17 nt, Human
caugagcaucaggccag

SEQ ID NO: 1887441 - RNA, 18 nt, Human
caugagcaucaggccagg

SEQ ID NO: 1887442 - RNA, 20 nt, Human
caugagcaucaggccaggcc

SEQ ID NO: 1887443 - RNA, 21 nt, Human
caugagcaucaggccaggccc

SEQ ID NO: 1887444 - RNA, 22 nt, Human
caugagcaucaggccaggcccu

SEQ ID NO: 1887445 - RNA, 23 nt, Human
caugagcaucaggccaggcccuc

SEQ ID NO: 1887446 - RNA, 12 nt, Human
caugaagacaga

SEQ ID NO: 1887447 - RNA, 21 nt, Human
caugaaaacacauuuuucuua

SEQ ID NO: 1887448 - RNA, 19 nt, Human
caugaaaacacauuuuucu

SEQ ID NO: 1887449 - RNA, 22 nt, Human
caugaaaaugcaacaacaugua

SEQ ID NO: 1887450 - RNA, 15 nt, Human
caugaaaaugcaaca

SEQ ID NO: 1887451 - RNA, 13 nt, Human
caugaaaaugcaa

SEQ ID NO: 1887452 - RNA, 14 nt, Human
caugaaagauucaa

SEQ ID NO: 1887453 - RNA, 17 nt, Human
caugaaaacacauuuuu

SEQ ID NO: 1887454 - RNA, 16 nt, Human
caugaaaacacauuuu

SEQ ID NO: 1887455 - RNA, 15 nt, Human
caugaaaacacauuu

SEQ ID NO: 1887456 - RNA, 14 nt, Human
caugaaaacacauu

SEQ ID NO: 1887457 - RNA, 13 nt, Human
caugaaaacacau

SEQ ID NO: 1887458 - RNA, 16 nt, Human
caucuuuucuugccuc

SEQ ID NO: 1887459 - RNA, 14 nt, Human
caucuuuucuugcc

SEQ ID NO: 1887460 - RNA, 22 nt, Human
caucuuugugaaggccucgcag

SEQ ID NO: 1887461 - RNA, 21 nt, Human
caucuuuucuugccucugucc

SEQ ID NO: 1887462 - RNA, 22 nt, Human
caucuuuacaaaacuacaugag

SEQ ID NO: 1887463 - RNA, 14 nt, Human
caucuuucuuugga

SEQ ID NO: 1887464 - RNA, 13 nt, Human
caucuuugugaag

SEQ ID NO: 1887465 - RNA, 14 nt, Human
caucuuugugaagg

SEQ ID NO: 1887466 - RNA, 13 nt, Human
cauagucacaugg

SEQ ID NO: 1887467 - RNA, 22 nt, Human
cauaguaccauuuauacaaauu

SEQ ID NO: 1887468 - RNA, 17 nt, Human
cauaguaugguggcugg

SEQ ID NO: 1887469 - RNA, 16 nt, Human
cauaguaugguggcug

SEQ ID NO: 1887470 - RNA, 18 nt, Human
cauaguaccaaucauuuu

SEQ ID NO: 1887471 - RNA, 16 nt, Human
cauaguaccaaucauu

SEQ ID NO: 1887472 - RNA, 23 nt, Human
cauaguaacuucuuauggaauug

SEQ ID NO: 1887473 - RNA, 24 nt, Human
cauaguaacuucuuauggaauuga

SEQ ID NO: 1887474 - RNA, 21 nt, Human
cauaguaacuucuuauggaau

SEQ ID NO: 1887475 - RNA, 22 nt, Human
cauaguaacuucuuauggaauu

SEQ ID NO: 1887476 - RNA, 22 nt, Human
cauaguaccaaucauuuuaauu

SEQ ID NO: 1887477 - RNA, 16 nt, Human
cauaguaccauuuaua

SEQ ID NO: 1887478 - RNA, 19 nt, Human
cauaguaccauuuauacaa

SEQ ID NO: 1887479 - RNA, 20 nt, Human
cauaguaccauuuauacaaa

SEQ ID NO: 1887480 - RNA, 15 nt, Human
cauaguaugguggcu

SEQ ID NO: 1887481 - RNA, 19 nt, Human
cagugcuugauugcgugga

SEQ ID NO: 1887482 - RNA, 16 nt, Human
cauauaagugauugcu

SEQ ID NO: 1887483 - RNA, 23 nt, Human
cauauaagauucauauuuacuuc

SEQ ID NO: 1887484 - RNA, 18 nt, Human
cauauauuggguuccauu

SEQ ID NO: 1887485 - RNA, 22 nt, Human
cauauauuggguuccauucuca

SEQ ID NO: 1887486 - RNA, 22 nt, Human
cauauucuguuggccaguguga

SEQ ID NO: 1887487 - RNA, 17 nt, Human
cauauugauuuccguua

SEQ ID NO: 1887488 - RNA, 17 nt, Human
cauaucuuuauuaauca

SEQ ID NO: 1887489 - RNA, 14 nt, Human
cauaucuuuauuaa

SEQ ID NO: 1887490 - RNA, 15 nt, Human
cauaucuuuauuaau

SEQ ID NO: 1887491 - RNA, 16 nt, Human
cauaucuuuauuaauc

SEQ ID NO: 1887492 - RNA, 21 nt, Human
cauauugauuuccguuaaaau

SEQ ID NO: 1887493 - RNA, 19 nt, Human
cauauuguaaaacagguag

SEQ ID NO: 1887494 - RNA, 17 nt, Human
cauauuguaaaacaggu

SEQ ID NO: 1887495 - RNA, 16 nt, Human
cauauuguaaaacagg

SEQ ID NO: 1887496 - RNA, 13 nt, Human
cauauuguaaaac

SEQ ID NO: 1887497 - RNA, 23 nt, Human
cauauugcugagagaaauaugga

SEQ ID NO: 1887498 - RNA, 16 nt, Human
cauauugcugagagaa

SEQ ID NO: 1887499 - RNA, 17 nt, Human
cauauugcugagagaaa

SEQ ID NO: 1887500 - RNA, 21 nt, Human
cauauugcugagagaaauaug

SEQ ID NO: 1887501 - RNA, 13 nt, Human
cauauuguuacug

SEQ ID NO: 1887502 - RNA, 19 nt, Human
cauauuguuacugguacca

SEQ ID NO: 1887503 - RNA, 13 nt, Human
cauauuugcacua

SEQ ID NO: 1887504 - RNA, 14 nt, Human
cauauuugcacuaa

SEQ ID NO: 1887505 - RNA, 14 nt, Human
caucaacaucuugg

SEQ ID NO: 1887506 - RNA, 23 nt, Human
cauccagucucccaacuuguauu

SEQ ID NO: 1887507 - RNA, 17 nt, Human
cauccagguucagcuug

SEQ ID NO: 1887508 - RNA, 23 nt, Human
cauccacugugccaugugccagg

SEQ ID NO: 1887509 - RNA, 17 nt, Human
cauccacugugccaugu

SEQ ID NO: 1887510 - RNA, 14 nt, Human
cauccacugugcca

SEQ ID NO: 1887511 - RNA, 12 nt, Human
caucauucccuu

SEQ ID NO: 1887512 - RNA, 15 nt, Human
caucccucuggggcu

SEQ ID NO: 1887513 - RNA, 13 nt, Human
caucccuccuggg

SEQ ID NO: 1887514 - RNA, 20 nt, Human
caucaccaacgucugugcca

SEQ ID NO: 1887515 - RNA, 12 nt, Human
caucacccgcua

SEQ ID NO: 1887516 - RNA, 15 nt, Human
caucaugucuggcua

SEQ ID NO: 1887517 - RNA, 14 nt, Human
caucaugucuggcu

SEQ ID NO: 1887518 - RNA, 21 nt, Human
caucauguuuacagaggacag

SEQ ID NO: 1887519 - RNA, 19 nt, Human
caucauguuuacagaggac

SEQ ID NO: 1887520 - RNA, 13 nt, Human
caucauguuuaca

SEQ ID NO: 1887521 - RNA, 13 nt, Human
caucaugucuggc

SEQ ID NO: 1887522 - RNA, 16 nt, Human
caucauccuaagcuau

SEQ ID NO: 1887523 - RNA, 17 nt, Human
caucaugaccagcaaau

SEQ ID NO: 1887524 - RNA, 17 nt, Human
caugucuuguacaugug

SEQ ID NO: 1887525 - RNA, 15 nt, Human
caugucuuguacaug

SEQ ID NO: 1887526 - RNA, 14 nt, Human
caugucuuguacau

SEQ ID NO: 1887527 - RNA, 13 nt, Human
caugucuuguaca

SEQ ID NO: 1887528 - RNA, 12 nt, Human
caugucuggcua

SEQ ID NO: 1887529 - RNA, 14 nt, Human
caugucugcauuuc

SEQ ID NO: 1887530 - RNA, 15 nt, Human
caugucugcauuucg

SEQ ID NO: 1887531 - RNA, 23 nt, Human
caugucugcauuucgguggcuag

SEQ ID NO: 1887532 - RNA, 15 nt, Human
caugugaugagagga

SEQ ID NO: 1887533 - RNA, 16 nt, Human
caugugaugagaggaa

SEQ ID NO: 1887534 - RNA, 17 nt, Human
caugugaugagaggaaa

SEQ ID NO: 1887535 - RNA, 18 nt, Human
caugugaugagaggaaau

SEQ ID NO: 1887536 - RNA, 20 nt, Human
caugugaugagaggaaauca

SEQ ID NO: 1887537 - RNA, 21 nt, Human
caugugaugagaggaaaucac

SEQ ID NO: 1887538 - RNA, 18 nt, Human
cauguguagccugugcau

SEQ ID NO: 1887539 - RNA, 16 nt, Human
cauguguagccugugc

SEQ ID NO: 1887540 - RNA, 14 nt, Human
cauguguagccugu

SEQ ID NO: 1887541 - RNA, 17 nt, Human
caugugcuacaggggcc

SEQ ID NO: 1887542 - RNA, 20 nt, Human
caugugcuacaggggccaga

SEQ ID NO: 1887543 - RNA, 22 nt, Human
caugugcuacaggggccagaag

SEQ ID NO: 1887544 - RNA, 14 nt, Human
caugugcacaugca

SEQ ID NO: 1887545 - RNA, 22 nt, Human
caugugccagguuuuuggucug

SEQ ID NO: 1887546 - RNA, 14 nt, Human
cauguguuccaagg

SEQ ID NO: 1887547 - RNA, 22 nt, Human
cauguacugagccuuguaauuc

SEQ ID NO: 1887548 - RNA, 19 nt, Human
cauguacugagccuuguaa

SEQ ID NO: 1887549 - RNA, 23 nt, Human
cauguacugagccuuguaauucu

SEQ ID NO: 1887550 - RNA, 20 nt, Human
cauguacaugaagaagcuaa

SEQ ID NO: 1887551 - RNA, 21 nt, Human
cauguaaagcaguauuaaaau

SEQ ID NO: 1887552 - RNA, 20 nt, Human
cauguaaagcaguauuaaaa

SEQ ID NO: 1887553 - RNA, 19 nt, Human
cauguacccuaaggucauu

SEQ ID NO: 1887554 - RNA, 23 nt, Human
cauggucggaaaacaugcuacac

SEQ ID NO: 1887555 - RNA, 14 nt, Human
cauggucacacacu

SEQ ID NO: 1887556 - RNA, 15 nt, Human
cauggucacacacug

SEQ ID NO: 1887557 - RNA, 19 nt, Human
cauggugcuuguuaaugcu

SEQ ID NO: 1887558 - RNA, 19 nt, Human
cauggucggaaaacaugcu

SEQ ID NO: 1887559 - RNA, 17 nt, Human
cauggucggaaaacaug

SEQ ID NO: 1887560 - RNA, 14 nt, Human
cauguuugugauug

SEQ ID NO: 1887561 - RNA, 12 nt, Human
cauguuugugau

SEQ ID NO: 1887562 - RNA, 19 nt, Human
cauguuuuucuucucccuc

SEQ ID NO: 1887563 - RNA, 20 nt, Human
cauguuuuucuucucccuca

SEQ ID NO: 1887564 - RNA, 22 nt, Human
cauuaaaaaaaaaaaaaaaagu

SEQ ID NO: 1887565 - RNA, 22 nt, Human
caugcagccuaaggcuguauga

SEQ ID NO: 1887566 - RNA, 22 nt, Human
caugcacugugaaggacccuug

SEQ ID NO: 1887567 - RNA, 10 nt, Human
caugcacugu

SEQ ID NO: 1887568 - RNA, 13 nt, Human
caugcacugugaa

SEQ ID NO: 1887569 - RNA, 14 nt, Human
caugcacugugaag

SEQ ID NO: 1887570 - RNA, 16 nt, Human
caugcacugugaagga

SEQ ID NO: 1887571 - RNA, 17 nt, Human
caugcacugugaaggac

SEQ ID NO: 1887572 - RNA, 18 nt, Human
caugcacugugaaggacc

SEQ ID NO: 1887573 - RNA, 20 nt, Human
caugcacugugaaggacccu

SEQ ID NO: 1887574 - RNA, 17 nt, Human
caugcugucccuuacgu

SEQ ID NO: 1887575 - RNA, 15 nt, Human
caugcuguucaugaa

SEQ ID NO: 1887576 - RNA, 13 nt, Human
caugcugucccuu

SEQ ID NO: 1887577 - RNA, 15 nt, Human
caugcugucccuuac

SEQ ID NO: 1887578 - RNA, 17 nt, Human
caugcgggcuuccuccu

SEQ ID NO: 1887579 - RNA, 22 nt, Human
cauggacuucugccagcauaau

SEQ ID NO: 1887580 - RNA, 14 nt, Human
cauggagccagcuc

SEQ ID NO: 1887581 - RNA, 15 nt, Human
cauggacuuccacug

SEQ ID NO: 1887582 - RNA, 17 nt, Human
cauggagccagcucccu

SEQ ID NO: 1887583 - RNA, 18 nt, Human
caugcuguucaugaaaga

SEQ ID NO: 1887584 - RNA, 16 nt, Human
caugcuguucaugaaa

SEQ ID NO: 1887585 - RNA, 18 nt, Human
caugggccuccugugugu

SEQ ID NO: 1887586 - RNA, 19 nt, Human
caugggcacaaagggccca

SEQ ID NO: 1887587 - RNA, 21 nt, Human
caugggcacaaagggcccaga

SEQ ID NO: 1887588 - RNA, 23 nt, Human
caugggacagggaggacgcucuc

SEQ ID NO: 1887589 - RNA, 18 nt, Human
caugggaccuauaacugc

SEQ ID NO: 1887590 - RNA, 22 nt, Human
caugggaccuauaacugcccag

SEQ ID NO: 1887591 - RNA, 16 nt, Human
cauggucacacacuga

SEQ ID NO: 1887592 - RNA, 15 nt, Human
cauuuacuguggcuu

SEQ ID NO: 1887593 - RNA, 14 nt, Human
cauuuacuguggcu

SEQ ID NO: 1887594 - RNA, 13 nt, Human
cauuuacuguggc

SEQ ID NO: 1887595 - RNA, 12 nt, Human
cauuuacugugg

SEQ ID NO: 1887596 - RNA, 18 nt, Human
cauuucuuugugcuuugg

SEQ ID NO: 1887597 - RNA, 19 nt, Human
cauuugaaaauuuugaugu

SEQ ID NO: 1887598 - RNA, 17 nt, Human
cauuugaaaauuuugau

SEQ ID NO: 1887599 - RNA, 22 nt, Human
cauuuacccuucuuuucugacu

SEQ ID NO: 1887600 - RNA, 23 nt, Human
cauuuacaacccgguucacucuu

SEQ ID NO: 1887601 - RNA, 15 nt, Human
cauuuaccuuuuuga

SEQ ID NO: 1887602 - RNA, 14 nt, Human
cauuuacaacccgg

SEQ ID NO: 1887603 - RNA, 15 nt, Human
cauuuaaaaaaaauc

SEQ ID NO: 1887604 - RNA, 16 nt, Human
cauuguucaauuagaa

SEQ ID NO: 1887605 - RNA, 15 nt, Human
cauugugggaagggg

SEQ ID NO: 1887606 - RNA, 13 nt, Human
cauugugggaagg

SEQ ID NO: 1887607 - RNA, 14 nt, Human
cauugaccugaggc

SEQ ID NO: 1887608 - RNA, 15 nt, Human
cauugaccugaggcc

SEQ ID NO: 1887609 - RNA, 17 nt, Human
cauugaccugaggcccu

SEQ ID NO: 1887610 - RNA, 18 nt, Human
cauugaccugaggcccuu

SEQ ID NO: 1887611 - RNA, 16 nt, Human
cauugauauuugugca

SEQ ID NO: 1887612 - RNA, 19 nt, Human
cauugauauuugugcauuu

SEQ ID NO: 1887613 - RNA, 22 nt, Human
cauugauauuugugcauuuucu

SEQ ID NO: 1887614 - RNA, 23 nt, Human
cauugauauuugugcauuuucua

SEQ ID NO: 1887615 - RNA, 12 nt, Human
cauugaugcuga

SEQ ID NO: 1887616 - RNA, 17 nt, Human
cauugaauuauaaaagc

SEQ ID NO: 1887617 - RNA, 14 nt, Human
cauugaaggcuuaa

SEQ ID NO: 1887618 - RNA, 13 nt, Human
cauugaaggcuua

SEQ ID NO: 1887619 - RNA, 22 nt, Human
cauugaacacaaacuguaaaua

SEQ ID NO: 1887620 - RNA, 14 nt, Human
cauugaacagcaaa

SEQ ID NO: 1887621 - RNA, 15 nt, Human
cauugaacagcaaag

SEQ ID NO: 1887622 - RNA, 19 nt, Human
cauucuuuuguaauuuaaa

SEQ ID NO: 1887623 - RNA, 21 nt, Human
cauuuuuaagugcugcauuua

SEQ ID NO: 1887624 - RNA, 11 nt, Human
cauuuucaucu

SEQ ID NO: 1887625 - RNA, 14 nt, Human
cauuuuccucugcu

SEQ ID NO: 1887626 - RNA, 15 nt, Human
cauuuuccucugcuu

SEQ ID NO: 1887627 - RNA, 17 nt, Human
cauuuuccucugcuuug

SEQ ID NO: 1887628 - RNA, 20 nt, Human
cauuuuccucugcuuugaaa

SEQ ID NO: 1887629 - RNA, 17 nt, Human
cauuuuuaguagagaca

SEQ ID NO: 1887630 - RNA, 12 nt, Human
cauuuuuacugu

SEQ ID NO: 1887631 - RNA, 22 nt, Human
ccaaaaugcucuagugccuucu

SEQ ID NO: 1887632 - RNA, 17 nt, Human
ccaaaccaccagaagcc

SEQ ID NO: 1887633 - RNA, 16 nt, Human
ccaaacccuucagugc

SEQ ID NO: 1887634 - RNA, 22 nt, Human
cauuuuacuuuuuccuggcuca

SEQ ID NO: 1887635 - RNA, 20 nt, Human
cauuuuacuuuuuccuggcu

SEQ ID NO: 1887636 - RNA, 17 nt, Human
cauuuuacuuuuuccug

SEQ ID NO: 1887637 - RNA, 20 nt, Human
cauuuuacccacacacagau

SEQ ID NO: 1887638 - RNA, 22 nt, Human
cauuuuauuuuauuaugcauga

SEQ ID NO: 1887639 - RNA, 23 nt, Human
cauuuuauuuuauuaugcaugaa

SEQ ID NO: 1887640 - RNA, 23 nt, Human
cauuuuaccuuugacaaagguaa

SEQ ID NO: 1887641 - RNA, 16 nt, Human
cauucaggagcuuccu

SEQ ID NO: 1887642 - RNA, 18 nt, Human
cauucaguauauaaaaua

SEQ ID NO: 1887643 - RNA, 19 nt, Human
cauucagugauuacuguca

SEQ ID NO: 1887644 - RNA, 20 nt, Human
cauucagugauuacugucaa

SEQ ID NO: 1887645 - RNA, 21 nt, Human
cauucagugauuacugucaag

SEQ ID NO: 1887646 - RNA, 21 nt, Human
cauucagauaugauucaaaug

SEQ ID NO: 1887647 - RNA, 15 nt, Human
cauucaccugcccca

SEQ ID NO: 1887648 - RNA, 16 nt, Human
cauucaccugccccaa

SEQ ID NO: 1887649 - RNA, 19 nt, Human
cauucaccugccccaacuc

SEQ ID NO: 1887650 - RNA, 19 nt, Human
cauucauuuucuggguguu

SEQ ID NO: 1887651 - RNA, 20 nt, Human
cauucauuuagcuaaacgga

SEQ ID NO: 1887652 - RNA, 13 nt, Human
cauuccagaggaa

SEQ ID NO: 1887653 - RNA, 13 nt, Human
cauuccccaggag

SEQ ID NO: 1887654 - RNA, 15 nt, Human
cauuccccaggaggc

SEQ ID NO: 1887655 - RNA, 17 nt, Human
cauuccccaggaggcca

SEQ ID NO: 1887656 - RNA, 14 nt, Human
cauuccaagccuga

SEQ ID NO: 1887657 - RNA, 14 nt, Human
cauuccagaggaag

SEQ ID NO: 1887658 - RNA, 20 nt, Human
cauucccuucgacagcauuu

SEQ ID NO: 1887659 - RNA, 20 nt, Human
cauuccccaggaggccagcc

SEQ ID NO: 1887660 - RNA, 18 nt, Human
cauuccccaggaggccag

SEQ ID NO: 1887661 - RNA, 19 nt, Human
cauuccccaggaggccagc

SEQ ID NO: 1887662 - RNA, 23 nt, Human
cauucacaguucuuugggccaga

SEQ ID NO: 1887663 - RNA, 13 nt, Human
cauucaccugccc

SEQ ID NO: 1887664 - RNA, 22 nt, Human
cauucacaguucuuugggccag

SEQ ID NO: 1887665 - RNA, 20 nt, Human
cauucaaauguauuacagug

SEQ ID NO: 1887666 - RNA, 12 nt, Human
cauucaacaaga

SEQ ID NO: 1887667 - RNA, 16 nt, Human
cauuaagccuuccaca

SEQ ID NO: 1887668 - RNA, 21 nt, Human
cauuacagggcacaggccaug

SEQ ID NO: 1887669 - RNA, 22 nt, Human
cauuacagggcacaggccaugg

SEQ ID NO: 1887670 - RNA, 13 nt, Human
cauucuggaauaa

SEQ ID NO: 1887671 - RNA, 17 nt, Human
cauucuguuaaucauua

SEQ ID NO: 1887672 - RNA, 13 nt, Human
cauucuuaaaaaa

SEQ ID NO: 1887673 - RNA, 20 nt, Human
cauucugccugcccaggccc

SEQ ID NO: 1887674 - RNA, 19 nt, Human
cauucugccugcccaggcc

SEQ ID NO: 1887675 - RNA, 18 nt, Human
cauucugccugcccaggc

SEQ ID NO: 1887676 - RNA, 17 nt, Human
cauucugccugcccagg

SEQ ID NO: 1887677 - RNA, 16 nt, Human
cauucugccugcccag

SEQ ID NO: 1887678 - RNA, 15 nt, Human
cauucugccugccca

SEQ ID NO: 1887679 - RNA, 13 nt, Human
cauucugccugcc

SEQ ID NO: 1887680 - RNA, 12 nt, Human
cauucugccugc

SEQ ID NO: 1887681 - RNA, 23 nt, Human
cauuccugaugcuucuucagaga

SEQ ID NO: 1887682 - RNA, 14 nt, Human
cauuccugaugcuu

SEQ ID NO: 1887683 - RNA, 16 nt, Human
cauuccugaugcuucu

SEQ ID NO: 1887684 - RNA, 19 nt, Human
cauuccugaugcuucuuca

SEQ ID NO: 1887685 - RNA, 22 nt, Human
cauuccugaugcuucuucagag

SEQ ID NO: 1887686 - RNA, 14 nt, Human
cauuccugaacagg

SEQ ID NO: 1887687 - RNA, 13 nt, Human
cauuccugaagaa

SEQ ID NO: 1887688 - RNA, 16 nt, Human
cauuccugaagaacca

SEQ ID NO: 1887689 - RNA, 17 nt, Human
cauuccugaagaaccag

SEQ ID NO: 1887690 - RNA, 20 nt, Human
cauuccugaagaaccagucc

SEQ ID NO: 1887691 - RNA, 21 nt, Human
cauuccugaagaaccaguccc

SEQ ID NO: 1887692 - RNA, 23 nt, Human
cauucuucuguacgucugacagg

SEQ ID NO: 1887693 - RNA, 17 nt, Human
cauucuugaaagcugug

SEQ ID NO: 1887694 - RNA, 12 nt, Human
cauucuuuugua

SEQ ID NO: 1887695 - RNA, 14 nt, Human
cauucuuuuguaau

SEQ ID NO: 1887696 - RNA, 15 nt, Human
cauucuuuuguaauu

SEQ ID NO: 1887697 - RNA, 16 nt, Human
cauucuuuuguaauuu

SEQ ID NO: 1887698 - RNA, 18 nt, Human
cauucuuuuguaauuuaa

SEQ ID NO: 1887699 - RNA, 17 nt, Human
cauucuuucugauaacu

SEQ ID NO: 1887700 - RNA, 23 nt, Human
ccagggagaccuggacacaggcc

SEQ ID NO: 1887701 - RNA, 21 nt, Human
ccagggagaccuggacacagg

SEQ ID NO: 1887702 - RNA, 22 nt, Human
ccagggagaccuggacacaggc

SEQ ID NO: 1887703 - RNA, 18 nt, Human
ccagggagaccuggacac

SEQ ID NO: 1887704 - RNA, 19 nt, Human
ccagggagcauuuuccucc

SEQ ID NO: 1887705 - RNA, 20 nt, Human
ccagggagcauuuuccucca

SEQ ID NO: 1887706 - RNA, 21 nt, Human
ccagggagcauuuuccuccau

SEQ ID NO: 1887707 - RNA, 20 nt, Human
ccaggcuuagucacugagac

SEQ ID NO: 1887708 - RNA, 14 nt, Human
ccagggacagaggg

SEQ ID NO: 1887709 - RNA, 15 nt, Human
ccagggacagagggg

SEQ ID NO: 1887710 - RNA, 21 nt, Human
ccagggacagaggggguggcc

SEQ ID NO: 1887711 - RNA, 22 nt, Human
ccagggacagaggggguggccu

SEQ ID NO: 1887712 - RNA, 19 nt, Human
ccaggugcacaagcuccaa

SEQ ID NO: 1887713 - RNA, 20 nt, Human
ccaggugcacaagcuccaag

SEQ ID NO: 1887714 - RNA, 18 nt, Human
ccaggugcacaagcucca

SEQ ID NO: 1887715 - RNA, 19 nt, Human
ccagggcuggacugaggcc

SEQ ID NO: 1887716 - RNA, 18 nt, Human
ccagggcuggacugaggc

SEQ ID NO: 1887717 - RNA, 17 nt, Human
ccagggcuggacugagg

SEQ ID NO: 1887718 - RNA, 16 nt, Human
ccagggcuggacugag

SEQ ID NO: 1887719 - RNA, 13 nt, Human
ccagggcuggacu

SEQ ID NO: 1887720 - RNA, 19 nt, Human
ccagggcccagagcccagc

SEQ ID NO: 1887721 - RNA, 21 nt, Human
ccagggcccagagcccagcuc

SEQ ID NO: 1887722 - RNA, 22 nt, Human
ccagggcccagagcccagcucc

SEQ ID NO: 1887723 - RNA, 23 nt, Human
ccagggcccagagcccagcucca

SEQ ID NO: 1887724 - RNA, 18 nt, Human
ccagggagccuuugguuc

SEQ ID NO: 1887725 - RNA, 14 nt, Human
ccagggagccuuug

SEQ ID NO: 1887726 - RNA, 12 nt, Human
ccagggagccuu

SEQ ID NO: 1887727 - RNA, 13 nt, Human
ccagggagccuuu

SEQ ID NO: 1887728 - RNA, 13 nt, Human
ccagggcccagag

SEQ ID NO: 1887729 - RNA, 14 nt, Human
ccagggcccagagc

SEQ ID NO: 1887730 - RNA, 15 nt, Human
ccagggcccagagcc

SEQ ID NO: 1887731 - RNA, 16 nt, Human
ccagggcccagagccc

SEQ ID NO: 1887732 - RNA, 17 nt, Human
ccagggcccagagccca

SEQ ID NO: 1887733 - RNA, 18 nt, Human
ccagggcccagagcccag

SEQ ID NO: 1887734 - RNA, 20 nt, Human
ccagucuggaaugcaguggu

SEQ ID NO: 1887735 - RNA, 19 nt, Human
ccagucuggaaugcagugg

SEQ ID NO: 1887736 - RNA, 18 nt, Human
ccagucuggaaugcagug

SEQ ID NO: 1887737 - RNA, 20 nt, Human
ccagucuccaccaggaaccu

SEQ ID NO: 1887738 - RNA, 21 nt, Human
ccagucuccaccaggaaccuc

SEQ ID NO: 1887739 - RNA, 23 nt, Human
ccagucuccaccaggaaccucuu

SEQ ID NO: 1887740 - RNA, 16 nt, Human
ccagucuccaccagga

SEQ ID NO: 1887741 - RNA, 18 nt, Human
ccagucuccaccaggaac

SEQ ID NO: 1887742 - RNA, 19 nt, Human
ccagucuccaccaggaacc

SEQ ID NO: 1887743 - RNA, 17 nt, Human
ccagguuuuuggucuga

SEQ ID NO: 1887744 - RNA, 20 nt, Human
ccaguaaaaaaaaaaaaugg

SEQ ID NO: 1887745 - RNA, 24 nt, Human
ccaggugcacaagcuccaagcucc

SEQ ID NO: 1887746 - RNA, 24 nt, Human
ccaggcuguaucccaugagccuca

SEQ ID NO: 1887747 - RNA, 17 nt, Human
ccaggcuuagucacuga

SEQ ID NO: 1887748 - RNA, 18 nt, Human
ccaggcgcaggggcucac

SEQ ID NO: 1887749 - RNA, 22 nt, Human
ccaggcccucugcccacucccu

SEQ ID NO: 1887750 - RNA, 23 nt, Human
ccaggcccucugcccacucccug

SEQ ID NO: 1887751 - RNA, 20 nt, Human
ccaggcccucugcccacucc

SEQ ID NO: 1887752 - RNA, 21 nt, Human
ccaggcccucugcccacuccc

SEQ ID NO: 1887753 - RNA, 19 nt, Human
ccaggccagggggccaguc

SEQ ID NO: 1887754 - RNA, 20 nt, Human
ccaggagccccgaggccuuc

SEQ ID NO: 1887755 - RNA, 12 nt, Human
ccaggagccucc

SEQ ID NO: 1887756 - RNA, 19 nt, Human
ccaggagccccgaggccuu

SEQ ID NO: 1887757 - RNA, 16 nt, Human
ccaggagccccgaggc

SEQ ID NO: 1887758 - RNA, 18 nt, Human
ccaggcauuccccaggag

SEQ ID NO: 1887759 - RNA, 19 nt, Human
ccaggcauuccccaggagg

SEQ ID NO: 1887760 - RNA, 21 nt, Human
ccaggcauuccccaggaggcc

SEQ ID NO: 1887761 - RNA, 15 nt, Human
ccaggccagcugccu

SEQ ID NO: 1887762 - RNA, 13 nt, Human
ccagccucccuga

SEQ ID NO: 1887763 - RNA, 15 nt, Human
ccagccucccugaag

SEQ ID NO: 1887764 - RNA, 17 nt, Human
ccagccucccugaagcc

SEQ ID NO: 1887765 - RNA, 21 nt, Human
ccagccucccugaagccuuug

SEQ ID NO: 1887766 - RNA, 15 nt, Human
ccauagucacauggc

SEQ ID NO: 1887767 - RNA, 23 nt, Human
ccauauucuguuggccaguguga

SEQ ID NO: 1887768 - RNA, 15 nt, Human
ccauaguaccauuua

SEQ ID NO: 1887769 - RNA, 19 nt, Human
ccauaguaccauuuauaca

SEQ ID NO: 1887770 - RNA, 22 nt, Human
ccaguguuguggauuuaacaga

SEQ ID NO: 1887771 - RNA, 16 nt, Human
ccaguguccuuagaac

SEQ ID NO: 1887772 - RNA, 16 nt, Human
ccagugaggcucugcc

SEQ ID NO: 1887773 - RNA, 14 nt, Human
ccagugaggcucug

SEQ ID NO: 1887774 - RNA, 15 nt, Human
ccagugaggcucugc

SEQ ID NO: 1887775 - RNA, 22 nt, Human
ccagugguuccuaauccucuag

SEQ ID NO: 1887776 - RNA, 20 nt, Human
ccagugccgagaaggaagcc

SEQ ID NO: 1887777 - RNA, 14 nt, Human
ccagugcccccacu

SEQ ID NO: 1887778 - RNA, 16 nt, Human
ccagugcccccacuga

SEQ ID NO: 1887779 - RNA, 18 nt, Human
ccagugcccccacugacc

SEQ ID NO: 1887780 - RNA, 13 nt, Human
ccaucuacccucc

SEQ ID NO: 1887781 - RNA, 13 nt, Human
cccaaagggugug

SEQ ID NO: 1887782 - RNA, 20 nt, Human
cccaaagugguauagaaaug

SEQ ID NO: 1887783 - RNA, 16 nt, Human
cccaaagugcugggau

SEQ ID NO: 1887784 - RNA, 21 nt, Human
cccaaagugguauagaaaugc

SEQ ID NO: 1887785 - RNA, 23 nt, Human
cccaaauggaaaugggcagagca

SEQ ID NO: 1887786 - RNA, 14 nt, Human
cccaaaugagccau

SEQ ID NO: 1887787 - RNA, 18 nt, Human
cccaaauggaaaugggca

SEQ ID NO: 1887788 - RNA, 22 nt, Human
cccaaauggaaaugggcagagc

SEQ ID NO: 1887789 - RNA, 13 nt, Human
cccaagggaucug

SEQ ID NO: 1887790 - RNA, 23 nt, Human
cccaaucccagcuaccucaacca

SEQ ID NO: 1887791 - RNA, 17 nt, Human
cccaaucccuuuauuac

SEQ ID NO: 1887792 - RNA, 21 nt, Human
cccaaucccuuuauuaccccc

SEQ ID NO: 1887793 - RNA, 17 nt, Human
cccaacccuucccucac

SEQ ID NO: 1887794 - RNA, 19 nt, Human
ccauucuccaccugccagg

SEQ ID NO: 1887795 - RNA, 20 nt, Human
ccauucuccaccugccaggg

SEQ ID NO: 1887796 - RNA, 13 nt, Human
ccauucuccauuu

SEQ ID NO: 1887797 - RNA, 17 nt, Human
ccauucuccauuuguua

SEQ ID NO: 1887798 - RNA, 14 nt, Human
ccauuuguguuuau

SEQ ID NO: 1887799 - RNA, 14 nt, Human
ccauuuguuaucug

SEQ ID NO: 1887800 - RNA, 15 nt, Human
cccaaagugcuggga

SEQ ID NO: 1887801 - RNA, 13 nt, Human
cccaaagugcugg

SEQ ID NO: 1887802 - RNA, 20 nt, Human
cccaaaacucuccucugcug

SEQ ID NO: 1887803 - RNA, 21 nt, Human
cccaaaacaccggguuccagc

SEQ ID NO: 1887804 - RNA, 16 nt, Human
cccaaaacucuccucu

SEQ ID NO: 1887805 - RNA, 18 nt, Human
cccaaaacucuccucugc

SEQ ID NO: 1887806 - RNA, 18 nt, Human
ccauucuccaccugccag

SEQ ID NO: 1887807 - RNA, 21 nt, Human
ccauguuuguggcuauuaaaa

SEQ ID NO: 1887808 - RNA, 20 nt, Human
ccauucagugauuacuguca

SEQ ID NO: 1887809 - RNA, 17 nt, Human
ccauguugugccucccu

SEQ ID NO: 1887810 - RNA, 20 nt, Human
ccauguugugccucccuggu

SEQ ID NO: 1887811 - RNA, 22 nt, Human
ccauguugugccucccugguga

SEQ ID NO: 1887812 - RNA, 16 nt, Human
ccauguuggccaggcu

SEQ ID NO: 1887813 - RNA, 17 nt, Human
ccauguuggccaggcug

SEQ ID NO: 1887814 - RNA, 19 nt, Human
ccaugggacagggaggacg

SEQ ID NO: 1887815 - RNA, 16 nt, Human
ccaugggacagggagg

SEQ ID NO: 1887816 - RNA, 13 nt, Human
ccauccuccagca

SEQ ID NO: 1887817 - RNA, 14 nt, Human
ccauccuccagcag

SEQ ID NO: 1887818 - RNA, 15 nt, Human
ccauccuccagcagg

SEQ ID NO: 1887819 - RNA, 16 nt, Human
ccauccuccagcaggg

SEQ ID NO: 1887820 - RNA, 17 nt, Human
ccauccuccagcaggga

SEQ ID NO: 1887821 - RNA, 18 nt, Human
ccauauuguaaaacaggu

SEQ ID NO: 1887822 - RNA, 14 nt, Human
ccauauuguaaaac

SEQ ID NO: 1887823 - RNA, 21 nt, Human
ccagccacggacgcuggcucc

SEQ ID NO: 1887824 - RNA, 17 nt, Human
ccagccaggccccaggc

SEQ ID NO: 1887825 - RNA, 15 nt, Human
ccagccaaagccucc

SEQ ID NO: 1887826 - RNA, 14 nt, Human
ccagcauuccuuuu

SEQ ID NO: 1887827 - RNA, 13 nt, Human
ccagcauuccuuu

SEQ ID NO: 1887828 - RNA, 18 nt, Human
ccagccaaagccuccucc

SEQ ID NO: 1887829 - RNA, 19 nt, Human
ccagccaaagccuccucca

SEQ ID NO: 1887830 - RNA, 23 nt, Human
ccagcauaauacuugcuuuggaa

SEQ ID NO: 1887831 - RNA, 15 nt, Human
ccagcaguuuucaag

SEQ ID NO: 1887832 - RNA, 22 nt, Human
ccagcaguuuucaagucaaauu

SEQ ID NO: 1887833 - RNA, 15 nt, Human
ccagcaggugcugac

SEQ ID NO: 1887834 - RNA, 22 nt, Human
ccagcacugaggaagaacgggg

SEQ ID NO: 1887835 - RNA, 17 nt, Human
ccagcacugaggaagaa

SEQ ID NO: 1887836 - RNA, 15 nt, Human
ccagcacugaggaag

SEQ ID NO: 1887837 - RNA, 14 nt, Human
ccagcacugaggaa

SEQ ID NO: 1887838 - RNA, 13 nt, Human
ccagcacugagga

SEQ ID NO: 1887839 - RNA, 12 nt, Human
ccagcacugagg

SEQ ID NO: 1887840 - RNA, 18 nt, Human
ccagcaggugcugacuuc

SEQ ID NO: 1887841 - RNA, 21 nt, Human
ccagcagucaauuaacaauaa

SEQ ID NO: 1887842 - RNA, 15 nt, Human
ccagccccagugccc

SEQ ID NO: 1887843 - RNA, 13 nt, Human
ccagccccagugc

SEQ ID NO: 1887844 - RNA, 23 nt, Human
ccagccccaaaacucuccucugc

SEQ ID NO: 1887845 - RNA, 17 nt, Human
ccagcccuuagcaggga

SEQ ID NO: 1887846 - RNA, 16 nt, Human
ccagcccuuagcaggg

SEQ ID NO: 1887847 - RNA, 16 nt, Human
ccagccccagugccca

SEQ ID NO: 1887848 - RNA, 14 nt, Human
ccagcccuccccau

SEQ ID NO: 1887849 - RNA, 20 nt, Human
ccagcccuccccauggagcc

SEQ ID NO: 1887850 - RNA, 21 nt, Human
ccagcccuccccauggagcca

SEQ ID NO: 1887851 - RNA, 19 nt, Human
ccagccucaucucuuuguu

SEQ ID NO: 1887852 - RNA, 14 nt, Human
ccagccgccaugcu

SEQ ID NO: 1887853 - RNA, 23 nt, Human
ccagccgagauagccaaggccaa

SEQ ID NO: 1887854 - RNA, 18 nt, Human
ccagccgccaugcuccug

SEQ ID NO: 1887855 - RNA, 19 nt, Human
ccagccgccaugcuccugg

SEQ ID NO: 1887856 - RNA, 15 nt, Human
ccagcaagugagagc

SEQ ID NO: 1887857 - RNA, 14 nt, Human
ccagauuucacucu

SEQ ID NO: 1887858 - RNA, 22 nt, Human
ccagcaagugagagcugggugu

SEQ ID NO: 1887859 - RNA, 21 nt, Human
ccagcaagugagagcugggug

SEQ ID NO: 1887860 - RNA, 20 nt, Human
ccagcaagugagagcugggu

SEQ ID NO: 1887861 - RNA, 16 nt, Human
ccagcaagugagagcu

SEQ ID NO: 1887862 - RNA, 22 nt, Human
ccagaggagcugggagccgggc

SEQ ID NO: 1887863 - RNA, 21 nt, Human
ccagaggagcugggagccggg

SEQ ID NO: 1887864 - RNA, 20 nt, Human
ccagaggagcugggagccgg

SEQ ID NO: 1887865 - RNA, 22 nt, Human
ccagaggagggcagcagaaggg

SEQ ID NO: 1887866 - RNA, 12 nt, Human
ccagaggagggc

SEQ ID NO: 1887867 - RNA, 22 nt, Human
ccagaggcaccucaagaagaag

SEQ ID NO: 1887868 - RNA, 18 nt, Human
ccagaggcagcuucuuug

SEQ ID NO: 1887869 - RNA, 19 nt, Human
ccagaggcagcuucuuugc

SEQ ID NO: 1887870 - RNA, 20 nt, Human
ccagaggacugugaugcccu

SEQ ID NO: 1887871 - RNA, 22 nt, Human
ccagaggacugugaugcccugc

SEQ ID NO: 1887872 - RNA, 22 nt, Human
ccagaggagagaggacccccug

SEQ ID NO: 1887873 - RNA, 21 nt, Human
ccagaggagagaggacccccu

SEQ ID NO: 1887874 - RNA, 21 nt, Human
ccagagggagugacagaggca

SEQ ID NO: 1887875 - RNA, 20 nt, Human
ccagagggagugacagaggc

SEQ ID NO: 1887876 - RNA, 19 nt, Human
ccagagggagugacagagg

SEQ ID NO: 1887877 - RNA, 18 nt, Human
ccagagggagugacagag

SEQ ID NO: 1887878 - RNA, 17 nt, Human
ccagagggagugacaga

SEQ ID NO: 1887879 - RNA, 16 nt, Human
ccagagggagugacag

SEQ ID NO: 1887880 - RNA, 14 nt, Human
ccagagcugccacc

SEQ ID NO: 1887881 - RNA, 15 nt, Human
ccagagcugccaccu

SEQ ID NO: 1887882 - RNA, 16 nt, Human
ccagagcugccaccug

SEQ ID NO: 1887883 - RNA, 19 nt, Human
ccagagcugccaccugccu

SEQ ID NO: 1887884 - RNA, 11 nt, Human
ccagagcugcc

SEQ ID NO: 1887885 - RNA, 20 nt, Human
ccagagcuacccgcagaguu

SEQ ID NO: 1887886 - RNA, 21 nt, Human
ccagagcuacccgcagaguuc

SEQ ID NO: 1887887 - RNA, 12 nt, Human
ccagagcugcca

SEQ ID NO: 1887888 - RNA, 13 nt, Human
ccagagcugccac

SEQ ID NO: 1887889 - RNA, 20 nt, Human
ccagagauccaaaagaagcc

SEQ ID NO: 1887890 - RNA, 17 nt, Human
ccacuguacuugcucuu

SEQ ID NO: 1887891 - RNA, 18 nt, Human
ccacuguacuugcucuug

SEQ ID NO: 1887892 - RNA, 19 nt, Human
ccacuguacuugcucuuga

SEQ ID NO: 1887893 - RNA, 19 nt, Human
ccagacaccuugacagggc

SEQ ID NO: 1887894 - RNA, 17 nt, Human
ccagacaccuugacagg

SEQ ID NO: 1887895 - RNA, 20 nt, Human
ccacuguacuugcucuugau

SEQ ID NO: 1887896 - RNA, 14 nt, Human
ccagacacccagga

SEQ ID NO: 1887897 - RNA, 15 nt, Human
ccagacacccaggac

SEQ ID NO: 1887898 - RNA, 16 nt, Human
ccagacacccaggacu

SEQ ID NO: 1887899 - RNA, 14 nt, Human
ccagagaggguggu

SEQ ID NO: 1887900 - RNA, 18 nt, Human
ccagacccccuggagacu

SEQ ID NO: 1887901 - RNA, 23 nt, Human
ccagagaggguggugaccucugc

SEQ ID NO: 1887902 - RNA, 21 nt, Human
ccagagaggguggugaccucu

SEQ ID NO: 1887903 - RNA, 20 nt, Human
ccagacaccuugacagggca

SEQ ID NO: 1887904 - RNA, 16 nt, Human
ccagacccccuggaga

SEQ ID NO: 1887905 - RNA, 12 nt, Human
ccagacccccug

SEQ ID NO: 1887906 - RNA, 23 nt, Human
ccagagggagugacagaggcagc

SEQ ID NO: 1887907 - RNA, 22 nt, Human
ccagagggagugacagaggcag

SEQ ID NO: 1887908 - RNA, 13 nt, Human
ccagagggccugc

SEQ ID NO: 1887909 - RNA, 15 nt, Human
ccagagggccugcaa

SEQ ID NO: 1887910 - RNA, 16 nt, Human
ccagagggccugcaag

SEQ ID NO: 1887911 - RNA, 14 nt, Human
ccagaugcagggca

SEQ ID NO: 1887912 - RNA, 15 nt, Human
ccagaugcagggcag

SEQ ID NO: 1887913 - RNA, 18 nt, Human
ccagaugcagggcaguca

SEQ ID NO: 1887914 - RNA, 18 nt, Human
ccagauucuuuccugagg

SEQ ID NO: 1887915 - RNA, 17 nt, Human
ccagauguuuccagacu

SEQ ID NO: 1887916 - RNA, 23 nt, Human
ccagauguuuccagacuuccuug

SEQ ID NO: 1887917 - RNA, 19 nt, Human
ccagauucuuuccugaggc

SEQ ID NO: 1887918 - RNA, 20 nt, Human
ccagauucuuuccugaggcu

SEQ ID NO: 1887919 - RNA, 21 nt, Human
ccagauucuuuccugaggcug

SEQ ID NO: 1887920 - RNA, 22 nt, Human
ccagauucuuuccugaggcugg

SEQ ID NO: 1887921 - RNA, 20 nt, Human
ccagauugcaacaggcuggg

SEQ ID NO: 1887922 - RNA, 19 nt, Human
ccagauugcaacaggcugg

SEQ ID NO: 1887923 - RNA, 23 nt, Human
ccagauucuuuccugaggcuggg

SEQ ID NO: 1887924 - RNA, 21 nt, Human
ccagauugcaacaggcugggc

SEQ ID NO: 1887925 - RNA, 13 nt, Human
ccagauuuaugca

SEQ ID NO: 1887926 - RNA, 22 nt, Human
ccagauuuaugcauauuauuuu

SEQ ID NO: 1887927 - RNA, 12 nt, Human
ccagauuucacu

SEQ ID NO: 1887928 - RNA, 14 nt, Human
ccacaccugccucu

SEQ ID NO: 1887929 - RNA, 14 nt, Human
ccacacccagccca

SEQ ID NO: 1887930 - RNA, 13 nt, Human
ccacacccagccc

SEQ ID NO: 1887931 - RNA, 12 nt, Human
ccacacccagcc

SEQ ID NO: 1887932 - RNA, 20 nt, Human
ccaaaccaccagaagcccag

SEQ ID NO: 1887933 - RNA, 23 nt, Human
ccacaucuugcucugcugacaga

SEQ ID NO: 1887934 - RNA, 22 nt, Human
ccacaucuugcucugcugacag

SEQ ID NO: 1887935 - RNA, 16 nt, Human
ccacaucuugcucugc

SEQ ID NO: 1887936 - RNA, 14 nt, Human
ccaccaacauacuc

SEQ ID NO: 1887937 - RNA, 18 nt, Human
ccaccaacauacucccau

SEQ ID NO: 1887938 - RNA, 14 nt, Human
ccacaucuugcucu

SEQ ID NO: 1887939 - RNA, 14 nt, Human
ccacaucaaagagg

SEQ ID NO: 1887940 - RNA, 20 nt, Human
ccacauacaacacaaagaga

SEQ ID NO: 1887941 - RNA, 13 nt, Human
ccacacuggacuc

SEQ ID NO: 1887942 - RNA, 14 nt, Human
ccacacuggacucc

SEQ ID NO: 1887943 - RNA, 19 nt, Human
ccacacugauccagcccug

SEQ ID NO: 1887944 - RNA, 22 nt, Human
ccacacugauccagcccugagu

SEQ ID NO: 1887945 - RNA, 13 nt, Human
ccacccaccucag

SEQ ID NO: 1887946 - RNA, 22 nt, Human
ccacccaagggccuggccugag

SEQ ID NO: 1887947 - RNA, 20 nt, Human
ccacccaagggccuggccug

SEQ ID NO: 1887948 - RNA, 21 nt, Human
ccacccaagggccuggccuga

SEQ ID NO: 1887949 - RNA, 15 nt, Human
ccacccaccucagcc

SEQ ID NO: 1887950 - RNA, 14 nt, Human
ccacccaccucagc

SEQ ID NO: 1887951 - RNA, 16 nt, Human
ccacccaccucagccu

SEQ ID NO: 1887952 - RNA, 17 nt, Human
ccacccaccucccugcc

SEQ ID NO: 1887953 - RNA, 19 nt, Human
ccacccaccucccugccuc

SEQ ID NO: 1887954 - RNA, 16 nt, Human
ccaccacacccagccc

SEQ ID NO: 1887955 - RNA, 14 nt, Human
ccaccacacccagc

SEQ ID NO: 1887956 - RNA, 20 nt, Human
ccaccaacauacucccaucu

SEQ ID NO: 1887957 - RNA, 22 nt, Human
ccaccaagccuggucagcccaa

SEQ ID NO: 1887958 - RNA, 16 nt, Human
ccacccaagggccugg

SEQ ID NO: 1887959 - RNA, 17 nt, Human
ccacccaagggccuggc

SEQ ID NO: 1887960 - RNA, 19 nt, Human
ccacccaagggccuggccu

SEQ ID NO: 1887961 - RNA, 17 nt, Human
ccacggacgcuggcucc

SEQ ID NO: 1887962 - RNA, 17 nt, Human
ccaccuggccucugcac

SEQ ID NO: 1887963 - RNA, 14 nt, Human
ccaccuggccucug

SEQ ID NO: 1887964 - RNA, 22 nt, Human
ccaccugcggugcuaucucccc

SEQ ID NO: 1887965 - RNA, 15 nt, Human
ccaccuggccucugc

SEQ ID NO: 1887966 - RNA, 16 nt, Human
ccaccuggccucugca

SEQ ID NO: 1887967 - RNA, 15 nt, Human
ccacggccaggccag

SEQ ID NO: 1887968 - RNA, 14 nt, Human
ccacggccaggcca

SEQ ID NO: 1887969 - RNA, 13 nt, Human
ccacggccaggcc

SEQ ID NO: 1887970 - RNA, 12 nt, Human
ccacggccaggc

SEQ ID NO: 1887971 - RNA, 17 nt, Human
ccaccugccuguugggc

SEQ ID NO: 1887972 - RNA, 20 nt, Human
ccaccugccuguugggccag

SEQ ID NO: 1887973 - RNA, 12 nt, Human
ccaccugccagg

SEQ ID NO: 1887974 - RNA, 16 nt, Human
ccaccugccagggaca

SEQ ID NO: 1887975 - RNA, 17 nt, Human
ccaccucccacaaagga

SEQ ID NO: 1887976 - RNA, 14 nt, Human
ccacccaggagccc

SEQ ID NO: 1887977 - RNA, 12 nt, Human
ccacccaggagc

SEQ ID NO: 1887978 - RNA, 15 nt, Human
ccaccucagccuccc

SEQ ID NO: 1887979 - RNA, 14 nt, Human
ccaccucagccucc

SEQ ID NO: 1887980 - RNA, 13 nt, Human
ccaccucagccuc

SEQ ID NO: 1887981 - RNA, 12 nt, Human
ccaccucagccu

SEQ ID NO: 1887982 - RNA, 18 nt, Human
ccacccugaaagcccuga

SEQ ID NO: 1887983 - RNA, 16 nt, Human
ccacccugaaagcccu

SEQ ID NO: 1887984 - RNA, 17 nt, Human
ccacccugaaagcccug

SEQ ID NO: 1887985 - RNA, 19 nt, Human
ccaccccucaacaccucug

SEQ ID NO: 1887986 - RNA, 15 nt, Human
ccacccuccacucuc

SEQ ID NO: 1887987 - RNA, 18 nt, Human
ccacuggacugaccuggu

SEQ ID NO: 1887988 - RNA, 16 nt, Human
ccacugcgaccacaag

SEQ ID NO: 1887989 - RNA, 23 nt, Human
ccacugcacuccagccuggguga

SEQ ID NO: 1887990 - RNA, 15 nt, Human
ccacucccugcaacc

SEQ ID NO: 1887991 - RNA, 19 nt, Human
ccacugcacuccagccugg

SEQ ID NO: 1887992 - RNA, 20 nt, Human
ccacugcacuccagccuggg

SEQ ID NO: 1887993 - RNA, 22 nt, Human
ccacuacggaauaguuggcuag

SEQ ID NO: 1887994 - RNA, 18 nt, Human
ccacuacauucuguuaau

SEQ ID NO: 1887995 - RNA, 23 nt, Human
ccacuacggaauaguuggcuagg

SEQ ID NO: 1887996 - RNA, 21 nt, Human
ccacuaagaauucaaacuggg

SEQ ID NO: 1887997 - RNA, 13 nt, Human
ccacuaagcagag

SEQ ID NO: 1887998 - RNA, 14 nt, Human
ccacuaagcagagg

SEQ ID NO: 1887999 - RNA, 16 nt, Human
ccacuaagcagaggag

SEQ ID NO: 1888000 - RNA, 19 nt, Human
ccacucaaaggccagaccu

SEQ ID NO: 1888001 - RNA, 12 nt, Human
ccacucccugca

SEQ ID NO: 1888002 - RNA, 13 nt, Human
ccacucccugcaa

SEQ ID NO: 1888003 - RNA, 13 nt, Human
ccacguuucuaaa

SEQ ID NO: 1888004 - RNA, 18 nt, Human
ccacuaagcagaggaggg

SEQ ID NO: 1888005 - RNA, 13 nt, Human
ccuggacacaggc

SEQ ID NO: 1888006 - RNA, 16 nt, Human
ccuggacacaggccug

SEQ ID NO: 1888007 - RNA, 20 nt, Human
ccuggacacaggccugcucu

SEQ ID NO: 1888008 - RNA, 18 nt, Human
ccuggaauauauaaccag

SEQ ID NO: 1888009 - RNA, 23 nt, Human
ccuggcacccggccccugcuggu

SEQ ID NO: 1888010 - RNA, 22 nt, Human
ccuggcacuauaauguaagcuc

SEQ ID NO: 1888011 - RNA, 22 nt, Human
ccuggcacccggccccugcugg

SEQ ID NO: 1888012 - RNA, 12 nt, Human
ccuggcagcccc

SEQ ID NO: 1888013 - RNA, 13 nt, Human
ccuggcagccccu

SEQ ID NO: 1888014 - RNA, 14 nt, Human
ccuggcagcucagc

SEQ ID NO: 1888015 - RNA, 12 nt, Human
ccuggcagcucu

SEQ ID NO: 1888016 - RNA, 13 nt, Human
ccuggcagcucug

SEQ ID NO: 1888017 - RNA, 14 nt, Human
ccuggcagcucugg

SEQ ID NO: 1888018 - RNA, 15 nt, Human
ccuggcagcucugga

SEQ ID NO: 1888019 - RNA, 17 nt, Human
ccuggcagcucuggaca

SEQ ID NO: 1888020 - RNA, 19 nt, Human
ccuggcagcucuggacagc

SEQ ID NO: 1888021 - RNA, 20 nt, Human
ccuggcagcucuggacagcc

SEQ ID NO: 1888022 - RNA, 21 nt, Human
ccuggcagcucuggacagccc

SEQ ID NO: 1888023 - RNA, 23 nt, Human
ccuggcagcucuggacagcccca

SEQ ID NO: 1888024 - RNA, 15 nt, Human
ccuggccagaugcac

SEQ ID NO: 1888025 - RNA, 20 nt, Human
ccuggcuccaaacccucgag

SEQ ID NO: 1888026 - RNA, 12 nt, Human
ccuggccagaca

SEQ ID NO: 1888027 - RNA, 13 nt, Human
ccuggccagacac

SEQ ID NO: 1888028 - RNA, 14 nt, Human
ccuggccagacaca

SEQ ID NO: 1888029 - RNA, 15 nt, Human
ccuggccagacacag

SEQ ID NO: 1888030 - RNA, 16 nt, Human
ccuggccagacacagg

SEQ ID NO: 1888031 - RNA, 18 nt, Human
ccuggccagacacaggcc

SEQ ID NO: 1888032 - RNA, 19 nt, Human
ccuggccagacacaggccc

SEQ ID NO: 1888033 - RNA, 23 nt, Human
ccuggccagacacaggcccuccc

SEQ ID NO: 1888034 - RNA, 18 nt, Human
ccuggcugcagccugcgc

SEQ ID NO: 1888035 - RNA, 22 nt, Human
ccuggcuccaaacccucgaggc

SEQ ID NO: 1888036 - RNA, 15 nt, Human
ccuggcuccaggcca

SEQ ID NO: 1888037 - RNA, 17 nt, Human
ccuggcuccaggccagg

SEQ ID NO: 1888038 - RNA, 16 nt, Human
ccuggcuccaggccag

SEQ ID NO: 1888039 - RNA, 17 nt, Human
ccugguccacagggcac

SEQ ID NO: 1888040 - RNA, 14 nt, Human
ccuggucagcccaa

SEQ ID NO: 1888041 - RNA, 12 nt, Human
ccuggucagccc

SEQ ID NO: 1888042 - RNA, 21 nt, Human
ccuggugagagggccgggcag

SEQ ID NO: 1888043 - RNA, 19 nt, Human
ccugguaggagugugugau

SEQ ID NO: 1888044 - RNA, 15 nt, Human
ccugguacucaagcc

SEQ ID NO: 1888045 - RNA, 16 nt, Human
ccugguacucaagccc

SEQ ID NO: 1888046 - RNA, 19 nt, Human
ccugguacucaagcccgcg

SEQ ID NO: 1888047 - RNA, 20 nt, Human
ccuggcugggacguggcuca

SEQ ID NO: 1888048 - RNA, 21 nt, Human
ccuggcugggacguggcucag

SEQ ID NO: 1888049 - RNA, 22 nt, Human
ccuggcugggacguggcucagc

SEQ ID NO: 1888050 - RNA, 24 nt, Human
ccuggcugggacguggcucagcca

SEQ ID NO: 1888051 - RNA, 22 nt, Human
ccugcgcccaguccuuccaccu

SEQ ID NO: 1888052 - RNA, 16 nt, Human
ccugcggugcuaucuc

SEQ ID NO: 1888053 - RNA, 17 nt, Human
ccugcggugcuaucucc

SEQ ID NO: 1888054 - RNA, 23 nt, Human
ccugcgggugaacaaagcagcca

SEQ ID NO: 1888055 - RNA, 24 nt, Human
ccugcgggugaacaaagcagccac

SEQ ID NO: 1888056 - RNA, 23 nt, Human
ccugcgguagaugggagggaggc

SEQ ID NO: 1888057 - RNA, 19 nt, Human
ccugcgagggcagcgggag

SEQ ID NO: 1888058 - RNA, 20 nt, Human
ccugcgccaccgcccagaga

SEQ ID NO: 1888059 - RNA, 13 nt, Human
ccugcgagggcag

SEQ ID NO: 1888060 - RNA, 18 nt, Human
ccugcgcccaguccuucc

SEQ ID NO: 1888061 - RNA, 20 nt, Human
ccugcgcccaguccuuccac

SEQ ID NO: 1888062 - RNA, 22 nt, Human
ccugccccucaacucuccucca

SEQ ID NO: 1888063 - RNA, 22 nt, Human
ccugcccccaggacugggccac

SEQ ID NO: 1888064 - RNA, 20 nt, Human
ccugcccccaggacugggcc

SEQ ID NO: 1888065 - RNA, 19 nt, Human
ccugcccccaggacugggc

SEQ ID NO: 1888066 - RNA, 18 nt, Human
ccugcccccaggacuggg

SEQ ID NO: 1888067 - RNA, 17 nt, Human
ccugcccccaggacugg

SEQ ID NO: 1888068 - RNA, 16 nt, Human
ccugcccccaggacug

SEQ ID NO: 1888069 - RNA, 11 nt, Human
ccugccucagc

SEQ ID NO: 1888070 - RNA, 23 nt, Human
ccugccuguugggccaggagccu

SEQ ID NO: 1888071 - RNA, 18 nt, Human
ccugccugguccucacac

SEQ ID NO: 1888072 - RNA, 14 nt, Human
ccugcuucaaauau

SEQ ID NO: 1888073 - RNA, 13 nt, Human
ccuggaacuuggg

SEQ ID NO: 1888074 - RNA, 16 nt, Human
ccuggaacuuggggag

SEQ ID NO: 1888075 - RNA, 17 nt, Human
ccuggaacuuggggagu

SEQ ID NO: 1888076 - RNA, 22 nt, Human
ccugcucuccgaccagacaccu

SEQ ID NO: 1888077 - RNA, 21 nt, Human
ccugcucuccgaccagacacc

SEQ ID NO: 1888078 - RNA, 11 nt, Human
ccugcuccaga

SEQ ID NO: 1888079 - RNA, 12 nt, Human
ccugcuccagac

SEQ ID NO: 1888080 - RNA, 13 nt, Human
ccugcuccagacc

SEQ ID NO: 1888081 - RNA, 14 nt, Human
ccugcuccagaccu

SEQ ID NO: 1888082 - RNA, 15 nt, Human
ccugcuccagaccug

SEQ ID NO: 1888083 - RNA, 22 nt, Human
ccugcggugcuaucucccccag

SEQ ID NO: 1888084 - RNA, 23 nt, Human
ccugacaacacucauugaccuga

SEQ ID NO: 1888085 - RNA, 13 nt, Human
ccugagcaacucu

SEQ ID NO: 1888086 - RNA, 14 nt, Human
ccugagcaacucuu

SEQ ID NO: 1888087 - RNA, 15 nt, Human
ccugagcaacucuug

SEQ ID NO: 1888088 - RNA, 18 nt, Human
ccugagcaacucuugauu

SEQ ID NO: 1888089 - RNA, 23 nt, Human
ccugagcaacucuugauuaucca

SEQ ID NO: 1888090 - RNA, 16 nt, Human
ccugagcuuucugcua

SEQ ID NO: 1888091 - RNA, 19 nt, Human
ccugaggaagagggacugu

SEQ ID NO: 1888092 - RNA, 21 nt, Human
ccugaggcccagagggccugc

SEQ ID NO: 1888093 - RNA, 12 nt, Human
ccugagccagau

SEQ ID NO: 1888094 - RNA, 14 nt, Human
ccugagcuuucugc

SEQ ID NO: 1888095 - RNA, 11 nt, Human
ccugagcccca

SEQ ID NO: 1888096 - RNA, 15 nt, Human
ccugaggcagguccc

SEQ ID NO: 1888097 - RNA, 22 nt, Human
ccugcaaccugauugugucucu

SEQ ID NO: 1888098 - RNA, 21 nt, Human
ccugcaaccugauugugucuc

SEQ ID NO: 1888099 - RNA, 17 nt, Human
ccugauugugucucuug

SEQ ID NO: 1888100 - RNA, 19 nt, Human
ccugauugugucucuuggu

SEQ ID NO: 1888101 - RNA, 11 nt, Human
ccugaggcccu

SEQ ID NO: 1888102 - RNA, 12 nt, Human
ccugaggcccuu

SEQ ID NO: 1888103 - RNA, 19 nt, Human
ccugaugcuucuucagaga

SEQ ID NO: 1888104 - RNA, 20 nt, Human
ccugaugcuucuucagagac

SEQ ID NO: 1888105 - RNA, 21 nt, Human
ccugaugcuucuucagagacu

SEQ ID NO: 1888106 - RNA, 22 nt, Human
ccugaugcuucuucagagacuc

SEQ ID NO: 1888107 - RNA, 14 nt, Human
ccugaggcccuucu

SEQ ID NO: 1888108 - RNA, 15 nt, Human
ccugauugugucucu

SEQ ID NO: 1888109 - RNA, 16 nt, Human
ccugcaggccaggcca

SEQ ID NO: 1888110 - RNA, 19 nt, Human
ccugcacucuuuaagggag

SEQ ID NO: 1888111 - RNA, 12 nt, Human
ccugcaggccag

SEQ ID NO: 1888112 - RNA, 18 nt, Human
ccugcaggccaggccagc

SEQ ID NO: 1888113 - RNA, 14 nt, Human
ccugcaagaacaag

SEQ ID NO: 1888114 - RNA, 13 nt, Human
ccugccaggaagc

SEQ ID NO: 1888115 - RNA, 14 nt, Human
ccugccaggaagcc

SEQ ID NO: 1888116 - RNA, 15 nt, Human
ccugccaggaagcca

SEQ ID NO: 1888117 - RNA, 17 nt, Human
ccugccaggaagccagc

SEQ ID NO: 1888118 - RNA, 12 nt, Human
ccugccagcugc

SEQ ID NO: 1888119 - RNA, 13 nt, Human
ccugccagcugca

SEQ ID NO: 1888120 - RNA, 14 nt, Human
ccugccagcugcac

SEQ ID NO: 1888121 - RNA, 16 nt, Human
ccugccagcugcacug

SEQ ID NO: 1888122 - RNA, 17 nt, Human
ccugccagcugcacuga

SEQ ID NO: 1888123 - RNA, 18 nt, Human
ccugccagcugcacugau

SEQ ID NO: 1888124 - RNA, 23 nt, Human
ccugccagcugcacugaugcugc

SEQ ID NO: 1888125 - RNA, 14 nt, Human
ccugccacucaggc

SEQ ID NO: 1888126 - RNA, 14 nt, Human
ccugccagaccccc

SEQ ID NO: 1888127 - RNA, 23 nt, Human
ccugccacucaggcccaaagccu

SEQ ID NO: 1888128 - RNA, 22 nt, Human
ccugccacucaggcccaaagcc

SEQ ID NO: 1888129 - RNA, 19 nt, Human
ccugcaucugaccagcagc

SEQ ID NO: 1888130 - RNA, 18 nt, Human
ccugcaucugaccagcag

SEQ ID NO: 1888131 - RNA, 16 nt, Human
ccugccagggacagag

SEQ ID NO: 1888132 - RNA, 15 nt, Human
ccugcccccaggacu

SEQ ID NO: 1888133 - RNA, 14 nt, Human
ccugcccccaggac

SEQ ID NO: 1888134 - RNA, 12 nt, Human
ccugcccccagg

SEQ ID NO: 1888135 - RNA, 12 nt, Human
ccugccagggac

SEQ ID NO: 1888136 - RNA, 13 nt, Human
ccugccagggaca

SEQ ID NO: 1888137 - RNA, 14 nt, Human
ccugccagggacag

SEQ ID NO: 1888138 - RNA, 15 nt, Human
ccugccagggacaga

SEQ ID NO: 1888139 - RNA, 23 nt, Human
ccugccaggaagccagcaggcuc

SEQ ID NO: 1888140 - RNA, 16 nt, Human
ccugccaggcauggug

SEQ ID NO: 1888141 - RNA, 11 nt, Human
ccugccaggga

SEQ ID NO: 1888142 - RNA, 18 nt, Human
ccugccaggaagccagca

SEQ ID NO: 1888143 - RNA, 19 nt, Human
ccugccaggaagccagcag

SEQ ID NO: 1888144 - RNA, 21 nt, Human
ccugccaggaagccagcaggc

SEQ ID NO: 1888145 - RNA, 22 nt, Human
ccugccaggaagccagcaggcu

SEQ ID NO: 1888146 - RNA, 18 nt, Human
ccuugaagaaccucucac

SEQ ID NO: 1888147 - RNA, 17 nt, Human
ccuugaagaaccucuca

SEQ ID NO: 1888148 - RNA, 13 nt, Human
ccuugaacuagga

SEQ ID NO: 1888149 - RNA, 21 nt, Human
ccuugaaaauaagaauagaaa

SEQ ID NO: 1888150 - RNA, 20 nt, Human
ccuugaaaacuuuaugcuaa

SEQ ID NO: 1888151 - RNA, 13 nt, Human
ccuugacucuuuc

SEQ ID NO: 1888152 - RNA, 22 nt, Human
ccuugaccauucuccaccugcc

SEQ ID NO: 1888153 - RNA, 23 nt, Human
ccuugaccauucuccaccugcca

SEQ ID NO: 1888154 - RNA, 20 nt, Human
ccuugaguugauucagcucu

SEQ ID NO: 1888155 - RNA, 14 nt, Human
ccuucgggcugugc

SEQ ID NO: 1888156 - RNA, 15 nt, Human
ccuucggcgccuuaa

SEQ ID NO: 1888157 - RNA, 14 nt, Human
ccuucuaggaagcu

SEQ ID NO: 1888158 - RNA, 16 nt, Human
ccuucgacagcauuuu

SEQ ID NO: 1888159 - RNA, 15 nt, Human
ccuucuccuucaccu

SEQ ID NO: 1888160 - RNA, 19 nt, Human
ccuucuccuucaccuuugu

SEQ ID NO: 1888161 - RNA, 20 nt, Human
ccuucuaggguuauugcauu

SEQ ID NO: 1888162 - RNA, 14 nt, Human
ccuucucucaucuc

SEQ ID NO: 1888163 - RNA, 16 nt, Human
ccuuugacgccauccc

SEQ ID NO: 1888164 - RNA, 20 nt, Human
ccuuucuccccugcccccag

SEQ ID NO: 1888165 - RNA, 19 nt, Human
ccuuucuccccugccccca

SEQ ID NO: 1888166 - RNA, 17 nt, Human
ccuuugacgccauccca

SEQ ID NO: 1888167 - RNA, 18 nt, Human
ccuuugacgccaucccag

SEQ ID NO: 1888168 - RNA, 18 nt, Human
ccuuucuccccugccccc

SEQ ID NO: 1888169 - RNA, 15 nt, Human
ccuuucuccccugcc

SEQ ID NO: 1888170 - RNA, 21 nt, Human
ccuuguuccuagaguagagug

SEQ ID NO: 1888171 - RNA, 19 nt, Human
ccuuguuuacacauacccu

SEQ ID NO: 1888172 - RNA, 21 nt, Human
ccuuggcuuuuacugaagccu

SEQ ID NO: 1888173 - RNA, 23 nt, Human
ccuugauuguucgggugugcaau

SEQ ID NO: 1888174 - RNA, 22 nt, Human
ccuuggugucgggcaugacacg

SEQ ID NO: 1888175 - RNA, 21 nt, Human
ccuugguuaggcauuguggga

SEQ ID NO: 1888176 - RNA, 22 nt, Human
ccuugguuaggcauugugggaa

SEQ ID NO: 1888177 - RNA, 17 nt, Human
ccuugggcccucugguu

SEQ ID NO: 1888178 - RNA, 15 nt, Human
ccuuccucucuccag

SEQ ID NO: 1888179 - RNA, 17 nt, Human
ccuuccucucuccagau

SEQ ID NO: 1888180 - RNA, 22 nt, Human
ccuucauuuggcauuccccacu

SEQ ID NO: 1888181 - RNA, 18 nt, Human
ccuucagcccucaccccu

SEQ ID NO: 1888182 - RNA, 17 nt, Human
ccuuccaagagccugag

SEQ ID NO: 1888183 - RNA, 16 nt, Human
ccuuccaagagccuga

SEQ ID NO: 1888184 - RNA, 15 nt, Human
ccuuccaagagccug

SEQ ID NO: 1888185 - RNA, 20 nt, Human
ccuucggccuccauccugag

SEQ ID NO: 1888186 - RNA, 19 nt, Human
ccuucggccuccauccuga

SEQ ID NO: 1888187 - RNA, 14 nt, Human
ccuucggccuccau

SEQ ID NO: 1888188 - RNA, 15 nt, Human
ccuucgacagcauuu

SEQ ID NO: 1888189 - RNA, 17 nt, Human
ccuuccuuguagccuuu

SEQ ID NO: 1888190 - RNA, 18 nt, Human
ccuuccuuguagccuuuu

SEQ ID NO: 1888191 - RNA, 10 nt, Human
ccuucagaca

SEQ ID NO: 1888192 - RNA, 11 nt, Human
ccuucagacac

SEQ ID NO: 1888193 - RNA, 21 nt, Human
ccuucaccuuuguccccaccg

SEQ ID NO: 1888194 - RNA, 14 nt, Human
ccuuagacaguccc

SEQ ID NO: 1888195 - RNA, 17 nt, Human
ccuucacagaugggugc

SEQ ID NO: 1888196 - RNA, 19 nt, Human
ccuucaccuuuguccccac

SEQ ID NO: 1888197 - RNA, 20 nt, Human
ccuucaccuuuguccccacc

SEQ ID NO: 1888198 - RNA, 11 nt, Human
ccuucagugcc

SEQ ID NO: 1888199 - RNA, 15 nt, Human
ccuucagcccucacc

SEQ ID NO: 1888200 - RNA, 14 nt, Human
ccuucagcccucac

SEQ ID NO: 1888201 - RNA, 19 nt, Human
ccuucauuuggcauucccc

SEQ ID NO: 1888202 - RNA, 14 nt, Human
ccuucagugccaaa

SEQ ID NO: 1888203 - RNA, 12 nt, Human
ccuucagccuga

SEQ ID NO: 1888204 - RNA, 13 nt, Human
ccuucagcccuca

SEQ ID NO: 1888205 - RNA, 17 nt, Human
ccuucagacacccucaa

SEQ ID NO: 1888206 - RNA, 20 nt, Human
ccuucagacacccucaaccu

SEQ ID NO: 1888207 - RNA, 23 nt, Human
ccuguugggccaggagccuccug

SEQ ID NO: 1888208 - RNA, 12 nt, Human
ccuguuuaagag

SEQ ID NO: 1888209 - RNA, 15 nt, Human
ccuguuuaagagaca

SEQ ID NO: 1888210 - RNA, 14 nt, Human
ccuguuuguuucug

SEQ ID NO: 1888211 - RNA, 18 nt, Human
ccuguuuguuucugaaag

SEQ ID NO: 1888212 - RNA, 16 nt, Human
ccuguuucugcagcca

SEQ ID NO: 1888213 - RNA, 21 nt, Human
ccugugucuugcaauggcagc

SEQ ID NO: 1888214 - RNA, 19 nt, Human
ccugugucuugcaauggca

SEQ ID NO: 1888215 - RNA, 17 nt, Human
ccugugucuugcaaugg

SEQ ID NO: 1888216 - RNA, 22 nt, Human
ccugugucuuuaaaugcugcuu

SEQ ID NO: 1888217 - RNA, 14 nt, Human
ccugugugauugac

SEQ ID NO: 1888218 - RNA, 22 nt, Human
ccugugucuugcaauggcagcc

SEQ ID NO: 1888219 - RNA, 18 nt, Human
ccugugugauugacagcu

SEQ ID NO: 1888220 - RNA, 19 nt, Human
ccugugugauugacagcuu

SEQ ID NO: 1888221 - RNA, 22 nt, Human
ccugugugauugacagcuuugc

SEQ ID NO: 1888222 - RNA, 21 nt, Human
ccugugugugcgccuacagga

SEQ ID NO: 1888223 - RNA, 20 nt, Human
ccugugugugcgccuacagg

SEQ ID NO: 1888224 - RNA, 21 nt, Human
ccuguguguccaaaacugccu

SEQ ID NO: 1888225 - RNA, 20 nt, Human
ccuguguguccaaaacugcc

SEQ ID NO: 1888226 - RNA, 17 nt, Human
ccuuaaagaguguggca

SEQ ID NO: 1888227 - RNA, 14 nt, Human
ccuguuuuuuuucu

SEQ ID NO: 1888228 - RNA, 17 nt, Human
ccuguuuuuuuucuuuu

SEQ ID NO: 1888229 - RNA, 17 nt, Human
ccuguuuuuaagcuguu

SEQ ID NO: 1888230 - RNA, 19 nt, Human
ccuguuuuuaagcuguuuc

SEQ ID NO: 1888231 - RNA, 18 nt, Human
ccuguuuuuaagcuguuu

SEQ ID NO: 1888232 - RNA, 14 nt, Human
ccuuacacaauggu

SEQ ID NO: 1888233 - RNA, 20 nt, Human
ccuuacacaaugguuuucuu

SEQ ID NO: 1888234 - RNA, 13 nt, Human
ccuuaccagcaga

SEQ ID NO: 1888235 - RNA, 15 nt, Human
ccuuacccucauguu

SEQ ID NO: 1888236 - RNA, 20 nt, Human
ccuuaccagcagagcaccuu

SEQ ID NO: 1888237 - RNA, 18 nt, Human
ccuuagaagucacacagu

SEQ ID NO: 1888238 - RNA, 14 nt, Human
ccuuagaaguggaa

SEQ ID NO: 1888239 - RNA, 17 nt, Human
ccuuagaagucacacag

SEQ ID NO: 1888240 - RNA, 19 nt, Human
ccuuacccucauguucuua

SEQ ID NO: 1888241 - RNA, 19 nt, Human
ccuuaccugccaggaagcc

SEQ ID NO: 1888242 - RNA, 12 nt, Human
ccuucagugccu

SEQ ID NO: 1888243 - RNA, 16 nt, Human
cgccagggagaccugg

SEQ ID NO: 1888244 - RNA, 21 nt, Human
cgccaggcugaccacagcaca

SEQ ID NO: 1888245 - RNA, 23 nt, Human
cgccaggcugaccacagcacagc

SEQ ID NO: 1888246 - RNA, 22 nt, Human
cgccaggggaaaaucagccugc

SEQ ID NO: 1888247 - RNA, 21 nt, Human
cgccaggauggaacacggcca

SEQ ID NO: 1888248 - RNA, 23 nt, Human
cgccaggauggaacacggccaca

SEQ ID NO: 1888249 - RNA, 16 nt, Human
cgccaggcugaccaca

SEQ ID NO: 1888250 - RNA, 17 nt, Human
cgccaggcugaccacag

SEQ ID NO: 1888251 - RNA, 20 nt, Human
cgccaggcugaccacagcac

SEQ ID NO: 1888252 - RNA, 19 nt, Human
cgccagauucuuuccugag

SEQ ID NO: 1888253 - RNA, 20 nt, Human
cgccagauucuuuccugagg

SEQ ID NO: 1888254 - RNA, 21 nt, Human
cgccagauucuuuccugaggc

SEQ ID NO: 1888255 - RNA, 14 nt, Human
cgcagccaggacac

SEQ ID NO: 1888256 - RNA, 13 nt, Human
cgcagccaggaca

SEQ ID NO: 1888257 - RNA, 12 nt, Human
cgcagccaggac

SEQ ID NO: 1888258 - RNA, 15 nt, Human
cgcagccaggacacc

SEQ ID NO: 1888259 - RNA, 14 nt, Human
cgcagcccugcaga

SEQ ID NO: 1888260 - RNA, 15 nt, Human
cgcagacaggaccag

SEQ ID NO: 1888261 - RNA, 16 nt, Human
cgcagacaggaccagg

SEQ ID NO: 1888262 - RNA, 16 nt, Human
cgagcccugguggcag

SEQ ID NO: 1888263 - RNA, 15 nt, Human
cgagcccugguggca

SEQ ID NO: 1888264 - RNA, 18 nt, Human
cgagcaugccuggauggg

SEQ ID NO: 1888265 - RNA, 18 nt, Human
cgagcccugguggcagug

SEQ ID NO: 1888266 - RNA, 20 nt, Human
cgauuucuguuuagauaaua

SEQ ID NO: 1888267 - RNA, 15 nt, Human
cgauucauauugaau

SEQ ID NO: 1888268 - RNA, 18 nt, Human
cgcaaaccacacuggacu

SEQ ID NO: 1888269 - RNA, 15 nt, Human
cgcaaaccacacugg

SEQ ID NO: 1888270 - RNA, 16 nt, Human
cgcaaaccacacugga

SEQ ID NO: 1888271 - RNA, 17 nt, Human
cgccaugcuccuggccc

SEQ ID NO: 1888272 - RNA, 13 nt, Human
cgaacuggcgccu

SEQ ID NO: 1888273 - RNA, 15 nt, Human
cgaagaagagccaca

SEQ ID NO: 1888274 - RNA, 16 nt, Human
cgaagaagagccacag

SEQ ID NO: 1888275 - RNA, 17 nt, Human
cgaagaagagccacagu

SEQ ID NO: 1888276 - RNA, 18 nt, Human
cgaagaagagccacagug

SEQ ID NO: 1888277 - RNA, 14 nt, Human
cgaauacaaaauug

SEQ ID NO: 1888278 - RNA, 14 nt, Human
cgaacuggcugcaa

SEQ ID NO: 1888279 - RNA, 12 nt, Human
cgaacuggcugc

SEQ ID NO: 1888280 - RNA, 19 nt, Human
cgaaagggacuuggaagcu

SEQ ID NO: 1888281 - RNA, 20 nt, Human
cgaaaggaugaaagugacca

SEQ ID NO: 1888282 - RNA, 22 nt, Human
cgaaagggacuuggaagcuccg

SEQ ID NO: 1888283 - RNA, 21 nt, Human
cgaaagaacaguccauugaaa

SEQ ID NO: 1888284 - RNA, 12 nt, Human
cgaaagaacagu

SEQ ID NO: 1888285 - RNA, 22 nt, Human
ccuuugacgccaucccagcccc

SEQ ID NO: 1888286 - RNA, 20 nt, Human
ccuuugacgccaucccagcc

SEQ ID NO: 1888287 - RNA, 21 nt, Human
ccuuugacgccaucccagccc

SEQ ID NO: 1888288 - RNA, 22 nt, Human
ccuuuuauguaguaauugacau

SEQ ID NO: 1888289 - RNA, 15 nt, Human
ccuuuuauugacaca

SEQ ID NO: 1888290 - RNA, 13 nt, Human
ccuuuuauuucuu

SEQ ID NO: 1888291 - RNA, 18 nt, Human
ccuuuuauuucuucacca

SEQ ID NO: 1888292 - RNA, 18 nt, Human
ccuuuuuuuccaucuuua

SEQ ID NO: 1888293 - RNA, 15 nt, Human
cgaaaacguggcugc

SEQ ID NO: 1888294 - RNA, 13 nt, Human
cgaaaaccaggcc

SEQ ID NO: 1888295 - RNA, 22 nt, Human
cgaaaaccaggccuuaucucca

SEQ ID NO: 1888296 - RNA, 18 nt, Human
cgaaaacguggcugcuuc

SEQ ID NO: 1888297 - RNA, 19 nt, Human
cgaaaacguggcugcuuca

SEQ ID NO: 1888298 - RNA, 20 nt, Human
cgaaaacguggcugcuucaa

SEQ ID NO: 1888299 - RNA, 17 nt, Human
cgaaacacagaaaccuu

SEQ ID NO: 1888300 - RNA, 18 nt, Human
cgaaaccugggauucagg

SEQ ID NO: 1888301 - RNA, 17 nt, Human
cgagaaacagccugugu

SEQ ID NO: 1888302 - RNA, 17 nt, Human
cgagaacuuucauuuuu

SEQ ID NO: 1888303 - RNA, 16 nt, Human
cgagaacuuucauuuu

SEQ ID NO: 1888304 - RNA, 20 nt, Human
cgagaaauaaaguuugcuua

SEQ ID NO: 1888305 - RNA, 14 nt, Human
cgaauagcugggac

SEQ ID NO: 1888306 - RNA, 13 nt, Human
cgaauagcuggga

SEQ ID NO: 1888307 - RNA, 17 nt, Human
cgagaucacgccacugc

SEQ ID NO: 1888308 - RNA, 18 nt, Human
cgagauagccaaggccaa

SEQ ID NO: 1888309 - RNA, 13 nt, Human
cgagaccagccug

SEQ ID NO: 1888310 - RNA, 14 nt, Human
cgagaccagccugg

SEQ ID NO: 1888311 - RNA, 15 nt, Human
cgagaccagccuggc

SEQ ID NO: 1888312 - RNA, 16 nt, Human
cgagaccagccuggcc

SEQ ID NO: 1888313 - RNA, 20 nt, Human
cgagauugcaccacugcacu

SEQ ID NO: 1888314 - RNA, 20 nt, Human
cgagaucacgccacugcacu

SEQ ID NO: 1888315 - RNA, 18 nt, Human
cgagaucacgccacugca

SEQ ID NO: 1888316 - RNA, 14 nt, Human
cgagcaugccugga

SEQ ID NO: 1888317 - RNA, 13 nt, Human
cgagcaugccugg

SEQ ID NO: 1888318 - RNA, 16 nt, Human
cgagcaugccuggaug

SEQ ID NO: 1888319 - RNA, 17 nt, Human
cgagcaugccuggaugg

SEQ ID NO: 1888320 - RNA, 20 nt, Human
cgagcaggcuucuucccccc

SEQ ID NO: 1888321 - RNA, 19 nt, Human
cccacaugugacacauaug

SEQ ID NO: 1888322 - RNA, 21 nt, Human
cccacaggagguggucuggga

SEQ ID NO: 1888323 - RNA, 16 nt, Human
cccacaggaggugguc

SEQ ID NO: 1888324 - RNA, 19 nt, Human
cccacagcgcuggccggga

SEQ ID NO: 1888325 - RNA, 13 nt, Human
cccacacacagau

SEQ ID NO: 1888326 - RNA, 15 nt, Human
cccacaaaggcaaag

SEQ ID NO: 1888327 - RNA, 13 nt, Human
cccacaaguggug

SEQ ID NO: 1888328 - RNA, 20 nt, Human
cccacaagaaaugaaagcag

SEQ ID NO: 1888329 - RNA, 14 nt, Human
cccacaaguggugg

SEQ ID NO: 1888330 - RNA, 16 nt, Human
cccacaagugguggua

SEQ ID NO: 1888331 - RNA, 20 nt, Human
cccacaaguggugguaaccc

SEQ ID NO: 1888332 - RNA, 22 nt, Human
cccacaaguggugguaacccug

SEQ ID NO: 1888333 - RNA, 23 nt, Human
cccacaaguggugguaacccugg

SEQ ID NO: 1888334 - RNA, 16 nt, Human
cccaaugcacuuuguu

SEQ ID NO: 1888335 - RNA, 20 nt, Human
cccaaugcacuuuguucugg

SEQ ID NO: 1888336 - RNA, 13 nt, Human
cccacaagaaaug

SEQ ID NO: 1888337 - RNA, 17 nt, Human
cccaccuggccucugca

SEQ ID NO: 1888338 - RNA, 19 nt, Human
cccaccuggccucugcacu

SEQ ID NO: 1888339 - RNA, 21 nt, Human
cccaccuggccucugcacucc

SEQ ID NO: 1888340 - RNA, 20 nt, Human
cccacgacugcccggcaggg

SEQ ID NO: 1888341 - RNA, 21 nt, Human
cccacgacugcccggcagggu

SEQ ID NO: 1888342 - RNA, 16 nt, Human
cccaccuggccucugc

SEQ ID NO: 1888343 - RNA, 12 nt, Human
cccacuucugcc

SEQ ID NO: 1888344 - RNA, 23 nt, Human
cccacuugagaauuacccuuuug

SEQ ID NO: 1888345 - RNA, 21 nt, Human
cccacgcuggagugcagugag

SEQ ID NO: 1888346 - RNA, 20 nt, Human
cccacgcuggagugcaguga

SEQ ID NO: 1888347 - RNA, 19 nt, Human
cccacgcuggagugcagug

SEQ ID NO: 1888348 - RNA, 18 nt, Human
cccaccaucaugucuggc

SEQ ID NO: 1888349 - RNA, 19 nt, Human
cccaccgcagacaggacca

SEQ ID NO: 1888350 - RNA, 20 nt, Human
cccaccgcagacaggaccag

SEQ ID NO: 1888351 - RNA, 17 nt, Human
cccaccacacccucccu

SEQ ID NO: 1888352 - RNA, 17 nt, Human
cccaccucagccucccg

SEQ ID NO: 1888353 - RNA, 12 nt, Human
cccaccucccug

SEQ ID NO: 1888354 - RNA, 22 nt, Human
cccaccucucucacuccuugaa

SEQ ID NO: 1888355 - RNA, 15 nt, Human
cccaccucccugccu

SEQ ID NO: 1888356 - RNA, 16 nt, Human
cccaccucccugccuc

SEQ ID NO: 1888357 - RNA, 14 nt, Human
cccaccucccugcc

SEQ ID NO: 1888358 - RNA, 17 nt, Human
cccaccucccugccucc

SEQ ID NO: 1888359 - RNA, 23 nt, Human
cccgagucauucguucuguggag

SEQ ID NO: 1888360 - RNA, 13 nt, Human
cccgggcagggcu

SEQ ID NO: 1888361 - RNA, 12 nt, Human
cccgggcagggc

SEQ ID NO: 1888362 - RNA, 22 nt, Human
cccgggcagggcucccacagag

SEQ ID NO: 1888363 - RNA, 21 nt, Human
cccgggcagggcucccacaga

SEQ ID NO: 1888364 - RNA, 12 nt, Human
cccgggcccaga

SEQ ID NO: 1888365 - RNA, 14 nt, Human
cccgggcccagagg

SEQ ID NO: 1888366 - RNA, 13 nt, Human
cccgggcccagag

SEQ ID NO: 1888367 - RNA, 16 nt, Human
cccgggcccagaggag

SEQ ID NO: 1888368 - RNA, 12 nt, Human
cccgggcucugc

SEQ ID NO: 1888369 - RNA, 14 nt, Human
cccgggcucugccu

SEQ ID NO: 1888370 - RNA, 15 nt, Human
cccgggcucugccuc

SEQ ID NO: 1888371 - RNA, 22 nt, Human
cccgaguagcugggacuacagg

SEQ ID NO: 1888372 - RNA, 21 nt, Human
cccgagucauucguucugugg

SEQ ID NO: 1888373 - RNA, 16 nt, Human
cccgcccccugcccuc

SEQ ID NO: 1888374 - RNA, 17 nt, Human
cccgcccccugcccucc

SEQ ID NO: 1888375 - RNA, 18 nt, Human
cccgccgccugguacuca

SEQ ID NO: 1888376 - RNA, 19 nt, Human
cccgcugucagccauuccu

SEQ ID NO: 1888377 - RNA, 20 nt, Human
cccgcugucagccauuccug

SEQ ID NO: 1888378 - RNA, 21 nt, Human
cccgaguagcugggacuacag

SEQ ID NO: 1888379 - RNA, 18 nt, Human
cccgaguagcugggacua

SEQ ID NO: 1888380 - RNA, 17 nt, Human
cccgaguagcugggacu

SEQ ID NO: 1888381 - RNA, 16 nt, Human
cccgaguagcugggac

SEQ ID NO: 1888382 - RNA, 15 nt, Human
cccgaguagcuggga

SEQ ID NO: 1888383 - RNA, 14 nt, Human
cccgaguagcuggg

SEQ ID NO: 1888384 - RNA, 13 nt, Human
cccgaguagcugg

SEQ ID NO: 1888385 - RNA, 21 nt, Human
cccgaggccuucucugaagga

SEQ ID NO: 1888386 - RNA, 15 nt, Human
cccagagggccugca

SEQ ID NO: 1888387 - RNA, 14 nt, Human
cccagagggccugc

SEQ ID NO: 1888388 - RNA, 18 nt, Human
cccggggcagggcagccg

SEQ ID NO: 1888389 - RNA, 21 nt, Human
cccggggugcccacaggccgc

SEQ ID NO: 1888390 - RNA, 16 nt, Human
cccgggcucugccucc

SEQ ID NO: 1888391 - RNA, 22 nt, Human
cccggggaaaggcaagguccgg

SEQ ID NO: 1888392 - RNA, 17 nt, Human
cccgucgacguagaacc

SEQ ID NO: 1888393 - RNA, 15 nt, Human
cccgugggguuccuc

SEQ ID NO: 1888394 - RNA, 23 nt, Human
cccuacuauucaguggcgagaaa

SEQ ID NO: 1888395 - RNA, 20 nt, Human
cccuacaguugaaaaacagc

SEQ ID NO: 1888396 - RNA, 16 nt, Human
cccugcacaagccagg

SEQ ID NO: 1888397 - RNA, 12 nt, Human
cccugcacuugc

SEQ ID NO: 1888398 - RNA, 19 nt, Human
cccugcacuugcagacucu

SEQ ID NO: 1888399 - RNA, 22 nt, Human
cccugcacuugcagacucuaca

SEQ ID NO: 1888400 - RNA, 16 nt, Human
cccucuggggcuguuc

SEQ ID NO: 1888401 - RNA, 18 nt, Human
cccucugguuugccggug

SEQ ID NO: 1888402 - RNA, 15 nt, Human
cccugaaagcccuga

SEQ ID NO: 1888403 - RNA, 13 nt, Human
cccugaggcccag

SEQ ID NO: 1888404 - RNA, 16 nt, Human
cccugaaagcccugag

SEQ ID NO: 1888405 - RNA, 14 nt, Human
cccugaggcccaga

SEQ ID NO: 1888406 - RNA, 15 nt, Human
cccugaggcccagag

SEQ ID NO: 1888407 - RNA, 16 nt, Human
cccugaggcccagagg

SEQ ID NO: 1888408 - RNA, 17 nt, Human
cccugaggcccagaggg

SEQ ID NO: 1888409 - RNA, 18 nt, Human
cccugaggcccagagggc

SEQ ID NO: 1888410 - RNA, 19 nt, Human
cccugaggcccagagggcc

SEQ ID NO: 1888411 - RNA, 20 nt, Human
cccugaggcccagagggccu

SEQ ID NO: 1888412 - RNA, 23 nt, Human
cccugaggcccagagggccugca

SEQ ID NO: 1888413 - RNA, 18 nt, Human
cccucuggaguggccacu

SEQ ID NO: 1888414 - RNA, 21 nt, Human
cccucuggaguggccacuaag

SEQ ID NO: 1888415 - RNA, 22 nt, Human
cccucuggaguggccacuaagc

SEQ ID NO: 1888416 - RNA, 12 nt, Human
cccucuggggcu

SEQ ID NO: 1888417 - RNA, 20 nt, Human
cccucccccccaugcacugu

SEQ ID NO: 1888418 - RNA, 15 nt, Human
cccucccccccaugc

SEQ ID NO: 1888419 - RNA, 18 nt, Human
cccucccccccaugcacu

SEQ ID NO: 1888420 - RNA, 14 nt, Human
cccuccccauggag

SEQ ID NO: 1888421 - RNA, 23 nt, Human
cccuccacucuccucuuccaggc

SEQ ID NO: 1888422 - RNA, 13 nt, Human
cccuccaccugcu

SEQ ID NO: 1888423 - RNA, 15 nt, Human
cccuaguaaaaauac

SEQ ID NO: 1888424 - RNA, 22 nt, Human
cccugcuggguguggcgcagca

SEQ ID NO: 1888425 - RNA, 18 nt, Human
cccugcccaccuggccuc

SEQ ID NO: 1888426 - RNA, 16 nt, Human
cccugcuggguguggc

SEQ ID NO: 1888427 - RNA, 21 nt, Human
cccugcuggguguggcgcagc

SEQ ID NO: 1888428 - RNA, 13 nt, Human
cccugcccaccug

SEQ ID NO: 1888429 - RNA, 21 nt, Human
cccugccagacccccuggaga

SEQ ID NO: 1888430 - RNA, 13 nt, Human
cccugccagaccc

SEQ ID NO: 1888431 - RNA, 14 nt, Human
cccugcccaccugg

SEQ ID NO: 1888432 - RNA, 17 nt, Human
cccugcccaccuggccu

SEQ ID NO: 1888433 - RNA, 15 nt, Human
cccuggacugugugc

SEQ ID NO: 1888434 - RNA, 24 nt, Human
cccugggaggcgggcgcacugccu

SEQ ID NO: 1888435 - RNA, 15 nt, Human
cccugguggcagcuc

SEQ ID NO: 1888436 - RNA, 16 nt, Human
cccugguggcagcuca

SEQ ID NO: 1888437 - RNA, 17 nt, Human
cccugguggcagcucac

SEQ ID NO: 1888438 - RNA, 21 nt, Human
ccuaugcacauauggacucug

SEQ ID NO: 1888439 - RNA, 20 nt, Human
ccuaugcacauauggacucu

SEQ ID NO: 1888440 - RNA, 14 nt, Human
ccuaugcacauaug

SEQ ID NO: 1888441 - RNA, 19 nt, Human
ccucagucuggcccuuccu

SEQ ID NO: 1888442 - RNA, 11 nt, Human
ccucagugcca

SEQ ID NO: 1888443 - RNA, 20 nt, Human
ccucagucuggcccuuccuu

SEQ ID NO: 1888444 - RNA, 22 nt, Human
ccucauaguaugguggcugggu

SEQ ID NO: 1888445 - RNA, 21 nt, Human
ccucauaguaugguggcuggg

SEQ ID NO: 1888446 - RNA, 13 nt, Human
ccucaucaccaac

SEQ ID NO: 1888447 - RNA, 14 nt, Human
ccucaucaccaacg

SEQ ID NO: 1888448 - RNA, 20 nt, Human
ccucauaguaugguggcugg

SEQ ID NO: 1888449 - RNA, 13 nt, Human
ccucauacccacc

SEQ ID NO: 1888450 - RNA, 21 nt, Human
ccucaucuccccaucauuggu

SEQ ID NO: 1888451 - RNA, 17 nt, Human
ccucaucucucugccca

SEQ ID NO: 1888452 - RNA, 19 nt, Human
ccucaucucucugcccaac

SEQ ID NO: 1888453 - RNA, 13 nt, Human
ccucauccucaua

SEQ ID NO: 1888454 - RNA, 20 nt, Human
ccucauccucauacccaccc

SEQ ID NO: 1888455 - RNA, 20 nt, Human
ccucaucucucugcccaacc

SEQ ID NO: 1888456 - RNA, 16 nt, Human
ccucccaaagugcugg

SEQ ID NO: 1888457 - RNA, 16 nt, Human
ccuccccauggagcca

SEQ ID NO: 1888458 - RNA, 15 nt, Human
ccucccaaagugcug

SEQ ID NO: 1888459 - RNA, 23 nt, Human
ccuccaugugggcuaguugggcu

SEQ ID NO: 1888460 - RNA, 14 nt, Human
ccuccauccugagg

SEQ ID NO: 1888461 - RNA, 22 nt, Human
ccuccaggugcacaagcuccaa

SEQ ID NO: 1888462 - RNA, 22 nt, Human
ccuccagggcuggacugaggcc

SEQ ID NO: 1888463 - RNA, 19 nt, Human
ccuccaggugcacaagcuc

SEQ ID NO: 1888464 - RNA, 21 nt, Human
ccuccaggugcacaagcucca

SEQ ID NO: 1888465 - RNA, 21 nt, Human
ccuccagggcuggacugaggc

SEQ ID NO: 1888466 - RNA, 20 nt, Human
ccuccagggcuggacugagg

SEQ ID NO: 1888467 - RNA, 18 nt, Human
ccuccagggcuggacuga

SEQ ID NO: 1888468 - RNA, 17 nt, Human
ccuccagggcuggacug

SEQ ID NO: 1888469 - RNA, 16 nt, Human
ccuccagggcuggacu

SEQ ID NO: 1888470 - RNA, 13 nt, Human
ccuccagggcugg

SEQ ID NO: 1888471 - RNA, 12 nt, Human
ccuccagggcug

SEQ ID NO: 1888472 - RNA, 13 nt, Human
ccuccagcaggga

SEQ ID NO: 1888473 - RNA, 21 nt, Human
ccucccgaguagcugggacua

SEQ ID NO: 1888474 - RNA, 20 nt, Human
ccucccgaguagcugggacu

SEQ ID NO: 1888475 - RNA, 19 nt, Human
ccucccgaguagcugggac

SEQ ID NO: 1888476 - RNA, 12 nt, Human
ccucccugccuc

SEQ ID NO: 1888477 - RNA, 15 nt, Human
ccucccugccucagg

SEQ ID NO: 1888478 - RNA, 14 nt, Human
ccucccugccucca

SEQ ID NO: 1888479 - RNA, 15 nt, Human
ccucccugccuccag

SEQ ID NO: 1888480 - RNA, 14 nt, Human
ccuccucagaucuu

SEQ ID NO: 1888481 - RNA, 10 nt, Human
ccucccuccc

SEQ ID NO: 1888482 - RNA, 13 nt, Human
ccuccugcugggc

SEQ ID NO: 1888483 - RNA, 14 nt, Human
ccuccugggcuaag

SEQ ID NO: 1888484 - RNA, 23 nt, Human
ccuccugccucgaacuggcugca

SEQ ID NO: 1888485 - RNA, 18 nt, Human
ccucgguguggagaagcg

SEQ ID NO: 1888486 - RNA, 15 nt, Human
ccucguucucccugg

SEQ ID NO: 1888487 - RNA, 16 nt, Human
ccucguucucccuggg

SEQ ID NO: 1888488 - RNA, 17 nt, Human
ccucguucucccuggga

SEQ ID NO: 1888489 - RNA, 18 nt, Human
ccucguucucccugggag

SEQ ID NO: 1888490 - RNA, 20 nt, Human
ccucguucucccugggaggc

SEQ ID NO: 1888491 - RNA, 16 nt, Human
ccucggugccuuccuc

SEQ ID NO: 1888492 - RNA, 14 nt, Human
ccucgguguggaga

SEQ ID NO: 1888493 - RNA, 15 nt, Human
ccuccuucagacacc

SEQ ID NO: 1888494 - RNA, 22 nt, Human
ccuccuucagacacccucaacc

SEQ ID NO: 1888495 - RNA, 14 nt, Human
ccuccuucagacac

SEQ ID NO: 1888496 - RNA, 16 nt, Human
ccucuaggaggucucu

SEQ ID NO: 1888497 - RNA, 17 nt, Human
ccucuauuuauguuugc

SEQ ID NO: 1888498 - RNA, 21 nt, Human
ccucuauuuauguuugcacuu

SEQ ID NO: 1888499 - RNA, 18 nt, Human
ccucucauuccagaggaa

SEQ ID NO: 1888500 - RNA, 17 nt, Human
ccucccgaauagcuggg

SEQ ID NO: 1888501 - RNA, 19 nt, Human
ccgcaccuaaagcagccag

SEQ ID NO: 1888502 - RNA, 17 nt, Human
ccgcaccuaaagcagcc

SEQ ID NO: 1888503 - RNA, 19 nt, Human
ccgcacugggcuuggggac

SEQ ID NO: 1888504 - RNA, 14 nt, Human
ccgcacugggcuug

SEQ ID NO: 1888505 - RNA, 22 nt, Human
ccgcgccaaauaaugucucugu

SEQ ID NO: 1888506 - RNA, 22 nt, Human
ccgccugguacucaagcccgcg

SEQ ID NO: 1888507 - RNA, 21 nt, Human
ccgcuaagagggagggagggc

SEQ ID NO: 1888508 - RNA, 17 nt, Human
ccgcgucgcccucccag

SEQ ID NO: 1888509 - RNA, 20 nt, Human
ccgcggggacauugggaagg

SEQ ID NO: 1888510 - RNA, 19 nt, Human
ccgcgucgcccucccaggc

SEQ ID NO: 1888511 - RNA, 22 nt, Human
ccgcgugaucaaagccacacuc

SEQ ID NO: 1888512 - RNA, 23 nt, Human
ccgcuaagagggagggagggcuc

SEQ ID NO: 1888513 - RNA, 17 nt, Human
ccgaguagcugggacua

SEQ ID NO: 1888514 - RNA, 20 nt, Human
ccgaguagcugggacuacag

SEQ ID NO: 1888515 - RNA, 19 nt, Human
ccgagucauucguucugug

SEQ ID NO: 1888516 - RNA, 20 nt, Human
ccgagucauucguucugugg

SEQ ID NO: 1888517 - RNA, 12 nt, Human
ccgaguccaagc

SEQ ID NO: 1888518 - RNA, 15 nt, Human
ccgcaaaccacacug

SEQ ID NO: 1888519 - RNA, 16 nt, Human
ccgcaaaccacacugg

SEQ ID NO: 1888520 - RNA, 21 nt, Human
ccgcaaaccacacuggacucc

SEQ ID NO: 1888521 - RNA, 13 nt, Human
ccgaguccaagcu

SEQ ID NO: 1888522 - RNA, 14 nt, Human
ccgaggccuucucu

SEQ ID NO: 1888523 - RNA, 20 nt, Human
cccugguggcagcucaccuc

SEQ ID NO: 1888524 - RNA, 16 nt, Human
cccugguucucaucuu

SEQ ID NO: 1888525 - RNA, 15 nt, Human
cccugguucucaucu

SEQ ID NO: 1888526 - RNA, 17 nt, Human
cccugguucucaucuuu

SEQ ID NO: 1888527 - RNA, 18 nt, Human
ccgggaccccgagccugg

SEQ ID NO: 1888528 - RNA, 20 nt, Human
ccgggcgcgguggcucacgc

SEQ ID NO: 1888529 - RNA, 16 nt, Human
ccgggcguggugguga

SEQ ID NO: 1888530 - RNA, 22 nt, Human
ccgggcucugccucccaucacc

SEQ ID NO: 1888531 - RNA, 15 nt, Human
ccggguuccagcacc

SEQ ID NO: 1888532 - RNA, 12 nt, Human
ccggguuccagc

SEQ ID NO: 1888533 - RNA, 15 nt, Human
ccggggaaaggcaag

SEQ ID NO: 1888534 - RNA, 16 nt, Human
ccgugcucgccccagc

SEQ ID NO: 1888535 - RNA, 17 nt, Human
ccgugcucgccccagca

SEQ ID NO: 1888536 - RNA, 14 nt, Human
ccgugcugacagcu

SEQ ID NO: 1888537 - RNA, 16 nt, Human
ccgugcugacagcugc

SEQ ID NO: 1888538 - RNA, 17 nt, Human
ccgugcugacagcugcu

SEQ ID NO: 1888539 - RNA, 18 nt, Human
ccgugcugacagcugcuc

SEQ ID NO: 1888540 - RNA, 19 nt, Human
ccgugcugacagcugcucc

SEQ ID NO: 1888541 - RNA, 21 nt, Human
ccgugcugacagcugcuccua

SEQ ID NO: 1888542 - RNA, 20 nt, Human
ccgugcugacagcugcuccu

SEQ ID NO: 1888543 - RNA, 12 nt, Human
ccgcuuucuacc

SEQ ID NO: 1888544 - RNA, 23 nt, Human
ccgcugccacccaccucccugcc

SEQ ID NO: 1888545 - RNA, 24 nt, Human
ccgcugccacccaccucccugccu

SEQ ID NO: 1888546 - RNA, 15 nt, Human
ccgcugccacccacc

SEQ ID NO: 1888547 - RNA, 16 nt, Human
ccgcugccacccaccu

SEQ ID NO: 1888548 - RNA, 17 nt, Human
ccgcugccacccaccuc

SEQ ID NO: 1888549 - RNA, 20 nt, Human
ccgcugccacccaccucccu

SEQ ID NO: 1888550 - RNA, 11 nt, Human
ccgcugccacc

SEQ ID NO: 1888551 - RNA, 12 nt, Human
ccgcugccaccc

SEQ ID NO: 1888552 - RNA, 14 nt, Human
ccgcugccacccac

SEQ ID NO: 1888553 - RNA, 15 nt, Human
ccggcuggccuggcc

SEQ ID NO: 1888554 - RNA, 19 nt, Human
ccgcuuucuacccagcgag

SEQ ID NO: 1888555 - RNA, 17 nt, Human
ccggcuggccuggcccc

SEQ ID NO: 1888556 - RNA, 18 nt, Human
ccggcuggccuggccccu

SEQ ID NO: 1888557 - RNA, 20 nt, Human
ccgggaagggggcugggaca

SEQ ID NO: 1888558 - RNA, 17 nt, Human
ccgggaccccgagccug

SEQ ID NO: 1888559 - RNA, 18 nt, Human
ccuauauuguuuucagug

SEQ ID NO: 1888560 - RNA, 22 nt, Human
ccuauauuguuuucaguguaca

SEQ ID NO: 1888561 - RNA, 16 nt, Human
ccuauaacugcccagc

SEQ ID NO: 1888562 - RNA, 13 nt, Human
ccuaguuccacca

SEQ ID NO: 1888563 - RNA, 21 nt, Human
ccuaguuccaccaucaagcca

SEQ ID NO: 1888564 - RNA, 23 nt, Human
ccuaguuccaccaucaagccacc

SEQ ID NO: 1888565 - RNA, 15 nt, Human
ccuaaaauucagugg

SEQ ID NO: 1888566 - RNA, 16 nt, Human
ccuaaauauauuuuaa

SEQ ID NO: 1888567 - RNA, 18 nt, Human
ccuaaauauauuuuaaga

SEQ ID NO: 1888568 - RNA, 17 nt, Human
ccuaaaagcacacucau

SEQ ID NO: 1888569 - RNA, 18 nt, Human
ccuaaaagcacacucauc

SEQ ID NO: 1888570 - RNA, 22 nt, Human
ccuaaaagugggcuugauucug

SEQ ID NO: 1888571 - RNA, 20 nt, Human
cuguaguugcguggacucug

SEQ ID NO: 1888572 - RNA, 20 nt, Human
cuguacgucugacaggcaau

SEQ ID NO: 1888573 - RNA, 19 nt, Human
cuguacgucugacaggcaa

SEQ ID NO: 1888574 - RNA, 14 nt, Human
cuguacaucuauuu

SEQ ID NO: 1888575 - RNA, 18 nt, Human
cuguacgucugacaggca

SEQ ID NO: 1888576 - RNA, 16 nt, Human
cuguacgucugacagg

SEQ ID NO: 1888577 - RNA, 15 nt, Human
cuguacgucugacag

SEQ ID NO: 1888578 - RNA, 14 nt, Human
cuguacgucugaca

SEQ ID NO: 1888579 - RNA, 21 nt, Human
cuguacaugaaaacacauuuu

SEQ ID NO: 1888580 - RNA, 20 nt, Human
cuguacaugaaaacacauuu

SEQ ID NO: 1888581 - RNA, 17 nt, Human
cuguacaugaaaacaca

SEQ ID NO: 1888582 - RNA, 16 nt, Human
cuguaauuguguguga

SEQ ID NO: 1888583 - RNA, 20 nt, Human
cuguauuuuguuuuugucuu

SEQ ID NO: 1888584 - RNA, 20 nt, Human
cuguauuuugaaaaugcuuu

SEQ ID NO: 1888585 - RNA, 15 nt, Human
cugucaauuacagga

SEQ ID NO: 1888586 - RNA, 16 nt, Human
cugucaauuacaggaa

SEQ ID NO: 1888587 - RNA, 13 nt, Human
cugucaauuacag

SEQ ID NO: 1888588 - RNA, 20 nt, Human
cuguaucccaugagccucag

SEQ ID NO: 1888589 - RNA, 22 nt, Human
cuguaucccaugagccucagca

SEQ ID NO: 1888590 - RNA, 21 nt, Human
cuguaucccaugagccucagc

SEQ ID NO: 1888591 - RNA, 16 nt, Human
cugguuaggauggcag

SEQ ID NO: 1888592 - RNA, 18 nt, Human
cugguuaggauggcagga

SEQ ID NO: 1888593 - RNA, 19 nt, Human
cugguuaggauggcaggac

SEQ ID NO: 1888594 - RNA, 18 nt, Human
cuguaaucccagcaauuu

SEQ ID NO: 1888595 - RNA, 17 nt, Human
cuguaaucccagcacuu

SEQ ID NO: 1888596 - RNA, 19 nt, Human
cuguaauccuagcacuuug

SEQ ID NO: 1888597 - RNA, 20 nt, Human
cuguaaucccagcacuuugg

SEQ ID NO: 1888598 - RNA, 22 nt, Human
cugguuagagguucccuuugac

SEQ ID NO: 1888599 - RNA, 21 nt, Human
cugguuagagguucccuuuga

SEQ ID NO: 1888600 - RNA, 15 nt, Human
cuguaauuugugaua

SEQ ID NO: 1888601 - RNA, 14 nt, Human
cuguaauuugugau

SEQ ID NO: 1888602 - RNA, 14 nt, Human
cuguacagagccca

SEQ ID NO: 1888603 - RNA, 15 nt, Human
cuguacagagcccac

SEQ ID NO: 1888604 - RNA, 18 nt, Human
cuguacagagcccacgcc

SEQ ID NO: 1888605 - RNA, 22 nt, Human
cuguacagagcccacgccccca

SEQ ID NO: 1888606 - RNA, 18 nt, Human
cugguggcagugggagcu

SEQ ID NO: 1888607 - RNA, 14 nt, Human
cugguggcaguggg

SEQ ID NO: 1888608 - RNA, 15 nt, Human
cugguggcagcugcg

SEQ ID NO: 1888609 - RNA, 20 nt, Human
cugguggcagcucaccucuc

SEQ ID NO: 1888610 - RNA, 17 nt, Human
cugguggcagcucaccu

SEQ ID NO: 1888611 - RNA, 18 nt, Human
cugguggcagcucaccuc

SEQ ID NO: 1888612 - RNA, 23 nt, Human
cuggugguucacucuuggagccu

SEQ ID NO: 1888613 - RNA, 21 nt, Human
cuggugguucacucuuggagc

SEQ ID NO: 1888614 - RNA, 20 nt, Human
cuggugguucacucuuggag

SEQ ID NO: 1888615 - RNA, 12 nt, Human
cuggugguucac

SEQ ID NO: 1888616 - RNA, 15 nt, Human
cuggugguugcuguu

SEQ ID NO: 1888617 - RNA, 20 nt, Human
cuggugguugcuguuuuccu

SEQ ID NO: 1888618 - RNA, 18 nt, Human
cugggccuggcagcucag

SEQ ID NO: 1888619 - RNA, 20 nt, Human
cugggccuggcagcucagcu

SEQ ID NO: 1888620 - RNA, 13 nt, Human
cugggccugcaga

SEQ ID NO: 1888621 - RNA, 14 nt, Human
cugggcuccuccag

SEQ ID NO: 1888622 - RNA, 15 nt, Human
cugggcuccuccagg

SEQ ID NO: 1888623 - RNA, 17 nt, Human
cugggcuccuccagggu

SEQ ID NO: 1888624 - RNA, 21 nt, Human
cugggauuacaagcgugagcc

SEQ ID NO: 1888625 - RNA, 19 nt, Human
cugggauguuucugucaca

SEQ ID NO: 1888626 - RNA, 14 nt, Human
cugggauguuucug

SEQ ID NO: 1888627 - RNA, 23 nt, Human
cugcucauucuaaugauggccca

SEQ ID NO: 1888628 - RNA, 19 nt, Human
cugggccccugccucucug

SEQ ID NO: 1888629 - RNA, 20 nt, Human
cugggccccugccucucugc

SEQ ID NO: 1888630 - RNA, 23 nt, Human
cugggccccugccucucugcagg

SEQ ID NO: 1888631 - RNA, 13 nt, Human
cugggucgcccug

SEQ ID NO: 1888632 - RNA, 17 nt, Human
cugggggugggccaggc

SEQ ID NO: 1888633 - RNA, 13 nt, Human
cuggggugggguc

SEQ ID NO: 1888634 - RNA, 14 nt, Human
cuggggugggguca

SEQ ID NO: 1888635 - RNA, 20 nt, Human
cugggguggggucaugcccu

SEQ ID NO: 1888636 - RNA, 15 nt, Human
cugggucgcccugga

SEQ ID NO: 1888637 - RNA, 16 nt, Human
cugggucgcccuggac

SEQ ID NO: 1888638 - RNA, 15 nt, Human
cugguaaucuugcuc

SEQ ID NO: 1888639 - RNA, 15 nt, Human
cugggcuucaguggc

SEQ ID NO: 1888640 - RNA, 22 nt, Human
cugggcuuggggaccagagcug

SEQ ID NO: 1888641 - RNA, 18 nt, Human
cugggcuugucuguagau

SEQ ID NO: 1888642 - RNA, 18 nt, Human
cugggggcugggcagagg

SEQ ID NO: 1888643 - RNA, 14 nt, Human
cugggggcugggca

SEQ ID NO: 1888644 - RNA, 14 nt, Human
cugggggugggcca

SEQ ID NO: 1888645 - RNA, 15 nt, Human
cugggggugggccag

SEQ ID NO: 1888646 - RNA, 16 nt, Human
cugggggugggccagg

SEQ ID NO: 1888647 - RNA, 16 nt, Human
cugggggccucuucug

SEQ ID NO: 1888648 - RNA, 19 nt, Human
cugggcuuggggcuuccua

SEQ ID NO: 1888649 - RNA, 20 nt, Human
cugggcuuggggcuuccuaa

SEQ ID NO: 1888650 - RNA, 22 nt, Human
cuguggcuucuuaaucuuuuca

SEQ ID NO: 1888651 - RNA, 11 nt, Human
cugugggaaau

SEQ ID NO: 1888652 - RNA, 13 nt, Human
cugugggaaauua

SEQ ID NO: 1888653 - RNA, 21 nt, Human
cuguggguuucuaaagcugcc

SEQ ID NO: 1888654 - RNA, 23 nt, Human
cuguggggugugcacaucucugc

SEQ ID NO: 1888655 - RNA, 22 nt, Human
cuguggguuucuaaagcugcca

SEQ ID NO: 1888656 - RNA, 14 nt, Human
cuguggaucaaauc

SEQ ID NO: 1888657 - RNA, 24 nt, Human
cuguggaucaaauccagccugcug

SEQ ID NO: 1888658 - RNA, 18 nt, Human
cugugugugcgccuacag

SEQ ID NO: 1888659 - RNA, 14 nt, Human
cuguguguguguau

SEQ ID NO: 1888660 - RNA, 16 nt, Human
cuguguguguguaugu

SEQ ID NO: 1888661 - RNA, 15 nt, Human
cuguguguguguaug

SEQ ID NO: 1888662 - RNA, 20 nt, Human
cuguguguuuaugugugugu

SEQ ID NO: 1888663 - RNA, 18 nt, Human
cuguguguuuaugugugu

SEQ ID NO: 1888664 - RNA, 20 nt, Human
cuguguguguguaugugggg

SEQ ID NO: 1888665 - RNA, 18 nt, Human
cuguguguguguaugugg

SEQ ID NO: 1888666 - RNA, 21 nt, Human
cuguguguguguauguggggg

SEQ ID NO: 1888667 - RNA, 19 nt, Human
cugugucuuuaaaugcugc

SEQ ID NO: 1888668 - RNA, 20 nt, Human
cugugucuuuaaaugcugcu

SEQ ID NO: 1888669 - RNA, 21 nt, Human
cugugucuuuaaaugcugcuu

SEQ ID NO: 1888670 - RNA, 20 nt, Human
cugugucuuuuuucacuaca

SEQ ID NO: 1888671 - RNA, 20 nt, Human
cugugucuuugguuugugcu

SEQ ID NO: 1888672 - RNA, 14 nt, Human
cugugugcucagga

SEQ ID NO: 1888673 - RNA, 21 nt, Human
cugugugauugacagcuuugc

SEQ ID NO: 1888674 - RNA, 23 nt, Human
cugugugauugacagcuuugcug

SEQ ID NO: 1888675 - RNA, 22 nt, Human
cugugugauugacagcuuugcu

SEQ ID NO: 1888676 - RNA, 22 nt, Human
cuguguguccaaaacugccuca

SEQ ID NO: 1888677 - RNA, 21 nt, Human
cuguguguccaaaacugccuc

SEQ ID NO: 1888678 - RNA, 19 nt, Human
cuguguguccaaaacugcc

SEQ ID NO: 1888679 - RNA, 15 nt, Human
cuguguguccaaaac

SEQ ID NO: 1888680 - RNA, 14 nt, Human
cugugaugcccugc

SEQ ID NO: 1888681 - RNA, 15 nt, Human
cugugauggggcccu

SEQ ID NO: 1888682 - RNA, 23 nt, Human
cugugauggggcccugccuccuu

SEQ ID NO: 1888683 - RNA, 16 nt, Human
cugugauugugccuac

SEQ ID NO: 1888684 - RNA, 16 nt, Human
cugugauggggcccug

SEQ ID NO: 1888685 - RNA, 21 nt, Human
cugugauggggcccugccucc

SEQ ID NO: 1888686 - RNA, 20 nt, Human
cugugagcucccaggugcag

SEQ ID NO: 1888687 - RNA, 16 nt, Human
cugugaacgauuuaga

SEQ ID NO: 1888688 - RNA, 17 nt, Human
cugugagcccagcuggg

SEQ ID NO: 1888689 - RNA, 15 nt, Human
cugugagcccagcug

SEQ ID NO: 1888690 - RNA, 22 nt, Human
cugugaaauucccaacaaacau

SEQ ID NO: 1888691 - RNA, 16 nt, Human
cugugaaaggaaagag

SEQ ID NO: 1888692 - RNA, 22 nt, Human
cugugaaaggaaagagggaggu

SEQ ID NO: 1888693 - RNA, 14 nt, Human
cugugaaauuccca

SEQ ID NO: 1888694 - RNA, 15 nt, Human
cugugccaugugcca

SEQ ID NO: 1888695 - RNA, 22 nt, Human
cugugccauuuuguauuuuacu

SEQ ID NO: 1888696 - RNA, 23 nt, Human
cugugcccacccuccacucuccu

SEQ ID NO: 1888697 - RNA, 17 nt, Human
cugugcccacccuccac

SEQ ID NO: 1888698 - RNA, 19 nt, Human
cugugcccuaaaguguauu

SEQ ID NO: 1888699 - RNA, 14 nt, Human
cugugccaugugcc

SEQ ID NO: 1888700 - RNA, 15 nt, Human
cugugcacgguggac

SEQ ID NO: 1888701 - RNA, 14 nt, Human
cugugcacugccca

SEQ ID NO: 1888702 - RNA, 22 nt, Human
cugugauugggcguagaagugg

SEQ ID NO: 1888703 - RNA, 21 nt, Human
cugugcaaccucuuggccuga

SEQ ID NO: 1888704 - RNA, 23 nt, Human
cugucuucucccugcacaagcca

SEQ ID NO: 1888705 - RNA, 19 nt, Human
cugucuucauagcagauuu

SEQ ID NO: 1888706 - RNA, 22 nt, Human
cugucuucauagcagauuuuaa

SEQ ID NO: 1888707 - RNA, 18 nt, Human
cugucuucaguaagccgu

SEQ ID NO: 1888708 - RNA, 21 nt, Human
cugucuuuuuucuaaaguaaa

SEQ ID NO: 1888709 - RNA, 15 nt, Human
cugugaaaggaaaga

SEQ ID NO: 1888710 - RNA, 20 nt, Human
cugucuuuccuagauggcag

SEQ ID NO: 1888711 - RNA, 11 nt, Human
cugucuuuccu

SEQ ID NO: 1888712 - RNA, 13 nt, Human
cugucuuuccuag

SEQ ID NO: 1888713 - RNA, 14 nt, Human
cugucuuuccuaga

SEQ ID NO: 1888714 - RNA, 22 nt, Human
cugucauuugagcagggcucag

SEQ ID NO: 1888715 - RNA, 21 nt, Human
cugucauuugagcagggcuca

SEQ ID NO: 1888716 - RNA, 18 nt, Human
cugucaauuacaggaagu

SEQ ID NO: 1888717 - RNA, 23 nt, Human
cugucauuugagcagggcucagc

SEQ ID NO: 1888718 - RNA, 14 nt, Human
cugucugccagggc

SEQ ID NO: 1888719 - RNA, 14 nt, Human
cugucuguguuuuu

SEQ ID NO: 1888720 - RNA, 18 nt, Human
cuuccuauaugcacuuau

SEQ ID NO: 1888721 - RNA, 18 nt, Human
cuuccuguccagcuccaa

SEQ ID NO: 1888722 - RNA, 18 nt, Human
cuuccccaacacgcagga

SEQ ID NO: 1888723 - RNA, 22 nt, Human
cuuccccaccccaguuuuuguu

SEQ ID NO: 1888724 - RNA, 14 nt, Human
cuucccauucucca

SEQ ID NO: 1888725 - RNA, 13 nt, Human
cuucccauucucc

SEQ ID NO: 1888726 - RNA, 16 nt, Human
cuuccacaagagccca

SEQ ID NO: 1888727 - RNA, 20 nt, Human
cuuccacuuuuuuuuguaug

SEQ ID NO: 1888728 - RNA, 21 nt, Human
cuuccacuuuuuuuuguaugu

SEQ ID NO: 1888729 - RNA, 18 nt, Human
cuuccccaucuucuaaac

SEQ ID NO: 1888730 - RNA, 16 nt, Human
cuucucacugccaugc

SEQ ID NO: 1888731 - RNA, 21 nt, Human
cuucucacugccaugccagcu

SEQ ID NO: 1888732 - RNA, 17 nt, Human
cuucucauuucaccccu

SEQ ID NO: 1888733 - RNA, 15 nt, Human
cuucucauuucaccc

SEQ ID NO: 1888734 - RNA, 14 nt, Human
cuucucauuucacc

SEQ ID NO: 1888735 - RNA, 17 nt, Human
cuucucauccugcaggc

SEQ ID NO: 1888736 - RNA, 16 nt, Human
cuucucauccugcagg

SEQ ID NO: 1888737 - RNA, 15 nt, Human
cuucucauccugcag

SEQ ID NO: 1888738 - RNA, 19 nt, Human
cuucgggaggucgaggcag

SEQ ID NO: 1888739 - RNA, 20 nt, Human
cuucggccuccauccugagg

SEQ ID NO: 1888740 - RNA, 16 nt, Human
cuucgggcugugcccg

SEQ ID NO: 1888741 - RNA, 17 nt, Human
cuucgcuccugugucuu

SEQ ID NO: 1888742 - RNA, 23 nt, Human
cuuccuguguguccaaaacugcc

SEQ ID NO: 1888743 - RNA, 15 nt, Human
cuuccugugugucca

SEQ ID NO: 1888744 - RNA, 17 nt, Human
cuuccuuaugcuucuuu

SEQ ID NO: 1888745 - RNA, 15 nt, Human
cuuccuuaugcuucu

SEQ ID NO: 1888746 - RNA, 14 nt, Human
cuuccuguucugaa

SEQ ID NO: 1888747 - RNA, 13 nt, Human
cuuccuuggcuuu

SEQ ID NO: 1888748 - RNA, 17 nt, Human
cuuccuuguagccuuuu

SEQ ID NO: 1888749 - RNA, 20 nt, Human
cuuccuuguagccuuuugac

SEQ ID NO: 1888750 - RNA, 21 nt, Human
cuuccuuguagccuuuugacu

SEQ ID NO: 1888751 - RNA, 22 nt, Human
cuucaguaacccccacuggacu

SEQ ID NO: 1888752 - RNA, 20 nt, Human
cuucaguaacccccacugga

SEQ ID NO: 1888753 - RNA, 15 nt, Human
cuucaguaagccgug

SEQ ID NO: 1888754 - RNA, 14 nt, Human
cuucagugccaaaa

SEQ ID NO: 1888755 - RNA, 23 nt, Human
cuucauggaugggggaacucaga

SEQ ID NO: 1888756 - RNA, 13 nt, Human
cuuccacaagagc

SEQ ID NO: 1888757 - RNA, 14 nt, Human
cuuccacaagagcc

SEQ ID NO: 1888758 - RNA, 15 nt, Human
cuuccacaagagccc

SEQ ID NO: 1888759 - RNA, 14 nt, Human
cuucagccucccga

SEQ ID NO: 1888760 - RNA, 15 nt, Human
cuucagccugaaaga

SEQ ID NO: 1888761 - RNA, 20 nt, Human
cuucagccucccgaguagcu

SEQ ID NO: 1888762 - RNA, 16 nt, Human
cuucagccucccgagu

SEQ ID NO: 1888763 - RNA, 14 nt, Human
cuucaguaagccgu

SEQ ID NO: 1888764 - RNA, 15 nt, Human
cuucagcugacuuuu

SEQ ID NO: 1888765 - RNA, 19 nt, Human
cuucagcugacuuuucugu

SEQ ID NO: 1888766 - RNA, 23 nt, Human
cuucacauauugauuuccguuaa

SEQ ID NO: 1888767 - RNA, 14 nt, Human
cuucacauauugau

SEQ ID NO: 1888768 - RNA, 21 nt, Human
cuucaaggauccugagccaga

SEQ ID NO: 1888769 - RNA, 22 nt, Human
cuucaaggauccugagccagau

SEQ ID NO: 1888770 - RNA, 23 nt, Human
cuucaaggauccugagccagauu

SEQ ID NO: 1888771 - RNA, 14 nt, Human
cuucacaaagccca

SEQ ID NO: 1888772 - RNA, 15 nt, Human
cuucacaaagcccaa

SEQ ID NO: 1888773 - RNA, 17 nt, Human
cuucacaaagcccaagg

SEQ ID NO: 1888774 - RNA, 23 nt, Human
cuucacaaagcccaagggaucug

SEQ ID NO: 1888775 - RNA, 13 nt, Human
cuucacacacaga

SEQ ID NO: 1888776 - RNA, 15 nt, Human
cuucaaauauuuccc

SEQ ID NO: 1888777 - RNA, 21 nt, Human
cuuagucacugagacagcccg

SEQ ID NO: 1888778 - RNA, 20 nt, Human
cuuagucacugagacagccc

SEQ ID NO: 1888779 - RNA, 22 nt, Human
cuuagucacugagacagcccgg

SEQ ID NO: 1888780 - RNA, 17 nt, Human
cuucaaggauccugagc

SEQ ID NO: 1888781 - RNA, 18 nt, Human
cuucaaggauccugagcc

SEQ ID NO: 1888782 - RNA, 19 nt, Human
cuucaaggauccugagcca

SEQ ID NO: 1888783 - RNA, 20 nt, Human
cuucaaggauccugagccag

SEQ ID NO: 1888784 - RNA, 19 nt, Human
cuuaccugggcauucuugu

SEQ ID NO: 1888785 - RNA, 20 nt, Human
cuuaccugccaggaagccag

SEQ ID NO: 1888786 - RNA, 20 nt, Human
cuuagaagucacacaguauu

SEQ ID NO: 1888787 - RNA, 17 nt, Human
cuuagaagucacacagu

SEQ ID NO: 1888788 - RNA, 16 nt, Human
cuuagaaguggaagua

SEQ ID NO: 1888789 - RNA, 13 nt, Human
cuuacuguacaug

SEQ ID NO: 1888790 - RNA, 20 nt, Human
cuuagaaaaaccaccaccau

SEQ ID NO: 1888791 - RNA, 23 nt, Human
cuuagguuggcaaaaaggcagga

SEQ ID NO: 1888792 - RNA, 21 nt, Human
cuuagguuggcaaaaaggcag

SEQ ID NO: 1888793 - RNA, 22 nt, Human
cuuagagacaguugggugagaa

SEQ ID NO: 1888794 - RNA, 12 nt, Human
cuuagaauccaa

SEQ ID NO: 1888795 - RNA, 16 nt, Human
cuuagaauccaaacuu

SEQ ID NO: 1888796 - RNA, 17 nt, Human
cuuagaauccaaacuug

SEQ ID NO: 1888797 - RNA, 19 nt, Human
cuuagaauuaguggcacuu

SEQ ID NO: 1888798 - RNA, 20 nt, Human
cuuaaucuuuucacaaauaa

SEQ ID NO: 1888799 - RNA, 19 nt, Human
cuuaaucuuuucacaaaua

SEQ ID NO: 1888800 - RNA, 18 nt, Human
cuuaaucuuuucacaaau

SEQ ID NO: 1888801 - RNA, 17 nt, Human
cuuaaucuuuucacaaa

SEQ ID NO: 1888802 - RNA, 21 nt, Human
cuuaaucuuuucacaaauaaa

SEQ ID NO: 1888803 - RNA, 20 nt, Human
cuuaauucuuagcucauucu

SEQ ID NO: 1888804 - RNA, 17 nt, Human
cuuaaccagaucauugu

SEQ ID NO: 1888805 - RNA, 12 nt, Human
cuuaaaaauggu

SEQ ID NO: 1888806 - RNA, 16 nt, Human
cuuaauacuaccuuga

SEQ ID NO: 1888807 - RNA, 18 nt, Human
cuuaauacuaccuugaaa

SEQ ID NO: 1888808 - RNA, 17 nt, Human
cuguuugcuaagugagg

SEQ ID NO: 1888809 - RNA, 19 nt, Human
cuguuugcuaagugaggau

SEQ ID NO: 1888810 - RNA, 18 nt, Human
cuguuuagauaauacacc

SEQ ID NO: 1888811 - RNA, 17 nt, Human
cuguuuagcagcagccu

SEQ ID NO: 1888812 - RNA, 20 nt, Human
cuguuuagcagcagccuuua

SEQ ID NO: 1888813 - RNA, 17 nt, Human
cuguuucaaacuuuacu

SEQ ID NO: 1888814 - RNA, 15 nt, Human
cuguuucaaacuuua

SEQ ID NO: 1888815 - RNA, 17 nt, Human
cuguugcccaggcuggc

SEQ ID NO: 1888816 - RNA, 18 nt, Human
cuguugcccaggcuggcg

SEQ ID NO: 1888817 - RNA, 17 nt, Human
cuguuuagauaauacac

SEQ ID NO: 1888818 - RNA, 14 nt, Human
cuguuuagauaaua

SEQ ID NO: 1888819 - RNA, 13 nt, Human
cuguuuucccuga

SEQ ID NO: 1888820 - RNA, 12 nt, Human
cuguuuuccucc

SEQ ID NO: 1888821 - RNA, 14 nt, Human
cuguuuuccucccu

SEQ ID NO: 1888822 - RNA, 15 nt, Human
cuguuuuccucccuu

SEQ ID NO: 1888823 - RNA, 16 nt, Human
cuguuuuccucccuuc

SEQ ID NO: 1888824 - RNA, 17 nt, Human
cuguuuuccucccuucu

SEQ ID NO: 1888825 - RNA, 19 nt, Human
cuguuuuccucccuucugc

SEQ ID NO: 1888826 - RNA, 20 nt, Human
cuguuuuccucccuucugcu

SEQ ID NO: 1888827 - RNA, 21 nt, Human
cuguuuuccucccuucugcua

SEQ ID NO: 1888828 - RNA, 23 nt, Human
cuguuuuccucccuucugcuacu

SEQ ID NO: 1888829 - RNA, 16 nt, Human
cuuaaaaaguggaaaa

SEQ ID NO: 1888830 - RNA, 17 nt, Human
cuuaaaaaguggaaaaa

SEQ ID NO: 1888831 - RNA, 15 nt, Human
cuguuuuuaagcugu

SEQ ID NO: 1888832 - RNA, 16 nt, Human
cuguuuuuaagcuguu

SEQ ID NO: 1888833 - RNA, 17 nt, Human
cuguuuuuaagcuguuu

SEQ ID NO: 1888834 - RNA, 18 nt, Human
cuguuuuuaagcuguuuc

SEQ ID NO: 1888835 - RNA, 19 nt, Human
cuguuuuuaagcuguuucc

SEQ ID NO: 1888836 - RNA, 23 nt, Human
cuguuuuuaagcuguuuccauag

SEQ ID NO: 1888837 - RNA, 16 nt, Human
cuguuaauaguucagg

SEQ ID NO: 1888838 - RNA, 18 nt, Human
cuguucuuaagacgugau

SEQ ID NO: 1888839 - RNA, 21 nt, Human
cuguucuuucuggcuaugcau

SEQ ID NO: 1888840 - RNA, 14 nt, Human
cuguucuuucuggc

SEQ ID NO: 1888841 - RNA, 13 nt, Human
cuguucuuucugg

SEQ ID NO: 1888842 - RNA, 21 nt, Human
cuguucuuuccaaaguacacu

SEQ ID NO: 1888843 - RNA, 19 nt, Human
cuguucuuuccaaaguaca

SEQ ID NO: 1888844 - RNA, 16 nt, Human
cuguucuuuccaaagu

SEQ ID NO: 1888845 - RNA, 15 nt, Human
cuguucuuuccaaag

SEQ ID NO: 1888846 - RNA, 16 nt, Human
cuguugcccaggcugg

SEQ ID NO: 1888847 - RNA, 15 nt, Human
cuguugcccaggcug

SEQ ID NO: 1888848 - RNA, 14 nt, Human
cuguugcccaggcu

SEQ ID NO: 1888849 - RNA, 13 nt, Human
cuguugcccaggc

SEQ ID NO: 1888850 - RNA, 12 nt, Human
cuguugcccagg

SEQ ID NO: 1888851 - RNA, 23 nt, Human
cuguucuuucuggcuaugcauuu

SEQ ID NO: 1888852 - RNA, 17 nt, Human
cuguugacacaggucuu

SEQ ID NO: 1888853 - RNA, 22 nt, Human
cuguugacacaggucuuuccua

SEQ ID NO: 1888854 - RNA, 15 nt, Human
cuguugagcuguuuu

SEQ ID NO: 1888855 - RNA, 20 nt, Human
cuguugagcuguuuucccug

SEQ ID NO: 1888856 - RNA, 21 nt, Human
cuguugacacaggucuuuccu

SEQ ID NO: 1888857 - RNA, 18 nt, Human
cuuucauuuacuguggcu

SEQ ID NO: 1888858 - RNA, 17 nt, Human
cuuucagugaaagcauc

SEQ ID NO: 1888859 - RNA, 15 nt, Human
cuuucagugaaagca

SEQ ID NO: 1888860 - RNA, 17 nt, Human
cuuucauaaucuuugcu

SEQ ID NO: 1888861 - RNA, 18 nt, Human
cuuucauaaucuuugcuu

SEQ ID NO: 1888862 - RNA, 20 nt, Human
cuuuccaaagccaaugugaa

SEQ ID NO: 1888863 - RNA, 22 nt, Human
cuuucauuuuuuuccaggcugg

SEQ ID NO: 1888864 - RNA, 20 nt, Human
cuuucauuuuuuuccaggcu

SEQ ID NO: 1888865 - RNA, 15 nt, Human
cuuucauuuuuuucc

SEQ ID NO: 1888866 - RNA, 19 nt, Human
cuuucauuuuuuuccaggc

SEQ ID NO: 1888867 - RNA, 16 nt, Human
cuuucauuuuuuucca

SEQ ID NO: 1888868 - RNA, 18 nt, Human
cuuuccaaaugcccagcu

SEQ ID NO: 1888869 - RNA, 19 nt, Human
cuuuccaaaugcccagcuu

SEQ ID NO: 1888870 - RNA, 22 nt, Human
cuuuccaaaugcccagcuuaaa

SEQ ID NO: 1888871 - RNA, 16 nt, Human
cuuucccaacucuagc

SEQ ID NO: 1888872 - RNA, 21 nt, Human
cuuuauuuucuauaauuuaaa

SEQ ID NO: 1888873 - RNA, 12 nt, Human
cuuuauuuccaa

SEQ ID NO: 1888874 - RNA, 23 nt, Human
cuuuauuccagaaugcuguacau

SEQ ID NO: 1888875 - RNA, 21 nt, Human
cuuuauugaaaaaauaaaaaa

SEQ ID NO: 1888876 - RNA, 17 nt, Human
cuuuauuaaauguagaa

SEQ ID NO: 1888877 - RNA, 20 nt, Human
cuuuauuaaucacuauuguu

SEQ ID NO: 1888878 - RNA, 14 nt, Human
cuuuauuacccccu

SEQ ID NO: 1888879 - RNA, 21 nt, Human
cuuuauuaaauacaaaacuuc

SEQ ID NO: 1888880 - RNA, 20 nt, Human
cuuuauuccagaaugcugua

SEQ ID NO: 1888881 - RNA, 21 nt, Human
cuuuauucaauaaaaaaaaga

SEQ ID NO: 1888882 - RNA, 20 nt, Human
cuuuauuacccccuccuuca

SEQ ID NO: 1888883 - RNA, 22 nt, Human
cuuuauuacccccuccuucaga

SEQ ID NO: 1888884 - RNA, 15 nt, Human
cuuuauuaaucacua

SEQ ID NO: 1888885 - RNA, 15 nt, Human
cuuuaguuuuuguga

SEQ ID NO: 1888886 - RNA, 13 nt, Human
cuuuaguuuuugu

SEQ ID NO: 1888887 - RNA, 20 nt, Human
cuuuagaaagguuuugagca

SEQ ID NO: 1888888 - RNA, 19 nt, Human
cuuuagaaagguuuugagc

SEQ ID NO: 1888889 - RNA, 20 nt, Human
cuuguguguuuauugucaaa

SEQ ID NO: 1888890 - RNA, 15 nt, Human
cuuguggcuuugcaa

SEQ ID NO: 1888891 - RNA, 12 nt, Human
cuuguaaauaaa

SEQ ID NO: 1888892 - RNA, 15 nt, Human
cuuguaaauaaagcc

SEQ ID NO: 1888893 - RNA, 16 nt, Human
cuuguaaauaaagccc

SEQ ID NO: 1888894 - RNA, 17 nt, Human
cuuguaaauaaagcccu

SEQ ID NO: 1888895 - RNA, 19 nt, Human
cuuguaaauaaagcccugg

SEQ ID NO: 1888896 - RNA, 23 nt, Human
cuuguuggauuuuugucuugugu

SEQ ID NO: 1888897 - RNA, 21 nt, Human
cuuguuggauuuuugucuugu

SEQ ID NO: 1888898 - RNA, 21 nt, Human
cuuguguuucuuuaguuuuug

SEQ ID NO: 1888899 - RNA, 21 nt, Human
cuuguguguuuauugucaaag

SEQ ID NO: 1888900 - RNA, 22 nt, Human
cuuggaaccguaggacccaagc

SEQ ID NO: 1888901 - RNA, 13 nt, Human
cuuggaagcuccg

SEQ ID NO: 1888902 - RNA, 13 nt, Human
cuuggaggaagga

SEQ ID NO: 1888903 - RNA, 16 nt, Human
cuuggaaaugggagac

SEQ ID NO: 1888904 - RNA, 21 nt, Human
cuuggaaacuggaugagguca

SEQ ID NO: 1888905 - RNA, 17 nt, Human
cuugcucugcugacaga

SEQ ID NO: 1888906 - RNA, 16 nt, Human
cuugcucugcugacag

SEQ ID NO: 1888907 - RNA, 20 nt, Human
cuugcuucaaccccaugaga

SEQ ID NO: 1888908 - RNA, 11 nt, Human
cuugccagaga

SEQ ID NO: 1888909 - RNA, 12 nt, Human
cuugccagagau

SEQ ID NO: 1888910 - RNA, 16 nt, Human
cuugccagagauccaa

SEQ ID NO: 1888911 - RNA, 23 nt, Human
cuugccagagauccaaaagaagc

SEQ ID NO: 1888912 - RNA, 18 nt, Human
cuucucauuucaccccuc

SEQ ID NO: 1888913 - RNA, 21 nt, Human
cuucuccacccugcucuccga

SEQ ID NO: 1888914 - RNA, 18 nt, Human
cuucuccacccugcucuc

SEQ ID NO: 1888915 - RNA, 17 nt, Human
cuucuccacccugcucu

SEQ ID NO: 1888916 - RNA, 14 nt, Human
cuugcucugcugac

SEQ ID NO: 1888917 - RNA, 13 nt, Human
cuugcucugcuga

SEQ ID NO: 1888918 - RNA, 19 nt, Human
cuuguaaaggaauuuaaaa

SEQ ID NO: 1888919 - RNA, 16 nt, Human
cuuggggggcugaggu

SEQ ID NO: 1888920 - RNA, 22 nt, Human
cuuggggggcugaggugggagg

SEQ ID NO: 1888921 - RNA, 22 nt, Human
cuuggggaccagagcugccacc

SEQ ID NO: 1888922 - RNA, 15 nt, Human
cuuggggggcugagg

SEQ ID NO: 1888923 - RNA, 19 nt, Human
cuuggggaguuaagaccug

SEQ ID NO: 1888924 - RNA, 20 nt, Human
cuuggggaguuaagaccugg

SEQ ID NO: 1888925 - RNA, 21 nt, Human
cuuggggaguuaagaccuggc

SEQ ID NO: 1888926 - RNA, 13 nt, Human
cuugggcuucauc

SEQ ID NO: 1888927 - RNA, 14 nt, Human
cuugggccacugug

SEQ ID NO: 1888928 - RNA, 20 nt, Human
cuuggggaccagagcugcca

SEQ ID NO: 1888929 - RNA, 21 nt, Human
cuuggggaccagagcugccac

SEQ ID NO: 1888930 - RNA, 22 nt, Human
cuugggcuucauccuccucaga

SEQ ID NO: 1888931 - RNA, 20 nt, Human
cuuggggacaggggcaggag

SEQ ID NO: 1888932 - RNA, 17 nt, Human
cuuggcugcagggaguc

SEQ ID NO: 1888933 - RNA, 14 nt, Human
cuuggcugcaggga

SEQ ID NO: 1888934 - RNA, 20 nt, Human
cuuggcuuuuacugaagccu

SEQ ID NO: 1888935 - RNA, 16 nt, Human
cuuggcugcagggagu

SEQ ID NO: 1888936 - RNA, 15 nt, Human
cuuggaggugucugu

SEQ ID NO: 1888937 - RNA, 17 nt, Human
cuuggagguagcuuuga

SEQ ID NO: 1888938 - RNA, 22 nt, Human
cuuggaggaaggaaacccagcu

SEQ ID NO: 1888939 - RNA, 23 nt, Human
cuuggagggcaugaagacagaua

SEQ ID NO: 1888940 - RNA, 12 nt, Human
cuuggagggcau

SEQ ID NO: 1888941 - RNA, 19 nt, Human
cuuuucuggaauguaauca

SEQ ID NO: 1888942 - RNA, 18 nt, Human
cuuuucuggaauguaauc

SEQ ID NO: 1888943 - RNA, 18 nt, Human
cuuuucuguccgagcuuu

SEQ ID NO: 1888944 - RNA, 23 nt, Human
cuuuucuguccgagcuuugaaaa

SEQ ID NO: 1888945 - RNA, 16 nt, Human
cuuuucuuucagccaa

SEQ ID NO: 1888946 - RNA, 18 nt, Human
cuuuucuugcaugaggcu

SEQ ID NO: 1888947 - RNA, 23 nt, Human
cuuuucuugcaugaggcuagugu

SEQ ID NO: 1888948 - RNA, 12 nt, Human
cuuuucucugcc

SEQ ID NO: 1888949 - RNA, 20 nt, Human
cuuuucauaaccuagccuua

SEQ ID NO: 1888950 - RNA, 20 nt, Human
cuuuuacugaagccuuucuu

SEQ ID NO: 1888951 - RNA, 22 nt, Human
cuuuucauaaccuagccuuaga

SEQ ID NO: 1888952 - RNA, 18 nt, Human
cuuuucauauuugcacua

SEQ ID NO: 1888953 - RNA, 17 nt, Human
cuuuucauauuugcacu

SEQ ID NO: 1888954 - RNA, 18 nt, Human
cuuuguuuguugucagcu

SEQ ID NO: 1888955 - RNA, 20 nt, Human
cuuuguuuguugucagcuga

SEQ ID NO: 1888956 - RNA, 14 nt, Human
cuuuguucugcugu

SEQ ID NO: 1888957 - RNA, 20 nt, Human
cuuuguucugcuguucucua

SEQ ID NO: 1888958 - RNA, 20 nt, Human
cuuuuacguccaucucuugu

SEQ ID NO: 1888959 - RNA, 18 nt, Human
cuuuguucuaaagaugga

SEQ ID NO: 1888960 - RNA, 14 nt, Human
cuuuguucuggcuc

SEQ ID NO: 1888961 - RNA, 15 nt, Human
cuuuguucuggcucu

SEQ ID NO: 1888962 - RNA, 15 nt, Human
cuuuguucagccugc

SEQ ID NO: 1888963 - RNA, 19 nt, Human
cuuugugauuuuuguaauu

SEQ ID NO: 1888964 - RNA, 18 nt, Human
cuuugugauuuuuguaau

SEQ ID NO: 1888965 - RNA, 17 nt, Human
cuuugugauuuuuguaa

SEQ ID NO: 1888966 - RNA, 13 nt, Human
cuuugggaggcca

SEQ ID NO: 1888967 - RNA, 18 nt, Human
cuuuguccccaccgcaga

SEQ ID NO: 1888968 - RNA, 12 nt, Human
cuuuggcuuuuu

SEQ ID NO: 1888969 - RNA, 22 nt, Human
cuuuguccccaccgcagacagg

SEQ ID NO: 1888970 - RNA, 14 nt, Human
cuuugugauuuuug

SEQ ID NO: 1888971 - RNA, 16 nt, Human
cuuucccaucuuccaa

SEQ ID NO: 1888972 - RNA, 11 nt, Human
cuuugcugcug

SEQ ID NO: 1888973 - RNA, 19 nt, Human
cuuugcugcugaaggcuca

SEQ ID NO: 1888974 - RNA, 19 nt, Human
cuuuggacccugaggccca

SEQ ID NO: 1888975 - RNA, 17 nt, Human
cuuuggacccugaggcc

SEQ ID NO: 1888976 - RNA, 18 nt, Human
cuuuggacccugaggccc

SEQ ID NO: 1888977 - RNA, 18 nt, Human
cuuuggacagaagcagcu

SEQ ID NO: 1888978 - RNA, 19 nt, Human
cuuuggacagaagcagcuc

SEQ ID NO: 1888979 - RNA, 20 nt, Human
cuuuggacagaagcagcucu

SEQ ID NO: 1888980 - RNA, 21 nt, Human
cuuuggacagaagcagcucuu

SEQ ID NO: 1888981 - RNA, 15 nt, Human
cuuuggacccugagg

SEQ ID NO: 1888982 - RNA, 16 nt, Human
cuuuggacccugaggc

SEQ ID NO: 1888983 - RNA, 20 nt, Human
gaaaaucuuauaauuuaaaa

SEQ ID NO: 1888984 - RNA, 14 nt, Human
gaaacacagaaacc

SEQ ID NO: 1888985 - RNA, 18 nt, Human
gaaacagcuaaugggaca

SEQ ID NO: 1888986 - RNA, 16 nt, Human
gaaacagccugugucu

SEQ ID NO: 1888987 - RNA, 17 nt, Human
gaaacagccugugucuu

SEQ ID NO: 1888988 - RNA, 16 nt, Human
gaaacacuuugcauaa

SEQ ID NO: 1888989 - RNA, 12 nt, Human
gaaacagaggcu

SEQ ID NO: 1888990 - RNA, 19 nt, Human
gaaaauaacgauaaaagac

SEQ ID NO: 1888991 - RNA, 17 nt, Human
gaaaagcugcugacagu

SEQ ID NO: 1888992 - RNA, 13 nt, Human
gaaaagcugcuga

SEQ ID NO: 1888993 - RNA, 18 nt, Human
gaaaauaagaauagaaau

SEQ ID NO: 1888994 - RNA, 19 nt, Human
gaaaaucuuauaauuuaaa

SEQ ID NO: 1888995 - RNA, 16 nt, Human
gaaaaucagccugcuc

SEQ ID NO: 1888996 - RNA, 18 nt, Human
gaaaaucagccugcucca

SEQ ID NO: 1888997 - RNA, 14 nt, Human
gaaaaucagccugc

SEQ ID NO: 1888998 - RNA, 22 nt, Human
gaaaacaauaacgauaaaagac

SEQ ID NO: 1888999 - RNA, 13 nt, Human
gaaaacacauuuu

SEQ ID NO: 1889000 - RNA, 14 nt, Human
gaaaacacauuuuu

SEQ ID NO: 1889001 - RNA, 12 nt, Human
gaaaacaugcua

SEQ ID NO: 1889002 - RNA, 15 nt, Human
gaaaacaugcuacac

SEQ ID NO: 1889003 - RNA, 14 nt, Human
gaaaacaugcuaca

SEQ ID NO: 1889004 - RNA, 19 nt, Human
gaaaacguggcugcuucaa

SEQ ID NO: 1889005 - RNA, 18 nt, Human
gaaaacguggcugcuuca

SEQ ID NO: 1889006 - RNA, 15 nt, Human
gaaaacguggcugcu

SEQ ID NO: 1889007 - RNA, 16 nt, Human
gaaaacguggcugcuu

SEQ ID NO: 1889008 - RNA, 15 nt, Human
cuuuuuucacuacau

SEQ ID NO: 1889009 - RNA, 18 nt, Human
cuuuugacuuucauugga

SEQ ID NO: 1889010 - RNA, 14 nt, Human
cuuuuuucuaaagu

SEQ ID NO: 1889011 - RNA, 20 nt, Human
cuuuuuucucugauacagaa

SEQ ID NO: 1889012 - RNA, 18 nt, Human
cuuuuuuccuuaauccag

SEQ ID NO: 1889013 - RNA, 16 nt, Human
cuuuugagcauuuaga

SEQ ID NO: 1889014 - RNA, 21 nt, Human
cuuuugagugccuuacacaau

SEQ ID NO: 1889015 - RNA, 17 nt, Human
gaaaaaggaugcacaga

SEQ ID NO: 1889016 - RNA, 23 nt, Human
gaaaaaggaugcacagaguuguu

SEQ ID NO: 1889017 - RNA, 14 nt, Human
cuuuuuuggcugcu

SEQ ID NO: 1889018 - RNA, 15 nt, Human
cuuuuuuggcugcug

SEQ ID NO: 1889019 - RNA, 22 nt, Human
cuuuuuucucugauacagaaaa

SEQ ID NO: 1889020 - RNA, 16 nt, Human
cuuuuuucuuuuuccu

SEQ ID NO: 1889021 - RNA, 24 nt, Human
gaaggcacuaaaaagagcuguccu

SEQ ID NO: 1889022 - RNA, 17 nt, Human
gaaggcagcagguggca

SEQ ID NO: 1889023 - RNA, 16 nt, Human
gaaggccccgcccagg

SEQ ID NO: 1889024 - RNA, 14 nt, Human
gaaggccccgccca

SEQ ID NO: 1889025 - RNA, 15 nt, Human
gaaggccccgcccag

SEQ ID NO: 1889026 - RNA, 15 nt, Human
gaaggagacaggcag

SEQ ID NO: 1889027 - RNA, 16 nt, Human
gaaggagacaggcaga

SEQ ID NO: 1889028 - RNA, 18 nt, Human
gaaggagacaggcagagc

SEQ ID NO: 1889029 - RNA, 20 nt, Human
gaaggaaaaggcagggagcg

SEQ ID NO: 1889030 - RNA, 14 nt, Human
gaaggaaacccagc

SEQ ID NO: 1889031 - RNA, 17 nt, Human
gaaggaaacccagcucu

SEQ ID NO: 1889032 - RNA, 18 nt, Human
gaaggaaacccagcucug

SEQ ID NO: 1889033 - RNA, 15 nt, Human
gaaggcaaagcacga

SEQ ID NO: 1889034 - RNA, 21 nt, Human
gaaggauacaaaagcauguga

SEQ ID NO: 1889035 - RNA, 19 nt, Human
gaaggauacaaaagcaugu

SEQ ID NO: 1889036 - RNA, 12 nt, Human
gaaggauacaaa

SEQ ID NO: 1889037 - RNA, 21 nt, Human
gaagacucauucuucuguacg

SEQ ID NO: 1889038 - RNA, 19 nt, Human
gaagacucauucuucugua

SEQ ID NO: 1889039 - RNA, 14 nt, Human
gaagaagcucucuc

SEQ ID NO: 1889040 - RNA, 22 nt, Human
gaagccacgguguucugugaua

SEQ ID NO: 1889041 - RNA, 15 nt, Human
gaagccagcaggcuc

SEQ ID NO: 1889042 - RNA, 16 nt, Human
gaagccagcaggcucu

SEQ ID NO: 1889043 - RNA, 23 nt, Human
gaagccagcaggcucucaggcca

SEQ ID NO: 1889044 - RNA, 19 nt, Human
gaagccaggaauuucccag

SEQ ID NO: 1889045 - RNA, 21 nt, Human
gaagccaggaauuucccagga

SEQ ID NO: 1889046 - RNA, 23 nt, Human
gaagccaggaauuucccaggacc

SEQ ID NO: 1889047 - RNA, 24 nt, Human
gaagccaggaauuucccaggaccc

SEQ ID NO: 1889048 - RNA, 15 nt, Human
gaagccaucuuucuu

SEQ ID NO: 1889049 - RNA, 12 nt, Human
gaagcccagaau

SEQ ID NO: 1889050 - RNA, 10 nt, Human
gaagcccaga

SEQ ID NO: 1889051 - RNA, 18 nt, Human
gaagcuuuuaugugaaac

SEQ ID NO: 1889052 - RNA, 18 nt, Human
gaaggaaaaggcagggag

SEQ ID NO: 1889053 - RNA, 12 nt, Human
gaagcuuuacca

SEQ ID NO: 1889054 - RNA, 18 nt, Human
gaagcuuuaccagcugaa

SEQ ID NO: 1889055 - RNA, 20 nt, Human
gaagcccaggaaaggcucca

SEQ ID NO: 1889056 - RNA, 21 nt, Human
gaagcccaggaaaggcuccag

SEQ ID NO: 1889057 - RNA, 22 nt, Human
gaagcccaggaaaggcuccagg

SEQ ID NO: 1889058 - RNA, 23 nt, Human
gaagcccaggaaaggcuccagga

SEQ ID NO: 1889059 - RNA, 20 nt, Human
gaagccgugcucgccccagc

SEQ ID NO: 1889060 - RNA, 14 nt, Human
gaauacuuuauaaa

SEQ ID NO: 1889061 - RNA, 11 nt, Human
gaauaauaaau

SEQ ID NO: 1889062 - RNA, 23 nt, Human
gaauagaaauaaaggaugugauu

SEQ ID NO: 1889063 - RNA, 20 nt, Human
gaauacuuuuuacaauuaaa

SEQ ID NO: 1889064 - RNA, 14 nt, Human
gaauacuuuuuaca

SEQ ID NO: 1889065 - RNA, 18 nt, Human
gaauacuguuaaaggaaa

SEQ ID NO: 1889066 - RNA, 20 nt, Human
gaauacuguuaaaggaaaaa

SEQ ID NO: 1889067 - RNA, 20 nt, Human
gaauaauccuaaacauauga

SEQ ID NO: 1889068 - RNA, 20 nt, Human
gaauaagugccaggauggaa

SEQ ID NO: 1889069 - RNA, 14 nt, Human
gaauaacauguaau

SEQ ID NO: 1889070 - RNA, 22 nt, Human
gaauaaauaaauguaucuuauu

SEQ ID NO: 1889071 - RNA, 12 nt, Human
gaauaaaauuuu

SEQ ID NO: 1889072 - RNA, 12 nt, Human
gaaguuucugcc

SEQ ID NO: 1889073 - RNA, 18 nt, Human
gaaguuuaauugacuuau

SEQ ID NO: 1889074 - RNA, 16 nt, Human
gaaucucaaauaacua

SEQ ID NO: 1889075 - RNA, 18 nt, Human
gaaucuauuuaucuucau

SEQ ID NO: 1889076 - RNA, 19 nt, Human
gaaucuauuuaucuucauu

SEQ ID NO: 1889077 - RNA, 16 nt, Human
gaaucuggagaccagg

SEQ ID NO: 1889078 - RNA, 18 nt, Human
gaaucuggagaccaggga

SEQ ID NO: 1889079 - RNA, 22 nt, Human
gaaucuggagaccagggagccu

SEQ ID NO: 1889080 - RNA, 13 nt, Human
gaaucuauuuaag

SEQ ID NO: 1889081 - RNA, 15 nt, Human
gaaucuauuuaagua

SEQ ID NO: 1889082 - RNA, 16 nt, Human
gaaucuauuuaaguaa

SEQ ID NO: 1889083 - RNA, 20 nt, Human
gaaucuauuuaucuucauuu

SEQ ID NO: 1889084 - RNA, 19 nt, Human
gaaugaaagggcccagaga

SEQ ID NO: 1889085 - RNA, 14 nt, Human
gaaugccuccugca

SEQ ID NO: 1889086 - RNA, 14 nt, Human
gaaugaaagggccc

SEQ ID NO: 1889087 - RNA, 14 nt, Human
gaauagcugggacu

SEQ ID NO: 1889088 - RNA, 15 nt, Human
gaauagccacauuug

SEQ ID NO: 1889089 - RNA, 18 nt, Human
gaauagccacauuuggaa

SEQ ID NO: 1889090 - RNA, 23 nt, Human
gaauagccacauuuggaauacuu

SEQ ID NO: 1889091 - RNA, 15 nt, Human
gaauagcugggacua

SEQ ID NO: 1889092 - RNA, 12 nt, Human
gaauccaaacuu

SEQ ID NO: 1889093 - RNA, 13 nt, Human
gaauccaaacuug

SEQ ID NO: 1889094 - RNA, 13 nt, Human
gaaucagaacuca

SEQ ID NO: 1889095 - RNA, 22 nt, Human
gaaauguuauuuuuuaauuauu

SEQ ID NO: 1889096 - RNA, 21 nt, Human
gaaauguuauuuuuuaauuau

SEQ ID NO: 1889097 - RNA, 22 nt, Human
gaaauuaagaaggcaaaaaugu

SEQ ID NO: 1889098 - RNA, 17 nt, Human
gaaauuaagaaggcaaa

SEQ ID NO: 1889099 - RNA, 18 nt, Human
gaaauuaagaaggcaaaa

SEQ ID NO: 1889100 - RNA, 23 nt, Human
gaaaugcugguuuuucaguuuuc

SEQ ID NO: 1889101 - RNA, 14 nt, Human
gaaaugggcagagc

SEQ ID NO: 1889102 - RNA, 20 nt, Human
gaaaugggcagagcagagac

SEQ ID NO: 1889103 - RNA, 19 nt, Human
gaaaugggacuuaacuccu

SEQ ID NO: 1889104 - RNA, 17 nt, Human
gaaaugggacuuaacuc

SEQ ID NO: 1889105 - RNA, 21 nt, Human
gaaauugacacaaguggaccu

SEQ ID NO: 1889106 - RNA, 17 nt, Human
gaaauuuguuauaauga

SEQ ID NO: 1889107 - RNA, 17 nt, Human
gaaauaugcacaauagc

SEQ ID NO: 1889108 - RNA, 18 nt, Human
gaaauaugcacaauagca

SEQ ID NO: 1889109 - RNA, 21 nt, Human
gaaauaucugaaaauguaugu

SEQ ID NO: 1889110 - RNA, 13 nt, Human
gaaauauaauuga

SEQ ID NO: 1889111 - RNA, 17 nt, Human
gaaauauacacacagca

SEQ ID NO: 1889112 - RNA, 15 nt, Human
gaaauauacacacag

SEQ ID NO: 1889113 - RNA, 18 nt, Human
gaaauacugcaagaaaau

SEQ ID NO: 1889114 - RNA, 20 nt, Human
gaaacagccugugucuuuaa

SEQ ID NO: 1889115 - RNA, 17 nt, Human
gaaauaaaguuugcuua

SEQ ID NO: 1889116 - RNA, 15 nt, Human
gaaccguaggaccca

SEQ ID NO: 1889117 - RNA, 17 nt, Human
gaaccaccacacccagc

SEQ ID NO: 1889118 - RNA, 16 nt, Human
gaaccaccacacccag

SEQ ID NO: 1889119 - RNA, 17 nt, Human
gaaccugacguagcugc

SEQ ID NO: 1889120 - RNA, 19 nt, Human
gaaccguuuugaagcuacu

SEQ ID NO: 1889121 - RNA, 17 nt, Human
gaaccguuuugaagcua

SEQ ID NO: 1889122 - RNA, 18 nt, Human
gaaccguuuugaagcuac

SEQ ID NO: 1889123 - RNA, 21 nt, Human
gaaccacaucuugcucugcug

SEQ ID NO: 1889124 - RNA, 16 nt, Human
gaacagacuggaagca

SEQ ID NO: 1889125 - RNA, 15 nt, Human
gaacagacuggaagc

SEQ ID NO: 1889126 - RNA, 13 nt, Human
gaacagaagaaaa

SEQ ID NO: 1889127 - RNA, 14 nt, Human
gaacagaagaaaau

SEQ ID NO: 1889128 - RNA, 18 nt, Human
gaaccuucuggccuccca

SEQ ID NO: 1889129 - RNA, 21 nt, Human
gaaccuucuggccucccacag

SEQ ID NO: 1889130 - RNA, 22 nt, Human
gaacggggcucuucucauuuca

SEQ ID NO: 1889131 - RNA, 19 nt, Human
gaacggggcucuucucauu

SEQ ID NO: 1889132 - RNA, 16 nt, Human
gaaccuggaacuuggg

SEQ ID NO: 1889133 - RNA, 22 nt, Human
gaacuagcauauaauucuauau

SEQ ID NO: 1889134 - RNA, 13 nt, Human
gaacuauuagagc

SEQ ID NO: 1889135 - RNA, 15 nt, Human
gaacucaacuuugac

SEQ ID NO: 1889136 - RNA, 14 nt, Human
gaacucccuuucaa

SEQ ID NO: 1889137 - RNA, 16 nt, Human
gaacucaaauggggcc

SEQ ID NO: 1889138 - RNA, 19 nt, Human
gaacucaaauggggccaga

SEQ ID NO: 1889139 - RNA, 20 nt, Human
gaacucaaauggggccagau

SEQ ID NO: 1889140 - RNA, 22 nt, Human
gaacucaaauggggccagaucc

SEQ ID NO: 1889141 - RNA, 23 nt, Human
gaacucaaauggggccagaucca

SEQ ID NO: 1889142 - RNA, 22 nt, Human
gaacuggguacuuguggacaca

SEQ ID NO: 1889143 - RNA, 15 nt, Human
gaacucccuuucaac

SEQ ID NO: 1889144 - RNA, 23 nt, Human
gaacuuccagguguuacuguaau

SEQ ID NO: 1889145 - RNA, 17 nt, Human
gaacuuacauuguucaa

SEQ ID NO: 1889146 - RNA, 23 nt, Human
gaagaaaauggaaccaggcuugg

SEQ ID NO: 1889147 - RNA, 22 nt, Human
gaagaaaacaucuauucucucc

SEQ ID NO: 1889148 - RNA, 14 nt, Human
gaagaaaacaucua

SEQ ID NO: 1889149 - RNA, 22 nt, Human
gaagaacuguguuucaaguuca

SEQ ID NO: 1889150 - RNA, 14 nt, Human
gaagaagagccaca

SEQ ID NO: 1889151 - RNA, 15 nt, Human
gaagaagagccacag

SEQ ID NO: 1889152 - RNA, 21 nt, Human
gaacuuguaaaggaauuuaaa

SEQ ID NO: 1889153 - RNA, 23 nt, Human
gaacuugguucccauuugcuccu

SEQ ID NO: 1889154 - RNA, 13 nt, Human
gaacuuggcgcug

SEQ ID NO: 1889155 - RNA, 15 nt, Human
gaacuuggcgcugcc

SEQ ID NO: 1889156 - RNA, 16 nt, Human
gaacuuggcgcugccc

SEQ ID NO: 1889157 - RNA, 20 nt, Human
cugagggagcuccaacucag

SEQ ID NO: 1889158 - RNA, 13 nt, Human
cugaggcugggcu

SEQ ID NO: 1889159 - RNA, 17 nt, Human
cugaggcuggcacagga

SEQ ID NO: 1889160 - RNA, 18 nt, Human
cugaggcuggcacaggac

SEQ ID NO: 1889161 - RNA, 19 nt, Human
cugaggcuggcacaggaca

SEQ ID NO: 1889162 - RNA, 20 nt, Human
cugaggcuggcacaggacau

SEQ ID NO: 1889163 - RNA, 11 nt, Human
cugaggcuggc

SEQ ID NO: 1889164 - RNA, 13 nt, Human
cugaggcuggcac

SEQ ID NO: 1889165 - RNA, 15 nt, Human
cugaggcugggcucc

SEQ ID NO: 1889166 - RNA, 16 nt, Human
cugaggcugggcuccc

SEQ ID NO: 1889167 - RNA, 17 nt, Human
cugaggcugggcucccu

SEQ ID NO: 1889168 - RNA, 22 nt, Human
cugaggcugggcucccuuccca

SEQ ID NO: 1889169 - RNA, 24 nt, Human
cugaggcccuucucuccagccccu

SEQ ID NO: 1889170 - RNA, 13 nt, Human
cugagccccuguc

SEQ ID NO: 1889171 - RNA, 15 nt, Human
cugagccccugucua

SEQ ID NO: 1889172 - RNA, 16 nt, Human
cugagccccugucuag

SEQ ID NO: 1889173 - RNA, 22 nt, Human
cugagccccugucuagagaggg

SEQ ID NO: 1889174 - RNA, 23 nt, Human
cugagccccugucuagagaggga

SEQ ID NO: 1889175 - RNA, 12 nt, Human
cugagccccugu

SEQ ID NO: 1889176 - RNA, 21 nt, Human
cugaggcuccacuuggucugu

SEQ ID NO: 1889177 - RNA, 15 nt, Human
cugaggcuccacuug

SEQ ID NO: 1889178 - RNA, 22 nt, Human
cugaggccugagcgcuccugcc

SEQ ID NO: 1889179 - RNA, 18 nt, Human
cugaggccugagcgcucc

SEQ ID NO: 1889180 - RNA, 17 nt, Human
cugaggccugagcgcuc

SEQ ID NO: 1889181 - RNA, 18 nt, Human
cugaucaggaccuccaag

SEQ ID NO: 1889182 - RNA, 17 nt, Human
cugaucagaccacggcu

SEQ ID NO: 1889183 - RNA, 20 nt, Human
cugauccuaguuccaccauc

SEQ ID NO: 1889184 - RNA, 21 nt, Human
cugauccuaguuccaccauca

SEQ ID NO: 1889185 - RNA, 14 nt, Human
cugauggugcaaug

SEQ ID NO: 1889186 - RNA, 12 nt, Human
cugauccuggag

SEQ ID NO: 1889187 - RNA, 15 nt, Human
cugauccuggaggcc

SEQ ID NO: 1889188 - RNA, 17 nt, Human
cugauccuggaggccca

SEQ ID NO: 1889189 - RNA, 15 nt, Human
cugauggugcaauga

SEQ ID NO: 1889190 - RNA, 16 nt, Human
cugauggugcaaugac

SEQ ID NO: 1889191 - RNA, 22 nt, Human
cugauacagaaaaguugaauuu

SEQ ID NO: 1889192 - RNA, 14 nt, Human
cugauaagcuucaa

SEQ ID NO: 1889193 - RNA, 18 nt, Human
cugagucugaaggcuggg

SEQ ID NO: 1889194 - RNA, 19 nt, Human
cugagucugaaggcugggu

SEQ ID NO: 1889195 - RNA, 15 nt, Human
cugagugaaccugua

SEQ ID NO: 1889196 - RNA, 21 nt, Human
cugagugaaaaaucuguggaa

SEQ ID NO: 1889197 - RNA, 13 nt, Human
cugagugaaccug

SEQ ID NO: 1889198 - RNA, 17 nt, Human
cugagugaaccuguaua

SEQ ID NO: 1889199 - RNA, 13 nt, Human
cugagugaaaaau

SEQ ID NO: 1889200 - RNA, 14 nt, Human
cugagugaaaaauc

SEQ ID NO: 1889201 - RNA, 18 nt, Human
cugaguuccuagccaccg

SEQ ID NO: 1889202 - RNA, 17 nt, Human
cugaguuccuagccacc

SEQ ID NO: 1889203 - RNA, 16 nt, Human
cugaguuccuagccac

SEQ ID NO: 1889204 - RNA, 15 nt, Human
cugaguuccuagcca

SEQ ID NO: 1889205 - RNA, 23 nt, Human
cugauaacuagauggugcugaga

SEQ ID NO: 1889206 - RNA, 24 nt, Human
cugauaacuagauggugcugagaa

SEQ ID NO: 1889207 - RNA, 18 nt, Human
cugauaacuagauggugc

SEQ ID NO: 1889208 - RNA, 19 nt, Human
cugauaacuagauggugcu

SEQ ID NO: 1889209 - RNA, 20 nt, Human
cugauaacuagauggugcug

SEQ ID NO: 1889210 - RNA, 21 nt, Human
cugauaacuagauggugcuga

SEQ ID NO: 1889211 - RNA, 21 nt, Human
cugaguugguguugacaugug

SEQ ID NO: 1889212 - RNA, 20 nt, Human
cugaguuguugagucuguuu

SEQ ID NO: 1889213 - RNA, 20 nt, Human
cugaguugacuugacagaac

SEQ ID NO: 1889214 - RNA, 16 nt, Human
cugcacaugucuugua

SEQ ID NO: 1889215 - RNA, 14 nt, Human
cugcacaugucuug

SEQ ID NO: 1889216 - RNA, 23 nt, Human
cugcacaugucuuguacaugugu

SEQ ID NO: 1889217 - RNA, 21 nt, Human
cugcacaugucuuguacaugu

SEQ ID NO: 1889218 - RNA, 23 nt, Human
cugcacaugaaucccacccacau

SEQ ID NO: 1889219 - RNA, 22 nt, Human
cugcacaugaaucccacccaca

SEQ ID NO: 1889220 - RNA, 18 nt, Human
cugcaauaaggggagagu

SEQ ID NO: 1889221 - RNA, 22 nt, Human
cugcacaagcugcacccucagg

SEQ ID NO: 1889222 - RNA, 12 nt, Human
cugcaccgggcc

SEQ ID NO: 1889223 - RNA, 23 nt, Human
cugcaccggcuggccuggccccu

SEQ ID NO: 1889224 - RNA, 15 nt, Human
cugcacuccccugcu

SEQ ID NO: 1889225 - RNA, 13 nt, Human
cugcacccucagg

SEQ ID NO: 1889226 - RNA, 14 nt, Human
cugcacccucaggc

SEQ ID NO: 1889227 - RNA, 16 nt, Human
cugcacccucaggcag

SEQ ID NO: 1889228 - RNA, 22 nt, Human
cugcaccggcuggccuggcccc

SEQ ID NO: 1889229 - RNA, 18 nt, Human
cugcacuugcagacucua

SEQ ID NO: 1889230 - RNA, 15 nt, Human
cugcacugaugcugc

SEQ ID NO: 1889231 - RNA, 17 nt, Human
cugcacugaugcugccc

SEQ ID NO: 1889232 - RNA, 18 nt, Human
cugcacugaugcugcccc

SEQ ID NO: 1889233 - RNA, 19 nt, Human
cugcacugaugcugccccu

SEQ ID NO: 1889234 - RNA, 16 nt, Human
cugcacuccccugcug

SEQ ID NO: 1889235 - RNA, 17 nt, Human
cugcacuccccugcugg

SEQ ID NO: 1889236 - RNA, 18 nt, Human
cugcacuccccugcuggg

SEQ ID NO: 1889237 - RNA, 20 nt, Human
cugcacucuagccuggguga

SEQ ID NO: 1889238 - RNA, 21 nt, Human
cugauugugucucuugguccu

SEQ ID NO: 1889239 - RNA, 16 nt, Human
cugauuuaggagaagc

SEQ ID NO: 1889240 - RNA, 17 nt, Human
cugauuuaggagaagcc

SEQ ID NO: 1889241 - RNA, 18 nt, Human
cugauuuaggagaagcca

SEQ ID NO: 1889242 - RNA, 20 nt, Human
cugauuuaggagaagccagg

SEQ ID NO: 1889243 - RNA, 22 nt, Human
cugauuuaggagaagccaggaa

SEQ ID NO: 1889244 - RNA, 21 nt, Human
cugauuuaggagaagccagga

SEQ ID NO: 1889245 - RNA, 16 nt, Human
cugauuuagauaugca

SEQ ID NO: 1889246 - RNA, 18 nt, Human
cugauuuccccuuuugca

SEQ ID NO: 1889247 - RNA, 19 nt, Human
cugauuuccccuuuugcau

SEQ ID NO: 1889248 - RNA, 13 nt, Human
cugauuuccccuu

SEQ ID NO: 1889249 - RNA, 15 nt, Human
cugauuuccccuuuu

SEQ ID NO: 1889250 - RNA, 17 nt, Human
cugauugugucucuugg

SEQ ID NO: 1889251 - RNA, 13 nt, Human
cugauuguauuua

SEQ ID NO: 1889252 - RNA, 18 nt, Human
cugauccuggaggcccag

SEQ ID NO: 1889253 - RNA, 17 nt, Human
cugauggugcaaugacc

SEQ ID NO: 1889254 - RNA, 19 nt, Human
cugauggugcaaugaccuu

SEQ ID NO: 1889255 - RNA, 20 nt, Human
cugauggugcaaugaccuuu

SEQ ID NO: 1889256 - RNA, 21 nt, Human
cugauggugcaaugaccuuuc

SEQ ID NO: 1889257 - RNA, 22 nt, Human
cugcaaagaucuguccucagcc

SEQ ID NO: 1889258 - RNA, 23 nt, Human
cugcaaagaucuguccucagccu

SEQ ID NO: 1889259 - RNA, 23 nt, Human
cugauuuuuuuuuccuucagugc

SEQ ID NO: 1889260 - RNA, 15 nt, Human
cugcaaaaauauuua

SEQ ID NO: 1889261 - RNA, 17 nt, Human
cugcaaaaauauuuaua

SEQ ID NO: 1889262 - RNA, 20 nt, Human
cugcaaaaauauuuauaaaa

SEQ ID NO: 1889263 - RNA, 21 nt, Human
cugcaaaaauauuuauaaaac

SEQ ID NO: 1889264 - RNA, 21 nt, Human
cugauuuuuuuuuccuucagu

SEQ ID NO: 1889265 - RNA, 22 nt, Human
cugauuuuuuuuuccuucagug

SEQ ID NO: 1889266 - RNA, 16 nt, Human
cugauuuuuuuuuccu

SEQ ID NO: 1889267 - RNA, 18 nt, Human
cugauuuuuuuuuccuuc

SEQ ID NO: 1889268 - RNA, 19 nt, Human
cugauuuuuuuuuccuuca

SEQ ID NO: 1889269 - RNA, 20 nt, Human
cugauuuuuuuuuccuucag

SEQ ID NO: 1889270 - RNA, 21 nt, Human
cugccacugacugcagggaca

SEQ ID NO: 1889271 - RNA, 20 nt, Human
cugccacugacugcagggac

SEQ ID NO: 1889272 - RNA, 19 nt, Human
cugccacugacugcaggga

SEQ ID NO: 1889273 - RNA, 11 nt, Human
cugccaggcau

SEQ ID NO: 1889274 - RNA, 13 nt, Human
cugccaggcaugg

SEQ ID NO: 1889275 - RNA, 23 nt, Human
cugccacucaggcccaaagccuc

SEQ ID NO: 1889276 - RNA, 16 nt, Human
cugccacucaggccca

SEQ ID NO: 1889277 - RNA, 23 nt, Human
cugccaucucaccuccugcuggg

SEQ ID NO: 1889278 - RNA, 21 nt, Human
cugccaucucaccuccugcug

SEQ ID NO: 1889279 - RNA, 14 nt, Human
cugccaugccagcu

SEQ ID NO: 1889280 - RNA, 15 nt, Human
cugccaugccagcuu

SEQ ID NO: 1889281 - RNA, 13 nt, Human
cugcccaccuggc

SEQ ID NO: 1889282 - RNA, 14 nt, Human
cugcccaccuggcc

SEQ ID NO: 1889283 - RNA, 15 nt, Human
cugcccaccuggccu

SEQ ID NO: 1889284 - RNA, 18 nt, Human
cugcccacucccugcaac

SEQ ID NO: 1889285 - RNA, 20 nt, Human
cugcccauggacaggcuggc

SEQ ID NO: 1889286 - RNA, 16 nt, Human
cugcccauggacaggc

SEQ ID NO: 1889287 - RNA, 18 nt, Human
cugcccauggacaggcug

SEQ ID NO: 1889288 - RNA, 22 nt, Human
cugcccagcggacaguggcagg

SEQ ID NO: 1889289 - RNA, 17 nt, Human
cugcccaccuggccucu

SEQ ID NO: 1889290 - RNA, 18 nt, Human
cugcccaccuggccucug

SEQ ID NO: 1889291 - RNA, 19 nt, Human
cugcccaccuggccucugc

SEQ ID NO: 1889292 - RNA, 20 nt, Human
cugcccaccuggccucugca

SEQ ID NO: 1889293 - RNA, 22 nt, Human
cugcccaccuggccucugcacu

SEQ ID NO: 1889294 - RNA, 14 nt, Human
cugcccacucccug

SEQ ID NO: 1889295 - RNA, 15 nt, Human
cugcccacucccugc

SEQ ID NO: 1889296 - RNA, 16 nt, Human
cugcccacucccugca

SEQ ID NO: 1889297 - RNA, 23 nt, Human
cugcacuugcagacucuacagag

SEQ ID NO: 1889298 - RNA, 19 nt, Human
cugcaguugccagucaccc

SEQ ID NO: 1889299 - RNA, 17 nt, Human
cugcaguugccagucac

SEQ ID NO: 1889300 - RNA, 21 nt, Human
cugcaguugccagucaccccg

SEQ ID NO: 1889301 - RNA, 22 nt, Human
cugcaguugccagucaccccgg

SEQ ID NO: 1889302 - RNA, 22 nt, Human
cugcaucguuucaucuuccaac

SEQ ID NO: 1889303 - RNA, 22 nt, Human
cugcaucugaccagcagcgccu

SEQ ID NO: 1889304 - RNA, 16 nt, Human
cugcaucugaccagca

SEQ ID NO: 1889305 - RNA, 17 nt, Human
cugcaucugaccagcag

SEQ ID NO: 1889306 - RNA, 18 nt, Human
cugcaucugaccagcagc

SEQ ID NO: 1889307 - RNA, 19 nt, Human
cugcaucugaccagcagcg

SEQ ID NO: 1889308 - RNA, 20 nt, Human
cugcaucugaccagcagcgc

SEQ ID NO: 1889309 - RNA, 21 nt, Human
cugcaucugaccagcagcgcc

SEQ ID NO: 1889310 - RNA, 16 nt, Human
cugcaucguuucaucu

SEQ ID NO: 1889311 - RNA, 18 nt, Human
cugcaugcgggcuuccuc

SEQ ID NO: 1889312 - RNA, 22 nt, Human
cugcaugcgggcuuccuccugg

SEQ ID NO: 1889313 - RNA, 12 nt, Human
cugcaugcugcu

SEQ ID NO: 1889314 - RNA, 13 nt, Human
cugcaugcugcug

SEQ ID NO: 1889315 - RNA, 15 nt, Human
cugcaugcugcugga

SEQ ID NO: 1889316 - RNA, 18 nt, Human
cugcaugcugcuggacag

SEQ ID NO: 1889317 - RNA, 22 nt, Human
cugcaugcugcuggacaguauc

SEQ ID NO: 1889318 - RNA, 18 nt, Human
cugccaaugggagcucau

SEQ ID NO: 1889319 - RNA, 19 nt, Human
cugccaaugggagcucaug

SEQ ID NO: 1889320 - RNA, 18 nt, Human
cugcgguccacccaggag

SEQ ID NO: 1889321 - RNA, 22 nt, Human
cugcgggcuggguguggucucc

SEQ ID NO: 1889322 - RNA, 20 nt, Human
cugcgguccacccaggagcc

SEQ ID NO: 1889323 - RNA, 19 nt, Human
cugcgguccacccaggagc

SEQ ID NO: 1889324 - RNA, 20 nt, Human
cugcgugcagggacaaagag

SEQ ID NO: 1889325 - RNA, 16 nt, Human
cugcggagcaagagga

SEQ ID NO: 1889326 - RNA, 17 nt, Human
cugcggagcaagaggag

SEQ ID NO: 1889327 - RNA, 18 nt, Human
cugccuuuggcagaguuc

SEQ ID NO: 1889328 - RNA, 22 nt, Human
cugccugcccaggccccugcca

SEQ ID NO: 1889329 - RNA, 21 nt, Human
cugccugcccaggccccugcc

SEQ ID NO: 1889330 - RNA, 13 nt, Human
cugccuccaggaa

SEQ ID NO: 1889331 - RNA, 21 nt, Human
cugccucugacacacagcucu

SEQ ID NO: 1889332 - RNA, 18 nt, Human
cugccucugacacacagc

SEQ ID NO: 1889333 - RNA, 17 nt, Human
cugccucugacacacag

SEQ ID NO: 1889334 - RNA, 19 nt, Human
cugccucucugcagguccc

SEQ ID NO: 1889335 - RNA, 18 nt, Human
cugccuggacuagaggga

SEQ ID NO: 1889336 - RNA, 12 nt, Human
cugccccaacuc

SEQ ID NO: 1889337 - RNA, 12 nt, Human
cugccgcagccc

SEQ ID NO: 1889338 - RNA, 13 nt, Human
cugccgcagcccu

SEQ ID NO: 1889339 - RNA, 15 nt, Human
cugccgcagagcugg

SEQ ID NO: 1889340 - RNA, 14 nt, Human
cugccgcagagcug

SEQ ID NO: 1889341 - RNA, 13 nt, Human
cugccgcagagcu

SEQ ID NO: 1889342 - RNA, 23 nt, Human
cugccgcagcccugcagagggca

SEQ ID NO: 1889343 - RNA, 18 nt, Human
cugccgcagagcuggccg

SEQ ID NO: 1889344 - RNA, 16 nt, Human
cugccgcagagcuggc

SEQ ID NO: 1889345 - RNA, 19 nt, Human
cugccgcagcccugcagag

SEQ ID NO: 1889346 - RNA, 20 nt, Human
cugccgcagcccugcagagg

SEQ ID NO: 1889347 - RNA, 21 nt, Human
cugccgcagcccugcagaggg

SEQ ID NO: 1889348 - RNA, 22 nt, Human
cugccgcagcccugcagagggc

SEQ ID NO: 1889349 - RNA, 19 nt, Human
cugccucagccucccaaag

SEQ ID NO: 1889350 - RNA, 18 nt, Human
cugccucagccucccaag

SEQ ID NO: 1889351 - RNA, 10 nt, Human
cugccucagg

SEQ ID NO: 1889352 - RNA, 15 nt, Human
cugccucagccuccc

SEQ ID NO: 1889353 - RNA, 15 nt, Human
cugccucucugcagg

SEQ ID NO: 1889354 - RNA, 16 nt, Human
cugccucucugcaggu

SEQ ID NO: 1889355 - RNA, 17 nt, Human
cugccucucugcagguc

SEQ ID NO: 1889356 - RNA, 18 nt, Human
cugccucucugcaggucc

SEQ ID NO: 1889357 - RNA, 14 nt, Human
cugccuccagggcu

SEQ ID NO: 1889358 - RNA, 23 nt, Human
cugccuccagggcuggacugagg

SEQ ID NO: 1889359 - RNA, 22 nt, Human
cugccuccagggcuggacugag

SEQ ID NO: 1889360 - RNA, 20 nt, Human
cugccuccagggcuggacug

SEQ ID NO: 1889361 - RNA, 19 nt, Human
cugccuccagggcuggacu

SEQ ID NO: 1889362 - RNA, 18 nt, Human
cugccuccagggcuggac

SEQ ID NO: 1889363 - RNA, 17 nt, Human
cugccuccagggcugga

SEQ ID NO: 1889364 - RNA, 16 nt, Human
cugccuccagggcugg

SEQ ID NO: 1889365 - RNA, 15 nt, Human
cugccuccagggcug

SEQ ID NO: 1889366 - RNA, 13 nt, Human
cucugugugcucc

SEQ ID NO: 1889367 - RNA, 21 nt, Human
cucugugucugaguggcuuca

SEQ ID NO: 1889368 - RNA, 20 nt, Human
cucuguugcccaggcuggag

SEQ ID NO: 1889369 - RNA, 22 nt, Human
cucuguugcccaggcuggagug

SEQ ID NO: 1889370 - RNA, 14 nt, Human
cucugugucugagu

SEQ ID NO: 1889371 - RNA, 20 nt, Human
cucugugucugaguggcuuc

SEQ ID NO: 1889372 - RNA, 13 nt, Human
cucuguuuaugcu

SEQ ID NO: 1889373 - RNA, 15 nt, Human
cucuguuuaugcuuu

SEQ ID NO: 1889374 - RNA, 23 nt, Human
cucugugucagguggggcagcuu

SEQ ID NO: 1889375 - RNA, 22 nt, Human
cucugugucagguggggcagcu

SEQ ID NO: 1889376 - RNA, 21 nt, Human
cucugugucagguggggcagc

SEQ ID NO: 1889377 - RNA, 20 nt, Human
cucugugucagguggggcag

SEQ ID NO: 1889378 - RNA, 23 nt, Human
cucugugaacgauuuagaaagaa

SEQ ID NO: 1889379 - RNA, 18 nt, Human
cucugugaacgauuuaga

SEQ ID NO: 1889380 - RNA, 21 nt, Human
cucugugaacgauuuagaaag

SEQ ID NO: 1889381 - RNA, 13 nt, Human
cucuucuccaggc

SEQ ID NO: 1889382 - RNA, 15 nt, Human
cucuucuccaggcug

SEQ ID NO: 1889383 - RNA, 19 nt, Human
cucuucucauuucaccccu

SEQ ID NO: 1889384 - RNA, 15 nt, Human
cucuucucauuucac

SEQ ID NO: 1889385 - RNA, 12 nt, Human
cucuucucauuu

SEQ ID NO: 1889386 - RNA, 11 nt, Human
cucuucucauu

SEQ ID NO: 1889387 - RNA, 14 nt, Human
cucuucucagccac

SEQ ID NO: 1889388 - RNA, 15 nt, Human
cucuucucagccacu

SEQ ID NO: 1889389 - RNA, 20 nt, Human
cucugccucugacacacagc

SEQ ID NO: 1889390 - RNA, 19 nt, Human
cucugccucugacacacag

SEQ ID NO: 1889391 - RNA, 21 nt, Human
cucugccucccaucacccgcu

SEQ ID NO: 1889392 - RNA, 10 nt, Human
cucugccuga

SEQ ID NO: 1889393 - RNA, 19 nt, Human
cucuggauuauauuaugaa

SEQ ID NO: 1889394 - RNA, 20 nt, Human
cucuggauuauauuaugaag

SEQ ID NO: 1889395 - RNA, 23 nt, Human
cucuggcagcucagagagggugg

SEQ ID NO: 1889396 - RNA, 22 nt, Human
cucuggccuucggccuccaucc

SEQ ID NO: 1889397 - RNA, 21 nt, Human
cucuggccuucggccuccauc

SEQ ID NO: 1889398 - RNA, 22 nt, Human
cucuguccugggagugagcugg

SEQ ID NO: 1889399 - RNA, 15 nt, Human
cucuguccugggagu

SEQ ID NO: 1889400 - RNA, 14 nt, Human
cucuguccugggag

SEQ ID NO: 1889401 - RNA, 20 nt, Human
cucugggccauucuccacag

SEQ ID NO: 1889402 - RNA, 13 nt, Human
cucugucgcccag

SEQ ID NO: 1889403 - RNA, 17 nt, Human
cucugucgcccagucug

SEQ ID NO: 1889404 - RNA, 19 nt, Human
cucugucgcccagucugga

SEQ ID NO: 1889405 - RNA, 18 nt, Human
cucugucgcccagucugg

SEQ ID NO: 1889406 - RNA, 15 nt, Human
cucugcauucuagua

SEQ ID NO: 1889407 - RNA, 14 nt, Human
cucugcauucuagu

SEQ ID NO: 1889408 - RNA, 21 nt, Human
cucugcaggucccuaauaaag

SEQ ID NO: 1889409 - RNA, 22 nt, Human
cucugcaggucccuaauaaagc

SEQ ID NO: 1889410 - RNA, 18 nt, Human
cucugcaggucccuaaua

SEQ ID NO: 1889411 - RNA, 12 nt, Human
cucugaguguga

SEQ ID NO: 1889412 - RNA, 15 nt, Human
cucugauacagaaaa

SEQ ID NO: 1889413 - RNA, 13 nt, Human
cucugcacaagcu

SEQ ID NO: 1889414 - RNA, 19 nt, Human
cucugcaggucccuaauaa

SEQ ID NO: 1889415 - RNA, 20 nt, Human
cucugcaggucccuaauaaa

SEQ ID NO: 1889416 - RNA, 14 nt, Human
cucugcacaagcug

SEQ ID NO: 1889417 - RNA, 15 nt, Human
cucugcacaagcugc

SEQ ID NO: 1889418 - RNA, 18 nt, Human
cucugcccacucccugca

SEQ ID NO: 1889419 - RNA, 20 nt, Human
cucugcccacucccugcaac

SEQ ID NO: 1889420 - RNA, 17 nt, Human
cucugccccauccucca

SEQ ID NO: 1889421 - RNA, 21 nt, Human
cucugccccauccuccagcag

SEQ ID NO: 1889422 - RNA, 22 nt, Human
cucugccccauccuccagcagg

SEQ ID NO: 1889423 - RNA, 24 nt, Human
cucugccccauccuccagcaggga

SEQ ID NO: 1889424 - RNA, 14 nt, Human
cucugcccaacccu

SEQ ID NO: 1889425 - RNA, 20 nt, Human
cucugcccaacccuucccuc

SEQ ID NO: 1889426 - RNA, 15 nt, Human
cucugccccauccuc

SEQ ID NO: 1889427 - RNA, 13 nt, Human
cucugcccacucc

SEQ ID NO: 1889428 - RNA, 15 nt, Human
cucugcccacucccu

SEQ ID NO: 1889429 - RNA, 16 nt, Human
cucugcccacucccug

SEQ ID NO: 1889430 - RNA, 17 nt, Human
cucugcccacucccugc

SEQ ID NO: 1889431 - RNA, 13 nt, Human
cucugccucccau

SEQ ID NO: 1889432 - RNA, 14 nt, Human
cucugccucccauc

SEQ ID NO: 1889433 - RNA, 16 nt, Human
cucugccucccaucac

SEQ ID NO: 1889434 - RNA, 17 nt, Human
cucugccucccaucacc

SEQ ID NO: 1889435 - RNA, 22 nt, Human
cucugaaggacauugcggacag

SEQ ID NO: 1889436 - RNA, 19 nt, Human
cucugaauuugagauacaa

SEQ ID NO: 1889437 - RNA, 19 nt, Human
cucugaaggguaauuauau

SEQ ID NO: 1889438 - RNA, 19 nt, Human
cucugacacacagcucugu

SEQ ID NO: 1889439 - RNA, 23 nt, Human
cucugacagaagaaccccagggu

SEQ ID NO: 1889440 - RNA, 18 nt, Human
cucugacacacagcucug

SEQ ID NO: 1889441 - RNA, 17 nt, Human
cucugacacacagcucu

SEQ ID NO: 1889442 - RNA, 16 nt, Human
cucugacacacagcuc

SEQ ID NO: 1889443 - RNA, 15 nt, Human
cucugacacacagcu

SEQ ID NO: 1889444 - RNA, 14 nt, Human
cucugacacacagc

SEQ ID NO: 1889445 - RNA, 21 nt, Human
cucugagacucgcgacaaugc

SEQ ID NO: 1889446 - RNA, 14 nt, Human
cucugaggacacua

SEQ ID NO: 1889447 - RNA, 12 nt, Human
cucugaggacac

SEQ ID NO: 1889448 - RNA, 16 nt, Human
cucugaggacacuaac

SEQ ID NO: 1889449 - RNA, 23 nt, Human
cucugagacucgcgacaaugcaa

SEQ ID NO: 1889450 - RNA, 13 nt, Human
cucugaggaagcu

SEQ ID NO: 1889451 - RNA, 12 nt, Human
cucuuuguaaga

SEQ ID NO: 1889452 - RNA, 20 nt, Human
cucuuuguucuaaagaugga

SEQ ID NO: 1889453 - RNA, 14 nt, Human
cucuuuucaaaaca

SEQ ID NO: 1889454 - RNA, 23 nt, Human
cugaaagggacgcuacccgggaa

SEQ ID NO: 1889455 - RNA, 19 nt, Human
cugaaagugaaaguccaga

SEQ ID NO: 1889456 - RNA, 23 nt, Human
cugaaagugaaaguccagaaacu

SEQ ID NO: 1889457 - RNA, 16 nt, Human
cucuucuccaggcugu

SEQ ID NO: 1889458 - RNA, 22 nt, Human
cucuuuggucuacacugugcug

SEQ ID NO: 1889459 - RNA, 23 nt, Human
cucuuuggucuacacugugcuga

SEQ ID NO: 1889460 - RNA, 15 nt, Human
cugaacauuccagag

SEQ ID NO: 1889461 - RNA, 19 nt, Human
cugaacaauaggcuguucc

SEQ ID NO: 1889462 - RNA, 21 nt, Human
cugaacaauaggcuguuccca

SEQ ID NO: 1889463 - RNA, 14 nt, Human
cugaagaaccaguc

SEQ ID NO: 1889464 - RNA, 15 nt, Human
cugaagaaccagucc

SEQ ID NO: 1889465 - RNA, 22 nt, Human
cugaagaaccaguccccccacc

SEQ ID NO: 1889466 - RNA, 16 nt, Human
cugaaccccucccucc

SEQ ID NO: 1889467 - RNA, 20 nt, Human
cugaaauaaacgucuuaaau

SEQ ID NO: 1889468 - RNA, 19 nt, Human
cugaaugguuuucaaaaua

SEQ ID NO: 1889469 - RNA, 20 nt, Human
cugaaugguuuucaaaauaa

SEQ ID NO: 1889470 - RNA, 12 nt, Human
cugaauuauuuu

SEQ ID NO: 1889471 - RNA, 12 nt, Human
cugaauuucuuu

SEQ ID NO: 1889472 - RNA, 15 nt, Human
cugaauuaugaaacu

SEQ ID NO: 1889473 - RNA, 14 nt, Human
cugaauuaugaaac

SEQ ID NO: 1889474 - RNA, 13 nt, Human
cugaauuaugaaa

SEQ ID NO: 1889475 - RNA, 23 nt, Human
cugaauuaucuauacauaucuuu

SEQ ID NO: 1889476 - RNA, 17 nt, Human
cugaagucacacaguga

SEQ ID NO: 1889477 - RNA, 19 nt, Human
cugaagucacacagugagu

SEQ ID NO: 1889478 - RNA, 18 nt, Human
cugaagucacacagugag

SEQ ID NO: 1889479 - RNA, 21 nt, Human
cugaagucacacagugagucg

SEQ ID NO: 1889480 - RNA, 17 nt, Human
cugaaguucagcugcau

SEQ ID NO: 1889481 - RNA, 19 nt, Human
cugaaguucagccacccug

SEQ ID NO: 1889482 - RNA, 22 nt, Human
cugaagucccagauacuugggg

SEQ ID NO: 1889483 - RNA, 17 nt, Human
cugaagucuuuguacag

SEQ ID NO: 1889484 - RNA, 20 nt, Human
cugaagucuuuguacagaca

SEQ ID NO: 1889485 - RNA, 15 nt, Human
cugagccagauuuca

SEQ ID NO: 1889486 - RNA, 13 nt, Human
cugagccagauuu

SEQ ID NO: 1889487 - RNA, 14 nt, Human
cugagccagauuuc

SEQ ID NO: 1889488 - RNA, 12 nt, Human
cugagcaggugu

SEQ ID NO: 1889489 - RNA, 21 nt, Human
cugagauuucaucugcucucc

SEQ ID NO: 1889490 - RNA, 20 nt, Human
cugagauuucaucugcucuc

SEQ ID NO: 1889491 - RNA, 19 nt, Human
cugagauuucaucugcucu

SEQ ID NO: 1889492 - RNA, 18 nt, Human
cugagauuucaucugcuc

SEQ ID NO: 1889493 - RNA, 16 nt, Human
cugagauuucaucugc

SEQ ID NO: 1889494 - RNA, 15 nt, Human
cugagauuucaucug

SEQ ID NO: 1889495 - RNA, 14 nt, Human
cugagauuucaucu

SEQ ID NO: 1889496 - RNA, 22 nt, Human
cugagauuucaucugcucuccu

SEQ ID NO: 1889497 - RNA, 20 nt, Human
cugagcaacucuugauuauc

SEQ ID NO: 1889498 - RNA, 20 nt, Human
cugagacagcccgggcucug

SEQ ID NO: 1889499 - RNA, 19 nt, Human
cugagacagcccgggcucu

SEQ ID NO: 1889500 - RNA, 21 nt, Human
cugagacagcccgggcucugc

SEQ ID NO: 1889501 - RNA, 22 nt, Human
cugagacagcccgggcucugcc

SEQ ID NO: 1889502 - RNA, 20 nt, Human
cugacugucucccgggacua

SEQ ID NO: 1889503 - RNA, 18 nt, Human
cugacagacacaggcccg

SEQ ID NO: 1889504 - RNA, 17 nt, Human
cugacagacacaggccc

SEQ ID NO: 1889505 - RNA, 20 nt, Human
cugaccagcagcgccuuucc

SEQ ID NO: 1889506 - RNA, 21 nt, Human
cugaccagcagcgccuuuccc

SEQ ID NO: 1889507 - RNA, 22 nt, Human
cugaccagcagcgccuuuccca

SEQ ID NO: 1889508 - RNA, 16 nt, Human
cugacagacacaggcc

SEQ ID NO: 1889509 - RNA, 14 nt, Human
cugaauuucuuuug

SEQ ID NO: 1889510 - RNA, 16 nt, Human
cugaauuaugaaacuu

SEQ ID NO: 1889511 - RNA, 15 nt, Human
cugacggccagggag

SEQ ID NO: 1889512 - RNA, 19 nt, Human
cugacggccagggagaagc

SEQ ID NO: 1889513 - RNA, 20 nt, Human
cugacggccagggagaagcu

SEQ ID NO: 1889514 - RNA, 21 nt, Human
cugacggccagggagaagcuc

SEQ ID NO: 1889515 - RNA, 18 nt, Human
cugacguagcugcaaagg

SEQ ID NO: 1889516 - RNA, 23 nt, Human
cugacguagcugcaaaggacaga

SEQ ID NO: 1889517 - RNA, 22 nt, Human
cugacguagcugcaaaggacag

SEQ ID NO: 1889518 - RNA, 22 nt, Human
cuccuuggugccuggccuggca

SEQ ID NO: 1889519 - RNA, 19 nt, Human
cuccuuggugccuggccug

SEQ ID NO: 1889520 - RNA, 15 nt, Human
cuccuuggugccugg

SEQ ID NO: 1889521 - RNA, 19 nt, Human
cucgagaacuuucauuuuu

SEQ ID NO: 1889522 - RNA, 13 nt, Human
cucgagcaugccu

SEQ ID NO: 1889523 - RNA, 15 nt, Human
cucgagcaugccugg

SEQ ID NO: 1889524 - RNA, 16 nt, Human
cucgagcaugccugga

SEQ ID NO: 1889525 - RNA, 19 nt, Human
cucgagcaugccuggaugg

SEQ ID NO: 1889526 - RNA, 14 nt, Human
cuccuuggugccug

SEQ ID NO: 1889527 - RNA, 23 nt, Human
cuccuuggugucgggcaugacac

SEQ ID NO: 1889528 - RNA, 15 nt, Human
cuccuuccugugugu

SEQ ID NO: 1889529 - RNA, 20 nt, Human
cuccuuccuggagcccagag

SEQ ID NO: 1889530 - RNA, 13 nt, Human
cuccuuccugugu

SEQ ID NO: 1889531 - RNA, 23 nt, Human
cuccuuccuggagcccagaggag

SEQ ID NO: 1889532 - RNA, 20 nt, Human
cucgcccugcgguagauggg

SEQ ID NO: 1889533 - RNA, 13 nt, Human
cucgcaggaagac

SEQ ID NO: 1889534 - RNA, 22 nt, Human
cucgagcaugccuggauggggc

SEQ ID NO: 1889535 - RNA, 14 nt, Human
cucgauuucuccag

SEQ ID NO: 1889536 - RNA, 17 nt, Human
cucgauucauauugaau

SEQ ID NO: 1889537 - RNA, 12 nt, Human
cucgcaggaaga

SEQ ID NO: 1889538 - RNA, 21 nt, Human
cuccugccucgaacuggcugc

SEQ ID NO: 1889539 - RNA, 20 nt, Human
cuccugccucgaacuggcug

SEQ ID NO: 1889540 - RNA, 18 nt, Human
cuccugccucgaacuggc

SEQ ID NO: 1889541 - RNA, 21 nt, Human
cuccugccucagccuccugag

SEQ ID NO: 1889542 - RNA, 22 nt, Human
cuccugccucgaacuggcugca

SEQ ID NO: 1889543 - RNA, 15 nt, Human
cuccucuccccagca

SEQ ID NO: 1889544 - RNA, 13 nt, Human
cuccucuccccag

SEQ ID NO: 1889545 - RNA, 17 nt, Human
cuccugccgcagagcug

SEQ ID NO: 1889546 - RNA, 16 nt, Human
cuccugccgcagagcu

SEQ ID NO: 1889547 - RNA, 14 nt, Human
cuccucuccccagc

SEQ ID NO: 1889548 - RNA, 18 nt, Human
cuccugccgcagagcugg

SEQ ID NO: 1889549 - RNA, 23 nt, Human
cuccucucccauugucccucugc

SEQ ID NO: 1889550 - RNA, 11 nt, Human
cuccugccuca

SEQ ID NO: 1889551 - RNA, 12 nt, Human
cuccugccucag

SEQ ID NO: 1889552 - RNA, 16 nt, Human
cuccugccucagccuc

SEQ ID NO: 1889553 - RNA, 17 nt, Human
cuccugccucagccucc

SEQ ID NO: 1889554 - RNA, 24 nt, Human
cuccugugugugcgccuacaggag

SEQ ID NO: 1889555 - RNA, 23 nt, Human
cuccugugugugcgccuacagga

SEQ ID NO: 1889556 - RNA, 21 nt, Human
cuccugugugugcgccuacag

SEQ ID NO: 1889557 - RNA, 13 nt, Human
cuccugcugggca

SEQ ID NO: 1889558 - RNA, 14 nt, Human
cuccugcuguaaau

SEQ ID NO: 1889559 - RNA, 14 nt, Human
cuccuggaaauauu

SEQ ID NO: 1889560 - RNA, 23 nt, Human
cuccugcuguaaauuuggcuucu

SEQ ID NO: 1889561 - RNA, 20 nt, Human
cuccuuagaaguggaaguag

SEQ ID NO: 1889562 - RNA, 17 nt, Human
cuccuuagaaguggaag

SEQ ID NO: 1889563 - RNA, 13 nt, Human
cuccuuagaagug

SEQ ID NO: 1889564 - RNA, 14 nt, Human
cuccuucccuuccu

SEQ ID NO: 1889565 - RNA, 15 nt, Human
cucccggggcagggc

SEQ ID NO: 1889566 - RNA, 18 nt, Human
cucccggggcagggcagc

SEQ ID NO: 1889567 - RNA, 17 nt, Human
cucccggggcagggcag

SEQ ID NO: 1889568 - RNA, 16 nt, Human
cucccggggcagggca

SEQ ID NO: 1889569 - RNA, 20 nt, Human
cucccgaguagcugggacua

SEQ ID NO: 1889570 - RNA, 19 nt, Human
cucccgaguagcugggacu

SEQ ID NO: 1889571 - RNA, 22 nt, Human
cucccugcaucugaccagcagc

SEQ ID NO: 1889572 - RNA, 23 nt, Human
cucccugcaucugaccagcagcg

SEQ ID NO: 1889573 - RNA, 15 nt, Human
cucccugccuccagg

SEQ ID NO: 1889574 - RNA, 16 nt, Human
cucccugccuccagga

SEQ ID NO: 1889575 - RNA, 18 nt, Human
cucccugccucaggccuc

SEQ ID NO: 1889576 - RNA, 14 nt, Human
cucccugccuccag

SEQ ID NO: 1889577 - RNA, 23 nt, Human
cuccccagcaagugagagcuggg

SEQ ID NO: 1889578 - RNA, 22 nt, Human
cuccccagcaagugagagcugg

SEQ ID NO: 1889579 - RNA, 13 nt, Human
cuccauccugagg

SEQ ID NO: 1889580 - RNA, 14 nt, Human
cuccauccugaggc

SEQ ID NO: 1889581 - RNA, 15 nt, Human
cuccccugcccccag

SEQ ID NO: 1889582 - RNA, 14 nt, Human
cuccccugccccca

SEQ ID NO: 1889583 - RNA, 13 nt, Human
cuccccugccccc

SEQ ID NO: 1889584 - RNA, 23 nt, Human
cuccccugcccccaggacugggc

SEQ ID NO: 1889585 - RNA, 22 nt, Human
cuccccugcccccaggacuggg

SEQ ID NO: 1889586 - RNA, 21 nt, Human
cuccccugcccccaggacugg

SEQ ID NO: 1889587 - RNA, 20 nt, Human
cuccccugcccccaggacug

SEQ ID NO: 1889588 - RNA, 19 nt, Human
cuccccugcccccaggacu

SEQ ID NO: 1889589 - RNA, 18 nt, Human
cuccccugcccccaggac

SEQ ID NO: 1889590 - RNA, 17 nt, Human
cuccccugcccccagga

SEQ ID NO: 1889591 - RNA, 16 nt, Human
cuccccugcccccagg

SEQ ID NO: 1889592 - RNA, 12 nt, Human
cucccuuucaac

SEQ ID NO: 1889593 - RNA, 16 nt, Human
cucccuguuccccaga

SEQ ID NO: 1889594 - RNA, 17 nt, Human
cucccuguuccccagag

SEQ ID NO: 1889595 - RNA, 18 nt, Human
cucccuguuccccagaga

SEQ ID NO: 1889596 - RNA, 19 nt, Human
cucccuguuccccagagaa

SEQ ID NO: 1889597 - RNA, 18 nt, Human
cuccucagaucuucugug

SEQ ID NO: 1889598 - RNA, 12 nt, Human
cuccuccuagcc

SEQ ID NO: 1889599 - RNA, 15 nt, Human
cuccuccucccugca

SEQ ID NO: 1889600 - RNA, 13 nt, Human
cuccuccucccug

SEQ ID NO: 1889601 - RNA, 14 nt, Human
cuccuccucccugc

SEQ ID NO: 1889602 - RNA, 21 nt, Human
cuccucucccauugucccucu

SEQ ID NO: 1889603 - RNA, 15 nt, Human
cuccuccagccgcca

SEQ ID NO: 1889604 - RNA, 17 nt, Human
cuccuccacucuccccc

SEQ ID NO: 1889605 - RNA, 13 nt, Human
cuccuccagaguc

SEQ ID NO: 1889606 - RNA, 15 nt, Human
cuccuccagagucag

SEQ ID NO: 1889607 - RNA, 15 nt, Human
cuccucaguucuugc

SEQ ID NO: 1889608 - RNA, 18 nt, Human
cucauuugucacacacuu

SEQ ID NO: 1889609 - RNA, 16 nt, Human
cuccaaaauaaaacuu

SEQ ID NO: 1889610 - RNA, 15 nt, Human
cuccaaaauaaaacu

SEQ ID NO: 1889611 - RNA, 18 nt, Human
cuccaaaauaaaacuuuu

SEQ ID NO: 1889612 - RNA, 17 nt, Human
cucauuugucacacacu

SEQ ID NO: 1889613 - RNA, 13 nt, Human
cucauuaaaaaaa

SEQ ID NO: 1889614 - RNA, 18 nt, Human
cucauguuuucaacugcc

SEQ ID NO: 1889615 - RNA, 20 nt, Human
cucauguuuucaacugccaa

SEQ ID NO: 1889616 - RNA, 16 nt, Human
cucauguuuucaacug

SEQ ID NO: 1889617 - RNA, 17 nt, Human
cucauguuuucaacugc

SEQ ID NO: 1889618 - RNA, 22 nt, Human
cucaucucuuagcuccccucca

SEQ ID NO: 1889619 - RNA, 20 nt, Human
cucaucucuuagcuccccuc

SEQ ID NO: 1889620 - RNA, 21 nt, Human
cuccaaugcuguuaucccugc

SEQ ID NO: 1889621 - RNA, 23 nt, Human
cuccaaguccacaguggaaccag

SEQ ID NO: 1889622 - RNA, 18 nt, Human
cuccaauuuuuuuuuccu

SEQ ID NO: 1889623 - RNA, 19 nt, Human
cuccaauuuuuuuuuccuu

SEQ ID NO: 1889624 - RNA, 20 nt, Human
cuccacaccauucaggucuu

SEQ ID NO: 1889625 - RNA, 18 nt, Human
cuccacaccauucagguc

SEQ ID NO: 1889626 - RNA, 13 nt, Human
cuccacccugcuc

SEQ ID NO: 1889627 - RNA, 23 nt, Human
cuccaccaagccuggucagccca

SEQ ID NO: 1889628 - RNA, 15 nt, Human
cuccacccugcucuc

SEQ ID NO: 1889629 - RNA, 14 nt, Human
cuccacccuggccg

SEQ ID NO: 1889630 - RNA, 15 nt, Human
cuccacccuggccga

SEQ ID NO: 1889631 - RNA, 12 nt, Human
cuccauccugag

SEQ ID NO: 1889632 - RNA, 18 nt, Human
cuccaggagcagccacau

SEQ ID NO: 1889633 - RNA, 23 nt, Human
cuccaggagcagccacauuccug

SEQ ID NO: 1889634 - RNA, 11 nt, Human
cuccaggagca

SEQ ID NO: 1889635 - RNA, 13 nt, Human
cuccaggagcagc

SEQ ID NO: 1889636 - RNA, 12 nt, Human
cuccaggaacca

SEQ ID NO: 1889637 - RNA, 18 nt, Human
cuccaggaaccacaccac

SEQ ID NO: 1889638 - RNA, 14 nt, Human
cuccaggagcagcc

SEQ ID NO: 1889639 - RNA, 15 nt, Human
cuccaggagcagcca

SEQ ID NO: 1889640 - RNA, 16 nt, Human
cuccaggagcagccac

SEQ ID NO: 1889641 - RNA, 17 nt, Human
cuccaggagcagccaca

SEQ ID NO: 1889642 - RNA, 14 nt, Human
cuccagcucaccag

SEQ ID NO: 1889643 - RNA, 12 nt, Human
cuccagccuggg

SEQ ID NO: 1889644 - RNA, 20 nt, Human
cuccagccccuggaugcagc

SEQ ID NO: 1889645 - RNA, 16 nt, Human
cuccagccccuggaug

SEQ ID NO: 1889646 - RNA, 17 nt, Human
cuccagccccuggaugc

SEQ ID NO: 1889647 - RNA, 15 nt, Human
cuccagccccuggau

SEQ ID NO: 1889648 - RNA, 13 nt, Human
cuccaccugcucu

SEQ ID NO: 1889649 - RNA, 14 nt, Human
cuccaccugccagg

SEQ ID NO: 1889650 - RNA, 12 nt, Human
cuccaccugcca

SEQ ID NO: 1889651 - RNA, 13 nt, Human
cuccaccugccag

SEQ ID NO: 1889652 - RNA, 15 nt, Human
cucagggucccuggu

SEQ ID NO: 1889653 - RNA, 16 nt, Human
cucagggucccuggug

SEQ ID NO: 1889654 - RNA, 17 nt, Human
cucagggucccuggugg

SEQ ID NO: 1889655 - RNA, 18 nt, Human
cucagggucccugguggc

SEQ ID NO: 1889656 - RNA, 16 nt, Human
cucaggugagaagcag

SEQ ID NO: 1889657 - RNA, 19 nt, Human
cucaggugagaagcagagg

SEQ ID NO: 1889658 - RNA, 20 nt, Human
cucaggugagaagcagagga

SEQ ID NO: 1889659 - RNA, 16 nt, Human
cucagggccuggcuca

SEQ ID NO: 1889660 - RNA, 15 nt, Human
cucagggccuggucg

SEQ ID NO: 1889661 - RNA, 14 nt, Human
cucagggccuggcu

SEQ ID NO: 1889662 - RNA, 15 nt, Human
cucagggccuggcuc

SEQ ID NO: 1889663 - RNA, 13 nt, Human
cucagggccuggc

SEQ ID NO: 1889664 - RNA, 10 nt, Human
cucagggcag

SEQ ID NO: 1889665 - RNA, 18 nt, Human
cucagcauccuggcaccc

SEQ ID NO: 1889666 - RNA, 12 nt, Human
cucagccagaga

SEQ ID NO: 1889667 - RNA, 11 nt, Human
cucagccagca

SEQ ID NO: 1889668 - RNA, 13 nt, Human
cucagccagcacu

SEQ ID NO: 1889669 - RNA, 14 nt, Human
cucagccagagaag

SEQ ID NO: 1889670 - RNA, 18 nt, Human
cucaggaguuugagacca

SEQ ID NO: 1889671 - RNA, 23 nt, Human
cucaggaguuugagaccaaccug

SEQ ID NO: 1889672 - RNA, 13 nt, Human
cucaggaucucuu

SEQ ID NO: 1889673 - RNA, 15 nt, Human
cucauccucauaccc

SEQ ID NO: 1889674 - RNA, 19 nt, Human
cucaucucuuagcuccccu

SEQ ID NO: 1889675 - RNA, 17 nt, Human
cucaucucuuagcuccc

SEQ ID NO: 1889676 - RNA, 16 nt, Human
cucaucucucugccca

SEQ ID NO: 1889677 - RNA, 17 nt, Human
cucaucucucugcccaa

SEQ ID NO: 1889678 - RNA, 20 nt, Human
cucaucucuaacagcucagg

SEQ ID NO: 1889679 - RNA, 22 nt, Human
cucaucucuaacagcucaggau

SEQ ID NO: 1889680 - RNA, 23 nt, Human
cucaucucuaacagcucaggauc

SEQ ID NO: 1889681 - RNA, 24 nt, Human
cucaucucuaacagcucaggaucu

SEQ ID NO: 1889682 - RNA, 23 nt, Human
cucauaguaugguggcuggguug

SEQ ID NO: 1889683 - RNA, 21 nt, Human
cucaucaccaacgucugugcc

SEQ ID NO: 1889684 - RNA, 22 nt, Human
cucaucaccaacgucugugcca

SEQ ID NO: 1889685 - RNA, 19 nt, Human
cucaggugauccacccacc

SEQ ID NO: 1889686 - RNA, 18 nt, Human
cucaggugauccacccac

SEQ ID NO: 1889687 - RNA, 20 nt, Human
cucaggugauccacccaccu

SEQ ID NO: 1889688 - RNA, 16 nt, Human
cucauacccaccccca

SEQ ID NO: 1889689 - RNA, 18 nt, Human
cucauacccacccccacc

SEQ ID NO: 1889690 - RNA, 19 nt, Human
cucauacccacccccaccc

SEQ ID NO: 1889691 - RNA, 21 nt, Human
cucauacccacccccacccaa

SEQ ID NO: 1889692 - RNA, 21 nt, Human
cucauaguaugguggcugggu

SEQ ID NO: 1889693 - RNA, 22 nt, Human
cucauacucaccucaccccacu

SEQ ID NO: 1889694 - RNA, 14 nt, Human
cucauacucaccuc

SEQ ID NO: 1889695 - RNA, 15 nt, Human
cucauacccaccccc

SEQ ID NO: 1889696 - RNA, 22 nt, Human
cuaugcacauauggacucugca

SEQ ID NO: 1889697 - RNA, 13 nt, Human
cuaugcauggugc

SEQ ID NO: 1889698 - RNA, 19 nt, Human
cuaugcauggugccccagg

SEQ ID NO: 1889699 - RNA, 20 nt, Human
cuaugcauggugccccagga

SEQ ID NO: 1889700 - RNA, 21 nt, Human
cuaugcauggugccccaggac

SEQ ID NO: 1889701 - RNA, 22 nt, Human
cuaugcauggugccccaggacc

SEQ ID NO: 1889702 - RNA, 23 nt, Human
cuaugcauggugccccaggacca

SEQ ID NO: 1889703 - RNA, 18 nt, Human
cuaugcacauauggacuc

SEQ ID NO: 1889704 - RNA, 13 nt, Human
cuaugcacauaug

SEQ ID NO: 1889705 - RNA, 21 nt, Human
cuaugcacauauggacucugc

SEQ ID NO: 1889706 - RNA, 20 nt, Human
cuaugcacauauggacucug

SEQ ID NO: 1889707 - RNA, 17 nt, Human
cuaugagggccuugagu

SEQ ID NO: 1889708 - RNA, 15 nt, Human
cuaugagggccuuga

SEQ ID NO: 1889709 - RNA, 13 nt, Human
cuaugagggccuu

SEQ ID NO: 1889710 - RNA, 16 nt, Human
cuaugagcuaaauguc

SEQ ID NO: 1889711 - RNA, 17 nt, Human
cuaucuguuuacagugu

SEQ ID NO: 1889712 - RNA, 16 nt, Human
cuaucuguuuacagug

SEQ ID NO: 1889713 - RNA, 13 nt, Human
cuauggccugugg

SEQ ID NO: 1889714 - RNA, 15 nt, Human
cuauuagagaagaga

SEQ ID NO: 1889715 - RNA, 23 nt, Human
cuaugggacucaaugcacugaca

SEQ ID NO: 1889716 - RNA, 22 nt, Human
cuaugggacucaaugcacugac

SEQ ID NO: 1889717 - RNA, 18 nt, Human
cuaugggacucaaugcac

SEQ ID NO: 1889718 - RNA, 17 nt, Human
cuauagccuaggugaca

SEQ ID NO: 1889719 - RNA, 13 nt, Human
cuauauuguacac

SEQ ID NO: 1889720 - RNA, 15 nt, Human
cuauauuguacacac

SEQ ID NO: 1889721 - RNA, 14 nt, Human
cuauauuguacaca

SEQ ID NO: 1889722 - RNA, 17 nt, Human
cuauauuuuacauaaau

SEQ ID NO: 1889723 - RNA, 12 nt, Human
cuauauuugggc

SEQ ID NO: 1889724 - RNA, 22 nt, Human
cuauauuugggccugcuccaga

SEQ ID NO: 1889725 - RNA, 16 nt, Human
cuauaauguaagcucu

SEQ ID NO: 1889726 - RNA, 21 nt, Human
cuauaauguaagcucuacuga

SEQ ID NO: 1889727 - RNA, 22 nt, Human
cuauaauuuaccugaagucuuu

SEQ ID NO: 1889728 - RNA, 12 nt, Human
cuauagacucua

SEQ ID NO: 1889729 - RNA, 14 nt, Human
cuauacauaucuuu

SEQ ID NO: 1889730 - RNA, 15 nt, Human
cuauacauaucuuua

SEQ ID NO: 1889731 - RNA, 17 nt, Human
cuauacauaucuuuauu

SEQ ID NO: 1889732 - RNA, 20 nt, Human
cuauacauaucuuuauuaau

SEQ ID NO: 1889733 - RNA, 22 nt, Human
cuauacauaucuuuauuaauca

SEQ ID NO: 1889734 - RNA, 13 nt, Human
cuagguucuaaaa

SEQ ID NO: 1889735 - RNA, 16 nt, Human
cuaguaaaaauacaaa

SEQ ID NO: 1889736 - RNA, 15 nt, Human
cuagucaagcuccuc

SEQ ID NO: 1889737 - RNA, 16 nt, Human
cuagucaagcuccucc

SEQ ID NO: 1889738 - RNA, 19 nt, Human
cuagucaagcuccuccucc

SEQ ID NO: 1889739 - RNA, 22 nt, Human
cuagucaagcuccuccucccug

SEQ ID NO: 1889740 - RNA, 23 nt, Human
cuagucaagcuccuccucccugc

SEQ ID NO: 1889741 - RNA, 18 nt, Human
cgccagggagaccuggac

SEQ ID NO: 1889742 - RNA, 17 nt, Human
cgccaucccagccccaa

SEQ ID NO: 1889743 - RNA, 22 nt, Human
cgcccaguuggguggaugccug

SEQ ID NO: 1889744 - RNA, 20 nt, Human
cgccaucccagccccaauga

SEQ ID NO: 1889745 - RNA, 15 nt, Human
cgccaugcuccuggc

SEQ ID NO: 1889746 - RNA, 23 nt, Human
cgcccaguuggguggaugccugg

SEQ ID NO: 1889747 - RNA, 22 nt, Human
cuagguaaauuacaguuccuag

SEQ ID NO: 1889748 - RNA, 24 nt, Human
cuaggugacagagugagacucugu

SEQ ID NO: 1889749 - RNA, 18 nt, Human
cuaggugacagagugaga

SEQ ID NO: 1889750 - RNA, 14 nt, Human
cuaggugacagagu

SEQ ID NO: 1889751 - RNA, 19 nt, Human
cucaagaagaagaggggca

SEQ ID NO: 1889752 - RNA, 20 nt, Human
cucaagaagaagaggggcau

SEQ ID NO: 1889753 - RNA, 22 nt, Human
cucaagaaauaaaaggaagcca

SEQ ID NO: 1889754 - RNA, 23 nt, Human
cucaagaaauaaaaggaagccaa

SEQ ID NO: 1889755 - RNA, 21 nt, Human
cucaagaaauaaaaggaagcc

SEQ ID NO: 1889756 - RNA, 14 nt, Human
cucaagacuuccag

SEQ ID NO: 1889757 - RNA, 21 nt, Human
cucaaguccucuuuucugaga

SEQ ID NO: 1889758 - RNA, 16 nt, Human
cucaagacuuccagag

SEQ ID NO: 1889759 - RNA, 17 nt, Human
cucaagugauucuccug

SEQ ID NO: 1889760 - RNA, 22 nt, Human
cucacacaugagcaucaggcca

SEQ ID NO: 1889761 - RNA, 24 nt, Human
cucacacaugagcaucaggccagg

SEQ ID NO: 1889762 - RNA, 23 nt, Human
cucacaccaggcuugccugcagg

SEQ ID NO: 1889763 - RNA, 15 nt, Human
cucacaguccuuacc

SEQ ID NO: 1889764 - RNA, 15 nt, Human
cucacagcugaguug

SEQ ID NO: 1889765 - RNA, 13 nt, Human
cucacagcugagu

SEQ ID NO: 1889766 - RNA, 14 nt, Human
cucaccacccacuu

SEQ ID NO: 1889767 - RNA, 22 nt, Human
cucacauuuauucugcucacau

SEQ ID NO: 1889768 - RNA, 19 nt, Human
cucacauuuauucugcuca

SEQ ID NO: 1889769 - RNA, 15 nt, Human
cucacauuuauucug

SEQ ID NO: 1889770 - RNA, 17 nt, Human
cucacaguccuuaccag

SEQ ID NO: 1889771 - RNA, 19 nt, Human
cucacaguccuuaccagca

SEQ ID NO: 1889772 - RNA, 22 nt, Human
cucacaguccuuaccagcagag

SEQ ID NO: 1889773 - RNA, 23 nt, Human
cucacaguccuuaccagcagagc

SEQ ID NO: 1889774 - RNA, 15 nt, Human
cucaccagccccagu

SEQ ID NO: 1889775 - RNA, 14 nt, Human
cucaccagccccag

SEQ ID NO: 1889776 - RNA, 13 nt, Human
cucaccagcccca

SEQ ID NO: 1889777 - RNA, 18 nt, Human
cucaccagccccagugcc

SEQ ID NO: 1889778 - RNA, 17 nt, Human
cucaccagccccagugc

SEQ ID NO: 1889779 - RNA, 17 nt, Human
cucaaccuccugggcua

SEQ ID NO: 1889780 - RNA, 15 nt, Human
cucaaccuccugggc

SEQ ID NO: 1889781 - RNA, 13 nt, Human
cucaaccuccugg

SEQ ID NO: 1889782 - RNA, 21 nt, Human
cucaacaccucugcacaagcu

SEQ ID NO: 1889783 - RNA, 19 nt, Human
cucaaaugcucagaccagc

SEQ ID NO: 1889784 - RNA, 22 nt, Human
cucaaaugcucagaccagcucu

SEQ ID NO: 1889785 - RNA, 23 nt, Human
cucaaauacgugggcauucaaau

SEQ ID NO: 1889786 - RNA, 16 nt, Human
cucaaaugcucagacc

SEQ ID NO: 1889787 - RNA, 17 nt, Human
cuauuuauauguacaug

SEQ ID NO: 1889788 - RNA, 14 nt, Human
cuauuuaucuucau

SEQ ID NO: 1889789 - RNA, 14 nt, Human
cuauuguagagcca

SEQ ID NO: 1889790 - RNA, 17 nt, Human
cuauuccuguaaugaaa

SEQ ID NO: 1889791 - RNA, 14 nt, Human
cucacucaccuuca

SEQ ID NO: 1889792 - RNA, 23 nt, Human
cucacuauguugcccaggcaggu

SEQ ID NO: 1889793 - RNA, 22 nt, Human
cucacuauguugcccaggcagg

SEQ ID NO: 1889794 - RNA, 21 nt, Human
cucacuauguugcccaggcag

SEQ ID NO: 1889795 - RNA, 20 nt, Human
cucacuauguugcccaggca

SEQ ID NO: 1889796 - RNA, 19 nt, Human
cucacuauguugcccaggc

SEQ ID NO: 1889797 - RNA, 15 nt, Human
cucaccccagcccca

SEQ ID NO: 1889798 - RNA, 14 nt, Human
cucacugcagccuc

SEQ ID NO: 1889799 - RNA, 13 nt, Human
cucacugcagccu

SEQ ID NO: 1889800 - RNA, 12 nt, Human
cucacugcagcc

SEQ ID NO: 1889801 - RNA, 21 nt, Human
cucacucugucgcccagucug

SEQ ID NO: 1889802 - RNA, 13 nt, Human
cucacucugucgc

SEQ ID NO: 1889803 - RNA, 22 nt, Human
cucacucugucgcccagucugg

SEQ ID NO: 1889804 - RNA, 12 nt, Human
cucacucugucg

SEQ ID NO: 1889805 - RNA, 11 nt, Human
cucacucuguc

SEQ ID NO: 1889806 - RNA, 13 nt, Human
cucacuccuugaa

SEQ ID NO: 1889807 - RNA, 17 nt, Human
cucagcauccuggcacc

SEQ ID NO: 1889808 - RNA, 16 nt, Human
cucagcauccuggcac

SEQ ID NO: 1889809 - RNA, 15 nt, Human
cucagaucuucugug

SEQ ID NO: 1889810 - RNA, 14 nt, Human
cucagcacaaggcc

SEQ ID NO: 1889811 - RNA, 20 nt, Human
cucagcacaaggccaucugg

SEQ ID NO: 1889812 - RNA, 20 nt, Human
cucacuguugcccaggcugg

SEQ ID NO: 1889813 - RNA, 19 nt, Human
cucacugccaugccagcuu

SEQ ID NO: 1889814 - RNA, 22 nt, Human
cucacugccaugccagcuuauc

SEQ ID NO: 1889815 - RNA, 22 nt, Human
cucacuguugcccaggcuggcg

SEQ ID NO: 1889816 - RNA, 21 nt, Human
cucacuguugcccaggcuggc

SEQ ID NO: 1889817 - RNA, 18 nt, Human
cucagagagggugggagu

SEQ ID NO: 1889818 - RNA, 13 nt, Human
cucagagugcaag

SEQ ID NO: 1889819 - RNA, 14 nt, Human
cucagagagggugg

SEQ ID NO: 1889820 - RNA, 20 nt, Human
cucagauccagggacagagg

SEQ ID NO: 1889821 - RNA, 22 nt, Human
cucagauccagggacagaggcc

SEQ ID NO: 1889822 - RNA, 15 nt, Human
cucagauccagggac

SEQ ID NO: 1889823 - RNA, 16 nt, Human
cucagauccagggaca

SEQ ID NO: 1889824 - RNA, 17 nt, Human
cucagauccagggacag

SEQ ID NO: 1889825 - RNA, 18 nt, Human
cucagauccagggacaga

SEQ ID NO: 1889826 - RNA, 17 nt, Human
cucagaucaguguacca

SEQ ID NO: 1889827 - RNA, 21 nt, Human
cucagaucaguguaccauuug

SEQ ID NO: 1889828 - RNA, 10 nt, Human
cucagaucca

SEQ ID NO: 1889829 - RNA, 13 nt, Human
cucagauccaggg

SEQ ID NO: 1889830 - RNA, 14 nt, Human
cucagauccaggga

SEQ ID NO: 1889831 - RNA, 22 nt, Human
gagggacgcggcucccggggca

SEQ ID NO: 1889832 - RNA, 17 nt, Human
gagggaccucucccagg

SEQ ID NO: 1889833 - RNA, 18 nt, Human
gagggaccucucccaggg

SEQ ID NO: 1889834 - RNA, 13 nt, Human
gagggaccucucc

SEQ ID NO: 1889835 - RNA, 14 nt, Human
gagggaccucuccc

SEQ ID NO: 1889836 - RNA, 15 nt, Human
gagggaccucuccca

SEQ ID NO: 1889837 - RNA, 14 nt, Human
gagggagggagggc

SEQ ID NO: 1889838 - RNA, 17 nt, Human
gagggaggcaagcccug

SEQ ID NO: 1889839 - RNA, 15 nt, Human
gagggagggagggcu

SEQ ID NO: 1889840 - RNA, 15 nt, Human
gagggagggcuccag

SEQ ID NO: 1889841 - RNA, 19 nt, Human
gagggaacggaaauaaagg

SEQ ID NO: 1889842 - RNA, 20 nt, Human
gaggcuuuggauuugacauu

SEQ ID NO: 1889843 - RNA, 14 nt, Human
gaggcuuuggauuu

SEQ ID NO: 1889844 - RNA, 16 nt, Human
gaggcuuuggauuuga

SEQ ID NO: 1889845 - RNA, 16 nt, Human
gagggagugacagagg

SEQ ID NO: 1889846 - RNA, 16 nt, Human
gagggagggcuccaga

SEQ ID NO: 1889847 - RNA, 14 nt, Human
gagggagugacaga

SEQ ID NO: 1889848 - RNA, 13 nt, Human
gagggagugacag

SEQ ID NO: 1889849 - RNA, 14 nt, Human
gagggagguaagga

SEQ ID NO: 1889850 - RNA, 23 nt, Human
gagggcacagaaaauggaagaca

SEQ ID NO: 1889851 - RNA, 14 nt, Human
gagggcacagaaaa

SEQ ID NO: 1889852 - RNA, 22 nt, Human
gagggcacagaaaauggaagac

SEQ ID NO: 1889853 - RNA, 22 nt, Human
gaggggccucuuaugggcuggg

SEQ ID NO: 1889854 - RNA, 22 nt, Human
gagggcagcagaaggggguggu

SEQ ID NO: 1889855 - RNA, 21 nt, Human
gagggcagcagaagggggugg

SEQ ID NO: 1889856 - RNA, 19 nt, Human
gagggcagcagaagggggu

SEQ ID NO: 1889857 - RNA, 15 nt, Human
gaggccagugagcca

SEQ ID NO: 1889858 - RNA, 19 nt, Human
gaggcccccaucuccuuaa

SEQ ID NO: 1889859 - RNA, 22 nt, Human
gaggccccuauguaguccgugc

SEQ ID NO: 1889860 - RNA, 24 nt, Human
gaggccccuauguaguccgugcug

SEQ ID NO: 1889861 - RNA, 20 nt, Human
gaggccccugucucagggug

SEQ ID NO: 1889862 - RNA, 17 nt, Human
gaggcccucuggagugg

SEQ ID NO: 1889863 - RNA, 19 nt, Human
gaggcccucuggaguggcc

SEQ ID NO: 1889864 - RNA, 24 nt, Human
gaggcccuucucuccagccccugg

SEQ ID NO: 1889865 - RNA, 14 nt, Human
gaggcccuucucuc

SEQ ID NO: 1889866 - RNA, 23 nt, Human
gaggcccuucucuccagccccug

SEQ ID NO: 1889867 - RNA, 20 nt, Human
gaggccugccuccagggcug

SEQ ID NO: 1889868 - RNA, 19 nt, Human
gaggccugccuccagggcu

SEQ ID NO: 1889869 - RNA, 22 nt, Human
gaggccugccuccagggcugga

SEQ ID NO: 1889870 - RNA, 21 nt, Human
gaggccugccuccagggcugg

SEQ ID NO: 1889871 - RNA, 20 nt, Human
gaggccugagcgcuccugcc

SEQ ID NO: 1889872 - RNA, 14 nt, Human
gaggccuucucuga

SEQ ID NO: 1889873 - RNA, 19 nt, Human
gaggcggaucuuuggacag

SEQ ID NO: 1889874 - RNA, 20 nt, Human
gaggcggccccggccggggu

SEQ ID NO: 1889875 - RNA, 11 nt, Human
gaggccuucca

SEQ ID NO: 1889876 - RNA, 13 nt, Human
gaggcugggcucc

SEQ ID NO: 1889877 - RNA, 14 nt, Human
gaggcugggcuccc

SEQ ID NO: 1889878 - RNA, 19 nt, Human
gaggcggguggaucacuug

SEQ ID NO: 1889879 - RNA, 23 nt, Human
gaggcuaaauuacucaggaagaa

SEQ ID NO: 1889880 - RNA, 15 nt, Human
gaggcugggcucccu

SEQ ID NO: 1889881 - RNA, 19 nt, Human
gaggagcugggagccgggc

SEQ ID NO: 1889882 - RNA, 18 nt, Human
gaggagcucaggacacua

SEQ ID NO: 1889883 - RNA, 23 nt, Human
gaggacagggaggugaccccagg

SEQ ID NO: 1889884 - RNA, 22 nt, Human
gaggacagggaggugaccccag

SEQ ID NO: 1889885 - RNA, 13 nt, Human
gaggacagggagg

SEQ ID NO: 1889886 - RNA, 15 nt, Human
gaggaauccagaccc

SEQ ID NO: 1889887 - RNA, 14 nt, Human
gaggaauccagacc

SEQ ID NO: 1889888 - RNA, 22 nt, Human
gaggaaggaaacccagcucugg

SEQ ID NO: 1889889 - RNA, 13 nt, Human
gaggccagccuug

SEQ ID NO: 1889890 - RNA, 12 nt, Human
gaggccagccuu

SEQ ID NO: 1889891 - RNA, 22 nt, Human
gaggcagccccauucugccugc

SEQ ID NO: 1889892 - RNA, 23 nt, Human
gaggcagccccauucugccugcc

SEQ ID NO: 1889893 - RNA, 13 nt, Human
gaggcagccccau

SEQ ID NO: 1889894 - RNA, 23 nt, Human
gaggaguuugggguaugggagag

SEQ ID NO: 1889895 - RNA, 18 nt, Human
gaggaggggccgcugcca

SEQ ID NO: 1889896 - RNA, 16 nt, Human
gaggaggggccgcugc

SEQ ID NO: 1889897 - RNA, 17 nt, Human
gaggaggggccgcugcc

SEQ ID NO: 1889898 - RNA, 19 nt, Human
gaggagguaaugaauuaaa

SEQ ID NO: 1889899 - RNA, 16 nt, Human
gaggauugcuugagcu

SEQ ID NO: 1889900 - RNA, 20 nt, Human
gaggauguucugggacacag

SEQ ID NO: 1889901 - RNA, 17 nt, Human
gaggauguucugggaca

SEQ ID NO: 1889902 - RNA, 12 nt, Human
gaggauguucug

SEQ ID NO: 1889903 - RNA, 15 nt, Human
gaggaugucugggcc

SEQ ID NO: 1889904 - RNA, 17 nt, Human
gagccuggugcugcugc

SEQ ID NO: 1889905 - RNA, 16 nt, Human
gagccuggugcugcug

SEQ ID NO: 1889906 - RNA, 13 nt, Human
gagccugggaggu

SEQ ID NO: 1889907 - RNA, 21 nt, Human
gagccugggaggucaaggcug

SEQ ID NO: 1889908 - RNA, 15 nt, Human
gagccuggcaagaau

SEQ ID NO: 1889909 - RNA, 10 nt, Human
gagccuggca

SEQ ID NO: 1889910 - RNA, 13 nt, Human
gagcuacaaaugc

SEQ ID NO: 1889911 - RNA, 12 nt, Human
gagcuacaaaug

SEQ ID NO: 1889912 - RNA, 19 nt, Human
gagcggugcuguccucagg

SEQ ID NO: 1889913 - RNA, 20 nt, Human
gagccuccugcccuuaccug

SEQ ID NO: 1889914 - RNA, 22 nt, Human
gagccuccugcccuuaccugcc

SEQ ID NO: 1889915 - RNA, 12 nt, Human
gagccugcagag

SEQ ID NO: 1889916 - RNA, 15 nt, Human
gagccugcagagcug

SEQ ID NO: 1889917 - RNA, 17 nt, Human
gagcccugguggcagug

SEQ ID NO: 1889918 - RNA, 19 nt, Human
gagccucagcauccuggca

SEQ ID NO: 1889919 - RNA, 16 nt, Human
gagcccugguggcagu

SEQ ID NO: 1889920 - RNA, 15 nt, Human
gagcccugguggcag

SEQ ID NO: 1889921 - RNA, 21 nt, Human
gagccucagcauccuggcacc

SEQ ID NO: 1889922 - RNA, 20 nt, Human
gagccucagcauccuggcac

SEQ ID NO: 1889923 - RNA, 14 nt, Human
gagccuccugcccu

SEQ ID NO: 1889924 - RNA, 19 nt, Human
gagcuuccuguccucccag

SEQ ID NO: 1889925 - RNA, 10 nt, Human
gagcuucucu

SEQ ID NO: 1889926 - RNA, 14 nt, Human
gagcuucucuguga

SEQ ID NO: 1889927 - RNA, 16 nt, Human
gagcuucucugugaac

SEQ ID NO: 1889928 - RNA, 13 nt, Human
gagcugccaccug

SEQ ID NO: 1889929 - RNA, 15 nt, Human
gagcugccaccugcc

SEQ ID NO: 1889930 - RNA, 16 nt, Human
gagcugccaccugccu

SEQ ID NO: 1889931 - RNA, 19 nt, Human
gagcugcaggggcauggga

SEQ ID NO: 1889932 - RNA, 18 nt, Human
gagcuccaacucagaagg

SEQ ID NO: 1889933 - RNA, 19 nt, Human
gagcuccaacucagaaggg

SEQ ID NO: 1889934 - RNA, 22 nt, Human
gagcucccaggugcagccagag

SEQ ID NO: 1889935 - RNA, 14 nt, Human
gagcuacaaaugca

SEQ ID NO: 1889936 - RNA, 23 nt, Human
gagcuacacaggggaaaagagga

SEQ ID NO: 1889937 - RNA, 18 nt, Human
gagcuacccgcagaguuc

SEQ ID NO: 1889938 - RNA, 14 nt, Human
gagcucaggacacu

SEQ ID NO: 1889939 - RNA, 17 nt, Human
gagcucaggacacuaau

SEQ ID NO: 1889940 - RNA, 13 nt, Human
gagcacacccagc

SEQ ID NO: 1889941 - RNA, 15 nt, Human
gagcacacccagccc

SEQ ID NO: 1889942 - RNA, 16 nt, Human
gagcacacccagcccc

SEQ ID NO: 1889943 - RNA, 19 nt, Human
gagcaccuuagacaguccc

SEQ ID NO: 1889944 - RNA, 17 nt, Human
gagcaccuuagacaguc

SEQ ID NO: 1889945 - RNA, 21 nt, Human
gagcaagacgcugugcugccc

SEQ ID NO: 1889946 - RNA, 18 nt, Human
gagcaagacgcugugcug

SEQ ID NO: 1889947 - RNA, 22 nt, Human
gagcaagacgcugugcugcccu

SEQ ID NO: 1889948 - RNA, 23 nt, Human
gagcaagacgcugugcugcccug

SEQ ID NO: 1889949 - RNA, 19 nt, Human
gagcaaaaucgaugcagug

SEQ ID NO: 1889950 - RNA, 20 nt, Human
gagaucaaccccuucgcucc

SEQ ID NO: 1889951 - RNA, 14 nt, Human
gaaugcuguacauc

SEQ ID NO: 1889952 - RNA, 15 nt, Human
gaaugcuguacaucu

SEQ ID NO: 1889953 - RNA, 17 nt, Human
gaaugcuguacaucuau

SEQ ID NO: 1889954 - RNA, 20 nt, Human
gaaugcuguacaucuauuuu

SEQ ID NO: 1889955 - RNA, 13 nt, Human
gaaugcuguacau

SEQ ID NO: 1889956 - RNA, 21 nt, Human
gaaugcugcaggacuugagaa

SEQ ID NO: 1889957 - RNA, 13 nt, Human
gagaucagccugg

SEQ ID NO: 1889958 - RNA, 14 nt, Human
gagaucagccuggg

SEQ ID NO: 1889959 - RNA, 16 nt, Human
gagaucagccugggca

SEQ ID NO: 1889960 - RNA, 15 nt, Human
gagccacuccggccc

SEQ ID NO: 1889961 - RNA, 13 nt, Human
gagccacugcacc

SEQ ID NO: 1889962 - RNA, 18 nt, Human
gagccaccgcgcccagcc

SEQ ID NO: 1889963 - RNA, 18 nt, Human
gagcaggcggugggcacc

SEQ ID NO: 1889964 - RNA, 22 nt, Human
gagcaggcggugggcacccacc

SEQ ID NO: 1889965 - RNA, 18 nt, Human
gagcagccacauuccuga

SEQ ID NO: 1889966 - RNA, 13 nt, Human
gagcccaggccuc

SEQ ID NO: 1889967 - RNA, 14 nt, Human
gagcccaggccucc

SEQ ID NO: 1889968 - RNA, 12 nt, Human
gagcccacgccc

SEQ ID NO: 1889969 - RNA, 15 nt, Human
gagcccacgccccca

SEQ ID NO: 1889970 - RNA, 16 nt, Human
gagcccacgcccccac

SEQ ID NO: 1889971 - RNA, 12 nt, Human
gagcccaggccu

SEQ ID NO: 1889972 - RNA, 22 nt, Human
gagccacugcaccgggccacag

SEQ ID NO: 1889973 - RNA, 11 nt, Human
gagcccacgcc

SEQ ID NO: 1889974 - RNA, 17 nt, Human
gagccaugggcacaaag

SEQ ID NO: 1889975 - RNA, 18 nt, Human
gagccaugggcacaaagg

SEQ ID NO: 1889976 - RNA, 15 nt, Human
gaguucuugugccau

SEQ ID NO: 1889977 - RNA, 13 nt, Human
gaguuccuagcca

SEQ ID NO: 1889978 - RNA, 21 nt, Human
gaguugaaaaucuuauaauuu

SEQ ID NO: 1889979 - RNA, 14 nt, Human
gaguugaagacaga

SEQ ID NO: 1889980 - RNA, 17 nt, Human
gagugugccugaagucc

SEQ ID NO: 1889981 - RNA, 21 nt, Human
gaguuagaauaauaaauauuu

SEQ ID NO: 1889982 - RNA, 22 nt, Human
gaguuagaauaauaaauauuua

SEQ ID NO: 1889983 - RNA, 16 nt, Human
gaguuagaauaauaaa

SEQ ID NO: 1889984 - RNA, 23 nt, Human
gaguucaucuugaauuguaagga

SEQ ID NO: 1889985 - RNA, 18 nt, Human
gaguuaucuaaaagaaau

SEQ ID NO: 1889986 - RNA, 16 nt, Human
gaguuaucuaaaagaa

SEQ ID NO: 1889987 - RNA, 23 nt, Human
gagugaacaaauuuacagagaca

SEQ ID NO: 1889988 - RNA, 22 nt, Human
gagugaacaaauuuacagagac

SEQ ID NO: 1889989 - RNA, 11 nt, Human
gaguggccacu

SEQ ID NO: 1889990 - RNA, 19 nt, Human
gagugaacaaauuuacaga

SEQ ID NO: 1889991 - RNA, 12 nt, Human
gagugggcccaa

SEQ ID NO: 1889992 - RNA, 23 nt, Human
gagugggggaucacagccucuga

SEQ ID NO: 1889993 - RNA, 15 nt, Human
gaguggcuucacucc

SEQ ID NO: 1889994 - RNA, 19 nt, Human
gaguggcuucacuccugcu

SEQ ID NO: 1889995 - RNA, 20 nt, Human
gaguggcuucacuccugcug

SEQ ID NO: 1889996 - RNA, 17 nt, Human
gauagcacagacccugc

SEQ ID NO: 1889997 - RNA, 18 nt, Human
gauagcacagacccugcc

SEQ ID NO: 1889998 - RNA, 18 nt, Human
gauacaaugcugugcccu

SEQ ID NO: 1889999 - RNA, 13 nt, Human
gauacaaugcugu

SEQ ID NO: 1890000 - RNA, 21 nt, Human
gauagacacauaugaggggga

SEQ ID NO: 1890001 - RNA, 20 nt, Human
gauagacacauaugaggggg

SEQ ID NO: 1890002 - RNA, 22 nt, Human
gaguuuuucccagcuacaccuu

SEQ ID NO: 1890003 - RNA, 22 nt, Human
gaucaaccccuucgcuccugug

SEQ ID NO: 1890004 - RNA, 21 nt, Human
gaucaaccccuucgcuccugu

SEQ ID NO: 1890005 - RNA, 19 nt, Human
gauauauuuaaaaauauuu

SEQ ID NO: 1890006 - RNA, 15 nt, Human
gauauauuuaaaaau

SEQ ID NO: 1890007 - RNA, 23 nt, Human
gauauaugcucugcauguuacau

SEQ ID NO: 1890008 - RNA, 17 nt, Human
gauauacucuagaugaa

SEQ ID NO: 1890009 - RNA, 17 nt, Human
gauauaaguguguguuu

SEQ ID NO: 1890010 - RNA, 21 nt, Human
gauauaaguguguguuuuuca

SEQ ID NO: 1890011 - RNA, 13 nt, Human
gauagccaaggcc

SEQ ID NO: 1890012 - RNA, 14 nt, Human
gauagccaaggcca

SEQ ID NO: 1890013 - RNA, 12 nt, Human
gauagccaaggc

SEQ ID NO: 1890014 - RNA, 19 nt, Human
gauagcacagacccugccc

SEQ ID NO: 1890015 - RNA, 20 nt, Human
gauagcacagacccugcccu

SEQ ID NO: 1890016 - RNA, 14 nt, Human
gaguagcugggacu

SEQ ID NO: 1890017 - RNA, 12 nt, Human
gaguagcuggga

SEQ ID NO: 1890018 - RNA, 19 nt, Human
gagucaaaacuacaaauca

SEQ ID NO: 1890019 - RNA, 19 nt, Human
gagucaaaugguaggcauu

SEQ ID NO: 1890020 - RNA, 14 nt, Human
gaguccccuguuug

SEQ ID NO: 1890021 - RNA, 23 nt, Human
gaguccccuguuuguuucugaaa

SEQ ID NO: 1890022 - RNA, 14 nt, Human
gagucccugccauc

SEQ ID NO: 1890023 - RNA, 12 nt, Human
gaguccccuguu

SEQ ID NO: 1890024 - RNA, 17 nt, Human
gagucgaggacagggag

SEQ ID NO: 1890025 - RNA, 21 nt, Human
gagucucacuguugcccaggc

SEQ ID NO: 1890026 - RNA, 20 nt, Human
gagucucacuguugcccagg

SEQ ID NO: 1890027 - RNA, 19 nt, Human
gagucucacuguugcccag

SEQ ID NO: 1890028 - RNA, 23 nt, Human
gagucucacuguugcccaggcug

SEQ ID NO: 1890029 - RNA, 22 nt, Human
gagucucacuguugcccaggcu

SEQ ID NO: 1890030 - RNA, 21 nt, Human
gagucugaaggcuggguucug

SEQ ID NO: 1890031 - RNA, 16 nt, Human
gaguacguugugcauu

SEQ ID NO: 1890032 - RNA, 22 nt, Human
gaguaaaauaaauauugucuuu

SEQ ID NO: 1890033 - RNA, 19 nt, Human
gagguuuuaaaaaaauccc

SEQ ID NO: 1890034 - RNA, 19 nt, Human
gagguucaaagauauuuug

SEQ ID NO: 1890035 - RNA, 14 nt, Human
gagguucccuuuga

SEQ ID NO: 1890036 - RNA, 22 nt, Human
gagguuuguuuagaagaagugu

SEQ ID NO: 1890037 - RNA, 20 nt, Human
gaguacguugugcauuuggu

SEQ ID NO: 1890038 - RNA, 15 nt, Human
gaguacuacaguccu

SEQ ID NO: 1890039 - RNA, 18 nt, Human
gaguacguugugcauuug

SEQ ID NO: 1890040 - RNA, 17 nt, Human
gaguacguugugcauuu

SEQ ID NO: 1890041 - RNA, 12 nt, Human
gaguagcuggau

SEQ ID NO: 1890042 - RNA, 23 nt, Human
gaguaaaauaaauauugucuuuu

SEQ ID NO: 1890043 - RNA, 18 nt, Human
gaguacuacaguccuccc

SEQ ID NO: 1890044 - RNA, 19 nt, Human
gaguacuacaguccuccca

SEQ ID NO: 1890045 - RNA, 22 nt, Human
gaggggggaggugggauccucc

SEQ ID NO: 1890046 - RNA, 15 nt, Human
gaggggguggccucc

SEQ ID NO: 1890047 - RNA, 15 nt, Human
gaggggggagguggg

SEQ ID NO: 1890048 - RNA, 21 nt, Human
gaggugggauccuccaggugc

SEQ ID NO: 1890049 - RNA, 22 nt, Human
gaggugggauccuccaggugca

SEQ ID NO: 1890050 - RNA, 18 nt, Human
gaggugggauccuccagg

SEQ ID NO: 1890051 - RNA, 13 nt, Human
gaugcccugcccu

SEQ ID NO: 1890052 - RNA, 12 nt, Human
gaugcccuggag

SEQ ID NO: 1890053 - RNA, 15 nt, Human
gaugcccuggaggug

SEQ ID NO: 1890054 - RNA, 18 nt, Human
gaugcccuggagguggcu

SEQ ID NO: 1890055 - RNA, 19 nt, Human
gaugcccuggagguggcug

SEQ ID NO: 1890056 - RNA, 21 nt, Human
gaugccuggcgggguggggug

SEQ ID NO: 1890057 - RNA, 14 nt, Human
gaugcuauuugcaa

SEQ ID NO: 1890058 - RNA, 13 nt, Human
gaugcuauuugca

SEQ ID NO: 1890059 - RNA, 20 nt, Human
gauggcaggacgugggcugg

SEQ ID NO: 1890060 - RNA, 21 nt, Human
gauggcacuuauaaccaaagc

SEQ ID NO: 1890061 - RNA, 22 nt, Human
gauggcaacagaucuggaaccu

SEQ ID NO: 1890062 - RNA, 15 nt, Human
gauggcaacagaucu

SEQ ID NO: 1890063 - RNA, 16 nt, Human
gauggcaacagaucug

SEQ ID NO: 1890064 - RNA, 17 nt, Human
gauggcaacagaucugg

SEQ ID NO: 1890065 - RNA, 21 nt, Human
gauggcaacagaucuggaacc

SEQ ID NO: 1890066 - RNA, 22 nt, Human
gaugggcaacccccagccugcu

SEQ ID NO: 1890067 - RNA, 23 nt, Human
gaugggacuagagcuuucuuuca

SEQ ID NO: 1890068 - RNA, 22 nt, Human
gaugagaaagguugaagcacca

SEQ ID NO: 1890069 - RNA, 11 nt, Human
gaugagaaagg

SEQ ID NO: 1890070 - RNA, 14 nt, Human
gaugacuauggaaa

SEQ ID NO: 1890071 - RNA, 13 nt, Human
gaugacucaagau

SEQ ID NO: 1890072 - RNA, 14 nt, Human
gaugacucaagauu

SEQ ID NO: 1890073 - RNA, 16 nt, Human
gaugacucaagauucc

SEQ ID NO: 1890074 - RNA, 21 nt, Human
gaugacucaagauucccagga

SEQ ID NO: 1890075 - RNA, 22 nt, Human
gaugacucaagauucccaggag

SEQ ID NO: 1890076 - RNA, 23 nt, Human
gaugacucaagauucccaggagu

SEQ ID NO: 1890077 - RNA, 17 nt, Human
gaugcaauguagagggg

SEQ ID NO: 1890078 - RNA, 13 nt, Human
gaugcauggagau

SEQ ID NO: 1890079 - RNA, 20 nt, Human
gaugcauggagauagcccca

SEQ ID NO: 1890080 - RNA, 16 nt, Human
gaucuuugcagacagg

SEQ ID NO: 1890081 - RNA, 15 nt, Human
gaugaaaaaauaaca

SEQ ID NO: 1890082 - RNA, 15 nt, Human
gaucuuuuguuccca

SEQ ID NO: 1890083 - RNA, 18 nt, Human
gaucuuuuguucccaucc

SEQ ID NO: 1890084 - RNA, 24 nt, Human
gaucuuuuguucccauccucuucu

SEQ ID NO: 1890085 - RNA, 17 nt, Human
gaucgaaccguuuugaa

SEQ ID NO: 1890086 - RNA, 20 nt, Human
gaucuguuuugaaggcaaaa

SEQ ID NO: 1890087 - RNA, 15 nt, Human
gaucuucaacaaauu

SEQ ID NO: 1890088 - RNA, 13 nt, Human
gaucuucaacaaa

SEQ ID NO: 1890089 - RNA, 16 nt, Human
gaucuucaacaaauug

SEQ ID NO: 1890090 - RNA, 21 nt, Human
gauccucccaccucagccucc

SEQ ID NO: 1890091 - RNA, 20 nt, Human
gauccucccaccucagccuc

SEQ ID NO: 1890092 - RNA, 19 nt, Human
gauccucccaccucagccu

SEQ ID NO: 1890093 - RNA, 12 nt, Human
gauccuccaggu

SEQ ID NO: 1890094 - RNA, 13 nt, Human
gauccugagccag

SEQ ID NO: 1890095 - RNA, 14 nt, Human
gauccugagccaga

SEQ ID NO: 1890096 - RNA, 15 nt, Human
gauccugagccagau

SEQ ID NO: 1890097 - RNA, 19 nt, Human
gauccugagccagauuuca

SEQ ID NO: 1890098 - RNA, 14 nt, Human
gaucacgccacugc

SEQ ID NO: 1890099 - RNA, 13 nt, Human
gaucacgccacug

SEQ ID NO: 1890100 - RNA, 23 nt, Human
gaucaaccccuucgcuccugugu

SEQ ID NO: 1890101 - RNA, 15 nt, Human
gaucacgccacugca

SEQ ID NO: 1890102 - RNA, 18 nt, Human
gauccuaguuccaccauc

SEQ ID NO: 1890103 - RNA, 11 nt, Human
gauccuccagg

SEQ ID NO: 1890104 - RNA, 13 nt, Human
gauugugccccug

SEQ ID NO: 1890105 - RNA, 20 nt, Human
gauuguccccgacccuugcc

SEQ ID NO: 1890106 - RNA, 15 nt, Human
gauuguccccgaccc

SEQ ID NO: 1890107 - RNA, 23 nt, Human
gauugacgggacuguugguauug

SEQ ID NO: 1890108 - RNA, 17 nt, Human
gauugacagcuuugcug

SEQ ID NO: 1890109 - RNA, 19 nt, Human
gauugacagcuuugcugcu

SEQ ID NO: 1890110 - RNA, 16 nt, Human
gauugacagcuuugcu

SEQ ID NO: 1890111 - RNA, 22 nt, Human
gauucccaagcucugcuccucu

SEQ ID NO: 1890112 - RNA, 16 nt, Human
gauucacuucacgcuu

SEQ ID NO: 1890113 - RNA, 12 nt, Human
gauucagacagc

SEQ ID NO: 1890114 - RNA, 21 nt, Human
gauuccccuaaccucauuccc

SEQ ID NO: 1890115 - RNA, 19 nt, Human
gauucccaggaguucugcu

SEQ ID NO: 1890116 - RNA, 12 nt, Human
gauucccaggag

SEQ ID NO: 1890117 - RNA, 13 nt, Human
gauucccaggagu

SEQ ID NO: 1890118 - RNA, 21 nt, Human
gauucccaggaguucugcuca

SEQ ID NO: 1890119 - RNA, 15 nt, Human
gauuccugagccagu

SEQ ID NO: 1890120 - RNA, 16 nt, Human
gauguucugggacaca

SEQ ID NO: 1890121 - RNA, 14 nt, Human
gauguucugggaca

SEQ ID NO: 1890122 - RNA, 21 nt, Human
gauguguccugauaagcugag

SEQ ID NO: 1890123 - RNA, 23 nt, Human
gauguggaaaagccaagaggcug

SEQ ID NO: 1890124 - RNA, 21 nt, Human
gauguggaaaagccaagaggc

SEQ ID NO: 1890125 - RNA, 23 nt, Human
gauggugcaaugaccuuucaaua

SEQ ID NO: 1890126 - RNA, 16 nt, Human
gauggugcugagaagc

SEQ ID NO: 1890127 - RNA, 17 nt, Human
gauggugcugagaagcu

SEQ ID NO: 1890128 - RNA, 12 nt, Human
gauggugcugag

SEQ ID NO: 1890129 - RNA, 14 nt, Human
gauggugcugagaa

SEQ ID NO: 1890130 - RNA, 20 nt, Human
gauggugcaaugaccuuuca

SEQ ID NO: 1890131 - RNA, 16 nt, Human
gaugggcccaauucuu

SEQ ID NO: 1890132 - RNA, 19 nt, Human
gauucaacagguuuuccug

SEQ ID NO: 1890133 - RNA, 22 nt, Human
gauuaagaucucagugguuaag

SEQ ID NO: 1890134 - RNA, 18 nt, Human
gauuaaccacuucagcug

SEQ ID NO: 1890135 - RNA, 19 nt, Human
gauuaaccacuucagcuga

SEQ ID NO: 1890136 - RNA, 21 nt, Human
gauuaaccacuucagcugacu

SEQ ID NO: 1890137 - RNA, 19 nt, Human
gauuaaauucuugcaaagu

SEQ ID NO: 1890138 - RNA, 12 nt, Human
gauuaaauucuu

SEQ ID NO: 1890139 - RNA, 15 nt, Human
gauguuuuccaugag

SEQ ID NO: 1890140 - RNA, 23 nt, Human
gauguuuuccaugaguccccugu

SEQ ID NO: 1890141 - RNA, 14 nt, Human
gauguuuuccauga

SEQ ID NO: 1890142 - RNA, 21 nt, Human
gauguucuuucacccuuuucu

SEQ ID NO: 1890143 - RNA, 19 nt, Human
gauguugaaaaaguucugc

SEQ ID NO: 1890144 - RNA, 17 nt, Human
gcaggacgugggcuggg

SEQ ID NO: 1890145 - RNA, 21 nt, Human
gcaggaccuucgggcugugcc

SEQ ID NO: 1890146 - RNA, 15 nt, Human
gcagcucagcuuccc

SEQ ID NO: 1890147 - RNA, 18 nt, Human
gcaggaaauggcugugga

SEQ ID NO: 1890148 - RNA, 20 nt, Human
gcagcucauaagagccacag

SEQ ID NO: 1890149 - RNA, 18 nt, Human
gcagcucagagagggugg

SEQ ID NO: 1890150 - RNA, 19 nt, Human
gcagcucagagaggguggg

SEQ ID NO: 1890151 - RNA, 16 nt, Human
gcagcucaccucuccc

SEQ ID NO: 1890152 - RNA, 17 nt, Human
gcagcucaccucucccu

SEQ ID NO: 1890153 - RNA, 20 nt, Human
gcagcucaccucucccuugg

SEQ ID NO: 1890154 - RNA, 21 nt, Human
gcagcucaccucucccuugga

SEQ ID NO: 1890155 - RNA, 14 nt, Human
gcagcucagagagg

SEQ ID NO: 1890156 - RNA, 15 nt, Human
gcagccucacagucc

SEQ ID NO: 1890157 - RNA, 17 nt, Human
gcagccucacaguccuu

SEQ ID NO: 1890158 - RNA, 19 nt, Human
gcagccucacaguccuuac

SEQ ID NO: 1890159 - RNA, 18 nt, Human
gcagccucccauccaggg

SEQ ID NO: 1890160 - RNA, 20 nt, Human
gcagccucccauccagggcc

SEQ ID NO: 1890161 - RNA, 21 nt, Human
gcagccucccauccagggccc

SEQ ID NO: 1890162 - RNA, 20 nt, Human
gcagcagggagggcuucugc

SEQ ID NO: 1890163 - RNA, 18 nt, Human
gcagcagggagggcuucu

SEQ ID NO: 1890164 - RNA, 19 nt, Human
gcagcagggagggcuucug

SEQ ID NO: 1890165 - RNA, 18 nt, Human
gcagacugaucaggaccu

SEQ ID NO: 1890166 - RNA, 17 nt, Human
gcagagaagcucucggg

SEQ ID NO: 1890167 - RNA, 22 nt, Human
gcagagaccaucccugaaggcc

SEQ ID NO: 1890168 - RNA, 19 nt, Human
gcagaggggcagauggaaa

SEQ ID NO: 1890169 - RNA, 20 nt, Human
gcagagaccaucccugaagg

SEQ ID NO: 1890170 - RNA, 21 nt, Human
gcagagaccaucccugaaggc

SEQ ID NO: 1890171 - RNA, 16 nt, Human
gcacuugcagacucua

SEQ ID NO: 1890172 - RNA, 14 nt, Human
gcacuugcagacuc

SEQ ID NO: 1890173 - RNA, 22 nt, Human
gcacuucgggaggucgaggcag

SEQ ID NO: 1890174 - RNA, 22 nt, Human
gcagacucuacagaggccaugg

SEQ ID NO: 1890175 - RNA, 19 nt, Human
gcagacucuacagaggcca

SEQ ID NO: 1890176 - RNA, 18 nt, Human
gcagacucuacagaggcc

SEQ ID NO: 1890177 - RNA, 17 nt, Human
gcagacucuacagaggc

SEQ ID NO: 1890178 - RNA, 18 nt, Human
gcagauggagaccccuug

SEQ ID NO: 1890179 - RNA, 20 nt, Human
gcagauguaaaguuauucuu

SEQ ID NO: 1890180 - RNA, 22 nt, Human
gcagauguaaaguuauucuuga

SEQ ID NO: 1890181 - RNA, 22 nt, Human
gcagcagaaggggguggugucu

SEQ ID NO: 1890182 - RNA, 15 nt, Human
gcagcagaagggggu

SEQ ID NO: 1890183 - RNA, 18 nt, Human
gcagagguugcagugagc

SEQ ID NO: 1890184 - RNA, 23 nt, Human
gcagagguugcagugagccgaga

SEQ ID NO: 1890185 - RNA, 15 nt, Human
gcagauccaggacua

SEQ ID NO: 1890186 - RNA, 14 nt, Human
gcagauccaggacu

SEQ ID NO: 1890187 - RNA, 19 nt, Human
gcacuguuuuauuuuaauu

SEQ ID NO: 1890188 - RNA, 14 nt, Human
gcacugggcuuggg

SEQ ID NO: 1890189 - RNA, 12 nt, Human
gcacugggcuug

SEQ ID NO: 1890190 - RNA, 22 nt, Human
gcacuauaauguaagcucuacu

SEQ ID NO: 1890191 - RNA, 12 nt, Human
gcacuacauuca

SEQ ID NO: 1890192 - RNA, 16 nt, Human
gcacuacauucauuua

SEQ ID NO: 1890193 - RNA, 20 nt, Human
gcacuauaauguaagcucua

SEQ ID NO: 1890194 - RNA, 14 nt, Human
gcacuauaauguaa

SEQ ID NO: 1890195 - RNA, 15 nt, Human
gcacuauaauguaag

SEQ ID NO: 1890196 - RNA, 12 nt, Human
gcacugcuucca

SEQ ID NO: 1890197 - RNA, 13 nt, Human
gcacugcuuccag

SEQ ID NO: 1890198 - RNA, 14 nt, Human
gcacugcuuccagu

SEQ ID NO: 1890199 - RNA, 15 nt, Human
gcacugcuuccagug

SEQ ID NO: 1890200 - RNA, 20 nt, Human
gcacuaaggugugcucugau

SEQ ID NO: 1890201 - RNA, 14 nt, Human
gcacgugugugcac

SEQ ID NO: 1890202 - RNA, 16 nt, Human
gcacccucaggcaggu

SEQ ID NO: 1890203 - RNA, 19 nt, Human
gcacccucaggcagguggg

SEQ ID NO: 1890204 - RNA, 21 nt, Human
gcacagcuucauuuccugugu

SEQ ID NO: 1890205 - RNA, 23 nt, Human
gcacagcuucauuuccugugucu

SEQ ID NO: 1890206 - RNA, 14 nt, Human
gcacaggacaugcg

SEQ ID NO: 1890207 - RNA, 20 nt, Human
gauugugucucuugguccug

SEQ ID NO: 1890208 - RNA, 22 nt, Human
gcacagcagccuggggcuggcc

SEQ ID NO: 1890209 - RNA, 22 nt, Human
gcacagccaacacgcaccugcc

SEQ ID NO: 1890210 - RNA, 15 nt, Human
gcacagcagccuggg

SEQ ID NO: 1890211 - RNA, 17 nt, Human
gcacagcccaaagaagg

SEQ ID NO: 1890212 - RNA, 17 nt, Human
gcaccaucucuccuccu

SEQ ID NO: 1890213 - RNA, 14 nt, Human
gcaccagcagccug

SEQ ID NO: 1890214 - RNA, 21 nt, Human
gcaccagacacccaggacuua

SEQ ID NO: 1890215 - RNA, 13 nt, Human
gcaccagcagccu

SEQ ID NO: 1890216 - RNA, 14 nt, Human
gcaccaucucuccu

SEQ ID NO: 1890217 - RNA, 15 nt, Human
gcaccaucucuccuc

SEQ ID NO: 1890218 - RNA, 15 nt, Human
gcaccacacucagcc

SEQ ID NO: 1890219 - RNA, 17 nt, Human
gcaccacacucagcccu

SEQ ID NO: 1890220 - RNA, 15 nt, Human
gcaccagacacccag

SEQ ID NO: 1890221 - RNA, 16 nt, Human
gcaccagacacccagg

SEQ ID NO: 1890222 - RNA, 17 nt, Human
gcaccagacacccagga

SEQ ID NO: 1890223 - RNA, 18 nt, Human
gcaccagacacccaggac

SEQ ID NO: 1890224 - RNA, 19 nt, Human
gcaccagacacccaggacu

SEQ ID NO: 1890225 - RNA, 20 nt, Human
gcaccagacacccaggacuu

SEQ ID NO: 1890226 - RNA, 22 nt, Human
gcaggcccaaauuaucaagcua

SEQ ID NO: 1890227 - RNA, 17 nt, Human
gcaggccaggccagcug

SEQ ID NO: 1890228 - RNA, 15 nt, Human
gcaggccaggccagc

SEQ ID NO: 1890229 - RNA, 16 nt, Human
gcaggccaggccagcu

SEQ ID NO: 1890230 - RNA, 18 nt, Human
gcaggcagccaggccaca

SEQ ID NO: 1890231 - RNA, 17 nt, Human
gcaggcagccaggccac

SEQ ID NO: 1890232 - RNA, 12 nt, Human
gcagggcagccg

SEQ ID NO: 1890233 - RNA, 17 nt, Human
gcagggcucccacagag

SEQ ID NO: 1890234 - RNA, 14 nt, Human
gcaggcggugggca

SEQ ID NO: 1890235 - RNA, 15 nt, Human
gcaggcggugggcac

SEQ ID NO: 1890236 - RNA, 16 nt, Human
gcaggcggugggcacc

SEQ ID NO: 1890237 - RNA, 23 nt, Human
gcaggcggugggcacccacccug

SEQ ID NO: 1890238 - RNA, 13 nt, Human
gcagggaugcccu

SEQ ID NO: 1890239 - RNA, 21 nt, Human
gcagggaugcccuggaggugg

SEQ ID NO: 1890240 - RNA, 23 nt, Human
gcagggaugcccuggagguggcu

SEQ ID NO: 1890241 - RNA, 22 nt, Human
gcaggggaggguagagcggaga

SEQ ID NO: 1890242 - RNA, 16 nt, Human
gcagggucucacucug

SEQ ID NO: 1890243 - RNA, 19 nt, Human
gcaggguccuagaaauucc

SEQ ID NO: 1890244 - RNA, 14 nt, Human
gcaggucccuaaua

SEQ ID NO: 1890245 - RNA, 15 nt, Human
gcaggucccuaauaa

SEQ ID NO: 1890246 - RNA, 21 nt, Human
gcaguggugcgaucuggguuc

SEQ ID NO: 1890247 - RNA, 20 nt, Human
gcaguggugcgaucuggguu

SEQ ID NO: 1890248 - RNA, 22 nt, Human
gcaguggugcgaucuggguuca

SEQ ID NO: 1890249 - RNA, 19 nt, Human
gcaguggugguuuucuguu

SEQ ID NO: 1890250 - RNA, 21 nt, Human
gcaguggugguuuucuguucu

SEQ ID NO: 1890251 - RNA, 20 nt, Human
gcaguggugguuuucuguuc

SEQ ID NO: 1890252 - RNA, 19 nt, Human
gcauacguacacauuuuau

SEQ ID NO: 1890253 - RNA, 19 nt, Human
gcaguggugcgaucugggu

SEQ ID NO: 1890254 - RNA, 18 nt, Human
gcaguggugcgaucuggg

SEQ ID NO: 1890255 - RNA, 17 nt, Human
gcagugggccuggccag

SEQ ID NO: 1890256 - RNA, 12 nt, Human
gcagugggagcu

SEQ ID NO: 1890257 - RNA, 16 nt, Human
gcagugggccuggcca

SEQ ID NO: 1890258 - RNA, 11 nt, Human
gcagugggagc

SEQ ID NO: 1890259 - RNA, 16 nt, Human
gcaggucccuaauaaa

SEQ ID NO: 1890260 - RNA, 17 nt, Human
gcaggucccuaauaaag

SEQ ID NO: 1890261 - RNA, 18 nt, Human
gcaggucccuaauaaagc

SEQ ID NO: 1890262 - RNA, 19 nt, Human
gcaggucccuaauaaagcu

SEQ ID NO: 1890263 - RNA, 20 nt, Human
gcaggucccuaauaaagcug

SEQ ID NO: 1890264 - RNA, 21 nt, Human
gcaggucccuaauaaagcugu

SEQ ID NO: 1890265 - RNA, 23 nt, Human
gcaggucccuaauaaagcugugu

SEQ ID NO: 1890266 - RNA, 22 nt, Human
gcauccacuucuuucagcagac

SEQ ID NO: 1890267 - RNA, 23 nt, Human
gcaucaggccaggcccucugccc

SEQ ID NO: 1890268 - RNA, 18 nt, Human
gcaucaggccaggcccuc

SEQ ID NO: 1890269 - RNA, 12 nt, Human
gcaucaggccag

SEQ ID NO: 1890270 - RNA, 20 nt, Human
gcaugaaguaauaugcacac

SEQ ID NO: 1890271 - RNA, 22 nt, Human
gcaugaaguaauaugcacacau

SEQ ID NO: 1890272 - RNA, 21 nt, Human
gcaugaaguaauaugcacaca

SEQ ID NO: 1890273 - RNA, 21 nt, Human
gcaugacacgaauauugcuga

SEQ ID NO: 1890274 - RNA, 22 nt, Human
gcaugacacgaauauugcugau

SEQ ID NO: 1890275 - RNA, 14 nt, Human
gcaugccuggaugg

SEQ ID NO: 1890276 - RNA, 14 nt, Human
gcaugacauuucuu

SEQ ID NO: 1890277 - RNA, 14 nt, Human
gcauguucucugag

SEQ ID NO: 1890278 - RNA, 13 nt, Human
gcauguuacauaa

SEQ ID NO: 1890279 - RNA, 15 nt, Human
gcaugccuggauggg

SEQ ID NO: 1890280 - RNA, 24 nt, Human
gcauuaucuagauacuguaucaug

SEQ ID NO: 1890281 - RNA, 22 nt, Human
gcauuaucuagauacuguauca

SEQ ID NO: 1890282 - RNA, 19 nt, Human
gcauuaucuagauacugua

SEQ ID NO: 1890283 - RNA, 18 nt, Human
gcauuaaauucacaaacu

SEQ ID NO: 1890284 - RNA, 22 nt, Human
gcauuaaauucacaaacuuuua

SEQ ID NO: 1890285 - RNA, 18 nt, Human
gcauuugaggucuguucu

SEQ ID NO: 1890286 - RNA, 22 nt, Human
gcauugaccgcgacuaauuuca

SEQ ID NO: 1890287 - RNA, 23 nt, Human
gcauugaccgcgacuaauuucaa

SEQ ID NO: 1890288 - RNA, 22 nt, Human
gcauuccccaggaggccagccu

SEQ ID NO: 1890289 - RNA, 22 nt, Human
gcauugaacacaaacuguaaau

SEQ ID NO: 1890290 - RNA, 23 nt, Human
gcauugaacacaaacuguaaaua

SEQ ID NO: 1890291 - RNA, 21 nt, Human
gcauugaacacaaacuguaaa

SEQ ID NO: 1890292 - RNA, 14 nt, Human
gcauuccccaggag

SEQ ID NO: 1890293 - RNA, 15 nt, Human
gcauuccccaggagg

SEQ ID NO: 1890294 - RNA, 16 nt, Human
gcauuccccaggaggc

SEQ ID NO: 1890295 - RNA, 17 nt, Human
gcauuccccaggaggcc

SEQ ID NO: 1890296 - RNA, 18 nt, Human
gcauuccccaggaggcca

SEQ ID NO: 1890297 - RNA, 19 nt, Human
gcauuccccaggaggccag

SEQ ID NO: 1890298 - RNA, 20 nt, Human
gcauuccccaggaggccagc

SEQ ID NO: 1890299 - RNA, 21 nt, Human
gcauuccccaggaggccagcc

SEQ ID NO: 1890300 - RNA, 22 nt, Human
gcccagaggagcugggagccgg

SEQ ID NO: 1890301 - RNA, 16 nt, Human
gcccagaggagggcag

SEQ ID NO: 1890302 - RNA, 23 nt, Human
gcccagaggagggcagcagaagg

SEQ ID NO: 1890303 - RNA, 17 nt, Human
gcccagagcccagcucc

SEQ ID NO: 1890304 - RNA, 18 nt, Human
gcccagagcccagcucca

SEQ ID NO: 1890305 - RNA, 12 nt, Human
gcccagagggcc

SEQ ID NO: 1890306 - RNA, 14 nt, Human
gcccagagggccug

SEQ ID NO: 1890307 - RNA, 15 nt, Human
gcccagagggccugc

SEQ ID NO: 1890308 - RNA, 18 nt, Human
gcccagagggccugcaag

SEQ ID NO: 1890309 - RNA, 19 nt, Human
gcccagagggccugcaagg

SEQ ID NO: 1890310 - RNA, 15 nt, Human
gcccagagagggugg

SEQ ID NO: 1890311 - RNA, 14 nt, Human
gcccagagcccagc

SEQ ID NO: 1890312 - RNA, 15 nt, Human
gcccagagcccagcu

SEQ ID NO: 1890313 - RNA, 16 nt, Human
gcccagagcccagcuc

SEQ ID NO: 1890314 - RNA, 19 nt, Human
gcccagagacccaagcugc

SEQ ID NO: 1890315 - RNA, 23 nt, Human
gcccagagacauacuugaagggc

SEQ ID NO: 1890316 - RNA, 10 nt, Human
gcccagagac

SEQ ID NO: 1890317 - RNA, 20 nt, Human
gcccagagacauacuugaag

SEQ ID NO: 1890318 - RNA, 21 nt, Human
gcccaaugcacuuuguucugg

SEQ ID NO: 1890319 - RNA, 12 nt, Human
gcccaauauuau

SEQ ID NO: 1890320 - RNA, 18 nt, Human
gcccaauauuauaauuuu

SEQ ID NO: 1890321 - RNA, 22 nt, Human
gcccaauucuuacaaacaugug

SEQ ID NO: 1890322 - RNA, 23 nt, Human
gcccagccacggacgcuggcucc

SEQ ID NO: 1890323 - RNA, 14 nt, Human
gcccagccaggccc

SEQ ID NO: 1890324 - RNA, 15 nt, Human
gcccagccaggcccc

SEQ ID NO: 1890325 - RNA, 16 nt, Human
gcccagccaggcccca

SEQ ID NO: 1890326 - RNA, 17 nt, Human
gcccagccaggccccag

SEQ ID NO: 1890327 - RNA, 9 nt, Human
gcccagccc

SEQ ID NO: 1890328 - RNA, 12 nt, Human
gcccagccccuu

SEQ ID NO: 1890329 - RNA, 11 nt, Human
gcccagccccu

SEQ ID NO: 1890330 - RNA, 22 nt, Human
gcccagagggccugcaagggag

SEQ ID NO: 1890331 - RNA, 20 nt, Human
gcccagagggccugcaaggg

SEQ ID NO: 1890332 - RNA, 21 nt, Human
gcccagagggccugcaaggga

SEQ ID NO: 1890333 - RNA, 20 nt, Human
gcccagauuaugagacacag

SEQ ID NO: 1890334 - RNA, 22 nt, Human
gcccagauuaugagacacagga

SEQ ID NO: 1890335 - RNA, 22 nt, Human
gcccagauuaaagucuuuaucc

SEQ ID NO: 1890336 - RNA, 19 nt, Human
gcccagauuaugagacaca

SEQ ID NO: 1890337 - RNA, 15 nt, Human
gcccaguugggugga

SEQ ID NO: 1890338 - RNA, 20 nt, Human
gcccagucuggaaugcagug

SEQ ID NO: 1890339 - RNA, 18 nt, Human
gcccaguccuuccaccuc

SEQ ID NO: 1890340 - RNA, 19 nt, Human
gcccaguccuuccaccucg

SEQ ID NO: 1890341 - RNA, 19 nt, Human
gcccagucuggaaugcagu

SEQ ID NO: 1890342 - RNA, 14 nt, Human
gcccaguccuucca

SEQ ID NO: 1890343 - RNA, 15 nt, Human
gcccaguccuuccac

SEQ ID NO: 1890344 - RNA, 17 nt, Human
gcccaguccuuccaccu

SEQ ID NO: 1890345 - RNA, 23 nt, Human
gcccaggcuuagucacugagaca

SEQ ID NO: 1890346 - RNA, 19 nt, Human
gcccaggcuuagucacuga

SEQ ID NO: 1890347 - RNA, 21 nt, Human
gcccaggcuuagucacugaga

SEQ ID NO: 1890348 - RNA, 20 nt, Human
gcccaggcuggcgugcagug

SEQ ID NO: 1890349 - RNA, 19 nt, Human
gcccaggcuggcgugcagu

SEQ ID NO: 1890350 - RNA, 22 nt, Human
gcccaggcuggcgugcaguggu

SEQ ID NO: 1890351 - RNA, 16 nt, Human
gcccaggcugguuucg

SEQ ID NO: 1890352 - RNA, 18 nt, Human
gcccaggaaaggcuccag

SEQ ID NO: 1890353 - RNA, 19 nt, Human
gcccaggaaaggcuccagg

SEQ ID NO: 1890354 - RNA, 20 nt, Human
gcccaggaaaggcuccagga

SEQ ID NO: 1890355 - RNA, 21 nt, Human
gcccaggaaaggcuccaggag

SEQ ID NO: 1890356 - RNA, 19 nt, Human
gcccagcugggucaggcag

SEQ ID NO: 1890357 - RNA, 20 nt, Human
gcccagcugggucaggcagg

SEQ ID NO: 1890358 - RNA, 13 nt, Human
gcccagcuggguc

SEQ ID NO: 1890359 - RNA, 14 nt, Human
gcccagcuggguca

SEQ ID NO: 1890360 - RNA, 15 nt, Human
gcccagcugggucag

SEQ ID NO: 1890361 - RNA, 18 nt, Human
gcccagcugggucaggca

SEQ ID NO: 1890362 - RNA, 18 nt, Human
gcccagcggacaguggca

SEQ ID NO: 1890363 - RNA, 19 nt, Human
gcccagcggacaguggcag

SEQ ID NO: 1890364 - RNA, 20 nt, Human
gcccagcggacaguggcagg

SEQ ID NO: 1890365 - RNA, 21 nt, Human
gcccagcggacaguggcagga

SEQ ID NO: 1890366 - RNA, 20 nt, Human
gcccagccccuucugaccca

SEQ ID NO: 1890367 - RNA, 24 nt, Human
gcccagccccuucugacccaugcu

SEQ ID NO: 1890368 - RNA, 12 nt, Human
gcccagcccucc

SEQ ID NO: 1890369 - RNA, 16 nt, Human
gcccagcccuccccau

SEQ ID NO: 1890370 - RNA, 13 nt, Human
gcccagccccuuc

SEQ ID NO: 1890371 - RNA, 14 nt, Human
gcccagccccuucu

SEQ ID NO: 1890372 - RNA, 16 nt, Human
gcccagccccuucuga

SEQ ID NO: 1890373 - RNA, 17 nt, Human
gcccagccccuucugac

SEQ ID NO: 1890374 - RNA, 21 nt, Human
gccagggagaccuggacacag

SEQ ID NO: 1890375 - RNA, 22 nt, Human
gccagggagaccuggacacagg

SEQ ID NO: 1890376 - RNA, 20 nt, Human
gccagggcaaugaugaauga

SEQ ID NO: 1890377 - RNA, 19 nt, Human
gccaggggggugaggagcu

SEQ ID NO: 1890378 - RNA, 20 nt, Human
gccaggggggugaggagcug

SEQ ID NO: 1890379 - RNA, 21 nt, Human
gccaggggggugaggagcugg

SEQ ID NO: 1890380 - RNA, 22 nt, Human
gccaggggggugaggagcuggg

SEQ ID NO: 1890381 - RNA, 17 nt, Human
gccagguuuuuggucug

SEQ ID NO: 1890382 - RNA, 12 nt, Human
gccaguaaaugg

SEQ ID NO: 1890383 - RNA, 20 nt, Human
gccagucaccccggccaccu

SEQ ID NO: 1890384 - RNA, 21 nt, Human
gccaguaaaaaaaaaaaaugg

SEQ ID NO: 1890385 - RNA, 17 nt, Human
gccagucaccccggcca

SEQ ID NO: 1890386 - RNA, 18 nt, Human
gccagucaccccggccac

SEQ ID NO: 1890387 - RNA, 15 nt, Human
gccagggagaccugg

SEQ ID NO: 1890388 - RNA, 18 nt, Human
gccagggagaccuggaca

SEQ ID NO: 1890389 - RNA, 19 nt, Human
gccagggagaccuggacac

SEQ ID NO: 1890390 - RNA, 14 nt, Human
gccagggagaagcu

SEQ ID NO: 1890391 - RNA, 15 nt, Human
gccagggagaagcuc

SEQ ID NO: 1890392 - RNA, 16 nt, Human
gccagggagaagcucc

SEQ ID NO: 1890393 - RNA, 20 nt, Human
gccagggagaagcuccucuc

SEQ ID NO: 1890394 - RNA, 23 nt, Human
gccagggacagaggggguggccu

SEQ ID NO: 1890395 - RNA, 13 nt, Human
gccagggacagag

SEQ ID NO: 1890396 - RNA, 16 nt, Human
gccagggacagagggg

SEQ ID NO: 1890397 - RNA, 18 nt, Human
gccagggacagagggggu

SEQ ID NO: 1890398 - RNA, 16 nt, Human
gccagauuucacucuc

SEQ ID NO: 1890399 - RNA, 14 nt, Human
gccagauccagccu

SEQ ID NO: 1890400 - RNA, 11 nt, Human
gccagauccag

SEQ ID NO: 1890401 - RNA, 18 nt, Human
gccagauuucacucuccu

SEQ ID NO: 1890402 - RNA, 21 nt, Human
gccagauuucacucuccuugg

SEQ ID NO: 1890403 - RNA, 13 nt, Human
gccaggcuggguc

SEQ ID NO: 1890404 - RNA, 22 nt, Human
gccaggcugaccacagcacagc

SEQ ID NO: 1890405 - RNA, 15 nt, Human
gccagugagccacuc

SEQ ID NO: 1890406 - RNA, 20 nt, Human
gccagugaugcuaaagguug

SEQ ID NO: 1890407 - RNA, 19 nt, Human
gccagugaugcuaaagguu

SEQ ID NO: 1890408 - RNA, 19 nt, Human
gccaucucaccuccugcug

SEQ ID NO: 1890409 - RNA, 20 nt, Human
gccaucucaccuccugcugg

SEQ ID NO: 1890410 - RNA, 21 nt, Human
gccaucucaccuccugcuggg

SEQ ID NO: 1890411 - RNA, 19 nt, Human
gccaugccagcuuaucuca

SEQ ID NO: 1890412 - RNA, 13 nt, Human
gccaugccagcuu

SEQ ID NO: 1890413 - RNA, 18 nt, Human
gccaugccagcuuaucuc

SEQ ID NO: 1890414 - RNA, 18 nt, Human
gccaugaggaacaaggca

SEQ ID NO: 1890415 - RNA, 20 nt, Human
gccaugaggaacaaggcaag

SEQ ID NO: 1890416 - RNA, 23 nt, Human
gccaugagaugauacauccaaag

SEQ ID NO: 1890417 - RNA, 23 nt, Human
gcccaaauuaucaagcuaauaaa

SEQ ID NO: 1890418 - RNA, 22 nt, Human
gcccaaauuaucaagcuaauaa

SEQ ID NO: 1890419 - RNA, 21 nt, Human
gcccaaauuaucaagcuaaua

SEQ ID NO: 1890420 - RNA, 23 nt, Human
gcccaaaccaccagaagcccaga

SEQ ID NO: 1890421 - RNA, 14 nt, Human
gccauuuuuacugu

SEQ ID NO: 1890422 - RNA, 22 nt, Human
gcccaaaccaccagaagcccag

SEQ ID NO: 1890423 - RNA, 21 nt, Human
gcccaaaccaccagaagccca

SEQ ID NO: 1890424 - RNA, 16 nt, Human
gcccaacccuucccuc

SEQ ID NO: 1890425 - RNA, 22 nt, Human
gccaugggacagggaggacgcu

SEQ ID NO: 1890426 - RNA, 18 nt, Human
gccauggacagaagaagg

SEQ ID NO: 1890427 - RNA, 23 nt, Human
gccaugggacagggaggacgcuc

SEQ ID NO: 1890428 - RNA, 21 nt, Human
gccaugggcacaaagggccca

SEQ ID NO: 1890429 - RNA, 20 nt, Human
gccauuuugcauuuucaucu

SEQ ID NO: 1890430 - RNA, 13 nt, Human
gccauuuugcauu

SEQ ID NO: 1890431 - RNA, 18 nt, Human
gccacggacgcuggcucc

SEQ ID NO: 1890432 - RNA, 19 nt, Human
gccacggccaggccagagg

SEQ ID NO: 1890433 - RNA, 13 nt, Human
gccacuaagcaga

SEQ ID NO: 1890434 - RNA, 14 nt, Human
gccacuaagcagag

SEQ ID NO: 1890435 - RNA, 15 nt, Human
gccacuaagcagagg

SEQ ID NO: 1890436 - RNA, 16 nt, Human
gccacuaagcagagga

SEQ ID NO: 1890437 - RNA, 17 nt, Human
gccacuaagcagaggag

SEQ ID NO: 1890438 - RNA, 19 nt, Human
gccacuaagcagaggaggg

SEQ ID NO: 1890439 - RNA, 20 nt, Human
gccacuaagcagaggagggg

SEQ ID NO: 1890440 - RNA, 23 nt, Human
gccacuaagcagaggaggggccg

SEQ ID NO: 1890441 - RNA, 16 nt, Human
gccacggacgcuggcu

SEQ ID NO: 1890442 - RNA, 18 nt, Human
gccacgcagccaggacac

SEQ ID NO: 1890443 - RNA, 17 nt, Human
gccacgcagccaggaca

SEQ ID NO: 1890444 - RNA, 16 nt, Human
gccacgcagccaggac

SEQ ID NO: 1890445 - RNA, 15 nt, Human
gccacgcagccagga

SEQ ID NO: 1890446 - RNA, 14 nt, Human
gccacgcagccagg

SEQ ID NO: 1890447 - RNA, 13 nt, Human
gccacgcagccag

SEQ ID NO: 1890448 - RNA, 17 nt, Human
gccacggccaggccaga

SEQ ID NO: 1890449 - RNA, 18 nt, Human
gccacggccaggccagag

SEQ ID NO: 1890450 - RNA, 15 nt, Human
gccacgauugcagga

SEQ ID NO: 1890451 - RNA, 22 nt, Human
gccaccugcggugcuaucuccc

SEQ ID NO: 1890452 - RNA, 14 nt, Human
gccaccugcggugc

SEQ ID NO: 1890453 - RNA, 20 nt, Human
gccaccugcggugcuaucuc

SEQ ID NO: 1890454 - RNA, 17 nt, Human
gccaccugccuguuggg

SEQ ID NO: 1890455 - RNA, 17 nt, Human
gccaccgcgcccagccu

SEQ ID NO: 1890456 - RNA, 19 nt, Human
gccaccgccuccuacagcc

SEQ ID NO: 1890457 - RNA, 15 nt, Human
gccacaggucuuuau

SEQ ID NO: 1890458 - RNA, 18 nt, Human
gccacaguagucuugaug

SEQ ID NO: 1890459 - RNA, 15 nt, Human
gccacaucaaagagg

SEQ ID NO: 1890460 - RNA, 20 nt, Human
gccagagacacaagccuucg

SEQ ID NO: 1890461 - RNA, 10 nt, Human
gccagaggag

SEQ ID NO: 1890462 - RNA, 17 nt, Human
gccagagacacaagccu

SEQ ID NO: 1890463 - RNA, 19 nt, Human
gccagagacacaagccuuc

SEQ ID NO: 1890464 - RNA, 16 nt, Human
gccagagacacaagcc

SEQ ID NO: 1890465 - RNA, 18 nt, Human
gccagaugcaccagcccu

SEQ ID NO: 1890466 - RNA, 17 nt, Human
gccagaugcaccagccc

SEQ ID NO: 1890467 - RNA, 16 nt, Human
gccagaugcaccagcc

SEQ ID NO: 1890468 - RNA, 23 nt, Human
gccagagggagugacagaggcag

SEQ ID NO: 1890469 - RNA, 22 nt, Human
gccagagggagugacagaggca

SEQ ID NO: 1890470 - RNA, 21 nt, Human
gccagagggagugacagaggc

SEQ ID NO: 1890471 - RNA, 19 nt, Human
gccagaggagagaggaccc

SEQ ID NO: 1890472 - RNA, 22 nt, Human
gccagaggagagaggacccccu

SEQ ID NO: 1890473 - RNA, 12 nt, Human
gccagaggagag

SEQ ID NO: 1890474 - RNA, 13 nt, Human
gccagaggagaga

SEQ ID NO: 1890475 - RNA, 15 nt, Human
gccagaggagagagg

SEQ ID NO: 1890476 - RNA, 17 nt, Human
gccagaggagagaggac

SEQ ID NO: 1890477 - RNA, 19 nt, Human
gccacagcccagccacgga

SEQ ID NO: 1890478 - RNA, 13 nt, Human
gccacagcccagc

SEQ ID NO: 1890479 - RNA, 23 nt, Human
gccacagagaaaguacuucucca

SEQ ID NO: 1890480 - RNA, 12 nt, Human
gccacaggacac

SEQ ID NO: 1890481 - RNA, 18 nt, Human
gccacaggacacagucag

SEQ ID NO: 1890482 - RNA, 23 nt, Human
gccacaggccugagauuucaucu

SEQ ID NO: 1890483 - RNA, 22 nt, Human
gccacaggccugagauuucauc

SEQ ID NO: 1890484 - RNA, 20 nt, Human
gccacaggccugagauuuca

SEQ ID NO: 1890485 - RNA, 15 nt, Human
gccacaggccugaga

SEQ ID NO: 1890486 - RNA, 13 nt, Human
gccacaggccuga

SEQ ID NO: 1890487 - RNA, 12 nt, Human
gccacaggccug

SEQ ID NO: 1890488 - RNA, 20 nt, Human
gccacagagaaaguacuucu

SEQ ID NO: 1890489 - RNA, 14 nt, Human
gccacagagaaagu

SEQ ID NO: 1890490 - RNA, 13 nt, Human
gccacagagaaag

SEQ ID NO: 1890491 - RNA, 22 nt, Human
gccacacucugggcuccagagu

SEQ ID NO: 1890492 - RNA, 19 nt, Human
gccacacucagcacaaggc

SEQ ID NO: 1890493 - RNA, 13 nt, Human
gccacacucagca

SEQ ID NO: 1890494 - RNA, 16 nt, Human
gccacacucagcacaa

SEQ ID NO: 1890495 - RNA, 17 nt, Human
gccacacucagcacaag

SEQ ID NO: 1890496 - RNA, 16 nt, Human
gccacaagacccuugu

SEQ ID NO: 1890497 - RNA, 22 nt, Human
gccacaagacccuugugguccc

SEQ ID NO: 1890498 - RNA, 20 nt, Human
gccaaugugaacagcggcug

SEQ ID NO: 1890499 - RNA, 15 nt, Human
gccaauucagacagg

SEQ ID NO: 1890500 - RNA, 17 nt, Human
gccaauucagacaggca

SEQ ID NO: 1890501 - RNA, 18 nt, Human
gccaauucagacaggcaa

SEQ ID NO: 1890502 - RNA, 21 nt, Human
gccacaaggacuuccugucca

SEQ ID NO: 1890503 - RNA, 14 nt, Human
gccacaaggacuuc

SEQ ID NO: 1890504 - RNA, 17 nt, Human
gccacaaggacuuccug

SEQ ID NO: 1890505 - RNA, 18 nt, Human
gccacaaggacuuccugu

SEQ ID NO: 1890506 - RNA, 19 nt, Human
gccacaaggacuuccuguc

SEQ ID NO: 1890507 - RNA, 14 nt, Human
gccaaggugggagg

SEQ ID NO: 1890508 - RNA, 15 nt, Human
gccaaggugggagga

SEQ ID NO: 1890509 - RNA, 23 nt, Human
gccaaggugggaggauugcuuga

SEQ ID NO: 1890510 - RNA, 23 nt, Human
gcauuuggugguuucagaaaugu

SEQ ID NO: 1890511 - RNA, 22 nt, Human
gcauuuggugguuucagaaaug

SEQ ID NO: 1890512 - RNA, 20 nt, Human
gcauuugaggucuguucuuu

SEQ ID NO: 1890513 - RNA, 19 nt, Human
gcauuugaggucuguucuu

SEQ ID NO: 1890514 - RNA, 21 nt, Human
gccaaggcugggggaagaagc

SEQ ID NO: 1890515 - RNA, 18 nt, Human
gccaauauuaaaucugcu

SEQ ID NO: 1890516 - RNA, 12 nt, Human
gccaaguucuua

SEQ ID NO: 1890517 - RNA, 23 nt, Human
ggaccaugcgacacugggaggcc

SEQ ID NO: 1890518 - RNA, 17 nt, Human
ggaccaucauccuacug

SEQ ID NO: 1890519 - RNA, 18 nt, Human
ggaccuugaacuggguac

SEQ ID NO: 1890520 - RNA, 19 nt, Human
ggacccaauguaggagcug

SEQ ID NO: 1890521 - RNA, 19 nt, Human
ggacgaagaagagccacag

SEQ ID NO: 1890522 - RNA, 13 nt, Human
ggacgcuggcucc

SEQ ID NO: 1890523 - RNA, 20 nt, Human
ggacgaagaagagccacagu

SEQ ID NO: 1890524 - RNA, 19 nt, Human
ggacgcucucuggccuucg

SEQ ID NO: 1890525 - RNA, 16 nt, Human
ggacgcucucuggccu

SEQ ID NO: 1890526 - RNA, 14 nt, Human
ggacugagaaauuu

SEQ ID NO: 1890527 - RNA, 19 nt, Human
ggacugaauuaugaaacuu

SEQ ID NO: 1890528 - RNA, 17 nt, Human
ggacugaauuaugaaac

SEQ ID NO: 1890529 - RNA, 16 nt, Human
ggacugaaaaccucuc

SEQ ID NO: 1890530 - RNA, 17 nt, Human
ggacugaaaaccucucc

SEQ ID NO: 1890531 - RNA, 18 nt, Human
ggacugaaaaccucuccu

SEQ ID NO: 1890532 - RNA, 12 nt, Human
ggagacaggcag

SEQ ID NO: 1890533 - RNA, 18 nt, Human
ggagaagccacaggccug

SEQ ID NO: 1890534 - RNA, 20 nt, Human
ggagaagccacaggccugag

SEQ ID NO: 1890535 - RNA, 19 nt, Human
ggagaagccacaggccuga

SEQ ID NO: 1890536 - RNA, 19 nt, Human
ggagaagcuccucucccca

SEQ ID NO: 1890537 - RNA, 18 nt, Human
ggacugagaaauuuauaa

SEQ ID NO: 1890538 - RNA, 14 nt, Human
ggacugaggccuga

SEQ ID NO: 1890539 - RNA, 13 nt, Human
ggacugaggccug

SEQ ID NO: 1890540 - RNA, 19 nt, Human
ggaccagagcugccaccug

SEQ ID NO: 1890541 - RNA, 13 nt, Human
ggaccagcucagg

SEQ ID NO: 1890542 - RNA, 14 nt, Human
ggaccagagcugcc

SEQ ID NO: 1890543 - RNA, 17 nt, Human
ggacagccccacccugg

SEQ ID NO: 1890544 - RNA, 17 nt, Human
ggacagcuccuucuguc

SEQ ID NO: 1890545 - RNA, 16 nt, Human
ggacagcuccuucugu

SEQ ID NO: 1890546 - RNA, 15 nt, Human
ggacagcuccuucug

SEQ ID NO: 1890547 - RNA, 11 nt, Human
ggacagcuccu

SEQ ID NO: 1890548 - RNA, 14 nt, Human
ggacagccccaccc

SEQ ID NO: 1890549 - RNA, 15 nt, Human
ggacagccccacccu

SEQ ID NO: 1890550 - RNA, 16 nt, Human
ggacagccccacccug

SEQ ID NO: 1890551 - RNA, 20 nt, Human
ggacagaggggguggccucc

SEQ ID NO: 1890552 - RNA, 16 nt, Human
ggacacuuaauacuac

SEQ ID NO: 1890553 - RNA, 19 nt, Human
gcuuuuaugugaaacaugu

SEQ ID NO: 1890554 - RNA, 20 nt, Human
gcuuuuaugugaaacauguu

SEQ ID NO: 1890555 - RNA, 21 nt, Human
gcuuuuaugugaaacauguuu

SEQ ID NO: 1890556 - RNA, 15 nt, Human
ggacagaagcagcuc

SEQ ID NO: 1890557 - RNA, 16 nt, Human
ggacagaagcagcucu

SEQ ID NO: 1890558 - RNA, 17 nt, Human
ggacagaagcagcucuu

SEQ ID NO: 1890559 - RNA, 23 nt, Human
ggacagacucacaaccugaaccu

SEQ ID NO: 1890560 - RNA, 14 nt, Human
ggacagaagcagcu

SEQ ID NO: 1890561 - RNA, 14 nt, Human
ggacagaagaaggc

SEQ ID NO: 1890562 - RNA, 16 nt, Human
ggacagaggggguggc

SEQ ID NO: 1890563 - RNA, 20 nt, Human
ggacagaggccccagccucc

SEQ ID NO: 1890564 - RNA, 23 nt, Human
ggacagaggccccagccucccug

SEQ ID NO: 1890565 - RNA, 14 nt, Human
ggacagaggcccca

SEQ ID NO: 1890566 - RNA, 15 nt, Human
ggacagaggccccag

SEQ ID NO: 1890567 - RNA, 16 nt, Human
ggacagaggccccagc

SEQ ID NO: 1890568 - RNA, 17 nt, Human
ggacagaggccccagcc

SEQ ID NO: 1890569 - RNA, 18 nt, Human
ggacagaggccccagccu

SEQ ID NO: 1890570 - RNA, 12 nt, Human
ggagcuagccag

SEQ ID NO: 1890571 - RNA, 14 nt, Human
ggagcuagaauuug

SEQ ID NO: 1890572 - RNA, 15 nt, Human
ggagcuagccagagg

SEQ ID NO: 1890573 - RNA, 20 nt, Human
ggagcuccaacucagaaggg

SEQ ID NO: 1890574 - RNA, 20 nt, Human
ggagcggccggccagccccu

SEQ ID NO: 1890575 - RNA, 23 nt, Human
ggagcgaacuggcgccuccgagg

SEQ ID NO: 1890576 - RNA, 20 nt, Human
ggagccuuugguucuggcca

SEQ ID NO: 1890577 - RNA, 15 nt, Human
ggagccuccugcccu

SEQ ID NO: 1890578 - RNA, 17 nt, Human
ggagccugcagagcugc

SEQ ID NO: 1890579 - RNA, 17 nt, Human
ggagacaggcagagcug

SEQ ID NO: 1890580 - RNA, 15 nt, Human
ggagcaagaggaggc

SEQ ID NO: 1890581 - RNA, 13 nt, Human
ggagcaagaggag

SEQ ID NO: 1890582 - RNA, 14 nt, Human
ggagcacacccagc

SEQ ID NO: 1890583 - RNA, 15 nt, Human
ggagcacacccagcc

SEQ ID NO: 1890584 - RNA, 17 nt, Human
ggagcacacccagcccc

SEQ ID NO: 1890585 - RNA, 16 nt, Human
ggagcccugggaggcu

SEQ ID NO: 1890586 - RNA, 19 nt, Human
ggagcccugggaggcucug

SEQ ID NO: 1890587 - RNA, 14 nt, Human
ggagccuccugccc

SEQ ID NO: 1890588 - RNA, 15 nt, Human
ggagccucccugccu

SEQ ID NO: 1890589 - RNA, 16 nt, Human
ggagccucccugccuc

SEQ ID NO: 1890590 - RNA, 22 nt, Human
ggagccucccugccucaggccu

SEQ ID NO: 1890591 - RNA, 18 nt, Human
ggagccucccugccucag

SEQ ID NO: 1890592 - RNA, 16 nt, Human
ggagccuaggccaggu

SEQ ID NO: 1890593 - RNA, 17 nt, Human
ggagccuaggccaggug

SEQ ID NO: 1890594 - RNA, 18 nt, Human
ggagccuaggccaggugc

SEQ ID NO: 1890595 - RNA, 14 nt, Human
ggagccucccugcc

SEQ ID NO: 1890596 - RNA, 20 nt, Human
ggagcccugggaggcucugg

SEQ ID NO: 1890597 - RNA, 16 nt, Human
ggagccuacccacccc

SEQ ID NO: 1890598 - RNA, 15 nt, Human
ggagccgggccgcag

SEQ ID NO: 1890599 - RNA, 21 nt, Human
ggaggauguucugggacacag

SEQ ID NO: 1890600 - RNA, 18 nt, Human
ggaggauguucugggaca

SEQ ID NO: 1890601 - RNA, 14 nt, Human
ggaggcaagcccug

SEQ ID NO: 1890602 - RNA, 16 nt, Human
ggaggacgcucucugg

SEQ ID NO: 1890603 - RNA, 17 nt, Human
ggaggcaggaguuucgu

SEQ ID NO: 1890604 - RNA, 22 nt, Human
ggaggcacuuuagggcuguaaa

SEQ ID NO: 1890605 - RNA, 17 nt, Human
ggagggagggcuccaga

SEQ ID NO: 1890606 - RNA, 13 nt, Human
ggagggagggcuc

SEQ ID NO: 1890607 - RNA, 16 nt, Human
ggagggagggcuccag

SEQ ID NO: 1890608 - RNA, 19 nt, Human
ggaggggagcaugggaagu

SEQ ID NO: 1890609 - RNA, 13 nt, Human
ggaggggccuagg

SEQ ID NO: 1890610 - RNA, 15 nt, Human
ggaggggccuaggcc

SEQ ID NO: 1890611 - RNA, 21 nt, Human
ggaggggccuaggccucagcc

SEQ ID NO: 1890612 - RNA, 22 nt, Human
ggagucccaccuuggcugcagg

SEQ ID NO: 1890613 - RNA, 18 nt, Human
ggagggggaauguaguga

SEQ ID NO: 1890614 - RNA, 15 nt, Human
ggcaugauccaagca

SEQ ID NO: 1890615 - RNA, 16 nt, Human
ggcaugauccaagcaa

SEQ ID NO: 1890616 - RNA, 18 nt, Human
ggcaugauccaagcaaga

SEQ ID NO: 1890617 - RNA, 15 nt, Human
ggcaugaugcgggcc

SEQ ID NO: 1890618 - RNA, 18 nt, Human
ggcaugugaugagaggaa

SEQ ID NO: 1890619 - RNA, 23 nt, Human
ggcaugugaugagaggaaaucac

SEQ ID NO: 1890620 - RNA, 22 nt, Human
ggcaugacacgaauauugcuga

SEQ ID NO: 1890621 - RNA, 20 nt, Human
ggcagucauuggcugucucc

SEQ ID NO: 1890622 - RNA, 21 nt, Human
ggcagcugcgguccacccagg

SEQ ID NO: 1890623 - RNA, 21 nt, Human
ggcagaguucuauaauguaaa

SEQ ID NO: 1890624 - RNA, 12 nt, Human
ggcagcugccac

SEQ ID NO: 1890625 - RNA, 17 nt, Human
ggcagaguugaagacag

SEQ ID NO: 1890626 - RNA, 19 nt, Human
ggcagaguugaagacagag

SEQ ID NO: 1890627 - RNA, 21 nt, Human
ggcagaguugaagacagagcu

SEQ ID NO: 1890628 - RNA, 24 nt, Human
ggcagcugcgguccacccaggagc

SEQ ID NO: 1890629 - RNA, 23 nt, Human
ggcagcugcgguccacccaggag

SEQ ID NO: 1890630 - RNA, 12 nt, Human
ggcaggguccua

SEQ ID NO: 1890631 - RNA, 18 nt, Human
ggcagggucucacucugu

SEQ ID NO: 1890632 - RNA, 17 nt, Human
ggcagggucucacucug

SEQ ID NO: 1890633 - RNA, 17 nt, Human
ggcagguuggugggggc

SEQ ID NO: 1890634 - RNA, 20 nt, Human
ggcauguucucugaggacac

SEQ ID NO: 1890635 - RNA, 22 nt, Human
ggccacagaaaauucuucucca

SEQ ID NO: 1890636 - RNA, 16 nt, Human
ggccacacucagcaca

SEQ ID NO: 1890637 - RNA, 21 nt, Human
ggccacacucagcacaaggcc

SEQ ID NO: 1890638 - RNA, 19 nt, Human
ggccacaucaaagaggcug

SEQ ID NO: 1890639 - RNA, 20 nt, Human
ggccacaguagucuugauga

SEQ ID NO: 1890640 - RNA, 16 nt, Human
ggccacaucaaagagg

SEQ ID NO: 1890641 - RNA, 20 nt, Human
ggccacugugaagagaacca

SEQ ID NO: 1890642 - RNA, 15 nt, Human
ggccacuucugggug

SEQ ID NO: 1890643 - RNA, 21 nt, Human
ggccacuucuggguggggcag

SEQ ID NO: 1890644 - RNA, 14 nt, Human
ggccagaagaugaa

SEQ ID NO: 1890645 - RNA, 21 nt, Human
ggccagaagaugaacagacug

SEQ ID NO: 1890646 - RNA, 16 nt, Human
ggccagacacaggccc

SEQ ID NO: 1890647 - RNA, 17 nt, Human
ggccagacacaggcccu

SEQ ID NO: 1890648 - RNA, 18 nt, Human
ggccagacacaggcccuc

SEQ ID NO: 1890649 - RNA, 15 nt, Human
ggccagacaugccac

SEQ ID NO: 1890650 - RNA, 11 nt, Human
ggccaggagcc

SEQ ID NO: 1890651 - RNA, 13 nt, Human
ggccaggagccuc

SEQ ID NO: 1890652 - RNA, 14 nt, Human
ggccaggcccucug

SEQ ID NO: 1890653 - RNA, 17 nt, Human
ggccaggcccucugccc

SEQ ID NO: 1890654 - RNA, 15 nt, Human
ggccaggcccucugc

SEQ ID NO: 1890655 - RNA, 16 nt, Human
ggccaggcccucugcc

SEQ ID NO: 1890656 - RNA, 18 nt, Human
ggcagagcugcuccccuc

SEQ ID NO: 1890657 - RNA, 22 nt, Human
ggcagagcagagaccaucccug

SEQ ID NO: 1890658 - RNA, 21 nt, Human
ggcagagguugcagugagccg

SEQ ID NO: 1890659 - RNA, 20 nt, Human
ggcacucagaagacacugau

SEQ ID NO: 1890660 - RNA, 19 nt, Human
ggcacucagaagacacuga

SEQ ID NO: 1890661 - RNA, 18 nt, Human
ggcacucagaagacacug

SEQ ID NO: 1890662 - RNA, 20 nt, Human
ggcacccggccccugcuggu

SEQ ID NO: 1890663 - RNA, 19 nt, Human
ggcacccggccccugcugg

SEQ ID NO: 1890664 - RNA, 18 nt, Human
ggcacccggccccugcug

SEQ ID NO: 1890665 - RNA, 20 nt, Human
ggcacccaccaucaugucug

SEQ ID NO: 1890666 - RNA, 18 nt, Human
ggcacccaagaccucagg

SEQ ID NO: 1890667 - RNA, 22 nt, Human
ggcacccaagaccucagggcac

SEQ ID NO: 1890668 - RNA, 17 nt, Human
ggcaccagcagccugga

SEQ ID NO: 1890669 - RNA, 19 nt, Human
ggcaagcaccuccugccuc

SEQ ID NO: 1890670 - RNA, 18 nt, Human
ggcaagcaccuccugccu

SEQ ID NO: 1890671 - RNA, 17 nt, Human
ggcaagcaccuccugcc

SEQ ID NO: 1890672 - RNA, 21 nt, Human
ggauucuuccucccucccucu

SEQ ID NO: 1890673 - RNA, 23 nt, Human
ggagucccaccuuggcugcaggg

SEQ ID NO: 1890674 - RNA, 16 nt, Human
ggaugaucuaggaaga

SEQ ID NO: 1890675 - RNA, 18 nt, Human
ggaugaucuaggaagacu

SEQ ID NO: 1890676 - RNA, 22 nt, Human
ggaugaucuaggaagacuuugg

SEQ ID NO: 1890677 - RNA, 17 nt, Human
ggaugccugguggcagc

SEQ ID NO: 1890678 - RNA, 13 nt, Human
ggaugccuggugg

SEQ ID NO: 1890679 - RNA, 19 nt, Human
ggaugcccaaagaugcagc

SEQ ID NO: 1890680 - RNA, 18 nt, Human
ggaugaugacuauggaaa

SEQ ID NO: 1890681 - RNA, 18 nt, Human
ggaugcccaaagaugcag

SEQ ID NO: 1890682 - RNA, 21 nt, Human
ggaugccugguggcagcugcg

SEQ ID NO: 1890683 - RNA, 20 nt, Human
ggaugccugguggcagcugc

SEQ ID NO: 1890684 - RNA, 19 nt, Human
ggaugccugguggcagcug

SEQ ID NO: 1890685 - RNA, 18 nt, Human
ggaugccugguggcagcu

SEQ ID NO: 1890686 - RNA, 12 nt, Human
ggauuauauuau

SEQ ID NO: 1890687 - RNA, 18 nt, Human
ggaugcccuggagguggc

SEQ ID NO: 1890688 - RNA, 21 nt, Human
ggaugcccuggagguggcuga

SEQ ID NO: 1890689 - RNA, 12 nt, Human
ggaugcccugga

SEQ ID NO: 1890690 - RNA, 13 nt, Human
ggaugcccuggag

SEQ ID NO: 1890691 - RNA, 15 nt, Human
ggaugcccuggaggu

SEQ ID NO: 1890692 - RNA, 16 nt, Human
ggauucugagagcugu

SEQ ID NO: 1890693 - RNA, 13 nt, Human
ggauuccucuuuu

SEQ ID NO: 1890694 - RNA, 18 nt, Human
ggauuccucuuuucucug

SEQ ID NO: 1890695 - RNA, 15 nt, Human
ggauuccucuuuucu

SEQ ID NO: 1890696 - RNA, 21 nt, Human
ggauucaggaauguguggccu

SEQ ID NO: 1890697 - RNA, 22 nt, Human
ggcccagaggagcugggagccg

SEQ ID NO: 1890698 - RNA, 18 nt, Human
ggcccagagcccagcucc

SEQ ID NO: 1890699 - RNA, 19 nt, Human
ggcccagagcccagcucca

SEQ ID NO: 1890700 - RNA, 14 nt, Human
ggcccagagggccu

SEQ ID NO: 1890701 - RNA, 12 nt, Human
ggcccagagccc

SEQ ID NO: 1890702 - RNA, 13 nt, Human
ggcccagagccca

SEQ ID NO: 1890703 - RNA, 14 nt, Human
ggcccagagcccag

SEQ ID NO: 1890704 - RNA, 15 nt, Human
ggcccagagcccagc

SEQ ID NO: 1890705 - RNA, 16 nt, Human
ggcccagagcccagcu

SEQ ID NO: 1890706 - RNA, 17 nt, Human
ggcccagagcccagcuc

SEQ ID NO: 1890707 - RNA, 20 nt, Human
ggcccagagggccugcaagg

SEQ ID NO: 1890708 - RNA, 17 nt, Human
ggcccagagggccugca

SEQ ID NO: 1890709 - RNA, 19 nt, Human
ggcccagagggccugcaag

SEQ ID NO: 1890710 - RNA, 22 nt, Human
ggccgggaccccgagccuggcu

SEQ ID NO: 1890711 - RNA, 23 nt, Human
ggccgggaccccgagccuggcuc

SEQ ID NO: 1890712 - RNA, 14 nt, Human
ggccgggcagaggg

SEQ ID NO: 1890713 - RNA, 16 nt, Human
ggccgggcagaggggc

SEQ ID NO: 1890714 - RNA, 18 nt, Human
ggccucaagaucaaugaa

SEQ ID NO: 1890715 - RNA, 12 nt, Human
ggccucaagauc

SEQ ID NO: 1890716 - RNA, 22 nt, Human
ggccucaagugauucuccugcc

SEQ ID NO: 1890717 - RNA, 14 nt, Human
ggccucaagugauu

SEQ ID NO: 1890718 - RNA, 22 nt, Human
ggccuagcauacguacacauuu

SEQ ID NO: 1890719 - RNA, 20 nt, Human
ggccuagcauacguacacau

SEQ ID NO: 1890720 - RNA, 14 nt, Human
ggccuccugugugu

SEQ ID NO: 1890721 - RNA, 19 nt, Human
ggccucgcaggaagaccca

SEQ ID NO: 1890722 - RNA, 20 nt, Human
ggccucucauuccagaggaa

SEQ ID NO: 1890723 - RNA, 23 nt, Human
ggccugggggcugggcagaggaa

SEQ ID NO: 1890724 - RNA, 15 nt, Human
ggccuggccugagcu

SEQ ID NO: 1890725 - RNA, 16 nt, Human
ggccuggccugagcug

SEQ ID NO: 1890726 - RNA, 18 nt, Human
ggccugagcgcuccugcc

SEQ ID NO: 1890727 - RNA, 23 nt, Human
ggcgcagcauauucaggaagcuc

SEQ ID NO: 1890728 - RNA, 24 nt, Human
ggcgcagcauauucaggaagcuca

SEQ ID NO: 1890729 - RNA, 16 nt, Human
ggcgcacugccucuca

SEQ ID NO: 1890730 - RNA, 12 nt, Human
ggcgcacuguga

SEQ ID NO: 1890731 - RNA, 14 nt, Human
ggcgcacugccucu

SEQ ID NO: 1890732 - RNA, 13 nt, Human
ggccuggccccuc

SEQ ID NO: 1890733 - RNA, 22 nt, Human
ggccugagauuucaucugcucu

SEQ ID NO: 1890734 - RNA, 20 nt, Human
ggccugagauuucaucugcu

SEQ ID NO: 1890735 - RNA, 22 nt, Human
ggccucugcacuccccugcugg

SEQ ID NO: 1890736 - RNA, 16 nt, Human
ggccugacucucagca

SEQ ID NO: 1890737 - RNA, 18 nt, Human
ggccucugcacuccccug

SEQ ID NO: 1890738 - RNA, 19 nt, Human
ggccucugcacuccccugc

SEQ ID NO: 1890739 - RNA, 14 nt, Human
ggccuggccccuca

SEQ ID NO: 1890740 - RNA, 15 nt, Human
ggccuggccccucag

SEQ ID NO: 1890741 - RNA, 17 nt, Human
ggccuggccccucaggg

SEQ ID NO: 1890742 - RNA, 18 nt, Human
ggccuggccccucagggu

SEQ ID NO: 1890743 - RNA, 23 nt, Human
ggccuggccccucagggucccug

SEQ ID NO: 1890744 - RNA, 10 nt, Human
ggccuggccu

SEQ ID NO: 1890745 - RNA, 13 nt, Human
ggccuggccugag

SEQ ID NO: 1890746 - RNA, 14 nt, Human
ggccuggccugagc

SEQ ID NO: 1890747 - RNA, 14 nt, Human
ggcucccaggacac

SEQ ID NO: 1890748 - RNA, 15 nt, Human
ggcuccaggcuccuu

SEQ ID NO: 1890749 - RNA, 14 nt, Human
ggcuccaggcuccu

SEQ ID NO: 1890750 - RNA, 15 nt, Human
ggcucucaggccagc

SEQ ID NO: 1890751 - RNA, 16 nt, Human
ggcucucaggccagcu

SEQ ID NO: 1890752 - RNA, 17 nt, Human
ggcucucaggccagcug

SEQ ID NO: 1890753 - RNA, 18 nt, Human
ggcucucaggccagcugc

SEQ ID NO: 1890754 - RNA, 19 nt, Human
ggcucucaggccagcugcu

SEQ ID NO: 1890755 - RNA, 20 nt, Human
ggcucucaggccagcugcuu

SEQ ID NO: 1890756 - RNA, 23 nt, Human
ggcucucauguuuucaacugcca

SEQ ID NO: 1890757 - RNA, 17 nt, Human
ggcucuggagcccacug

SEQ ID NO: 1890758 - RNA, 19 nt, Human
ggcucuggagcccacugua

SEQ ID NO: 1890759 - RNA, 16 nt, Human
ggcucuggagcccacu

SEQ ID NO: 1890760 - RNA, 16 nt, Human
ggcucugccucccauc

SEQ ID NO: 1890761 - RNA, 14 nt, Human
ggcucugcccuugg

SEQ ID NO: 1890762 - RNA, 15 nt, Human
ggcucugcccuuggu

SEQ ID NO: 1890763 - RNA, 13 nt, Human
ggcucugccuccc

SEQ ID NO: 1890764 - RNA, 15 nt, Human
ggcucugccucccau

SEQ ID NO: 1890765 - RNA, 12 nt, Human
ggcucugcccuu

SEQ ID NO: 1890766 - RNA, 9 nt, Human
ggcuccaga

SEQ ID NO: 1890767 - RNA, 16 nt, Human
ggcuccacuuggucug

SEQ ID NO: 1890768 - RNA, 14 nt, Human
ggcuaugcauuuga

SEQ ID NO: 1890769 - RNA, 15 nt, Human
ggcucacacugagaa

SEQ ID NO: 1890770 - RNA, 18 nt, Human
ggcucacacugagaaugu

SEQ ID NO: 1890771 - RNA, 17 nt, Human
ggcucacacugagaaug

SEQ ID NO: 1890772 - RNA, 13 nt, Human
ggcuaugcauuug

SEQ ID NO: 1890773 - RNA, 12 nt, Human
ggcuaugcauuu

SEQ ID NO: 1890774 - RNA, 13 nt, Human
ggcuccaggcucc

SEQ ID NO: 1890775 - RNA, 12 nt, Human
ggcuccaggcuc

SEQ ID NO: 1890776 - RNA, 18 nt, Human
ggcuccaggagcagccac

SEQ ID NO: 1890777 - RNA, 17 nt, Human
ggcuccaggagcagcca

SEQ ID NO: 1890778 - RNA, 10 nt, Human
ggcuccagac

SEQ ID NO: 1890779 - RNA, 14 nt, Human
ggcuccaggagcag

SEQ ID NO: 1890780 - RNA, 16 nt, Human
ggcuccaggagcagcc

SEQ ID NO: 1890781 - RNA, 17 nt, Human
ggcgcugccccuggcag

SEQ ID NO: 1890782 - RNA, 11 nt, Human
ggcgcugcccc

SEQ ID NO: 1890783 - RNA, 19 nt, Human
ggcgccgcaaaccacacug

SEQ ID NO: 1890784 - RNA, 15 nt, Human
ggcgcgguggcucac

SEQ ID NO: 1890785 - RNA, 20 nt, Human
ggcuaguaucaaaagaaaga

SEQ ID NO: 1890786 - RNA, 16 nt, Human
ggcuagucaagcuccu

SEQ ID NO: 1890787 - RNA, 17 nt, Human
ggcuagucaagcuccuc

SEQ ID NO: 1890788 - RNA, 19 nt, Human
ggcuagucaagcuccuccu

SEQ ID NO: 1890789 - RNA, 22 nt, Human
ggcuagucaagcuccuccuccc

SEQ ID NO: 1890790 - RNA, 23 nt, Human
ggcuagucaagcuccuccucccu

SEQ ID NO: 1890791 - RNA, 16 nt, Human
gggagccgggccgcag

SEQ ID NO: 1890792 - RNA, 19 nt, Human
gggagccccuucugcucag

SEQ ID NO: 1890793 - RNA, 21 nt, Human
gggagccuuugguucuggcca

SEQ ID NO: 1890794 - RNA, 12 nt, Human
gggagccucccu

SEQ ID NO: 1890795 - RNA, 21 nt, Human
gggagccucccugccucaggc

SEQ ID NO: 1890796 - RNA, 15 nt, Human
gggagcuagccagag

SEQ ID NO: 1890797 - RNA, 18 nt, Human
gggagcuagccagaggac

SEQ ID NO: 1890798 - RNA, 22 nt, Human
gggagccuuugguucuggccag

SEQ ID NO: 1890799 - RNA, 21 nt, Human
gggagcuccaacucagaaggg

SEQ ID NO: 1890800 - RNA, 22 nt, Human
gggagcugccuguucagcucca

SEQ ID NO: 1890801 - RNA, 21 nt, Human
gggagcugccuguucagcucc

SEQ ID NO: 1890802 - RNA, 13 nt, Human
gggagcugccugu

SEQ ID NO: 1890803 - RNA, 16 nt, Human
gggagcugcaggggca

SEQ ID NO: 1890804 - RNA, 12 nt, Human
gggagcugaggc

SEQ ID NO: 1890805 - RNA, 22 nt, Human
gggaggauguucugggacacag

SEQ ID NO: 1890806 - RNA, 21 nt, Human
gggaggauugcuugagcucag

SEQ ID NO: 1890807 - RNA, 23 nt, Human
gggaggaucucuugagccuggga

SEQ ID NO: 1890808 - RNA, 20 nt, Human
gggaggacgcucucuggccu

SEQ ID NO: 1890809 - RNA, 17 nt, Human
gggaggacgcucucugg

SEQ ID NO: 1890810 - RNA, 17 nt, Human
gggagugacagaggcag

SEQ ID NO: 1890811 - RNA, 18 nt, Human
gggagguugaucagaucu

SEQ ID NO: 1890812 - RNA, 21 nt, Human
gggagugaguugauagcacag

SEQ ID NO: 1890813 - RNA, 23 nt, Human
gggaggauugcuugagcucagga

SEQ ID NO: 1890814 - RNA, 20 nt, Human
gggaggugggauccuccagg

SEQ ID NO: 1890815 - RNA, 12 nt, Human
gggaaucaagau

SEQ ID NO: 1890816 - RNA, 14 nt, Human
gggaaucagaacuc

SEQ ID NO: 1890817 - RNA, 23 nt, Human
gggaauagucuagauggcuccuc

SEQ ID NO: 1890818 - RNA, 23 nt, Human
gggaagugaagacuggaagcuaa

SEQ ID NO: 1890819 - RNA, 20 nt, Human
ggcuuuuacugaagccuuuc

SEQ ID NO: 1890820 - RNA, 18 nt, Human
ggcuuuuacugaagccuu

SEQ ID NO: 1890821 - RNA, 12 nt, Human
ggcuuuggauuu

SEQ ID NO: 1890822 - RNA, 13 nt, Human
ggcuuuggcuucu

SEQ ID NO: 1890823 - RNA, 21 nt, Human
ggcuuugcaaccauuuucauu

SEQ ID NO: 1890824 - RNA, 15 nt, Human
ggcuuugcaaccauu

SEQ ID NO: 1890825 - RNA, 21 nt, Human
gggaauguuugccucugccuc

SEQ ID NO: 1890826 - RNA, 19 nt, Human
gggaauguuugccucugcc

SEQ ID NO: 1890827 - RNA, 22 nt, Human
gggacaaguggacucagggcag

SEQ ID NO: 1890828 - RNA, 14 nt, Human
gggacacccuguga

SEQ ID NO: 1890829 - RNA, 20 nt, Human
gggacaccaagccuuggcuc

SEQ ID NO: 1890830 - RNA, 19 nt, Human
gggacaaguggacucaggg

SEQ ID NO: 1890831 - RNA, 21 nt, Human
gggacccaauguaggagcugc

SEQ ID NO: 1890832 - RNA, 23 nt, Human
gggacucaaugcacugacauugu

SEQ ID NO: 1890833 - RNA, 15 nt, Human
gggacugagaaauuu

SEQ ID NO: 1890834 - RNA, 21 nt, Human
gggacugaggggaggggagca

SEQ ID NO: 1890835 - RNA, 14 nt, Human
gggacguggcucag

SEQ ID NO: 1890836 - RNA, 18 nt, Human
gggacguggcucagccag

SEQ ID NO: 1890837 - RNA, 19 nt, Human
gggagcccacuguccuggg

SEQ ID NO: 1890838 - RNA, 20 nt, Human
gggagcccacuguccugggc

SEQ ID NO: 1890839 - RNA, 21 nt, Human
gggagcccacuguccugggcc

SEQ ID NO: 1890840 - RNA, 19 nt, Human
gggacucaaugcacugaca

SEQ ID NO: 1890841 - RNA, 17 nt, Human
gggacucaaugcacuga

SEQ ID NO: 1890842 - RNA, 17 nt, Human
gggacgaagaagagcca

SEQ ID NO: 1890843 - RNA, 19 nt, Human
gggacgaagaagagccaca

SEQ ID NO: 1890844 - RNA, 20 nt, Human
gggacgaagaagagccacag

SEQ ID NO: 1890845 - RNA, 21 nt, Human
gggacgaagaagagccacagu

SEQ ID NO: 1890846 - RNA, 16 nt, Human
gggaccccgagccugg

SEQ ID NO: 1890847 - RNA, 21 nt, Human
gggacccccgcccccugcccu

SEQ ID NO: 1890848 - RNA, 24 nt, Human
gggacccccgcccccugcccuccc

SEQ ID NO: 1890849 - RNA, 13 nt, Human
gggacccccgccc

SEQ ID NO: 1890850 - RNA, 14 nt, Human
gggacccccgcccc

SEQ ID NO: 1890851 - RNA, 17 nt, Human
gggacccccgcccccug

SEQ ID NO: 1890852 - RNA, 18 nt, Human
gggacccccgcccccugc

SEQ ID NO: 1890853 - RNA, 19 nt, Human
gggacccccgcccccugcc

SEQ ID NO: 1890854 - RNA, 15 nt, Human
ggcuuaaaacaacac

SEQ ID NO: 1890855 - RNA, 20 nt, Human
ggcuguuggcugggggccuc

SEQ ID NO: 1890856 - RNA, 16 nt, Human
ggcuguuggcuggggg

SEQ ID NO: 1890857 - RNA, 15 nt, Human
ggcuguuggcugggg

SEQ ID NO: 1890858 - RNA, 14 nt, Human
ggcuguuggcuggg

SEQ ID NO: 1890859 - RNA, 15 nt, Human
ggcuugccugcaggc

SEQ ID NO: 1890860 - RNA, 14 nt, Human
ggcuugccugcagg

SEQ ID NO: 1890861 - RNA, 17 nt, Human
ggcuuggggaccagagc

SEQ ID NO: 1890862 - RNA, 18 nt, Human
ggcuuggggaccagagcu

SEQ ID NO: 1890863 - RNA, 14 nt, Human
ggcuuagucacuga

SEQ ID NO: 1890864 - RNA, 15 nt, Human
ggcuuagucacugag

SEQ ID NO: 1890865 - RNA, 20 nt, Human
ggcuucacggaagagccuug

SEQ ID NO: 1890866 - RNA, 21 nt, Human
ggcuucacggaagagccuugc

SEQ ID NO: 1890867 - RNA, 15 nt, Human
ggcuucacuccugcu

SEQ ID NO: 1890868 - RNA, 13 nt, Human
ggcuugccugcag

SEQ ID NO: 1890869 - RNA, 17 nt, Human
ggcuucacuccugcugu

SEQ ID NO: 1890870 - RNA, 21 nt, Human
ggcugcuucaaggauccugag

SEQ ID NO: 1890871 - RNA, 20 nt, Human
ggcugcuucaaggauccuga

SEQ ID NO: 1890872 - RNA, 16 nt, Human
ggcuggacugaggccu

SEQ ID NO: 1890873 - RNA, 14 nt, Human
ggcuggacugaggc

SEQ ID NO: 1890874 - RNA, 13 nt, Human
ggcuggacugagg

SEQ ID NO: 1890875 - RNA, 18 nt, Human
ggcuggacugaggccuga

SEQ ID NO: 1890876 - RNA, 17 nt, Human
ggcuggacugaggccug

SEQ ID NO: 1890877 - RNA, 13 nt, Human
ggcuggacuugga

SEQ ID NO: 1890878 - RNA, 18 nt, Human
ggcuggagcuagaauuug

SEQ ID NO: 1890879 - RNA, 18 nt, Human
ggcuggacuuggagguag

SEQ ID NO: 1890880 - RNA, 14 nt, Human
ggcuggagugagga

SEQ ID NO: 1890881 - RNA, 16 nt, Human
ggcuggagugaggaaa

SEQ ID NO: 1890882 - RNA, 23 nt, Human
ggcucuggagcccacuguacuug

SEQ ID NO: 1890883 - RNA, 23 nt, Human
ggcucugggauagcugacccagc

SEQ ID NO: 1890884 - RNA, 15 nt, Human
ggcugcuucaaggau

SEQ ID NO: 1890885 - RNA, 19 nt, Human
ggcugcuucaaggauccug

SEQ ID NO: 1890886 - RNA, 14 nt, Human
ggcugaggcuggca

SEQ ID NO: 1890887 - RNA, 17 nt, Human
ggcugaggcuggcacag

SEQ ID NO: 1890888 - RNA, 18 nt, Human
ggcugaggcuggcacagg

SEQ ID NO: 1890889 - RNA, 14 nt, Human
ggcugggggccuca

SEQ ID NO: 1890890 - RNA, 16 nt, Human
ggcugggggaagaagc

SEQ ID NO: 1890891 - RNA, 22 nt, Human
ggcugggcuucaguggcagcug

SEQ ID NO: 1890892 - RNA, 21 nt, Human
ggcugggcuucaguggcagcu

SEQ ID NO: 1890893 - RNA, 11 nt, Human
ggcugggcuuc

SEQ ID NO: 1890894 - RNA, 20 nt, Human
ggcugggcucccuucccacc

SEQ ID NO: 1890895 - RNA, 21 nt, Human
ggcugggcucccuucccaccu

SEQ ID NO: 1890896 - RNA, 20 nt, Human
ggcuggagugcaguggugug

SEQ ID NO: 1890897 - RNA, 23 nt, Human
gcuggccaucugguuaggauggc

SEQ ID NO: 1890898 - RNA, 21 nt, Human
gcuggcaugauccaagcaaga

SEQ ID NO: 1890899 - RNA, 15 nt, Human
gcuggaccuugaacu

SEQ ID NO: 1890900 - RNA, 16 nt, Human
gcuggaccuugaacug

SEQ ID NO: 1890901 - RNA, 20 nt, Human
gcuggacaguaucacugucu

SEQ ID NO: 1890902 - RNA, 20 nt, Human
gcuggaaacagacucgauuc

SEQ ID NO: 1890903 - RNA, 22 nt, Human
gcugcuuuugucuaugggacuc

SEQ ID NO: 1890904 - RNA, 21 nt, Human
gcugcgguccacccaggagcc

SEQ ID NO: 1890905 - RNA, 22 nt, Human
gcugcgguccacccaggagccc

SEQ ID NO: 1890906 - RNA, 17 nt, Human
gcugcgucauuacaggg

SEQ ID NO: 1890907 - RNA, 15 nt, Human
gcugcgguccaccca

SEQ ID NO: 1890908 - RNA, 14 nt, Human
gcugcgguccaccc

SEQ ID NO: 1890909 - RNA, 14 nt, Human
gcugccuuggcuca

SEQ ID NO: 1890910 - RNA, 15 nt, Human
gcugcggagcaagag

SEQ ID NO: 1890911 - RNA, 16 nt, Human
gcugcggagcaagagg

SEQ ID NO: 1890912 - RNA, 19 nt, Human
gcugccuguucagcuccag

SEQ ID NO: 1890913 - RNA, 18 nt, Human
gcugccuguucagcucca

SEQ ID NO: 1890914 - RNA, 22 nt, Human
gcugccuguucagcuccagcuc

SEQ ID NO: 1890915 - RNA, 20 nt, Human
gcugccuguucagcuccagc

SEQ ID NO: 1890916 - RNA, 16 nt, Human
gcugcccugcccaccu

SEQ ID NO: 1890917 - RNA, 18 nt, Human
gcugcccugcccaccugg

SEQ ID NO: 1890918 - RNA, 20 nt, Human
gcugcccugcccaccuggcc

SEQ ID NO: 1890919 - RNA, 21 nt, Human
gcugcccugcccaccuggccu

SEQ ID NO: 1890920 - RNA, 22 nt, Human
gcugcccugcccaccuggccuc

SEQ ID NO: 1890921 - RNA, 23 nt, Human
gcugcccugcccaccuggccucu

SEQ ID NO: 1890922 - RNA, 24 nt, Human
gcugcccugcccaccuggccucug

SEQ ID NO: 1890923 - RNA, 13 nt, Human
gcugcccugccca

SEQ ID NO: 1890924 - RNA, 14 nt, Human
gcugcccugcccac

SEQ ID NO: 1890925 - RNA, 12 nt, Human
gcugcccugccc

SEQ ID NO: 1890926 - RNA, 23 nt, Human
gcugcaaaggguaucaggugcug

SEQ ID NO: 1890927 - RNA, 22 nt, Human
gcugcaaaggguaucaggugcu

SEQ ID NO: 1890928 - RNA, 17 nt, Human
gcugauuuggugaccaa

SEQ ID NO: 1890929 - RNA, 21 nt, Human
gcugauuaaaccaaggcuaga

SEQ ID NO: 1890930 - RNA, 14 nt, Human
gcugauuguauuua

SEQ ID NO: 1890931 - RNA, 18 nt, Human
gcugagaagcuuuugaau

SEQ ID NO: 1890932 - RNA, 19 nt, Human
gcugcauuuaaaagauaca

SEQ ID NO: 1890933 - RNA, 18 nt, Human
gcugcauuuaaaagauac

SEQ ID NO: 1890934 - RNA, 17 nt, Human
gcugcaguugccaguca

SEQ ID NO: 1890935 - RNA, 13 nt, Human
gcugcaguugcca

SEQ ID NO: 1890936 - RNA, 14 nt, Human
gcugcaguugccag

SEQ ID NO: 1890937 - RNA, 13 nt, Human
gcugcaaaggaca

SEQ ID NO: 1890938 - RNA, 15 nt, Human
gcugcaaaggacaga

SEQ ID NO: 1890939 - RNA, 20 nt, Human
gcugccaaugggagcucaug

SEQ ID NO: 1890940 - RNA, 12 nt, Human
gcugccaccugc

SEQ ID NO: 1890941 - RNA, 14 nt, Human
gcugccacccaccu

SEQ ID NO: 1890942 - RNA, 17 nt, Human
gcugccacccaccuccc

SEQ ID NO: 1890943 - RNA, 19 nt, Human
gcugccacccaccucccug

SEQ ID NO: 1890944 - RNA, 20 nt, Human
gcugccacccaccucccugc

SEQ ID NO: 1890945 - RNA, 21 nt, Human
gcugccacccaccucccugcc

SEQ ID NO: 1890946 - RNA, 13 nt, Human
gcugccaccugcc

SEQ ID NO: 1890947 - RNA, 22 nt, Human
gcugccacccaccucccugccu

SEQ ID NO: 1890948 - RNA, 23 nt, Human
gcugccacccaccucccugccuc

SEQ ID NO: 1890949 - RNA, 19 nt, Human
gcugacagacacaggcccg

SEQ ID NO: 1890950 - RNA, 18 nt, Human
gcugacagacacaggccc

SEQ ID NO: 1890951 - RNA, 17 nt, Human
gcugacagacacaggcc

SEQ ID NO: 1890952 - RNA, 20 nt, Human
gcugacagacacaggcccgg

SEQ ID NO: 1890953 - RNA, 16 nt, Human
gcugacauucaccugc

SEQ ID NO: 1890954 - RNA, 17 nt, Human
gcugacauucaccugcc

SEQ ID NO: 1890955 - RNA, 13 nt, Human
gcugaccacagca

SEQ ID NO: 1890956 - RNA, 22 nt, Human
gcugacuguuuucucuugagag

SEQ ID NO: 1890957 - RNA, 13 nt, Human
gcugacggccagg

SEQ ID NO: 1890958 - RNA, 15 nt, Human
gcugacggccaggga

SEQ ID NO: 1890959 - RNA, 19 nt, Human
gcugacuucaucucccacc

SEQ ID NO: 1890960 - RNA, 24 nt, Human
gcugacuucaucucccaccuagca

SEQ ID NO: 1890961 - RNA, 14 nt, Human
gcugaccacagcac

SEQ ID NO: 1890962 - RNA, 16 nt, Human
gcugaccacagcacag

SEQ ID NO: 1890963 - RNA, 17 nt, Human
gcugaccacagcacagc

SEQ ID NO: 1890964 - RNA, 19 nt, Human
gcugaccacagcacagcca

SEQ ID NO: 1890965 - RNA, 19 nt, Human
gcucuugaugccuggcggg

SEQ ID NO: 1890966 - RNA, 12 nt, Human
gcucuuugcacu

SEQ ID NO: 1890967 - RNA, 13 nt, Human
gcucuuugcacua

SEQ ID NO: 1890968 - RNA, 15 nt, Human
gcucuccaagcccag

SEQ ID NO: 1890969 - RNA, 21 nt, Human
gcucucaggccagcugcuugg

SEQ ID NO: 1890970 - RNA, 20 nt, Human
gcuucaguggcagcugcuuu

SEQ ID NO: 1890971 - RNA, 13 nt, Human
gcuuaucucaggg

SEQ ID NO: 1890972 - RNA, 19 nt, Human
gcuucaguggcagcugcuu

SEQ ID NO: 1890973 - RNA, 11 nt, Human
gcuucauacac

SEQ ID NO: 1890974 - RNA, 10 nt, Human
gcuucauaca

SEQ ID NO: 1890975 - RNA, 12 nt, Human
gcuuacggcccu

SEQ ID NO: 1890976 - RNA, 15 nt, Human
gcuuacggcccuggc

SEQ ID NO: 1890977 - RNA, 16 nt, Human
gcuuacggcccuggcc

SEQ ID NO: 1890978 - RNA, 17 nt, Human
gcuuacggcccuggccu

SEQ ID NO: 1890979 - RNA, 19 nt, Human
gcuuacggcccuggccuug

SEQ ID NO: 1890980 - RNA, 22 nt, Human
gcuucucacugccaugccagcu

SEQ ID NO: 1890981 - RNA, 16 nt, Human
gcuucucauccugcag

SEQ ID NO: 1890982 - RNA, 18 nt, Human
gcuucauuuccugugucu

SEQ ID NO: 1890983 - RNA, 16 nt, Human
gcuucuguugucaccu

SEQ ID NO: 1890984 - RNA, 17 nt, Human
gcuucuguugucaccuu

SEQ ID NO: 1890985 - RNA, 18 nt, Human
gcuucucauccugcaggc

SEQ ID NO: 1890986 - RNA, 17 nt, Human
gcuucucauccugcagg

SEQ ID NO: 1890987 - RNA, 20 nt, Human
gcuuugguuauauuuagcuc

SEQ ID NO: 1890988 - RNA, 13 nt, Human
gcuuuuaugugaa

SEQ ID NO: 1890989 - RNA, 15 nt, Human
gcuuuuaugugaaac

SEQ ID NO: 1890990 - RNA, 14 nt, Human
gcuuuccaaagcca

SEQ ID NO: 1890991 - RNA, 14 nt, Human
gcuuguuggauuuu

SEQ ID NO: 1890992 - RNA, 15 nt, Human
gcuuguuauuuauaa

SEQ ID NO: 1890993 - RNA, 21 nt, Human
gcuuguuaaugcuuucugaag

SEQ ID NO: 1890994 - RNA, 13 nt, Human
gcuuguuaaugcu

SEQ ID NO: 1890995 - RNA, 23 nt, Human
gcuuguuaaugcuuucugaagcu

SEQ ID NO: 1890996 - RNA, 16 nt, Human
gcuuggacggcugggc

SEQ ID NO: 1890997 - RNA, 18 nt, Human
gcuuggaaacuggaugag

SEQ ID NO: 1890998 - RNA, 14 nt, Human
gcuugccugcaggc

SEQ ID NO: 1890999 - RNA, 13 nt, Human
gcuugccugcagg

SEQ ID NO: 1891000 - RNA, 19 nt, Human
gcuucuguugucaccuuca

SEQ ID NO: 1891001 - RNA, 15 nt, Human
gcuggugucaccuga

SEQ ID NO: 1891002 - RNA, 14 nt, Human
gcuggugucaccug

SEQ ID NO: 1891003 - RNA, 14 nt, Human
gcugucaucugugc

SEQ ID NO: 1891004 - RNA, 15 nt, Human
gcugucaucugugca

SEQ ID NO: 1891005 - RNA, 16 nt, Human
gcugucaucugugcac

SEQ ID NO: 1891006 - RNA, 17 nt, Human
gcugucagccauuccug

SEQ ID NO: 1891007 - RNA, 23 nt, Human
gcugucccuuacgugaguccugg

SEQ ID NO: 1891008 - RNA, 16 nt, Human
gcugucccuuuuccuu

SEQ ID NO: 1891009 - RNA, 22 nt, Human
gcugucaucugugcacugccca

SEQ ID NO: 1891010 - RNA, 16 nt, Human
gcuguguggcagucug

SEQ ID NO: 1891011 - RNA, 16 nt, Human
gcugugugcucuccaa

SEQ ID NO: 1891012 - RNA, 15 nt, Human
gcugugucucccuuc

SEQ ID NO: 1891013 - RNA, 13 nt, Human
gcuguccucaggu

SEQ ID NO: 1891014 - RNA, 18 nt, Human
gcuguccucagguggcca

SEQ ID NO: 1891015 - RNA, 19 nt, Human
gcuguccucagguggccau

SEQ ID NO: 1891016 - RNA, 20 nt, Human
gcuguccucagguggccaug

SEQ ID NO: 1891017 - RNA, 14 nt, Human
gcuggucccacuca

SEQ ID NO: 1891018 - RNA, 19 nt, Human
gcuggucucaaacuccuga

SEQ ID NO: 1891019 - RNA, 20 nt, Human
gcuggucucaaacuccugac

SEQ ID NO: 1891020 - RNA, 18 nt, Human
gcugggggccucagugcc

SEQ ID NO: 1891021 - RNA, 22 nt, Human
gcuggucaaacaaacucucuga

SEQ ID NO: 1891022 - RNA, 15 nt, Human
gcugggggccucagu

SEQ ID NO: 1891023 - RNA, 14 nt, Human
gcugggggccucag

SEQ ID NO: 1891024 - RNA, 14 nt, Human
gcuggggaugucuc

SEQ ID NO: 1891025 - RNA, 20 nt, Human
gcugggcuucaguggcagcu

SEQ ID NO: 1891026 - RNA, 22 nt, Human
gcugggcuucaguggcagcugc

SEQ ID NO: 1891027 - RNA, 21 nt, Human
gcugggcuucaguggcagcug

SEQ ID NO: 1891028 - RNA, 22 nt, Human
gcugggcuuggcagcccggguc

SEQ ID NO: 1891029 - RNA, 19 nt, Human
gcugggaugauuggagggg

SEQ ID NO: 1891030 - RNA, 21 nt, Human
gcugggcucccuucccaccuc

SEQ ID NO: 1891031 - RNA, 13 nt, Human
gcuggccuggccc

SEQ ID NO: 1891032 - RNA, 12 nt, Human
gcuggccuggcc

SEQ ID NO: 1891033 - RNA, 14 nt, Human
gcuggccuggcccc

SEQ ID NO: 1891034 - RNA, 15 nt, Human
gcuggccuggccccu

SEQ ID NO: 1891035 - RNA, 18 nt, Human
gcgcaguggcccugagca

SEQ ID NO: 1891036 - RNA, 15 nt, Human
gcgcaguggcccuga

SEQ ID NO: 1891037 - RNA, 18 nt, Human
gcgccaaauaaugucucu

SEQ ID NO: 1891038 - RNA, 23 nt, Human
gcgcccaguuggguggaugccug

SEQ ID NO: 1891039 - RNA, 22 nt, Human
gcgcccaguccuuccaccucga

SEQ ID NO: 1891040 - RNA, 21 nt, Human
gcgccuuaaggauguucuagc

SEQ ID NO: 1891041 - RNA, 17 nt, Human
gcgccgcaaaccacacu

SEQ ID NO: 1891042 - RNA, 18 nt, Human
gcgccgcaaaccacacug

SEQ ID NO: 1891043 - RNA, 14 nt, Human
gcgguccacccagg

SEQ ID NO: 1891044 - RNA, 13 nt, Human
gcgguccacccag

SEQ ID NO: 1891045 - RNA, 19 nt, Human
gcggugagaggggaacaga

SEQ ID NO: 1891046 - RNA, 23 nt, Human
gcgguagccagcacacagggcag

SEQ ID NO: 1891047 - RNA, 21 nt, Human
gcgguagccagcacacagggc

SEQ ID NO: 1891048 - RNA, 22 nt, Human
gcgguagccagcacacagggca

SEQ ID NO: 1891049 - RNA, 17 nt, Human
gcggggacagcuccuuc

SEQ ID NO: 1891050 - RNA, 15 nt, Human
gcggggacagcuccu

SEQ ID NO: 1891051 - RNA, 15 nt, Human
gcgguagccagcaca

SEQ ID NO: 1891052 - RNA, 14 nt, Human
gcggggacagcucc

SEQ ID NO: 1891053 - RNA, 19 nt, Human
gcggagacggagucccacc

SEQ ID NO: 1891054 - RNA, 16 nt, Human
gcggagaaaggaaggg

SEQ ID NO: 1891055 - RNA, 18 nt, Human
gcgcugccccuggcagcc

SEQ ID NO: 1891056 - RNA, 21 nt, Human
gcgcugccccuggcagccccu

SEQ ID NO: 1891057 - RNA, 20 nt, Human
gccuuguaauucuaaaugaa

SEQ ID NO: 1891058 - RNA, 17 nt, Human
gccuuguaauucuaaau

SEQ ID NO: 1891059 - RNA, 13 nt, Human
gccuuccucucuc

SEQ ID NO: 1891060 - RNA, 16 nt, Human
gccuuccucucuccag

SEQ ID NO: 1891061 - RNA, 17 nt, Human
gccuuccucucuccaga

SEQ ID NO: 1891062 - RNA, 18 nt, Human
gccuuccucucuccagau

SEQ ID NO: 1891063 - RNA, 15 nt, Human
gccuuguugaugugg

SEQ ID NO: 1891064 - RNA, 16 nt, Human
gccuuacacaaugguu

SEQ ID NO: 1891065 - RNA, 19 nt, Human
gccuuccuauuuugcauaa

SEQ ID NO: 1891066 - RNA, 15 nt, Human
gccuuacacaauggu

SEQ ID NO: 1891067 - RNA, 12 nt, Human
gcgacaaugcaa

SEQ ID NO: 1891068 - RNA, 13 nt, Human
gcgacaaugcaaa

SEQ ID NO: 1891069 - RNA, 20 nt, Human
gcgacaaugcaaaccaucau

SEQ ID NO: 1891070 - RNA, 21 nt, Human
gcgacaaugcaaaccaucauu

SEQ ID NO: 1891071 - RNA, 19 nt, Human
gccuuucccaacucuagcu

SEQ ID NO: 1891072 - RNA, 18 nt, Human
gccuuucccaacucuagc

SEQ ID NO: 1891073 - RNA, 16 nt, Human
gcgaauuuuaaaagau

SEQ ID NO: 1891074 - RNA, 15 nt, Human
gcgaauuuuaaaaga

SEQ ID NO: 1891075 - RNA, 14 nt, Human
gcgaauuuuaaaag

SEQ ID NO: 1891076 - RNA, 14 nt, Human
gccuggcacacauc

SEQ ID NO: 1891077 - RNA, 22 nt, Human
gccuggccagaugcaccagccc

SEQ ID NO: 1891078 - RNA, 21 nt, Human
gccuggccagaugcaccagcc

SEQ ID NO: 1891079 - RNA, 20 nt, Human
gccuggccagaugcaccagc

SEQ ID NO: 1891080 - RNA, 13 nt, Human
gccuggccccuca

SEQ ID NO: 1891081 - RNA, 14 nt, Human
gccuggccccucag

SEQ ID NO: 1891082 - RNA, 20 nt, Human
gccuguaauccuagcacuuu

SEQ ID NO: 1891083 - RNA, 15 nt, Human
gccuguaauccuagc

SEQ ID NO: 1891084 - RNA, 13 nt, Human
gccuggucagccc

SEQ ID NO: 1891085 - RNA, 15 nt, Human
gccuggucagcccaa

SEQ ID NO: 1891086 - RNA, 14 nt, Human
gccuggucagccca

SEQ ID NO: 1891087 - RNA, 16 nt, Human
gccuggcacacaucag

SEQ ID NO: 1891088 - RNA, 13 nt, Human
gccuggcacacau

SEQ ID NO: 1891089 - RNA, 20 nt, Human
gccuggauggggcugcaccg

SEQ ID NO: 1891090 - RNA, 20 nt, Human
gccuggauguugcugugcac

SEQ ID NO: 1891091 - RNA, 16 nt, Human
gccuggauggggcugc

SEQ ID NO: 1891092 - RNA, 18 nt, Human
gccuggauggggcugcac

SEQ ID NO: 1891093 - RNA, 18 nt, Human
gccugaagucacacagug

SEQ ID NO: 1891094 - RNA, 17 nt, Human
gccugaagucacacagu

SEQ ID NO: 1891095 - RNA, 20 nt, Human
gccugagcgacagugagacu

SEQ ID NO: 1891096 - RNA, 17 nt, Human
gccugagcgacagugag

SEQ ID NO: 1891097 - RNA, 16 nt, Human
gccugaagucacacag

SEQ ID NO: 1891098 - RNA, 22 nt, Human
gcccaguuggguggaugccugg

SEQ ID NO: 1891099 - RNA, 21 nt, Human
gcccaguuggguggaugccug

SEQ ID NO: 1891100 - RNA, 19 nt, Human
gcccaguuggguggaugcc

SEQ ID NO: 1891101 - RNA, 12 nt, Human
gccugagcuggg

SEQ ID NO: 1891102 - RNA, 22 nt, Human
gccugagcgcuccugccgcaga

SEQ ID NO: 1891103 - RNA, 23 nt, Human
gccugagcgcuccugccgcagag

SEQ ID NO: 1891104 - RNA, 17 nt, Human
gcuauaaacaauuacau

SEQ ID NO: 1891105 - RNA, 21 nt, Human
gcuaguugggcuuccucauag

SEQ ID NO: 1891106 - RNA, 19 nt, Human
gcggugcuaucucccccag

SEQ ID NO: 1891107 - RNA, 22 nt, Human
gcggugcuaucucccccagccc

SEQ ID NO: 1891108 - RNA, 16 nt, Human
gcggugcuguccucag

SEQ ID NO: 1891109 - RNA, 18 nt, Human
gcggugcuguccucaggu

SEQ ID NO: 1891110 - RNA, 18 nt, Human
gcuauaaauuccucuuug

SEQ ID NO: 1891111 - RNA, 23 nt, Human
gcuauaaauuccucuuugcuuug

SEQ ID NO: 1891112 - RNA, 19 nt, Human
gcuauccagcuauuuuuau

SEQ ID NO: 1891113 - RNA, 22 nt, Human
gcucaaguccucuuuucugaga

SEQ ID NO: 1891114 - RNA, 19 nt, Human
gcucaaguccucuuuucug

SEQ ID NO: 1891115 - RNA, 14 nt, Human
gcucacaccuguaa

SEQ ID NO: 1891116 - RNA, 18 nt, Human
gcucaaguccucuuuucu

SEQ ID NO: 1891117 - RNA, 18 nt, Human
gcucaagcgauucuccug

SEQ ID NO: 1891118 - RNA, 14 nt, Human
gcuaucucccccag

SEQ ID NO: 1891119 - RNA, 15 nt, Human
gcuaucucccccagc

SEQ ID NO: 1891120 - RNA, 15 nt, Human
gcuaucguaaaauua

SEQ ID NO: 1891121 - RNA, 16 nt, Human
gcuaucguaaaauuaa

SEQ ID NO: 1891122 - RNA, 17 nt, Human
gcuaucguaaaauuaag

SEQ ID NO: 1891123 - RNA, 13 nt, Human
gcuaucuccccca

SEQ ID NO: 1891124 - RNA, 18 nt, Human
gcucauggacuucugcca

SEQ ID NO: 1891125 - RNA, 12 nt, Human
gcucagcuucuc

SEQ ID NO: 1891126 - RNA, 13 nt, Human
gcucagcuucucc

SEQ ID NO: 1891127 - RNA, 16 nt, Human
gcucagcuucuccugu

SEQ ID NO: 1891128 - RNA, 16 nt, Human
gcucagcucugggcca

SEQ ID NO: 1891129 - RNA, 17 nt, Human
gcucagcucugggccau

SEQ ID NO: 1891130 - RNA, 23 nt, Human
gcucagcggggacagcuccuucu

SEQ ID NO: 1891131 - RNA, 19 nt, Human
gcucagcggggacagcucc

SEQ ID NO: 1891132 - RNA, 18 nt, Human
gcucagcggggacagcuc

SEQ ID NO: 1891133 - RNA, 17 nt, Human
gcucagcggggacagcu

SEQ ID NO: 1891134 - RNA, 16 nt, Human
gcucagcggggacagc

SEQ ID NO: 1891135 - RNA, 18 nt, Human
gcucaccagccccagugc

SEQ ID NO: 1891136 - RNA, 15 nt, Human
gcucaccagccccag

SEQ ID NO: 1891137 - RNA, 14 nt, Human
gcucaccagcccca

SEQ ID NO: 1891138 - RNA, 13 nt, Human
gcucaccagcccc

SEQ ID NO: 1891139 - RNA, 12 nt, Human
gcucaccagccc

SEQ ID NO: 1891140 - RNA, 16 nt, Human
gcucacauaucuguca

SEQ ID NO: 1891141 - RNA, 22 nt, Human
gcucacacugagaauguaagaa

SEQ ID NO: 1891142 - RNA, 14 nt, Human
gcucacacugagaa

SEQ ID NO: 1891143 - RNA, 13 nt, Human
gcucacacugaga

SEQ ID NO: 1891144 - RNA, 15 nt, Human
gcucagccagcacuu

SEQ ID NO: 1891145 - RNA, 14 nt, Human
gcucaccucucccu

SEQ ID NO: 1891146 - RNA, 16 nt, Human
gcucaccucucccuug

SEQ ID NO: 1891147 - RNA, 17 nt, Human
gcucaccucucccuugg

SEQ ID NO: 1891148 - RNA, 18 nt, Human
gcucaccucucccuugga

SEQ ID NO: 1891149 - RNA, 23 nt, Human
gcuccgcuuucuacccagcgagc

SEQ ID NO: 1891150 - RNA, 22 nt, Human
gcuccgcuuucuacccagcgag

SEQ ID NO: 1891151 - RNA, 21 nt, Human
gcuccgcuuucuacccagcga

SEQ ID NO: 1891152 - RNA, 18 nt, Human
gcuccgcuuucuacccag

SEQ ID NO: 1891153 - RNA, 20 nt, Human
gcucccuucccaccucucuc

SEQ ID NO: 1891154 - RNA, 12 nt, Human
gcuccaggcucc

SEQ ID NO: 1891155 - RNA, 18 nt, Human
gcuccaggccagggggcc

SEQ ID NO: 1891156 - RNA, 17 nt, Human
gcuccaggccagggggc

SEQ ID NO: 1891157 - RNA, 15 nt, Human
gcuccaggagcagcc

SEQ ID NO: 1891158 - RNA, 16 nt, Human
gcuccaggagcagcca

SEQ ID NO: 1891159 - RNA, 17 nt, Human
gcuccaggagcagccac

SEQ ID NO: 1891160 - RNA, 18 nt, Human
gcuccaggagcagccaca

SEQ ID NO: 1891161 - RNA, 11 nt, Human
gcuccaggagc

SEQ ID NO: 1891162 - RNA, 17 nt, Human
gcucauuuacuguuuua

SEQ ID NO: 1891163 - RNA, 12 nt, Human
gcuccaggagca

SEQ ID NO: 1891164 - RNA, 14 nt, Human
gcuccaggagcagc

SEQ ID NO: 1891165 - RNA, 13 nt, Human
gcuccaaacccuc

SEQ ID NO: 1891166 - RNA, 21 nt, Human
gcuccagcuguucagcugguu

SEQ ID NO: 1891167 - RNA, 18 nt, Human
gcucauucuaaugauggc

SEQ ID NO: 1891168 - RNA, 14 nt, Human
gcucauucuaauga

SEQ ID NO: 1891169 - RNA, 12 nt, Human
gcucauuuacug

SEQ ID NO: 1891170 - RNA, 21 nt, Human
gcucgagcaugccuggauggg

SEQ ID NO: 1891171 - RNA, 19 nt, Human
gcucgagcaugccuggaug

SEQ ID NO: 1891172 - RNA, 16 nt, Human
gcuccuuguuccuaga

SEQ ID NO: 1891173 - RNA, 17 nt, Human
gcuccuuuagcgcccag

SEQ ID NO: 1891174 - RNA, 14 nt, Human
gcuccuuguuccua

SEQ ID NO: 1891175 - RNA, 13 nt, Human
gcuccuucugucc

SEQ ID NO: 1891176 - RNA, 13 nt, Human
gcuccugugucuu

SEQ ID NO: 1891177 - RNA, 12 nt, Human
gcuccugugucu

SEQ ID NO: 1891178 - RNA, 24 nt, Human
gcuccgcuuucuacccagcgagcc

SEQ ID NO: 1891179 - RNA, 13 nt, Human
gcuccuagaggga

SEQ ID NO: 1891180 - RNA, 14 nt, Human
gcuccuagagggag

SEQ ID NO: 1891181 - RNA, 15 nt, Human
gcuccuagagggagg

SEQ ID NO: 1891182 - RNA, 16 nt, Human
gcuccuagagggaggg

SEQ ID NO: 1891183 - RNA, 18 nt, Human
gcuccuagagggaggggc

SEQ ID NO: 1891184 - RNA, 19 nt, Human
gcuccuagagggaggggcc

SEQ ID NO: 1891185 - RNA, 20 nt, Human
gcuccuccagggugugugcu

SEQ ID NO: 1891186 - RNA, 13 nt, Human
ucacugccauaua

SEQ ID NO: 1891187 - RNA, 18 nt, Human
ucacugccaugccagcuu

SEQ ID NO: 1891188 - RNA, 19 nt, Human
ucacugcuaagaauauuug

SEQ ID NO: 1891189 - RNA, 20 nt, Human
ucacucuuauugcccacgcu

SEQ ID NO: 1891190 - RNA, 19 nt, Human
ucacucugugucugagugg

SEQ ID NO: 1891191 - RNA, 16 nt, Human
ucaccagccccagugc

SEQ ID NO: 1891192 - RNA, 13 nt, Human
ucaccagccccag

SEQ ID NO: 1891193 - RNA, 17 nt, Human
ucacucuuauugcccac

SEQ ID NO: 1891194 - RNA, 19 nt, Human
ucaccccugguucucaucu

SEQ ID NO: 1891195 - RNA, 18 nt, Human
ucaccccugguucucauc

SEQ ID NO: 1891196 - RNA, 15 nt, Human
ucaccccugguucuc

SEQ ID NO: 1891197 - RNA, 20 nt, Human
ucaccccucccuuucucccc

SEQ ID NO: 1891198 - RNA, 18 nt, Human
ucaccccucccuuucucc

SEQ ID NO: 1891199 - RNA, 17 nt, Human
ucaccccucccuuucuc

SEQ ID NO: 1891200 - RNA, 14 nt, Human
ucaccccucccuuu

SEQ ID NO: 1891201 - RNA, 14 nt, Human
ucacugcuuaacuu

SEQ ID NO: 1891202 - RNA, 17 nt, Human
ucacuggggccuacagc

SEQ ID NO: 1891203 - RNA, 14 nt, Human
ucagaaacaggacc

SEQ ID NO: 1891204 - RNA, 10 nt, Human
ucagaaaugu

SEQ ID NO: 1891205 - RNA, 20 nt, Human
ucacuuguuuuauuuaaccu

SEQ ID NO: 1891206 - RNA, 16 nt, Human
ucagaauucucuaguu

SEQ ID NO: 1891207 - RNA, 23 nt, Human
ucagacacccucaaccucuucug

SEQ ID NO: 1891208 - RNA, 15 nt, Human
ucagacacccucaac

SEQ ID NO: 1891209 - RNA, 17 nt, Human
ucagacacccucaaccu

SEQ ID NO: 1891210 - RNA, 22 nt, Human
ucagacacccucaaccucuucu

SEQ ID NO: 1891211 - RNA, 23 nt, Human
ucagaauucucuaguuugauuaa

SEQ ID NO: 1891212 - RNA, 15 nt, Human
ucagaaauguguuau

SEQ ID NO: 1891213 - RNA, 23 nt, Human
ucagaccauaauguuacauuauu

SEQ ID NO: 1891214 - RNA, 15 nt, Human
ucagaccauaauguu

SEQ ID NO: 1891215 - RNA, 14 nt, Human
ucagacagcugccu

SEQ ID NO: 1891216 - RNA, 13 nt, Human
ucagacagcugcc

SEQ ID NO: 1891217 - RNA, 18 nt, Human
ucagaccuuuuaacuccu

SEQ ID NO: 1891218 - RNA, 18 nt, Human
ucagacgcacucgcauug

SEQ ID NO: 1891219 - RNA, 21 nt, Human
ucagaguaauccaagcaaaug

SEQ ID NO: 1891220 - RNA, 22 nt, Human
ucagaguaauccaagcaaaugu

SEQ ID NO: 1891221 - RNA, 15 nt, Human
ucagggaggucauuu

SEQ ID NO: 1891222 - RNA, 21 nt, Human
ucagggagugggcuaagcacg

SEQ ID NO: 1891223 - RNA, 15 nt, Human
ucaggcuugauaaua

SEQ ID NO: 1891224 - RNA, 16 nt, Human
ucagggaaaagcagcu

SEQ ID NO: 1891225 - RNA, 18 nt, Human
ucagggaaaagcagcucu

SEQ ID NO: 1891226 - RNA, 19 nt, Human
ucagggaaaagcagcucuc

SEQ ID NO: 1891227 - RNA, 23 nt, Human
ucagggaaaagcagcucuccccu

SEQ ID NO: 1891228 - RNA, 15 nt, Human
ucagggcagcgccag

SEQ ID NO: 1891229 - RNA, 19 nt, Human
ucagggcagcgccaggcug

SEQ ID NO: 1891230 - RNA, 14 nt, Human
ucagggccuggcuc

SEQ ID NO: 1891231 - RNA, 16 nt, Human
ucagggccuggcucag

SEQ ID NO: 1891232 - RNA, 15 nt, Human
ucaggugagaagcag

SEQ ID NO: 1891233 - RNA, 16 nt, Human
ucaggugagaagcaga

SEQ ID NO: 1891234 - RNA, 19 nt, Human
ucaggagcccugggaggcu

SEQ ID NO: 1891235 - RNA, 18 nt, Human
ucaggagcccugggaggc

SEQ ID NO: 1891236 - RNA, 20 nt, Human
ucaggagcccugggaggcuc

SEQ ID NO: 1891237 - RNA, 23 nt, Human
ucaggagcccugggaggcucugg

SEQ ID NO: 1891238 - RNA, 22 nt, Human
ucagccucccgaguagcuggga

SEQ ID NO: 1891239 - RNA, 21 nt, Human
ucagccucccgaguagcuggg

SEQ ID NO: 1891240 - RNA, 20 nt, Human
ucagccuccugaguagcugg

SEQ ID NO: 1891241 - RNA, 21 nt, Human
ucagccuccugaguagcugga

SEQ ID NO: 1891242 - RNA, 13 nt, Human
ucagccuccugag

SEQ ID NO: 1891243 - RNA, 18 nt, Human
ucagccugcuccagcugu

SEQ ID NO: 1891244 - RNA, 19 nt, Human
ucagccugcuccagcuguu

SEQ ID NO: 1891245 - RNA, 15 nt, Human
ucagcugaaccuggg

SEQ ID NO: 1891246 - RNA, 16 nt, Human
ucagcugaaccugggu

SEQ ID NO: 1891247 - RNA, 12 nt, Human
ucagccuggcca

SEQ ID NO: 1891248 - RNA, 14 nt, Human
ucagccuggccaga

SEQ ID NO: 1891249 - RNA, 15 nt, Human
ucagccuggccagac

SEQ ID NO: 1891250 - RNA, 16 nt, Human
ucagccuggccagaca

SEQ ID NO: 1891251 - RNA, 17 nt, Human
ucagccuggccagacac

SEQ ID NO: 1891252 - RNA, 18 nt, Human
ucagccuggccagacaca

SEQ ID NO: 1891253 - RNA, 21 nt, Human
ucagccucccaaagugcuggg

SEQ ID NO: 1891254 - RNA, 19 nt, Human
ucagccucccaaagugcug

SEQ ID NO: 1891255 - RNA, 14 nt, Human
ucagccucccaaag

SEQ ID NO: 1891256 - RNA, 22 nt, Human
ucagccucccgaauagcuggga

SEQ ID NO: 1891257 - RNA, 21 nt, Human
ucagccucccgaauagcuggg

SEQ ID NO: 1891258 - RNA, 18 nt, Human
ucagccucccgaguagcu

SEQ ID NO: 1891259 - RNA, 20 nt, Human
ucagccucccgaguagcugg

SEQ ID NO: 1891260 - RNA, 17 nt, Human
ucagauauaaaagacug

SEQ ID NO: 1891261 - RNA, 14 nt, Human
ucagauauaaaaga

SEQ ID NO: 1891262 - RNA, 20 nt, Human
ucagauauaaaagacugacc

SEQ ID NO: 1891263 - RNA, 18 nt, Human
ucagauauaaaagacuga

SEQ ID NO: 1891264 - RNA, 15 nt, Human
ucagauaugauucaa

SEQ ID NO: 1891265 - RNA, 13 nt, Human
ucauucaauaaau

SEQ ID NO: 1891266 - RNA, 14 nt, Human
ucauuccagaggaa

SEQ ID NO: 1891267 - RNA, 21 nt, Human
ucauucaacccaccugcgucu

SEQ ID NO: 1891268 - RNA, 16 nt, Human
ucauuuccugugucuu

SEQ ID NO: 1891269 - RNA, 13 nt, Human
ucauuuccugugu

SEQ ID NO: 1891270 - RNA, 12 nt, Human
ucauugugaaau

SEQ ID NO: 1891271 - RNA, 15 nt, Human
ucauugugaaauuau

SEQ ID NO: 1891272 - RNA, 17 nt, Human
ucauugugaaauuauuc

SEQ ID NO: 1891273 - RNA, 18 nt, Human
ucauugugaaauuauuca

SEQ ID NO: 1891274 - RNA, 21 nt, Human
ucauuucaccccucccuuucu

SEQ ID NO: 1891275 - RNA, 16 nt, Human
ucauuucaccccuccc

SEQ ID NO: 1891276 - RNA, 15 nt, Human
ucauuucaccccucc

SEQ ID NO: 1891277 - RNA, 14 nt, Human
ucauuucaccccuc

SEQ ID NO: 1891278 - RNA, 23 nt, Human
ucauuucaccccucccuuucucc

SEQ ID NO: 1891279 - RNA, 23 nt, Human
ucaucuuagguuggcaaaaaggc

SEQ ID NO: 1891280 - RNA, 16 nt, Human
ucaucugcucuccuuc

SEQ ID NO: 1891281 - RNA, 15 nt, Human
ucaucugcucuccuu

SEQ ID NO: 1891282 - RNA, 14 nt, Human
ucaucugcucuccu

SEQ ID NO: 1891283 - RNA, 12 nt, Human
ucaucugcucuc

SEQ ID NO: 1891284 - RNA, 18 nt, Human
ucaucugcucuccuuccu

SEQ ID NO: 1891285 - RNA, 17 nt, Human
ucaucugcucuccuucc

SEQ ID NO: 1891286 - RNA, 21 nt, Human
ucaucugcucuccuuccugga

SEQ ID NO: 1891287 - RNA, 19 nt, Human
ucaucuugaauuguaagga

SEQ ID NO: 1891288 - RNA, 13 nt, Human
ucaucugccgugc

SEQ ID NO: 1891289 - RNA, 15 nt, Human
ucaggugcugccauc

SEQ ID NO: 1891290 - RNA, 14 nt, Human
ucaggugcugccau

SEQ ID NO: 1891291 - RNA, 13 nt, Human
ucaggugcugcca

SEQ ID NO: 1891292 - RNA, 23 nt, Human
ucaggugccucaagagaaggcaa

SEQ ID NO: 1891293 - RNA, 21 nt, Human
ucaggugagaagcagaggaag

SEQ ID NO: 1891294 - RNA, 15 nt, Human
ucauacucaccucac

SEQ ID NO: 1891295 - RNA, 20 nt, Human
ucauacuaucuacucuccuc

SEQ ID NO: 1891296 - RNA, 19 nt, Human
ucaucaccaacgucugugc

SEQ ID NO: 1891297 - RNA, 20 nt, Human
ucaucaccaacgucugugcc

SEQ ID NO: 1891298 - RNA, 21 nt, Human
ucaucaccaacgucugugcca

SEQ ID NO: 1891299 - RNA, 17 nt, Human
uccaauuuacauacucu

SEQ ID NO: 1891300 - RNA, 18 nt, Human
uccaauuuacauacucug

SEQ ID NO: 1891301 - RNA, 18 nt, Human
uccaaaauaaaacuuuuu

SEQ ID NO: 1891302 - RNA, 20 nt, Human
uccaaaauaaaacuuuuuaa

SEQ ID NO: 1891303 - RNA, 17 nt, Human
uccacaaguuaaauaaa

SEQ ID NO: 1891304 - RNA, 18 nt, Human
uccacaaguuaaauaaau

SEQ ID NO: 1891305 - RNA, 23 nt, Human
uccacacaacauauccguauaua

SEQ ID NO: 1891306 - RNA, 16 nt, Human
uccacaagagcccagg

SEQ ID NO: 1891307 - RNA, 17 nt, Human
uccacaagagcccaggc

SEQ ID NO: 1891308 - RNA, 18 nt, Human
uccacaagagcccaggcc

SEQ ID NO: 1891309 - RNA, 12 nt, Human
uccacccugcuc

SEQ ID NO: 1891310 - RNA, 17 nt, Human
uccacagcaaccccagg

SEQ ID NO: 1891311 - RNA, 18 nt, Human
uccaccugccagggacag

SEQ ID NO: 1891312 - RNA, 21 nt, Human
uccaccugccagggacagagg

SEQ ID NO: 1891313 - RNA, 17 nt, Human
uccaccugccagggaca

SEQ ID NO: 1891314 - RNA, 15 nt, Human
uccaccugccaggga

SEQ ID NO: 1891315 - RNA, 17 nt, Human
uccagccacagaaaaga

SEQ ID NO: 1891316 - RNA, 16 nt, Human
uccacuuggucuguga

SEQ ID NO: 1891317 - RNA, 15 nt, Human
uccacuuggucugug

SEQ ID NO: 1891318 - RNA, 17 nt, Human
uccagcuguucagcugg

SEQ ID NO: 1891319 - RNA, 16 nt, Human
uccaggagcagccaca

SEQ ID NO: 1891320 - RNA, 17 nt, Human
uccagcucaccagcccc

SEQ ID NO: 1891321 - RNA, 16 nt, Human
uccagcucaccagccc

SEQ ID NO: 1891322 - RNA, 18 nt, Human
uccagcucaccagcccca

SEQ ID NO: 1891323 - RNA, 16 nt, Human
uccagguucagcuugu

SEQ ID NO: 1891324 - RNA, 15 nt, Human
uccagguucagcuug

SEQ ID NO: 1891325 - RNA, 16 nt, Human
uccagguguuacugua

SEQ ID NO: 1891326 - RNA, 14 nt, Human
uccagguggcauca

SEQ ID NO: 1891327 - RNA, 18 nt, Human
uccaggugcacaagcucc

SEQ ID NO: 1891328 - RNA, 20 nt, Human
uccaggugcacaagcuccaa

SEQ ID NO: 1891329 - RNA, 21 nt, Human
uccaggugcacaagcuccaag

SEQ ID NO: 1891330 - RNA, 22 nt, Human
uccaggugcacaagcuccaagc

SEQ ID NO: 1891331 - RNA, 15 nt, Human
uccaggugcacaagc

SEQ ID NO: 1891332 - RNA, 23 nt, Human
uccaggggugggacacccuguga

SEQ ID NO: 1891333 - RNA, 22 nt, Human
uccaggagcagccacauuccug

SEQ ID NO: 1891334 - RNA, 17 nt, Human
uccaggagcagccacau

SEQ ID NO: 1891335 - RNA, 18 nt, Human
uccaggagcagccacauu

SEQ ID NO: 1891336 - RNA, 14 nt, Human
uauuaaugcuaagg

SEQ ID NO: 1891337 - RNA, 13 nt, Human
uauuaaugcuaag

SEQ ID NO: 1891338 - RNA, 12 nt, Human
uauuaaugcuaa

SEQ ID NO: 1891339 - RNA, 23 nt, Human
uauuaauacaaugaugcuauuug

SEQ ID NO: 1891340 - RNA, 21 nt, Human
uauuaauacaaugaugcuauu

SEQ ID NO: 1891341 - RNA, 24 nt, Human
uauuaagaaagacuaucuaaaugu

SEQ ID NO: 1891342 - RNA, 12 nt, Human
uauuaaauuaug

SEQ ID NO: 1891343 - RNA, 21 nt, Human
uauuaaauuaaauuuuguguc

SEQ ID NO: 1891344 - RNA, 19 nt, Human
uauuaaauuaaauuuugug

SEQ ID NO: 1891345 - RNA, 18 nt, Human
uauuaaauggaaacugaa

SEQ ID NO: 1891346 - RNA, 19 nt, Human
uauuaaauggaaacugaaa

SEQ ID NO: 1891347 - RNA, 20 nt, Human
uauuaaauggaaacugaaac

SEQ ID NO: 1891348 - RNA, 12 nt, Human
uauguauuuaua

SEQ ID NO: 1891349 - RNA, 23 nt, Human
uauguugagucgcgcaccgaaaa

SEQ ID NO: 1891350 - RNA, 12 nt, Human
uauguugcauag

SEQ ID NO: 1891351 - RNA, 18 nt, Human
uauguugaauacuuuuua

SEQ ID NO: 1891352 - RNA, 20 nt, Human
uauguugcccaggcaggucu

SEQ ID NO: 1891353 - RNA, 12 nt, Human
uauguuuacaaa

SEQ ID NO: 1891354 - RNA, 19 nt, Human
uauguugcccaggcagguc

SEQ ID NO: 1891355 - RNA, 16 nt, Human
uauguugcccaggcag

SEQ ID NO: 1891356 - RNA, 13 nt, Human
uauguugcccagg

SEQ ID NO: 1891357 - RNA, 16 nt, Human
uauguugcauagaaua

SEQ ID NO: 1891358 - RNA, 16 nt, Human
uauguaccauguacau

SEQ ID NO: 1891359 - RNA, 15 nt, Human
uauguacaugagaag

SEQ ID NO: 1891360 - RNA, 18 nt, Human
uauguacaggaugcuuug

SEQ ID NO: 1891361 - RNA, 14 nt, Human
uauguaguaauuga

SEQ ID NO: 1891362 - RNA, 17 nt, Human
uauguaguaauugacau

SEQ ID NO: 1891363 - RNA, 20 nt, Human
uauguaguaauugacaugug

SEQ ID NO: 1891364 - RNA, 17 nt, Human
uauguaugguauccaag

SEQ ID NO: 1891365 - RNA, 18 nt, Human
uauguaguccgugcugac

SEQ ID NO: 1891366 - RNA, 13 nt, Human
gggaguggccaca

SEQ ID NO: 1891367 - RNA, 15 nt, Human
gggaguggccacaga

SEQ ID NO: 1891368 - RNA, 15 nt, Human
uauuaaugcuaaggg

SEQ ID NO: 1891369 - RNA, 13 nt, Human
uauuaauugcuuu

SEQ ID NO: 1891370 - RNA, 14 nt, Human
uauuaauugcuuug

SEQ ID NO: 1891371 - RNA, 16 nt, Human
uauuccagaaugcugu

SEQ ID NO: 1891372 - RNA, 17 nt, Human
uauuccagaaugcugua

SEQ ID NO: 1891373 - RNA, 20 nt, Human
uauuccagaaugcuguacau

SEQ ID NO: 1891374 - RNA, 21 nt, Human
uauuccagaaugcuguacauc

SEQ ID NO: 1891375 - RNA, 23 nt, Human
uauuccagaaugcuguacaucua

SEQ ID NO: 1891376 - RNA, 12 nt, Human
uauucccaugag

SEQ ID NO: 1891377 - RNA, 14 nt, Human
uauucgcuugagaa

SEQ ID NO: 1891378 - RNA, 17 nt, Human
uauucgcuugagaaaaa

SEQ ID NO: 1891379 - RNA, 22 nt, Human
uauucgcuugagaaaaaaagaa

SEQ ID NO: 1891380 - RNA, 19 nt, Human
uauuuauaaauauauuuaa

SEQ ID NO: 1891381 - RNA, 17 nt, Human
uauuuauaaauauauuu

SEQ ID NO: 1891382 - RNA, 16 nt, Human
uauuuauaaauauauu

SEQ ID NO: 1891383 - RNA, 17 nt, Human
uauuuauaaaacuucuc

SEQ ID NO: 1891384 - RNA, 14 nt, Human
uauuuauaaaacuu

SEQ ID NO: 1891385 - RNA, 24 nt, Human
uauuuauaaaaauaaaaaacacug

SEQ ID NO: 1891386 - RNA, 24 nt, Human
uauuuaaacucuguugcaagugca

SEQ ID NO: 1891387 - RNA, 18 nt, Human
uauuuaaaaauauuuuug

SEQ ID NO: 1891388 - RNA, 22 nt, Human
uauuguuuucaguguacaugga

SEQ ID NO: 1891389 - RNA, 18 nt, Human
uauuguuuucaguguaca

SEQ ID NO: 1891390 - RNA, 20 nt, Human
uauuguuuucaguguacaug

SEQ ID NO: 1891391 - RNA, 12 nt, Human
uauuguuuucag

SEQ ID NO: 1891392 - RNA, 17 nt, Human
uauuguuccagcaguuu

SEQ ID NO: 1891393 - RNA, 21 nt, Human
uauugcuugcacaaaccaauu

SEQ ID NO: 1891394 - RNA, 19 nt, Human
uauugcuuguuggauuuuu

SEQ ID NO: 1891395 - RNA, 22 nt, Human
uauuggaaauuuguuauaauga

SEQ ID NO: 1891396 - RNA, 17 nt, Human
uauugcugauggugcaa

SEQ ID NO: 1891397 - RNA, 15 nt, Human
uauugcugagagaaa

SEQ ID NO: 1891398 - RNA, 16 nt, Human
uauuguguuuguguau

SEQ ID NO: 1891399 - RNA, 16 nt, Human
uauugcugagagaaau

SEQ ID NO: 1891400 - RNA, 19 nt, Human
uauugcugagagaaauaug

SEQ ID NO: 1891401 - RNA, 17 nt, Human
uauucucuccuguaccu

SEQ ID NO: 1891402 - RNA, 18 nt, Human
uauucucuccuguaccuc

SEQ ID NO: 1891403 - RNA, 18 nt, Human
uauucucuccaaaaaugc

SEQ ID NO: 1891404 - RNA, 21 nt, Human
uauugauaugcuuauacacuu

SEQ ID NO: 1891405 - RNA, 15 nt, Human
ucaauaaaugucugu

SEQ ID NO: 1891406 - RNA, 15 nt, Human
ucaauaaagcauuua

SEQ ID NO: 1891407 - RNA, 19 nt, Human
ucaauaaagcauuuauaaa

SEQ ID NO: 1891408 - RNA, 16 nt, Human
ucaauaaaugucuguu

SEQ ID NO: 1891409 - RNA, 13 nt, Human
ucaaugcagcccc

SEQ ID NO: 1891410 - RNA, 21 nt, Human
ucaauuacaggaaguacugga

SEQ ID NO: 1891411 - RNA, 23 nt, Human
ucaauuacaggaaguacuggaga

SEQ ID NO: 1891412 - RNA, 22 nt, Human
ucaaugccccugaauuuaaaua

SEQ ID NO: 1891413 - RNA, 19 nt, Human
ucaaugguuugcaaggaag

SEQ ID NO: 1891414 - RNA, 18 nt, Human
ucaaugguuugcaaggaa

SEQ ID NO: 1891415 - RNA, 23 nt, Human
ucaauguacuaggauacugcugc

SEQ ID NO: 1891416 - RNA, 22 nt, Human
ucaauguacuaggauacugcug

SEQ ID NO: 1891417 - RNA, 20 nt, Human
ucaaugccccugaauuuaaa

SEQ ID NO: 1891418 - RNA, 18 nt, Human
ucaaugccccugaauuua

SEQ ID NO: 1891419 - RNA, 17 nt, Human
ucaaugccccugaauuu

SEQ ID NO: 1891420 - RNA, 19 nt, Human
ucaauaaacuaaagaaaaa

SEQ ID NO: 1891421 - RNA, 12 nt, Human
ucaauaaagcau

SEQ ID NO: 1891422 - RNA, 19 nt, Human
ucaauaaaaaaaagaaaug

SEQ ID NO: 1891423 - RNA, 16 nt, Human
ucaauaaaaaaaagaa

SEQ ID NO: 1891424 - RNA, 21 nt, Human
ucaagugauucuccugccuca

SEQ ID NO: 1891425 - RNA, 19 nt, Human
ucaagugauucuccugccu

SEQ ID NO: 1891426 - RNA, 18 nt, Human
ucaagugauucuccugcc

SEQ ID NO: 1891427 - RNA, 20 nt, Human
ucaagugauucuccugccuc

SEQ ID NO: 1891428 - RNA, 19 nt, Human
ucacaggcagguccagggu

SEQ ID NO: 1891429 - RNA, 18 nt, Human
ucacaggcagguccaggg

SEQ ID NO: 1891430 - RNA, 17 nt, Human
ucacaggcagguccagg

SEQ ID NO: 1891431 - RNA, 16 nt, Human
ucacaggcagguccag

SEQ ID NO: 1891432 - RNA, 22 nt, Human
ucacaguccuuaccagcagagc

SEQ ID NO: 1891433 - RNA, 23 nt, Human
ucacaguccuuaccagcagagca

SEQ ID NO: 1891434 - RNA, 19 nt, Human
ucacaguccuuaccagcag

SEQ ID NO: 1891435 - RNA, 16 nt, Human
ucacagucacauucca

SEQ ID NO: 1891436 - RNA, 18 nt, Human
ucacaagacccaaaaggc

SEQ ID NO: 1891437 - RNA, 17 nt, Human
ucacaagacccaaaagg

SEQ ID NO: 1891438 - RNA, 13 nt, Human
ucacaagacccaa

SEQ ID NO: 1891439 - RNA, 20 nt, Human
ucacaccugaacugaacacc

SEQ ID NO: 1891440 - RNA, 14 nt, Human
ucaccaaggcugau

SEQ ID NO: 1891441 - RNA, 19 nt, Human
ucaccaaaucagcugcuac

SEQ ID NO: 1891442 - RNA, 20 nt, Human
ucaccaaaucagcugcuacu

SEQ ID NO: 1891443 - RNA, 16 nt, Human
ucaccacaugugcaca

SEQ ID NO: 1891444 - RNA, 17 nt, Human
ucacauuuauucugcuc

SEQ ID NO: 1891445 - RNA, 19 nt, Human
ucacauuuauucugcucac

SEQ ID NO: 1891446 - RNA, 18 nt, Human
ucacauuuauucugcuca

SEQ ID NO: 1891447 - RNA, 23 nt, Human
uauuuauauauguauuuauaaau

SEQ ID NO: 1891448 - RNA, 16 nt, Human
uauuuauauauguauu

SEQ ID NO: 1891449 - RNA, 17 nt, Human
uauuuuauguugcauag

SEQ ID NO: 1891450 - RNA, 13 nt, Human
uauuuauauaaau

SEQ ID NO: 1891451 - RNA, 19 nt, Human
uauuuauaacaaccuaaau

SEQ ID NO: 1891452 - RNA, 20 nt, Human
uauuuauaacaaccuaaauu

SEQ ID NO: 1891453 - RNA, 15 nt, Human
uauuuauaaaacuuc

SEQ ID NO: 1891454 - RNA, 16 nt, Human
uauuuuccaugaaaau

SEQ ID NO: 1891455 - RNA, 20 nt, Human
uauuuuccaugaaaaugcaa

SEQ ID NO: 1891456 - RNA, 17 nt, Human
uauuuuauuaugcauga

SEQ ID NO: 1891457 - RNA, 14 nt, Human
uauuuuauuaugca

SEQ ID NO: 1891458 - RNA, 22 nt, Human
uauuuucccuauuagagaagag

SEQ ID NO: 1891459 - RNA, 17 nt, Human
uauuuuuuucuuuucuu

SEQ ID NO: 1891460 - RNA, 14 nt, Human
uauuuuuuuacuaa

SEQ ID NO: 1891461 - RNA, 14 nt, Human
ucaaaaaaagaaaa

SEQ ID NO: 1891462 - RNA, 15 nt, Human
ucaaaaaaagaaaaa

SEQ ID NO: 1891463 - RNA, 17 nt, Human
ucaaauuguaagcaugc

SEQ ID NO: 1891464 - RNA, 20 nt, Human
ucaaauuguaagcaugcaca

SEQ ID NO: 1891465 - RNA, 23 nt, Human
ucaaccccuucgcuccugugucu

SEQ ID NO: 1891466 - RNA, 18 nt, Human
ucaacccuaaaaagcaga

SEQ ID NO: 1891467 - RNA, 22 nt, Human
ucaacccuaaaaagcagagcuu

SEQ ID NO: 1891468 - RNA, 23 nt, Human
ucaacccuaaaaagcagagcuuu

SEQ ID NO: 1891469 - RNA, 15 nt, Human
ucaaaugagaaaaug

SEQ ID NO: 1891470 - RNA, 14 nt, Human
ucaaaugcucagac

SEQ ID NO: 1891471 - RNA, 19 nt, Human
ucaaaugcucagaccagcu

SEQ ID NO: 1891472 - RNA, 18 nt, Human
ucaaauggggccagaucc

SEQ ID NO: 1891473 - RNA, 12 nt, Human
ucaaauuaauaa

SEQ ID NO: 1891474 - RNA, 17 nt, Human
ucaaauuaauaaucuua

SEQ ID NO: 1891475 - RNA, 22 nt, Human
ucaaauuaauaaucuuauuagg

SEQ ID NO: 1891476 - RNA, 21 nt, Human
ucaaaugcucagaccagcucu

SEQ ID NO: 1891477 - RNA, 20 nt, Human
ucaaagaaauuuccacucag

SEQ ID NO: 1891478 - RNA, 19 nt, Human
ucaaagaaauuuccacuca

SEQ ID NO: 1891479 - RNA, 13 nt, Human
ucaaagaaauuuc

SEQ ID NO: 1891480 - RNA, 12 nt, Human
ucaaagaaauuu

SEQ ID NO: 1891481 - RNA, 15 nt, Human
ucaaaaaacuuguaa

SEQ ID NO: 1891482 - RNA, 14 nt, Human
ucaaaaaacuugua

SEQ ID NO: 1891483 - RNA, 14 nt, Human
ucaaaaaacaaaaa

SEQ ID NO: 1891484 - RNA, 21 nt, Human
ucaaauauauucagccuggcu

SEQ ID NO: 1891485 - RNA, 22 nt, Human
ucaaauauauucagccuggcuu

SEQ ID NO: 1891486 - RNA, 23 nt, Human
ucaaauauauucagccuggcuuc

SEQ ID NO: 1891487 - RNA, 17 nt, Human
ucugguuaggauggcag

SEQ ID NO: 1891488 - RNA, 14 nt, Human
ucuguccuacucug

SEQ ID NO: 1891489 - RNA, 19 nt, Human
ucuguccuacucuguguca

SEQ ID NO: 1891490 - RNA, 15 nt, Human
ucuguccuacucugu

SEQ ID NO: 1891491 - RNA, 20 nt, Human
ucuguccuacucugugucag

SEQ ID NO: 1891492 - RNA, 21 nt, Human
ucuguccugggagugagcugg

SEQ ID NO: 1891493 - RNA, 14 nt, Human
ucugucgcccaguc

SEQ ID NO: 1891494 - RNA, 16 nt, Human
ucugucgcccagucug

SEQ ID NO: 1891495 - RNA, 22 nt, Human
ucugucucuggauuauauuaug

SEQ ID NO: 1891496 - RNA, 16 nt, Human
ucugggaccucaguuu

SEQ ID NO: 1891497 - RNA, 13 nt, Human
ucugggaccucag

SEQ ID NO: 1891498 - RNA, 23 nt, Human
ucuggugacuuuccucuuugguc

SEQ ID NO: 1891499 - RNA, 14 nt, Human
ucugggacacaguu

SEQ ID NO: 1891500 - RNA, 14 nt, Human
ucuggcugcagagc

SEQ ID NO: 1891501 - RNA, 18 nt, Human
ucuggcucuuccaggcug

SEQ ID NO: 1891502 - RNA, 23 nt, Human
ucuggcucuuccaggcugggaga

SEQ ID NO: 1891503 - RNA, 22 nt, Human
ucuggcuaugcauuugaaaauu

SEQ ID NO: 1891504 - RNA, 19 nt, Human
ucuggcuaugcauuugaaa

SEQ ID NO: 1891505 - RNA, 23 nt, Human
ucuggccuucggccuccauccug

SEQ ID NO: 1891506 - RNA, 18 nt, Human
ucuggccuucggccucca

SEQ ID NO: 1891507 - RNA, 17 nt, Human
ucuggccuucggccucc

SEQ ID NO: 1891508 - RNA, 22 nt, Human
ucugcugacagacacaggcccg

SEQ ID NO: 1891509 - RNA, 21 nt, Human
ucugcugacagacacaggccc

SEQ ID NO: 1891510 - RNA, 20 nt, Human
ucugcugacagacacaggcc

SEQ ID NO: 1891511 - RNA, 19 nt, Human
ucugcugacagacacaggc

SEQ ID NO: 1891512 - RNA, 15 nt, Human
ucuggaaugcagugg

SEQ ID NO: 1891513 - RNA, 19 nt, Human
ucuggaauaaggagaauga

SEQ ID NO: 1891514 - RNA, 14 nt, Human
ucuggacaggcaug

SEQ ID NO: 1891515 - RNA, 16 nt, Human
ucuggaaugcaguggu

SEQ ID NO: 1891516 - RNA, 21 nt, Human
ucuggacaggcauguucucug

SEQ ID NO: 1891517 - RNA, 16 nt, Human
ucugcugguuuuaaca

SEQ ID NO: 1891518 - RNA, 19 nt, Human
ucuggaaucuggagaccag

SEQ ID NO: 1891519 - RNA, 17 nt, Human
ucugcugacagacacag

SEQ ID NO: 1891520 - RNA, 18 nt, Human
ucugcugacagacacagg

SEQ ID NO: 1891521 - RNA, 21 nt, Human
ucugcuccucuccccagcaag

SEQ ID NO: 1891522 - RNA, 18 nt, Human
ucugcuccucuccccagc

SEQ ID NO: 1891523 - RNA, 16 nt, Human
ucugccugcccaggcc

SEQ ID NO: 1891524 - RNA, 15 nt, Human
ucugccugcccaggc

SEQ ID NO: 1891525 - RNA, 16 nt, Human
ucugcuccccagggga

SEQ ID NO: 1891526 - RNA, 13 nt, Human
ucugccugcccag

SEQ ID NO: 1891527 - RNA, 14 nt, Human
ucugccugcccagg

SEQ ID NO: 1891528 - RNA, 23 nt, Human
ucuucagaucucuaacuucacca

SEQ ID NO: 1891529 - RNA, 18 nt, Human
ucuucagaucucuaacuu

SEQ ID NO: 1891530 - RNA, 15 nt, Human
ucuuaggaagagaaa

SEQ ID NO: 1891531 - RNA, 19 nt, Human
ucuuaggaagagaaaccag

SEQ ID NO: 1891532 - RNA, 12 nt, Human
ucuugaacuccu

SEQ ID NO: 1891533 - RNA, 13 nt, Human
ucuugaaaaaugc

SEQ ID NO: 1891534 - RNA, 14 nt, Human
ucuugaaagcugug

SEQ ID NO: 1891535 - RNA, 19 nt, Human
ucuucuuuuugcuucaaaa

SEQ ID NO: 1891536 - RNA, 23 nt, Human
ucuucucauuucaccccucccuu

SEQ ID NO: 1891537 - RNA, 22 nt, Human
ucuucucauuucaccccucccu

SEQ ID NO: 1891538 - RNA, 20 nt, Human
ucuucucauuucaccccucc

SEQ ID NO: 1891539 - RNA, 19 nt, Human
ucuucucauuucaccccuc

SEQ ID NO: 1891540 - RNA, 18 nt, Human
ucuucucauuucaccccu

SEQ ID NO: 1891541 - RNA, 15 nt, Human
ucuucucauuucacc

SEQ ID NO: 1891542 - RNA, 10 nt, Human
ucuucucauu

SEQ ID NO: 1891543 - RNA, 13 nt, Human
ucuuaaaaagugg

SEQ ID NO: 1891544 - RNA, 17 nt, Human
ucuuaaacaaauguaug

SEQ ID NO: 1891545 - RNA, 15 nt, Human
ucuguuuuguaaagu

SEQ ID NO: 1891546 - RNA, 22 nt, Human
ucuguuuuguaaaguccccaga

SEQ ID NO: 1891547 - RNA, 17 nt, Human
ucuguuuugaaggcaaa

SEQ ID NO: 1891548 - RNA, 13 nt, Human
ucuguuuuguaaa

SEQ ID NO: 1891549 - RNA, 22 nt, Human
ucuuaaccagaucauugugaaa

SEQ ID NO: 1891550 - RNA, 17 nt, Human
ucuuagcuccccuccaa

SEQ ID NO: 1891551 - RNA, 16 nt, Human
ucuuaaccagaucauu

SEQ ID NO: 1891552 - RNA, 17 nt, Human
ucuuaaccagaucauug

SEQ ID NO: 1891553 - RNA, 22 nt, Human
ucuuaaauauguggaguucauc

SEQ ID NO: 1891554 - RNA, 19 nt, Human
ucucuuuuuuuggcccagg

SEQ ID NO: 1891555 - RNA, 14 nt, Human
ucugaaaauugaug

SEQ ID NO: 1891556 - RNA, 13 nt, Human
ucugaaaauguau

SEQ ID NO: 1891557 - RNA, 14 nt, Human
ucugaaaauguaug

SEQ ID NO: 1891558 - RNA, 22 nt, Human
ucugaaaauugaugggauuugg

SEQ ID NO: 1891559 - RNA, 19 nt, Human
ucucuuagcuccccuccaa

SEQ ID NO: 1891560 - RNA, 15 nt, Human
ucucuuauagaauau

SEQ ID NO: 1891561 - RNA, 18 nt, Human
ucucuuagcuccccucca

SEQ ID NO: 1891562 - RNA, 17 nt, Human
ucucuuagcuccccucc

SEQ ID NO: 1891563 - RNA, 16 nt, Human
ucucuuagcuccccuc

SEQ ID NO: 1891564 - RNA, 17 nt, Human
ucucuuauagaauauuu

SEQ ID NO: 1891565 - RNA, 18 nt, Human
ucucuuauagaauauuua

SEQ ID NO: 1891566 - RNA, 20 nt, Human
ucucuuauagaauauuuauu

SEQ ID NO: 1891567 - RNA, 21 nt, Human
ucucuuauagaauauuuauua

SEQ ID NO: 1891568 - RNA, 13 nt, Human
ucugacccacugc

SEQ ID NO: 1891569 - RNA, 17 nt, Human
ucugaccagcagcgccu

SEQ ID NO: 1891570 - RNA, 18 nt, Human
ucugaccagcagcgccuu

SEQ ID NO: 1891571 - RNA, 15 nt, Human
ucugacauaaguauu

SEQ ID NO: 1891572 - RNA, 22 nt, Human
ucugacaggcaaugcuggcugu

SEQ ID NO: 1891573 - RNA, 21 nt, Human
ucugacaggcaaugcuggcug

SEQ ID NO: 1891574 - RNA, 12 nt, Human
ucugacaggcaa

SEQ ID NO: 1891575 - RNA, 19 nt, Human
ucugacacacagcucuguc

SEQ ID NO: 1891576 - RNA, 18 nt, Human
ucugacacacagcucugu

SEQ ID NO: 1891577 - RNA, 17 nt, Human
ucugacacacagcucug

SEQ ID NO: 1891578 - RNA, 16 nt, Human
ucugacacacagcucu

SEQ ID NO: 1891579 - RNA, 20 nt, Human
ucugaaauuuccugggagcu

SEQ ID NO: 1891580 - RNA, 18 nt, Human
ucugaaauuuccugggag

SEQ ID NO: 1891581 - RNA, 17 nt, Human
ucugaaauuuccuggga

SEQ ID NO: 1891582 - RNA, 23 nt, Human
ucugcacaugaaucccacccaca

SEQ ID NO: 1891583 - RNA, 12 nt, Human
ucugcacaugaa

SEQ ID NO: 1891584 - RNA, 20 nt, Human
ucugcaagaauugaagcagg

SEQ ID NO: 1891585 - RNA, 21 nt, Human
ucugcaagaauugaagcagga

SEQ ID NO: 1891586 - RNA, 15 nt, Human
ucugcaacucugaag

SEQ ID NO: 1891587 - RNA, 14 nt, Human
ucugcaacucugaa

SEQ ID NO: 1891588 - RNA, 23 nt, Human
ucugaggaauccagacccggcug

SEQ ID NO: 1891589 - RNA, 15 nt, Human
ucugacccacugcuu

SEQ ID NO: 1891590 - RNA, 14 nt, Human
ucugacccacugcu

SEQ ID NO: 1891591 - RNA, 15 nt, Human
ucugcacaugucuug

SEQ ID NO: 1891592 - RNA, 12 nt, Human
ucugcacauguc

SEQ ID NO: 1891593 - RNA, 19 nt, Human
ucugcacaugucuuguaca

SEQ ID NO: 1891594 - RNA, 17 nt, Human
ucugcacaugucuugua

SEQ ID NO: 1891595 - RNA, 16 nt, Human
ucugcacaugucuugu

SEQ ID NO: 1891596 - RNA, 16 nt, Human
ucugcauucuaguacu

SEQ ID NO: 1891597 - RNA, 15 nt, Human
ucugcauuucggugg

SEQ ID NO: 1891598 - RNA, 18 nt, Human
ucugcauuucgguggcua

SEQ ID NO: 1891599 - RNA, 19 nt, Human
ucugcauuucgguggcuag

SEQ ID NO: 1891600 - RNA, 15 nt, Human
ucuccugccucagcc

SEQ ID NO: 1891601 - RNA, 17 nt, Human
ucuccugccucagccuc

SEQ ID NO: 1891602 - RNA, 19 nt, Human
ucuccugccucagccuccc

SEQ ID NO: 1891603 - RNA, 21 nt, Human
ucuccuggaagugcuaauuuu

SEQ ID NO: 1891604 - RNA, 21 nt, Human
ucuccuggaaauauuaagaaa

SEQ ID NO: 1891605 - RNA, 15 nt, Human
ucuccuguaccucuu

SEQ ID NO: 1891606 - RNA, 17 nt, Human
ucuccuguaccucuuga

SEQ ID NO: 1891607 - RNA, 16 nt, Human
ucuccuguaccucuug

SEQ ID NO: 1891608 - RNA, 19 nt, Human
ucuccuguaccucuugagc

SEQ ID NO: 1891609 - RNA, 21 nt, Human
ucucgugguaggacuguagaa

SEQ ID NO: 1891610 - RNA, 19 nt, Human
ucucgugguaggacuguag

SEQ ID NO: 1891611 - RNA, 14 nt, Human
ucucgugauugaua

SEQ ID NO: 1891612 - RNA, 22 nt, Human
ucucgugauugauaagaaccuu

SEQ ID NO: 1891613 - RNA, 12 nt, Human
ucucuaacuuca

SEQ ID NO: 1891614 - RNA, 17 nt, Human
ucucuaacagcucagga

SEQ ID NO: 1891615 - RNA, 18 nt, Human
ucucuaacagcucaggau

SEQ ID NO: 1891616 - RNA, 22 nt, Human
ucucuaaagaguuuauuuuaag

SEQ ID NO: 1891617 - RNA, 13 nt, Human
ucucuaacaaugu

SEQ ID NO: 1891618 - RNA, 19 nt, Human
ucucuaaagaguuuauuuu

SEQ ID NO: 1891619 - RNA, 21 nt, Human
ucucuaaagaguuuauuuuaa

SEQ ID NO: 1891620 - RNA, 19 nt, Human
ucucuaacuucaccauauu

SEQ ID NO: 1891621 - RNA, 15 nt, Human
ucucugcaggucccu

SEQ ID NO: 1891622 - RNA, 16 nt, Human
ucucugcaggucccua

SEQ ID NO: 1891623 - RNA, 18 nt, Human
ucucugcaggucccuaau

SEQ ID NO: 1891624 - RNA, 21 nt, Human
ucucugggcuuggggcuuccu

SEQ ID NO: 1891625 - RNA, 16 nt, Human
ucucugugaacgauuu

SEQ ID NO: 1891626 - RNA, 14 nt, Human
ucucugugagacuc

SEQ ID NO: 1891627 - RNA, 22 nt, Human
ucucugugaacgauuuagaaag

SEQ ID NO: 1891628 - RNA, 23 nt, Human
ucucugugaacgauuuagaaaga

SEQ ID NO: 1891629 - RNA, 22 nt, Human
ucucugugagacucgagaacuu

SEQ ID NO: 1891630 - RNA, 19 nt, Human
ucucugugagacucgagaa

SEQ ID NO: 1891631 - RNA, 14 nt, Human
ucucugaggacacu

SEQ ID NO: 1891632 - RNA, 17 nt, Human
ucucugaggacacuaac

SEQ ID NO: 1891633 - RNA, 15 nt, Human
ucucugauacagaaa

SEQ ID NO: 1891634 - RNA, 13 nt, Human
ucucugcaggucc

SEQ ID NO: 1891635 - RNA, 14 nt, Human
ucucugcagguccc

SEQ ID NO: 1891636 - RNA, 15 nt, Human
ucucuaguuugauua

SEQ ID NO: 1891637 - RNA, 16 nt, Human
ucucuaguuugauuaa

SEQ ID NO: 1891638 - RNA, 12 nt, Human
ucucucugccca

SEQ ID NO: 1891639 - RNA, 14 nt, Human
ucucucugcccaac

SEQ ID NO: 1891640 - RNA, 16 nt, Human
ucucucugcccaaccc

SEQ ID NO: 1891641 - RNA, 14 nt, Human
ucuaauaucagcaa

SEQ ID NO: 1891642 - RNA, 14 nt, Human
ucuaauauggccac

SEQ ID NO: 1891643 - RNA, 22 nt, Human
ucuaauagaacucaguuuuaac

SEQ ID NO: 1891644 - RNA, 19 nt, Human
ucuaacagcucaggaucuc

SEQ ID NO: 1891645 - RNA, 19 nt, Human
ucuaacaauguauuuucuu

SEQ ID NO: 1891646 - RNA, 15 nt, Human
ucuaacagcucagga

SEQ ID NO: 1891647 - RNA, 17 nt, Human
ucuaacagcucaggauc

SEQ ID NO: 1891648 - RNA, 21 nt, Human
ucuaaaucuccaaaauaaaac

SEQ ID NO: 1891649 - RNA, 18 nt, Human
ucggccuccauccugagg

SEQ ID NO: 1891650 - RNA, 14 nt, Human
ucgagucaaaaugu

SEQ ID NO: 1891651 - RNA, 22 nt, Human
ucgagguuucucaaagaaauuu

SEQ ID NO: 1891652 - RNA, 16 nt, Human
ucgagguuucucaaag

SEQ ID NO: 1891653 - RNA, 16 nt, Human
ucgugauugauaagaa

SEQ ID NO: 1891654 - RNA, 14 nt, Human
ucuaauauguaaca

SEQ ID NO: 1891655 - RNA, 19 nt, Human
ucuacuugcucuggaccug

SEQ ID NO: 1891656 - RNA, 20 nt, Human
ucuacuugcucuggaccugc

SEQ ID NO: 1891657 - RNA, 21 nt, Human
ucuacuugcucuggaccugcc

SEQ ID NO: 1891658 - RNA, 22 nt, Human
ucuacuugcucuggaccugccc

SEQ ID NO: 1891659 - RNA, 14 nt, Human
ucuacuuuaauaaa

SEQ ID NO: 1891660 - RNA, 15 nt, Human
ucuacuuuaauaaau

SEQ ID NO: 1891661 - RNA, 16 nt, Human
ucuaggacugaauuau

SEQ ID NO: 1891662 - RNA, 23 nt, Human
ucuaggacugaauuaugaaacuu

SEQ ID NO: 1891663 - RNA, 22 nt, Human
ucucaaagaaauuuccacucag

SEQ ID NO: 1891664 - RNA, 21 nt, Human
ucucaaagaaauuuccacuca

SEQ ID NO: 1891665 - RNA, 19 nt, Human
ucucaaagaaauuuccacu

SEQ ID NO: 1891666 - RNA, 17 nt, Human
ucucaaauaacuaaaag

SEQ ID NO: 1891667 - RNA, 22 nt, Human
ucuaugauuccagguggcauca

SEQ ID NO: 1891668 - RNA, 15 nt, Human
ucuaucaaguauuau

SEQ ID NO: 1891669 - RNA, 23 nt, Human
ucuauauuuugggaaaaaaacau

SEQ ID NO: 1891670 - RNA, 22 nt, Human
ucuaucaaguauuauaccuuuu

SEQ ID NO: 1891671 - RNA, 21 nt, Human
ucuaucaaguauuauaccuuu

SEQ ID NO: 1891672 - RNA, 21 nt, Human
uccuucaccuuuguccccacc

SEQ ID NO: 1891673 - RNA, 22 nt, Human
uccuucaccuuuguccccaccg

SEQ ID NO: 1891674 - RNA, 12 nt, Human
uccuucagacac

SEQ ID NO: 1891675 - RNA, 13 nt, Human
uccuucagacacc

SEQ ID NO: 1891676 - RNA, 17 nt, Human
uccuugagacacggagc

SEQ ID NO: 1891677 - RNA, 21 nt, Human
uccuugagacacggagcccag

SEQ ID NO: 1891678 - RNA, 23 nt, Human
uccuugagacacggagcccagcc

SEQ ID NO: 1891679 - RNA, 23 nt, Human
uccuucagacacccucaaccucu

SEQ ID NO: 1891680 - RNA, 16 nt, Human
uccuuaccagcagagc

SEQ ID NO: 1891681 - RNA, 17 nt, Human
uccuuaccagcagagca

SEQ ID NO: 1891682 - RNA, 18 nt, Human
uccuuaccagcagagcac

SEQ ID NO: 1891683 - RNA, 18 nt, Human
uccuucacagaugggugc

SEQ ID NO: 1891684 - RNA, 19 nt, Human
uccuucacagaugggugcu

SEQ ID NO: 1891685 - RNA, 20 nt, Human
uccuuaccagcagagcaccu

SEQ ID NO: 1891686 - RNA, 18 nt, Human
uccuucaccuuugucccc

SEQ ID NO: 1891687 - RNA, 20 nt, Human
uccuucaccuuuguccccac

SEQ ID NO: 1891688 - RNA, 23 nt, Human
uccuuuucacaguucucuccuuc

SEQ ID NO: 1891689 - RNA, 20 nt, Human
uccuuuuaaaucuugauacc

SEQ ID NO: 1891690 - RNA, 17 nt, Human
ucgaggcggaucuuugg

SEQ ID NO: 1891691 - RNA, 22 nt, Human
ucgaggcggaucuuuggacaga

SEQ ID NO: 1891692 - RNA, 15 nt, Human
ucgaaccguuuugaa

SEQ ID NO: 1891693 - RNA, 18 nt, Human
ucgaaccguuuugaagcu

SEQ ID NO: 1891694 - RNA, 18 nt, Human
uccuuuucgcaggauucu

SEQ ID NO: 1891695 - RNA, 18 nt, Human
ucgaaacacagaaaccuu

SEQ ID NO: 1891696 - RNA, 13 nt, Human
ucgaaacacagaa

SEQ ID NO: 1891697 - RNA, 19 nt, Human
ucgaaaccugggauucagg

SEQ ID NO: 1891698 - RNA, 24 nt, Human
uccuuuuauuucuucaccagauuu

SEQ ID NO: 1891699 - RNA, 14 nt, Human
uccugccucagccu

SEQ ID NO: 1891700 - RNA, 14 nt, Human
uccugagccagauu

SEQ ID NO: 1891701 - RNA, 20 nt, Human
uccugccuaagugcagcccc

SEQ ID NO: 1891702 - RNA, 13 nt, Human
uccugagccagau

SEQ ID NO: 1891703 - RNA, 19 nt, Human
uccuggcacccggccccug

SEQ ID NO: 1891704 - RNA, 16 nt, Human
uccuggcacccggccc

SEQ ID NO: 1891705 - RNA, 14 nt, Human
uccuggcacccggc

SEQ ID NO: 1891706 - RNA, 15 nt, Human
uccugccucagccuc

SEQ ID NO: 1891707 - RNA, 13 nt, Human
uccugccucagcc

SEQ ID NO: 1891708 - RNA, 16 nt, Human
uccugccucagccucc

SEQ ID NO: 1891709 - RNA, 17 nt, Human
uccugccucagccuccc

SEQ ID NO: 1891710 - RNA, 22 nt, Human
uccuggcacccggccccugcug

SEQ ID NO: 1891711 - RNA, 17 nt, Human
uccuggcacugcuucca

SEQ ID NO: 1891712 - RNA, 21 nt, Human
uccuggcacccggccccugcu

SEQ ID NO: 1891713 - RNA, 20 nt, Human
uccuggcacccggccccugc

SEQ ID NO: 1891714 - RNA, 18 nt, Human
uccuggcacugcuuccag

SEQ ID NO: 1891715 - RNA, 22 nt, Human
uccuggcacugcuuccagugag

SEQ ID NO: 1891716 - RNA, 20 nt, Human
uccuguaccucuugagccuu

SEQ ID NO: 1891717 - RNA, 22 nt, Human
uccuguaccucuugagccuuga

SEQ ID NO: 1891718 - RNA, 13 nt, Human
uccuauaugcacu

SEQ ID NO: 1891719 - RNA, 21 nt, Human
uccuauauuguuuucagugua

SEQ ID NO: 1891720 - RNA, 17 nt, Human
uccucauuagcauuuug

SEQ ID NO: 1891721 - RNA, 22 nt, Human
uccucaucucuaacagcucagg

SEQ ID NO: 1891722 - RNA, 23 nt, Human
uccucaucucuaacagcucagga

SEQ ID NO: 1891723 - RNA, 21 nt, Human
uccuauucuuucgaaagaaga

SEQ ID NO: 1891724 - RNA, 12 nt, Human
uccucaucucua

SEQ ID NO: 1891725 - RNA, 20 nt, Human
uccucaucucuaacagcuca

SEQ ID NO: 1891726 - RNA, 18 nt, Human
uccuauauuguuuucagu

SEQ ID NO: 1891727 - RNA, 14 nt, Human
uccuacccaucccc

SEQ ID NO: 1891728 - RNA, 15 nt, Human
uccuacccauccccg

SEQ ID NO: 1891729 - RNA, 18 nt, Human
uccuacccacccuccuuu

SEQ ID NO: 1891730 - RNA, 17 nt, Human
uccgaccagacaccuug

SEQ ID NO: 1891731 - RNA, 13 nt, Human
uccgaccagacac

SEQ ID NO: 1891732 - RNA, 16 nt, Human
uccuaaucuucugaac

SEQ ID NO: 1891733 - RNA, 20 nt, Human
uccuaauaaucauuggauuc

SEQ ID NO: 1891734 - RNA, 19 nt, Human
uccuccuuggugccuggcc

SEQ ID NO: 1891735 - RNA, 17 nt, Human
uccuccuuggugccugg

SEQ ID NO: 1891736 - RNA, 16 nt, Human
uccuccuuggugccug

SEQ ID NO: 1891737 - RNA, 13 nt, Human
uccuccuuccaug

SEQ ID NO: 1891738 - RNA, 15 nt, Human
uccuccuuccaugga

SEQ ID NO: 1891739 - RNA, 20 nt, Human
uccuccagcagggaaaaugc

SEQ ID NO: 1891740 - RNA, 12 nt, Human
uccuccagcagg

SEQ ID NO: 1891741 - RNA, 14 nt, Human
uccuccagcaggga

SEQ ID NO: 1891742 - RNA, 17 nt, Human
uccucauguucugcuuu

SEQ ID NO: 1891743 - RNA, 19 nt, Human
uccuccacucucccccacc

SEQ ID NO: 1891744 - RNA, 16 nt, Human
uccuccacucuccccc

SEQ ID NO: 1891745 - RNA, 23 nt, Human
uccuccacucucccccacccccu

SEQ ID NO: 1891746 - RNA, 14 nt, Human
uccucuaggagguc

SEQ ID NO: 1891747 - RNA, 21 nt, Human
uccucguucucccugggaggc

SEQ ID NO: 1891748 - RNA, 15 nt, Human
uccucguucucccug

SEQ ID NO: 1891749 - RNA, 16 nt, Human
uccucguucucccugg

SEQ ID NO: 1891750 - RNA, 19 nt, Human
uccucguucucccugggag

SEQ ID NO: 1891751 - RNA, 19 nt, Human
uccuccuuuucacaguucu

SEQ ID NO: 1891752 - RNA, 16 nt, Human
uccucuguacagagcc

SEQ ID NO: 1891753 - RNA, 17 nt, Human
uccucuguacagagccc

SEQ ID NO: 1891754 - RNA, 18 nt, Human
uccucuguacagagccca

SEQ ID NO: 1891755 - RNA, 14 nt, Human
uccucugcugcugg

SEQ ID NO: 1891756 - RNA, 15 nt, Human
uccucugcugcuggc

SEQ ID NO: 1891757 - RNA, 16 nt, Human
uccucugcugcuggcu

SEQ ID NO: 1891758 - RNA, 17 nt, Human
uccucugcuuugaaagc

SEQ ID NO: 1891759 - RNA, 15 nt, Human
uccucugcuuugaaa

SEQ ID NO: 1891760 - RNA, 16 nt, Human
ucccugcacaagccag

SEQ ID NO: 1891761 - RNA, 15 nt, Human
ucccugcacaagcca

SEQ ID NO: 1891762 - RNA, 18 nt, Human
ucccugcacaagccaggg

SEQ ID NO: 1891763 - RNA, 13 nt, Human
ucccugcacuugc

SEQ ID NO: 1891764 - RNA, 14 nt, Human
ucccugcacuugca

SEQ ID NO: 1891765 - RNA, 20 nt, Human
ucccugccucaggccucugu

SEQ ID NO: 1891766 - RNA, 11 nt, Human
ucccugccuca

SEQ ID NO: 1891767 - RNA, 16 nt, Human
ucccugccucaggccu

SEQ ID NO: 1891768 - RNA, 17 nt, Human
ucccugccucaggccuc

SEQ ID NO: 1891769 - RNA, 18 nt, Human
ucccugccucaggccucu

SEQ ID NO: 1891770 - RNA, 23 nt, Human
ucccugccugguccucacacuca

SEQ ID NO: 1891771 - RNA, 14 nt, Human
ucccuucccaccuc

SEQ ID NO: 1891772 - RNA, 13 nt, Human
ucccuucccaccu

SEQ ID NO: 1891773 - RNA, 23 nt, Human
ucccuugaggaaacaacagcuuu

SEQ ID NO: 1891774 - RNA, 20 nt, Human
ucccuuccuuguagccuuuu

SEQ ID NO: 1891775 - RNA, 17 nt, Human
ucccuucgacagcauuu

SEQ ID NO: 1891776 - RNA, 22 nt, Human
ucccuucuaggguuauugcauu

SEQ ID NO: 1891777 - RNA, 21 nt, Human
ucccggggcagggcagccguc

SEQ ID NO: 1891778 - RNA, 16 nt, Human
ucccggggcagggcag

SEQ ID NO: 1891779 - RNA, 14 nt, Human
ucccggggcagggc

SEQ ID NO: 1891780 - RNA, 23 nt, Human
ucccguggaacguuuuuccuguu

SEQ ID NO: 1891781 - RNA, 22 nt, Human
ucccguggaacguuuuuccugu

SEQ ID NO: 1891782 - RNA, 16 nt, Human
ucccguggaacguuuu

SEQ ID NO: 1891783 - RNA, 14 nt, Human
ucccuaauaaagcu

SEQ ID NO: 1891784 - RNA, 15 nt, Human
ucccuaauaaagcug

SEQ ID NO: 1891785 - RNA, 13 nt, Human
uccccuucacucc

SEQ ID NO: 1891786 - RNA, 21 nt, Human
uccccuguuuguuucugaaag

SEQ ID NO: 1891787 - RNA, 17 nt, Human
uccagguuuaagcuguu

SEQ ID NO: 1891788 - RNA, 18 nt, Human
uccagguguuacuguaau

SEQ ID NO: 1891789 - RNA, 18 nt, Human
uccagguuuaagcuguua

SEQ ID NO: 1891790 - RNA, 18 nt, Human
uccccuguuuguuucuga

SEQ ID NO: 1891791 - RNA, 20 nt, Human
uccccuguuuguuucugaaa

SEQ ID NO: 1891792 - RNA, 11 nt, Human
ucccuccuggg

SEQ ID NO: 1891793 - RNA, 19 nt, Human
ucccuccugggaaugaagc

SEQ ID NO: 1891794 - RNA, 15 nt, Human
ucccucuacugggag

SEQ ID NO: 1891795 - RNA, 17 nt, Human
ucccucuacugggagcc

SEQ ID NO: 1891796 - RNA, 14 nt, Human
ucccucuaauuuau

SEQ ID NO: 1891797 - RNA, 16 nt, Human
ucccucuaauuuaucu

SEQ ID NO: 1891798 - RNA, 16 nt, Human
ucccuauuagagaaga

SEQ ID NO: 1891799 - RNA, 16 nt, Human
ucccuaauaaagcugu

SEQ ID NO: 1891800 - RNA, 16 nt, Human
ucccuaguaaaaauac

SEQ ID NO: 1891801 - RNA, 17 nt, Human
uguacacguguccugua

SEQ ID NO: 1891802 - RNA, 16 nt, Human
uguacacguguccugu

SEQ ID NO: 1891803 - RNA, 16 nt, Human
uguacaagaugaagga

SEQ ID NO: 1891804 - RNA, 14 nt, Human
uguacagacaacaa

SEQ ID NO: 1891805 - RNA, 11 nt, Human
uguacagagcc

SEQ ID NO: 1891806 - RNA, 11 nt, Human
uguaaugaaaa

SEQ ID NO: 1891807 - RNA, 12 nt, Human
uguaaugaaaac

SEQ ID NO: 1891808 - RNA, 13 nt, Human
uguaaugaaaacc

SEQ ID NO: 1891809 - RNA, 17 nt, Human
uguaaugaaaaccacau

SEQ ID NO: 1891810 - RNA, 17 nt, Human
uguaacaagccacccca

SEQ ID NO: 1891811 - RNA, 14 nt, Human
uguaacaagccacc

SEQ ID NO: 1891812 - RNA, 21 nt, Human
uguaaauuuggcuucuguugu

SEQ ID NO: 1891813 - RNA, 16 nt, Human
uguaaauuuggcuucu

SEQ ID NO: 1891814 - RNA, 18 nt, Human
uguaaauuuggcuucugu

SEQ ID NO: 1891815 - RNA, 17 nt, Human
uguaaauuuaugugaug

SEQ ID NO: 1891816 - RNA, 19 nt, Human
ugguugcuguuuuccuccc

SEQ ID NO: 1891817 - RNA, 20 nt, Human
ugguugcacuuaugauuuca

SEQ ID NO: 1891818 - RNA, 16 nt, Human
ugguuggagaauuuag

SEQ ID NO: 1891819 - RNA, 16 nt, Human
ugguuuucuguucuuu

SEQ ID NO: 1891820 - RNA, 20 nt, Human
ugguuguacauauaagugau

SEQ ID NO: 1891821 - RNA, 23 nt, Human
ugguuuuuaaaaaacugcugacu

SEQ ID NO: 1891822 - RNA, 20 nt, Human
ugguuuuguuccccuccucc

SEQ ID NO: 1891823 - RNA, 17 nt, Human
ugguuuuguuccccucc

SEQ ID NO: 1891824 - RNA, 16 nt, Human
ugguuuuucaguuuuc

SEQ ID NO: 1891825 - RNA, 19 nt, Human
ugguuuucuuguguguuua

SEQ ID NO: 1891826 - RNA, 21 nt, Human
ugguuuuuaaaaaacugcuga

SEQ ID NO: 1891827 - RNA, 16 nt, Human
ugguuuuguuccccuc

SEQ ID NO: 1891828 - RNA, 11 nt, Human
uguaaaauggu

SEQ ID NO: 1891829 - RNA, 12 nt, Human
uguaaaauggug

SEQ ID NO: 1891830 - RNA, 22 nt, Human
uguaaaacagguagaauuaucu

SEQ ID NO: 1891831 - RNA, 14 nt, Human
uguaaaacagguag

SEQ ID NO: 1891832 - RNA, 13 nt, Human
uguaaaacaggua

SEQ ID NO: 1891833 - RNA, 12 nt, Human
uguaaaacaggu

SEQ ID NO: 1891834 - RNA, 23 nt, Human
uggguacuuguggacacagcucu

SEQ ID NO: 1891835 - RNA, 20 nt, Human
uggguacuuguggacacagc

SEQ ID NO: 1891836 - RNA, 14 nt, Human
uggugagaggcauc

SEQ ID NO: 1891837 - RNA, 18 nt, Human
ugguggcagugggagcug

SEQ ID NO: 1891838 - RNA, 13 nt, Human
ugguggcaguggg

SEQ ID NO: 1891839 - RNA, 20 nt, Human
ugguggcagugggagcugcc

SEQ ID NO: 1891840 - RNA, 14 nt, Human
uggugcaaugaccu

SEQ ID NO: 1891841 - RNA, 19 nt, Human
uggugcaaugaccuuucaa

SEQ ID NO: 1891842 - RNA, 20 nt, Human
uggugcaaugaccuuucaau

SEQ ID NO: 1891843 - RNA, 13 nt, Human
ugguggcuggguu

SEQ ID NO: 1891844 - RNA, 16 nt, Human
uggugggggccucggu

SEQ ID NO: 1891845 - RNA, 18 nt, Human
uggugggggccucggugu

SEQ ID NO: 1891846 - RNA, 20 nt, Human
uggugggccaacaaagaaca

SEQ ID NO: 1891847 - RNA, 23 nt, Human
uggugggccaacaaagaacacua

SEQ ID NO: 1891848 - RNA, 15 nt, Human
uggugggagggggag

SEQ ID NO: 1891849 - RNA, 20 nt, Human
ugguggggcugccaggggag

SEQ ID NO: 1891850 - RNA, 15 nt, Human
uggugguaucugagu

SEQ ID NO: 1891851 - RNA, 17 nt, Human
uggugguaacccuggug

SEQ ID NO: 1891852 - RNA, 16 nt, Human
uggugguaacccuggu

SEQ ID NO: 1891853 - RNA, 18 nt, Human
uggugguuucagaaaugu

SEQ ID NO: 1891854 - RNA, 17 nt, Human
uggugguuucagaaaug

SEQ ID NO: 1891855 - RNA, 19 nt, Human
uggugguuuucuguucuuu

SEQ ID NO: 1891856 - RNA, 14 nt, Human
uggugguugcuguu

SEQ ID NO: 1891857 - RNA, 18 nt, Human
ugguugaugaucuuugca

SEQ ID NO: 1891858 - RNA, 15 nt, Human
ugguucucaucuuuc

SEQ ID NO: 1891859 - RNA, 14 nt, Human
ugguucucaucuuu

SEQ ID NO: 1891860 - RNA, 17 nt, Human
ugguucucaucuuucuu

SEQ ID NO: 1891861 - RNA, 13 nt, Human
ugguucucaucuu

SEQ ID NO: 1891862 - RNA, 11 nt, Human
ugguucucauc

SEQ ID NO: 1891863 - RNA, 18 nt, Human
ugguucugugucuguguu

SEQ ID NO: 1891864 - RNA, 12 nt, Human
ugguucuggcca

SEQ ID NO: 1891865 - RNA, 15 nt, Human
ugguucuaauagaac

SEQ ID NO: 1891866 - RNA, 16 nt, Human
uggugucaccugaaga

SEQ ID NO: 1891867 - RNA, 15 nt, Human
uggugucgggcauga

SEQ ID NO: 1891868 - RNA, 18 nt, Human
uggugucgggcaugacac

SEQ ID NO: 1891869 - RNA, 19 nt, Human
uggugucgggcaugacacg

SEQ ID NO: 1891870 - RNA, 16 nt, Human
ugguucauuaauucua

SEQ ID NO: 1891871 - RNA, 16 nt, Human
ugguuccagccugcca

SEQ ID NO: 1891872 - RNA, 15 nt, Human
ugguuccagccugcc

SEQ ID NO: 1891873 - RNA, 18 nt, Human
uguccucccagcuccuca

SEQ ID NO: 1891874 - RNA, 14 nt, Human
uguccucagcagcu

SEQ ID NO: 1891875 - RNA, 23 nt, Human
uguccuccaacaccaagcacagc

SEQ ID NO: 1891876 - RNA, 17 nt, Human
uguccuccaagccagcg

SEQ ID NO: 1891877 - RNA, 17 nt, Human
uguccccgcacugggcu

SEQ ID NO: 1891878 - RNA, 19 nt, Human
uguccccgcacugggcuug

SEQ ID NO: 1891879 - RNA, 20 nt, Human
uguccugggagugagcuggu

SEQ ID NO: 1891880 - RNA, 19 nt, Human
uguccugggagugagcugg

SEQ ID NO: 1891881 - RNA, 12 nt, Human
uguccugggagu

SEQ ID NO: 1891882 - RNA, 14 nt, Human
ugucuaaugaaacc

SEQ ID NO: 1891883 - RNA, 14 nt, Human
uguccugggccugc

SEQ ID NO: 1891884 - RNA, 15 nt, Human
uguccugggccugca

SEQ ID NO: 1891885 - RNA, 17 nt, Human
uguccugggccugcaga

SEQ ID NO: 1891886 - RNA, 14 nt, Human
ugucugagugaacc

SEQ ID NO: 1891887 - RNA, 15 nt, Human
ugucugagugaaccu

SEQ ID NO: 1891888 - RNA, 17 nt, Human
ugucugagugaaccugu

SEQ ID NO: 1891889 - RNA, 20 nt, Human
ugucugagugaaccuguaua

SEQ ID NO: 1891890 - RNA, 21 nt, Human
ugucugagugaaccuguauaa

SEQ ID NO: 1891891 - RNA, 16 nt, Human
ugucugaguggcuuca

SEQ ID NO: 1891892 - RNA, 16 nt, Human
ugucuuuucuugcaug

SEQ ID NO: 1891893 - RNA, 23 nt, Human
ugucuuuggacccugaggcccag

SEQ ID NO: 1891894 - RNA, 16 nt, Human
ugucuaugggacucaa

SEQ ID NO: 1891895 - RNA, 15 nt, Human
ugucuaugggacuca

SEQ ID NO: 1891896 - RNA, 14 nt, Human
ugucuaugggacuc

SEQ ID NO: 1891897 - RNA, 19 nt, Human
ugucuaggcaggaccugug

SEQ ID NO: 1891898 - RNA, 17 nt, Human
ugucuaggcaggaccug

SEQ ID NO: 1891899 - RNA, 14 nt, Human
ugucuagagaggga

SEQ ID NO: 1891900 - RNA, 15 nt, Human
ugucuaguuguuuga

SEQ ID NO: 1891901 - RNA, 23 nt, Human
ugucuaguuguuugauucagaca

SEQ ID NO: 1891902 - RNA, 21 nt, Human
ugucucaaaaaaagaaaaaga

SEQ ID NO: 1891903 - RNA, 22 nt, Human
uguacagcaaggagauuuacaa

SEQ ID NO: 1891904 - RNA, 21 nt, Human
uguacagagcccacgccccca

SEQ ID NO: 1891905 - RNA, 12 nt, Human
uguacagagccc

SEQ ID NO: 1891906 - RNA, 23 nt, Human
uguacagcaaggagauuuacaac

SEQ ID NO: 1891907 - RNA, 13 nt, Human
uguaucugagcag

SEQ ID NO: 1891908 - RNA, 19 nt, Human
uguauuuuacuaauaaaau

SEQ ID NO: 1891909 - RNA, 14 nt, Human
ugucacaggcaggu

SEQ ID NO: 1891910 - RNA, 13 nt, Human
ugucacacacuuu

SEQ ID NO: 1891911 - RNA, 21 nt, Human
ugucaauuacaggaaguacug

SEQ ID NO: 1891912 - RNA, 19 nt, Human
uguaugcuucauacaggga

SEQ ID NO: 1891913 - RNA, 16 nt, Human
uguaugcuucauacag

SEQ ID NO: 1891914 - RNA, 14 nt, Human
uguaugcuucauac

SEQ ID NO: 1891915 - RNA, 13 nt, Human
uguaugcuucaua

SEQ ID NO: 1891916 - RNA, 17 nt, Human
uguauggagagaaaaca

SEQ ID NO: 1891917 - RNA, 21 nt, Human
ugucacaggcagguccagggu

SEQ ID NO: 1891918 - RNA, 17 nt, Human
ugucacaggcaggucca

SEQ ID NO: 1891919 - RNA, 16 nt, Human
ugucacaggcaggucc

SEQ ID NO: 1891920 - RNA, 15 nt, Human
ugucacaggcagguc

SEQ ID NO: 1891921 - RNA, 17 nt, Human
ugucacagggacugaaa

SEQ ID NO: 1891922 - RNA, 16 nt, Human
ugucagugugacugau

SEQ ID NO: 1891923 - RNA, 19 nt, Human
ugucagugugacugaucuc

SEQ ID NO: 1891924 - RNA, 15 nt, Human
ugucagugugacuga

SEQ ID NO: 1891925 - RNA, 14 nt, Human
ugucagugugacug

SEQ ID NO: 1891926 - RNA, 22 nt, Human
uggccucaagaucaaugaaaug

SEQ ID NO: 1891927 - RNA, 21 nt, Human
uggccucaagaucaaugaaau

SEQ ID NO: 1891928 - RNA, 23 nt, Human
uggccuccaaguccacaguggaa

SEQ ID NO: 1891929 - RNA, 13 nt, Human
uggccuccaaguc

SEQ ID NO: 1891930 - RNA, 11 nt, Human
uggccucccaa

SEQ ID NO: 1891931 - RNA, 14 nt, Human
uggccucccaacuc

SEQ ID NO: 1891932 - RNA, 13 nt, Human
uggccucaagauc

SEQ ID NO: 1891933 - RNA, 23 nt, Human
uggccuagcauacguacacauuu

SEQ ID NO: 1891934 - RNA, 23 nt, Human
uggccucaagugauucuccugcc

SEQ ID NO: 1891935 - RNA, 18 nt, Human
uggccucaagugauucuc

SEQ ID NO: 1891936 - RNA, 19 nt, Human
uggccucccaacucacccc

SEQ ID NO: 1891937 - RNA, 20 nt, Human
uggccucccaacucacccca

SEQ ID NO: 1891938 - RNA, 21 nt, Human
uggccucccaacucaccccag

SEQ ID NO: 1891939 - RNA, 22 nt, Human
uggccucccaacucaccccagc

SEQ ID NO: 1891940 - RNA, 20 nt, Human
uggccucccaaaugagccau

SEQ ID NO: 1891941 - RNA, 19 nt, Human
uggcagcugcgguccaccc

SEQ ID NO: 1891942 - RNA, 17 nt, Human
uggcagcugcgguccac

SEQ ID NO: 1891943 - RNA, 11 nt, Human
uggcagcucug

SEQ ID NO: 1891944 - RNA, 21 nt, Human
uggcagcucuggacagcccca

SEQ ID NO: 1891945 - RNA, 22 nt, Human
uggcagcucuggacagccccac

SEQ ID NO: 1891946 - RNA, 16 nt, Human
uggcagcugccacgcc

SEQ ID NO: 1891947 - RNA, 13 nt, Human
uggccccucaggg

SEQ ID NO: 1891948 - RNA, 20 nt, Human
uggccccucagggucccugg

SEQ ID NO: 1891949 - RNA, 12 nt, Human
uggccccaggac

SEQ ID NO: 1891950 - RNA, 15 nt, Human
uggccccaggaccug

SEQ ID NO: 1891951 - RNA, 20 nt, Human
uggccccaggaccuggcugc

SEQ ID NO: 1891952 - RNA, 20 nt, Human
uggccuagcauacguacaca

SEQ ID NO: 1891953 - RNA, 14 nt, Human
uggccccugagauc

SEQ ID NO: 1891954 - RNA, 21 nt, Human
uggccccucagggucccuggu

SEQ ID NO: 1891955 - RNA, 22 nt, Human
uggccccucagggucccuggug

SEQ ID NO: 1891956 - RNA, 14 nt, Human
uggcuccccaaagg

SEQ ID NO: 1891957 - RNA, 15 nt, Human
uggcuccccaaaggg

SEQ ID NO: 1891958 - RNA, 13 nt, Human
uggcugcugaagg

SEQ ID NO: 1891959 - RNA, 14 nt, Human
uggcugcugaaggc

SEQ ID NO: 1891960 - RNA, 16 nt, Human
uggcugcugaaggcuc

SEQ ID NO: 1891961 - RNA, 23 nt, Human
uggcuccagaugcagggcaguca

SEQ ID NO: 1891962 - RNA, 20 nt, Human
uggcuccagaugcagggcag

SEQ ID NO: 1891963 - RNA, 21 nt, Human
uggcuccagaugcagggcagu

SEQ ID NO: 1891964 - RNA, 20 nt, Human
uggcuccauugguguugaca

SEQ ID NO: 1891965 - RNA, 15 nt, Human
uggcuccaggccagg

SEQ ID NO: 1891966 - RNA, 22 nt, Human
uggccuucggccuccauccuga

SEQ ID NO: 1891967 - RNA, 13 nt, Human
uggccucugcacu

SEQ ID NO: 1891968 - RNA, 23 nt, Human
uggccuucggccuccauccugag

SEQ ID NO: 1891969 - RNA, 22 nt, Human
uggcuuccuaaaauucagugga

SEQ ID NO: 1891970 - RNA, 23 nt, Human
uggcugggacguggcucagccag

SEQ ID NO: 1891971 - RNA, 15 nt, Human
uggcugggacguggc

SEQ ID NO: 1891972 - RNA, 19 nt, Human
uggcugggacguggcucag

SEQ ID NO: 1891973 - RNA, 14 nt, Human
ugggaaugaagcaa

SEQ ID NO: 1891974 - RNA, 18 nt, Human
ugggaugauuggaggggg

SEQ ID NO: 1891975 - RNA, 16 nt, Human
ugggaaugaaugucag

SEQ ID NO: 1891976 - RNA, 21 nt, Human
ugggaaugaaugucaguguga

SEQ ID NO: 1891977 - RNA, 14 nt, Human
ugggacacccugug

SEQ ID NO: 1891978 - RNA, 15 nt, Human
ugggacacccuguga

SEQ ID NO: 1891979 - RNA, 16 nt, Human
ugggaggaucucuuga

SEQ ID NO: 1891980 - RNA, 14 nt, Human
ugggacagggagga

SEQ ID NO: 1891981 - RNA, 14 nt, Human
ugggcagagcagag

SEQ ID NO: 1891982 - RNA, 15 nt, Human
ugggcagagcagaga

SEQ ID NO: 1891983 - RNA, 17 nt, Human
ugggcagagcagagacc

SEQ ID NO: 1891984 - RNA, 18 nt, Human
ugggcagagcagagacca

SEQ ID NO: 1891985 - RNA, 13 nt, Human
ugggcaggaaaag

SEQ ID NO: 1891986 - RNA, 19 nt, Human
uggggggcugaggugggag

SEQ ID NO: 1891987 - RNA, 17 nt, Human
uggggggcuucauacac

SEQ ID NO: 1891988 - RNA, 16 nt, Human
ugggggccucagugcc

SEQ ID NO: 1891989 - RNA, 21 nt, Human
uggggccagauccagccuggg

SEQ ID NO: 1891990 - RNA, 17 nt, Human
uggggccaggcuggguc

SEQ ID NO: 1891991 - RNA, 19 nt, Human
uggggccagauccagccug

SEQ ID NO: 1891992 - RNA, 20 nt, Human
uggggccagauccagccugg

SEQ ID NO: 1891993 - RNA, 13 nt, Human
uggggccagaucc

SEQ ID NO: 1891994 - RNA, 14 nt, Human
uggggccagaucca

SEQ ID NO: 1891995 - RNA, 15 nt, Human
uggggccagauccag

SEQ ID NO: 1891996 - RNA, 16 nt, Human
uggggccagauccagc

SEQ ID NO: 1891997 - RNA, 18 nt, Human
uggggccagauccagccu

SEQ ID NO: 1891998 - RNA, 13 nt, Human
uggggcagcuuga

SEQ ID NO: 1891999 - RNA, 23 nt, Human
ugggcuuggggaccagagcugcc

SEQ ID NO: 1892000 - RNA, 17 nt, Human
ugggcuugucuguagau

SEQ ID NO: 1892001 - RNA, 21 nt, Human
ugggcuugucuguagauuuua

SEQ ID NO: 1892002 - RNA, 22 nt, Human
ugggcuuggggaccagagcugc

SEQ ID NO: 1892003 - RNA, 21 nt, Human
ugggcuucaguggcagcugcu

SEQ ID NO: 1892004 - RNA, 22 nt, Human
ugggcuucaguggcagcugcuu

SEQ ID NO: 1892005 - RNA, 22 nt, Human
ugggcuucauccuccucagauc

SEQ ID NO: 1892006 - RNA, 15 nt, Human
ugggcuucauccucc

SEQ ID NO: 1892007 - RNA, 16 nt, Human
ugggccugcuccagac

SEQ ID NO: 1892008 - RNA, 18 nt, Human
ugggccugcuccagaccu

SEQ ID NO: 1892009 - RNA, 19 nt, Human
ugggccugcuccagaccug

SEQ ID NO: 1892010 - RNA, 20 nt, Human
ugggccugcuccagaccuga

SEQ ID NO: 1892011 - RNA, 13 nt, Human
ugggccugcagaa

SEQ ID NO: 1892012 - RNA, 14 nt, Human
ugggccugcuccag

SEQ ID NO: 1892013 - RNA, 15 nt, Human
ugggccugcuccaga

SEQ ID NO: 1892014 - RNA, 19 nt, Human
uggcacugacugggcauag

SEQ ID NO: 1892015 - RNA, 19 nt, Human
uggcacugcuuccagugag

SEQ ID NO: 1892016 - RNA, 22 nt, Human
uggcacuauaauguaagcucua

SEQ ID NO: 1892017 - RNA, 18 nt, Human
uggcacuggaugcagaaa

SEQ ID NO: 1892018 - RNA, 15 nt, Human
uggcacuggaugcag

SEQ ID NO: 1892019 - RNA, 13 nt, Human
uggcacuggaugc

SEQ ID NO: 1892020 - RNA, 22 nt, Human
uggcacugcuuccagugaggcu

SEQ ID NO: 1892021 - RNA, 15 nt, Human
uggauuuaacagaaa

SEQ ID NO: 1892022 - RNA, 17 nt, Human
uggauuuaacagaaaug

SEQ ID NO: 1892023 - RNA, 13 nt, Human
uggcaaccugcuu

SEQ ID NO: 1892024 - RNA, 21 nt, Human
uggcacuauaauguaagcucu

SEQ ID NO: 1892025 - RNA, 16 nt, Human
uggcaaggaaaaacag

SEQ ID NO: 1892026 - RNA, 14 nt, Human
uggcaaccugcuuc

SEQ ID NO: 1892027 - RNA, 22 nt, Human
uggaugcagccucacaguccuu

SEQ ID NO: 1892028 - RNA, 13 nt, Human
uggaugcagccuc

SEQ ID NO: 1892029 - RNA, 21 nt, Human
uggaugcagccucacaguccu

SEQ ID NO: 1892030 - RNA, 19 nt, Human
uggaucaaauccagccugc

SEQ ID NO: 1892031 - RNA, 23 nt, Human
uggaggggggaggugggauccuc

SEQ ID NO: 1892032 - RNA, 17 nt, Human
uggagaguuuccugaaa

SEQ ID NO: 1892033 - RNA, 22 nt, Human
uggacucugcacaugucuugua

SEQ ID NO: 1892034 - RNA, 18 nt, Human
uggacucugcacaugucu

SEQ ID NO: 1892035 - RNA, 17 nt, Human
uggacucugcacauguc

SEQ ID NO: 1892036 - RNA, 17 nt, Human
uggacucugcacaugaa

SEQ ID NO: 1892037 - RNA, 16 nt, Human
uggacucugcacauga

SEQ ID NO: 1892038 - RNA, 15 nt, Human
uggacucugcacaug

SEQ ID NO: 1892039 - RNA, 19 nt, Human
uggacucugcacaugucuu

SEQ ID NO: 1892040 - RNA, 18 nt, Human
uggagaccagggagccuu

SEQ ID NO: 1892041 - RNA, 19 nt, Human
uggagaccagggagccuuu

SEQ ID NO: 1892042 - RNA, 15 nt, Human
uggagaguuuccuga

SEQ ID NO: 1892043 - RNA, 16 nt, Human
uggagaguuuccugaa

SEQ ID NO: 1892044 - RNA, 23 nt, Human
uggacaggcauguucucugagga

SEQ ID NO: 1892045 - RNA, 17 nt, Human
uggacaggcauguucuc

SEQ ID NO: 1892046 - RNA, 14 nt, Human
uggacauuuaccuu

SEQ ID NO: 1892047 - RNA, 22 nt, Human
uggacaggcauguucucugagg

SEQ ID NO: 1892048 - RNA, 18 nt, Human
uggacaggcauguucucu

SEQ ID NO: 1892049 - RNA, 19 nt, Human
uggacuaacuugucuuugg

SEQ ID NO: 1892050 - RNA, 20 nt, Human
uggacuaacuugucuuugga

SEQ ID NO: 1892051 - RNA, 19 nt, Human
uggacguguuaugacucca

SEQ ID NO: 1892052 - RNA, 23 nt, Human
uggacguguuaugacuccagaau

SEQ ID NO: 1892053 - RNA, 15 nt, Human
uggacggcugggcac

SEQ ID NO: 1892054 - RNA, 22 nt, Human
ugcuuccagugaggcucugccc

SEQ ID NO: 1892055 - RNA, 23 nt, Human
ugcuuccagugaggcucugcccu

SEQ ID NO: 1892056 - RNA, 23 nt, Human
ugcuuccauggccguguagaagc

SEQ ID NO: 1892057 - RNA, 22 nt, Human
ugcuuccauggccguguagaag

SEQ ID NO: 1892058 - RNA, 18 nt, Human
ugcuuaacuucacauauu

SEQ ID NO: 1892059 - RNA, 17 nt, Human
ugcuuaacuucacauau

SEQ ID NO: 1892060 - RNA, 14 nt, Human
ugcuuaacuucaca

SEQ ID NO: 1892061 - RNA, 13 nt, Human
ugcuuaacuucac

SEQ ID NO: 1892062 - RNA, 19 nt, Human
ugcuuaacuucacauauug

SEQ ID NO: 1892063 - RNA, 12 nt, Human
ugcuuaaugaaa

SEQ ID NO: 1892064 - RNA, 14 nt, Human
ugcuuaaugaaaag

SEQ ID NO: 1892065 - RNA, 22 nt, Human
ugcuguuuuccucccuucugcu

SEQ ID NO: 1892066 - RNA, 16 nt, Human
ugcuguuuuccucccu

SEQ ID NO: 1892067 - RNA, 17 nt, Human
ugcuguuuuccucccuu

SEQ ID NO: 1892068 - RNA, 19 nt, Human
ugcuguuuuccucccuucu

SEQ ID NO: 1892069 - RNA, 21 nt, Human
ugcuguuuuccucccuucugc

SEQ ID NO: 1892070 - RNA, 14 nt, Human
ugcuguuuuccucc

SEQ ID NO: 1892071 - RNA, 15 nt, Human
ugcuguuuuccuccc

SEQ ID NO: 1892072 - RNA, 13 nt, Human
ugcuuugcuuucu

SEQ ID NO: 1892073 - RNA, 17 nt, Human
ugcuuuggaaaacccag

SEQ ID NO: 1892074 - RNA, 19 nt, Human
uggaaaagccaagaggcug

SEQ ID NO: 1892075 - RNA, 16 nt, Human
uggaaaagccaagagg

SEQ ID NO: 1892076 - RNA, 19 nt, Human
ugcuuugcuuucugcucag

SEQ ID NO: 1892077 - RNA, 14 nt, Human
ugcuuugcuuucug

SEQ ID NO: 1892078 - RNA, 15 nt, Human
ugcuuucugaagcuu

SEQ ID NO: 1892079 - RNA, 20 nt, Human
ugcuuucugaagcuuuacca

SEQ ID NO: 1892080 - RNA, 21 nt, Human
ugcuuucugaagcuuuaccag

SEQ ID NO: 1892081 - RNA, 23 nt, Human
ugcuuucugaagcuuuaccagcu

SEQ ID NO: 1892082 - RNA, 18 nt, Human
ugcuugugaaaggaaaga

SEQ ID NO: 1892083 - RNA, 13 nt, Human
ugcuucuucagag

SEQ ID NO: 1892084 - RNA, 15 nt, Human
uggaacacucugaga

SEQ ID NO: 1892085 - RNA, 17 nt, Human
uggaacacucugagacu

SEQ ID NO: 1892086 - RNA, 21 nt, Human
uggaaacuggaugaggucaua

SEQ ID NO: 1892087 - RNA, 17 nt, Human
uggaaccucagccuggc

SEQ ID NO: 1892088 - RNA, 18 nt, Human
uggaaccucagccuggcc

SEQ ID NO: 1892089 - RNA, 19 nt, Human
uggaaccucagccuggcca

SEQ ID NO: 1892090 - RNA, 23 nt, Human
uggaaccucagccuggccagaca

SEQ ID NO: 1892091 - RNA, 18 nt, Human
ugaucagaccauaauguu

SEQ ID NO: 1892092 - RNA, 15 nt, Human
ugaucagaucugaca

SEQ ID NO: 1892093 - RNA, 16 nt, Human
ugaucagaucugacau

SEQ ID NO: 1892094 - RNA, 17 nt, Human
ugaucagaucugacaug

SEQ ID NO: 1892095 - RNA, 23 nt, Human
ugaucagaucugacaugauuccu

SEQ ID NO: 1892096 - RNA, 22 nt, Human
ugaucacggcucacugcagccu

SEQ ID NO: 1892097 - RNA, 19 nt, Human
ugauaugcaguuuuccuua

SEQ ID NO: 1892098 - RNA, 19 nt, Human
ugauauauuuaaaaauauu

SEQ ID NO: 1892099 - RNA, 21 nt, Human
ugauaucaugccccuguacuc

SEQ ID NO: 1892100 - RNA, 19 nt, Human
ugauauccauucuuucuga

SEQ ID NO: 1892101 - RNA, 21 nt, Human
ugauauccauucuuucugaua

SEQ ID NO: 1892102 - RNA, 14 nt, Human
ugauauccuucuag

SEQ ID NO: 1892103 - RNA, 17 nt, Human
ugauauaaguguguguu

SEQ ID NO: 1892104 - RNA, 23 nt, Human
ugauauaaguguguguuuuucau

SEQ ID NO: 1892105 - RNA, 24 nt, Human
ugauaguuguaccgcaaugugacu

SEQ ID NO: 1892106 - RNA, 14 nt, Human
ugauauaaauaaaa

SEQ ID NO: 1892107 - RNA, 14 nt, Human
ugauauauuuaaaa

SEQ ID NO: 1892108 - RNA, 20 nt, Human
ugauccacccaccucagccu

SEQ ID NO: 1892109 - RNA, 16 nt, Human
ugauccacccaccuca

SEQ ID NO: 1892110 - RNA, 15 nt, Human
ugauccacccaccuc

SEQ ID NO: 1892111 - RNA, 21 nt, Human
ugauccaagcuggucccacuc

SEQ ID NO: 1892112 - RNA, 24 nt, Human
ugaucauccacugugccaugugcc

SEQ ID NO: 1892113 - RNA, 13 nt, Human
ugaucauccacug

SEQ ID NO: 1892114 - RNA, 22 nt, Human
ugauccacccaccucagccucc

SEQ ID NO: 1892115 - RNA, 21 nt, Human
ugauccacccaccucagccuc

SEQ ID NO: 1892116 - RNA, 19 nt, Human
ugaucuaggaagacuuugg

SEQ ID NO: 1892117 - RNA, 21 nt, Human
ugaucuaggaagacuuuggaa

SEQ ID NO: 1892118 - RNA, 14 nt, Human
ugaucugaaaaaua

SEQ ID NO: 1892119 - RNA, 14 nt, Human
ugaugcccugcccu

SEQ ID NO: 1892120 - RNA, 20 nt, Human
ugaugcuauuugcaauuccu

SEQ ID NO: 1892121 - RNA, 13 nt, Human
ugaugcuauuugc

SEQ ID NO: 1892122 - RNA, 15 nt, Human
ugaugcugccccuca

SEQ ID NO: 1892123 - RNA, 19 nt, Human
ugaugcuucuucagagacu

SEQ ID NO: 1892124 - RNA, 21 nt, Human
ugaugcuucuucagagacucc

SEQ ID NO: 1892125 - RNA, 22 nt, Human
ugaugcuucuucagagacuccu

SEQ ID NO: 1892126 - RNA, 13 nt, Human
ugauguacaugua

SEQ ID NO: 1892127 - RNA, 21 nt, Human
ugaugguuguacauauaagug

SEQ ID NO: 1892128 - RNA, 20 nt, Human
ugaugaugaaaugaggucag

SEQ ID NO: 1892129 - RNA, 23 nt, Human
ugaugaucuuugcagacaggcaa

SEQ ID NO: 1892130 - RNA, 22 nt, Human
ugaugaucuuugcagacaggca

SEQ ID NO: 1892131 - RNA, 14 nt, Human
ugaugaaaauauuu

SEQ ID NO: 1892132 - RNA, 14 nt, Human
ugaugccaugagga

SEQ ID NO: 1892133 - RNA, 15 nt, Human
ugaugaaaauauuua

SEQ ID NO: 1892134 - RNA, 20 nt, Human
ugaucuuugcagacaggcaa

SEQ ID NO: 1892135 - RNA, 19 nt, Human
ugaucuuugcagacaggca

SEQ ID NO: 1892136 - RNA, 13 nt, Human
ugaucuggaaccc

SEQ ID NO: 1892137 - RNA, 23 nt, Human
ugaucuuugcagacaggcaagca

SEQ ID NO: 1892138 - RNA, 21 nt, Human
ugaucuuugcagacaggcaag

SEQ ID NO: 1892139 - RNA, 14 nt, Human
ugaucuggaaccca

SEQ ID NO: 1892140 - RNA, 16 nt, Human
ugaguccuagagcuac

SEQ ID NO: 1892141 - RNA, 15 nt, Human
ugagguugcuuuguu

SEQ ID NO: 1892142 - RNA, 11 nt, Human
ugaguccuggc

SEQ ID NO: 1892143 - RNA, 18 nt, Human
ugaguccuggcaugggaa

SEQ ID NO: 1892144 - RNA, 14 nt, Human
ugagucgaggacag

SEQ ID NO: 1892145 - RNA, 19 nt, Human
ugaguccuggcaugggaau

SEQ ID NO: 1892146 - RNA, 22 nt, Human
ugaguccuggcaugggaaugaa

SEQ ID NO: 1892147 - RNA, 19 nt, Human
ugagguuucaaaccucccu

SEQ ID NO: 1892148 - RNA, 21 nt, Human
ugaguccccuguuuguuucug

SEQ ID NO: 1892149 - RNA, 16 nt, Human
ugaggugcuauguucu

SEQ ID NO: 1892150 - RNA, 15 nt, Human
ugaggugcuauguuc

SEQ ID NO: 1892151 - RNA, 19 nt, Human
ugagguggaagagggcugc

SEQ ID NO: 1892152 - RNA, 11 nt, Human
ugaggcugggc

SEQ ID NO: 1892153 - RNA, 14 nt, Human
ugaggcuggcacag

SEQ ID NO: 1892154 - RNA, 15 nt, Human
ugaggcuggcacagg

SEQ ID NO: 1892155 - RNA, 17 nt, Human
ugaggcuggcacaggac

SEQ ID NO: 1892156 - RNA, 11 nt, Human
ugaggcuggca

SEQ ID NO: 1892157 - RNA, 23 nt, Human
ugaggcugcuuuccaaagccaau

SEQ ID NO: 1892158 - RNA, 20 nt, Human
ugaggcugcuuuccaaagcc

SEQ ID NO: 1892159 - RNA, 16 nt, Human
ugaggcugcuuuccaa

SEQ ID NO: 1892160 - RNA, 15 nt, Human
ugaggucuguucuuu

SEQ ID NO: 1892161 - RNA, 14 nt, Human
ugaggucuguucuu

SEQ ID NO: 1892162 - RNA, 20 nt, Human
ugaggucuguucuuuccaaa

SEQ ID NO: 1892163 - RNA, 23 nt, Human
ugaggcuuuggauuugacauugc

SEQ ID NO: 1892164 - RNA, 13 nt, Human
ugaggcuuuggau

SEQ ID NO: 1892165 - RNA, 18 nt, Human
ugaggcuuuggauuugac

SEQ ID NO: 1892166 - RNA, 20 nt, Human
ugaguugguguugacaugug

SEQ ID NO: 1892167 - RNA, 19 nt, Human
ugaguuggggucuggcagc

SEQ ID NO: 1892168 - RNA, 21 nt, Human
ugaguuggggucuggcagccu

SEQ ID NO: 1892169 - RNA, 17 nt, Human
ugaguuggggucuggca

SEQ ID NO: 1892170 - RNA, 17 nt, Human
ugaguuggcugggaaua

SEQ ID NO: 1892171 - RNA, 18 nt, Human
ugagucgaggacagggag

SEQ ID NO: 1892172 - RNA, 16 nt, Human
ugaguuggcugggaau

SEQ ID NO: 1892173 - RNA, 14 nt, Human
ugaguuggcuggga

SEQ ID NO: 1892174 - RNA, 16 nt, Human
ugaguugauucagcuc

SEQ ID NO: 1892175 - RNA, 19 nt, Human
ugaguugauucagcucugc

SEQ ID NO: 1892176 - RNA, 16 nt, Human
ugagucgaggacaggg

SEQ ID NO: 1892177 - RNA, 15 nt, Human
ugagucgaggacagg

SEQ ID NO: 1892178 - RNA, 21 nt, Human
ugaguugauagcacagacccu

SEQ ID NO: 1892179 - RNA, 23 nt, Human
ugaguugauagcacagacccugc

SEQ ID NO: 1892180 - RNA, 15 nt, Human
ugauagcacagaccc

SEQ ID NO: 1892181 - RNA, 16 nt, Human
ugauagcacagacccu

SEQ ID NO: 1892182 - RNA, 17 nt, Human
ugauagcacagacccug

SEQ ID NO: 1892183 - RNA, 18 nt, Human
ugauagcacagacccugc

SEQ ID NO: 1892184 - RNA, 20 nt, Human
ugauagcacagacccugccc

SEQ ID NO: 1892185 - RNA, 21 nt, Human
ugauagcacagacccugcccu

SEQ ID NO: 1892186 - RNA, 16 nt, Human
ugauagugguggaguu

SEQ ID NO: 1892187 - RNA, 22 nt, Human
ugauagcacagacccugcccug

SEQ ID NO: 1892188 - RNA, 23 nt, Human
ugauagcacagacccugcccugu

SEQ ID NO: 1892189 - RNA, 12 nt, Human
ugauagcacuuu

SEQ ID NO: 1892190 - RNA, 13 nt, Human
ugauagcacuuuc

SEQ ID NO: 1892191 - RNA, 14 nt, Human
ugauagcacuuucu

SEQ ID NO: 1892192 - RNA, 15 nt, Human
ugauagcacuuucua

SEQ ID NO: 1892193 - RNA, 21 nt, Human
ugauagcacuuucuacaaugu

SEQ ID NO: 1892194 - RNA, 21 nt, Human
ugagcucccaggugcagccag

SEQ ID NO: 1892195 - RNA, 23 nt, Human
ugagcucccaggugcagccagag

SEQ ID NO: 1892196 - RNA, 21 nt, Human
ugagcucucggaacugcaugc

SEQ ID NO: 1892197 - RNA, 15 nt, Human
ugagccucagcaucc

SEQ ID NO: 1892198 - RNA, 13 nt, Human
ugagccucagcau

SEQ ID NO: 1892199 - RNA, 17 nt, Human
ugagccccugucuagag

SEQ ID NO: 1892200 - RNA, 21 nt, Human
ugagccccugucuagagaggg

SEQ ID NO: 1892201 - RNA, 22 nt, Human
ugagccccugucuagagaggga

SEQ ID NO: 1892202 - RNA, 20 nt, Human
ugagaugcuagaacucccuu

SEQ ID NO: 1892203 - RNA, 16 nt, Human
ugagaugcuagaacuc

SEQ ID NO: 1892204 - RNA, 14 nt, Human
ugagaugcuagaac

SEQ ID NO: 1892205 - RNA, 13 nt, Human
ugagcaucaggcc

SEQ ID NO: 1892206 - RNA, 13 nt, Human
ugagccccaaaag

SEQ ID NO: 1892207 - RNA, 17 nt, Human
ugagcccagcuggguca

SEQ ID NO: 1892208 - RNA, 21 nt, Human
ugagcccagcugggucaggca

SEQ ID NO: 1892209 - RNA, 14 nt, Human
ugagcaucaggcca

SEQ ID NO: 1892210 - RNA, 15 nt, Human
ugagcaucaggccag

SEQ ID NO: 1892211 - RNA, 17 nt, Human
ugagaguagagucacug

SEQ ID NO: 1892212 - RNA, 14 nt, Human
ugagagguuugacu

SEQ ID NO: 1892213 - RNA, 22 nt, Human
ugagagguuugacuagaugaug

SEQ ID NO: 1892214 - RNA, 18 nt, Human
ugagauccuuccuuuuga

SEQ ID NO: 1892215 - RNA, 20 nt, Human
ugagaugauacauccaaagc

SEQ ID NO: 1892216 - RNA, 14 nt, Human
ugagacucugucuc

SEQ ID NO: 1892217 - RNA, 13 nt, Human
ugagacucugucu

SEQ ID NO: 1892218 - RNA, 12 nt, Human
ugagacucuguc

SEQ ID NO: 1892219 - RNA, 23 nt, Human
ugagaggcauccaguaucuugaa

SEQ ID NO: 1892220 - RNA, 16 nt, Human
ugagaggcauuucccc

SEQ ID NO: 1892221 - RNA, 14 nt, Human
ugagaggcauuucc

SEQ ID NO: 1892222 - RNA, 22 nt, Human
ugagaggcauccaguaucuuga

SEQ ID NO: 1892223 - RNA, 17 nt, Human
ugagaaaucuaaaaaac

SEQ ID NO: 1892224 - RNA, 13 nt, Human
ugagaaaucuaaa

SEQ ID NO: 1892225 - RNA, 12 nt, Human
ugagacccuguc

SEQ ID NO: 1892226 - RNA, 16 nt, Human
ugagacagcucugcau

SEQ ID NO: 1892227 - RNA, 14 nt, Human
ugagacagcucugc

SEQ ID NO: 1892228 - RNA, 22 nt, Human
ugagaaauucaacguuaauaau

SEQ ID NO: 1892229 - RNA, 15 nt, Human
ucuugaacuccuggc

SEQ ID NO: 1892230 - RNA, 13 nt, Human
ucuugaaggugcu

SEQ ID NO: 1892231 - RNA, 16 nt, Human
ucuugaauaauguaag

SEQ ID NO: 1892232 - RNA, 22 nt, Human
ucuugaaucuagggagggggaa

SEQ ID NO: 1892233 - RNA, 17 nt, Human
ucuugaauuguaaggaa

SEQ ID NO: 1892234 - RNA, 20 nt, Human
ugaccauucuccaccugcca

SEQ ID NO: 1892235 - RNA, 21 nt, Human
ugaccauucuccaccugccag

SEQ ID NO: 1892236 - RNA, 22 nt, Human
ugaccauucuccaccugccagg

SEQ ID NO: 1892237 - RNA, 12 nt, Human
ugaccucugccu

SEQ ID NO: 1892238 - RNA, 23 nt, Human
ugaccucugcagcaauaaagcag

SEQ ID NO: 1892239 - RNA, 21 nt, Human
ugaccucugcagcaauaaagc

SEQ ID NO: 1892240 - RNA, 18 nt, Human
ugaccucugcagcaauaa

SEQ ID NO: 1892241 - RNA, 14 nt, Human
ugaccuuucaauag

SEQ ID NO: 1892242 - RNA, 15 nt, Human
ugaccuuucaauagg

SEQ ID NO: 1892243 - RNA, 16 nt, Human
ugaccuuucaauagga

SEQ ID NO: 1892244 - RNA, 22 nt, Human
ugaccucaggugauccacccac

SEQ ID NO: 1892245 - RNA, 16 nt, Human
ugaccucugcagcaau

SEQ ID NO: 1892246 - RNA, 13 nt, Human
ugaccucugcagc

SEQ ID NO: 1892247 - RNA, 22 nt, Human
ugaccucccucuaauuuaucuu

SEQ ID NO: 1892248 - RNA, 13 nt, Human
ugaccucccucua

SEQ ID NO: 1892249 - RNA, 14 nt, Human
ugaccucccucuaa

SEQ ID NO: 1892250 - RNA, 15 nt, Human
ugacugaauuucuuu

SEQ ID NO: 1892251 - RNA, 14 nt, Human
ugacugaauuucuu

SEQ ID NO: 1892252 - RNA, 13 nt, Human
ugacugaauuucu

SEQ ID NO: 1892253 - RNA, 17 nt, Human
ugacucuggcaaagcuu

SEQ ID NO: 1892254 - RNA, 22 nt, Human
ugacucuggcaaagcuuuuaga

SEQ ID NO: 1892255 - RNA, 17 nt, Human
ugacgccaucccagccc

SEQ ID NO: 1892256 - RNA, 18 nt, Human
ugacgccaucccagcccc

SEQ ID NO: 1892257 - RNA, 19 nt, Human
ugacgccaucccagcccca

SEQ ID NO: 1892258 - RNA, 20 nt, Human
ugacgccaucccagccccaa

SEQ ID NO: 1892259 - RNA, 19 nt, Human
ugacggccagggagaagcu

SEQ ID NO: 1892260 - RNA, 18 nt, Human
ugaccuuucaauaggaaa

SEQ ID NO: 1892261 - RNA, 22 nt, Human
ugaccuuucaauaggaaaaacu

SEQ ID NO: 1892262 - RNA, 17 nt, Human
ugaccuuuuauguagua

SEQ ID NO: 1892263 - RNA, 18 nt, Human
ugaccuuuuauguaguaa

SEQ ID NO: 1892264 - RNA, 23 nt, Human
ugaccuuuuauguaguaauugac

SEQ ID NO: 1892265 - RNA, 13 nt, Human
ugacgccauccca

SEQ ID NO: 1892266 - RNA, 14 nt, Human
ugacgccaucccag

SEQ ID NO: 1892267 - RNA, 15 nt, Human
ugacgccaucccagc

SEQ ID NO: 1892268 - RNA, 16 nt, Human
ugacgccaucccagcc

SEQ ID NO: 1892269 - RNA, 16 nt, Human
ugcaccuugugucugu

SEQ ID NO: 1892270 - RNA, 15 nt, Human
ugcaccuugugucug

SEQ ID NO: 1892271 - RNA, 14 nt, Human
ugcaccuugugucu

SEQ ID NO: 1892272 - RNA, 22 nt, Human
ugcaccuggaauauauaaccag

SEQ ID NO: 1892273 - RNA, 20 nt, Human
ugcaccuggaauauauaacc

SEQ ID NO: 1892274 - RNA, 17 nt, Human
ugcaccuggaauauaua

SEQ ID NO: 1892275 - RNA, 21 nt, Human
ugcaccggcuggccuggcccc

SEQ ID NO: 1892276 - RNA, 20 nt, Human
ugcacagaguuguuacauuu

SEQ ID NO: 1892277 - RNA, 14 nt, Human
ugcacaaaguggca

SEQ ID NO: 1892278 - RNA, 15 nt, Human
ugcacaaaguggcau

SEQ ID NO: 1892279 - RNA, 20 nt, Human
ugcacaaaguggcauaaaaa

SEQ ID NO: 1892280 - RNA, 18 nt, Human
ugcaccggcuggccuggc

SEQ ID NO: 1892281 - RNA, 19 nt, Human
ugcaccggcuggccuggcc

SEQ ID NO: 1892282 - RNA, 20 nt, Human
ugcaccggcuggccuggccc

SEQ ID NO: 1892283 - RNA, 18 nt, Human
ugcacugugaaggacccu

SEQ ID NO: 1892284 - RNA, 18 nt, Human
ugcacuuaugauuucaug

SEQ ID NO: 1892285 - RNA, 19 nt, Human
ugcacuuaugauuucaugu

SEQ ID NO: 1892286 - RNA, 20 nt, Human
ugcacuuaugauuucaugug

SEQ ID NO: 1892287 - RNA, 21 nt, Human
ugcacugacauuguuggccaa

SEQ ID NO: 1892288 - RNA, 18 nt, Human
ugcacugacauuguuggc

SEQ ID NO: 1892289 - RNA, 17 nt, Human
ugcacucuuuaagggag

SEQ ID NO: 1892290 - RNA, 15 nt, Human
ugcacugugaaggac

SEQ ID NO: 1892291 - RNA, 21 nt, Human
ugcaaugacacagucuuggcu

SEQ ID NO: 1892292 - RNA, 20 nt, Human
ugcaagaaaaugauguguac

SEQ ID NO: 1892293 - RNA, 13 nt, Human
ugcaaugaccuuu

SEQ ID NO: 1892294 - RNA, 16 nt, Human
ugcaaugaccuuucaa

SEQ ID NO: 1892295 - RNA, 17 nt, Human
ugcaaugaccuuucaau

SEQ ID NO: 1892296 - RNA, 19 nt, Human
ugcaaugaccuuucaauag

SEQ ID NO: 1892297 - RNA, 22 nt, Human
ugcaaugaccuuucaauaggaa

SEQ ID NO: 1892298 - RNA, 23 nt, Human
ugcaaugaccuuucaauaggaaa

SEQ ID NO: 1892299 - RNA, 16 nt, Human
ugcaauggcagccuug

SEQ ID NO: 1892300 - RNA, 15 nt, Human
ugcaauggcagccuu

SEQ ID NO: 1892301 - RNA, 14 nt, Human
ugcaauggcagccu

SEQ ID NO: 1892302 - RNA, 13 nt, Human
ugcaauggcagcc

SEQ ID NO: 1892303 - RNA, 22 nt, Human
ugcaauguagaggggaaaagag

SEQ ID NO: 1892304 - RNA, 16 nt, Human
ugcaaugacucaggac

SEQ ID NO: 1892305 - RNA, 22 nt, Human
ugcaaugucugagugaaccugu

SEQ ID NO: 1892306 - RNA, 19 nt, Human
ugcaaugucugagugaacc

SEQ ID NO: 1892307 - RNA, 15 nt, Human
ugcacaaacagaggc

SEQ ID NO: 1892308 - RNA, 16 nt, Human
ugcacaaacagaggcc

SEQ ID NO: 1892309 - RNA, 19 nt, Human
ugcacagaguuguuacauu

SEQ ID NO: 1892310 - RNA, 18 nt, Human
ugcacagaguuguuacau

SEQ ID NO: 1892311 - RNA, 17 nt, Human
ugcacagaguuguuaca

SEQ ID NO: 1892312 - RNA, 20 nt, Human
ugcacaaacagaggccgcca

SEQ ID NO: 1892313 - RNA, 18 nt, Human
ugcacaaaacccagaccu

SEQ ID NO: 1892314 - RNA, 19 nt, Human
ugcacaaaacccagaccug

SEQ ID NO: 1892315 - RNA, 17 nt, Human
ugcacaaacagaggccg

SEQ ID NO: 1892316 - RNA, 19 nt, Human
ugcacaaacagaggccgcc

SEQ ID NO: 1892317 - RNA, 22 nt, Human
ugauuuuuuuuuccuucagugc

SEQ ID NO: 1892318 - RNA, 23 nt, Human
ugauuuuuuuuuccuucagugcc

SEQ ID NO: 1892319 - RNA, 22 nt, Human
ugcaaaaauauuuauaaaacuu

SEQ ID NO: 1892320 - RNA, 23 nt, Human
ugcaaaaauauuuauaaaacuuc

SEQ ID NO: 1892321 - RNA, 18 nt, Human
ugcaaaaauauuuauaaa

SEQ ID NO: 1892322 - RNA, 13 nt, Human
ugauuuuuugcau

SEQ ID NO: 1892323 - RNA, 16 nt, Human
ugauuuuuuuuuccuu

SEQ ID NO: 1892324 - RNA, 17 nt, Human
ugauuuuuuuuuccuuc

SEQ ID NO: 1892325 - RNA, 19 nt, Human
ugauuuuuuuuuccuucag

SEQ ID NO: 1892326 - RNA, 20 nt, Human
ugauuuuuuuuuccuucagu

SEQ ID NO: 1892327 - RNA, 16 nt, Human
ugauuuugcuguagaa

SEQ ID NO: 1892328 - RNA, 14 nt, Human
ugauuuugcuguag

SEQ ID NO: 1892329 - RNA, 19 nt, Human
ugauuuugcuguagaagau

SEQ ID NO: 1892330 - RNA, 17 nt, Human
ugauuuugcuguagaag

SEQ ID NO: 1892331 - RNA, 19 nt, Human
ugauuuuuaaagaaaaguu

SEQ ID NO: 1892332 - RNA, 15 nt, Human
ugauuuucauugcug

SEQ ID NO: 1892333 - RNA, 13 nt, Human
ugauuuucauugc

SEQ ID NO: 1892334 - RNA, 22 nt, Human
ugaugugaagccaauucagaca

SEQ ID NO: 1892335 - RNA, 14 nt, Human
ugaugugaagccaa

SEQ ID NO: 1892336 - RNA, 17 nt, Human
ugcaacaggcugggcuu

SEQ ID NO: 1892337 - RNA, 16 nt, Human
ugcaacaggcugggcu

SEQ ID NO: 1892338 - RNA, 15 nt, Human
ugcaacaggcugggc

SEQ ID NO: 1892339 - RNA, 14 nt, Human
ugcaacaggcuggg

SEQ ID NO: 1892340 - RNA, 20 nt, Human
ugcaacaggcugggcuucag

SEQ ID NO: 1892341 - RNA, 19 nt, Human
ugcaacaggcugggcuuca

SEQ ID NO: 1892342 - RNA, 14 nt, Human
ugcaaccuccgccu

SEQ ID NO: 1892343 - RNA, 13 nt, Human
ugcaaccuccgcc

SEQ ID NO: 1892344 - RNA, 17 nt, Human
ugcaaccagggagcugc

SEQ ID NO: 1892345 - RNA, 20 nt, Human
ugcaaccagggagcugcagg

SEQ ID NO: 1892346 - RNA, 21 nt, Human
ugcaaccagggagcugcaggg

SEQ ID NO: 1892347 - RNA, 21 nt, Human
ugcaaccuccgccucuugggu

SEQ ID NO: 1892348 - RNA, 20 nt, Human
ugcaaccuccgccucuuggg

SEQ ID NO: 1892349 - RNA, 18 nt, Human
ugcaaccuccgccucuug

SEQ ID NO: 1892350 - RNA, 19 nt, Human
ugcaaccugauugugucuc

SEQ ID NO: 1892351 - RNA, 20 nt, Human
ugcaaccugauugugucucu

SEQ ID NO: 1892352 - RNA, 18 nt, Human
ugcaaccucuuggccuga

SEQ ID NO: 1892353 - RNA, 14 nt, Human
ugcaacuucugccu

SEQ ID NO: 1892354 - RNA, 13 nt, Human
ugcaacuucugcc

SEQ ID NO: 1892355 - RNA, 14 nt, Human
ugcaacuuggacuu

SEQ ID NO: 1892356 - RNA, 18 nt, Human
ugcaacuuuguauaaaag

SEQ ID NO: 1892357 - RNA, 22 nt, Human
ugcaaccugauugugucucuug

SEQ ID NO: 1892358 - RNA, 22 nt, Human
ugcaacucugaaggguaauuau

SEQ ID NO: 1892359 - RNA, 16 nt, Human
ugccucccgcccccuu

SEQ ID NO: 1892360 - RNA, 20 nt, Human
ugccguuacuuuucauauuu

SEQ ID NO: 1892361 - RNA, 13 nt, Human
ugccucccuggug

SEQ ID NO: 1892362 - RNA, 22 nt, Human
ugccucccuggugagagggccg

SEQ ID NO: 1892363 - RNA, 14 nt, Human
ugccucccugguga

SEQ ID NO: 1892364 - RNA, 22 nt, Human
ugccuccgcgugaucaaagcca

SEQ ID NO: 1892365 - RNA, 22 nt, Human
ugccuccuuugugaggaagccg

SEQ ID NO: 1892366 - RNA, 13 nt, Human
ugccucgaaacac

SEQ ID NO: 1892367 - RNA, 17 nt, Human
ugccucgaaacacagaa

SEQ ID NO: 1892368 - RNA, 21 nt, Human
ugccuccuuugugaggaagcc

SEQ ID NO: 1892369 - RNA, 20 nt, Human
ugccuccuuugugaggaagc

SEQ ID NO: 1892370 - RNA, 21 nt, Human
ugccucgaaacacagaaaccu

SEQ ID NO: 1892371 - RNA, 13 nt, Human
ugccucugggacu

SEQ ID NO: 1892372 - RNA, 19 nt, Human
ugccugguggcagcugcgg

SEQ ID NO: 1892373 - RNA, 17 nt, Human
ugccugguccucacacu

SEQ ID NO: 1892374 - RNA, 18 nt, Human
ugccugguggcagcugcg

SEQ ID NO: 1892375 - RNA, 17 nt, Human
ugccugguggcagcugc

SEQ ID NO: 1892376 - RNA, 13 nt, Human
ugccugcccaggc

SEQ ID NO: 1892377 - RNA, 16 nt, Human
ugccugccagcugcac

SEQ ID NO: 1892378 - RNA, 15 nt, Human
ugccugccagcugca

SEQ ID NO: 1892379 - RNA, 19 nt, Human
ugccugccagcugcacuga

SEQ ID NO: 1892380 - RNA, 21 nt, Human
ugccucuucucuacucuaggg

SEQ ID NO: 1892381 - RNA, 16 nt, Human
ugcccuggagguggcu

SEQ ID NO: 1892382 - RNA, 15 nt, Human
ugccgucuaccugag

SEQ ID NO: 1892383 - RNA, 16 nt, Human
ugccgucuaccugagg

SEQ ID NO: 1892384 - RNA, 17 nt, Human
ugccgucuaccugaggg

SEQ ID NO: 1892385 - RNA, 19 nt, Human
ugccgucuaccugaggggc

SEQ ID NO: 1892386 - RNA, 21 nt, Human
ugcccugcccaccuggccucu

SEQ ID NO: 1892387 - RNA, 19 nt, Human
ugcccuaaaguguauuuuu

SEQ ID NO: 1892388 - RNA, 17 nt, Human
ugcccuaaaguguauuu

SEQ ID NO: 1892389 - RNA, 22 nt, Human
ugcccugcccaccuggccucug

SEQ ID NO: 1892390 - RNA, 23 nt, Human
ugcccugcccaccuggccucugc

SEQ ID NO: 1892391 - RNA, 21 nt, Human
ugcccggggaaaggcaagguc

SEQ ID NO: 1892392 - RNA, 18 nt, Human
ugcccggggaaaggcaag

SEQ ID NO: 1892393 - RNA, 19 nt, Human
ugcccagaaugaggcugcu

SEQ ID NO: 1892394 - RNA, 18 nt, Human
ugcccagaaugaggcugc

SEQ ID NO: 1892395 - RNA, 17 nt, Human
ugcccagaaugaggcug

SEQ ID NO: 1892396 - RNA, 19 nt, Human
ugccacugacugcagggac

SEQ ID NO: 1892397 - RNA, 12 nt, Human
ugccaggaagcc

SEQ ID NO: 1892398 - RNA, 16 nt, Human
ugccaggaagccagca

SEQ ID NO: 1892399 - RNA, 18 nt, Human
ugccaggaagccagcagg

SEQ ID NO: 1892400 - RNA, 19 nt, Human
ugccaggaagccagcaggc

SEQ ID NO: 1892401 - RNA, 12 nt, Human
ugccauccaggu

SEQ ID NO: 1892402 - RNA, 22 nt, Human
ugccaucauguuuacagaggac

SEQ ID NO: 1892403 - RNA, 15 nt, Human
ugccauccagguuca

SEQ ID NO: 1892404 - RNA, 17 nt, Human
ugccagguuuuuggucu

SEQ ID NO: 1892405 - RNA, 16 nt, Human
ugccauguuggccagg

SEQ ID NO: 1892406 - RNA, 20 nt, Human
ugcccaccuggccucugcac

SEQ ID NO: 1892407 - RNA, 15 nt, Human
ugccauguuggccag

SEQ ID NO: 1892408 - RNA, 12 nt, Human
ugccauguuggc

SEQ ID NO: 1892409 - RNA, 18 nt, Human
ugcccacgcuggagugca

SEQ ID NO: 1892410 - RNA, 19 nt, Human
ugcccaccuggccucugca

SEQ ID NO: 1892411 - RNA, 13 nt, Human
ugcccacucccug

SEQ ID NO: 1892412 - RNA, 15 nt, Human
ugccaugugccaggu

SEQ ID NO: 1892413 - RNA, 14 nt, Human
ugccaugugccagg

SEQ ID NO: 1892414 - RNA, 23 nt, Human
ugccaugaggaacaaggcaaggc

SEQ ID NO: 1892415 - RNA, 20 nt, Human
ugccaugaggaacaaggcaa

SEQ ID NO: 1892416 - RNA, 16 nt, Human
ugcauguaugucuugg

SEQ ID NO: 1892417 - RNA, 15 nt, Human
ugcauguaugucuug

SEQ ID NO: 1892418 - RNA, 14 nt, Human
ugcauguaugucuu

SEQ ID NO: 1892419 - RNA, 13 nt, Human
ugcauguaugucu

SEQ ID NO: 1892420 - RNA, 15 nt, Human
ugcauguuugugauu

SEQ ID NO: 1892421 - RNA, 23 nt, Human
ugcauguuuguuguauacuuccu

SEQ ID NO: 1892422 - RNA, 17 nt, Human
ugcaugguuuagaaagc

SEQ ID NO: 1892423 - RNA, 19 nt, Human
ugcagauaaacaguaguga

SEQ ID NO: 1892424 - RNA, 15 nt, Human
ugcaucccccccacc

SEQ ID NO: 1892425 - RNA, 17 nt, Human
ugcaucccccccaccuc

SEQ ID NO: 1892426 - RNA, 17 nt, Human
ugccacaguauauuuuu

SEQ ID NO: 1892427 - RNA, 23 nt, Human
ugcauuuuggagaguuuccugaa

SEQ ID NO: 1892428 - RNA, 18 nt, Human
ugcauuaucuagauacug

SEQ ID NO: 1892429 - RNA, 21 nt, Human
ugcauuauauuuguaaauuua

SEQ ID NO: 1892430 - RNA, 17 nt, Human
ugcauuaucuagauacu

SEQ ID NO: 1892431 - RNA, 12 nt, Human
ugcauuaucuag

SEQ ID NO: 1892432 - RNA, 14 nt, Human
uuuucaaaauggag

SEQ ID NO: 1892433 - RNA, 21 nt, Human
uuuucaaaauuguuacaaauu

SEQ ID NO: 1892434 - RNA, 16 nt, Human
uuuucacauuggaaac

SEQ ID NO: 1892435 - RNA, 23 nt, Human
uuuucaccuguuuuuaagcuguu

SEQ ID NO: 1892436 - RNA, 18 nt, Human
uuuucccuauuagagaag

SEQ ID NO: 1892437 - RNA, 22 nt, Human
uuuucccuauuagagaagagau

SEQ ID NO: 1892438 - RNA, 19 nt, Human
uuuucccagcuacaccuuu

SEQ ID NO: 1892439 - RNA, 15 nt, Human
uuuucagauauaaaa

SEQ ID NO: 1892440 - RNA, 18 nt, Human
uuuucccagcuacaccuu

SEQ ID NO: 1892441 - RNA, 13 nt, Human
uuuucuacucgag

SEQ ID NO: 1892442 - RNA, 20 nt, Human
uuuucuacucgaguuacaga

SEQ ID NO: 1892443 - RNA, 22 nt, Human
uuuucuacucgaguuacagaca

SEQ ID NO: 1892444 - RNA, 23 nt, Human
uuuucuacucgaguuacagacaa

SEQ ID NO: 1892445 - RNA, 16 nt, Human
uuuucuuucagccaag

SEQ ID NO: 1892446 - RNA, 16 nt, Human
uuuucuuuaaugcuuu

SEQ ID NO: 1892447 - RNA, 22 nt, Human
uuuucuuguguguuuauuguca

SEQ ID NO: 1892448 - RNA, 13 nt, Human
uuuucuucucccu

SEQ ID NO: 1892449 - RNA, 15 nt, Human
uuuucuucacugucc

SEQ ID NO: 1892450 - RNA, 21 nt, Human
uuuuaaaguaacccuacaaaa

SEQ ID NO: 1892451 - RNA, 19 nt, Human
uuuuacguccaucucuugu

SEQ ID NO: 1892452 - RNA, 14 nt, Human
uuuuaccuucacug

SEQ ID NO: 1892453 - RNA, 15 nt, Human
uuuuacuaauagaca

SEQ ID NO: 1892454 - RNA, 19 nt, Human
uuuuaucgucacugcuuaa

SEQ ID NO: 1892455 - RNA, 18 nt, Human
uuuuauuuuuagacagag

SEQ ID NO: 1892456 - RNA, 21 nt, Human
uuuuauuuuucucaugaugag

SEQ ID NO: 1892457 - RNA, 17 nt, Human
uuuucaaaauaaaaaug

SEQ ID NO: 1892458 - RNA, 21 nt, Human
uuuuauacauaaacaagacca

SEQ ID NO: 1892459 - RNA, 13 nt, Human
uuuuauacauaaa

SEQ ID NO: 1892460 - RNA, 13 nt, Human
uuuuauacucuuu

SEQ ID NO: 1892461 - RNA, 18 nt, Human
uuuuauacucuuucugua

SEQ ID NO: 1892462 - RNA, 19 nt, Human
uuuuauacucuuucuguau

SEQ ID NO: 1892463 - RNA, 21 nt, Human
uuugagugccuuacacaaugg

SEQ ID NO: 1892464 - RNA, 14 nt, Human
uuugaguguuuuaa

SEQ ID NO: 1892465 - RNA, 20 nt, Human
uuugcacuaagauauuucca

SEQ ID NO: 1892466 - RNA, 17 nt, Human
uuuccguuaaaauacca

SEQ ID NO: 1892467 - RNA, 15 nt, Human
uuuccguuaaaauac

SEQ ID NO: 1892468 - RNA, 23 nt, Human
uuucccuuugagguugcuuuguu

SEQ ID NO: 1892469 - RNA, 12 nt, Human
uuuggaaaauaa

SEQ ID NO: 1892470 - RNA, 13 nt, Human
uuuggacccugag

SEQ ID NO: 1892471 - RNA, 19 nt, Human
uuuggacaaaauggaauac

SEQ ID NO: 1892472 - RNA, 18 nt, Human
uuugcauaacguauaaaa

SEQ ID NO: 1892473 - RNA, 17 nt, Human
uuugcauuaaauucaca

SEQ ID NO: 1892474 - RNA, 18 nt, Human
uuugcauuaaauucacaa

SEQ ID NO: 1892475 - RNA, 21 nt, Human
uuugcauuaaauucacaaacu

SEQ ID NO: 1892476 - RNA, 22 nt, Human
uuugcauuaaauucacaaacuu

SEQ ID NO: 1892477 - RNA, 19 nt, Human
uuugcauugaacacaaacu

SEQ ID NO: 1892478 - RNA, 13 nt, Human
uuugcauucuccc

SEQ ID NO: 1892479 - RNA, 15 nt, Human
uuuggucaacacuaa

SEQ ID NO: 1892480 - RNA, 23 nt, Human
uuugguaguggaaaaaaaaaaga

SEQ ID NO: 1892481 - RNA, 17 nt, Human
uuuggucuacacugugc

SEQ ID NO: 1892482 - RNA, 13 nt, Human
uuuguguauuuaa

SEQ ID NO: 1892483 - RNA, 20 nt, Human
uuuguguauuuaacagggag

SEQ ID NO: 1892484 - RNA, 15 nt, Human
uuuguugucagcuga

SEQ ID NO: 1892485 - RNA, 22 nt, Human
uuuguuaguaugaggcauuugu

SEQ ID NO: 1892486 - RNA, 23 nt, Human
uuuuaaaauccacuuuaucuuga

SEQ ID NO: 1892487 - RNA, 14 nt, Human
uuuuaaaauccacu

SEQ ID NO: 1892488 - RNA, 11 nt, Human
uuuuuuuacua

SEQ ID NO: 1892489 - RNA, 13 nt, Human
uuuuuuccaucuu

SEQ ID NO: 1892490 - RNA, 22 nt, Human
uuuuuuccaucuuuacaaaacu

SEQ ID NO: 1892491 - RNA, 12 nt, Human
uuuuuuuuaaga

SEQ ID NO: 1892492 - RNA, 12 nt, Human
uuuuuuucuuua

SEQ ID NO: 1892493 - RNA, 13 nt, Human
uuuuuccaucuuu

SEQ ID NO: 1892494 - RNA, 19 nt, Human
uuuuucccagcuacaccuu

SEQ ID NO: 1892495 - RNA, 23 nt, Human
uuuuucccuucaucugggcacug

SEQ ID NO: 1892496 - RNA, 13 nt, Human
uuuuuuaaaaacu

SEQ ID NO: 1892497 - RNA, 20 nt, Human
uuuuuuaaccccgucaacaa

SEQ ID NO: 1892498 - RNA, 18 nt, Human
uuuuuucaauauuuauua

SEQ ID NO: 1892499 - RNA, 15 nt, Human
uuuuucaguuuucag

SEQ ID NO: 1892500 - RNA, 12 nt, Human
uuuuucaguuuu

SEQ ID NO: 1892501 - RNA, 19 nt, Human
uuuuucauugccaaaaacu

SEQ ID NO: 1892502 - RNA, 12 nt, Human
uuuuuccaggcu

SEQ ID NO: 1892503 - RNA, 20 nt, Human
uuuuuaauaaagacaggguu

SEQ ID NO: 1892504 - RNA, 17 nt, Human
uuuuuaauaaagacagg

SEQ ID NO: 1892505 - RNA, 18 nt, Human
uuuuuaaguuacacauuu

SEQ ID NO: 1892506 - RNA, 13 nt, Human
uuuuuaaucuuua

SEQ ID NO: 1892507 - RNA, 13 nt, Human
uuuuuaaucucca

SEQ ID NO: 1892508 - RNA, 23 nt, Human
uuuuuaagugcugcauuuaaaag

SEQ ID NO: 1892509 - RNA, 22 nt, Human
uuuuuaagugcugcauuuaaaa

SEQ ID NO: 1892510 - RNA, 19 nt, Human
uuuuuaagugcugcauuua

SEQ ID NO: 1892511 - RNA, 18 nt, Human
uuuuuaagugcugcauuu

SEQ ID NO: 1892512 - RNA, 17 nt, Human
uuuuuaagugcugcauu

SEQ ID NO: 1892513 - RNA, 16 nt, Human
uuuuuaagugcugcau

SEQ ID NO: 1892514 - RNA, 23 nt, Human
uuuuuaagaaaaaggaugcacag

SEQ ID NO: 1892515 - RNA, 22 nt, Human
uuuuuaacucaauauuuuccau

SEQ ID NO: 1892516 - RNA, 12 nt, Human
uuuuuaagaaaa

SEQ ID NO: 1892517 - RNA, 15 nt, Human
uuuugaauaaaaacu

SEQ ID NO: 1892518 - RNA, 13 nt, Human
uuuugaaggcaaa

SEQ ID NO: 1892519 - RNA, 14 nt, Human
uuuugaaggcaaaa

SEQ ID NO: 1892520 - RNA, 19 nt, Human
uuuuuaaccccgucaacaa

SEQ ID NO: 1892521 - RNA, 21 nt, Human
uuuugacucuggcaaagcuuu

SEQ ID NO: 1892522 - RNA, 20 nt, Human
uuuugacuuucauuggaaau

SEQ ID NO: 1892523 - RNA, 13 nt, Human
uuuuuuuugacaa

SEQ ID NO: 1892524 - RNA, 21 nt, Human
uuguacauguguagccugugc

SEQ ID NO: 1892525 - RNA, 20 nt, Human
uuguacauguguagccugug

SEQ ID NO: 1892526 - RNA, 14 nt, Human
uuguauuaaagaca

SEQ ID NO: 1892527 - RNA, 13 nt, Human
uuguauuaaacuc

SEQ ID NO: 1892528 - RNA, 15 nt, Human
uuguauuaaacucuu

SEQ ID NO: 1892529 - RNA, 16 nt, Human
uuguauuaaagacaga

SEQ ID NO: 1892530 - RNA, 21 nt, Human
uuguauucagaguugaugguu

SEQ ID NO: 1892531 - RNA, 16 nt, Human
uuguauucucuccugu

SEQ ID NO: 1892532 - RNA, 15 nt, Human
uuguauucucuccug

SEQ ID NO: 1892533 - RNA, 19 nt, Human
uuguauucucuccuguacc

SEQ ID NO: 1892534 - RNA, 16 nt, Human
uuguauuaaacucuuc

SEQ ID NO: 1892535 - RNA, 15 nt, Human
uugucuuaaaaagug

SEQ ID NO: 1892536 - RNA, 12 nt, Human
uugugauuuuug

SEQ ID NO: 1892537 - RNA, 17 nt, Human
uugugauuuuuguaauu

SEQ ID NO: 1892538 - RNA, 16 nt, Human
uugugauuuuuguaau

SEQ ID NO: 1892539 - RNA, 20 nt, Human
uugugaaaggaaagaggcuc

SEQ ID NO: 1892540 - RNA, 21 nt, Human
uugugaaauaaaacuggcuuu

SEQ ID NO: 1892541 - RNA, 22 nt, Human
uugucuuaaaaaguggaaaaau

SEQ ID NO: 1892542 - RNA, 22 nt, Human
uuggguucaagcgauucuucug

SEQ ID NO: 1892543 - RNA, 19 nt, Human
uugcacguauuuuaauagc

SEQ ID NO: 1892544 - RNA, 16 nt, Human
uugcacuaagauauuu

SEQ ID NO: 1892545 - RNA, 13 nt, Human
uuggucuguguga

SEQ ID NO: 1892546 - RNA, 16 nt, Human
uuggucugugagaugc

SEQ ID NO: 1892547 - RNA, 21 nt, Human
uuggugaacauugcaauagaa

SEQ ID NO: 1892548 - RNA, 13 nt, Human
uuguaaaacaggu

SEQ ID NO: 1892549 - RNA, 17 nt, Human
uuguaaauagcucaggu

SEQ ID NO: 1892550 - RNA, 14 nt, Human
uuguaaaacaggua

SEQ ID NO: 1892551 - RNA, 15 nt, Human
uuguaaaacagguag

SEQ ID NO: 1892552 - RNA, 18 nt, Human
uuguacauaaugcgugca

SEQ ID NO: 1892553 - RNA, 23 nt, Human
uuguaaauuaacuuuuauaaacu

SEQ ID NO: 1892554 - RNA, 18 nt, Human
uuguaaauuaacuuuuau

SEQ ID NO: 1892555 - RNA, 16 nt, Human
uuguaaauuaacuuuu

SEQ ID NO: 1892556 - RNA, 15 nt, Human
uuguaaauuaacuuu

SEQ ID NO: 1892557 - RNA, 22 nt, Human
uugugccauagucacauggccu

SEQ ID NO: 1892558 - RNA, 12 nt, Human
uugugccccugc

SEQ ID NO: 1892559 - RNA, 17 nt, Human
uugugccucccugguga

SEQ ID NO: 1892560 - RNA, 12 nt, Human
uugugcauuugg

SEQ ID NO: 1892561 - RNA, 22 nt, Human
uugugccaaccuauuuugaagu

SEQ ID NO: 1892562 - RNA, 23 nt, Human
uugugcauuaucuagauacugua

SEQ ID NO: 1892563 - RNA, 22 nt, Human
uugugcauuaucuagauacugu

SEQ ID NO: 1892564 - RNA, 17 nt, Human
uugugcauuaucuagau

SEQ ID NO: 1892565 - RNA, 21 nt, Human
uuguguuuauauauaagccaa

SEQ ID NO: 1892566 - RNA, 20 nt, Human
uuguguugaagagguuuuaa

SEQ ID NO: 1892567 - RNA, 13 nt, Human
uuguguucuuugu

SEQ ID NO: 1892568 - RNA, 23 nt, Human
uuguggauuuaacagaaauguac

SEQ ID NO: 1892569 - RNA, 22 nt, Human
uuguggauuuaacagaaaugua

SEQ ID NO: 1892570 - RNA, 21 nt, Human
uuguggauuuaacagaaaugu

SEQ ID NO: 1892571 - RNA, 20 nt, Human
uuguggauuuaacagaaaug

SEQ ID NO: 1892572 - RNA, 22 nt, Human
uuguggaggagcucaggacacu

SEQ ID NO: 1892573 - RNA, 16 nt, Human
uuguggacacagcucu

SEQ ID NO: 1892574 - RNA, 17 nt, Human
uuguggacacagcucuu

SEQ ID NO: 1892575 - RNA, 22 nt, Human
uuguggaauggagauucaguuu

SEQ ID NO: 1892576 - RNA, 22 nt, Human
uuguuaguaugaggcauuuguu

SEQ ID NO: 1892577 - RNA, 20 nt, Human
uuguuagugugucuuagugu

SEQ ID NO: 1892578 - RNA, 16 nt, Human
uuguuaucagucaaua

SEQ ID NO: 1892579 - RNA, 22 nt, Human
uuguuaucagucaauauuuuua

SEQ ID NO: 1892580 - RNA, 13 nt, Human
uuguuaucuggga

SEQ ID NO: 1892581 - RNA, 19 nt, Human
uuguguuucuuuaguuuuu

SEQ ID NO: 1892582 - RNA, 17 nt, Human
uuguguuuguguauuua

SEQ ID NO: 1892583 - RNA, 19 nt, Human
uuguuaauaaaaguacaug

SEQ ID NO: 1892584 - RNA, 14 nt, Human
uuguuaauaaaagu

SEQ ID NO: 1892585 - RNA, 21 nt, Human
uuguuaauaaaaguacauguu

SEQ ID NO: 1892586 - RNA, 17 nt, Human
uuguuaauauucauuuu

SEQ ID NO: 1892587 - RNA, 14 nt, Human
uuguuacauuuuua

SEQ ID NO: 1892588 - RNA, 19 nt, Human
uuguuaaugguuugaauau

SEQ ID NO: 1892589 - RNA, 21 nt, Human
uuguuaguaugaggcauuugu

SEQ ID NO: 1892590 - RNA, 19 nt, Human
uuguuaguaugaggcauuu

SEQ ID NO: 1892591 - RNA, 19 nt, Human
uuuaacucuauaauguguu

SEQ ID NO: 1892592 - RNA, 15 nt, Human
uuuaacuagaauuua

SEQ ID NO: 1892593 - RNA, 18 nt, Human
uuuaacuccucaauucca

SEQ ID NO: 1892594 - RNA, 24 nt, Human
uuuaacucaauauuuuccaugaaa

SEQ ID NO: 1892595 - RNA, 17 nt, Human
uuuaacuagaauuuauu

SEQ ID NO: 1892596 - RNA, 18 nt, Human
uuuaacagaaauguacag

SEQ ID NO: 1892597 - RNA, 17 nt, Human
uuuaacagcugaauuau

SEQ ID NO: 1892598 - RNA, 20 nt, Human
uuuaacagcugaauuaucua

SEQ ID NO: 1892599 - RNA, 18 nt, Human
uuuaaguuacacauuuuu

SEQ ID NO: 1892600 - RNA, 20 nt, Human
uuuaagacgaaacauuuguu

SEQ ID NO: 1892601 - RNA, 22 nt, Human
uuuaagaaaaaggaugcacaga

SEQ ID NO: 1892602 - RNA, 18 nt, Human
uuuaagaaaaaggaugca

SEQ ID NO: 1892603 - RNA, 13 nt, Human
uuuaacuucugcc

SEQ ID NO: 1892604 - RNA, 16 nt, Human
uuuacacucuuuguaa

SEQ ID NO: 1892605 - RNA, 21 nt, Human
uuuacaccaguuccuuucaau

SEQ ID NO: 1892606 - RNA, 21 nt, Human
uuuaauagcgucauaacuaga

SEQ ID NO: 1892607 - RNA, 22 nt, Human
uuuaauagcgucauaacuagaa

SEQ ID NO: 1892608 - RNA, 21 nt, Human
uuuaauagguuuggacaaaau

SEQ ID NO: 1892609 - RNA, 16 nt, Human
uuuacagucuauuuga

SEQ ID NO: 1892610 - RNA, 16 nt, Human
uuuacauuguugagcu

SEQ ID NO: 1892611 - RNA, 18 nt, Human
uuuacagucuauuugaga

SEQ ID NO: 1892612 - RNA, 14 nt, Human
uuuagaaauauaau

SEQ ID NO: 1892613 - RNA, 19 nt, Human
uuuagaaauacugcaagaa

SEQ ID NO: 1892614 - RNA, 20 nt, Human
uuuagaaauacugcaagaaa

SEQ ID NO: 1892615 - RNA, 22 nt, Human
uuuagaaauacugcaagaaaau

SEQ ID NO: 1892616 - RNA, 23 nt, Human
uuuagaaagaagcccaauauuau

SEQ ID NO: 1892617 - RNA, 19 nt, Human
uuuacuucuuauacauuug

SEQ ID NO: 1892618 - RNA, 22 nt, Human
uuuacuucuuauacauuugaua

SEQ ID NO: 1892619 - RNA, 12 nt, Human
uuuagacagagu

SEQ ID NO: 1892620 - RNA, 21 nt, Human
uuuauaaaaauaaaaaacacu

SEQ ID NO: 1892621 - RNA, 23 nt, Human
uuuauaaaaauaaaaaacacugg

SEQ ID NO: 1892622 - RNA, 13 nt, Human
uuucacaaauaaa

SEQ ID NO: 1892623 - RNA, 12 nt, Human
uuucacaaauaa

SEQ ID NO: 1892624 - RNA, 22 nt, Human
uuucacaaacagaaaacaugua

SEQ ID NO: 1892625 - RNA, 18 nt, Human
uuucagauauaaaagacu

SEQ ID NO: 1892626 - RNA, 16 nt, Human
uuucagauauaaaaga

SEQ ID NO: 1892627 - RNA, 14 nt, Human
uuucagauauaaaa

SEQ ID NO: 1892628 - RNA, 12 nt, Human
uuucaauaggaa

SEQ ID NO: 1892629 - RNA, 14 nt, Human
uuucaauaggaaaa

SEQ ID NO: 1892630 - RNA, 17 nt, Human
uuucaauaggaaaaacu

SEQ ID NO: 1892631 - RNA, 19 nt, Human
uuucaauaggaaaaacuga

SEQ ID NO: 1892632 - RNA, 19 nt, Human
uuucaauuuccaagagcug

SEQ ID NO: 1892633 - RNA, 23 nt, Human
uuucaagucaaauuaauaaucuu

SEQ ID NO: 1892634 - RNA, 19 nt, Human
uuucaauaaagcauuuaua

SEQ ID NO: 1892635 - RNA, 20 nt, Human
uuucaauaaagcauuuauaa

SEQ ID NO: 1892636 - RNA, 20 nt, Human
uuucaagguaauuucuugug

SEQ ID NO: 1892637 - RNA, 18 nt, Human
uuucaagucaaauuaaua

SEQ ID NO: 1892638 - RNA, 20 nt, Human
uuucaagucaaauuaauaau

SEQ ID NO: 1892639 - RNA, 17 nt, Human
uuucauuuacuguggcu

SEQ ID NO: 1892640 - RNA, 14 nt, Human
uuucauuuacugug

SEQ ID NO: 1892641 - RNA, 18 nt, Human
uuucauuuaggugaggaa

SEQ ID NO: 1892642 - RNA, 14 nt, Human
uuucauuuagguga

SEQ ID NO: 1892643 - RNA, 16 nt, Human
uuuccaagagcugagg

SEQ ID NO: 1892644 - RNA, 14 nt, Human
uuuccaagagcuga

SEQ ID NO: 1892645 - RNA, 13 nt, Human
uuuccaagagcug

SEQ ID NO: 1892646 - RNA, 14 nt, Human
uuucagcagacuga

SEQ ID NO: 1892647 - RNA, 23 nt, Human
uuucagcaccuacaguguacagu

SEQ ID NO: 1892648 - RNA, 13 nt, Human
uuucaguguacau

SEQ ID NO: 1892649 - RNA, 14 nt, Human
uuucaguguacaug

SEQ ID NO: 1892650 - RNA, 13 nt, Human
uuuauuauggcac

SEQ ID NO: 1892651 - RNA, 13 nt, Human
uuuauuaugcaug

SEQ ID NO: 1892652 - RNA, 16 nt, Human
uuuauggcuuuugugc

SEQ ID NO: 1892653 - RNA, 14 nt, Human
uuuauggcuuuugu

SEQ ID NO: 1892654 - RNA, 17 nt, Human
uuuauacaaauuagaaa

SEQ ID NO: 1892655 - RNA, 19 nt, Human
uuuauacaaauuagaaaau

SEQ ID NO: 1892656 - RNA, 13 nt, Human
uuuauaaaacuuc

SEQ ID NO: 1892657 - RNA, 13 nt, Human
uuuauacaaauua

SEQ ID NO: 1892658 - RNA, 15 nt, Human
uuuauacaaauuaga

SEQ ID NO: 1892659 - RNA, 16 nt, Human
uuucaacugccaaaau

SEQ ID NO: 1892660 - RNA, 19 nt, Human
uuuauuuaguuccuugagu

SEQ ID NO: 1892661 - RNA, 20 nt, Human
uuuauuuacagaugaaugua

SEQ ID NO: 1892662 - RNA, 16 nt, Human
uuuauuauuuauuuau

SEQ ID NO: 1892663 - RNA, 12 nt, Human
uuuauugacaca

SEQ ID NO: 1892664 - RNA, 13 nt, Human
uuuauugacacag

SEQ ID NO: 1892665 - RNA, 14 nt, Human
uuuauugacacaga

SEQ ID NO: 1892666 - RNA, 15 nt, Human
uuuauugacacagaa

SEQ ID NO: 1892667 - RNA, 16 nt, Human
uuccuuuauguucuca

SEQ ID NO: 1892668 - RNA, 17 nt, Human
uucgggugugcaauguc

SEQ ID NO: 1892669 - RNA, 21 nt, Human
uucgggugugcaaugucugag

SEQ ID NO: 1892670 - RNA, 16 nt, Human
uuccuuucauuuacug

SEQ ID NO: 1892671 - RNA, 18 nt, Human
uucggugagcuacaaaug

SEQ ID NO: 1892672 - RNA, 21 nt, Human
uuccuugaguugauucagcuc

SEQ ID NO: 1892673 - RNA, 12 nt, Human
uuccauggccuc

SEQ ID NO: 1892674 - RNA, 16 nt, Human
uuccauggccucuuca

SEQ ID NO: 1892675 - RNA, 22 nt, Human
uuccauggccguguagaagcau

SEQ ID NO: 1892676 - RNA, 20 nt, Human
uuccugaggcugggcucccu

SEQ ID NO: 1892677 - RNA, 23 nt, Human
uuccugagggaucuauacuugcu

SEQ ID NO: 1892678 - RNA, 21 nt, Human
uuccugaggaagagggacugu

SEQ ID NO: 1892679 - RNA, 15 nt, Human
uuccugaggcugggc

SEQ ID NO: 1892680 - RNA, 21 nt, Human
uuccugcaggccaggccagcu

SEQ ID NO: 1892681 - RNA, 19 nt, Human
uucuacccagcgagcccug

SEQ ID NO: 1892682 - RNA, 12 nt, Human
uucuacccagcg

SEQ ID NO: 1892683 - RNA, 15 nt, Human
uucuacaaugugaac

SEQ ID NO: 1892684 - RNA, 16 nt, Human
uucuacaaugugaacu

SEQ ID NO: 1892685 - RNA, 18 nt, Human
uucuacaaugugaacuuu

SEQ ID NO: 1892686 - RNA, 19 nt, Human
uucuacaaugugaacuuua

SEQ ID NO: 1892687 - RNA, 22 nt, Human
uucgguggcuagucaagcuccu

SEQ ID NO: 1892688 - RNA, 21 nt, Human
uucuacccagcgagcccuggu

SEQ ID NO: 1892689 - RNA, 20 nt, Human
uucuacccagcgagcccugg

SEQ ID NO: 1892690 - RNA, 14 nt, Human
uucuacccaggugc

SEQ ID NO: 1892691 - RNA, 13 nt, Human
uucuacgccaggg

SEQ ID NO: 1892692 - RNA, 14 nt, Human
uucuauagcuuuuc

SEQ ID NO: 1892693 - RNA, 22 nt, Human
uucuacucgaguuacagacaaa

SEQ ID NO: 1892694 - RNA, 13 nt, Human
uucuacuugcucu

SEQ ID NO: 1892695 - RNA, 14 nt, Human
uucuacuugcucug

SEQ ID NO: 1892696 - RNA, 16 nt, Human
uucuacuugcucugga

SEQ ID NO: 1892697 - RNA, 22 nt, Human
uucuacuugcucuggaccugcc

SEQ ID NO: 1892698 - RNA, 19 nt, Human
uucuacuugcucuggaccu

SEQ ID NO: 1892699 - RNA, 20 nt, Human
uucuacuugcucuggaccug

SEQ ID NO: 1892700 - RNA, 23 nt, Human
uucuacuugcucuggaccugccc

SEQ ID NO: 1892701 - RNA, 16 nt, Human
uucucugcccuccaag

SEQ ID NO: 1892702 - RNA, 17 nt, Human
uucucugcccuccaaga

SEQ ID NO: 1892703 - RNA, 23 nt, Human
uucugacccaugcugcccuguga

SEQ ID NO: 1892704 - RNA, 22 nt, Human
uucugacccaugcugcccugug

SEQ ID NO: 1892705 - RNA, 18 nt, Human
uucugacccugcuucaaa

SEQ ID NO: 1892706 - RNA, 21 nt, Human
uucugacccugcuucaaauau

SEQ ID NO: 1892707 - RNA, 18 nt, Human
uucucugaggaagcuggg

SEQ ID NO: 1892708 - RNA, 19 nt, Human
uucugagagcugugcauca

SEQ ID NO: 1892709 - RNA, 13 nt, Human
uucugagagcugu

SEQ ID NO: 1892710 - RNA, 23 nt, Human
uucugauaacuagauggugcuga

SEQ ID NO: 1892711 - RNA, 22 nt, Human
uucugauaacuagauggugcug

SEQ ID NO: 1892712 - RNA, 19 nt, Human
uucugcucacauaucuguc

SEQ ID NO: 1892713 - RNA, 15 nt, Human
uucugcucagcucug

SEQ ID NO: 1892714 - RNA, 20 nt, Human
uucugcucagcucugggcca

SEQ ID NO: 1892715 - RNA, 19 nt, Human
uucugcuacuggcaaaagg

SEQ ID NO: 1892716 - RNA, 14 nt, Human
uucugcucagcucu

SEQ ID NO: 1892717 - RNA, 12 nt, Human
uucugcucagcu

SEQ ID NO: 1892718 - RNA, 15 nt, Human
uucugcucauucuaa

SEQ ID NO: 1892719 - RNA, 19 nt, Human
uucugcucauucuaaugau

SEQ ID NO: 1892720 - RNA, 22 nt, Human
uucugauaugcaguuuuccuua

SEQ ID NO: 1892721 - RNA, 19 nt, Human
uucugauccuaguuccacc

SEQ ID NO: 1892722 - RNA, 19 nt, Human
uucugcaaaaauauuuaua

SEQ ID NO: 1892723 - RNA, 16 nt, Human
uucuccacccugcucu

SEQ ID NO: 1892724 - RNA, 19 nt, Human
uucucauuucaccccuccc

SEQ ID NO: 1892725 - RNA, 16 nt, Human
uucucauuucaccccu

SEQ ID NO: 1892726 - RNA, 15 nt, Human
uucucauuucacccc

SEQ ID NO: 1892727 - RNA, 23 nt, Human
uucucauugaauuauaaaagcca

SEQ ID NO: 1892728 - RNA, 14 nt, Human
uucuccacucaguu

SEQ ID NO: 1892729 - RNA, 20 nt, Human
uucuccaccugccagggaca

SEQ ID NO: 1892730 - RNA, 16 nt, Human
uucuccaccugccagg

SEQ ID NO: 1892731 - RNA, 18 nt, Human
uucuccaccugccaggga

SEQ ID NO: 1892732 - RNA, 21 nt, Human
uucuccaccucccacaaagga

SEQ ID NO: 1892733 - RNA, 12 nt, Human
uucuccaccugc

SEQ ID NO: 1892734 - RNA, 14 nt, Human
uucuccaccugcca

SEQ ID NO: 1892735 - RNA, 15 nt, Human
uucuccaccugccag

SEQ ID NO: 1892736 - RNA, 20 nt, Human
uucucugaggacacuaacca

SEQ ID NO: 1892737 - RNA, 14 nt, Human
uucucugaggacac

SEQ ID NO: 1892738 - RNA, 11 nt, Human
uucucugcccu

SEQ ID NO: 1892739 - RNA, 12 nt, Human
uucucugcccuc

SEQ ID NO: 1892740 - RNA, 19 nt, Human
uucucuccuguaccucuug

SEQ ID NO: 1892741 - RNA, 22 nt, Human
uucucuccuguaccucuugagc

SEQ ID NO: 1892742 - RNA, 13 nt, Human
uucucugaggaag

SEQ ID NO: 1892743 - RNA, 13 nt, Human
uucucuccagccc

SEQ ID NO: 1892744 - RNA, 14 nt, Human
uucucuccagcccc

SEQ ID NO: 1892745 - RNA, 17 nt, Human
uucuccacucaguugca

SEQ ID NO: 1892746 - RNA, 18 nt, Human
uucucuccuguaccucuu

SEQ ID NO: 1892747 - RNA, 14 nt, Human
uucucuccuguacc

SEQ ID NO: 1892748 - RNA, 15 nt, Human
uucucuccagccccu

SEQ ID NO: 1892749 - RNA, 16 nt, Human
uucucuccagccccug

SEQ ID NO: 1892750 - RNA, 20 nt, Human
uucuggaauguaaucaaugu

SEQ ID NO: 1892751 - RNA, 16 nt, Human
uucuggaauguaauca

SEQ ID NO: 1892752 - RNA, 15 nt, Human
uucuggaauguaauc

SEQ ID NO: 1892753 - RNA, 22 nt, Human
uucuggaauguaaucaauguuu

SEQ ID NO: 1892754 - RNA, 19 nt, Human
uucugcuucagccucccga

SEQ ID NO: 1892755 - RNA, 14 nt, Human
uucugcuguucucu

SEQ ID NO: 1892756 - RNA, 16 nt, Human
uucugcuucagccucc

SEQ ID NO: 1892757 - RNA, 15 nt, Human
uucugcuucagccuc

SEQ ID NO: 1892758 - RNA, 14 nt, Human
uucugcuucagccu

SEQ ID NO: 1892759 - RNA, 18 nt, Human
uucugcuggaaacagacu

SEQ ID NO: 1892760 - RNA, 18 nt, Human
uucuguauuuuguuuuug

SEQ ID NO: 1892761 - RNA, 23 nt, Human
uucuuaguugcuguaugucucgu

SEQ ID NO: 1892762 - RNA, 15 nt, Human
uucuuaguugcugua

SEQ ID NO: 1892763 - RNA, 14 nt, Human
uucuuaguugcugu

SEQ ID NO: 1892764 - RNA, 21 nt, Human
uucuuccacaagagcccaggc

SEQ ID NO: 1892765 - RNA, 21 nt, Human
uucuuauacauuugauaaagu

SEQ ID NO: 1892766 - RNA, 13 nt, Human
uucuucccauucu

SEQ ID NO: 1892767 - RNA, 17 nt, Human
uucuucccauucuccau

SEQ ID NO: 1892768 - RNA, 21 nt, Human
uucuuguguguuuauugucaa

SEQ ID NO: 1892769 - RNA, 13 nt, Human
uucuuccucccuc

SEQ ID NO: 1892770 - RNA, 14 nt, Human
uucuuuccaaagua

SEQ ID NO: 1892771 - RNA, 19 nt, Human
uucuuucacaaaaaagaag

SEQ ID NO: 1892772 - RNA, 12 nt, Human
uucuuucagcca

SEQ ID NO: 1892773 - RNA, 23 nt, Human
uucuuuaaaaaacaacuauggau

SEQ ID NO: 1892774 - RNA, 16 nt, Human
uugaacuccuggccuc

SEQ ID NO: 1892775 - RNA, 15 nt, Human
uugaacuccuggccu

SEQ ID NO: 1892776 - RNA, 13 nt, Human
uugaaaagaggug

SEQ ID NO: 1892777 - RNA, 21 nt, Human
uugaaaagaggugugcaagag

SEQ ID NO: 1892778 - RNA, 14 nt, Human
uugaaaagaggugu

SEQ ID NO: 1892779 - RNA, 20 nt, Human
uugaaaaaccauuuugcugu

SEQ ID NO: 1892780 - RNA, 21 nt, Human
uucuuuccaaaguacacuguu

SEQ ID NO: 1892781 - RNA, 23 nt, Human
uugaaaacacuguucucugcccu

SEQ ID NO: 1892782 - RNA, 21 nt, Human
uugacucuuuugccauuaaac

SEQ ID NO: 1892783 - RNA, 15 nt, Human
uugacucuuuugcca

SEQ ID NO: 1892784 - RNA, 19 nt, Human
uugacucuggcaaagcuuu

SEQ ID NO: 1892785 - RNA, 20 nt, Human
uugacgccaucccagcccca

SEQ ID NO: 1892786 - RNA, 16 nt, Human
uugaccucugcagcaa

SEQ ID NO: 1892787 - RNA, 17 nt, Human
uugacgccaucccagcc

SEQ ID NO: 1892788 - RNA, 18 nt, Human
uugacgccaucccagccc

SEQ ID NO: 1892789 - RNA, 19 nt, Human
uugacgccaucccagcccc

SEQ ID NO: 1892790 - RNA, 14 nt, Human
uugacccacaagaa

SEQ ID NO: 1892791 - RNA, 17 nt, Human
uugaccgugaggccaga

SEQ ID NO: 1892792 - RNA, 17 nt, Human
uugacccacaagaaaug

SEQ ID NO: 1892793 - RNA, 21 nt, Human
uugaccucaggugauccaccc

SEQ ID NO: 1892794 - RNA, 20 nt, Human
uugaccgcgacuaauuucaa

SEQ ID NO: 1892795 - RNA, 15 nt, Human
uugaccucugcagca

SEQ ID NO: 1892796 - RNA, 14 nt, Human
uugaccucugcagc

SEQ ID NO: 1892797 - RNA, 16 nt, Human
uugacaaccaugagac

SEQ ID NO: 1892798 - RNA, 12 nt, Human
uugacaacaucu

SEQ ID NO: 1892799 - RNA, 13 nt, Human
uugacaacaucug

SEQ ID NO: 1892800 - RNA, 20 nt, Human
uugacaaagucaagccacau

SEQ ID NO: 1892801 - RNA, 19 nt, Human
uugacaaagucaagccaca

SEQ ID NO: 1892802 - RNA, 12 nt, Human
uugaauuuuaca

SEQ ID NO: 1892803 - RNA, 18 nt, Human
uugaacuggguacuugug

SEQ ID NO: 1892804 - RNA, 13 nt, Human
uugaacuuugacc

SEQ ID NO: 1892805 - RNA, 20 nt, Human
uugaacuguaccaugugcua

SEQ ID NO: 1892806 - RNA, 14 nt, Human
uugaauuguaagga

SEQ ID NO: 1892807 - RNA, 23 nt, Human
uugauauccucuuugagugaagc

SEQ ID NO: 1892808 - RNA, 18 nt, Human
uugauauaaauaaaacau

SEQ ID NO: 1892809 - RNA, 20 nt, Human
uugaugaccaaaguccuuuu

SEQ ID NO: 1892810 - RNA, 11 nt, Human
uugagccuggg

SEQ ID NO: 1892811 - RNA, 13 nt, Human
uugaggguugggc

SEQ ID NO: 1892812 - RNA, 16 nt, Human
uugaggguugggcugg

SEQ ID NO: 1892813 - RNA, 16 nt, Human
uugaugaucuuugcag

SEQ ID NO: 1892814 - RNA, 12 nt, Human
uugauucugcag

SEQ ID NO: 1892815 - RNA, 20 nt, Human
uugauucugcaguaaaucuu

SEQ ID NO: 1892816 - RNA, 13 nt, Human
uugauugauuuga

SEQ ID NO: 1892817 - RNA, 14 nt, Human
uugauugauuugaa

SEQ ID NO: 1892818 - RNA, 13 nt, Human
uugauuugaagaa

SEQ ID NO: 1892819 - RNA, 14 nt, Human
uugauuugaagaac

SEQ ID NO: 1892820 - RNA, 21 nt, Human
uugcaaaguaucccuacugua

SEQ ID NO: 1892821 - RNA, 12 nt, Human
uugcaaaucuug

SEQ ID NO: 1892822 - RNA, 15 nt, Human
uugcaaaucuugaaa

SEQ ID NO: 1892823 - RNA, 16 nt, Human
uugcaaaucuugaaau

SEQ ID NO: 1892824 - RNA, 17 nt, Human
uugcaaaucuugaaauu

SEQ ID NO: 1892825 - RNA, 18 nt, Human
uugauuugaagaacaugu

SEQ ID NO: 1892826 - RNA, 13 nt, Human
uugauuugcauug

SEQ ID NO: 1892827 - RNA, 14 nt, Human
uugauuugcauuga

SEQ ID NO: 1892828 - RNA, 15 nt, Human
uugauuugcauugaa

SEQ ID NO: 1892829 - RNA, 17 nt, Human
uugauuugcauugaaca

SEQ ID NO: 1892830 - RNA, 19 nt, Human
uugauuugcauugaacaca

SEQ ID NO: 1892831 - RNA, 11 nt, Human
uucacaaauaa

SEQ ID NO: 1892832 - RNA, 22 nt, Human
uucacaaacuuuuauacucuuu

SEQ ID NO: 1892833 - RNA, 15 nt, Human
uucacaaagcccaag

SEQ ID NO: 1892834 - RNA, 16 nt, Human
uucacaaacuuuuaua

SEQ ID NO: 1892835 - RNA, 17 nt, Human
uucacaaacuuuuauac

SEQ ID NO: 1892836 - RNA, 15 nt, Human
uucaauauccuuugc

SEQ ID NO: 1892837 - RNA, 11 nt, Human
uucaauauuua

SEQ ID NO: 1892838 - RNA, 21 nt, Human
uucaauaggaaaaacugauuu

SEQ ID NO: 1892839 - RNA, 22 nt, Human
uucaauaggaaaaacugauuuu

SEQ ID NO: 1892840 - RNA, 14 nt, Human
uucaccuuuguccc

SEQ ID NO: 1892841 - RNA, 19 nt, Human
uucaccuuuguccccaccg

SEQ ID NO: 1892842 - RNA, 20 nt, Human
uucaccuuuguccccaccgc

SEQ ID NO: 1892843 - RNA, 13 nt, Human
uucacccuuuucu

SEQ ID NO: 1892844 - RNA, 22 nt, Human
uucaccccucccuuucuccccu

SEQ ID NO: 1892845 - RNA, 20 nt, Human
uucaccccucccuuucuccc

SEQ ID NO: 1892846 - RNA, 18 nt, Human
uucaccccucccuuucuc

SEQ ID NO: 1892847 - RNA, 17 nt, Human
uucaccccucccuuucu

SEQ ID NO: 1892848 - RNA, 16 nt, Human
uucaccccucccuuuc

SEQ ID NO: 1892849 - RNA, 15 nt, Human
uucaccccucccuuu

SEQ ID NO: 1892850 - RNA, 22 nt, Human
uucacaagacccaaaaggcaga

SEQ ID NO: 1892851 - RNA, 13 nt, Human
uucacggaagagc

SEQ ID NO: 1892852 - RNA, 22 nt, Human
uucaccuuuguccccaccgcag

SEQ ID NO: 1892853 - RNA, 17 nt, Human
uucacggaagagccuug

SEQ ID NO: 1892854 - RNA, 14 nt, Human
uucagacagcugcc

SEQ ID NO: 1892855 - RNA, 15 nt, Human
uucagacagcugccu

SEQ ID NO: 1892856 - RNA, 16 nt, Human
uucagacagcugccug

SEQ ID NO: 1892857 - RNA, 17 nt, Human
uucagacagcugccugg

SEQ ID NO: 1892858 - RNA, 15 nt, Human
uucagauauaaaaga

SEQ ID NO: 1892859 - RNA, 14 nt, Human
uucagauauaaaag

SEQ ID NO: 1892860 - RNA, 19 nt, Human
uucagauauaaaagacuga

SEQ ID NO: 1892861 - RNA, 12 nt, Human
uucagauauaaa

SEQ ID NO: 1892862 - RNA, 19 nt, Human
uucaauaaaugucuguuga

SEQ ID NO: 1892863 - RNA, 18 nt, Human
uucaauaaaugucuguug

SEQ ID NO: 1892864 - RNA, 18 nt, Human
uucaaccagggauuguuu

SEQ ID NO: 1892865 - RNA, 22 nt, Human
uucaaccagggauuguuucugu

SEQ ID NO: 1892866 - RNA, 16 nt, Human
uucaaccaugaagucu

SEQ ID NO: 1892867 - RNA, 18 nt, Human
uucaaauguauuacagug

SEQ ID NO: 1892868 - RNA, 22 nt, Human
uuauuuuggaaaauaaauuauu

SEQ ID NO: 1892869 - RNA, 14 nt, Human
uuauuuucaccugu

SEQ ID NO: 1892870 - RNA, 18 nt, Human
uucaaaugcuguaacuuu

SEQ ID NO: 1892871 - RNA, 18 nt, Human
uuauuuuauuaugcauga

SEQ ID NO: 1892872 - RNA, 17 nt, Human
uuauuuuaauucaguug

SEQ ID NO: 1892873 - RNA, 13 nt, Human
uuauuuuaaaaga

SEQ ID NO: 1892874 - RNA, 16 nt, Human
uuauuagggagaaaau

SEQ ID NO: 1892875 - RNA, 17 nt, Human
uuauuagggagaaaauu

SEQ ID NO: 1892876 - RNA, 18 nt, Human
uuauuagggagaaaauuc

SEQ ID NO: 1892877 - RNA, 19 nt, Human
uuauuagggagaaaauuca

SEQ ID NO: 1892878 - RNA, 20 nt, Human
uuauuagggagaaaauucaa

SEQ ID NO: 1892879 - RNA, 19 nt, Human
uuauuucuuaaacaaaugu

SEQ ID NO: 1892880 - RNA, 23 nt, Human
uuauuagggagaaaauucaauug

SEQ ID NO: 1892881 - RNA, 23 nt, Human
uucaguuauuauauuuacaaaug

SEQ ID NO: 1892882 - RNA, 20 nt, Human
uucauaaauaaaguuuguug

SEQ ID NO: 1892883 - RNA, 15 nt, Human
uucauaaccuagccu

SEQ ID NO: 1892884 - RNA, 15 nt, Human
uucauaaagaauugu

SEQ ID NO: 1892885 - RNA, 15 nt, Human
uucauccuccucaga

SEQ ID NO: 1892886 - RNA, 19 nt, Human
uucauccuccucagaucuu

SEQ ID NO: 1892887 - RNA, 19 nt, Human
uucaucugcucuccuuccu

SEQ ID NO: 1892888 - RNA, 16 nt, Human
uucaucugcucuccuu

SEQ ID NO: 1892889 - RNA, 15 nt, Human
uucaucugcucuccu

SEQ ID NO: 1892890 - RNA, 13 nt, Human
uucaucugcucuc

SEQ ID NO: 1892891 - RNA, 23 nt, Human
uucaucgaaucuacuaauuccac

SEQ ID NO: 1892892 - RNA, 20 nt, Human
uucaucgaaucuacuaauuc

SEQ ID NO: 1892893 - RNA, 18 nt, Human
uucaucgaaucuacuaau

SEQ ID NO: 1892894 - RNA, 16 nt, Human
uucaguggcagcugcu

SEQ ID NO: 1892895 - RNA, 15 nt, Human
uucaguggcagcugc

SEQ ID NO: 1892896 - RNA, 17 nt, Human
uucaguggcagcugcuu

SEQ ID NO: 1892897 - RNA, 12 nt, Human
uucaguguacau

SEQ ID NO: 1892898 - RNA, 13 nt, Human
uucaguguacaug

SEQ ID NO: 1892899 - RNA, 15 nt, Human
uucagcuccagcuca

SEQ ID NO: 1892900 - RNA, 12 nt, Human
uucagcuccagc

SEQ ID NO: 1892901 - RNA, 22 nt, Human
uucagcuccagcucaccagccc

SEQ ID NO: 1892902 - RNA, 14 nt, Human
uucaguggcagcug

SEQ ID NO: 1892903 - RNA, 13 nt, Human
uucagcuugggga

SEQ ID NO: 1892904 - RNA, 22 nt, Human
uucagcuuguaaauagcucagg

SEQ ID NO: 1892905 - RNA, 11 nt, Human
uuccagaaucc

SEQ ID NO: 1892906 - RNA, 14 nt, Human
uuccagaaugcugu

SEQ ID NO: 1892907 - RNA, 15 nt, Human
uuccagaaugcugua

SEQ ID NO: 1892908 - RNA, 19 nt, Human
uuccagaaugcuguacauc

SEQ ID NO: 1892909 - RNA, 16 nt, Human
uuccagaaugcuguac

SEQ ID NO: 1892910 - RNA, 18 nt, Human
uuccagaaugcuguacau

SEQ ID NO: 1892911 - RNA, 19 nt, Human
uuccaacccucaucaccaa

SEQ ID NO: 1892912 - RNA, 13 nt, Human
uuccagagccuca

SEQ ID NO: 1892913 - RNA, 20 nt, Human
uuccagacuuccuugagaca

SEQ ID NO: 1892914 - RNA, 14 nt, Human
uuccauggacuuug

SEQ ID NO: 1892915 - RNA, 15 nt, Human
uuccauggacuuugu

SEQ ID NO: 1892916 - RNA, 13 nt, Human
uuccaaaguacac

SEQ ID NO: 1892917 - RNA, 22 nt, Human
uuccaaagaguagaauugcauu

SEQ ID NO: 1892918 - RNA, 18 nt, Human
uucauuuuuuuccaggcu

SEQ ID NO: 1892919 - RNA, 16 nt, Human
uuccaaaguacacugu

SEQ ID NO: 1892920 - RNA, 16 nt, Human
uuccaacacugauuuc

SEQ ID NO: 1892921 - RNA, 22 nt, Human
uuccaacacugauuuccccuuu

SEQ ID NO: 1892922 - RNA, 21 nt, Human
uucauuuuuguuauccuuuuu

SEQ ID NO: 1892923 - RNA, 17 nt, Human
uucauuuuuuuccaggc

SEQ ID NO: 1892924 - RNA, 14 nt, Human
uucauuuuuuucca

SEQ ID NO: 1892925 - RNA, 21 nt, Human
uucaucugcucuccuuccugg

SEQ ID NO: 1892926 - RNA, 13 nt, Human
uuauaauauacua

SEQ ID NO: 1892927 - RNA, 18 nt, Human
uuauaauaauguuaacau

SEQ ID NO: 1892928 - RNA, 15 nt, Human
uuauaauaauguuaa

SEQ ID NO: 1892929 - RNA, 15 nt, Human
uuauaaugaaugaaa

SEQ ID NO: 1892930 - RNA, 12 nt, Human
uuauaauuuaaa

SEQ ID NO: 1892931 - RNA, 12 nt, Human
uuauaauuuuaa

SEQ ID NO: 1892932 - RNA, 17 nt, Human
uuauaauuuuaaauguu

SEQ ID NO: 1892933 - RNA, 21 nt, Human
uuauaauuuuaaauguuuuuu

SEQ ID NO: 1892934 - RNA, 21 nt, Human
ugugaaaagaaaaaugagccu

SEQ ID NO: 1892935 - RNA, 17 nt, Human
ugugaaaagaaaaauga

SEQ ID NO: 1892936 - RNA, 13 nt, Human
ugugaaaagaaaa

SEQ ID NO: 1892937 - RNA, 15 nt, Human
ugugaaaagaaaaau

SEQ ID NO: 1892938 - RNA, 16 nt, Human
uuauauuaugaagcuu

SEQ ID NO: 1892939 - RNA, 16 nt, Human
uuauauguacaugaga

SEQ ID NO: 1892940 - RNA, 19 nt, Human
uuauauguacaugagaagg

SEQ ID NO: 1892941 - RNA, 16 nt, Human
uuauaugaagauaagu

SEQ ID NO: 1892942 - RNA, 13 nt, Human
uuauacauaaaca

SEQ ID NO: 1892943 - RNA, 11 nt, Human
uuauacauaaa

SEQ ID NO: 1892944 - RNA, 23 nt, Human
uuauaucuauauuuuacauaaau

SEQ ID NO: 1892945 - RNA, 19 nt, Human
uuauaucuauauuuuacau

SEQ ID NO: 1892946 - RNA, 19 nt, Human
uuauacaaauuagaaaaug

SEQ ID NO: 1892947 - RNA, 16 nt, Human
uuauaauuuuuuucaa

SEQ ID NO: 1892948 - RNA, 16 nt, Human
uuauauuuacaaaugg

SEQ ID NO: 1892949 - RNA, 24 nt, Human
uuauccuuuuuuaaaaguaaaugu

SEQ ID NO: 1892950 - RNA, 19 nt, Human
uuaucuaauaccucugugu

SEQ ID NO: 1892951 - RNA, 21 nt, Human
uuaucuaaaagaaaugucuau

SEQ ID NO: 1892952 - RNA, 15 nt, Human
uuaucuaaaagaaau

SEQ ID NO: 1892953 - RNA, 20 nt, Human
uuaucuaauaccucugugug

SEQ ID NO: 1892954 - RNA, 11 nt, Human
uuaucuaauuu

SEQ ID NO: 1892955 - RNA, 17 nt, Human
uuaucuaauuuauaaaa

SEQ ID NO: 1892956 - RNA, 16 nt, Human
uuaucuaauuuauaaa

SEQ ID NO: 1892957 - RNA, 14 nt, Human
uuaucuagauacug

SEQ ID NO: 1892958 - RNA, 19 nt, Human
uuaucuauacauaucuuua

SEQ ID NO: 1892959 - RNA, 14 nt, Human
uuaucuugaauaau

SEQ ID NO: 1892960 - RNA, 16 nt, Human
uuaucuugaauaaugu

SEQ ID NO: 1892961 - RNA, 23 nt, Human
uuauuaaaaaucucaaauuucua

SEQ ID NO: 1892962 - RNA, 19 nt, Human
uuauuaaaugcccagcccc

SEQ ID NO: 1892963 - RNA, 21 nt, Human
uuauuaaaugcccagccccuu

SEQ ID NO: 1892964 - RNA, 22 nt, Human
uuauguuuuuuaaaauauuuau

SEQ ID NO: 1892965 - RNA, 20 nt, Human
uuauuaaauacaaaacuucc

SEQ ID NO: 1892966 - RNA, 16 nt, Human
uuauuaaauggaaacu

SEQ ID NO: 1892967 - RNA, 13 nt, Human
uuauuaaucacua

SEQ ID NO: 1892968 - RNA, 15 nt, Human
uuauuaccucugaua

SEQ ID NO: 1892969 - RNA, 12 nt, Human
uuauuaccucug

SEQ ID NO: 1892970 - RNA, 13 nt, Human
uuauuaccucuga

SEQ ID NO: 1892971 - RNA, 19 nt, Human
uuauuacccccuccuucag

SEQ ID NO: 1892972 - RNA, 20 nt, Human
uuauuacccccuccuucaga

SEQ ID NO: 1892973 - RNA, 22 nt, Human
uuauuacccccuccuucagaca

SEQ ID NO: 1892974 - RNA, 19 nt, Human
uuaugauuuuuaaagaaaa

SEQ ID NO: 1892975 - RNA, 16 nt, Human
uuaugauuuuuaaaga

SEQ ID NO: 1892976 - RNA, 17 nt, Human
uuauggaacacucugag

SEQ ID NO: 1892977 - RNA, 21 nt, Human
uuauggacaaugacccagugg

SEQ ID NO: 1892978 - RNA, 14 nt, Human
uuauggaauugauu

SEQ ID NO: 1892979 - RNA, 19 nt, Human
uuauggaauugauuugcau

SEQ ID NO: 1892980 - RNA, 18 nt, Human
uuauggaacacucugaga

SEQ ID NO: 1892981 - RNA, 20 nt, Human
uuauggaacacucugagacu

SEQ ID NO: 1892982 - RNA, 17 nt, Human
uuauggcuuuugugcau

SEQ ID NO: 1892983 - RNA, 18 nt, Human
uuauggcuuuugugcauu

SEQ ID NO: 1892984 - RNA, 17 nt, Human
uuauguugcauagaaua

SEQ ID NO: 1892985 - RNA, 14 nt, Human
uuauggcacaucag

SEQ ID NO: 1892986 - RNA, 20 nt, Human
uuauggaauugauuugcauu

SEQ ID NO: 1892987 - RNA, 21 nt, Human
uuauggaauugauuugcauug

SEQ ID NO: 1892988 - RNA, 23 nt, Human
uuauggaauugauuugcauugaa

SEQ ID NO: 1892989 - RNA, 16 nt, Human
uuauggcuuuugugca

SEQ ID NO: 1892990 - RNA, 15 nt, Human
aaaaaauauuuuccu

SEQ ID NO: 1892991 - RNA, 19 nt, Human
aaaaacccagcaacagaaa

SEQ ID NO: 1892992 - RNA, 21 nt, Human
acugugagcucccaggugcag

SEQ ID NO: 1892993 - RNA, 19 nt, Human
acugugacccccagcuccg

SEQ ID NO: 1892994 - RNA, 21 nt, Human
acugugacccccagcuccggc

SEQ ID NO: 1892995 - RNA, 16 nt, Human
acugugaaggacccuu

SEQ ID NO: 1892996 - RNA, 15 nt, Human
acugugaaggacccu

SEQ ID NO: 1892997 - RNA, 18 nt, Human
acugguuccauggccucu

SEQ ID NO: 1892998 - RNA, 17 nt, Human
acuggaagcacagcuuc

SEQ ID NO: 1892999 - RNA, 19 nt, Human
acuggaagcacagcuucau

SEQ ID NO: 1893000 - RNA, 16 nt, Human
acuggaagcuaauuug

SEQ ID NO: 1893001 - RNA, 21 nt, Human
acugcccauggacaggcuggc

SEQ ID NO: 1893002 - RNA, 19 nt, Human
acugcccauggacaggcug

SEQ ID NO: 1893003 - RNA, 18 nt, Human
acugguaggaaacuaggu

SEQ ID NO: 1893004 - RNA, 20 nt, Human
acugguaggaacuugagaac

SEQ ID NO: 1893005 - RNA, 14 nt, Human
acugguauuuuauc

SEQ ID NO: 1893006 - RNA, 15 nt, Human
acuggagaaaaugga

SEQ ID NO: 1893007 - RNA, 19 nt, Human
acuggaagcuaauuugcau

SEQ ID NO: 1893008 - RNA, 15 nt, Human
acuggagccaugggc

SEQ ID NO: 1893009 - RNA, 20 nt, Human
acucugucucaguccaugaa

SEQ ID NO: 1893010 - RNA, 18 nt, Human
acucugucucaguccaug

SEQ ID NO: 1893011 - RNA, 15 nt, Human
acucugucuaaaaaa

SEQ ID NO: 1893012 - RNA, 22 nt, Human
acuguuugccuucuacuuuuaa

SEQ ID NO: 1893013 - RNA, 21 nt, Human
acuguuugccuucuacuuuua

SEQ ID NO: 1893014 - RNA, 12 nt, Human
acuucagacaua

SEQ ID NO: 1893015 - RNA, 17 nt, Human
acuucuggguggggcag

SEQ ID NO: 1893016 - RNA, 16 nt, Human
acuucuggguggggca

SEQ ID NO: 1893017 - RNA, 19 nt, Human
acuucacgcuuucagcgaa

SEQ ID NO: 1893018 - RNA, 20 nt, Human
acuuggggagauggaguucu

SEQ ID NO: 1893019 - RNA, 21 nt, Human
acuuggggaguuaagaccugg

SEQ ID NO: 1893020 - RNA, 15 nt, Human
acuugggccacugug

SEQ ID NO: 1893021 - RNA, 14 nt, Human
acuugggccacugu

SEQ ID NO: 1893022 - RNA, 13 nt, Human
acuucuugaaggu

SEQ ID NO: 1893023 - RNA, 16 nt, Human
acuucuugaaggugcu

SEQ ID NO: 1893024 - RNA, 16 nt, Human
acuucuuauggaauug

SEQ ID NO: 1893025 - RNA, 17 nt, Human
acuucuuauggaauuga

SEQ ID NO: 1893026 - RNA, 20 nt, Human
acuucuuauggaauugauuu

SEQ ID NO: 1893027 - RNA, 21 nt, Human
acuucuuauggaauugauuug

SEQ ID NO: 1893028 - RNA, 23 nt, Human
acuucuuauggaauugauuugca

SEQ ID NO: 1893029 - RNA, 12 nt, Human
acuucuugaagg

SEQ ID NO: 1893030 - RNA, 16 nt, Human
acuugguuuuuaaaaa

SEQ ID NO: 1893031 - RNA, 23 nt, Human
acuuggggaguuaagaccuggca

SEQ ID NO: 1893032 - RNA, 22 nt, Human
acugugcugagucugaaggcug

SEQ ID NO: 1893033 - RNA, 20 nt, Human
acugugcugagucugaaggc

SEQ ID NO: 1893034 - RNA, 23 nt, Human
acuuuaucuaauaccucugugug

SEQ ID NO: 1893035 - RNA, 22 nt, Human
acuuuaucuugaauaauguaag

SEQ ID NO: 1893036 - RNA, 12 nt, Human
acuuuauuucca

SEQ ID NO: 1893037 - RNA, 21 nt, Human
acuuuauuuccaaguuguuca

SEQ ID NO: 1893038 - RNA, 22 nt, Human
acuuuauuuucuauaauuuaaa

SEQ ID NO: 1893039 - RNA, 16 nt, Human
acuuuguucuggcucu

SEQ ID NO: 1893040 - RNA, 17 nt, Human
acuuuguucuggcucuu

SEQ ID NO: 1893041 - RNA, 20 nt, Human
acuuuguucuggcucuucca

SEQ ID NO: 1893042 - RNA, 19 nt, Human
acuuuguucuggcucuucc

SEQ ID NO: 1893043 - RNA, 12 nt, Human
acuuuuaugaua

SEQ ID NO: 1893044 - RNA, 16 nt, Human
acuuuuaugauacuug

SEQ ID NO: 1893045 - RNA, 13 nt, Human
acuuuuauaaacu

SEQ ID NO: 1893046 - RNA, 16 nt, Human
agaaaaucaggcuggc

SEQ ID NO: 1893047 - RNA, 19 nt, Human
agaaaauaguggugugauu

SEQ ID NO: 1893048 - RNA, 15 nt, Human
agaaaauaccaagga

SEQ ID NO: 1893049 - RNA, 14 nt, Human
acuuuucuuugugg

SEQ ID NO: 1893050 - RNA, 14 nt, Human
agaaaauaacaaua

SEQ ID NO: 1893051 - RNA, 20 nt, Human
acuuuucauaaccuagccuu

SEQ ID NO: 1893052 - RNA, 23 nt, Human
acuuuuaugauacuugaaaauua

SEQ ID NO: 1893053 - RNA, 16 nt, Human
acuuuucuuucagcca

SEQ ID NO: 1893054 - RNA, 19 nt, Human
acuuuucauauuugcacua

SEQ ID NO: 1893055 - RNA, 19 nt, Human
agaaaauggaaccaggcuu

SEQ ID NO: 1893056 - RNA, 22 nt, Human
agaaaauggaaccaggcuugga

SEQ ID NO: 1893057 - RNA, 20 nt, Human
agaaaauggaaccaggcuug

SEQ ID NO: 1893058 - RNA, 16 nt, Human
agaaaggauaaaguug

SEQ ID NO: 1893059 - RNA, 14 nt, Human
agaaaggggagccc

SEQ ID NO: 1893060 - RNA, 15 nt, Human
agaaaggggagccca

SEQ ID NO: 1893061 - RNA, 16 nt, Human
agaaaggggagcccac

SEQ ID NO: 1893062 - RNA, 17 nt, Human
agaaaggggagcccacu

SEQ ID NO: 1893063 - RNA, 22 nt, Human
agaaaguacuucuccacccugc

SEQ ID NO: 1893064 - RNA, 20 nt, Human
agaaaggggcaguuuaaagc

SEQ ID NO: 1893065 - RNA, 23 nt, Human
agaaaguacuucuccacccugcu

SEQ ID NO: 1893066 - RNA, 21 nt, Human
agaaagguuuugagcaugggu

SEQ ID NO: 1893067 - RNA, 19 nt, Human
agaaagguuuugagcaugg

SEQ ID NO: 1893068 - RNA, 12 nt, Human
agaaaguuuccc

SEQ ID NO: 1893069 - RNA, 20 nt, Human
agaaaguuuccccaccagug

SEQ ID NO: 1893070 - RNA, 17 nt, Human
agaaauaaaaggaagcc

SEQ ID NO: 1893071 - RNA, 18 nt, Human
agaaauaaaaggaagcca

SEQ ID NO: 1893072 - RNA, 21 nt, Human
agaaauaaaguuugcuuagaa

SEQ ID NO: 1893073 - RNA, 14 nt, Human
agaaaguucaugcu

SEQ ID NO: 1893074 - RNA, 23 nt, Human
agaaagugugcuuuaugcugaaa

SEQ ID NO: 1893075 - RNA, 15 nt, Human
agaaagugugcuuua

SEQ ID NO: 1893076 - RNA, 16 nt, Human
agaaagugugcuuuau

SEQ ID NO: 1893077 - RNA, 22 nt, Human
agaaagugugcuuuaugcugaa

SEQ ID NO: 1893078 - RNA, 14 nt, Human
acgccacagcccag

SEQ ID NO: 1893079 - RNA, 15 nt, Human
acgccacagcccagc

SEQ ID NO: 1893080 - RNA, 20 nt, Human
acgccacagcccagccacgg

SEQ ID NO: 1893081 - RNA, 11 nt, Human
acgcugugcug

SEQ ID NO: 1893082 - RNA, 12 nt, Human
acgcugugcugc

SEQ ID NO: 1893083 - RNA, 14 nt, Human
acgcugugcugccc

SEQ ID NO: 1893084 - RNA, 14 nt, Human
acgucugacaggca

SEQ ID NO: 1893085 - RNA, 13 nt, Human
acgucugacaggc

SEQ ID NO: 1893086 - RNA, 14 nt, Human
acggaacucaaaua

SEQ ID NO: 1893087 - RNA, 17 nt, Human
acgcuuugggagaaugu

SEQ ID NO: 1893088 - RNA, 12 nt, Human
acgcuuugauuc

SEQ ID NO: 1893089 - RNA, 13 nt, Human
acgcuuugauuca

SEQ ID NO: 1893090 - RNA, 14 nt, Human
acgcuuugauucau

SEQ ID NO: 1893091 - RNA, 16 nt, Human
acgcuuugauucauag

SEQ ID NO: 1893092 - RNA, 19 nt, Human
acgcuuucagcgaaugaca

SEQ ID NO: 1893093 - RNA, 11 nt, Human
acgcuuugauu

SEQ ID NO: 1893094 - RNA, 17 nt, Human
acgcuuucuagcuguug

SEQ ID NO: 1893095 - RNA, 11 nt, Human
acgugaguccu

SEQ ID NO: 1893096 - RNA, 16 nt, Human
acuaagaauucaaacu

SEQ ID NO: 1893097 - RNA, 18 nt, Human
acuaagaauucaaacugg

SEQ ID NO: 1893098 - RNA, 22 nt, Human
acuaagcagaggaggggccgcu

SEQ ID NO: 1893099 - RNA, 21 nt, Human
acuaaggggcccggccagcca

SEQ ID NO: 1893100 - RNA, 22 nt, Human
acuaaggggcccggccagccau

SEQ ID NO: 1893101 - RNA, 15 nt, Human
acuaauuccacaccu

SEQ ID NO: 1893102 - RNA, 19 nt, Human
acuaagcagaggaggggcc

SEQ ID NO: 1893103 - RNA, 12 nt, Human
acuaaggggccc

SEQ ID NO: 1893104 - RNA, 20 nt, Human
acuaauuucaaaaugcuuuu

SEQ ID NO: 1893105 - RNA, 16 nt, Human
acuaauuucaaaaugc

SEQ ID NO: 1893106 - RNA, 19 nt, Human
acuaauuucaaaaugcuuu

SEQ ID NO: 1893107 - RNA, 23 nt, Human
acuaauuccacaccuuuuauuga

SEQ ID NO: 1893108 - RNA, 14 nt, Human
acuaauucuugcau

SEQ ID NO: 1893109 - RNA, 22 nt, Human
acuaauucuugcauauuuugua

SEQ ID NO: 1893110 - RNA, 14 nt, Human
acuaauuucaaaau

SEQ ID NO: 1893111 - RNA, 18 nt, Human
accuuggcugcagggagu

SEQ ID NO: 1893112 - RNA, 17 nt, Human
accuuggcugcagggag

SEQ ID NO: 1893113 - RNA, 17 nt, Human
accuguuagcagacagg

SEQ ID NO: 1893114 - RNA, 13 nt, Human
accuuucccaucu

SEQ ID NO: 1893115 - RNA, 18 nt, Human
accuuucccaucuuccaa

SEQ ID NO: 1893116 - RNA, 15 nt, Human
accuuuaagagaaau

SEQ ID NO: 1893117 - RNA, 19 nt, Human
accuuucauaaucuuugcu

SEQ ID NO: 1893118 - RNA, 20 nt, Human
accuuucauaaucuuugcuu

SEQ ID NO: 1893119 - RNA, 21 nt, Human
accuuucauaaucuuugcuuu

SEQ ID NO: 1893120 - RNA, 16 nt, Human
accugucccccugaca

SEQ ID NO: 1893121 - RNA, 12 nt, Human
accugucccccu

SEQ ID NO: 1893122 - RNA, 15 nt, Human
accugucccccugac

SEQ ID NO: 1893123 - RNA, 17 nt, Human
accugucuccuggcggu

SEQ ID NO: 1893124 - RNA, 13 nt, Human
accugccucagga

SEQ ID NO: 1893125 - RNA, 15 nt, Human
accucugcagcaaua

SEQ ID NO: 1893126 - RNA, 20 nt, Human
accucugcagcaauaaagca

SEQ ID NO: 1893127 - RNA, 18 nt, Human
accucugcagcaauaaag

SEQ ID NO: 1893128 - RNA, 21 nt, Human
accucugcagcaauaaagcag

SEQ ID NO: 1893129 - RNA, 16 nt, Human
acuagugcugaagcuu

SEQ ID NO: 1893130 - RNA, 15 nt, Human
acuagugcugaagcu

SEQ ID NO: 1893131 - RNA, 14 nt, Human
acuagugcugaagc

SEQ ID NO: 1893132 - RNA, 19 nt, Human
acuagugcugaagcuuauu

SEQ ID NO: 1893133 - RNA, 18 nt, Human
acuagugcugaagcuuau

SEQ ID NO: 1893134 - RNA, 17 nt, Human
acuagugcugaagcuua

SEQ ID NO: 1893135 - RNA, 18 nt, Human
acuauuuuucagaaucuc

SEQ ID NO: 1893136 - RNA, 14 nt, Human
acuauuuuucagaa

SEQ ID NO: 1893137 - RNA, 13 nt, Human
acucaaaagcugg

SEQ ID NO: 1893138 - RNA, 18 nt, Human
acucaaaagcugggcagg

SEQ ID NO: 1893139 - RNA, 19 nt, Human
acucaguccauagcagaga

SEQ ID NO: 1893140 - RNA, 13 nt, Human
acucaggaagaac

SEQ ID NO: 1893141 - RNA, 16 nt, Human
acucaggcccaaagcc

SEQ ID NO: 1893142 - RNA, 21 nt, Human
acucagcccucauuggcucuu

SEQ ID NO: 1893143 - RNA, 17 nt, Human
acucagcccucauuggc

SEQ ID NO: 1893144 - RNA, 18 nt, Human
acucaaaugcucagacca

SEQ ID NO: 1893145 - RNA, 21 nt, Human
acucaaaugcucagaccagcu

SEQ ID NO: 1893146 - RNA, 23 nt, Human
acucaaaugcucagaccagcucu

SEQ ID NO: 1893147 - RNA, 17 nt, Human
acucaaauggggccaga

SEQ ID NO: 1893148 - RNA, 20 nt, Human
acucaaauggggccagaucc

SEQ ID NO: 1893149 - RNA, 21 nt, Human
acucaaauggggccagaucca

SEQ ID NO: 1893150 - RNA, 22 nt, Human
acucaaauggggccagauccag

SEQ ID NO: 1893151 - RNA, 23 nt, Human
acucaaauggggccagauccagc

SEQ ID NO: 1893152 - RNA, 15 nt, Human
acuagauggugcuga

SEQ ID NO: 1893153 - RNA, 16 nt, Human
acuagauggugcugag

SEQ ID NO: 1893154 - RNA, 18 nt, Human
acuagauggugcugagaa

SEQ ID NO: 1893155 - RNA, 19 nt, Human
acucugucgcccagucugg

SEQ ID NO: 1893156 - RNA, 23 nt, Human
acucuaucaaguauuauaccuuu

SEQ ID NO: 1893157 - RNA, 20 nt, Human
acucuagcugggggugggcc

SEQ ID NO: 1893158 - RNA, 17 nt, Human
acucuauguucuaagaa

SEQ ID NO: 1893159 - RNA, 21 nt, Human
acucuaucaaguauuauaccu

SEQ ID NO: 1893160 - RNA, 15 nt, Human
acucuagggaaaaac

SEQ ID NO: 1893161 - RNA, 17 nt, Human
acucuagggaaaaacca

SEQ ID NO: 1893162 - RNA, 15 nt, Human
acucauauuuucaug

SEQ ID NO: 1893163 - RNA, 13 nt, Human
acucauauuacug

SEQ ID NO: 1893164 - RNA, 15 nt, Human
acucauauuacuggu

SEQ ID NO: 1893165 - RNA, 22 nt, Human
acucauauuacugguaggaacu

SEQ ID NO: 1893166 - RNA, 17 nt, Human
acaagaaaguuucccca

SEQ ID NO: 1893167 - RNA, 15 nt, Human
acaagaaaguuuccc

SEQ ID NO: 1893168 - RNA, 15 nt, Human
acaacuacagaaaaa

SEQ ID NO: 1893169 - RNA, 19 nt, Human
acaacuacagaaaaaccag

SEQ ID NO: 1893170 - RNA, 20 nt, Human
acaacuacagaaaaaccaga

SEQ ID NO: 1893171 - RNA, 21 nt, Human
acaagaaaguuuccccaccag

SEQ ID NO: 1893172 - RNA, 13 nt, Human
acaagaaaugaaa

SEQ ID NO: 1893173 - RNA, 17 nt, Human
acaaggauugcuacugu

SEQ ID NO: 1893174 - RNA, 12 nt, Human
acaaggcaaggc

SEQ ID NO: 1893175 - RNA, 14 nt, Human
acaaggcaaggcug

SEQ ID NO: 1893176 - RNA, 22 nt, Human
acaaaauguaggguuauaauaa

SEQ ID NO: 1893177 - RNA, 14 nt, Human
acaaaauuucuauu

SEQ ID NO: 1893178 - RNA, 19 nt, Human
acaaacaaaauuucuauua

SEQ ID NO: 1893179 - RNA, 18 nt, Human
acaaacaaaauuucuauu

SEQ ID NO: 1893180 - RNA, 16 nt, Human
acaaacaaaauuucua

SEQ ID NO: 1893181 - RNA, 16 nt, Human
acaaacaaacaaacaa

SEQ ID NO: 1893182 - RNA, 15 nt, Human
acaaggcaaggcugu

SEQ ID NO: 1893183 - RNA, 18 nt, Human
acaaggccaucugggcuc

SEQ ID NO: 1893184 - RNA, 17 nt, Human
acacgcgugcacacacc

SEQ ID NO: 1893185 - RNA, 15 nt, Human
acacgcgugcacaca

SEQ ID NO: 1893186 - RNA, 14 nt, Human
acaccaagcacagc

SEQ ID NO: 1893187 - RNA, 13 nt, Human
acacagcucuucu

SEQ ID NO: 1893188 - RNA, 11 nt, Human
acacagcucuu

SEQ ID NO: 1893189 - RNA, 22 nt, Human
acacauuuuauuuuauuaugca

SEQ ID NO: 1893190 - RNA, 21 nt, Human
acacauuuuauuuuauuaugc

SEQ ID NO: 1893191 - RNA, 22 nt, Human
acacauuuuuuaaaugcaccug

SEQ ID NO: 1893192 - RNA, 20 nt, Human
acacauuuuuuaaaugcacc

SEQ ID NO: 1893193 - RNA, 14 nt, Human
acacauuuuucaga

SEQ ID NO: 1893194 - RNA, 12 nt, Human
acacauuuuucu

SEQ ID NO: 1893195 - RNA, 19 nt, Human
acacagaggcugccucucc

SEQ ID NO: 1893196 - RNA, 20 nt, Human
acacagcucuguccugggag

SEQ ID NO: 1893197 - RNA, 21 nt, Human
acacagacuguugucccugca

SEQ ID NO: 1893198 - RNA, 19 nt, Human
acagagugagacucugucu

SEQ ID NO: 1893199 - RNA, 23 nt, Human
acagagucucacuguugcccagg

SEQ ID NO: 1893200 - RNA, 17 nt, Human
acagaggcuauuguccc

SEQ ID NO: 1893201 - RNA, 15 nt, Human
acagagugagacucu

SEQ ID NO: 1893202 - RNA, 14 nt, Human
acagaggggguggc

SEQ ID NO: 1893203 - RNA, 19 nt, Human
acagccaacuauggccugu

SEQ ID NO: 1893204 - RNA, 17 nt, Human
acagccaacuauggccu

SEQ ID NO: 1893205 - RNA, 24 nt, Human
acagccaacacgcaccugccucag

SEQ ID NO: 1893206 - RNA, 20 nt, Human
acagccaacacgcaccugcc

SEQ ID NO: 1893207 - RNA, 21 nt, Human
acagccaacacgcaccugccu

SEQ ID NO: 1893208 - RNA, 22 nt, Human
acagccaacacgcaccugccuc

SEQ ID NO: 1893209 - RNA, 15 nt, Human
acagaggcagcccca

SEQ ID NO: 1893210 - RNA, 14 nt, Human
acagaggcagcccc

SEQ ID NO: 1893211 - RNA, 14 nt, Human
acagacacaggccc

SEQ ID NO: 1893212 - RNA, 13 nt, Human
acagacacaggcc

SEQ ID NO: 1893213 - RNA, 23 nt, Human
acagaggcagccccauucugccu

SEQ ID NO: 1893214 - RNA, 19 nt, Human
acagaggcagccccauucu

SEQ ID NO: 1893215 - RNA, 15 nt, Human
acagacacaggcccg

SEQ ID NO: 1893216 - RNA, 15 nt, Human
acagaggccccagcc

SEQ ID NO: 1893217 - RNA, 16 nt, Human
acagaggccccagccu

SEQ ID NO: 1893218 - RNA, 17 nt, Human
acagaggccccagccuc

SEQ ID NO: 1893219 - RNA, 18 nt, Human
acagaggccccagccucc

SEQ ID NO: 1893220 - RNA, 22 nt, Human
acagaggccccagccucccuga

SEQ ID NO: 1893221 - RNA, 11 nt, Human
acagacacagg

SEQ ID NO: 1893222 - RNA, 13 nt, Human
acagacaaagcgu

SEQ ID NO: 1893223 - RNA, 15 nt, Human
acacuguacugcaau

SEQ ID NO: 1893224 - RNA, 15 nt, Human
acacugcauguuugu

SEQ ID NO: 1893225 - RNA, 14 nt, Human
acacugcauguuug

SEQ ID NO: 1893226 - RNA, 23 nt, Human
acacugcuuguguuuuuaacuca

SEQ ID NO: 1893227 - RNA, 16 nt, Human
acacuggacuccggcc

SEQ ID NO: 1893228 - RNA, 19 nt, Human
acacugcuuguguuuuuaa

SEQ ID NO: 1893229 - RNA, 14 nt, Human
acacugggaaacag

SEQ ID NO: 1893230 - RNA, 17 nt, Human
acagccacggccaggcc

SEQ ID NO: 1893231 - RNA, 16 nt, Human
acagccacggccaggc

SEQ ID NO: 1893232 - RNA, 15 nt, Human
acagccacggccagg

SEQ ID NO: 1893233 - RNA, 18 nt, Human
acagccacggccaggcca

SEQ ID NO: 1893234 - RNA, 18 nt, Human
acagcucuucuccaggcu

SEQ ID NO: 1893235 - RNA, 15 nt, Human
acaggaucagucuga

SEQ ID NO: 1893236 - RNA, 17 nt, Human
acagcucuucuccaggc

SEQ ID NO: 1893237 - RNA, 16 nt, Human
acagcucuucuccagg

SEQ ID NO: 1893238 - RNA, 12 nt, Human
acaggcaagcac

SEQ ID NO: 1893239 - RNA, 18 nt, Human
acaggcaaugcuggcugu

SEQ ID NO: 1893240 - RNA, 21 nt, Human
acaggaugaugacuauggaaa

SEQ ID NO: 1893241 - RNA, 15 nt, Human
acaggaugcuuuggu

SEQ ID NO: 1893242 - RNA, 14 nt, Human
acaggauuauugga

SEQ ID NO: 1893243 - RNA, 21 nt, Human
acaugugacacauaugcaccu

SEQ ID NO: 1893244 - RNA, 18 nt, Human
acaugugcacaugcacgu

SEQ ID NO: 1893245 - RNA, 16 nt, Human
acaugugcacaugcac

SEQ ID NO: 1893246 - RNA, 16 nt, Human
acaugauuuccuugaa

SEQ ID NO: 1893247 - RNA, 17 nt, Human
acaugauuuccuugaau

SEQ ID NO: 1893248 - RNA, 19 nt, Human
acaugaucuucuuuauaau

SEQ ID NO: 1893249 - RNA, 13 nt, Human
acaugauuccuuc

SEQ ID NO: 1893250 - RNA, 13 nt, Human
acaugauuuccuu

SEQ ID NO: 1893251 - RNA, 14 nt, Human
acaugauuccuucc

SEQ ID NO: 1893252 - RNA, 15 nt, Human
acaugauuccuuccu

SEQ ID NO: 1893253 - RNA, 22 nt, Human
acaugauuccuuccuguucuga

SEQ ID NO: 1893254 - RNA, 19 nt, Human
acaucagcacgauuucugu

SEQ ID NO: 1893255 - RNA, 18 nt, Human
acaucagcacgauuucug

SEQ ID NO: 1893256 - RNA, 17 nt, Human
acaucagcacgauuucu

SEQ ID NO: 1893257 - RNA, 15 nt, Human
acaucagcacgauuu

SEQ ID NO: 1893258 - RNA, 23 nt, Human
acauguuucuuuguaaugaaaac

SEQ ID NO: 1893259 - RNA, 19 nt, Human
acauguuucuuuguaauga

SEQ ID NO: 1893260 - RNA, 22 nt, Human
acauguuucuuuguaaugaaaa

SEQ ID NO: 1893261 - RNA, 19 nt, Human
acaggguuuugccauguug

SEQ ID NO: 1893262 - RNA, 15 nt, Human
acaggguuucaccau

SEQ ID NO: 1893263 - RNA, 23 nt, Human
acaggcaaugcuggcuguuggcu

SEQ ID NO: 1893264 - RNA, 19 nt, Human
acaggcaaugcuggcuguu

SEQ ID NO: 1893265 - RNA, 21 nt, Human
acauaaugcgugcauaccacu

SEQ ID NO: 1893266 - RNA, 22 nt, Human
acauaaugcgugcauaccacuu

SEQ ID NO: 1893267 - RNA, 23 nt, Human
acauaaugcgugcauaccacuuu

SEQ ID NO: 1893268 - RNA, 17 nt, Human
acauaaugggguccugg

SEQ ID NO: 1893269 - RNA, 14 nt, Human
acauuuauucugcu

SEQ ID NO: 1893270 - RNA, 15 nt, Human
acauuuauucugcuc

SEQ ID NO: 1893271 - RNA, 19 nt, Human
acauuuguucuauagcuuu

SEQ ID NO: 1893272 - RNA, 12 nt, Human
accaagcccagu

SEQ ID NO: 1893273 - RNA, 17 nt, Human
accaagcacagcagccu

SEQ ID NO: 1893274 - RNA, 14 nt, Human
accaagcacagcag

SEQ ID NO: 1893275 - RNA, 16 nt, Human
accaagcacagcagcc

SEQ ID NO: 1893276 - RNA, 13 nt, Human
accagaucauugu

SEQ ID NO: 1893277 - RNA, 13 nt, Human
accagaggcagcu

SEQ ID NO: 1893278 - RNA, 19 nt, Human
accagagcugccaccugcc

SEQ ID NO: 1893279 - RNA, 13 nt, Human
accagcagaaaug

SEQ ID NO: 1893280 - RNA, 15 nt, Human
accagcauuccuuuu

SEQ ID NO: 1893281 - RNA, 15 nt, Human
accagcccagacccu

SEQ ID NO: 1893282 - RNA, 17 nt, Human
accagccaguaaauggg

SEQ ID NO: 1893283 - RNA, 17 nt, Human
accagcauuccuuuuga

SEQ ID NO: 1893284 - RNA, 11 nt, Human
acccccugaau

SEQ ID NO: 1893285 - RNA, 16 nt, Human
acccaccucagccucc

SEQ ID NO: 1893286 - RNA, 13 nt, Human
acccaccucccug

SEQ ID NO: 1893287 - RNA, 14 nt, Human
acccaccucccugc

SEQ ID NO: 1893288 - RNA, 15 nt, Human
acccaccucccugcc

SEQ ID NO: 1893289 - RNA, 22 nt, Human
acccagugcccccacugaccag

SEQ ID NO: 1893290 - RNA, 16 nt, Human
acccaccucccugccu

SEQ ID NO: 1893291 - RNA, 18 nt, Human
acccaccucccugccucc

SEQ ID NO: 1893292 - RNA, 15 nt, Human
acccaccucagccuc

SEQ ID NO: 1893293 - RNA, 14 nt, Human
acccaccucagccu

SEQ ID NO: 1893294 - RNA, 13 nt, Human
acccaccucagcc

SEQ ID NO: 1893295 - RNA, 23 nt, Human
acccaagggccuggccugagcug

SEQ ID NO: 1893296 - RNA, 17 nt, Human
acccacaagaaaugaaa

SEQ ID NO: 1893297 - RNA, 21 nt, Human
acccacaagaaaugaaagcag

SEQ ID NO: 1893298 - RNA, 20 nt, Human
accauauuaccacagacaua

SEQ ID NO: 1893299 - RNA, 18 nt, Human
acccaagggccuggccug

SEQ ID NO: 1893300 - RNA, 19 nt, Human
acccaagggccuggccuga

SEQ ID NO: 1893301 - RNA, 22 nt, Human
acccaagggccuggccugagcu

SEQ ID NO: 1893302 - RNA, 16 nt, Human
accauauuaccacaga

SEQ ID NO: 1893303 - RNA, 14 nt, Human
accauauuaccaca

SEQ ID NO: 1893304 - RNA, 19 nt, Human
accccuccaugugggcuag

SEQ ID NO: 1893305 - RNA, 16 nt, Human
accccuccaugugggc

SEQ ID NO: 1893306 - RNA, 22 nt, Human
accccucccucacucccaccug

SEQ ID NO: 1893307 - RNA, 12 nt, Human
aacucagaaggg

SEQ ID NO: 1893308 - RNA, 14 nt, Human
aacucacuuuccuc

SEQ ID NO: 1893309 - RNA, 15 nt, Human
aacggauuccaaaga

SEQ ID NO: 1893310 - RNA, 15 nt, Human
aacgcagacacugag

SEQ ID NO: 1893311 - RNA, 19 nt, Human
aacgcucucuacucugcuu

SEQ ID NO: 1893312 - RNA, 13 nt, Human
aacgauuuagaaa

SEQ ID NO: 1893313 - RNA, 12 nt, Human
aacgauuuagaa

SEQ ID NO: 1893314 - RNA, 14 nt, Human
aacugauaaagaug

SEQ ID NO: 1893315 - RNA, 18 nt, Human
aacugagauccuuccuuu

SEQ ID NO: 1893316 - RNA, 13 nt, Human
aacuuaacaugaa

SEQ ID NO: 1893317 - RNA, 12 nt, Human
aacucagaucca

SEQ ID NO: 1893318 - RNA, 13 nt, Human
aacucagauccag

SEQ ID NO: 1893319 - RNA, 14 nt, Human
aacucagauccagg

SEQ ID NO: 1893320 - RNA, 15 nt, Human
aacucagauccaggg

SEQ ID NO: 1893321 - RNA, 22 nt, Human
aacucagauccagggacagagg

SEQ ID NO: 1893322 - RNA, 18 nt, Human
aacuuaaucuaaauggaa

SEQ ID NO: 1893323 - RNA, 16 nt, Human
aacuuaaucuaaaugg

SEQ ID NO: 1893324 - RNA, 15 nt, Human
aacuuaaucuaaaug

SEQ ID NO: 1893325 - RNA, 20 nt, Human
aacuuuaugcuaagugaaau

SEQ ID NO: 1893326 - RNA, 21 nt, Human
aacuuuaugcuaagugaaaua

SEQ ID NO: 1893327 - RNA, 14 nt, Human
aacuuuauuaaaua

SEQ ID NO: 1893328 - RNA, 22 nt, Human
aaccacuggaaaguuuaugguu

SEQ ID NO: 1893329 - RNA, 15 nt, Human
aaccacuucagcuga

SEQ ID NO: 1893330 - RNA, 13 nt, Human
aaccacgcuggac

SEQ ID NO: 1893331 - RNA, 19 nt, Human
aaccaccagaagcccagaa

SEQ ID NO: 1893332 - RNA, 18 nt, Human
aaccaccagaagcccaga

SEQ ID NO: 1893333 - RNA, 11 nt, Human
aacauccaaaa

SEQ ID NO: 1893334 - RNA, 16 nt, Human
aacauccaaccuuccc

SEQ ID NO: 1893335 - RNA, 17 nt, Human
aacauccaaccuuccca

SEQ ID NO: 1893336 - RNA, 15 nt, Human
aacauccaauauuuu

SEQ ID NO: 1893337 - RNA, 23 nt, Human
aacccuucuccucuuguaaauaa

SEQ ID NO: 1893338 - RNA, 21 nt, Human
aaccgaacugauguaaguaaa

SEQ ID NO: 1893339 - RNA, 14 nt, Human
aaccagaggcagcu

SEQ ID NO: 1893340 - RNA, 21 nt, Human
aacccuaaaaagcagagcuuu

SEQ ID NO: 1893341 - RNA, 19 nt, Human
aaccuaggagugccccauu

SEQ ID NO: 1893342 - RNA, 18 nt, Human
aacacuaacauauaaugu

SEQ ID NO: 1893343 - RNA, 13 nt, Human
aacacggccacau

SEQ ID NO: 1893344 - RNA, 21 nt, Human
aacacggccacaucaaagagg

SEQ ID NO: 1893345 - RNA, 13 nt, Human
aacacgcaggagc

SEQ ID NO: 1893346 - RNA, 14 nt, Human
aacacgcaggagca

SEQ ID NO: 1893347 - RNA, 19 nt, Human
aacaccauugaaggcuuaa

SEQ ID NO: 1893348 - RNA, 17 nt, Human
aacaccauugaaggcuu

SEQ ID NO: 1893349 - RNA, 15 nt, Human
aacaccauugaaggc

SEQ ID NO: 1893350 - RNA, 21 nt, Human
aacacauuaagccuuccacac

SEQ ID NO: 1893351 - RNA, 18 nt, Human
aaauuuuuuuuguuucau

SEQ ID NO: 1893352 - RNA, 17 nt, Human
aaauuuuuuuuguuuca

SEQ ID NO: 1893353 - RNA, 18 nt, Human
aacaaauuuacagagaca

SEQ ID NO: 1893354 - RNA, 13 nt, Human
aacaacauguaua

SEQ ID NO: 1893355 - RNA, 17 nt, Human
aaaucuuauaauuuaaa

SEQ ID NO: 1893356 - RNA, 23 nt, Human
aaaugccuuacccucauguucuu

SEQ ID NO: 1893357 - RNA, 15 nt, Human
aaaugccuuuguacu

SEQ ID NO: 1893358 - RNA, 19 nt, Human
aaauugacacuuaaaaaug

SEQ ID NO: 1893359 - RNA, 20 nt, Human
aaauugacacaaguggaccu

SEQ ID NO: 1893360 - RNA, 23 nt, Human
aaauugaaucaguauaaacaaag

SEQ ID NO: 1893361 - RNA, 21 nt, Human
aaauuaacacugcuuguguuu

SEQ ID NO: 1893362 - RNA, 18 nt, Human
aaauuaacagaaaaacag

SEQ ID NO: 1893363 - RNA, 13 nt, Human
aaauuaacacugc

SEQ ID NO: 1893364 - RNA, 12 nt, Human
aaauuaacacug

SEQ ID NO: 1893365 - RNA, 21 nt, Human
aaauucuugcaaaguaucccu

SEQ ID NO: 1893366 - RNA, 13 nt, Human
aaauucuuucauu

SEQ ID NO: 1893367 - RNA, 19 nt, Human
aaauaguggugugauuugg

SEQ ID NO: 1893368 - RNA, 17 nt, Human
aaauaguuaagacauga

SEQ ID NO: 1893369 - RNA, 22 nt, Human
aaauaguuaagacaugauuucc

SEQ ID NO: 1893370 - RNA, 15 nt, Human
aaauagcuucuguuu

SEQ ID NO: 1893371 - RNA, 17 nt, Human
aaauagcuuuuuucucu

SEQ ID NO: 1893372 - RNA, 20 nt, Human
aaauagcuuuuuucucugau

SEQ ID NO: 1893373 - RNA, 24 nt, Human
aaauagcucaggugucccugcacu

SEQ ID NO: 1893374 - RNA, 23 nt, Human
aaaucaaguauuugggaagugaa

SEQ ID NO: 1893375 - RNA, 18 nt, Human
aaaucaaguauuugggaa

SEQ ID NO: 1893376 - RNA, 16 nt, Human
aaauaaaacuuuuuaa

SEQ ID NO: 1893377 - RNA, 13 nt, Human
aaauaaaacuuuu

SEQ ID NO: 1893378 - RNA, 19 nt, Human
aaauaaaacuuuuuaaaau

SEQ ID NO: 1893379 - RNA, 17 nt, Human
aaauaaaaggaagccaa

SEQ ID NO: 1893380 - RNA, 20 nt, Human
aaauaaaguuugcuuagaaa

SEQ ID NO: 1893381 - RNA, 19 nt, Human
aaauaaaguuggucuuuug

SEQ ID NO: 1893382 - RNA, 13 nt, Human
aaaguggaaaaau

SEQ ID NO: 1893383 - RNA, 12 nt, Human
aaaguccccaga

SEQ ID NO: 1893384 - RNA, 16 nt, Human
aaaguccuuuuuuucc

SEQ ID NO: 1893385 - RNA, 18 nt, Human
aaaguccuuuuuuuccau

SEQ ID NO: 1893386 - RNA, 22 nt, Human
aaaguccuuuuuuuccaucuuu

SEQ ID NO: 1893387 - RNA, 19 nt, Human
aaaggcuccaggagcagcc

SEQ ID NO: 1893388 - RNA, 20 nt, Human
aaaggcuccaggagcagcca

SEQ ID NO: 1893389 - RNA, 14 nt, Human
aaaggcagaagcaa

SEQ ID NO: 1893390 - RNA, 17 nt, Human
aaaggccagaccugcag

SEQ ID NO: 1893391 - RNA, 20 nt, Human
aaaggccagaccugcagacg

SEQ ID NO: 1893392 - RNA, 15 nt, Human
aaaggcuccaggagc

SEQ ID NO: 1893393 - RNA, 16 nt, Human
aaaggcuccaggagca

SEQ ID NO: 1893394 - RNA, 14 nt, Human
aaagcccugugcuc

SEQ ID NO: 1893395 - RNA, 13 nt, Human
aaaggcaaggucc

SEQ ID NO: 1893396 - RNA, 16 nt, Human
aaagccuccuccagcc

SEQ ID NO: 1893397 - RNA, 13 nt, Human
aaagcccugugcu

SEQ ID NO: 1893398 - RNA, 19 nt, Human
aaagcccuuaggaagaauu

SEQ ID NO: 1893399 - RNA, 17 nt, Human
aaagccaaugugaacag

SEQ ID NO: 1893400 - RNA, 15 nt, Human
aaagccaaugugaac

SEQ ID NO: 1893401 - RNA, 19 nt, Human
aaagccacaaccacauaca

SEQ ID NO: 1893402 - RNA, 20 nt, Human
aaaccauuaugaagaagaga

SEQ ID NO: 1893403 - RNA, 19 nt, Human
aaaccccuacccucacaau

SEQ ID NO: 1893404 - RNA, 13 nt, Human
aaacccucgaggc

SEQ ID NO: 1893405 - RNA, 24 nt, Human
aaacccucgaggcggaucuuugga

SEQ ID NO: 1893406 - RNA, 18 nt, Human
aaacucuccucugcugcu

SEQ ID NO: 1893407 - RNA, 12 nt, Human
aaacucucugaa

SEQ ID NO: 1893408 - RNA, 13 nt, Human
aaacucucugaac

SEQ ID NO: 1893409 - RNA, 18 nt, Human
aaaccaucauugaaaucu

SEQ ID NO: 1893410 - RNA, 15 nt, Human
aaagaaauauaccua

SEQ ID NO: 1893411 - RNA, 17 nt, Human
aaagaaauauaccuaaa

SEQ ID NO: 1893412 - RNA, 13 nt, Human
aaagaaauaucug

SEQ ID NO: 1893413 - RNA, 22 nt, Human
aaacugagauccuuccuuuuga

SEQ ID NO: 1893414 - RNA, 19 nt, Human
aaagaguguggcaaaauaa

SEQ ID NO: 1893415 - RNA, 16 nt, Human
aaagaagcccccagcu

SEQ ID NO: 1893416 - RNA, 14 nt, Human
aaagaguaggaaga

SEQ ID NO: 1893417 - RNA, 13 nt, Human
aaagaaaugcaaa

SEQ ID NO: 1893418 - RNA, 14 nt, Human
aaagaaaugcaaaa

SEQ ID NO: 1893419 - RNA, 20 nt, Human
aaagaagcccaauauuauaa

SEQ ID NO: 1893420 - RNA, 16 nt, Human
aaagauauuuugcuuu

SEQ ID NO: 1893421 - RNA, 12 nt, Human
aaagauauuuug

SEQ ID NO: 1893422 - RNA, 20 nt, Human
aaagauauuuugcuuuguga

SEQ ID NO: 1893423 - RNA, 17 nt, Human
aaagauauuuugcuuug

SEQ ID NO: 1893424 - RNA, 23 nt, Human
aaagaaguaggggaagacaugca

SEQ ID NO: 1893425 - RNA, 21 nt, Human
aaaauugaugggauuugguca

SEQ ID NO: 1893426 - RNA, 15 nt, Human
aaaauugcaaaucuu

SEQ ID NO: 1893427 - RNA, 22 nt, Human
aaaaucucaaauuucuaaaucu

SEQ ID NO: 1893428 - RNA, 19 nt, Human
aaaaucucaaauuucuaaa

SEQ ID NO: 1893429 - RNA, 16 nt, Human
aaacacuguucucugc

SEQ ID NO: 1893430 - RNA, 22 nt, Human
aaacacugggagaaaugaaaaa

SEQ ID NO: 1893431 - RNA, 21 nt, Human
aaacacugggagaaaugaaaa

SEQ ID NO: 1893432 - RNA, 21 nt, Human
aaacacgcacuuagucucuaa

SEQ ID NO: 1893433 - RNA, 12 nt, Human
aaacagaagccu

SEQ ID NO: 1893434 - RNA, 22 nt, Human
aaacagaccuaaugcuccuugu

SEQ ID NO: 1893435 - RNA, 15 nt, Human
aaaaagaaaggaggg

SEQ ID NO: 1893436 - RNA, 12 nt, Human
aaaaagaaauga

SEQ ID NO: 1893437 - RNA, 17 nt, Human
aaaagugggcuugauuc

SEQ ID NO: 1893438 - RNA, 18 nt, Human
aaaagugggcuugauucu

SEQ ID NO: 1893439 - RNA, 21 nt, Human
aaaaucuacacuccagugaga

SEQ ID NO: 1893440 - RNA, 22 nt, Human
aaaaucccuuaccucggugccu

SEQ ID NO: 1893441 - RNA, 17 nt, Human
aaaauaaaacuuuuuaa

SEQ ID NO: 1893442 - RNA, 13 nt, Human
aaaaguugaauuu

SEQ ID NO: 1893443 - RNA, 18 nt, Human
aaaaguucugcagauaaa

SEQ ID NO: 1893444 - RNA, 16 nt, Human
aagcagccagccguga

SEQ ID NO: 1893445 - RNA, 20 nt, Human
aagcagcguuucuaugacac

SEQ ID NO: 1893446 - RNA, 17 nt, Human
aagcagcguuucuauga

SEQ ID NO: 1893447 - RNA, 14 nt, Human
aagcagcguuucua

SEQ ID NO: 1893448 - RNA, 22 nt, Human
aagcagcguuucuaugacacau

SEQ ID NO: 1893449 - RNA, 21 nt, Human
aagcagcguuucuaugacaca

SEQ ID NO: 1893450 - RNA, 22 nt, Human
aagcagcggucagcagacaagg

SEQ ID NO: 1893451 - RNA, 17 nt, Human
aagccaauucagacagg

SEQ ID NO: 1893452 - RNA, 23 nt, Human
aagccacaggccugagauuucau

SEQ ID NO: 1893453 - RNA, 22 nt, Human
aagccacaggccugagauuuca

SEQ ID NO: 1893454 - RNA, 19 nt, Human
aagccacaggccugagauu

SEQ ID NO: 1893455 - RNA, 17 nt, Human
aagccacaggccugaga

SEQ ID NO: 1893456 - RNA, 15 nt, Human
aagccacaggccuga

SEQ ID NO: 1893457 - RNA, 14 nt, Human
aagccacaggccug

SEQ ID NO: 1893458 - RNA, 14 nt, Human
aagccacagcuggu

SEQ ID NO: 1893459 - RNA, 13 nt, Human
aagcagcucuccc

SEQ ID NO: 1893460 - RNA, 20 nt, Human
aagccagcaggcucucaggc

SEQ ID NO: 1893461 - RNA, 23 nt, Human
aagccagcaggcucucaggccag

SEQ ID NO: 1893462 - RNA, 19 nt, Human
aacuuuccucuuccugccu

SEQ ID NO: 1893463 - RNA, 17 nt, Human
aacuuucauuuuuuucc

SEQ ID NO: 1893464 - RNA, 14 nt, Human
aacuuucauuuuuu

SEQ ID NO: 1893465 - RNA, 11 nt, Human
aacuuucauuu

SEQ ID NO: 1893466 - RNA, 17 nt, Human
aacuuuauuaaauacaa

SEQ ID NO: 1893467 - RNA, 19 nt, Human
aacuuuauuaaauacaaaa

SEQ ID NO: 1893468 - RNA, 23 nt, Human
aacuuuauuaaauacaaaacuuc

SEQ ID NO: 1893469 - RNA, 21 nt, Human
aacuuuauuaaauacaaaacu

SEQ ID NO: 1893470 - RNA, 13 nt, Human
aacuuuauuucca

SEQ ID NO: 1893471 - RNA, 12 nt, Human
aagauaaaugug

SEQ ID NO: 1893472 - RNA, 13 nt, Human
aagauaaaugugc

SEQ ID NO: 1893473 - RNA, 14 nt, Human
aagauaaaugugcu

SEQ ID NO: 1893474 - RNA, 17 nt, Human
aagauaaagccagaagc

SEQ ID NO: 1893475 - RNA, 13 nt, Human
aagauacugaaau

SEQ ID NO: 1893476 - RNA, 17 nt, Human
aagauuacuuuuucuuu

SEQ ID NO: 1893477 - RNA, 21 nt, Human
aagauucccaggaguucugcu

SEQ ID NO: 1893478 - RNA, 17 nt, Human
aagauucccaggaguuc

SEQ ID NO: 1893479 - RNA, 19 nt, Human
aagauucccaggaguucug

SEQ ID NO: 1893480 - RNA, 13 nt, Human
aagauucccagga

SEQ ID NO: 1893481 - RNA, 14 nt, Human
aagauucccaggag

SEQ ID NO: 1893482 - RNA, 15 nt, Human
aagauucccaggagu

SEQ ID NO: 1893483 - RNA, 16 nt, Human
aagauucccaggaguu

SEQ ID NO: 1893484 - RNA, 21 nt, Human
aagcuggucccacucagucca

SEQ ID NO: 1893485 - RNA, 18 nt, Human
aagcuggucccacucagu

SEQ ID NO: 1893486 - RNA, 16 nt, Human
aagcugggguucauga

SEQ ID NO: 1893487 - RNA, 18 nt, Human
aagcuguguggcagucug

SEQ ID NO: 1893488 - RNA, 13 nt, Human
aagcuguggccag

SEQ ID NO: 1893489 - RNA, 14 nt, Human
aagcuguauuuuga

SEQ ID NO: 1893490 - RNA, 22 nt, Human
aagcugggguucaugacaaugg

SEQ ID NO: 1893491 - RNA, 13 nt, Human
aaggacacuagaa

SEQ ID NO: 1893492 - RNA, 21 nt, Human
aagcugugugcucuccaagcc

SEQ ID NO: 1893493 - RNA, 17 nt, Human
aaggacuuccuguccag

SEQ ID NO: 1893494 - RNA, 20 nt, Human
aaggacuuccuguccagcuc

SEQ ID NO: 1893495 - RNA, 21 nt, Human
aaggacuuccuguccagcucc

SEQ ID NO: 1893496 - RNA, 22 nt, Human
aaggacuuccuguccagcucca

SEQ ID NO: 1893497 - RNA, 15 nt, Human
aaggauugcuacugu

SEQ ID NO: 1893498 - RNA, 15 nt, Human
aaggauguucuagca

SEQ ID NO: 1893499 - RNA, 23 nt, Human
aaggacuuccuguccagcuccaa

SEQ ID NO: 1893500 - RNA, 20 nt, Human
aaggcagggagcgagggaga

SEQ ID NO: 1893501 - RNA, 21 nt, Human
aagcgauucuucugcuucagc

SEQ ID NO: 1893502 - RNA, 14 nt, Human
aagcuaauuugcau

SEQ ID NO: 1893503 - RNA, 15 nt, Human
aagcuaauuugcauu

SEQ ID NO: 1893504 - RNA, 22 nt, Human
aagcuaauuugcauuaaauuca

SEQ ID NO: 1893505 - RNA, 23 nt, Human
aagcuaauuugcauuaaauucac

SEQ ID NO: 1893506 - RNA, 17 nt, Human
aagcuacaaucuguuca

SEQ ID NO: 1893507 - RNA, 22 nt, Human
aagucucuuuuuuuggcccagg

SEQ ID NO: 1893508 - RNA, 15 nt, Human
aagucuccaaagucu

SEQ ID NO: 1893509 - RNA, 21 nt, Human
aaguggaaaaauagccugccu

SEQ ID NO: 1893510 - RNA, 19 nt, Human
aaguggaaaaauagccugc

SEQ ID NO: 1893511 - RNA, 12 nt, Human
aaguugaauuuu

SEQ ID NO: 1893512 - RNA, 22 nt, Human
aaguugcagugagcugauauca

SEQ ID NO: 1893513 - RNA, 17 nt, Human
aaguccuacaagcuaaa

SEQ ID NO: 1893514 - RNA, 18 nt, Human
aaguccucuuuucugaga

SEQ ID NO: 1893515 - RNA, 19 nt, Human
aaguccacaguggaaccag

SEQ ID NO: 1893516 - RNA, 14 nt, Human
aaguccacagugga

SEQ ID NO: 1893517 - RNA, 18 nt, Human
aaguauccugcuucugau

SEQ ID NO: 1893518 - RNA, 12 nt, Human
aaguccaaugug

SEQ ID NO: 1893519 - RNA, 22 nt, Human
aaguccucuuuucugagaggac

SEQ ID NO: 1893520 - RNA, 21 nt, Human
aaguccuuuuuuuccaucuuu

SEQ ID NO: 1893521 - RNA, 14 nt, Human
aagucuccaaaguc

SEQ ID NO: 1893522 - RNA, 19 nt, Human
aaguagaagucuuagaugu

SEQ ID NO: 1893523 - RNA, 20 nt, Human
aaguagaagucuuagaugua

SEQ ID NO: 1893524 - RNA, 20 nt, Human
aaggugaggagcuugaaacc

SEQ ID NO: 1893525 - RNA, 17 nt, Human
aaggugauauauuuaaa

SEQ ID NO: 1893526 - RNA, 20 nt, Human
aagguccucugucagucaca

SEQ ID NO: 1893527 - RNA, 15 nt, Human
aaguaguggagcccc

SEQ ID NO: 1893528 - RNA, 17 nt, Human
aaguaucccuacuguaa

SEQ ID NO: 1893529 - RNA, 23 nt, Human
aaguaucccuacuguaauuugug

SEQ ID NO: 1893530 - RNA, 18 nt, Human
aaguaucccuacuguaau

SEQ ID NO: 1893531 - RNA, 21 nt, Human
aaguagaagucuuagauguau

SEQ ID NO: 1893532 - RNA, 17 nt, Human
aagggagcuagccagag

SEQ ID NO: 1893533 - RNA, 18 nt, Human
aagggacgcuacccggga

SEQ ID NO: 1893534 - RNA, 19 nt, Human
aaggucauuuuuuuuaaga

SEQ ID NO: 1893535 - RNA, 18 nt, Human
aaggucauuuuuuuuaag

SEQ ID NO: 1893536 - RNA, 17 nt, Human
aagggccagagccaggg

SEQ ID NO: 1893537 - RNA, 11 nt, Human
aagggccagag

SEQ ID NO: 1893538 - RNA, 12 nt, Human
aagggccagagc

SEQ ID NO: 1893539 - RNA, 13 nt, Human
aagggccagagcc

SEQ ID NO: 1893540 - RNA, 14 nt, Human
aagggccagagcca

SEQ ID NO: 1893541 - RNA, 15 nt, Human
aagggccagagccag

SEQ ID NO: 1893542 - RNA, 16 nt, Human
aagggccagagccagg

SEQ ID NO: 1893543 - RNA, 23 nt, Human
aauguuucuucuagguucuaaaa

SEQ ID NO: 1893544 - RNA, 22 nt, Human
aauguuucuucuagguucuaaa

SEQ ID NO: 1893545 - RNA, 13 nt, Human
aauguuuccuuua

SEQ ID NO: 1893546 - RNA, 16 nt, Human
aauguuugccucugcc

SEQ ID NO: 1893547 - RNA, 15 nt, Human
aauguuugccucugc

SEQ ID NO: 1893548 - RNA, 12 nt, Human
aauguuuccuuu

SEQ ID NO: 1893549 - RNA, 23 nt, Human
aauguuuacacucuuuguaagag

SEQ ID NO: 1893550 - RNA, 20 nt, Human
aauguuuacacucuuuguaa

SEQ ID NO: 1893551 - RNA, 17 nt, Human
aaugugaaaagaaaaau

SEQ ID NO: 1893552 - RNA, 15 nt, Human
aaugugaaaagaaaa

SEQ ID NO: 1893553 - RNA, 23 nt, Human
aaugucacguuuuguuuugugcc

SEQ ID NO: 1893554 - RNA, 22 nt, Human
aaugucacguuuuguuuugugc

SEQ ID NO: 1893555 - RNA, 15 nt, Human
aaugucaguaugugg

SEQ ID NO: 1893556 - RNA, 13 nt, Human
aaugucaguaugu

SEQ ID NO: 1893557 - RNA, 23 nt, Human
aaugccuuacccucauguucuua

SEQ ID NO: 1893558 - RNA, 18 nt, Human
aaugcgugcauaccacuu

SEQ ID NO: 1893559 - RNA, 19 nt, Human
aaugcgugcauaccacuuu

SEQ ID NO: 1893560 - RNA, 15 nt, Human
aauguuuuuuuuuaa

SEQ ID NO: 1893561 - RNA, 20 nt, Human
aauguuuuuuuuuaaagacu

SEQ ID NO: 1893562 - RNA, 22 nt, Human
aauguuuuuuuuuaaagacuuu

SEQ ID NO: 1893563 - RNA, 21 nt, Human
aauuaaaaaaaaagaucuguu

SEQ ID NO: 1893564 - RNA, 20 nt, Human
aaucaagauuuaauccuaga

SEQ ID NO: 1893565 - RNA, 15 nt, Human
aaucaccgaaaacgu

SEQ ID NO: 1893566 - RNA, 14 nt, Human
aaucaccgaaaacg

SEQ ID NO: 1893567 - RNA, 17 nt, Human
aauauacuauauuuaug

SEQ ID NO: 1893568 - RNA, 13 nt, Human
aauagacaauuua

SEQ ID NO: 1893569 - RNA, 16 nt, Human
aauauauaucaaauau

SEQ ID NO: 1893570 - RNA, 20 nt, Human
aauacucuacccucuuagaa

SEQ ID NO: 1893571 - RNA, 22 nt, Human
aauacucuacccucuuagaaaa

SEQ ID NO: 1893572 - RNA, 13 nt, Human
aauacucuuauau

SEQ ID NO: 1893573 - RNA, 23 nt, Human
aauacucuuaggaagagaaacca

SEQ ID NO: 1893574 - RNA, 17 nt, Human
aauacuaccuugaaaau

SEQ ID NO: 1893575 - RNA, 18 nt, Human
aauacuaccuugaaaaua

SEQ ID NO: 1893576 - RNA, 21 nt, Human
aauacuaccuugaaaauaaga

SEQ ID NO: 1893577 - RNA, 21 nt, Human
aauacuauauuuauacuguau

SEQ ID NO: 1893578 - RNA, 10 nt, Human
aauacuuuuu

SEQ ID NO: 1893579 - RNA, 15 nt, Human
aauacuuuuuacaau

SEQ ID NO: 1893580 - RNA, 23 nt, Human
aaugaaagucuugugacuagugc

SEQ ID NO: 1893581 - RNA, 21 nt, Human
aaugaaagucuugugacuagu

SEQ ID NO: 1893582 - RNA, 20 nt, Human
aaugaaagucuugugacuag

SEQ ID NO: 1893583 - RNA, 16 nt, Human
aaugauccccagcugu

SEQ ID NO: 1893584 - RNA, 17 nt, Human
aaugaaguuguagguaa

SEQ ID NO: 1893585 - RNA, 20 nt, Human
aaugauccccagcuguuuau

SEQ ID NO: 1893586 - RNA, 19 nt, Human
aaugauccccagcuguuua

SEQ ID NO: 1893587 - RNA, 22 nt, Human
aaugauccccagcuguuuaugc

SEQ ID NO: 1893588 - RNA, 19 nt, Human
aaugaaagucuugugacua

SEQ ID NO: 1893589 - RNA, 16 nt, Human
aaucucuccauucccg

SEQ ID NO: 1893590 - RNA, 17 nt, Human
aauccaggcagauccag

SEQ ID NO: 1893591 - RNA, 18 nt, Human
aauccaggcagauccagg

SEQ ID NO: 1893592 - RNA, 18 nt, Human
aaucucaaauuucuaaau

SEQ ID NO: 1893593 - RNA, 17 nt, Human
aaucucaaauuucuaaa

SEQ ID NO: 1893594 - RNA, 15 nt, Human
aauccaaugaaauga

SEQ ID NO: 1893595 - RNA, 17 nt, Human
aauccagacccggcugc

SEQ ID NO: 1893596 - RNA, 19 nt, Human
aauccagacccggcugcgu

SEQ ID NO: 1893597 - RNA, 13 nt, Human
aauccagccugcu

SEQ ID NO: 1893598 - RNA, 15 nt, Human
aaucucaaauuucua

SEQ ID NO: 1893599 - RNA, 16 nt, Human
aaucucaaauuucuaa

SEQ ID NO: 1893600 - RNA, 17 nt, Human
aauccaagcaaauguga

SEQ ID NO: 1893601 - RNA, 18 nt, Human
aauccaagcaaaugugaa

SEQ ID NO: 1893602 - RNA, 11 nt, Human
agccgggccgc

SEQ ID NO: 1893603 - RNA, 13 nt, Human
agccgcuggggcc

SEQ ID NO: 1893604 - RNA, 21 nt, Human
agccgccaugcuccuggccca

SEQ ID NO: 1893605 - RNA, 14 nt, Human
agcccucgucuccc

SEQ ID NO: 1893606 - RNA, 23 nt, Human
agcccucaccccugguucucauc

SEQ ID NO: 1893607 - RNA, 14 nt, Human
agccgggccgcaga

SEQ ID NO: 1893608 - RNA, 21 nt, Human
agccgggcgugguggugagug

SEQ ID NO: 1893609 - RNA, 14 nt, Human
agccgugagugcag

SEQ ID NO: 1893610 - RNA, 21 nt, Human
agccucccaaagugcugggau

SEQ ID NO: 1893611 - RNA, 22 nt, Human
agccucccacgacugcccggca

SEQ ID NO: 1893612 - RNA, 18 nt, Human
agccgugcucgccccagc

SEQ ID NO: 1893613 - RNA, 19 nt, Human
agccucccgaguagcuggg

SEQ ID NO: 1893614 - RNA, 18 nt, Human
agccucccgaguagcugg

SEQ ID NO: 1893615 - RNA, 20 nt, Human
agccucccgaguagcuggga

SEQ ID NO: 1893616 - RNA, 17 nt, Human
agccucccauccagggc

SEQ ID NO: 1893617 - RNA, 14 nt, Human
agccuccuccagcc

SEQ ID NO: 1893618 - RNA, 18 nt, Human
agccucccauccagggcc

SEQ ID NO: 1893619 - RNA, 12 nt, Human
agccucccugcc

SEQ ID NO: 1893620 - RNA, 13 nt, Human
agccucccugccu

SEQ ID NO: 1893621 - RNA, 14 nt, Human
agccucccugccuc

SEQ ID NO: 1893622 - RNA, 23 nt, Human
agccucccugccucaggccucug

SEQ ID NO: 1893623 - RNA, 16 nt, Human
agccccauucugccug

SEQ ID NO: 1893624 - RNA, 13 nt, Human
agccccauucugc

SEQ ID NO: 1893625 - RNA, 22 nt, Human
agcccucaccccugguucucau

SEQ ID NO: 1893626 - RNA, 15 nt, Human
agccccagugcccac

SEQ ID NO: 1893627 - RNA, 14 nt, Human
agccccagugccca

SEQ ID NO: 1893628 - RNA, 13 nt, Human
agccccagugccc

SEQ ID NO: 1893629 - RNA, 18 nt, Human
agccagcaggcucucagg

SEQ ID NO: 1893630 - RNA, 19 nt, Human
agccagcaggcucucaggc

SEQ ID NO: 1893631 - RNA, 17 nt, Human
agccagcaggcucucag

SEQ ID NO: 1893632 - RNA, 20 nt, Human
agccagcaggcucucaggcc

SEQ ID NO: 1893633 - RNA, 23 nt, Human
agcauccuggcacccggccccug

SEQ ID NO: 1893634 - RNA, 22 nt, Human
agcauccuggcacccggccccu

SEQ ID NO: 1893635 - RNA, 14 nt, Human
agcaugacauuucu

SEQ ID NO: 1893636 - RNA, 15 nt, Human
agcaugacauuucuu

SEQ ID NO: 1893637 - RNA, 23 nt, Human
agccaagugugguagagugugcc

SEQ ID NO: 1893638 - RNA, 15 nt, Human
agccagcacacaggg

SEQ ID NO: 1893639 - RNA, 17 nt, Human
agccagcacacagggca

SEQ ID NO: 1893640 - RNA, 18 nt, Human
agccagcacacagggcag

SEQ ID NO: 1893641 - RNA, 19 nt, Human
agccagcacacagggcagu

SEQ ID NO: 1893642 - RNA, 20 nt, Human
agccagcacuuguccagcug

SEQ ID NO: 1893643 - RNA, 21 nt, Human
agccagcacuuguccagcuga

SEQ ID NO: 1893644 - RNA, 22 nt, Human
agccagcacuuguccagcugag

SEQ ID NO: 1893645 - RNA, 20 nt, Human
agcaugccuggauggggcug

SEQ ID NO: 1893646 - RNA, 23 nt, Human
agcaugccuggauggggcugcac

SEQ ID NO: 1893647 - RNA, 21 nt, Human
agcaugcugugauugugccua

SEQ ID NO: 1893648 - RNA, 15 nt, Human
agccaaaugguuuaa

SEQ ID NO: 1893649 - RNA, 18 nt, Human
agccaacacgcaccugcc

SEQ ID NO: 1893650 - RNA, 19 nt, Human
agccaacacgcaccugccu

SEQ ID NO: 1893651 - RNA, 18 nt, Human
agccaacagaagcuucca

SEQ ID NO: 1893652 - RNA, 22 nt, Human
agccaacacgcaccugccucag

SEQ ID NO: 1893653 - RNA, 18 nt, Human
agcagugggccuggccag

SEQ ID NO: 1893654 - RNA, 18 nt, Human
agcagugcaugcuguccc

SEQ ID NO: 1893655 - RNA, 22 nt, Human
agcagcugguaaucuugcucug

SEQ ID NO: 1893656 - RNA, 19 nt, Human
agcagugcaugcugucccu

SEQ ID NO: 1893657 - RNA, 20 nt, Human
agcagugcaugcugucccuu

SEQ ID NO: 1893658 - RNA, 22 nt, Human
agcagcugaaauaugcuggcug

SEQ ID NO: 1893659 - RNA, 23 nt, Human
agcagcugaaauaugcuggcugg

SEQ ID NO: 1893660 - RNA, 12 nt, Human
agcagcucuccc

SEQ ID NO: 1893661 - RNA, 14 nt, Human
agcagcucuccccu

SEQ ID NO: 1893662 - RNA, 13 nt, Human
agcagcguuucua

SEQ ID NO: 1893663 - RNA, 14 nt, Human
agcagcgccuuucc

SEQ ID NO: 1893664 - RNA, 15 nt, Human
agcagcgccuuuccc

SEQ ID NO: 1893665 - RNA, 20 nt, Human
agcacagacccugcccugug

SEQ ID NO: 1893666 - RNA, 18 nt, Human
agcacagacccugcccug

SEQ ID NO: 1893667 - RNA, 19 nt, Human
agcacagacccugcccugu

SEQ ID NO: 1893668 - RNA, 23 nt, Human
agcacacuugacaucaacugcau

SEQ ID NO: 1893669 - RNA, 20 nt, Human
agcacacucauccccucacu

SEQ ID NO: 1893670 - RNA, 14 nt, Human
agcacacucauccc

SEQ ID NO: 1893671 - RNA, 17 nt, Human
agcacagacccugcccu

SEQ ID NO: 1893672 - RNA, 16 nt, Human
agacuggaagcacagc

SEQ ID NO: 1893673 - RNA, 17 nt, Human
agacuggaagcacagcu

SEQ ID NO: 1893674 - RNA, 19 nt, Human
agacuggaagcacagcuuc

SEQ ID NO: 1893675 - RNA, 14 nt, Human
agacuggaagcuaa

SEQ ID NO: 1893676 - RNA, 19 nt, Human
agacuggaagcuaauuugc

SEQ ID NO: 1893677 - RNA, 12 nt, Human
agagaaaaagag

SEQ ID NO: 1893678 - RNA, 16 nt, Human
agagaaaaagaaaugc

SEQ ID NO: 1893679 - RNA, 20 nt, Human
agagaaaaagaaaugcaaaa

SEQ ID NO: 1893680 - RNA, 21 nt, Human
agagaaaaagaaaugcaaaaa

SEQ ID NO: 1893681 - RNA, 21 nt, Human
agagaggguggugaccucugc

SEQ ID NO: 1893682 - RNA, 20 nt, Human
agagaggguggugaccucug

SEQ ID NO: 1893683 - RNA, 22 nt, Human
agagaggguggugaccucugcc

SEQ ID NO: 1893684 - RNA, 19 nt, Human
agagcccaccuuggcucaa

SEQ ID NO: 1893685 - RNA, 13 nt, Human
agagcccacgccc

SEQ ID NO: 1893686 - RNA, 17 nt, Human
agagcccacgcccccac

SEQ ID NO: 1893687 - RNA, 15 nt, Human
agagcccagcuccaa

SEQ ID NO: 1893688 - RNA, 16 nt, Human
agagcccacgccccca

SEQ ID NO: 1893689 - RNA, 21 nt, Human
agacgcugugcugcccugccc

SEQ ID NO: 1893690 - RNA, 12 nt, Human
agacagcugccu

SEQ ID NO: 1893691 - RNA, 11 nt, Human
agacagcucuu

SEQ ID NO: 1893692 - RNA, 12 nt, Human
agacagcucuua

SEQ ID NO: 1893693 - RNA, 18 nt, Human
agacggagucccaccuug

SEQ ID NO: 1893694 - RNA, 22 nt, Human
agacgcugugcugcccugccca

SEQ ID NO: 1893695 - RNA, 17 nt, Human
agacgugauuuugcugu

SEQ ID NO: 1893696 - RNA, 15 nt, Human
agacagauacuccuc

SEQ ID NO: 1893697 - RNA, 21 nt, Human
agacagauacuccuccaaggu

SEQ ID NO: 1893698 - RNA, 16 nt, Human
agacagcccgggcucu

SEQ ID NO: 1893699 - RNA, 21 nt, Human
agacagcuccacccuggccga

SEQ ID NO: 1893700 - RNA, 14 nt, Human
agacagcccgggcu

SEQ ID NO: 1893701 - RNA, 15 nt, Human
agacagcccgggcuc

SEQ ID NO: 1893702 - RNA, 23 nt, Human
agacagagucucacuguugccca

SEQ ID NO: 1893703 - RNA, 19 nt, Human
agauauaugcucugcaugu

SEQ ID NO: 1893704 - RNA, 14 nt, Human
agaucuucuguggg

SEQ ID NO: 1893705 - RNA, 14 nt, Human
agauggcuccucuc

SEQ ID NO: 1893706 - RNA, 15 nt, Human
agauggcuccucuca

SEQ ID NO: 1893707 - RNA, 14 nt, Human
agauggcagucacu

SEQ ID NO: 1893708 - RNA, 17 nt, Human
agaguguggcaaaauaa

SEQ ID NO: 1893709 - RNA, 20 nt, Human
agaguguggagucauucuca

SEQ ID NO: 1893710 - RNA, 14 nt, Human
agagugugccugaa

SEQ ID NO: 1893711 - RNA, 23 nt, Human
agaggguggugaccucugccuga

SEQ ID NO: 1893712 - RNA, 11 nt, Human
agagugggagc

SEQ ID NO: 1893713 - RNA, 19 nt, Human
agaguggggauaugauuua

SEQ ID NO: 1893714 - RNA, 19 nt, Human
agaggguggugaccucugc

SEQ ID NO: 1893715 - RNA, 15 nt, Human
agagggccgggcaga

SEQ ID NO: 1893716 - RNA, 17 nt, Human
agagggccgggcagagg

SEQ ID NO: 1893717 - RNA, 18 nt, Human
agagggccgggcagaggg

SEQ ID NO: 1893718 - RNA, 22 nt, Human
agaggguggugaccucugccug

SEQ ID NO: 1893719 - RNA, 20 nt, Human
agaggguggugaccucugcc

SEQ ID NO: 1893720 - RNA, 12 nt, Human
agagggcacaga

SEQ ID NO: 1893721 - RNA, 17 nt, Human
agagggaugcauggaga

SEQ ID NO: 1893722 - RNA, 14 nt, Human
agaggacuuuucuu

SEQ ID NO: 1893723 - RNA, 22 nt, Human
agaggacgagcgauugaggugu

SEQ ID NO: 1893724 - RNA, 15 nt, Human
agaggagagaggacc

SEQ ID NO: 1893725 - RNA, 16 nt, Human
agaggagagaggaccc

SEQ ID NO: 1893726 - RNA, 20 nt, Human
agaggacaguauuugugggg

SEQ ID NO: 1893727 - RNA, 15 nt, Human
agaggaccggcggcu

SEQ ID NO: 1893728 - RNA, 16 nt, Human
agaggaaggagaggag

SEQ ID NO: 1893729 - RNA, 15 nt, Human
agagcccaggccucc

SEQ ID NO: 1893730 - RNA, 13 nt, Human
agagcccaggccu

SEQ ID NO: 1893731 - RNA, 14 nt, Human
agagcccaggccuc

SEQ ID NO: 1893732 - RNA, 13 nt, Human
aggacccaagcag

SEQ ID NO: 1893733 - RNA, 15 nt, Human
aggacccaagcagag

SEQ ID NO: 1893734 - RNA, 18 nt, Human
aggacccaagcagagaag

SEQ ID NO: 1893735 - RNA, 17 nt, Human
aggaauccagacccggc

SEQ ID NO: 1893736 - RNA, 21 nt, Human
aggaaucaugugccaagcaga

SEQ ID NO: 1893737 - RNA, 20 nt, Human
aggaauccagacccggcugc

SEQ ID NO: 1893738 - RNA, 21 nt, Human
agcuuuucccuuuuuuuaagu

SEQ ID NO: 1893739 - RNA, 18 nt, Human
agcuuuugaauaaaaacu

SEQ ID NO: 1893740 - RNA, 16 nt, Human
aggaguguggccacgu

SEQ ID NO: 1893741 - RNA, 18 nt, Human
aggagugugugauuuuuu

SEQ ID NO: 1893742 - RNA, 17 nt, Human
aggaguuauuuguaaug

SEQ ID NO: 1893743 - RNA, 23 nt, Human
aggaugcuuguacauaaugcgug

SEQ ID NO: 1893744 - RNA, 21 nt, Human
aggaugcuuguacauaaugcg

SEQ ID NO: 1893745 - RNA, 18 nt, Human
aggaguggguugauuuca

SEQ ID NO: 1893746 - RNA, 21 nt, Human
aggagucccugccaucauguu

SEQ ID NO: 1893747 - RNA, 13 nt, Human
aggaccucaggug

SEQ ID NO: 1893748 - RNA, 16 nt, Human
aggaccggcggcucgg

SEQ ID NO: 1893749 - RNA, 16 nt, Human
aggauguucugggaca

SEQ ID NO: 1893750 - RNA, 15 nt, Human
aggauguucugggac

SEQ ID NO: 1893751 - RNA, 22 nt, Human
aggauguucuagcauggcugcc

SEQ ID NO: 1893752 - RNA, 14 nt, Human
aggauggaacacgg

SEQ ID NO: 1893753 - RNA, 19 nt, Human
aggauggaacacggccaca

SEQ ID NO: 1893754 - RNA, 14 nt, Human
aggaugcuuugguu

SEQ ID NO: 1893755 - RNA, 18 nt, Human
aggauguucugggacaca

SEQ ID NO: 1893756 - RNA, 14 nt, Human
aggauuauuggaaa

SEQ ID NO: 1893757 - RNA, 22 nt, Human
agcuuccccaacacgcaggagc

SEQ ID NO: 1893758 - RNA, 23 nt, Human
agcuuccauuccaagccugacca

SEQ ID NO: 1893759 - RNA, 22 nt, Human
agcuuccaugauucuauuuaua

SEQ ID NO: 1893760 - RNA, 22 nt, Human
agcuucuggugaccuuccaaga

SEQ ID NO: 1893761 - RNA, 21 nt, Human
agcuucuggugaccuuccaag

SEQ ID NO: 1893762 - RNA, 23 nt, Human
agcugcgguccacccaggagccc

SEQ ID NO: 1893763 - RNA, 21 nt, Human
agcugcuauagccuggggugg

SEQ ID NO: 1893764 - RNA, 15 nt, Human
agcugcuauagccug

SEQ ID NO: 1893765 - RNA, 16 nt, Human
agcugcuauagccugg

SEQ ID NO: 1893766 - RNA, 16 nt, Human
agcugcucagggaaaa

SEQ ID NO: 1893767 - RNA, 21 nt, Human
agcugcucagggaaaagcagc

SEQ ID NO: 1893768 - RNA, 23 nt, Human
agcuccgcuuucuacccagcgag

SEQ ID NO: 1893769 - RNA, 21 nt, Human
agcuccgcuuucuacccagcg

SEQ ID NO: 1893770 - RNA, 20 nt, Human
agcuccgcuuucuacccagc

SEQ ID NO: 1893771 - RNA, 13 nt, Human
agcuccuucuguc

SEQ ID NO: 1893772 - RNA, 12 nt, Human
agcuccuucugu

SEQ ID NO: 1893773 - RNA, 23 nt, Human
agcugaacaauaggcuguuccca

SEQ ID NO: 1893774 - RNA, 14 nt, Human
agcugagcaggugu

SEQ ID NO: 1893775 - RNA, 14 nt, Human
agcugaaaguuggg

SEQ ID NO: 1893776 - RNA, 17 nt, Human
agcugaaaguugggacu

SEQ ID NO: 1893777 - RNA, 18 nt, Human
agcugaaauaugcuggcu

SEQ ID NO: 1893778 - RNA, 20 nt, Human
agcugaaauaugcuggcugg

SEQ ID NO: 1893779 - RNA, 21 nt, Human
agcugaacaauaggcuguucc

SEQ ID NO: 1893780 - RNA, 22 nt, Human
agcugaacaauaggcuguuccc

SEQ ID NO: 1893781 - RNA, 22 nt, Human
agggacgcggcucccggggcag

SEQ ID NO: 1893782 - RNA, 17 nt, Human
agggacgcuacccggga

SEQ ID NO: 1893783 - RNA, 17 nt, Human
agggacgaagaagagcc

SEQ ID NO: 1893784 - RNA, 21 nt, Human
agggacgaagaagagccacag

SEQ ID NO: 1893785 - RNA, 22 nt, Human
agggacgaagaagagccacagu

SEQ ID NO: 1893786 - RNA, 18 nt, Human
aggcuguaucccaugagc

SEQ ID NO: 1893787 - RNA, 13 nt, Human
aggcuguauccca

SEQ ID NO: 1893788 - RNA, 20 nt, Human
aggcugucaauuacaggaag

SEQ ID NO: 1893789 - RNA, 22 nt, Human
aggcugguucggauuuggggug

SEQ ID NO: 1893790 - RNA, 16 nt, Human
aggcugguggcccagg

SEQ ID NO: 1893791 - RNA, 17 nt, Human
aggcugguggcccagga

SEQ ID NO: 1893792 - RNA, 21 nt, Human
aggcugucaauuacaggaagu

SEQ ID NO: 1893793 - RNA, 22 nt, Human
agggacagaggggguggccucc

SEQ ID NO: 1893794 - RNA, 23 nt, Human
agggacagaggggguggccuccc

SEQ ID NO: 1893795 - RNA, 13 nt, Human
agggaccucuccc

SEQ ID NO: 1893796 - RNA, 15 nt, Human
agggaccucucccag

SEQ ID NO: 1893797 - RNA, 16 nt, Human
agggaccucucccagg

SEQ ID NO: 1893798 - RNA, 23 nt, Human
aggcuacuguaaggcaaucaugg

SEQ ID NO: 1893799 - RNA, 21 nt, Human
aggcuagaaccaccugccuau

SEQ ID NO: 1893800 - RNA, 13 nt, Human
aggcuaaacaucc

SEQ ID NO: 1893801 - RNA, 21 nt, Human
aggcuaaacauccaauauuuu

SEQ ID NO: 1893802 - RNA, 22 nt, Human
aggcccuucucuccagccccug

SEQ ID NO: 1893803 - RNA, 23 nt, Human
aggcccuucucuccagccccugg

SEQ ID NO: 1893804 - RNA, 20 nt, Human
aggcccuucucuccagcccc

SEQ ID NO: 1893805 - RNA, 21 nt, Human
aggcccuucucuccagccccu

SEQ ID NO: 1893806 - RNA, 18 nt, Human
aggguccagaaggagaca

SEQ ID NO: 1893807 - RNA, 15 nt, Human
agggucagccagggc

SEQ ID NO: 1893808 - RNA, 17 nt, Human
agggucagccagggccu

SEQ ID NO: 1893809 - RNA, 18 nt, Human
agggucagccagggccug

SEQ ID NO: 1893810 - RNA, 19 nt, Human
agggucagccagggccugc

SEQ ID NO: 1893811 - RNA, 23 nt, Human
agggucagccagggccugcgagg

SEQ ID NO: 1893812 - RNA, 21 nt, Human
aggguaucaggugcugccauc

SEQ ID NO: 1893813 - RNA, 15 nt, Human
aggguaucuggugac

SEQ ID NO: 1893814 - RNA, 19 nt, Human
aggguaucaggugcugcca

SEQ ID NO: 1893815 - RNA, 16 nt, Human
aggggccuaggccuca

SEQ ID NO: 1893816 - RNA, 19 nt, Human
aggggccuaggccucagcc

SEQ ID NO: 1893817 - RNA, 23 nt, Human
aggggccuaggccucagccagag

SEQ ID NO: 1893818 - RNA, 19 nt, Human
aggggccucuuaugggcug

SEQ ID NO: 1893819 - RNA, 20 nt, Human
aggggccucuuaugggcugg

SEQ ID NO: 1893820 - RNA, 21 nt, Human
aggggccucuuaugggcuggg

SEQ ID NO: 1893821 - RNA, 19 nt, Human
aggguccagaaggagacag

SEQ ID NO: 1893822 - RNA, 21 nt, Human
aggguccagaaggagacaggc

SEQ ID NO: 1893823 - RNA, 11 nt, Human
agggucccugg

SEQ ID NO: 1893824 - RNA, 12 nt, Human
agggucccuggg

SEQ ID NO: 1893825 - RNA, 20 nt, Human
agguaaaagcaucacaugaa

SEQ ID NO: 1893826 - RNA, 18 nt, Human
agguaaaucagacuauga

SEQ ID NO: 1893827 - RNA, 23 nt, Human
agguaaaucagacuaugaaguuu

SEQ ID NO: 1893828 - RNA, 19 nt, Human
agguaauuucuugugccuc

SEQ ID NO: 1893829 - RNA, 16 nt, Human
agguaauuucuugugc

SEQ ID NO: 1893830 - RNA, 12 nt, Human
aggucccuaaua

SEQ ID NO: 1893831 - RNA, 11 nt, Human
aggucccuaau

SEQ ID NO: 1893832 - RNA, 13 nt, Human
aggucccuaauaa

SEQ ID NO: 1893833 - RNA, 15 nt, Human
aggucccuaauaaag

SEQ ID NO: 1893834 - RNA, 16 nt, Human
aggucccuaauaaagc

SEQ ID NO: 1893835 - RNA, 18 nt, Human
aggucuguucuuuccaaa

SEQ ID NO: 1893836 - RNA, 23 nt, Human
aggucuguucuuuccaaaguaca

SEQ ID NO: 1893837 - RNA, 22 nt, Human
aggucuguucuuuccaaaguac

SEQ ID NO: 1893838 - RNA, 15 nt, Human
agguucaaagauauu

SEQ ID NO: 1893839 - RNA, 14 nt, Human
agguucaaagauau

SEQ ID NO: 1893840 - RNA, 22 nt, Human
agguucccuuugacgccauccc

SEQ ID NO: 1893841 - RNA, 13 nt, Human
agguucccuuuga

SEQ ID NO: 1893842 - RNA, 23 nt, Human
agguucccuuugacgccauccca

SEQ ID NO: 1893843 - RNA, 23 nt, Human
aggugcuaggaacacuccuucac

SEQ ID NO: 1893844 - RNA, 21 nt, Human
agguggaauuauuuuaaaaga

SEQ ID NO: 1893845 - RNA, 17 nt, Human
agguggaauuauuuuaa

SEQ ID NO: 1893846 - RNA, 19 nt, Human
aggugcuaggaacacuccu

SEQ ID NO: 1893847 - RNA, 22 nt, Human
aggugcuaggaacacuccuuca

SEQ ID NO: 1893848 - RNA, 20 nt, Human
agguggagguugcagugagc

SEQ ID NO: 1893849 - RNA, 14 nt, Human
auaucauucagcaa

SEQ ID NO: 1893850 - RNA, 13 nt, Human
auaucauucagca

SEQ ID NO: 1893851 - RNA, 15 nt, Human
auaucaauuuaaaaa

SEQ ID NO: 1893852 - RNA, 16 nt, Human
auaucaaauauauuca

SEQ ID NO: 1893853 - RNA, 19 nt, Human
auauauuuuuuucugaaau

SEQ ID NO: 1893854 - RNA, 15 nt, Human
auaucauucagcaac

SEQ ID NO: 1893855 - RNA, 21 nt, Human
auaugcuuauacacuuacacu

SEQ ID NO: 1893856 - RNA, 22 nt, Human
auauuaccacagacauacuaac

SEQ ID NO: 1893857 - RNA, 19 nt, Human
auauuaccacagacauacu

SEQ ID NO: 1893858 - RNA, 19 nt, Human
auauuuacuucuuauacau

SEQ ID NO: 1893859 - RNA, 23 nt, Human
auauuuauuauuuucaccuguuu

SEQ ID NO: 1893860 - RNA, 14 nt, Human
auauuuacguauga

SEQ ID NO: 1893861 - RNA, 23 nt, Human
auauuaugaagcuuuuaugugaa

SEQ ID NO: 1893862 - RNA, 23 nt, Human
auagcaucuuugaauacaaagaa

SEQ ID NO: 1893863 - RNA, 22 nt, Human
auagcaucuuguggcuuugcaa

SEQ ID NO: 1893864 - RNA, 15 nt, Human
auagccaaggccaaa

SEQ ID NO: 1893865 - RNA, 21 nt, Human
auagccaaggccaaaggaagc

SEQ ID NO: 1893866 - RNA, 13 nt, Human
auagccacauuug

SEQ ID NO: 1893867 - RNA, 16 nt, Human
auagccacauuuggaa

SEQ ID NO: 1893868 - RNA, 21 nt, Human
auagccacauuuggaauacuu

SEQ ID NO: 1893869 - RNA, 22 nt, Human
auagccacauuuggaauacuuu

SEQ ID NO: 1893870 - RNA, 23 nt, Human
auagccacauuuggaauacuuuu

SEQ ID NO: 1893871 - RNA, 18 nt, Human
auagcagcuuauucacaa

SEQ ID NO: 1893872 - RNA, 15 nt, Human
auagguuuaauaauu

SEQ ID NO: 1893873 - RNA, 18 nt, Human
auagguuuggacaaaaug

SEQ ID NO: 1893874 - RNA, 14 nt, Human
auagguuuggacaa

SEQ ID NO: 1893875 - RNA, 18 nt, Human
auaguaugguggcugggu

SEQ ID NO: 1893876 - RNA, 17 nt, Human
auaguaugguggcuggg

SEQ ID NO: 1893877 - RNA, 22 nt, Human
auauacucuagaugaaguuuua

SEQ ID NO: 1893878 - RNA, 11 nt, Human
auauacuuuuu

SEQ ID NO: 1893879 - RNA, 20 nt, Human
auauacuuuuuuuucuuuaa

SEQ ID NO: 1893880 - RNA, 19 nt, Human
auagcaugacauuucuuug

SEQ ID NO: 1893881 - RNA, 14 nt, Human
auaccucugugugc

SEQ ID NO: 1893882 - RNA, 13 nt, Human
auaccucugugug

SEQ ID NO: 1893883 - RNA, 12 nt, Human
auaccucugugu

SEQ ID NO: 1893884 - RNA, 18 nt, Human
auaccugucccccugaca

SEQ ID NO: 1893885 - RNA, 11 nt, Human
auacccacccc

SEQ ID NO: 1893886 - RNA, 12 nt, Human
auacccaccccc

SEQ ID NO: 1893887 - RNA, 15 nt, Human
auaauguaagcucua

SEQ ID NO: 1893888 - RNA, 11 nt, Human
auaaugucucu

SEQ ID NO: 1893889 - RNA, 19 nt, Human
auaaugucucugugagacu

SEQ ID NO: 1893890 - RNA, 15 nt, Human
auaaugucucuguga

SEQ ID NO: 1893891 - RNA, 20 nt, Human
auacaccacuacauucuguu

SEQ ID NO: 1893892 - RNA, 19 nt, Human
auacaccacuacauucugu

SEQ ID NO: 1893893 - RNA, 21 nt, Human
auacaccacuacauucuguua

SEQ ID NO: 1893894 - RNA, 18 nt, Human
auacaccacuacauucug

SEQ ID NO: 1893895 - RNA, 21 nt, Human
auaaugcgugcauaccacuuu

SEQ ID NO: 1893896 - RNA, 20 nt, Human
auaaugcgugcauaccacuu

SEQ ID NO: 1893897 - RNA, 14 nt, Human
auaauguaagcucu

SEQ ID NO: 1893898 - RNA, 19 nt, Human
auaaggccauaaaacaggu

SEQ ID NO: 1893899 - RNA, 18 nt, Human
auaaaggauuaaugucaa

SEQ ID NO: 1893900 - RNA, 22 nt, Human
auaaauuuuuuuuguuucauau

SEQ ID NO: 1893901 - RNA, 19 nt, Human
auaaauuuuuuuuguuuca

SEQ ID NO: 1893902 - RNA, 11 nt, Human
auaaagacagg

SEQ ID NO: 1893903 - RNA, 13 nt, Human
auaaagcagcguu

SEQ ID NO: 1893904 - RNA, 20 nt, Human
auaaagcagcguuucuauga

SEQ ID NO: 1893905 - RNA, 19 nt, Human
auaaagcagcguuucuaug

SEQ ID NO: 1893906 - RNA, 18 nt, Human
auaaagcagcguuucuau

SEQ ID NO: 1893907 - RNA, 14 nt, Human
auaaagcagcguuu

SEQ ID NO: 1893908 - RNA, 15 nt, Human
auaaagcaggcagaa

SEQ ID NO: 1893909 - RNA, 14 nt, Human
auaaagcauuuaua

SEQ ID NO: 1893910 - RNA, 18 nt, Human
auaaagcauuuauaaauu

SEQ ID NO: 1893911 - RNA, 14 nt, Human
auaaagcccuggga

SEQ ID NO: 1893912 - RNA, 20 nt, Human
auaaagcccugggaucacug

SEQ ID NO: 1893913 - RNA, 18 nt, Human
auaaagcuguguggcagu

SEQ ID NO: 1893914 - RNA, 13 nt, Human
auaaaggauguga

SEQ ID NO: 1893915 - RNA, 14 nt, Human
auaaaggaugugau

SEQ ID NO: 1893916 - RNA, 17 nt, Human
auaaaggaugugauugu

SEQ ID NO: 1893917 - RNA, 21 nt, Human
auaaaggaugugauuguggaa

SEQ ID NO: 1893918 - RNA, 22 nt, Human
auaaaggaugugauuguggaau

SEQ ID NO: 1893919 - RNA, 11 nt, Human
auaaaacuuuu

SEQ ID NO: 1893920 - RNA, 15 nt, Human
auaaaacuuuuuaaa

SEQ ID NO: 1893921 - RNA, 22 nt, Human
auaaaaauaaauuugguucuaa

SEQ ID NO: 1893922 - RNA, 13 nt, Human
auaaaaauaaauu

SEQ ID NO: 1893923 - RNA, 12 nt, Human
auaaaaaggugu

SEQ ID NO: 1893924 - RNA, 20 nt, Human
auaaacuuuuuucuuacugu

SEQ ID NO: 1893925 - RNA, 24 nt, Human
auaaacuuuaccuuuuuuauacau

SEQ ID NO: 1893926 - RNA, 16 nt, Human
auaaacuuuaccuuuu

SEQ ID NO: 1893927 - RNA, 21 nt, Human
auaaacuuuaccuuuuuuaua

SEQ ID NO: 1893928 - RNA, 17 nt, Human
auaaaacuuuuuaaaau

SEQ ID NO: 1893929 - RNA, 23 nt, Human
aguugaaaaucuuauaauuuaaa

SEQ ID NO: 1893930 - RNA, 19 nt, Human
aguugaaccuauuucucuu

SEQ ID NO: 1893931 - RNA, 17 nt, Human
aguugaaccuauuucuc

SEQ ID NO: 1893932 - RNA, 14 nt, Human
aguugaagacagag

SEQ ID NO: 1893933 - RNA, 16 nt, Human
aguuguguuugaagca

SEQ ID NO: 1893934 - RNA, 20 nt, Human
aguuguuugauucagacagc

SEQ ID NO: 1893935 - RNA, 16 nt, Human
aguuguuaauaaaagu

SEQ ID NO: 1893936 - RNA, 22 nt, Human
aguugaaaaucuuauaauuuaa

SEQ ID NO: 1893937 - RNA, 18 nt, Human
aguuccaaaaugccaaau

SEQ ID NO: 1893938 - RNA, 22 nt, Human
aguucauguauguucagaagaa

SEQ ID NO: 1893939 - RNA, 19 nt, Human
aguucagguaacaggcaga

SEQ ID NO: 1893940 - RNA, 17 nt, Human
aguuacagacaaagcgu

SEQ ID NO: 1893941 - RNA, 20 nt, Human
aguucagguaacaggcagau

SEQ ID NO: 1893942 - RNA, 18 nt, Human
aguucauaaauuuauggu

SEQ ID NO: 1893943 - RNA, 12 nt, Human
aguuaaauaaau

SEQ ID NO: 1893944 - RNA, 14 nt, Human
aguuacagacaaag

SEQ ID NO: 1893945 - RNA, 16 nt, Human
aguuacagacaaagcg

SEQ ID NO: 1893946 - RNA, 18 nt, Human
aguuacacuaaaagguga

SEQ ID NO: 1893947 - RNA, 14 nt, Human
agugggagcugccu

SEQ ID NO: 1893948 - RNA, 15 nt, Human
agugggagcugccug

SEQ ID NO: 1893949 - RNA, 16 nt, Human
agugggagcugccugu

SEQ ID NO: 1893950 - RNA, 18 nt, Human
aguguauuuuuuuacuaa

SEQ ID NO: 1893951 - RNA, 17 nt, Human
aguguauuuuuuuacua

SEQ ID NO: 1893952 - RNA, 16 nt, Human
aguguauuuuucaaua

SEQ ID NO: 1893953 - RNA, 21 nt, Human
aguguauuuuucaauaaagca

SEQ ID NO: 1893954 - RNA, 23 nt, Human
aguggcuuaaaacaacacucaca

SEQ ID NO: 1893955 - RNA, 18 nt, Human
aguggcuucacuccugcu

SEQ ID NO: 1893956 - RNA, 19 nt, Human
aguggcuucacuccugcug

SEQ ID NO: 1893957 - RNA, 21 nt, Human
aguggcuucacuccugcugua

SEQ ID NO: 1893958 - RNA, 20 nt, Human
aguggcuucacuccugcugu

SEQ ID NO: 1893959 - RNA, 16 nt, Human
aguggcuggaucugug

SEQ ID NO: 1893960 - RNA, 14 nt, Human
aguguccuuagaac

SEQ ID NO: 1893961 - RNA, 12 nt, Human
aguccuguaaug

SEQ ID NO: 1893962 - RNA, 17 nt, Human
agucugaaggcuggguu

SEQ ID NO: 1893963 - RNA, 16 nt, Human
agucugaaggcugggu

SEQ ID NO: 1893964 - RNA, 13 nt, Human
agucugaaggcug

SEQ ID NO: 1893965 - RNA, 15 nt, Human
agucugaaggcuggg

SEQ ID NO: 1893966 - RNA, 22 nt, Human
aguccuggcaugggaaugaaug

SEQ ID NO: 1893967 - RNA, 20 nt, Human
aguccuggcaugggaaugaa

SEQ ID NO: 1893968 - RNA, 21 nt, Human
aguccuggcaugggaaugaau

SEQ ID NO: 1893969 - RNA, 18 nt, Human
agucuggaaugcaguggu

SEQ ID NO: 1893970 - RNA, 20 nt, Human
agugaacuugggccacugug

SEQ ID NO: 1893971 - RNA, 17 nt, Human
agucuggaaugcagugg

SEQ ID NO: 1893972 - RNA, 23 nt, Human
agucugcgucucugcuuuaaagu

SEQ ID NO: 1893973 - RNA, 18 nt, Human
agucugauucccaagcuc

SEQ ID NO: 1893974 - RNA, 16 nt, Human
agucugauucccaagc

SEQ ID NO: 1893975 - RNA, 20 nt, Human
agucugauucccaagcucug

SEQ ID NO: 1893976 - RNA, 16 nt, Human
agugaagacaaugacu

SEQ ID NO: 1893977 - RNA, 14 nt, Human
agugaagacaauga

SEQ ID NO: 1893978 - RNA, 16 nt, Human
agugaagacuggaagc

SEQ ID NO: 1893979 - RNA, 19 nt, Human
agugaaguugcuucuucua

SEQ ID NO: 1893980 - RNA, 17 nt, Human
agugaagugagaaguuc

SEQ ID NO: 1893981 - RNA, 14 nt, Human
aguaugguggcugg

SEQ ID NO: 1893982 - RNA, 22 nt, Human
agucaaaugguaggcauuuccu

SEQ ID NO: 1893983 - RNA, 23 nt, Human
agucaaaugguaggcauuuccua

SEQ ID NO: 1893984 - RNA, 14 nt, Human
agucaaauuaauaa

SEQ ID NO: 1893985 - RNA, 15 nt, Human
agucaaauuaauaau

SEQ ID NO: 1893986 - RNA, 18 nt, Human
agucaaauuaauaaucuu

SEQ ID NO: 1893987 - RNA, 20 nt, Human
agucaaauuaauaaucuuau

SEQ ID NO: 1893988 - RNA, 22 nt, Human
agucaaauuaauaaucuuauua

SEQ ID NO: 1893989 - RNA, 16 nt, Human
aguaugaggcauuugu

SEQ ID NO: 1893990 - RNA, 15 nt, Human
aguaugaggcauuug

SEQ ID NO: 1893991 - RNA, 16 nt, Human
aguaucuuuuuauuca

SEQ ID NO: 1893992 - RNA, 11 nt, Human
aguaucuugaa

SEQ ID NO: 1893993 - RNA, 12 nt, Human
aguaucuugaag

SEQ ID NO: 1893994 - RNA, 15 nt, Human
aguaucuugaagacu

SEQ ID NO: 1893995 - RNA, 15 nt, Human
aucaugugaaaucau

SEQ ID NO: 1893996 - RNA, 22 nt, Human
aucagcuggucaaacaaacucu

SEQ ID NO: 1893997 - RNA, 14 nt, Human
aucaugugaaauca

SEQ ID NO: 1893998 - RNA, 16 nt, Human
aucaugugaaaucauu

SEQ ID NO: 1893999 - RNA, 20 nt, Human
aucagccugcuccagcuguu

SEQ ID NO: 1894000 - RNA, 19 nt, Human
aucagccugcuccagcugu

SEQ ID NO: 1894001 - RNA, 17 nt, Human
aucagccugcuccagcu

SEQ ID NO: 1894002 - RNA, 18 nt, Human
aucagccugcuccagcug

SEQ ID NO: 1894003 - RNA, 14 nt, Human
aucagccugugcca

SEQ ID NO: 1894004 - RNA, 18 nt, Human
aucagcuccacuuucagu

SEQ ID NO: 1894005 - RNA, 23 nt, Human
aucagcacgauuucuguuuagau

SEQ ID NO: 1894006 - RNA, 20 nt, Human
aucagcacgauuucuguuua

SEQ ID NO: 1894007 - RNA, 19 nt, Human
aucagcacgauuucuguuu

SEQ ID NO: 1894008 - RNA, 14 nt, Human
aucaccgaaaacgu

SEQ ID NO: 1894009 - RNA, 19 nt, Human
aucaccgaaaacguggcug

SEQ ID NO: 1894010 - RNA, 21 nt, Human
aucaccgaaaacguggcugcu

SEQ ID NO: 1894011 - RNA, 21 nt, Human
aucacagccucugaaaaccaa

SEQ ID NO: 1894012 - RNA, 18 nt, Human
aucaccaacgucugugcc

SEQ ID NO: 1894013 - RNA, 19 nt, Human
aucaccaacgucugugcca

SEQ ID NO: 1894014 - RNA, 19 nt, Human
auccucccaccucagccuc

SEQ ID NO: 1894015 - RNA, 18 nt, Human
auccucccaccucagccu

SEQ ID NO: 1894016 - RNA, 20 nt, Human
auccucccaccucagccucc

SEQ ID NO: 1894017 - RNA, 21 nt, Human
aucggaucuggggcucuggga

SEQ ID NO: 1894018 - RNA, 15 nt, Human
auccucccaccucag

SEQ ID NO: 1894019 - RNA, 23 nt, Human
auccuccaggugcacaagcucca

SEQ ID NO: 1894020 - RNA, 11 nt, Human
auccuccaggu

SEQ ID NO: 1894021 - RNA, 11 nt, Human
auccuccagca

SEQ ID NO: 1894022 - RNA, 13 nt, Human
auccuccagcagg

SEQ ID NO: 1894023 - RNA, 15 nt, Human
auccuccagcaggga

SEQ ID NO: 1894024 - RNA, 22 nt, Human
auccccgcagugugcacuaagg

SEQ ID NO: 1894025 - RNA, 15 nt, Human
auccccuguagagug

SEQ ID NO: 1894026 - RNA, 12 nt, Human
auccccugccuc

SEQ ID NO: 1894027 - RNA, 13 nt, Human
auccccugccucc

SEQ ID NO: 1894028 - RNA, 13 nt, Human
auccuauucuuuc

SEQ ID NO: 1894029 - RNA, 21 nt, Human
auccuauugaaccauguuugu

SEQ ID NO: 1894030 - RNA, 14 nt, Human
aucccauuuaaaaa

SEQ ID NO: 1894031 - RNA, 14 nt, Human
auccaggcagaucc

SEQ ID NO: 1894032 - RNA, 15 nt, Human
auccaggcagaucca

SEQ ID NO: 1894033 - RNA, 16 nt, Human
auccaggcagauccag

SEQ ID NO: 1894034 - RNA, 15 nt, Human
aucccauuuaaaaaa

SEQ ID NO: 1894035 - RNA, 22 nt, Human
auccaggacuauauuugggccu

SEQ ID NO: 1894036 - RNA, 23 nt, Human
auccaggacuauauuugggccug

SEQ ID NO: 1894037 - RNA, 15 nt, Human
auccagacccggcug

SEQ ID NO: 1894038 - RNA, 18 nt, Human
auccagaaagaaaacuug

SEQ ID NO: 1894039 - RNA, 16 nt, Human
auccagaaagaaaacu

SEQ ID NO: 1894040 - RNA, 22 nt, Human
aucuucugaacuuggcgcugcc

SEQ ID NO: 1894041 - RNA, 18 nt, Human
aucuugaagacuuuucuu

SEQ ID NO: 1894042 - RNA, 14 nt, Human
aucuucuuuauaau

SEQ ID NO: 1894043 - RNA, 18 nt, Human
aucuugaauaauguaaga

SEQ ID NO: 1894044 - RNA, 17 nt, Human
aucuugaauuguaagga

SEQ ID NO: 1894045 - RNA, 18 nt, Human
aucucccuucacaaguuu

SEQ ID NO: 1894046 - RNA, 22 nt, Human
aucugcuuuuuaaagaaugcuc

SEQ ID NO: 1894047 - RNA, 11 nt, Human
aucuggaaccc

SEQ ID NO: 1894048 - RNA, 14 nt, Human
aucuggaacccaga

SEQ ID NO: 1894049 - RNA, 15 nt, Human
aucuggaacccagac

SEQ ID NO: 1894050 - RNA, 16 nt, Human
aucuggaacccagacu

SEQ ID NO: 1894051 - RNA, 17 nt, Human
aucuggaacccagacuc

SEQ ID NO: 1894052 - RNA, 18 nt, Human
aucuggaacccagacuca

SEQ ID NO: 1894053 - RNA, 23 nt, Human
aucuauucucuccaaaaaugcac

SEQ ID NO: 1894054 - RNA, 21 nt, Human
aucucccccagccccauccuc

SEQ ID NO: 1894055 - RNA, 15 nt, Human
aucuauuaaaaccac

SEQ ID NO: 1894056 - RNA, 21 nt, Human
aucuauauuuuacauaaauuu

SEQ ID NO: 1894057 - RNA, 13 nt, Human
aucuauauuuugg

SEQ ID NO: 1894058 - RNA, 17 nt, Human
aucuauauuuuacauaa

SEQ ID NO: 1894059 - RNA, 14 nt, Human
aucuauauuuuaca

SEQ ID NO: 1894060 - RNA, 13 nt, Human
augaaagacugua

SEQ ID NO: 1894061 - RNA, 16 nt, Human
augaaagacuguacaa

SEQ ID NO: 1894062 - RNA, 17 nt, Human
augaaagacuguacaaa

SEQ ID NO: 1894063 - RNA, 19 nt, Human
augaaagacuguacaaagu

SEQ ID NO: 1894064 - RNA, 23 nt, Human
augaaaaaauauauaucaaauau

SEQ ID NO: 1894065 - RNA, 19 nt, Human
augaaguuuuuuuuauaca

SEQ ID NO: 1894066 - RNA, 14 nt, Human
augaaguuuuacau

SEQ ID NO: 1894067 - RNA, 16 nt, Human
augaaguuuuacauug

SEQ ID NO: 1894068 - RNA, 22 nt, Human
augaagcuuuuaugugaaacau

SEQ ID NO: 1894069 - RNA, 21 nt, Human
augaaggagaggcaacaucca

SEQ ID NO: 1894070 - RNA, 19 nt, Human
augaagguuucugaaaauu

SEQ ID NO: 1894071 - RNA, 17 nt, Human
augaagguuucugaaaa

SEQ ID NO: 1894072 - RNA, 21 nt, Human
augaccuuucaauaggaaaaa

SEQ ID NO: 1894073 - RNA, 22 nt, Human
augaccuuucaauaggaaaaac

SEQ ID NO: 1894074 - RNA, 23 nt, Human
augaccuuucaauaggaaaaacu

SEQ ID NO: 1894075 - RNA, 11 nt, Human
augcugcccug

SEQ ID NO: 1894076 - RNA, 12 nt, Human
augcugccccuc

SEQ ID NO: 1894077 - RNA, 18 nt, Human
augcugcaggacuugaga

SEQ ID NO: 1894078 - RNA, 19 nt, Human
augcugcaggacuugagaa

SEQ ID NO: 1894079 - RNA, 16 nt, Human
augcucuuuacuucau

SEQ ID NO: 1894080 - RNA, 23 nt, Human
auggaaaggagccuaggccaggu

SEQ ID NO: 1894081 - RNA, 15 nt, Human
auggauuuccagcca

SEQ ID NO: 1894082 - RNA, 19 nt, Human
auggauucuccacucaguu

SEQ ID NO: 1894083 - RNA, 14 nt, Human
augcuuguacauaa

SEQ ID NO: 1894084 - RNA, 13 nt, Human
augcuuguacaua

SEQ ID NO: 1894085 - RNA, 12 nt, Human
augcuuguacau

SEQ ID NO: 1894086 - RNA, 12 nt, Human
augcugcccugu

SEQ ID NO: 1894087 - RNA, 16 nt, Human
auggaaacugaaacua

SEQ ID NO: 1894088 - RNA, 16 nt, Human
auggcuguggagugug

SEQ ID NO: 1894089 - RNA, 24 nt, Human
augauguuuuccaugaguccccug

SEQ ID NO: 1894090 - RNA, 17 nt, Human
augaugcuauuugcaau

SEQ ID NO: 1894091 - RNA, 16 nt, Human
augaugcuauuugcaa

SEQ ID NO: 1894092 - RNA, 15 nt, Human
augcacaaacagagg

SEQ ID NO: 1894093 - RNA, 16 nt, Human
augaugccaugaggaa

SEQ ID NO: 1894094 - RNA, 17 nt, Human
augaugccaugaggaac

SEQ ID NO: 1894095 - RNA, 16 nt, Human
augcauauuauuuuau

SEQ ID NO: 1894096 - RNA, 20 nt, Human
augcauauuauuuuauguug

SEQ ID NO: 1894097 - RNA, 17 nt, Human
augccucucucaggcca

SEQ ID NO: 1894098 - RNA, 16 nt, Human
augcaugaaguaauau

SEQ ID NO: 1894099 - RNA, 19 nt, Human
augccucucucaggccaaa

SEQ ID NO: 1894100 - RNA, 16 nt, Human
augcacagaguuguua

SEQ ID NO: 1894101 - RNA, 16 nt, Human
augcacaaacagaggc

SEQ ID NO: 1894102 - RNA, 17 nt, Human
augcacaaacagaggcc

SEQ ID NO: 1894103 - RNA, 18 nt, Human
augcacagaguuguuaca

SEQ ID NO: 1894104 - RNA, 17 nt, Human
augcacagaguuguuac

SEQ ID NO: 1894105 - RNA, 23 nt, Human
auguaauuaaguacuauguauca

SEQ ID NO: 1894106 - RNA, 23 nt, Human
auguauuuucuucaccucugcua

SEQ ID NO: 1894107 - RNA, 15 nt, Human
auggucggaaaacau

SEQ ID NO: 1894108 - RNA, 15 nt, Human
auguaauuaaguacu

SEQ ID NO: 1894109 - RNA, 17 nt, Human
auguaauuaaguacuau

SEQ ID NO: 1894110 - RNA, 19 nt, Human
auggucaccaaaucagcug

SEQ ID NO: 1894111 - RNA, 15 nt, Human
auggucacacacuga

SEQ ID NO: 1894112 - RNA, 16 nt, Human
auggucacacacugau

SEQ ID NO: 1894113 - RNA, 18 nt, Human
auggucacacacugaugc

SEQ ID NO: 1894114 - RNA, 19 nt, Human
auggucacacacugaugcu

SEQ ID NO: 1894115 - RNA, 20 nt, Human
auggucacacacugaugcuu

SEQ ID NO: 1894116 - RNA, 14 nt, Human
auggucacacacug

SEQ ID NO: 1894117 - RNA, 14 nt, Human
augucuuuucuugc

SEQ ID NO: 1894118 - RNA, 15 nt, Human
augugaaacauguuu

SEQ ID NO: 1894119 - RNA, 22 nt, Human
augugaaacuggauuaaacuua

SEQ ID NO: 1894120 - RNA, 23 nt, Human
augugaacaguuguguuugaagc

SEQ ID NO: 1894121 - RNA, 21 nt, Human
augugaacaguuguguuugaa

SEQ ID NO: 1894122 - RNA, 11 nt, Human
augugaacagu

SEQ ID NO: 1894123 - RNA, 17 nt, Human
augugaacuuuauuaaa

SEQ ID NO: 1894124 - RNA, 12 nt, Human
augugaagccaa

SEQ ID NO: 1894125 - RNA, 21 nt, Human
augugaagccaauucagacag

SEQ ID NO: 1894126 - RNA, 22 nt, Human
augugaagccaauucagacagg

SEQ ID NO: 1894127 - RNA, 15 nt, Human
augugaacuuuauua

SEQ ID NO: 1894128 - RNA, 20 nt, Human
augugggcuaguugggcuuc

SEQ ID NO: 1894129 - RNA, 17 nt, Human
auguucuaagaagugaa

SEQ ID NO: 1894130 - RNA, 22 nt, Human
auguuccuuuggaagaaaaaau

SEQ ID NO: 1894131 - RNA, 12 nt, Human
auguucugggac

SEQ ID NO: 1894132 - RNA, 11 nt, Human
auguucuggga

SEQ ID NO: 1894133 - RNA, 13 nt, Human
auguucugcuuuc

SEQ ID NO: 1894134 - RNA, 13 nt, Human
auguucugggaca

SEQ ID NO: 1894135 - RNA, 19 nt, Human
auguuugccucugccucug

SEQ ID NO: 1894136 - RNA, 15 nt, Human
auguuuccagacuuc

SEQ ID NO: 1894137 - RNA, 22 nt, Human
auguuugccucugccucugaca

SEQ ID NO: 1894138 - RNA, 16 nt, Human
auuaaauacaaaacuu

SEQ ID NO: 1894139 - RNA, 17 nt, Human
auuaaauacaaaacuuc

SEQ ID NO: 1894140 - RNA, 19 nt, Human
auuaaauacaaaacuucca

SEQ ID NO: 1894141 - RNA, 11 nt, Human
auuaaauagcu

SEQ ID NO: 1894142 - RNA, 16 nt, Human
auguggcuugagaaau

SEQ ID NO: 1894143 - RNA, 21 nt, Human
auguggcuugagaaauaugga

SEQ ID NO: 1894144 - RNA, 18 nt, Human
cugcugacuguuuucucu

SEQ ID NO: 1894145 - RNA, 21 nt, Human
cugcugacuguuuucucuuga

SEQ ID NO: 1894146 - RNA, 22 nt, Human
cugcucauucuaaugauggccc

SEQ ID NO: 1894147 - RNA, 18 nt, Human
cugcucagcuucuccugu

SEQ ID NO: 1894148 - RNA, 23 nt, Human
cugcucagggaaaagcagcucuc

SEQ ID NO: 1894149 - RNA, 16 nt, Human
cugcucagcuucuccu

SEQ ID NO: 1894150 - RNA, 22 nt, Human
cugcucagggaaaagcagcucu

SEQ ID NO: 1894151 - RNA, 23 nt, Human
cugccuguugggccaggagccuc

SEQ ID NO: 1894152 - RNA, 21 nt, Human
cugccuguugggccaggagcc

SEQ ID NO: 1894153 - RNA, 22 nt, Human
cugccuguugggccaggagccu

SEQ ID NO: 1894154 - RNA, 15 nt, Human
cugcucagcuucucc

SEQ ID NO: 1894155 - RNA, 14 nt, Human
cugcuauagccugg

SEQ ID NO: 1894156 - RNA, 15 nt, Human
cugcuauagccuggg

SEQ ID NO: 1894157 - RNA, 21 nt, Human
cugccucccgcccccuuggcu

SEQ ID NO: 1894158 - RNA, 20 nt, Human
cugccuccccucuccuuccu

SEQ ID NO: 1894159 - RNA, 21 nt, Human
cugaugaacucuuaaucaaau

SEQ ID NO: 1894160 - RNA, 19 nt, Human
cugccuguucagcuccagc

SEQ ID NO: 1894161 - RNA, 20 nt, Human
cugccuguugggccaggagc

SEQ ID NO: 1894162 - RNA, 18 nt, Human
cugccuguucagcuccag

SEQ ID NO: 1894163 - RNA, 17 nt, Human
cugccuguucagcucca

SEQ ID NO: 1894164 - RNA, 23 nt, Human
cugccugguccucacacucaccc

SEQ ID NO: 1894165 - RNA, 19 nt, Human
cugccugguccucacacuc

SEQ ID NO: 1894166 - RNA, 17 nt, Human
cugccugguccucacac

SEQ ID NO: 1894167 - RNA, 23 nt, Human
cugccuccgcgugaucaaagcca

SEQ ID NO: 1894168 - RNA, 23 nt, Human
cugccucucccaucacuucccua

SEQ ID NO: 1894169 - RNA, 15 nt, Human
cugccucucccauca

SEQ ID NO: 1894170 - RNA, 22 nt, Human
cugccucucccaucacuucccu

SEQ ID NO: 1894171 - RNA, 20 nt, Human
cugcuuuugucuaugggacu

SEQ ID NO: 1894172 - RNA, 22 nt, Human
cugcuucaaggauccugagcca

SEQ ID NO: 1894173 - RNA, 23 nt, Human
cugcuucaaggauccugagccag

SEQ ID NO: 1894174 - RNA, 19 nt, Human
cugcuucaaauauuucccu

SEQ ID NO: 1894175 - RNA, 12 nt, Human
cugcuucaagga

SEQ ID NO: 1894176 - RNA, 13 nt, Human
cugcuucaaggau

SEQ ID NO: 1894177 - RNA, 21 nt, Human
cugcuucaaggauccugagcc

SEQ ID NO: 1894178 - RNA, 14 nt, Human
cugcuucaaauauu

SEQ ID NO: 1894179 - RNA, 13 nt, Human
cuggaguuucaug

SEQ ID NO: 1894180 - RNA, 22 nt, Human
cuggaguuucauguacaagaug

SEQ ID NO: 1894181 - RNA, 18 nt, Human
cuggaguuucauguacaa

SEQ ID NO: 1894182 - RNA, 21 nt, Human
cuggacugaccugguccacag

SEQ ID NO: 1894183 - RNA, 12 nt, Human
cuggacugaggc

SEQ ID NO: 1894184 - RNA, 14 nt, Human
cuggacugaccugg

SEQ ID NO: 1894185 - RNA, 18 nt, Human
cuggacugaggccugagc

SEQ ID NO: 1894186 - RNA, 16 nt, Human
cuggacugaggccuga

SEQ ID NO: 1894187 - RNA, 15 nt, Human
cuggacugaggccug

SEQ ID NO: 1894188 - RNA, 13 nt, Human
cuggacugaggcc

SEQ ID NO: 1894189 - RNA, 13 nt, Human
cuggacuuggagg

SEQ ID NO: 1894190 - RNA, 14 nt, Human
cuggagaaaaugga

SEQ ID NO: 1894191 - RNA, 20 nt, Human
cuggaguugaucuggaaccc

SEQ ID NO: 1894192 - RNA, 22 nt, Human
cuggaguugaucuggaacccag

SEQ ID NO: 1894193 - RNA, 21 nt, Human
cugcuuuugucuaugggacuc

SEQ ID NO: 1894194 - RNA, 19 nt, Human
cugcuuuuuaaagaaugcu

SEQ ID NO: 1894195 - RNA, 14 nt, Human
cuggaacuugggga

SEQ ID NO: 1894196 - RNA, 14 nt, Human
cuggaagcacagcu

SEQ ID NO: 1894197 - RNA, 12 nt, Human
cugggcagaagg

SEQ ID NO: 1894198 - RNA, 15 nt, Human
cugggcagaaggaag

SEQ ID NO: 1894199 - RNA, 18 nt, Human
cugggccacuucugggug

SEQ ID NO: 1894200 - RNA, 14 nt, Human
cuggggagaaagua

SEQ ID NO: 1894201 - RNA, 17 nt, Human
cuggggaugucucucau

SEQ ID NO: 1894202 - RNA, 16 nt, Human
cuggggaugucucuca

SEQ ID NO: 1894203 - RNA, 20 nt, Human
cuggguucacugcaaccucc

SEQ ID NO: 1894204 - RNA, 18 nt, Human
cuggguucacugcaaccu

SEQ ID NO: 1894205 - RNA, 15 nt, Human
cuggguucacugcaa

SEQ ID NO: 1894206 - RNA, 15 nt, Human
cuggguggggcagug

SEQ ID NO: 1894207 - RNA, 15 nt, Human
cuggggccaggcugg

SEQ ID NO: 1894208 - RNA, 18 nt, Human
cuggggcuagggggagcc

SEQ ID NO: 1894209 - RNA, 15 nt, Human
cuggggcucugggau

SEQ ID NO: 1894210 - RNA, 14 nt, Human
cuggggcucuggga

SEQ ID NO: 1894211 - RNA, 17 nt, Human
cuggcagaguugaagac

SEQ ID NO: 1894212 - RNA, 18 nt, Human
cuggcagaguugaagaca

SEQ ID NO: 1894213 - RNA, 19 nt, Human
cuggcagaguugaagacag

SEQ ID NO: 1894214 - RNA, 11 nt, Human
cuggcagccca

SEQ ID NO: 1894215 - RNA, 12 nt, Human
cuggcagccccu

SEQ ID NO: 1894216 - RNA, 12 nt, Human
cuggcagccucc

SEQ ID NO: 1894217 - RNA, 14 nt, Human
cuggcagccuccca

SEQ ID NO: 1894218 - RNA, 15 nt, Human
cuggcagccucccau

SEQ ID NO: 1894219 - RNA, 13 nt, Human
cuggcagccccug

SEQ ID NO: 1894220 - RNA, 11 nt, Human
cugggacacag

SEQ ID NO: 1894221 - RNA, 18 nt, Human
cugggaauaagugccagg

SEQ ID NO: 1894222 - RNA, 20 nt, Human
cuggcucucccauuuccuga

SEQ ID NO: 1894223 - RNA, 14 nt, Human
cuggccuagcauac

SEQ ID NO: 1894224 - RNA, 22 nt, Human
cuggccgggaccccgagccugg

SEQ ID NO: 1894225 - RNA, 22 nt, Human
cuggccccucagggucccuggu

SEQ ID NO: 1894226 - RNA, 20 nt, Human
cuggcagccucccauccagg

SEQ ID NO: 1894227 - RNA, 22 nt, Human
cuggcagccucccauccagggc

SEQ ID NO: 1894228 - RNA, 23 nt, Human
cuggcagccucccauccagggcc

SEQ ID NO: 1894229 - RNA, 23 nt, Human
cuggccccugagaucucugcagg

SEQ ID NO: 1894230 - RNA, 22 nt, Human
cuggccccugagaucucugcag

SEQ ID NO: 1894231 - RNA, 18 nt, Human
cuggccccugagaucucu

SEQ ID NO: 1894232 - RNA, 15 nt, Human
cuuaggaagaauuuu

SEQ ID NO: 1894233 - RNA, 17 nt, Human
cuuaggaagagaaacca

SEQ ID NO: 1894234 - RNA, 22 nt, Human
cuuaggaagagaaaccagggag

SEQ ID NO: 1894235 - RNA, 15 nt, Human
cuuaggccagcacca

SEQ ID NO: 1894236 - RNA, 19 nt, Human
cuuagggaaggauacaaaa

SEQ ID NO: 1894237 - RNA, 12 nt, Human
cuuaggccuucc

SEQ ID NO: 1894238 - RNA, 13 nt, Human
cuuaggccuuccu

SEQ ID NO: 1894239 - RNA, 15 nt, Human
cuuaggccuuccucu

SEQ ID NO: 1894240 - RNA, 17 nt, Human
cuuaggccuuccucucu

SEQ ID NO: 1894241 - RNA, 21 nt, Human
cuuagggaaggauacaaaagc

SEQ ID NO: 1894242 - RNA, 23 nt, Human
cuuaggccuuccucucuccagau

SEQ ID NO: 1894243 - RNA, 22 nt, Human
cuuagcucauucuccuuguguu

SEQ ID NO: 1894244 - RNA, 16 nt, Human
cuuaccagcagagcac

SEQ ID NO: 1894245 - RNA, 17 nt, Human
cuuagcuccccuccaac

SEQ ID NO: 1894246 - RNA, 23 nt, Human
cuuagcucauucuccuuguguua

SEQ ID NO: 1894247 - RNA, 14 nt, Human
cuuagcuccccucc

SEQ ID NO: 1894248 - RNA, 23 nt, Human
cuguucaauguuuuuaaaaaucu

SEQ ID NO: 1894249 - RNA, 22 nt, Human
cuguucaauguuuuuaaaaauc

SEQ ID NO: 1894250 - RNA, 14 nt, Human
cuguuggcuggggg

SEQ ID NO: 1894251 - RNA, 22 nt, Human
cuguuggcugggggccucagug

SEQ ID NO: 1894252 - RNA, 19 nt, Human
cuguuggcugggggccuca

SEQ ID NO: 1894253 - RNA, 12 nt, Human
cuguuuaagaga

SEQ ID NO: 1894254 - RNA, 14 nt, Human
cuguuuaagagaca

SEQ ID NO: 1894255 - RNA, 21 nt, Human
cuuaaaaaugguuuaaauggu

SEQ ID NO: 1894256 - RNA, 17 nt, Human
cuguugucaccuucacc

SEQ ID NO: 1894257 - RNA, 18 nt, Human
cuguugucaccuucaccu

SEQ ID NO: 1894258 - RNA, 23 nt, Human
cuguugucaccuucaccuccuuu

SEQ ID NO: 1894259 - RNA, 21 nt, Human
cuguugucaccuucaccuccu

SEQ ID NO: 1894260 - RNA, 14 nt, Human
cuuaaaacaacacu

SEQ ID NO: 1894261 - RNA, 17 nt, Human
cuuacaagccagcugga

SEQ ID NO: 1894262 - RNA, 16 nt, Human
cuuacaagccagcugg

SEQ ID NO: 1894263 - RNA, 20 nt, Human
cuuacauuuuacuuuuuccu

SEQ ID NO: 1894264 - RNA, 20 nt, Human
cuuacauuguucaauuagaa

SEQ ID NO: 1894265 - RNA, 15 nt, Human
cuuaccagcagagca

SEQ ID NO: 1894266 - RNA, 22 nt, Human
cuggugacaugucuuuucuugc

SEQ ID NO: 1894267 - RNA, 13 nt, Human
cuguagaguggga

SEQ ID NO: 1894268 - RNA, 19 nt, Human
cuguagaaaagggaacuga

SEQ ID NO: 1894269 - RNA, 15 nt, Human
cuguacucuuagaug

SEQ ID NO: 1894270 - RNA, 16 nt, Human
cuguacugggccaugu

SEQ ID NO: 1894271 - RNA, 16 nt, Human
cugucgcccagucugg

SEQ ID NO: 1894272 - RNA, 15 nt, Human
cugucgcccagucug

SEQ ID NO: 1894273 - RNA, 19 nt, Human
cugucaauuacaggaagua

SEQ ID NO: 1894274 - RNA, 20 nt, Human
cugucaauuacaggaaguac

SEQ ID NO: 1894275 - RNA, 23 nt, Human
cugucaauuacaggaaguacugg

SEQ ID NO: 1894276 - RNA, 14 nt, Human
cugucauagaaagu

SEQ ID NO: 1894277 - RNA, 21 nt, Human
cuguccugggagugagcuggu

SEQ ID NO: 1894278 - RNA, 13 nt, Human
cuguccugggccu

SEQ ID NO: 1894279 - RNA, 14 nt, Human
cuguccugggccug

SEQ ID NO: 1894280 - RNA, 18 nt, Human
cuguccugggccugcaga

SEQ ID NO: 1894281 - RNA, 17 nt, Human
cuguccuccaagccagc

SEQ ID NO: 1894282 - RNA, 16 nt, Human
cugugacccccagcuc

SEQ ID NO: 1894283 - RNA, 17 nt, Human
cugugacccccagcucc

SEQ ID NO: 1894284 - RNA, 18 nt, Human
cugugacccccagcuccg

SEQ ID NO: 1894285 - RNA, 21 nt, Human
cugugacccccagcuccggcc

SEQ ID NO: 1894286 - RNA, 13 nt, Human
cugugacccccag

SEQ ID NO: 1894287 - RNA, 15 nt, Human
cugugacccccagcu

SEQ ID NO: 1894288 - RNA, 12 nt, Human
cugugcugcccu

SEQ ID NO: 1894289 - RNA, 13 nt, Human
cugugcugcccug

SEQ ID NO: 1894290 - RNA, 14 nt, Human
cugugcugcccugc

SEQ ID NO: 1894291 - RNA, 19 nt, Human
cugugccuucuuuugauua

SEQ ID NO: 1894292 - RNA, 16 nt, Human
cugugccuuuugccau

SEQ ID NO: 1894293 - RNA, 13 nt, Human
cuguuagucauuu

SEQ ID NO: 1894294 - RNA, 15 nt, Human
cuguuagucauuugc

SEQ ID NO: 1894295 - RNA, 14 nt, Human
cuguuagucauuug

SEQ ID NO: 1894296 - RNA, 18 nt, Human
cuguuagucauuugcuga

SEQ ID NO: 1894297 - RNA, 21 nt, Human
cugugcugcccugcccaccug

SEQ ID NO: 1894298 - RNA, 19 nt, Human
cuguguauuuuuuaaagcu

SEQ ID NO: 1894299 - RNA, 23 nt, Human
cuguguauuuuuuaaagcuacaa

SEQ ID NO: 1894300 - RNA, 17 nt, Human
cugugucagcauagaag

SEQ ID NO: 1894301 - RNA, 19 nt, Human
cugugucagcauagaagua

SEQ ID NO: 1894302 - RNA, 15 nt, Human
cugugcugcccugcc

SEQ ID NO: 1894303 - RNA, 17 nt, Human
cugugcugcccugccca

SEQ ID NO: 1894304 - RNA, 18 nt, Human
cugugcugcccugcccac

SEQ ID NO: 1894305 - RNA, 19 nt, Human
cugugcugcccugcccacc

SEQ ID NO: 1894306 - RNA, 16 nt, Human
cuuucuacccagcgag

SEQ ID NO: 1894307 - RNA, 15 nt, Human
cuuucuacccagcga

SEQ ID NO: 1894308 - RNA, 15 nt, Human
cuuucuacaauguga

SEQ ID NO: 1894309 - RNA, 18 nt, Human
cuuucuacaaugugaacu

SEQ ID NO: 1894310 - RNA, 20 nt, Human
cuuucuacaaugugaacuuu

SEQ ID NO: 1894311 - RNA, 21 nt, Human
cuuugacucuuuugccauuaa

SEQ ID NO: 1894312 - RNA, 16 nt, Human
cuuugacgccauccca

SEQ ID NO: 1894313 - RNA, 17 nt, Human
cuuugacgccaucccag

SEQ ID NO: 1894314 - RNA, 14 nt, Human
cuuugaccuguugg

SEQ ID NO: 1894315 - RNA, 22 nt, Human
cuuuguauucucuccuguaccu

SEQ ID NO: 1894316 - RNA, 19 nt, Human
cuuuuauaaacuuuaccuu

SEQ ID NO: 1894317 - RNA, 21 nt, Human
cuuuuauaaacuuuaccuuuu

SEQ ID NO: 1894318 - RNA, 20 nt, Human
cuuuuauaaacuuuaccuuu

SEQ ID NO: 1894319 - RNA, 20 nt, Human
cuuugguuaaauagucuaga

SEQ ID NO: 1894320 - RNA, 19 nt, Human
cuuugguuauauuuagcuc

SEQ ID NO: 1894321 - RNA, 20 nt, Human
cuuugauucuccuucagccc

SEQ ID NO: 1894322 - RNA, 22 nt, Human
cuuugauucuccuucagcccuc

SEQ ID NO: 1894323 - RNA, 19 nt, Human
cuuugauucuccuucagcc

SEQ ID NO: 1894324 - RNA, 18 nt, Human
cuuugauucuccuucagc

SEQ ID NO: 1894325 - RNA, 16 nt, Human
cuuugauucuccuuca

SEQ ID NO: 1894326 - RNA, 14 nt, Human
cuuuguaaugaaaa

SEQ ID NO: 1894327 - RNA, 15 nt, Human
cuuuguaaugaaaac

SEQ ID NO: 1894328 - RNA, 14 nt, Human
cuuugguucuggcc

SEQ ID NO: 1894329 - RNA, 19 nt, Human
cuuugguucuggccagaau

SEQ ID NO: 1894330 - RNA, 21 nt, Human
cuuugguucuggccagaaugc

SEQ ID NO: 1894331 - RNA, 20 nt, Human
cuuugguuuaauuuaaagcc

SEQ ID NO: 1894332 - RNA, 16 nt, Human
cuuuguaaugaaaacc

SEQ ID NO: 1894333 - RNA, 17 nt, Human
cuuuguauucucuccug

SEQ ID NO: 1894334 - RNA, 17 nt, Human
cuuucagcagacugauc

SEQ ID NO: 1894335 - RNA, 11 nt, Human
cuugugccaua

SEQ ID NO: 1894336 - RNA, 19 nt, Human
cuugugccauagucacaug

SEQ ID NO: 1894337 - RNA, 20 nt, Human
cuugugacuagugcugaagc

SEQ ID NO: 1894338 - RNA, 15 nt, Human
cuugugcaguguuga

SEQ ID NO: 1894339 - RNA, 23 nt, Human
cuuuaaugucacaggcaggucca

SEQ ID NO: 1894340 - RNA, 14 nt, Human
cuuucacccuuuuc

SEQ ID NO: 1894341 - RNA, 15 nt, Human
cuuucacccuuuucu

SEQ ID NO: 1894342 - RNA, 20 nt, Human
cuuucacccuuuucuguuug

SEQ ID NO: 1894343 - RNA, 19 nt, Human
cuugugacuagugcugaag

SEQ ID NO: 1894344 - RNA, 18 nt, Human
cuugugacuagugcugaa

SEQ ID NO: 1894345 - RNA, 17 nt, Human
cuugugacuagugcuga

SEQ ID NO: 1894346 - RNA, 16 nt, Human
cuugugacuagugcug

SEQ ID NO: 1894347 - RNA, 15 nt, Human
cuugugacuagugcu

SEQ ID NO: 1894348 - RNA, 14 nt, Human
cuugugacuagugc

SEQ ID NO: 1894349 - RNA, 13 nt, Human
cuugucuuuggac

SEQ ID NO: 1894350 - RNA, 15 nt, Human
cuugucuuuggaccc

SEQ ID NO: 1894351 - RNA, 18 nt, Human
cuugucuuuggacccuga

SEQ ID NO: 1894352 - RNA, 19 nt, Human
cuugucuuuggacccugag

SEQ ID NO: 1894353 - RNA, 19 nt, Human
cuuggugucgggcaugaca

SEQ ID NO: 1894354 - RNA, 20 nt, Human
cuuggugucgggcaugacac

SEQ ID NO: 1894355 - RNA, 17 nt, Human
cuugggucccagggaag

SEQ ID NO: 1894356 - RNA, 23 nt, Human
cuuggguucaagugauucuccug

SEQ ID NO: 1894357 - RNA, 22 nt, Human
cuugguagaagcccuucuaccu

SEQ ID NO: 1894358 - RNA, 14 nt, Human
cuugguccugcugc

SEQ ID NO: 1894359 - RNA, 16 nt, Human
cuuggucugugagaug

SEQ ID NO: 1894360 - RNA, 19 nt, Human
cuuggucugugagaugcua

SEQ ID NO: 1894361 - RNA, 18 nt, Human
cuucuucagagacuccug

SEQ ID NO: 1894362 - RNA, 13 nt, Human
cuucuucagagac

SEQ ID NO: 1894363 - RNA, 14 nt, Human
cuucuucagagacu

SEQ ID NO: 1894364 - RNA, 20 nt, Human
cuucuuaaucuuuucacaaa

SEQ ID NO: 1894365 - RNA, 17 nt, Human
cuucuuaaucuuuucac

SEQ ID NO: 1894366 - RNA, 16 nt, Human
cuucuuaaucuuuuca

SEQ ID NO: 1894367 - RNA, 22 nt, Human
cuucuuaaucuuuucacaaaua

SEQ ID NO: 1894368 - RNA, 21 nt, Human
cuucuuaaucuuuucacaaau

SEQ ID NO: 1894369 - RNA, 23 nt, Human
cuucuuaaucuuuucacaaauaa

SEQ ID NO: 1894370 - RNA, 16 nt, Human
cuucuagguucuaaaa

SEQ ID NO: 1894371 - RNA, 21 nt, Human
cuucuaggguuauugcauuug

SEQ ID NO: 1894372 - RNA, 23 nt, Human
cuucuaaagguguugucccuucu

SEQ ID NO: 1894373 - RNA, 20 nt, Human
cuucucacauuuauauuuuu

SEQ ID NO: 1894374 - RNA, 13 nt, Human
cuucucacauuua

SEQ ID NO: 1894375 - RNA, 22 nt, Human
cuucucugugaacgauuuagaa

SEQ ID NO: 1894376 - RNA, 21 nt, Human
cuucucugugaacgauuuaga

SEQ ID NO: 1894377 - RNA, 13 nt, Human
cuuccuccuggug

SEQ ID NO: 1894378 - RNA, 22 nt, Human
cuuccucuuuccaucuacccuc

SEQ ID NO: 1894379 - RNA, 16 nt, Human
cuuccucucuccagau

SEQ ID NO: 1894380 - RNA, 21 nt, Human
cuuccucuuuccaucuacccu

SEQ ID NO: 1894381 - RNA, 15 nt, Human
cuuccucucuccaga

SEQ ID NO: 1894382 - RNA, 23 nt, Human
cuuggauuguccccgacccuugc

SEQ ID NO: 1894383 - RNA, 24 nt, Human
cuuggauuguccccgacccuugcc

SEQ ID NO: 1894384 - RNA, 17 nt, Human
cuuggccugaucagacc

SEQ ID NO: 1894385 - RNA, 12 nt, Human
cuugcaaaguau

SEQ ID NO: 1894386 - RNA, 12 nt, Human
cuugauucauaa

SEQ ID NO: 1894387 - RNA, 13 nt, Human
cuugaagggccag

SEQ ID NO: 1894388 - RNA, 14 nt, Human
cuugaagggccaga

SEQ ID NO: 1894389 - RNA, 15 nt, Human
cuugaagggccagag

SEQ ID NO: 1894390 - RNA, 16 nt, Human
cuugaagggccagagc

SEQ ID NO: 1894391 - RNA, 17 nt, Human
cuugaagggccagagcc

SEQ ID NO: 1894392 - RNA, 18 nt, Human
cuugaagggccagagcca

SEQ ID NO: 1894393 - RNA, 19 nt, Human
cuugaagggccagagccag

SEQ ID NO: 1894394 - RNA, 21 nt, Human
cuugaagggccagagccaggg

SEQ ID NO: 1894395 - RNA, 20 nt, Human
cuugaauugcauuuuuuaaa

SEQ ID NO: 1894396 - RNA, 16 nt, Human
cuugacaucaacugca

SEQ ID NO: 1894397 - RNA, 20 nt, Human
cuugaauguggcuugagaaa

SEQ ID NO: 1894398 - RNA, 19 nt, Human
cuugaauguggcuugagaa

SEQ ID NO: 1894399 - RNA, 22 nt, Human
cuugaauguggcuugagaaaua

SEQ ID NO: 1894400 - RNA, 11 nt, Human
cuugaagucag

SEQ ID NO: 1894401 - RNA, 20 nt, Human
cuugaagggccagagccagg

SEQ ID NO: 1894402 - RNA, 14 nt, Human
cuugaaggugcuga

SEQ ID NO: 1894403 - RNA, 22 nt, Human
cuugaaggugcugacggccagg

SEQ ID NO: 1894404 - RNA, 22 nt, Human
cuugauauccucuuugagugaa

SEQ ID NO: 1894405 - RNA, 17 nt, Human
cuugauauccucuuuga

SEQ ID NO: 1894406 - RNA, 17 nt, Human
cuugaucaacaucuuuu

SEQ ID NO: 1894407 - RNA, 23 nt, Human
cuugaucaacaucuuuucuugcc

SEQ ID NO: 1894408 - RNA, 18 nt, Human
cuugauguguuaucucuu

SEQ ID NO: 1894409 - RNA, 20 nt, Human
cuugauuaagaucucagugg

SEQ ID NO: 1894410 - RNA, 16 nt, Human
cuugauuauccauauu

SEQ ID NO: 1894411 - RNA, 19 nt, Human
gaaaacuuguauuaugugu

SEQ ID NO: 1894412 - RNA, 22 nt, Human
gaaaacuuguauuauguguguu

SEQ ID NO: 1894413 - RNA, 23 nt, Human
gaaaagaaaaaugagccuggcaa

SEQ ID NO: 1894414 - RNA, 21 nt, Human
gaaaacuuuaugcuaagugaa

SEQ ID NO: 1894415 - RNA, 23 nt, Human
gaaaagauuuuaaucaaguugaa

SEQ ID NO: 1894416 - RNA, 13 nt, Human
gaaaagauuuuaa

SEQ ID NO: 1894417 - RNA, 17 nt, Human
gaaaagauuuuaaucaa

SEQ ID NO: 1894418 - RNA, 15 nt, Human
gaaaauguuauuuaa

SEQ ID NO: 1894419 - RNA, 16 nt, Human
gaaaauguuauuuaac

SEQ ID NO: 1894420 - RNA, 15 nt, Human
gaaaauguugagaau

SEQ ID NO: 1894421 - RNA, 17 nt, Human
gaaaauguugagaaucc

SEQ ID NO: 1894422 - RNA, 20 nt, Human
gaaaauguugagaaucccaa

SEQ ID NO: 1894423 - RNA, 22 nt, Human
gaaaagaaaucuaugauuccag

SEQ ID NO: 1894424 - RNA, 21 nt, Human
gaaacaagucagucauucaga

SEQ ID NO: 1894425 - RNA, 14 nt, Human
gaaacaacuuggaa

SEQ ID NO: 1894426 - RNA, 15 nt, Human
gaaacaacagcuuua

SEQ ID NO: 1894427 - RNA, 21 nt, Human
gaaacaacagcuuuaaaagaa

SEQ ID NO: 1894428 - RNA, 17 nt, Human
gaaacuggauuaaacuu

SEQ ID NO: 1894429 - RNA, 13 nt, Human
gaaacuggauuaa

SEQ ID NO: 1894430 - RNA, 18 nt, Human
gaaagaaaaucaggcugg

SEQ ID NO: 1894431 - RNA, 13 nt, Human
gaaagggcccaga

SEQ ID NO: 1894432 - RNA, 16 nt, Human
gaaaggcuccaggagc

SEQ ID NO: 1894433 - RNA, 13 nt, Human
gaaaggcuccagg

SEQ ID NO: 1894434 - RNA, 14 nt, Human
gaaaggcuccagga

SEQ ID NO: 1894435 - RNA, 15 nt, Human
gaaaggcuccaggag

SEQ ID NO: 1894436 - RNA, 16 nt, Human
gaacacccuauauuuu

SEQ ID NO: 1894437 - RNA, 20 nt, Human
gaacaccauugaaggcuuaa

SEQ ID NO: 1894438 - RNA, 19 nt, Human
gaacaccauugaaggcuua

SEQ ID NO: 1894439 - RNA, 14 nt, Human
gaacacggccacau

SEQ ID NO: 1894440 - RNA, 22 nt, Human
gaacacggccacaucaaagagg

SEQ ID NO: 1894441 - RNA, 16 nt, Human
gaacaccauugaaggc

SEQ ID NO: 1894442 - RNA, 19 nt, Human
gaacacaaacuguaaauaa

SEQ ID NO: 1894443 - RNA, 19 nt, Human
gaacaauauugacuuuguc

SEQ ID NO: 1894444 - RNA, 20 nt, Human
gaacaauauugacuuugucu

SEQ ID NO: 1894445 - RNA, 17 nt, Human
gaacacaaacuguaaau

SEQ ID NO: 1894446 - RNA, 16 nt, Human
gaaagggcccagagag

SEQ ID NO: 1894447 - RNA, 15 nt, Human
gaaagggcccagaga

SEQ ID NO: 1894448 - RNA, 13 nt, Human
gaaaggggagccc

SEQ ID NO: 1894449 - RNA, 15 nt, Human
gaaaggggagcccac

SEQ ID NO: 1894450 - RNA, 16 nt, Human
gaaaggggagcccacu

SEQ ID NO: 1894451 - RNA, 18 nt, Human
gaaaucuaugauuccagg

SEQ ID NO: 1894452 - RNA, 20 nt, Human
gaaaucuaugauuccaggug

SEQ ID NO: 1894453 - RNA, 20 nt, Human
gaaaggggcaguuuaaagca

SEQ ID NO: 1894454 - RNA, 14 nt, Human
gaacaaagcagcca

SEQ ID NO: 1894455 - RNA, 15 nt, Human
gaacaaagcagccac

SEQ ID NO: 1894456 - RNA, 16 nt, Human
gaacaaagcagccacg

SEQ ID NO: 1894457 - RNA, 19 nt, Human
gaacaaagcagccacgagg

SEQ ID NO: 1894458 - RNA, 11 nt, Human
gaaaugaaaaa

SEQ ID NO: 1894459 - RNA, 22 nt, Human
gaaccaccacacccagcccacu

SEQ ID NO: 1894460 - RNA, 21 nt, Human
gaaccaccacacccagcccac

SEQ ID NO: 1894461 - RNA, 20 nt, Human
gaaccaccacacccagccca

SEQ ID NO: 1894462 - RNA, 18 nt, Human
gaaccaccacacccagcc

SEQ ID NO: 1894463 - RNA, 17 nt, Human
gaaccccuucauccucu

SEQ ID NO: 1894464 - RNA, 22 nt, Human
gaaccccuggcuccaggccagg

SEQ ID NO: 1894465 - RNA, 20 nt, Human
gaaccccggggugcccacag

SEQ ID NO: 1894466 - RNA, 18 nt, Human
gaaccccuggcuccaggc

SEQ ID NO: 1894467 - RNA, 13 nt, Human
gaacccagacuca

SEQ ID NO: 1894468 - RNA, 16 nt, Human
gaacccagacucagac

SEQ ID NO: 1894469 - RNA, 17 nt, Human
gaacccagacucagaca

SEQ ID NO: 1894470 - RNA, 19 nt, Human
gaacccagacucagacauu

SEQ ID NO: 1894471 - RNA, 15 nt, Human
gaaccaggcuuggaa

SEQ ID NO: 1894472 - RNA, 19 nt, Human
gaaccaguccccccacccu

SEQ ID NO: 1894473 - RNA, 22 nt, Human
gaaccauggucggaaaacaugc

SEQ ID NO: 1894474 - RNA, 16 nt, Human
gaaccauguuuguggc

SEQ ID NO: 1894475 - RNA, 23 nt, Human
gaaccaccacacccagcccacuu

SEQ ID NO: 1894476 - RNA, 20 nt, Human
gaacucuuaaucaaauagca

SEQ ID NO: 1894477 - RNA, 13 nt, Human
gaacucuuaauca

SEQ ID NO: 1894478 - RNA, 14 nt, Human
gaacuccuggccuc

SEQ ID NO: 1894479 - RNA, 15 nt, Human
gaacuccuggccuca

SEQ ID NO: 1894480 - RNA, 13 nt, Human
gaacuccuggccu

SEQ ID NO: 1894481 - RNA, 15 nt, Human
gaacuccugaccuca

SEQ ID NO: 1894482 - RNA, 19 nt, Human
gaacccgggaggcagaggu

SEQ ID NO: 1894483 - RNA, 17 nt, Human
gaacccgggaggcagag

SEQ ID NO: 1894484 - RNA, 14 nt, Human
gaacugagcuugga

SEQ ID NO: 1894485 - RNA, 22 nt, Human
gaacugagcuuggaagcuucug

SEQ ID NO: 1894486 - RNA, 21 nt, Human
gaacugagcuuggaagcuucu

SEQ ID NO: 1894487 - RNA, 16 nt, Human
gaacugagcuuggaag

SEQ ID NO: 1894488 - RNA, 15 nt, Human
gaacugagcuuggaa

SEQ ID NO: 1894489 - RNA, 17 nt, Human
gaacugauguaaguaaa

SEQ ID NO: 1894490 - RNA, 16 nt, Human
gaagacucauucuucu

SEQ ID NO: 1894491 - RNA, 18 nt, Human
gaagacucauucuucugu

SEQ ID NO: 1894492 - RNA, 17 nt, Human
gaagacucauucuucug

SEQ ID NO: 1894493 - RNA, 14 nt, Human
gaagcacagcuuca

SEQ ID NO: 1894494 - RNA, 13 nt, Human
gaagcacagcuuc

SEQ ID NO: 1894495 - RNA, 14 nt, Human
gaagcacaugccuc

SEQ ID NO: 1894496 - RNA, 17 nt, Human
gaagcacagugaucaag

SEQ ID NO: 1894497 - RNA, 22 nt, Human
gaagcacaugccucucucaggc

SEQ ID NO: 1894498 - RNA, 16 nt, Human
gaagcaccauaacuuu

SEQ ID NO: 1894499 - RNA, 12 nt, Human
gaagcagcucuu

SEQ ID NO: 1894500 - RNA, 12 nt, Human
gaagcagguucc

SEQ ID NO: 1894501 - RNA, 19 nt, Human
gaagcagguucccaagcuc

SEQ ID NO: 1894502 - RNA, 14 nt, Human
gaagacagcucuua

SEQ ID NO: 1894503 - RNA, 15 nt, Human
gaagacagcucuuau

SEQ ID NO: 1894504 - RNA, 14 nt, Human
gaagacauugcacc

SEQ ID NO: 1894505 - RNA, 19 nt, Human
gaagacccaacacauggga

SEQ ID NO: 1894506 - RNA, 20 nt, Human
gaagaccucaccuagaaauu

SEQ ID NO: 1894507 - RNA, 19 nt, Human
gaagaccucaccuagaaau

SEQ ID NO: 1894508 - RNA, 16 nt, Human
gaagacacugaugggc

SEQ ID NO: 1894509 - RNA, 15 nt, Human
gaacugcaugcugcu

SEQ ID NO: 1894510 - RNA, 21 nt, Human
gaagacacugaugggcaaccc

SEQ ID NO: 1894511 - RNA, 19 nt, Human
gaacugcaugcugcuggac

SEQ ID NO: 1894512 - RNA, 21 nt, Human
gaagacacugaaauauacaca

SEQ ID NO: 1894513 - RNA, 13 nt, Human
gaagacagagcua

SEQ ID NO: 1894514 - RNA, 15 nt, Human
gaagacagagcuaca

SEQ ID NO: 1894515 - RNA, 12 nt, Human
gaagacagcucu

SEQ ID NO: 1894516 - RNA, 13 nt, Human
gaagacagcucuu

SEQ ID NO: 1894517 - RNA, 17 nt, Human
gagaagcggcuggcagc

SEQ ID NO: 1894518 - RNA, 14 nt, Human
gacugugugcucag

SEQ ID NO: 1894519 - RNA, 16 nt, Human
gacugugugcucagga

SEQ ID NO: 1894520 - RNA, 17 nt, Human
gacugugugcucaggag

SEQ ID NO: 1894521 - RNA, 20 nt, Human
gacugugugcucaggagccc

SEQ ID NO: 1894522 - RNA, 22 nt, Human
gacuguacaaaguagaagucuu

SEQ ID NO: 1894523 - RNA, 14 nt, Human
gacucacaccugaa

SEQ ID NO: 1894524 - RNA, 23 nt, Human
gacucacaccugaacugaacacc

SEQ ID NO: 1894525 - RNA, 17 nt, Human
gacucaaugcacugaca

SEQ ID NO: 1894526 - RNA, 18 nt, Human
gacucacaaccugaaccu

SEQ ID NO: 1894527 - RNA, 19 nt, Human
gacucacaaccugaaccua

SEQ ID NO: 1894528 - RNA, 14 nt, Human
gacucaaugcacug

SEQ ID NO: 1894529 - RNA, 22 nt, Human
gacucaagauucccaggaguuc

SEQ ID NO: 1894530 - RNA, 22 nt, Human
gacuuuguuaguuucuccaagc

SEQ ID NO: 1894531 - RNA, 23 nt, Human
gacuuuucuguccgagcuuugaa

SEQ ID NO: 1894532 - RNA, 21 nt, Human
gacuuuucuguccgagcuuug

SEQ ID NO: 1894533 - RNA, 16 nt, Human
gacuguuuucucuuga

SEQ ID NO: 1894534 - RNA, 18 nt, Human
gacuguuuucucuugaga

SEQ ID NO: 1894535 - RNA, 14 nt, Human
gacuuuggaaagac

SEQ ID NO: 1894536 - RNA, 14 nt, Human
gacuuuggaaagag

SEQ ID NO: 1894537 - RNA, 19 nt, Human
gacuagugcugaagcuuau

SEQ ID NO: 1894538 - RNA, 23 nt, Human
gacuagugcugaagcuuauuaau

SEQ ID NO: 1894539 - RNA, 18 nt, Human
gacuagugcugaagcuua

SEQ ID NO: 1894540 - RNA, 17 nt, Human
gacuagugcugaagcuu

SEQ ID NO: 1894541 - RNA, 16 nt, Human
gacuagugcugaagcu

SEQ ID NO: 1894542 - RNA, 15 nt, Human
gacuagugcugaagc

SEQ ID NO: 1894543 - RNA, 14 nt, Human
gacuagugcugaag

SEQ ID NO: 1894544 - RNA, 13 nt, Human
gacuagugcugaa

SEQ ID NO: 1894545 - RNA, 12 nt, Human
gacuagugcuga

SEQ ID NO: 1894546 - RNA, 18 nt, Human
gacuauauuguacacacc

SEQ ID NO: 1894547 - RNA, 19 nt, Human
gacuauauuugggccugcu

SEQ ID NO: 1894548 - RNA, 21 nt, Human
gacuauauuugggccugcucc

SEQ ID NO: 1894549 - RNA, 15 nt, Human
gacuauggagcugag

SEQ ID NO: 1894550 - RNA, 18 nt, Human
gacucaaaguuucagaga

SEQ ID NO: 1894551 - RNA, 22 nt, Human
gacucaaaugcucagaccagcu

SEQ ID NO: 1894552 - RNA, 12 nt, Human
gacucaagauuc

SEQ ID NO: 1894553 - RNA, 16 nt, Human
gacucaagauucccag

SEQ ID NO: 1894554 - RNA, 17 nt, Human
gacucaagauucccagg

SEQ ID NO: 1894555 - RNA, 18 nt, Human
gacucaagauucccagga

SEQ ID NO: 1894556 - RNA, 19 nt, Human
gacucaagauucccaggag

SEQ ID NO: 1894557 - RNA, 20 nt, Human
gacucaagauucccaggagu

SEQ ID NO: 1894558 - RNA, 13 nt, Human
gacgcugugcugc

SEQ ID NO: 1894559 - RNA, 15 nt, Human
gacgcugugcugccc

SEQ ID NO: 1894560 - RNA, 12 nt, Human
gacgcuggcucc

SEQ ID NO: 1894561 - RNA, 12 nt, Human
gacgcugugcug

SEQ ID NO: 1894562 - RNA, 14 nt, Human
gacagaaagcagaa

SEQ ID NO: 1894563 - RNA, 16 nt, Human
gacacuccccgaaguc

SEQ ID NO: 1894564 - RNA, 21 nt, Human
gacacuccccgaagucuuuug

SEQ ID NO: 1894565 - RNA, 20 nt, Human
gacagaaagcagaacaguga

SEQ ID NO: 1894566 - RNA, 15 nt, Human
gacagcuccuucugu

SEQ ID NO: 1894567 - RNA, 14 nt, Human
gacagcuccuucug

SEQ ID NO: 1894568 - RNA, 13 nt, Human
gacagcuccuucu

SEQ ID NO: 1894569 - RNA, 20 nt, Human
gacaggggcaggaggaaggg

SEQ ID NO: 1894570 - RNA, 18 nt, Human
gacaggggcaggaggaag

SEQ ID NO: 1894571 - RNA, 22 nt, Human
gaagcauggugcccuggcuucu

SEQ ID NO: 1894572 - RNA, 20 nt, Human
gacaguauggcagcuuuccu

SEQ ID NO: 1894573 - RNA, 17 nt, Human
gacaggguuucaccaug

SEQ ID NO: 1894574 - RNA, 19 nt, Human
gacagguuugggaccccug

SEQ ID NO: 1894575 - RNA, 22 nt, Human
gacagguuugggaccccuggug

SEQ ID NO: 1894576 - RNA, 17 nt, Human
gacaguaucacugucuu

SEQ ID NO: 1894577 - RNA, 21 nt, Human
gacaguaucacugucuuuccu

SEQ ID NO: 1894578 - RNA, 23 nt, Human
gaccaggcauccuccacaauagc

SEQ ID NO: 1894579 - RNA, 14 nt, Human
gaccaucccugaag

SEQ ID NO: 1894580 - RNA, 15 nt, Human
gaccaucccugaagg

SEQ ID NO: 1894581 - RNA, 15 nt, Human
gaccauaauguuaca

SEQ ID NO: 1894582 - RNA, 16 nt, Human
gaccaucccugaaggc

SEQ ID NO: 1894583 - RNA, 17 nt, Human
gaccaucccugaaggcc

SEQ ID NO: 1894584 - RNA, 16 nt, Human
gaccauucuccaccug

SEQ ID NO: 1894585 - RNA, 17 nt, Human
gaccauucuccaccugc

SEQ ID NO: 1894586 - RNA, 13 nt, Human
gacccggcugcgu

SEQ ID NO: 1894587 - RNA, 12 nt, Human
gacccggcugcg

SEQ ID NO: 1894588 - RNA, 16 nt, Human
gacccuauugcugcuu

SEQ ID NO: 1894589 - RNA, 14 nt, Human
gacccguccauuug

SEQ ID NO: 1894590 - RNA, 18 nt, Human
gagguggaauuauuuuaa

SEQ ID NO: 1894591 - RNA, 19 nt, Human
gagguggagguugcaguga

SEQ ID NO: 1894592 - RNA, 17 nt, Human
gaggugggauccuccag

SEQ ID NO: 1894593 - RNA, 14 nt, Human
gagucacuggaaca

SEQ ID NO: 1894594 - RNA, 21 nt, Human
gagucacuggaacacuaauga

SEQ ID NO: 1894595 - RNA, 15 nt, Human
gaggugggauccucc

SEQ ID NO: 1894596 - RNA, 16 nt, Human
gaggugggauccucca

SEQ ID NO: 1894597 - RNA, 13 nt, Human
gaggugggauccu

SEQ ID NO: 1894598 - RNA, 20 nt, Human
gagguggcugagccccuguc

SEQ ID NO: 1894599 - RNA, 18 nt, Human
gagugcagugagccgaga

SEQ ID NO: 1894600 - RNA, 13 nt, Human
gagugcagugagc

SEQ ID NO: 1894601 - RNA, 22 nt, Human
gaguugauacuacaguuuguua

SEQ ID NO: 1894602 - RNA, 21 nt, Human
gaguugauagcacagacccug

SEQ ID NO: 1894603 - RNA, 19 nt, Human
gaguugauacuacaguuug

SEQ ID NO: 1894604 - RNA, 23 nt, Human
gagugccccauucuuuuguaauu

SEQ ID NO: 1894605 - RNA, 18 nt, Human
gagugagacucugucuca

SEQ ID NO: 1894606 - RNA, 14 nt, Human
gagugagacucugu

SEQ ID NO: 1894607 - RNA, 14 nt, Human
gaguccaagcuggg

SEQ ID NO: 1894608 - RNA, 12 nt, Human
gaguccaagcug

SEQ ID NO: 1894609 - RNA, 18 nt, Human
gagucagaaguuucugcc

SEQ ID NO: 1894610 - RNA, 18 nt, Human
gagucauucguucugugg

SEQ ID NO: 1894611 - RNA, 20 nt, Human
gaggccagagacacaagccu

SEQ ID NO: 1894612 - RNA, 12 nt, Human
gaggcucugccc

SEQ ID NO: 1894613 - RNA, 13 nt, Human
gaggcucugcccu

SEQ ID NO: 1894614 - RNA, 14 nt, Human
gaggcucugcccuu

SEQ ID NO: 1894615 - RNA, 14 nt, Human
gaggcucuggagcc

SEQ ID NO: 1894616 - RNA, 19 nt, Human
gaggcucuggagcccacug

SEQ ID NO: 1894617 - RNA, 15 nt, Human
gaggcucugcccuug

SEQ ID NO: 1894618 - RNA, 17 nt, Human
gaggcucugcccuuggu

SEQ ID NO: 1894619 - RNA, 14 nt, Human
gaggcugccucucc

SEQ ID NO: 1894620 - RNA, 12 nt, Human
gaggggaacaga

SEQ ID NO: 1894621 - RNA, 12 nt, Human
gagggcuccaga

SEQ ID NO: 1894622 - RNA, 13 nt, Human
gagggcuccagac

SEQ ID NO: 1894623 - RNA, 14 nt, Human
gagggcuccagaca

SEQ ID NO: 1894624 - RNA, 15 nt, Human
gagggcuccagacac

SEQ ID NO: 1894625 - RNA, 19 nt, Human
gagcugccuguucagcucc

SEQ ID NO: 1894626 - RNA, 16 nt, Human
gagcugccuguucagc

SEQ ID NO: 1894627 - RNA, 15 nt, Human
gagcugccuguucag

SEQ ID NO: 1894628 - RNA, 17 nt, Human
gagcggagaaaggaagg

SEQ ID NO: 1894629 - RNA, 20 nt, Human
gagcugccuguucagcucca

SEQ ID NO: 1894630 - RNA, 20 nt, Human
gagcugugcaucagcuagaa

SEQ ID NO: 1894631 - RNA, 17 nt, Human
gagcaucaggccaggcc

SEQ ID NO: 1894632 - RNA, 12 nt, Human
gagccuuccagg

SEQ ID NO: 1894633 - RNA, 13 nt, Human
gagccuuccaggg

SEQ ID NO: 1894634 - RNA, 15 nt, Human
gagcgacagugagac

SEQ ID NO: 1894635 - RNA, 13 nt, Human
gagcgacagugag

SEQ ID NO: 1894636 - RNA, 23 nt, Human
gagcgcuccugccgcagagcugg

SEQ ID NO: 1894637 - RNA, 22 nt, Human
gagcgcuccugccgcagagcug

SEQ ID NO: 1894638 - RNA, 21 nt, Human
gagcgcuccugccgcagagcu

SEQ ID NO: 1894639 - RNA, 15 nt, Human
gagcgcuccugccgc

SEQ ID NO: 1894640 - RNA, 20 nt, Human
gagcaucaggccaggcccuc

SEQ ID NO: 1894641 - RNA, 22 nt, Human
gagcaucaggccaggcccucug

SEQ ID NO: 1894642 - RNA, 18 nt, Human
gagcagugggccuggcca

SEQ ID NO: 1894643 - RNA, 17 nt, Human
gagcagugggccuggcc

SEQ ID NO: 1894644 - RNA, 15 nt, Human
gagcagugggccugg

SEQ ID NO: 1894645 - RNA, 19 nt, Human
gagaagcuccucuccccag

SEQ ID NO: 1894646 - RNA, 21 nt, Human
gagaagcucucgggcuaggaa

SEQ ID NO: 1894647 - RNA, 22 nt, Human
gagaagcuccucuccccagccc

SEQ ID NO: 1894648 - RNA, 22 nt, Human
gcacuauagccuaggugacaga

SEQ ID NO: 1894649 - RNA, 17 nt, Human
gcacuccagccugggug

SEQ ID NO: 1894650 - RNA, 12 nt, Human
gcacuccccugc

SEQ ID NO: 1894651 - RNA, 12 nt, Human
gcaccuccugcc

SEQ ID NO: 1894652 - RNA, 20 nt, Human
gcacacaccagagcccaccu

SEQ ID NO: 1894653 - RNA, 11 nt, Human
gcacacauuuu

SEQ ID NO: 1894654 - RNA, 13 nt, Human
gcacacagggcag

SEQ ID NO: 1894655 - RNA, 12 nt, Human
gcacacauuuuu

SEQ ID NO: 1894656 - RNA, 21 nt, Human
gcaccuacaguguacagucuu

SEQ ID NO: 1894657 - RNA, 19 nt, Human
gcaccuacaguguacaguc

SEQ ID NO: 1894658 - RNA, 18 nt, Human
gcaccuacaguguacagu

SEQ ID NO: 1894659 - RNA, 22 nt, Human
gcaccuaauccaggcagaucca

SEQ ID NO: 1894660 - RNA, 23 nt, Human
gcaccuaauccaggcagauccag

SEQ ID NO: 1894661 - RNA, 17 nt, Human
gcaccggcuggccuggc

SEQ ID NO: 1894662 - RNA, 17 nt, Human
gcaccuaauccaggcag

SEQ ID NO: 1894663 - RNA, 18 nt, Human
gcaccuaauccaggcaga

SEQ ID NO: 1894664 - RNA, 15 nt, Human
gcaccggcuggccug

SEQ ID NO: 1894665 - RNA, 16 nt, Human
gcaccggcuggccugg

SEQ ID NO: 1894666 - RNA, 11 nt, Human
gcaauaaagca

SEQ ID NO: 1894667 - RNA, 21 nt, Human
gcaauaaagcagcguuucuau

SEQ ID NO: 1894668 - RNA, 19 nt, Human
gcacacaccagagcccacc

SEQ ID NO: 1894669 - RNA, 18 nt, Human
gcacacaccagagcccac

SEQ ID NO: 1894670 - RNA, 17 nt, Human
gcacacaccagagccca

SEQ ID NO: 1894671 - RNA, 16 nt, Human
gcacacaccagagccc

SEQ ID NO: 1894672 - RNA, 15 nt, Human
gcacacaccagagcc

SEQ ID NO: 1894673 - RNA, 14 nt, Human
gcacacaccagagc

SEQ ID NO: 1894674 - RNA, 12 nt, Human
gcacacaccaga

SEQ ID NO: 1894675 - RNA, 18 nt, Human
gcaaccuccgccucuugg

SEQ ID NO: 1894676 - RNA, 22 nt, Human
gcaacccuggugaccagcacca

SEQ ID NO: 1894677 - RNA, 18 nt, Human
gcaacccccagccugcua

SEQ ID NO: 1894678 - RNA, 17 nt, Human
gcaacccccagccugcu

SEQ ID NO: 1894679 - RNA, 16 nt, Human
gcaaaagaugcuucuc

SEQ ID NO: 1894680 - RNA, 15 nt, Human
gcaaaagaugcuucu

SEQ ID NO: 1894681 - RNA, 19 nt, Human
gauucuccugccucagccu

SEQ ID NO: 1894682 - RNA, 21 nt, Human
gauucuccugccucagccucc

SEQ ID NO: 1894683 - RNA, 20 nt, Human
gauucuccugccucagccuc

SEQ ID NO: 1894684 - RNA, 11 nt, Human
gauucuccuuc

SEQ ID NO: 1894685 - RNA, 21 nt, Human
gauucuucugcuucagccucc

SEQ ID NO: 1894686 - RNA, 23 nt, Human
gauucuuauggacaaugacccag

SEQ ID NO: 1894687 - RNA, 23 nt, Human
gauuuaacagaaauguacagcaa

SEQ ID NO: 1894688 - RNA, 20 nt, Human
gauuuaacagaaauguacag

SEQ ID NO: 1894689 - RNA, 13 nt, Human
gauuucacucucc

SEQ ID NO: 1894690 - RNA, 16 nt, Human
gauuucacucuccuug

SEQ ID NO: 1894691 - RNA, 17 nt, Human
gauuucacucuccuugg

SEQ ID NO: 1894692 - RNA, 18 nt, Human
gauuucacucuccuuggu

SEQ ID NO: 1894693 - RNA, 22 nt, Human
gauuuuuuuuuccuucagugcc

SEQ ID NO: 1894694 - RNA, 23 nt, Human
gauuuuuuuuuccuucagugccu

SEQ ID NO: 1894695 - RNA, 15 nt, Human
gauuucaucugcucu

SEQ ID NO: 1894696 - RNA, 12 nt, Human
gauuucaucugc

SEQ ID NO: 1894697 - RNA, 15 nt, Human
gaugugauuguggaa

SEQ ID NO: 1894698 - RNA, 16 nt, Human
gaugugauuguggaau

SEQ ID NO: 1894699 - RNA, 18 nt, Human
gaugugauuguggaaugg

SEQ ID NO: 1894700 - RNA, 18 nt, Human
gaucuggguucacugcaa

SEQ ID NO: 1894701 - RNA, 22 nt, Human
gaguugauagcacagacccugc

SEQ ID NO: 1894702 - RNA, 23 nt, Human
gaucuggaaccucagccuggcca

SEQ ID NO: 1894703 - RNA, 20 nt, Human
gaucuggguucacugcaacc

SEQ ID NO: 1894704 - RNA, 17 nt, Human
gaucuggggcucuggga

SEQ ID NO: 1894705 - RNA, 18 nt, Human
gaucuggggcucugggau

SEQ ID NO: 1894706 - RNA, 23 nt, Human
gaugcuucucacugccaugccag

SEQ ID NO: 1894707 - RNA, 13 nt, Human
gaugcugugaaau

SEQ ID NO: 1894708 - RNA, 14 nt, Human
gaugaugacuaugg

SEQ ID NO: 1894709 - RNA, 19 nt, Human
gauggaguucuugugccau

SEQ ID NO: 1894710 - RNA, 18 nt, Human
gauggaguucuugugcca

SEQ ID NO: 1894711 - RNA, 16 nt, Human
gauggaguucuugugc

SEQ ID NO: 1894712 - RNA, 22 nt, Human
gauggaaaaaccacccccaaau

SEQ ID NO: 1894713 - RNA, 16 nt, Human
gaugcuuguacauaau

SEQ ID NO: 1894714 - RNA, 14 nt, Human
gaugcuuguacaua

SEQ ID NO: 1894715 - RNA, 19 nt, Human
gaugcugugaaauucccaa

SEQ ID NO: 1894716 - RNA, 19 nt, Human
gccaaggccaaaggaagca

SEQ ID NO: 1894717 - RNA, 17 nt, Human
gccaaggccaaaggaag

SEQ ID NO: 1894718 - RNA, 11 nt, Human
gccaaggccaa

SEQ ID NO: 1894719 - RNA, 21 nt, Human
gccaaggagcugcuauagccu

SEQ ID NO: 1894720 - RNA, 23 nt, Human
gccaaggagcugcuauagccugg

SEQ ID NO: 1894721 - RNA, 20 nt, Human
gccaaggagggugagugcaa

SEQ ID NO: 1894722 - RNA, 21 nt, Human
gccaaggagggugagugcaag

SEQ ID NO: 1894723 - RNA, 17 nt, Human
gccaagaggcugcagcc

SEQ ID NO: 1894724 - RNA, 11 nt, Human
gccaaggagcu

SEQ ID NO: 1894725 - RNA, 12 nt, Human
gccaaggagcug

SEQ ID NO: 1894726 - RNA, 13 nt, Human
gccaaggagcugc

SEQ ID NO: 1894727 - RNA, 14 nt, Human
gccaaggagcugcu

SEQ ID NO: 1894728 - RNA, 15 nt, Human
gccaaggagcugcua

SEQ ID NO: 1894729 - RNA, 16 nt, Human
gccaaggagcugcuau

SEQ ID NO: 1894730 - RNA, 20 nt, Human
gccaaggagcugcuauagcc

SEQ ID NO: 1894731 - RNA, 21 nt, Human
gcauccuggcacccggccccu

SEQ ID NO: 1894732 - RNA, 17 nt, Human
gcauccuggcacccggc

SEQ ID NO: 1894733 - RNA, 23 nt, Human
gcauccuggcacccggccccugc

SEQ ID NO: 1894734 - RNA, 22 nt, Human
gcauccuggcacccggccccug

SEQ ID NO: 1894735 - RNA, 15 nt, Human
gcauguaugucuugg

SEQ ID NO: 1894736 - RNA, 14 nt, Human
gcauguaugucuug

SEQ ID NO: 1894737 - RNA, 22 nt, Human
gcauguacccuaaggucauuac

SEQ ID NO: 1894738 - RNA, 19 nt, Human
gcaugggaaugaaugucag

SEQ ID NO: 1894739 - RNA, 13 nt, Human
gcaugggaaugaa

SEQ ID NO: 1894740 - RNA, 16 nt, Human
gcaugggaaugaaugu

SEQ ID NO: 1894741 - RNA, 17 nt, Human
gcaugugaugagaggaa

SEQ ID NO: 1894742 - RNA, 16 nt, Human
gcauuugaaaauuuug

SEQ ID NO: 1894743 - RNA, 14 nt, Human
gcauuugaaaauuu

SEQ ID NO: 1894744 - RNA, 15 nt, Human
gccaaccuauuuuga

SEQ ID NO: 1894745 - RNA, 23 nt, Human
gccaacccuucuccucuuguaaa

SEQ ID NO: 1894746 - RNA, 13 nt, Human
gccaacccuucuc

SEQ ID NO: 1894747 - RNA, 22 nt, Human
gccaacccuucuccucuuguaa

SEQ ID NO: 1894748 - RNA, 15 nt, Human
gcauuuaaaagauac

SEQ ID NO: 1894749 - RNA, 12 nt, Human
gcauuuaaaaga

SEQ ID NO: 1894750 - RNA, 22 nt, Human
gcauugugugugcagacuucag

SEQ ID NO: 1894751 - RNA, 21 nt, Human
gcauuuccuaucaccuauuuc

SEQ ID NO: 1894752 - RNA, 14 nt, Human
gccaacuauggccu

SEQ ID NO: 1894753 - RNA, 15 nt, Human
gccaacuauggccug

SEQ ID NO: 1894754 - RNA, 16 nt, Human
gccaaccuauuuugaa

SEQ ID NO: 1894755 - RNA, 19 nt, Human
gccaacuauggccugugga

SEQ ID NO: 1894756 - RNA, 14 nt, Human
gccaagaauucuua

SEQ ID NO: 1894757 - RNA, 18 nt, Human
gccaagaauucuuaaaua

SEQ ID NO: 1894758 - RNA, 15 nt, Human
gccaagaaacgucuu

SEQ ID NO: 1894759 - RNA, 21 nt, Human
gccaagaaacgucuucuaaac

SEQ ID NO: 1894760 - RNA, 22 nt, Human
gccaagaaacgucuucuaaacu

SEQ ID NO: 1894761 - RNA, 14 nt, Human
gccaagaggcugca

SEQ ID NO: 1894762 - RNA, 13 nt, Human
gccaagaggcugc

SEQ ID NO: 1894763 - RNA, 12 nt, Human
gccaagaggcug

SEQ ID NO: 1894764 - RNA, 16 nt, Human
gcacuuuguucuggcu

SEQ ID NO: 1894765 - RNA, 22 nt, Human
gcacugaagggauaugugaaac

SEQ ID NO: 1894766 - RNA, 17 nt, Human
gcacugaaaaaaaaucu

SEQ ID NO: 1894767 - RNA, 20 nt, Human
gcacucuuuaagggagugua

SEQ ID NO: 1894768 - RNA, 20 nt, Human
gcagcugcuuuugucuaugg

SEQ ID NO: 1894769 - RNA, 13 nt, Human
gcagcugcuuuug

SEQ ID NO: 1894770 - RNA, 23 nt, Human
gcagcugcgguccacccaggagc

SEQ ID NO: 1894771 - RNA, 22 nt, Human
gcagcugcgguccacccaggag

SEQ ID NO: 1894772 - RNA, 16 nt, Human
gcagcuugaggguugg

SEQ ID NO: 1894773 - RNA, 15 nt, Human
gcagcuuauucacaa

SEQ ID NO: 1894774 - RNA, 21 nt, Human
gcagcuugaggguugggcugg

SEQ ID NO: 1894775 - RNA, 19 nt, Human
gcagcuugaggguugggcu

SEQ ID NO: 1894776 - RNA, 22 nt, Human
gcaggcucgggcuccccagccc

SEQ ID NO: 1894777 - RNA, 12 nt, Human
gcaggcucucag

SEQ ID NO: 1894778 - RNA, 13 nt, Human
gcaggcucucagg

SEQ ID NO: 1894779 - RNA, 14 nt, Human
gcaggcucucaggc

SEQ ID NO: 1894780 - RNA, 15 nt, Human
gcaggcucucaggcc

SEQ ID NO: 1894781 - RNA, 16 nt, Human
gcaggcucucaggcca

SEQ ID NO: 1894782 - RNA, 22 nt, Human
gcagggaaacagcuaaugggac

SEQ ID NO: 1894783 - RNA, 18 nt, Human
gcaggcucucaggccagc

SEQ ID NO: 1894784 - RNA, 17 nt, Human
gcaggcucucaggccag

SEQ ID NO: 1894785 - RNA, 16 nt, Human
gcauaccacuuuuguu

SEQ ID NO: 1894786 - RNA, 15 nt, Human
gcauaccacuuuugu

SEQ ID NO: 1894787 - RNA, 22 nt, Human
gcagggacacgggcagccuggc

SEQ ID NO: 1894788 - RNA, 19 nt, Human
gcagggacacgggcagccu

SEQ ID NO: 1894789 - RNA, 18 nt, Human
gcagggacacgggcagcc

SEQ ID NO: 1894790 - RNA, 14 nt, Human
gcagggacaaagag

SEQ ID NO: 1894791 - RNA, 15 nt, Human
gcagggacaaagagg

SEQ ID NO: 1894792 - RNA, 21 nt, Human
gcagggacaaagaggccuuua

SEQ ID NO: 1894793 - RNA, 18 nt, Human
gcagguucccaagcucag

SEQ ID NO: 1894794 - RNA, 19 nt, Human
gcagguucccaagcucaga

SEQ ID NO: 1894795 - RNA, 13 nt, Human
gcagguucccaag

SEQ ID NO: 1894796 - RNA, 15 nt, Human
gcagguucccaagcu

SEQ ID NO: 1894797 - RNA, 16 nt, Human
gcagguucccaagcuc

SEQ ID NO: 1894798 - RNA, 15 nt, Human
gcauaaaaauuagcc

SEQ ID NO: 1894799 - RNA, 14 nt, Human
gcaguugccaguca

SEQ ID NO: 1894800 - RNA, 23 nt, Human
gcaguugccagucaccccggcca

SEQ ID NO: 1894801 - RNA, 17 nt, Human
gcucugaucauccacug

SEQ ID NO: 1894802 - RNA, 23 nt, Human
gcucugaucauccacugugccau

SEQ ID NO: 1894803 - RNA, 23 nt, Human
gcucugcaagaauugaagcagga

SEQ ID NO: 1894804 - RNA, 11 nt, Human
gcucugcccuu

SEQ ID NO: 1894805 - RNA, 15 nt, Human
gcuccacuuggucug

SEQ ID NO: 1894806 - RNA, 16 nt, Human
gcuccacccuggccga

SEQ ID NO: 1894807 - RNA, 19 nt, Human
gcuccacccuggccgaguc

SEQ ID NO: 1894808 - RNA, 17 nt, Human
gcucccggggcagggca

SEQ ID NO: 1894809 - RNA, 20 nt, Human
gcuccccucugcacggacca

SEQ ID NO: 1894810 - RNA, 18 nt, Human
gcucccccuccaccugcu

SEQ ID NO: 1894811 - RNA, 17 nt, Human
gcucccccuccaccugc

SEQ ID NO: 1894812 - RNA, 19 nt, Human
gcucccggggcagggcagc

SEQ ID NO: 1894813 - RNA, 20 nt, Human
gcucccggggcagggcagcc

SEQ ID NO: 1894814 - RNA, 17 nt, Human
gcuccugagggagcucc

SEQ ID NO: 1894815 - RNA, 19 nt, Human
gcuccugagggagcuccaa

SEQ ID NO: 1894816 - RNA, 14 nt, Human
gcuccuggcccacu

SEQ ID NO: 1894817 - RNA, 15 nt, Human
gcuccuggcccacug

SEQ ID NO: 1894818 - RNA, 20 nt, Human
gcuccuggcccacugcaucg

SEQ ID NO: 1894819 - RNA, 18 nt, Human
gcuccuggcccacugcau

SEQ ID NO: 1894820 - RNA, 19 nt, Human
gcuccuggcccacugcauc

SEQ ID NO: 1894821 - RNA, 13 nt, Human
gcucccaggacac

SEQ ID NO: 1894822 - RNA, 17 nt, Human
gcucccaggcauucccc

SEQ ID NO: 1894823 - RNA, 12 nt, Human
gcucccaggaca

SEQ ID NO: 1894824 - RNA, 18 nt, Human
gcuccagcucaccagccc

SEQ ID NO: 1894825 - RNA, 19 nt, Human
gcuccacuuggucugugag

SEQ ID NO: 1894826 - RNA, 18 nt, Human
gcuccacuuggucuguga

SEQ ID NO: 1894827 - RNA, 21 nt, Human
gcuccagcucaccagccccag

SEQ ID NO: 1894828 - RNA, 20 nt, Human
gcuccagcucaccagcccca

SEQ ID NO: 1894829 - RNA, 13 nt, Human
gcuaugcauuuga

SEQ ID NO: 1894830 - RNA, 19 nt, Human
gcuauucaguaauaacucu

SEQ ID NO: 1894831 - RNA, 12 nt, Human
gcuaugcauuug

SEQ ID NO: 1894832 - RNA, 14 nt, Human
gcuaugagggccuu

SEQ ID NO: 1894833 - RNA, 21 nt, Human
gcuagugugguguuuccuggc

SEQ ID NO: 1894834 - RNA, 22 nt, Human
gcuagugugguguuuccuggca

SEQ ID NO: 1894835 - RNA, 23 nt, Human
gcuaggccuggccagaugcacca

SEQ ID NO: 1894836 - RNA, 17 nt, Human
gcuaggccuggccagau

SEQ ID NO: 1894837 - RNA, 16 nt, Human
gcuaggccuggccaga

SEQ ID NO: 1894838 - RNA, 20 nt, Human
gcuauucaguaauaacucua

SEQ ID NO: 1894839 - RNA, 22 nt, Human
gcuauugauauaaauaaaacau

SEQ ID NO: 1894840 - RNA, 17 nt, Human
gcuauuugcaauuccug

SEQ ID NO: 1894841 - RNA, 19 nt, Human
gcuauuugcaauuccugcu

SEQ ID NO: 1894842 - RNA, 22 nt, Human
gcuauuuuuauuuguuugugca

SEQ ID NO: 1894843 - RNA, 14 nt, Human
gcucacugcagccu

SEQ ID NO: 1894844 - RNA, 13 nt, Human
gcucacugcagcc

SEQ ID NO: 1894845 - RNA, 12 nt, Human
gcucacugcagc

SEQ ID NO: 1894846 - RNA, 11 nt, Human
gcucacugcag

SEQ ID NO: 1894847 - RNA, 16 nt, Human
gcucacugcagccuca

SEQ ID NO: 1894848 - RNA, 15 nt, Human
gcucacugcagccuc

SEQ ID NO: 1894849 - RNA, 17 nt, Human
gcucacugcagccucaa

SEQ ID NO: 1894850 - RNA, 17 nt, Human
gcucaggugucccugca

SEQ ID NO: 1894851 - RNA, 16 nt, Human
gcucaggugucccugc

SEQ ID NO: 1894852 - RNA, 14 nt, Human
gcucaggugucccu

SEQ ID NO: 1894853 - RNA, 23 nt, Human
gcucagguggggucacucuggca

SEQ ID NO: 1894854 - RNA, 15 nt, Human
gcucagggaaaagca

SEQ ID NO: 1894855 - RNA, 17 nt, Human
gcucagggaaaagcagc

SEQ ID NO: 1894856 - RNA, 14 nt, Human
gcucaggaucucuu

SEQ ID NO: 1894857 - RNA, 18 nt, Human
gcucaggaucucuuagca

SEQ ID NO: 1894858 - RNA, 14 nt, Human
gcucagagagggug

SEQ ID NO: 1894859 - RNA, 17 nt, Human
gcucaggacagaugcca

SEQ ID NO: 1894860 - RNA, 20 nt, Human
gcucaggacagaugccacac

SEQ ID NO: 1894861 - RNA, 16 nt, Human
gcucagacauguuuuc

SEQ ID NO: 1894862 - RNA, 13 nt, Human
gcucagagagggu

SEQ ID NO: 1894863 - RNA, 21 nt, Human
gcucagacauguuuuccguga

SEQ ID NO: 1894864 - RNA, 16 nt, Human
gcucagaccagcucuu

SEQ ID NO: 1894865 - RNA, 18 nt, Human
gcuagaacucccuuucaa

SEQ ID NO: 1894866 - RNA, 16 nt, Human
gcuagaacucccuuuc

SEQ ID NO: 1894867 - RNA, 15 nt, Human
gcuagaacucccuuu

SEQ ID NO: 1894868 - RNA, 14 nt, Human
gcuagaacucccuu

SEQ ID NO: 1894869 - RNA, 13 nt, Human
gcuagaacucccu

SEQ ID NO: 1894870 - RNA, 12 nt, Human
gcuagaacuccc

SEQ ID NO: 1894871 - RNA, 22 nt, Human
gcgugguguggagugugugucu

SEQ ID NO: 1894872 - RNA, 19 nt, Human
gcgugcagggacaaagagg

SEQ ID NO: 1894873 - RNA, 23 nt, Human
gcgugcacacaccagagcccacc

SEQ ID NO: 1894874 - RNA, 18 nt, Human
gcgugcagggacaaagag

SEQ ID NO: 1894875 - RNA, 19 nt, Human
gcgugcacacaccagagcc

SEQ ID NO: 1894876 - RNA, 18 nt, Human
gcguuucuaugacacaug

SEQ ID NO: 1894877 - RNA, 22 nt, Human
gcguuugaccuuuuauguagua

SEQ ID NO: 1894878 - RNA, 20 nt, Human
gcgugcacacaccagagccc

SEQ ID NO: 1894879 - RNA, 22 nt, Human
gcgggaggauguucugggacac

SEQ ID NO: 1894880 - RNA, 21 nt, Human
gcgggaggauguucugggaca

SEQ ID NO: 1894881 - RNA, 20 nt, Human
gcgggaggauguucugggac

SEQ ID NO: 1894882 - RNA, 21 nt, Human
gcuaauaaaauaucauucagc

SEQ ID NO: 1894883 - RNA, 20 nt, Human
gcuaauaaaauaucauucag

SEQ ID NO: 1894884 - RNA, 19 nt, Human
gcuaauaaaauaucauuca

SEQ ID NO: 1894885 - RNA, 18 nt, Human
gcuaauaaaauaucauuc

SEQ ID NO: 1894886 - RNA, 23 nt, Human
gcuaauaaaauaucauucagcaa

SEQ ID NO: 1894887 - RNA, 17 nt, Human
gcuaauaaaauaucauu

SEQ ID NO: 1894888 - RNA, 14 nt, Human
gcuaauaaaauauc

SEQ ID NO: 1894889 - RNA, 23 nt, Human
gcuaagugauccucccaccucag

SEQ ID NO: 1894890 - RNA, 13 nt, Human
gcuaaugggacac

SEQ ID NO: 1894891 - RNA, 15 nt, Human
gcuaaugggacacua

SEQ ID NO: 1894892 - RNA, 22 nt, Human
gcuaauucuuugaccuguuggg

SEQ ID NO: 1894893 - RNA, 15 nt, Human
gccugcccaggcccc

SEQ ID NO: 1894894 - RNA, 22 nt, Human
gccugcccaggccccugccacc

SEQ ID NO: 1894895 - RNA, 21 nt, Human
gccuccagggcuggacugagg

SEQ ID NO: 1894896 - RNA, 23 nt, Human
gccuccagggcuggacugaggcc

SEQ ID NO: 1894897 - RNA, 22 nt, Human
gccuccagggcuggacugaggc

SEQ ID NO: 1894898 - RNA, 24 nt, Human
gccuccagggcuggacugaggccu

SEQ ID NO: 1894899 - RNA, 15 nt, Human
gccuccaucagcuaa

SEQ ID NO: 1894900 - RNA, 12 nt, Human
gccuccauccug

SEQ ID NO: 1894901 - RNA, 17 nt, Human
gccucccaaagugcugg

SEQ ID NO: 1894902 - RNA, 16 nt, Human
gccucccaaagugcug

SEQ ID NO: 1894903 - RNA, 14 nt, Human
gccuccauccuagu

SEQ ID NO: 1894904 - RNA, 23 nt, Human
gccuccugugugugcgccuacag

SEQ ID NO: 1894905 - RNA, 19 nt, Human
gccuccugugugugcgccu

SEQ ID NO: 1894906 - RNA, 17 nt, Human
gccucgaacuggcugca

SEQ ID NO: 1894907 - RNA, 22 nt, Human
gccucgaacuggcugcaaaggg

SEQ ID NO: 1894908 - RNA, 20 nt, Human
gccucgaacuggcugcaaag

SEQ ID NO: 1894909 - RNA, 17 nt, Human
gccucgacacagagugg

SEQ ID NO: 1894910 - RNA, 17 nt, Human
gccucuuaugggcuggg

SEQ ID NO: 1894911 - RNA, 18 nt, Human
gccucuuaugggcugggu

SEQ ID NO: 1894912 - RNA, 16 nt, Human
gccucuuaugggcugg

SEQ ID NO: 1894913 - RNA, 14 nt, Human
gccugcccaggccc

SEQ ID NO: 1894914 - RNA, 13 nt, Human
gccugcccaggcc

SEQ ID NO: 1894915 - RNA, 14 nt, Human
gccucuuggguuca

SEQ ID NO: 1894916 - RNA, 21 nt, Human
gccucuuaugggcuggguucu

SEQ ID NO: 1894917 - RNA, 22 nt, Human
gcgaucuggguucacugcaacc

SEQ ID NO: 1894918 - RNA, 20 nt, Human
gcgcagcauauucaggaagc

SEQ ID NO: 1894919 - RNA, 22 nt, Human
gcgcacugugacccccagcucc

SEQ ID NO: 1894920 - RNA, 15 nt, Human
gcgcaccgaaaaacu

SEQ ID NO: 1894921 - RNA, 13 nt, Human
gcgcacugccucu

SEQ ID NO: 1894922 - RNA, 15 nt, Human
gcgagcccugguggc

SEQ ID NO: 1894923 - RNA, 17 nt, Human
gcgagcccugguggcag

SEQ ID NO: 1894924 - RNA, 14 nt, Human
gccuugccagagau

SEQ ID NO: 1894925 - RNA, 13 nt, Human
gccuugccagaga

SEQ ID NO: 1894926 - RNA, 17 nt, Human
gccuugccagagaucca

SEQ ID NO: 1894927 - RNA, 17 nt, Human
gccuugaccauucucca

SEQ ID NO: 1894928 - RNA, 19 nt, Human
gccuugaccauucuccacc

SEQ ID NO: 1894929 - RNA, 20 nt, Human
gccuugaccauucuccaccu

SEQ ID NO: 1894930 - RNA, 21 nt, Human
gccuugaccauucuccaccug

SEQ ID NO: 1894931 - RNA, 21 nt, Human
gccuguugggccaggagccuc

SEQ ID NO: 1894932 - RNA, 20 nt, Human
gccuucggccuccauccuga

SEQ ID NO: 1894933 - RNA, 23 nt, Human
gccuucggccuccauccugaggc

SEQ ID NO: 1894934 - RNA, 21 nt, Human
gccuucggccuccauccugag

SEQ ID NO: 1894935 - RNA, 13 nt, Human
gccuggcucaggu

SEQ ID NO: 1894936 - RNA, 16 nt, Human
gccugugccucuggga

SEQ ID NO: 1894937 - RNA, 17 nt, Human
gccugugccucugggac

SEQ ID NO: 1894938 - RNA, 18 nt, Human
gccugugccucugggacu

SEQ ID NO: 1894939 - RNA, 14 nt, Human
gccuguugggccag

SEQ ID NO: 1894940 - RNA, 15 nt, Human
gccuguugggccagg

SEQ ID NO: 1894941 - RNA, 16 nt, Human
gccuguugggccagga

SEQ ID NO: 1894942 - RNA, 18 nt, Human
gccuguugggccaggagc

SEQ ID NO: 1894943 - RNA, 20 nt, Human
gccuguugggccaggagccu

SEQ ID NO: 1894944 - RNA, 13 nt, Human
gccuggccugagc

SEQ ID NO: 1894945 - RNA, 14 nt, Human
gccuggccugagcu

SEQ ID NO: 1894946 - RNA, 18 nt, Human
gccuggccugagcuggga

SEQ ID NO: 1894947 - RNA, 20 nt, Human
gccuggccugagcugggaug

SEQ ID NO: 1894948 - RNA, 16 nt, Human
gccuggccuggcacac

SEQ ID NO: 1894949 - RNA, 13 nt, Human
gccuggccuggca

SEQ ID NO: 1894950 - RNA, 12 nt, Human
gcccccacuggu

SEQ ID NO: 1894951 - RNA, 12 nt, Human
gcccccacugac

SEQ ID NO: 1894952 - RNA, 17 nt, Human
gcccccacugaccagaa

SEQ ID NO: 1894953 - RNA, 17 nt, Human
gcccccaccgugggcag

SEQ ID NO: 1894954 - RNA, 18 nt, Human
gcccccaccgugggcagg

SEQ ID NO: 1894955 - RNA, 20 nt, Human
gcccccaccgugggcaggga

SEQ ID NO: 1894956 - RNA, 22 nt, Human
gcccccaccgugggcagggagc

SEQ ID NO: 1894957 - RNA, 16 nt, Human
gccccugccacccugg

SEQ ID NO: 1894958 - RNA, 17 nt, Human
gccccugccacccuggg

SEQ ID NO: 1894959 - RNA, 15 nt, Human
gcccccccuuccacu

SEQ ID NO: 1894960 - RNA, 16 nt, Human
gccccugccagacccc

SEQ ID NO: 1894961 - RNA, 11 nt, Human
gccccugccag

SEQ ID NO: 1894962 - RNA, 18 nt, Human
gcccccaucucaugcccc

SEQ ID NO: 1894963 - RNA, 16 nt, Human
gcccccccccaccccu

SEQ ID NO: 1894964 - RNA, 17 nt, Human
gcccccccccaccccug

SEQ ID NO: 1894965 - RNA, 13 nt, Human
gcccccccuucca

SEQ ID NO: 1894966 - RNA, 14 nt, Human
gcccccccuuccac

SEQ ID NO: 1894967 - RNA, 17 nt, Human
gcccucaccacccacuu

SEQ ID NO: 1894968 - RNA, 18 nt, Human
gcccucaccccugguucu

SEQ ID NO: 1894969 - RNA, 22 nt, Human
gcccucaccccugguucucauc

SEQ ID NO: 1894970 - RNA, 21 nt, Human
gcccucaccccugguucucau

SEQ ID NO: 1894971 - RNA, 19 nt, Human
gcccucaaacuugacucua

SEQ ID NO: 1894972 - RNA, 15 nt, Human
gccccugcucuggug

SEQ ID NO: 1894973 - RNA, 20 nt, Human
gccccugccucucugcaggu

SEQ ID NO: 1894974 - RNA, 23 nt, Human
gccccugccucucugcagguccc

SEQ ID NO: 1894975 - RNA, 23 nt, Human
gcccgggcucugccucccaucac

SEQ ID NO: 1894976 - RNA, 20 nt, Human
gccuaggugacagagugaga

SEQ ID NO: 1894977 - RNA, 18 nt, Human
gccgcccgggcccagagg

SEQ ID NO: 1894978 - RNA, 20 nt, Human
gccuagcauacguacacauu

SEQ ID NO: 1894979 - RNA, 22 nt, Human
gccuagcauacguacacauuuu

SEQ ID NO: 1894980 - RNA, 21 nt, Human
gccuagcauacguacacauuu

SEQ ID NO: 1894981 - RNA, 23 nt, Human
gccuagcauacguacacauuuua

SEQ ID NO: 1894982 - RNA, 15 nt, Human
gccuaggugacagag

SEQ ID NO: 1894983 - RNA, 14 nt, Human
gccuaggugacaga

SEQ ID NO: 1894984 - RNA, 13 nt, Human
gccuaggugacag

SEQ ID NO: 1894985 - RNA, 20 nt, Human
gccuaggccucagccagaga

SEQ ID NO: 1894986 - RNA, 17 nt, Human
gccuaggccucagccag

SEQ ID NO: 1894987 - RNA, 18 nt, Human
gccuaggccucagccaga

SEQ ID NO: 1894988 - RNA, 13 nt, Human
gccuaggccaggu

SEQ ID NO: 1894989 - RNA, 14 nt, Human
gccuaggccaggug

SEQ ID NO: 1894990 - RNA, 13 nt, Human
gccuaggccucag

SEQ ID NO: 1894991 - RNA, 16 nt, Human
gccuaggccaggugca

SEQ ID NO: 1894992 - RNA, 16 nt, Human
gccuaggccucagcca

SEQ ID NO: 1894993 - RNA, 16 nt, Human
gccgcccgggcccaga

SEQ ID NO: 1894994 - RNA, 15 nt, Human
gccgcccgggcccag

SEQ ID NO: 1894995 - RNA, 18 nt, Human
gccgcccugcgggugaac

SEQ ID NO: 1894996 - RNA, 22 nt, Human
gcccuuagcagggaaacagcua

SEQ ID NO: 1894997 - RNA, 20 nt, Human
gccgcagcccugcagagggc

SEQ ID NO: 1894998 - RNA, 20 nt, Human
gcccuuagcagggaaacagc

SEQ ID NO: 1894999 - RNA, 21 nt, Human
gcccugugcaaccucuuggcc

SEQ ID NO: 1895000 - RNA, 14 nt, Human
gcccugccuccuuu

SEQ ID NO: 1895001 - RNA, 12 nt, Human
gcccugccuccu

SEQ ID NO: 1895002 - RNA, 13 nt, Human
gcccugccuccuu

SEQ ID NO: 1895003 - RNA, 18 nt, Human
gcccugcagagggcacag

SEQ ID NO: 1895004 - RNA, 11 nt, Human
gcccugccucc

SEQ ID NO: 1895005 - RNA, 17 nt, Human
gcccugcccaccuggcc

SEQ ID NO: 1895006 - RNA, 20 nt, Human
gcccugcccaccuggccucu

SEQ ID NO: 1895007 - RNA, 21 nt, Human
gcccugcccaccuggccucug

SEQ ID NO: 1895008 - RNA, 22 nt, Human
gcccugcccaccuggccucugc

SEQ ID NO: 1895009 - RNA, 15 nt, Human
ggaagagaaaaaaua

SEQ ID NO: 1895010 - RNA, 13 nt, Human
ggaagagaaacca

SEQ ID NO: 1895011 - RNA, 18 nt, Human
ggaagacuuuggaaagag

SEQ ID NO: 1895012 - RNA, 13 nt, Human
ggaagagaaaaaa

SEQ ID NO: 1895013 - RNA, 13 nt, Human
ggaagacagcucu

SEQ ID NO: 1895014 - RNA, 14 nt, Human
ggaagacagcucuu

SEQ ID NO: 1895015 - RNA, 20 nt, Human
ggaacuuauuaaauggaaac

SEQ ID NO: 1895016 - RNA, 13 nt, Human
ggaacuugagaac

SEQ ID NO: 1895017 - RNA, 22 nt, Human
ggaagacaaugugaaaagaaaa

SEQ ID NO: 1895018 - RNA, 13 nt, Human
ggaagacuuugga

SEQ ID NO: 1895019 - RNA, 17 nt, Human
ggaagacuuuggaaaga

SEQ ID NO: 1895020 - RNA, 12 nt, Human
ggaagacuuugg

SEQ ID NO: 1895021 - RNA, 22 nt, Human
ggaacuuggggaguuaagaccu

SEQ ID NO: 1895022 - RNA, 12 nt, Human
ggaacacucuga

SEQ ID NO: 1895023 - RNA, 14 nt, Human
ggaacacucugaga

SEQ ID NO: 1895024 - RNA, 15 nt, Human
ggaacacucugagac

SEQ ID NO: 1895025 - RNA, 16 nt, Human
ggaacacucugagacu

SEQ ID NO: 1895026 - RNA, 20 nt, Human
ggaacugcugggcuuggcag

SEQ ID NO: 1895027 - RNA, 13 nt, Human
ggaagcccccacc

SEQ ID NO: 1895028 - RNA, 21 nt, Human
ggaagcccccaccgugggcag

SEQ ID NO: 1895029 - RNA, 22 nt, Human
ggaagcccccaccgugggcagg

SEQ ID NO: 1895030 - RNA, 15 nt, Human
ggaagccgcuggggc

SEQ ID NO: 1895031 - RNA, 16 nt, Human
ggaagcuaauuugcau

SEQ ID NO: 1895032 - RNA, 19 nt, Human
ggaaggaaacccagcucug

SEQ ID NO: 1895033 - RNA, 20 nt, Human
ggaaggaaacccagcucugg

SEQ ID NO: 1895034 - RNA, 22 nt, Human
ggaagugugggucugugugugu

SEQ ID NO: 1895035 - RNA, 21 nt, Human
ggaagugugggucugugugug

SEQ ID NO: 1895036 - RNA, 12 nt, Human
ggaagugugggu

SEQ ID NO: 1895037 - RNA, 16 nt, Human
ggaaggaaacccagcu

SEQ ID NO: 1895038 - RNA, 11 nt, Human
ggaagcuccgc

SEQ ID NO: 1895039 - RNA, 15 nt, Human
ggaagcucagggccu

SEQ ID NO: 1895040 - RNA, 23 nt, Human
ggaagcucagggccuggcucagg

SEQ ID NO: 1895041 - RNA, 13 nt, Human
ggaauaauaccua

SEQ ID NO: 1895042 - RNA, 18 nt, Human
ggaauaacauguaauuaa

SEQ ID NO: 1895043 - RNA, 21 nt, Human
ggaaguuuuguggaggagcuc

SEQ ID NO: 1895044 - RNA, 16 nt, Human
ggaauccagacccggc

SEQ ID NO: 1895045 - RNA, 13 nt, Human
ggacaagagcagg

SEQ ID NO: 1895046 - RNA, 22 nt, Human
ggacaaggaugaucuaggaaga

SEQ ID NO: 1895047 - RNA, 23 nt, Human
ggacaaggaugaucuaggaagac

SEQ ID NO: 1895048 - RNA, 19 nt, Human
ggaaugaagauacugaaau

SEQ ID NO: 1895049 - RNA, 21 nt, Human
ggacacgggcagccuggcucc

SEQ ID NO: 1895050 - RNA, 17 nt, Human
ggacacuaaccacgcug

SEQ ID NO: 1895051 - RNA, 19 nt, Human
ggacagcuccuucuguccu

SEQ ID NO: 1895052 - RNA, 22 nt, Human
ggacacuaaccacgcuggaccu

SEQ ID NO: 1895053 - RNA, 20 nt, Human
ggacagcuccuucuguccua

SEQ ID NO: 1895054 - RNA, 18 nt, Human
ggacacagcucuucucca

SEQ ID NO: 1895055 - RNA, 15 nt, Human
ggacacagcucuucu

SEQ ID NO: 1895056 - RNA, 21 nt, Human
ggacacagcucuucuccaggc

SEQ ID NO: 1895057 - RNA, 20 nt, Human
ggacaaguggacucagggca

SEQ ID NO: 1895058 - RNA, 14 nt, Human
ggacacagcucuuc

SEQ ID NO: 1895059 - RNA, 23 nt, Human
ggacaggcauguucucugaggac

SEQ ID NO: 1895060 - RNA, 14 nt, Human
ggacccccgccccc

SEQ ID NO: 1895061 - RNA, 15 nt, Human
ggacccccgcccccu

SEQ ID NO: 1895062 - RNA, 16 nt, Human
ggacccccgcccccug

SEQ ID NO: 1895063 - RNA, 19 nt, Human
ggacccccgcccccugccc

SEQ ID NO: 1895064 - RNA, 20 nt, Human
ggacccccgcccccugcccu

SEQ ID NO: 1895065 - RNA, 22 nt, Human
ggacccccgcccccugcccucc

SEQ ID NO: 1895066 - RNA, 18 nt, Human
ggaccccgagccuggcuc

SEQ ID NO: 1895067 - RNA, 11 nt, Human
ggacccugagg

SEQ ID NO: 1895068 - RNA, 15 nt, Human
ggaccccgagccugg

SEQ ID NO: 1895069 - RNA, 23 nt, Human
ggacccccgcccccugcccuccc

SEQ ID NO: 1895070 - RNA, 12 nt, Human
ggacccccugaa

SEQ ID NO: 1895071 - RNA, 20 nt, Human
ggacguguuaugacuccaga

SEQ ID NO: 1895072 - RNA, 18 nt, Human
ggacguggcucagccagc

SEQ ID NO: 1895073 - RNA, 20 nt, Human
ggaccucaggccugggggcu

SEQ ID NO: 1895074 - RNA, 15 nt, Human
ggacggcugggcaca

SEQ ID NO: 1895075 - RNA, 14 nt, Human
ggaccucaggccug

SEQ ID NO: 1895076 - RNA, 15 nt, Human
ggaccucaggccugg

SEQ ID NO: 1895077 - RNA, 13 nt, Human
ggaccucaggccu

SEQ ID NO: 1895078 - RNA, 12 nt, Human
ggacccugaggc

SEQ ID NO: 1895079 - RNA, 13 nt, Human
ggacccugaggcc

SEQ ID NO: 1895080 - RNA, 13 nt, Human
ggacccugaaggg

SEQ ID NO: 1895081 - RNA, 13 nt, Human
ggacgugggcugg

SEQ ID NO: 1895082 - RNA, 19 nt, Human
ggacguggcucagccagca

SEQ ID NO: 1895083 - RNA, 20 nt, Human
ggacuaacuugucuuuggac

SEQ ID NO: 1895084 - RNA, 14 nt, Human
ggacuacaggugug

SEQ ID NO: 1895085 - RNA, 24 nt, Human
ggacuaacuugucuuuggacccug

SEQ ID NO: 1895086 - RNA, 15 nt, Human
ggacucaaugcacug

SEQ ID NO: 1895087 - RNA, 23 nt, Human
ggacuauauuugggccugcucca

SEQ ID NO: 1895088 - RNA, 18 nt, Human
ggacucaaugcacugaca

SEQ ID NO: 1895089 - RNA, 16 nt, Human
ggacucaaugcacuga

SEQ ID NO: 1895090 - RNA, 13 nt, Human
ggacucagggcag

SEQ ID NO: 1895091 - RNA, 15 nt, Human
ggacucagggcagcg

SEQ ID NO: 1895092 - RNA, 22 nt, Human
ggacucagggcagcgccaggcu

SEQ ID NO: 1895093 - RNA, 14 nt, Human
ggacuuggaagcuc

SEQ ID NO: 1895094 - RNA, 16 nt, Human
ggacuccggcccuccu

SEQ ID NO: 1895095 - RNA, 9 nt, Human
ggacuuugu

SEQ ID NO: 1895096 - RNA, 16 nt, Human
ggagaaaggaagggcu

SEQ ID NO: 1895097 - RNA, 13 nt, Human
ggagaaacuggaa

SEQ ID NO: 1895098 - RNA, 22 nt, Human
gcuggagugcagugagccgaga

SEQ ID NO: 1895099 - RNA, 20 nt, Human
gcuggccuggccccucaggg

SEQ ID NO: 1895100 - RNA, 17 nt, Human
gcuggagugcagugagc

SEQ ID NO: 1895101 - RNA, 18 nt, Human
gcuggagugcagugagcc

SEQ ID NO: 1895102 - RNA, 20 nt, Human
gcuggcgugcaguggugcga

SEQ ID NO: 1895103 - RNA, 15 nt, Human
gcuggagugcagugg

SEQ ID NO: 1895104 - RNA, 12 nt, Human
gcuggagugagg

SEQ ID NO: 1895105 - RNA, 13 nt, Human
gcugcuggcuggu

SEQ ID NO: 1895106 - RNA, 18 nt, Human
gcugcugaaggcucgagc

SEQ ID NO: 1895107 - RNA, 15 nt, Human
gcugcugaaggcuca

SEQ ID NO: 1895108 - RNA, 21 nt, Human
gcugcuggacaguaucacugu

SEQ ID NO: 1895109 - RNA, 13 nt, Human
gcucugcccuugg

SEQ ID NO: 1895110 - RNA, 14 nt, Human
gcucugggccauuc

SEQ ID NO: 1895111 - RNA, 20 nt, Human
gcucugggccauucuccaca

SEQ ID NO: 1895112 - RNA, 23 nt, Human
gcucugggccauucuccacagca

SEQ ID NO: 1895113 - RNA, 15 nt, Human
gcucugguccauaga

SEQ ID NO: 1895114 - RNA, 16 nt, Human
gcucugguccauagag

SEQ ID NO: 1895115 - RNA, 23 nt, Human
gcucugguccauagagagcaaga

SEQ ID NO: 1895116 - RNA, 13 nt, Human
gcugcugaaggcu

SEQ ID NO: 1895117 - RNA, 14 nt, Human
gcugcugaaggcuc

SEQ ID NO: 1895118 - RNA, 15 nt, Human
gcugcugaaggcucg

SEQ ID NO: 1895119 - RNA, 21 nt, Human
gcuggguggcaccagcagccu

SEQ ID NO: 1895120 - RNA, 22 nt, Human
gcuggguggcaccagcagccug

SEQ ID NO: 1895121 - RNA, 23 nt, Human
gcuggguggcaccagcagccugg

SEQ ID NO: 1895122 - RNA, 17 nt, Human
gcuggcuccccaaaggg

SEQ ID NO: 1895123 - RNA, 13 nt, Human
gcuggcuccccaa

SEQ ID NO: 1895124 - RNA, 23 nt, Human
gcuggcuccagaugcagggcagu

SEQ ID NO: 1895125 - RNA, 21 nt, Human
gcuggcuccccaaagggugug

SEQ ID NO: 1895126 - RNA, 14 nt, Human
gcuggcuccagaug

SEQ ID NO: 1895127 - RNA, 17 nt, Human
gcuggcuccagaugcag

SEQ ID NO: 1895128 - RNA, 21 nt, Human
gcuggcuccagaugcagggca

SEQ ID NO: 1895129 - RNA, 22 nt, Human
gcuggcuccagaugcagggcag

SEQ ID NO: 1895130 - RNA, 17 nt, Human
gcuggcuguuggcuggg

SEQ ID NO: 1895131 - RNA, 16 nt, Human
gcuggcuguuggcugg

SEQ ID NO: 1895132 - RNA, 15 nt, Human
gcuggcuguuggcug

SEQ ID NO: 1895133 - RNA, 23 nt, Human
gcugggccccugccucucugcag

SEQ ID NO: 1895134 - RNA, 21 nt, Human
gcugggccccugccucucugc

SEQ ID NO: 1895135 - RNA, 22 nt, Human
gcugggccccugccucucugca

SEQ ID NO: 1895136 - RNA, 12 nt, Human
gcugggucgccc

SEQ ID NO: 1895137 - RNA, 16 nt, Human
gcugggucaggcaggg

SEQ ID NO: 1895138 - RNA, 13 nt, Human
gcugggucaggca

SEQ ID NO: 1895139 - RNA, 14 nt, Human
gcugggucaggcag

SEQ ID NO: 1895140 - RNA, 15 nt, Human
gcugggucaggcagg

SEQ ID NO: 1895141 - RNA, 22 nt, Human
gcuuccucauaguaugguggcu

SEQ ID NO: 1895142 - RNA, 20 nt, Human
gcuuguaaauagcucaggug

SEQ ID NO: 1895143 - RNA, 14 nt, Human
gcuugagcucagga

SEQ ID NO: 1895144 - RNA, 20 nt, Human
gcuugagaaauauggacacu

SEQ ID NO: 1895145 - RNA, 12 nt, Human
gcuuguacauaa

SEQ ID NO: 1895146 - RNA, 21 nt, Human
gcuuugaaagccccagaaauc

SEQ ID NO: 1895147 - RNA, 21 nt, Human
gcuuucuuucacaaaaaagaa

SEQ ID NO: 1895148 - RNA, 12 nt, Human
gcuucagccucc

SEQ ID NO: 1895149 - RNA, 19 nt, Human
gcuucacggaagagccuug

SEQ ID NO: 1895150 - RNA, 18 nt, Human
gcuucacggaagagccuu

SEQ ID NO: 1895151 - RNA, 16 nt, Human
gcuuauuaaugcuaag

SEQ ID NO: 1895152 - RNA, 15 nt, Human
gcuuauuaaugcuaa

SEQ ID NO: 1895153 - RNA, 20 nt, Human
gcuuauuaaugcuaagggca

SEQ ID NO: 1895154 - RNA, 19 nt, Human
gcuuauuaaugcuaagggc

SEQ ID NO: 1895155 - RNA, 18 nt, Human
gcuucaaggauccugagc

SEQ ID NO: 1895156 - RNA, 19 nt, Human
gcuucaaggauccugagcc

SEQ ID NO: 1895157 - RNA, 20 nt, Human
gcuucaaggauccugagcca

SEQ ID NO: 1895158 - RNA, 21 nt, Human
gcuucaaggauccugagccag

SEQ ID NO: 1895159 - RNA, 17 nt, Human
gcuucacggaagagccu

SEQ ID NO: 1895160 - RNA, 15 nt, Human
gcuucacggaagagc

SEQ ID NO: 1895161 - RNA, 14 nt, Human
ggccaguugguccc

SEQ ID NO: 1895162 - RNA, 17 nt, Human
ggccaguuggucccccu

SEQ ID NO: 1895163 - RNA, 20 nt, Human
ggccagugugacaaggauug

SEQ ID NO: 1895164 - RNA, 17 nt, Human
ggccagucccugaggca

SEQ ID NO: 1895165 - RNA, 23 nt, Human
ggccagucccugaggcagguccc

SEQ ID NO: 1895166 - RNA, 14 nt, Human
ggccccugcugguu

SEQ ID NO: 1895167 - RNA, 13 nt, Human
ggccccugcuggu

SEQ ID NO: 1895168 - RNA, 23 nt, Human
ggccccugcugguucaggguugg

SEQ ID NO: 1895169 - RNA, 13 nt, Human
ggcccggcuccag

SEQ ID NO: 1895170 - RNA, 12 nt, Human
ggcccggccagc

SEQ ID NO: 1895171 - RNA, 19 nt, Human
ggcccuucucuccagcccc

SEQ ID NO: 1895172 - RNA, 20 nt, Human
ggcccuucucuccagccccu

SEQ ID NO: 1895173 - RNA, 21 nt, Human
ggcccuucucuccagccccug

SEQ ID NO: 1895174 - RNA, 15 nt, Human
ggcccggcuccaggc

SEQ ID NO: 1895175 - RNA, 20 nt, Human
ggcccggccagccaugucug

SEQ ID NO: 1895176 - RNA, 16 nt, Human
ggcccuccuacccugc

SEQ ID NO: 1895177 - RNA, 20 nt, Human
ggcccuccuacccugcgccc

SEQ ID NO: 1895178 - RNA, 17 nt, Human
ggcccuccuacccugcg

SEQ ID NO: 1895179 - RNA, 19 nt, Human
ggcccuccuacccugcgcc

SEQ ID NO: 1895180 - RNA, 21 nt, Human
ggcccuccuacccugcgccca

SEQ ID NO: 1895181 - RNA, 16 nt, Human
ggccuccauccugagg

SEQ ID NO: 1895182 - RNA, 15 nt, Human
ggccuccauccugag

SEQ ID NO: 1895183 - RNA, 14 nt, Human
ggccuccauccuga

SEQ ID NO: 1895184 - RNA, 15 nt, Human
ggccucagccagaga

SEQ ID NO: 1895185 - RNA, 17 nt, Human
ggccucagccagagaag

SEQ ID NO: 1895186 - RNA, 20 nt, Human
ggccucagccagagaagcua

SEQ ID NO: 1895187 - RNA, 22 nt, Human
ggcccuucucuccagccccugg

SEQ ID NO: 1895188 - RNA, 23 nt, Human
ggcccuucucuccagccccugga

SEQ ID NO: 1895189 - RNA, 23 nt, Human
ggccucaagugauucuccugccu

SEQ ID NO: 1895190 - RNA, 11 nt, Human
ggcagccccug

SEQ ID NO: 1895191 - RNA, 23 nt, Human
ggcagccccauucugccugccca

SEQ ID NO: 1895192 - RNA, 20 nt, Human
ggcacagaaaauggaagaca

SEQ ID NO: 1895193 - RNA, 21 nt, Human
ggcacagaaaauggaagacag

SEQ ID NO: 1895194 - RNA, 19 nt, Human
ggcacagaaaauggaagac

SEQ ID NO: 1895195 - RNA, 23 nt, Human
ggcacagaaaauggaagacagcu

SEQ ID NO: 1895196 - RNA, 23 nt, Human
ggcacucagaagacacugauggg

SEQ ID NO: 1895197 - RNA, 23 nt, Human
ggcacugaagggauaugugaaac

SEQ ID NO: 1895198 - RNA, 13 nt, Human
ggcacaucagcac

SEQ ID NO: 1895199 - RNA, 12 nt, Human
ggagagaaaaca

SEQ ID NO: 1895200 - RNA, 16 nt, Human
ggagagaagagaaugc

SEQ ID NO: 1895201 - RNA, 21 nt, Human
ggcagggcucccacagagaca

SEQ ID NO: 1895202 - RNA, 15 nt, Human
ggcagggcugaggcc

SEQ ID NO: 1895203 - RNA, 17 nt, Human
ggcagggcucccacaga

SEQ ID NO: 1895204 - RNA, 22 nt, Human
ggcagccccuguucuggcagag

SEQ ID NO: 1895205 - RNA, 14 nt, Human
ggcaguuggccaga

SEQ ID NO: 1895206 - RNA, 18 nt, Human
ggcaguuuaaagcacaau

SEQ ID NO: 1895207 - RNA, 21 nt, Human
ggcaguggugguuuucuguuc

SEQ ID NO: 1895208 - RNA, 20 nt, Human
ggcaguggugguuuucuguu

SEQ ID NO: 1895209 - RNA, 17 nt, Human
ggcuccaaacccucgag

SEQ ID NO: 1895210 - RNA, 14 nt, Human
ggcuccacuugguc

SEQ ID NO: 1895211 - RNA, 18 nt, Human
ggcucagcggggacagcu

SEQ ID NO: 1895212 - RNA, 14 nt, Human
ggcucagagugggg

SEQ ID NO: 1895213 - RNA, 20 nt, Human
ggcucagcggggacagcucc

SEQ ID NO: 1895214 - RNA, 19 nt, Human
ggcucagcggggacagcuc

SEQ ID NO: 1895215 - RNA, 19 nt, Human
ggcucagguggggucacuc

SEQ ID NO: 1895216 - RNA, 20 nt, Human
ggcucagguggggucacucu

SEQ ID NO: 1895217 - RNA, 13 nt, Human
ggcugcugaaggc

SEQ ID NO: 1895218 - RNA, 14 nt, Human
ggcugggagagccu

SEQ ID NO: 1895219 - RNA, 15 nt, Human
ggcugggagagccuu

SEQ ID NO: 1895220 - RNA, 16 nt, Human
ggcugggagagccuuc

SEQ ID NO: 1895221 - RNA, 11 nt, Human
ggcucucaggc

SEQ ID NO: 1895222 - RNA, 14 nt, Human
ggcucucaggccag

SEQ ID NO: 1895223 - RNA, 13 nt, Human
ggcucucaggcca

SEQ ID NO: 1895224 - RNA, 14 nt, Human
ggcucuuccaggcu

SEQ ID NO: 1895225 - RNA, 12 nt, Human
ggcucuuccagg

SEQ ID NO: 1895226 - RNA, 19 nt, Human
ggcugccaaugggagcuca

SEQ ID NO: 1895227 - RNA, 20 nt, Human
ggcugccaaugggagcucau

SEQ ID NO: 1895228 - RNA, 13 nt, Human
ggcugaccacagc

SEQ ID NO: 1895229 - RNA, 15 nt, Human
ggcugaccacagcac

SEQ ID NO: 1895230 - RNA, 16 nt, Human
ggcugaccacagcaca

SEQ ID NO: 1895231 - RNA, 17 nt, Human
ggcugaccacagcacag

SEQ ID NO: 1895232 - RNA, 18 nt, Human
ggcugaccacagcacagc

SEQ ID NO: 1895233 - RNA, 22 nt, Human
ggcugcggaaugaaccacaucu

SEQ ID NO: 1895234 - RNA, 19 nt, Human
ggcugaccacagcacagcc

SEQ ID NO: 1895235 - RNA, 21 nt, Human
ggcugccaaugggagcucaug

SEQ ID NO: 1895236 - RNA, 14 nt, Human
gggaggucauuuug

SEQ ID NO: 1895237 - RNA, 17 nt, Human
gggagggucagccaggg

SEQ ID NO: 1895238 - RNA, 15 nt, Human
gggaggucgaggcag

SEQ ID NO: 1895239 - RNA, 18 nt, Human
gggaggucaaggcugcag

SEQ ID NO: 1895240 - RNA, 15 nt, Human
gggagggagggcucc

SEQ ID NO: 1895241 - RNA, 16 nt, Human
gggagggagggcucca

SEQ ID NO: 1895242 - RNA, 23 nt, Human
gggagcaggcucgggcuccccag

SEQ ID NO: 1895243 - RNA, 15 nt, Human
gggagagccuuccag

SEQ ID NO: 1895244 - RNA, 19 nt, Human
gggagagccuuccaggggu

SEQ ID NO: 1895245 - RNA, 24 nt, Human
gggagcaggcggugggcacccacc

SEQ ID NO: 1895246 - RNA, 10 nt, Human
gggagcccac

SEQ ID NO: 1895247 - RNA, 23 nt, Human
gggacuuggaagcuccgcuuucu

SEQ ID NO: 1895248 - RNA, 18 nt, Human
gggacuuggaagcuccgc

SEQ ID NO: 1895249 - RNA, 17 nt, Human
gggacuuggaagcuccg

SEQ ID NO: 1895250 - RNA, 15 nt, Human
gggacuuggaagcuc

SEQ ID NO: 1895251 - RNA, 21 nt, Human
gggagaaccaaaaagaggcua

SEQ ID NO: 1895252 - RNA, 13 nt, Human
gggagaaaauuca

SEQ ID NO: 1895253 - RNA, 15 nt, Human
gggagaaaauucaau

SEQ ID NO: 1895254 - RNA, 22 nt, Human
aaaagccagcaggcuucaaacu

SEQ ID NO: 1895255 - RNA, 18 nt, Human
aaaagccaagaggcugca

SEQ ID NO: 1895256 - RNA, 18 nt, Human
aaaaggaagccaaagagu

SEQ ID NO: 1895257 - RNA, 18 nt, Human
aaaacucuccucugcugc

SEQ ID NO: 1895258 - RNA, 12 nt, Human
aaaacucuuuua

SEQ ID NO: 1895259 - RNA, 23 nt, Human
aaaacugaaagugaaaguccaga

SEQ ID NO: 1895260 - RNA, 15 nt, Human
aaaacuucagacaua

SEQ ID NO: 1895261 - RNA, 15 nt, Human
aaaagauuuuaauca

SEQ ID NO: 1895262 - RNA, 14 nt, Human
aaaagauuuuaauc

SEQ ID NO: 1895263 - RNA, 14 nt, Human
aaaacaugcuacac

SEQ ID NO: 1895264 - RNA, 13 nt, Human
aaaacaugcuaca

SEQ ID NO: 1895265 - RNA, 13 nt, Human
aaaacaucuauuc

SEQ ID NO: 1895266 - RNA, 16 nt, Human
aaaacaucuauucucu

SEQ ID NO: 1895267 - RNA, 21 nt, Human
aaaacaucuauucucuccaaa

SEQ ID NO: 1895268 - RNA, 12 nt, Human
aaaacccaagug

SEQ ID NO: 1895269 - RNA, 11 nt, Human
aaaaccaggcc

SEQ ID NO: 1895270 - RNA, 14 nt, Human
gggaccagagcugc

SEQ ID NO: 1895271 - RNA, 20 nt, Human
gggaccagagcugccaccug

SEQ ID NO: 1895272 - RNA, 15 nt, Human
gggacauugggaagg

SEQ ID NO: 1895273 - RNA, 17 nt, Human
aaaaaugguuuaaaugg

SEQ ID NO: 1895274 - RNA, 14 nt, Human
gggacacgggcagc

SEQ ID NO: 1895275 - RNA, 13 nt, Human
gggaagagacuug

SEQ ID NO: 1895276 - RNA, 13 nt, Human
gggacagcuccuu

SEQ ID NO: 1895277 - RNA, 12 nt, Human
gggacagcuccu

SEQ ID NO: 1895278 - RNA, 17 nt, Human
gggacagaggccccagc

SEQ ID NO: 1895279 - RNA, 18 nt, Human
gggacagaggccccagcc

SEQ ID NO: 1895280 - RNA, 19 nt, Human
gggacagaggccccagccu

SEQ ID NO: 1895281 - RNA, 20 nt, Human
gggacagaggccccagccuc

SEQ ID NO: 1895282 - RNA, 21 nt, Human
gggacagaggccccagccucc

SEQ ID NO: 1895283 - RNA, 15 nt, Human
gggacagcuccuucu

SEQ ID NO: 1895284 - RNA, 18 nt, Human
gggacaggggcaggagga

SEQ ID NO: 1895285 - RNA, 17 nt, Human
gggacaggggcaggagg

SEQ ID NO: 1895286 - RNA, 18 nt, Human
gggaagaagcucucuccu

SEQ ID NO: 1895287 - RNA, 16 nt, Human
gggaacucagauccag

SEQ ID NO: 1895288 - RNA, 21 nt, Human
ggcuuccuccugguguggaag

SEQ ID NO: 1895289 - RNA, 15 nt, Human
ggcuucucugaggaa

SEQ ID NO: 1895290 - RNA, 16 nt, Human
ggcuucucugaggaag

SEQ ID NO: 1895291 - RNA, 14 nt, Human
aaaaauaacaauga

SEQ ID NO: 1895292 - RNA, 21 nt, Human
aaaaauaaauuugguucuaau

SEQ ID NO: 1895293 - RNA, 19 nt, Human
ggcugggggccucagugcc

SEQ ID NO: 1895294 - RNA, 17 nt, Human
ggcugggggccucagug

SEQ ID NO: 1895295 - RNA, 16 nt, Human
ggcugggggccucagu

SEQ ID NO: 1895296 - RNA, 15 nt, Human
ggcugggggccucag

SEQ ID NO: 1895297 - RNA, 14 nt, Human
ggcugggucgcccu

SEQ ID NO: 1895298 - RNA, 17 nt, Human
ggcugggucgcccugga

SEQ ID NO: 1895299 - RNA, 20 nt, Human
ggcugggucgcccuggacug

SEQ ID NO: 1895300 - RNA, 19 nt, Human
ggcuggguggcaccagcag

SEQ ID NO: 1895301 - RNA, 19 nt, Human
ggcuggguucuacccaggu

SEQ ID NO: 1895302 - RNA, 21 nt, Human
ggcuggguucuacccaggugc

SEQ ID NO: 1895303 - RNA, 18 nt, Human
ggcuguaucccaugagcc

SEQ ID NO: 1895304 - RNA, 22 nt, Human
ggcugguucggauuuggggugg

SEQ ID NO: 1895305 - RNA, 23 nt, Human
ggcugguucggauuuggggugga

SEQ ID NO: 1895306 - RNA, 16 nt, Human
ggcuguaaaaugcaug

SEQ ID NO: 1895307 - RNA, 20 nt, Human
ggcuucaguggcagcugcuu

SEQ ID NO: 1895308 - RNA, 19 nt, Human
ggcuucaguggcagcugcu

SEQ ID NO: 1895309 - RNA, 17 nt, Human
ggcuucaguggcagcug

SEQ ID NO: 1895310 - RNA, 18 nt, Human
ggcuucaguggcagcugc

SEQ ID NO: 1895311 - RNA, 16 nt, Human
ggcuuccucauaguau

SEQ ID NO: 1895312 - RNA, 12 nt, Human
ggcuucauacac

SEQ ID NO: 1895313 - RNA, 22 nt, Human
ggcuucauccuccucagaucuu

SEQ ID NO: 1895314 - RNA, 18 nt, Human
ggcuucauccuccucaga

SEQ ID NO: 1895315 - RNA, 11 nt, Human
ggcuucauaca

SEQ ID NO: 1895316 - RNA, 9 nt, Human
ggcuucaua

SEQ ID NO: 1895317 - RNA, 13 nt, Human
ggugcagccagag

SEQ ID NO: 1895318 - RNA, 17 nt, Human
ggugcagccagaggcac

SEQ ID NO: 1895319 - RNA, 12 nt, Human
ggugcagguaga

SEQ ID NO: 1895320 - RNA, 21 nt, Human
ggugcauauuuauaaaaauaa

SEQ ID NO: 1895321 - RNA, 21 nt, Human
ggugcauuugaggucuguucu

SEQ ID NO: 1895322 - RNA, 16 nt, Human
ggugcagugugaaaag

SEQ ID NO: 1895323 - RNA, 11 nt, Human
ggugcugggcc

SEQ ID NO: 1895324 - RNA, 13 nt, Human
ggugcugggcccc

SEQ ID NO: 1895325 - RNA, 15 nt, Human
ggugcugggccccug

SEQ ID NO: 1895326 - RNA, 16 nt, Human
ggugcugggccccugc

SEQ ID NO: 1895327 - RNA, 13 nt, Human
gguggaugccugg

SEQ ID NO: 1895328 - RNA, 15 nt, Human
gguggaguuaaucuu

SEQ ID NO: 1895329 - RNA, 15 nt, Human
gguggaauuauuuua

SEQ ID NO: 1895330 - RNA, 17 nt, Human
ggucgacuucgggcugg

SEQ ID NO: 1895331 - RNA, 14 nt, Human
ggucgcccuggacu

SEQ ID NO: 1895332 - RNA, 13 nt, Human
ggucgaggcagga

SEQ ID NO: 1895333 - RNA, 13 nt, Human
ggugaacagaaca

SEQ ID NO: 1895334 - RNA, 20 nt, Human
ggucgcccuggacugugugc

SEQ ID NO: 1895335 - RNA, 24 nt, Human
ggugauccacccaccucagccucc

SEQ ID NO: 1895336 - RNA, 23 nt, Human
ggugauccacccaccucagccuc

SEQ ID NO: 1895337 - RNA, 18 nt, Human
ggugauccacccaccuca

SEQ ID NO: 1895338 - RNA, 18 nt, Human
ggugaacaaagcagccac

SEQ ID NO: 1895339 - RNA, 19 nt, Human
ggugaacaaagcagccacg

SEQ ID NO: 1895340 - RNA, 12 nt, Human
ggugcaaugacc

SEQ ID NO: 1895341 - RNA, 12 nt, Human
ggugcaaccagg

SEQ ID NO: 1895342 - RNA, 13 nt, Human
ggugcaaugaccu

SEQ ID NO: 1895343 - RNA, 16 nt, Human
ggugcaaugaccuuuc

SEQ ID NO: 1895344 - RNA, 19 nt, Human
aaagcacgaaauguuauuu

SEQ ID NO: 1895345 - RNA, 15 nt, Human
aaagcucacuuuacu

SEQ ID NO: 1895346 - RNA, 15 nt, Human
aaagcuuguuaagau

SEQ ID NO: 1895347 - RNA, 15 nt, Human
aaagcuuuuagaaau

SEQ ID NO: 1895348 - RNA, 13 nt, Human
aaagcugcugaca

SEQ ID NO: 1895349 - RNA, 21 nt, Human
aaagcugcucagggaaaagca

SEQ ID NO: 1895350 - RNA, 22 nt, Human
aaagggacuuggaagcuccgcu

SEQ ID NO: 1895351 - RNA, 20 nt, Human
aaagggacugagaaauuuau

SEQ ID NO: 1895352 - RNA, 20 nt, Human
aaaggagccuaggccaggug

SEQ ID NO: 1895353 - RNA, 14 nt, Human
aaagguaaaucaga

SEQ ID NO: 1895354 - RNA, 17 nt, Human
aaaggagauuggaagga

SEQ ID NO: 1895355 - RNA, 21 nt, Human
aaaggagagcuagcagcaggg

SEQ ID NO: 1895356 - RNA, 22 nt, Human
aaaggaaagagggagguaagga

SEQ ID NO: 1895357 - RNA, 12 nt, Human
aaaggaagccaa

SEQ ID NO: 1895358 - RNA, 14 nt, Human
aaaggaagccaaag

SEQ ID NO: 1895359 - RNA, 15 nt, Human
aaaggaagccaaaga

SEQ ID NO: 1895360 - RNA, 13 nt, Human
aaaggaagaaaaa

SEQ ID NO: 1895361 - RNA, 20 nt, Human
aaacuuuccucuuccugccu

SEQ ID NO: 1895362 - RNA, 14 nt, Human
aaacuuugcuaaau

SEQ ID NO: 1895363 - RNA, 16 nt, Human
aaacuuguauuaugug

SEQ ID NO: 1895364 - RNA, 19 nt, Human
aaacuuguaaauaaaggaa

SEQ ID NO: 1895365 - RNA, 21 nt, Human
aaacuuccagugcaacacuga

SEQ ID NO: 1895366 - RNA, 22 nt, Human
aaacuuccagugcaacacugaa

SEQ ID NO: 1895367 - RNA, 14 nt, Human
ggguggccucccaa

SEQ ID NO: 1895368 - RNA, 23 nt, Human
ggguggccuaagaguugagcucu

SEQ ID NO: 1895369 - RNA, 17 nt, Human
ggguggggggcuucaua

SEQ ID NO: 1895370 - RNA, 19 nt, Human
aaacuucagacauagaauu

SEQ ID NO: 1895371 - RNA, 19 nt, Human
ggguggggggcuucauaca

SEQ ID NO: 1895372 - RNA, 19 nt, Human
aaacuuccagugcaacacu

SEQ ID NO: 1895373 - RNA, 13 nt, Human
aaagacagugaaa

SEQ ID NO: 1895374 - RNA, 9 nt, Human
aaagacaga

SEQ ID NO: 1895375 - RNA, 14 nt, Human
aaagacagagcugg

SEQ ID NO: 1895376 - RNA, 22 nt, Human
aaagacagggcugauaagcuaa

SEQ ID NO: 1895377 - RNA, 19 nt, Human
aaagacugaccaauauugu

SEQ ID NO: 1895378 - RNA, 11 nt, Human
gguccugcugc

SEQ ID NO: 1895379 - RNA, 12 nt, Human
gguccugcugca

SEQ ID NO: 1895380 - RNA, 14 nt, Human
gguccugcugcagu

SEQ ID NO: 1895381 - RNA, 14 nt, Human
aaagacuguacaaa

SEQ ID NO: 1895382 - RNA, 22 nt, Human
aaagagaugaugaaaauauuua

SEQ ID NO: 1895383 - RNA, 20 nt, Human
aaagagaugaugaaaauauu

SEQ ID NO: 1895384 - RNA, 19 nt, Human
aaagagaugaugaaaauau

SEQ ID NO: 1895385 - RNA, 23 nt, Human
aaagacugaguacguugugcauu

SEQ ID NO: 1895386 - RNA, 13 nt, Human
aaagacuguacaa

SEQ ID NO: 1895387 - RNA, 19 nt, Human
aaagaugcuucucacugcc

SEQ ID NO: 1895388 - RNA, 17 nt, Human
aaagaugcuucucacug

SEQ ID NO: 1895389 - RNA, 14 nt, Human
aaagaugcuucuca

SEQ ID NO: 1895390 - RNA, 15 nt, Human
aaagaggaaugaagu

SEQ ID NO: 1895391 - RNA, 17 nt, Human
gggucgacuucgggcug

SEQ ID NO: 1895392 - RNA, 23 nt, Human
gggucggaacccaagcuuagaac

SEQ ID NO: 1895393 - RNA, 13 nt, Human
gggucgcccugga

SEQ ID NO: 1895394 - RNA, 15 nt, Human
gggucgcccuggacu

SEQ ID NO: 1895395 - RNA, 19 nt, Human
gggggugcugggccccugc

SEQ ID NO: 1895396 - RNA, 18 nt, Human
ggguccaggauuccucuu

SEQ ID NO: 1895397 - RNA, 20 nt, Human
ggguccaggauuccucuuuu

SEQ ID NO: 1895398 - RNA, 16 nt, Human
ggguccagggagcagg

SEQ ID NO: 1895399 - RNA, 17 nt, Human
ggguccagggagcaggc

SEQ ID NO: 1895400 - RNA, 15 nt, Human
aaacgggcucagcaa

SEQ ID NO: 1895401 - RNA, 18 nt, Human
aaaccuuuguuugcaucu

SEQ ID NO: 1895402 - RNA, 18 nt, Human
aaaccuuuuauauuuagu

SEQ ID NO: 1895403 - RNA, 11 nt, Human
aaaccucuccu

SEQ ID NO: 1895404 - RNA, 22 nt, Human
aaaccucuccucauguucugcu

SEQ ID NO: 1895405 - RNA, 23 nt, Human
aaaccaagucaagugaaaaagga

SEQ ID NO: 1895406 - RNA, 13 nt, Human
aaacucuccucug

SEQ ID NO: 1895407 - RNA, 19 nt, Human
aaacuguuaauaguucagg

SEQ ID NO: 1895408 - RNA, 16 nt, Human
aaacuuaaucuaaaug

SEQ ID NO: 1895409 - RNA, 18 nt, Human
aaacuuaaucuaaaugga

SEQ ID NO: 1895410 - RNA, 17 nt, Human
aaacuuaaucuaaaugg

SEQ ID NO: 1895411 - RNA, 22 nt, Human
ggguggccuaagaguugagcuc

SEQ ID NO: 1895412 - RNA, 22 nt, Human
aaacuaggugcauauuuauaaa

SEQ ID NO: 1895413 - RNA, 20 nt, Human
aaacuaggggacaaagcaaa

SEQ ID NO: 1895414 - RNA, 18 nt, Human
aaacuaggugcauauuua

SEQ ID NO: 1895415 - RNA, 14 nt, Human
aaacgucuuaaaua

SEQ ID NO: 1895416 - RNA, 13 nt, Human
aaacgucuuaaau

SEQ ID NO: 1895417 - RNA, 15 nt, Human
aaacucauuuauaaa

SEQ ID NO: 1895418 - RNA, 24 nt, Human
aaacucauuuauaaagcuaaaaua

SEQ ID NO: 1895419 - RNA, 13 nt, Human
gggaugagaaagg

SEQ ID NO: 1895420 - RNA, 16 nt, Human
aaaauguuauuuaaca

SEQ ID NO: 1895421 - RNA, 14 nt, Human
aaaauguugagaau

SEQ ID NO: 1895422 - RNA, 19 nt, Human
aaaauuuagaaauauaauu

SEQ ID NO: 1895423 - RNA, 20 nt, Human
aaaauuuugauguuuuaagg

SEQ ID NO: 1895424 - RNA, 19 nt, Human
aaacacaaacgggcucagc

SEQ ID NO: 1895425 - RNA, 22 nt, Human
aaacaauguuaacauuuuuggu

SEQ ID NO: 1895426 - RNA, 17 nt, Human
aaacaaaguuacuaggu

SEQ ID NO: 1895427 - RNA, 11 nt, Human
aaacacauuuu

SEQ ID NO: 1895428 - RNA, 12 nt, Human
aaacacauuuuu

SEQ ID NO: 1895429 - RNA, 22 nt, Human
ggggaauguuugccucugccuc

SEQ ID NO: 1895430 - RNA, 18 nt, Human
ggggaauguuugccucug

SEQ ID NO: 1895431 - RNA, 15 nt, Human
ggggaccagagcugc

SEQ ID NO: 1895432 - RNA, 16 nt, Human
ggggaccagagcugcc

SEQ ID NO: 1895433 - RNA, 15 nt, Human
ggggaauucaucucu

SEQ ID NO: 1895434 - RNA, 14 nt, Human
aaacaguagugaua

SEQ ID NO: 1895435 - RNA, 16 nt, Human
aaacauggccuuugcu

SEQ ID NO: 1895436 - RNA, 17 nt, Human
aaacauggccuuugcuu

SEQ ID NO: 1895437 - RNA, 20 nt, Human
aaacaugugguuacacagug

SEQ ID NO: 1895438 - RNA, 11 nt, Human
ggggagaaagu

SEQ ID NO: 1895439 - RNA, 14 nt, Human
ggggccgcugccac

SEQ ID NO: 1895440 - RNA, 22 nt, Human
ggggccgcugccacccaccucc

SEQ ID NO: 1895441 - RNA, 18 nt, Human
ggggacccccgcccccug

SEQ ID NO: 1895442 - RNA, 13 nt, Human
ggggacccccgcc

SEQ ID NO: 1895443 - RNA, 15 nt, Human
ggggacccccgcccc

SEQ ID NO: 1895444 - RNA, 21 nt, Human
ggggacccaauguaggagcug

SEQ ID NO: 1895445 - RNA, 18 nt, Human
gggggccucagugccacu

SEQ ID NO: 1895446 - RNA, 17 nt, Human
gggggccucagugccac

SEQ ID NO: 1895447 - RNA, 15 nt, Human
gggggccucagugcc

SEQ ID NO: 1895448 - RNA, 12 nt, Human
gggggccucagu

SEQ ID NO: 1895449 - RNA, 15 nt, Human
ggggccucagugcca

SEQ ID NO: 1895450 - RNA, 23 nt, Human
ggggccuacagcuuugaucccug

SEQ ID NO: 1895451 - RNA, 20 nt, Human
ggggccuaggccucagccag

SEQ ID NO: 1895452 - RNA, 23 nt, Human
ggggccuaggccucagccagaga

SEQ ID NO: 1895453 - RNA, 17 nt, Human
guacacguguccuguag

SEQ ID NO: 1895454 - RNA, 15 nt, Human
guacacguguccugu

SEQ ID NO: 1895455 - RNA, 14 nt, Human
guacacguguccug

SEQ ID NO: 1895456 - RNA, 18 nt, Human
guaauuuuauaugaagau

SEQ ID NO: 1895457 - RNA, 15 nt, Human
guaauuuuauaugaa

SEQ ID NO: 1895458 - RNA, 15 nt, Human
aaauacaaaacuucc

SEQ ID NO: 1895459 - RNA, 17 nt, Human
aaauacagauagauaua

SEQ ID NO: 1895460 - RNA, 18 nt, Human
aaauaccagccaguaaau

SEQ ID NO: 1895461 - RNA, 22 nt, Human
aaauacgugggcauucaaaugu

SEQ ID NO: 1895462 - RNA, 17 nt, Human
aaauacugcaagaaaau

SEQ ID NO: 1895463 - RNA, 15 nt, Human
aaauauacacacagc

SEQ ID NO: 1895464 - RNA, 20 nt, Human
guaauaggcguaacuaauuu

SEQ ID NO: 1895465 - RNA, 22 nt, Human
guaauuugugauacaaugcugu

SEQ ID NO: 1895466 - RNA, 23 nt, Human
guaauuuaaaauugugauguguc

SEQ ID NO: 1895467 - RNA, 20 nt, Human
guaauuuaaaauugugaugu

SEQ ID NO: 1895468 - RNA, 19 nt, Human
guaauuuaaaauugugaug

SEQ ID NO: 1895469 - RNA, 15 nt, Human
guaauccaccugccu

SEQ ID NO: 1895470 - RNA, 20 nt, Human
guaaucccagcacuuuggga

SEQ ID NO: 1895471 - RNA, 21 nt, Human
guaauccaagcaaaugugaau

SEQ ID NO: 1895472 - RNA, 18 nt, Human
guaauaugcacacauuuu

SEQ ID NO: 1895473 - RNA, 17 nt, Human
guaauaugcacacauuu

SEQ ID NO: 1895474 - RNA, 16 nt, Human
guaauaugcacacauu

SEQ ID NO: 1895475 - RNA, 14 nt, Human
guaauaugcacaca

SEQ ID NO: 1895476 - RNA, 16 nt, Human
aaaguugguaaaccuu

SEQ ID NO: 1895477 - RNA, 17 nt, Human
aaaguugguaaaccuuu

SEQ ID NO: 1895478 - RNA, 20 nt, Human
aaaguuuaaaacagaagccu

SEQ ID NO: 1895479 - RNA, 21 nt, Human
aaauaacuggaggaauuuucu

SEQ ID NO: 1895480 - RNA, 18 nt, Human
aaauaaccaaucuacaau

SEQ ID NO: 1895481 - RNA, 14 nt, Human
aaauaaaaauaaau

SEQ ID NO: 1895482 - RNA, 13 nt, Human
aaauaaaaagaaa

SEQ ID NO: 1895483 - RNA, 14 nt, Human
aaauaagaauagaa

SEQ ID NO: 1895484 - RNA, 17 nt, Human
aaauaagaauagaaaua

SEQ ID NO: 1895485 - RNA, 23 nt, Human
aaaguucugcagauaaacaguag

SEQ ID NO: 1895486 - RNA, 14 nt, Human
aaaguuauucuuga

SEQ ID NO: 1895487 - RNA, 12 nt, Human
aaaguuacuagg

SEQ ID NO: 1895488 - RNA, 15 nt, Human
aaaguuacuagguaa

SEQ ID NO: 1895489 - RNA, 20 nt, Human
aaaguuacuagguaacuuca

SEQ ID NO: 1895490 - RNA, 21 nt, Human
aaaguuacuagguaacuucau

SEQ ID NO: 1895491 - RNA, 19 nt, Human
aaaguauucuguacucuua

SEQ ID NO: 1895492 - RNA, 21 nt, Human
aaaguacuucuccacccugcu

SEQ ID NO: 1895493 - RNA, 20 nt, Human
aaaguacuucuccacccugc

SEQ ID NO: 1895494 - RNA, 23 nt, Human
aaaguacuucuccacccugcucu

SEQ ID NO: 1895495 - RNA, 18 nt, Human
aaaguaucccuacuguaa

SEQ ID NO: 1895496 - RNA, 19 nt, Human
aaaguacuucuccacccug

SEQ ID NO: 1895497 - RNA, 16 nt, Human
aaaguacauguuaaac

SEQ ID NO: 1895498 - RNA, 20 nt, Human
aaaguacacuguuucaaacu

SEQ ID NO: 1895499 - RNA, 20 nt, Human
aaagguauuuuaaucaccaa

SEQ ID NO: 1895500 - RNA, 20 nt, Human
guacauguguagccugugca

SEQ ID NO: 1895501 - RNA, 19 nt, Human
guacauguguagccugugc

SEQ ID NO: 1895502 - RNA, 19 nt, Human
guacauggaauaacaugua

SEQ ID NO: 1895503 - RNA, 11 nt, Human
guacaugagaa

SEQ ID NO: 1895504 - RNA, 20 nt, Human
guacaugaaaacacauuuuu

SEQ ID NO: 1895505 - RNA, 19 nt, Human
guacaugaaaacacauuuu

SEQ ID NO: 1895506 - RNA, 18 nt, Human
guacaugaaaacacauuu

SEQ ID NO: 1895507 - RNA, 17 nt, Human
guacaugaaaacacauu

SEQ ID NO: 1895508 - RNA, 16 nt, Human
guacaugaaaacacau

SEQ ID NO: 1895509 - RNA, 15 nt, Human
guacaugaaaacaca

SEQ ID NO: 1895510 - RNA, 14 nt, Human
guacaugaaaacac

SEQ ID NO: 1895511 - RNA, 18 nt, Human
guacaucuauuuuggauu

SEQ ID NO: 1895512 - RNA, 20 nt, Human
guacaucuauuuuggauugu

SEQ ID NO: 1895513 - RNA, 15 nt, Human
guaccaaucauuuua

SEQ ID NO: 1895514 - RNA, 14 nt, Human
guaccaaucauuuu

SEQ ID NO: 1895515 - RNA, 21 nt, Human
guaccaaucauuuuaauuauu

SEQ ID NO: 1895516 - RNA, 15 nt, Human
guaccaccaaaaaag

SEQ ID NO: 1895517 - RNA, 20 nt, Human
guaccaagacuacuagggaa

SEQ ID NO: 1895518 - RNA, 23 nt, Human
guaccaagacuacuagggaaaug

SEQ ID NO: 1895519 - RNA, 12 nt, Human
guacccacugcu

SEQ ID NO: 1895520 - RNA, 19 nt, Human
guaccauuuauacaaauua

SEQ ID NO: 1895521 - RNA, 21 nt, Human
guaccauuuauacaaauuaga

SEQ ID NO: 1895522 - RNA, 20 nt, Human
guaccauaguaccauuuaua

SEQ ID NO: 1895523 - RNA, 21 nt, Human
guaccaugugcuacaggggcc

SEQ ID NO: 1895524 - RNA, 15 nt, Human
aaauccacuuuaucu

SEQ ID NO: 1895525 - RNA, 19 nt, Human
aaaucagccguguaaccau

SEQ ID NO: 1895526 - RNA, 12 nt, Human
aaaucagccugc

SEQ ID NO: 1895527 - RNA, 16 nt, Human
aaaucagcugcuacua

SEQ ID NO: 1895528 - RNA, 18 nt, Human
aaaucagccugcuccagc

SEQ ID NO: 1895529 - RNA, 14 nt, Human
aaaucagacuauga

SEQ ID NO: 1895530 - RNA, 21 nt, Human
aaaucagacuaugaaguuuuu

SEQ ID NO: 1895531 - RNA, 16 nt, Human
guacugagccuuguaa

SEQ ID NO: 1895532 - RNA, 16 nt, Human
guacuggagaaaaugg

SEQ ID NO: 1895533 - RNA, 19 nt, Human
guacuggcugauggaguaa

SEQ ID NO: 1895534 - RNA, 14 nt, Human
guacccacugcucu

SEQ ID NO: 1895535 - RNA, 13 nt, Human
guacccacugcuc

SEQ ID NO: 1895536 - RNA, 18 nt, Human
guacuacaguccucccau

SEQ ID NO: 1895537 - RNA, 19 nt, Human
guacuacaguccucccauc

SEQ ID NO: 1895538 - RNA, 13 nt, Human
guacuauguauca

SEQ ID NO: 1895539 - RNA, 17 nt, Human
guacuacaguccuccca

SEQ ID NO: 1895540 - RNA, 18 nt, Human
guacuaggauacugcugc

SEQ ID NO: 1895541 - RNA, 22 nt, Human
guacuaggauacugcugcguca

SEQ ID NO: 1895542 - RNA, 14 nt, Human
guacucauuaaaaa

SEQ ID NO: 1895543 - RNA, 15 nt, Human
guacuauguaucaau

SEQ ID NO: 1895544 - RNA, 17 nt, Human
guacuauguaucaauga

SEQ ID NO: 1895545 - RNA, 20 nt, Human
guacucaucaucaacccuaa

SEQ ID NO: 1895546 - RNA, 20 nt, Human
guagaaauaucugaaaaugu

SEQ ID NO: 1895547 - RNA, 21 nt, Human
guagaaauaucugaaaaugua

SEQ ID NO: 1895548 - RNA, 23 nt, Human
guagaaauaucugaaaauguaug

SEQ ID NO: 1895549 - RNA, 22 nt, Human
guagaacacaaggucauuugcu

SEQ ID NO: 1895550 - RNA, 21 nt, Human
guagaagucuuagauguauau

SEQ ID NO: 1895551 - RNA, 12 nt, Human
guagaagauggc

SEQ ID NO: 1895552 - RNA, 18 nt, Human
guagaagcccuucuaccu

SEQ ID NO: 1895553 - RNA, 22 nt, Human
guagaauuaucuaauuuauaaa

SEQ ID NO: 1895554 - RNA, 17 nt, Human
guagaauuaucuaauuu

SEQ ID NO: 1895555 - RNA, 14 nt, Human
guagaauugcauug

SEQ ID NO: 1895556 - RNA, 15 nt, Human
guagaauugcauuga

SEQ ID NO: 1895557 - RNA, 11 nt, Human
guagagccagg

SEQ ID NO: 1895558 - RNA, 15 nt, Human
guagagccagagguc

SEQ ID NO: 1895559 - RNA, 10 nt, Human
guagagccag

SEQ ID NO: 1895560 - RNA, 13 nt, Human
guagagacagggu

SEQ ID NO: 1895561 - RNA, 18 nt, Human
guagagccagggucucac

SEQ ID NO: 1895562 - RNA, 15 nt, Human
guagagccagggucu

SEQ ID NO: 1895563 - RNA, 12 nt, Human
guagagacaggg

SEQ ID NO: 1895564 - RNA, 11 nt, Human
guagagacagg

SEQ ID NO: 1895565 - RNA, 21 nt, Human
guagaccugucuccuggcggu

SEQ ID NO: 1895566 - RNA, 19 nt, Human
guagaccugucuccuggcg

SEQ ID NO: 1895567 - RNA, 14 nt, Human
ccacgcagccagga

SEQ ID NO: 1895568 - RNA, 13 nt, Human
ccacgcagccagg

SEQ ID NO: 1895569 - RNA, 16 nt, Human
ccacgcagccaggaca

SEQ ID NO: 1895570 - RNA, 15 nt, Human
ccacgcagccaggac

SEQ ID NO: 1895571 - RNA, 17 nt, Human
ccacgcagccaggacac

SEQ ID NO: 1895572 - RNA, 13 nt, Human
ccacgcccccacu

SEQ ID NO: 1895573 - RNA, 19 nt, Human
ccaccuuggcugcagggag

SEQ ID NO: 1895574 - RNA, 18 nt, Human
ccaccuuggcugcaggga

SEQ ID NO: 1895575 - RNA, 18 nt, Human
ccacgcuggaccuugaac

SEQ ID NO: 1895576 - RNA, 13 nt, Human
ccacgcuggagug

SEQ ID NO: 1895577 - RNA, 16 nt, Human
ccaccuuggcugcagg

SEQ ID NO: 1895578 - RNA, 15 nt, Human
ccaccuuggcugcag

SEQ ID NO: 1895579 - RNA, 14 nt, Human
ccaccuuggcugca

SEQ ID NO: 1895580 - RNA, 12 nt, Human
ccaccuuggcug

SEQ ID NO: 1895581 - RNA, 13 nt, Human
ccaccuagcagca

SEQ ID NO: 1895582 - RNA, 14 nt, Human
ccaccuagcagcac

SEQ ID NO: 1895583 - RNA, 23 nt, Human
ccaccuagcagcaccguucugug

SEQ ID NO: 1895584 - RNA, 19 nt, Human
ccaccaucaugucuggcua

SEQ ID NO: 1895585 - RNA, 18 nt, Human
ccaccaucaugucuggcu

SEQ ID NO: 1895586 - RNA, 14 nt, Human
ccaccagucauuuu

SEQ ID NO: 1895587 - RNA, 19 nt, Human
ccacagcccagccacggac

SEQ ID NO: 1895588 - RNA, 18 nt, Human
ccacagcccagccacgga

SEQ ID NO: 1895589 - RNA, 15 nt, Human
ccacagcccagccac

SEQ ID NO: 1895590 - RNA, 20 nt, Human
ccacagcccagccacggacg

SEQ ID NO: 1895591 - RNA, 17 nt, Human
ccacagagacaaggagg

SEQ ID NO: 1895592 - RNA, 22 nt, Human
ccacagagaaaguacuucucca

SEQ ID NO: 1895593 - RNA, 21 nt, Human
ccacacuggacuccggcccuc

SEQ ID NO: 1895594 - RNA, 22 nt, Human
ccacacuggacuccggcccucc

SEQ ID NO: 1895595 - RNA, 17 nt, Human
cauuuuuuaaaacaaga

SEQ ID NO: 1895596 - RNA, 16 nt, Human
cauuuuuuaaaacaag

SEQ ID NO: 1895597 - RNA, 19 nt, Human
cauuuuuuaaaugcaccug

SEQ ID NO: 1895598 - RNA, 16 nt, Human
cauuuuuuaaaugcac

SEQ ID NO: 1895599 - RNA, 15 nt, Human
cauuuuuuaaaugca

SEQ ID NO: 1895600 - RNA, 15 nt, Human
cauuuuuuaaaacaa

SEQ ID NO: 1895601 - RNA, 14 nt, Human
cauuuuuuaaaaca

SEQ ID NO: 1895602 - RNA, 17 nt, Human
cauuugucacacacuuu

SEQ ID NO: 1895603 - RNA, 15 nt, Human
cauuuggauuggaug

SEQ ID NO: 1895604 - RNA, 14 nt, Human
cauuuggauugggg

SEQ ID NO: 1895605 - RNA, 23 nt, Human
cauuuggauuggggucccucuaa

SEQ ID NO: 1895606 - RNA, 15 nt, Human
cauuuggaauacuuu

SEQ ID NO: 1895607 - RNA, 17 nt, Human
cauuuggaauacuuuuu

SEQ ID NO: 1895608 - RNA, 15 nt, Human
cauuuauucugcuca

SEQ ID NO: 1895609 - RNA, 14 nt, Human
cauuuauucugcuc

SEQ ID NO: 1895610 - RNA, 18 nt, Human
cauuuauaaagcuaaaau

SEQ ID NO: 1895611 - RNA, 21 nt, Human
cauuuauaaagcuaaaauaac

SEQ ID NO: 1895612 - RNA, 12 nt, Human
cauuuauacaaa

SEQ ID NO: 1895613 - RNA, 15 nt, Human
cauuuauacaaauua

SEQ ID NO: 1895614 - RNA, 17 nt, Human
cauuuauacaaauuaga

SEQ ID NO: 1895615 - RNA, 18 nt, Human
cauuuauacaaauuagaa

SEQ ID NO: 1895616 - RNA, 19 nt, Human
cauuuauacaaauuagaaa

SEQ ID NO: 1895617 - RNA, 20 nt, Human
cauuuauacaaauuagaaaa

SEQ ID NO: 1895618 - RNA, 12 nt, Human
cauuggaaauua

SEQ ID NO: 1895619 - RNA, 16 nt, Human
ccaaggccaaaggaag

SEQ ID NO: 1895620 - RNA, 18 nt, Human
ccaaucccagcuaccuca

SEQ ID NO: 1895621 - RNA, 17 nt, Human
ccaaauaaugucucugu

SEQ ID NO: 1895622 - RNA, 16 nt, Human
ccaaauaaugucucug

SEQ ID NO: 1895623 - RNA, 15 nt, Human
ccaaauaaugucucu

SEQ ID NO: 1895624 - RNA, 13 nt, Human
ccaagaagcccag

SEQ ID NO: 1895625 - RNA, 16 nt, Human
ccaacgucugugccau

SEQ ID NO: 1895626 - RNA, 24 nt, Human
ccaacggcaagggaacaaguacuu

SEQ ID NO: 1895627 - RNA, 14 nt, Human
ccaagaaacgucuu

SEQ ID NO: 1895628 - RNA, 22 nt, Human
ccaaauggaaaugggcagagca

SEQ ID NO: 1895629 - RNA, 13 nt, Human
ccaacgucugugc

SEQ ID NO: 1895630 - RNA, 15 nt, Human
ccaacgucugugcca

SEQ ID NO: 1895631 - RNA, 19 nt, Human
ccaagcuggucccacucag

SEQ ID NO: 1895632 - RNA, 12 nt, Human
ccaagcuggucc

SEQ ID NO: 1895633 - RNA, 14 nt, Human
ccaagaagcccagg

SEQ ID NO: 1895634 - RNA, 15 nt, Human
ccaaggccaaaggaa

SEQ ID NO: 1895635 - RNA, 12 nt, Human
cauuccuguucc

SEQ ID NO: 1895636 - RNA, 21 nt, Human
cauuaugaugugggucaagga

SEQ ID NO: 1895637 - RNA, 22 nt, Human
cauuaggugugacugaauuucu

SEQ ID NO: 1895638 - RNA, 18 nt, Human
cauguugcuguuuccagu

SEQ ID NO: 1895639 - RNA, 17 nt, Human
cauuagggggaacucua

SEQ ID NO: 1895640 - RNA, 23 nt, Human
cauuaucuagauacuguaucaug

SEQ ID NO: 1895641 - RNA, 13 nt, Human
cauguuggccagg

SEQ ID NO: 1895642 - RNA, 12 nt, Human
cauguuggccag

SEQ ID NO: 1895643 - RNA, 18 nt, Human
cauguccaagaagcccag

SEQ ID NO: 1895644 - RNA, 19 nt, Human
cauguccaagaagcccagg

SEQ ID NO: 1895645 - RNA, 20 nt, Human
cauguccaagaagcccagga

SEQ ID NO: 1895646 - RNA, 20 nt, Human
cauguauaauauuuuuaauu

SEQ ID NO: 1895647 - RNA, 18 nt, Human
cauguauaauauuuuuaa

SEQ ID NO: 1895648 - RNA, 15 nt, Human
cauguauaauauuuu

SEQ ID NO: 1895649 - RNA, 16 nt, Human
caugcacgugugugca

SEQ ID NO: 1895650 - RNA, 13 nt, Human
caugcuccuggcc

SEQ ID NO: 1895651 - RNA, 12 nt, Human
caugcugcccug

SEQ ID NO: 1895652 - RNA, 13 nt, Human
caugcugcccugu

SEQ ID NO: 1895653 - RNA, 22 nt, Human
caugauuaaccacuucagcuga

SEQ ID NO: 1895654 - RNA, 23 nt, Human
caugauuaaccacuucagcugac

SEQ ID NO: 1895655 - RNA, 12 nt, Human
caugcacaaauu

SEQ ID NO: 1895656 - RNA, 24 nt, Human
caugauuaaccacuucagcugacu

SEQ ID NO: 1895657 - RNA, 21 nt, Human
caugacacgaauauugcugau

SEQ ID NO: 1895658 - RNA, 18 nt, Human
caugaagguuucugaaaa

SEQ ID NO: 1895659 - RNA, 15 nt, Human
caugaagguuucuga

SEQ ID NO: 1895660 - RNA, 23 nt, Human
caugacacgaauauugcugaugg

SEQ ID NO: 1895661 - RNA, 23 nt, Human
caugaaguaauaugcacacauuu

SEQ ID NO: 1895662 - RNA, 22 nt, Human
caugaaguaauaugcacacauu

SEQ ID NO: 1895663 - RNA, 19 nt, Human
caugaaguaauaugcacac

SEQ ID NO: 1895664 - RNA, 15 nt, Human
caugaaguaauaugc

SEQ ID NO: 1895665 - RNA, 14 nt, Human
caugcugcccugug

SEQ ID NO: 1895666 - RNA, 15 nt, Human
caugcugcccuguga

SEQ ID NO: 1895667 - RNA, 15 nt, Human
cagugggagcugccu

SEQ ID NO: 1895668 - RNA, 14 nt, Human
cauacaccagcauu

SEQ ID NO: 1895669 - RNA, 18 nt, Human
cauacaccagcauuccuu

SEQ ID NO: 1895670 - RNA, 20 nt, Human
cauacaccagcauuccuuuu

SEQ ID NO: 1895671 - RNA, 13 nt, Human
cauaauuucagcu

SEQ ID NO: 1895672 - RNA, 13 nt, Human
cauacaccagcau

SEQ ID NO: 1895673 - RNA, 22 nt, Human
cauagcagagaaugaaagggcc

SEQ ID NO: 1895674 - RNA, 19 nt, Human
cauagcagagaaugaaagg

SEQ ID NO: 1895675 - RNA, 22 nt, Human
cauagcuuacaagccagcugga

SEQ ID NO: 1895676 - RNA, 22 nt, Human
cauaugccugggcagaaggaag

SEQ ID NO: 1895677 - RNA, 15 nt, Human
cauaugccugggcag

SEQ ID NO: 1895678 - RNA, 20 nt, Human
cauaugccugggcagaagga

SEQ ID NO: 1895679 - RNA, 22 nt, Human
cauauucaggaagcucagggcc

SEQ ID NO: 1895680 - RNA, 20 nt, Human
cauauucaggaagcucaggg

SEQ ID NO: 1895681 - RNA, 14 nt, Human
cauauucaggaagc

SEQ ID NO: 1895682 - RNA, 15 nt, Human
cauauucaggaagcu

SEQ ID NO: 1895683 - RNA, 16 nt, Human
cauccccugccuccau

SEQ ID NO: 1895684 - RNA, 14 nt, Human
cauccccuguagag

SEQ ID NO: 1895685 - RNA, 19 nt, Human
cauccccgcagugugcacu

SEQ ID NO: 1895686 - RNA, 13 nt, Human
cauccccugccuc

SEQ ID NO: 1895687 - RNA, 14 nt, Human
cauccccugccucc

SEQ ID NO: 1895688 - RNA, 15 nt, Human
cauccccugccucca

SEQ ID NO: 1895689 - RNA, 22 nt, Human
cauccccugccuccauccuagu

SEQ ID NO: 1895690 - RNA, 19 nt, Human
caucccauaugccugggca

SEQ ID NO: 1895691 - RNA, 15 nt, Human
caucugcucuccuuc

SEQ ID NO: 1895692 - RNA, 14 nt, Human
caucugcucuccuu

SEQ ID NO: 1895693 - RNA, 13 nt, Human
caucugcucuccu

SEQ ID NO: 1895694 - RNA, 18 nt, Human
cauccuuccucacaccag

SEQ ID NO: 1895695 - RNA, 15 nt, Human
cauccuucccugucu

SEQ ID NO: 1895696 - RNA, 21 nt, Human
cauccuucccugucugccagg

SEQ ID NO: 1895697 - RNA, 22 nt, Human
cauccuucccugucugccaggg

SEQ ID NO: 1895698 - RNA, 20 nt, Human
caucugccgugccuggaucc

SEQ ID NO: 1895699 - RNA, 16 nt, Human
caucaggccaggcccu

SEQ ID NO: 1895700 - RNA, 19 nt, Human
caucaggccaggcccucug

SEQ ID NO: 1895701 - RNA, 19 nt, Human
cauccauggggcugauugu

SEQ ID NO: 1895702 - RNA, 15 nt, Human
caucaggccaggccc

SEQ ID NO: 1895703 - RNA, 20 nt, Human
caucugggcuccuccagggu

SEQ ID NO: 1895704 - RNA, 16 nt, Human
caucugggcuccucca

SEQ ID NO: 1895705 - RNA, 17 nt, Human
caucugggcuccuccag

SEQ ID NO: 1895706 - RNA, 21 nt, Human
cagcugccucugccacugacu

SEQ ID NO: 1895707 - RNA, 12 nt, Human
cagcugcacuga

SEQ ID NO: 1895708 - RNA, 18 nt, Human
cagcugcacugaugcugc

SEQ ID NO: 1895709 - RNA, 14 nt, Human
caggaaaggcucca

SEQ ID NO: 1895710 - RNA, 15 nt, Human
caggaaaggcuccag

SEQ ID NO: 1895711 - RNA, 18 nt, Human
caggaaaggcccagccac

SEQ ID NO: 1895712 - RNA, 19 nt, Human
cagcuucauuuccuguguc

SEQ ID NO: 1895713 - RNA, 18 nt, Human
cagcuucauuuccugugu

SEQ ID NO: 1895714 - RNA, 15 nt, Human
cagcuucauuuccug

SEQ ID NO: 1895715 - RNA, 18 nt, Human
cagcugugcucuggacag

SEQ ID NO: 1895716 - RNA, 20 nt, Human
cagcuccagcucaccagccc

SEQ ID NO: 1895717 - RNA, 18 nt, Human
cagcuccagcucaccagc

SEQ ID NO: 1895718 - RNA, 17 nt, Human
cagcuccagcucaccag

SEQ ID NO: 1895719 - RNA, 16 nt, Human
cagcuccagcucacca

SEQ ID NO: 1895720 - RNA, 22 nt, Human
cagcuccagcucaccagcccca

SEQ ID NO: 1895721 - RNA, 13 nt, Human
cagcuccacccug

SEQ ID NO: 1895722 - RNA, 15 nt, Human
cagcuccacccuggc

SEQ ID NO: 1895723 - RNA, 15 nt, Human
cagcuccagcucacc

SEQ ID NO: 1895724 - RNA, 14 nt, Human
cagcuccagcucac

SEQ ID NO: 1895725 - RNA, 13 nt, Human
cagcuccagcuca

SEQ ID NO: 1895726 - RNA, 19 nt, Human
cagcuccaagaauuucuag

SEQ ID NO: 1895727 - RNA, 23 nt, Human
cagcuccaaccugcaaagaucug

SEQ ID NO: 1895728 - RNA, 16 nt, Human
cagcuccaagaauuuc

SEQ ID NO: 1895729 - RNA, 17 nt, Human
cagcuccaaccugcaaa

SEQ ID NO: 1895730 - RNA, 20 nt, Human
cagcuccaaccugcaaagau

SEQ ID NO: 1895731 - RNA, 21 nt, Human
cagccgagauagccaaggcca

SEQ ID NO: 1895732 - RNA, 21 nt, Human
cagcccuuagcagggaaacag

SEQ ID NO: 1895733 - RNA, 16 nt, Human
cagcccuuagcaggga

SEQ ID NO: 1895734 - RNA, 22 nt, Human
cagccccuggaugcagccucac

SEQ ID NO: 1895735 - RNA, 15 nt, Human
cagcccuuagcaggg

SEQ ID NO: 1895736 - RNA, 17 nt, Human
cagccccuggaugcagc

SEQ ID NO: 1895737 - RNA, 18 nt, Human
cagccccuggaugcagcc

SEQ ID NO: 1895738 - RNA, 19 nt, Human
cagccccuggaugcagccu

SEQ ID NO: 1895739 - RNA, 21 nt, Human
cagccccuggaugcagccuca

SEQ ID NO: 1895740 - RNA, 12 nt, Human
cagccccuggau

SEQ ID NO: 1895741 - RNA, 13 nt, Human
cagccccuggaug

SEQ ID NO: 1895742 - RNA, 14 nt, Human
cagccccuggaugc

SEQ ID NO: 1895743 - RNA, 18 nt, Human
cagccugagcgacaguga

SEQ ID NO: 1895744 - RNA, 22 nt, Human
cagccugagcgacagugagacu

SEQ ID NO: 1895745 - RNA, 19 nt, Human
cagccugagcgacagugag

SEQ ID NO: 1895746 - RNA, 17 nt, Human
cagcggggacagcuccu

SEQ ID NO: 1895747 - RNA, 16 nt, Human
cagcggggacagcucc

SEQ ID NO: 1895748 - RNA, 15 nt, Human
cagcggggacagcuc

SEQ ID NO: 1895749 - RNA, 16 nt, Human
cagccugagcaacucu

SEQ ID NO: 1895750 - RNA, 20 nt, Human
cagccugagcaacucuugau

SEQ ID NO: 1895751 - RNA, 21 nt, Human
cagccugagcaacucuugauu

SEQ ID NO: 1895752 - RNA, 15 nt, Human
cagcguacucaucau

SEQ ID NO: 1895753 - RNA, 20 nt, Human
cagcaccuacaguguacagu

SEQ ID NO: 1895754 - RNA, 21 nt, Human
cagcagguccccagcuuuggc

SEQ ID NO: 1895755 - RNA, 15 nt, Human
cagcaccuacagugu

SEQ ID NO: 1895756 - RNA, 17 nt, Human
cagcaccguucugugca

SEQ ID NO: 1895757 - RNA, 18 nt, Human
cagcaccguucugugcac

SEQ ID NO: 1895758 - RNA, 16 nt, Human
cagcaccguucugugc

SEQ ID NO: 1895759 - RNA, 13 nt, Human
cagcacagccaac

SEQ ID NO: 1895760 - RNA, 19 nt, Human
cagcacacagggcagugag

SEQ ID NO: 1895761 - RNA, 18 nt, Human
cagcacacagggcaguga

SEQ ID NO: 1895762 - RNA, 22 nt, Human
cagccaggccacaagacccuug

SEQ ID NO: 1895763 - RNA, 12 nt, Human
cagccaggccac

SEQ ID NO: 1895764 - RNA, 13 nt, Human
cagccaggccaca

SEQ ID NO: 1895765 - RNA, 19 nt, Human
cagcauauucaggaagcuc

SEQ ID NO: 1895766 - RNA, 22 nt, Human
cagcauauucaggaagcucagg

SEQ ID NO: 1895767 - RNA, 23 nt, Human
cagcauauucaggaagcucaggg

SEQ ID NO: 1895768 - RNA, 22 nt, Human
cagagggccugcaagggaguga

SEQ ID NO: 1895769 - RNA, 14 nt, Human
cagaggggcagaug

SEQ ID NO: 1895770 - RNA, 17 nt, Human
cagaggggcagauggaa

SEQ ID NO: 1895771 - RNA, 23 nt, Human
cagaaguuucugccgcagcccug

SEQ ID NO: 1895772 - RNA, 19 nt, Human
cagaaguuucugccgcagc

SEQ ID NO: 1895773 - RNA, 20 nt, Human
cagaaguuugagaucagccu

SEQ ID NO: 1895774 - RNA, 22 nt, Human
cagaaguuugagaucagccugg

SEQ ID NO: 1895775 - RNA, 23 nt, Human
cagaaguuugagaucagccuggg

SEQ ID NO: 1895776 - RNA, 16 nt, Human
cagagcugccaccugc

SEQ ID NO: 1895777 - RNA, 18 nt, Human
cagagcugccaccugccu

SEQ ID NO: 1895778 - RNA, 20 nt, Human
cagagcugggauguuucugu

SEQ ID NO: 1895779 - RNA, 20 nt, Human
cagagucagaaguuucugcc

SEQ ID NO: 1895780 - RNA, 18 nt, Human
cagaggggguggccuccc

SEQ ID NO: 1895781 - RNA, 17 nt, Human
cagaggggguggccucc

SEQ ID NO: 1895782 - RNA, 19 nt, Human
cagaggggguggccuccca

SEQ ID NO: 1895783 - RNA, 20 nt, Human
cagaggggguggccucccaa

SEQ ID NO: 1895784 - RNA, 19 nt, Human
cagauaugauucaaauguc

SEQ ID NO: 1895785 - RNA, 17 nt, Human
cagauaugauucaaaug

SEQ ID NO: 1895786 - RNA, 16 nt, Human
cagauaugauucaaau

SEQ ID NO: 1895787 - RNA, 15 nt, Human
cagauaugauucaaa

SEQ ID NO: 1895788 - RNA, 12 nt, Human
caggagcuuccu

SEQ ID NO: 1895789 - RNA, 16 nt, Human
caggacccugaagggg

SEQ ID NO: 1895790 - RNA, 14 nt, Human
caggacccugaagg

SEQ ID NO: 1895791 - RNA, 15 nt, Human
caggacccugaaggg

SEQ ID NO: 1895792 - RNA, 23 nt, Human
caggagcuuccuguccucccagc

SEQ ID NO: 1895793 - RNA, 13 nt, Human
caggaggaagggg

SEQ ID NO: 1895794 - RNA, 14 nt, Human
caggaggccagccu

SEQ ID NO: 1895795 - RNA, 15 nt, Human
caggaggccagccuu

SEQ ID NO: 1895796 - RNA, 16 nt, Human
caggaggccagccuug

SEQ ID NO: 1895797 - RNA, 13 nt, Human
caggacccugaag

SEQ ID NO: 1895798 - RNA, 14 nt, Human
caggaccccugagu

SEQ ID NO: 1895799 - RNA, 12 nt, Human
caggaccccuga

SEQ ID NO: 1895800 - RNA, 17 nt, Human
caggaggccagccuuga

SEQ ID NO: 1895801 - RNA, 23 nt, Human
caggcacccaccaucaugucugg

SEQ ID NO: 1895802 - RNA, 22 nt, Human
caggcacccaccaucaugucug

SEQ ID NO: 1895803 - RNA, 18 nt, Human
caggcacccaccaucaug

SEQ ID NO: 1895804 - RNA, 15 nt, Human
caggagguggucugg

SEQ ID NO: 1895805 - RNA, 15 nt, Human
caggcagauccagga

SEQ ID NO: 1895806 - RNA, 17 nt, Human
caggcagauccaggacu

SEQ ID NO: 1895807 - RNA, 18 nt, Human
caggcagauccaggacua

SEQ ID NO: 1895808 - RNA, 21 nt, Human
caggccagagggagugacaga

SEQ ID NO: 1895809 - RNA, 19 nt, Human
caggccagagggagugaca

SEQ ID NO: 1895810 - RNA, 23 nt, Human
caggccagagggagugacagagg

SEQ ID NO: 1895811 - RNA, 19 nt, Human
caggcugggcuucaguggc

SEQ ID NO: 1895812 - RNA, 17 nt, Human
caggcugggcuucagug

SEQ ID NO: 1895813 - RNA, 18 nt, Human
cagggaggacgcucucug

SEQ ID NO: 1895814 - RNA, 17 nt, Human
cagggaggacgcucucu

SEQ ID NO: 1895815 - RNA, 19 nt, Human
cagggaggacgcucucugg

SEQ ID NO: 1895816 - RNA, 16 nt, Human
caggcugggcuucagu

SEQ ID NO: 1895817 - RNA, 15 nt, Human
caggcuggcgugcag

SEQ ID NO: 1895818 - RNA, 21 nt, Human
caggcggugggcacccacccu

SEQ ID NO: 1895819 - RNA, 15 nt, Human
caggcggugggcacc

SEQ ID NO: 1895820 - RNA, 17 nt, Human
caggcggugggcaccca

SEQ ID NO: 1895821 - RNA, 23 nt, Human
caggccugagauuucaucugcuc

SEQ ID NO: 1895822 - RNA, 21 nt, Human
caggccugagauuucaucugc

SEQ ID NO: 1895823 - RNA, 19 nt, Human
caggccugagauuucaucu

SEQ ID NO: 1895824 - RNA, 18 nt, Human
caggccugagauuucauc

SEQ ID NO: 1895825 - RNA, 16 nt, Human
caggccugagauuuca

SEQ ID NO: 1895826 - RNA, 14 nt, Human
caggccugagauuu

SEQ ID NO: 1895827 - RNA, 15 nt, Human
caggccugacucuca

SEQ ID NO: 1895828 - RNA, 18 nt, Human
cagggaggugaccccagg

SEQ ID NO: 1895829 - RNA, 22 nt, Human
cagggaguccgaaagggacuug

SEQ ID NO: 1895830 - RNA, 17 nt, Human
caggugcagccagaggc

SEQ ID NO: 1895831 - RNA, 19 nt, Human
caggugcagccagaggcac

SEQ ID NO: 1895832 - RNA, 14 nt, Human
caggugcagccaga

SEQ ID NO: 1895833 - RNA, 15 nt, Human
caggugcagccagag

SEQ ID NO: 1895834 - RNA, 16 nt, Human
caggugcagccagagg

SEQ ID NO: 1895835 - RNA, 22 nt, Human
caggugaguccuagagcuacag

SEQ ID NO: 1895836 - RNA, 23 nt, Human
caggugaguccuagagcuacagg

SEQ ID NO: 1895837 - RNA, 20 nt, Human
caggugauccacccaccuca

SEQ ID NO: 1895838 - RNA, 20 nt, Human
caggugaguccuagagcuac

SEQ ID NO: 1895839 - RNA, 14 nt, Human
caggguuggccccu

SEQ ID NO: 1895840 - RNA, 12 nt, Human
caggguuggccc

SEQ ID NO: 1895841 - RNA, 17 nt, Human
caggugauccacccacc

SEQ ID NO: 1895842 - RNA, 16 nt, Human
caggugauccacccac

SEQ ID NO: 1895843 - RNA, 14 nt, Human
cagguugguggggg

SEQ ID NO: 1895844 - RNA, 14 nt, Human
caggugcgaaagga

SEQ ID NO: 1895845 - RNA, 18 nt, Human
caggugcuaggaacacuc

SEQ ID NO: 1895846 - RNA, 20 nt, Human
caggugcuaggaacacuccu

SEQ ID NO: 1895847 - RNA, 12 nt, Human
cagggugugucu

SEQ ID NO: 1895848 - RNA, 13 nt, Human
cagggugugugcu

SEQ ID NO: 1895849 - RNA, 18 nt, Human
cagggucucacucugucg

SEQ ID NO: 1895850 - RNA, 17 nt, Human
cagggucucacucuguc

SEQ ID NO: 1895851 - RNA, 21 nt, Human
cagggucucacucugucgccc

SEQ ID NO: 1895852 - RNA, 22 nt, Human
cagggucucacucugucgccca

SEQ ID NO: 1895853 - RNA, 20 nt, Human
cagucaccccggccaccugc

SEQ ID NO: 1895854 - RNA, 19 nt, Human
cagucaccccggccaccug

SEQ ID NO: 1895855 - RNA, 22 nt, Human
cagucaccccggccaccugcgg

SEQ ID NO: 1895856 - RNA, 16 nt, Human
cagguuuaagcuguua

SEQ ID NO: 1895857 - RNA, 18 nt, Human
cagguuuaagcuguuacu

SEQ ID NO: 1895858 - RNA, 15 nt, Human
cagguuugggacccc

SEQ ID NO: 1895859 - RNA, 23 nt, Human
cagguuugggaccccuggugguu

SEQ ID NO: 1895860 - RNA, 18 nt, Human
cagguuugggaccccugg

SEQ ID NO: 1895861 - RNA, 15 nt, Human
cagugccaaaaacaa

SEQ ID NO: 1895862 - RNA, 12 nt, Human
cagugcccacag

SEQ ID NO: 1895863 - RNA, 11 nt, Human
cagugggagcu

SEQ ID NO: 1895864 - RNA, 20 nt, Human
cagucugauucccaagcucu

SEQ ID NO: 1895865 - RNA, 19 nt, Human
cagucugauucccaagcuc

SEQ ID NO: 1895866 - RNA, 15 nt, Human
cagucugaucuguga

SEQ ID NO: 1895867 - RNA, 22 nt, Human
cagugcacuaauguguaagaca

SEQ ID NO: 1895868 - RNA, 19 nt, Human
cagugcaugcugucccuua

SEQ ID NO: 1895869 - RNA, 22 nt, Human
cagugcaugcugucccuuacgu

SEQ ID NO: 1895870 - RNA, 23 nt, Human
cagugcaugcugucccuuacgug

SEQ ID NO: 1895871 - RNA, 22 nt, Human
cagucugaugagaacucugagc

SEQ ID NO: 1895872 - RNA, 16 nt, Human
cagucuccaccaggaa

SEQ ID NO: 1895873 - RNA, 17 nt, Human
cagucuccaccaggaac

SEQ ID NO: 1895874 - RNA, 15 nt, Human
caguccuuccaccuc

SEQ ID NO: 1895875 - RNA, 17 nt, Human
auuucacuuaauaaugu

SEQ ID NO: 1895876 - RNA, 12 nt, Human
auuucacuuaau

SEQ ID NO: 1895877 - RNA, 16 nt, Human
auuuaugcauauuauu

SEQ ID NO: 1895878 - RNA, 22 nt, Human
auuuaugcauauuauuuuaugu

SEQ ID NO: 1895879 - RNA, 19 nt, Human
auuuaucuugucucugggc

SEQ ID NO: 1895880 - RNA, 15 nt, Human
auuuauauguacaug

SEQ ID NO: 1895881 - RNA, 16 nt, Human
auuuauauguacauga

SEQ ID NO: 1895882 - RNA, 17 nt, Human
auuuauauguacaugag

SEQ ID NO: 1895883 - RNA, 16 nt, Human
auuuaaugaaagacug

SEQ ID NO: 1895884 - RNA, 15 nt, Human
auuuaaugaaagacu

SEQ ID NO: 1895885 - RNA, 20 nt, Human
auuuaaugaaagacuguaca

SEQ ID NO: 1895886 - RNA, 21 nt, Human
auuuaaugaaagacuguacaa

SEQ ID NO: 1895887 - RNA, 18 nt, Human
auuucugcauauguugaa

SEQ ID NO: 1895888 - RNA, 22 nt, Human
auuucugcauauguugaauacu

SEQ ID NO: 1895889 - RNA, 23 nt, Human
auuucugcauauguugaauacuu

SEQ ID NO: 1895890 - RNA, 17 nt, Human
auuucuauuuauuuacu

SEQ ID NO: 1895891 - RNA, 13 nt, Human
auuucuauuuauu

SEQ ID NO: 1895892 - RNA, 16 nt, Human
auuucuauuuauuuac

SEQ ID NO: 1895893 - RNA, 12 nt, Human
auuucuauuuau

SEQ ID NO: 1895894 - RNA, 12 nt, Human
auuucagacucc

SEQ ID NO: 1895895 - RNA, 12 nt, Human
auuucauaaaga

SEQ ID NO: 1895896 - RNA, 16 nt, Human
auugcuuguuggauuu

SEQ ID NO: 1895897 - RNA, 14 nt, Human
auugcuugcacaaa

SEQ ID NO: 1895898 - RNA, 12 nt, Human
auugcuuugagc

SEQ ID NO: 1895899 - RNA, 10 nt, Human
auugcuuuga

SEQ ID NO: 1895900 - RNA, 20 nt, Human
auugugugugcucugcuuca

SEQ ID NO: 1895901 - RNA, 13 nt, Human
auuguguuugugu

SEQ ID NO: 1895902 - RNA, 16 nt, Human
auuguugucugcaacu

SEQ ID NO: 1895903 - RNA, 13 nt, Human
auucaauaaauug

SEQ ID NO: 1895904 - RNA, 16 nt, Human
auucaauauccuuugc

SEQ ID NO: 1895905 - RNA, 19 nt, Human
auucaauauccuuugccuc

SEQ ID NO: 1895906 - RNA, 17 nt, Human
auuaugggaaucaagau

SEQ ID NO: 1895907 - RNA, 18 nt, Human
auuaugggaaucaagauu

SEQ ID NO: 1895908 - RNA, 18 nt, Human
auucaaauguauuacagu

SEQ ID NO: 1895909 - RNA, 18 nt, Human
auucaacagguuuuccug

SEQ ID NO: 1895910 - RNA, 16 nt, Human
auucaaaugucuauaa

SEQ ID NO: 1895911 - RNA, 20 nt, Human
auuaguacuccccuccuuga

SEQ ID NO: 1895912 - RNA, 16 nt, Human
auuagggagaaaauuc

SEQ ID NO: 1895913 - RNA, 17 nt, Human
auuagggagaaaauuca

SEQ ID NO: 1895914 - RNA, 22 nt, Human
auuaguaccauaguaccauuua

SEQ ID NO: 1895915 - RNA, 11 nt, Human
auuaaauuaug

SEQ ID NO: 1895916 - RNA, 17 nt, Human
auuaaaugcccagcccc

SEQ ID NO: 1895917 - RNA, 19 nt, Human
auuaaaugcccagccccuu

SEQ ID NO: 1895918 - RNA, 14 nt, Human
auucuugcaaagua

SEQ ID NO: 1895919 - RNA, 16 nt, Human
auucuugcaaaguauc

SEQ ID NO: 1895920 - RNA, 15 nt, Human
auucuugcaaaguau

SEQ ID NO: 1895921 - RNA, 12 nt, Human
auucuugcauau

SEQ ID NO: 1895922 - RNA, 13 nt, Human
auucuugcauauu

SEQ ID NO: 1895923 - RNA, 22 nt, Human
auucuucuguacgucugacagg

SEQ ID NO: 1895924 - RNA, 20 nt, Human
auucuucugcuucagccucc

SEQ ID NO: 1895925 - RNA, 19 nt, Human
auucuucugcuucagccuc

SEQ ID NO: 1895926 - RNA, 19 nt, Human
auucucuaguuugauuaaa

SEQ ID NO: 1895927 - RNA, 18 nt, Human
auucucuaguuugauuaa

SEQ ID NO: 1895928 - RNA, 17 nt, Human
auucucuaguuugauua

SEQ ID NO: 1895929 - RNA, 22 nt, Human
auucuccuuguguuacuaaguu

SEQ ID NO: 1895930 - RNA, 21 nt, Human
auucuccuuguguuacuaagu

SEQ ID NO: 1895931 - RNA, 19 nt, Human
auucuccuuguguuacuaa

SEQ ID NO: 1895932 - RNA, 18 nt, Human
auucuccuuguguuacua

SEQ ID NO: 1895933 - RNA, 12 nt, Human
auuccuuuccag

SEQ ID NO: 1895934 - RNA, 17 nt, Human
auuccucaacguauugu

SEQ ID NO: 1895935 - RNA, 12 nt, Human
auuccuuccugu

SEQ ID NO: 1895936 - RNA, 14 nt, Human
auuccuuccuguuc

SEQ ID NO: 1895937 - RNA, 16 nt, Human
auuccuuccuguucug

SEQ ID NO: 1895938 - RNA, 17 nt, Human
auuccuuccuguucuga

SEQ ID NO: 1895939 - RNA, 18 nt, Human
auuccuuccuguucugaa

SEQ ID NO: 1895940 - RNA, 21 nt, Human
caaaaggauaaugaauacuuu

SEQ ID NO: 1895941 - RNA, 20 nt, Human
caaacaugugguuaaugcca

SEQ ID NO: 1895942 - RNA, 16 nt, Human
auuuuuuugagacaga

SEQ ID NO: 1895943 - RNA, 18 nt, Human
auuuuuuuuuccuucagu

SEQ ID NO: 1895944 - RNA, 20 nt, Human
auuuuuuuuuccuucagugc

SEQ ID NO: 1895945 - RNA, 22 nt, Human
auuuuuuuuuccuucagugccu

SEQ ID NO: 1895946 - RNA, 23 nt, Human
auuuuuuuuuccuucagugccuu

SEQ ID NO: 1895947 - RNA, 13 nt, Human
caaaagaagcccc

SEQ ID NO: 1895948 - RNA, 16 nt, Human
caaaagaagcccccag

SEQ ID NO: 1895949 - RNA, 17 nt, Human
caaaagaagcccccagc

SEQ ID NO: 1895950 - RNA, 18 nt, Human
caaaagaagcccccagcu

SEQ ID NO: 1895951 - RNA, 19 nt, Human
caaaagaagcccccagcua

SEQ ID NO: 1895952 - RNA, 14 nt, Human
auuuuuagacagag

SEQ ID NO: 1895953 - RNA, 21 nt, Human
auuuuuagauaguuagaaccu

SEQ ID NO: 1895954 - RNA, 19 nt, Human
auuuuuaagugcugcauuu

SEQ ID NO: 1895955 - RNA, 18 nt, Human
auuuuuaagugcugcauu

SEQ ID NO: 1895956 - RNA, 16 nt, Human
auuuuuaagugcugca

SEQ ID NO: 1895957 - RNA, 21 nt, Human
auuuuauaucaauuuaaaaaa

SEQ ID NO: 1895958 - RNA, 19 nt, Human
auuuuagggguagcauuug

SEQ ID NO: 1895959 - RNA, 18 nt, Human
auuuucuucaccucugcu

SEQ ID NO: 1895960 - RNA, 20 nt, Human
auuuugaauaaauaaaugua

SEQ ID NO: 1895961 - RNA, 23 nt, Human
caaccaugagaccacuguuauca

SEQ ID NO: 1895962 - RNA, 18 nt, Human
caaccaugagaccacugu

SEQ ID NO: 1895963 - RNA, 19 nt, Human
caaccagggagcugcaggg

SEQ ID NO: 1895964 - RNA, 17 nt, Human
caaccagcuaagaaaag

SEQ ID NO: 1895965 - RNA, 17 nt, Human
caaccagggagcugcag

SEQ ID NO: 1895966 - RNA, 22 nt, Human
caaccagggauuguuucuguuu

SEQ ID NO: 1895967 - RNA, 15 nt, Human
caaccagcuaagaaa

SEQ ID NO: 1895968 - RNA, 22 nt, Human
caaccagcuaagaaaagauuuu

SEQ ID NO: 1895969 - RNA, 18 nt, Human
caaccccccagcacugag

SEQ ID NO: 1895970 - RNA, 16 nt, Human
caaccccccagcacug

SEQ ID NO: 1895971 - RNA, 15 nt, Human
caaccccccagcacu

SEQ ID NO: 1895972 - RNA, 14 nt, Human
caaccccccagcac

SEQ ID NO: 1895973 - RNA, 16 nt, Human
caacccccauuucuau

SEQ ID NO: 1895974 - RNA, 20 nt, Human
caaccccccagcacugagga

SEQ ID NO: 1895975 - RNA, 19 nt, Human
caaccccccagcacugagg

SEQ ID NO: 1895976 - RNA, 17 nt, Human
caacuacagaaaaacca

SEQ ID NO: 1895977 - RNA, 18 nt, Human
caacucaccccagcccca

SEQ ID NO: 1895978 - RNA, 17 nt, Human
caacucauauuuucaug

SEQ ID NO: 1895979 - RNA, 19 nt, Human
caagacccaaaaggcagaa

SEQ ID NO: 1895980 - RNA, 20 nt, Human
caagaauuucuaggacugaa

SEQ ID NO: 1895981 - RNA, 18 nt, Human
caagaccacguuucuaaa

SEQ ID NO: 1895982 - RNA, 17 nt, Human
caagaccacguuucuaa

SEQ ID NO: 1895983 - RNA, 14 nt, Human
caacucuccuccag

SEQ ID NO: 1895984 - RNA, 22 nt, Human
caagaauugaagcaggacuaaa

SEQ ID NO: 1895985 - RNA, 18 nt, Human
caacucuccccugaccug

SEQ ID NO: 1895986 - RNA, 24 nt, Human
caacucuccccugaccugugagcc

SEQ ID NO: 1895987 - RNA, 13 nt, Human
caacucuagcugg

SEQ ID NO: 1895988 - RNA, 11 nt, Human
caaagggugug

SEQ ID NO: 1895989 - RNA, 22 nt, Human
caaagguaaaucagacuaugaa

SEQ ID NO: 1895990 - RNA, 14 nt, Human
caaagguaaaucag

SEQ ID NO: 1895991 - RNA, 22 nt, Human
caaaguagaagucuuagaugua

SEQ ID NO: 1895992 - RNA, 21 nt, Human
caaaguaucccuacuguaauu

SEQ ID NO: 1895993 - RNA, 19 nt, Human
caaaguaucccuacuguaa

SEQ ID NO: 1895994 - RNA, 17 nt, Human
caaaggguccagaagga

SEQ ID NO: 1895995 - RNA, 21 nt, Human
caaaggguccagaaggagaca

SEQ ID NO: 1895996 - RNA, 22 nt, Human
caaagcagugcaugcugucccu

SEQ ID NO: 1895997 - RNA, 16 nt, Human
caaagauauuuugcuu

SEQ ID NO: 1895998 - RNA, 14 nt, Human
caaagauauuuugc

SEQ ID NO: 1895999 - RNA, 18 nt, Human
caaagcagugcaugcugu

SEQ ID NO: 1896000 - RNA, 21 nt, Human
caaagcagugcaugcuguccc

SEQ ID NO: 1896001 - RNA, 22 nt, Human
caaaugagaaaaugucuuuauu

SEQ ID NO: 1896002 - RNA, 12 nt, Human
caaaugagccau

SEQ ID NO: 1896003 - RNA, 13 nt, Human
caaaugagccaug

SEQ ID NO: 1896004 - RNA, 15 nt, Human
caaaugcuaauguca

SEQ ID NO: 1896005 - RNA, 21 nt, Human
caaaugcuaaugucaaacuug

SEQ ID NO: 1896006 - RNA, 23 nt, Human
caaaugcuguaacuuucugaaau

SEQ ID NO: 1896007 - RNA, 14 nt, Human
caacaaagaacacu

SEQ ID NO: 1896008 - RNA, 22 nt, Human
caacaaaucuaggaaaauauuu

SEQ ID NO: 1896009 - RNA, 13 nt, Human
caaaucuugaaau

SEQ ID NO: 1896010 - RNA, 19 nt, Human
caaaucuugaaauuaagaa

SEQ ID NO: 1896011 - RNA, 12 nt, Human
caaaucuugaaa

SEQ ID NO: 1896012 - RNA, 14 nt, Human
caaaguccuuuuuu

SEQ ID NO: 1896013 - RNA, 17 nt, Human
caaaguccuuuuuuucc

SEQ ID NO: 1896014 - RNA, 19 nt, Human
caaaguccuuuuuuuccau

SEQ ID NO: 1896015 - RNA, 23 nt, Human
caaaguccuuuuuuuccaucuuu

SEQ ID NO: 1896016 - RNA, 22 nt, Human
caacaacauguauaauauuuuu

SEQ ID NO: 1896017 - RNA, 21 nt, Human
caacaacauguauaauauuuu

SEQ ID NO: 1896018 - RNA, 13 nt, Human
caacaccaagcac

SEQ ID NO: 1896019 - RNA, 22 nt, Human
caccuacuuuucuuuccucaga

SEQ ID NO: 1896020 - RNA, 14 nt, Human
caccuagcagcacc

SEQ ID NO: 1896021 - RNA, 12 nt, Human
caccucagccuc

SEQ ID NO: 1896022 - RNA, 16 nt, Human
cacgaaauguuauuuu

SEQ ID NO: 1896023 - RNA, 15 nt, Human
cacgaaauguuauuu

SEQ ID NO: 1896024 - RNA, 13 nt, Human
cacgaaauguuau

SEQ ID NO: 1896025 - RNA, 20 nt, Human
caccuuuugggaauguuuua

SEQ ID NO: 1896026 - RNA, 14 nt, Human
caccuuucccaucu

SEQ ID NO: 1896027 - RNA, 21 nt, Human
caccuuuguuuagaacacugg

SEQ ID NO: 1896028 - RNA, 16 nt, Human
caccuuucuccuuugu

SEQ ID NO: 1896029 - RNA, 22 nt, Human
caccuuucauaaucuuugcuuu

SEQ ID NO: 1896030 - RNA, 16 nt, Human
caccuuggcugcaggg

SEQ ID NO: 1896031 - RNA, 15 nt, Human
caccuuggcugcagg

SEQ ID NO: 1896032 - RNA, 18 nt, Human
caccuuggcugcagggag

SEQ ID NO: 1896033 - RNA, 15 nt, Human
caccugccccaacuc

SEQ ID NO: 1896034 - RNA, 16 nt, Human
caccugccccaacucu

SEQ ID NO: 1896035 - RNA, 22 nt, Human
cacucuuauugcccacgcugga

SEQ ID NO: 1896036 - RNA, 21 nt, Human
cacucuuauugcccacgcugg

SEQ ID NO: 1896037 - RNA, 20 nt, Human
cacucuuauugcccacgcug

SEQ ID NO: 1896038 - RNA, 21 nt, Human
cacuacauuauaaaugucucu

SEQ ID NO: 1896039 - RNA, 17 nt, Human
cacuacauucuguuaau

SEQ ID NO: 1896040 - RNA, 16 nt, Human
cacuacauucuguuaa

SEQ ID NO: 1896041 - RNA, 21 nt, Human
cacuacauucuguuaaucauu

SEQ ID NO: 1896042 - RNA, 12 nt, Human
cacuccagccug

SEQ ID NO: 1896043 - RNA, 13 nt, Human
cacuccagccuga

SEQ ID NO: 1896044 - RNA, 13 nt, Human
cacuccagccugg

SEQ ID NO: 1896045 - RNA, 14 nt, Human
cacuccagccuggg

SEQ ID NO: 1896046 - RNA, 23 nt, Human
cacuccagccugagcgacaguga

SEQ ID NO: 1896047 - RNA, 17 nt, Human
cacucugugucugagug

SEQ ID NO: 1896048 - RNA, 23 nt, Human
cacucugugucugaguggcuuca

SEQ ID NO: 1896049 - RNA, 20 nt, Human
cacucugucgcccagucugg

SEQ ID NO: 1896050 - RNA, 13 nt, Human
cacggccaggcca

SEQ ID NO: 1896051 - RNA, 12 nt, Human
cacggccaggcc

SEQ ID NO: 1896052 - RNA, 17 nt, Human
cacggccaggccagagg

SEQ ID NO: 1896053 - RNA, 14 nt, Human
cacggcucacugca

SEQ ID NO: 1896054 - RNA, 15 nt, Human
cacggcucacugcag

SEQ ID NO: 1896055 - RNA, 13 nt, Human
cacggccacauca

SEQ ID NO: 1896056 - RNA, 19 nt, Human
cacggccacaucaaagagg

SEQ ID NO: 1896057 - RNA, 14 nt, Human
cacugccauauacu

SEQ ID NO: 1896058 - RNA, 17 nt, Human
cacugccaugccagcuu

SEQ ID NO: 1896059 - RNA, 23 nt, Human
cacugcagccucaaccuccuggg

SEQ ID NO: 1896060 - RNA, 22 nt, Human
cacugcagccucaaccuccugg

SEQ ID NO: 1896061 - RNA, 21 nt, Human
cacugcagccucaaccuccug

SEQ ID NO: 1896062 - RNA, 20 nt, Human
cacugcagccucaaccuccu

SEQ ID NO: 1896063 - RNA, 14 nt, Human
cacugcagccucaa

SEQ ID NO: 1896064 - RNA, 19 nt, Human
cacugcagccucaaccucc

SEQ ID NO: 1896065 - RNA, 14 nt, Human
cacugggaggccag

SEQ ID NO: 1896066 - RNA, 19 nt, Human
cacugggagaaaugaaaaa

SEQ ID NO: 1896067 - RNA, 21 nt, Human
cacugggaggccagugagcca

SEQ ID NO: 1896068 - RNA, 20 nt, Human
cacugggcuuggggaccaga

SEQ ID NO: 1896069 - RNA, 23 nt, Human
cacuguugcccaggcuggcgugc

SEQ ID NO: 1896070 - RNA, 19 nt, Human
cacuguugcccaggcuggc

SEQ ID NO: 1896071 - RNA, 18 nt, Human
cacuguugcccaggcugg

SEQ ID NO: 1896072 - RNA, 15 nt, Human
cacuuaaaaaugguu

SEQ ID NO: 1896073 - RNA, 18 nt, Human
cacuuguguuaugaagca

SEQ ID NO: 1896074 - RNA, 18 nt, Human
cacuuucuagccagagga

SEQ ID NO: 1896075 - RNA, 16 nt, Human
cacuuucuagccagag

SEQ ID NO: 1896076 - RNA, 17 nt, Human
cacuuucuagccagagg

SEQ ID NO: 1896077 - RNA, 13 nt, Human
cacuuucuagcca

SEQ ID NO: 1896078 - RNA, 15 nt, Human
cacuuuagggcugua

SEQ ID NO: 1896079 - RNA, 17 nt, Human
cacuuuagggcuguaaa

SEQ ID NO: 1896080 - RNA, 18 nt, Human
cacuuuagggcuguaaaa

SEQ ID NO: 1896081 - RNA, 23 nt, Human
cacuuuagggcuguaaaaugcau

SEQ ID NO: 1896082 - RNA, 19 nt, Human
cacuuucuacaaugugaac

SEQ ID NO: 1896083 - RNA, 23 nt, Human
cacuuucuacaaugugaacuuua

SEQ ID NO: 1896084 - RNA, 11 nt, Human
cagaacaguga

SEQ ID NO: 1896085 - RNA, 17 nt, Human
cagaacagugauuacca

SEQ ID NO: 1896086 - RNA, 12 nt, Human
cagaacagugau

SEQ ID NO: 1896087 - RNA, 14 nt, Human
cagaaguuucugcc

SEQ ID NO: 1896088 - RNA, 16 nt, Human
cagaaguuucugccgc

SEQ ID NO: 1896089 - RNA, 18 nt, Human
cagaacagugauuaccag

SEQ ID NO: 1896090 - RNA, 16 nt, Human
cagaaauguacagcaa

SEQ ID NO: 1896091 - RNA, 20 nt, Human
cagaaagguuuucuucuuuu

SEQ ID NO: 1896092 - RNA, 16 nt, Human
cagaaagugugcuuua

SEQ ID NO: 1896093 - RNA, 17 nt, Human
cagaaagugugcuuuau

SEQ ID NO: 1896094 - RNA, 22 nt, Human
cagaaagugugcuuuaugcuga

SEQ ID NO: 1896095 - RNA, 23 nt, Human
cagaaagugugcuuuaugcugaa

SEQ ID NO: 1896096 - RNA, 17 nt, Human
caaucauuuuaauuauu

SEQ ID NO: 1896097 - RNA, 20 nt, Human
caaucauauuaauacaauga

SEQ ID NO: 1896098 - RNA, 21 nt, Human
caaugcuggcuguuggcuggg

SEQ ID NO: 1896099 - RNA, 20 nt, Human
caaugcuggcuguuggcugg

SEQ ID NO: 1896100 - RNA, 13 nt, Human
caaugcuggcugu

SEQ ID NO: 1896101 - RNA, 20 nt, Human
caaucccuuuauuacccccu

SEQ ID NO: 1896102 - RNA, 12 nt, Human
caaucccagcua

SEQ ID NO: 1896103 - RNA, 17 nt, Human
caaucccagcuaccuca

SEQ ID NO: 1896104 - RNA, 18 nt, Human
cacaagagcccaggccuc

SEQ ID NO: 1896105 - RNA, 19 nt, Human
cacaagagcccaggccucc

SEQ ID NO: 1896106 - RNA, 20 nt, Human
cacaagagcccaggccuccu

SEQ ID NO: 1896107 - RNA, 18 nt, Human
cacaagcuccaagcuccc

SEQ ID NO: 1896108 - RNA, 19 nt, Human
cacaagcuccaagcuccca

SEQ ID NO: 1896109 - RNA, 15 nt, Human
caaugggagcucaug

SEQ ID NO: 1896110 - RNA, 19 nt, Human
caauggcuaccuaaaaaga

SEQ ID NO: 1896111 - RNA, 18 nt, Human
caauggcuuacuccagga

SEQ ID NO: 1896112 - RNA, 22 nt, Human
caauugcuuugucauauagcug

SEQ ID NO: 1896113 - RNA, 17 nt, Human
caauuuccaagagcuga

SEQ ID NO: 1896114 - RNA, 20 nt, Human
cacaagcuccaagcucccag

SEQ ID NO: 1896115 - RNA, 21 nt, Human
cacaagcuccaagcucccagg

SEQ ID NO: 1896116 - RNA, 21 nt, Human
caagucagucauucagauaug

SEQ ID NO: 1896117 - RNA, 12 nt, Human
caagauuucaga

SEQ ID NO: 1896118 - RNA, 17 nt, Human
caaggcaaggcugucaa

SEQ ID NO: 1896119 - RNA, 16 nt, Human
caaggcaaggcuguca

SEQ ID NO: 1896120 - RNA, 18 nt, Human
caaggcaaggcugucaau

SEQ ID NO: 1896121 - RNA, 21 nt, Human
caaggccaaaggaagcacaug

SEQ ID NO: 1896122 - RNA, 19 nt, Human
caaggccaaaggaagcaca

SEQ ID NO: 1896123 - RNA, 20 nt, Human
caaggccaaaggaagcacau

SEQ ID NO: 1896124 - RNA, 14 nt, Human
cacagacccugccc

SEQ ID NO: 1896125 - RNA, 16 nt, Human
cacagacccugcccug

SEQ ID NO: 1896126 - RNA, 17 nt, Human
cacagacccugcccugu

SEQ ID NO: 1896127 - RNA, 14 nt, Human
cacagcucuguccu

SEQ ID NO: 1896128 - RNA, 11 nt, Human
cacagcucugu

SEQ ID NO: 1896129 - RNA, 18 nt, Human
cacagacccugcccugug

SEQ ID NO: 1896130 - RNA, 19 nt, Human
cacagcucuguccugggag

SEQ ID NO: 1896131 - RNA, 18 nt, Human
cacagcucuguccuggga

SEQ ID NO: 1896132 - RNA, 16 nt, Human
cacagcucuguccugg

SEQ ID NO: 1896133 - RNA, 15 nt, Human
cacagcucuguccug

SEQ ID NO: 1896134 - RNA, 15 nt, Human
cacagcucuucucca

SEQ ID NO: 1896135 - RNA, 14 nt, Human
cacagcucuucucc

SEQ ID NO: 1896136 - RNA, 17 nt, Human
cacagcucuucuccagg

SEQ ID NO: 1896137 - RNA, 23 nt, Human
cacagaaaagaaaguucaugcuu

SEQ ID NO: 1896138 - RNA, 12 nt, Human
cacagaaaccuu

SEQ ID NO: 1896139 - RNA, 11 nt, Human
cacacauuuuu

SEQ ID NO: 1896140 - RNA, 10 nt, Human
cacacauuuu

SEQ ID NO: 1896141 - RNA, 20 nt, Human
cacacauuuuuuaaaugcac

SEQ ID NO: 1896142 - RNA, 19 nt, Human
cacacauuuuuuaaaugca

SEQ ID NO: 1896143 - RNA, 16 nt, Human
cacacauuuuuuaaau

SEQ ID NO: 1896144 - RNA, 12 nt, Human
cacacauuuuuu

SEQ ID NO: 1896145 - RNA, 22 nt, Human
cacagggacugaaaaccucucc

SEQ ID NO: 1896146 - RNA, 16 nt, Human
cacccaggagccccga

SEQ ID NO: 1896147 - RNA, 18 nt, Human
cacccaccucagccuccc

SEQ ID NO: 1896148 - RNA, 13 nt, Human
cacccaccucccu

SEQ ID NO: 1896149 - RNA, 14 nt, Human
cacccaccucccug

SEQ ID NO: 1896150 - RNA, 15 nt, Human
cacccaccucccugc

SEQ ID NO: 1896151 - RNA, 16 nt, Human
cacccaccucccugcc

SEQ ID NO: 1896152 - RNA, 18 nt, Human
cacccaccucccugccuc

SEQ ID NO: 1896153 - RNA, 21 nt, Human
cacccaccucccugccuccag

SEQ ID NO: 1896154 - RNA, 23 nt, Human
cacccaccucccugccuccagga

SEQ ID NO: 1896155 - RNA, 16 nt, Human
caccagccccagugcc

SEQ ID NO: 1896156 - RNA, 13 nt, Human
caccagccccagu

SEQ ID NO: 1896157 - RNA, 17 nt, Human
cacccaccucagccucc

SEQ ID NO: 1896158 - RNA, 20 nt, Human
caccaggcuugccugcaggc

SEQ ID NO: 1896159 - RNA, 17 nt, Human
cacauuuuauuuuauua

SEQ ID NO: 1896160 - RNA, 11 nt, Human
cacaucucugc

SEQ ID NO: 1896161 - RNA, 21 nt, Human
cacauuuuauuuuauuaugca

SEQ ID NO: 1896162 - RNA, 12 nt, Human
cacaucuucccu

SEQ ID NO: 1896163 - RNA, 20 nt, Human
cacauuuuauuuuauuaugc

SEQ ID NO: 1896164 - RNA, 19 nt, Human
cacauuuuauuuuauuaug

SEQ ID NO: 1896165 - RNA, 16 nt, Human
caccaacgucugugcc

SEQ ID NO: 1896166 - RNA, 14 nt, Human
caccaacgucugug

SEQ ID NO: 1896167 - RNA, 22 nt, Human
cacaucuaagccugaaggggcg

SEQ ID NO: 1896168 - RNA, 21 nt, Human
ccauugcuaucuauugauaau

SEQ ID NO: 1896169 - RNA, 15 nt, Human
cccaacucaccccag

SEQ ID NO: 1896170 - RNA, 16 nt, Human
cccaacucaccccagc

SEQ ID NO: 1896171 - RNA, 15 nt, Human
cccacccacauguga

SEQ ID NO: 1896172 - RNA, 15 nt, Human
cccaagcucugcucc

SEQ ID NO: 1896173 - RNA, 12 nt, Human
cccaagcucugc

SEQ ID NO: 1896174 - RNA, 14 nt, Human
cccaagcucugcuc

SEQ ID NO: 1896175 - RNA, 13 nt, Human
cccaagcucugcu

SEQ ID NO: 1896176 - RNA, 18 nt, Human
cccaagaccucagggcac

SEQ ID NO: 1896177 - RNA, 15 nt, Human
cccaacucuagcugg

SEQ ID NO: 1896178 - RNA, 16 nt, Human
cccaacucuagcuggg

SEQ ID NO: 1896179 - RNA, 21 nt, Human
cccaacucuagcugggggugg

SEQ ID NO: 1896180 - RNA, 15 nt, Human
cccaagaaugggagg

SEQ ID NO: 1896181 - RNA, 17 nt, Human
cccaacucaccccagcc

SEQ ID NO: 1896182 - RNA, 20 nt, Human
cccaacucaccccagcccca

SEQ ID NO: 1896183 - RNA, 23 nt, Human
cccacugcuuuuggucuguguga

SEQ ID NO: 1896184 - RNA, 14 nt, Human
cccacugaccagaa

SEQ ID NO: 1896185 - RNA, 12 nt, Human
cccaccccuggg

SEQ ID NO: 1896186 - RNA, 22 nt, Human
cccaccccugggggcucucaug

SEQ ID NO: 1896187 - RNA, 13 nt, Human
cccacucccugca

SEQ ID NO: 1896188 - RNA, 12 nt, Human
cccacucccugc

SEQ ID NO: 1896189 - RNA, 16 nt, Human
ccauguacaugaagaa

SEQ ID NO: 1896190 - RNA, 22 nt, Human
ccaugaugacaacuacagaaaa

SEQ ID NO: 1896191 - RNA, 14 nt, Human
ccauguagcccccu

SEQ ID NO: 1896192 - RNA, 20 nt, Human
ccauguagcccccuggccuc

SEQ ID NO: 1896193 - RNA, 22 nt, Human
ccauguagcccccuggccucug

SEQ ID NO: 1896194 - RNA, 23 nt, Human
ccauguagcccccuggccucugu

SEQ ID NO: 1896195 - RNA, 18 nt, Human
ccaugaguccccuguuug

SEQ ID NO: 1896196 - RNA, 21 nt, Human
ccaugaguuggggucuggcag

SEQ ID NO: 1896197 - RNA, 22 nt, Human
ccaugaguuggggucuggcagc

SEQ ID NO: 1896198 - RNA, 23 nt, Human
ccaugaguuggggucuggcagcc

SEQ ID NO: 1896199 - RNA, 23 nt, Human
ccaugaggaacaaggcaaggcug

SEQ ID NO: 1896200 - RNA, 20 nt, Human
ccaugaggaacaaggcaagg

SEQ ID NO: 1896201 - RNA, 23 nt, Human
ccaguuggguggaugccuggugg

SEQ ID NO: 1896202 - RNA, 13 nt, Human
ccaguuggucccc

SEQ ID NO: 1896203 - RNA, 19 nt, Human
ccauccagguucagcuugu

SEQ ID NO: 1896204 - RNA, 18 nt, Human
ccauccagguucagcuug

SEQ ID NO: 1896205 - RNA, 18 nt, Human
ccaguuggucccccuucc

SEQ ID NO: 1896206 - RNA, 20 nt, Human
ccaguuggucccccuuccau

SEQ ID NO: 1896207 - RNA, 20 nt, Human
ccaucccaaacccuucagug

SEQ ID NO: 1896208 - RNA, 19 nt, Human
ccaucccauaugccugggc

SEQ ID NO: 1896209 - RNA, 20 nt, Human
ccaucccauaugccugggca

SEQ ID NO: 1896210 - RNA, 21 nt, Human
ccaucccauaugccugggcag

SEQ ID NO: 1896211 - RNA, 17 nt, Human
ccagccccagugcccac

SEQ ID NO: 1896212 - RNA, 14 nt, Human
ccagcagagcaccu

SEQ ID NO: 1896213 - RNA, 12 nt, Human
ccagcagagcac

SEQ ID NO: 1896214 - RNA, 13 nt, Human
ccagcagagcacc

SEQ ID NO: 1896215 - RNA, 18 nt, Human
ccagccccauccucugua

SEQ ID NO: 1896216 - RNA, 15 nt, Human
ccagccccauccucu

SEQ ID NO: 1896217 - RNA, 17 nt, Human
ccagccccauccucugu

SEQ ID NO: 1896218 - RNA, 12 nt, Human
ccagcagaaaug

SEQ ID NO: 1896219 - RNA, 16 nt, Human
ccagcacuuguccagc

SEQ ID NO: 1896220 - RNA, 19 nt, Human
ccagcacuuguccagcuga

SEQ ID NO: 1896221 - RNA, 20 nt, Human
ccagcacuuguccagcugag

SEQ ID NO: 1896222 - RNA, 23 nt, Human
ccagccccuucugacccaugcug

SEQ ID NO: 1896223 - RNA, 24 nt, Human
ccagccccuucugacccaugcugc

SEQ ID NO: 1896224 - RNA, 14 nt, Human
ccagccccuugaga

SEQ ID NO: 1896225 - RNA, 22 nt, Human
ccagcuauugauauaaauaaaa

SEQ ID NO: 1896226 - RNA, 14 nt, Human
ccagcuccaaccug

SEQ ID NO: 1896227 - RNA, 15 nt, Human
ccagcuccaaccugc

SEQ ID NO: 1896228 - RNA, 20 nt, Human
ccagcuccaaccugcaaaga

SEQ ID NO: 1896229 - RNA, 22 nt, Human
ccagcuccaaggggaaucagaa

SEQ ID NO: 1896230 - RNA, 14 nt, Human
ccagcucccucuau

SEQ ID NO: 1896231 - RNA, 16 nt, Human
ccaggcuggcgugcag

SEQ ID NO: 1896232 - RNA, 12 nt, Human
ccaggcuggcgu

SEQ ID NO: 1896233 - RNA, 21 nt, Human
ccaggggaaaaucagccugcu

SEQ ID NO: 1896234 - RNA, 16 nt, Human
ccaggggaguuguguc

SEQ ID NO: 1896235 - RNA, 18 nt, Human
ccaggggaguugugucug

SEQ ID NO: 1896236 - RNA, 14 nt, Human
ccaggcaggucuug

SEQ ID NO: 1896237 - RNA, 12 nt, Human
ccaggcaggucu

SEQ ID NO: 1896238 - RNA, 23 nt, Human
ccaggcaggucuugaacuccugg

SEQ ID NO: 1896239 - RNA, 21 nt, Human
ccaggauggaacacggccaca

SEQ ID NO: 1896240 - RNA, 15 nt, Human
ccagucccugaggca

SEQ ID NO: 1896241 - RNA, 17 nt, Human
ccaggggggugaggagc

SEQ ID NO: 1896242 - RNA, 19 nt, Human
ccaggggggugaggagcug

SEQ ID NO: 1896243 - RNA, 20 nt, Human
ccaggggggugaggagcugg

SEQ ID NO: 1896244 - RNA, 23 nt, Human
ccagggggccagucccugaggca

SEQ ID NO: 1896245 - RNA, 15 nt, Human
ccccugacaacacuc

SEQ ID NO: 1896246 - RNA, 13 nt, Human
ccccugaauuuaa

SEQ ID NO: 1896247 - RNA, 17 nt, Human
ccccugaauuuaaauag

SEQ ID NO: 1896248 - RNA, 13 nt, Human
ccccugcacucca

SEQ ID NO: 1896249 - RNA, 16 nt, Human
ccccugccacccuggg

SEQ ID NO: 1896250 - RNA, 14 nt, Human
ccccugccacccug

SEQ ID NO: 1896251 - RNA, 10 nt, Human
ccccugccag

SEQ ID NO: 1896252 - RNA, 19 nt, Human
ccccugcccccaggacugg

SEQ ID NO: 1896253 - RNA, 18 nt, Human
ccccugcccccaggacug

SEQ ID NO: 1896254 - RNA, 23 nt, Human
ccccugcccccaggacugggcca

SEQ ID NO: 1896255 - RNA, 17 nt, Human
ccccugcccccaggacu

SEQ ID NO: 1896256 - RNA, 16 nt, Human
ccccugcccccaggac

SEQ ID NO: 1896257 - RNA, 16 nt, Human
cccggccccugcuggu

SEQ ID NO: 1896258 - RNA, 15 nt, Human
cccggccccugcugg

SEQ ID NO: 1896259 - RNA, 11 nt, Human
cccggccagcc

SEQ ID NO: 1896260 - RNA, 15 nt, Human
cccgggaagggggcu

SEQ ID NO: 1896261 - RNA, 22 nt, Human
cccgaauagcugggacuacagg

SEQ ID NO: 1896262 - RNA, 18 nt, Human
cccgaauagcugggacua

SEQ ID NO: 1896263 - RNA, 17 nt, Human
cccgaauagcugggacu

SEQ ID NO: 1896264 - RNA, 16 nt, Human
cccgaauagcugggac

SEQ ID NO: 1896265 - RNA, 13 nt, Human
ccccuucugaccc

SEQ ID NO: 1896266 - RNA, 14 nt, Human
ccccuucugaccca

SEQ ID NO: 1896267 - RNA, 16 nt, Human
ccccuucugacccaug

SEQ ID NO: 1896268 - RNA, 20 nt, Human
cccucaacucuccuccagag

SEQ ID NO: 1896269 - RNA, 16 nt, Human
cccucaacucuccucc

SEQ ID NO: 1896270 - RNA, 16 nt, Human
cccucaaccucuucug

SEQ ID NO: 1896271 - RNA, 22 nt, Human
cccgggaagggggcugggacau

SEQ ID NO: 1896272 - RNA, 17 nt, Human
cccggcuaauuuuugua

SEQ ID NO: 1896273 - RNA, 16 nt, Human
cccucaacaccucugc

SEQ ID NO: 1896274 - RNA, 18 nt, Human
cccgggaagggggcuggg

SEQ ID NO: 1896275 - RNA, 21 nt, Human
cccgggaagggggcugggaca

SEQ ID NO: 1896276 - RNA, 20 nt, Human
cccucaccuuggcaccagac

SEQ ID NO: 1896277 - RNA, 21 nt, Human
cccucaccuuggcaccagaca

SEQ ID NO: 1896278 - RNA, 23 nt, Human
cccucaccuuggcaccagacacc

SEQ ID NO: 1896279 - RNA, 15 nt, Human
cccucacucucuaca

SEQ ID NO: 1896280 - RNA, 14 nt, Human
cccuccuccacucu

SEQ ID NO: 1896281 - RNA, 13 nt, Human
cccuccuccacuc

SEQ ID NO: 1896282 - RNA, 12 nt, Human
cccuccuccacu

SEQ ID NO: 1896283 - RNA, 15 nt, Human
cccauucugccugcc

SEQ ID NO: 1896284 - RNA, 14 nt, Human
cccauucugccugc

SEQ ID NO: 1896285 - RNA, 19 nt, Human
cccauucugccugcccagg

SEQ ID NO: 1896286 - RNA, 15 nt, Human
cccauuugcuccuuu

SEQ ID NO: 1896287 - RNA, 20 nt, Human
ccccagauugcaacaggcug

SEQ ID NO: 1896288 - RNA, 15 nt, Human
ccccagauugcaaca

SEQ ID NO: 1896289 - RNA, 12 nt, Human
ccccagcccaga

SEQ ID NO: 1896290 - RNA, 13 nt, Human
ccccagcccagag

SEQ ID NO: 1896291 - RNA, 15 nt, Human
ccccagcccagagac

SEQ ID NO: 1896292 - RNA, 16 nt, Human
ccccagcccagagaca

SEQ ID NO: 1896293 - RNA, 14 nt, Human
ccccgcacugggcu

SEQ ID NO: 1896294 - RNA, 20 nt, Human
cccaggcuggagugcaauga

SEQ ID NO: 1896295 - RNA, 22 nt, Human
cccaggcuuagucacugagaca

SEQ ID NO: 1896296 - RNA, 17 nt, Human
cccaggaaaggcuccag

SEQ ID NO: 1896297 - RNA, 18 nt, Human
cccaggaaaggcuccagg

SEQ ID NO: 1896298 - RNA, 16 nt, Human
cccauccccgcagugu

SEQ ID NO: 1896299 - RNA, 15 nt, Human
cccagggaaguuuug

SEQ ID NO: 1896300 - RNA, 21 nt, Human
cccacugggguccagggagca

SEQ ID NO: 1896301 - RNA, 14 nt, Human
cccagcacugagga

SEQ ID NO: 1896302 - RNA, 13 nt, Human
cccagcacugagg

SEQ ID NO: 1896303 - RNA, 21 nt, Human
cccagccaggccccaggcagg

SEQ ID NO: 1896304 - RNA, 15 nt, Human
cccaggaaaggcucc

SEQ ID NO: 1896305 - RNA, 16 nt, Human
cccaggaaaggcucca

SEQ ID NO: 1896306 - RNA, 21 nt, Human
cccauccucuguacagagccc

SEQ ID NO: 1896307 - RNA, 22 nt, Human
cccauccucuguacagagccca

SEQ ID NO: 1896308 - RNA, 16 nt, Human
cccauccccuguggga

SEQ ID NO: 1896309 - RNA, 19 nt, Human
cccauccucuucuuuuagc

SEQ ID NO: 1896310 - RNA, 20 nt, Human
cccauccucuucuuuuagca

SEQ ID NO: 1896311 - RNA, 21 nt, Human
cccaucgccagcugaugacuc

SEQ ID NO: 1896312 - RNA, 22 nt, Human
cccaucgccagcugaugacuca

SEQ ID NO: 1896313 - RNA, 23 nt, Human
cccaucgccagcugaugacucaa

SEQ ID NO: 1896314 - RNA, 16 nt, Human
ccuccgagggacgcgg

SEQ ID NO: 1896315 - RNA, 13 nt, Human
ccuccgccucuug

SEQ ID NO: 1896316 - RNA, 15 nt, Human
ccucccuuucucccc

SEQ ID NO: 1896317 - RNA, 14 nt, Human
ccucccuuucuccc

SEQ ID NO: 1896318 - RNA, 13 nt, Human
ccucccuuucucc

SEQ ID NO: 1896319 - RNA, 12 nt, Human
ccucccuuucuc

SEQ ID NO: 1896320 - RNA, 14 nt, Human
ccuccgccucuugg

SEQ ID NO: 1896321 - RNA, 20 nt, Human
ccuccgcgugaucaaagcca

SEQ ID NO: 1896322 - RNA, 15 nt, Human
ccuccuagccaccca

SEQ ID NO: 1896323 - RNA, 17 nt, Human
ccucccuucugcuacug

SEQ ID NO: 1896324 - RNA, 15 nt, Human
ccucccuucugcuac

SEQ ID NO: 1896325 - RNA, 16 nt, Human
ccucccuucugcuacu

SEQ ID NO: 1896326 - RNA, 10 nt, Human
ccucccuucu

SEQ ID NO: 1896327 - RNA, 13 nt, Human
ccucccuucugcu

SEQ ID NO: 1896328 - RNA, 16 nt, Human
ccucccuucucuucac

SEQ ID NO: 1896329 - RNA, 12 nt, Human
ccucgcuuggac

SEQ ID NO: 1896330 - RNA, 21 nt, Human
ccucgagguuucucaaagaaa

SEQ ID NO: 1896331 - RNA, 15 nt, Human
ccucgcaggaagacc

SEQ ID NO: 1896332 - RNA, 18 nt, Human
ccuccuuuucacaguucu

SEQ ID NO: 1896333 - RNA, 16 nt, Human
ccucgaaacacagaaa

SEQ ID NO: 1896334 - RNA, 20 nt, Human
ccucgaaacacagaaaccuu

SEQ ID NO: 1896335 - RNA, 23 nt, Human
ccuccuuugugaggaagccgcug

SEQ ID NO: 1896336 - RNA, 17 nt, Human
ccucccaucacccgcua

SEQ ID NO: 1896337 - RNA, 15 nt, Human
ccucccauccagggc

SEQ ID NO: 1896338 - RNA, 20 nt, Human
ccuccaagaccuucuccuuc

SEQ ID NO: 1896339 - RNA, 12 nt, Human
ccucccaucacc

SEQ ID NO: 1896340 - RNA, 16 nt, Human
ccuccaagaccuucuc

SEQ ID NO: 1896341 - RNA, 17 nt, Human
ccuccaagaccuucucc

SEQ ID NO: 1896342 - RNA, 19 nt, Human
ccuccaagaccuucuccuu

SEQ ID NO: 1896343 - RNA, 20 nt, Human
ccucaagugauucuccugcc

SEQ ID NO: 1896344 - RNA, 16 nt, Human
ccucaagaaauaaaag

SEQ ID NO: 1896345 - RNA, 23 nt, Human
ccucaagugauucuccugccuca

SEQ ID NO: 1896346 - RNA, 22 nt, Human
ccucagccuugccagagaucca

SEQ ID NO: 1896347 - RNA, 10 nt, Human
ccucaggccu

SEQ ID NO: 1896348 - RNA, 12 nt, Human
ccucaggcaggu

SEQ ID NO: 1896349 - RNA, 18 nt, Human
ccucaggcaggugggaug

SEQ ID NO: 1896350 - RNA, 15 nt, Human
ccucaaccuccuggg

SEQ ID NO: 1896351 - RNA, 19 nt, Human
ccucaacucuccuccagag

SEQ ID NO: 1896352 - RNA, 21 nt, Human
ccucaacucuccuccagaguc

SEQ ID NO: 1896353 - RNA, 23 nt, Human
ccucaacucuccuccagagucag

SEQ ID NO: 1896354 - RNA, 16 nt, Human
ccucaacaccucugca

SEQ ID NO: 1896355 - RNA, 14 nt, Human
ccucaaaugagaaa

SEQ ID NO: 1896356 - RNA, 18 nt, Human
ccgaagccgccuguggac

SEQ ID NO: 1896357 - RNA, 14 nt, Human
cccuucucuccagc

SEQ ID NO: 1896358 - RNA, 19 nt, Human
cccuucucuccagccccug

SEQ ID NO: 1896359 - RNA, 17 nt, Human
cccuucuccucuuguaa

SEQ ID NO: 1896360 - RNA, 21 nt, Human
cccuuuuuuggcugcugaagg

SEQ ID NO: 1896361 - RNA, 22 nt, Human
cccuuuuuuggcugcugaaggc

SEQ ID NO: 1896362 - RNA, 23 nt, Human
cccuuuuuuggcugcugaaggcu

SEQ ID NO: 1896363 - RNA, 15 nt, Human
cccuucucucaucuc

SEQ ID NO: 1896364 - RNA, 18 nt, Human
cccuucuccucuuguaaa

SEQ ID NO: 1896365 - RNA, 20 nt, Human
cccuucuccucuuguaaaua

SEQ ID NO: 1896366 - RNA, 14 nt, Human
cccuccuuucacca

SEQ ID NO: 1896367 - RNA, 12 nt, Human
cccuccuucaga

SEQ ID NO: 1896368 - RNA, 21 nt, Human
cccugugaguacuacaguccu

SEQ ID NO: 1896369 - RNA, 23 nt, Human
cccugugaguacuacaguccucc

SEQ ID NO: 1896370 - RNA, 15 nt, Human
cccugugauggggcc

SEQ ID NO: 1896371 - RNA, 15 nt, Human
cccugugggccccca

SEQ ID NO: 1896372 - RNA, 23 nt, Human
cccuucuaggguuauugcauuug

SEQ ID NO: 1896373 - RNA, 14 nt, Human
ccgcagcccugcag

SEQ ID NO: 1896374 - RNA, 13 nt, Human
ccgcagagcuggc

SEQ ID NO: 1896375 - RNA, 15 nt, Human
ccgcagagcuggccg

SEQ ID NO: 1896376 - RNA, 18 nt, Human
ccgcagcccugcagaggg

SEQ ID NO: 1896377 - RNA, 23 nt, Human
ccgcagcccugcagagggcacag

SEQ ID NO: 1896378 - RNA, 17 nt, Human
ccggccaccugcggugc

SEQ ID NO: 1896379 - RNA, 18 nt, Human
ccggccaccugcggugcu

SEQ ID NO: 1896380 - RNA, 15 nt, Human
ccggccagccauguc

SEQ ID NO: 1896381 - RNA, 11 nt, Human
ccggccagccc

SEQ ID NO: 1896382 - RNA, 22 nt, Human
ccgguucacucuucucagccac

SEQ ID NO: 1896383 - RNA, 19 nt, Human
ccuagccuuagaagucaca

SEQ ID NO: 1896384 - RNA, 23 nt, Human
ccuagccugugccucugggacug

SEQ ID NO: 1896385 - RNA, 22 nt, Human
ccuagccuuagaagucacacag

SEQ ID NO: 1896386 - RNA, 12 nt, Human
ccuaauaaagcu

SEQ ID NO: 1896387 - RNA, 13 nt, Human
ccuaauaaagcug

SEQ ID NO: 1896388 - RNA, 17 nt, Human
ccgugaaaacggagcug

SEQ ID NO: 1896389 - RNA, 18 nt, Human
ccgugaaaacggagcuga

SEQ ID NO: 1896390 - RNA, 16 nt, Human
ccuaaugcuccuuguu

SEQ ID NO: 1896391 - RNA, 19 nt, Human
ccuaaugcuccuuguuccu

SEQ ID NO: 1896392 - RNA, 21 nt, Human
ccuagcauacguacacauuuu

SEQ ID NO: 1896393 - RNA, 16 nt, Human
ccuagccacccaccac

SEQ ID NO: 1896394 - RNA, 12 nt, Human
ccuagccaccca

SEQ ID NO: 1896395 - RNA, 13 nt, Human
ccugagggagcuc

SEQ ID NO: 1896396 - RNA, 22 nt, Human
ccugagggaucuauacuugcuu

SEQ ID NO: 1896397 - RNA, 15 nt, Human
ccugagggagcucca

SEQ ID NO: 1896398 - RNA, 20 nt, Human
ccugaggcuuuggauuugac

SEQ ID NO: 1896399 - RNA, 22 nt, Human
ccugaggcuuuggauuugacau

SEQ ID NO: 1896400 - RNA, 19 nt, Human
ccugaguuccuagccaccg

SEQ ID NO: 1896401 - RNA, 18 nt, Human
ccugagaucucugcagga

SEQ ID NO: 1896402 - RNA, 23 nt, Human
ccugagauuucaucugcucuccu

SEQ ID NO: 1896403 - RNA, 22 nt, Human
ccugagauuucaucugcucucc

SEQ ID NO: 1896404 - RNA, 18 nt, Human
ccugagauuucaucugcu

SEQ ID NO: 1896405 - RNA, 17 nt, Human
ccugagauuucaucugc

SEQ ID NO: 1896406 - RNA, 16 nt, Human
ccugagauuucaucug

SEQ ID NO: 1896407 - RNA, 15 nt, Human
ccugagauuucaucu

SEQ ID NO: 1896408 - RNA, 11 nt, Human
ccugagauuuc

SEQ ID NO: 1896409 - RNA, 14 nt, Human
ccugcaggcagcca

SEQ ID NO: 1896410 - RNA, 12 nt, Human
ccugcaggcagc

SEQ ID NO: 1896411 - RNA, 13 nt, Human
ccugcaggcagcc

SEQ ID NO: 1896412 - RNA, 19 nt, Human
ccugauaagcuucaaagcu

SEQ ID NO: 1896413 - RNA, 21 nt, Human
ccugaguuccuagccaccgcc

SEQ ID NO: 1896414 - RNA, 20 nt, Human
ccugaguuccuagccaccgc

SEQ ID NO: 1896415 - RNA, 15 nt, Human
ccucuuugagugaag

SEQ ID NO: 1896416 - RNA, 19 nt, Human
ccucuuucccucccuuccu

SEQ ID NO: 1896417 - RNA, 22 nt, Human
ccucggccucccaaagugcugg

SEQ ID NO: 1896418 - RNA, 15 nt, Human
ccugcccaccuggcc

SEQ ID NO: 1896419 - RNA, 17 nt, Human
ccugcccaccuggccuc

SEQ ID NO: 1896420 - RNA, 20 nt, Human
ccugccaucauguuuacaga

SEQ ID NO: 1896421 - RNA, 18 nt, Human
ccugccaucauguuuaca

SEQ ID NO: 1896422 - RNA, 19 nt, Human
ccugcccaggccccugcca

SEQ ID NO: 1896423 - RNA, 18 nt, Human
ccugcccaggccccugcc

SEQ ID NO: 1896424 - RNA, 18 nt, Human
ccugcccaccuggccucu

SEQ ID NO: 1896425 - RNA, 19 nt, Human
ccugcccaccuggccucug

SEQ ID NO: 1896426 - RNA, 22 nt, Human
ccugcccaggccccugccaccc

SEQ ID NO: 1896427 - RNA, 21 nt, Human
ccugcccaggccccugccacc

SEQ ID NO: 1896428 - RNA, 15 nt, Human
ccugccucagccucc

SEQ ID NO: 1896429 - RNA, 16 nt, Human
ccugccucagccuccc

SEQ ID NO: 1896430 - RNA, 12 nt, Human
ccugccucagga

SEQ ID NO: 1896431 - RNA, 19 nt, Human
ccugccucaggccucugug

SEQ ID NO: 1896432 - RNA, 13 nt, Human
ccugccucucugc

SEQ ID NO: 1896433 - RNA, 14 nt, Human
ccugccucucugca

SEQ ID NO: 1896434 - RNA, 15 nt, Human
ccugccucucugcag

SEQ ID NO: 1896435 - RNA, 21 nt, Human
ccuggcacacaucaggaguuc

SEQ ID NO: 1896436 - RNA, 15 nt, Human
ccuggcacacaucag

SEQ ID NO: 1896437 - RNA, 13 nt, Human
ccuggcacacauc

SEQ ID NO: 1896438 - RNA, 12 nt, Human
ccuggcacacau

SEQ ID NO: 1896439 - RNA, 17 nt, Human
ccuggauggggcugcac

SEQ ID NO: 1896440 - RNA, 18 nt, Human
ccuggauggggcugcacc

SEQ ID NO: 1896441 - RNA, 14 nt, Human
ccuggauguugcug

SEQ ID NO: 1896442 - RNA, 15 nt, Human
ccuggauggggcugc

SEQ ID NO: 1896443 - RNA, 13 nt, Human
ccuggccuggcac

SEQ ID NO: 1896444 - RNA, 12 nt, Human
ccuggccuggca

SEQ ID NO: 1896445 - RNA, 22 nt, Human
ccuggccucaagugauucuccu

SEQ ID NO: 1896446 - RNA, 20 nt, Human
ccuggccccucagggucccu

SEQ ID NO: 1896447 - RNA, 21 nt, Human
ccuggccccucagggucccug

SEQ ID NO: 1896448 - RNA, 18 nt, Human
ccuggccccucagggucc

SEQ ID NO: 1896449 - RNA, 19 nt, Human
ccuggccuggcacacauca

SEQ ID NO: 1896450 - RNA, 16 nt, Human
ccuggccuggcacaca

SEQ ID NO: 1896451 - RNA, 15 nt, Human
ccuggccuggcacac

SEQ ID NO: 1896452 - RNA, 15 nt, Human
ccuggggagaaagua

SEQ ID NO: 1896453 - RNA, 19 nt, Human
ccugguggcagugggagcu

SEQ ID NO: 1896454 - RNA, 18 nt, Human
ccugguggcagugggagc

SEQ ID NO: 1896455 - RNA, 15 nt, Human
ccuggggcuggccuc

SEQ ID NO: 1896456 - RNA, 16 nt, Human
ccuggggcuggccucc

SEQ ID NO: 1896457 - RNA, 17 nt, Human
ccuggggcuggccuccc

SEQ ID NO: 1896458 - RNA, 20 nt, Human
ccugguggcagugggagcug

SEQ ID NO: 1896459 - RNA, 19 nt, Human
ccuggggcuggccucccaa

SEQ ID NO: 1896460 - RNA, 13 nt, Human
ccugguguggaag

SEQ ID NO: 1896461 - RNA, 21 nt, Human
ccuggugguugcuguuuuccu

SEQ ID NO: 1896462 - RNA, 12 nt, Human
ccuggugguuca

SEQ ID NO: 1896463 - RNA, 22 nt, Human
ccuggugguucacucuuggagc

SEQ ID NO: 1896464 - RNA, 13 nt, Human
ccuggugguucac

SEQ ID NO: 1896465 - RNA, 17 nt, Human
ccugucucuacuaaaaa

SEQ ID NO: 1896466 - RNA, 16 nt, Human
ccugucuccuggcggu

SEQ ID NO: 1896467 - RNA, 13 nt, Human
ccugucuccuggc

SEQ ID NO: 1896468 - RNA, 13 nt, Human
ccugguucucauc

SEQ ID NO: 1896469 - RNA, 14 nt, Human
cucacuucacccug

SEQ ID NO: 1896470 - RNA, 19 nt, Human
cucaccuuggcaccagaca

SEQ ID NO: 1896471 - RNA, 18 nt, Human
cucacuuguuuuauuuaa

SEQ ID NO: 1896472 - RNA, 20 nt, Human
cucacuuuccuccugaggcu

SEQ ID NO: 1896473 - RNA, 16 nt, Human
cucaccuuggcaccag

SEQ ID NO: 1896474 - RNA, 17 nt, Human
cucaccuuggcaccaga

SEQ ID NO: 1896475 - RNA, 21 nt, Human
cucagaagggagcuagccaga

SEQ ID NO: 1896476 - RNA, 22 nt, Human
cucagaagggagcuagccagag

SEQ ID NO: 1896477 - RNA, 14 nt, Human
cucaccuccugcug

SEQ ID NO: 1896478 - RNA, 16 nt, Human
cucaccucuaaaacag

SEQ ID NO: 1896479 - RNA, 13 nt, Human
cucaccugccccu

SEQ ID NO: 1896480 - RNA, 18 nt, Human
cucaccugccccucaacu

SEQ ID NO: 1896481 - RNA, 14 nt, Human
cucaccugccccuc

SEQ ID NO: 1896482 - RNA, 16 nt, Human
cucaccugccccucaa

SEQ ID NO: 1896483 - RNA, 13 nt, Human
cucaccuccugcu

SEQ ID NO: 1896484 - RNA, 13 nt, Human
cucaccucucccu

SEQ ID NO: 1896485 - RNA, 19 nt, Human
cucaccuauccacacaaca

SEQ ID NO: 1896486 - RNA, 14 nt, Human
cucaccucucccuu

SEQ ID NO: 1896487 - RNA, 15 nt, Human
cucaccucucccuug

SEQ ID NO: 1896488 - RNA, 16 nt, Human
cucaccucucccuugg

SEQ ID NO: 1896489 - RNA, 17 nt, Human
cucaccucucccuugga

SEQ ID NO: 1896490 - RNA, 23 nt, Human
cuaugucauuugcuggagcucug

SEQ ID NO: 1896491 - RNA, 15 nt, Human
cuauguugcccaggc

SEQ ID NO: 1896492 - RNA, 22 nt, Human
cuauguguagggcgggaggaug

SEQ ID NO: 1896493 - RNA, 18 nt, Human
cuauguggauuuuuuccu

SEQ ID NO: 1896494 - RNA, 19 nt, Human
cuauguggauuuuuuccua

SEQ ID NO: 1896495 - RNA, 19 nt, Human
cuauguaucaaugaguaac

SEQ ID NO: 1896496 - RNA, 20 nt, Human
cuaucucccccagccccauc

SEQ ID NO: 1896497 - RNA, 17 nt, Human
cuauguugcccaggcag

SEQ ID NO: 1896498 - RNA, 16 nt, Human
cuauguugcccaggca

SEQ ID NO: 1896499 - RNA, 14 nt, Human
cuauuuuucagaau

SEQ ID NO: 1896500 - RNA, 18 nt, Human
cucaaaaaaagaaaaaga

SEQ ID NO: 1896501 - RNA, 22 nt, Human
cucaaagaaauuuccacucagg

SEQ ID NO: 1896502 - RNA, 13 nt, Human
cucaaaggccaga

SEQ ID NO: 1896503 - RNA, 22 nt, Human
cucaaaggccagaccugcagac

SEQ ID NO: 1896504 - RNA, 14 nt, Human
cucacaaaggaugc

SEQ ID NO: 1896505 - RNA, 16 nt, Human
cucacaaccugaaccu

SEQ ID NO: 1896506 - RNA, 17 nt, Human
cucacaaccugaaccua

SEQ ID NO: 1896507 - RNA, 12 nt, Human
cucaaauaacua

SEQ ID NO: 1896508 - RNA, 20 nt, Human
cucacaaccugaaccuagga

SEQ ID NO: 1896509 - RNA, 14 nt, Human
cucacacaugagca

SEQ ID NO: 1896510 - RNA, 21 nt, Human
cucacacaugagcaucaggcc

SEQ ID NO: 1896511 - RNA, 19 nt, Human
cuaggccuccuggcccagg

SEQ ID NO: 1896512 - RNA, 19 nt, Human
cuaggccucagccagagaa

SEQ ID NO: 1896513 - RNA, 12 nt, Human
cuaggccugggg

SEQ ID NO: 1896514 - RNA, 13 nt, Human
cuaggccugggga

SEQ ID NO: 1896515 - RNA, 19 nt, Human
cuaggccuggccagaugca

SEQ ID NO: 1896516 - RNA, 18 nt, Human
cuaggccuggccagaugc

SEQ ID NO: 1896517 - RNA, 15 nt, Human
cuaggccuggccaga

SEQ ID NO: 1896518 - RNA, 14 nt, Human
cuaggccuggccag

SEQ ID NO: 1896519 - RNA, 17 nt, Human
cuaggccuccuggccca

SEQ ID NO: 1896520 - RNA, 18 nt, Human
cuaggccuccuggcccag

SEQ ID NO: 1896521 - RNA, 15 nt, Human
cuaggccucagccag

SEQ ID NO: 1896522 - RNA, 16 nt, Human
cuaggccucagccaga

SEQ ID NO: 1896523 - RNA, 17 nt, Human
cuaggccucagccagag

SEQ ID NO: 1896524 - RNA, 18 nt, Human
cuaggccucagccagaga

SEQ ID NO: 1896525 - RNA, 13 nt, Human
cuaggccuggcca

SEQ ID NO: 1896526 - RNA, 13 nt, Human
cuaggccucagcc

SEQ ID NO: 1896527 - RNA, 12 nt, Human
cuaggccgggcg

SEQ ID NO: 1896528 - RNA, 19 nt, Human
cuagccagaggagagagga

SEQ ID NO: 1896529 - RNA, 17 nt, Human
cuagccagaggagagag

SEQ ID NO: 1896530 - RNA, 15 nt, Human
cuagaauuuauucaa

SEQ ID NO: 1896531 - RNA, 20 nt, Human
cuagcauacguacacauuuu

SEQ ID NO: 1896532 - RNA, 19 nt, Human
cuagcauacguacacauuu

SEQ ID NO: 1896533 - RNA, 18 nt, Human
cuagcauacguacacauu

SEQ ID NO: 1896534 - RNA, 16 nt, Human
cuagcauacguacaca

SEQ ID NO: 1896535 - RNA, 12 nt, Human
cuagaauuuauu

SEQ ID NO: 1896536 - RNA, 13 nt, Human
cuagaauuuauuc

SEQ ID NO: 1896537 - RNA, 17 nt, Human
cuauaaacaauuacaug

SEQ ID NO: 1896538 - RNA, 16 nt, Human
cuauaaacaauuacau

SEQ ID NO: 1896539 - RNA, 20 nt, Human
cuaguuugauuaaauucuug

SEQ ID NO: 1896540 - RNA, 19 nt, Human
cuaguuugauuaaauucuu

SEQ ID NO: 1896541 - RNA, 17 nt, Human
cuaguuugauuaaauuc

SEQ ID NO: 1896542 - RNA, 14 nt, Human
cuagggaagauaau

SEQ ID NO: 1896543 - RNA, 23 nt, Human
cuagggggagccccuucugcuca

SEQ ID NO: 1896544 - RNA, 14 nt, Human
cuaccuugaaaaua

SEQ ID NO: 1896545 - RNA, 19 nt, Human
cuaccuugaaaauaagaau

SEQ ID NO: 1896546 - RNA, 17 nt, Human
cuacuaauuccacaccu

SEQ ID NO: 1896547 - RNA, 12 nt, Human
cuacuaauucca

SEQ ID NO: 1896548 - RNA, 15 nt, Human
cuacuaauuccacac

SEQ ID NO: 1896549 - RNA, 13 nt, Human
cuacuaaaacuac

SEQ ID NO: 1896550 - RNA, 16 nt, Human
cuaccugaggggccuc

SEQ ID NO: 1896551 - RNA, 19 nt, Human
cuaccugaggggccucuua

SEQ ID NO: 1896552 - RNA, 23 nt, Human
cuaccugaggggccucuuauggg

SEQ ID NO: 1896553 - RNA, 20 nt, Human
cuacuagggaaaugccuuug

SEQ ID NO: 1896554 - RNA, 20 nt, Human
cuacucaaguagcauuuacu

SEQ ID NO: 1896555 - RNA, 17 nt, Human
cuacucaaguagcauuu

SEQ ID NO: 1896556 - RNA, 18 nt, Human
cuacucaaguagcauuua

SEQ ID NO: 1896557 - RNA, 16 nt, Human
cgcuggcuccccaaag

SEQ ID NO: 1896558 - RNA, 13 nt, Human
cgcuggcucccca

SEQ ID NO: 1896559 - RNA, 17 nt, Human
cgcuggggccaguuggu

SEQ ID NO: 1896560 - RNA, 18 nt, Human
cgcuggccgggaccccga

SEQ ID NO: 1896561 - RNA, 23 nt, Human
cgcuggccgggaccccgagccug

SEQ ID NO: 1896562 - RNA, 20 nt, Human
cgcuggggccaguugguccc

SEQ ID NO: 1896563 - RNA, 13 nt, Human
cgcugccccuggc

SEQ ID NO: 1896564 - RNA, 16 nt, Human
cgcugccccuggcagc

SEQ ID NO: 1896565 - RNA, 17 nt, Human
cgcugccccuggcagcc

SEQ ID NO: 1896566 - RNA, 23 nt, Human
cgcuggaccuugaacuggguacu

SEQ ID NO: 1896567 - RNA, 19 nt, Human
cgcuggaccuugaacuggg

SEQ ID NO: 1896568 - RNA, 18 nt, Human
cgcugccccuggcagccc

SEQ ID NO: 1896569 - RNA, 16 nt, Human
cgccuuaaggauguuc

SEQ ID NO: 1896570 - RNA, 18 nt, Human
cgcauccccugccuccau

SEQ ID NO: 1896571 - RNA, 13 nt, Human
cgcauccccugcc

SEQ ID NO: 1896572 - RNA, 14 nt, Human
cgcauccccugccu

SEQ ID NO: 1896573 - RNA, 15 nt, Human
cgcauccccugccuc

SEQ ID NO: 1896574 - RNA, 16 nt, Human
cgcauccccugccucc

SEQ ID NO: 1896575 - RNA, 21 nt, Human
cgagguuucucaaagaaauuu

SEQ ID NO: 1896576 - RNA, 13 nt, Human
cguuaaaauacca

SEQ ID NO: 1896577 - RNA, 12 nt, Human
cguguuuguguu

SEQ ID NO: 1896578 - RNA, 15 nt, Human
cuaaagcugccagcc

SEQ ID NO: 1896579 - RNA, 16 nt, Human
cuaaaggcuaccuuug

SEQ ID NO: 1896580 - RNA, 15 nt, Human
cuaaaggcuaccuuu

SEQ ID NO: 1896581 - RNA, 14 nt, Human
cuaaagcugccagc

SEQ ID NO: 1896582 - RNA, 19 nt, Human
cuaaaggcuaccuuuguau

SEQ ID NO: 1896583 - RNA, 17 nt, Human
cuaaaggcuaccuuugu

SEQ ID NO: 1896584 - RNA, 22 nt, Human
cuaaaguguauuuuuuuacuaa

SEQ ID NO: 1896585 - RNA, 20 nt, Human
cuaacugcuacaaauacucu

SEQ ID NO: 1896586 - RNA, 13 nt, Human
cgguguggagaag

SEQ ID NO: 1896587 - RNA, 22 nt, Human
cgguucacucuucucagccacu

SEQ ID NO: 1896588 - RNA, 21 nt, Human
cgguuccucguucucccuggg

SEQ ID NO: 1896589 - RNA, 19 nt, Human
cgguuccucguucucccug

SEQ ID NO: 1896590 - RNA, 16 nt, Human
cguacacauuuuauuu

SEQ ID NO: 1896591 - RNA, 13 nt, Human
cguacacauuuua

SEQ ID NO: 1896592 - RNA, 15 nt, Human
cggagacggaguccc

SEQ ID NO: 1896593 - RNA, 19 nt, Human
cucuuuuuuuggcccaggc

SEQ ID NO: 1896594 - RNA, 18 nt, Human
cucuuuuuuuggcccagg

SEQ ID NO: 1896595 - RNA, 16 nt, Human
cucuuuuuuuggccca

SEQ ID NO: 1896596 - RNA, 17 nt, Human
cugaaagaggaaugaag

SEQ ID NO: 1896597 - RNA, 13 nt, Human
cugaaagaggaau

SEQ ID NO: 1896598 - RNA, 24 nt, Human
cucuugauucauaaugacuuaagc

SEQ ID NO: 1896599 - RNA, 13 nt, Human
cucuugagccugg

SEQ ID NO: 1896600 - RNA, 14 nt, Human
cucuugagccuggg

SEQ ID NO: 1896601 - RNA, 22 nt, Human
cucuugauucauaaugacuuaa

SEQ ID NO: 1896602 - RNA, 15 nt, Human
cucuugagccuggga

SEQ ID NO: 1896603 - RNA, 16 nt, Human
cucuugagccugggag

SEQ ID NO: 1896604 - RNA, 17 nt, Human
cucugcacaagcugcac

SEQ ID NO: 1896605 - RNA, 18 nt, Human
cucugcacaagcugcacc

SEQ ID NO: 1896606 - RNA, 19 nt, Human
cucugcacaagcugcaccc

SEQ ID NO: 1896607 - RNA, 23 nt, Human
cugacacacagcucuguccuggg

SEQ ID NO: 1896608 - RNA, 22 nt, Human
cugacacacagcucuguccugg

SEQ ID NO: 1896609 - RNA, 21 nt, Human
cugacacacagcucuguccug

SEQ ID NO: 1896610 - RNA, 20 nt, Human
cugacacacagcucuguccu

SEQ ID NO: 1896611 - RNA, 19 nt, Human
cugacacacagcucugucc

SEQ ID NO: 1896612 - RNA, 18 nt, Human
cugacacacagcucuguc

SEQ ID NO: 1896613 - RNA, 17 nt, Human
cugacacacagcucugu

SEQ ID NO: 1896614 - RNA, 16 nt, Human
cugacacacagcucug

SEQ ID NO: 1896615 - RNA, 15 nt, Human
cugacacacagcucu

SEQ ID NO: 1896616 - RNA, 13 nt, Human
cugacacacagcu

SEQ ID NO: 1896617 - RNA, 14 nt, Human
cugaaaauguaugu

SEQ ID NO: 1896618 - RNA, 19 nt, Human
cugaagcagguucccaagc

SEQ ID NO: 1896619 - RNA, 20 nt, Human
cugaagcagguucccaagcu

SEQ ID NO: 1896620 - RNA, 21 nt, Human
cugaagcagguucccaagcuc

SEQ ID NO: 1896621 - RNA, 14 nt, Human
cugacaccuuucau

SEQ ID NO: 1896622 - RNA, 21 nt, Human
cugaguaaaaaagcugugugc

SEQ ID NO: 1896623 - RNA, 23 nt, Human
cugaggaauccagacccggcugc

SEQ ID NO: 1896624 - RNA, 14 nt, Human
cugaggggccucuu

SEQ ID NO: 1896625 - RNA, 13 nt, Human
cugaggugggagg

SEQ ID NO: 1896626 - RNA, 22 nt, Human
cugaggugggaggaucucuuga

SEQ ID NO: 1896627 - RNA, 21 nt, Human
cugaggugggagauguggaaa

SEQ ID NO: 1896628 - RNA, 14 nt, Human
cugaggaauccaga

SEQ ID NO: 1896629 - RNA, 23 nt, Human
cugaggaagaacggggcucuucu

SEQ ID NO: 1896630 - RNA, 19 nt, Human
cugaggaagcugggguuca

SEQ ID NO: 1896631 - RNA, 18 nt, Human
cugaggaagaacggggcu

SEQ ID NO: 1896632 - RNA, 15 nt, Human
cugaggaagaacggg

SEQ ID NO: 1896633 - RNA, 23 nt, Human
cugaggaagagggacuguucuuu

SEQ ID NO: 1896634 - RNA, 18 nt, Human
cugaggaagagggacugu

SEQ ID NO: 1896635 - RNA, 12 nt, Human
cugagcuuggaa

SEQ ID NO: 1896636 - RNA, 15 nt, Human
cugagcuucucugug

SEQ ID NO: 1896637 - RNA, 16 nt, Human
cugagcuucucuguga

SEQ ID NO: 1896638 - RNA, 21 nt, Human
cugagcuuggaagcuucuggu

SEQ ID NO: 1896639 - RNA, 20 nt, Human
cugagcuuggaagcuucugg

SEQ ID NO: 1896640 - RNA, 14 nt, Human
cugagcuuggaagc

SEQ ID NO: 1896641 - RNA, 22 nt, Human
cugagcugggaugauuggaggg

SEQ ID NO: 1896642 - RNA, 12 nt, Human
cugagcugggau

SEQ ID NO: 1896643 - RNA, 19 nt, Human
cugacccugcuucaaauau

SEQ ID NO: 1896644 - RNA, 17 nt, Human
cugaucucucgugauug

SEQ ID NO: 1896645 - RNA, 18 nt, Human
cugaucucucgugauuga

SEQ ID NO: 1896646 - RNA, 10 nt, Human
cucuccucug

SEQ ID NO: 1896647 - RNA, 17 nt, Human
cucucuggccuucggcc

SEQ ID NO: 1896648 - RNA, 22 nt, Human
cucucuggccuucggccuccau

SEQ ID NO: 1896649 - RNA, 19 nt, Human
cucucuggccuucggccuc

SEQ ID NO: 1896650 - RNA, 20 nt, Human
cucucuugauuaagaucuca

SEQ ID NO: 1896651 - RNA, 16 nt, Human
cucuccgaccagacac

SEQ ID NO: 1896652 - RNA, 13 nt, Human
cucuccuccuuuu

SEQ ID NO: 1896653 - RNA, 20 nt, Human
cucuccuccuuuucacaguu

SEQ ID NO: 1896654 - RNA, 17 nt, Human
cucgugguaggacugua

SEQ ID NO: 1896655 - RNA, 16 nt, Human
cucgugguaggacugu

SEQ ID NO: 1896656 - RNA, 15 nt, Human
cucgugguaggacug

SEQ ID NO: 1896657 - RNA, 13 nt, Human
cucucccuuggau

SEQ ID NO: 1896658 - RNA, 16 nt, Human
cucugcacaagcugca

SEQ ID NO: 1896659 - RNA, 22 nt, Human
cuccuuuagcgcccaguugggu

SEQ ID NO: 1896660 - RNA, 17 nt, Human
cuccuuuagcgcccagu

SEQ ID NO: 1896661 - RNA, 16 nt, Human
cuccuuuagcgcccag

SEQ ID NO: 1896662 - RNA, 22 nt, Human
cuccuagccugugccucuggga

SEQ ID NO: 1896663 - RNA, 23 nt, Human
cuccuagagggaggggccuaggc

SEQ ID NO: 1896664 - RNA, 16 nt, Human
cuccuagccacccacc

SEQ ID NO: 1896665 - RNA, 24 nt, Human
cuccuuuucacaguucucuccuuc

SEQ ID NO: 1896666 - RNA, 23 nt, Human
cuccuuugugaggaagccgcugg

SEQ ID NO: 1896667 - RNA, 20 nt, Human
cucgaaacacagaaaccuuu

SEQ ID NO: 1896668 - RNA, 14 nt, Human
cucgaaacacagaa

SEQ ID NO: 1896669 - RNA, 15 nt, Human
cucgaaacacagaaa

SEQ ID NO: 1896670 - RNA, 19 nt, Human
cucgaaacacagaaaccuu

SEQ ID NO: 1896671 - RNA, 11 nt, Human
cucggugccuu

SEQ ID NO: 1896672 - RNA, 17 nt, Human
cucccaccucagccucc

SEQ ID NO: 1896673 - RNA, 16 nt, Human
cucccaccucagccuc

SEQ ID NO: 1896674 - RNA, 14 nt, Human
cucccaccucagcc

SEQ ID NO: 1896675 - RNA, 22 nt, Human
cuccaggugcacaagcuccaag

SEQ ID NO: 1896676 - RNA, 18 nt, Human
cuccaggugcacaagcuc

SEQ ID NO: 1896677 - RNA, 19 nt, Human
cuccaggugcacaagcucc

SEQ ID NO: 1896678 - RNA, 20 nt, Human
cuccaggugcacaagcucca

SEQ ID NO: 1896679 - RNA, 23 nt, Human
cuccaggcuguaucccaugagcc

SEQ ID NO: 1896680 - RNA, 16 nt, Human
cuccagacacaugucc

SEQ ID NO: 1896681 - RNA, 17 nt, Human
cucagacauuggcaccu

SEQ ID NO: 1896682 - RNA, 22 nt, Human
cuccagaauuucccaaagcagu

SEQ ID NO: 1896683 - RNA, 11 nt, Human
cuccagacaca

SEQ ID NO: 1896684 - RNA, 16 nt, Human
cucagaaucucaaaua

SEQ ID NO: 1896685 - RNA, 17 nt, Human
cucagaaucucaaauaa

SEQ ID NO: 1896686 - RNA, 21 nt, Human
cuccagaauuucccaaagcag

SEQ ID NO: 1896687 - RNA, 13 nt, Human
cucagacauuggc

SEQ ID NO: 1896688 - RNA, 20 nt, Human
cucagacauguuuuccguga

SEQ ID NO: 1896689 - RNA, 19 nt, Human
cucagacauguuuuccgug

SEQ ID NO: 1896690 - RNA, 16 nt, Human
cucccucccucuuucc

SEQ ID NO: 1896691 - RNA, 23 nt, Human
cuccccaucgccagcugaugacu

SEQ ID NO: 1896692 - RNA, 21 nt, Human
cuccccaucgccagcugauga

SEQ ID NO: 1896693 - RNA, 15 nt, Human
cucccucuuucccuc

SEQ ID NO: 1896694 - RNA, 19 nt, Human
cucccucuuucccucccuu

SEQ ID NO: 1896695 - RNA, 20 nt, Human
cuccgcuuucuacccagcga

SEQ ID NO: 1896696 - RNA, 21 nt, Human
cuccgcuuucuacccagcgag

SEQ ID NO: 1896697 - RNA, 22 nt, Human
cuccgcuuucuacccagcgagc

SEQ ID NO: 1896698 - RNA, 14 nt, Human
cuccgucaacucau

SEQ ID NO: 1896699 - RNA, 13 nt, Human
cuccuagagggag

SEQ ID NO: 1896700 - RNA, 15 nt, Human
cuccuagagggaggg

SEQ ID NO: 1896701 - RNA, 18 nt, Human
cuccuagagggaggggcc

SEQ ID NO: 1896702 - RNA, 19 nt, Human
cuccuagagggaggggccu

SEQ ID NO: 1896703 - RNA, 17 nt, Human
gugaccaggcauccucc

SEQ ID NO: 1896704 - RNA, 18 nt, Human
gugaccauguuuuguuua

SEQ ID NO: 1896705 - RNA, 18 nt, Human
gugaccagcaccaucucu

SEQ ID NO: 1896706 - RNA, 21 nt, Human
gugaccagcaccaucucuccu

SEQ ID NO: 1896707 - RNA, 17 nt, Human
gugaccaaugaugguca

SEQ ID NO: 1896708 - RNA, 19 nt, Human
gugacagaggcagccccau

SEQ ID NO: 1896709 - RNA, 18 nt, Human
gugacagaggcagcccca

SEQ ID NO: 1896710 - RNA, 16 nt, Human
gugacagaggcagccc

SEQ ID NO: 1896711 - RNA, 20 nt, Human
gugaaggccucgcaggaaga

SEQ ID NO: 1896712 - RNA, 14 nt, Human
gugacaugucuuuu

SEQ ID NO: 1896713 - RNA, 14 nt, Human
gugaaggcuggcau

SEQ ID NO: 1896714 - RNA, 12 nt, Human
gugaaggcuggc

SEQ ID NO: 1896715 - RNA, 13 nt, Human
gugaaggcuggca

SEQ ID NO: 1896716 - RNA, 14 nt, Human
gugaagugaagaca

SEQ ID NO: 1896717 - RNA, 10 nt, Human
gugaagccaa

SEQ ID NO: 1896718 - RNA, 20 nt, Human
gugaagccaauucagacagg

SEQ ID NO: 1896719 - RNA, 22 nt, Human
gugaagccaauucagacaggca

SEQ ID NO: 1896720 - RNA, 12 nt, Human
gugaaggacccu

SEQ ID NO: 1896721 - RNA, 13 nt, Human
gugaaggacccuu

SEQ ID NO: 1896722 - RNA, 12 nt, Human
gugaaggccucg

SEQ ID NO: 1896723 - RNA, 23 nt, Human
gugaagacaaugacuuacuguac

SEQ ID NO: 1896724 - RNA, 16 nt, Human
aacucugcauucuagu

SEQ ID NO: 1896725 - RNA, 15 nt, Human
gugagucgaggacag

SEQ ID NO: 1896726 - RNA, 20 nt, Human
gugaguccuggcaugggaau

SEQ ID NO: 1896727 - RNA, 19 nt, Human
gugaguccuagagcuacag

SEQ ID NO: 1896728 - RNA, 17 nt, Human
gugaguccuggcauggg

SEQ ID NO: 1896729 - RNA, 19 nt, Human
gugaguacuacaguccucc

SEQ ID NO: 1896730 - RNA, 21 nt, Human
gugaguacuacaguccuccca

SEQ ID NO: 1896731 - RNA, 15 nt, Human
aacugaacauuccag

SEQ ID NO: 1896732 - RNA, 22 nt, Human
aacugaacaccauugaaggcuu

SEQ ID NO: 1896733 - RNA, 21 nt, Human
aacugaacaccauugaaggcu

SEQ ID NO: 1896734 - RNA, 23 nt, Human
aacugaacaccauugaaggcuua

SEQ ID NO: 1896735 - RNA, 16 nt, Human
gugagaggggaacaga

SEQ ID NO: 1896736 - RNA, 13 nt, Human
gugagagcugggu

SEQ ID NO: 1896737 - RNA, 15 nt, Human
gugagcaauccugca

SEQ ID NO: 1896738 - RNA, 21 nt, Human
gugagcacuaaggugugcucu

SEQ ID NO: 1896739 - RNA, 17 nt, Human
gugaguacuacaguccu

SEQ ID NO: 1896740 - RNA, 12 nt, Human
gugaccccaggu

SEQ ID NO: 1896741 - RNA, 15 nt, Human
gugacccccagcucc

SEQ ID NO: 1896742 - RNA, 17 nt, Human
gugacccccagcuccgg

SEQ ID NO: 1896743 - RNA, 16 nt, Human
gugacccccagcuccg

SEQ ID NO: 1896744 - RNA, 12 nt, Human
gugagagcuggg

SEQ ID NO: 1896745 - RNA, 22 nt, Human
aaccaugagaccacuguuauca

SEQ ID NO: 1896746 - RNA, 17 nt, Human
gucucuugguccugcug

SEQ ID NO: 1896747 - RNA, 13 nt, Human
gucucuugguccu

SEQ ID NO: 1896748 - RNA, 20 nt, Human
aaccaugaagucucuaacaa

SEQ ID NO: 1896749 - RNA, 20 nt, Human
gucucuugguccugcugcag

SEQ ID NO: 1896750 - RNA, 18 nt, Human
gucucuugguccugcugc

SEQ ID NO: 1896751 - RNA, 19 nt, Human
gucucuugguccugcugca

SEQ ID NO: 1896752 - RNA, 23 nt, Human
gucucuuuaaugucacaggcagg

SEQ ID NO: 1896753 - RNA, 22 nt, Human
gucucuuuaaugucacaggcag

SEQ ID NO: 1896754 - RNA, 14 nt, Human
gucugaaggcuggg

SEQ ID NO: 1896755 - RNA, 19 nt, Human
gucugaaggcuggguucug

SEQ ID NO: 1896756 - RNA, 20 nt, Human
gucucuuuaaugucacaggc

SEQ ID NO: 1896757 - RNA, 19 nt, Human
gucucuuuaaugucacagg

SEQ ID NO: 1896758 - RNA, 18 nt, Human
gucucuuuaaugucacag

SEQ ID NO: 1896759 - RNA, 16 nt, Human
gucucuuguauuaaac

SEQ ID NO: 1896760 - RNA, 19 nt, Human
gucucuuguauuaaacucu

SEQ ID NO: 1896761 - RNA, 23 nt, Human
gucugacaggcaaugcuggcugu

SEQ ID NO: 1896762 - RNA, 22 nt, Human
gucugacaggcaaugcuggcug

SEQ ID NO: 1896763 - RNA, 21 nt, Human
gucugacaggcaaugcuggcu

SEQ ID NO: 1896764 - RNA, 21 nt, Human
gucuggaguugaucuggaacc

SEQ ID NO: 1896765 - RNA, 23 nt, Human
aacuaagaaauaugcacaauagc

SEQ ID NO: 1896766 - RNA, 17 nt, Human
aacuagaacugaauuuu

SEQ ID NO: 1896767 - RNA, 17 nt, Human
aacuagaauuuauucaa

SEQ ID NO: 1896768 - RNA, 19 nt, Human
aacuagaauuuauucaauu

SEQ ID NO: 1896769 - RNA, 22 nt, Human
aacuagaauuuauucaauuccu

SEQ ID NO: 1896770 - RNA, 23 nt, Human
aacguggcugcuucaaggauccu

SEQ ID NO: 1896771 - RNA, 16 nt, Human
gucuucaguaagccgu

SEQ ID NO: 1896772 - RNA, 15 nt, Human
gucuuuguacagaca

SEQ ID NO: 1896773 - RNA, 16 nt, Human
gucuuuguacagacaa

SEQ ID NO: 1896774 - RNA, 19 nt, Human
gucuuuguuaaguucuauu

SEQ ID NO: 1896775 - RNA, 19 nt, Human
aaccugauugugucucuug

SEQ ID NO: 1896776 - RNA, 18 nt, Human
aaccugauugugucucuu

SEQ ID NO: 1896777 - RNA, 16 nt, Human
gucuagacuaaaagau

SEQ ID NO: 1896778 - RNA, 13 nt, Human
gucuagagaggga

SEQ ID NO: 1896779 - RNA, 14 nt, Human
gucuagagagggag

SEQ ID NO: 1896780 - RNA, 15 nt, Human
gucuagagagggagg

SEQ ID NO: 1896781 - RNA, 16 nt, Human
gucuagagagggaggc

SEQ ID NO: 1896782 - RNA, 21 nt, Human
gucuagagagggaggcaagcc

SEQ ID NO: 1896783 - RNA, 15 nt, Human
gucuagauggcuccu

SEQ ID NO: 1896784 - RNA, 16 nt, Human
gucuagauggcuccuc

SEQ ID NO: 1896785 - RNA, 19 nt, Human
gucuagauggcuccucuca

SEQ ID NO: 1896786 - RNA, 17 nt, Human
gucuagauggcuccucu

SEQ ID NO: 1896787 - RNA, 18 nt, Human
gucuagauggcuccucuc

SEQ ID NO: 1896788 - RNA, 23 nt, Human
gucgcccagucuggaaugcagug

SEQ ID NO: 1896789 - RNA, 14 nt, Human
gucgcccuggacug

SEQ ID NO: 1896790 - RNA, 18 nt, Human
gucgcccuggacugugug

SEQ ID NO: 1896791 - RNA, 15 nt, Human
gucgcccucccaggc

SEQ ID NO: 1896792 - RNA, 20 nt, Human
gucuaccugaggggccucuu

SEQ ID NO: 1896793 - RNA, 18 nt, Human
gucgacuucgggcuggcc

SEQ ID NO: 1896794 - RNA, 14 nt, Human
gucgaggacaggga

SEQ ID NO: 1896795 - RNA, 16 nt, Human
guccuuuuuuuccauc

SEQ ID NO: 1896796 - RNA, 19 nt, Human
guccuuuuuuuccaucuuu

SEQ ID NO: 1896797 - RNA, 14 nt, Human
gucgcccagucugg

SEQ ID NO: 1896798 - RNA, 13 nt, Human
gucgcccagucug

SEQ ID NO: 1896799 - RNA, 20 nt, Human
gucgcccaggcuggagugca

SEQ ID NO: 1896800 - RNA, 17 nt, Human
guccugcugcaguugcc

SEQ ID NO: 1896801 - RNA, 13 nt, Human
guccugcugcagu

SEQ ID NO: 1896802 - RNA, 16 nt, Human
guccugcugcaguugc

SEQ ID NO: 1896803 - RNA, 23 nt, Human
gucucaguccaugaagauguaga

SEQ ID NO: 1896804 - RNA, 21 nt, Human
gucuccaaccccccagcacug

SEQ ID NO: 1896805 - RNA, 20 nt, Human
gucuccaaccccccagcacu

SEQ ID NO: 1896806 - RNA, 17 nt, Human
gucuccaaccccccagc

SEQ ID NO: 1896807 - RNA, 16 nt, Human
gucuccaaccccccag

SEQ ID NO: 1896808 - RNA, 22 nt, Human
gucuccaaccccccagcacuga

SEQ ID NO: 1896809 - RNA, 12 nt, Human
gucuccaccagg

SEQ ID NO: 1896810 - RNA, 15 nt, Human
gucuccaccaggaac

SEQ ID NO: 1896811 - RNA, 16 nt, Human
gucuccaccaggaacc

SEQ ID NO: 1896812 - RNA, 17 nt, Human
gucuccaccaggaaccu

SEQ ID NO: 1896813 - RNA, 19 nt, Human
gucuccaccaggaaccucu

SEQ ID NO: 1896814 - RNA, 20 nt, Human
gucuccaccaggaaccucuu

SEQ ID NO: 1896815 - RNA, 21 nt, Human
gucuccaccaggaaccucuuc

SEQ ID NO: 1896816 - RNA, 15 nt, Human
gucuaugggacucaa

SEQ ID NO: 1896817 - RNA, 14 nt, Human
gucuaugggacuca

SEQ ID NO: 1896818 - RNA, 22 nt, Human
gucucaaacucuugaccucagg

SEQ ID NO: 1896819 - RNA, 16 nt, Human
gucucaaacuccugac

SEQ ID NO: 1896820 - RNA, 22 nt, Human
aacauuuguucuauagcuuuuc

SEQ ID NO: 1896821 - RNA, 14 nt, Human
aacauuuuaauuca

SEQ ID NO: 1896822 - RNA, 16 nt, Human
aacauuuugucauaua

SEQ ID NO: 1896823 - RNA, 15 nt, Human
aacauuuuacccaca

SEQ ID NO: 1896824 - RNA, 17 nt, Human
aacauuuuacccacaca

SEQ ID NO: 1896825 - RNA, 13 nt, Human
aacauuuucacac

SEQ ID NO: 1896826 - RNA, 13 nt, Human
gucuccauguuug

SEQ ID NO: 1896827 - RNA, 13 nt, Human
aaccacaucuugc

SEQ ID NO: 1896828 - RNA, 22 nt, Human
aaccacauacaacacaaagaga

SEQ ID NO: 1896829 - RNA, 16 nt, Human
aaccaaauauuccaga

SEQ ID NO: 1896830 - RNA, 12 nt, Human
guagccugugca

SEQ ID NO: 1896831 - RNA, 16 nt, Human
guagccuuuugacuuu

SEQ ID NO: 1896832 - RNA, 22 nt, Human
guagcucuaggagggcuggcaa

SEQ ID NO: 1896833 - RNA, 18 nt, Human
gucccaccuuggcugcag

SEQ ID NO: 1896834 - RNA, 17 nt, Human
gucccaccuuggcugca

SEQ ID NO: 1896835 - RNA, 19 nt, Human
gucccaccuuggcugcagg

SEQ ID NO: 1896836 - RNA, 23 nt, Human
guccccuguuuguuucugaaagg

SEQ ID NO: 1896837 - RNA, 11 nt, Human
guccccuucuc

SEQ ID NO: 1896838 - RNA, 18 nt, Human
gucccccugacaacacuc

SEQ ID NO: 1896839 - RNA, 13 nt, Human
gucccccugacaa

SEQ ID NO: 1896840 - RNA, 15 nt, Human
guccccgcacugggc

SEQ ID NO: 1896841 - RNA, 16 nt, Human
guccccgcacugggcu

SEQ ID NO: 1896842 - RNA, 21 nt, Human
guccgaaagggacuuggaagc

SEQ ID NO: 1896843 - RNA, 13 nt, Human
gucccuuuuccuu

SEQ ID NO: 1896844 - RNA, 20 nt, Human
guccccuucucucaucucuu

SEQ ID NO: 1896845 - RNA, 19 nt, Human
guccccuucucucaucucu

SEQ ID NO: 1896846 - RNA, 18 nt, Human
guccccuucucucaucuc

SEQ ID NO: 1896847 - RNA, 17 nt, Human
guccccuucucucaucu

SEQ ID NO: 1896848 - RNA, 14 nt, Human
guccccuucucuca

SEQ ID NO: 1896849 - RNA, 13 nt, Human
guccccuucucuc

SEQ ID NO: 1896850 - RNA, 12 nt, Human
guccccuucucu

SEQ ID NO: 1896851 - RNA, 22 nt, Human
guccgaaagggacuuggaagcu

SEQ ID NO: 1896852 - RNA, 13 nt, Human
guccuaaaacacc

SEQ ID NO: 1896853 - RNA, 19 nt, Human
aacagguuuuccugaagaa

SEQ ID NO: 1896854 - RNA, 20 nt, Human
aacagacuggaagcacagcu

SEQ ID NO: 1896855 - RNA, 13 nt, Human
guccuacccaccc

SEQ ID NO: 1896856 - RNA, 14 nt, Human
aacaucaacaucuu

SEQ ID NO: 1896857 - RNA, 22 nt, Human
aacauguuuuucuucucccuca

SEQ ID NO: 1896858 - RNA, 18 nt, Human
aacauacucccaucugug

SEQ ID NO: 1896859 - RNA, 16 nt, Human
aacauacucccaucug

SEQ ID NO: 1896860 - RNA, 20 nt, Human
aacauacucccaucugugaa

SEQ ID NO: 1896861 - RNA, 17 nt, Human
gugggcaaacaggcagu

SEQ ID NO: 1896862 - RNA, 18 nt, Human
guggggggggugcugggc

SEQ ID NO: 1896863 - RNA, 14 nt, Human
gugggggucugugu

SEQ ID NO: 1896864 - RNA, 16 nt, Human
gugggggucugugugu

SEQ ID NO: 1896865 - RNA, 15 nt, Human
gugggggucugugug

SEQ ID NO: 1896866 - RNA, 14 nt, Human
gugggucaaggaau

SEQ ID NO: 1896867 - RNA, 15 nt, Human
gugguguuuccuggc

SEQ ID NO: 1896868 - RNA, 16 nt, Human
gugguguuuccuggca

SEQ ID NO: 1896869 - RNA, 20 nt, Human
gugguguuuccugcaggcca

SEQ ID NO: 1896870 - RNA, 22 nt, Human
gugguguggagaagccacaggc

SEQ ID NO: 1896871 - RNA, 14 nt, Human
gugguguggagaag

SEQ ID NO: 1896872 - RNA, 14 nt, Human
guggcuucuuaauc

SEQ ID NO: 1896873 - RNA, 15 nt, Human
guggccucccaacuc

SEQ ID NO: 1896874 - RNA, 23 nt, Human
gugggaaagauuacuuuuucuuu

SEQ ID NO: 1896875 - RNA, 22 nt, Human
guggcuugagaaauauggacac

SEQ ID NO: 1896876 - RNA, 13 nt, Human
guggccucccaac

SEQ ID NO: 1896877 - RNA, 14 nt, Human
guggccucccaacu

SEQ ID NO: 1896878 - RNA, 15 nt, Human
gugggauccuccagg

SEQ ID NO: 1896879 - RNA, 18 nt, Human
gugggauccuccaggugc

SEQ ID NO: 1896880 - RNA, 12 nt, Human
gugggagcugag

SEQ ID NO: 1896881 - RNA, 16 nt, Human
aagagcuguccuggua

SEQ ID NO: 1896882 - RNA, 18 nt, Human
aagagcugaggcaauucu

SEQ ID NO: 1896883 - RNA, 11 nt, Human
aagagcugagg

SEQ ID NO: 1896884 - RNA, 16 nt, Human
aagagcccaggccucc

SEQ ID NO: 1896885 - RNA, 15 nt, Human
aagagauuccugagc

SEQ ID NO: 1896886 - RNA, 12 nt, Human
aagagcccaggc

SEQ ID NO: 1896887 - RNA, 14 nt, Human
aagagcccaggccu

SEQ ID NO: 1896888 - RNA, 16 nt, Human
aagacuguacaaagua

SEQ ID NO: 1896889 - RNA, 20 nt, Human
aagagaugaugaaaauauuu

SEQ ID NO: 1896890 - RNA, 16 nt, Human
aagagauugugguuuc

SEQ ID NO: 1896891 - RNA, 19 nt, Human
aagagauugugguuucauu

SEQ ID NO: 1896892 - RNA, 19 nt, Human
aagacccaacacaugggac

SEQ ID NO: 1896893 - RNA, 21 nt, Human
aagacgcugugcugcccugcc

SEQ ID NO: 1896894 - RNA, 22 nt, Human
aagacgcugugcugcccugccc

SEQ ID NO: 1896895 - RNA, 23 nt, Human
aagacgcugugcugcccugccca

SEQ ID NO: 1896896 - RNA, 17 nt, Human
aagacucauucuucugu

SEQ ID NO: 1896897 - RNA, 20 nt, Human
aagacuggaagcuaauuugc

SEQ ID NO: 1896898 - RNA, 22 nt, Human
aagacuggaagcuaauuugcau

SEQ ID NO: 1896899 - RNA, 23 nt, Human
aagacuggaagcuaauuugcauu

SEQ ID NO: 1896900 - RNA, 13 nt, Human
aagcaaacccaga

SEQ ID NO: 1896901 - RNA, 14 nt, Human
aagcaaacacauua

SEQ ID NO: 1896902 - RNA, 16 nt, Human
aagcaaacccagacgg

SEQ ID NO: 1896903 - RNA, 19 nt, Human
aagcaaacccagacggcuc

SEQ ID NO: 1896904 - RNA, 12 nt, Human
aagcaaacacau

SEQ ID NO: 1896905 - RNA, 13 nt, Human
aagcaaacacauu

SEQ ID NO: 1896906 - RNA, 13 nt, Human
aagcaaaugugaa

SEQ ID NO: 1896907 - RNA, 14 nt, Human
aagcaaaugugaau

SEQ ID NO: 1896908 - RNA, 16 nt, Human
aagcaagauuucagau

SEQ ID NO: 1896909 - RNA, 22 nt, Human
aagauguagaggagaaacugga

SEQ ID NO: 1896910 - RNA, 15 nt, Human
aagaugcaauguaga

SEQ ID NO: 1896911 - RNA, 13 nt, Human
aagcaaaauguga

SEQ ID NO: 1896912 - RNA, 19 nt, Human
aagauguagaggagaaacu

SEQ ID NO: 1896913 - RNA, 16 nt, Human
aagaguaggaagacuu

SEQ ID NO: 1896914 - RNA, 18 nt, Human
aagaguaggaagacuuug

SEQ ID NO: 1896915 - RNA, 19 nt, Human
aagaguaggaagacuuugg

SEQ ID NO: 1896916 - RNA, 15 nt, Human
aagauauuuugcuuu

SEQ ID NO: 1896917 - RNA, 19 nt, Human
gugguguuuccuggcacug

SEQ ID NO: 1896918 - RNA, 18 nt, Human
gugguuauggagagggug

SEQ ID NO: 1896919 - RNA, 23 nt, Human
gugguuaaugccauggacagaag

SEQ ID NO: 1896920 - RNA, 14 nt, Human
gugguuacacagug

SEQ ID NO: 1896921 - RNA, 13 nt, Human
gugguuacacagu

SEQ ID NO: 1896922 - RNA, 21 nt, Human
gugguucacucuuggagccug

SEQ ID NO: 1896923 - RNA, 20 nt, Human
gugguucacucuuggagccu

SEQ ID NO: 1896924 - RNA, 22 nt, Human
aagauauuuugcuuugugauuu

SEQ ID NO: 1896925 - RNA, 20 nt, Human
aagaguaggaagacuuugga

SEQ ID NO: 1896926 - RNA, 20 nt, Human
aagauauuuugcuuugugau

SEQ ID NO: 1896927 - RNA, 17 nt, Human
aagauauuuugcuuugu

SEQ ID NO: 1896928 - RNA, 14 nt, Human
guguguguaugugg

SEQ ID NO: 1896929 - RNA, 13 nt, Human
gugugugugaaug

SEQ ID NO: 1896930 - RNA, 17 nt, Human
guguguguugugugugg

SEQ ID NO: 1896931 - RNA, 19 nt, Human
gugugguguuuccuggcac

SEQ ID NO: 1896932 - RNA, 13 nt, Human
guguggugcagug

SEQ ID NO: 1896933 - RNA, 14 nt, Human
guguggugcagugu

SEQ ID NO: 1896934 - RNA, 18 nt, Human
guguggugcagugugaaa

SEQ ID NO: 1896935 - RNA, 13 nt, Human
guguguguaugug

SEQ ID NO: 1896936 - RNA, 13 nt, Human
guguucuuugugu

SEQ ID NO: 1896937 - RNA, 13 nt, Human
guguucugugaua

SEQ ID NO: 1896938 - RNA, 20 nt, Human
gugucccaaaaagaaaggag

SEQ ID NO: 1896939 - RNA, 19 nt, Human
gugucuugcaauggcagcc

SEQ ID NO: 1896940 - RNA, 18 nt, Human
gugucuuuaaaugcugcu

SEQ ID NO: 1896941 - RNA, 19 nt, Human
gugucuuuaaaugcugcuu

SEQ ID NO: 1896942 - RNA, 21 nt, Human
gugucuugcaauggcagccuu

SEQ ID NO: 1896943 - RNA, 18 nt, Human
gugugagucaccaagccc

SEQ ID NO: 1896944 - RNA, 13 nt, Human
gugugagucacca

SEQ ID NO: 1896945 - RNA, 15 nt, Human
gugugguguuuccug

SEQ ID NO: 1896946 - RNA, 19 nt, Human
guguggugcagugugaaaa

SEQ ID NO: 1896947 - RNA, 19 nt, Human
gugccuggccuggcacaca

SEQ ID NO: 1896948 - RNA, 15 nt, Human
gugccuggccuggca

SEQ ID NO: 1896949 - RNA, 12 nt, Human
gugccuggccug

SEQ ID NO: 1896950 - RNA, 15 nt, Human
gugccucugggacug

SEQ ID NO: 1896951 - RNA, 14 nt, Human
aacuuggcgcugcc

SEQ ID NO: 1896952 - RNA, 15 nt, Human
aacuuggauuuuuga

SEQ ID NO: 1896953 - RNA, 14 nt, Human
aacuuggaaauagu

SEQ ID NO: 1896954 - RNA, 17 nt, Human
aacuuggcgcugccccu

SEQ ID NO: 1896955 - RNA, 23 nt, Human
aacuugguucccauuugcuccuu

SEQ ID NO: 1896956 - RNA, 17 nt, Human
gugcacacaccagagcc

SEQ ID NO: 1896957 - RNA, 18 nt, Human
gugcacguacacacacau

SEQ ID NO: 1896958 - RNA, 14 nt, Human
gugcacacaccaga

SEQ ID NO: 1896959 - RNA, 12 nt, Human
gugcacacacca

SEQ ID NO: 1896960 - RNA, 14 nt, Human
aacugcaugcugcu

SEQ ID NO: 1896961 - RNA, 16 nt, Human
aacugcaugcugcugg

SEQ ID NO: 1896962 - RNA, 20 nt, Human
gugcauuugaggucuguucu

SEQ ID NO: 1896963 - RNA, 20 nt, Human
gugcacuaauguguaagaca

SEQ ID NO: 1896964 - RNA, 22 nt, Human
gugcauuugaggucuguucuuu

SEQ ID NO: 1896965 - RNA, 21 nt, Human
gugcauuugaggucuguucuu

SEQ ID NO: 1896966 - RNA, 15 nt, Human
gugcauuuggugguu

SEQ ID NO: 1896967 - RNA, 14 nt, Human
gugccaagcagagg

SEQ ID NO: 1896968 - RNA, 17 nt, Human
aacuuguauuaaagaca

SEQ ID NO: 1896969 - RNA, 20 nt, Human
aagaaaaaggaugcacagag

SEQ ID NO: 1896970 - RNA, 19 nt, Human
aagaaaaaggaugcacaga

SEQ ID NO: 1896971 - RNA, 22 nt, Human
aagaaaaaggaugcacagaguu

SEQ ID NO: 1896972 - RNA, 22 nt, Human
aagaaaaguuuuguaaauuucu

SEQ ID NO: 1896973 - RNA, 21 nt, Human
aagaaaaguuuuguaaauuuc

SEQ ID NO: 1896974 - RNA, 16 nt, Human
aagaaaaguuuuguaa

SEQ ID NO: 1896975 - RNA, 15 nt, Human
aagaaaaguuuugua

SEQ ID NO: 1896976 - RNA, 12 nt, Human
aagaaaagauuu

SEQ ID NO: 1896977 - RNA, 22 nt, Human
aagaaaagauuuuaaucaaguu

SEQ ID NO: 1896978 - RNA, 18 nt, Human
aagaaaacaucuauucuc

SEQ ID NO: 1896979 - RNA, 23 nt, Human
aagaaaguuuccccaccagugaa

SEQ ID NO: 1896980 - RNA, 16 nt, Human
aagaagcccaggaaag

SEQ ID NO: 1896981 - RNA, 17 nt, Human
aagaagcccaggaaagg

SEQ ID NO: 1896982 - RNA, 19 nt, Human
aagaagccacagaccuagg

SEQ ID NO: 1896983 - RNA, 15 nt, Human
aagaagcccccagcu

SEQ ID NO: 1896984 - RNA, 16 nt, Human
aagaagcccccagcua

SEQ ID NO: 1896985 - RNA, 19 nt, Human
aagaagcccccagcuaaga

SEQ ID NO: 1896986 - RNA, 14 nt, Human
aagaagcucucucc

SEQ ID NO: 1896987 - RNA, 15 nt, Human
aagaagcucucuccu

SEQ ID NO: 1896988 - RNA, 15 nt, Human
aagaaaguuucccca

SEQ ID NO: 1896989 - RNA, 13 nt, Human
aagaaaguuuccc

SEQ ID NO: 1896990 - RNA, 21 nt, Human
aagaaauaaaaggaagccaaa

SEQ ID NO: 1896991 - RNA, 23 nt, Human
aagaaauaaaaggaagccaaaga

SEQ ID NO: 1896992 - RNA, 17 nt, Human
guggacucugcacaugu

SEQ ID NO: 1896993 - RNA, 14 nt, Human
guggacucugcaca

SEQ ID NO: 1896994 - RNA, 14 nt, Human
guggacucagggca

SEQ ID NO: 1896995 - RNA, 15 nt, Human
guggacucagggcag

SEQ ID NO: 1896996 - RNA, 16 nt, Human
guggacucagggcagc

SEQ ID NO: 1896997 - RNA, 21 nt, Human
guggacucagggcagcgccag

SEQ ID NO: 1896998 - RNA, 21 nt, Human
guggauuuaacagaaauguac

SEQ ID NO: 1896999 - RNA, 23 nt, Human
guggauuuaacagaaauguacag

SEQ ID NO: 1897000 - RNA, 21 nt, Human
guggauuuugguuuuguuccc

SEQ ID NO: 1897001 - RNA, 14 nt, Human
guggcaaccugcuu

SEQ ID NO: 1897002 - RNA, 14 nt, Human
guggcagcugcggu

SEQ ID NO: 1897003 - RNA, 22 nt, Human
guggcagcucaccucucccuug

SEQ ID NO: 1897004 - RNA, 13 nt, Human
guggcaccagcag

SEQ ID NO: 1897005 - RNA, 14 nt, Human
guggcaccagcagc

SEQ ID NO: 1897006 - RNA, 13 nt, Human
aagacccaaaagg

SEQ ID NO: 1897007 - RNA, 19 nt, Human
aagaauucaaacuggggcc

SEQ ID NO: 1897008 - RNA, 24 nt, Human
aagaauuucuaggacugaauuaug

SEQ ID NO: 1897009 - RNA, 17 nt, Human
guggcagcugcggucca

SEQ ID NO: 1897010 - RNA, 11 nt, Human
aagaauauuug

SEQ ID NO: 1897011 - RNA, 15 nt, Human
aagaauauuugaaug

SEQ ID NO: 1897012 - RNA, 19 nt, Human
gugcugggccccugccucu

SEQ ID NO: 1897013 - RNA, 16 nt, Human
gugcugggccccugcc

SEQ ID NO: 1897014 - RNA, 15 nt, Human
gugcuggcaaccacu

SEQ ID NO: 1897015 - RNA, 18 nt, Human
gugcugcccugcccaccu

SEQ ID NO: 1897016 - RNA, 20 nt, Human
aagaaguaggggaagacaug

SEQ ID NO: 1897017 - RNA, 21 nt, Human
gugcugcccugcccaccuggc

SEQ ID NO: 1897018 - RNA, 19 nt, Human
gugcugcccugcccaccug

SEQ ID NO: 1897019 - RNA, 20 nt, Human
gugcugcccugcccaccugg

SEQ ID NO: 1897020 - RNA, 24 nt, Human
guggacacagcucuucuccaggcu

SEQ ID NO: 1897021 - RNA, 17 nt, Human
guggacacagcucuucu

SEQ ID NO: 1897022 - RNA, 15 nt, Human
guggacacagcucuu

SEQ ID NO: 1897023 - RNA, 14 nt, Human
guggacacagcucu

SEQ ID NO: 1897024 - RNA, 18 nt, Human
gugcuguccucagguggc

SEQ ID NO: 1897025 - RNA, 20 nt, Human
guggaauuauuuuaaaagau

SEQ ID NO: 1897026 - RNA, 17 nt, Human
guggaagagggcugcaa

SEQ ID NO: 1897027 - RNA, 14 nt, Human
guggaagagggcug

SEQ ID NO: 1897028 - RNA, 21 nt, Human
aauaaaauaucauucagcaac

SEQ ID NO: 1897029 - RNA, 17 nt, Human
aauaaaauaucauucag

SEQ ID NO: 1897030 - RNA, 16 nt, Human
aauaaaauaucauuca

SEQ ID NO: 1897031 - RNA, 15 nt, Human
aauaaaauaucauuc

SEQ ID NO: 1897032 - RNA, 14 nt, Human
aauaaaauaucauu

SEQ ID NO: 1897033 - RNA, 12 nt, Human
aauaaaauauca

SEQ ID NO: 1897034 - RNA, 20 nt, Human
aauaaaauaucauucagcaa

SEQ ID NO: 1897035 - RNA, 19 nt, Human
aauaaaauaucauucagca

SEQ ID NO: 1897036 - RNA, 18 nt, Human
aauaaaauaucauucagc

SEQ ID NO: 1897037 - RNA, 14 nt, Human
aauaaaguaauuau

SEQ ID NO: 1897038 - RNA, 18 nt, Human
aauaaagguuguuuugaa

SEQ ID NO: 1897039 - RNA, 18 nt, Human
aauaaaggaugugauugu

SEQ ID NO: 1897040 - RNA, 12 nt, Human
aauaaaaauaau

SEQ ID NO: 1897041 - RNA, 16 nt, Human
aauaaaaauaaauuug

SEQ ID NO: 1897042 - RNA, 20 nt, Human
aauaaaaggaagccaaagag

SEQ ID NO: 1897043 - RNA, 21 nt, Human
aauaaaaggaagccaaagagu

SEQ ID NO: 1897044 - RNA, 16 nt, Human
aauaaaagugaccuuu

SEQ ID NO: 1897045 - RNA, 20 nt, Human
uaaaguguauuuuuuuacua

SEQ ID NO: 1897046 - RNA, 18 nt, Human
aauaaaaaaaagaaauga

SEQ ID NO: 1897047 - RNA, 20 nt, Human
aauaaaaaaaagaaaugaaa

SEQ ID NO: 1897048 - RNA, 19 nt, Human
uaaaguguauuuuuuuacu

SEQ ID NO: 1897049 - RNA, 15 nt, Human
uaaaguguauuuuuu

SEQ ID NO: 1897050 - RNA, 14 nt, Human
uaaaguguauuuuu

SEQ ID NO: 1897051 - RNA, 13 nt, Human
uaaagucaggggu

SEQ ID NO: 1897052 - RNA, 23 nt, Human
uaaagucauggucauugcaggaa

SEQ ID NO: 1897053 - RNA, 15 nt, Human
aauaacaauaaaaga

SEQ ID NO: 1897054 - RNA, 21 nt, Human
aauaaauuugguucuaauaga

SEQ ID NO: 1897055 - RNA, 12 nt, Human
aauaacauguaa

SEQ ID NO: 1897056 - RNA, 19 nt, Human
aauaacauguaauuaagua

SEQ ID NO: 1897057 - RNA, 22 nt, Human
aauaacauguaauuaaguacua

SEQ ID NO: 1897058 - RNA, 12 nt, Human
aauaaauuauuu

SEQ ID NO: 1897059 - RNA, 19 nt, Human
aauaaaguuugcuuagaaa

SEQ ID NO: 1897060 - RNA, 15 nt, Human
aauaacuaaaaggua

SEQ ID NO: 1897061 - RNA, 17 nt, Human
aauaagugccaggaugg

SEQ ID NO: 1897062 - RNA, 13 nt, Human
uaaaugaauguuu

SEQ ID NO: 1897063 - RNA, 22 nt, Human
uaaaucuccaaaauaaaacuuu

SEQ ID NO: 1897064 - RNA, 12 nt, Human
uaaaugaauguu

SEQ ID NO: 1897065 - RNA, 21 nt, Human
uaaaucuccaaaauaaaacuu

SEQ ID NO: 1897066 - RNA, 20 nt, Human
uaaaucuccaaaauaaaacu

SEQ ID NO: 1897067 - RNA, 17 nt, Human
uaaaugauuucauucaa

SEQ ID NO: 1897068 - RNA, 20 nt, Human
uaaauguuuuuuuuuaaaga

SEQ ID NO: 1897069 - RNA, 22 nt, Human
uaaauuaacuuuuauaaacuuu

SEQ ID NO: 1897070 - RNA, 13 nt, Human
uaacaagccaccc

SEQ ID NO: 1897071 - RNA, 19 nt, Human
uaaauuuuuuuuguuucau

SEQ ID NO: 1897072 - RNA, 12 nt, Human
uaacaaaugaac

SEQ ID NO: 1897073 - RNA, 21 nt, Human
uaaauagucuagacuaaaaga

SEQ ID NO: 1897074 - RNA, 17 nt, Human
uaaauccuuuacuguua

SEQ ID NO: 1897075 - RNA, 19 nt, Human
uaaaucuccaaaauaaaac

SEQ ID NO: 1897076 - RNA, 17 nt, Human
uaaauagcuuuuguguc

SEQ ID NO: 1897077 - RNA, 12 nt, Human
uaaauagcuuuu

SEQ ID NO: 1897078 - RNA, 17 nt, Human
uaaauacaaaacuucca

SEQ ID NO: 1897079 - RNA, 13 nt, Human
uaaauaacuuuuu

SEQ ID NO: 1897080 - RNA, 22 nt, Human
uaaauaacuggaggaauuuucu

SEQ ID NO: 1897081 - RNA, 21 nt, Human
aauacaccacuacauucuguu

SEQ ID NO: 1897082 - RNA, 22 nt, Human
uaaauaaauguaucuuauucac

SEQ ID NO: 1897083 - RNA, 20 nt, Human
aauacaccacuacauucugu

SEQ ID NO: 1897084 - RNA, 18 nt, Human
aauacaccacuacauucu

SEQ ID NO: 1897085 - RNA, 16 nt, Human
aauacaccacuacauu

SEQ ID NO: 1897086 - RNA, 15 nt, Human
aauacaccacuacau

SEQ ID NO: 1897087 - RNA, 14 nt, Human
aauacaauaaguua

SEQ ID NO: 1897088 - RNA, 17 nt, Human
uaaacuaaagaaaaauu

SEQ ID NO: 1897089 - RNA, 17 nt, Human
uaaacgucuuaaauauu

SEQ ID NO: 1897090 - RNA, 13 nt, Human
uaaacgucuuaaa

SEQ ID NO: 1897091 - RNA, 15 nt, Human
uaaacggauuccaaa

SEQ ID NO: 1897092 - RNA, 16 nt, Human
uaaaccgccaaggcug

SEQ ID NO: 1897093 - RNA, 18 nt, Human
uaaaccgccaaggcuggg

SEQ ID NO: 1897094 - RNA, 19 nt, Human
uaaacccaguaguggugac

SEQ ID NO: 1897095 - RNA, 23 nt, Human
uaaacccauauuguaaaacaggu

SEQ ID NO: 1897096 - RNA, 15 nt, Human
uaaacucuguugcaa

SEQ ID NO: 1897097 - RNA, 20 nt, Human
uaaacucuucacaaaaucug

SEQ ID NO: 1897098 - RNA, 14 nt, Human
uaaacucauuuaua

SEQ ID NO: 1897099 - RNA, 15 nt, Human
uaaagacagaggcag

SEQ ID NO: 1897100 - RNA, 10 nt, Human
uaaagacaga

SEQ ID NO: 1897101 - RNA, 9 nt, Human
uaaagacag

SEQ ID NO: 1897102 - RNA, 16 nt, Human
uaaagacuuuuaugau

SEQ ID NO: 1897103 - RNA, 19 nt, Human
uaaagaacacccuauauuu

SEQ ID NO: 1897104 - RNA, 14 nt, Human
uaaagaguguggca

SEQ ID NO: 1897105 - RNA, 17 nt, Human
uaaagauaaagccagaa

SEQ ID NO: 1897106 - RNA, 13 nt, Human
uaaagauggaaaa

SEQ ID NO: 1897107 - RNA, 19 nt, Human
uaaaggcuaccuuuguauu

SEQ ID NO: 1897108 - RNA, 21 nt, Human
uaaaggcuaccuuuguauucu

SEQ ID NO: 1897109 - RNA, 19 nt, Human
uaaaauuuuuaaucuuuaa

SEQ ID NO: 1897110 - RNA, 19 nt, Human
uaaaccaaggcuagaacca

SEQ ID NO: 1897111 - RNA, 14 nt, Human
uaaacaaaguuacu

SEQ ID NO: 1897112 - RNA, 15 nt, Human
uaaacaaaguuacua

SEQ ID NO: 1897113 - RNA, 17 nt, Human
uaaacaaaguuacuagg

SEQ ID NO: 1897114 - RNA, 17 nt, Human
uaaaauuuuuaaucuuu

SEQ ID NO: 1897115 - RNA, 14 nt, Human
uaaaauguuaaaac

SEQ ID NO: 1897116 - RNA, 21 nt, Human
aaguuuucccuugaggaaaca

SEQ ID NO: 1897117 - RNA, 22 nt, Human
aaguuuucccuugaggaaacaa

SEQ ID NO: 1897118 - RNA, 21 nt, Human
aaguuucagagaccauugcaa

SEQ ID NO: 1897119 - RNA, 13 nt, Human
aaguuugcuuaga

SEQ ID NO: 1897120 - RNA, 16 nt, Human
aaguuugcuuagaaaa

SEQ ID NO: 1897121 - RNA, 15 nt, Human
aaguuugcuuagaaa

SEQ ID NO: 1897122 - RNA, 17 nt, Human
guuuuuuuuuaaagacu

SEQ ID NO: 1897123 - RNA, 23 nt, Human
aaguguuuaacuugucaaaaaac

SEQ ID NO: 1897124 - RNA, 17 nt, Human
aaguuacacauuuuuca

SEQ ID NO: 1897125 - RNA, 14 nt, Human
aaguuaaauuuuau

SEQ ID NO: 1897126 - RNA, 12 nt, Human
aaguuaaauaaa

SEQ ID NO: 1897127 - RNA, 14 nt, Human
aaguuaaauaaauc

SEQ ID NO: 1897128 - RNA, 18 nt, Human
aaguuacuagguaacuuc

SEQ ID NO: 1897129 - RNA, 19 nt, Human
aaguuacuagguaacuuca

SEQ ID NO: 1897130 - RNA, 20 nt, Human
aaguuacuagguaacuucau

SEQ ID NO: 1897131 - RNA, 21 nt, Human
aaguuacuagguaacuucaua

SEQ ID NO: 1897132 - RNA, 17 nt, Human
aaguucaugcuuuguuc

SEQ ID NO: 1897133 - RNA, 16 nt, Human
aaguucagccacccug

SEQ ID NO: 1897134 - RNA, 17 nt, Human
aaguucugcagauaaac

SEQ ID NO: 1897135 - RNA, 21 nt, Human
aaguucuauuggaaaaaccac

SEQ ID NO: 1897136 - RNA, 14 nt, Human
aaguuuaauugacu

SEQ ID NO: 1897137 - RNA, 18 nt, Human
guuugccuucuacuuuua

SEQ ID NO: 1897138 - RNA, 13 nt, Human
guuugcuaaguga

SEQ ID NO: 1897139 - RNA, 17 nt, Human
guuugccucugccucug

SEQ ID NO: 1897140 - RNA, 19 nt, Human
guuugcaucugaaaauuga

SEQ ID NO: 1897141 - RNA, 22 nt, Human
guuucugccgcagcccugcaga

SEQ ID NO: 1897142 - RNA, 18 nt, Human
guuucugccgcagcccug

SEQ ID NO: 1897143 - RNA, 16 nt, Human
guuuuaagaggcaggg

SEQ ID NO: 1897144 - RNA, 18 nt, Human
guuuuaaggaugcuugua

SEQ ID NO: 1897145 - RNA, 14 nt, Human
guuuuaagaggcag

SEQ ID NO: 1897146 - RNA, 16 nt, Human
guuuuacugcagcuuu

SEQ ID NO: 1897147 - RNA, 18 nt, Human
guuuuacugcagcuuugu

SEQ ID NO: 1897148 - RNA, 13 nt, Human
aagggcccagaga

SEQ ID NO: 1897149 - RNA, 15 nt, Human
aagggcccagagagg

SEQ ID NO: 1897150 - RNA, 15 nt, Human
aaggcugcuuagaau

SEQ ID NO: 1897151 - RNA, 19 nt, Human
aaggguaucaggugcugcc

SEQ ID NO: 1897152 - RNA, 16 nt, Human
aaggguaucuggugac

SEQ ID NO: 1897153 - RNA, 17 nt, Human
aaggggcaguggugguu

SEQ ID NO: 1897154 - RNA, 17 nt, Human
aaggguaucaggugcug

SEQ ID NO: 1897155 - RNA, 14 nt, Human
aaggggcaguggug

SEQ ID NO: 1897156 - RNA, 13 nt, Human
aaggggagcccac

SEQ ID NO: 1897157 - RNA, 16 nt, Human
aaggggagcccacugu

SEQ ID NO: 1897158 - RNA, 16 nt, Human
aaggguucccucaaga

SEQ ID NO: 1897159 - RNA, 15 nt, Human
guuuuuuaugcuaau

SEQ ID NO: 1897160 - RNA, 21 nt, Human
guuuuuuaaaauauuuaucug

SEQ ID NO: 1897161 - RNA, 15 nt, Human
guuuuuuuuuaaaga

SEQ ID NO: 1897162 - RNA, 23 nt, Human
guuuuuuucauugccaaaaacua

SEQ ID NO: 1897163 - RNA, 16 nt, Human
guuuuugucuuaaaaa

SEQ ID NO: 1897164 - RNA, 22 nt, Human
aagucuuauauauuguagauaa

SEQ ID NO: 1897165 - RNA, 18 nt, Human
aagucuuagauguauaua

SEQ ID NO: 1897166 - RNA, 19 nt, Human
aagucuuagauguauauau

SEQ ID NO: 1897167 - RNA, 17 nt, Human
aagucuuagauguauau

SEQ ID NO: 1897168 - RNA, 18 nt, Human
guuuuucuaggccugggg

SEQ ID NO: 1897169 - RNA, 18 nt, Human
aaguauucuuauuuaaug

SEQ ID NO: 1897170 - RNA, 19 nt, Human
aaguauucuuauuuaauga

SEQ ID NO: 1897171 - RNA, 21 nt, Human
aaguauucuguacucuuagau

SEQ ID NO: 1897172 - RNA, 24 nt, Human
aagucacacaguauuacuucugcu

SEQ ID NO: 1897173 - RNA, 21 nt, Human
aagucaagugaaaaaggagga

SEQ ID NO: 1897174 - RNA, 13 nt, Human
aagucacacagug

SEQ ID NO: 1897175 - RNA, 20 nt, Human
aagucacauuccugaacagg

SEQ ID NO: 1897176 - RNA, 23 nt, Human
aaguacuucuccacccugcucuc

SEQ ID NO: 1897177 - RNA, 22 nt, Human
aaguacuucuccacccugcucu

SEQ ID NO: 1897178 - RNA, 21 nt, Human
aaguacuucuccacccugcuc

SEQ ID NO: 1897179 - RNA, 15 nt, Human
aaguacuggagaaaa

SEQ ID NO: 1897180 - RNA, 16 nt, Human
aaguacuauguaucaa

SEQ ID NO: 1897181 - RNA, 15 nt, Human
aaguacuauguauca

SEQ ID NO: 1897182 - RNA, 23 nt, Human
guugcugaugaacucuuaaucaa

SEQ ID NO: 1897183 - RNA, 23 nt, Human
guuggcugggggccucagugcca

SEQ ID NO: 1897184 - RNA, 17 nt, Human
guugcccaggcuggcgu

SEQ ID NO: 1897185 - RNA, 16 nt, Human
guugcccaggcuggcg

SEQ ID NO: 1897186 - RNA, 15 nt, Human
guugcccaggcuggc

SEQ ID NO: 1897187 - RNA, 17 nt, Human
guugggcuggugucacc

SEQ ID NO: 1897188 - RNA, 21 nt, Human
guugggagaaugucaguaugu

SEQ ID NO: 1897189 - RNA, 14 nt, Human
guugggagaauguc

SEQ ID NO: 1897190 - RNA, 16 nt, Human
guuggggucuggcagc

SEQ ID NO: 1897191 - RNA, 14 nt, Human
guugcccaggcugg

SEQ ID NO: 1897192 - RNA, 15 nt, Human
aaggcuaccuuugua

SEQ ID NO: 1897193 - RNA, 13 nt, Human
aaggcuaccuuug

SEQ ID NO: 1897194 - RNA, 18 nt, Human
aaggccucgcaggaagac

SEQ ID NO: 1897195 - RNA, 17 nt, Human
aaggccucgcaggaaga

SEQ ID NO: 1897196 - RNA, 19 nt, Human
aaggccccgcccaggcuua

SEQ ID NO: 1897197 - RNA, 15 nt, Human
aaggccucgcaggaa

SEQ ID NO: 1897198 - RNA, 14 nt, Human
aaggccccgcccag

SEQ ID NO: 1897199 - RNA, 16 nt, Human
aaggccccgcccaggc

SEQ ID NO: 1897200 - RNA, 22 nt, Human
aaggaugcacagaguuguuaca

SEQ ID NO: 1897201 - RNA, 18 nt, Human
aaggaucuuuguggccaa

SEQ ID NO: 1897202 - RNA, 20 nt, Human
aaggaucuuuguggccaagg

SEQ ID NO: 1897203 - RNA, 24 nt, Human
aaggaugcacagaguuguuacauu

SEQ ID NO: 1897204 - RNA, 14 nt, Human
aaggaugcccaaag

SEQ ID NO: 1897205 - RNA, 19 nt, Human
aaggaugcccaaagaugca

SEQ ID NO: 1897206 - RNA, 19 nt, Human
aaggagacaggcagagcug

SEQ ID NO: 1897207 - RNA, 14 nt, Human
aaggagacaggcag

SEQ ID NO: 1897208 - RNA, 16 nt, Human
aaggagacaggcagag

SEQ ID NO: 1897209 - RNA, 22 nt, Human
aaggagcaagucagaauagaaa

SEQ ID NO: 1897210 - RNA, 18 nt, Human
aaggagauuuacaacugg

SEQ ID NO: 1897211 - RNA, 16 nt, Human
aaggaaacccagcucu

SEQ ID NO: 1897212 - RNA, 15 nt, Human
aaggaaacccagcuc

SEQ ID NO: 1897213 - RNA, 19 nt, Human
guugaucuggaacccagac

SEQ ID NO: 1897214 - RNA, 15 nt, Human
guugaucuggaaccc

SEQ ID NO: 1897215 - RNA, 14 nt, Human
guugaucagaucug

SEQ ID NO: 1897216 - RNA, 16 nt, Human
guugaucuggaaccca

SEQ ID NO: 1897217 - RNA, 17 nt, Human
guugaucuggaacccag

SEQ ID NO: 1897218 - RNA, 13 nt, Human
aaggauaaugaau

SEQ ID NO: 1897219 - RNA, 23 nt, Human
aaggauaaaguugguaaaccuuu

SEQ ID NO: 1897220 - RNA, 21 nt, Human
aaggauaaaguugguaaaccu

SEQ ID NO: 1897221 - RNA, 20 nt, Human
aaggaggaagagaaaaaaua

SEQ ID NO: 1897222 - RNA, 11 nt, Human
aaggauaaagu

SEQ ID NO: 1897223 - RNA, 20 nt, Human
aaggauagaugcuggcccag

SEQ ID NO: 1897224 - RNA, 11 nt, Human
aaggauccuga

SEQ ID NO: 1897225 - RNA, 12 nt, Human
aaggauccugag

SEQ ID NO: 1897226 - RNA, 20 nt, Human
aaggauccugagccagauuu

SEQ ID NO: 1897227 - RNA, 22 nt, Human
aaggauccugagccagauuuca

SEQ ID NO: 1897228 - RNA, 16 nt, Human
aaggaucuuuguggcc

SEQ ID NO: 1897229 - RNA, 19 nt, Human
aaggauagaugcuggccca

SEQ ID NO: 1897230 - RNA, 19 nt, Human
aaggaaaaaauaacaauga

SEQ ID NO: 1897231 - RNA, 16 nt, Human
aaggaaaaaauaacaa

SEQ ID NO: 1897232 - RNA, 22 nt, Human
guuccccuccuccacucucccc

SEQ ID NO: 1897233 - RNA, 16 nt, Human
aagcuuuuaugugaaa

SEQ ID NO: 1897234 - RNA, 13 nt, Human
aagcuuuuagaaa

SEQ ID NO: 1897235 - RNA, 14 nt, Human
aagcuuuuagaaau

SEQ ID NO: 1897236 - RNA, 18 nt, Human
aagcuuuuagaaauacug

SEQ ID NO: 1897237 - RNA, 13 nt, Human
aagcucugcuccu

SEQ ID NO: 1897238 - RNA, 18 nt, Human
aagcuguuacugucuuca

SEQ ID NO: 1897239 - RNA, 14 nt, Human
aagcuuugacacug

SEQ ID NO: 1897240 - RNA, 15 nt, Human
aagcuguuuccauag

SEQ ID NO: 1897241 - RNA, 23 nt, Human
aagcuguuuccauagggugacac

SEQ ID NO: 1897242 - RNA, 16 nt, Human
guguuuaugugugugu

SEQ ID NO: 1897243 - RNA, 12 nt, Human
guguuuaugugu

SEQ ID NO: 1897244 - RNA, 11 nt, Human
aagcucccagg

SEQ ID NO: 1897245 - RNA, 13 nt, Human
guguuuauuguca

SEQ ID NO: 1897246 - RNA, 23 nt, Human
aagcucccaggcauuccccagga

SEQ ID NO: 1897247 - RNA, 12 nt, Human
aagcucccaggc

SEQ ID NO: 1897248 - RNA, 22 nt, Human
aagcucccaggcauuccccagg

SEQ ID NO: 1897249 - RNA, 16 nt, Human
aagcuccucuccccag

SEQ ID NO: 1897250 - RNA, 21 nt, Human
aagcuccuccucccugcaucu

SEQ ID NO: 1897251 - RNA, 13 nt, Human
aagcuccuccucc

SEQ ID NO: 1897252 - RNA, 15 nt, Human
aagcuccuccucccu

SEQ ID NO: 1897253 - RNA, 16 nt, Human
aagcuccuccucccug

SEQ ID NO: 1897254 - RNA, 17 nt, Human
aagcuccuccucccugc

SEQ ID NO: 1897255 - RNA, 18 nt, Human
aagcuccuccucccugca

SEQ ID NO: 1897256 - RNA, 19 nt, Human
aagcuccuccucccugcau

SEQ ID NO: 1897257 - RNA, 18 nt, Human
guugacaguucauaugua

SEQ ID NO: 1897258 - RNA, 23 nt, Human
guugauagcacagacccugcccu

SEQ ID NO: 1897259 - RNA, 13 nt, Human
guugagcuguuuu

SEQ ID NO: 1897260 - RNA, 24 nt, Human
guugagcucucggaacugcaugcu

SEQ ID NO: 1897261 - RNA, 22 nt, Human
guugauagcacagacccugccc

SEQ ID NO: 1897262 - RNA, 13 nt, Human
guugaauuuuaca

SEQ ID NO: 1897263 - RNA, 15 nt, Human
guugacacaggucuu

SEQ ID NO: 1897264 - RNA, 15 nt, Human
guucugugucugugu

SEQ ID NO: 1897265 - RNA, 16 nt, Human
guucucaucuuucuug

SEQ ID NO: 1897266 - RNA, 11 nt, Human
guucucaucuu

SEQ ID NO: 1897267 - RNA, 16 nt, Human
guucucugaggacacu

SEQ ID NO: 1897268 - RNA, 11 nt, Human
guucucugccc

SEQ ID NO: 1897269 - RNA, 16 nt, Human
guucucccugggaggc

SEQ ID NO: 1897270 - RNA, 13 nt, Human
guucucugcccuc

SEQ ID NO: 1897271 - RNA, 12 nt, Human
guucucugcccu

SEQ ID NO: 1897272 - RNA, 11 nt, Human
guucugugcac

SEQ ID NO: 1897273 - RNA, 18 nt, Human
uaccccuuucuggcucuc

SEQ ID NO: 1897274 - RNA, 14 nt, Human
uacccgcagaguuc

SEQ ID NO: 1897275 - RNA, 20 nt, Human
uacccgggaagggggcuggg

SEQ ID NO: 1897276 - RNA, 15 nt, Human
uacccucauguucuu

SEQ ID NO: 1897277 - RNA, 16 nt, Human
uacccucauguucuua

SEQ ID NO: 1897278 - RNA, 20 nt, Human
uacccuggcacuauaaugua

SEQ ID NO: 1897279 - RNA, 22 nt, Human
uacccuggcacuauaauguaag

SEQ ID NO: 1897280 - RNA, 22 nt, Human
uacccucuucauggauggggga

SEQ ID NO: 1897281 - RNA, 17 nt, Human
uaccauccccuguagag

SEQ ID NO: 1897282 - RNA, 20 nt, Human
uaccauaguaccauuuauac

SEQ ID NO: 1897283 - RNA, 17 nt, Human
uaccacuuuuguucuug

SEQ ID NO: 1897284 - RNA, 23 nt, Human
uacauuguuugucugucuucaua

SEQ ID NO: 1897285 - RNA, 16 nt, Human
aauuaaggcauaagaa

SEQ ID NO: 1897286 - RNA, 13 nt, Human
aauuaaguacuau

SEQ ID NO: 1897287 - RNA, 17 nt, Human
uacauguacugauuacu

SEQ ID NO: 1897288 - RNA, 23 nt, Human
uacauggcuggagcuagaauuug

SEQ ID NO: 1897289 - RNA, 15 nt, Human
uacauuguucaauua

SEQ ID NO: 1897290 - RNA, 13 nt, Human
uacauuguugagc

SEQ ID NO: 1897291 - RNA, 23 nt, Human
uacauuguugagcuauugcuguu

SEQ ID NO: 1897292 - RNA, 19 nt, Human
uacauuguuugucugucuu

SEQ ID NO: 1897293 - RNA, 14 nt, Human
uacauuguucaauu

SEQ ID NO: 1897294 - RNA, 19 nt, Human
aauuaacaugaauauuuag

SEQ ID NO: 1897295 - RNA, 18 nt, Human
aauuaaauuuugugucuc

SEQ ID NO: 1897296 - RNA, 17 nt, Human
aauuaaauuuugugucu

SEQ ID NO: 1897297 - RNA, 12 nt, Human
aauuaacacugc

SEQ ID NO: 1897298 - RNA, 14 nt, Human
aauuaacagaaaaa

SEQ ID NO: 1897299 - RNA, 20 nt, Human
aauuaagaaaggauaaaguu

SEQ ID NO: 1897300 - RNA, 22 nt, Human
aauuaacuuuuauaaacuuuac

SEQ ID NO: 1897301 - RNA, 20 nt, Human
aauuaacuuuuauaaacuuu

SEQ ID NO: 1897302 - RNA, 18 nt, Human
aauuaacuuuuauaaacu

SEQ ID NO: 1897303 - RNA, 19 nt, Human
aaugugaacagcggcugga

SEQ ID NO: 1897304 - RNA, 15 nt, Human
aaugugaacuuuauu

SEQ ID NO: 1897305 - RNA, 20 nt, Human
aaugugaacuuuauuaaaua

SEQ ID NO: 1897306 - RNA, 18 nt, Human
aauguugagaaucccaaa

SEQ ID NO: 1897307 - RNA, 15 nt, Human
aauguacauuaauua

SEQ ID NO: 1897308 - RNA, 23 nt, Human
aauguacagcaaggagauuuaca

SEQ ID NO: 1897309 - RNA, 21 nt, Human
aauguacagcaaggagauuua

SEQ ID NO: 1897310 - RNA, 18 nt, Human
uacaccuuucuccuuugu

SEQ ID NO: 1897311 - RNA, 19 nt, Human
uacaccuuucuccuuugua

SEQ ID NO: 1897312 - RNA, 20 nt, Human
uacaccuuucuccuuuguac

SEQ ID NO: 1897313 - RNA, 22 nt, Human
uacagcaaggagauuuacaacu

SEQ ID NO: 1897314 - RNA, 16 nt, Human
aaugguuuaaaugguc

SEQ ID NO: 1897315 - RNA, 22 nt, Human
aaugguuuaacuucugccugug

SEQ ID NO: 1897316 - RNA, 14 nt, Human
aaugguuugaauau

SEQ ID NO: 1897317 - RNA, 17 nt, Human
aaugguuuaacuucugc

SEQ ID NO: 1897318 - RNA, 22 nt, Human
uacaaucucccuucacaaguuu

SEQ ID NO: 1897319 - RNA, 13 nt, Human
aauguaagacaaa

SEQ ID NO: 1897320 - RNA, 13 nt, Human
aauguaagcucua

SEQ ID NO: 1897321 - RNA, 15 nt, Human
aauguaagcucuacu

SEQ ID NO: 1897322 - RNA, 17 nt, Human
aaugguuuucuugugug

SEQ ID NO: 1897323 - RNA, 18 nt, Human
aaugguuuucuugugugu

SEQ ID NO: 1897324 - RNA, 22 nt, Human
aaugguuuucuuguguguuuau

SEQ ID NO: 1897325 - RNA, 23 nt, Human
aaugguuugaauauaaacacuau

SEQ ID NO: 1897326 - RNA, 17 nt, Human
aaugguuugaauauaaa

SEQ ID NO: 1897327 - RNA, 12 nt, Human
uacagucuugua

SEQ ID NO: 1897328 - RNA, 13 nt, Human
uacagucuuguau

SEQ ID NO: 1897329 - RNA, 15 nt, Human
uacauaaugcgugca

SEQ ID NO: 1897330 - RNA, 20 nt, Human
uacaguggggaaugaagaua

SEQ ID NO: 1897331 - RNA, 18 nt, Human
uacaguaucucagggccu

SEQ ID NO: 1897332 - RNA, 12 nt, Human
uacaguccuccc

SEQ ID NO: 1897333 - RNA, 15 nt, Human
uacaguccucccauc

SEQ ID NO: 1897334 - RNA, 17 nt, Human
uacaguccucccaucuc

SEQ ID NO: 1897335 - RNA, 18 nt, Human
uacaguccucccaucuca

SEQ ID NO: 1897336 - RNA, 13 nt, Human
uacagucuauuug

SEQ ID NO: 1897337 - RNA, 13 nt, Human
aaugucacaggca

SEQ ID NO: 1897338 - RNA, 14 nt, Human
aaugucacaggcag

SEQ ID NO: 1897339 - RNA, 22 nt, Human
aaugugaaacuggauuaaacuu

SEQ ID NO: 1897340 - RNA, 13 nt, Human
aauguaucuuauu

SEQ ID NO: 1897341 - RNA, 16 nt, Human
aauguaucuuauucac

SEQ ID NO: 1897342 - RNA, 17 nt, Human
aauguaugcuucauaca

SEQ ID NO: 1897343 - RNA, 16 nt, Human
aauguaugcuucauac

SEQ ID NO: 1897344 - RNA, 15 nt, Human
aauguaugcuucaua

SEQ ID NO: 1897345 - RNA, 17 nt, Human
aauguaucuuauucaca

SEQ ID NO: 1897346 - RNA, 18 nt, Human
aauguaucuuauucacau

SEQ ID NO: 1897347 - RNA, 12 nt, Human
aauguagagggg

SEQ ID NO: 1897348 - RNA, 22 nt, Human
aauguagugaagggauguauca

SEQ ID NO: 1897349 - RNA, 15 nt, Human
uacauacaccagcau

SEQ ID NO: 1897350 - RNA, 16 nt, Human
uacauacaccagcauu

SEQ ID NO: 1897351 - RNA, 20 nt, Human
uacauacaccagcauuccuu

SEQ ID NO: 1897352 - RNA, 16 nt, Human
uaauuaucuaaaguau

SEQ ID NO: 1897353 - RNA, 23 nt, Human
uaauuaguuccucauuagcauuu

SEQ ID NO: 1897354 - RNA, 19 nt, Human
aaugcacuuuguucuggcu

SEQ ID NO: 1897355 - RNA, 20 nt, Human
aaugcacuuuguucuggcuc

SEQ ID NO: 1897356 - RNA, 19 nt, Human
aaugcacaaacagaggccg

SEQ ID NO: 1897357 - RNA, 20 nt, Human
aaugcacaaacagaggccgc

SEQ ID NO: 1897358 - RNA, 13 nt, Human
aaugcacuuuguu

SEQ ID NO: 1897359 - RNA, 16 nt, Human
aaugcacuuuguucug

SEQ ID NO: 1897360 - RNA, 18 nt, Human
aaugcacaaacagaggcc

SEQ ID NO: 1897361 - RNA, 18 nt, Human
aaugcaacaacauguaua

SEQ ID NO: 1897362 - RNA, 15 nt, Human
aaugcaacaacaugu

SEQ ID NO: 1897363 - RNA, 22 nt, Human
aaugcaaaccaucauugaaauc

SEQ ID NO: 1897364 - RNA, 23 nt, Human
aaugcaaaccaucauugaaaucu

SEQ ID NO: 1897365 - RNA, 20 nt, Human
aaugaaugucagugugacug

SEQ ID NO: 1897366 - RNA, 21 nt, Human
aaugaaugucagugugacuga

SEQ ID NO: 1897367 - RNA, 19 nt, Human
aaugaccacaccugccucu

SEQ ID NO: 1897368 - RNA, 13 nt, Human
aaugaccuuucaa

SEQ ID NO: 1897369 - RNA, 14 nt, Human
aaugaccuuucaau

SEQ ID NO: 1897370 - RNA, 15 nt, Human
aaugaccuuucaaua

SEQ ID NO: 1897371 - RNA, 16 nt, Human
aaugcaaaccaucauu

SEQ ID NO: 1897372 - RNA, 21 nt, Human
uacaagcgugagccacugcac

SEQ ID NO: 1897373 - RNA, 19 nt, Human
uacaagcccccccuuccac

SEQ ID NO: 1897374 - RNA, 20 nt, Human
uacaagcgugagccacugca

SEQ ID NO: 1897375 - RNA, 19 nt, Human
uacaagcgugagccacugc

SEQ ID NO: 1897376 - RNA, 18 nt, Human
uacaagcgugagccacug

SEQ ID NO: 1897377 - RNA, 16 nt, Human
uacaagcgugagccac

SEQ ID NO: 1897378 - RNA, 16 nt, Human
uacaaaaacauggccu

SEQ ID NO: 1897379 - RNA, 16 nt, Human
uaauuuuuuucaauau

SEQ ID NO: 1897380 - RNA, 22 nt, Human
uaauuuuuuucaauauuuauua

SEQ ID NO: 1897381 - RNA, 18 nt, Human
uacaagccagcuggagaa

SEQ ID NO: 1897382 - RNA, 14 nt, Human
uacaagcccccccu

SEQ ID NO: 1897383 - RNA, 15 nt, Human
uacaagcccccccuu

SEQ ID NO: 1897384 - RNA, 13 nt, Human
uaauucauguugc

SEQ ID NO: 1897385 - RNA, 19 nt, Human
uaauucaucccaacugucu

SEQ ID NO: 1897386 - RNA, 17 nt, Human
uaauuuaccugaagucu

SEQ ID NO: 1897387 - RNA, 18 nt, Human
uaauuuaccugaagucuu

SEQ ID NO: 1897388 - RNA, 13 nt, Human
uaauuuuuuacua

SEQ ID NO: 1897389 - RNA, 20 nt, Human
uaauuugcauuaaauucaca

SEQ ID NO: 1897390 - RNA, 22 nt, Human
uaauuuuuguguuuuuaauaaa

SEQ ID NO: 1897391 - RNA, 12 nt, Human
uaauuugcauua

SEQ ID NO: 1897392 - RNA, 16 nt, Human
uaauuugcauuaaauu

SEQ ID NO: 1897393 - RNA, 17 nt, Human
uaauuugcauuaaauuc

SEQ ID NO: 1897394 - RNA, 22 nt, Human
uaauuugauaguauugugcaua

SEQ ID NO: 1897395 - RNA, 17 nt, Human
aaucuuuucacaaauaa

SEQ ID NO: 1897396 - RNA, 16 nt, Human
aaucuuuucacaaaua

SEQ ID NO: 1897397 - RNA, 15 nt, Human
aaucuuuucacaaau

SEQ ID NO: 1897398 - RNA, 14 nt, Human
aaucuuuucacaaa

SEQ ID NO: 1897399 - RNA, 18 nt, Human
aaucuuuucacaaauaaa

SEQ ID NO: 1897400 - RNA, 15 nt, Human
aaugaaugucagugu

SEQ ID NO: 1897401 - RNA, 14 nt, Human
aaugaaugucagug

SEQ ID NO: 1897402 - RNA, 14 nt, Human
aaugaaugaaacau

SEQ ID NO: 1897403 - RNA, 15 nt, Human
aaugaaugaaugaau

SEQ ID NO: 1897404 - RNA, 23 nt, Human
aaucuucugaacuuggcgcugcc

SEQ ID NO: 1897405 - RNA, 13 nt, Human
uaaugucaaacuu

SEQ ID NO: 1897406 - RNA, 18 nt, Human
uaaugucaaacuugaguc

SEQ ID NO: 1897407 - RNA, 17 nt, Human
uaaugugccuaguucuu

SEQ ID NO: 1897408 - RNA, 17 nt, Human
aaucuugaaauuaagaa

SEQ ID NO: 1897409 - RNA, 14 nt, Human
aaucuugaaauuaa

SEQ ID NO: 1897410 - RNA, 23 nt, Human
aaucuuuuacaacugccucgaaa

SEQ ID NO: 1897411 - RNA, 13 nt, Human
aaucuugcucugc

SEQ ID NO: 1897412 - RNA, 15 nt, Human
uaaugucacaggcag

SEQ ID NO: 1897413 - RNA, 17 nt, Human
uaaugucacaggcaggu

SEQ ID NO: 1897414 - RNA, 16 nt, Human
uaaugucacaggcagg

SEQ ID NO: 1897415 - RNA, 23 nt, Human
uaaugugaaacuggauuaaacuu

SEQ ID NO: 1897416 - RNA, 22 nt, Human
uaaugugaaacuggauuaaacu

SEQ ID NO: 1897417 - RNA, 20 nt, Human
uaaugugaaacuggauuaaa

SEQ ID NO: 1897418 - RNA, 12 nt, Human
uaaugugaaacu

SEQ ID NO: 1897419 - RNA, 15 nt, Human
uaauguaagacaaau

SEQ ID NO: 1897420 - RNA, 16 nt, Human
uaauguaagcucuacu

SEQ ID NO: 1897421 - RNA, 17 nt, Human
uaauguaagcucuacug

SEQ ID NO: 1897422 - RNA, 19 nt, Human
uaaucagggaggucauuuu

SEQ ID NO: 1897423 - RNA, 21 nt, Human
uaauauugauaugcuuauaca

SEQ ID NO: 1897424 - RNA, 17 nt, Human
uaaucuuuaauuuuaca

SEQ ID NO: 1897425 - RNA, 13 nt, Human
uaauccagcugau

SEQ ID NO: 1897426 - RNA, 14 nt, Human
uaaucuugcucugc

SEQ ID NO: 1897427 - RNA, 15 nt, Human
uaaucuugcucugcu

SEQ ID NO: 1897428 - RNA, 20 nt, Human
uaaucuugcucugcuugaca

SEQ ID NO: 1897429 - RNA, 22 nt, Human
uaauccaagcaaaugugaauca

SEQ ID NO: 1897430 - RNA, 15 nt, Human
uaauaccucugugug

SEQ ID NO: 1897431 - RNA, 14 nt, Human
uaauaccucugugu

SEQ ID NO: 1897432 - RNA, 13 nt, Human
uaauaccucugug

SEQ ID NO: 1897433 - RNA, 18 nt, Human
uaauaccucugugugcuc

SEQ ID NO: 1897434 - RNA, 18 nt, Human
uaauacuugcuuuggaaa

SEQ ID NO: 1897435 - RNA, 20 nt, Human
aauacaguaucucagggccu

SEQ ID NO: 1897436 - RNA, 23 nt, Human
uaauacaccacuacauucuguua

SEQ ID NO: 1897437 - RNA, 21 nt, Human
uaauacaccacuacauucugu

SEQ ID NO: 1897438 - RNA, 22 nt, Human
uaauacaccacuacauucuguu

SEQ ID NO: 1897439 - RNA, 18 nt, Human
uagcaugucgucaaagcu

SEQ ID NO: 1897440 - RNA, 21 nt, Human
uagcaugucgucaaagcugaa

SEQ ID NO: 1897441 - RNA, 22 nt, Human
uagauuuuagacccuauugcug

SEQ ID NO: 1897442 - RNA, 16 nt, Human
uagcacagacccugcc

SEQ ID NO: 1897443 - RNA, 17 nt, Human
uagcacagacccugccc

SEQ ID NO: 1897444 - RNA, 18 nt, Human
uagcacagacccugcccu

SEQ ID NO: 1897445 - RNA, 19 nt, Human
uagcacagacccugcccug

SEQ ID NO: 1897446 - RNA, 12 nt, Human
uagagcuuucuu

SEQ ID NO: 1897447 - RNA, 23 nt, Human
uagagcuuucuuucacaaaaaag

SEQ ID NO: 1897448 - RNA, 16 nt, Human
acaaaaagcauaaaaa

SEQ ID NO: 1897449 - RNA, 20 nt, Human
acaagaagccacagaccuag

SEQ ID NO: 1897450 - RNA, 22 nt, Human
acaagaaaugaaagcagggacu

SEQ ID NO: 1897451 - RNA, 12 nt, Human
acaacacucaca

SEQ ID NO: 1897452 - RNA, 14 nt, Human
acaacacaaagaga

SEQ ID NO: 1897453 - RNA, 18 nt, Human
acaaauucugucucugga

SEQ ID NO: 1897454 - RNA, 15 nt, Human
acaacaacaaaauga

SEQ ID NO: 1897455 - RNA, 19 nt, Human
uagcauuuguguugaagag

SEQ ID NO: 1897456 - RNA, 22 nt, Human
acaaauuagaaaauguuauuua

SEQ ID NO: 1897457 - RNA, 15 nt, Human
acaagccagggugug

SEQ ID NO: 1897458 - RNA, 11 nt, Human
acaagccaggg

SEQ ID NO: 1897459 - RNA, 15 nt, Human
acaagccagcuggag

SEQ ID NO: 1897460 - RNA, 13 nt, Human
acaagccagcugg

SEQ ID NO: 1897461 - RNA, 12 nt, Human
acaagccacccc

SEQ ID NO: 1897462 - RNA, 14 nt, Human
acaagcuaaaauua

SEQ ID NO: 1897463 - RNA, 13 nt, Human
acaagcugcaccc

SEQ ID NO: 1897464 - RNA, 21 nt, Human
acaagcgugagccacugcacc

SEQ ID NO: 1897465 - RNA, 20 nt, Human
acaagcgugagccacugcac

SEQ ID NO: 1897466 - RNA, 16 nt, Human
acaagcaaacccagac

SEQ ID NO: 1897467 - RNA, 19 nt, Human
acaagcaaacccagacggc

SEQ ID NO: 1897468 - RNA, 18 nt, Human
acaagcacuaaacaaaga

SEQ ID NO: 1897469 - RNA, 17 nt, Human
acaagagcccaggccuc

SEQ ID NO: 1897470 - RNA, 18 nt, Human
acaagagcccaggccucc

SEQ ID NO: 1897471 - RNA, 15 nt, Human
acaagagcacuacau

SEQ ID NO: 1897472 - RNA, 21 nt, Human
acaagagcacuacauucauuu

SEQ ID NO: 1897473 - RNA, 17 nt, Human
aauuuuuuugagacaga

SEQ ID NO: 1897474 - RNA, 13 nt, Human
acaaaaacauggc

SEQ ID NO: 1897475 - RNA, 23 nt, Human
acaaaaaaaccucuuaauauucu

SEQ ID NO: 1897476 - RNA, 19 nt, Human
aauuuuuuucaauauuuau

SEQ ID NO: 1897477 - RNA, 15 nt, Human
aauuuuuuucaauau

SEQ ID NO: 1897478 - RNA, 12 nt, Human
uagacagucccu

SEQ ID NO: 1897479 - RNA, 14 nt, Human
uagacagucccugc

SEQ ID NO: 1897480 - RNA, 17 nt, Human
aauuuuuauuaaauuau

SEQ ID NO: 1897481 - RNA, 18 nt, Human
aauuuuuauuaaauuaug

SEQ ID NO: 1897482 - RNA, 15 nt, Human
uagaagucacacagu

SEQ ID NO: 1897483 - RNA, 18 nt, Human
uagaagauggcacuuaua

SEQ ID NO: 1897484 - RNA, 22 nt, Human
uagaacugaauuuugucuuuau

SEQ ID NO: 1897485 - RNA, 19 nt, Human
uagaacuuuaagcaacaag

SEQ ID NO: 1897486 - RNA, 17 nt, Human
uagaacugaauuuuguc

SEQ ID NO: 1897487 - RNA, 13 nt, Human
uagaacugaauuu

SEQ ID NO: 1897488 - RNA, 15 nt, Human
uagaacucccuuuca

SEQ ID NO: 1897489 - RNA, 19 nt, Human
uagaacucaguuuuaacua

SEQ ID NO: 1897490 - RNA, 22 nt, Human
uagaacucaguuuuaacuagaa

SEQ ID NO: 1897491 - RNA, 16 nt, Human
uagacaauuuauuaug

SEQ ID NO: 1897492 - RNA, 22 nt, Human
uagacaaguccagccuggcaag

SEQ ID NO: 1897493 - RNA, 23 nt, Human
uagaauuuauucaauuccucugg

SEQ ID NO: 1897494 - RNA, 13 nt, Human
uagaauugcauug

SEQ ID NO: 1897495 - RNA, 14 nt, Human
uagaauugcauuga

SEQ ID NO: 1897496 - RNA, 15 nt, Human
uagaauugcauugac

SEQ ID NO: 1897497 - RNA, 15 nt, Human
uagaauuuauucaau

SEQ ID NO: 1897498 - RNA, 20 nt, Human
uagaauuuauucaauuccuc

SEQ ID NO: 1897499 - RNA, 22 nt, Human
uagaauuuauucaauuccucug

SEQ ID NO: 1897500 - RNA, 20 nt, Human
uagaagucuuagauguauau

SEQ ID NO: 1897501 - RNA, 18 nt, Human
uagaagucuuagauguau

SEQ ID NO: 1897502 - RNA, 19 nt, Human
uagaagucuuagauguaua

SEQ ID NO: 1897503 - RNA, 16 nt, Human
uagaagucacacagua

SEQ ID NO: 1897504 - RNA, 23 nt, Human
uagaagucacauuccugaacagg

SEQ ID NO: 1897505 - RNA, 16 nt, Human
uagaagucuuagaugu

SEQ ID NO: 1897506 - RNA, 17 nt, Human
uagaagucuuagaugua

SEQ ID NO: 1897507 - RNA, 22 nt, Human
uacucaauguuacuaucugcuu

SEQ ID NO: 1897508 - RNA, 20 nt, Human
uacucuuauaucuauauuuu

SEQ ID NO: 1897509 - RNA, 18 nt, Human
uacucuuaggaagagaaa

SEQ ID NO: 1897510 - RNA, 22 nt, Human
uacucuuauaucuauauuuuac

SEQ ID NO: 1897511 - RNA, 21 nt, Human
uacucuuaggaagagaaacca

SEQ ID NO: 1897512 - RNA, 14 nt, Human
uacgucugacaggc

SEQ ID NO: 1897513 - RNA, 13 nt, Human
uacguaugagacg

SEQ ID NO: 1897514 - RNA, 14 nt, Human
uacguugugcauuu

SEQ ID NO: 1897515 - RNA, 13 nt, Human
uacguugugcauu

SEQ ID NO: 1897516 - RNA, 19 nt, Human
uacuagguaacuucauauu

SEQ ID NO: 1897517 - RNA, 15 nt, Human
uacuagguaacuuca

SEQ ID NO: 1897518 - RNA, 16 nt, Human
uacuagguaacuucau

SEQ ID NO: 1897519 - RNA, 16 nt, Human
uacuauaauuuaccug

SEQ ID NO: 1897520 - RNA, 16 nt, Human
uacuauguaucaauga

SEQ ID NO: 1897521 - RNA, 19 nt, Human
uacucaaguagcauuuacu

SEQ ID NO: 1897522 - RNA, 21 nt, Human
uacucaaguagcauuuacugu

SEQ ID NO: 1897523 - RNA, 15 nt, Human
uacucaagcccgcgg

SEQ ID NO: 1897524 - RNA, 22 nt, Human
uacuauucaguggcgagaaaua

SEQ ID NO: 1897525 - RNA, 21 nt, Human
aauucuugccaaauauaaaua

SEQ ID NO: 1897526 - RNA, 20 nt, Human
aauucuugcaaaguaucccu

SEQ ID NO: 1897527 - RNA, 14 nt, Human
aauucuugcaaagu

SEQ ID NO: 1897528 - RNA, 22 nt, Human
aauucuucuccacuuucuagcc

SEQ ID NO: 1897529 - RNA, 17 nt, Human
aauucuuacaaacaugu

SEQ ID NO: 1897530 - RNA, 15 nt, Human
aauucuuauucuuuc

SEQ ID NO: 1897531 - RNA, 19 nt, Human
aauucuuauuuuuuaaaaa

SEQ ID NO: 1897532 - RNA, 23 nt, Human
aauucuuauuuuuuaaaaagcua

SEQ ID NO: 1897533 - RNA, 21 nt, Human
uacccugcgcccaguccuucc

SEQ ID NO: 1897534 - RNA, 23 nt, Human
uacccugcgcccaguccuuccac

SEQ ID NO: 1897535 - RNA, 15 nt, Human
uacguacacauuuua

SEQ ID NO: 1897536 - RNA, 19 nt, Human
aauugacccacaagaaaug

SEQ ID NO: 1897537 - RNA, 16 nt, Human
aauugacccacaagaa

SEQ ID NO: 1897538 - RNA, 13 nt, Human
aauugacccacaa

SEQ ID NO: 1897539 - RNA, 17 nt, Human
aauucuugcauauuuug

SEQ ID NO: 1897540 - RNA, 13 nt, Human
aauucuugcauau

SEQ ID NO: 1897541 - RNA, 14 nt, Human
aauucuuucauuuu

SEQ ID NO: 1897542 - RNA, 22 nt, Human
aauucuuugaccuguugggagu

SEQ ID NO: 1897543 - RNA, 18 nt, Human
aauucuuugaccuguugg

SEQ ID NO: 1897544 - RNA, 22 nt, Human
aauuguuuggggaugagaaagg

SEQ ID NO: 1897545 - RNA, 12 nt, Human
aauuguuucaca

SEQ ID NO: 1897546 - RNA, 21 nt, Human
aauugugugugcucugcuuca

SEQ ID NO: 1897547 - RNA, 23 nt, Human
aauugugugugaugugaagccaa

SEQ ID NO: 1897548 - RNA, 13 nt, Human
aauuuaaaagucu

SEQ ID NO: 1897549 - RNA, 20 nt, Human
aauuguuuguaagugaagug

SEQ ID NO: 1897550 - RNA, 16 nt, Human
aauuguuugucuuuaa

SEQ ID NO: 1897551 - RNA, 12 nt, Human
aauuuaaagcaa

SEQ ID NO: 1897552 - RNA, 20 nt, Human
aauuuaaagaaguaugggaa

SEQ ID NO: 1897553 - RNA, 15 nt, Human
aauuuaaagccacaa

SEQ ID NO: 1897554 - RNA, 19 nt, Human
aauuuacauacucugcuua

SEQ ID NO: 1897555 - RNA, 16 nt, Human
aauuuaaauagcuuuu

SEQ ID NO: 1897556 - RNA, 15 nt, Human
aauuuaaauagcuuu

SEQ ID NO: 1897557 - RNA, 16 nt, Human
aauuucucuacugucu

SEQ ID NO: 1897558 - RNA, 20 nt, Human
aauuugaaacacuuugcaua

SEQ ID NO: 1897559 - RNA, 17 nt, Human
aauuugagauacaaaca

SEQ ID NO: 1897560 - RNA, 18 nt, Human
aauuugauaugugaacag

SEQ ID NO: 1897561 - RNA, 16 nt, Human
aauuugauaugugaac

SEQ ID NO: 1897562 - RNA, 15 nt, Human
aauuugauaugugaa

SEQ ID NO: 1897563 - RNA, 21 nt, Human
aauuugauaguauugugcaua

SEQ ID NO: 1897564 - RNA, 19 nt, Human
aauuugauaugugaacagu

SEQ ID NO: 1897565 - RNA, 21 nt, Human
aauuucuaaaucuccaaaaua

SEQ ID NO: 1897566 - RNA, 13 nt, Human
aauuucuaaaucu

SEQ ID NO: 1897567 - RNA, 14 nt, Human
aauuuaugugaugg

SEQ ID NO: 1897568 - RNA, 17 nt, Human
aauuuagaaauauaauu

SEQ ID NO: 1897569 - RNA, 15 nt, Human
aauuuaccugaaguc

SEQ ID NO: 1897570 - RNA, 18 nt, Human
aauuuagguuuuuauuag

SEQ ID NO: 1897571 - RNA, 20 nt, Human
aauuuagguuuuuauuagua

SEQ ID NO: 1897572 - RNA, 20 nt, Human
aauuuaucuugucucugggc

SEQ ID NO: 1897573 - RNA, 18 nt, Human
aauuuaucuugucucugg

SEQ ID NO: 1897574 - RNA, 19 nt, Human
aauuuaucuugucucuggg

SEQ ID NO: 1897575 - RNA, 12 nt, Human
uauuaaagacag

SEQ ID NO: 1897576 - RNA, 23 nt, Human
uauuaaaaaucucaaauuucuaa

SEQ ID NO: 1897577 - RNA, 16 nt, Human
uauuaaauacaaaacu

SEQ ID NO: 1897578 - RNA, 18 nt, Human
uauuaaauacaaaacuuc

SEQ ID NO: 1897579 - RNA, 19 nt, Human
uauuaaauacaaaacuucc

SEQ ID NO: 1897580 - RNA, 23 nt, Human
uauuacaguggggaaugaagaua

SEQ ID NO: 1897581 - RNA, 19 nt, Human
uauguuuuaagaggcaggg

SEQ ID NO: 1897582 - RNA, 17 nt, Human
uauguuuuaagaggcag

SEQ ID NO: 1897583 - RNA, 23 nt, Human
uauguguguguguuguguguggg

SEQ ID NO: 1897584 - RNA, 22 nt, Human
uauuaaaaaucucaaauuucua

SEQ ID NO: 1897585 - RNA, 20 nt, Human
uauuaaaaaucucaaauuuc

SEQ ID NO: 1897586 - RNA, 18 nt, Human
uauuaaaaaucucaaauu

SEQ ID NO: 1897587 - RNA, 16 nt, Human
uauuaaaaaucucaaa

SEQ ID NO: 1897588 - RNA, 22 nt, Human
uauguguguguguugugugugg

SEQ ID NO: 1897589 - RNA, 14 nt, Human
uauguguguguguu

SEQ ID NO: 1897590 - RNA, 11 nt, Human
uaugugugugu

SEQ ID NO: 1897591 - RNA, 22 nt, Human
acagcugcuccuagagggaggg

SEQ ID NO: 1897592 - RNA, 23 nt, Human
acagcugcuccuagagggagggg

SEQ ID NO: 1897593 - RNA, 15 nt, Human
uauucagcucaugga

SEQ ID NO: 1897594 - RNA, 22 nt, Human
uauucaauaaaaaaaagaaaug

SEQ ID NO: 1897595 - RNA, 23 nt, Human
uauucaauaaaaaaaagaaauga

SEQ ID NO: 1897596 - RNA, 20 nt, Human
uauucaauaaaaaaaagaaa

SEQ ID NO: 1897597 - RNA, 18 nt, Human
uauucaggaagcucaggg

SEQ ID NO: 1897598 - RNA, 22 nt, Human
uauucaggaagcucagggccug

SEQ ID NO: 1897599 - RNA, 23 nt, Human
uauucauagcagcuuauucacaa

SEQ ID NO: 1897600 - RNA, 14 nt, Human
uauucauaauuauu

SEQ ID NO: 1897601 - RNA, 12 nt, Human
uauuagagaaga

SEQ ID NO: 1897602 - RNA, 14 nt, Human
uauuaccucugaua

SEQ ID NO: 1897603 - RNA, 19 nt, Human
uauuaccucugauaccuca

SEQ ID NO: 1897604 - RNA, 16 nt, Human
uauuaccacagacaua

SEQ ID NO: 1897605 - RNA, 21 nt, Human
uauuacccccuccuucagaca

SEQ ID NO: 1897606 - RNA, 22 nt, Human
uauuacccccuccuucagacac

SEQ ID NO: 1897607 - RNA, 11 nt, Human
uauuaccucug

SEQ ID NO: 1897608 - RNA, 13 nt, Human
uauuaccucugau

SEQ ID NO: 1897609 - RNA, 15 nt, Human
uauuaguuuugcaua

SEQ ID NO: 1897610 - RNA, 15 nt, Human
acagggcaccugcca

SEQ ID NO: 1897611 - RNA, 13 nt, Human
acagggcacaggc

SEQ ID NO: 1897612 - RNA, 17 nt, Human
acagggcaccugccacc

SEQ ID NO: 1897613 - RNA, 22 nt, Human
acagggcacaccgggcacucag

SEQ ID NO: 1897614 - RNA, 22 nt, Human
acagguuuuccugaagaauuga

SEQ ID NO: 1897615 - RNA, 16 nt, Human
acagggcacaggccau

SEQ ID NO: 1897616 - RNA, 17 nt, Human
acaggcugggcuucagu

SEQ ID NO: 1897617 - RNA, 14 nt, Human
acaggcugggcuuc

SEQ ID NO: 1897618 - RNA, 21 nt, Human
acaggcugggcuucaguggca

SEQ ID NO: 1897619 - RNA, 21 nt, Human
acaguauggcagcuuuccuca

SEQ ID NO: 1897620 - RNA, 23 nt, Human
acaguaucacugucuuuccuaga

SEQ ID NO: 1897621 - RNA, 21 nt, Human
acaguaucacugucuuuccua

SEQ ID NO: 1897622 - RNA, 19 nt, Human
acaguauuacuucugcuac

SEQ ID NO: 1897623 - RNA, 17 nt, Human
acaguauuacuucugcu

SEQ ID NO: 1897624 - RNA, 16 nt, Human
acaguauuacuucugc

SEQ ID NO: 1897625 - RNA, 15 nt, Human
acaguauuacuucug

SEQ ID NO: 1897626 - RNA, 13 nt, Human
acagucccugcca

SEQ ID NO: 1897627 - RNA, 17 nt, Human
acaguccucccaucuca

SEQ ID NO: 1897628 - RNA, 18 nt, Human
acaguccuuaccagcaga

SEQ ID NO: 1897629 - RNA, 20 nt, Human
acaguccuuaccagcagagc

SEQ ID NO: 1897630 - RNA, 15 nt, Human
acagucccugccaau

SEQ ID NO: 1897631 - RNA, 13 nt, Human
acaguccucccau

SEQ ID NO: 1897632 - RNA, 14 nt, Human
acaguccucccauc

SEQ ID NO: 1897633 - RNA, 15 nt, Human
acaguccucccaucu

SEQ ID NO: 1897634 - RNA, 20 nt, Human
acagugaaagaaaauaacaa

SEQ ID NO: 1897635 - RNA, 22 nt, Human
acagucuuguauuaaguuguua

SEQ ID NO: 1897636 - RNA, 18 nt, Human
acagucuuguauuaaguu

SEQ ID NO: 1897637 - RNA, 15 nt, Human
acagucuuguauuaa

SEQ ID NO: 1897638 - RNA, 14 nt, Human
acagucuuguauua

SEQ ID NO: 1897639 - RNA, 21 nt, Human
acaguccuuaccagcagagca

SEQ ID NO: 1897640 - RNA, 22 nt, Human
acaguccuuaccagcagagcac

SEQ ID NO: 1897641 - RNA, 23 nt, Human
acagucuauuugagacuccucag

SEQ ID NO: 1897642 - RNA, 15 nt, Human
acaguuaagagaaau

SEQ ID NO: 1897643 - RNA, 11 nt, Human
acaguguuccg

SEQ ID NO: 1897644 - RNA, 18 nt, Human
acagugagacucugucuc

SEQ ID NO: 1897645 - RNA, 14 nt, Human
acagugagacucug

SEQ ID NO: 1897646 - RNA, 19 nt, Human
acagugugaauaaagugcu

SEQ ID NO: 1897647 - RNA, 20 nt, Human
uauuuaagauaauuauaaua

SEQ ID NO: 1897648 - RNA, 17 nt, Human
uauuuaagauaauuaua

SEQ ID NO: 1897649 - RNA, 20 nt, Human
uauuuaaguaacuuuaaauu

SEQ ID NO: 1897650 - RNA, 15 nt, Human
uauuuaaugaaagac

SEQ ID NO: 1897651 - RNA, 21 nt, Human
uauuuaaugaaagacuguaca

SEQ ID NO: 1897652 - RNA, 14 nt, Human
uauuuaauagguuu

SEQ ID NO: 1897653 - RNA, 14 nt, Human
uauugucuuuuugu

SEQ ID NO: 1897654 - RNA, 18 nt, Human
uauuuaaccucuaaauuc

SEQ ID NO: 1897655 - RNA, 17 nt, Human
uauuuaaccucuaaauu

SEQ ID NO: 1897656 - RNA, 15 nt, Human
uauuuaacagcugaa

SEQ ID NO: 1897657 - RNA, 21 nt, Human
uauuuaacagcugaauuaucu

SEQ ID NO: 1897658 - RNA, 23 nt, Human
uauuuaacagcugaauuaucuau

SEQ ID NO: 1897659 - RNA, 13 nt, Human
uauugucaaagug

SEQ ID NO: 1897660 - RNA, 17 nt, Human
uauugucaaagugguga

SEQ ID NO: 1897661 - RNA, 21 nt, Human
uauuguagcauccuggaauau

SEQ ID NO: 1897662 - RNA, 20 nt, Human
uauuguagcauccuggaaua

SEQ ID NO: 1897663 - RNA, 18 nt, Human
uauuguagcauccuggaa

SEQ ID NO: 1897664 - RNA, 17 nt, Human
uauuguagcauccugga

SEQ ID NO: 1897665 - RNA, 17 nt, Human
uauuguacaguuuuuau

SEQ ID NO: 1897666 - RNA, 11 nt, Human
uauuguaccuc

SEQ ID NO: 1897667 - RNA, 13 nt, Human
uauuguaccucuc

SEQ ID NO: 1897668 - RNA, 14 nt, Human
uauuguaccucucu

SEQ ID NO: 1897669 - RNA, 15 nt, Human
uauuguacaguuuuu

SEQ ID NO: 1897670 - RNA, 14 nt, Human
uauuguacaguuuu

SEQ ID NO: 1897671 - RNA, 13 nt, Human
uauuguacaguuu

SEQ ID NO: 1897672 - RNA, 12 nt, Human
uauuguacaguu

SEQ ID NO: 1897673 - RNA, 11 nt, Human
uauuguacagu

SEQ ID NO: 1897674 - RNA, 18 nt, Human
uauuuacuucuuauacau

SEQ ID NO: 1897675 - RNA, 23 nt, Human
uauuuacugagcuucucugugaa

SEQ ID NO: 1897676 - RNA, 21 nt, Human
uauuuacugagcuucucugug

SEQ ID NO: 1897677 - RNA, 22 nt, Human
uauuuacugagcuucucuguga

SEQ ID NO: 1897678 - RNA, 14 nt, Human
uauuuacgcuuuga

SEQ ID NO: 1897679 - RNA, 15 nt, Human
uauuuacgcuuugau

SEQ ID NO: 1897680 - RNA, 19 nt, Human
uauuuacgcuuugauucau

SEQ ID NO: 1897681 - RNA, 22 nt, Human
uauuuacgcuuugauucauagu

SEQ ID NO: 1897682 - RNA, 14 nt, Human
uauuuacugagcuu

SEQ ID NO: 1897683 - RNA, 16 nt, Human
uauuuacugagcuucu

SEQ ID NO: 1897684 - RNA, 19 nt, Human
uauuuacugagcuucucug

SEQ ID NO: 1897685 - RNA, 23 nt, Human
uauuuaauuuuuuugagacagag

SEQ ID NO: 1897686 - RNA, 14 nt, Human
uauuuaauucaugu

SEQ ID NO: 1897687 - RNA, 21 nt, Human
uauuuaaugccgauauacucu

SEQ ID NO: 1897688 - RNA, 19 nt, Human
uauuuaguguucauaaaua

SEQ ID NO: 1897689 - RNA, 22 nt, Human
uauuuagcuccaaaccuucaca

SEQ ID NO: 1897690 - RNA, 13 nt, Human
uauuuauuuaaau

SEQ ID NO: 1897691 - RNA, 13 nt, Human
uauuuauuuacug

SEQ ID NO: 1897692 - RNA, 17 nt, Human
uauuuauuuacugagcu

SEQ ID NO: 1897693 - RNA, 14 nt, Human
uauuuauuuaaauu

SEQ ID NO: 1897694 - RNA, 11 nt, Human
uauuuauuuac

SEQ ID NO: 1897695 - RNA, 22 nt, Human
uauuucaauuuccaagagcuga

SEQ ID NO: 1897696 - RNA, 14 nt, Human
uauucuucauaaca

SEQ ID NO: 1897697 - RNA, 15 nt, Human
uauucuuauuuaaug

SEQ ID NO: 1897698 - RNA, 16 nt, Human
uauucuguuggccagu

SEQ ID NO: 1897699 - RNA, 14 nt, Human
uauucuuauucaaa

SEQ ID NO: 1897700 - RNA, 17 nt, Human
uauucuuauucaaagaa

SEQ ID NO: 1897701 - RNA, 24 nt, Human
uauucucuccuguaccucuugagc

SEQ ID NO: 1897702 - RNA, 20 nt, Human
uauucucuccuguaccucuu

SEQ ID NO: 1897703 - RNA, 19 nt, Human
acaguucuuugggccagac

SEQ ID NO: 1897704 - RNA, 20 nt, Human
acaguucuuugggccagaca

SEQ ID NO: 1897705 - RNA, 17 nt, Human
acaguucucuccuucuu

SEQ ID NO: 1897706 - RNA, 17 nt, Human
acaguucuuugggccag

SEQ ID NO: 1897707 - RNA, 18 nt, Human
acaguucuuugggccaga

SEQ ID NO: 1897708 - RNA, 15 nt, Human
acaguucauauguac

SEQ ID NO: 1897709 - RNA, 20 nt, Human
acaguucaauucucauuugu

SEQ ID NO: 1897710 - RNA, 20 nt, Human
acaguuacucagaauucucu

SEQ ID NO: 1897711 - RNA, 13 nt, Human
acaguuacucaga

SEQ ID NO: 1897712 - RNA, 22 nt, Human
acaguucggugagcuacaaaug

SEQ ID NO: 1897713 - RNA, 19 nt, Human
acaguucggugagcuacaa

SEQ ID NO: 1897714 - RNA, 23 nt, Human
acaguucggugagcuacaaaugc

SEQ ID NO: 1897715 - RNA, 16 nt, Human
acaguucucuccuucu

SEQ ID NO: 1897716 - RNA, 15 nt, Human
uauuguaaaacaggu

SEQ ID NO: 1897717 - RNA, 17 nt, Human
uauuggguuccauucuc

SEQ ID NO: 1897718 - RNA, 14 nt, Human
uauugacuuugucu

SEQ ID NO: 1897719 - RNA, 14 nt, Human
uauugagucaaaug

SEQ ID NO: 1897720 - RNA, 22 nt, Human
uauucuuucgaaagaagaaaau

SEQ ID NO: 1897721 - RNA, 16 nt, Human
uauugaaucuauuuaa

SEQ ID NO: 1897722 - RNA, 17 nt, Human
uauugaaucuauuuaag

SEQ ID NO: 1897723 - RNA, 11 nt, Human
uauugaaucua

SEQ ID NO: 1897724 - RNA, 22 nt, Human
uauugaauauaauauauuugug

SEQ ID NO: 1897725 - RNA, 20 nt, Human
uauugaauauaauauauuug

SEQ ID NO: 1897726 - RNA, 21 nt, Human
uauugaauauaauauauuugu

SEQ ID NO: 1897727 - RNA, 23 nt, Human
uauugacacagaaaauguugaga

SEQ ID NO: 1897728 - RNA, 13 nt, Human
uauugacacagaa

SEQ ID NO: 1897729 - RNA, 16 nt, Human
uauugacacagaaaau

SEQ ID NO: 1897730 - RNA, 18 nt, Human
uauugacacagaaaaugu

SEQ ID NO: 1897731 - RNA, 20 nt, Human
uauugacacagaaaauguug

SEQ ID NO: 1897732 - RNA, 17 nt, Human
acacccagcccccacau

SEQ ID NO: 1897733 - RNA, 19 nt, Human
acacccugugauggggccc

SEQ ID NO: 1897734 - RNA, 19 nt, Human
acaccuaaauaaccaaucu

SEQ ID NO: 1897735 - RNA, 12 nt, Human
acacccagcccc

SEQ ID NO: 1897736 - RNA, 11 nt, Human
acacccuguga

SEQ ID NO: 1897737 - RNA, 12 nt, Human
acacccugugau

SEQ ID NO: 1897738 - RNA, 18 nt, Human
acacccugugauggggcc

SEQ ID NO: 1897739 - RNA, 21 nt, Human
acacccagcccacuucugcca

SEQ ID NO: 1897740 - RNA, 20 nt, Human
acacccagcccacuucugcc

SEQ ID NO: 1897741 - RNA, 19 nt, Human
acacccagcccacuucugc

SEQ ID NO: 1897742 - RNA, 21 nt, Human
acaccaggcuugccugcaggc

SEQ ID NO: 1897743 - RNA, 21 nt, Human
acacaugcaaggucauuuuuu

SEQ ID NO: 1897744 - RNA, 12 nt, Human
uauaaaagccug

SEQ ID NO: 1897745 - RNA, 14 nt, Human
uauaaaagccuguu

SEQ ID NO: 1897746 - RNA, 17 nt, Human
uauaaaagccuguuuaa

SEQ ID NO: 1897747 - RNA, 18 nt, Human
acacaugcaaggucauuu

SEQ ID NO: 1897748 - RNA, 16 nt, Human
acacaucgcacugugg

SEQ ID NO: 1897749 - RNA, 20 nt, Human
acacaugcaaggucauuuuu

SEQ ID NO: 1897750 - RNA, 19 nt, Human
acacaugcaaggucauuuu

SEQ ID NO: 1897751 - RNA, 21 nt, Human
uagucaggugccucaagagaa

SEQ ID NO: 1897752 - RNA, 19 nt, Human
acaagcugcacccucaggc

SEQ ID NO: 1897753 - RNA, 21 nt, Human
acaagcugcacccucaggcag

SEQ ID NO: 1897754 - RNA, 22 nt, Human
acaagcugcacccucaggcagg

SEQ ID NO: 1897755 - RNA, 23 nt, Human
acaagcugcacccucaggcaggu

SEQ ID NO: 1897756 - RNA, 19 nt, Human
uagucagaauuagcugcuu

SEQ ID NO: 1897757 - RNA, 21 nt, Human
uagucucuuguauuaaacucu

SEQ ID NO: 1897758 - RNA, 20 nt, Human
uaguuccucauuagcauuuu

SEQ ID NO: 1897759 - RNA, 20 nt, Human
uauagccuaggugacagagu

SEQ ID NO: 1897760 - RNA, 19 nt, Human
uauaggaauugacccacaa

SEQ ID NO: 1897761 - RNA, 14 nt, Human
uauaggaauugacc

SEQ ID NO: 1897762 - RNA, 13 nt, Human
uauaggaauugac

SEQ ID NO: 1897763 - RNA, 18 nt, Human
uauagguuuuaaagaccu

SEQ ID NO: 1897764 - RNA, 19 nt, Human
acacucauugaccugaggc

SEQ ID NO: 1897765 - RNA, 21 nt, Human
acacucauugaccugaggccc

SEQ ID NO: 1897766 - RNA, 23 nt, Human
acacucauugaccugaggcccuu

SEQ ID NO: 1897767 - RNA, 13 nt, Human
uauauaucaaaua

SEQ ID NO: 1897768 - RNA, 23 nt, Human
uauauauuuuuuucugaaauuuc

SEQ ID NO: 1897769 - RNA, 20 nt, Human
uauauauuuuuuucugaaau

SEQ ID NO: 1897770 - RNA, 22 nt, Human
uauauauuuuuuucugaaauuu

SEQ ID NO: 1897771 - RNA, 21 nt, Human
uauauauuuuuuucugaaauu

SEQ ID NO: 1897772 - RNA, 14 nt, Human
uauacauuugauaa

SEQ ID NO: 1897773 - RNA, 14 nt, Human
uauacauaaacaag

SEQ ID NO: 1897774 - RNA, 13 nt, Human
uauacauaaacaa

SEQ ID NO: 1897775 - RNA, 21 nt, Human
uauacacuuacacuuuaugca

SEQ ID NO: 1897776 - RNA, 12 nt, Human
uauacacacagc

SEQ ID NO: 1897777 - RNA, 20 nt, Human
uauaaccaguguuguggauu

SEQ ID NO: 1897778 - RNA, 14 nt, Human
uauauuuacaaaug

SEQ ID NO: 1897779 - RNA, 15 nt, Human
uauauuuacaaaugg

SEQ ID NO: 1897780 - RNA, 21 nt, Human
uaucaaguauuauaccuuuuu

SEQ ID NO: 1897781 - RNA, 18 nt, Human
uaucaaguauuauaccuu

SEQ ID NO: 1897782 - RNA, 18 nt, Human
uaucacccagaagaaaau

SEQ ID NO: 1897783 - RNA, 23 nt, Human
acagacacaggcccggcuccagg

SEQ ID NO: 1897784 - RNA, 11 nt, Human
acacuccuuca

SEQ ID NO: 1897785 - RNA, 15 nt, Human
acacuccccgaaguc

SEQ ID NO: 1897786 - RNA, 21 nt, Human
acagacacucccacuuggcau

SEQ ID NO: 1897787 - RNA, 17 nt, Human
acagacccugcccugug

SEQ ID NO: 1897788 - RNA, 16 nt, Human
acagacccugcccugu

SEQ ID NO: 1897789 - RNA, 18 nt, Human
acagacccugcccugugg

SEQ ID NO: 1897790 - RNA, 20 nt, Human
acagacccugcccugugggc

SEQ ID NO: 1897791 - RNA, 20 nt, Human
acagacucaaaugcucagac

SEQ ID NO: 1897792 - RNA, 22 nt, Human
acagacucgauucauauugaau

SEQ ID NO: 1897793 - RNA, 20 nt, Human
acagacucacaaccugaacc

SEQ ID NO: 1897794 - RNA, 22 nt, Human
acagacucacaaccugaaccua

SEQ ID NO: 1897795 - RNA, 14 nt, Human
acagacuggaagca

SEQ ID NO: 1897796 - RNA, 19 nt, Human
acagacugaccuugaugag

SEQ ID NO: 1897797 - RNA, 16 nt, Human
uauauugauccagaaa

SEQ ID NO: 1897798 - RNA, 18 nt, Human
uaucucccccagccccau

SEQ ID NO: 1897799 - RNA, 17 nt, Human
uaucucccccagcccca

SEQ ID NO: 1897800 - RNA, 19 nt, Human
uaucuagauacuguaucau

SEQ ID NO: 1897801 - RNA, 16 nt, Human
uaucuagauacuguau

SEQ ID NO: 1897802 - RNA, 15 nt, Human
uaucuagauacugua

SEQ ID NO: 1897803 - RNA, 21 nt, Human
uaucuacucuccucaucucua

SEQ ID NO: 1897804 - RNA, 14 nt, Human
uaucuacucuccuc

SEQ ID NO: 1897805 - RNA, 20 nt, Human
uaucuacucuccucaucucu

SEQ ID NO: 1897806 - RNA, 14 nt, Human
uauccauucuuucu

SEQ ID NO: 1897807 - RNA, 16 nt, Human
uauccauucuuucuga

SEQ ID NO: 1897808 - RNA, 10 nt, Human
uaucagaauu

SEQ ID NO: 1897809 - RNA, 22 nt, Human
uauccauauugagucaaauggu

SEQ ID NO: 1897810 - RNA, 21 nt, Human
acagagugagacucugucuca

SEQ ID NO: 1897811 - RNA, 18 nt, Human
acagagcuacacagggga

SEQ ID NO: 1897812 - RNA, 22 nt, Human
acagaguggacuguucccugag

SEQ ID NO: 1897813 - RNA, 16 nt, Human
acagagcuacacaggg

SEQ ID NO: 1897814 - RNA, 20 nt, Human
acagagcccacgcccccacu

SEQ ID NO: 1897815 - RNA, 19 nt, Human
acagacuguugucccugca

SEQ ID NO: 1897816 - RNA, 20 nt, Human
acagacuguugucccugcac

SEQ ID NO: 1897817 - RNA, 16 nt, Human
acagcccagccacgga

SEQ ID NO: 1897818 - RNA, 17 nt, Human
acagcccagccacggac

SEQ ID NO: 1897819 - RNA, 19 nt, Human
acagcccaaagaaggaaaa

SEQ ID NO: 1897820 - RNA, 13 nt, Human
acagcccaccugg

SEQ ID NO: 1897821 - RNA, 15 nt, Human
acagccccacccugg

SEQ ID NO: 1897822 - RNA, 12 nt, Human
acagccccaccc

SEQ ID NO: 1897823 - RNA, 13 nt, Human
acagccccacccu

SEQ ID NO: 1897824 - RNA, 14 nt, Human
acagccccacccug

SEQ ID NO: 1897825 - RNA, 18 nt, Human
acagaguuuucacucuua

SEQ ID NO: 1897826 - RNA, 20 nt, Human
acagaguuuucacucuuauu

SEQ ID NO: 1897827 - RNA, 22 nt, Human
acagcagccuggggcuggccuc

SEQ ID NO: 1897828 - RNA, 14 nt, Human
uaugaucacggcuc

SEQ ID NO: 1897829 - RNA, 23 nt, Human
uaugaucacggcucacugcagcc

SEQ ID NO: 1897830 - RNA, 21 nt, Human
uaugaucacggcucacugcag

SEQ ID NO: 1897831 - RNA, 13 nt, Human
uaugaggcauuug

SEQ ID NO: 1897832 - RNA, 15 nt, Human
uaucuugaauaaugu

SEQ ID NO: 1897833 - RNA, 15 nt, Human
uaucuugaagacuuu

SEQ ID NO: 1897834 - RNA, 19 nt, Human
uaugcucugcauguuacau

SEQ ID NO: 1897835 - RNA, 19 nt, Human
uaugcugaaacagaauacu

SEQ ID NO: 1897836 - RNA, 22 nt, Human
uauggccugugagcuaggaauu

SEQ ID NO: 1897837 - RNA, 14 nt, Human
uauggccuguggau

SEQ ID NO: 1897838 - RNA, 14 nt, Human
uaugcucugcaugu

SEQ ID NO: 1897839 - RNA, 18 nt, Human
uaugcucugcauguuaca

SEQ ID NO: 1897840 - RNA, 18 nt, Human
uaugaugugggucaagga

SEQ ID NO: 1897841 - RNA, 17 nt, Human
acagcuaacauggaagu

SEQ ID NO: 1897842 - RNA, 15 nt, Human
acagcuccaagaauu

SEQ ID NO: 1897843 - RNA, 21 nt, Human
acagcucaggaucucuuagca

SEQ ID NO: 1897844 - RNA, 17 nt, Human
acagcuccacccuggcc

SEQ ID NO: 1897845 - RNA, 14 nt, Human
acagccugugucuu

SEQ ID NO: 1897846 - RNA, 18 nt, Human
acagccugugucuuuaaa

SEQ ID NO: 1897847 - RNA, 23 nt, Human
acagccugugucuuuaaaugcug

SEQ ID NO: 1897848 - RNA, 14 nt, Human
acagcuaacaugga

SEQ ID NO: 1897849 - RNA, 15 nt, Human
acagcuaacauggaa

SEQ ID NO: 1897850 - RNA, 19 nt, Human
uauggggauagaugugugg

SEQ ID NO: 1897851 - RNA, 18 nt, Human
uauggggauagaugugug

SEQ ID NO: 1897852 - RNA, 17 nt, Human
uauggggauagaugugu

SEQ ID NO: 1897853 - RNA, 16 nt, Human
uauggcuuuugugcau

SEQ ID NO: 1897854 - RNA, 19 nt, Human
uccucagaucauccagaag

SEQ ID NO: 1897855 - RNA, 20 nt, Human
uccucagaucuucugugggu

SEQ ID NO: 1897856 - RNA, 19 nt, Human
acucuuauugcccacgcug

SEQ ID NO: 1897857 - RNA, 16 nt, Human
acucuuauugcccacg

SEQ ID NO: 1897858 - RNA, 20 nt, Human
uccucaauuccaacacugau

SEQ ID NO: 1897859 - RNA, 15 nt, Human
uccucacacacagac

SEQ ID NO: 1897860 - RNA, 17 nt, Human
uccucaagaaauaaaag

SEQ ID NO: 1897861 - RNA, 23 nt, Human
uccucaagaaauaaaaggaagcc

SEQ ID NO: 1897862 - RNA, 19 nt, Human
uccucccucccucuuuccc

SEQ ID NO: 1897863 - RNA, 14 nt, Human
uccucccugcaucu

SEQ ID NO: 1897864 - RNA, 17 nt, Human
uccucccucccucuuuc

SEQ ID NO: 1897865 - RNA, 15 nt, Human
uccucccucccucuu

SEQ ID NO: 1897866 - RNA, 12 nt, Human
uccucuccccag

SEQ ID NO: 1897867 - RNA, 22 nt, Human
uccucccugcaucugaccagca

SEQ ID NO: 1897868 - RNA, 22 nt, Human
uccucauacccacccccaccca

SEQ ID NO: 1897869 - RNA, 14 nt, Human
uccucauacccacc

SEQ ID NO: 1897870 - RNA, 18 nt, Human
uccucauacccaccccca

SEQ ID NO: 1897871 - RNA, 11 nt, Human
uccucagccuu

SEQ ID NO: 1897872 - RNA, 23 nt, Human
uccucagguggccaugccucagc

SEQ ID NO: 1897873 - RNA, 16 nt, Human
uccucauaaaaagcaa

SEQ ID NO: 1897874 - RNA, 23 nt, Human
uccucauaaaaagcaaaacaaaa

SEQ ID NO: 1897875 - RNA, 22 nt, Human
acucugcacaugucuuguacau

SEQ ID NO: 1897876 - RNA, 21 nt, Human
acucugcacaugucuuguaca

SEQ ID NO: 1897877 - RNA, 19 nt, Human
acucugcacaugucuugua

SEQ ID NO: 1897878 - RNA, 18 nt, Human
acucugcacaugucuugu

SEQ ID NO: 1897879 - RNA, 16 nt, Human
acucugcauucuagua

SEQ ID NO: 1897880 - RNA, 23 nt, Human
acucuuauaucuauauuuuacau

SEQ ID NO: 1897881 - RNA, 21 nt, Human
acucuggagguuuguuuagaa

SEQ ID NO: 1897882 - RNA, 17 nt, Human
acucugcacaugucuug

SEQ ID NO: 1897883 - RNA, 13 nt, Human
acucugcacaugu

SEQ ID NO: 1897884 - RNA, 11 nt, Human
acucugcacau

SEQ ID NO: 1897885 - RNA, 21 nt, Human
acucuccucugcugcuggcug

SEQ ID NO: 1897886 - RNA, 14 nt, Human
acucucccccaccc

SEQ ID NO: 1897887 - RNA, 18 nt, Human
acucuccucugcugcugg

SEQ ID NO: 1897888 - RNA, 19 nt, Human
acucuccucugcugcuggc

SEQ ID NO: 1897889 - RNA, 17 nt, Human
acucuccucugcugcug

SEQ ID NO: 1897890 - RNA, 10 nt, Human
acucuccccc

SEQ ID NO: 1897891 - RNA, 20 nt, Human
acucgcgacaaugcaaacca

SEQ ID NO: 1897892 - RNA, 23 nt, Human
acucgcgacaaugcaaaccauca

SEQ ID NO: 1897893 - RNA, 19 nt, Human
uccuaggcauuugcugaau

SEQ ID NO: 1897894 - RNA, 18 nt, Human
acucgcgacaaugcaaac

SEQ ID NO: 1897895 - RNA, 22 nt, Human
ucccucauccucauacccaccc

SEQ ID NO: 1897896 - RNA, 20 nt, Human
ucccucaccuuggcaccaga

SEQ ID NO: 1897897 - RNA, 21 nt, Human
ucccucagucuggcccuuccu

SEQ ID NO: 1897898 - RNA, 15 nt, Human
ucccucaccuuggca

SEQ ID NO: 1897899 - RNA, 21 nt, Human
ucccucaccuuggcaccagac

SEQ ID NO: 1897900 - RNA, 16 nt, Human
acucaucuagguaaau

SEQ ID NO: 1897901 - RNA, 18 nt, Human
acucaucuagguaaauua

SEQ ID NO: 1897902 - RNA, 15 nt, Human
acucauugcugagcc

SEQ ID NO: 1897903 - RNA, 18 nt, Human
acucauugcugagccucu

SEQ ID NO: 1897904 - RNA, 20 nt, Human
acucauugcugagccucugc

SEQ ID NO: 1897905 - RNA, 21 nt, Human
acucauugcugagccucugcu

SEQ ID NO: 1897906 - RNA, 22 nt, Human
acucauugcugagccucugcuc

SEQ ID NO: 1897907 - RNA, 23 nt, Human
acucauugcugagccucugcucc

SEQ ID NO: 1897908 - RNA, 21 nt, Human
acucauuuauaaagcuaaaau

SEQ ID NO: 1897909 - RNA, 20 nt, Human
acucauuuaaaguauuuuau

SEQ ID NO: 1897910 - RNA, 18 nt, Human
acuccaacagaagaacug

SEQ ID NO: 1897911 - RNA, 19 nt, Human
acuccaacagaagaacugu

SEQ ID NO: 1897912 - RNA, 20 nt, Human
uccuagcacuuugggaggcc

SEQ ID NO: 1897913 - RNA, 21 nt, Human
uccuagauggcagucacugaa

SEQ ID NO: 1897914 - RNA, 14 nt, Human
uccuaggcauuugc

SEQ ID NO: 1897915 - RNA, 22 nt, Human
uccuagauggcagucacugaau

SEQ ID NO: 1897916 - RNA, 18 nt, Human
uccuagauggcagucacu

SEQ ID NO: 1897917 - RNA, 17 nt, Human
uccuaaaacaccuggua

SEQ ID NO: 1897918 - RNA, 14 nt, Human
uccuagaguagagu

SEQ ID NO: 1897919 - RNA, 18 nt, Human
ucccuuuuaauccuggcu

SEQ ID NO: 1897920 - RNA, 22 nt, Human
ucccuuugacgccaucccagcc

SEQ ID NO: 1897921 - RNA, 23 nt, Human
ucccuuugacgccaucccagccc

SEQ ID NO: 1897922 - RNA, 18 nt, Human
uccgugaaaacggagcug

SEQ ID NO: 1897923 - RNA, 16 nt, Human
ucccuguaggauuuuu

SEQ ID NO: 1897924 - RNA, 17 nt, Human
ucccuguuccccagaga

SEQ ID NO: 1897925 - RNA, 15 nt, Human
ucccuguuccccaga

SEQ ID NO: 1897926 - RNA, 16 nt, Human
ucccuguuccccagag

SEQ ID NO: 1897927 - RNA, 18 nt, Human
ucccuguuccccagagaa

SEQ ID NO: 1897928 - RNA, 22 nt, Human
ucccuuuccaaaugcccagcuu

SEQ ID NO: 1897929 - RNA, 18 nt, Human
ucccuuacgugaguccug

SEQ ID NO: 1897930 - RNA, 22 nt, Human
ucccuuacgugaguccuggcau

SEQ ID NO: 1897931 - RNA, 14 nt, Human
uccccaaagggugu

SEQ ID NO: 1897932 - RNA, 20 nt, Human
uccccaauaauugcagaacu

SEQ ID NO: 1897933 - RNA, 21 nt, Human
uccccaauaauugcagaacua

SEQ ID NO: 1897934 - RNA, 17 nt, Human
ucccauagccaggaaac

SEQ ID NO: 1897935 - RNA, 16 nt, Human
ucccauaugccugggc

SEQ ID NO: 1897936 - RNA, 15 nt, Human
ucccauaugccuggg

SEQ ID NO: 1897937 - RNA, 13 nt, Human
ucccaucucacac

SEQ ID NO: 1897938 - RNA, 14 nt, Human
ucccaucucacaca

SEQ ID NO: 1897939 - RNA, 19 nt, Human
ucccaucucacacaugagc

SEQ ID NO: 1897940 - RNA, 17 nt, Human
ucccaggugcagccaga

SEQ ID NO: 1897941 - RNA, 19 nt, Human
ucccagugccgagaaggaa

SEQ ID NO: 1897942 - RNA, 22 nt, Human
ucccagugccgagaaggaagcc

SEQ ID NO: 1897943 - RNA, 17 nt, Human
acuacaguccucccauc

SEQ ID NO: 1897944 - RNA, 16 nt, Human
acuacaguccucccau

SEQ ID NO: 1897945 - RNA, 20 nt, Human
acuacaugagaacaaacaga

SEQ ID NO: 1897946 - RNA, 13 nt, Human
acuacauucauuu

SEQ ID NO: 1897947 - RNA, 23 nt, Human
acuacaggugugagucaccaagc

SEQ ID NO: 1897948 - RNA, 17 nt, Human
acuaaccagcagaaaug

SEQ ID NO: 1897949 - RNA, 15 nt, Human
acuacaguccuccca

SEQ ID NO: 1897950 - RNA, 13 nt, Human
acuaaccacgcug

SEQ ID NO: 1897951 - RNA, 16 nt, Human
acuaaccagcagaaau

SEQ ID NO: 1897952 - RNA, 12 nt, Human
acuaaacucauu

SEQ ID NO: 1897953 - RNA, 14 nt, Human
acuaaacucauuua

SEQ ID NO: 1897954 - RNA, 16 nt, Human
acuaaacucauuuaua

SEQ ID NO: 1897955 - RNA, 14 nt, Human
uccagcucaccagc

SEQ ID NO: 1897956 - RNA, 15 nt, Human
uccagcucaccagcc

SEQ ID NO: 1897957 - RNA, 21 nt, Human
uccagcuauuuuuauuuguuu

SEQ ID NO: 1897958 - RNA, 12 nt, Human
acguuucuaaag

SEQ ID NO: 1897959 - RNA, 18 nt, Human
acguuuacaagccccccc

SEQ ID NO: 1897960 - RNA, 13 nt, Human
uccagccugggug

SEQ ID NO: 1897961 - RNA, 17 nt, Human
uccagccuggggucugg

SEQ ID NO: 1897962 - RNA, 24 nt, Human
uccagccugggugacagagcaagu

SEQ ID NO: 1897963 - RNA, 12 nt, Human
uccagccugggu

SEQ ID NO: 1897964 - RNA, 20 nt, Human
uccagccugguuuagccugg

SEQ ID NO: 1897965 - RNA, 13 nt, Human
acuaaaaauacaa

SEQ ID NO: 1897966 - RNA, 16 nt, Human
acuaaaacuacaaaaa

SEQ ID NO: 1897967 - RNA, 14 nt, Human
acguuucuaaaggc

SEQ ID NO: 1897968 - RNA, 17 nt, Human
acuauagccuaggugac

SEQ ID NO: 1897969 - RNA, 23 nt, Human
acuauaauuuaccugaagucuuu

SEQ ID NO: 1897970 - RNA, 15 nt, Human
acuauauuguacaca

SEQ ID NO: 1897971 - RNA, 23 nt, Human
uccccaggaggccagccuugacc

SEQ ID NO: 1897972 - RNA, 16 nt, Human
uccccaggcaccucac

SEQ ID NO: 1897973 - RNA, 24 nt, Human
uccccaccgcagacaggaccaggg

SEQ ID NO: 1897974 - RNA, 18 nt, Human
acuauguugcccaggcag

SEQ ID NO: 1897975 - RNA, 22 nt, Human
acuaugaaguuuuuuuuauaca

SEQ ID NO: 1897976 - RNA, 23 nt, Human
acuauguugcccaggcaggucuu

SEQ ID NO: 1897977 - RNA, 20 nt, Human
acuauguugcccaggcaggu

SEQ ID NO: 1897978 - RNA, 19 nt, Human
acuauguugcccaggcagg

SEQ ID NO: 1897979 - RNA, 18 nt, Human
ucccuauuagagaagaga

SEQ ID NO: 1897980 - RNA, 18 nt, Human
ucccgaauagcugggacu

SEQ ID NO: 1897981 - RNA, 20 nt, Human
ucccgaguagcugggacuac

SEQ ID NO: 1897982 - RNA, 18 nt, Human
uccccuuuugcauucucc

SEQ ID NO: 1897983 - RNA, 16 nt, Human
ucccgaauagcuggga

SEQ ID NO: 1897984 - RNA, 15 nt, Human
ucccgaauagcuggg

SEQ ID NO: 1897985 - RNA, 13 nt, Human
uccccuucucuca

SEQ ID NO: 1897986 - RNA, 16 nt, Human
uccccuccuccacucu

SEQ ID NO: 1897987 - RNA, 14 nt, Human
uccccuccuccacu

SEQ ID NO: 1897988 - RNA, 16 nt, Human
uccccuucucucaucu

SEQ ID NO: 1897989 - RNA, 15 nt, Human
uccccuucucucauc

SEQ ID NO: 1897990 - RNA, 18 nt, Human
uccccuucucucaucucu

SEQ ID NO: 1897991 - RNA, 20 nt, Human
acucaagacuuccagagccu

SEQ ID NO: 1897992 - RNA, 17 nt, Human
acucaagacuuccagag

SEQ ID NO: 1897993 - RNA, 12 nt, Human
uccccuccucca

SEQ ID NO: 1897994 - RNA, 22 nt, Human
uccccuccaaccuggggggcag

SEQ ID NO: 1897995 - RNA, 13 nt, Human
uccccuccaaccu

SEQ ID NO: 1897996 - RNA, 12 nt, Human
uccccuccaacc

SEQ ID NO: 1897997 - RNA, 15 nt, Human
acuggcgccuccgag

SEQ ID NO: 1897998 - RNA, 10 nt, Human
acuggcaugc

SEQ ID NO: 1897999 - RNA, 22 nt, Human
acuggcugcaaaggguaucagg

SEQ ID NO: 1898000 - RNA, 13 nt, Human
uccuucagcccuc

SEQ ID NO: 1898001 - RNA, 19 nt, Human
uccuucagcccucaccccu

SEQ ID NO: 1898002 - RNA, 15 nt, Human
uccuucagcccucac

SEQ ID NO: 1898003 - RNA, 14 nt, Human
uccuucagcccuca

SEQ ID NO: 1898004 - RNA, 22 nt, Human
uccuucagugccuuauggaaca

SEQ ID NO: 1898005 - RNA, 13 nt, Human
uccuucagugccu

SEQ ID NO: 1898006 - RNA, 20 nt, Human
uccuucagugccuuauggaa

SEQ ID NO: 1898007 - RNA, 12 nt, Human
uccuucagugcc

SEQ ID NO: 1898008 - RNA, 21 nt, Human
uccuucagcccucaccccugg

SEQ ID NO: 1898009 - RNA, 11 nt, Human
uccuucagugc

SEQ ID NO: 1898010 - RNA, 13 nt, Human
uccuucagccuga

SEQ ID NO: 1898011 - RNA, 20 nt, Human
uccuuccuggagcccagagg

SEQ ID NO: 1898012 - RNA, 21 nt, Human
uccuuccucacaccaggcuug

SEQ ID NO: 1898013 - RNA, 16 nt, Human
uccuuccucacaccag

SEQ ID NO: 1898014 - RNA, 22 nt, Human
acuggauuaaacuuaaucuaaa

SEQ ID NO: 1898015 - RNA, 22 nt, Human
acuggcaaaaggaucuuugugg

SEQ ID NO: 1898016 - RNA, 12 nt, Human
acuggcaaaagg

SEQ ID NO: 1898017 - RNA, 22 nt, Human
acugcugcgucauuacagggca

SEQ ID NO: 1898018 - RNA, 18 nt, Human
acugcuuccagugaggcu

SEQ ID NO: 1898019 - RNA, 21 nt, Human
acugcuuccagugaggcucug

SEQ ID NO: 1898020 - RNA, 22 nt, Human
acugcuuccagugaggcucugc

SEQ ID NO: 1898021 - RNA, 23 nt, Human
acugcuuccagugaggcucugcc

SEQ ID NO: 1898022 - RNA, 18 nt, Human
acugcuacuguaauuuua

SEQ ID NO: 1898023 - RNA, 22 nt, Human
acugcuacuguaauuuuauaug

SEQ ID NO: 1898024 - RNA, 19 nt, Human
acugccuuuggcagaguuc

SEQ ID NO: 1898025 - RNA, 16 nt, Human
acugccuuuggcagag

SEQ ID NO: 1898026 - RNA, 16 nt, Human
acugcauaccaaccug

SEQ ID NO: 1898027 - RNA, 20 nt, Human
acugcauaccaaccugggca

SEQ ID NO: 1898028 - RNA, 20 nt, Human
uccuuucauuuacuguggcu

SEQ ID NO: 1898029 - RNA, 16 nt, Human
uccuuucauuuacugu

SEQ ID NO: 1898030 - RNA, 14 nt, Human
uccuuuccagguau

SEQ ID NO: 1898031 - RNA, 15 nt, Human
ucgaacuggcugcaa

SEQ ID NO: 1898032 - RNA, 13 nt, Human
ucgaacuggcugc

SEQ ID NO: 1898033 - RNA, 14 nt, Human
ucgaacuggcugca

SEQ ID NO: 1898034 - RNA, 15 nt, Human
uccuuucaccacaug

SEQ ID NO: 1898035 - RNA, 19 nt, Human
uccuuucaaugguuugcaa

SEQ ID NO: 1898036 - RNA, 18 nt, Human
uccuuucaagguaacugu

SEQ ID NO: 1898037 - RNA, 14 nt, Human
uccuuccuguucug

SEQ ID NO: 1898038 - RNA, 23 nt, Human
uccuuuaggagggaguuaucuaa

SEQ ID NO: 1898039 - RNA, 16 nt, Human
uccuuccuguucugaa

SEQ ID NO: 1898040 - RNA, 14 nt, Human
ucgcgacaaugcaa

SEQ ID NO: 1898041 - RNA, 13 nt, Human
ucgcgacaaugca

SEQ ID NO: 1898042 - RNA, 17 nt, Human
ucgaggacagggaggug

SEQ ID NO: 1898043 - RNA, 14 nt, Human
ucgaggacagggag

SEQ ID NO: 1898044 - RNA, 22 nt, Human
ucgacagcauuuuccucugcuu

SEQ ID NO: 1898045 - RNA, 12 nt, Human
ucgacacagagu

SEQ ID NO: 1898046 - RNA, 17 nt, Human
ucgacagugaauauuca

SEQ ID NO: 1898047 - RNA, 14 nt, Human
ucgagcaugccugg

SEQ ID NO: 1898048 - RNA, 15 nt, Human
ucgagcaugccugga

SEQ ID NO: 1898049 - RNA, 20 nt, Human
acuguacagacagaaaaaac

SEQ ID NO: 1898050 - RNA, 17 nt, Human
acuguaauuuuauauga

SEQ ID NO: 1898051 - RNA, 14 nt, Human
acuguacaaaguag

SEQ ID NO: 1898052 - RNA, 15 nt, Human
acuguacaaaguaga

SEQ ID NO: 1898053 - RNA, 19 nt, Human
acuguaauuugugauacaa

SEQ ID NO: 1898054 - RNA, 13 nt, Human
acuguacaaagua

SEQ ID NO: 1898055 - RNA, 16 nt, Human
acuguaauaaagauga

SEQ ID NO: 1898056 - RNA, 12 nt, Human
acuguacaugug

SEQ ID NO: 1898057 - RNA, 21 nt, Human
acuguaccaugugcuacaggg

SEQ ID NO: 1898058 - RNA, 23 nt, Human
acuguagaaaagggaacugaaca

SEQ ID NO: 1898059 - RNA, 14 nt, Human
acuguacaugaaaa

SEQ ID NO: 1898060 - RNA, 13 nt, Human
acuguacaugaaa

SEQ ID NO: 1898061 - RNA, 23 nt, Human
acuguacaugaaaacacauuuuu

SEQ ID NO: 1898062 - RNA, 13 nt, Human
ucgcuccuguguc

SEQ ID NO: 1898063 - RNA, 17 nt, Human
acugggagaaaugaaaa

SEQ ID NO: 1898064 - RNA, 12 nt, Human
ucgcuccugugu

SEQ ID NO: 1898065 - RNA, 22 nt, Human
acugggaugggaggagaggaca

SEQ ID NO: 1898066 - RNA, 23 nt, Human
acugggagccuacccacccccag

SEQ ID NO: 1898067 - RNA, 12 nt, Human
acugggagccua

SEQ ID NO: 1898068 - RNA, 19 nt, Human
acuggguacuuguggacac

SEQ ID NO: 1898069 - RNA, 17 nt, Human
acuggggauuggguggg

SEQ ID NO: 1898070 - RNA, 23 nt, Human
acuggguacuuguggacacagcu

SEQ ID NO: 1898071 - RNA, 20 nt, Human
acuggguacuuguggacaca

SEQ ID NO: 1898072 - RNA, 16 nt, Human
acuguaaggcaaucau

SEQ ID NO: 1898073 - RNA, 21 nt, Human
acuggggauugggugggcagg

SEQ ID NO: 1898074 - RNA, 22 nt, Human
acugcagggacacgggcagccu

SEQ ID NO: 1898075 - RNA, 12 nt, Human
acugcagggaca

SEQ ID NO: 1898076 - RNA, 23 nt, Human
acugcagccucaaccuccugggc

SEQ ID NO: 1898077 - RNA, 22 nt, Human
acugcagccucaaccuccuggg

SEQ ID NO: 1898078 - RNA, 21 nt, Human
acugcagccucaaccuccugg

SEQ ID NO: 1898079 - RNA, 19 nt, Human
acugcagccucaaccuccu

SEQ ID NO: 1898080 - RNA, 17 nt, Human
uccuuaaagaguguggc

SEQ ID NO: 1898081 - RNA, 23 nt, Human
uccuuaaagaguguggcaaaaua

SEQ ID NO: 1898082 - RNA, 18 nt, Human
uccuuaaagaguguggca

SEQ ID NO: 1898083 - RNA, 13 nt, Human
acugcacuguuuu

SEQ ID NO: 1898084 - RNA, 24 nt, Human
uccugugucuugcaauggcagccu

SEQ ID NO: 1898085 - RNA, 23 nt, Human
uccugugucuugcaauggcagcc

SEQ ID NO: 1898086 - RNA, 19 nt, Human
uccugugugauugacagcu

SEQ ID NO: 1898087 - RNA, 22 nt, Human
uccuguguguccaaaacugccu

SEQ ID NO: 1898088 - RNA, 14 nt, Human
uccugugugugcgc

SEQ ID NO: 1898089 - RNA, 13 nt, Human
uccugugugugcg

SEQ ID NO: 1898090 - RNA, 18 nt, Human
uccugugugugcgccuac

SEQ ID NO: 1898091 - RNA, 19 nt, Human
uccuguucuuaagacguga

SEQ ID NO: 1898092 - RNA, 12 nt, Human
uccuguucugaa

SEQ ID NO: 1898093 - RNA, 19 nt, Human
uccuguucccaugagauga

SEQ ID NO: 1898094 - RNA, 19 nt, Human
uccugugccuccaucagcu

SEQ ID NO: 1898095 - RNA, 13 nt, Human
uccugcugcaguu

SEQ ID NO: 1898096 - RNA, 12 nt, Human
uccugggccugc

SEQ ID NO: 1898097 - RNA, 13 nt, Human
uccugggccugca

SEQ ID NO: 1898098 - RNA, 15 nt, Human
uccugggccugcaga

SEQ ID NO: 1898099 - RNA, 16 nt, Human
uccugggccugcagaa

SEQ ID NO: 1898100 - RNA, 20 nt, Human
uccugccucgaacuggcugc

SEQ ID NO: 1898101 - RNA, 21 nt, Human
uccugccucgaacuggcugca

SEQ ID NO: 1898102 - RNA, 19 nt, Human
uccugccucagccucccaa

SEQ ID NO: 1898103 - RNA, 22 nt, Human
uccugcaggcagccaggccaca

SEQ ID NO: 1898104 - RNA, 14 nt, Human
uccugcaggccagg

SEQ ID NO: 1898105 - RNA, 19 nt, Human
uccugcaggccaggccagc

SEQ ID NO: 1898106 - RNA, 20 nt, Human
uccugcaggccaggccagcu

SEQ ID NO: 1898107 - RNA, 16 nt, Human
uccugcaggcagccag

SEQ ID NO: 1898108 - RNA, 17 nt, Human
uccugcaggcagccagg

SEQ ID NO: 1898109 - RNA, 19 nt, Human
uccugcaggcagccaggcc

SEQ ID NO: 1898110 - RNA, 20 nt, Human
uccugcaggcagccaggcca

SEQ ID NO: 1898111 - RNA, 15 nt, Human
uccugcaggcagcca

SEQ ID NO: 1898112 - RNA, 19 nt, Human
uccugaguagcuggauuac

SEQ ID NO: 1898113 - RNA, 22 nt, Human
acugaggggaggggagcauggg

SEQ ID NO: 1898114 - RNA, 17 nt, Human
acugaggggaggggagc

SEQ ID NO: 1898115 - RNA, 14 nt, Human
acugaggccugagc

SEQ ID NO: 1898116 - RNA, 13 nt, Human
acugaggccugag

SEQ ID NO: 1898117 - RNA, 14 nt, Human
acugaggaucagag

SEQ ID NO: 1898118 - RNA, 15 nt, Human
uccucuccccagcaa

SEQ ID NO: 1898119 - RNA, 14 nt, Human
uccucuccccagcc

SEQ ID NO: 1898120 - RNA, 15 nt, Human
uccucuccccagccc

SEQ ID NO: 1898121 - RNA, 16 nt, Human
uccucuccccagccca

SEQ ID NO: 1898122 - RNA, 17 nt, Human
uccucuccccagcccag

SEQ ID NO: 1898123 - RNA, 18 nt, Human
uccucuccccagcccaga

SEQ ID NO: 1898124 - RNA, 19 nt, Human
uccucuccccagcccagag

SEQ ID NO: 1898125 - RNA, 20 nt, Human
uccucuccccagcccagaga

SEQ ID NO: 1898126 - RNA, 16 nt, Human
acugagcuucucugug

SEQ ID NO: 1898127 - RNA, 22 nt, Human
acugaggaagaacggggcucuu

SEQ ID NO: 1898128 - RNA, 13 nt, Human
acugaggaagaac

SEQ ID NO: 1898129 - RNA, 17 nt, Human
acugagcuuggaagcuu

SEQ ID NO: 1898130 - RNA, 16 nt, Human
acugagcuuggaagcu

SEQ ID NO: 1898131 - RNA, 13 nt, Human
acugagcuuggaa

SEQ ID NO: 1898132 - RNA, 12 nt, Human
acugagcuugga

SEQ ID NO: 1898133 - RNA, 17 nt, Human
acugagcuucucuguga

SEQ ID NO: 1898134 - RNA, 18 nt, Human
acugagcuucucugugaa

SEQ ID NO: 1898135 - RNA, 18 nt, Human
acugaguacguugugcau

SEQ ID NO: 1898136 - RNA, 21 nt, Human
acugaguacguugugcauuug

SEQ ID NO: 1898137 - RNA, 19 nt, Human
acugaguacguugugcauu

SEQ ID NO: 1898138 - RNA, 23 nt, Human
acugaguacguugugcauuuggu

SEQ ID NO: 1898139 - RNA, 22 nt, Human
acugaguacguugugcauuugg

SEQ ID NO: 1898140 - RNA, 14 nt, Human
acugcaaccuccgc

SEQ ID NO: 1898141 - RNA, 13 nt, Human
acugcaaccuccg

SEQ ID NO: 1898142 - RNA, 22 nt, Human
acugcaaccuccgccucuuggg

SEQ ID NO: 1898143 - RNA, 16 nt, Human
acugcaaccuccgccu

SEQ ID NO: 1898144 - RNA, 14 nt, Human
ucauuuuaauuauu

SEQ ID NO: 1898145 - RNA, 13 nt, Human
ucauuuuaauuau

SEQ ID NO: 1898146 - RNA, 20 nt, Human
ucauuuuagggguagcauuu

SEQ ID NO: 1898147 - RNA, 19 nt, Human
ucauuuguuuguuuuccuu

SEQ ID NO: 1898148 - RNA, 21 nt, Human
ucauuugagcagggcucagcg

SEQ ID NO: 1898149 - RNA, 20 nt, Human
ucauuugcuaacuagcuugg

SEQ ID NO: 1898150 - RNA, 23 nt, Human
uccaaagucucuggaauuugaaa

SEQ ID NO: 1898151 - RNA, 13 nt, Human
ucauuuuuuuuaa

SEQ ID NO: 1898152 - RNA, 16 nt, Human
ucauuuuuuuccaggc

SEQ ID NO: 1898153 - RNA, 13 nt, Human
ucauuuuuuucca

SEQ ID NO: 1898154 - RNA, 18 nt, Human
ucauuuuuuuccaggcug

SEQ ID NO: 1898155 - RNA, 19 nt, Human
ucauuugagcagggcucag

SEQ ID NO: 1898156 - RNA, 17 nt, Human
accuggaauauauaacc

SEQ ID NO: 1898157 - RNA, 14 nt, Human
accuggaauauaua

SEQ ID NO: 1898158 - RNA, 18 nt, Human
accuggaacuuggggagu

SEQ ID NO: 1898159 - RNA, 23 nt, Human
accugcggugcuaucucccccag

SEQ ID NO: 1898160 - RNA, 19 nt, Human
accugcggugcuaucuccc

SEQ ID NO: 1898161 - RNA, 22 nt, Human
accugcggugcuaucuccccca

SEQ ID NO: 1898162 - RNA, 15 nt, Human
accugaagucuuugu

SEQ ID NO: 1898163 - RNA, 22 nt, Human
accugaagucuuuguacagaca

SEQ ID NO: 1898164 - RNA, 18 nt, Human
accugcggugcuaucucc

SEQ ID NO: 1898165 - RNA, 20 nt, Human
uccacaguggaaccagccca

SEQ ID NO: 1898166 - RNA, 16 nt, Human
uccacaguggaaccag

SEQ ID NO: 1898167 - RNA, 18 nt, Human
uccaccaagccuggucag

SEQ ID NO: 1898168 - RNA, 23 nt, Human
uccaccaagccuggucagcccaa

SEQ ID NO: 1898169 - RNA, 22 nt, Human
uccaccaagccuggucagccca

SEQ ID NO: 1898170 - RNA, 15 nt, Human
uccaccaggaaccuc

SEQ ID NO: 1898171 - RNA, 11 nt, Human
uccaagcuggu

SEQ ID NO: 1898172 - RNA, 12 nt, Human
uccaagcuggga

SEQ ID NO: 1898173 - RNA, 22 nt, Human
uccaagcugggagauucaaggg

SEQ ID NO: 1898174 - RNA, 14 nt, Human
uccacagugacucc

SEQ ID NO: 1898175 - RNA, 12 nt, Human
uccacagggcac

SEQ ID NO: 1898176 - RNA, 17 nt, Human
uccaacaccaagcacag

SEQ ID NO: 1898177 - RNA, 21 nt, Human
uccaacaccaagcacagcagc

SEQ ID NO: 1898178 - RNA, 23 nt, Human
uccaacaccaagcacagcagccu

SEQ ID NO: 1898179 - RNA, 20 nt, Human
uccaacacugauuuccccuu

SEQ ID NO: 1898180 - RNA, 17 nt, Human
uccaacagaagaacugu

SEQ ID NO: 1898181 - RNA, 14 nt, Human
uccaaccuucccaa

SEQ ID NO: 1898182 - RNA, 16 nt, Human
uccaagcucccaggca

SEQ ID NO: 1898183 - RNA, 14 nt, Human
uccaagcucccagg

SEQ ID NO: 1898184 - RNA, 15 nt, Human
uccaagcucccaggc

SEQ ID NO: 1898185 - RNA, 12 nt, Human
uccaagcuccca

SEQ ID NO: 1898186 - RNA, 13 nt, Human
uccaagcucccag

SEQ ID NO: 1898187 - RNA, 15 nt, Human
accugguccacaggg

SEQ ID NO: 1898188 - RNA, 16 nt, Human
accugguccacagggc

SEQ ID NO: 1898189 - RNA, 17 nt, Human
accugguccacagggca

SEQ ID NO: 1898190 - RNA, 18 nt, Human
accugguccacagggcac

SEQ ID NO: 1898191 - RNA, 15 nt, Human
uccaccaucaagcca

SEQ ID NO: 1898192 - RNA, 16 nt, Human
uccaccagucauuuuu

SEQ ID NO: 1898193 - RNA, 18 nt, Human
uccaccagucauuuuuca

SEQ ID NO: 1898194 - RNA, 19 nt, Human
uccaccaggaaccucuuca

SEQ ID NO: 1898195 - RNA, 21 nt, Human
uccaccaggaaccucuucaga

SEQ ID NO: 1898196 - RNA, 14 nt, Human
uccaccagucauuu

SEQ ID NO: 1898197 - RNA, 15 nt, Human
uccaccagucauuuu

SEQ ID NO: 1898198 - RNA, 17 nt, Human
accuuagacagucccug

SEQ ID NO: 1898199 - RNA, 23 nt, Human
accuuaggaauaaucuccuguua

SEQ ID NO: 1898200 - RNA, 13 nt, Human
accuuaggccuuc

SEQ ID NO: 1898201 - RNA, 21 nt, Human
accuuaggccuuccucucucc

SEQ ID NO: 1898202 - RNA, 18 nt, Human
accuuaggccuuccucuc

SEQ ID NO: 1898203 - RNA, 20 nt, Human
accuuaggccuuccucucuc

SEQ ID NO: 1898204 - RNA, 14 nt, Human
accuuaggccuucc

SEQ ID NO: 1898205 - RNA, 15 nt, Human
accuuaggccuuccu

SEQ ID NO: 1898206 - RNA, 16 nt, Human
accuuaggccuuccuc

SEQ ID NO: 1898207 - RNA, 17 nt, Human
accuuaggccuuccucu

SEQ ID NO: 1898208 - RNA, 12 nt, Human
accuucuccuuc

SEQ ID NO: 1898209 - RNA, 19 nt, Human
accuucccaaacgccuccc

SEQ ID NO: 1898210 - RNA, 21 nt, Human
accuucccaaacgccuccccu

SEQ ID NO: 1898211 - RNA, 22 nt, Human
accuucccaaacgccuccccug

SEQ ID NO: 1898212 - RNA, 14 nt, Human
accuucccaaacgc

SEQ ID NO: 1898213 - RNA, 17 nt, Human
accuuccaagagccuga

SEQ ID NO: 1898214 - RNA, 14 nt, Human
accuugacagggca

SEQ ID NO: 1898215 - RNA, 15 nt, Human
accuugaaugaugcc

SEQ ID NO: 1898216 - RNA, 15 nt, Human
accuugacagggcac

SEQ ID NO: 1898217 - RNA, 16 nt, Human
accuugacagggcaca

SEQ ID NO: 1898218 - RNA, 13 nt, Human
accuucuccuuca

SEQ ID NO: 1898219 - RNA, 15 nt, Human
uccagccccuggaug

SEQ ID NO: 1898220 - RNA, 16 nt, Human
uccagccccuggaugc

SEQ ID NO: 1898221 - RNA, 17 nt, Human
uccagccccuggaugca

SEQ ID NO: 1898222 - RNA, 19 nt, Human
uccagccccuggaugcagc

SEQ ID NO: 1898223 - RNA, 21 nt, Human
uccagccccuggaugcagccu

SEQ ID NO: 1898224 - RNA, 22 nt, Human
uccagccccuggaugcagccuc

SEQ ID NO: 1898225 - RNA, 20 nt, Human
uccagccugagcgacaguga

SEQ ID NO: 1898226 - RNA, 21 nt, Human
uccagccugagcgacagugag

SEQ ID NO: 1898227 - RNA, 11 nt, Human
uccagccugcc

SEQ ID NO: 1898228 - RNA, 19 nt, Human
accuuuguauucucuccug

SEQ ID NO: 1898229 - RNA, 15 nt, Human
accuuuguauucucu

SEQ ID NO: 1898230 - RNA, 23 nt, Human
accuuuguauucucuccuguacc

SEQ ID NO: 1898231 - RNA, 22 nt, Human
uccagaaguuugagaucagccu

SEQ ID NO: 1898232 - RNA, 13 nt, Human
uccagaaugcugu

SEQ ID NO: 1898233 - RNA, 15 nt, Human
uccagaaugcuguac

SEQ ID NO: 1898234 - RNA, 16 nt, Human
uccagaaugcuguaca

SEQ ID NO: 1898235 - RNA, 17 nt, Human
uccagaaugcuguacau

SEQ ID NO: 1898236 - RNA, 22 nt, Human
uccacucucccccacccccucc

SEQ ID NO: 1898237 - RNA, 13 nt, Human
accuagccuuaga

SEQ ID NO: 1898238 - RNA, 14 nt, Human
accuagcagcaccg

SEQ ID NO: 1898239 - RNA, 21 nt, Human
accuagcagcaccguucugug

SEQ ID NO: 1898240 - RNA, 22 nt, Human
accuagcagcaccguucugugc

SEQ ID NO: 1898241 - RNA, 23 nt, Human
accuagcagcaccguucugugca

SEQ ID NO: 1898242 - RNA, 12 nt, Human
accuauccacac

SEQ ID NO: 1898243 - RNA, 14 nt, Human
accguucugugcac

SEQ ID NO: 1898244 - RNA, 20 nt, Human
accuaauccaggcagaucca

SEQ ID NO: 1898245 - RNA, 21 nt, Human
accuaauccaggcagauccag

SEQ ID NO: 1898246 - RNA, 15 nt, Human
accuaauccaggcag

SEQ ID NO: 1898247 - RNA, 20 nt, Human
accuccgccucuuggguuca

SEQ ID NO: 1898248 - RNA, 10 nt, Human
acccuuuucu

SEQ ID NO: 1898249 - RNA, 20 nt, Human
ucauauuuacuucuuauaca

SEQ ID NO: 1898250 - RNA, 21 nt, Human
ucauauuuacuucuuauacau

SEQ ID NO: 1898251 - RNA, 22 nt, Human
ucauauuuacuucuuauacauu

SEQ ID NO: 1898252 - RNA, 16 nt, Human
ucauauuuacuucuua

SEQ ID NO: 1898253 - RNA, 12 nt, Human
ucauauugaaua

SEQ ID NO: 1898254 - RNA, 17 nt, Human
accgccaaggcuggggg

SEQ ID NO: 1898255 - RNA, 20 nt, Human
accgcagacaggaccaggga

SEQ ID NO: 1898256 - RNA, 16 nt, Human
accgugggcagggagc

SEQ ID NO: 1898257 - RNA, 18 nt, Human
accgugggcagggagcgg

SEQ ID NO: 1898258 - RNA, 16 nt, Human
accgccuccuacagcc

SEQ ID NO: 1898259 - RNA, 13 nt, Human
accucucccuugg

SEQ ID NO: 1898260 - RNA, 14 nt, Human
accucucccugacc

SEQ ID NO: 1898261 - RNA, 17 nt, Human
accucucccugacccug

SEQ ID NO: 1898262 - RNA, 22 nt, Human
accucucccugacccuguauau

SEQ ID NO: 1898263 - RNA, 23 nt, Human
accucucccugacccuguauaua

SEQ ID NO: 1898264 - RNA, 14 nt, Human
accucucccuugga

SEQ ID NO: 1898265 - RNA, 15 nt, Human
accucucccuuggau

SEQ ID NO: 1898266 - RNA, 21 nt, Human
accucuaaauucuuucauuuu

SEQ ID NO: 1898267 - RNA, 12 nt, Human
accucugcacaa

SEQ ID NO: 1898268 - RNA, 13 nt, Human
accucugauaccu

SEQ ID NO: 1898269 - RNA, 15 nt, Human
accucugauaccuca

SEQ ID NO: 1898270 - RNA, 22 nt, Human
accucucuuauagaauauuuau

SEQ ID NO: 1898271 - RNA, 23 nt, Human
accucucuuauagaauauuuauu

SEQ ID NO: 1898272 - RNA, 23 nt, Human
accucucccuuggauuguccccg

SEQ ID NO: 1898273 - RNA, 14 nt, Human
accucucucacucc

SEQ ID NO: 1898274 - RNA, 19 nt, Human
accucucucacuccuugaa

SEQ ID NO: 1898275 - RNA, 14 nt, Human
accucuccucaugu

SEQ ID NO: 1898276 - RNA, 17 nt, Human
accucggugccuuccuc

SEQ ID NO: 1898277 - RNA, 18 nt, Human
accucuaaauucuuucau

SEQ ID NO: 1898278 - RNA, 21 nt, Human
ucauuggauucugagagcugu

SEQ ID NO: 1898279 - RNA, 19 nt, Human
ucauugaccugaggcccuu

SEQ ID NO: 1898280 - RNA, 21 nt, Human
ucauucuccuuguguuacuaa

SEQ ID NO: 1898281 - RNA, 15 nt, Human
ucauucguucugugg

SEQ ID NO: 1898282 - RNA, 18 nt, Human
ucauucuaaugauggccc

SEQ ID NO: 1898283 - RNA, 22 nt, Human
ucauugaccugaggcccuucuc

SEQ ID NO: 1898284 - RNA, 13 nt, Human
ucaugucuggcua

SEQ ID NO: 1898285 - RNA, 14 nt, Human
ucaugugaaaucau

SEQ ID NO: 1898286 - RNA, 17 nt, Human
ucauguucuuaauucuu

SEQ ID NO: 1898287 - RNA, 11 nt, Human
ucauguucuua

SEQ ID NO: 1898288 - RNA, 23 nt, Human
ucauccacugugccaugugccag

SEQ ID NO: 1898289 - RNA, 21 nt, Human
ucauccacugugccaugugcc

SEQ ID NO: 1898290 - RNA, 19 nt, Human
ucauccacugugccaugug

SEQ ID NO: 1898291 - RNA, 19 nt, Human
ucaugacaaagacugagua

SEQ ID NO: 1898292 - RNA, 15 nt, Human
ucaugaccagcaaau

SEQ ID NO: 1898293 - RNA, 16 nt, Human
ucaugaccagcaaaua

SEQ ID NO: 1898294 - RNA, 22 nt, Human
ucaugauagaaggcuaugggga

SEQ ID NO: 1898295 - RNA, 17 nt, Human
accccuuucuggcucuc

SEQ ID NO: 1898296 - RNA, 20 nt, Human
accccuucgcuccugugucu

SEQ ID NO: 1898297 - RNA, 21 nt, Human
acccgagucauucguucugug

SEQ ID NO: 1898298 - RNA, 15 nt, Human
acccuccacucuccu

SEQ ID NO: 1898299 - RNA, 14 nt, Human
acccucuuagaaaa

SEQ ID NO: 1898300 - RNA, 13 nt, Human
acccucuucaugg

SEQ ID NO: 1898301 - RNA, 14 nt, Human
acccugcccugugg

SEQ ID NO: 1898302 - RNA, 13 nt, Human
acccugcccugug

SEQ ID NO: 1898303 - RNA, 11 nt, Human
acccugcccug

SEQ ID NO: 1898304 - RNA, 12 nt, Human
acccugcccugu

SEQ ID NO: 1898305 - RNA, 16 nt, Human
acccuuguggucccac

SEQ ID NO: 1898306 - RNA, 17 nt, Human
acccuuguggucccacc

SEQ ID NO: 1898307 - RNA, 19 nt, Human
acccuuguggucccacccc

SEQ ID NO: 1898308 - RNA, 23 nt, Human
acccuucuccucuuguaaauaaa

SEQ ID NO: 1898309 - RNA, 15 nt, Human
acccuucuccucuug

SEQ ID NO: 1898310 - RNA, 17 nt, Human
acccuucuccucuugua

SEQ ID NO: 1898311 - RNA, 19 nt, Human
acccuucuccucuuguaaa

SEQ ID NO: 1898312 - RNA, 21 nt, Human
acccuucuccucuuguaaaua

SEQ ID NO: 1898313 - RNA, 18 nt, Human
ucagcggggacagcuccu

SEQ ID NO: 1898314 - RNA, 13 nt, Human
ucaggaagaacac

SEQ ID NO: 1898315 - RNA, 17 nt, Human
ucagcggggacagcucc

SEQ ID NO: 1898316 - RNA, 16 nt, Human
ucagcggggacagcuc

SEQ ID NO: 1898317 - RNA, 15 nt, Human
ucagcggggacagcu

SEQ ID NO: 1898318 - RNA, 19 nt, Human
ucagccuggccagacacag

SEQ ID NO: 1898319 - RNA, 20 nt, Human
ucagccuggccagacacagg

SEQ ID NO: 1898320 - RNA, 20 nt, Human
ucaggccaaacucaccugcc

SEQ ID NO: 1898321 - RNA, 23 nt, Human
ucaggccaaacucaccugccccu

SEQ ID NO: 1898322 - RNA, 22 nt, Human
ucaggaagaacacccucuaaau

SEQ ID NO: 1898323 - RNA, 16 nt, Human
ucaggaagcucagggc

SEQ ID NO: 1898324 - RNA, 17 nt, Human
ucaggaagcucagggcc

SEQ ID NO: 1898325 - RNA, 19 nt, Human
ucaggaagcucagggccug

SEQ ID NO: 1898326 - RNA, 20 nt, Human
ucaggaagcucagggccugg

SEQ ID NO: 1898327 - RNA, 19 nt, Human
accccuucgcuccuguguc

SEQ ID NO: 1898328 - RNA, 16 nt, Human
ucagguaacaggcaga

SEQ ID NO: 1898329 - RNA, 15 nt, Human
ucagguaacaggcag

SEQ ID NO: 1898330 - RNA, 13 nt, Human
ucagguaacaggc

SEQ ID NO: 1898331 - RNA, 13 nt, Human
ucagggucccugg

SEQ ID NO: 1898332 - RNA, 15 nt, Human
ucagggucauagcau

SEQ ID NO: 1898333 - RNA, 14 nt, Human
ucagggucccuggu

SEQ ID NO: 1898334 - RNA, 18 nt, Human
ucagggucccugguggca

SEQ ID NO: 1898335 - RNA, 15 nt, Human
ucaggccagcugcuu

SEQ ID NO: 1898336 - RNA, 20 nt, Human
ucaggccagcugcuugggcu

SEQ ID NO: 1898337 - RNA, 11 nt, Human
ucaggccaggc

SEQ ID NO: 1898338 - RNA, 12 nt, Human
ucaggccaggcc

SEQ ID NO: 1898339 - RNA, 14 nt, Human
ucaggcccaaagcc

SEQ ID NO: 1898340 - RNA, 15 nt, Human
ucaggccgaaggagg

SEQ ID NO: 1898341 - RNA, 13 nt, Human
ucagaagacacug

SEQ ID NO: 1898342 - RNA, 13 nt, Human
ucagaucuucugu

SEQ ID NO: 1898343 - RNA, 12 nt, Human
ucagaagaaauu

SEQ ID NO: 1898344 - RNA, 22 nt, Human
ucagaacucaaauggggccaga

SEQ ID NO: 1898345 - RNA, 21 nt, Human
ucagaacucaaauggggccag

SEQ ID NO: 1898346 - RNA, 13 nt, Human
acccagcucuggu

SEQ ID NO: 1898347 - RNA, 15 nt, Human
acccagcucuggucc

SEQ ID NO: 1898348 - RNA, 22 nt, Human
acccagcuaugguucucucgca

SEQ ID NO: 1898349 - RNA, 13 nt, Human
ucagcccugaccc

SEQ ID NO: 1898350 - RNA, 16 nt, Human
ucagcccugacccugu

SEQ ID NO: 1898351 - RNA, 15 nt, Human
acccccagccugcua

SEQ ID NO: 1898352 - RNA, 19 nt, Human
accccauuucucuccucac

SEQ ID NO: 1898353 - RNA, 14 nt, Human
acccccagccugcu

SEQ ID NO: 1898354 - RNA, 14 nt, Human
accccauuucucuc

SEQ ID NO: 1898355 - RNA, 15 nt, Human
accccauuucucucc

SEQ ID NO: 1898356 - RNA, 15 nt, Human
acccagugcccccac

SEQ ID NO: 1898357 - RNA, 18 nt, Human
acccagugcccccacuga

SEQ ID NO: 1898358 - RNA, 14 nt, Human
acccccgcccccug

SEQ ID NO: 1898359 - RNA, 21 nt, Human
acccccgcccccugcccuccc

SEQ ID NO: 1898360 - RNA, 15 nt, Human
acccccgcccccugc

SEQ ID NO: 1898361 - RNA, 18 nt, Human
acccccgcccccugcccu

SEQ ID NO: 1898362 - RNA, 19 nt, Human
acccccgcccccugcccuc

SEQ ID NO: 1898363 - RNA, 20 nt, Human
acccccgcccccugcccucc

SEQ ID NO: 1898364 - RNA, 18 nt, Human
acccccagcuccggccug

SEQ ID NO: 1898365 - RNA, 16 nt, Human
acccccaggaccccug

SEQ ID NO: 1898366 - RNA, 17 nt, Human
acccccauuucuauuua

SEQ ID NO: 1898367 - RNA, 18 nt, Human
acccccauuucuauuuau

SEQ ID NO: 1898368 - RNA, 19 nt, Human
ucagccuggcuucaaauug

SEQ ID NO: 1898369 - RNA, 10 nt, Human
ucagccuggg

SEQ ID NO: 1898370 - RNA, 12 nt, Human
ucagccugggca

SEQ ID NO: 1898371 - RNA, 22 nt, Human
accccuggcuccaggccagggg

SEQ ID NO: 1898372 - RNA, 20 nt, Human
accccuggcuccaggccagg

SEQ ID NO: 1898373 - RNA, 19 nt, Human
accccuggcuccaggccag

SEQ ID NO: 1898374 - RNA, 23 nt, Human
accccucccuuucuccccugccc

SEQ ID NO: 1898375 - RNA, 19 nt, Human
accccucccuuucuccccu

SEQ ID NO: 1898376 - RNA, 18 nt, Human
accccucccuuucucccc

SEQ ID NO: 1898377 - RNA, 16 nt, Human
accccucccuuucucc

SEQ ID NO: 1898378 - RNA, 14 nt, Human
accccucccuuucu

SEQ ID NO: 1898379 - RNA, 13 nt, Human
accccucccuuuc

SEQ ID NO: 1898380 - RNA, 15 nt, Human
acccccuccccgccc

SEQ ID NO: 1898381 - RNA, 18 nt, Human
acccaagaccucagggca

SEQ ID NO: 1898382 - RNA, 19 nt, Human
acccaagaccucagggcac

SEQ ID NO: 1898383 - RNA, 19 nt, Human
acccaacuagcucuauguu

SEQ ID NO: 1898384 - RNA, 19 nt, Human
acccacuugcuuuuaaaau

SEQ ID NO: 1898385 - RNA, 16 nt, Human
acccagaagaaaauag

SEQ ID NO: 1898386 - RNA, 18 nt, Human
acccaaaaggcagaagca

SEQ ID NO: 1898387 - RNA, 21 nt, Human
acccaaauguucaucaaugaa

SEQ ID NO: 1898388 - RNA, 18 nt, Human
acccagcccacuucugcc

SEQ ID NO: 1898389 - RNA, 17 nt, Human
acccagcccacuucugc

SEQ ID NO: 1898390 - RNA, 16 nt, Human
acccagcccacuucug

SEQ ID NO: 1898391 - RNA, 23 nt, Human
accauuuugggguacccacugcu

SEQ ID NO: 1898392 - RNA, 15 nt, Human
acccaaaaggcagaa

SEQ ID NO: 1898393 - RNA, 13 nt, Human
acccaaaaggcag

SEQ ID NO: 1898394 - RNA, 23 nt, Human
accauuuauacaaauuagaaaau

SEQ ID NO: 1898395 - RNA, 21 nt, Human
accauuuaaaaacaggcagcu

SEQ ID NO: 1898396 - RNA, 23 nt, Human
accauuuaaaaacaggcagcuca

SEQ ID NO: 1898397 - RNA, 13 nt, Human
accauuuauacaa

SEQ ID NO: 1898398 - RNA, 16 nt, Human
accauuuauacaaauu

SEQ ID NO: 1898399 - RNA, 19 nt, Human
accauuuauacaaauuaga

SEQ ID NO: 1898400 - RNA, 21 nt, Human
accauuuauacaaauuagaaa

SEQ ID NO: 1898401 - RNA, 22 nt, Human
accauuuauacaaauuagaaaa

SEQ ID NO: 1898402 - RNA, 23 nt, Human
accaugauuaaccacuucagcug

SEQ ID NO: 1898403 - RNA, 22 nt, Human
accaugauuaaccacuucagcu

SEQ ID NO: 1898404 - RNA, 23 nt, Human
accaugaagucucuaacaaugua

SEQ ID NO: 1898405 - RNA, 13 nt, Human
accauucuccacc

SEQ ID NO: 1898406 - RNA, 16 nt, Human
accauucuccaccugc

SEQ ID NO: 1898407 - RNA, 18 nt, Human
accauucuccaccugcca

SEQ ID NO: 1898408 - RNA, 14 nt, Human
accauuuaaaaaca

SEQ ID NO: 1898409 - RNA, 16 nt, Human
accauuuaaaaacagg

SEQ ID NO: 1898410 - RNA, 21 nt, Human
accaguguuguggauuuaaca

SEQ ID NO: 1898411 - RNA, 18 nt, Human
ucacuguugcccaggcug

SEQ ID NO: 1898412 - RNA, 17 nt, Human
ucacuguugcccaggcu

SEQ ID NO: 1898413 - RNA, 19 nt, Human
ucacuguugcccaggcugg

SEQ ID NO: 1898414 - RNA, 19 nt, Human
accagggagcugcaggggc

SEQ ID NO: 1898415 - RNA, 14 nt, Human
ucacugucuuuccu

SEQ ID NO: 1898416 - RNA, 20 nt, Human
accagggagccccuuugaug

SEQ ID NO: 1898417 - RNA, 16 nt, Human
accagggauuguuucu

SEQ ID NO: 1898418 - RNA, 18 nt, Human
accagggauuguuucugu

SEQ ID NO: 1898419 - RNA, 19 nt, Human
accagggauuguuucuguu

SEQ ID NO: 1898420 - RNA, 12 nt, Human
ucacugcagccu

SEQ ID NO: 1898421 - RNA, 13 nt, Human
ucacugcagccuc

SEQ ID NO: 1898422 - RNA, 16 nt, Human
ucacuguugcccaggc

SEQ ID NO: 1898423 - RNA, 12 nt, Human
ucacugucuuuc

SEQ ID NO: 1898424 - RNA, 19 nt, Human
ucacuguccuccaagccag

SEQ ID NO: 1898425 - RNA, 15 nt, Human
ucacuguccuccaag

SEQ ID NO: 1898426 - RNA, 16 nt, Human
ucacuguccuccaagc

SEQ ID NO: 1898427 - RNA, 16 nt, Human
ucaccugccccucaac

SEQ ID NO: 1898428 - RNA, 13 nt, Human
ucacugagacagc

SEQ ID NO: 1898429 - RNA, 14 nt, Human
ucacugagacagcc

SEQ ID NO: 1898430 - RNA, 15 nt, Human
ucacugagacagccc

SEQ ID NO: 1898431 - RNA, 14 nt, Human
accacaucuugcuc

SEQ ID NO: 1898432 - RNA, 22 nt, Human
accacagacauacuaaccagca

SEQ ID NO: 1898433 - RNA, 21 nt, Human
accacagacauacuaaccagc

SEQ ID NO: 1898434 - RNA, 15 nt, Human
accacagcacagcca

SEQ ID NO: 1898435 - RNA, 16 nt, Human
accacagcacagccaa

SEQ ID NO: 1898436 - RNA, 20 nt, Human
uauuucaguuuuaaauguac

SEQ ID NO: 1898437 - RNA, 22 nt, Human
accacacuggacuccggcccuc

SEQ ID NO: 1898438 - RNA, 24 nt, Human
accacaucuugcucugcugacaga

SEQ ID NO: 1898439 - RNA, 21 nt, Human
accacaucuugcucugcugac

SEQ ID NO: 1898440 - RNA, 20 nt, Human
accacaucuugcucugcuga

SEQ ID NO: 1898441 - RNA, 16 nt, Human
accacaucuugcucug

SEQ ID NO: 1898442 - RNA, 20 nt, Human
accacucuaucaaguauuau

SEQ ID NO: 1898443 - RNA, 16 nt, Human
accacaucuaagccug

SEQ ID NO: 1898444 - RNA, 20 nt, Human
accacaucuaagccugaagg

SEQ ID NO: 1898445 - RNA, 15 nt, Human
accacuucagcugac

SEQ ID NO: 1898446 - RNA, 13 nt, Human
accacuucagcug

SEQ ID NO: 1898447 - RNA, 14 nt, Human
accacuucagcuga

SEQ ID NO: 1898448 - RNA, 19 nt, Human
accacugcagaagacagua

SEQ ID NO: 1898449 - RNA, 14 nt, Human
accacugcagaaga

SEQ ID NO: 1898450 - RNA, 13 nt, Human
accacugcagaag

SEQ ID NO: 1898451 - RNA, 17 nt, Human
accagacaccuugacag

SEQ ID NO: 1898452 - RNA, 12 nt, Human
accacuuuuguu

SEQ ID NO: 1898453 - RNA, 23 nt, Human
accagacaccuugacagggcaca

SEQ ID NO: 1898454 - RNA, 22 nt, Human
accagacaccuugacagggcac

SEQ ID NO: 1898455 - RNA, 22 nt, Human
accagagcccaccuuggcucaa

SEQ ID NO: 1898456 - RNA, 19 nt, Human
accagagcccaccuuggcu

SEQ ID NO: 1898457 - RNA, 15 nt, Human
accagccugaccaaa

SEQ ID NO: 1898458 - RNA, 11 nt, Human
accagccuggc

SEQ ID NO: 1898459 - RNA, 12 nt, Human
accagccuggcc

SEQ ID NO: 1898460 - RNA, 15 nt, Human
accagccuggccaac

SEQ ID NO: 1898461 - RNA, 20 nt, Human
accagccuggccaacauggu

SEQ ID NO: 1898462 - RNA, 20 nt, Human
accagccuggucaacauggu

SEQ ID NO: 1898463 - RNA, 23 nt, Human
ucaccugaagacucauucuucug

SEQ ID NO: 1898464 - RNA, 14 nt, Human
ucaccuccugcugg

SEQ ID NO: 1898465 - RNA, 15 nt, Human
ucaccuccugcuggg

SEQ ID NO: 1898466 - RNA, 19 nt, Human
ucaccugaagacucauucu

SEQ ID NO: 1898467 - RNA, 12 nt, Human
ucaccuccugcu

SEQ ID NO: 1898468 - RNA, 13 nt, Human
ucaccuccugcug

SEQ ID NO: 1898469 - RNA, 23 nt, Human
ugaggggucgacuucgggcuggc

SEQ ID NO: 1898470 - RNA, 22 nt, Human
ugagggggaauagucuagaugg

SEQ ID NO: 1898471 - RNA, 13 nt, Human
ugaggggccucuu

SEQ ID NO: 1898472 - RNA, 12 nt, Human
ugaggggccucu

SEQ ID NO: 1898473 - RNA, 19 nt, Human
ugagggauacccaucccau

SEQ ID NO: 1898474 - RNA, 23 nt, Human
ugagggaucuauacuugcuuugu

SEQ ID NO: 1898475 - RNA, 16 nt, Human
ugaggcccuucucucc

SEQ ID NO: 1898476 - RNA, 18 nt, Human
ugaggcccuucucuccag

SEQ ID NO: 1898477 - RNA, 19 nt, Human
ugaggcccuucucuccagc

SEQ ID NO: 1898478 - RNA, 20 nt, Human
ugaggcccuucucuccagcc

SEQ ID NO: 1898479 - RNA, 22 nt, Human
ugaggcccuucucuccagcccc

SEQ ID NO: 1898480 - RNA, 23 nt, Human
ugaggcccuucucuccagccccu

SEQ ID NO: 1898481 - RNA, 24 nt, Human
ugaggcccuucucuccagccccug

SEQ ID NO: 1898482 - RNA, 17 nt, Human
agcagaggaaggagagg

SEQ ID NO: 1898483 - RNA, 12 nt, Human
agcagaggaggg

SEQ ID NO: 1898484 - RNA, 15 nt, Human
agcagaggaggggcc

SEQ ID NO: 1898485 - RNA, 19 nt, Human
agcagaggaggggccgcug

SEQ ID NO: 1898486 - RNA, 21 nt, Human
agcagaggaggggccgcugcc

SEQ ID NO: 1898487 - RNA, 20 nt, Human
agcagaggauaauuagcauc

SEQ ID NO: 1898488 - RNA, 22 nt, Human
agcagaggaggggccgcugcca

SEQ ID NO: 1898489 - RNA, 19 nt, Human
agcagauggagaccccuug

SEQ ID NO: 1898490 - RNA, 19 nt, Human
agcagaugcaaugacucag

SEQ ID NO: 1898491 - RNA, 13 nt, Human
agcagauuuuaau

SEQ ID NO: 1898492 - RNA, 21 nt, Human
agcagauuuuaauuuugaaua

SEQ ID NO: 1898493 - RNA, 22 nt, Human
agcagauuuuaauuuugaauaa

SEQ ID NO: 1898494 - RNA, 20 nt, Human
ugaggguugggcugguguca

SEQ ID NO: 1898495 - RNA, 22 nt, Human
ugagggugacuauggagcugag

SEQ ID NO: 1898496 - RNA, 17 nt, Human
ugagguacugagaguga

SEQ ID NO: 1898497 - RNA, 13 nt, Human
ugaggucagagcc

SEQ ID NO: 1898498 - RNA, 22 nt, Human
ugagguacugagagugaacaaa

SEQ ID NO: 1898499 - RNA, 16 nt, Human
ugaggucagagccugc

SEQ ID NO: 1898500 - RNA, 14 nt, Human
ugaggucagagccu

SEQ ID NO: 1898501 - RNA, 17 nt, Human
ugaggucagagccugca

SEQ ID NO: 1898502 - RNA, 17 nt, Human
agcagagaccaucccug

SEQ ID NO: 1898503 - RNA, 18 nt, Human
agcagagaccaucccuga

SEQ ID NO: 1898504 - RNA, 19 nt, Human
agcagagaccaucccugaa

SEQ ID NO: 1898505 - RNA, 20 nt, Human
agcagagaccaucccugaag

SEQ ID NO: 1898506 - RNA, 20 nt, Human
agcagagcaccuuagacagu

SEQ ID NO: 1898507 - RNA, 16 nt, Human
ugagcuacaaaugcau

SEQ ID NO: 1898508 - RNA, 21 nt, Human
ugagcggugcuguccucaggu

SEQ ID NO: 1898509 - RNA, 20 nt, Human
ugagcggugcuguccucagg

SEQ ID NO: 1898510 - RNA, 14 nt, Human
ugagcuaggaauug

SEQ ID NO: 1898511 - RNA, 13 nt, Human
ugagccuuguaau

SEQ ID NO: 1898512 - RNA, 22 nt, Human
ugagcgcuccugccgcagagcu

SEQ ID NO: 1898513 - RNA, 18 nt, Human
ugagcgcuccugccgcag

SEQ ID NO: 1898514 - RNA, 14 nt, Human
ugagcgcuccugcc

SEQ ID NO: 1898515 - RNA, 12 nt, Human
ugagcgccagga

SEQ ID NO: 1898516 - RNA, 14 nt, Human
ugagcuacaaaugc

SEQ ID NO: 1898517 - RNA, 13 nt, Human
ugagcuacaaaug

SEQ ID NO: 1898518 - RNA, 15 nt, Human
ugaggaagcaaaagc

SEQ ID NO: 1898519 - RNA, 24 nt, Human
ugaggaagaacggggcucuucuca

SEQ ID NO: 1898520 - RNA, 23 nt, Human
ugaggaagaacggggcucuucuc

SEQ ID NO: 1898521 - RNA, 19 nt, Human
ugaggaagaacggggcucu

SEQ ID NO: 1898522 - RNA, 17 nt, Human
ugaggaagaacggggcu

SEQ ID NO: 1898523 - RNA, 23 nt, Human
ugaggaaaaaaaucguccaggga

SEQ ID NO: 1898524 - RNA, 16 nt, Human
ugaggaaacaacagcu

SEQ ID NO: 1898525 - RNA, 22 nt, Human
ugaggaagcaaaagcaucuaug

SEQ ID NO: 1898526 - RNA, 14 nt, Human
ugaggaagccgcug

SEQ ID NO: 1898527 - RNA, 17 nt, Human
ugaggaagccgcugggg

SEQ ID NO: 1898528 - RNA, 18 nt, Human
ugaggaagccgcuggggc

SEQ ID NO: 1898529 - RNA, 19 nt, Human
ugaggaagccgcuggggcc

SEQ ID NO: 1898530 - RNA, 21 nt, Human
ugaggaagccgcuggggccag

SEQ ID NO: 1898531 - RNA, 17 nt, Human
ugaggaagagggacugu

SEQ ID NO: 1898532 - RNA, 22 nt, Human
ugaggaauccagacccggcugc

SEQ ID NO: 1898533 - RNA, 21 nt, Human
ugaggaauccagacccggcug

SEQ ID NO: 1898534 - RNA, 21 nt, Human
ugaggacacuaaccacgcugg

SEQ ID NO: 1898535 - RNA, 12 nt, Human
ugaggccagaga

SEQ ID NO: 1898536 - RNA, 20 nt, Human
ugaggccacacucagcacaa

SEQ ID NO: 1898537 - RNA, 23 nt, Human
ugaggccacacucagcacaaggc

SEQ ID NO: 1898538 - RNA, 12 nt, Human
ugaggccacacu

SEQ ID NO: 1898539 - RNA, 13 nt, Human
ugaggccacacuc

SEQ ID NO: 1898540 - RNA, 19 nt, Human
ugaggccacacucagcaca

SEQ ID NO: 1898541 - RNA, 12 nt, Human
ugaggcccagag

SEQ ID NO: 1898542 - RNA, 13 nt, Human
ugaggcccagagg

SEQ ID NO: 1898543 - RNA, 20 nt, Human
ugaggccagagacacaagcc

SEQ ID NO: 1898544 - RNA, 14 nt, Human
ugaggccagagaca

SEQ ID NO: 1898545 - RNA, 16 nt, Human
ugaggccagagacaca

SEQ ID NO: 1898546 - RNA, 23 nt, Human
ugaggcccagagggccugcaagg

SEQ ID NO: 1898547 - RNA, 21 nt, Human
ugaggcccagagggccugcaa

SEQ ID NO: 1898548 - RNA, 22 nt, Human
ugaggcccagagggccugcaag

SEQ ID NO: 1898549 - RNA, 15 nt, Human
ugaggcccagagggc

SEQ ID NO: 1898550 - RNA, 17 nt, Human
ugaggcccagagggccu

SEQ ID NO: 1898551 - RNA, 18 nt, Human
ugaggcccagagggccug

SEQ ID NO: 1898552 - RNA, 20 nt, Human
ugaggcccagagggccugca

SEQ ID NO: 1898553 - RNA, 21 nt, Human
agcagacaguguuuucuggga

SEQ ID NO: 1898554 - RNA, 12 nt, Human
agcagacaggcc

SEQ ID NO: 1898555 - RNA, 16 nt, Human
agcagacugaucagga

SEQ ID NO: 1898556 - RNA, 17 nt, Human
agcagacugaucaggac

SEQ ID NO: 1898557 - RNA, 18 nt, Human
agcagacugaucaggacc

SEQ ID NO: 1898558 - RNA, 19 nt, Human
agcagacugaucaggaccu

SEQ ID NO: 1898559 - RNA, 21 nt, Human
agcagagaaugaaagggccca

SEQ ID NO: 1898560 - RNA, 23 nt, Human
agcagagaaugaaagggcccaga

SEQ ID NO: 1898561 - RNA, 22 nt, Human
agcagagaaugaaagggcccag

SEQ ID NO: 1898562 - RNA, 14 nt, Human
agcagagaauucuc

SEQ ID NO: 1898563 - RNA, 21 nt, Human
agcagagaauucucuuaucca

SEQ ID NO: 1898564 - RNA, 15 nt, Human
agcagagaccauccc

SEQ ID NO: 1898565 - RNA, 16 nt, Human
agcagagaccaucccu

SEQ ID NO: 1898566 - RNA, 10 nt, Human
ugagccuggc

SEQ ID NO: 1898567 - RNA, 14 nt, Human
ugagccugggaggu

SEQ ID NO: 1898568 - RNA, 11 nt, Human
ugagccuggca

SEQ ID NO: 1898569 - RNA, 16 nt, Human
ugagccuggcaagaau

SEQ ID NO: 1898570 - RNA, 19 nt, Human
ugagccugggaggucaagg

SEQ ID NO: 1898571 - RNA, 22 nt, Human
ugagccugggaggucaaggcug

SEQ ID NO: 1898572 - RNA, 14 nt, Human
ugagccuugaacuu

SEQ ID NO: 1898573 - RNA, 19 nt, Human
ugagccuugaacuuugacc

SEQ ID NO: 1898574 - RNA, 18 nt, Human
ugagccuugaacuuugac

SEQ ID NO: 1898575 - RNA, 17 nt, Human
ugagccuugaacuuuga

SEQ ID NO: 1898576 - RNA, 15 nt, Human
ugagccuugaacuuu

SEQ ID NO: 1898577 - RNA, 20 nt, Human
ugagcgacagugagacucug

SEQ ID NO: 1898578 - RNA, 16 nt, Human
ugagcgacagugagac

SEQ ID NO: 1898579 - RNA, 14 nt, Human
ugagcgacagugag

SEQ ID NO: 1898580 - RNA, 13 nt, Human
ugagcgacaguga

SEQ ID NO: 1898581 - RNA, 18 nt, Human
agcacgaaauguuauuuu

SEQ ID NO: 1898582 - RNA, 16 nt, Human
agcacgauuucuguuu

SEQ ID NO: 1898583 - RNA, 15 nt, Human
agcacgauuucuguu

SEQ ID NO: 1898584 - RNA, 14 nt, Human
agcacgauuucugu

SEQ ID NO: 1898585 - RNA, 17 nt, Human
agcacgaaauguuauuu

SEQ ID NO: 1898586 - RNA, 13 nt, Human
agcacgauuucug

SEQ ID NO: 1898587 - RNA, 23 nt, Human
agcaccuuagacagucccugcca

SEQ ID NO: 1898588 - RNA, 19 nt, Human
agcaccuuagacagucccu

SEQ ID NO: 1898589 - RNA, 20 nt, Human
agcaccuuagacagucccug

SEQ ID NO: 1898590 - RNA, 21 nt, Human
agcaccuuagacagucccugc

SEQ ID NO: 1898591 - RNA, 22 nt, Human
agcaccuuagacagucccugcc

SEQ ID NO: 1898592 - RNA, 22 nt, Human
agcacuuugggaggccaaggug

SEQ ID NO: 1898593 - RNA, 14 nt, Human
agcacuuugggagg

SEQ ID NO: 1898594 - RNA, 16 nt, Human
agcacuuguccagcug

SEQ ID NO: 1898595 - RNA, 22 nt, Human
agcacuuucuacaaugugaacu

SEQ ID NO: 1898596 - RNA, 23 nt, Human
agcacuuugggaggccaaggugg

SEQ ID NO: 1898597 - RNA, 16 nt, Human
agcacuuugggaggcu

SEQ ID NO: 1898598 - RNA, 18 nt, Human
agcagaaaggcacgucca

SEQ ID NO: 1898599 - RNA, 13 nt, Human
agcagaaaugccu

SEQ ID NO: 1898600 - RNA, 12 nt, Human
agcagaaaugcc

SEQ ID NO: 1898601 - RNA, 19 nt, Human
agcagaaaugccuuacccu

SEQ ID NO: 1898602 - RNA, 14 nt, Human
agcagaacagugau

SEQ ID NO: 1898603 - RNA, 23 nt, Human
agcagaaggggguggugucucca

SEQ ID NO: 1898604 - RNA, 22 nt, Human
agcagaaggggguggugucucc

SEQ ID NO: 1898605 - RNA, 16 nt, Human
agcagaaggggguggu

SEQ ID NO: 1898606 - RNA, 12 nt, Human
agcagaaggggg

SEQ ID NO: 1898607 - RNA, 17 nt, Human
ugagcaauguauaaccc

SEQ ID NO: 1898608 - RNA, 18 nt, Human
ugagcaauguauaacccc

SEQ ID NO: 1898609 - RNA, 21 nt, Human
ugagcacaacuuuaagaggac

SEQ ID NO: 1898610 - RNA, 22 nt, Human
ugagcacaacuuuaagaggaca

SEQ ID NO: 1898611 - RNA, 23 nt, Human
ugagcacuaaggugugcucugau

SEQ ID NO: 1898612 - RNA, 22 nt, Human
ugagcacuaaggugugcucuga

SEQ ID NO: 1898613 - RNA, 21 nt, Human
ugagcacuaaggugugcucug

SEQ ID NO: 1898614 - RNA, 20 nt, Human
ugagcacuaaggugugcucu

SEQ ID NO: 1898615 - RNA, 16 nt, Human
ugagcaacucuugauu

SEQ ID NO: 1898616 - RNA, 18 nt, Human
ugagcaacucuugauuau

SEQ ID NO: 1898617 - RNA, 15 nt, Human
ugagcaauccugcaa

SEQ ID NO: 1898618 - RNA, 23 nt, Human
ugagccacugcaccgggccacag

SEQ ID NO: 1898619 - RNA, 13 nt, Human
ugagccagauuuc

SEQ ID NO: 1898620 - RNA, 14 nt, Human
ugagccagauuuca

SEQ ID NO: 1898621 - RNA, 16 nt, Human
ugagccagauuucacu

SEQ ID NO: 1898622 - RNA, 18 nt, Human
ugagccacugcaccgggc

SEQ ID NO: 1898623 - RNA, 21 nt, Human
ugagccacugcaccgggccac

SEQ ID NO: 1898624 - RNA, 22 nt, Human
ugagcaucaggccaggcccucu

SEQ ID NO: 1898625 - RNA, 24 nt, Human
ugagcaucaggccaggcccucugc

SEQ ID NO: 1898626 - RNA, 21 nt, Human
ugagcaucaggccaggcccuc

SEQ ID NO: 1898627 - RNA, 16 nt, Human
agcacagcuucauuuc

SEQ ID NO: 1898628 - RNA, 15 nt, Human
agcacagugaucaag

SEQ ID NO: 1898629 - RNA, 13 nt, Human
agcacaugccucu

SEQ ID NO: 1898630 - RNA, 14 nt, Human
agcacaugccucuc

SEQ ID NO: 1898631 - RNA, 23 nt, Human
agcacaugcccuaaugucuguau

SEQ ID NO: 1898632 - RNA, 13 nt, Human
agcaagugagagc

SEQ ID NO: 1898633 - RNA, 20 nt, Human
agcaagugagacccugucuc

SEQ ID NO: 1898634 - RNA, 17 nt, Human
ugagccagauuucacuc

SEQ ID NO: 1898635 - RNA, 22 nt, Human
ugagccagauuucacucuccuu

SEQ ID NO: 1898636 - RNA, 14 nt, Human
agcaagugagagcu

SEQ ID NO: 1898637 - RNA, 18 nt, Human
agcaagugagagcugggu

SEQ ID NO: 1898638 - RNA, 22 nt, Human
agcaagugagagcuggguguca

SEQ ID NO: 1898639 - RNA, 13 nt, Human
agcacagcagccu

SEQ ID NO: 1898640 - RNA, 15 nt, Human
agcacagcagccugg

SEQ ID NO: 1898641 - RNA, 23 nt, Human
agcacagcagccuggggcuggcc

SEQ ID NO: 1898642 - RNA, 12 nt, Human
agcacagccaac

SEQ ID NO: 1898643 - RNA, 13 nt, Human
agcacagccaaca

SEQ ID NO: 1898644 - RNA, 23 nt, Human
agcacagccaacacgcaccugcc

SEQ ID NO: 1898645 - RNA, 10 nt, Human
agcacagcag

SEQ ID NO: 1898646 - RNA, 12 nt, Human
agcacagcagcc

SEQ ID NO: 1898647 - RNA, 19 nt, Human
ugacuuggggagauggagu

SEQ ID NO: 1898648 - RNA, 18 nt, Human
ugacuuggggagauggag

SEQ ID NO: 1898649 - RNA, 19 nt, Human
ugacuugacagaacacugu

SEQ ID NO: 1898650 - RNA, 17 nt, Human
ugacuugacagaacacu

SEQ ID NO: 1898651 - RNA, 21 nt, Human
agauucaaugccccugaauuu

SEQ ID NO: 1898652 - RNA, 22 nt, Human
agauucaaugccccugaauuua

SEQ ID NO: 1898653 - RNA, 19 nt, Human
agauuaugagacacaggau

SEQ ID NO: 1898654 - RNA, 20 nt, Human
agauuauggagcuuuuuucc

SEQ ID NO: 1898655 - RNA, 23 nt, Human
agauuauauauauuuuuuucuga

SEQ ID NO: 1898656 - RNA, 17 nt, Human
ugacuccagaauuuccc

SEQ ID NO: 1898657 - RNA, 19 nt, Human
ugacuccagaauuucccaa

SEQ ID NO: 1898658 - RNA, 17 nt, Human
ugaccugaggcccuucu

SEQ ID NO: 1898659 - RNA, 14 nt, Human
ugaccugaggcccu

SEQ ID NO: 1898660 - RNA, 15 nt, Human
ugaccugaggcccuu

SEQ ID NO: 1898661 - RNA, 20 nt, Human
ugacuccagaauuucccaaa

SEQ ID NO: 1898662 - RNA, 23 nt, Human
ugacuccagaauuucccaaagca

SEQ ID NO: 1898663 - RNA, 21 nt, Human
ugacuuauuuauauaaauuuu

SEQ ID NO: 1898664 - RNA, 17 nt, Human
ugacuuauuuauauaaa

SEQ ID NO: 1898665 - RNA, 20 nt, Human
ugacuuauuuauauaaauuu

SEQ ID NO: 1898666 - RNA, 21 nt, Human
agauugugccccugcacucca

SEQ ID NO: 1898667 - RNA, 16 nt, Human
agauugugccccugca

SEQ ID NO: 1898668 - RNA, 23 nt, Human
agauuggcucacacugagaaugu

SEQ ID NO: 1898669 - RNA, 14 nt, Human
agauuuaugcauau

SEQ ID NO: 1898670 - RNA, 13 nt, Human
agauuucacucuc

SEQ ID NO: 1898671 - RNA, 14 nt, Human
agauuucacucucc

SEQ ID NO: 1898672 - RNA, 21 nt, Human
agcaaaaccaaauauuccaga

SEQ ID NO: 1898673 - RNA, 12 nt, Human
agcaaaacaaaa

SEQ ID NO: 1898674 - RNA, 13 nt, Human
agcaacagaaaaa

SEQ ID NO: 1898675 - RNA, 20 nt, Human
agcaacauuuuacccacaca

SEQ ID NO: 1898676 - RNA, 16 nt, Human
agcaacagaaaaaugg

SEQ ID NO: 1898677 - RNA, 22 nt, Human
agcaacauuuuacccacacaca

SEQ ID NO: 1898678 - RNA, 14 nt, Human
agcaaccccaggcu

SEQ ID NO: 1898679 - RNA, 15 nt, Human
agcaaccccaggcug

SEQ ID NO: 1898680 - RNA, 16 nt, Human
agcaaccccaggcuga

SEQ ID NO: 1898681 - RNA, 17 nt, Human
ugaccacaccugccucu

SEQ ID NO: 1898682 - RNA, 14 nt, Human
ugaccacagcacag

SEQ ID NO: 1898683 - RNA, 21 nt, Human
agaucauugugaaauuauuca

SEQ ID NO: 1898684 - RNA, 18 nt, Human
agauccaaaagaagcccc

SEQ ID NO: 1898685 - RNA, 23 nt, Human
agauccaaaagaagcccccagcu

SEQ ID NO: 1898686 - RNA, 21 nt, Human
agauccaaaagaagcccccag

SEQ ID NO: 1898687 - RNA, 19 nt, Human
agaugauggaugccaauau

SEQ ID NO: 1898688 - RNA, 16 nt, Human
agaugauggaugccaa

SEQ ID NO: 1898689 - RNA, 15 nt, Human
agauccuuccuuuug

SEQ ID NO: 1898690 - RNA, 12 nt, Human
agauccaggacu

SEQ ID NO: 1898691 - RNA, 13 nt, Human
agauccagccugg

SEQ ID NO: 1898692 - RNA, 14 nt, Human
agauccagccuggg

SEQ ID NO: 1898693 - RNA, 13 nt, Human
agauccaggacua

SEQ ID NO: 1898694 - RNA, 20 nt, Human
ugaccaaaauggugaaaccu

SEQ ID NO: 1898695 - RNA, 14 nt, Human
ugaccaaaguccuu

SEQ ID NO: 1898696 - RNA, 16 nt, Human
ugaccaaaguccuuuu

SEQ ID NO: 1898697 - RNA, 16 nt, Human
ugacagucaugcaguc

SEQ ID NO: 1898698 - RNA, 15 nt, Human
ugacauugcguuuga

SEQ ID NO: 1898699 - RNA, 19 nt, Human
ugacauugcguuugaccuu

SEQ ID NO: 1898700 - RNA, 17 nt, Human
ugacagguuugggaccc

SEQ ID NO: 1898701 - RNA, 21 nt, Human
ugaccccgacgccacagccca

SEQ ID NO: 1898702 - RNA, 14 nt, Human
ugacccccagcucc

SEQ ID NO: 1898703 - RNA, 13 nt, Human
ugaccucugccug

SEQ ID NO: 1898704 - RNA, 22 nt, Human
ugaccccgacgccacagcccag

SEQ ID NO: 1898705 - RNA, 14 nt, Human
ugaccucugccuga

SEQ ID NO: 1898706 - RNA, 12 nt, Human
ugaccugaggcc

SEQ ID NO: 1898707 - RNA, 15 nt, Human
agauguguucacaau

SEQ ID NO: 1898708 - RNA, 18 nt, Human
agauguguucacaaugga

SEQ ID NO: 1898709 - RNA, 22 nt, Human
agaugugguugcauaagguuuu

SEQ ID NO: 1898710 - RNA, 21 nt, Human
agaugugguugcauaagguuu

SEQ ID NO: 1898711 - RNA, 23 nt, Human
ugacccagugcccccacugacca

SEQ ID NO: 1898712 - RNA, 17 nt, Human
ugacccagugcccccac

SEQ ID NO: 1898713 - RNA, 18 nt, Human
ugacccagugcccccacu

SEQ ID NO: 1898714 - RNA, 16 nt, Human
ugacccagugccccca

SEQ ID NO: 1898715 - RNA, 19 nt, Human
agauggaguucuugugcca

SEQ ID NO: 1898716 - RNA, 17 nt, Human
agauggaguucuugugc

SEQ ID NO: 1898717 - RNA, 13 nt, Human
agauggauucucc

SEQ ID NO: 1898718 - RNA, 18 nt, Human
agauggauucuccacuca

SEQ ID NO: 1898719 - RNA, 23 nt, Human
agauggauucuccacucaguugc

SEQ ID NO: 1898720 - RNA, 18 nt, Human
agaugcuucucacugcca

SEQ ID NO: 1898721 - RNA, 16 nt, Human
agaugcuucucacugc

SEQ ID NO: 1898722 - RNA, 23 nt, Human
agaugcuagaacucccuuucaac

SEQ ID NO: 1898723 - RNA, 19 nt, Human
agaugcuagcacaugcccu

SEQ ID NO: 1898724 - RNA, 22 nt, Human
ugaagcuuauuaaugcuaaggg

SEQ ID NO: 1898725 - RNA, 23 nt, Human
ugaagcuuauuaaugcuaagggc

SEQ ID NO: 1898726 - RNA, 20 nt, Human
ugaagcuuauuaaugcuaag

SEQ ID NO: 1898727 - RNA, 19 nt, Human
ugaagcuuauuaaugcuaa

SEQ ID NO: 1898728 - RNA, 18 nt, Human
ugaagcuuauuaaugcua

SEQ ID NO: 1898729 - RNA, 17 nt, Human
ugaagcuuauuaaugcu

SEQ ID NO: 1898730 - RNA, 16 nt, Human
ugaagcuuauuaaugc

SEQ ID NO: 1898731 - RNA, 13 nt, Human
ugaagccuuucuu

SEQ ID NO: 1898732 - RNA, 19 nt, Human
ugaagcagguucccaagcu

SEQ ID NO: 1898733 - RNA, 20 nt, Human
ugaagcagguucccaagcuc

SEQ ID NO: 1898734 - RNA, 18 nt, Human
ugaagauguagaggagaa

SEQ ID NO: 1898735 - RNA, 17 nt, Human
ugaagauguagaggaga

SEQ ID NO: 1898736 - RNA, 22 nt, Human
agagggagggagggcuccagac

SEQ ID NO: 1898737 - RNA, 13 nt, Human
agagggaggggcc

SEQ ID NO: 1898738 - RNA, 14 nt, Human
agagggaggggccu

SEQ ID NO: 1898739 - RNA, 16 nt, Human
agagggaggggccuag

SEQ ID NO: 1898740 - RNA, 18 nt, Human
agagggaggggccuaggc

SEQ ID NO: 1898741 - RNA, 20 nt, Human
agagggaggggccuaggccu

SEQ ID NO: 1898742 - RNA, 21 nt, Human
agagggagggagggcuccaga

SEQ ID NO: 1898743 - RNA, 22 nt, Human
agagggacuguucuuuuguccc

SEQ ID NO: 1898744 - RNA, 20 nt, Human
agagggagggagggcuccag

SEQ ID NO: 1898745 - RNA, 15 nt, Human
agagggaccucuccc

SEQ ID NO: 1898746 - RNA, 16 nt, Human
agagggaccucuccca

SEQ ID NO: 1898747 - RNA, 19 nt, Human
agagggaccucucccaggg

SEQ ID NO: 1898748 - RNA, 21 nt, Human
agaggcgcaugaauuugugaa

SEQ ID NO: 1898749 - RNA, 17 nt, Human
agaggcagaagaacccu

SEQ ID NO: 1898750 - RNA, 13 nt, Human
agaggcagaagaa

SEQ ID NO: 1898751 - RNA, 18 nt, Human
agaggcaauggcuccuuc

SEQ ID NO: 1898752 - RNA, 19 nt, Human
agaggcuaaauuacucagg

SEQ ID NO: 1898753 - RNA, 21 nt, Human
agaggcuaaauuacucaggaa

SEQ ID NO: 1898754 - RNA, 21 nt, Human
agaggccuuuaaccauggugc

SEQ ID NO: 1898755 - RNA, 19 nt, Human
agagcugggugucaagagg

SEQ ID NO: 1898756 - RNA, 21 nt, Human
ugaagacaaugacuuacugua

SEQ ID NO: 1898757 - RNA, 12 nt, Human
agaggaaagcaa

SEQ ID NO: 1898758 - RNA, 16 nt, Human
agaggaaagcaaagga

SEQ ID NO: 1898759 - RNA, 18 nt, Human
agaggaaagcaaaggaga

SEQ ID NO: 1898760 - RNA, 19 nt, Human
agaggaaagcaaaggagau

SEQ ID NO: 1898761 - RNA, 11 nt, Human
agaggaaauca

SEQ ID NO: 1898762 - RNA, 12 nt, Human
agaggaaaucac

SEQ ID NO: 1898763 - RNA, 21 nt, Human
agaggaaaucaccgaaaacgu

SEQ ID NO: 1898764 - RNA, 18 nt, Human
agaggcaacugcauuggc

SEQ ID NO: 1898765 - RNA, 13 nt, Human
ucuuuguaaugaa

SEQ ID NO: 1898766 - RNA, 15 nt, Human
ucuuuguaaugaaaa

SEQ ID NO: 1898767 - RNA, 11 nt, Human
ugaacuuugac

SEQ ID NO: 1898768 - RNA, 12 nt, Human
ucuuuguaauga

SEQ ID NO: 1898769 - RNA, 14 nt, Human
ucuuuggucuacac

SEQ ID NO: 1898770 - RNA, 21 nt, Human
ucuuuggucuacacugugcug

SEQ ID NO: 1898771 - RNA, 17 nt, Human
ugaacuuugaccucugc

SEQ ID NO: 1898772 - RNA, 16 nt, Human
ugaacuuugaccucug

SEQ ID NO: 1898773 - RNA, 17 nt, Human
ugaagacaaugacuuac

SEQ ID NO: 1898774 - RNA, 13 nt, Human
ugaagacaaugac

SEQ ID NO: 1898775 - RNA, 11 nt, Human
ugaagacaaug

SEQ ID NO: 1898776 - RNA, 11 nt, Human
ugaagaagaga

SEQ ID NO: 1898777 - RNA, 12 nt, Human
agauaauuauaa

SEQ ID NO: 1898778 - RNA, 16 nt, Human
agauaaguguauuuuu

SEQ ID NO: 1898779 - RNA, 18 nt, Human
agauaaguguauuuuuca

SEQ ID NO: 1898780 - RNA, 20 nt, Human
agauaaguguauuuuucaau

SEQ ID NO: 1898781 - RNA, 19 nt, Human
agagugagacucugucuca

SEQ ID NO: 1898782 - RNA, 19 nt, Human
agauaaggguaucugguga

SEQ ID NO: 1898783 - RNA, 19 nt, Human
agauacaggaaaagcugcu

SEQ ID NO: 1898784 - RNA, 22 nt, Human
agauauuuugcuuugugauuuu

SEQ ID NO: 1898785 - RNA, 19 nt, Human
agaucaaccccuucgcucc

SEQ ID NO: 1898786 - RNA, 14 nt, Human
agaucaaccccuuc

SEQ ID NO: 1898787 - RNA, 21 nt, Human
agaucaaccccuucgcuccug

SEQ ID NO: 1898788 - RNA, 22 nt, Human
agagucucacuguugcccaggc

SEQ ID NO: 1898789 - RNA, 14 nt, Human
agagugaacaaauu

SEQ ID NO: 1898790 - RNA, 20 nt, Human
agagucucacuguugcccag

SEQ ID NO: 1898791 - RNA, 16 nt, Human
agagugagacucuguc

SEQ ID NO: 1898792 - RNA, 15 nt, Human
agagugagacucugu

SEQ ID NO: 1898793 - RNA, 22 nt, Human
agagugaacaaauuuacagaga

SEQ ID NO: 1898794 - RNA, 18 nt, Human
agagucuauuuacggaac

SEQ ID NO: 1898795 - RNA, 14 nt, Human
ugaaugucagugug

SEQ ID NO: 1898796 - RNA, 17 nt, Human
ugaauguauuuauuugg

SEQ ID NO: 1898797 - RNA, 15 nt, Human
ugaaugucaguguga

SEQ ID NO: 1898798 - RNA, 18 nt, Human
ugaaugucagugugacug

SEQ ID NO: 1898799 - RNA, 14 nt, Human
agaguccucugaau

SEQ ID NO: 1898800 - RNA, 19 nt, Human
ugaauguauuuauuuggga

SEQ ID NO: 1898801 - RNA, 23 nt, Human
ugaauguauuuauuugggagacc

SEQ ID NO: 1898802 - RNA, 12 nt, Human
agaguccucuga

SEQ ID NO: 1898803 - RNA, 13 nt, Human
agaguccucugaa

SEQ ID NO: 1898804 - RNA, 18 nt, Human
ugaagguggaaauaaacu

SEQ ID NO: 1898805 - RNA, 19 nt, Human
ugaaggugcugacggccag

SEQ ID NO: 1898806 - RNA, 20 nt, Human
ugaaggugcugacggccagg

SEQ ID NO: 1898807 - RNA, 15 nt, Human
ugaaggugcugacgg

SEQ ID NO: 1898808 - RNA, 12 nt, Human
ugaagcuuccuu

SEQ ID NO: 1898809 - RNA, 13 nt, Human
ugaagcuuuacca

SEQ ID NO: 1898810 - RNA, 16 nt, Human
ugaauauaaacacuau

SEQ ID NO: 1898811 - RNA, 21 nt, Human
ugaauauaauauauuugugua

SEQ ID NO: 1898812 - RNA, 22 nt, Human
ugaauauaauauauuuguguau

SEQ ID NO: 1898813 - RNA, 15 nt, Human
ugaauauaaacacua

SEQ ID NO: 1898814 - RNA, 16 nt, Human
ugaagguuucugaaaa

SEQ ID NO: 1898815 - RNA, 13 nt, Human
ugaagguuucuga

SEQ ID NO: 1898816 - RNA, 17 nt, Human
ucuuggacacuguacaa

SEQ ID NO: 1898817 - RNA, 16 nt, Human
ucuuggacacuguaca

SEQ ID NO: 1898818 - RNA, 12 nt, Human
ucuuggagccug

SEQ ID NO: 1898819 - RNA, 14 nt, Human
ucuuggagccugca

SEQ ID NO: 1898820 - RNA, 13 nt, Human
ucuuggagccugc

SEQ ID NO: 1898821 - RNA, 16 nt, Human
ucuugcaauggcagcc

SEQ ID NO: 1898822 - RNA, 13 nt, Human
ucuugcaauggca

SEQ ID NO: 1898823 - RNA, 17 nt, Human
ucuugcaauggcagccu

SEQ ID NO: 1898824 - RNA, 20 nt, Human
ucuugaugccuggcggggug

SEQ ID NO: 1898825 - RNA, 14 nt, Human
ucuugaugccuggc

SEQ ID NO: 1898826 - RNA, 12 nt, Human
ucuugaugacca

SEQ ID NO: 1898827 - RNA, 19 nt, Human
agaccugcagacgcccaga

SEQ ID NO: 1898828 - RNA, 23 nt, Human
agaccugauccuggaggcccagu

SEQ ID NO: 1898829 - RNA, 18 nt, Human
agacucauucuucuguac

SEQ ID NO: 1898830 - RNA, 17 nt, Human
agacucauucuucugua

SEQ ID NO: 1898831 - RNA, 19 nt, Human
agacuaucuaaauguugaa

SEQ ID NO: 1898832 - RNA, 17 nt, Human
agacuaucuaaauguug

SEQ ID NO: 1898833 - RNA, 18 nt, Human
agacuaucuaaauguuga

SEQ ID NO: 1898834 - RNA, 18 nt, Human
agaccugauccuggaggc

SEQ ID NO: 1898835 - RNA, 19 nt, Human
agaccugauccuggaggcc

SEQ ID NO: 1898836 - RNA, 21 nt, Human
agaccugauccuggaggccca

SEQ ID NO: 1898837 - RNA, 22 nt, Human
agaccugauccuggaggcccag

SEQ ID NO: 1898838 - RNA, 19 nt, Human
agaccugacaccuuucaua

SEQ ID NO: 1898839 - RNA, 14 nt, Human
agaccugauccugg

SEQ ID NO: 1898840 - RNA, 15 nt, Human
agaccugauccugga

SEQ ID NO: 1898841 - RNA, 16 nt, Human
agaccugauccuggag

SEQ ID NO: 1898842 - RNA, 12 nt, Human
agacccugcccu

SEQ ID NO: 1898843 - RNA, 13 nt, Human
agacccugcccug

SEQ ID NO: 1898844 - RNA, 14 nt, Human
agacccugcccugu

SEQ ID NO: 1898845 - RNA, 18 nt, Human
agacauguuuuccgugaa

SEQ ID NO: 1898846 - RNA, 19 nt, Human
agaccuaacgagaaauaga

SEQ ID NO: 1898847 - RNA, 15 nt, Human
agaccuaaugcuccu

SEQ ID NO: 1898848 - RNA, 18 nt, Human
agaccuaaugcuccuugu

SEQ ID NO: 1898849 - RNA, 19 nt, Human
agacccuuguggucccacc

SEQ ID NO: 1898850 - RNA, 20 nt, Human
agacccuuguggucccaccc

SEQ ID NO: 1898851 - RNA, 22 nt, Human
agacccuuguggucccacccca

SEQ ID NO: 1898852 - RNA, 23 nt, Human
agacccuuguggucccaccccac

SEQ ID NO: 1898853 - RNA, 13 nt, Human
agacccuuguggu

SEQ ID NO: 1898854 - RNA, 15 nt, Human
agacccuuguggucc

SEQ ID NO: 1898855 - RNA, 16 nt, Human
agacccugcccugugg

SEQ ID NO: 1898856 - RNA, 19 nt, Human
agacccugcccugugggcc

SEQ ID NO: 1898857 - RNA, 21 nt, Human
agacccugcccugugggcccc

SEQ ID NO: 1898858 - RNA, 23 nt, Human
agacccugcccugugggccccca

SEQ ID NO: 1898859 - RNA, 15 nt, Human
ucuuuacuucaugga

SEQ ID NO: 1898860 - RNA, 19 nt, Human
ucuuggagccugcagagcu

SEQ ID NO: 1898861 - RNA, 18 nt, Human
ucuuggagccugcagagc

SEQ ID NO: 1898862 - RNA, 15 nt, Human
ucuuggagccugcag

SEQ ID NO: 1898863 - RNA, 17 nt, Human
agacucuacagaggcca

SEQ ID NO: 1898864 - RNA, 21 nt, Human
agacucgcgacaaugcaaacc

SEQ ID NO: 1898865 - RNA, 19 nt, Human
agacucuacagaggccaug

SEQ ID NO: 1898866 - RNA, 18 nt, Human
agacuccugcaggcagcc

SEQ ID NO: 1898867 - RNA, 19 nt, Human
agacuccugcaggcagcca

SEQ ID NO: 1898868 - RNA, 20 nt, Human
agacuccugcaggcagccag

SEQ ID NO: 1898869 - RNA, 23 nt, Human
agacuccugcaggcagccaggcc

SEQ ID NO: 1898870 - RNA, 13 nt, Human
ucuuuccugaggc

SEQ ID NO: 1898871 - RNA, 14 nt, Human
ucuuuccugaggcu

SEQ ID NO: 1898872 - RNA, 15 nt, Human
ucuuuccugaggcug

SEQ ID NO: 1898873 - RNA, 16 nt, Human
ucuuuccugaggcugg

SEQ ID NO: 1898874 - RNA, 14 nt, Human
agacuccugcaggc

SEQ ID NO: 1898875 - RNA, 15 nt, Human
agacuccugcaggca

SEQ ID NO: 1898876 - RNA, 16 nt, Human
agacuccugcaggcag

SEQ ID NO: 1898877 - RNA, 17 nt, Human
agacuccugcaggcagc

SEQ ID NO: 1898878 - RNA, 15 nt, Human
agacuuuggaaagac

SEQ ID NO: 1898879 - RNA, 18 nt, Human
agagaaugaaagggccca

SEQ ID NO: 1898880 - RNA, 14 nt, Human
agacuuuggaaaga

SEQ ID NO: 1898881 - RNA, 12 nt, Human
agacuuuggaaa

SEQ ID NO: 1898882 - RNA, 15 nt, Human
agagaccaucccuga

SEQ ID NO: 1898883 - RNA, 15 nt, Human
ucuuugggccagaca

SEQ ID NO: 1898884 - RNA, 16 nt, Human
ucuuugggccagacau

SEQ ID NO: 1898885 - RNA, 20 nt, Human
ucuuugggccagacaugcca

SEQ ID NO: 1898886 - RNA, 13 nt, Human
agagaccaucccu

SEQ ID NO: 1898887 - RNA, 14 nt, Human
agagaccaucccug

SEQ ID NO: 1898888 - RNA, 14 nt, Human
agacuucaucccuc

SEQ ID NO: 1898889 - RNA, 17 nt, Human
agacuucaucccucugg

SEQ ID NO: 1898890 - RNA, 17 nt, Human
agacuguugucccugca

SEQ ID NO: 1898891 - RNA, 18 nt, Human
ucuuaaucuuuucacaaa

SEQ ID NO: 1898892 - RNA, 17 nt, Human
ucuuaaucuuuucacaa

SEQ ID NO: 1898893 - RNA, 14 nt, Human
ucuuaauauucugg

SEQ ID NO: 1898894 - RNA, 18 nt, Human
ucuuaauauucuggaguc

SEQ ID NO: 1898895 - RNA, 22 nt, Human
ucuuauugcccacgcuggagug

SEQ ID NO: 1898896 - RNA, 18 nt, Human
ucuuauugcccacgcugg

SEQ ID NO: 1898897 - RNA, 14 nt, Human
ucuuauugcccacg

SEQ ID NO: 1898898 - RNA, 18 nt, Human
ucuuaugggcuggguucu

SEQ ID NO: 1898899 - RNA, 15 nt, Human
ucuuaugggcugggu

SEQ ID NO: 1898900 - RNA, 16 nt, Human
ucuuaugggcuggguu

SEQ ID NO: 1898901 - RNA, 14 nt, Human
ucuuaugggcuggg

SEQ ID NO: 1898902 - RNA, 22 nt, Human
ucuuccaggcugggagagccuu

SEQ ID NO: 1898903 - RNA, 17 nt, Human
ucuuauuuuuuaaaaag

SEQ ID NO: 1898904 - RNA, 12 nt, Human
ucuucaacaaau

SEQ ID NO: 1898905 - RNA, 20 nt, Human
ucuucagaaagugugcuuua

SEQ ID NO: 1898906 - RNA, 23 nt, Human
ucuucagaaagugugcuuuaugc

SEQ ID NO: 1898907 - RNA, 23 nt, Human
agacaggcaagcaccuccugccu

SEQ ID NO: 1898908 - RNA, 15 nt, Human
agacaggaccaggga

SEQ ID NO: 1898909 - RNA, 16 nt, Human
agacaggaccagggau

SEQ ID NO: 1898910 - RNA, 21 nt, Human
agacaggguuuugccauguug

SEQ ID NO: 1898911 - RNA, 23 nt, Human
agacaggguuucaccauguugcc

SEQ ID NO: 1898912 - RNA, 19 nt, Human
agacaggguuucaccaugu

SEQ ID NO: 1898913 - RNA, 19 nt, Human
agacagucccugccaaugg

SEQ ID NO: 1898914 - RNA, 15 nt, Human
agacagucccugcca

SEQ ID NO: 1898915 - RNA, 16 nt, Human
agacagucccugccaa

SEQ ID NO: 1898916 - RNA, 17 nt, Human
agacagucccugccaau

SEQ ID NO: 1898917 - RNA, 22 nt, Human
agacacugaaauauacacacag

SEQ ID NO: 1898918 - RNA, 20 nt, Human
agacacugaaauauacacac

SEQ ID NO: 1898919 - RNA, 21 nt, Human
agacacugaaauauacacaca

SEQ ID NO: 1898920 - RNA, 22 nt, Human
agacacuccccgaagucuuuug

SEQ ID NO: 1898921 - RNA, 23 nt, Human
agacacuccccgaagucuuuugu

SEQ ID NO: 1898922 - RNA, 13 nt, Human
agacacugaaaua

SEQ ID NO: 1898923 - RNA, 23 nt, Human
agacagcuucucauccugcaggc

SEQ ID NO: 1898924 - RNA, 22 nt, Human
agacagcuucucauccugcagg

SEQ ID NO: 1898925 - RNA, 17 nt, Human
agaauuugauaugugaa

SEQ ID NO: 1898926 - RNA, 19 nt, Human
agaauuugauaugugaaca

SEQ ID NO: 1898927 - RNA, 18 nt, Human
agaauuugauaugugaac

SEQ ID NO: 1898928 - RNA, 20 nt, Human
agaauuugauaugugaacag

SEQ ID NO: 1898929 - RNA, 21 nt, Human
agacacccucaaccucuucug

SEQ ID NO: 1898930 - RNA, 20 nt, Human
agacacuccccgaagucuuu

SEQ ID NO: 1898931 - RNA, 12 nt, Human
agacacccagga

SEQ ID NO: 1898932 - RNA, 13 nt, Human
agacacccaggac

SEQ ID NO: 1898933 - RNA, 14 nt, Human
agacacccaggacu

SEQ ID NO: 1898934 - RNA, 15 nt, Human
agacacccaggacuu

SEQ ID NO: 1898935 - RNA, 16 nt, Human
agacacccaggacuua

SEQ ID NO: 1898936 - RNA, 19 nt, Human
agacacccucaaccucuuc

SEQ ID NO: 1898937 - RNA, 20 nt, Human
ucuguuggccagugugacaa

SEQ ID NO: 1898938 - RNA, 19 nt, Human
ucuguuggccagugugaca

SEQ ID NO: 1898939 - RNA, 18 nt, Human
ucuguuggccagugugac

SEQ ID NO: 1898940 - RNA, 18 nt, Human
ucuguucccccuucacaa

SEQ ID NO: 1898941 - RNA, 20 nt, Human
ucuguucccccuucacaaag

SEQ ID NO: 1898942 - RNA, 13 nt, Human
ucuguucccccuu

SEQ ID NO: 1898943 - RNA, 15 nt, Human
ucugugaaaggaaag

SEQ ID NO: 1898944 - RNA, 21 nt, Human
ucugugaaaggaaagagggag

SEQ ID NO: 1898945 - RNA, 18 nt, Human
ucugugccuucuuuugau

SEQ ID NO: 1898946 - RNA, 22 nt, Human
ucugugccuucuuuugauuaug

SEQ ID NO: 1898947 - RNA, 23 nt, Human
agaauuucccaaagcagugcaug

SEQ ID NO: 1898948 - RNA, 21 nt, Human
agaauuuauucaauuccucug

SEQ ID NO: 1898949 - RNA, 21 nt, Human
agaauuucuaggacugaauua

SEQ ID NO: 1898950 - RNA, 13 nt, Human
agaauuucuagga

SEQ ID NO: 1898951 - RNA, 17 nt, Human
agaauuucccaaagcag

SEQ ID NO: 1898952 - RNA, 18 nt, Human
agaauuucccaaagcagu

SEQ ID NO: 1898953 - RNA, 15 nt, Human
agaauuuagguuuuu

SEQ ID NO: 1898954 - RNA, 13 nt, Human
agaauuuauucaa

SEQ ID NO: 1898955 - RNA, 14 nt, Human
agaauuuauucaau

SEQ ID NO: 1898956 - RNA, 20 nt, Human
agaauugucuuucugucucu

SEQ ID NO: 1898957 - RNA, 15 nt, Human
ucugucauuugagca

SEQ ID NO: 1898958 - RNA, 13 nt, Human
ucugucagucaca

SEQ ID NO: 1898959 - RNA, 17 nt, Human
ucugucagucacagcca

SEQ ID NO: 1898960 - RNA, 19 nt, Human
ucugucagucacagccacc

SEQ ID NO: 1898961 - RNA, 23 nt, Human
ucugucauuugagcagggcucag

SEQ ID NO: 1898962 - RNA, 20 nt, Human
ucugucauuugagcagggcu

SEQ ID NO: 1898963 - RNA, 16 nt, Human
ucuggguucacugcaa

SEQ ID NO: 1898964 - RNA, 14 nt, Human
ucuggguucacugc

SEQ ID NO: 1898965 - RNA, 11 nt, Human
ucuggggcugu

SEQ ID NO: 1898966 - RNA, 16 nt, Human
ucuggggcucugggau

SEQ ID NO: 1898967 - RNA, 18 nt, Human
ucugguccauagagagca

SEQ ID NO: 1898968 - RNA, 14 nt, Human
ucugguccuaccca

SEQ ID NO: 1898969 - RNA, 13 nt, Human
ucugguccuaccc

SEQ ID NO: 1898970 - RNA, 15 nt, Human
ucuggggcucuggga

SEQ ID NO: 1898971 - RNA, 16 nt, Human
agaaggaaaaggcagg

SEQ ID NO: 1898972 - RNA, 22 nt, Human
agaagcuuuugaauaaaaacuu

SEQ ID NO: 1898973 - RNA, 18 nt, Human
agaagcuuccauuccaag

SEQ ID NO: 1898974 - RNA, 19 nt, Human
agaagaaaauggaaccagg

SEQ ID NO: 1898975 - RNA, 20 nt, Human
agaagaaaauggaaccaggc

SEQ ID NO: 1898976 - RNA, 15 nt, Human
agaagaaaacaucua

SEQ ID NO: 1898977 - RNA, 23 nt, Human
agaagaaaacaucuauucucucc

SEQ ID NO: 1898978 - RNA, 22 nt, Human
agaacucauguuauuuuuuaac

SEQ ID NO: 1898979 - RNA, 19 nt, Human
agaacucauguuauuuuuu

SEQ ID NO: 1898980 - RNA, 14 nt, Human
agaacucccuuuca

SEQ ID NO: 1898981 - RNA, 21 nt, Human
agaacucaugacggaagaguu

SEQ ID NO: 1898982 - RNA, 23 nt, Human
agaacuacaaacaaaauuucuau

SEQ ID NO: 1898983 - RNA, 22 nt, Human
agaacuacaaacaaaauuucua

SEQ ID NO: 1898984 - RNA, 19 nt, Human
agaacucacuggggccuac

SEQ ID NO: 1898985 - RNA, 17 nt, Human
agaacucaguuuuaacu

SEQ ID NO: 1898986 - RNA, 18 nt, Human
agaacuacaaacaaaauu

SEQ ID NO: 1898987 - RNA, 16 nt, Human
agaacuaaacucauuu

SEQ ID NO: 1898988 - RNA, 18 nt, Human
agaacuaaacucauuuau

SEQ ID NO: 1898989 - RNA, 12 nt, Human
agaacuaaacuc

SEQ ID NO: 1898990 - RNA, 21 nt, Human
agaacggggcucuucucauuu

SEQ ID NO: 1898991 - RNA, 20 nt, Human
agaacggggcucuucucauu

SEQ ID NO: 1898992 - RNA, 19 nt, Human
agaacggggcucuucucau

SEQ ID NO: 1898993 - RNA, 17 nt, Human
agaacggggcucuucuc

SEQ ID NO: 1898994 - RNA, 15 nt, Human
ucugcagaaacagaa

SEQ ID NO: 1898995 - RNA, 16 nt, Human
agaaauguacagcaag

SEQ ID NO: 1898996 - RNA, 17 nt, Human
agaaauguacagcaagg

SEQ ID NO: 1898997 - RNA, 11 nt, Human
agaaauguguu

SEQ ID NO: 1898998 - RNA, 19 nt, Human
ucugacccugcuucaaaua

SEQ ID NO: 1898999 - RNA, 15 nt, Human
agaaagacagagcug

SEQ ID NO: 1899000 - RNA, 21 nt, Human
ucugauucccaagcucugcuc

SEQ ID NO: 1899001 - RNA, 20 nt, Human
ucugauucccaagcucugcu

SEQ ID NO: 1899002 - RNA, 19 nt, Human
ucugauucccaagcucugc

SEQ ID NO: 1899003 - RNA, 17 nt, Human
ucugauacagaaaaguu

SEQ ID NO: 1899004 - RNA, 16 nt, Human
ucugauacagaaaagu

SEQ ID NO: 1899005 - RNA, 15 nt, Human
ucugagaaacaauga

SEQ ID NO: 1899006 - RNA, 22 nt, Human
agaagaaaauggaaccaggcuu

SEQ ID NO: 1899007 - RNA, 23 nt, Human
agaagaaaauggaaccaggcuug

SEQ ID NO: 1899008 - RNA, 21 nt, Human
agaagaaggcagcagguggca

SEQ ID NO: 1899009 - RNA, 14 nt, Human
agaagaaggcagca

SEQ ID NO: 1899010 - RNA, 13 nt, Human
agaagaaggcagc

SEQ ID NO: 1899011 - RNA, 20 nt, Human
agaagaacuguguuucaagu

SEQ ID NO: 1899012 - RNA, 21 nt, Human
agaagaacuguguuucaaguu

SEQ ID NO: 1899013 - RNA, 14 nt, Human
ucugcccuccaaga

SEQ ID NO: 1899014 - RNA, 18 nt, Human
ucugcccuccaagaccuu

SEQ ID NO: 1899015 - RNA, 16 nt, Human
ucugcucacauaucug

SEQ ID NO: 1899016 - RNA, 17 nt, Human
ucugcucacauaucugu

SEQ ID NO: 1899017 - RNA, 14 nt, Human
ucugcucagcuucu

SEQ ID NO: 1899018 - RNA, 15 nt, Human
ucugcucagcuucuc

SEQ ID NO: 1899019 - RNA, 18 nt, Human
ucugcucagcuucuccug

SEQ ID NO: 1899020 - RNA, 22 nt, Human
ucugcucaggagaccuggagga

SEQ ID NO: 1899021 - RNA, 14 nt, Human
ucugcucagcucug

SEQ ID NO: 1899022 - RNA, 16 nt, Human
ucugcucagcucuggg

SEQ ID NO: 1899023 - RNA, 17 nt, Human
ucugcugguuuuaacaa

SEQ ID NO: 1899024 - RNA, 21 nt, Human
ucugcuguucucuagaaagaa

SEQ ID NO: 1899025 - RNA, 12 nt, Human
ucugcuugaguc

SEQ ID NO: 1899026 - RNA, 14 nt, Human
ucugcuugagucag

SEQ ID NO: 1899027 - RNA, 18 nt, Human
ucugcuugacaacaucug

SEQ ID NO: 1899028 - RNA, 19 nt, Human
ucugcuugacaacaucuga

SEQ ID NO: 1899029 - RNA, 21 nt, Human
ucuggagucucacuugucuca

SEQ ID NO: 1899030 - RNA, 14 nt, Human
ucuggaguggccac

SEQ ID NO: 1899031 - RNA, 15 nt, Human
ucuggaguggccacu

SEQ ID NO: 1899032 - RNA, 19 nt, Human
ucuggaguggccacuaagc

SEQ ID NO: 1899033 - RNA, 16 nt, Human
ucuggaguugaucugg

SEQ ID NO: 1899034 - RNA, 17 nt, Human
ucuggaguugaucugga

SEQ ID NO: 1899035 - RNA, 21 nt, Human
ucuggaguugaucuggaaccc

SEQ ID NO: 1899036 - RNA, 18 nt, Human
ucuggagguacgaaaaga

SEQ ID NO: 1899037 - RNA, 22 nt, Human
ucuggaacccagacucagacau

SEQ ID NO: 1899038 - RNA, 23 nt, Human
ucuggaacccagacucagacauu

SEQ ID NO: 1899039 - RNA, 15 nt, Human
ucuggaaccucagcc

SEQ ID NO: 1899040 - RNA, 16 nt, Human
ucuggaaccucagccu

SEQ ID NO: 1899041 - RNA, 23 nt, Human
ucugcuuuuuaaagaaugcucuu

SEQ ID NO: 1899042 - RNA, 20 nt, Human
ucugcuugagucagguuuga

SEQ ID NO: 1899043 - RNA, 13 nt, Human
ucuggaacccaga

SEQ ID NO: 1899044 - RNA, 14 nt, Human
ucuggaacccagac

SEQ ID NO: 1899045 - RNA, 14 nt, Human
ucuggaaagcaaag

SEQ ID NO: 1899046 - RNA, 15 nt, Human
ucuggaacccagacu

SEQ ID NO: 1899047 - RNA, 16 nt, Human
ucuggaacccagacuc

SEQ ID NO: 1899048 - RNA, 17 nt, Human
ucuggaacccagacuca

SEQ ID NO: 1899049 - RNA, 18 nt, Human
ucuggaacccagacucag

SEQ ID NO: 1899050 - RNA, 12 nt, Human
ucuggauuauau

SEQ ID NO: 1899051 - RNA, 18 nt, Human
ucuggauuauauuaugaa

SEQ ID NO: 1899052 - RNA, 14 nt, Human
ucuggcagcucaga

SEQ ID NO: 1899053 - RNA, 15 nt, Human
ucuggcagcucagag

SEQ ID NO: 1899054 - RNA, 16 nt, Human
ucuggcagccucccau

SEQ ID NO: 1899055 - RNA, 15 nt, Human
agaagcggcuggcag

SEQ ID NO: 1899056 - RNA, 16 nt, Human
agaagcggcuggcagc

SEQ ID NO: 1899057 - RNA, 13 nt, Human
agaagcuaagcug

SEQ ID NO: 1899058 - RNA, 20 nt, Human
agaagcuauaaauuccucuu

SEQ ID NO: 1899059 - RNA, 21 nt, Human
agaagcuauaaauuccucuuu

SEQ ID NO: 1899060 - RNA, 16 nt, Human
ucuggcagcucagaga

SEQ ID NO: 1899061 - RNA, 21 nt, Human
ucuggcagccucccauccagg

SEQ ID NO: 1899062 - RNA, 11 nt, Human
ucuggcccuau

SEQ ID NO: 1899063 - RNA, 22 nt, Human
ucucuuuaaugucacaggcagg

SEQ ID NO: 1899064 - RNA, 15 nt, Human
ucucuuucaugaguu

SEQ ID NO: 1899065 - RNA, 13 nt, Human
ucucuugagccug

SEQ ID NO: 1899066 - RNA, 14 nt, Human
ucucuugagccugg

SEQ ID NO: 1899067 - RNA, 15 nt, Human
ucucuugagccuggg

SEQ ID NO: 1899068 - RNA, 12 nt, Human
ucucuuucuuua

SEQ ID NO: 1899069 - RNA, 18 nt, Human
agaaaaaggaugcacaga

SEQ ID NO: 1899070 - RNA, 17 nt, Human
agaaaaaugagccuggc

SEQ ID NO: 1899071 - RNA, 23 nt, Human
agaaaacacuuaaaaugaucauu

SEQ ID NO: 1899072 - RNA, 15 nt, Human
agaaagaagaugaau

SEQ ID NO: 1899073 - RNA, 12 nt, Human
agaaagaagccc

SEQ ID NO: 1899074 - RNA, 15 nt, Human
agaaacuggaacucu

SEQ ID NO: 1899075 - RNA, 13 nt, Human
agaaacuggaacu

SEQ ID NO: 1899076 - RNA, 12 nt, Human
agaaaacaucua

SEQ ID NO: 1899077 - RNA, 17 nt, Human
ucucuggccuucggccu

SEQ ID NO: 1899078 - RNA, 16 nt, Human
ucucuggccuucggcc

SEQ ID NO: 1899079 - RNA, 13 nt, Human
ucucuggccuucg

SEQ ID NO: 1899080 - RNA, 21 nt, Human
ucucugcgugcagggacaaag

SEQ ID NO: 1899081 - RNA, 14 nt, Human
ucucuugagagggu

SEQ ID NO: 1899082 - RNA, 20 nt, Human
ucuccuucaccuuugucccc

SEQ ID NO: 1899083 - RNA, 19 nt, Human
ucuccuucagcccucaccc

SEQ ID NO: 1899084 - RNA, 15 nt, Human
ucuccuucagcccuc

SEQ ID NO: 1899085 - RNA, 17 nt, Human
acuuuuuuuuguauguu

SEQ ID NO: 1899086 - RNA, 13 nt, Human
ucucuccagcccc

SEQ ID NO: 1899087 - RNA, 14 nt, Human
ucucuccagccccu

SEQ ID NO: 1899088 - RNA, 16 nt, Human
ucuccuuccugugugu

SEQ ID NO: 1899089 - RNA, 14 nt, Human
ucuccuuccugugu

SEQ ID NO: 1899090 - RNA, 13 nt, Human
ucuccuuccugug

SEQ ID NO: 1899091 - RNA, 20 nt, Human
ucuccuucagcccucacccc

SEQ ID NO: 1899092 - RNA, 22 nt, Human
ucucuccuguaccucuugagcc

SEQ ID NO: 1899093 - RNA, 20 nt, Human
ucucuccuguaccucuugag

SEQ ID NO: 1899094 - RNA, 15 nt, Human
ucucuccagccccug

SEQ ID NO: 1899095 - RNA, 13 nt, Human
ucucuccagaugu

SEQ ID NO: 1899096 - RNA, 16 nt, Human
ucucuccagauguuuc

SEQ ID NO: 1899097 - RNA, 18 nt, Human
ucucugccauaaaugauu

SEQ ID NO: 1899098 - RNA, 12 nt, Human
ucucugcccaac

SEQ ID NO: 1899099 - RNA, 13 nt, Human
ucucugcccaacc

SEQ ID NO: 1899100 - RNA, 13 nt, Human
ucuccucugcugc

SEQ ID NO: 1899101 - RNA, 14 nt, Human
ucuccucugcugcu

SEQ ID NO: 1899102 - RNA, 12 nt, Human
ucuccucugcug

SEQ ID NO: 1899103 - RNA, 19 nt, Human
ucucccuuggauugucccc

SEQ ID NO: 1899104 - RNA, 21 nt, Human
ucucccuuggauuguccccga

SEQ ID NO: 1899105 - RNA, 11 nt, Human
ucucccuugga

SEQ ID NO: 1899106 - RNA, 18 nt, Human
ucucccuuggauuguccc

SEQ ID NO: 1899107 - RNA, 14 nt, Human
acuuuuggcauuuu

SEQ ID NO: 1899108 - RNA, 14 nt, Human
acuuuuggaaggua

SEQ ID NO: 1899109 - RNA, 15 nt, Human
acuuuuuuuuaaguu

SEQ ID NO: 1899110 - RNA, 22 nt, Human
acuuuuuuuuuuuaagaguaaa

SEQ ID NO: 1899111 - RNA, 23 nt, Human
acuuuuuugcuauccagcuauuu

SEQ ID NO: 1899112 - RNA, 15 nt, Human
acuuuuucuuuaugu

SEQ ID NO: 1899113 - RNA, 23 nt, Human
acuuuggaaagacuuuuccaacc

SEQ ID NO: 1899114 - RNA, 17 nt, Human
acuuuggaaagacuuuu

SEQ ID NO: 1899115 - RNA, 12 nt, Human
acuuugggaggc

SEQ ID NO: 1899116 - RNA, 17 nt, Human
acuuugggaggccaagg

SEQ ID NO: 1899117 - RNA, 17 nt, Human
acuuugggaggcugagg

SEQ ID NO: 1899118 - RNA, 19 nt, Human
acuuugaggguguauauuu

SEQ ID NO: 1899119 - RNA, 13 nt, Human
acuuuggaaagac

SEQ ID NO: 1899120 - RNA, 14 nt, Human
acuuuggaaagacu

SEQ ID NO: 1899121 - RNA, 23 nt, Human
acuuugaccucugcagcaauaaa

SEQ ID NO: 1899122 - RNA, 19 nt, Human
acuuugaccucugcagcaa

SEQ ID NO: 1899123 - RNA, 23 nt, Human
acuuuaccuuuuuuauacauaaa

SEQ ID NO: 1899124 - RNA, 22 nt, Human
acuuuaccuuuuuuauacauaa

SEQ ID NO: 1899125 - RNA, 19 nt, Human
acuuuaccuuuuuuauaca

SEQ ID NO: 1899126 - RNA, 18 nt, Human
acuuuaccuuuuuuauac

SEQ ID NO: 1899127 - RNA, 19 nt, Human
ugcagucuguccaggcucg

SEQ ID NO: 1899128 - RNA, 21 nt, Human
ugcaggucccuaauaaagcug

SEQ ID NO: 1899129 - RNA, 17 nt, Human
ugcaggucccuaauaaa

SEQ ID NO: 1899130 - RNA, 14 nt, Human
ugcagugagccgag

SEQ ID NO: 1899131 - RNA, 18 nt, Human
ugcaggucccuaauaaag

SEQ ID NO: 1899132 - RNA, 19 nt, Human
ugcaggucccuaauaaagc

SEQ ID NO: 1899133 - RNA, 20 nt, Human
ugcaggucccuaauaaagcu

SEQ ID NO: 1899134 - RNA, 15 nt, Human
ugcauaauggucaga

SEQ ID NO: 1899135 - RNA, 11 nt, Human
ugcauaauaaa

SEQ ID NO: 1899136 - RNA, 19 nt, Human
ugcauaauaaaugcuucag

SEQ ID NO: 1899137 - RNA, 12 nt, Human
ugcaguuuuccu

SEQ ID NO: 1899138 - RNA, 19 nt, Human
ugcagugagccgagauugu

SEQ ID NO: 1899139 - RNA, 19 nt, Human
agccugagcgacagugaga

SEQ ID NO: 1899140 - RNA, 19 nt, Human
ugcagccucaaccuccugg

SEQ ID NO: 1899141 - RNA, 18 nt, Human
ugcagccucaaccuccug

SEQ ID NO: 1899142 - RNA, 18 nt, Human
agccugagcgacagugag

SEQ ID NO: 1899143 - RNA, 16 nt, Human
agccugagcaacucuu

SEQ ID NO: 1899144 - RNA, 21 nt, Human
agccugagcaacucuugauua

SEQ ID NO: 1899145 - RNA, 15 nt, Human
agccucagcauccug

SEQ ID NO: 1899146 - RNA, 16 nt, Human
agccucagcauccugg

SEQ ID NO: 1899147 - RNA, 14 nt, Human
agccucagcauccu

SEQ ID NO: 1899148 - RNA, 13 nt, Human
agccucagcaucc

SEQ ID NO: 1899149 - RNA, 18 nt, Human
agccucaaccuccugggc

SEQ ID NO: 1899150 - RNA, 17 nt, Human
agccucaaccuccuggg

SEQ ID NO: 1899151 - RNA, 22 nt, Human
ugcauaccacuuuuguucuugg

SEQ ID NO: 1899152 - RNA, 21 nt, Human
ugcauaccacuuuuguucuug

SEQ ID NO: 1899153 - RNA, 13 nt, Human
ugcauaauuucag

SEQ ID NO: 1899154 - RNA, 15 nt, Human
ugcaucugaccagca

SEQ ID NO: 1899155 - RNA, 17 nt, Human
ugcaucugaccagcagc

SEQ ID NO: 1899156 - RNA, 22 nt, Human
ugcaucugaccagcagcgccuu

SEQ ID NO: 1899157 - RNA, 18 nt, Human
ugcaucugaccagcagcg

SEQ ID NO: 1899158 - RNA, 21 nt, Human
ugcaucugaccagcagcgccu

SEQ ID NO: 1899159 - RNA, 13 nt, Human
ugcaugcuguccc

SEQ ID NO: 1899160 - RNA, 14 nt, Human
ugcaugcugucccu

SEQ ID NO: 1899161 - RNA, 15 nt, Human
ugcaugcugucccuu

SEQ ID NO: 1899162 - RNA, 20 nt, Human
ugcaugaaguaauaugcaca

SEQ ID NO: 1899163 - RNA, 22 nt, Human
ugcaugaaguaauaugcacaca

SEQ ID NO: 1899164 - RNA, 21 nt, Human
ugcaugaggcuaguguggugu

SEQ ID NO: 1899165 - RNA, 23 nt, Human
agccugcaguuauuaacacuaac

SEQ ID NO: 1899166 - RNA, 18 nt, Human
agccugccacucaggccc

SEQ ID NO: 1899167 - RNA, 16 nt, Human
agccugccucuucucu

SEQ ID NO: 1899168 - RNA, 19 nt, Human
agccugccucuucucuacu

SEQ ID NO: 1899169 - RNA, 16 nt, Human
ugcaugcugucccuua

SEQ ID NO: 1899170 - RNA, 15 nt, Human
agccugcagagcugc

SEQ ID NO: 1899171 - RNA, 14 nt, Human
agccugcagagcug

SEQ ID NO: 1899172 - RNA, 13 nt, Human
agccugcagagcu

SEQ ID NO: 1899173 - RNA, 12 nt, Human
agccugcagagc

SEQ ID NO: 1899174 - RNA, 14 nt, Human
ugcacaagccaggg

SEQ ID NO: 1899175 - RNA, 13 nt, Human
ugcacaagccagg

SEQ ID NO: 1899176 - RNA, 18 nt, Human
agcagcaccguucugugc

SEQ ID NO: 1899177 - RNA, 15 nt, Human
ugcacaagcuccaag

SEQ ID NO: 1899178 - RNA, 16 nt, Human
ugcacaagcuccaagc

SEQ ID NO: 1899179 - RNA, 18 nt, Human
ugcacaagcuccaagcuc

SEQ ID NO: 1899180 - RNA, 20 nt, Human
ugcacaagcuccaagcuccc

SEQ ID NO: 1899181 - RNA, 22 nt, Human
ugcacaagcuccaagcucccag

SEQ ID NO: 1899182 - RNA, 23 nt, Human
ugcacaagcuccaagcucccagg

SEQ ID NO: 1899183 - RNA, 23 nt, Human
ugcacaugaaucccacccacaug

SEQ ID NO: 1899184 - RNA, 15 nt, Human
ugcacacaccagagc

SEQ ID NO: 1899185 - RNA, 14 nt, Human
ugcacaagcugcac

SEQ ID NO: 1899186 - RNA, 15 nt, Human
ugcacaugucuugua

SEQ ID NO: 1899187 - RNA, 19 nt, Human
ugcacaugucuuguacaug

SEQ ID NO: 1899188 - RNA, 14 nt, Human
ugcaccacugcacu

SEQ ID NO: 1899189 - RNA, 17 nt, Human
ugcacguauuuuaauag

SEQ ID NO: 1899190 - RNA, 15 nt, Human
ugcaccacugcacuc

SEQ ID NO: 1899191 - RNA, 22 nt, Human
ugcacuauagccuaggugacag

SEQ ID NO: 1899192 - RNA, 12 nt, Human
ugcacuccccug

SEQ ID NO: 1899193 - RNA, 13 nt, Human
ugcacuccccugc

SEQ ID NO: 1899194 - RNA, 15 nt, Human
ugcacuaaggggccc

SEQ ID NO: 1899195 - RNA, 17 nt, Human
ugcacuaaggggcccgg

SEQ ID NO: 1899196 - RNA, 22 nt, Human
ugcacuaaggggcccggccagc

SEQ ID NO: 1899197 - RNA, 23 nt, Human
ugcacuaaggggcccggccagcc

SEQ ID NO: 1899198 - RNA, 20 nt, Human
ugcagacucuacagaggcca

SEQ ID NO: 1899199 - RNA, 19 nt, Human
ugcagacucuacagaggcc

SEQ ID NO: 1899200 - RNA, 14 nt, Human
ugcagaacuaaacu

SEQ ID NO: 1899201 - RNA, 15 nt, Human
ugcacuccccugcug

SEQ ID NO: 1899202 - RNA, 22 nt, Human
ugcagacucuacagaggccaug

SEQ ID NO: 1899203 - RNA, 15 nt, Human
agccucaaccuccug

SEQ ID NO: 1899204 - RNA, 22 nt, Human
agccuauguggauuuuuuccua

SEQ ID NO: 1899205 - RNA, 17 nt, Human
agccuaggugacagagu

SEQ ID NO: 1899206 - RNA, 15 nt, Human
agccuaggugacaga

SEQ ID NO: 1899207 - RNA, 12 nt, Human
agccuaggccag

SEQ ID NO: 1899208 - RNA, 13 nt, Human
agccuaggccagg

SEQ ID NO: 1899209 - RNA, 14 nt, Human
agccuaggccaggu

SEQ ID NO: 1899210 - RNA, 16 nt, Human
ugcccucaccacccac

SEQ ID NO: 1899211 - RNA, 19 nt, Human
ugccccucaacucuccucc

SEQ ID NO: 1899212 - RNA, 19 nt, Human
ugcccccaggacugggcca

SEQ ID NO: 1899213 - RNA, 17 nt, Human
ugcccccaggacugggc

SEQ ID NO: 1899214 - RNA, 16 nt, Human
ugcccccaggacuggg

SEQ ID NO: 1899215 - RNA, 15 nt, Human
ugcccccaggacugg

SEQ ID NO: 1899216 - RNA, 14 nt, Human
ugcccccaggacug

SEQ ID NO: 1899217 - RNA, 13 nt, Human
ugcccccaggacu

SEQ ID NO: 1899218 - RNA, 12 nt, Human
ugcccccaggac

SEQ ID NO: 1899219 - RNA, 11 nt, Human
ugcccaggccc

SEQ ID NO: 1899220 - RNA, 20 nt, Human
ugcccaggcaggucuugaac

SEQ ID NO: 1899221 - RNA, 17 nt, Human
ugcccaggcaggucuug

SEQ ID NO: 1899222 - RNA, 16 nt, Human
ugcccaggcaggucuu

SEQ ID NO: 1899223 - RNA, 15 nt, Human
ugcccaggcaggucu

SEQ ID NO: 1899224 - RNA, 14 nt, Human
ugcccacaggauca

SEQ ID NO: 1899225 - RNA, 22 nt, Human
ugcccaggccccugccacccug

SEQ ID NO: 1899226 - RNA, 20 nt, Human
ugcccaggccccugccaccc

SEQ ID NO: 1899227 - RNA, 14 nt, Human
ugcccaggccccug

SEQ ID NO: 1899228 - RNA, 12 nt, Human
ugcccaggcccc

SEQ ID NO: 1899229 - RNA, 11 nt, Human
ugcccccagga

SEQ ID NO: 1899230 - RNA, 17 nt, Human
ugcccccacugaccaga

SEQ ID NO: 1899231 - RNA, 19 nt, Human
agcuauggugucauaggcu

SEQ ID NO: 1899232 - RNA, 17 nt, Human
agcuauugauauaaaua

SEQ ID NO: 1899233 - RNA, 23 nt, Human
agcuauugauauaaauaaaacau

SEQ ID NO: 1899234 - RNA, 23 nt, Human
agcuauaaauuccucuuugcuuu

SEQ ID NO: 1899235 - RNA, 23 nt, Human
agcuacugugugugugaaugaac

SEQ ID NO: 1899236 - RNA, 14 nt, Human
agcuacuugggagg

SEQ ID NO: 1899237 - RNA, 15 nt, Human
agcuacugugugugu

SEQ ID NO: 1899238 - RNA, 19 nt, Human
agcuacugugugugugaau

SEQ ID NO: 1899239 - RNA, 20 nt, Human
agcuacugugugugugaaug

SEQ ID NO: 1899240 - RNA, 19 nt, Human
agcuacucgggaagcugag

SEQ ID NO: 1899241 - RNA, 19 nt, Human
ugccauguuggccaggcug

SEQ ID NO: 1899242 - RNA, 18 nt, Human
ugccauguuggccaggcu

SEQ ID NO: 1899243 - RNA, 17 nt, Human
ugccauguuggccaggc

SEQ ID NO: 1899244 - RNA, 17 nt, Human
agcucagggccuggcuc

SEQ ID NO: 1899245 - RNA, 15 nt, Human
agcucagggccuggc

SEQ ID NO: 1899246 - RNA, 16 nt, Human
agcucagggccuggcu

SEQ ID NO: 1899247 - RNA, 22 nt, Human
agcuauuuuuauuuguuugugc

SEQ ID NO: 1899248 - RNA, 21 nt, Human
ugccauguuggccaggcuggu

SEQ ID NO: 1899249 - RNA, 20 nt, Human
ugccauguuggccaggcugg

SEQ ID NO: 1899250 - RNA, 18 nt, Human
agcucagggccuggcuca

SEQ ID NO: 1899251 - RNA, 20 nt, Human
ugcccaacccuucccucacc

SEQ ID NO: 1899252 - RNA, 22 nt, Human
ugcccaacccuucccucaccuu

SEQ ID NO: 1899253 - RNA, 19 nt, Human
ugccauagucacauggccu

SEQ ID NO: 1899254 - RNA, 18 nt, Human
ugccauagucacauggcc

SEQ ID NO: 1899255 - RNA, 15 nt, Human
ugccauauucuguug

SEQ ID NO: 1899256 - RNA, 17 nt, Human
ugccauauucuguuggc

SEQ ID NO: 1899257 - RNA, 16 nt, Human
ugccauauucuguugg

SEQ ID NO: 1899258 - RNA, 22 nt, Human
ugccagucaccccggccaccug

SEQ ID NO: 1899259 - RNA, 23 nt, Human
ugccagucaccccggccaccugc

SEQ ID NO: 1899260 - RNA, 15 nt, Human
ugccagucaccccgg

SEQ ID NO: 1899261 - RNA, 16 nt, Human
ugccagucaccccggc

SEQ ID NO: 1899262 - RNA, 18 nt, Human
ugccagucaccccggcca

SEQ ID NO: 1899263 - RNA, 20 nt, Human
ugccagucaccccggccacc

SEQ ID NO: 1899264 - RNA, 24 nt, Human
agcguggcgcaguggcccugagca

SEQ ID NO: 1899265 - RNA, 22 nt, Human
agcguggcgcaguggcccugag

SEQ ID NO: 1899266 - RNA, 21 nt, Human
agcguggcgcaguggcccuga

SEQ ID NO: 1899267 - RNA, 23 nt, Human
agcgugguggacaugcacagcua

SEQ ID NO: 1899268 - RNA, 17 nt, Human
agcgugagccacugcac

SEQ ID NO: 1899269 - RNA, 16 nt, Human
agcgugagccacugca

SEQ ID NO: 1899270 - RNA, 20 nt, Human
agcgugguggacaugcacag

SEQ ID NO: 1899271 - RNA, 21 nt, Human
ugccauauucuguuggccagu

SEQ ID NO: 1899272 - RNA, 20 nt, Human
ugccauauucuguuggccag

SEQ ID NO: 1899273 - RNA, 15 nt, Human
agcggggacagcucc

SEQ ID NO: 1899274 - RNA, 17 nt, Human
agcggggacagcuccuu

SEQ ID NO: 1899275 - RNA, 16 nt, Human
agcggggacagcuccu

SEQ ID NO: 1899276 - RNA, 15 nt, Human
agcgugagccacugc

SEQ ID NO: 1899277 - RNA, 22 nt, Human
ugcauugaacacaaacuguaaa

SEQ ID NO: 1899278 - RNA, 19 nt, Human
ugcauugaacacaaacugu

SEQ ID NO: 1899279 - RNA, 21 nt, Human
ugcauugaacacaaacuguaa

SEQ ID NO: 1899280 - RNA, 23 nt, Human
ugcauuugaaaauuuugauguuu

SEQ ID NO: 1899281 - RNA, 19 nt, Human
ugcauuugaaaauuuugau

SEQ ID NO: 1899282 - RNA, 17 nt, Human
agcggcuggacuuggag

SEQ ID NO: 1899283 - RNA, 20 nt, Human
agcggcuggaauuggguggg

SEQ ID NO: 1899284 - RNA, 13 nt, Human
ugcauugaacaca

SEQ ID NO: 1899285 - RNA, 14 nt, Human
ugcauugaacacaa

SEQ ID NO: 1899286 - RNA, 15 nt, Human
ugcauugaacacaaa

SEQ ID NO: 1899287 - RNA, 17 nt, Human
ugcauugaacacaaacu

SEQ ID NO: 1899288 - RNA, 18 nt, Human
ugcauugaacacaaacug

SEQ ID NO: 1899289 - RNA, 22 nt, Human
ugccacacaaggauagaugcug

SEQ ID NO: 1899290 - RNA, 18 nt, Human
ugccaauauuaaaucugc

SEQ ID NO: 1899291 - RNA, 19 nt, Human
ugccaauauuaaaucugcu

SEQ ID NO: 1899292 - RNA, 19 nt, Human
ugccacaaggacuuccugu

SEQ ID NO: 1899293 - RNA, 22 nt, Human
agcgcccaguuggguggaugcc

SEQ ID NO: 1899294 - RNA, 14 nt, Human
agcgcccaguuggg

SEQ ID NO: 1899295 - RNA, 14 nt, Human
agccugcuccagcu

SEQ ID NO: 1899296 - RNA, 12 nt, Human
agcgccaggcug

SEQ ID NO: 1899297 - RNA, 21 nt, Human
agcgccaggcugaccacagca

SEQ ID NO: 1899298 - RNA, 21 nt, Human
agccugcgccaccgcccagag

SEQ ID NO: 1899299 - RNA, 21 nt, Human
agcgcuccugccgcagagcug

SEQ ID NO: 1899300 - RNA, 20 nt, Human
agcgcuccugccgcagagcu

SEQ ID NO: 1899301 - RNA, 17 nt, Human
agcgcuccugccgcaga

SEQ ID NO: 1899302 - RNA, 22 nt, Human
agcgcuccugccgcagagcugg

SEQ ID NO: 1899303 - RNA, 11 nt, Human
agcggccggcc

SEQ ID NO: 1899304 - RNA, 18 nt, Human
agcggccggccagccccu

SEQ ID NO: 1899305 - RNA, 22 nt, Human
agcggccggccagccccuggcc

SEQ ID NO: 1899306 - RNA, 18 nt, Human
ugcccuuggcacccaaga

SEQ ID NO: 1899307 - RNA, 14 nt, Human
agcugccagccgag

SEQ ID NO: 1899308 - RNA, 13 nt, Human
agcugccaccugc

SEQ ID NO: 1899309 - RNA, 18 nt, Human
agcugcauacaguuugca

SEQ ID NO: 1899310 - RNA, 16 nt, Human
ugccgcgucgcccucc

SEQ ID NO: 1899311 - RNA, 21 nt, Human
ugccgcgucgcccucccaggc

SEQ ID NO: 1899312 - RNA, 22 nt, Human
ugccucauuuagagaggaaaag

SEQ ID NO: 1899313 - RNA, 20 nt, Human
ugccgcgucgcccucccagg

SEQ ID NO: 1899314 - RNA, 21 nt, Human
ugccucugacacacagcucug

SEQ ID NO: 1899315 - RNA, 20 nt, Human
ugccucugacacacagcucu

SEQ ID NO: 1899316 - RNA, 19 nt, Human
ugccucucugcaggucccu

SEQ ID NO: 1899317 - RNA, 20 nt, Human
ugccucucugcaggucccua

SEQ ID NO: 1899318 - RNA, 16 nt, Human
ugccucucugcagguc

SEQ ID NO: 1899319 - RNA, 18 nt, Human
ugccucucugcagguccc

SEQ ID NO: 1899320 - RNA, 16 nt, Human
ugccucucucaggcca

SEQ ID NO: 1899321 - RNA, 15 nt, Human
ugccuccauccuagu

SEQ ID NO: 1899322 - RNA, 12 nt, Human
ugccuccauccu

SEQ ID NO: 1899323 - RNA, 15 nt, Human
ugccucucucaggcc

SEQ ID NO: 1899324 - RNA, 13 nt, Human
ugccucccaucac

SEQ ID NO: 1899325 - RNA, 14 nt, Human
ugccucccaucacc

SEQ ID NO: 1899326 - RNA, 19 nt, Human
ugccucccaucacccgcua

SEQ ID NO: 1899327 - RNA, 13 nt, Human
ugccucucucagg

SEQ ID NO: 1899328 - RNA, 14 nt, Human
ugccucucucaggc

SEQ ID NO: 1899329 - RNA, 14 nt, Human
agcucuguccuggg

SEQ ID NO: 1899330 - RNA, 12 nt, Human
agcucuguccug

SEQ ID NO: 1899331 - RNA, 18 nt, Human
agcucuucuccaggcugu

SEQ ID NO: 1899332 - RNA, 19 nt, Human
agcucuugaagacacugaa

SEQ ID NO: 1899333 - RNA, 11 nt, Human
agcugaugacu

SEQ ID NO: 1899334 - RNA, 15 nt, Human
agcugaugacucaag

SEQ ID NO: 1899335 - RNA, 13 nt, Human
agcugcacccuca

SEQ ID NO: 1899336 - RNA, 17 nt, Human
agcugcacccucaggca

SEQ ID NO: 1899337 - RNA, 22 nt, Human
agcugaugacucaagauuccca

SEQ ID NO: 1899338 - RNA, 18 nt, Human
agcugcacccucaggcag

SEQ ID NO: 1899339 - RNA, 19 nt, Human
agcugcacccucaggcagg

SEQ ID NO: 1899340 - RNA, 20 nt, Human
agcugcacccucaggcaggu

SEQ ID NO: 1899341 - RNA, 22 nt, Human
agcugcacccucaggcaggugg

SEQ ID NO: 1899342 - RNA, 12 nt, Human
agcucugcuccu

SEQ ID NO: 1899343 - RNA, 22 nt, Human
agcucugcuccucuccccagca

SEQ ID NO: 1899344 - RNA, 20 nt, Human
agcucugguccauagagagc

SEQ ID NO: 1899345 - RNA, 16 nt, Human
agcucucuccucccuu

SEQ ID NO: 1899346 - RNA, 17 nt, Human
agcucucggaacugcau

SEQ ID NO: 1899347 - RNA, 18 nt, Human
agcucucggaacugcaug

SEQ ID NO: 1899348 - RNA, 20 nt, Human
agcucucggaacugcaugcu

SEQ ID NO: 1899349 - RNA, 22 nt, Human
agcucucggaacugcaugcugc

SEQ ID NO: 1899350 - RNA, 23 nt, Human
agcucucggaacugcaugcugcu

SEQ ID NO: 1899351 - RNA, 22 nt, Human
agcucuauguuuacaaauggac

SEQ ID NO: 1899352 - RNA, 18 nt, Human
ugcccuccagcucuuucc

SEQ ID NO: 1899353 - RNA, 19 nt, Human
ugcccuccagcucuuuccu

SEQ ID NO: 1899354 - RNA, 15 nt, Human
agcucuccccucaga

SEQ ID NO: 1899355 - RNA, 22 nt, Human
ugcccuccaagaccuucuccuu

SEQ ID NO: 1899356 - RNA, 19 nt, Human
ugcccuccaagaccuucuc

SEQ ID NO: 1899357 - RNA, 20 nt, Human
ugcccuccaagaccuucucc

SEQ ID NO: 1899358 - RNA, 14 nt, Human
agcugggagccggg

SEQ ID NO: 1899359 - RNA, 15 nt, Human
agcugggagccgggc

SEQ ID NO: 1899360 - RNA, 19 nt, Human
agcugggacuacaggugug

SEQ ID NO: 1899361 - RNA, 17 nt, Human
agcugggacuacaggug

SEQ ID NO: 1899362 - RNA, 23 nt, Human
agcugggaugauuggagggggga

SEQ ID NO: 1899363 - RNA, 17 nt, Human
agcuggggccaggcugg

SEQ ID NO: 1899364 - RNA, 15 nt, Human
agcuggggaucccuc

SEQ ID NO: 1899365 - RNA, 22 nt, Human
agcuggggaucccuccccccca

SEQ ID NO: 1899366 - RNA, 14 nt, Human
agcugggcagguug

SEQ ID NO: 1899367 - RNA, 17 nt, Human
agcugggauguuucugu

SEQ ID NO: 1899368 - RNA, 19 nt, Human
agcugccucugccacugac

SEQ ID NO: 1899369 - RNA, 23 nt, Human
agcugccuccccucuccuuccug

SEQ ID NO: 1899370 - RNA, 20 nt, Human
agcugccuccccucuccuuc

SEQ ID NO: 1899371 - RNA, 22 nt, Human
ugccucugacacacagcucugu

SEQ ID NO: 1899372 - RNA, 10 nt, Human
agcugccugu

SEQ ID NO: 1899373 - RNA, 17 nt, Human
agcuggagaaauauggu

SEQ ID NO: 1899374 - RNA, 21 nt, Human
agcugccugggaucccucauc

SEQ ID NO: 1899375 - RNA, 13 nt, Human
agcugccugggau

SEQ ID NO: 1899376 - RNA, 19 nt, Human
agcugccugggaucccuca

SEQ ID NO: 1899377 - RNA, 19 nt, Human
ugcgacacugggaggccag

SEQ ID NO: 1899378 - RNA, 19 nt, Human
ugcgaaaggaugaaaguga

SEQ ID NO: 1899379 - RNA, 18 nt, Human
ugcggacagccacggcca

SEQ ID NO: 1899380 - RNA, 13 nt, Human
ugcgaaaggauga

SEQ ID NO: 1899381 - RNA, 14 nt, Human
ugccuuuacuucag

SEQ ID NO: 1899382 - RNA, 17 nt, Human
ugccuguucagcuccag

SEQ ID NO: 1899383 - RNA, 16 nt, Human
ugccuguucagcucca

SEQ ID NO: 1899384 - RNA, 15 nt, Human
ugccuguucagcucc

SEQ ID NO: 1899385 - RNA, 19 nt, Human
ugccuugugaaggaauuau

SEQ ID NO: 1899386 - RNA, 20 nt, Human
agcuggggccaggcuggguc

SEQ ID NO: 1899387 - RNA, 15 nt, Human
agcuggggaugucuc

SEQ ID NO: 1899388 - RNA, 17 nt, Human
agcugggggugggccag

SEQ ID NO: 1899389 - RNA, 18 nt, Human
agcugggggugggccagg

SEQ ID NO: 1899390 - RNA, 19 nt, Human
agcugggggugggccaggc

SEQ ID NO: 1899391 - RNA, 20 nt, Human
agcugggggugggccaggcu

SEQ ID NO: 1899392 - RNA, 21 nt, Human
agcugggggugggccaggcug

SEQ ID NO: 1899393 - RNA, 15 nt, Human
agcugugcacaaagu

SEQ ID NO: 1899394 - RNA, 20 nt, Human
agcugugcacaaaguggcau

SEQ ID NO: 1899395 - RNA, 21 nt, Human
aggaaacucugcauucuagua

SEQ ID NO: 1899396 - RNA, 12 nt, Human
aggaaagaggcu

SEQ ID NO: 1899397 - RNA, 13 nt, Human
aggaaagaggcuc

SEQ ID NO: 1899398 - RNA, 16 nt, Human
aggaaagaggcucugg

SEQ ID NO: 1899399 - RNA, 17 nt, Human
aggaaagcaaaggagau

SEQ ID NO: 1899400 - RNA, 19 nt, Human
aggaaagcaaaggagauug

SEQ ID NO: 1899401 - RNA, 14 nt, Human
ugcuauagccuggg

SEQ ID NO: 1899402 - RNA, 23 nt, Human
aggaaaccaguuaggucucaaua

SEQ ID NO: 1899403 - RNA, 21 nt, Human
aggaaacccagcucuggucca

SEQ ID NO: 1899404 - RNA, 18 nt, Human
aggaaacccagcucuggu

SEQ ID NO: 1899405 - RNA, 20 nt, Human
aggaaacccagcucuggucc

SEQ ID NO: 1899406 - RNA, 15 nt, Human
aggaaacccagcucu

SEQ ID NO: 1899407 - RNA, 13 nt, Human
aggaaaauauuuu

SEQ ID NO: 1899408 - RNA, 15 nt, Human
aggaaaauauuuuga

SEQ ID NO: 1899409 - RNA, 22 nt, Human
aggaaaauauuuugaucuucaa

SEQ ID NO: 1899410 - RNA, 16 nt, Human
aggaaacccagcucug

SEQ ID NO: 1899411 - RNA, 17 nt, Human
aggaaacccagcucugg

SEQ ID NO: 1899412 - RNA, 12 nt, Human
agcuuugaaaau

SEQ ID NO: 1899413 - RNA, 16 nt, Human
agcuuugaaaauucag

SEQ ID NO: 1899414 - RNA, 18 nt, Human
agcuuugaaaauucagug

SEQ ID NO: 1899415 - RNA, 19 nt, Human
agcuuugaaaauucagugg

SEQ ID NO: 1899416 - RNA, 21 nt, Human
aggaaaaggugauauccauuc

SEQ ID NO: 1899417 - RNA, 17 nt, Human
agcuuugacacuggaau

SEQ ID NO: 1899418 - RNA, 22 nt, Human
agcuuugacacuggaaugaguu

SEQ ID NO: 1899419 - RNA, 18 nt, Human
aggaaaaggugauaucca

SEQ ID NO: 1899420 - RNA, 22 nt, Human
agcuuauuaaugcuaagggcag

SEQ ID NO: 1899421 - RNA, 21 nt, Human
agcuuauuaaugcuaagggca

SEQ ID NO: 1899422 - RNA, 19 nt, Human
agcuuauuaaugcuaaggg

SEQ ID NO: 1899423 - RNA, 23 nt, Human
agcuuggaaacuggaugagguca

SEQ ID NO: 1899424 - RNA, 18 nt, Human
agcuuauuaaugcuaagg

SEQ ID NO: 1899425 - RNA, 17 nt, Human
agcuuauuaaugcuaag

SEQ ID NO: 1899426 - RNA, 16 nt, Human
agcuuauuaaugcuaa

SEQ ID NO: 1899427 - RNA, 15 nt, Human
agcuuauuaaugcua

SEQ ID NO: 1899428 - RNA, 14 nt, Human
agcuuauuaaugcu

SEQ ID NO: 1899429 - RNA, 21 nt, Human
agcuuguaaauagcucaggug

SEQ ID NO: 1899430 - RNA, 20 nt, Human
agcuuguaaauagcucaggu

SEQ ID NO: 1899431 - RNA, 19 nt, Human
agcuuguaaauagcucagg

SEQ ID NO: 1899432 - RNA, 14 nt, Human
agcuuucuuucaca

SEQ ID NO: 1899433 - RNA, 20 nt, Human
agcuuucuuucacaaaaaag

SEQ ID NO: 1899434 - RNA, 21 nt, Human
ugcggacagccacggccaggc

SEQ ID NO: 1899435 - RNA, 20 nt, Human
ugcggacagccacggccagg

SEQ ID NO: 1899436 - RNA, 15 nt, Human
agcuguuuucccuga

SEQ ID NO: 1899437 - RNA, 20 nt, Human
agcuuaaaggggcuagagug

SEQ ID NO: 1899438 - RNA, 18 nt, Human
agcuguuuucccugaccu

SEQ ID NO: 1899439 - RNA, 12 nt, Human
agcuuaucucag

SEQ ID NO: 1899440 - RNA, 14 nt, Human
agcuuaucucaggg

SEQ ID NO: 1899441 - RNA, 15 nt, Human
agcuuaucucagggg

SEQ ID NO: 1899442 - RNA, 17 nt, Human
ugcugacuguuuucucu

SEQ ID NO: 1899443 - RNA, 19 nt, Human
ugcucugugcccacccucc

SEQ ID NO: 1899444 - RNA, 20 nt, Human
ugcucuggaccugcccccgc

SEQ ID NO: 1899445 - RNA, 13 nt, Human
ugcucuggaccug

SEQ ID NO: 1899446 - RNA, 14 nt, Human
ugcucuggaccugc

SEQ ID NO: 1899447 - RNA, 15 nt, Human
ugcucuggaccugcc

SEQ ID NO: 1899448 - RNA, 16 nt, Human
ugcucuggaccugccc

SEQ ID NO: 1899449 - RNA, 17 nt, Human
ugcucuggacaggcaug

SEQ ID NO: 1899450 - RNA, 12 nt, Human
ugcucuggaccu

SEQ ID NO: 1899451 - RNA, 15 nt, Human
ugcucugcauguuac

SEQ ID NO: 1899452 - RNA, 18 nt, Human
ugcucugcauguuacaua

SEQ ID NO: 1899453 - RNA, 19 nt, Human
ugcucugaucauccacugu

SEQ ID NO: 1899454 - RNA, 19 nt, Human
ugcuauccagcuauuuuua

SEQ ID NO: 1899455 - RNA, 22 nt, Human
ugcucugaucauccacugugcc

SEQ ID NO: 1899456 - RNA, 21 nt, Human
ugcugacuguuuucucuugag

SEQ ID NO: 1899457 - RNA, 24 nt, Human
ugcugacuguuuucucuugagagg

SEQ ID NO: 1899458 - RNA, 18 nt, Human
aggaaaggcuccaggagc

SEQ ID NO: 1899459 - RNA, 20 nt, Human
aggaaaggcuccaggagcag

SEQ ID NO: 1899460 - RNA, 21 nt, Human
aggaaagcuugaguaaaauaa

SEQ ID NO: 1899461 - RNA, 22 nt, Human
aggaaaggcuccaggagcagcc

SEQ ID NO: 1899462 - RNA, 23 nt, Human
aggaaaggcuccaggagcagcca

SEQ ID NO: 1899463 - RNA, 23 nt, Human
aggaauccagacccggcugcgug

SEQ ID NO: 1899464 - RNA, 19 nt, Human
aggaauugacccacaagaa

SEQ ID NO: 1899465 - RNA, 17 nt, Human
aggaagcucagggccug

SEQ ID NO: 1899466 - RNA, 18 nt, Human
aggaagcucagggccugg

SEQ ID NO: 1899467 - RNA, 22 nt, Human
aggaagcucagggccuggcuca

SEQ ID NO: 1899468 - RNA, 14 nt, Human
aggaagagaaaaaa

SEQ ID NO: 1899469 - RNA, 14 nt, Human
aggaagagaaacca

SEQ ID NO: 1899470 - RNA, 15 nt, Human
aggaagacuuuggaa

SEQ ID NO: 1899471 - RNA, 15 nt, Human
ugcugccauccaggu

SEQ ID NO: 1899472 - RNA, 14 nt, Human
ugcugccauccagg

SEQ ID NO: 1899473 - RNA, 13 nt, Human
ugcugccauccag

SEQ ID NO: 1899474 - RNA, 12 nt, Human
ugcugccaucca

SEQ ID NO: 1899475 - RNA, 22 nt, Human
ugcugccauccagguucagcuu

SEQ ID NO: 1899476 - RNA, 21 nt, Human
ugcugccauccagguucagcu

SEQ ID NO: 1899477 - RNA, 11 nt, Human
ugcugccaucc

SEQ ID NO: 1899478 - RNA, 22 nt, Human
aggaauuuuauuuuuuucugaa

SEQ ID NO: 1899479 - RNA, 16 nt, Human
aggaauuuucuccaau

SEQ ID NO: 1899480 - RNA, 19 nt, Human
aggaauuuucuccaauuuu

SEQ ID NO: 1899481 - RNA, 20 nt, Human
aggauuucaugauuucauuu

SEQ ID NO: 1899482 - RNA, 19 nt, Human
aggauuucaugauuucauu

SEQ ID NO: 1899483 - RNA, 22 nt, Human
aggauugcuacuguccuaccca

SEQ ID NO: 1899484 - RNA, 18 nt, Human
aggaugcuuguacauaau

SEQ ID NO: 1899485 - RNA, 12 nt, Human
aggaucagucug

SEQ ID NO: 1899486 - RNA, 21 nt, Human
aggauccugagccagauuuca

SEQ ID NO: 1899487 - RNA, 16 nt, Human
aggaugcuuguacaua

SEQ ID NO: 1899488 - RNA, 15 nt, Human
aggaugcuuguacau

SEQ ID NO: 1899489 - RNA, 12 nt, Human
aggaucucuuga

SEQ ID NO: 1899490 - RNA, 15 nt, Human
uggacaccggaaaca

SEQ ID NO: 1899491 - RNA, 17 nt, Human
uggacaaaauggaauac

SEQ ID NO: 1899492 - RNA, 14 nt, Human
uggacaaaauggaa

SEQ ID NO: 1899493 - RNA, 14 nt, Human
aggcaagcaccucc

SEQ ID NO: 1899494 - RNA, 19 nt, Human
aggcaacugcauuggcuuu

SEQ ID NO: 1899495 - RNA, 12 nt, Human
aggcaagagaau

SEQ ID NO: 1899496 - RNA, 14 nt, Human
uggaauuugaaaca

SEQ ID NO: 1899497 - RNA, 10 nt, Human
ugcugcccug

SEQ ID NO: 1899498 - RNA, 12 nt, Human
ugcugcccugcc

SEQ ID NO: 1899499 - RNA, 17 nt, Human
uggaacacggccacauc

SEQ ID NO: 1899500 - RNA, 15 nt, Human
uggaacacggccaca

SEQ ID NO: 1899501 - RNA, 13 nt, Human
uggaagcuccgcu

SEQ ID NO: 1899502 - RNA, 18 nt, Human
uggaagcuaauuugcauu

SEQ ID NO: 1899503 - RNA, 14 nt, Human
uggaacacucugag

SEQ ID NO: 1899504 - RNA, 16 nt, Human
uggaagcuaauuugca

SEQ ID NO: 1899505 - RNA, 17 nt, Human
uggaagcuaauuugcau

SEQ ID NO: 1899506 - RNA, 12 nt, Human
uggaacacucug

SEQ ID NO: 1899507 - RNA, 20 nt, Human
uggaaguacuauaauuuacc

SEQ ID NO: 1899508 - RNA, 14 nt, Human
uggaaguaguggag

SEQ ID NO: 1899509 - RNA, 17 nt, Human
uggaaguaguggagccc

SEQ ID NO: 1899510 - RNA, 17 nt, Human
uggaaguccaauguggc

SEQ ID NO: 1899511 - RNA, 19 nt, Human
aggaguuucguuuucaaaa

SEQ ID NO: 1899512 - RNA, 21 nt, Human
aggaguuugagaccaaccugg

SEQ ID NO: 1899513 - RNA, 15 nt, Human
aggaggccagccuug

SEQ ID NO: 1899514 - RNA, 20 nt, Human
uggaagugugggucugugug

SEQ ID NO: 1899515 - RNA, 14 nt, Human
uggaagugcuaauu

SEQ ID NO: 1899516 - RNA, 14 nt, Human
uggaaguguggguc

SEQ ID NO: 1899517 - RNA, 13 nt, Human
uggaagugugggu

SEQ ID NO: 1899518 - RNA, 16 nt, Human
aggcaaugcuggcugu

SEQ ID NO: 1899519 - RNA, 14 nt, Human
uggagcuuuuuucc

SEQ ID NO: 1899520 - RNA, 15 nt, Human
aggcaaugcuggcug

SEQ ID NO: 1899521 - RNA, 16 nt, Human
uggagccugcagagcu

SEQ ID NO: 1899522 - RNA, 11 nt, Human
uggagccugca

SEQ ID NO: 1899523 - RNA, 19 nt, Human
uggagcccagaggagggca

SEQ ID NO: 1899524 - RNA, 15 nt, Human
uggagcccagaggag

SEQ ID NO: 1899525 - RNA, 21 nt, Human
uggagaagccacaggccugag

SEQ ID NO: 1899526 - RNA, 23 nt, Human
uggagcccagaggagggcagcag

SEQ ID NO: 1899527 - RNA, 20 nt, Human
uggagcccagaggagggcag

SEQ ID NO: 1899528 - RNA, 22 nt, Human
uggacuuuguuaguuucuccaa

SEQ ID NO: 1899529 - RNA, 11 nt, Human
uggacuuuguu

SEQ ID NO: 1899530 - RNA, 19 nt, Human
uggagcccacuguacuugc

SEQ ID NO: 1899531 - RNA, 23 nt, Human
uggagcccacuguacuugcucuu

SEQ ID NO: 1899532 - RNA, 16 nt, Human
uggagcccacuguacu

SEQ ID NO: 1899533 - RNA, 20 nt, Human
uggagaagccacaggccuga

SEQ ID NO: 1899534 - RNA, 19 nt, Human
uggagaagccacaggccug

SEQ ID NO: 1899535 - RNA, 18 nt, Human
uggagaagccacaggccu

SEQ ID NO: 1899536 - RNA, 24 nt, Human
uggacuuuguuaguuucuccaagc

SEQ ID NO: 1899537 - RNA, 22 nt, Human
aggcagccccauucugccugcc

SEQ ID NO: 1899538 - RNA, 21 nt, Human
aggcagccccauucugccugc

SEQ ID NO: 1899539 - RNA, 20 nt, Human
aggcagccccauucugccug

SEQ ID NO: 1899540 - RNA, 19 nt, Human
aggcagccccauucugccu

SEQ ID NO: 1899541 - RNA, 15 nt, Human
aggcacccaccauca

SEQ ID NO: 1899542 - RNA, 20 nt, Human
aggcaggaguuucguuuuca

SEQ ID NO: 1899543 - RNA, 12 nt, Human
aggcaggauggc

SEQ ID NO: 1899544 - RNA, 23 nt, Human
aggcaggaccuucgggcugugcc

SEQ ID NO: 1899545 - RNA, 22 nt, Human
aggcaggaccuucgggcugugc

SEQ ID NO: 1899546 - RNA, 21 nt, Human
aggcaggaccuucgggcugug

SEQ ID NO: 1899547 - RNA, 21 nt, Human
aggcagggucucacucugucg

SEQ ID NO: 1899548 - RNA, 20 nt, Human
aggcagggucucacucuguc

SEQ ID NO: 1899549 - RNA, 18 nt, Human
aggcagggucucacucug

SEQ ID NO: 1899550 - RNA, 19 nt, Human
aggcagggucucacucugu

SEQ ID NO: 1899551 - RNA, 14 nt, Human
aggcagguccaggg

SEQ ID NO: 1899552 - RNA, 11 nt, Human
aggcagguccc

SEQ ID NO: 1899553 - RNA, 22 nt, Human
aggcagggucucacucugucgc

SEQ ID NO: 1899554 - RNA, 14 nt, Human
aggcagggugcagu

SEQ ID NO: 1899555 - RNA, 21 nt, Human
aggcaggucuugaacuccugg

SEQ ID NO: 1899556 - RNA, 16 nt, Human
aggcagguccccagac

SEQ ID NO: 1899557 - RNA, 15 nt, Human
aggcagguccccaga

SEQ ID NO: 1899558 - RNA, 14 nt, Human
aggcagguccccag

SEQ ID NO: 1899559 - RNA, 13 nt, Human
aggcaggucccca

SEQ ID NO: 1899560 - RNA, 12 nt, Human
aggcaggucccc

SEQ ID NO: 1899561 - RNA, 13 nt, Human
aggcuccaggagc

SEQ ID NO: 1899562 - RNA, 14 nt, Human
aggcucauuuacug

SEQ ID NO: 1899563 - RNA, 15 nt, Human
aggcucauuuacugu

SEQ ID NO: 1899564 - RNA, 14 nt, Human
aggcuccaggagca

SEQ ID NO: 1899565 - RNA, 16 nt, Human
aggcuccaggagcagc

SEQ ID NO: 1899566 - RNA, 22 nt, Human
aggcuccacuuggucugugaga

SEQ ID NO: 1899567 - RNA, 21 nt, Human
aggcuccacuuggucugugag

SEQ ID NO: 1899568 - RNA, 17 nt, Human
aggcuccacuuggucug

SEQ ID NO: 1899569 - RNA, 11 nt, Human
aggcuccacuu

SEQ ID NO: 1899570 - RNA, 10 nt, Human
aggcucaggu

SEQ ID NO: 1899571 - RNA, 16 nt, Human
aggcucaggucccugg

SEQ ID NO: 1899572 - RNA, 18 nt, Human
aggccuucucugaaggac

SEQ ID NO: 1899573 - RNA, 17 nt, Human
aggccuucucugaagga

SEQ ID NO: 1899574 - RNA, 14 nt, Human
aggccuuuaaccau

SEQ ID NO: 1899575 - RNA, 21 nt, Human
aggcgcacugugacccccagc

SEQ ID NO: 1899576 - RNA, 22 nt, Human
aggcgcacugugacccccagcu

SEQ ID NO: 1899577 - RNA, 21 nt, Human
aggcuauuguccccuaaacca

SEQ ID NO: 1899578 - RNA, 22 nt, Human
uggcaugggaaugaaugucagu

SEQ ID NO: 1899579 - RNA, 19 nt, Human
uggcccacgcacuucggga

SEQ ID NO: 1899580 - RNA, 13 nt, Human
uggcccacugcau

SEQ ID NO: 1899581 - RNA, 14 nt, Human
uggcccacugcauc

SEQ ID NO: 1899582 - RNA, 17 nt, Human
uggcccaggaccaucau

SEQ ID NO: 1899583 - RNA, 15 nt, Human
uggccgaguccaagc

SEQ ID NO: 1899584 - RNA, 20 nt, Human
uggccucugcacuccccugc

SEQ ID NO: 1899585 - RNA, 19 nt, Human
uggccucugcacuccccug

SEQ ID NO: 1899586 - RNA, 22 nt, Human
uggccugaucagaccacggcuc

SEQ ID NO: 1899587 - RNA, 18 nt, Human
aggccaugggccuccugu

SEQ ID NO: 1899588 - RNA, 23 nt, Human
aggccagagacacaagccuucgg

SEQ ID NO: 1899589 - RNA, 15 nt, Human
aggcccagagggccu

SEQ ID NO: 1899590 - RNA, 16 nt, Human
aggcccagagggccug

SEQ ID NO: 1899591 - RNA, 14 nt, Human
uggcagcucagaga

SEQ ID NO: 1899592 - RNA, 15 nt, Human
uggcagcucagagag

SEQ ID NO: 1899593 - RNA, 16 nt, Human
uggcagcucagagagg

SEQ ID NO: 1899594 - RNA, 18 nt, Human
uggcagcucagagagggu

SEQ ID NO: 1899595 - RNA, 13 nt, Human
aggccagagacac

SEQ ID NO: 1899596 - RNA, 18 nt, Human
aggccagagacacaagcc

SEQ ID NO: 1899597 - RNA, 22 nt, Human
uggcagauguaaaguuauucuu

SEQ ID NO: 1899598 - RNA, 16 nt, Human
uggcaccagcagccug

SEQ ID NO: 1899599 - RNA, 17 nt, Human
uggcaccagcagccugg

SEQ ID NO: 1899600 - RNA, 23 nt, Human
uggcaccagacacccaggacuua

SEQ ID NO: 1899601 - RNA, 17 nt, Human
uggcaccagacacccag

SEQ ID NO: 1899602 - RNA, 20 nt, Human
uggcaccagacacccaggac

SEQ ID NO: 1899603 - RNA, 21 nt, Human
uggcaccagacacccaggacu

SEQ ID NO: 1899604 - RNA, 20 nt, Human
uggcacagcccaaagaagga

SEQ ID NO: 1899605 - RNA, 18 nt, Human
uggcacagcccaaagaag

SEQ ID NO: 1899606 - RNA, 14 nt, Human
uggcacaggacaug

SEQ ID NO: 1899607 - RNA, 18 nt, Human
aggcauccuuccucacac

SEQ ID NO: 1899608 - RNA, 20 nt, Human
aggcauccuuccucacacca

SEQ ID NO: 1899609 - RNA, 21 nt, Human
aggccccugccacccugggga

SEQ ID NO: 1899610 - RNA, 18 nt, Human
aggccccugccacccugg

SEQ ID NO: 1899611 - RNA, 17 nt, Human
aggccccugccacccug

SEQ ID NO: 1899612 - RNA, 15 nt, Human
aggccccugccaccc

SEQ ID NO: 1899613 - RNA, 13 nt, Human
aggccccugccac

SEQ ID NO: 1899614 - RNA, 19 nt, Human
aggcccagagggccugcaa

SEQ ID NO: 1899615 - RNA, 20 nt, Human
aggcccagagggccugcaag

SEQ ID NO: 1899616 - RNA, 16 nt, Human
aggcccggcuccaggc

SEQ ID NO: 1899617 - RNA, 15 nt, Human
aggcccggcuccagg

SEQ ID NO: 1899618 - RNA, 14 nt, Human
aggcccggcuccag

SEQ ID NO: 1899619 - RNA, 21 nt, Human
aggccccugucucagggugag

SEQ ID NO: 1899620 - RNA, 17 nt, Human
aggcccggcuccaggcu

SEQ ID NO: 1899621 - RNA, 12 nt, Human
aggccuggccag

SEQ ID NO: 1899622 - RNA, 16 nt, Human
aggccugacucucagc

SEQ ID NO: 1899623 - RNA, 13 nt, Human
aggccuggccaga

SEQ ID NO: 1899624 - RNA, 22 nt, Human
ugggaaccccuucauccucuga

SEQ ID NO: 1899625 - RNA, 20 nt, Human
ugggaaccccuucauccucu

SEQ ID NO: 1899626 - RNA, 19 nt, Human
aggcugggagagccuucca

SEQ ID NO: 1899627 - RNA, 16 nt, Human
aggcugggagagccuu

SEQ ID NO: 1899628 - RNA, 22 nt, Human
aggcugggagagccuuccaggg

SEQ ID NO: 1899629 - RNA, 20 nt, Human
aggcugggagagccuuccag

SEQ ID NO: 1899630 - RNA, 21 nt, Human
aggcugggagagccuuccagg

SEQ ID NO: 1899631 - RNA, 14 nt, Human
aggcugggcuucag

SEQ ID NO: 1899632 - RNA, 18 nt, Human
aggcugggcguaguggcu

SEQ ID NO: 1899633 - RNA, 21 nt, Human
aggcugggcucccuucccacc

SEQ ID NO: 1899634 - RNA, 23 nt, Human
aggcugggcucccuucccaccuc

SEQ ID NO: 1899635 - RNA, 13 nt, Human
aggcugggcuccc

SEQ ID NO: 1899636 - RNA, 14 nt, Human
aggcugggcucccu

SEQ ID NO: 1899637 - RNA, 18 nt, Human
aggcugggcucccuuccc

SEQ ID NO: 1899638 - RNA, 23 nt, Human
aggcugggcuucaguggcagcug

SEQ ID NO: 1899639 - RNA, 22 nt, Human
aggcugggcuucaguggcagcu

SEQ ID NO: 1899640 - RNA, 17 nt, Human
aggcugggggaagaagc

SEQ ID NO: 1899641 - RNA, 21 nt, Human
aggcugggcuucaguggcagc

SEQ ID NO: 1899642 - RNA, 20 nt, Human
aggcugggcuucaguggcag

SEQ ID NO: 1899643 - RNA, 19 nt, Human
aggcugggcuucaguggca

SEQ ID NO: 1899644 - RNA, 18 nt, Human
aggcugggcuucaguggc

SEQ ID NO: 1899645 - RNA, 20 nt, Human
aggcugggucgcccuggacu

SEQ ID NO: 1899646 - RNA, 21 nt, Human
aggcugggucgcccuggacug

SEQ ID NO: 1899647 - RNA, 14 nt, Human
aggcuggguucuga

SEQ ID NO: 1899648 - RNA, 17 nt, Human
aggcuggguucugaucc

SEQ ID NO: 1899649 - RNA, 15 nt, Human
aggcugggucgcccu

SEQ ID NO: 1899650 - RNA, 18 nt, Human
aggcugggucgcccugga

SEQ ID NO: 1899651 - RNA, 10 nt, Human
aggcuggguc

SEQ ID NO: 1899652 - RNA, 22 nt, Human
aggcugggggaagaagcucucu

SEQ ID NO: 1899653 - RNA, 17 nt, Human
aggcuuuuuuccagacu

SEQ ID NO: 1899654 - RNA, 19 nt, Human
aggcuuuggauuugacauu

SEQ ID NO: 1899655 - RNA, 18 nt, Human
aggcuuuuuuaucaugug

SEQ ID NO: 1899656 - RNA, 21 nt, Human
aggcuuuuuuaucaugugaaa

SEQ ID NO: 1899657 - RNA, 15 nt, Human
aggcuuuuuuaucau

SEQ ID NO: 1899658 - RNA, 17 nt, Human
agggaaaaugcagcagg

SEQ ID NO: 1899659 - RNA, 22 nt, Human
agggaaaaugcagcagggaugc

SEQ ID NO: 1899660 - RNA, 16 nt, Human
agggaaaagcagcucu

SEQ ID NO: 1899661 - RNA, 23 nt, Human
aggcuuagucacugagacagccc

SEQ ID NO: 1899662 - RNA, 22 nt, Human
aggcuuagucacugagacagcc

SEQ ID NO: 1899663 - RNA, 21 nt, Human
aggcuuagucacugagacagc

SEQ ID NO: 1899664 - RNA, 17 nt, Human
aggcuugccugcaggca

SEQ ID NO: 1899665 - RNA, 16 nt, Human
aggcuugccugcaggc

SEQ ID NO: 1899666 - RNA, 15 nt, Human
aggcuugccugcagg

SEQ ID NO: 1899667 - RNA, 18 nt, Human
ugggaaacaaaaggauaa

SEQ ID NO: 1899668 - RNA, 21 nt, Human
uggcuuuugugcauuaucuag

SEQ ID NO: 1899669 - RNA, 16 nt, Human
uggcuuuugugcauua

SEQ ID NO: 1899670 - RNA, 15 nt, Human
uggcuuuugugcauu

SEQ ID NO: 1899671 - RNA, 17 nt, Human
uggcuucacggaagagc

SEQ ID NO: 1899672 - RNA, 20 nt, Human
uggcuucacggaagagccuu

SEQ ID NO: 1899673 - RNA, 15 nt, Human
ugggaaacagaggcu

SEQ ID NO: 1899674 - RNA, 23 nt, Human
uggcugcaaaggguaucaggugc

SEQ ID NO: 1899675 - RNA, 13 nt, Human
uggcugagccccu

SEQ ID NO: 1899676 - RNA, 17 nt, Human
uggcugagccccugucu

SEQ ID NO: 1899677 - RNA, 22 nt, Human
uggcugcagagcagugggccug

SEQ ID NO: 1899678 - RNA, 18 nt, Human
uggcugcagagcaguggg

SEQ ID NO: 1899679 - RNA, 15 nt, Human
uggcugcagagcagu

SEQ ID NO: 1899680 - RNA, 23 nt, Human
uggcuguuggcugggggccucag

SEQ ID NO: 1899681 - RNA, 14 nt, Human
uggcuucacggaag

SEQ ID NO: 1899682 - RNA, 18 nt, Human
uggcuguuggcugggggc

SEQ ID NO: 1899683 - RNA, 16 nt, Human
uggcuguuggcugggg

SEQ ID NO: 1899684 - RNA, 16 nt, Human
uggcuguggagugugg

SEQ ID NO: 1899685 - RNA, 12 nt, Human
aggcucauuuua

SEQ ID NO: 1899686 - RNA, 18 nt, Human
uggcuaagcaaaauguga

SEQ ID NO: 1899687 - RNA, 14 nt, Human
uggcuaaauucaug

SEQ ID NO: 1899688 - RNA, 17 nt, Human
aggcuccaggagcagcc

SEQ ID NO: 1899689 - RNA, 18 nt, Human
aggcuccaggagcagcca

SEQ ID NO: 1899690 - RNA, 19 nt, Human
aggcuccaggagcagccac

SEQ ID NO: 1899691 - RNA, 23 nt, Human
aggcuccaggagcagccacauuc

SEQ ID NO: 1899692 - RNA, 17 nt, Human
uggcuaauguacugcau

SEQ ID NO: 1899693 - RNA, 19 nt, Human
uggcuaauguacugcauau

SEQ ID NO: 1899694 - RNA, 21 nt, Human
uggcucacugcaacuucugcc

SEQ ID NO: 1899695 - RNA, 13 nt, Human
uggcucacgccug

SEQ ID NO: 1899696 - RNA, 16 nt, Human
uggcucacacugagaa

SEQ ID NO: 1899697 - RNA, 15 nt, Human
uggcucacacugaga

SEQ ID NO: 1899698 - RNA, 14 nt, Human
uggcucacacugag

SEQ ID NO: 1899699 - RNA, 13 nt, Human
uggcucacacuga

SEQ ID NO: 1899700 - RNA, 12 nt, Human
uggcucacacug

SEQ ID NO: 1899701 - RNA, 19 nt, Human
uggcucacaccuguaaucc

SEQ ID NO: 1899702 - RNA, 16 nt, Human
uggcucacaccuguaa

SEQ ID NO: 1899703 - RNA, 12 nt, Human
uggcucagccag

SEQ ID NO: 1899704 - RNA, 18 nt, Human
uggcucagacauguuuuc

SEQ ID NO: 1899705 - RNA, 13 nt, Human
uggcucagccagc

SEQ ID NO: 1899706 - RNA, 16 nt, Human
uggcucagccagcacu

SEQ ID NO: 1899707 - RNA, 16 nt, Human
ugggcaaacaggcagu

SEQ ID NO: 1899708 - RNA, 15 nt, Human
ugggcaaacaggcag

SEQ ID NO: 1899709 - RNA, 14 nt, Human
ugggcaaacaggca

SEQ ID NO: 1899710 - RNA, 16 nt, Human
ugggauuuggucaaca

SEQ ID NO: 1899711 - RNA, 13 nt, Human
ugggcagaaggaa

SEQ ID NO: 1899712 - RNA, 20 nt, Human
ugggcacaaagggcccagau

SEQ ID NO: 1899713 - RNA, 16 nt, Human
ugggcacacgccuccc

SEQ ID NO: 1899714 - RNA, 21 nt, Human
ugggcacacgccucccacugg

SEQ ID NO: 1899715 - RNA, 19 nt, Human
ugggcacaaagggcccaga

SEQ ID NO: 1899716 - RNA, 15 nt, Human
ugggcaauauagcaa

SEQ ID NO: 1899717 - RNA, 16 nt, Human
ugggcaauauagcaag

SEQ ID NO: 1899718 - RNA, 23 nt, Human
ugggcagaaggaagacuucaucc

SEQ ID NO: 1899719 - RNA, 13 nt, Human
ugggcauucaaau

SEQ ID NO: 1899720 - RNA, 14 nt, Human
ugggcauucaaaug

SEQ ID NO: 1899721 - RNA, 16 nt, Human
ugggcagaaggaagac

SEQ ID NO: 1899722 - RNA, 20 nt, Human
ugggcagaaggaagacuuca

SEQ ID NO: 1899723 - RNA, 14 nt, Human
ugggaggcucugga

SEQ ID NO: 1899724 - RNA, 12 nt, Human
ugggaggcgggc

SEQ ID NO: 1899725 - RNA, 17 nt, Human
ugggaggcucuggagcc

SEQ ID NO: 1899726 - RNA, 23 nt, Human
ugggaggcucuggagcccacugu

SEQ ID NO: 1899727 - RNA, 19 nt, Human
ugggaggcugagaugggag

SEQ ID NO: 1899728 - RNA, 11 nt, Human
ugggaggcuga

SEQ ID NO: 1899729 - RNA, 16 nt, Human
ugggagggaggcucag

SEQ ID NO: 1899730 - RNA, 17 nt, Human
ugggagggaggcucagg

SEQ ID NO: 1899731 - RNA, 22 nt, Human
ugggagggaggcucaggucccu

SEQ ID NO: 1899732 - RNA, 22 nt, Human
ugggaggauugcuugagcucag

SEQ ID NO: 1899733 - RNA, 18 nt, Human
ugggaggauugcuugagc

SEQ ID NO: 1899734 - RNA, 21 nt, Human
ugggaggauugcuugagcuca

SEQ ID NO: 1899735 - RNA, 16 nt, Human
ugggagaaaugaaaaa

SEQ ID NO: 1899736 - RNA, 21 nt, Human
ugggagaaccaaaaagaggcu

SEQ ID NO: 1899737 - RNA, 22 nt, Human
ugggagaaccaaaaagaggcua

SEQ ID NO: 1899738 - RNA, 15 nt, Human
agggagcuagccaga

SEQ ID NO: 1899739 - RNA, 16 nt, Human
agggagcuagccagag

SEQ ID NO: 1899740 - RNA, 21 nt, Human
agggagcggccggccagcccc

SEQ ID NO: 1899741 - RNA, 22 nt, Human
agggagcggccggccagccccu

SEQ ID NO: 1899742 - RNA, 18 nt, Human
ugggacuacaggcaccca

SEQ ID NO: 1899743 - RNA, 18 nt, Human
agggagccuuugguucug

SEQ ID NO: 1899744 - RNA, 16 nt, Human
agggagcgagggagaa

SEQ ID NO: 1899745 - RNA, 19 nt, Human
agggagcggccggccagcc

SEQ ID NO: 1899746 - RNA, 15 nt, Human
agggagcauuuuccu

SEQ ID NO: 1899747 - RNA, 17 nt, Human
agggagcauuuuccucc

SEQ ID NO: 1899748 - RNA, 17 nt, Human
agggagccccuuugaug

SEQ ID NO: 1899749 - RNA, 22 nt, Human
agggagcuccaacucagaaggg

SEQ ID NO: 1899750 - RNA, 18 nt, Human
ugggacuagagcuuucuu

SEQ ID NO: 1899751 - RNA, 17 nt, Human
agggagcuagccagagg

SEQ ID NO: 1899752 - RNA, 23 nt, Human
agggagcuagccagaggacugug

SEQ ID NO: 1899753 - RNA, 16 nt, Human
ugggacuacaggugug

SEQ ID NO: 1899754 - RNA, 18 nt, Human
ugggacucaaugcacuga

SEQ ID NO: 1899755 - RNA, 15 nt, Human
ugggagaaaugaaaa

SEQ ID NO: 1899756 - RNA, 14 nt, Human
ugggacuuaacucc

SEQ ID NO: 1899757 - RNA, 21 nt, Human
agggagaccuggacacaggcc

SEQ ID NO: 1899758 - RNA, 22 nt, Human
agggagaccuggacacaggccu

SEQ ID NO: 1899759 - RNA, 19 nt, Human
agggagcaggcggugggca

SEQ ID NO: 1899760 - RNA, 16 nt, Human
agggagaccuggacac

SEQ ID NO: 1899761 - RNA, 19 nt, Human
agggagacccguccauuug

SEQ ID NO: 1899762 - RNA, 21 nt, Human
agggagaagacuauauuguac

SEQ ID NO: 1899763 - RNA, 13 nt, Human
agggagaagcucc

SEQ ID NO: 1899764 - RNA, 20 nt, Human
agggacuuggaagcuccgcu

SEQ ID NO: 1899765 - RNA, 15 nt, Human
agggacuuggaagcu

SEQ ID NO: 1899766 - RNA, 19 nt, Human
agggacuuggaagcuccgc

SEQ ID NO: 1899767 - RNA, 18 nt, Human
agggacuuggaagcuccg

SEQ ID NO: 1899768 - RNA, 15 nt, Human
ugggcucccuuccca

SEQ ID NO: 1899769 - RNA, 14 nt, Human
ugggcucccuuccc

SEQ ID NO: 1899770 - RNA, 23 nt, Human
ugggcuccuccagggugugugcu

SEQ ID NO: 1899771 - RNA, 13 nt, Human
ugggcuccuccag

SEQ ID NO: 1899772 - RNA, 15 nt, Human
ugggcuccuccaggg

SEQ ID NO: 1899773 - RNA, 20 nt, Human
agggcugucaucugugcacu

SEQ ID NO: 1899774 - RNA, 15 nt, Human
agggcuuacggcccu

SEQ ID NO: 1899775 - RNA, 18 nt, Human
agggcuuacggcccuggc

SEQ ID NO: 1899776 - RNA, 19 nt, Human
agggcuuacggcccuggcc

SEQ ID NO: 1899777 - RNA, 20 nt, Human
agggcuuacggcccuggccu

SEQ ID NO: 1899778 - RNA, 18 nt, Human
agggcugucaucugugca

SEQ ID NO: 1899779 - RNA, 19 nt, Human
agggcugucaucugugcac

SEQ ID NO: 1899780 - RNA, 18 nt, Human
agggcccagagagggugg

SEQ ID NO: 1899781 - RNA, 14 nt, Human
agggcccagagagg

SEQ ID NO: 1899782 - RNA, 17 nt, Human
agggcccagagcccagc

SEQ ID NO: 1899783 - RNA, 18 nt, Human
agggcccagagcccagcu

SEQ ID NO: 1899784 - RNA, 19 nt, Human
agggcccagagcccagcuc

SEQ ID NO: 1899785 - RNA, 20 nt, Human
agggcccagagcccagcucc

SEQ ID NO: 1899786 - RNA, 21 nt, Human
agggcccagagcccagcucca

SEQ ID NO: 1899787 - RNA, 20 nt, Human
agggcuccagacacaugucc

SEQ ID NO: 1899788 - RNA, 20 nt, Human
agggcuggacugaggccuga

SEQ ID NO: 1899789 - RNA, 18 nt, Human
agggcuggacugaggccu

SEQ ID NO: 1899790 - RNA, 17 nt, Human
agggcuggacugaggcc

SEQ ID NO: 1899791 - RNA, 16 nt, Human
agggcuggacugaggc

SEQ ID NO: 1899792 - RNA, 15 nt, Human
agggcuggacugagg

SEQ ID NO: 1899793 - RNA, 14 nt, Human
agggcuggacugag

SEQ ID NO: 1899794 - RNA, 19 nt, Human
agggcuccucuccagucug

SEQ ID NO: 1899795 - RNA, 18 nt, Human
agggaguguacucccagg

SEQ ID NO: 1899796 - RNA, 21 nt, Human
agggaguuaucuaaaagaaau

SEQ ID NO: 1899797 - RNA, 16 nt, Human
agggaguguacuccca

SEQ ID NO: 1899798 - RNA, 17 nt, Human
agggaguguacucccag

SEQ ID NO: 1899799 - RNA, 13 nt, Human
agggcccagagag

SEQ ID NO: 1899800 - RNA, 12 nt, Human
agggcccagaga

SEQ ID NO: 1899801 - RNA, 15 nt, Human
agggccaacccuucu

SEQ ID NO: 1899802 - RNA, 16 nt, Human
agggccaacccuucuc

SEQ ID NO: 1899803 - RNA, 17 nt, Human
agggccaacccuucucc

SEQ ID NO: 1899804 - RNA, 21 nt, Human
agggccaacccuucuccucuu

SEQ ID NO: 1899805 - RNA, 20 nt, Human
agggagugacagaggcagcc

SEQ ID NO: 1899806 - RNA, 20 nt, Human
agggagugaguugauagcac

SEQ ID NO: 1899807 - RNA, 23 nt, Human
agggaguccgaaagggacuugga

SEQ ID NO: 1899808 - RNA, 20 nt, Human
agggaguccgaaagggacuu

SEQ ID NO: 1899809 - RNA, 15 nt, Human
agggagggcugucau

SEQ ID NO: 1899810 - RNA, 22 nt, Human
agggagggcuccagacacaugu

SEQ ID NO: 1899811 - RNA, 12 nt, Human
agggagggcucc

SEQ ID NO: 1899812 - RNA, 17 nt, Human
agggagggcuccagaca

SEQ ID NO: 1899813 - RNA, 19 nt, Human
agggagggcuccagacaca

SEQ ID NO: 1899814 - RNA, 17 nt, Human
agggagggagggcucca

SEQ ID NO: 1899815 - RNA, 23 nt, Human
ugggccaacaaagaacacuaacu

SEQ ID NO: 1899816 - RNA, 23 nt, Human
agucacugugagcucccaggugc

SEQ ID NO: 1899817 - RNA, 24 nt, Human
agucacugugagcucccaggugca

SEQ ID NO: 1899818 - RNA, 19 nt, Human
ugucccuuacgugaguccu

SEQ ID NO: 1899819 - RNA, 23 nt, Human
ugucccuuacgugaguccuggca

SEQ ID NO: 1899820 - RNA, 16 nt, Human
agucccaccuuggcug

SEQ ID NO: 1899821 - RNA, 15 nt, Human
agucccaccuuggcu

SEQ ID NO: 1899822 - RNA, 20 nt, Human
agucauaaaauguaucuucc

SEQ ID NO: 1899823 - RNA, 21 nt, Human
agucauaaucauuagggggaa

SEQ ID NO: 1899824 - RNA, 19 nt, Human
agucccaccuuggcugcag

SEQ ID NO: 1899825 - RNA, 18 nt, Human
agucccaccuuggcugca

SEQ ID NO: 1899826 - RNA, 19 nt, Human
agucgcaucucagugcagg

SEQ ID NO: 1899827 - RNA, 14 nt, Human
aguccucccaucuc

SEQ ID NO: 1899828 - RNA, 16 nt, Human
aguccucccaucucac

SEQ ID NO: 1899829 - RNA, 20 nt, Human
aguccuacaagcuaaaauua

SEQ ID NO: 1899830 - RNA, 17 nt, Human
aguccucauaaaaagca

SEQ ID NO: 1899831 - RNA, 18 nt, Human
aguccucauaaaaagcaa

SEQ ID NO: 1899832 - RNA, 23 nt, Human
agucucacuguugcccaggcugg

SEQ ID NO: 1899833 - RNA, 20 nt, Human
agucuauuuacggaacucaa

SEQ ID NO: 1899834 - RNA, 15 nt, Human
agucuauuuacggaa

SEQ ID NO: 1899835 - RNA, 23 nt, Human
ugucuccaaccccccagcacuga

SEQ ID NO: 1899836 - RNA, 22 nt, Human
ugucuccaaccccccagcacug

SEQ ID NO: 1899837 - RNA, 21 nt, Human
ugucuccaaccccccagcacu

SEQ ID NO: 1899838 - RNA, 20 nt, Human
ugucuccaaccccccagcac

SEQ ID NO: 1899839 - RNA, 19 nt, Human
ugucuccaaccccccagca

SEQ ID NO: 1899840 - RNA, 17 nt, Human
ugucuccaaccccccag

SEQ ID NO: 1899841 - RNA, 16 nt, Human
ugucuccaacccccca

SEQ ID NO: 1899842 - RNA, 11 nt, Human
ugucuccaacc

SEQ ID NO: 1899843 - RNA, 19 nt, Human
agucucacuuugucgccca

SEQ ID NO: 1899844 - RNA, 19 nt, Human
aguauucuuauuuaaugaa

SEQ ID NO: 1899845 - RNA, 14 nt, Human
aguauuugugggga

SEQ ID NO: 1899846 - RNA, 15 nt, Human
agucaccaagcccag

SEQ ID NO: 1899847 - RNA, 17 nt, Human
agucaccccggccaccu

SEQ ID NO: 1899848 - RNA, 20 nt, Human
uguauauuguguuuguguau

SEQ ID NO: 1899849 - RNA, 21 nt, Human
uguauauuugugauagcacuu

SEQ ID NO: 1899850 - RNA, 15 nt, Human
aguauuaaaauuugg

SEQ ID NO: 1899851 - RNA, 23 nt, Human
ugucccugcacuugcagacucua

SEQ ID NO: 1899852 - RNA, 22 nt, Human
ugucccugcacuugcagacucu

SEQ ID NO: 1899853 - RNA, 20 nt, Human
ugucccugcacuugcagacu

SEQ ID NO: 1899854 - RNA, 22 nt, Human
uguccccuucucucaucucuua

SEQ ID NO: 1899855 - RNA, 20 nt, Human
uguccccuucucucaucucu

SEQ ID NO: 1899856 - RNA, 16 nt, Human
uguccccuucucucau

SEQ ID NO: 1899857 - RNA, 14 nt, Human
uguccccuucucuc

SEQ ID NO: 1899858 - RNA, 11 nt, Human
uguccccuucu

SEQ ID NO: 1899859 - RNA, 16 nt, Human
uguccaagaagcccag

SEQ ID NO: 1899860 - RNA, 17 nt, Human
uguccaagaagcccagg

SEQ ID NO: 1899861 - RNA, 18 nt, Human
uguccaagaagcccagga

SEQ ID NO: 1899862 - RNA, 22 nt, Human
uguccaagaagcccaggaaagg

SEQ ID NO: 1899863 - RNA, 22 nt, Human
ugucauuugagcagggcucagc

SEQ ID NO: 1899864 - RNA, 21 nt, Human
ugucauuugagcagggcucag

SEQ ID NO: 1899865 - RNA, 20 nt, Human
ugucauuugagcagggcuca

SEQ ID NO: 1899866 - RNA, 20 nt, Human
ugucagguggggcagcuuga

SEQ ID NO: 1899867 - RNA, 18 nt, Human
ugucagguggggcagcuu

SEQ ID NO: 1899868 - RNA, 17 nt, Human
ugucagguggggcagcu

SEQ ID NO: 1899869 - RNA, 14 nt, Human
uguccaagaagccc

SEQ ID NO: 1899870 - RNA, 15 nt, Human
uguccaagaagccca

SEQ ID NO: 1899871 - RNA, 16 nt, Human
uguccaaaacugccuc

SEQ ID NO: 1899872 - RNA, 15 nt, Human
uguccaaaacugccu

SEQ ID NO: 1899873 - RNA, 16 nt, Human
uguaauucuaaaugaa

SEQ ID NO: 1899874 - RNA, 15 nt, Human
uguaauucuaaauga

SEQ ID NO: 1899875 - RNA, 14 nt, Human
uguaauucuaaaug

SEQ ID NO: 1899876 - RNA, 13 nt, Human
uguaauucuaaau

SEQ ID NO: 1899877 - RNA, 19 nt, Human
uguaauuaaguacuaugua

SEQ ID NO: 1899878 - RNA, 21 nt, Human
uguaauuaaguacuauguauc

SEQ ID NO: 1899879 - RNA, 18 nt, Human
uguaauuaaguacuaugu

SEQ ID NO: 1899880 - RNA, 20 nt, Human
agguuggcaaaaaggcagga

SEQ ID NO: 1899881 - RNA, 16 nt, Human
agguuucucaaagaaa

SEQ ID NO: 1899882 - RNA, 19 nt, Human
agguuucucaaagaaauuu

SEQ ID NO: 1899883 - RNA, 14 nt, Human
agguuucugaaaau

SEQ ID NO: 1899884 - RNA, 23 nt, Human
agguuucugaaaauuaacacugc

SEQ ID NO: 1899885 - RNA, 15 nt, Human
agguuucugaaaauu

SEQ ID NO: 1899886 - RNA, 20 nt, Human
uguacauaaugcgugcauac

SEQ ID NO: 1899887 - RNA, 19 nt, Human
uguacauaaugcgugcaua

SEQ ID NO: 1899888 - RNA, 12 nt, Human
uguacaguuuuu

SEQ ID NO: 1899889 - RNA, 20 nt, Human
uguaauuuuuuuaucgucac

SEQ ID NO: 1899890 - RNA, 14 nt, Human
uguacaugaaaaca

SEQ ID NO: 1899891 - RNA, 18 nt, Human
uguacaucuauuuuggau

SEQ ID NO: 1899892 - RNA, 19 nt, Human
uguacaucuauuuuggauu

SEQ ID NO: 1899893 - RNA, 20 nt, Human
uguacaucuauuuuggauug

SEQ ID NO: 1899894 - RNA, 21 nt, Human
uguacaucuauuuuggauugu

SEQ ID NO: 1899895 - RNA, 16 nt, Human
uguacaugaaaacaca

SEQ ID NO: 1899896 - RNA, 23 nt, Human
uguacaucuauuuuggauuguau

SEQ ID NO: 1899897 - RNA, 14 nt, Human
uguacauauaagug

SEQ ID NO: 1899898 - RNA, 14 nt, Human
agguugaagcacca

SEQ ID NO: 1899899 - RNA, 14 nt, Human
agguugcagugagc

SEQ ID NO: 1899900 - RNA, 18 nt, Human
agguugcagugagcagag

SEQ ID NO: 1899901 - RNA, 12 nt, Human
aggugugcucug

SEQ ID NO: 1899902 - RNA, 14 nt, Human
aggugugcaagaga

SEQ ID NO: 1899903 - RNA, 15 nt, Human
aggugugauuauaaa

SEQ ID NO: 1899904 - RNA, 22 nt, Human
aggugugagucaccaagcccag

SEQ ID NO: 1899905 - RNA, 21 nt, Human
aggugugagucaccaagccca

SEQ ID NO: 1899906 - RNA, 20 nt, Human
aggugucccugcacuugcag

SEQ ID NO: 1899907 - RNA, 16 nt, Human
aggugucccugcacuu

SEQ ID NO: 1899908 - RNA, 20 nt, Human
agguguauggagagaaaaca

SEQ ID NO: 1899909 - RNA, 12 nt, Human
aggugggaggau

SEQ ID NO: 1899910 - RNA, 16 nt, Human
aggugggcgggcaggg

SEQ ID NO: 1899911 - RNA, 14 nt, Human
agguggcugagccc

SEQ ID NO: 1899912 - RNA, 15 nt, Human
agguggcugagcccc

SEQ ID NO: 1899913 - RNA, 17 nt, Human
agguggcugagccccug

SEQ ID NO: 1899914 - RNA, 19 nt, Human
agguggcugagccccuguc

SEQ ID NO: 1899915 - RNA, 15 nt, Human
aguaccaaucauuuu

SEQ ID NO: 1899916 - RNA, 16 nt, Human
aguaccaaucauuuua

SEQ ID NO: 1899917 - RNA, 22 nt, Human
aguaccaccaaaaaagcuguau

SEQ ID NO: 1899918 - RNA, 17 nt, Human
aguaccaccaaaaaagc

SEQ ID NO: 1899919 - RNA, 21 nt, Human
aguaccauaguaccauuuaua

SEQ ID NO: 1899920 - RNA, 23 nt, Human
aguaccauaguaccauuuauaca

SEQ ID NO: 1899921 - RNA, 17 nt, Human
aguagauguucuacuuu

SEQ ID NO: 1899922 - RNA, 19 nt, Human
aguaccauaguaccauuua

SEQ ID NO: 1899923 - RNA, 20 nt, Human
aguagcaguagaugcaugua

SEQ ID NO: 1899924 - RNA, 16 nt, Human
uguaggguuauaauaa

SEQ ID NO: 1899925 - RNA, 17 nt, Human
uguaggguuauaauaau

SEQ ID NO: 1899926 - RNA, 22 nt, Human
uguagucagaauuagcugcuuc

SEQ ID NO: 1899927 - RNA, 22 nt, Human
uguagugaaucacguaaagcua

SEQ ID NO: 1899928 - RNA, 21 nt, Human
uguaguccucauaaaaagcaa

SEQ ID NO: 1899929 - RNA, 20 nt, Human
uguaguccgugcugacagcu

SEQ ID NO: 1899930 - RNA, 22 nt, Human
uguaguccgugcugacagcugc

SEQ ID NO: 1899931 - RNA, 17 nt, Human
uguaguccucauaaaaa

SEQ ID NO: 1899932 - RNA, 18 nt, Human
uguauauauuuccuauau

SEQ ID NO: 1899933 - RNA, 12 nt, Human
uguauauacuuu

SEQ ID NO: 1899934 - RNA, 13 nt, Human
uguauauacuuuu

SEQ ID NO: 1899935 - RNA, 22 nt, Human
uguauauauuuccuauauuguu

SEQ ID NO: 1899936 - RNA, 14 nt, Human
uguauaguucacgu

SEQ ID NO: 1899937 - RNA, 15 nt, Human
uguacauguguagcc

SEQ ID NO: 1899938 - RNA, 11 nt, Human
uguacaugugu

SEQ ID NO: 1899939 - RNA, 22 nt, Human
uguacaugaagaagcuaaaucc

SEQ ID NO: 1899940 - RNA, 16 nt, Human
uguacaugagaaggaa

SEQ ID NO: 1899941 - RNA, 21 nt, Human
uguacauggaauaacauguaa

SEQ ID NO: 1899942 - RNA, 16 nt, Human
aguaaaaacaaagaaa

SEQ ID NO: 1899943 - RNA, 23 nt, Human
aguaaaaacaaagaaauuaugug

SEQ ID NO: 1899944 - RNA, 22 nt, Human
aguaauugguccgaucuuugac

SEQ ID NO: 1899945 - RNA, 21 nt, Human
aguacacuguuucaaacuuua

SEQ ID NO: 1899946 - RNA, 23 nt, Human
aguacacuguuucaaacuuuacu

SEQ ID NO: 1899947 - RNA, 18 nt, Human
aguaauugacaugugcca

SEQ ID NO: 1899948 - RNA, 20 nt, Human
aguaauugacaugugccagg

SEQ ID NO: 1899949 - RNA, 19 nt, Human
aguaaucuaauauggccac

SEQ ID NO: 1899950 - RNA, 20 nt, Human
aguaaucugagaaacaauga

SEQ ID NO: 1899951 - RNA, 21 nt, Human
ugugucuguacacguguccug

SEQ ID NO: 1899952 - RNA, 14 nt, Human
ugugucuguacacg

SEQ ID NO: 1899953 - RNA, 13 nt, Human
ugugucuguacac

SEQ ID NO: 1899954 - RNA, 12 nt, Human
ugugucugagug

SEQ ID NO: 1899955 - RNA, 20 nt, Human
ugugucuugcaauggcagcc

SEQ ID NO: 1899956 - RNA, 16 nt, Human
uguguguugccacagg

SEQ ID NO: 1899957 - RNA, 17 nt, Human
uguguguugccacagga

SEQ ID NO: 1899958 - RNA, 19 nt, Human
uguguguugccacaggaca

SEQ ID NO: 1899959 - RNA, 20 nt, Human
uguguguugccacaggacac

SEQ ID NO: 1899960 - RNA, 11 nt, Human
uguguguuuau

SEQ ID NO: 1899961 - RNA, 18 nt, Human
uguguguuguguguggga

SEQ ID NO: 1899962 - RNA, 16 nt, Human
uguguccaaaacugcc

SEQ ID NO: 1899963 - RNA, 18 nt, Human
agugcccccacugaccag

SEQ ID NO: 1899964 - RNA, 22 nt, Human
uguguuaucacccagaagaaaa

SEQ ID NO: 1899965 - RNA, 23 nt, Human
uguguuaucacccagaagaaaau

SEQ ID NO: 1899966 - RNA, 18 nt, Human
uguuaauaaaaguacaug

SEQ ID NO: 1899967 - RNA, 13 nt, Human
uguuaauaaaagu

SEQ ID NO: 1899968 - RNA, 19 nt, Human
uguuaauaaaaguacaugu

SEQ ID NO: 1899969 - RNA, 17 nt, Human
uguuacaaauuguagaa

SEQ ID NO: 1899970 - RNA, 18 nt, Human
uguuacaaauuguagaag

SEQ ID NO: 1899971 - RNA, 19 nt, Human
uguuacauaagauaaaugu

SEQ ID NO: 1899972 - RNA, 11 nt, Human
aguggcagcug

SEQ ID NO: 1899973 - RNA, 22 nt, Human
agugggcccaaugcacuuuguu

SEQ ID NO: 1899974 - RNA, 16 nt, Human
aguggggaaugaagau

SEQ ID NO: 1899975 - RNA, 16 nt, Human
agugggcuugauucug

SEQ ID NO: 1899976 - RNA, 22 nt, Human
agugggcuugauucugcaguaa

SEQ ID NO: 1899977 - RNA, 16 nt, Human
agugggguagguuggg

SEQ ID NO: 1899978 - RNA, 15 nt, Human
aguggauuucccauc

SEQ ID NO: 1899979 - RNA, 13 nt, Human
aguggacucaggg

SEQ ID NO: 1899980 - RNA, 16 nt, Human
aguggacucagggcag

SEQ ID NO: 1899981 - RNA, 21 nt, Human
aguggacuguucccugaggug

SEQ ID NO: 1899982 - RNA, 17 nt, Human
aguggaccuuaggccuu

SEQ ID NO: 1899983 - RNA, 19 nt, Human
aguggaccuuaggccuucc

SEQ ID NO: 1899984 - RNA, 20 nt, Human
aguggaccuuaggccuuccu

SEQ ID NO: 1899985 - RNA, 23 nt, Human
aguggaccuuaggccuuccucuc

SEQ ID NO: 1899986 - RNA, 14 nt, Human
agugugugucuuuc

SEQ ID NO: 1899987 - RNA, 12 nt, Human
agugugugucuu

SEQ ID NO: 1899988 - RNA, 11 nt, Human
agugugugucu

SEQ ID NO: 1899989 - RNA, 21 nt, Human
aguguuccgugguuaaacucg

SEQ ID NO: 1899990 - RNA, 18 nt, Human
aguguguguuuuucauaa

SEQ ID NO: 1899991 - RNA, 21 nt, Human
aguguucauaaauaaaguuug

SEQ ID NO: 1899992 - RNA, 16 nt, Human
aguguuguggauuuaa

SEQ ID NO: 1899993 - RNA, 17 nt, Human
aguguucugcaaaaaua

SEQ ID NO: 1899994 - RNA, 13 nt, Human
aguuacucagaau

SEQ ID NO: 1899995 - RNA, 17 nt, Human
aguuacuagguaacuuc

SEQ ID NO: 1899996 - RNA, 18 nt, Human
aguuacuagguaacuuca

SEQ ID NO: 1899997 - RNA, 19 nt, Human
aguuacuagguaacuucau

SEQ ID NO: 1899998 - RNA, 22 nt, Human
aguuacuagguaacuucauauu

SEQ ID NO: 1899999 - RNA, 20 nt, Human
aguguuguggauuuaacaga

SEQ ID NO: 1900000 - RNA, 19 nt, Human
aguguuguggauuuaacag

SEQ ID NO: 1900001 - RNA, 20 nt, Human
uguugcccaggcuggcgugc

SEQ ID NO: 1900002 - RNA, 23 nt, Human
uguugcccaggcuggcgugcagu

SEQ ID NO: 1900003 - RNA, 14 nt, Human
uguugccacaggac

SEQ ID NO: 1900004 - RNA, 15 nt, Human
uguugccacaggaca

SEQ ID NO: 1900005 - RNA, 16 nt, Human
uguugccacaggacac

SEQ ID NO: 1900006 - RNA, 15 nt, Human
uguugcauagaauaa

SEQ ID NO: 1900007 - RNA, 15 nt, Human
uguucuaagaaguga

SEQ ID NO: 1900008 - RNA, 14 nt, Human
agugugaccaggca

SEQ ID NO: 1900009 - RNA, 20 nt, Human
agugugacugaucucucgug

SEQ ID NO: 1900010 - RNA, 18 nt, Human
agugugaguaaucugaga

SEQ ID NO: 1900011 - RNA, 20 nt, Human
agugugccugaagucccaga

SEQ ID NO: 1900012 - RNA, 18 nt, Human
agugguauagaaaugcug

SEQ ID NO: 1900013 - RNA, 16 nt, Human
agugguauagaaaugc

SEQ ID NO: 1900014 - RNA, 15 nt, Human
agugguauagaaaug

SEQ ID NO: 1900015 - RNA, 14 nt, Human
agugguauagaaau

SEQ ID NO: 1900016 - RNA, 15 nt, Human
aguguggcaaaauaa

SEQ ID NO: 1900017 - RNA, 23 nt, Human
aguguggagucauucucauugaa

SEQ ID NO: 1900018 - RNA, 18 nt, Human
aguguggagucauucuca

SEQ ID NO: 1900019 - RNA, 17 nt, Human
aguguggcaguuuggca

SEQ ID NO: 1900020 - RNA, 16 nt, Human
aguguggcaguuuggc

SEQ ID NO: 1900021 - RNA, 20 nt, Human
aguguggagucauucucauu

SEQ ID NO: 1900022 - RNA, 21 nt, Human
agugugccugaagucccagau

SEQ ID NO: 1900023 - RNA, 12 nt, Human
agugugcuuuau

SEQ ID NO: 1900024 - RNA, 18 nt, Human
agugugcuuuaugcugaa

SEQ ID NO: 1900025 - RNA, 21 nt, Human
agugugcuuuaugcugaaaca

SEQ ID NO: 1900026 - RNA, 19 nt, Human
uguuccacaaguuaaauaa

SEQ ID NO: 1900027 - RNA, 22 nt, Human
uguucgcauggucacacacuga

SEQ ID NO: 1900028 - RNA, 23 nt, Human
uguucgcauggucacacacugau

SEQ ID NO: 1900029 - RNA, 20 nt, Human
uguucgacagugaauauuca

SEQ ID NO: 1900030 - RNA, 20 nt, Human
uguucgcauggucacacacu

SEQ ID NO: 1900031 - RNA, 15 nt, Human
uguuccuggcaguuu

SEQ ID NO: 1900032 - RNA, 19 nt, Human
uguuccuggcaguuuaaaa

SEQ ID NO: 1900033 - RNA, 13 nt, Human
uguuaugacucca

SEQ ID NO: 1900034 - RNA, 17 nt, Human
uguuaugacuccagaau

SEQ ID NO: 1900035 - RNA, 22 nt, Human
agugugguguuuccuggcacug

SEQ ID NO: 1900036 - RNA, 9 nt, Human
aguguguaa

SEQ ID NO: 1900037 - RNA, 21 nt, Human
agucucuuuuuuuggcccagg

SEQ ID NO: 1900038 - RNA, 20 nt, Human
agucucuuuuuuuggcccag

SEQ ID NO: 1900039 - RNA, 23 nt, Human
agucucuuuuuuuggcccaggcc

SEQ ID NO: 1900040 - RNA, 12 nt, Human
agucugaaggcu

SEQ ID NO: 1900041 - RNA, 13 nt, Human
agucuuagaugua

SEQ ID NO: 1900042 - RNA, 14 nt, Human
agucuuagauguau

SEQ ID NO: 1900043 - RNA, 16 nt, Human
agucuuagauguauau

SEQ ID NO: 1900044 - RNA, 23 nt, Human
agucuuagauguauauauuuccu

SEQ ID NO: 1900045 - RNA, 19 nt, Human
agucucgcucuguugccca

SEQ ID NO: 1900046 - RNA, 17 nt, Human
agucucuuguauuaaac

SEQ ID NO: 1900047 - RNA, 16 nt, Human
agucucuugauucaua

SEQ ID NO: 1900048 - RNA, 17 nt, Human
agucucuugauucauaa

SEQ ID NO: 1900049 - RNA, 17 nt, Human
ugugacuuaagaagccu

SEQ ID NO: 1900050 - RNA, 13 nt, Human
ugugacuggucag

SEQ ID NO: 1900051 - RNA, 16 nt, Human
ugugacugaucucucg

SEQ ID NO: 1900052 - RNA, 19 nt, Human
ugugagcucccaggugcag

SEQ ID NO: 1900053 - RNA, 23 nt, Human
ugugagcucccaggugcagccag

SEQ ID NO: 1900054 - RNA, 11 nt, Human
ugugaggaagc

SEQ ID NO: 1900055 - RNA, 19 nt, Human
ugugagacucgagaacuuu

SEQ ID NO: 1900056 - RNA, 18 nt, Human
ugugagcccagcuggguc

SEQ ID NO: 1900057 - RNA, 16 nt, Human
ugugaugcccugcccu

SEQ ID NO: 1900058 - RNA, 22 nt, Human
ugugaugaugaaaugaggucag

SEQ ID NO: 1900059 - RNA, 19 nt, Human
ugugaugagaggaaaucac

SEQ ID NO: 1900060 - RNA, 12 nt, Human
agugagcugguu

SEQ ID NO: 1900061 - RNA, 22 nt, Human
agugagcggugcuguccucagg

SEQ ID NO: 1900062 - RNA, 23 nt, Human
agugagcggugcuguccucaggu

SEQ ID NO: 1900063 - RNA, 22 nt, Human
agugagcacuaaggugugcucu

SEQ ID NO: 1900064 - RNA, 14 nt, Human
agugagcacuaagg

SEQ ID NO: 1900065 - RNA, 22 nt, Human
agucuugugacuagugcugaag

SEQ ID NO: 1900066 - RNA, 23 nt, Human
agucuugugacuagugcugaagc

SEQ ID NO: 1900067 - RNA, 21 nt, Human
agucuugugacuagugcugaa

SEQ ID NO: 1900068 - RNA, 20 nt, Human
agucuugugacuagugcuga

SEQ ID NO: 1900069 - RNA, 17 nt, Human
agucuugugacuagugc

SEQ ID NO: 1900070 - RNA, 16 nt, Human
agucuuucacauuuaa

SEQ ID NO: 1900071 - RNA, 18 nt, Human
agucuuucacauuuaaau

SEQ ID NO: 1900072 - RNA, 21 nt, Human
agugaacaaauuuacagagac

SEQ ID NO: 1900073 - RNA, 21 nt, Human
agugacugauggcuaauguac

SEQ ID NO: 1900074 - RNA, 15 nt, Human
agugaaccuguauaa

SEQ ID NO: 1900075 - RNA, 16 nt, Human
agugaacuugggccac

SEQ ID NO: 1900076 - RNA, 23 nt, Human
agugaacaaauuuacagagacag

SEQ ID NO: 1900077 - RNA, 22 nt, Human
agugaacaaauuuacagagaca

SEQ ID NO: 1900078 - RNA, 16 nt, Human
ugugcuccuccuuggu

SEQ ID NO: 1900079 - RNA, 14 nt, Human
ugugcucuccaagc

SEQ ID NO: 1900080 - RNA, 19 nt, Human
ugugcucuccaagcccagu

SEQ ID NO: 1900081 - RNA, 21 nt, Human
ugugcucaggagcccugggag

SEQ ID NO: 1900082 - RNA, 18 nt, Human
ugugcugagucugaaggc

SEQ ID NO: 1900083 - RNA, 19 nt, Human
ugugcugagucugaaggcu

SEQ ID NO: 1900084 - RNA, 12 nt, Human
ugugcugcccug

SEQ ID NO: 1900085 - RNA, 20 nt, Human
ugugcucaggagcccuggga

SEQ ID NO: 1900086 - RNA, 16 nt, Human
ugugauugacagcuuu

SEQ ID NO: 1900087 - RNA, 22 nt, Human
ugugauugacagcuuugcugcu

SEQ ID NO: 1900088 - RNA, 23 nt, Human
ugugauugacagcuuugcugcug

SEQ ID NO: 1900089 - RNA, 23 nt, Human
agugagcugguuuuuagcggaga

SEQ ID NO: 1900090 - RNA, 22 nt, Human
uguggauuuaacagaaauguac

SEQ ID NO: 1900091 - RNA, 20 nt, Human
uguggauuuaacagaaaugu

SEQ ID NO: 1900092 - RNA, 19 nt, Human
uguggauuuaacagaaaug

SEQ ID NO: 1900093 - RNA, 14 nt, Human
uguggaugauaaaa

SEQ ID NO: 1900094 - RNA, 21 nt, Human
uguggaucaaauccagccugc

SEQ ID NO: 1900095 - RNA, 18 nt, Human
ugugcugcccugcccacc

SEQ ID NO: 1900096 - RNA, 19 nt, Human
ugugcugcccugcccaccu

SEQ ID NO: 1900097 - RNA, 20 nt, Human
ugugcugcccugcccaccug

SEQ ID NO: 1900098 - RNA, 21 nt, Human
ugugcugcccugcccaccugg

SEQ ID NO: 1900099 - RNA, 21 nt, Human
agugcagaccccuuggccagc

SEQ ID NO: 1900100 - RNA, 17 nt, Human
agugcagugagccgaga

SEQ ID NO: 1900101 - RNA, 21 nt, Human
agugcacuaauguguaagaca

SEQ ID NO: 1900102 - RNA, 17 nt, Human
agugcacuaauguguaa

SEQ ID NO: 1900103 - RNA, 20 nt, Human
agugcaauaaaucugaccca

SEQ ID NO: 1900104 - RNA, 18 nt, Human
agugcaagccccugcucc

SEQ ID NO: 1900105 - RNA, 15 nt, Human
agugcaagccccugc

SEQ ID NO: 1900106 - RNA, 17 nt, Human
agugcaagccccugcuc

SEQ ID NO: 1900107 - RNA, 21 nt, Human
agugcaauaaaucugacccag

SEQ ID NO: 1900108 - RNA, 22 nt, Human
agugcaauaaaucugacccagu

SEQ ID NO: 1900109 - RNA, 23 nt, Human
agugcaauaaaucugacccagug

SEQ ID NO: 1900110 - RNA, 14 nt, Human
agugcacuaaugug

SEQ ID NO: 1900111 - RNA, 16 nt, Human
agugcaugcugucccu

SEQ ID NO: 1900112 - RNA, 14 nt, Human
agugcaugcugucc

SEQ ID NO: 1900113 - RNA, 14 nt, Human
agugccaaaaacaa

SEQ ID NO: 1900114 - RNA, 18 nt, Human
agugccaggauggaauga

SEQ ID NO: 1900115 - RNA, 16 nt, Human
agugaggaugaaaaaa

SEQ ID NO: 1900116 - RNA, 12 nt, Human
agugaggcucug

SEQ ID NO: 1900117 - RNA, 14 nt, Human
agugaggaugucug

SEQ ID NO: 1900118 - RNA, 13 nt, Human
agugaggcucugc

SEQ ID NO: 1900119 - RNA, 17 nt, Human
agugcaacacugaagcu

SEQ ID NO: 1900120 - RNA, 14 nt, Human
auagaguguuauca

SEQ ID NO: 1900121 - RNA, 15 nt, Human
auagaugcuggccca

SEQ ID NO: 1900122 - RNA, 16 nt, Human
auagaugcuggcccag

SEQ ID NO: 1900123 - RNA, 17 nt, Human
auagaugcuggcccagg

SEQ ID NO: 1900124 - RNA, 20 nt, Human
auagaugcuggcccagggcc

SEQ ID NO: 1900125 - RNA, 11 nt, Human
auagaugugug

SEQ ID NO: 1900126 - RNA, 13 nt, Human
auagaugugugga

SEQ ID NO: 1900127 - RNA, 12 nt, Human
auagaugugugg

SEQ ID NO: 1900128 - RNA, 23 nt, Human
auagaugcuggcccagggcccag

SEQ ID NO: 1900129 - RNA, 13 nt, Human
auagauguuuccu

SEQ ID NO: 1900130 - RNA, 14 nt, Human
auagauguguggac

SEQ ID NO: 1900131 - RNA, 18 nt, Human
auagauaggucagugcaa

SEQ ID NO: 1900132 - RNA, 19 nt, Human
auagaggcuaaauuacuca

SEQ ID NO: 1900133 - RNA, 15 nt, Human
auagacuaaaugaaa

SEQ ID NO: 1900134 - RNA, 14 nt, Human
auagagagagacca

SEQ ID NO: 1900135 - RNA, 13 nt, Human
auagaaguaaaaa

SEQ ID NO: 1900136 - RNA, 19 nt, Human
auagaaggcuauggggaua

SEQ ID NO: 1900137 - RNA, 13 nt, Human
auagaaaugcugg

SEQ ID NO: 1900138 - RNA, 19 nt, Human
auagaaaugcugguuuuuc

SEQ ID NO: 1900139 - RNA, 22 nt, Human
auagaaaugcugguuuuucagu

SEQ ID NO: 1900140 - RNA, 21 nt, Human
auagaacucaguuuuaacuag

SEQ ID NO: 1900141 - RNA, 14 nt, Human
auagaauaaaauuu

SEQ ID NO: 1900142 - RNA, 19 nt, Human
auagaauaaaauuuuuaau

SEQ ID NO: 1900143 - RNA, 22 nt, Human
auagaauaaaauuuuuaaucuu

SEQ ID NO: 1900144 - RNA, 17 nt, Human
auagaauuaacacauga

SEQ ID NO: 1900145 - RNA, 12 nt, Human
auagaauauuua

SEQ ID NO: 1900146 - RNA, 13 nt, Human
auagaauauuuau

SEQ ID NO: 1900147 - RNA, 19 nt, Human
auagaauauuuauuaccuc

SEQ ID NO: 1900148 - RNA, 22 nt, Human
auagaauauuuauuaccucuga

SEQ ID NO: 1900149 - RNA, 23 nt, Human
auagacaauuuauuauggcacau

SEQ ID NO: 1900150 - RNA, 22 nt, Human
auagacacuccccgaagucuuu

SEQ ID NO: 1900151 - RNA, 21 nt, Human
auagacagaauagauagcacu

SEQ ID NO: 1900152 - RNA, 22 nt, Human
auagacaauuuauuauggcaca

SEQ ID NO: 1900153 - RNA, 16 nt, Human
auagacaauuuauuau

SEQ ID NO: 1900154 - RNA, 15 nt, Human
uuauuauauuuacaa

SEQ ID NO: 1900155 - RNA, 12 nt, Human
uuauuaguuuug

SEQ ID NO: 1900156 - RNA, 13 nt, Human
uuauuaguuuugc

SEQ ID NO: 1900157 - RNA, 12 nt, Human
uuauuaugcaug

SEQ ID NO: 1900158 - RNA, 14 nt, Human
uuauuauauuuaca

SEQ ID NO: 1900159 - RNA, 24 nt, Human
uuauuaguaccauaguaccauuua

SEQ ID NO: 1900160 - RNA, 12 nt, Human
uuauucauaauu

SEQ ID NO: 1900161 - RNA, 23 nt, Human
uuauucaauaaaaaaaagaaaug

SEQ ID NO: 1900162 - RNA, 18 nt, Human
uuauucaauuccucuggg

SEQ ID NO: 1900163 - RNA, 19 nt, Human
uuauucaauuccucuggga

SEQ ID NO: 1900164 - RNA, 13 nt, Human
uuauuaugcauga

SEQ ID NO: 1900165 - RNA, 16 nt, Human
uuauuauuauuuuuua

SEQ ID NO: 1900166 - RNA, 16 nt, Human
uuauuauuuucaccug

SEQ ID NO: 1900167 - RNA, 15 nt, Human
uuauucaaagaaaua

SEQ ID NO: 1900168 - RNA, 11 nt, Human
auacucccauc

SEQ ID NO: 1900169 - RNA, 16 nt, Human
auacucauuaggaugg

SEQ ID NO: 1900170 - RNA, 17 nt, Human
uuauuccagaaugcugu

SEQ ID NO: 1900171 - RNA, 20 nt, Human
uuauuccagaaugcuguaca

SEQ ID NO: 1900172 - RNA, 22 nt, Human
uuauuccagaaugcuguacauc

SEQ ID NO: 1900173 - RNA, 21 nt, Human
auacucuuaggaagagaaacc

SEQ ID NO: 1900174 - RNA, 22 nt, Human
auacucuuaggaagagaaacca

SEQ ID NO: 1900175 - RNA, 18 nt, Human
auacucuuauaucuauau

SEQ ID NO: 1900176 - RNA, 14 nt, Human
auacucuuauaucu

SEQ ID NO: 1900177 - RNA, 16 nt, Human
auacucugcuuagaau

SEQ ID NO: 1900178 - RNA, 19 nt, Human
auacucuuaggaagagaaa

SEQ ID NO: 1900179 - RNA, 17 nt, Human
auacuccuccaagguua

SEQ ID NO: 1900180 - RNA, 14 nt, Human
auacucccaucugu

SEQ ID NO: 1900181 - RNA, 17 nt, Human
auacucuagaugaaguu

SEQ ID NO: 1900182 - RNA, 23 nt, Human
auacucuagaugaaguuuuacau

SEQ ID NO: 1900183 - RNA, 14 nt, Human
auacugcaagaaaa

SEQ ID NO: 1900184 - RNA, 16 nt, Human
auacugcaagaaaaug

SEQ ID NO: 1900185 - RNA, 14 nt, Human
auacucuuucugua

SEQ ID NO: 1900186 - RNA, 15 nt, Human
auacucuuucuguau

SEQ ID NO: 1900187 - RNA, 16 nt, Human
auacucuuucuguaua

SEQ ID NO: 1900188 - RNA, 17 nt, Human
auacucuuucuguauau

SEQ ID NO: 1900189 - RNA, 22 nt, Human
auacucuuucuguauauacuuu

SEQ ID NO: 1900190 - RNA, 23 nt, Human
auacucuuucuguauauacuuuu

SEQ ID NO: 1900191 - RNA, 19 nt, Human
auacugacugagaauauaa

SEQ ID NO: 1900192 - RNA, 12 nt, Human
auacuggcaugc

SEQ ID NO: 1900193 - RNA, 16 nt, Human
auacuggcaugcuaaa

SEQ ID NO: 1900194 - RNA, 16 nt, Human
auacugcuacuguaau

SEQ ID NO: 1900195 - RNA, 19 nt, Human
auacugcuacuguaauuuu

SEQ ID NO: 1900196 - RNA, 20 nt, Human
auacugcuacuguaauuuua

SEQ ID NO: 1900197 - RNA, 22 nt, Human
auacugcuacuguaauuuuaua

SEQ ID NO: 1900198 - RNA, 15 nt, Human
auacugcuacuguaa

SEQ ID NO: 1900199 - RNA, 16 nt, Human
uuaucauuuucaaaau

SEQ ID NO: 1900200 - RNA, 12 nt, Human
uuaucauuuuca

SEQ ID NO: 1900201 - RNA, 17 nt, Human
uuauccauauugaguca

SEQ ID NO: 1900202 - RNA, 19 nt, Human
uuauccauauugagucaaa

SEQ ID NO: 1900203 - RNA, 21 nt, Human
uuaucacccagaagaaaauag

SEQ ID NO: 1900204 - RNA, 19 nt, Human
uuaucacccagaagaaaau

SEQ ID NO: 1900205 - RNA, 18 nt, Human
uuaucacccagaagaaaa

SEQ ID NO: 1900206 - RNA, 17 nt, Human
uuaucacccagaagaaa

SEQ ID NO: 1900207 - RNA, 20 nt, Human
uuaugaagcuuuuaugugaa

SEQ ID NO: 1900208 - RNA, 19 nt, Human
uuaugaaacuuuuggaagg

SEQ ID NO: 1900209 - RNA, 14 nt, Human
uuaugaaacuuuug

SEQ ID NO: 1900210 - RNA, 18 nt, Human
uuaugaaacuuuuggaag

SEQ ID NO: 1900211 - RNA, 17 nt, Human
uuaugaaacuuuuggaa

SEQ ID NO: 1900212 - RNA, 11 nt, Human
uuaugacucca

SEQ ID NO: 1900213 - RNA, 20 nt, Human
uuaugauacuugaaaauuaa

SEQ ID NO: 1900214 - RNA, 18 nt, Human
uuaugaccucuuccuuua

SEQ ID NO: 1900215 - RNA, 17 nt, Human
uuaugggaaucaagauu

SEQ ID NO: 1900216 - RNA, 23 nt, Human
uuaugggaaccccuucauccucu

SEQ ID NO: 1900217 - RNA, 21 nt, Human
uuaugaugugggucaaggaau

SEQ ID NO: 1900218 - RNA, 20 nt, Human
uuaugaugugggucaaggaa

SEQ ID NO: 1900219 - RNA, 13 nt, Human
uuaugggcugggu

SEQ ID NO: 1900220 - RNA, 19 nt, Human
uuauggcuuuugugcauua

SEQ ID NO: 1900221 - RNA, 22 nt, Human
uuaugggcuggguucuacccag

SEQ ID NO: 1900222 - RNA, 13 nt, Human
uuaugugaaacau

SEQ ID NO: 1900223 - RNA, 19 nt, Human
uuauguaguaauugacaug

SEQ ID NO: 1900224 - RNA, 15 nt, Human
uuauguaguaauuga

SEQ ID NO: 1900225 - RNA, 16 nt, Human
uuauguaguaauugac

SEQ ID NO: 1900226 - RNA, 15 nt, Human
uuaugugaaacaugu

SEQ ID NO: 1900227 - RNA, 22 nt, Human
uuaugugccagauuuaugcaua

SEQ ID NO: 1900228 - RNA, 14 nt, Human
uuaugugugugugu

SEQ ID NO: 1900229 - RNA, 12 nt, Human
uuaugugugugu

SEQ ID NO: 1900230 - RNA, 10 nt, Human
uuaugugugu

SEQ ID NO: 1900231 - RNA, 20 nt, Human
uuaucacaaaaaagaaaaug

SEQ ID NO: 1900232 - RNA, 14 nt, Human
auacuauauuuaug

SEQ ID NO: 1900233 - RNA, 20 nt, Human
auacuaaccagcagaaaugc

SEQ ID NO: 1900234 - RNA, 19 nt, Human
auacuaaccagcagaaaug

SEQ ID NO: 1900235 - RNA, 13 nt, Human
auacuaaccagca

SEQ ID NO: 1900236 - RNA, 13 nt, Human
auacguacacauu

SEQ ID NO: 1900237 - RNA, 13 nt, Human
auacgauaaauaa

SEQ ID NO: 1900238 - RNA, 16 nt, Human
auacguacacauuuua

SEQ ID NO: 1900239 - RNA, 19 nt, Human
auacgugggcauucaaaug

SEQ ID NO: 1900240 - RNA, 18 nt, Human
auacgugggcauucaaau

SEQ ID NO: 1900241 - RNA, 15 nt, Human
auacguacacauuuu

SEQ ID NO: 1900242 - RNA, 14 nt, Human
auacguacacauuu

SEQ ID NO: 1900243 - RNA, 14 nt, Human
auaccuuuuuuaga

SEQ ID NO: 1900244 - RNA, 17 nt, Human
auaccagccaguaaaug

SEQ ID NO: 1900245 - RNA, 18 nt, Human
auaccacuuuuguucuug

SEQ ID NO: 1900246 - RNA, 17 nt, Human
auaccacuuuuguucuu

SEQ ID NO: 1900247 - RNA, 15 nt, Human
uuauaaauauauuua

SEQ ID NO: 1900248 - RNA, 22 nt, Human
uuauaaacuuuuuucuuacugu

SEQ ID NO: 1900249 - RNA, 12 nt, Human
uuauaaacuuuu

SEQ ID NO: 1900250 - RNA, 16 nt, Human
uuauaaacuuuuuucu

SEQ ID NO: 1900251 - RNA, 18 nt, Human
uuauaaacuuuaccuuuu

SEQ ID NO: 1900252 - RNA, 17 nt, Human
uuauaaacuuuaccuuu

SEQ ID NO: 1900253 - RNA, 16 nt, Human
auacagaggcaacugc

SEQ ID NO: 1900254 - RNA, 17 nt, Human
auacagaggcaacugca

SEQ ID NO: 1900255 - RNA, 20 nt, Human
auacaguuacucagaauucu

SEQ ID NO: 1900256 - RNA, 15 nt, Human
auacauacaccagca

SEQ ID NO: 1900257 - RNA, 23 nt, Human
auacauacaccagcauuccuuuu

SEQ ID NO: 1900258 - RNA, 23 nt, Human
auacauauauguauauauaugca

SEQ ID NO: 1900259 - RNA, 13 nt, Human
auacauaucuuua

SEQ ID NO: 1900260 - RNA, 14 nt, Human
auacauaucuuuau

SEQ ID NO: 1900261 - RNA, 16 nt, Human
auacauaucuuuauua

SEQ ID NO: 1900262 - RNA, 17 nt, Human
auacauaucuuuauuaa

SEQ ID NO: 1900263 - RNA, 20 nt, Human
auacauaucuuuauuaauca

SEQ ID NO: 1900264 - RNA, 23 nt, Human
auacaggaaaagcugcugacagu

SEQ ID NO: 1900265 - RNA, 23 nt, Human
auacagauagauauaugcucugc

SEQ ID NO: 1900266 - RNA, 18 nt, Human
auacaguuacucagaauu

SEQ ID NO: 1900267 - RNA, 21 nt, Human
auacaggaugaugacuaugga

SEQ ID NO: 1900268 - RNA, 16 nt, Human
auacagggaugguguu

SEQ ID NO: 1900269 - RNA, 20 nt, Human
aguuuaaauuguaauaggcg

SEQ ID NO: 1900270 - RNA, 17 nt, Human
aguuuaaauuguaauag

SEQ ID NO: 1900271 - RNA, 20 nt, Human
uuaaaaaucucaaauuucua

SEQ ID NO: 1900272 - RNA, 19 nt, Human
uuaaaaaucucaaauuucu

SEQ ID NO: 1900273 - RNA, 12 nt, Human
uuaaaaugagaa

SEQ ID NO: 1900274 - RNA, 19 nt, Human
uuaaaaugagaaaucuaaa

SEQ ID NO: 1900275 - RNA, 14 nt, Human
aguuucucuuuuca

SEQ ID NO: 1900276 - RNA, 15 nt, Human
aguuucugccgcagc

SEQ ID NO: 1900277 - RNA, 15 nt, Human
aguuuguugaaacac

SEQ ID NO: 1900278 - RNA, 18 nt, Human
aguuuuaacuagaauuua

SEQ ID NO: 1900279 - RNA, 22 nt, Human
aguuuguuaguaugaggcauuu

SEQ ID NO: 1900280 - RNA, 19 nt, Human
aguuucugccgcagcccug

SEQ ID NO: 1900281 - RNA, 16 nt, Human
uuaacagaaauguaca

SEQ ID NO: 1900282 - RNA, 19 nt, Human
uuaacacugcuuguguuuu

SEQ ID NO: 1900283 - RNA, 14 nt, Human
uuaacagaaaaaca

SEQ ID NO: 1900284 - RNA, 23 nt, Human
aguuuaucgaccaguuugaaucu

SEQ ID NO: 1900285 - RNA, 14 nt, Human
uuaacagaaaugua

SEQ ID NO: 1900286 - RNA, 13 nt, Human
uuaacagaaaugu

SEQ ID NO: 1900287 - RNA, 12 nt, Human
uuaacagaaaug

SEQ ID NO: 1900288 - RNA, 16 nt, Human
uuaaauuuugugucuc

SEQ ID NO: 1900289 - RNA, 14 nt, Human
uuaaauuuuguguc

SEQ ID NO: 1900290 - RNA, 13 nt, Human
aguuuuaucauuu

SEQ ID NO: 1900291 - RNA, 12 nt, Human
aguuuuaucauu

SEQ ID NO: 1900292 - RNA, 15 nt, Human
aguuuuuuuuauaca

SEQ ID NO: 1900293 - RNA, 22 nt, Human
aguuuuucccagcuacaccuuu

SEQ ID NO: 1900294 - RNA, 23 nt, Human
aguuuuucccagcuacaccuuuc

SEQ ID NO: 1900295 - RNA, 19 nt, Human
uuaagaaaaaggaugcaca

SEQ ID NO: 1900296 - RNA, 18 nt, Human
uuaagaaggcaaaaaugu

SEQ ID NO: 1900297 - RNA, 19 nt, Human
uuaagacgaaacauuuguu

SEQ ID NO: 1900298 - RNA, 11 nt, Human
uuaagaccugg

SEQ ID NO: 1900299 - RNA, 14 nt, Human
uuaagaccuggcag

SEQ ID NO: 1900300 - RNA, 18 nt, Human
uuaagaccuggcagcucu

SEQ ID NO: 1900301 - RNA, 18 nt, Human
uuaagacaugauuuccuu

SEQ ID NO: 1900302 - RNA, 16 nt, Human
uuaagacaugauuucc

SEQ ID NO: 1900303 - RNA, 19 nt, Human
auaaaagccuguuuaagag

SEQ ID NO: 1900304 - RNA, 13 nt, Human
auaaaaaaaagaa

SEQ ID NO: 1900305 - RNA, 20 nt, Human
auaaaagccuguuuaagaga

SEQ ID NO: 1900306 - RNA, 15 nt, Human
auaaaaggaagccaa

SEQ ID NO: 1900307 - RNA, 17 nt, Human
auaaaaggaagccaaag

SEQ ID NO: 1900308 - RNA, 22 nt, Human
auaaaagggacugagaaauuua

SEQ ID NO: 1900309 - RNA, 22 nt, Human
uuaacuuuuauaaacuuuaccu

SEQ ID NO: 1900310 - RNA, 23 nt, Human
uuaacuuuuauaaacuuuaccuu

SEQ ID NO: 1900311 - RNA, 19 nt, Human
auaaaaggaagccaaagag

SEQ ID NO: 1900312 - RNA, 20 nt, Human
auaaaaggaagccaaagagu

SEQ ID NO: 1900313 - RNA, 16 nt, Human
uuaaucuuuucacaaa

SEQ ID NO: 1900314 - RNA, 17 nt, Human
uuaaucuuuaauuuuac

SEQ ID NO: 1900315 - RNA, 13 nt, Human
uuaaucuuuaauu

SEQ ID NO: 1900316 - RNA, 15 nt, Human
uuaaucuuaucaaga

SEQ ID NO: 1900317 - RNA, 16 nt, Human
uuaauuugguuuucac

SEQ ID NO: 1900318 - RNA, 20 nt, Human
uuaaguuuccuuccagccca

SEQ ID NO: 1900319 - RNA, 21 nt, Human
uuaaguuuccuuccagcccag

SEQ ID NO: 1900320 - RNA, 16 nt, Human
uuaauaaaaguacaug

SEQ ID NO: 1900321 - RNA, 22 nt, Human
uuaagacgaaacauuuguucua

SEQ ID NO: 1900322 - RNA, 13 nt, Human
uuaagacguguuu

SEQ ID NO: 1900323 - RNA, 16 nt, Human
uuaagacguguuugug

SEQ ID NO: 1900324 - RNA, 17 nt, Human
uuaagacguguuugugu

SEQ ID NO: 1900325 - RNA, 22 nt, Human
uuaagagagucuauuuacggaa

SEQ ID NO: 1900326 - RNA, 15 nt, Human
uuaaucuaaauggaa

SEQ ID NO: 1900327 - RNA, 17 nt, Human
uuaaucacuauuguucc

SEQ ID NO: 1900328 - RNA, 19 nt, Human
auaaauuguaauuguaaag

SEQ ID NO: 1900329 - RNA, 14 nt, Human
uuacaggugugaac

SEQ ID NO: 1900330 - RNA, 20 nt, Human
uuacagggcacaggccaugg

SEQ ID NO: 1900331 - RNA, 20 nt, Human
uuacagggaugagccaccgc

SEQ ID NO: 1900332 - RNA, 19 nt, Human
uuaccagcagagcaccuua

SEQ ID NO: 1900333 - RNA, 17 nt, Human
uuacaguguagcuugcc

SEQ ID NO: 1900334 - RNA, 13 nt, Human
uuacaguguuccg

SEQ ID NO: 1900335 - RNA, 17 nt, Human
uuacaguggggaaugaa

SEQ ID NO: 1900336 - RNA, 21 nt, Human
auaaauuccucuuugcuuugc

SEQ ID NO: 1900337 - RNA, 15 nt, Human
auaaaucugacccag

SEQ ID NO: 1900338 - RNA, 16 nt, Human
auaaaucugacccagu

SEQ ID NO: 1900339 - RNA, 18 nt, Human
auaaaucugacccagugc

SEQ ID NO: 1900340 - RNA, 19 nt, Human
auaaaucugacccagugcc

SEQ ID NO: 1900341 - RNA, 15 nt, Human
uuacaaacauguggu

SEQ ID NO: 1900342 - RNA, 12 nt, Human
uuacaaacaugu

SEQ ID NO: 1900343 - RNA, 15 nt, Human
uuacugcagcuuugu

SEQ ID NO: 1900344 - RNA, 14 nt, Human
uuacucaggaagaa

SEQ ID NO: 1900345 - RNA, 17 nt, Human
uuacucaggaagaacac

SEQ ID NO: 1900346 - RNA, 23 nt, Human
uuacuguacagacagaaaaaacu

SEQ ID NO: 1900347 - RNA, 12 nt, Human
uuacuguacaug

SEQ ID NO: 1900348 - RNA, 23 nt, Human
uuacuguacaugaaaacacauuu

SEQ ID NO: 1900349 - RNA, 22 nt, Human
uuacuguacaugaaaacacauu

SEQ ID NO: 1900350 - RNA, 14 nt, Human
uuacuguacaugaa

SEQ ID NO: 1900351 - RNA, 13 nt, Human
uuacuguacauga

SEQ ID NO: 1900352 - RNA, 18 nt, Human
auaacuuuuuuuuaaguu

SEQ ID NO: 1900353 - RNA, 14 nt, Human
auaagauucauauu

SEQ ID NO: 1900354 - RNA, 16 nt, Human
uuagaagucacacagu

SEQ ID NO: 1900355 - RNA, 19 nt, Human
uuagaauaauaaauauuua

SEQ ID NO: 1900356 - RNA, 23 nt, Human
uuacugucaaggcugcuuagaau

SEQ ID NO: 1900357 - RNA, 15 nt, Human
uuacuguaauuccuc

SEQ ID NO: 1900358 - RNA, 18 nt, Human
uuagaauccaaacuugga

SEQ ID NO: 1900359 - RNA, 22 nt, Human
uuagaauccaaacuuggauuuu

SEQ ID NO: 1900360 - RNA, 13 nt, Human
uuaguagagacag

SEQ ID NO: 1900361 - RNA, 19 nt, Human
uuaguacuccccuccuuga

SEQ ID NO: 1900362 - RNA, 14 nt, Human
uuaguagagacagg

SEQ ID NO: 1900363 - RNA, 18 nt, Human
uuaguuuuugugaaguuu

SEQ ID NO: 1900364 - RNA, 21 nt, Human
uuaguuuuugugaaguuuaau

SEQ ID NO: 1900365 - RNA, 15 nt, Human
uuauaaaaauaaaaa

SEQ ID NO: 1900366 - RNA, 13 nt, Human
uuauaaacuuuac

SEQ ID NO: 1900367 - RNA, 13 nt, Human
uuauaaaacuucu

SEQ ID NO: 1900368 - RNA, 21 nt, Human
uuauaaaaauaaaaaacacug

SEQ ID NO: 1900369 - RNA, 22 nt, Human
uuauaaaaauaaaaaacacugg

SEQ ID NO: 1900370 - RNA, 19 nt, Human
uuauaaaaagguguuuuga

SEQ ID NO: 1900371 - RNA, 12 nt, Human
uuauaaaacuuc

SEQ ID NO: 1900372 - RNA, 19 nt, Human
uuaggugugggggaagcac

SEQ ID NO: 1900373 - RNA, 15 nt, Human
uuaggugaggaagca

SEQ ID NO: 1900374 - RNA, 14 nt, Human
uuaguaaucauauu

SEQ ID NO: 1900375 - RNA, 13 nt, Human
uuaguaaucauau

SEQ ID NO: 1900376 - RNA, 18 nt, Human
uuagguuggcaaaaaggc

SEQ ID NO: 1900377 - RNA, 14 nt, Human
auaagccagacauc

SEQ ID NO: 1900378 - RNA, 14 nt, Human
auaauauauuugug

SEQ ID NO: 1900379 - RNA, 21 nt, Human
auaagauucauauuuacuucu

SEQ ID NO: 1900380 - RNA, 22 nt, Human
auaagccaaaaaaugcuugcuu

SEQ ID NO: 1900381 - RNA, 18 nt, Human
auaaucacaacccuucag

SEQ ID NO: 1900382 - RNA, 20 nt, Human
auaauauuuuuaauuaaaua

SEQ ID NO: 1900383 - RNA, 15 nt, Human
auaaucuuauuaggg

SEQ ID NO: 1900384 - RNA, 14 nt, Human
auaauauuuuuaau

SEQ ID NO: 1900385 - RNA, 23 nt, Human
auaauucacauuguauucagagu

SEQ ID NO: 1900386 - RNA, 23 nt, Human
auaaucuuauuagggagaaaauu

SEQ ID NO: 1900387 - RNA, 14 nt, Human
auaauuuuaaaugu

SEQ ID NO: 1900388 - RNA, 21 nt, Human
uuagauguuccaguaaucuaa

SEQ ID NO: 1900389 - RNA, 22 nt, Human
uuagauguuccaguaaucuaau

SEQ ID NO: 1900390 - RNA, 12 nt, Human
auaauuuuaaau

SEQ ID NO: 1900391 - RNA, 13 nt, Human
auaauuuuaaaug

SEQ ID NO: 1900392 - RNA, 17 nt, Human
aucugguuaggauggca

SEQ ID NO: 1900393 - RNA, 10 nt, Human
aucuggugac

SEQ ID NO: 1900394 - RNA, 16 nt, Human
aucuggugacuuuccu

SEQ ID NO: 1900395 - RNA, 17 nt, Human
aucuggugacuuuccuc

SEQ ID NO: 1900396 - RNA, 17 nt, Human
aucugugaaaggaaaga

SEQ ID NO: 1900397 - RNA, 15 nt, Human
aucuguccucagccu

SEQ ID NO: 1900398 - RNA, 16 nt, Human
aucuguccucagccuu

SEQ ID NO: 1900399 - RNA, 17 nt, Human
aucuguccucagccuug

SEQ ID NO: 1900400 - RNA, 18 nt, Human
aucuguccucagccuugc

SEQ ID NO: 1900401 - RNA, 21 nt, Human
aucuguccucagccuugccag

SEQ ID NO: 1900402 - RNA, 14 nt, Human
aucuguccucagcc

SEQ ID NO: 1900403 - RNA, 17 nt, Human
aucuguaucuuuucucu

SEQ ID NO: 1900404 - RNA, 18 nt, Human
uugcauuuuuuaaaacaa

SEQ ID NO: 1900405 - RNA, 15 nt, Human
uugccaaaaaggggu

SEQ ID NO: 1900406 - RNA, 21 nt, Human
uugcauuuggauugggguccc

SEQ ID NO: 1900407 - RNA, 20 nt, Human
aucugcuagggaauaucaau

SEQ ID NO: 1900408 - RNA, 14 nt, Human
aucuuauaauuuaa

SEQ ID NO: 1900409 - RNA, 13 nt, Human
aucuugcucugcu

SEQ ID NO: 1900410 - RNA, 20 nt, Human
aucuuggucagauuugaacu

SEQ ID NO: 1900411 - RNA, 18 nt, Human
aucugugaaaggaaagag

SEQ ID NO: 1900412 - RNA, 17 nt, Human
aucuguuuacaguguuc

SEQ ID NO: 1900413 - RNA, 15 nt, Human
aucuguuuacagugu

SEQ ID NO: 1900414 - RNA, 17 nt, Human
aucuguuuugaaggcaa

SEQ ID NO: 1900415 - RNA, 18 nt, Human
aucuguuuugaaggcaaa

SEQ ID NO: 1900416 - RNA, 19 nt, Human
aucuguuuugaaggcaaaa

SEQ ID NO: 1900417 - RNA, 13 nt, Human
uugcucuggaccu

SEQ ID NO: 1900418 - RNA, 15 nt, Human
uugcucuggaccugc

SEQ ID NO: 1900419 - RNA, 14 nt, Human
uugcucuggaccug

SEQ ID NO: 1900420 - RNA, 14 nt, Human
aucuugucucuggg

SEQ ID NO: 1900421 - RNA, 15 nt, Human
aucuugucucugggc

SEQ ID NO: 1900422 - RNA, 22 nt, Human
uuggccgcaccuaaagcagcca

SEQ ID NO: 1900423 - RNA, 17 nt, Human
uuggccugaucagacca

SEQ ID NO: 1900424 - RNA, 18 nt, Human
uuggccccugcccggcug

SEQ ID NO: 1900425 - RNA, 21 nt, Human
uuggccccccgaccuuguaga

SEQ ID NO: 1900426 - RNA, 16 nt, Human
uuggagggugucccaa

SEQ ID NO: 1900427 - RNA, 14 nt, Human
uugcuugaaagaaa

SEQ ID NO: 1900428 - RNA, 15 nt, Human
uuggagaguuuccug

SEQ ID NO: 1900429 - RNA, 16 nt, Human
uuggagaguuuccuga

SEQ ID NO: 1900430 - RNA, 18 nt, Human
augaaagggcccagagag

SEQ ID NO: 1900431 - RNA, 14 nt, Human
aucuuuucuugccu

SEQ ID NO: 1900432 - RNA, 11 nt, Human
aucuuuugaac

SEQ ID NO: 1900433 - RNA, 23 nt, Human
aucuuuucuugccucuguccccu

SEQ ID NO: 1900434 - RNA, 22 nt, Human
aucuuuucauugaacagcaaag

SEQ ID NO: 1900435 - RNA, 17 nt, Human
aucuuugcagacaggca

SEQ ID NO: 1900436 - RNA, 19 nt, Human
aucuuugauucuccuucag

SEQ ID NO: 1900437 - RNA, 18 nt, Human
aucuuugauucuccuuca

SEQ ID NO: 1900438 - RNA, 17 nt, Human
aucuuugauucuccuuc

SEQ ID NO: 1900439 - RNA, 16 nt, Human
aucuuugauucuccuu

SEQ ID NO: 1900440 - RNA, 22 nt, Human
aucuuuucauuuaggugaggaa

SEQ ID NO: 1900441 - RNA, 20 nt, Human
aucuuugauucuccuucagc

SEQ ID NO: 1900442 - RNA, 20 nt, Human
aucuuucuuuggaugggacu

SEQ ID NO: 1900443 - RNA, 15 nt, Human
aucuuugauucuccu

SEQ ID NO: 1900444 - RNA, 14 nt, Human
aucuuugauucucc

SEQ ID NO: 1900445 - RNA, 18 nt, Human
aucuuucuugaucaacau

SEQ ID NO: 1900446 - RNA, 13 nt, Human
aucuuucuugauc

SEQ ID NO: 1900447 - RNA, 17 nt, Human
uuggcucacacugagaa

SEQ ID NO: 1900448 - RNA, 16 nt, Human
uuggcucacacugaga

SEQ ID NO: 1900449 - RNA, 13 nt, Human
uuggcucagacau

SEQ ID NO: 1900450 - RNA, 14 nt, Human
uuggcucagacaug

SEQ ID NO: 1900451 - RNA, 13 nt, Human
uuggugccuggcc

SEQ ID NO: 1900452 - RNA, 12 nt, Human
uuggugccuggc

SEQ ID NO: 1900453 - RNA, 21 nt, Human
uuggggaguuaagaccuggca

SEQ ID NO: 1900454 - RNA, 17 nt, Human
uuggggaguuaagaccu

SEQ ID NO: 1900455 - RNA, 19 nt, Human
uuggggaguuaagaccugg

SEQ ID NO: 1900456 - RNA, 20 nt, Human
uuggggaguuaagaccuggc

SEQ ID NO: 1900457 - RNA, 18 nt, Human
uuggggaccagagcugcc

SEQ ID NO: 1900458 - RNA, 23 nt, Human
uuggggacaggggcaggaggaag

SEQ ID NO: 1900459 - RNA, 21 nt, Human
augaauauuuaguguucauaa

SEQ ID NO: 1900460 - RNA, 23 nt, Human
augaauggcuaagcaaaauguga

SEQ ID NO: 1900461 - RNA, 19 nt, Human
augaagacucgcaauuuca

SEQ ID NO: 1900462 - RNA, 16 nt, Human
augaauauuuaguguu

SEQ ID NO: 1900463 - RNA, 18 nt, Human
augaacuuguaaaggaau

SEQ ID NO: 1900464 - RNA, 19 nt, Human
augaaagggcccagagagg

SEQ ID NO: 1900465 - RNA, 22 nt, Human
aucuaauaccucugugugcucc

SEQ ID NO: 1900466 - RNA, 18 nt, Human
aucuaauauguaacaagc

SEQ ID NO: 1900467 - RNA, 16 nt, Human
aucuaauauggccaca

SEQ ID NO: 1900468 - RNA, 23 nt, Human
aucuaauauggccacaguagucu

SEQ ID NO: 1900469 - RNA, 18 nt, Human
aucuacacuccagugaga

SEQ ID NO: 1900470 - RNA, 19 nt, Human
aucuacacuccagugagac

SEQ ID NO: 1900471 - RNA, 20 nt, Human
uugaguugauucagcucugc

SEQ ID NO: 1900472 - RNA, 20 nt, Human
uugagugaagcugggagaac

SEQ ID NO: 1900473 - RNA, 15 nt, Human
uugagucuguuuugu

SEQ ID NO: 1900474 - RNA, 18 nt, Human
uugagucuguuuuguaaa

SEQ ID NO: 1900475 - RNA, 16 nt, Human
uugagauguguucaca

SEQ ID NO: 1900476 - RNA, 13 nt, Human
uugaguagaggcu

SEQ ID NO: 1900477 - RNA, 15 nt, Human
uugagaucagccugg

SEQ ID NO: 1900478 - RNA, 16 nt, Human
uugagaucagccuggg

SEQ ID NO: 1900479 - RNA, 22 nt, Human
uugagacuccucaguucuugcc

SEQ ID NO: 1900480 - RNA, 12 nt, Human
uugagacagagu

SEQ ID NO: 1900481 - RNA, 12 nt, Human
uugacuuugucu

SEQ ID NO: 1900482 - RNA, 11 nt, Human
uugacuuuguc

SEQ ID NO: 1900483 - RNA, 21 nt, Human
uugacuugacagaacacuguc

SEQ ID NO: 1900484 - RNA, 20 nt, Human
uugacuugacagaacacugu

SEQ ID NO: 1900485 - RNA, 19 nt, Human
uugacuugacagaacacug

SEQ ID NO: 1900486 - RNA, 14 nt, Human
uugacagcuuugcu

SEQ ID NO: 1900487 - RNA, 17 nt, Human
uugacagcuuugcugcu

SEQ ID NO: 1900488 - RNA, 18 nt, Human
uugacagcuuugcugcug

SEQ ID NO: 1900489 - RNA, 18 nt, Human
auccucugagugugacca

SEQ ID NO: 1900490 - RNA, 16 nt, Human
auccucuguacagagc

SEQ ID NO: 1900491 - RNA, 17 nt, Human
auccucuguacagagcc

SEQ ID NO: 1900492 - RNA, 14 nt, Human
aucguucucugccu

SEQ ID NO: 1900493 - RNA, 13 nt, Human
aucuaaauggaac

SEQ ID NO: 1900494 - RNA, 18 nt, Human
aucuaaauggaaccacuc

SEQ ID NO: 1900495 - RNA, 17 nt, Human
aucuaaauggaaccacu

SEQ ID NO: 1900496 - RNA, 17 nt, Human
uugaagggaaauuucag

SEQ ID NO: 1900497 - RNA, 12 nt, Human
uugaaggcuuaa

SEQ ID NO: 1900498 - RNA, 11 nt, Human
uugaaggcuua

SEQ ID NO: 1900499 - RNA, 17 nt, Human
uugaaggcaaaauugca

SEQ ID NO: 1900500 - RNA, 12 nt, Human
uugaaggcaaaa

SEQ ID NO: 1900501 - RNA, 15 nt, Human
uugaaggcaaaauug

SEQ ID NO: 1900502 - RNA, 12 nt, Human
uugaauaaauaa

SEQ ID NO: 1900503 - RNA, 17 nt, Human
uugacagaacacugucu

SEQ ID NO: 1900504 - RNA, 16 nt, Human
uugacagaacacuguc

SEQ ID NO: 1900505 - RNA, 15 nt, Human
uugacagaacacugu

SEQ ID NO: 1900506 - RNA, 14 nt, Human
uugacagaacacug

SEQ ID NO: 1900507 - RNA, 15 nt, Human
uugaaucuauuuaag

SEQ ID NO: 1900508 - RNA, 17 nt, Human
uugaaucuauuuaagua

SEQ ID NO: 1900509 - RNA, 20 nt, Human
uugaaucuauuuaaguaaaa

SEQ ID NO: 1900510 - RNA, 17 nt, Human
uugaaucaguauaaaca

SEQ ID NO: 1900511 - RNA, 23 nt, Human
uugcauaguaccaaucauuuuaa

SEQ ID NO: 1900512 - RNA, 14 nt, Human
uugcauauauacau

SEQ ID NO: 1900513 - RNA, 18 nt, Human
uugcauauuuuguaacuu

SEQ ID NO: 1900514 - RNA, 14 nt, Human
uugcauugaacaca

SEQ ID NO: 1900515 - RNA, 15 nt, Human
uugcauugaacacaa

SEQ ID NO: 1900516 - RNA, 18 nt, Human
uugcauugaacacaaacu

SEQ ID NO: 1900517 - RNA, 22 nt, Human
uugcauugaacacaaacuguaa

SEQ ID NO: 1900518 - RNA, 23 nt, Human
uugcauugaacacaaacuguaaa

SEQ ID NO: 1900519 - RNA, 21 nt, Human
uugcauugaccgcgacuaauu

SEQ ID NO: 1900520 - RNA, 19 nt, Human
uugcaauggcagccuuggc

SEQ ID NO: 1900521 - RNA, 17 nt, Human
uugcaauggcagccuug

SEQ ID NO: 1900522 - RNA, 16 nt, Human
uugcaauggcagccuu

SEQ ID NO: 1900523 - RNA, 14 nt, Human
uugcaccacugcac

SEQ ID NO: 1900524 - RNA, 15 nt, Human
uugcaccacugcacu

SEQ ID NO: 1900525 - RNA, 16 nt, Human
uugcaccacugcacuc

SEQ ID NO: 1900526 - RNA, 18 nt, Human
uugcaccacugcacucca

SEQ ID NO: 1900527 - RNA, 14 nt, Human
uugauuaaauucuu

SEQ ID NO: 1900528 - RNA, 22 nt, Human
uugauuaagaucucagugguua

SEQ ID NO: 1900529 - RNA, 21 nt, Human
uugauuauccauauugaguca

SEQ ID NO: 1900530 - RNA, 20 nt, Human
aucugaccagcagcgccuuu

SEQ ID NO: 1900531 - RNA, 13 nt, Human
uugcaaggaagcc

SEQ ID NO: 1900532 - RNA, 12 nt, Human
uugcaaggaagc

SEQ ID NO: 1900533 - RNA, 23 nt, Human
uugauguuuuaaggaugcuugua

SEQ ID NO: 1900534 - RNA, 18 nt, Human
aucugacaugauuccuuc

SEQ ID NO: 1900535 - RNA, 19 nt, Human
aucugacaugauuccuucc

SEQ ID NO: 1900536 - RNA, 20 nt, Human
aucugacaugauuccuuccu

SEQ ID NO: 1900537 - RNA, 23 nt, Human
aucugacaugauuccuuccuguu

SEQ ID NO: 1900538 - RNA, 14 nt, Human
aucugaccagcagc

SEQ ID NO: 1900539 - RNA, 15 nt, Human
aucugaccagcagcg

SEQ ID NO: 1900540 - RNA, 16 nt, Human
aucugaccagcagcgc

SEQ ID NO: 1900541 - RNA, 13 nt, Human
uugauuaaauucu

SEQ ID NO: 1900542 - RNA, 12 nt, Human
aucugacccagu

SEQ ID NO: 1900543 - RNA, 13 nt, Human
aucugacccagug

SEQ ID NO: 1900544 - RNA, 23 nt, Human
aucugaaaauguauguguaagua

SEQ ID NO: 1900545 - RNA, 12 nt, Human
aucugaaaaugu

SEQ ID NO: 1900546 - RNA, 19 nt, Human
aucuagacccaucuucuuu

SEQ ID NO: 1900547 - RNA, 16 nt, Human
aucuacuuuaauaaau

SEQ ID NO: 1900548 - RNA, 16 nt, Human
aucucagggccugguc

SEQ ID NO: 1900549 - RNA, 21 nt, Human
aucucagguuaagugugagua

SEQ ID NO: 1900550 - RNA, 21 nt, Human
aucucaugccccuggcuggga

SEQ ID NO: 1900551 - RNA, 23 nt, Human
aucucaugccccuggcugggacg

SEQ ID NO: 1900552 - RNA, 14 nt, Human
aucuccaaaauaaa

SEQ ID NO: 1900553 - RNA, 21 nt, Human
aucuccaaaauaaaacuuuuu

SEQ ID NO: 1900554 - RNA, 20 nt, Human
aucuccaaaauaaaacuuuu

SEQ ID NO: 1900555 - RNA, 17 nt, Human
aucuccaaaauaaaacu

SEQ ID NO: 1900556 - RNA, 15 nt, Human
aucucccccagcccc

SEQ ID NO: 1900557 - RNA, 22 nt, Human
aucuccaccagucauuuuucag

SEQ ID NO: 1900558 - RNA, 17 nt, Human
aucuccaccagucauuu

SEQ ID NO: 1900559 - RNA, 18 nt, Human
aucuccaagaccagagau

SEQ ID NO: 1900560 - RNA, 16 nt, Human
aucucccccagcccca

SEQ ID NO: 1900561 - RNA, 17 nt, Human
aucucccccagccccau

SEQ ID NO: 1900562 - RNA, 16 nt, Human
aucugaaaauguaugu

SEQ ID NO: 1900563 - RNA, 19 nt, Human
aucugaaaauguaugugua

SEQ ID NO: 1900564 - RNA, 20 nt, Human
aucugaaaauguauguguaa

SEQ ID NO: 1900565 - RNA, 22 nt, Human
aucugaaaauguauguguaagu

SEQ ID NO: 1900566 - RNA, 18 nt, Human
aucucuugagccugggag

SEQ ID NO: 1900567 - RNA, 14 nt, Human
aucugaaaauguau

SEQ ID NO: 1900568 - RNA, 15 nt, Human
aucucuugagccugg

SEQ ID NO: 1900569 - RNA, 21 nt, Human
uucuaaaugaauguuuacacu

SEQ ID NO: 1900570 - RNA, 18 nt, Human
uucuaaaugaauguuuac

SEQ ID NO: 1900571 - RNA, 22 nt, Human
uucuaaagguguugucccuucu

SEQ ID NO: 1900572 - RNA, 15 nt, Human
uucuaaaugaauguu

SEQ ID NO: 1900573 - RNA, 12 nt, Human
uucuaaaugaau

SEQ ID NO: 1900574 - RNA, 20 nt, Human
uucuaaagguguugucccuu

SEQ ID NO: 1900575 - RNA, 21 nt, Human
uucuaaaucuccaaaauaaaa

SEQ ID NO: 1900576 - RNA, 21 nt, Human
uucuaaaggcuaccuuuguau

SEQ ID NO: 1900577 - RNA, 20 nt, Human
uucuaaaggcuaccuuugua

SEQ ID NO: 1900578 - RNA, 19 nt, Human
uucuaaaggcuaccuuugu

SEQ ID NO: 1900579 - RNA, 15 nt, Human
uucggccuccauccu

SEQ ID NO: 1900580 - RNA, 14 nt, Human
uucggccuccaucc

SEQ ID NO: 1900581 - RNA, 17 nt, Human
uucggauuuggggugga

SEQ ID NO: 1900582 - RNA, 20 nt, Human
uucggcagauacugucucuu

SEQ ID NO: 1900583 - RNA, 16 nt, Human
uucgcuugagaaaaaa

SEQ ID NO: 1900584 - RNA, 14 nt, Human
uucgcuugagaaaa

SEQ ID NO: 1900585 - RNA, 19 nt, Human
uucgcuccugugucuugca

SEQ ID NO: 1900586 - RNA, 15 nt, Human
uucgcuccugugucu

SEQ ID NO: 1900587 - RNA, 16 nt, Human
uucuagcauggcugcc

SEQ ID NO: 1900588 - RNA, 12 nt, Human
uucuagcuguug

SEQ ID NO: 1900589 - RNA, 20 nt, Human
uucuagcuguugagcuguuu

SEQ ID NO: 1900590 - RNA, 21 nt, Human
uucuagcuguugagcuguuuu

SEQ ID NO: 1900591 - RNA, 13 nt, Human
uucuaagaaguga

SEQ ID NO: 1900592 - RNA, 23 nt, Human
uucuaagaagugaaaaucuacac

SEQ ID NO: 1900593 - RNA, 18 nt, Human
aucagggaggucauuuug

SEQ ID NO: 1900594 - RNA, 21 nt, Human
aucagcaagucucuuuauaug

SEQ ID NO: 1900595 - RNA, 16 nt, Human
aucaggccauuguccc

SEQ ID NO: 1900596 - RNA, 13 nt, Human
aucaggccauugu

SEQ ID NO: 1900597 - RNA, 12 nt, Human
aucagaauucuc

SEQ ID NO: 1900598 - RNA, 22 nt, Human
aucagaauagccacauuuggaa

SEQ ID NO: 1900599 - RNA, 13 nt, Human
aucagcacgauuu

SEQ ID NO: 1900600 - RNA, 15 nt, Human
aucaggccaggcccu

SEQ ID NO: 1900601 - RNA, 16 nt, Human
aucaggccaggcccuc

SEQ ID NO: 1900602 - RNA, 18 nt, Human
aucaggccaggcccucug

SEQ ID NO: 1900603 - RNA, 16 nt, Human
uucuaggacugaauua

SEQ ID NO: 1900604 - RNA, 14 nt, Human
uucuaggacugaau

SEQ ID NO: 1900605 - RNA, 13 nt, Human
uucuaggacugaa

SEQ ID NO: 1900606 - RNA, 19 nt, Human
aucagaauagccacauuug

SEQ ID NO: 1900607 - RNA, 11 nt, Human
aucagaauucu

SEQ ID NO: 1900608 - RNA, 19 nt, Human
aucacuugaggucaggagu

SEQ ID NO: 1900609 - RNA, 13 nt, Human
aucaagcuaauaa

SEQ ID NO: 1900610 - RNA, 15 nt, Human
aucaagcuaauaaaa

SEQ ID NO: 1900611 - RNA, 14 nt, Human
aucaaugaguaaca

SEQ ID NO: 1900612 - RNA, 15 nt, Human
aucacggcucacugc

SEQ ID NO: 1900613 - RNA, 14 nt, Human
aucacgccacugca

SEQ ID NO: 1900614 - RNA, 13 nt, Human
aucacgccacugc

SEQ ID NO: 1900615 - RNA, 19 nt, Human
aucacggcucacugcagcc

SEQ ID NO: 1900616 - RNA, 18 nt, Human
aucacggcucacugcagc

SEQ ID NO: 1900617 - RNA, 20 nt, Human
uuccuguccucccagcuccu

SEQ ID NO: 1900618 - RNA, 14 nt, Human
uuccuguccuccca

SEQ ID NO: 1900619 - RNA, 11 nt, Human
uuccugugucu

SEQ ID NO: 1900620 - RNA, 14 nt, Human
aucaacagauaaau

SEQ ID NO: 1900621 - RNA, 13 nt, Human
aucaacaucuuuu

SEQ ID NO: 1900622 - RNA, 15 nt, Human
aucaacaucuuuucu

SEQ ID NO: 1900623 - RNA, 21 nt, Human
aucaagaugugacauguuuua

SEQ ID NO: 1900624 - RNA, 18 nt, Human
auauuuuuuguuaaauga

SEQ ID NO: 1900625 - RNA, 20 nt, Human
auauuuuuuguuaaaugauu

SEQ ID NO: 1900626 - RNA, 21 nt, Human
auauuuuuuuaaaauguuaaa

SEQ ID NO: 1900627 - RNA, 19 nt, Human
uuccguagguuauuuucag

SEQ ID NO: 1900628 - RNA, 16 nt, Human
uuccguuaaaauacca

SEQ ID NO: 1900629 - RNA, 14 nt, Human
uuccguuaaaauac

SEQ ID NO: 1900630 - RNA, 17 nt, Human
uuccgugaaaacggagc

SEQ ID NO: 1900631 - RNA, 23 nt, Human
uucccguggaacguuuuuccugu

SEQ ID NO: 1900632 - RNA, 15 nt, Human
uucccuauuagagaa

SEQ ID NO: 1900633 - RNA, 20 nt, Human
uucccucaccuuucccaucu

SEQ ID NO: 1900634 - RNA, 21 nt, Human
uucccucaccuuggcaccaga

SEQ ID NO: 1900635 - RNA, 17 nt, Human
uuccuaauccucuagga

SEQ ID NO: 1900636 - RNA, 20 nt, Human
uuccuaaauauauuuuaaga

SEQ ID NO: 1900637 - RNA, 14 nt, Human
uuccugaaccgaug

SEQ ID NO: 1900638 - RNA, 14 nt, Human
uuccugaacaggau

SEQ ID NO: 1900639 - RNA, 18 nt, Human
uuccugaagaauugaaaa

SEQ ID NO: 1900640 - RNA, 16 nt, Human
uuccugaagaaccagu

SEQ ID NO: 1900641 - RNA, 19 nt, Human
uuccugaagaaccaguccc

SEQ ID NO: 1900642 - RNA, 15 nt, Human
uuccugaacaggaua

SEQ ID NO: 1900643 - RNA, 15 nt, Human
uuccugaagaaccag

SEQ ID NO: 1900644 - RNA, 13 nt, Human
uuccucuuugcuu

SEQ ID NO: 1900645 - RNA, 14 nt, Human
uuccucuuugcuuu

SEQ ID NO: 1900646 - RNA, 13 nt, Human
uuccucuuuccau

SEQ ID NO: 1900647 - RNA, 17 nt, Human
uuccucuuuccaucuac

SEQ ID NO: 1900648 - RNA, 22 nt, Human
uuccucuuuccaucuacccucc

SEQ ID NO: 1900649 - RNA, 21 nt, Human
uucuuaaucuuuucacaaaua

SEQ ID NO: 1900650 - RNA, 20 nt, Human
uucuuaaucuuuucacaaau

SEQ ID NO: 1900651 - RNA, 19 nt, Human
uucuuaaucuuuucacaaa

SEQ ID NO: 1900652 - RNA, 13 nt, Human
uucuucucccuca

SEQ ID NO: 1900653 - RNA, 23 nt, Human
uucuuaagacgugauuuugcugu

SEQ ID NO: 1900654 - RNA, 21 nt, Human
uucuuaagacgugauuuugcu

SEQ ID NO: 1900655 - RNA, 15 nt, Human
uucuucugcuucagc

SEQ ID NO: 1900656 - RNA, 13 nt, Human
uucuucugcuuca

SEQ ID NO: 1900657 - RNA, 14 nt, Human
uucuucucccucag

SEQ ID NO: 1900658 - RNA, 13 nt, Human
aucccucauccuc

SEQ ID NO: 1900659 - RNA, 21 nt, Human
aucccucauccucauacccac

SEQ ID NO: 1900660 - RNA, 23 nt, Human
aucccucauccucauacccaccc

SEQ ID NO: 1900661 - RNA, 13 nt, Human
aucccaugagccu

SEQ ID NO: 1900662 - RNA, 14 nt, Human
aucccucauccuca

SEQ ID NO: 1900663 - RNA, 24 nt, Human
aucccauaugccugggcagaagga

SEQ ID NO: 1900664 - RNA, 20 nt, Human
uucuucugcuucagccuccc

SEQ ID NO: 1900665 - RNA, 21 nt, Human
uucuucuuuuugcuucaaaaa

SEQ ID NO: 1900666 - RNA, 17 nt, Human
uucuucuuuuugcuuca

SEQ ID NO: 1900667 - RNA, 13 nt, Human
uucuugaaagcug

SEQ ID NO: 1900668 - RNA, 14 nt, Human
uucuugaaagcugu

SEQ ID NO: 1900669 - RNA, 15 nt, Human
uucuugaaagcugug

SEQ ID NO: 1900670 - RNA, 15 nt, Human
uucuuuguaaugaaa

SEQ ID NO: 1900671 - RNA, 13 nt, Human
uucuuugggccag

SEQ ID NO: 1900672 - RNA, 21 nt, Human
auccuagagauuugguguaca

SEQ ID NO: 1900673 - RNA, 16 nt, Human
auccuaccuguuuugu

SEQ ID NO: 1900674 - RNA, 23 nt, Human
auccuagagauuugguguacaau

SEQ ID NO: 1900675 - RNA, 16 nt, Human
auccuccucagaucuu

SEQ ID NO: 1900676 - RNA, 16 nt, Human
auccuaggcauuugcu

SEQ ID NO: 1900677 - RNA, 21 nt, Human
auccuaagcuauucaguaaua

SEQ ID NO: 1900678 - RNA, 12 nt, Human
auccuaagcuau

SEQ ID NO: 1900679 - RNA, 16 nt, Human
auccguauauaucccc

SEQ ID NO: 1900680 - RNA, 22 nt, Human
auccggcaacaucaacccgagu

SEQ ID NO: 1900681 - RNA, 17 nt, Human
uugaaauuguauuacaa

SEQ ID NO: 1900682 - RNA, 19 nt, Human
uugaacccgggaggcagag

SEQ ID NO: 1900683 - RNA, 19 nt, Human
uugaaccuauuucucuuuc

SEQ ID NO: 1900684 - RNA, 15 nt, Human
uugaaccuauuucuc

SEQ ID NO: 1900685 - RNA, 16 nt, Human
uugaaccuauuucucu

SEQ ID NO: 1900686 - RNA, 13 nt, Human
uugaaccuauuuc

SEQ ID NO: 1900687 - RNA, 22 nt, Human
uugaacgcccccccccaccccu

SEQ ID NO: 1900688 - RNA, 19 nt, Human
uugaaagccccagaaauca

SEQ ID NO: 1900689 - RNA, 12 nt, Human
uugaaagcugug

SEQ ID NO: 1900690 - RNA, 22 nt, Human
uugaaagcuguggccagcuugu

SEQ ID NO: 1900691 - RNA, 20 nt, Human
uugaaauuaagaaggcaaaa

SEQ ID NO: 1900692 - RNA, 19 nt, Human
uucugggcacccucccacc

SEQ ID NO: 1900693 - RNA, 20 nt, Human
aucauuuuaccuuugacaaa

SEQ ID NO: 1900694 - RNA, 18 nt, Human
auccaagcaaaugugaau

SEQ ID NO: 1900695 - RNA, 16 nt, Human
auccaagcaagacuga

SEQ ID NO: 1900696 - RNA, 21 nt, Human
auccaagcuggucccacucag

SEQ ID NO: 1900697 - RNA, 18 nt, Human
auccaagcuggucccacu

SEQ ID NO: 1900698 - RNA, 16 nt, Human
auccacccaccucagc

SEQ ID NO: 1900699 - RNA, 16 nt, Human
auccaguaucuugaag

SEQ ID NO: 1900700 - RNA, 15 nt, Human
auccacccaccucag

SEQ ID NO: 1900701 - RNA, 13 nt, Human
auccacccaccuc

SEQ ID NO: 1900702 - RNA, 18 nt, Human
auccauauugagucaaau

SEQ ID NO: 1900703 - RNA, 20 nt, Human
auccauauugagucaaaugg

SEQ ID NO: 1900704 - RNA, 21 nt, Human
auccaguaucuugaagacuuu

SEQ ID NO: 1900705 - RNA, 19 nt, Human
auccauagcaccuccacau

SEQ ID NO: 1900706 - RNA, 18 nt, Human
aucccauaugccugggca

SEQ ID NO: 1900707 - RNA, 22 nt, Human
aucccagcuacuugggaggcug

SEQ ID NO: 1900708 - RNA, 19 nt, Human
aucccaaacccuucagugc

SEQ ID NO: 1900709 - RNA, 20 nt, Human
aucccaaacccuucagugcc

SEQ ID NO: 1900710 - RNA, 14 nt, Human
aucaggugcugcca

SEQ ID NO: 1900711 - RNA, 18 nt, Human
aucaguagccagcaucug

SEQ ID NO: 1900712 - RNA, 21 nt, Human
uucuccuuguguuacuaaguu

SEQ ID NO: 1900713 - RNA, 20 nt, Human
uucuccuucagcccucaccc

SEQ ID NO: 1900714 - RNA, 15 nt, Human
uucuccuucagcccu

SEQ ID NO: 1900715 - RNA, 14 nt, Human
aucaguauaaacaa

SEQ ID NO: 1900716 - RNA, 16 nt, Human
aucaguauaaacaaag

SEQ ID NO: 1900717 - RNA, 20 nt, Human
uucucuaguuugauuaaauu

SEQ ID NO: 1900718 - RNA, 17 nt, Human
uucucuaguuugauuaa

SEQ ID NO: 1900719 - RNA, 15 nt, Human
uucucuaguuugauu

SEQ ID NO: 1900720 - RNA, 16 nt, Human
uucuggcucuuccagg

SEQ ID NO: 1900721 - RNA, 17 nt, Human
uucuggcucuuccaggc

SEQ ID NO: 1900722 - RNA, 18 nt, Human
uucugccugcccaggccc

SEQ ID NO: 1900723 - RNA, 17 nt, Human
uucugccugcccaggcc

SEQ ID NO: 1900724 - RNA, 21 nt, Human
uucugccugcccaggccccug

SEQ ID NO: 1900725 - RNA, 15 nt, Human
uucugccauauucug

SEQ ID NO: 1900726 - RNA, 23 nt, Human
uucugaacuuggcgcugccccug

SEQ ID NO: 1900727 - RNA, 19 nt, Human
uucugaacuuggcgcugcc

SEQ ID NO: 1900728 - RNA, 22 nt, Human
uucugaacuuggcgcugccccu

SEQ ID NO: 1900729 - RNA, 17 nt, Human
uucucuugggaacugaa

SEQ ID NO: 1900730 - RNA, 22 nt, Human
uucucuugggaacugaacucac

SEQ ID NO: 1900731 - RNA, 20 nt, Human
auggcaggacgugggcuggg

SEQ ID NO: 1900732 - RNA, 21 nt, Human
auggcaggacgugggcugggc

SEQ ID NO: 1900733 - RNA, 14 nt, Human
auggcagcugccac

SEQ ID NO: 1900734 - RNA, 13 nt, Human
auggagagaaaac

SEQ ID NO: 1900735 - RNA, 15 nt, Human
auggcagugucuuuc

SEQ ID NO: 1900736 - RNA, 15 nt, Human
auggcccauucuacu

SEQ ID NO: 1900737 - RNA, 17 nt, Human
auggcccauucuacuug

SEQ ID NO: 1900738 - RNA, 19 nt, Human
auggcccauucuacuugcu

SEQ ID NO: 1900739 - RNA, 23 nt, Human
auggcccauucuacuugcucugg

SEQ ID NO: 1900740 - RNA, 24 nt, Human
auggcccauucuacuugcucugga

SEQ ID NO: 1900741 - RNA, 19 nt, Human
augggagagaagagaaugc

SEQ ID NO: 1900742 - RNA, 18 nt, Human
augggagggaggcucagg

SEQ ID NO: 1900743 - RNA, 15 nt, Human
augggagagaagaga

SEQ ID NO: 1900744 - RNA, 18 nt, Human
auggcuaauguacugcau

SEQ ID NO: 1900745 - RNA, 19 nt, Human
auggcuaagcaaaauguga

SEQ ID NO: 1900746 - RNA, 15 nt, Human
auggacucugcacau

SEQ ID NO: 1900747 - RNA, 11 nt, Human
auggacuuugu

SEQ ID NO: 1900748 - RNA, 12 nt, Human
auggacuuuguu

SEQ ID NO: 1900749 - RNA, 19 nt, Human
auggacuaacuugucuuug

SEQ ID NO: 1900750 - RNA, 21 nt, Human
uuucauuaauacagggcauuu

SEQ ID NO: 1900751 - RNA, 17 nt, Human
uuuccaugaguccccug

SEQ ID NO: 1900752 - RNA, 18 nt, Human
uuuccaugaguccccugu

SEQ ID NO: 1900753 - RNA, 12 nt, Human
uuuccaucuuua

SEQ ID NO: 1900754 - RNA, 14 nt, Human
uuuccccuuuugca

SEQ ID NO: 1900755 - RNA, 17 nt, Human
uuuccaugaaaaugcaa

SEQ ID NO: 1900756 - RNA, 20 nt, Human
augcuaagggcaggcccaaa

SEQ ID NO: 1900757 - RNA, 18 nt, Human
uuuaucaugugaaaucau

SEQ ID NO: 1900758 - RNA, 17 nt, Human
uuuaucaugugaaauca

SEQ ID NO: 1900759 - RNA, 22 nt, Human
augcuagaacucccuuucaaca

SEQ ID NO: 1900760 - RNA, 21 nt, Human
augcuagaacucccuuucaac

SEQ ID NO: 1900761 - RNA, 20 nt, Human
augcuagaacucccuuucaa

SEQ ID NO: 1900762 - RNA, 17 nt, Human
uuuauuaauugcuuuga

SEQ ID NO: 1900763 - RNA, 21 nt, Human
augcuauuugcaauuccugcu

SEQ ID NO: 1900764 - RNA, 14 nt, Human
augcuauuugcaau

SEQ ID NO: 1900765 - RNA, 16 nt, Human
uuuauuuuguguuuag

SEQ ID NO: 1900766 - RNA, 21 nt, Human
auggaaccugacguagcugca

SEQ ID NO: 1900767 - RNA, 20 nt, Human
uuuauuuuguguuuaggaac

SEQ ID NO: 1900768 - RNA, 22 nt, Human
uuucaaacuuuacuauggcccu

SEQ ID NO: 1900769 - RNA, 16 nt, Human
uuucaaacuuuacuau

SEQ ID NO: 1900770 - RNA, 22 nt, Human
uuucaaaauuguuacaaauugu

SEQ ID NO: 1900771 - RNA, 12 nt, Human
uuucaaaaugcu

SEQ ID NO: 1900772 - RNA, 13 nt, Human
uuucaaaaugcuu

SEQ ID NO: 1900773 - RNA, 15 nt, Human
uuucaaaaugcuuuu

SEQ ID NO: 1900774 - RNA, 13 nt, Human
augcugcuuuuuc

SEQ ID NO: 1900775 - RNA, 17 nt, Human
augcuguucaugaaaga

SEQ ID NO: 1900776 - RNA, 22 nt, Human
augcugugcccuaaaguguauu

SEQ ID NO: 1900777 - RNA, 13 nt, Human
augcugcuggaca

SEQ ID NO: 1900778 - RNA, 13 nt, Human
augcuucucacug

SEQ ID NO: 1900779 - RNA, 18 nt, Human
auggaaccugacguagcu

SEQ ID NO: 1900780 - RNA, 19 nt, Human
augcuguucaugaaagauu

SEQ ID NO: 1900781 - RNA, 20 nt, Human
uuuaaaacaagaaaguuucc

SEQ ID NO: 1900782 - RNA, 15 nt, Human
uuuaaaacaagaaag

SEQ ID NO: 1900783 - RNA, 14 nt, Human
uuuaaaaauauuuu

SEQ ID NO: 1900784 - RNA, 17 nt, Human
uuuaaaaauagacacuc

SEQ ID NO: 1900785 - RNA, 24 nt, Human
augcaccugaauguuagauaguua

SEQ ID NO: 1900786 - RNA, 13 nt, Human
uuuaaagaaugcu

SEQ ID NO: 1900787 - RNA, 22 nt, Human
augcaccagcccuuagcaggga

SEQ ID NO: 1900788 - RNA, 13 nt, Human
augcaccuggaau

SEQ ID NO: 1900789 - RNA, 17 nt, Human
augcacuuuguucuggc

SEQ ID NO: 1900790 - RNA, 19 nt, Human
augcacuuuguucuggcuc

SEQ ID NO: 1900791 - RNA, 20 nt, Human
augcacuuuguucuggcucu

SEQ ID NO: 1900792 - RNA, 22 nt, Human
augauucuauuuauauguacau

SEQ ID NO: 1900793 - RNA, 23 nt, Human
augauucuauuuauauguacaug

SEQ ID NO: 1900794 - RNA, 15 nt, Human
augauccaagcaaga

SEQ ID NO: 1900795 - RNA, 17 nt, Human
augauccaagcaagacu

SEQ ID NO: 1900796 - RNA, 21 nt, Human
augauacuugaaaauuaacau

SEQ ID NO: 1900797 - RNA, 17 nt, Human
augauacuugaaaauua

SEQ ID NO: 1900798 - RNA, 15 nt, Human
augauacauccaaag

SEQ ID NO: 1900799 - RNA, 17 nt, Human
augaucuaggaagacuu

SEQ ID NO: 1900800 - RNA, 20 nt, Human
augaucuaggaagacuuugg

SEQ ID NO: 1900801 - RNA, 15 nt, Human
augaucuaggaagac

SEQ ID NO: 1900802 - RNA, 19 nt, Human
augauuaauuaaauagcuu

SEQ ID NO: 1900803 - RNA, 16 nt, Human
augauuaauucaccuu

SEQ ID NO: 1900804 - RNA, 22 nt, Human
uuggugccuggccuggcacaca

SEQ ID NO: 1900805 - RNA, 20 nt, Human
uuggugccuggccuggcaca

SEQ ID NO: 1900806 - RNA, 13 nt, Human
uuguguuacuaag

SEQ ID NO: 1900807 - RNA, 20 nt, Human
uuguguuacuaaguuuuuau

SEQ ID NO: 1900808 - RNA, 15 nt, Human
uuguguuacuaaguu

SEQ ID NO: 1900809 - RNA, 13 nt, Human
uuguguucaccuu

SEQ ID NO: 1900810 - RNA, 21 nt, Human
uuguuccacaaguuaaauaaa

SEQ ID NO: 1900811 - RNA, 18 nt, Human
uuguugagcuauugcugu

SEQ ID NO: 1900812 - RNA, 21 nt, Human
uuguucccauccucuucuuuu

SEQ ID NO: 1900813 - RNA, 15 nt, Human
uuguucuuuguucuu

SEQ ID NO: 1900814 - RNA, 13 nt, Human
uuguucuuuuuau

SEQ ID NO: 1900815 - RNA, 22 nt, Human
augcccuuucuugaauugcauu

SEQ ID NO: 1900816 - RNA, 16 nt, Human
augcccuggagguggc

SEQ ID NO: 1900817 - RNA, 19 nt, Human
augccgauauacucuagau

SEQ ID NO: 1900818 - RNA, 20 nt, Human
augccucagcccugacccug

SEQ ID NO: 1900819 - RNA, 12 nt, Human
augcccugugca

SEQ ID NO: 1900820 - RNA, 14 nt, Human
augcccuggaggug

SEQ ID NO: 1900821 - RNA, 15 nt, Human
augcccuggaggugg

SEQ ID NO: 1900822 - RNA, 13 nt, Human
augcccugugcaa

SEQ ID NO: 1900823 - RNA, 23 nt, Human
augcccugugcaaccucuuggcc

SEQ ID NO: 1900824 - RNA, 12 nt, Human
augcccagcccc

SEQ ID NO: 1900825 - RNA, 13 nt, Human
augcccagccccu

SEQ ID NO: 1900826 - RNA, 14 nt, Human
augcccagccccuu

SEQ ID NO: 1900827 - RNA, 14 nt, Human
augcccuccucucc

SEQ ID NO: 1900828 - RNA, 15 nt, Human
augcccuccucuccc

SEQ ID NO: 1900829 - RNA, 23 nt, Human
augcccuccucucccauuguccc

SEQ ID NO: 1900830 - RNA, 21 nt, Human
augcgggccagugcuccagcc

SEQ ID NO: 1900831 - RNA, 20 nt, Human
augccucccccuagccauuu

SEQ ID NO: 1900832 - RNA, 24 nt, Human
augccucagcccugacccugugga

SEQ ID NO: 1900833 - RNA, 16 nt, Human
augcgggccagugcuc

SEQ ID NO: 1900834 - RNA, 20 nt, Human
augcgguagccagcacacag

SEQ ID NO: 1900835 - RNA, 21 nt, Human
augcgguagccagcacacagg

SEQ ID NO: 1900836 - RNA, 14 nt, Human
augcgguagccagc

SEQ ID NO: 1900837 - RNA, 15 nt, Human
augcgguagccagca

SEQ ID NO: 1900838 - RNA, 18 nt, Human
augcgguagccagcacac

SEQ ID NO: 1900839 - RNA, 23 nt, Human
augcuaaagguuguauugcauau

SEQ ID NO: 1900840 - RNA, 11 nt, Human
augcccagccc

SEQ ID NO: 1900841 - RNA, 19 nt, Human
augccauggacagaagaag

SEQ ID NO: 1900842 - RNA, 18 nt, Human
augccauggacagaagaa

SEQ ID NO: 1900843 - RNA, 17 nt, Human
augccauggacagaaga

SEQ ID NO: 1900844 - RNA, 16 nt, Human
augccacaaggacuuc

SEQ ID NO: 1900845 - RNA, 19 nt, Human
augccacaaggacuuccug

SEQ ID NO: 1900846 - RNA, 23 nt, Human
augcagugguaugaucacggcuc

SEQ ID NO: 1900847 - RNA, 13 nt, Human
augcagugcuucc

SEQ ID NO: 1900848 - RNA, 18 nt, Human
augccaaaaaaagacagg

SEQ ID NO: 1900849 - RNA, 17 nt, Human
augccaauauuaaaucu

SEQ ID NO: 1900850 - RNA, 23 nt, Human
uuuaauuauuauucuucauaaca

SEQ ID NO: 1900851 - RNA, 14 nt, Human
uuuaauuauuauuc

SEQ ID NO: 1900852 - RNA, 23 nt, Human
uuuaauuauuauuuauauaugua

SEQ ID NO: 1900853 - RNA, 12 nt, Human
uuuaauucaguu

SEQ ID NO: 1900854 - RNA, 13 nt, Human
uuuaauuaaauaa

SEQ ID NO: 1900855 - RNA, 18 nt, Human
uuuaaauauaugcuaagu

SEQ ID NO: 1900856 - RNA, 15 nt, Human
uuuaaguaacuuuaa

SEQ ID NO: 1900857 - RNA, 19 nt, Human
uuuaauuuuuuugagacag

SEQ ID NO: 1900858 - RNA, 21 nt, Human
uuuaauuuauuaauugcuuug

SEQ ID NO: 1900859 - RNA, 22 nt, Human
uuuaauuuauuaauugcuuuga

SEQ ID NO: 1900860 - RNA, 13 nt, Human
uuuaauuuaaagc

SEQ ID NO: 1900861 - RNA, 19 nt, Human
uuuacaaaacuacaugaga

SEQ ID NO: 1900862 - RNA, 19 nt, Human
augcagcagggaugcccug

SEQ ID NO: 1900863 - RNA, 20 nt, Human
augcagcagggaugcccugg

SEQ ID NO: 1900864 - RNA, 22 nt, Human
augcagauuuugcccuugacaa

SEQ ID NO: 1900865 - RNA, 18 nt, Human
augcagccucacaguccu

SEQ ID NO: 1900866 - RNA, 12 nt, Human
uuugacucuuuu

SEQ ID NO: 1900867 - RNA, 19 nt, Human
uuugacuagaugauggaug

SEQ ID NO: 1900868 - RNA, 19 nt, Human
uuugacucuggcaaagcuu

SEQ ID NO: 1900869 - RNA, 20 nt, Human
uuugacucuggcaaagcuuu

SEQ ID NO: 1900870 - RNA, 21 nt, Human
uuugacucuggcaaagcuuuu

SEQ ID NO: 1900871 - RNA, 20 nt, Human
uuugacgccaucccagcccc

SEQ ID NO: 1900872 - RNA, 19 nt, Human
uuugacgggaaacaaaacu

SEQ ID NO: 1900873 - RNA, 19 nt, Human
uuugaccuuuuauguagua

SEQ ID NO: 1900874 - RNA, 13 nt, Human
uuugacgccaucc

SEQ ID NO: 1900875 - RNA, 14 nt, Human
uuugacgccauccc

SEQ ID NO: 1900876 - RNA, 16 nt, Human
uuugacgccaucccag

SEQ ID NO: 1900877 - RNA, 19 nt, Human
uuugacgccaucccagccc

SEQ ID NO: 1900878 - RNA, 23 nt, Human
uuugauuaaauucuugcaaagua

SEQ ID NO: 1900879 - RNA, 21 nt, Human
uuugauucagacagcugccug

SEQ ID NO: 1900880 - RNA, 21 nt, Human
uuugauuaaauucuugcaaag

SEQ ID NO: 1900881 - RNA, 18 nt, Human
uuugauuaaauucuugca

SEQ ID NO: 1900882 - RNA, 13 nt, Human
uuugauuaaauuc

SEQ ID NO: 1900883 - RNA, 22 nt, Human
uuugauguucuuucacccuuuu

SEQ ID NO: 1900884 - RNA, 19 nt, Human
uuugcugagcauguacuga

SEQ ID NO: 1900885 - RNA, 23 nt, Human
uuuggcaaacucuccaccacacg

SEQ ID NO: 1900886 - RNA, 13 nt, Human
uuugccucugccu

SEQ ID NO: 1900887 - RNA, 15 nt, Human
uuugccguuauuaaa

SEQ ID NO: 1900888 - RNA, 21 nt, Human
uuugcaaggaagccacagcug

SEQ ID NO: 1900889 - RNA, 14 nt, Human
uuugcaaggaagcc

SEQ ID NO: 1900890 - RNA, 12 nt, Human
uuugcaaggaag

SEQ ID NO: 1900891 - RNA, 22 nt, Human
uuugauucagacagcugccugg

SEQ ID NO: 1900892 - RNA, 15 nt, Human
uuugauucauaguaa

SEQ ID NO: 1900893 - RNA, 20 nt, Human
uuugauucauaguaacuucu

SEQ ID NO: 1900894 - RNA, 21 nt, Human
uuugauucuccuucagcccuc

SEQ ID NO: 1900895 - RNA, 16 nt, Human
uuugauucuccuucag

SEQ ID NO: 1900896 - RNA, 14 nt, Human
uuugauucuccuuc

SEQ ID NO: 1900897 - RNA, 13 nt, Human
uuugauucuccuu

SEQ ID NO: 1900898 - RNA, 12 nt, Human
uuugauucuccu

SEQ ID NO: 1900899 - RNA, 18 nt, Human
auguacugagccuuguaa

SEQ ID NO: 1900900 - RNA, 21 nt, Human
auguaccauguacaugaagaa

SEQ ID NO: 1900901 - RNA, 15 nt, Human
auguaccauguacau

SEQ ID NO: 1900902 - RNA, 20 nt, Human
auguacgaugagaaauucaa

SEQ ID NO: 1900903 - RNA, 20 nt, Human
auguacuaggauacugcugc

SEQ ID NO: 1900904 - RNA, 13 nt, Human
auguagaggagaa

SEQ ID NO: 1900905 - RNA, 12 nt, Human
auguagaggaga

SEQ ID NO: 1900906 - RNA, 19 nt, Human
auguagaggagaaacugga

SEQ ID NO: 1900907 - RNA, 17 nt, Human
auguagaggagaaacug

SEQ ID NO: 1900908 - RNA, 19 nt, Human
auguagaggggaaaagaga

SEQ ID NO: 1900909 - RNA, 19 nt, Human
auguagccccucuccugga

SEQ ID NO: 1900910 - RNA, 23 nt, Human
auguaggagcugccuuggcucag

SEQ ID NO: 1900911 - RNA, 18 nt, Human
auguagcccccuggccuc

SEQ ID NO: 1900912 - RNA, 19 nt, Human
auguagcccccuggccucu

SEQ ID NO: 1900913 - RNA, 21 nt, Human
auguagcccccuggccucugu

SEQ ID NO: 1900914 - RNA, 23 nt, Human
auguagcccccuggccucugugc

SEQ ID NO: 1900915 - RNA, 12 nt, Human
uuugaccucugc

SEQ ID NO: 1900916 - RNA, 20 nt, Human
uuugacauugcguuugaccu

SEQ ID NO: 1900917 - RNA, 13 nt, Human
auguaguaauuga

SEQ ID NO: 1900918 - RNA, 16 nt, Human
auguaguaauugacau

SEQ ID NO: 1900919 - RNA, 17 nt, Human
auguaguaauugacaug

SEQ ID NO: 1900920 - RNA, 18 nt, Human
auguaguaauugacaugu

SEQ ID NO: 1900921 - RNA, 19 nt, Human
auguaugaggaauuucugu

SEQ ID NO: 1900922 - RNA, 13 nt, Human
uuuggcagaguuc

SEQ ID NO: 1900923 - RNA, 15 nt, Human
auguauguguaagua

SEQ ID NO: 1900924 - RNA, 16 nt, Human
auguaugcuucauaca

SEQ ID NO: 1900925 - RNA, 15 nt, Human
auguaugcuucauac

SEQ ID NO: 1900926 - RNA, 14 nt, Human
auguaugauuacau

SEQ ID NO: 1900927 - RNA, 14 nt, Human
auguaugcuucaua

SEQ ID NO: 1900928 - RNA, 16 nt, Human
auguauguguaaguau

SEQ ID NO: 1900929 - RNA, 19 nt, Human
auguauguucagaagaaau

SEQ ID NO: 1900930 - RNA, 20 nt, Human
auguauguucagaagaaauu

SEQ ID NO: 1900931 - RNA, 22 nt, Human
auguauuacaguggggaaugaa

SEQ ID NO: 1900932 - RNA, 16 nt, Human
augucaguauguggaa

SEQ ID NO: 1900933 - RNA, 12 nt, Human
augucaguguga

SEQ ID NO: 1900934 - RNA, 13 nt, Human
augucagugugac

SEQ ID NO: 1900935 - RNA, 17 nt, Human
auguccacugguucuuc

SEQ ID NO: 1900936 - RNA, 19 nt, Human
augucucgugguaggacug

SEQ ID NO: 1900937 - RNA, 23 nt, Human
augucucugugagacucgagaac

SEQ ID NO: 1900938 - RNA, 21 nt, Human
augucucugugagacucgaga

SEQ ID NO: 1900939 - RNA, 16 nt, Human
augucucgugguagga

SEQ ID NO: 1900940 - RNA, 15 nt, Human
augucucgugguagg

SEQ ID NO: 1900941 - RNA, 20 nt, Human
uuugugaagguggaaauaaa

SEQ ID NO: 1900942 - RNA, 24 nt, Human
uuugugaaggccucgcaggaagac

SEQ ID NO: 1900943 - RNA, 16 nt, Human
uuugugaaucuuugug

SEQ ID NO: 1900944 - RNA, 19 nt, Human
uuugucuuuggugaacauu

SEQ ID NO: 1900945 - RNA, 21 nt, Human
uuugucuuguguuucuuuagu

SEQ ID NO: 1900946 - RNA, 17 nt, Human
uuugucuuuaacuguca

SEQ ID NO: 1900947 - RNA, 13 nt, Human
uuuguaaugaaaa

SEQ ID NO: 1900948 - RNA, 14 nt, Human
uuuguaaugaaaac

SEQ ID NO: 1900949 - RNA, 12 nt, Human
uuuguauaaaag

SEQ ID NO: 1900950 - RNA, 23 nt, Human
augugcacaugcacgugugugca

SEQ ID NO: 1900951 - RNA, 14 nt, Human
augugauuguggaa

SEQ ID NO: 1900952 - RNA, 15 nt, Human
augugauuguggaau

SEQ ID NO: 1900953 - RNA, 17 nt, Human
augugauuguggaaugg

SEQ ID NO: 1900954 - RNA, 22 nt, Human
augugauuguggaauggagauu

SEQ ID NO: 1900955 - RNA, 15 nt, Human
augugauuuaaacaa

SEQ ID NO: 1900956 - RNA, 23 nt, Human
augucucuuuaaugucacaggca

SEQ ID NO: 1900957 - RNA, 16 nt, Human
augugaugagaggaaa

SEQ ID NO: 1900958 - RNA, 17 nt, Human
augugaugagaggaaau

SEQ ID NO: 1900959 - RNA, 19 nt, Human
augugaugagaggaaauca

SEQ ID NO: 1900960 - RNA, 14 nt, Human
auguacauuaauua

SEQ ID NO: 1900961 - RNA, 20 nt, Human
auguaaaggagucaaaacua

SEQ ID NO: 1900962 - RNA, 17 nt, Human
auguaaaagacuuuuuu

SEQ ID NO: 1900963 - RNA, 13 nt, Human
augguuguacaua

SEQ ID NO: 1900964 - RNA, 21 nt, Human
augguuugaauauaaacacua

SEQ ID NO: 1900965 - RNA, 16 nt, Human
augguucucaggccug

SEQ ID NO: 1900966 - RNA, 16 nt, Human
augguuuucaaaauaa

SEQ ID NO: 1900967 - RNA, 14 nt, Human
augguuuucuugug

SEQ ID NO: 1900968 - RNA, 14 nt, Human
augguuuucaaaau

SEQ ID NO: 1900969 - RNA, 15 nt, Human
augguuuucaaaaua

SEQ ID NO: 1900970 - RNA, 18 nt, Human
augguuugcaaggaagcc

SEQ ID NO: 1900971 - RNA, 17 nt, Human
augguuugcaaggaagc

SEQ ID NO: 1900972 - RNA, 16 nt, Human
augguuugcaaggaag

SEQ ID NO: 1900973 - RNA, 22 nt, Human
augguuugaauauaaacacuau

SEQ ID NO: 1900974 - RNA, 17 nt, Human
augguggcuggguugga

SEQ ID NO: 1900975 - RNA, 16 nt, Human
augguggcgcgcaccu

SEQ ID NO: 1900976 - RNA, 15 nt, Human
augguggcuggguug

SEQ ID NO: 1900977 - RNA, 13 nt, Human
augguggcugggu

SEQ ID NO: 1900978 - RNA, 12 nt, Human
augguggcuggg

SEQ ID NO: 1900979 - RNA, 16 nt, Human
auggugcugagaagcu

SEQ ID NO: 1900980 - RNA, 23 nt, Human
auggugcuuguuaaugcuuucug

SEQ ID NO: 1900981 - RNA, 12 nt, Human
auggugcugaga

SEQ ID NO: 1900982 - RNA, 13 nt, Human
auggugcugagaa

SEQ ID NO: 1900983 - RNA, 14 nt, Human
auggugcugagaag

SEQ ID NO: 1900984 - RNA, 19 nt, Human
augguguucaaaaaacuug

SEQ ID NO: 1900985 - RNA, 15 nt, Human
augggugcuuggagg

SEQ ID NO: 1900986 - RNA, 20 nt, Human
auggugagggauacccaucc

SEQ ID NO: 1900987 - RNA, 12 nt, Human
auggugcaauga

SEQ ID NO: 1900988 - RNA, 13 nt, Human
auggugcaaugac

SEQ ID NO: 1900989 - RNA, 15 nt, Human
auggugcaaugaccu

SEQ ID NO: 1900990 - RNA, 19 nt, Human
auggugcaaugaccuuuca

SEQ ID NO: 1900991 - RNA, 14 nt, Human
auggugccccagga

SEQ ID NO: 1900992 - RNA, 16 nt, Human
auggugcaaugaccuu

SEQ ID NO: 1900993 - RNA, 17 nt, Human
auggugcaaugaccuuu

SEQ ID NO: 1900994 - RNA, 15 nt, Human
auggugccccaggac

SEQ ID NO: 1900995 - RNA, 16 nt, Human
auggugccccaggacc

SEQ ID NO: 1900996 - RNA, 17 nt, Human
auggugccccaggacca

SEQ ID NO: 1900997 - RNA, 18 nt, Human
auggugccccaggaccag

SEQ ID NO: 1900998 - RNA, 19 nt, Human
auggugccccaggaccagc

SEQ ID NO: 1900999 - RNA, 20 nt, Human
auggugccccaggaccagcu

SEQ ID NO: 1901000 - RNA, 21 nt, Human
auggugccccaggaccagcuc

SEQ ID NO: 1901001 - RNA, 22 nt, Human
auggugccccaggaccagcuca

SEQ ID NO: 1901002 - RNA, 16 nt, Human
uuucugggauaaguaa

SEQ ID NO: 1901003 - RNA, 21 nt, Human
uuucugcagccacuauuguua

SEQ ID NO: 1901004 - RNA, 17 nt, Human
uuucuguauauacuuuu

SEQ ID NO: 1901005 - RNA, 15 nt, Human
augggauccuggagu

SEQ ID NO: 1901006 - RNA, 19 nt, Human
uuucuggcuaugcauuuga

SEQ ID NO: 1901007 - RNA, 18 nt, Human
uuucuggcuaugcauuug

SEQ ID NO: 1901008 - RNA, 16 nt, Human
uuucuggcuaugcauu

SEQ ID NO: 1901009 - RNA, 15 nt, Human
uuucuggcuaugcau

SEQ ID NO: 1901010 - RNA, 19 nt, Human
uuucugcagccacuauugu

SEQ ID NO: 1901011 - RNA, 14 nt, Human
uuucugcagaaaca

SEQ ID NO: 1901012 - RNA, 20 nt, Human
uuucuccccugcccccagga

SEQ ID NO: 1901013 - RNA, 17 nt, Human
uuucuccccugccccca

SEQ ID NO: 1901014 - RNA, 16 nt, Human
uuucuccccugccccc

SEQ ID NO: 1901015 - RNA, 14 nt, Human
uuucuccccugccc

SEQ ID NO: 1901016 - RNA, 13 nt, Human
uuucuccccugcc

SEQ ID NO: 1901017 - RNA, 14 nt, Human
augggugaaggcug

SEQ ID NO: 1901018 - RNA, 19 nt, Human
auggguccaggauuccucu

SEQ ID NO: 1901019 - RNA, 21 nt, Human
auggguccaggauuccucuuu

SEQ ID NO: 1901020 - RNA, 15 nt, Human
augggugaaggcugg

SEQ ID NO: 1901021 - RNA, 16 nt, Human
augggugaaggcuggc

SEQ ID NO: 1901022 - RNA, 17 nt, Human
augggugaaggcuggca

SEQ ID NO: 1901023 - RNA, 18 nt, Human
augggugaaggcuggcau

SEQ ID NO: 1901024 - RNA, 15 nt, Human
augggggugcauuug

SEQ ID NO: 1901025 - RNA, 16 nt, Human
augggguccuggccau

SEQ ID NO: 1901026 - RNA, 17 nt, Human
augggguccuggccauc

SEQ ID NO: 1901027 - RNA, 14 nt, Human
augggggugcauuu

SEQ ID NO: 1901028 - RNA, 18 nt, Human
augggggaacucagaucc

SEQ ID NO: 1901029 - RNA, 19 nt, Human
augggggaacucagaucca

SEQ ID NO: 1901030 - RNA, 21 nt, Human
augggggaacucagauccagg

SEQ ID NO: 1901031 - RNA, 24 nt, Human
auggggcugcaccggcuggccugg

SEQ ID NO: 1901032 - RNA, 21 nt, Human
auggggccagauccagccugg

SEQ ID NO: 1901033 - RNA, 22 nt, Human
auggggccagauccagccuggg

SEQ ID NO: 1901034 - RNA, 12 nt, Human
auggggcugcac

SEQ ID NO: 1901035 - RNA, 13 nt, Human
auggggccagauc

SEQ ID NO: 1901036 - RNA, 14 nt, Human
auggggccagaucc

SEQ ID NO: 1901037 - RNA, 15 nt, Human
auggggccagaucca

SEQ ID NO: 1901038 - RNA, 19 nt, Human
auggggccagauccagccu

SEQ ID NO: 1901039 - RNA, 15 nt, Human
uuugaaaucagcaua

SEQ ID NO: 1901040 - RNA, 20 nt, Human
uuugaaaaagaaaacacuua

SEQ ID NO: 1901041 - RNA, 20 nt, Human
augggcuggguucuacccag

SEQ ID NO: 1901042 - RNA, 12 nt, Human
auggggaugcag

SEQ ID NO: 1901043 - RNA, 20 nt, Human
auggggauagauguguggac

SEQ ID NO: 1901044 - RNA, 18 nt, Human
augggccuccugugugug

SEQ ID NO: 1901045 - RNA, 18 nt, Human
auucuaggccuccuggcc

SEQ ID NO: 1901046 - RNA, 19 nt, Human
auucuaggccuccuggccc

SEQ ID NO: 1901047 - RNA, 20 nt, Human
auucuaggccuccuggccca

SEQ ID NO: 1901048 - RNA, 17 nt, Human
auucucauuugucacac

SEQ ID NO: 1901049 - RNA, 13 nt, Human
auucuccacagca

SEQ ID NO: 1901050 - RNA, 14 nt, Human
auucuccacagcaa

SEQ ID NO: 1901051 - RNA, 19 nt, Human
auucugccugcccaggccc

SEQ ID NO: 1901052 - RNA, 18 nt, Human
auucugccugcccaggcc

SEQ ID NO: 1901053 - RNA, 17 nt, Human
auucugccugcccaggc

SEQ ID NO: 1901054 - RNA, 16 nt, Human
auucugccugcccagg

SEQ ID NO: 1901055 - RNA, 15 nt, Human
auucugccugcccag

SEQ ID NO: 1901056 - RNA, 14 nt, Human
auucugccugccca

SEQ ID NO: 1901057 - RNA, 13 nt, Human
auucugccugccc

SEQ ID NO: 1901058 - RNA, 11 nt, Human
auucugccugc

SEQ ID NO: 1901059 - RNA, 14 nt, Human
auucuguuggccag

SEQ ID NO: 1901060 - RNA, 21 nt, Human
auucuguuggccagugugaca

SEQ ID NO: 1901061 - RNA, 19 nt, Human
auucuguuggccaguguga

SEQ ID NO: 1901062 - RNA, 14 nt, Human
auucuguacucuua

SEQ ID NO: 1901063 - RNA, 22 nt, Human
auucugcucacauaucugucau

SEQ ID NO: 1901064 - RNA, 21 nt, Human
auucugcucacauaucuguca

SEQ ID NO: 1901065 - RNA, 20 nt, Human
auucugcucacauaucuguc

SEQ ID NO: 1901066 - RNA, 19 nt, Human
auucugcucacauaucugu

SEQ ID NO: 1901067 - RNA, 21 nt, Human
auucugccugcccaggccccu

SEQ ID NO: 1901068 - RNA, 20 nt, Human
auucugccugcccaggcccc

SEQ ID NO: 1901069 - RNA, 18 nt, Human
auucugcucacauaucug

SEQ ID NO: 1901070 - RNA, 17 nt, Human
auugacacuuaaaaaug

SEQ ID NO: 1901071 - RNA, 15 nt, Human
auugacacuuaaaaa

SEQ ID NO: 1901072 - RNA, 12 nt, Human
auugacacagaa

SEQ ID NO: 1901073 - RNA, 14 nt, Human
auugacacagaaaa

SEQ ID NO: 1901074 - RNA, 13 nt, Human
auugacuuugucu

SEQ ID NO: 1901075 - RNA, 17 nt, Human
auugaccugaggcccuu

SEQ ID NO: 1901076 - RNA, 19 nt, Human
auugacacuuaaaaauggu

SEQ ID NO: 1901077 - RNA, 17 nt, Human
auugacacagaaaaugu

SEQ ID NO: 1901078 - RNA, 15 nt, Human
auugaaaaaccauuu

SEQ ID NO: 1901079 - RNA, 22 nt, Human
auucuucccauucuccauuugu

SEQ ID NO: 1901080 - RNA, 20 nt, Human
auugaaaucuuuuugcuuug

SEQ ID NO: 1901081 - RNA, 17 nt, Human
auugaaaucuuuuugcu

SEQ ID NO: 1901082 - RNA, 18 nt, Human
auugaaaucuuuuugcuu

SEQ ID NO: 1901083 - RNA, 13 nt, Human
auucuuccucccu

SEQ ID NO: 1901084 - RNA, 17 nt, Human
auucuuacaaacaugug

SEQ ID NO: 1901085 - RNA, 16 nt, Human
auucuucccauucucc

SEQ ID NO: 1901086 - RNA, 17 nt, Human
auucuucccauucucca

SEQ ID NO: 1901087 - RNA, 18 nt, Human
auucuucccauucuccau

SEQ ID NO: 1901088 - RNA, 14 nt, Human
auucuuaaauaugu

SEQ ID NO: 1901089 - RNA, 21 nt, Human
auucuuacaaacaugugguua

SEQ ID NO: 1901090 - RNA, 16 nt, Human
auucuuacaaacaugu

SEQ ID NO: 1901091 - RNA, 21 nt, Human
auucuuaagacuugcauuuaa

SEQ ID NO: 1901092 - RNA, 16 nt, Human
auuauuauucuucaua

SEQ ID NO: 1901093 - RNA, 15 nt, Human
auuauuuauuuauuu

SEQ ID NO: 1901094 - RNA, 23 nt, Human
auucacaguucuuugggccagac

SEQ ID NO: 1901095 - RNA, 14 nt, Human
auuaucaagcuaau

SEQ ID NO: 1901096 - RNA, 13 nt, Human
auuaucaagcuaa

SEQ ID NO: 1901097 - RNA, 19 nt, Human
auuaucuaaaaucugcuag

SEQ ID NO: 1901098 - RNA, 22 nt, Human
auuaucuauacauaucuuuauu

SEQ ID NO: 1901099 - RNA, 20 nt, Human
auuaucuauacauaucuuua

SEQ ID NO: 1901100 - RNA, 14 nt, Human
auuaucuauacaua

SEQ ID NO: 1901101 - RNA, 19 nt, Human
auuaucuauacauaucuuu

SEQ ID NO: 1901102 - RNA, 14 nt, Human
auuaucuaauuuau

SEQ ID NO: 1901103 - RNA, 13 nt, Human
auuaucuaauuua

SEQ ID NO: 1901104 - RNA, 18 nt, Human
auuaucuagauacuguau

SEQ ID NO: 1901105 - RNA, 14 nt, Human
auuaucuagauacu

SEQ ID NO: 1901106 - RNA, 15 nt, Human
auuauuauucuucau

SEQ ID NO: 1901107 - RNA, 15 nt, Human
auuauuauuuggccc

SEQ ID NO: 1901108 - RNA, 11 nt, Human
auucagacagc

SEQ ID NO: 1901109 - RNA, 12 nt, Human
auucagacagcu

SEQ ID NO: 1901110 - RNA, 13 nt, Human
auucagacagcug

SEQ ID NO: 1901111 - RNA, 13 nt, Human
auucacauuguau

SEQ ID NO: 1901112 - RNA, 20 nt, Human
auucacauuguauucagagu

SEQ ID NO: 1901113 - RNA, 18 nt, Human
auucagacagcugccugg

SEQ ID NO: 1901114 - RNA, 12 nt, Human
auucaggaagcu

SEQ ID NO: 1901115 - RNA, 14 nt, Human
auucagacagcugc

SEQ ID NO: 1901116 - RNA, 15 nt, Human
auucagacagcugcc

SEQ ID NO: 1901117 - RNA, 16 nt, Human
auucagacagcugccu

SEQ ID NO: 1901118 - RNA, 17 nt, Human
auucagacagcugccug

SEQ ID NO: 1901119 - RNA, 19 nt, Human
auucuaacuuuuuugcuau

SEQ ID NO: 1901120 - RNA, 17 nt, Human
auucuaaugauggccca

SEQ ID NO: 1901121 - RNA, 18 nt, Human
auucuaaugauggcccau

SEQ ID NO: 1901122 - RNA, 23 nt, Human
auucuaaugauggcccauucuac

SEQ ID NO: 1901123 - RNA, 21 nt, Human
auucuaaugauggcccauucu

SEQ ID NO: 1901124 - RNA, 19 nt, Human
auuccagagcguguaguga

SEQ ID NO: 1901125 - RNA, 12 nt, Human
auuccagaggaa

SEQ ID NO: 1901126 - RNA, 13 nt, Human
auucaggaagcuc

SEQ ID NO: 1901127 - RNA, 21 nt, Human
auucccaggaguucugcucau

SEQ ID NO: 1901128 - RNA, 11 nt, Human
auucccaggag

SEQ ID NO: 1901129 - RNA, 12 nt, Human
auucccaggagu

SEQ ID NO: 1901130 - RNA, 18 nt, Human
auucccaggaguucugcu

SEQ ID NO: 1901131 - RNA, 20 nt, Human
auucccaggaguucugcuca

SEQ ID NO: 1901132 - RNA, 15 nt, Human
auuauauuuacaaau

SEQ ID NO: 1901133 - RNA, 14 nt, Human
auuauauuaugaag

SEQ ID NO: 1901134 - RNA, 11 nt, Human
uuuguggccaa

SEQ ID NO: 1901135 - RNA, 18 nt, Human
uuuguggccaaggagcug

SEQ ID NO: 1901136 - RNA, 20 nt, Human
uuuguggccaaggagcugcu

SEQ ID NO: 1901137 - RNA, 21 nt, Human
uuuguggccaaggagcugcua

SEQ ID NO: 1901138 - RNA, 22 nt, Human
uuuguggccaaggagcugcuau

SEQ ID NO: 1901139 - RNA, 22 nt, Human
auuauaauuuuuuucaauauuu

SEQ ID NO: 1901140 - RNA, 23 nt, Human
auuauaauuuuuuucaauauuua

SEQ ID NO: 1901141 - RNA, 19 nt, Human
auucagacagcugccuggg

SEQ ID NO: 1901142 - RNA, 20 nt, Human
auuuuuuaauuauuauuuau

SEQ ID NO: 1901143 - RNA, 15 nt, Human
auuuuuuaauuauua

SEQ ID NO: 1901144 - RNA, 18 nt, Human
auuuuuuguuaaaugauu

SEQ ID NO: 1901145 - RNA, 21 nt, Human
auuuuuugguuaagcuuugac

SEQ ID NO: 1901146 - RNA, 18 nt, Human
auuuuuuuaaaauguuaa

SEQ ID NO: 1901147 - RNA, 17 nt, Human
auuuuuuaaaacaagaa

SEQ ID NO: 1901148 - RNA, 15 nt, Human
auuuuuuaaaacaag

SEQ ID NO: 1901149 - RNA, 12 nt, Human
auuuuuuaaagc

SEQ ID NO: 1901150 - RNA, 23 nt, Human
auuuuuuaaaaaucuauauuuug

SEQ ID NO: 1901151 - RNA, 15 nt, Human
auuuuuuaaaaacua

SEQ ID NO: 1901152 - RNA, 21 nt, Human
auuuuuuaaccccgucaacaa

SEQ ID NO: 1901153 - RNA, 23 nt, Human
auuuuuuaaccccgucaacaaau

SEQ ID NO: 1901154 - RNA, 22 nt, Human
auuuuuuaaccccgucaacaaa

SEQ ID NO: 1901155 - RNA, 14 nt, Human
auuuuuuaaaugca

SEQ ID NO: 1901156 - RNA, 13 nt, Human
auuuuuuaaaugc

SEQ ID NO: 1901157 - RNA, 22 nt, Human
auuuuugugauuuugugauuga

SEQ ID NO: 1901158 - RNA, 14 nt, Human
auuuuugucuugug

SEQ ID NO: 1901159 - RNA, 19 nt, Human
auuuuuguagagccagggu

SEQ ID NO: 1901160 - RNA, 12 nt, Human
auuuuuguaauu

SEQ ID NO: 1901161 - RNA, 21 nt, Human
auuuuguuuuugucuuaaaaa

SEQ ID NO: 1901162 - RNA, 16 nt, Human
auuuuucaauaaagca

SEQ ID NO: 1901163 - RNA, 17 nt, Human
auuuuucaauaaagcau

SEQ ID NO: 1901164 - RNA, 21 nt, Human
auuuuucaauaaagcauuuau

SEQ ID NO: 1901165 - RNA, 21 nt, Human
auuuuucuuagggaaggauac

SEQ ID NO: 1901166 - RNA, 12 nt, Human
auuuuucucaug

SEQ ID NO: 1901167 - RNA, 16 nt, Human
auuuuucagauauaaa

SEQ ID NO: 1901168 - RNA, 20 nt, Human
auuuuucagaccuuuuaacu

SEQ ID NO: 1901169 - RNA, 22 nt, Human
auuuuucuuagggaaggauaca

SEQ ID NO: 1901170 - RNA, 15 nt, Human
auuuucuauaauuua

SEQ ID NO: 1901171 - RNA, 14 nt, Human
auuuucuauaauuu

SEQ ID NO: 1901172 - RNA, 16 nt, Human
auuuuccugccaggca

SEQ ID NO: 1901173 - RNA, 19 nt, Human
auuuucccuauuagagaag

SEQ ID NO: 1901174 - RNA, 15 nt, Human
auuuuaauaaacacu

SEQ ID NO: 1901175 - RNA, 19 nt, Human
auuuuaagacguguuugug

SEQ ID NO: 1901176 - RNA, 16 nt, Human
auuuuaauaaacacuc

SEQ ID NO: 1901177 - RNA, 17 nt, Human
auuuuaauaaacacucu

SEQ ID NO: 1901178 - RNA, 15 nt, Human
auuuuccaugaaaau

SEQ ID NO: 1901179 - RNA, 19 nt, Human
auuuugauccaagcugguc

SEQ ID NO: 1901180 - RNA, 13 nt, Human
auuuugaucuuca

SEQ ID NO: 1901181 - RNA, 16 nt, Human
auuuugaucuucaaca

SEQ ID NO: 1901182 - RNA, 17 nt, Human
auuuugauguuuuaagg

SEQ ID NO: 1901183 - RNA, 15 nt, Human
auuuugauguuuuaa

SEQ ID NO: 1901184 - RNA, 17 nt, Human
auuuugaucuucaacaa

SEQ ID NO: 1901185 - RNA, 19 nt, Human
auuuugaucuucaacaaau

SEQ ID NO: 1901186 - RNA, 20 nt, Human
auuuugaucuucaacaaauu

SEQ ID NO: 1901187 - RNA, 23 nt, Human
auuuugcccuugacaaagucaag

SEQ ID NO: 1901188 - RNA, 15 nt, Human
auuuugcccuugaca

SEQ ID NO: 1901189 - RNA, 15 nt, Human
auuuugcauaauaaa

SEQ ID NO: 1901190 - RNA, 19 nt, Human
auuuugcauaauaaaugcu

SEQ ID NO: 1901191 - RNA, 21 nt, Human
auuuugcugucccuuuuccuu

SEQ ID NO: 1901192 - RNA, 20 nt, Human
auuuugcuaaaugugaauga

SEQ ID NO: 1901193 - RNA, 17 nt, Human
auuuuguguuuaggaac

SEQ ID NO: 1901194 - RNA, 16 nt, Human
auuuuguuucagugca

SEQ ID NO: 1901195 - RNA, 23 nt, Human
auuuugucauauaagauucauau

SEQ ID NO: 1901196 - RNA, 12 nt, Human
auuuugucuuua

SEQ ID NO: 1901197 - RNA, 19 nt, Human
auuuugugcccccauguaa

SEQ ID NO: 1901198 - RNA, 18 nt, Human
auuuuguauauuuguauu

SEQ ID NO: 1901199 - RNA, 19 nt, Human
auuuuguaacuuccaugug

SEQ ID NO: 1901200 - RNA, 17 nt, Human
auuuuguaacaaaugaa

SEQ ID NO: 1901201 - RNA, 20 nt, Human
auuuugcuuugugauuuuug

SEQ ID NO: 1901202 - RNA, 18 nt, Human
auuuugcuuugugauuuu

SEQ ID NO: 1901203 - RNA, 20 nt, Human
auuuugcuguagaagauggc

SEQ ID NO: 1901204 - RNA, 12 nt, Human
auuuugcuguau

SEQ ID NO: 1901205 - RNA, 14 nt, Human
auuuugcuguauau

SEQ ID NO: 1901206 - RNA, 12 nt, Human
auuuugcuuugu

SEQ ID NO: 1901207 - RNA, 14 nt, Human
auuuuggaaaauaa

SEQ ID NO: 1901208 - RNA, 19 nt, Human
auuuuggaaaauaaauuau

SEQ ID NO: 1901209 - RNA, 20 nt, Human
auuuuggaaaauaaauuauu

SEQ ID NO: 1901210 - RNA, 19 nt, Human
auuuaaagaacacccuaua

SEQ ID NO: 1901211 - RNA, 21 nt, Human
auuguuuggggaugagaaagg

SEQ ID NO: 1901212 - RNA, 20 nt, Human
auuguuugucugucuucaua

SEQ ID NO: 1901213 - RNA, 16 nt, Human
auuguuugucuuuaac

SEQ ID NO: 1901214 - RNA, 13 nt, Human
auuuaaaagauac

SEQ ID NO: 1901215 - RNA, 21 nt, Human
auuguuugucuuuaacuguca

SEQ ID NO: 1901216 - RNA, 17 nt, Human
auuuaaaagauacaguu

SEQ ID NO: 1901217 - RNA, 16 nt, Human
auuuaaaagauacagu

SEQ ID NO: 1901218 - RNA, 14 nt, Human
auuuaaaagauaca

SEQ ID NO: 1901219 - RNA, 21 nt, Human
auuguacaguuuuuauugcuu

SEQ ID NO: 1901220 - RNA, 12 nt, Human
auuguaccucuc

SEQ ID NO: 1901221 - RNA, 18 nt, Human
auuguaccucucuuauag

SEQ ID NO: 1901222 - RNA, 19 nt, Human
auuguaccucucuuauaga

SEQ ID NO: 1901223 - RNA, 15 nt, Human
auuguacaguuuuua

SEQ ID NO: 1901224 - RNA, 14 nt, Human
auuguacaguuuuu

SEQ ID NO: 1901225 - RNA, 23 nt, Human
auugucaaaguggugagaggcau

SEQ ID NO: 1901226 - RNA, 16 nt, Human
auugucaaagugguga

SEQ ID NO: 1901227 - RNA, 14 nt, Human
auugugggaagggg

SEQ ID NO: 1901228 - RNA, 13 nt, Human
auugugggaaggg

SEQ ID NO: 1901229 - RNA, 12 nt, Human
auugucccucug

SEQ ID NO: 1901230 - RNA, 17 nt, Human
auugucccucugcccca

SEQ ID NO: 1901231 - RNA, 23 nt, Human
auugucccucugccccauccucc

SEQ ID NO: 1901232 - RNA, 19 nt, Human
auuggacaguaaaauccac

SEQ ID NO: 1901233 - RNA, 21 nt, Human
auugauuuccguuaaaauacc

SEQ ID NO: 1901234 - RNA, 12 nt, Human
auugauuagaaa

SEQ ID NO: 1901235 - RNA, 16 nt, Human
auuggauuugucuuug

SEQ ID NO: 1901236 - RNA, 22 nt, Human
auuggauucugagagcugugca

SEQ ID NO: 1901237 - RNA, 19 nt, Human
auuggauucugagagcugu

SEQ ID NO: 1901238 - RNA, 20 nt, Human
auuggcaccuaauccaggca

SEQ ID NO: 1901239 - RNA, 18 nt, Human
auuggguuccauucucac

SEQ ID NO: 1901240 - RNA, 23 nt, Human
auuggguggggggcuucauacac

SEQ ID NO: 1901241 - RNA, 20 nt, Human
auugggaaggggacccccgc

SEQ ID NO: 1901242 - RNA, 16 nt, Human
auuugaaaauuuugau

SEQ ID NO: 1901243 - RNA, 18 nt, Human
auuugaaacacuuugcau

SEQ ID NO: 1901244 - RNA, 20 nt, Human
auuucuuccacaagagccca

SEQ ID NO: 1901245 - RNA, 23 nt, Human
auuucuuccacaagagcccaggc

SEQ ID NO: 1901246 - RNA, 23 nt, Human
auuucuaggacugaauuaugaaa

SEQ ID NO: 1901247 - RNA, 20 nt, Human
auuucuaggacugaauuaug

SEQ ID NO: 1901248 - RNA, 23 nt, Human
auuucccugaaggaaccaaagcg

SEQ ID NO: 1901249 - RNA, 17 nt, Human
auuucccugaaggaacc

SEQ ID NO: 1901250 - RNA, 18 nt, Human
auuucuaggacugaauua

SEQ ID NO: 1901251 - RNA, 17 nt, Human
auuucuaggacugaauu

SEQ ID NO: 1901252 - RNA, 12 nt, Human
auuuauuuaaau

SEQ ID NO: 1901253 - RNA, 14 nt, Human
auuuauuuaaauuu

SEQ ID NO: 1901254 - RNA, 22 nt, Human
auuuccacucaggucuguuuuc

SEQ ID NO: 1901255 - RNA, 12 nt, Human
auuucccaggac

SEQ ID NO: 1901256 - RNA, 13 nt, Human
auuucccaggacc

SEQ ID NO: 1901257 - RNA, 14 nt, Human
auuucccaggaccc

SEQ ID NO: 1901258 - RNA, 16 nt, Human
auuucccaggacccug

SEQ ID NO: 1901259 - RNA, 19 nt, Human
auuucccaggacccugaag

SEQ ID NO: 1901260 - RNA, 21 nt, Human
auuucccauccccugugggaa

SEQ ID NO: 1901261 - RNA, 22 nt, Human
auuuccccuuuugcauucuccc

SEQ ID NO: 1901262 - RNA, 21 nt, Human
auuuccccuuuugcauucucc

SEQ ID NO: 1901263 - RNA, 16 nt, Human
auuuccacucaggucu

SEQ ID NO: 1901264 - RNA, 16 nt, Human
auuuccaagagcugag

SEQ ID NO: 1901265 - RNA, 19 nt, Human
auuucccaaagcagugcau

SEQ ID NO: 1901266 - RNA, 15 nt, Human
auuuccaagagcuga

SEQ ID NO: 1901267 - RNA, 13 nt, Human
auuugucaacaaa

SEQ ID NO: 1901268 - RNA, 15 nt, Human
auuugucaacaaagu

SEQ ID NO: 1901269 - RNA, 17 nt, Human
auuuggcuucuguuguc

SEQ ID NO: 1901270 - RNA, 14 nt, Human
auuugggaagugaa

SEQ ID NO: 1901271 - RNA, 18 nt, Human
auuugggaagugaagacu

SEQ ID NO: 1901272 - RNA, 19 nt, Human
auuuguaaauuuaugugau

SEQ ID NO: 1901273 - RNA, 18 nt, Human
auuuguaaauuuauguga

SEQ ID NO: 1901274 - RNA, 19 nt, Human
auuugggccugcuccagac

SEQ ID NO: 1901275 - RNA, 21 nt, Human
auuugggccugcuccagaccu

SEQ ID NO: 1901276 - RNA, 22 nt, Human
auuugggccugcuccagaccug

SEQ ID NO: 1901277 - RNA, 23 nt, Human
auuugggccugcuccagaccuga

SEQ ID NO: 1901278 - RNA, 18 nt, Human
auuugugaagguggaaau

SEQ ID NO: 1901279 - RNA, 21 nt, Human
auuugugaagguggaaauaaa

SEQ ID NO: 1901280 - RNA, 20 nt, Human
auuuguccucuuuacaugaa

SEQ ID NO: 1901281 - RNA, 22 nt, Human
auuuuaaaaauacagauagaua

SEQ ID NO: 1901282 - RNA, 20 nt, Human
auuuuaaaagaugcaaugua

SEQ ID NO: 1901283 - RNA, 20 nt, Human
auuuuaaaagauaaauauua

SEQ ID NO: 1901284 - RNA, 20 nt, Human
auuuuaagacguguuugugu

SEQ ID NO: 1901285 - RNA, 19 nt, Human
cacccacaugugacacaua

SEQ ID NO: 1901286 - RNA, 13 nt, Human
cacccacauguga

SEQ ID NO: 1901287 - RNA, 12 nt, Human
cacccacaugug

SEQ ID NO: 1901288 - RNA, 21 nt, Human
cacccacaugugacacauaug

SEQ ID NO: 1901289 - RNA, 14 nt, Human
caccagacacccag

SEQ ID NO: 1901290 - RNA, 19 nt, Human
cacccaagggccuggccug

SEQ ID NO: 1901291 - RNA, 20 nt, Human
cacccaagggccuggccuga

SEQ ID NO: 1901292 - RNA, 21 nt, Human
cacccaagggccuggccugag

SEQ ID NO: 1901293 - RNA, 23 nt, Human
cacccaagggccuggccugagcu

SEQ ID NO: 1901294 - RNA, 16 nt, Human
cacccaagggccuggc

SEQ ID NO: 1901295 - RNA, 17 nt, Human
caccagaagcccagaau

SEQ ID NO: 1901296 - RNA, 16 nt, Human
caccagaagcccagaa

SEQ ID NO: 1901297 - RNA, 17 nt, Human
cacccaagggccuggcc

SEQ ID NO: 1901298 - RNA, 18 nt, Human
cacccaagggccuggccu

SEQ ID NO: 1901299 - RNA, 15 nt, Human
caccagaagcccaga

SEQ ID NO: 1901300 - RNA, 14 nt, Human
caccagaagcccag

SEQ ID NO: 1901301 - RNA, 13 nt, Human
caccagaagccca

SEQ ID NO: 1901302 - RNA, 22 nt, Human
cacccaccaucaugucuggcua

SEQ ID NO: 1901303 - RNA, 20 nt, Human
cacccaccaucaugucuggc

SEQ ID NO: 1901304 - RNA, 13 nt, Human
cacccacccuggg

SEQ ID NO: 1901305 - RNA, 14 nt, Human
cacccacccuggga

SEQ ID NO: 1901306 - RNA, 16 nt, Human
cacccaccucagccuc

SEQ ID NO: 1901307 - RNA, 14 nt, Human
cacccaccucagcc

SEQ ID NO: 1901308 - RNA, 13 nt, Human
cacccaccucagc

SEQ ID NO: 1901309 - RNA, 12 nt, Human
cacccaccucag

SEQ ID NO: 1901310 - RNA, 12 nt, Human
caccccagcccc

SEQ ID NO: 1901311 - RNA, 13 nt, Human
caccccagcccca

SEQ ID NO: 1901312 - RNA, 22 nt, Human
cacccccacccaagggccuggc

SEQ ID NO: 1901313 - RNA, 16 nt, Human
cacccccuccccgccc

SEQ ID NO: 1901314 - RNA, 14 nt, Human
caccccggccaccu

SEQ ID NO: 1901315 - RNA, 15 nt, Human
caccccggccaccug

SEQ ID NO: 1901316 - RNA, 16 nt, Human
caccccggccaccugc

SEQ ID NO: 1901317 - RNA, 17 nt, Human
caccccggccaccugcg

SEQ ID NO: 1901318 - RNA, 15 nt, Human
cacaugugacacaua

SEQ ID NO: 1901319 - RNA, 17 nt, Human
cacaugugcacaugcac

SEQ ID NO: 1901320 - RNA, 13 nt, Human
cacaugugacaca

SEQ ID NO: 1901321 - RNA, 20 nt, Human
cacaugucuuguacaugugu

SEQ ID NO: 1901322 - RNA, 15 nt, Human
cacaugucuuguaca

SEQ ID NO: 1901323 - RNA, 15 nt, Human
cacaugugcacaugc

SEQ ID NO: 1901324 - RNA, 14 nt, Human
cacaugugcacaug

SEQ ID NO: 1901325 - RNA, 16 nt, Human
cacauuccugaugcuu

SEQ ID NO: 1901326 - RNA, 16 nt, Human
cacauuccugaacagg

SEQ ID NO: 1901327 - RNA, 17 nt, Human
cacauuagacuauccau

SEQ ID NO: 1901328 - RNA, 23 nt, Human
cacauuaagccuuccacacucac

SEQ ID NO: 1901329 - RNA, 15 nt, Human
cacauggccuaugca

SEQ ID NO: 1901330 - RNA, 18 nt, Human
cacauggcuauguuuuag

SEQ ID NO: 1901331 - RNA, 19 nt, Human
cacaugccucucucaggcc

SEQ ID NO: 1901332 - RNA, 13 nt, Human
cacaucaaagagg

SEQ ID NO: 1901333 - RNA, 22 nt, Human
cacauggugacuuuugaaaaga

SEQ ID NO: 1901334 - RNA, 14 nt, Human
cacauaucugucau

SEQ ID NO: 1901335 - RNA, 12 nt, Human
cacauaucuguc

SEQ ID NO: 1901336 - RNA, 18 nt, Human
cacaucagcacgauuucu

SEQ ID NO: 1901337 - RNA, 19 nt, Human
cacaucagcacgauuucug

SEQ ID NO: 1901338 - RNA, 13 nt, Human
cacaugccucucu

SEQ ID NO: 1901339 - RNA, 17 nt, Human
cacaugccucucucagg

SEQ ID NO: 1901340 - RNA, 18 nt, Human
cacaugccucucucaggc

SEQ ID NO: 1901341 - RNA, 15 nt, Human
caccacgucacuuca

SEQ ID NO: 1901342 - RNA, 18 nt, Human
caccacucaaaggccaga

SEQ ID NO: 1901343 - RNA, 22 nt, Human
caccacucaaaggccagaccug

SEQ ID NO: 1901344 - RNA, 20 nt, Human
caccacuacauucuguuaau

SEQ ID NO: 1901345 - RNA, 19 nt, Human
caccacuacauucuguuaa

SEQ ID NO: 1901346 - RNA, 18 nt, Human
caccacuacauucuguua

SEQ ID NO: 1901347 - RNA, 17 nt, Human
caccacuacauucuguu

SEQ ID NO: 1901348 - RNA, 16 nt, Human
caccacuacauucugu

SEQ ID NO: 1901349 - RNA, 14 nt, Human
caccaccucuuugg

SEQ ID NO: 1901350 - RNA, 18 nt, Human
caccacaugugcacaugc

SEQ ID NO: 1901351 - RNA, 15 nt, Human
caccacaugugcaca

SEQ ID NO: 1901352 - RNA, 19 nt, Human
caccacaugugcacaugca

SEQ ID NO: 1901353 - RNA, 14 nt, Human
caccacaucuaagc

SEQ ID NO: 1901354 - RNA, 15 nt, Human
caccaagcccaguua

SEQ ID NO: 1901355 - RNA, 21 nt, Human
caccaagccuggucagcccaa

SEQ ID NO: 1901356 - RNA, 20 nt, Human
caccaagccuggucagccca

SEQ ID NO: 1901357 - RNA, 19 nt, Human
caccaagccuggucagccc

SEQ ID NO: 1901358 - RNA, 18 nt, Human
cacauuggagauguuuag

SEQ ID NO: 1901359 - RNA, 17 nt, Human
cacauuggaaacaaguc

SEQ ID NO: 1901360 - RNA, 17 nt, Human
caccacacccagcccac

SEQ ID NO: 1901361 - RNA, 15 nt, Human
caccacacccagccc

SEQ ID NO: 1901362 - RNA, 13 nt, Human
caccacacccagc

SEQ ID NO: 1901363 - RNA, 22 nt, Human
caccaagccuggucagcccaaa

SEQ ID NO: 1901364 - RNA, 12 nt, Human
cacagcagccug

SEQ ID NO: 1901365 - RNA, 20 nt, Human
cacagaugggugcuuggagg

SEQ ID NO: 1901366 - RNA, 20 nt, Human
cacagaguuguuacauuuuu

SEQ ID NO: 1901367 - RNA, 14 nt, Human
cacagaugggugcu

SEQ ID NO: 1901368 - RNA, 18 nt, Human
cacagaugggugcuugga

SEQ ID NO: 1901369 - RNA, 22 nt, Human
cacagccaacacgcaccugccu

SEQ ID NO: 1901370 - RNA, 14 nt, Human
cacagcagccuggg

SEQ ID NO: 1901371 - RNA, 15 nt, Human
cacaggaaguagagg

SEQ ID NO: 1901372 - RNA, 16 nt, Human
cacaggaucagucuga

SEQ ID NO: 1901373 - RNA, 15 nt, Human
cacaggaucagucug

SEQ ID NO: 1901374 - RNA, 12 nt, Human
cacaggaucagu

SEQ ID NO: 1901375 - RNA, 19 nt, Human
cacaggcccggcuccaggc

SEQ ID NO: 1901376 - RNA, 18 nt, Human
cacaggcccggcuccagg

SEQ ID NO: 1901377 - RNA, 17 nt, Human
cacaggcccggcuccag

SEQ ID NO: 1901378 - RNA, 16 nt, Human
cacaggcccggcucca

SEQ ID NO: 1901379 - RNA, 10 nt, Human
cacaggcagg

SEQ ID NO: 1901380 - RNA, 17 nt, Human
cacauacacacacacgc

SEQ ID NO: 1901381 - RNA, 13 nt, Human
cacauacaacaca

SEQ ID NO: 1901382 - RNA, 22 nt, Human
cacauacaacacaaagagaaaa

SEQ ID NO: 1901383 - RNA, 23 nt, Human
cacaggcccggcuccaggcuccu

SEQ ID NO: 1901384 - RNA, 20 nt, Human
cacaggcccggcuccaggcu

SEQ ID NO: 1901385 - RNA, 18 nt, Human
cacagugagucgaggaca

SEQ ID NO: 1901386 - RNA, 20 nt, Human
cacagugagucgaggacagg

SEQ ID NO: 1901387 - RNA, 19 nt, Human
cacagugagucgaggacag

SEQ ID NO: 1901388 - RNA, 23 nt, Human
cacaguucuuugggccagacaug

SEQ ID NO: 1901389 - RNA, 13 nt, Human
cacaggcccuccc

SEQ ID NO: 1901390 - RNA, 22 nt, Human
cacaaagaugggugaaggcugg

SEQ ID NO: 1901391 - RNA, 19 nt, Human
cacaaacuuuuauacucuu

SEQ ID NO: 1901392 - RNA, 18 nt, Human
cacaaagagaaaaagaaa

SEQ ID NO: 1901393 - RNA, 15 nt, Human
cacaaacuguaaaua

SEQ ID NO: 1901394 - RNA, 23 nt, Human
cacaaacuguaaauaaaaagaaa

SEQ ID NO: 1901395 - RNA, 14 nt, Human
cacaaacuguaaau

SEQ ID NO: 1901396 - RNA, 16 nt, Human
cacaaaacccagaccu

SEQ ID NO: 1901397 - RNA, 18 nt, Human
cacaaaaguuucucuuuu

SEQ ID NO: 1901398 - RNA, 16 nt, Human
cacaaaaguuucucuu

SEQ ID NO: 1901399 - RNA, 12 nt, Human
cacaaaaaagaa

SEQ ID NO: 1901400 - RNA, 13 nt, Human
cacaaaaaagaag

SEQ ID NO: 1901401 - RNA, 21 nt, Human
cacaaauucugucucuggauu

SEQ ID NO: 1901402 - RNA, 20 nt, Human
cacaaagagaaaaagaaaug

SEQ ID NO: 1901403 - RNA, 11 nt, Human
cacaaagccca

SEQ ID NO: 1901404 - RNA, 12 nt, Human
cacaaagcccaa

SEQ ID NO: 1901405 - RNA, 14 nt, Human
cacaaagcccaagg

SEQ ID NO: 1901406 - RNA, 22 nt, Human
caaugccaaaaaaagacagggc

SEQ ID NO: 1901407 - RNA, 15 nt, Human
caaugucugagugaa

SEQ ID NO: 1901408 - RNA, 16 nt, Human
caaugucugagugaac

SEQ ID NO: 1901409 - RNA, 20 nt, Human
caaugucugagugaaccugu

SEQ ID NO: 1901410 - RNA, 13 nt, Human
caauucagacagg

SEQ ID NO: 1901411 - RNA, 14 nt, Human
caauucagacaggc

SEQ ID NO: 1901412 - RNA, 15 nt, Human
caauucagacaggca

SEQ ID NO: 1901413 - RNA, 23 nt, Human
caauucagacaggcaaauaaaag

SEQ ID NO: 1901414 - RNA, 21 nt, Human
caauaggaaaaacugauuuuu

SEQ ID NO: 1901415 - RNA, 15 nt, Human
caauaggcuguuccc

SEQ ID NO: 1901416 - RNA, 20 nt, Human
caauaggaaaaacugauuuu

SEQ ID NO: 1901417 - RNA, 23 nt, Human
caaugcacuuuguucuggcucuu

SEQ ID NO: 1901418 - RNA, 19 nt, Human
caaugcaaaccaucauuga

SEQ ID NO: 1901419 - RNA, 20 nt, Human
caaugcaaaccaucauugaa

SEQ ID NO: 1901420 - RNA, 17 nt, Human
caaugcaaaccaucauu

SEQ ID NO: 1901421 - RNA, 18 nt, Human
caaugcaaaccaucauug

SEQ ID NO: 1901422 - RNA, 21 nt, Human
caaugaugaaugagaaucuac

SEQ ID NO: 1901423 - RNA, 13 nt, Human
caaugaugcuauu

SEQ ID NO: 1901424 - RNA, 17 nt, Human
caaugaugcuauuugca

SEQ ID NO: 1901425 - RNA, 18 nt, Human
caaugaugcuauuugcaa

SEQ ID NO: 1901426 - RNA, 19 nt, Human
caaugaugcuauuugcaau

SEQ ID NO: 1901427 - RNA, 13 nt, Human
caaugaccuuuca

SEQ ID NO: 1901428 - RNA, 14 nt, Human
caaugaugaaugag

SEQ ID NO: 1901429 - RNA, 21 nt, Human
caaugacacagucuuggcuca

SEQ ID NO: 1901430 - RNA, 19 nt, Human
caaugacacagucuuggcu

SEQ ID NO: 1901431 - RNA, 14 nt, Human
caaugacacagucu

SEQ ID NO: 1901432 - RNA, 22 nt, Human
caaugaaugaaugaauggcuaa

SEQ ID NO: 1901433 - RNA, 19 nt, Human
caaugugaaaagaaaaaug

SEQ ID NO: 1901434 - RNA, 17 nt, Human
cacaccgggcacucaga

SEQ ID NO: 1901435 - RNA, 22 nt, Human
cacaccuguaaucccagcacuu

SEQ ID NO: 1901436 - RNA, 23 nt, Human
cacaccuuuuauugacacagaaa

SEQ ID NO: 1901437 - RNA, 22 nt, Human
cacaccuuuuauugacacagaa

SEQ ID NO: 1901438 - RNA, 13 nt, Human
cacaccagagccc

SEQ ID NO: 1901439 - RNA, 12 nt, Human
cacaccagagcc

SEQ ID NO: 1901440 - RNA, 15 nt, Human
cacaccagagcccac

SEQ ID NO: 1901441 - RNA, 16 nt, Human
cacaccacaucuaagc

SEQ ID NO: 1901442 - RNA, 13 nt, Human
cacacccagccca

SEQ ID NO: 1901443 - RNA, 22 nt, Human
cacaccaggcuugccugcaggc

SEQ ID NO: 1901444 - RNA, 21 nt, Human
cacaccaggcuugccugcagg

SEQ ID NO: 1901445 - RNA, 14 nt, Human
cacacaccagagcc

SEQ ID NO: 1901446 - RNA, 14 nt, Human
cacaaccugaaccu

SEQ ID NO: 1901447 - RNA, 12 nt, Human
cacacagcucug

SEQ ID NO: 1901448 - RNA, 19 nt, Human
cacacagaggcugccucuc

SEQ ID NO: 1901449 - RNA, 22 nt, Human
cacacagacuguugucccugca

SEQ ID NO: 1901450 - RNA, 20 nt, Human
cacacagacucauauuacug

SEQ ID NO: 1901451 - RNA, 15 nt, Human
cacacagacuguugu

SEQ ID NO: 1901452 - RNA, 18 nt, Human
cacagacucaaaugcuca

SEQ ID NO: 1901453 - RNA, 14 nt, Human
cacagacucauauu

SEQ ID NO: 1901454 - RNA, 22 nt, Human
cacagacuguugucccugcacu

SEQ ID NO: 1901455 - RNA, 23 nt, Human
cacagacuguugucccugcacuc

SEQ ID NO: 1901456 - RNA, 17 nt, Human
cacagaguuguuacauu

SEQ ID NO: 1901457 - RNA, 16 nt, Human
cacagaguuguuacau

SEQ ID NO: 1901458 - RNA, 21 nt, Human
cacacuugacaucaacugcau

SEQ ID NO: 1901459 - RNA, 14 nt, Human
cacacucauccccu

SEQ ID NO: 1901460 - RNA, 14 nt, Human
cacacugaugcuua

SEQ ID NO: 1901461 - RNA, 18 nt, Human
cacacugaugcuuagaug

SEQ ID NO: 1901462 - RNA, 13 nt, Human
cacacuggacucc

SEQ ID NO: 1901463 - RNA, 19 nt, Human
cacacuggacuccggcccu

SEQ ID NO: 1901464 - RNA, 20 nt, Human
cacacuggacuccggcccuc

SEQ ID NO: 1901465 - RNA, 15 nt, Human
caaauagcauaaguu

SEQ ID NO: 1901466 - RNA, 15 nt, Human
caaauagcacuugac

SEQ ID NO: 1901467 - RNA, 12 nt, Human
caaauauauuca

SEQ ID NO: 1901468 - RNA, 23 nt, Human
caaauaaugucucugugagacuc

SEQ ID NO: 1901469 - RNA, 20 nt, Human
caaauaaugucucugugaga

SEQ ID NO: 1901470 - RNA, 16 nt, Human
caaauaaugucucugu

SEQ ID NO: 1901471 - RNA, 13 nt, Human
caaauaaugucuc

SEQ ID NO: 1901472 - RNA, 21 nt, Human
caaaggaugcccaaagaugca

SEQ ID NO: 1901473 - RNA, 22 nt, Human
caaauucugcuugcuugcuuuu

SEQ ID NO: 1901474 - RNA, 20 nt, Human
caaauguucaucaaugaaug

SEQ ID NO: 1901475 - RNA, 21 nt, Human
caaauguucaucaaugaauga

SEQ ID NO: 1901476 - RNA, 13 nt, Human
caaaucagcugcu

SEQ ID NO: 1901477 - RNA, 16 nt, Human
caaaucagcugcuacu

SEQ ID NO: 1901478 - RNA, 18 nt, Human
auuuuuuuacuaauagac

SEQ ID NO: 1901479 - RNA, 15 nt, Human
auuuuuuucaauauu

SEQ ID NO: 1901480 - RNA, 23 nt, Human
caaacuuccagugcaacacugaa

SEQ ID NO: 1901481 - RNA, 17 nt, Human
caaacuuggauuuuuga

SEQ ID NO: 1901482 - RNA, 18 nt, Human
caaacuuuuauacucuuu

SEQ ID NO: 1901483 - RNA, 19 nt, Human
caaagaggccuuuaaccau

SEQ ID NO: 1901484 - RNA, 20 nt, Human
caaagaggcugaggcuggca

SEQ ID NO: 1901485 - RNA, 22 nt, Human
caaagaggcugaggcuggcaca

SEQ ID NO: 1901486 - RNA, 18 nt, Human
caaagcuaggccuggcca

SEQ ID NO: 1901487 - RNA, 17 nt, Human
caaagcuaggccuggcc

SEQ ID NO: 1901488 - RNA, 16 nt, Human
caaagcuaggccuggc

SEQ ID NO: 1901489 - RNA, 21 nt, Human
caaagccaaagcuaggccugg

SEQ ID NO: 1901490 - RNA, 20 nt, Human
caaagccaaagcuaggccug

SEQ ID NO: 1901491 - RNA, 16 nt, Human
caaagcuuguuaagau

SEQ ID NO: 1901492 - RNA, 16 nt, Human
caaaggaguagaaaga

SEQ ID NO: 1901493 - RNA, 16 nt, Human
caaagcuuuuagaaau

SEQ ID NO: 1901494 - RNA, 20 nt, Human
caaagcuuuuagaaauacug

SEQ ID NO: 1901495 - RNA, 17 nt, Human
caagcacuaaacaaaga

SEQ ID NO: 1901496 - RNA, 18 nt, Human
caagcaccuccugccucg

SEQ ID NO: 1901497 - RNA, 16 nt, Human
caagcgugagccacug

SEQ ID NO: 1901498 - RNA, 21 nt, Human
caagccaccaacauacuccca

SEQ ID NO: 1901499 - RNA, 18 nt, Human
caagcccccccuuccacu

SEQ ID NO: 1901500 - RNA, 21 nt, Human
caagccccugcuccagaagau

SEQ ID NO: 1901501 - RNA, 16 nt, Human
caaggaagccacagcu

SEQ ID NO: 1901502 - RNA, 18 nt, Human
caagcgugagccacugca

SEQ ID NO: 1901503 - RNA, 17 nt, Human
caagcgugagccacugc

SEQ ID NO: 1901504 - RNA, 15 nt, Human
caaggaaaaacaggu

SEQ ID NO: 1901505 - RNA, 15 nt, Human
caaggauagaugcug

SEQ ID NO: 1901506 - RNA, 16 nt, Human
caaggauagaugcugg

SEQ ID NO: 1901507 - RNA, 17 nt, Human
caaggauagaugcuggc

SEQ ID NO: 1901508 - RNA, 13 nt, Human
caaggauccugag

SEQ ID NO: 1901509 - RNA, 20 nt, Human
caaggauagaugcuggccca

SEQ ID NO: 1901510 - RNA, 21 nt, Human
caaggauagaugcuggcccag

SEQ ID NO: 1901511 - RNA, 22 nt, Human
caaggauagaugcuggcccagg

SEQ ID NO: 1901512 - RNA, 23 nt, Human
caaggauagaugcuggcccaggg

SEQ ID NO: 1901513 - RNA, 21 nt, Human
caaggaugaucuaggaagacu

SEQ ID NO: 1901514 - RNA, 17 nt, Human
caagugauucuccugcc

SEQ ID NO: 1901515 - RNA, 16 nt, Human
caagugauucuccugc

SEQ ID NO: 1901516 - RNA, 19 nt, Human
caagugaaaaaggaggaag

SEQ ID NO: 1901517 - RNA, 22 nt, Human
caagugauucuccugccucagc

SEQ ID NO: 1901518 - RNA, 21 nt, Human
caagugauucuccugccucag

SEQ ID NO: 1901519 - RNA, 14 nt, Human
caagugauucuccu

SEQ ID NO: 1901520 - RNA, 22 nt, Human
caagugugguagagugugccug

SEQ ID NO: 1901521 - RNA, 18 nt, Human
caaguggugguaacccug

SEQ ID NO: 1901522 - RNA, 19 nt, Human
caaguggugguaacccugg

SEQ ID NO: 1901523 - RNA, 20 nt, Human
caaguggugguaacccuggu

SEQ ID NO: 1901524 - RNA, 22 nt, Human
caaguggugguaacccuggugg

SEQ ID NO: 1901525 - RNA, 15 nt, Human
caaggauugcuacug

SEQ ID NO: 1901526 - RNA, 19 nt, Human
caagggccuggccugagcu

SEQ ID NO: 1901527 - RNA, 12 nt, Human
caaggugggagg

SEQ ID NO: 1901528 - RNA, 23 nt, Human
caaggugggaggauugcuugagc

SEQ ID NO: 1901529 - RNA, 14 nt, Human
caaauuuacagaga

SEQ ID NO: 1901530 - RNA, 23 nt, Human
caaauugugugugcucugcuuca

SEQ ID NO: 1901531 - RNA, 15 nt, Human
caaauucugucucug

SEQ ID NO: 1901532 - RNA, 24 nt, Human
caacaggcugggcuucaguggcag

SEQ ID NO: 1901533 - RNA, 23 nt, Human
caacaggcugggcuucaguggca

SEQ ID NO: 1901534 - RNA, 15 nt, Human
caaauuuacagagac

SEQ ID NO: 1901535 - RNA, 22 nt, Human
caacaucuuggucagauuugaa

SEQ ID NO: 1901536 - RNA, 19 nt, Human
caacagguuuuccugaaga

SEQ ID NO: 1901537 - RNA, 18 nt, Human
caacaggguuuuuuucca

SEQ ID NO: 1901538 - RNA, 15 nt, Human
caacagguuuuccug

SEQ ID NO: 1901539 - RNA, 19 nt, Human
caaccccuucgcuccugug

SEQ ID NO: 1901540 - RNA, 18 nt, Human
caaccccuucgcuccugu

SEQ ID NO: 1901541 - RNA, 21 nt, Human
caaccccuucgcuccuguguc

SEQ ID NO: 1901542 - RNA, 22 nt, Human
caaccacauacaacacaaagag

SEQ ID NO: 1901543 - RNA, 23 nt, Human
caacauguauaauauuuuuaauu

SEQ ID NO: 1901544 - RNA, 19 nt, Human
caacauguauaauauuuuu

SEQ ID NO: 1901545 - RNA, 18 nt, Human
caacauguauaauauuuu

SEQ ID NO: 1901546 - RNA, 17 nt, Human
caacauguauaauauuu

SEQ ID NO: 1901547 - RNA, 14 nt, Human
caacauucuuugca

SEQ ID NO: 1901548 - RNA, 13 nt, Human
caacauguauaau

SEQ ID NO: 1901549 - RNA, 18 nt, Human
caacauggugaaaccccg

SEQ ID NO: 1901550 - RNA, 13 nt, Human
caacaucuuuucu

SEQ ID NO: 1901551 - RNA, 14 nt, Human
caacaucugagugc

SEQ ID NO: 1901552 - RNA, 11 nt, Human
caacuuuguau

SEQ ID NO: 1901553 - RNA, 12 nt, Human
caacuuuguaua

SEQ ID NO: 1901554 - RNA, 16 nt, Human
caacuuuaagaggaca

SEQ ID NO: 1901555 - RNA, 16 nt, Human
caacugcauuggcuuu

SEQ ID NO: 1901556 - RNA, 20 nt, Human
caacucuccuccagagucag

SEQ ID NO: 1901557 - RNA, 21 nt, Human
caacucugaaggguaauuaua

SEQ ID NO: 1901558 - RNA, 21 nt, Human
caacugccucgaaacacagaa

SEQ ID NO: 1901559 - RNA, 23 nt, Human
caacugccucgaaacacagaaac

SEQ ID NO: 1901560 - RNA, 15 nt, Human
caacuuaacaugaaa

SEQ ID NO: 1901561 - RNA, 12 nt, Human
caacccucauca

SEQ ID NO: 1901562 - RNA, 15 nt, Human
caacccucaucacca

SEQ ID NO: 1901563 - RNA, 17 nt, Human
caacccuucccucaccu

SEQ ID NO: 1901564 - RNA, 18 nt, Human
caacccuucccucaccuu

SEQ ID NO: 1901565 - RNA, 10 nt, Human
caacccuucu

SEQ ID NO: 1901566 - RNA, 20 nt, Human
caacccuucuccucuuguaa

SEQ ID NO: 1901567 - RNA, 21 nt, Human
caacccuucuccucuuguaaa

SEQ ID NO: 1901568 - RNA, 23 nt, Human
caacccuucuccucuuguaaaua

SEQ ID NO: 1901569 - RNA, 16 nt, Human
caaccucuucuggcuc

SEQ ID NO: 1901570 - RNA, 19 nt, Human
caacucuccuccagaguca

SEQ ID NO: 1901571 - RNA, 16 nt, Human
caaccugauugugucu

SEQ ID NO: 1901572 - RNA, 13 nt, Human
caaccucuuggcc

SEQ ID NO: 1901573 - RNA, 15 nt, Human
caaccucuuggccug

SEQ ID NO: 1901574 - RNA, 17 nt, Human
caaccucuucuggcuca

SEQ ID NO: 1901575 - RNA, 18 nt, Human
caaccucuucuggcucaa

SEQ ID NO: 1901576 - RNA, 16 nt, Human
caaccugaaccuagga

SEQ ID NO: 1901577 - RNA, 12 nt, Human
caaccugaaccu

SEQ ID NO: 1901578 - RNA, 13 nt, Human
caaccugaaccua

SEQ ID NO: 1901579 - RNA, 16 nt, Human
cccacaugugacacau

SEQ ID NO: 1901580 - RNA, 15 nt, Human
cccaccgugggcagg

SEQ ID NO: 1901581 - RNA, 17 nt, Human
cccaccgugggcaggga

SEQ ID NO: 1901582 - RNA, 15 nt, Human
cccaccucagccucc

SEQ ID NO: 1901583 - RNA, 14 nt, Human
cccaccucagccuc

SEQ ID NO: 1901584 - RNA, 12 nt, Human
cccaccucagcc

SEQ ID NO: 1901585 - RNA, 19 nt, Human
cccaccgugggcagggagc

SEQ ID NO: 1901586 - RNA, 21 nt, Human
cccaccucagccucccaaagu

SEQ ID NO: 1901587 - RNA, 13 nt, Human
cccaccucucuca

SEQ ID NO: 1901588 - RNA, 14 nt, Human
cccaccucucucac

SEQ ID NO: 1901589 - RNA, 17 nt, Human
cccaccucucucacucc

SEQ ID NO: 1901590 - RNA, 12 nt, Human
cccaccuuggcu

SEQ ID NO: 1901591 - RNA, 19 nt, Human
cccaccucucucacuccuu

SEQ ID NO: 1901592 - RNA, 15 nt, Human
cccaccuuggcugca

SEQ ID NO: 1901593 - RNA, 14 nt, Human
cccaccuuggcugc

SEQ ID NO: 1901594 - RNA, 22 nt, Human
cccaccuuggcucaaguccucu

SEQ ID NO: 1901595 - RNA, 15 nt, Human
cccaccuuggcucaa

SEQ ID NO: 1901596 - RNA, 17 nt, Human
cccacgcccccacuggu

SEQ ID NO: 1901597 - RNA, 19 nt, Human
cccacgcccccacugguga

SEQ ID NO: 1901598 - RNA, 14 nt, Human
cccacgcuggagug

SEQ ID NO: 1901599 - RNA, 16 nt, Human
cccagaaugaggcugc

SEQ ID NO: 1901600 - RNA, 24 nt, Human
cccagaauaaacuggcagcucagc

SEQ ID NO: 1901601 - RNA, 22 nt, Human
cccagaauaaacuggcagcuca

SEQ ID NO: 1901602 - RNA, 12 nt, Human
cccacagagaca

SEQ ID NO: 1901603 - RNA, 13 nt, Human
cccacagacucaa

SEQ ID NO: 1901604 - RNA, 23 nt, Human
cccacagacucaaaugcucagac

SEQ ID NO: 1901605 - RNA, 13 nt, Human
cccacagcgcugg

SEQ ID NO: 1901606 - RNA, 13 nt, Human
cccacaggaucag

SEQ ID NO: 1901607 - RNA, 17 nt, Human
cccacaggaucagucug

SEQ ID NO: 1901608 - RNA, 23 nt, Human
cccaagggaucugguccuaccca

SEQ ID NO: 1901609 - RNA, 16 nt, Human
cccaagggccuggccu

SEQ ID NO: 1901610 - RNA, 20 nt, Human
ccauuuugcugucccuuuuc

SEQ ID NO: 1901611 - RNA, 21 nt, Human
ccauuuuguauuuuacuaaua

SEQ ID NO: 1901612 - RNA, 15 nt, Human
ccauuuuuacuguua

SEQ ID NO: 1901613 - RNA, 19 nt, Human
cccaaaacaccggguucca

SEQ ID NO: 1901614 - RNA, 12 nt, Human
cccaagggccug

SEQ ID NO: 1901615 - RNA, 14 nt, Human
cccaagggccuggc

SEQ ID NO: 1901616 - RNA, 18 nt, Human
ccauguuuuguuuacggu

SEQ ID NO: 1901617 - RNA, 15 nt, Human
ccauucugccugccc

SEQ ID NO: 1901618 - RNA, 13 nt, Human
ccauuugcuccuu

SEQ ID NO: 1901619 - RNA, 14 nt, Human
ccauucuccaccug

SEQ ID NO: 1901620 - RNA, 20 nt, Human
ccauucuacuugcucuggac

SEQ ID NO: 1901621 - RNA, 19 nt, Human
ccauucucaccuauccaca

SEQ ID NO: 1901622 - RNA, 13 nt, Human
ccauucuccacag

SEQ ID NO: 1901623 - RNA, 15 nt, Human
ccauucuccacagca

SEQ ID NO: 1901624 - RNA, 16 nt, Human
ccauucuccacagcaa

SEQ ID NO: 1901625 - RNA, 18 nt, Human
ccauucuccacagcaacc

SEQ ID NO: 1901626 - RNA, 17 nt, Human
ccauuaugaagaagaga

SEQ ID NO: 1901627 - RNA, 15 nt, Human
ccauuauguccuagu

SEQ ID NO: 1901628 - RNA, 12 nt, Human
ccauucuacuug

SEQ ID NO: 1901629 - RNA, 13 nt, Human
ccauucuacuugc

SEQ ID NO: 1901630 - RNA, 17 nt, Human
ccauucuacuugcucug

SEQ ID NO: 1901631 - RNA, 18 nt, Human
ccauucuacuugcucugg

SEQ ID NO: 1901632 - RNA, 19 nt, Human
ccauucuacuugcucugga

SEQ ID NO: 1901633 - RNA, 22 nt, Human
ccauucuacuugcucuggaccu

SEQ ID NO: 1901634 - RNA, 14 nt, Human
ccaggugcagccag

SEQ ID NO: 1901635 - RNA, 15 nt, Human
ccaggugcagccaga

SEQ ID NO: 1901636 - RNA, 14 nt, Human
ccagguagaacaca

SEQ ID NO: 1901637 - RNA, 16 nt, Human
ccaggugcagccagag

SEQ ID NO: 1901638 - RNA, 21 nt, Human
ccaggugcuaggaacacuccu

SEQ ID NO: 1901639 - RNA, 16 nt, Human
ccagguuucuaugugu

SEQ ID NO: 1901640 - RNA, 13 nt, Human
ccagguuuaagcu

SEQ ID NO: 1901641 - RNA, 22 nt, Human
ccaguaaaugggggugcauuug

SEQ ID NO: 1901642 - RNA, 21 nt, Human
ccaguaaaugggggugcauuu

SEQ ID NO: 1901643 - RNA, 20 nt, Human
ccaguaaaugggggugcauu

SEQ ID NO: 1901644 - RNA, 23 nt, Human
ccaguaaaugggggugcauuuga

SEQ ID NO: 1901645 - RNA, 13 nt, Human
ccagugaggcucu

SEQ ID NO: 1901646 - RNA, 21 nt, Human
ccagugaugcuaaagguugua

SEQ ID NO: 1901647 - RNA, 14 nt, Human
ccagugcaacacug

SEQ ID NO: 1901648 - RNA, 23 nt, Human
ccagugugacaaggauugcuacu

SEQ ID NO: 1901649 - RNA, 14 nt, Human
ccagugugacaagg

SEQ ID NO: 1901650 - RNA, 13 nt, Human
ccauaugccuggg

SEQ ID NO: 1901651 - RNA, 12 nt, Human
ccaucaagccac

SEQ ID NO: 1901652 - RNA, 15 nt, Human
ccauaugccugggca

SEQ ID NO: 1901653 - RNA, 13 nt, Human
ccaucaugucugg

SEQ ID NO: 1901654 - RNA, 12 nt, Human
ccaucauugaaa

SEQ ID NO: 1901655 - RNA, 12 nt, Human
ccaucaugucug

SEQ ID NO: 1901656 - RNA, 13 nt, Human
ccaucauccuacu

SEQ ID NO: 1901657 - RNA, 16 nt, Human
ccaucaagccaccaac

SEQ ID NO: 1901658 - RNA, 13 nt, Human
ccaucaagccacc

SEQ ID NO: 1901659 - RNA, 14 nt, Human
ccaucaagccacca

SEQ ID NO: 1901660 - RNA, 14 nt, Human
ccaucucacacaug

SEQ ID NO: 1901661 - RNA, 15 nt, Human
ccaucucacacauga

SEQ ID NO: 1901662 - RNA, 17 nt, Human
ccaucucacacaugagc

SEQ ID NO: 1901663 - RNA, 18 nt, Human
ccaucucacacaugagca

SEQ ID NO: 1901664 - RNA, 20 nt, Human
ccaucucacacaugagcauc

SEQ ID NO: 1901665 - RNA, 21 nt, Human
ccaucucacacaugagcauca

SEQ ID NO: 1901666 - RNA, 17 nt, Human
ccaucucaccuccugcu

SEQ ID NO: 1901667 - RNA, 15 nt, Human
ccaucucuccuccuu

SEQ ID NO: 1901668 - RNA, 14 nt, Human
ccaucauugaaauc

SEQ ID NO: 1901669 - RNA, 16 nt, Human
ccaucauugaaaucuu

SEQ ID NO: 1901670 - RNA, 17 nt, Human
ccaucauugaaaucuuu

SEQ ID NO: 1901671 - RNA, 18 nt, Human
ccauccugaggcuccacu

SEQ ID NO: 1901672 - RNA, 20 nt, Human
ccauccugaggcuccacuug

SEQ ID NO: 1901673 - RNA, 23 nt, Human
ccagugcccacaggaucagucug

SEQ ID NO: 1901674 - RNA, 17 nt, Human
ccagggcccccaucuca

SEQ ID NO: 1901675 - RNA, 19 nt, Human
ccagggagcugcaggggca

SEQ ID NO: 1901676 - RNA, 13 nt, Human
ccagggagcugca

SEQ ID NO: 1901677 - RNA, 15 nt, Human
ccagggagcugcagg

SEQ ID NO: 1901678 - RNA, 22 nt, Human
ccagggagccuuugguucuggc

SEQ ID NO: 1901679 - RNA, 14 nt, Human
ccagggccugcgag

SEQ ID NO: 1901680 - RNA, 13 nt, Human
ccagggccugcga

SEQ ID NO: 1901681 - RNA, 14 nt, Human
ccagggugugugcu

SEQ ID NO: 1901682 - RNA, 16 nt, Human
ccaggccccugccacc

SEQ ID NO: 1901683 - RNA, 15 nt, Human
ccaggccccugccac

SEQ ID NO: 1901684 - RNA, 14 nt, Human
ccaggccccugcca

SEQ ID NO: 1901685 - RNA, 12 nt, Human
ccaggccagagg

SEQ ID NO: 1901686 - RNA, 13 nt, Human
ccaggcccucugc

SEQ ID NO: 1901687 - RNA, 14 nt, Human
ccaggcccucugcc

SEQ ID NO: 1901688 - RNA, 23 nt, Human
ccaggccacuggccccugagauc

SEQ ID NO: 1901689 - RNA, 15 nt, Human
ccaggaggccagccu

SEQ ID NO: 1901690 - RNA, 18 nt, Human
ccaggaggccagccuuga

SEQ ID NO: 1901691 - RNA, 20 nt, Human
ccaggaggccagccuugacc

SEQ ID NO: 1901692 - RNA, 21 nt, Human
ccaggccacaagacccuugug

SEQ ID NO: 1901693 - RNA, 16 nt, Human
ccaggccacuggcccc

SEQ ID NO: 1901694 - RNA, 14 nt, Human
ccaggcuggucuca

SEQ ID NO: 1901695 - RNA, 21 nt, Human
ccaggcuuagucacugagaca

SEQ ID NO: 1901696 - RNA, 22 nt, Human
ccaggcuuagucacugagacag

SEQ ID NO: 1901697 - RNA, 23 nt, Human
ccaggcuuagucacugagacagc

SEQ ID NO: 1901698 - RNA, 21 nt, Human
ccaggcugggucgcccuggac

SEQ ID NO: 1901699 - RNA, 22 nt, Human
ccaggcugggucgcccuggacu

SEQ ID NO: 1901700 - RNA, 23 nt, Human
ccaggcugggucgcccuggacug

SEQ ID NO: 1901701 - RNA, 24 nt, Human
ccaggcugggucgcccuggacugu

SEQ ID NO: 1901702 - RNA, 12 nt, Human
ccaggcuggguc

SEQ ID NO: 1901703 - RNA, 16 nt, Human
ccaggcugggucgccc

SEQ ID NO: 1901704 - RNA, 15 nt, Human
ccaggcccucugccc

SEQ ID NO: 1901705 - RNA, 16 nt, Human
ccaggcccucugccca

SEQ ID NO: 1901706 - RNA, 23 nt, Human
ccaggcugggagagccuuccagg

SEQ ID NO: 1901707 - RNA, 14 nt, Human
ccacuguuaucaaa

SEQ ID NO: 1901708 - RNA, 16 nt, Human
ccacugugccaugugc

SEQ ID NO: 1901709 - RNA, 15 nt, Human
ccacugugccaugug

SEQ ID NO: 1901710 - RNA, 19 nt, Human
ccacugugccaugugccag

SEQ ID NO: 1901711 - RNA, 18 nt, Human
ccagaaaccuuuguuugc

SEQ ID NO: 1901712 - RNA, 22 nt, Human
ccagaagaaaauagugguguga

SEQ ID NO: 1901713 - RNA, 24 nt, Human
ccagaaacuguucccaccugcugg

SEQ ID NO: 1901714 - RNA, 19 nt, Human
ccagaacucacuggggccu

SEQ ID NO: 1901715 - RNA, 21 nt, Human
ccagaaugcuguacaucuauu

SEQ ID NO: 1901716 - RNA, 13 nt, Human
ccacuggacugac

SEQ ID NO: 1901717 - RNA, 22 nt, Human
ccacugcuuuuggucuguguga

SEQ ID NO: 1901718 - RNA, 20 nt, Human
ccacugcuuuuggucugugu

SEQ ID NO: 1901719 - RNA, 15 nt, Human
ccacugcucugguua

SEQ ID NO: 1901720 - RNA, 13 nt, Human
ccacugcucuggu

SEQ ID NO: 1901721 - RNA, 12 nt, Human
ccacugcucugg

SEQ ID NO: 1901722 - RNA, 11 nt, Human
ccacugcucug

SEQ ID NO: 1901723 - RNA, 14 nt, Human
ccacugugaagaga

SEQ ID NO: 1901724 - RNA, 15 nt, Human
ccacugugaagagaa

SEQ ID NO: 1901725 - RNA, 15 nt, Human
ccacuguccugggcc

SEQ ID NO: 1901726 - RNA, 19 nt, Human
ccacuguccugggccugca

SEQ ID NO: 1901727 - RNA, 20 nt, Human
ccacuguccugggccugcag

SEQ ID NO: 1901728 - RNA, 21 nt, Human
ccacuguccugggccugcaga

SEQ ID NO: 1901729 - RNA, 23 nt, Human
ccacuggugacaugucuuuucuu

SEQ ID NO: 1901730 - RNA, 18 nt, Human
ccacugggguccagggag

SEQ ID NO: 1901731 - RNA, 19 nt, Human
ccacugggguccagggagc

SEQ ID NO: 1901732 - RNA, 22 nt, Human
ccacugggguccagggagcagg

SEQ ID NO: 1901733 - RNA, 15 nt, Human
ccacugguucuucuu

SEQ ID NO: 1901734 - RNA, 19 nt, Human
ccacugcauaccaaccugg

SEQ ID NO: 1901735 - RNA, 18 nt, Human
ccacugcauaccaaccug

SEQ ID NO: 1901736 - RNA, 21 nt, Human
ccacugcaucguuucaucuuc

SEQ ID NO: 1901737 - RNA, 23 nt, Human
ccacugcaucguuucaucuucca

SEQ ID NO: 1901738 - RNA, 14 nt, Human
ccagaaggagacag

SEQ ID NO: 1901739 - RNA, 17 nt, Human
ccagaaggagacaggca

SEQ ID NO: 1901740 - RNA, 18 nt, Human
ccagaaggagacaggcag

SEQ ID NO: 1901741 - RNA, 16 nt, Human
ccagaaugcuguacau

SEQ ID NO: 1901742 - RNA, 17 nt, Human
ccagaaugcuguacauc

SEQ ID NO: 1901743 - RNA, 19 nt, Human
ccagacacaggcccucccu

SEQ ID NO: 1901744 - RNA, 15 nt, Human
ccagaaugaggcugc

SEQ ID NO: 1901745 - RNA, 14 nt, Human
ccagacaucaacag

SEQ ID NO: 1901746 - RNA, 14 nt, Human
ccagacaugccaca

SEQ ID NO: 1901747 - RNA, 20 nt, Human
ccagacaugccacaaggacu

SEQ ID NO: 1901748 - RNA, 22 nt, Human
ccagacacauguccaagaagcc

SEQ ID NO: 1901749 - RNA, 13 nt, Human
ccagacacccagg

SEQ ID NO: 1901750 - RNA, 15 nt, Human
ccagacacaggcccu

SEQ ID NO: 1901751 - RNA, 17 nt, Human
ccagacacauguccaag

SEQ ID NO: 1901752 - RNA, 20 nt, Human
ccagacacauguccaagaag

SEQ ID NO: 1901753 - RNA, 15 nt, Human
ccagacccggcugcg

SEQ ID NO: 1901754 - RNA, 14 nt, Human
ccagacccggcugc

SEQ ID NO: 1901755 - RNA, 16 nt, Human
ccagacccggcugcgu

SEQ ID NO: 1901756 - RNA, 13 nt, Human
ccagagauccaaa

SEQ ID NO: 1901757 - RNA, 11 nt, Human
ccagagccagg

SEQ ID NO: 1901758 - RNA, 12 nt, Human
ccagagccaggg

SEQ ID NO: 1901759 - RNA, 22 nt, Human
ccagagccaggggggugaggag

SEQ ID NO: 1901760 - RNA, 23 nt, Human
ccagagccaggggggugaggagc

SEQ ID NO: 1901761 - RNA, 12 nt, Human
ccacccugcucu

SEQ ID NO: 1901762 - RNA, 11 nt, Human
ccacccugcuc

SEQ ID NO: 1901763 - RNA, 14 nt, Human
ccaccucccugccu

SEQ ID NO: 1901764 - RNA, 16 nt, Human
ccaccucccugccucc

SEQ ID NO: 1901765 - RNA, 18 nt, Human
ccaccucccugccuccag

SEQ ID NO: 1901766 - RNA, 14 nt, Human
ccaccucucucacu

SEQ ID NO: 1901767 - RNA, 16 nt, Human
ccaccucucucacucc

SEQ ID NO: 1901768 - RNA, 19 nt, Human
ccaccucucucacuccuug

SEQ ID NO: 1901769 - RNA, 20 nt, Human
ccaccucucucacuccuuga

SEQ ID NO: 1901770 - RNA, 16 nt, Human
ccaccucucccugacc

SEQ ID NO: 1901771 - RNA, 17 nt, Human
ccaccucucccugaccc

SEQ ID NO: 1901772 - RNA, 18 nt, Human
ccaccucucccugacccu

SEQ ID NO: 1901773 - RNA, 13 nt, Human
ccaccuggccucu

SEQ ID NO: 1901774 - RNA, 18 nt, Human
ccaccuggccucugcacu

SEQ ID NO: 1901775 - RNA, 20 nt, Human
ccaccuggccucugcacucc

SEQ ID NO: 1901776 - RNA, 13 nt, Human
ccaccugccaggg

SEQ ID NO: 1901777 - RNA, 14 nt, Human
ccaccugccaggga

SEQ ID NO: 1901778 - RNA, 15 nt, Human
ccaccugccagggac

SEQ ID NO: 1901779 - RNA, 14 nt, Human
ccacccuccuuuca

SEQ ID NO: 1901780 - RNA, 17 nt, Human
ccaccccugggggcucu

SEQ ID NO: 1901781 - RNA, 20 nt, Human
ccaccccugggggcucucau

SEQ ID NO: 1901782 - RNA, 19 nt, Human
ccacccccacccaagggcc

SEQ ID NO: 1901783 - RNA, 19 nt, Human
ccacccccaggaccccuga

SEQ ID NO: 1901784 - RNA, 18 nt, Human
ccacccccaggaccccug

SEQ ID NO: 1901785 - RNA, 16 nt, Human
ccacccccaggacccc

SEQ ID NO: 1901786 - RNA, 13 nt, Human
ccaccuuggcuca

SEQ ID NO: 1901787 - RNA, 20 nt, Human
ccagccgugagugcagaccc

SEQ ID NO: 1901788 - RNA, 17 nt, Human
ccagccgagauagccaa

SEQ ID NO: 1901789 - RNA, 20 nt, Human
ccagccgagauagccaaggc

SEQ ID NO: 1901790 - RNA, 22 nt, Human
ccagccgagauagccaaggcca

SEQ ID NO: 1901791 - RNA, 19 nt, Human
ccagccccaaaacucuccu

SEQ ID NO: 1901792 - RNA, 18 nt, Human
ccagcccugaguuccuag

SEQ ID NO: 1901793 - RNA, 14 nt, Human
ccagcccugaguuc

SEQ ID NO: 1901794 - RNA, 17 nt, Human
ccagcccacuucugcca

SEQ ID NO: 1901795 - RNA, 16 nt, Human
ccagcccacuucugcc

SEQ ID NO: 1901796 - RNA, 11 nt, Human
ccagcccagag

SEQ ID NO: 1901797 - RNA, 12 nt, Human
ccagcccagaga

SEQ ID NO: 1901798 - RNA, 13 nt, Human
ccagcccagagac

SEQ ID NO: 1901799 - RNA, 14 nt, Human
ccagcccagagaca

SEQ ID NO: 1901800 - RNA, 22 nt, Human
ccagcccagagacauacuugaa

SEQ ID NO: 1901801 - RNA, 23 nt, Human
ccagcccagagacauacuugaag

SEQ ID NO: 1901802 - RNA, 19 nt, Human
ccagcaggcucucaggcca

SEQ ID NO: 1901803 - RNA, 20 nt, Human
ccagcaggcucucaggccag

SEQ ID NO: 1901804 - RNA, 21 nt, Human
ccagcaggcucucaggccagc

SEQ ID NO: 1901805 - RNA, 23 nt, Human
ccagcaggcucucaggccagcug

SEQ ID NO: 1901806 - RNA, 16 nt, Human
ccagccaucaaaaugc

SEQ ID NO: 1901807 - RNA, 18 nt, Human
ccagccaucaaaaugcuu

SEQ ID NO: 1901808 - RNA, 14 nt, Human
ccagccaugucugc

SEQ ID NO: 1901809 - RNA, 16 nt, Human
ccagccaugucugcau

SEQ ID NO: 1901810 - RNA, 17 nt, Human
ccagccaugucugcauu

SEQ ID NO: 1901811 - RNA, 18 nt, Human
ccagccaugucugcauuu

SEQ ID NO: 1901812 - RNA, 18 nt, Human
ccagcuccucacucaccu

SEQ ID NO: 1901813 - RNA, 20 nt, Human
ccagcuccggccuguccucc

SEQ ID NO: 1901814 - RNA, 18 nt, Human
ccagcuccggccuguccu

SEQ ID NO: 1901815 - RNA, 19 nt, Human
ccagcuccggccuguccuc

SEQ ID NO: 1901816 - RNA, 13 nt, Human
ccagcgagcccug

SEQ ID NO: 1901817 - RNA, 16 nt, Human
ccagcucccucuauuu

SEQ ID NO: 1901818 - RNA, 23 nt, Human
ccagccuugaccauucuccaccu

SEQ ID NO: 1901819 - RNA, 13 nt, Human
ccagccugggguc

SEQ ID NO: 1901820 - RNA, 13 nt, Human
ccagccuggguga

SEQ ID NO: 1901821 - RNA, 19 nt, Human
ccagccugagcgacaguga

SEQ ID NO: 1901822 - RNA, 10 nt, Human
ccagccugcc

SEQ ID NO: 1901823 - RNA, 17 nt, Human
ccagcaccaucucuccu

SEQ ID NO: 1901824 - RNA, 18 nt, Human
ccagcaccaucucuccuc

SEQ ID NO: 1901825 - RNA, 16 nt, Human
ccagcaggcucucagg

SEQ ID NO: 1901826 - RNA, 17 nt, Human
ccagcaggcucucaggc

SEQ ID NO: 1901827 - RNA, 18 nt, Human
ccagcaggcucucaggcc

SEQ ID NO: 1901828 - RNA, 19 nt, Human
ccagcaagugagagcuggg

SEQ ID NO: 1901829 - RNA, 18 nt, Human
ccagcaagugagagcugg

SEQ ID NO: 1901830 - RNA, 17 nt, Human
ccagcaagugagagcug

SEQ ID NO: 1901831 - RNA, 16 nt, Human
ccagcacacagggcag

SEQ ID NO: 1901832 - RNA, 15 nt, Human
ccagauuuugcugua

SEQ ID NO: 1901833 - RNA, 14 nt, Human
ccagauuuaaauaa

SEQ ID NO: 1901834 - RNA, 18 nt, Human
ccagauuuugcuguauau

SEQ ID NO: 1901835 - RNA, 22 nt, Human
ccagauugcaacaggcugggcu

SEQ ID NO: 1901836 - RNA, 18 nt, Human
ccagauugcaacaggcug

SEQ ID NO: 1901837 - RNA, 23 nt, Human
ccagauugcaacaggcugggcuu

SEQ ID NO: 1901838 - RNA, 16 nt, Human
ccagauuggcucacac

SEQ ID NO: 1901839 - RNA, 18 nt, Human
ccagauuucacucuccuu

SEQ ID NO: 1901840 - RNA, 19 nt, Human
ccagauuucacucuccuug

SEQ ID NO: 1901841 - RNA, 15 nt, Human
ccagauuucacucuc

SEQ ID NO: 1901842 - RNA, 22 nt, Human
ccagauuggcucacacugagaa

SEQ ID NO: 1901843 - RNA, 21 nt, Human
ccagauuggcucacacugaga

SEQ ID NO: 1901844 - RNA, 20 nt, Human
ccagauuggcucacacugag

SEQ ID NO: 1901845 - RNA, 19 nt, Human
ccagauuggcucacacuga

SEQ ID NO: 1901846 - RNA, 16 nt, Human
ccagauugcaacaggc

SEQ ID NO: 1901847 - RNA, 14 nt, Human
ccagauugcaacag

SEQ ID NO: 1901848 - RNA, 14 nt, Human
ccagagcccaccuu

SEQ ID NO: 1901849 - RNA, 17 nt, Human
ccagagcccagcuccaa

SEQ ID NO: 1901850 - RNA, 18 nt, Human
ccagagcccagcuccaag

SEQ ID NO: 1901851 - RNA, 23 nt, Human
ccagagccucaaaugagaaaaug

SEQ ID NO: 1901852 - RNA, 20 nt, Human
ccagagccucaaaugagaaa

SEQ ID NO: 1901853 - RNA, 16 nt, Human
ccagagcccagcucca

SEQ ID NO: 1901854 - RNA, 16 nt, Human
ccccuucauccucuga

SEQ ID NO: 1901855 - RNA, 13 nt, Human
ccccuuccaugga

SEQ ID NO: 1901856 - RNA, 20 nt, Human
ccccuuccauggacuuuguu

SEQ ID NO: 1901857 - RNA, 22 nt, Human
ccccuggcugggacguggcuca

SEQ ID NO: 1901858 - RNA, 23 nt, Human
ccccuggcugggacguggcucag

SEQ ID NO: 1901859 - RNA, 20 nt, Human
ccccuggcuccaggccaggg

SEQ ID NO: 1901860 - RNA, 14 nt, Human
ccccuggccucugu

SEQ ID NO: 1901861 - RNA, 12 nt, Human
ccccuggugguu

SEQ ID NO: 1901862 - RNA, 18 nt, Human
cccgacgccacagcccag

SEQ ID NO: 1901863 - RNA, 23 nt, Human
cccgacgccacagcccagccacg

SEQ ID NO: 1901864 - RNA, 15 nt, Human
cccgacgccacagcc

SEQ ID NO: 1901865 - RNA, 13 nt, Human
cccgagccuggcu

SEQ ID NO: 1901866 - RNA, 15 nt, Human
cccgagccuggcucc

SEQ ID NO: 1901867 - RNA, 20 nt, Human
cccgcccaggcuuagucacu

SEQ ID NO: 1901868 - RNA, 22 nt, Human
cccgcccaggcuuagucacuga

SEQ ID NO: 1901869 - RNA, 23 nt, Human
cccgcuaagagggagggagggcu

SEQ ID NO: 1901870 - RNA, 19 nt, Human
cccgcagugugcacuaagg

SEQ ID NO: 1901871 - RNA, 22 nt, Human
cccgcagugugcacuaaggggc

SEQ ID NO: 1901872 - RNA, 14 nt, Human
cccgcauccccugc

SEQ ID NO: 1901873 - RNA, 15 nt, Human
cccgcauccccugcc

SEQ ID NO: 1901874 - RNA, 16 nt, Human
cccgcauccccugccu

SEQ ID NO: 1901875 - RNA, 17 nt, Human
cccgcauccccugccuc

SEQ ID NO: 1901876 - RNA, 18 nt, Human
cccgcauccccugccucc

SEQ ID NO: 1901877 - RNA, 19 nt, Human
cccgcauccccugccucca

SEQ ID NO: 1901878 - RNA, 20 nt, Human
cccgcauccccugccuccau

SEQ ID NO: 1901879 - RNA, 18 nt, Human
ccccuggaugcagccuca

SEQ ID NO: 1901880 - RNA, 19 nt, Human
ccccuggaugcagccucac

SEQ ID NO: 1901881 - RNA, 12 nt, Human
ccccuggccucu

SEQ ID NO: 1901882 - RNA, 15 nt, Human
ccccuggaugcagcc

SEQ ID NO: 1901883 - RNA, 20 nt, Human
ccccugcugguucaggguug

SEQ ID NO: 1901884 - RNA, 15 nt, Human
ccccugcugguucag

SEQ ID NO: 1901885 - RNA, 13 nt, Human
ccccugcugguuc

SEQ ID NO: 1901886 - RNA, 11 nt, Human
ccccugcuggu

SEQ ID NO: 1901887 - RNA, 14 nt, Human
ccccugcugggugu

SEQ ID NO: 1901888 - RNA, 17 nt, Human
ccccugcuggguguggc

SEQ ID NO: 1901889 - RNA, 19 nt, Human
ccccugcccggcugcggaa

SEQ ID NO: 1901890 - RNA, 17 nt, Human
ccccugcccggcugcgg

SEQ ID NO: 1901891 - RNA, 23 nt, Human
ccccugcccuccccucucugcac

SEQ ID NO: 1901892 - RNA, 14 nt, Human
ccccugccucucug

SEQ ID NO: 1901893 - RNA, 15 nt, Human
ccccugccucucugc

SEQ ID NO: 1901894 - RNA, 16 nt, Human
ccccugccucucugca

SEQ ID NO: 1901895 - RNA, 17 nt, Human
ccccugccucucugcag

SEQ ID NO: 1901896 - RNA, 19 nt, Human
ccccugccucucugcaggu

SEQ ID NO: 1901897 - RNA, 15 nt, Human
ccccugccuccaucc

SEQ ID NO: 1901898 - RNA, 16 nt, Human
ccccugccuccauccu

SEQ ID NO: 1901899 - RNA, 15 nt, Human
cccgccaaaagcugc

SEQ ID NO: 1901900 - RNA, 18 nt, Human
ccccuccuccacucuccc

SEQ ID NO: 1901901 - RNA, 15 nt, Human
ccccuccuccacucu

SEQ ID NO: 1901902 - RNA, 12 nt, Human
ccccuccuccac

SEQ ID NO: 1901903 - RNA, 19 nt, Human
ccccucuccuuccugugug

SEQ ID NO: 1901904 - RNA, 14 nt, Human
ccccucuccuuccu

SEQ ID NO: 1901905 - RNA, 21 nt, Human
ccccucgcuuggacggcuggg

SEQ ID NO: 1901906 - RNA, 13 nt, Human
ccccuccuucaga

SEQ ID NO: 1901907 - RNA, 12 nt, Human
ccccuccaugug

SEQ ID NO: 1901908 - RNA, 12 nt, Human
ccccucccuuuc

SEQ ID NO: 1901909 - RNA, 15 nt, Human
ccccucccuuucucc

SEQ ID NO: 1901910 - RNA, 16 nt, Human
ccccucagggucccug

SEQ ID NO: 1901911 - RNA, 20 nt, Human
ccccucaucucucugcccaa

SEQ ID NO: 1901912 - RNA, 14 nt, Human
ccccuccaaccugg

SEQ ID NO: 1901913 - RNA, 13 nt, Human
ccccuccaccugc

SEQ ID NO: 1901914 - RNA, 17 nt, Human
cccccugacaacacuca

SEQ ID NO: 1901915 - RNA, 19 nt, Human
cccccugacaacacucauu

SEQ ID NO: 1901916 - RNA, 12 nt, Human
cccccagccugc

SEQ ID NO: 1901917 - RNA, 13 nt, Human
cccccagcuaaga

SEQ ID NO: 1901918 - RNA, 18 nt, Human
cccccagcuaagaaccug

SEQ ID NO: 1901919 - RNA, 21 nt, Human
cccccagcuaagaaccuggaa

SEQ ID NO: 1901920 - RNA, 15 nt, Human
cccccagcuccggcc

SEQ ID NO: 1901921 - RNA, 16 nt, Human
ccccucaacaccucug

SEQ ID NO: 1901922 - RNA, 23 nt, Human
ccccucaacucuccuccagaguc

SEQ ID NO: 1901923 - RNA, 15 nt, Human
ccccucaacaccucu

SEQ ID NO: 1901924 - RNA, 20 nt, Human
ccccagugcccacaggauca

SEQ ID NO: 1901925 - RNA, 16 nt, Human
ccccagugcccacagg

SEQ ID NO: 1901926 - RNA, 15 nt, Human
ccccagugcccacag

SEQ ID NO: 1901927 - RNA, 14 nt, Human
ccccagugcccaca

SEQ ID NO: 1901928 - RNA, 13 nt, Human
ccccaggcugaag

SEQ ID NO: 1901929 - RNA, 15 nt, Human
cccccacuggugaca

SEQ ID NO: 1901930 - RNA, 11 nt, Human
cccccacuggu

SEQ ID NO: 1901931 - RNA, 13 nt, Human
cccccacugguga

SEQ ID NO: 1901932 - RNA, 12 nt, Human
cccccacccccu

SEQ ID NO: 1901933 - RNA, 22 nt, Human
cccccaccucucccugacccug

SEQ ID NO: 1901934 - RNA, 17 nt, Human
ccccaucauugguaccc

SEQ ID NO: 1901935 - RNA, 12 nt, Human
ccccauccucca

SEQ ID NO: 1901936 - RNA, 14 nt, Human
ccccauccucugua

SEQ ID NO: 1901937 - RNA, 15 nt, Human
ccccauccuccagca

SEQ ID NO: 1901938 - RNA, 24 nt, Human
cccccacccaagggccuggccuga

SEQ ID NO: 1901939 - RNA, 13 nt, Human
cccccacccaagg

SEQ ID NO: 1901940 - RNA, 20 nt, Human
ccccagacuccaccaagccu

SEQ ID NO: 1901941 - RNA, 14 nt, Human
cccaugagccucag

SEQ ID NO: 1901942 - RNA, 12 nt, Human
cccaucugugaa

SEQ ID NO: 1901943 - RNA, 22 nt, Human
cccaugagccucagcauccugg

SEQ ID NO: 1901944 - RNA, 23 nt, Human
cccaugaguuggggucuggcagc

SEQ ID NO: 1901945 - RNA, 12 nt, Human
cccaugcacugu

SEQ ID NO: 1901946 - RNA, 14 nt, Human
cccaugcacuguga

SEQ ID NO: 1901947 - RNA, 16 nt, Human
cccaugcacugugaag

SEQ ID NO: 1901948 - RNA, 18 nt, Human
cccaugcacugugaagga

SEQ ID NO: 1901949 - RNA, 19 nt, Human
cccaugcacugugaaggac

SEQ ID NO: 1901950 - RNA, 20 nt, Human
cccaugcacugugaaggacc

SEQ ID NO: 1901951 - RNA, 22 nt, Human
cccaugcacugugaaggacccu

SEQ ID NO: 1901952 - RNA, 15 nt, Human
cccauggacaggcug

SEQ ID NO: 1901953 - RNA, 20 nt, Human
cccauggacaggcuggcucc

SEQ ID NO: 1901954 - RNA, 22 nt, Human
cccauggacaggcuggcuccag

SEQ ID NO: 1901955 - RNA, 19 nt, Human
cccaucucuacaaaaagca

SEQ ID NO: 1901956 - RNA, 14 nt, Human
cccaguugggugga

SEQ ID NO: 1901957 - RNA, 22 nt, Human
cccaucucaugccccuggcugg

SEQ ID NO: 1901958 - RNA, 21 nt, Human
cccaucucaugccccuggcug

SEQ ID NO: 1901959 - RNA, 18 nt, Human
cccagaaugccuccugca

SEQ ID NO: 1901960 - RNA, 17 nt, Human
cccagaaugaggcugcu

SEQ ID NO: 1901961 - RNA, 22 nt, Human
cccagagaaaggggagcccacu

SEQ ID NO: 1901962 - RNA, 21 nt, Human
cccagagaaagcgcagaugcu

SEQ ID NO: 1901963 - RNA, 18 nt, Human
cccagagacauacuugaa

SEQ ID NO: 1901964 - RNA, 21 nt, Human
cccagagacauacuugaaggg

SEQ ID NO: 1901965 - RNA, 22 nt, Human
cccagagacauacuugaagggc

SEQ ID NO: 1901966 - RNA, 23 nt, Human
cccagagacauacuugaagggcc

SEQ ID NO: 1901967 - RNA, 15 nt, Human
ccccaccgcagacag

SEQ ID NO: 1901968 - RNA, 20 nt, Human
ccccacccuggugggccaac

SEQ ID NO: 1901969 - RNA, 19 nt, Human
ccccaccgcagacaggacc

SEQ ID NO: 1901970 - RNA, 12 nt, Human
ccccaccucucc

SEQ ID NO: 1901971 - RNA, 17 nt, Human
ccccaccucucccugac

SEQ ID NO: 1901972 - RNA, 21 nt, Human
ccccacccaagggccuggccu

SEQ ID NO: 1901973 - RNA, 13 nt, Human
ccccaccccauuu

SEQ ID NO: 1901974 - RNA, 12 nt, Human
ccccacccucau

SEQ ID NO: 1901975 - RNA, 12 nt, Human
cccauuccugaa

SEQ ID NO: 1901976 - RNA, 13 nt, Human
cccauuccugaag

SEQ ID NO: 1901977 - RNA, 18 nt, Human
cccauuccugaagaacca

SEQ ID NO: 1901978 - RNA, 13 nt, Human
ccccaaucccagc

SEQ ID NO: 1901979 - RNA, 15 nt, Human
ccccaauaauugcag

SEQ ID NO: 1901980 - RNA, 21 nt, Human
ccgacgccacagcccagccac

SEQ ID NO: 1901981 - RNA, 18 nt, Human
ccgacgccacagcccagc

SEQ ID NO: 1901982 - RNA, 21 nt, Human
ccgagauugcaccacugcacu

SEQ ID NO: 1901983 - RNA, 15 nt, Human
ccgagauugcaccac

SEQ ID NO: 1901984 - RNA, 19 nt, Human
ccgagauugcaccacugca

SEQ ID NO: 1901985 - RNA, 21 nt, Human
ccgaggaaacgaaacccacuc

SEQ ID NO: 1901986 - RNA, 19 nt, Human
ccgagcuuugaaaauucag

SEQ ID NO: 1901987 - RNA, 16 nt, Human
ccgaguagcugggacu

SEQ ID NO: 1901988 - RNA, 14 nt, Human
ccgaguagcuggga

SEQ ID NO: 1901989 - RNA, 15 nt, Human
ccgcagacaggacca

SEQ ID NO: 1901990 - RNA, 23 nt, Human
ccgcacugggcuuggggaccaga

SEQ ID NO: 1901991 - RNA, 15 nt, Human
ccgaguccaagcugg

SEQ ID NO: 1901992 - RNA, 20 nt, Human
ccgggcagggcucccacaga

SEQ ID NO: 1901993 - RNA, 12 nt, Human
ccgggcagaggg

SEQ ID NO: 1901994 - RNA, 15 nt, Human
ccgggcagaggggca

SEQ ID NO: 1901995 - RNA, 13 nt, Human
ccgggccacagag

SEQ ID NO: 1901996 - RNA, 22 nt, Human
ccgggcacucagaagacacuga

SEQ ID NO: 1901997 - RNA, 21 nt, Human
ccggcuccaggcuccuuuagc

SEQ ID NO: 1901998 - RNA, 16 nt, Human
ccggcuccaggcuccu

SEQ ID NO: 1901999 - RNA, 18 nt, Human
ccgugaggccagagacac

SEQ ID NO: 1902000 - RNA, 20 nt, Human
ccggggugcccacaggccgc

SEQ ID NO: 1902001 - RNA, 18 nt, Human
ccgggcucugccucccau

SEQ ID NO: 1902002 - RNA, 13 nt, Human
ccgggcucugccu

SEQ ID NO: 1902003 - RNA, 14 nt, Human
ccgggcucugccuc

SEQ ID NO: 1902004 - RNA, 15 nt, Human
ccgggcucugccucc

SEQ ID NO: 1902005 - RNA, 14 nt, Human
ccgcuggggccagu

SEQ ID NO: 1902006 - RNA, 11 nt, Human
ccgcuggggcc

SEQ ID NO: 1902007 - RNA, 17 nt, Human
ccgccuccuacagccca

SEQ ID NO: 1902008 - RNA, 14 nt, Human
ccgccugguacuca

SEQ ID NO: 1902009 - RNA, 22 nt, Human
ccgccuggaugcggauggccgg

SEQ ID NO: 1902010 - RNA, 20 nt, Human
ccuacaguguacagucuugu

SEQ ID NO: 1902011 - RNA, 16 nt, Human
ccuacaguguacaguc

SEQ ID NO: 1902012 - RNA, 21 nt, Human
ccuacaguugaaaaacagcug

SEQ ID NO: 1902013 - RNA, 18 nt, Human
ccuaggugacagagugag

SEQ ID NO: 1902014 - RNA, 15 nt, Human
ccuaggccaggugca

SEQ ID NO: 1902015 - RNA, 18 nt, Human
ccuaggccucagccagag

SEQ ID NO: 1902016 - RNA, 19 nt, Human
ccuaggccucagccagaga

SEQ ID NO: 1902017 - RNA, 20 nt, Human
ccuaggccucagccagagaa

SEQ ID NO: 1902018 - RNA, 14 nt, Human
ccuaggccucagcc

SEQ ID NO: 1902019 - RNA, 11 nt, Human
ccuaggccagg

SEQ ID NO: 1902020 - RNA, 12 nt, Human
ccuaggccaggu

SEQ ID NO: 1902021 - RNA, 22 nt, Human
ccgggucaucuguaccucugcc

SEQ ID NO: 1902022 - RNA, 15 nt, Human
ccuacaguguacagu

SEQ ID NO: 1902023 - RNA, 18 nt, Human
ccuacaggagugagcacu

SEQ ID NO: 1902024 - RNA, 15 nt, Human
ccuaacgaaguaucc

SEQ ID NO: 1902025 - RNA, 19 nt, Human
cccuguuuguuucugaaag

SEQ ID NO: 1902026 - RNA, 17 nt, Human
cccuuaccugccaggaa

SEQ ID NO: 1902027 - RNA, 20 nt, Human
cccuuaccugccaggaagcc

SEQ ID NO: 1902028 - RNA, 23 nt, Human
cccuuaccugccaggaagccagc

SEQ ID NO: 1902029 - RNA, 13 nt, Human
cccuguucuggca

SEQ ID NO: 1902030 - RNA, 14 nt, Human
cccuguucuggcag

SEQ ID NO: 1902031 - RNA, 14 nt, Human
cccuguuccccaga

SEQ ID NO: 1902032 - RNA, 16 nt, Human
cccuguuccccagaga

SEQ ID NO: 1902033 - RNA, 17 nt, Human
cccuguuccccagagaa

SEQ ID NO: 1902034 - RNA, 15 nt, Human
cccuguauauagccc

SEQ ID NO: 1902035 - RNA, 17 nt, Human
cccuguauauagcccag

SEQ ID NO: 1902036 - RNA, 18 nt, Human
cccuguauauagcccagc

SEQ ID NO: 1902037 - RNA, 15 nt, Human
cccugguggcagugg

SEQ ID NO: 1902038 - RNA, 14 nt, Human
cccugguggcagug

SEQ ID NO: 1902039 - RNA, 13 nt, Human
cccugguggcagu

SEQ ID NO: 1902040 - RNA, 21 nt, Human
cccugguggcagcucaccucu

SEQ ID NO: 1902041 - RNA, 21 nt, Human
cccuggugaccagcaccaucu

SEQ ID NO: 1902042 - RNA, 22 nt, Human
cccuggugagagggccgggcag

SEQ ID NO: 1902043 - RNA, 14 nt, Human
cccuuagcagggaa

SEQ ID NO: 1902044 - RNA, 15 nt, Human
cccuuacgugagucc

SEQ ID NO: 1902045 - RNA, 17 nt, Human
cccuuacgugaguccug

SEQ ID NO: 1902046 - RNA, 23 nt, Human
cccuuagcagggaaacagcuaau

SEQ ID NO: 1902047 - RNA, 12 nt, Human
cccuuccaugga

SEQ ID NO: 1902048 - RNA, 13 nt, Human
cccuuccaggggu

SEQ ID NO: 1902049 - RNA, 13 nt, Human
cccuucacaaagc

SEQ ID NO: 1902050 - RNA, 18 nt, Human
cccuucacaaagcccaag

SEQ ID NO: 1902051 - RNA, 20 nt, Human
cccuucacaaagcccaaggg

SEQ ID NO: 1902052 - RNA, 14 nt, Human
cccuugagaaaccu

SEQ ID NO: 1902053 - RNA, 22 nt, Human
cccuugagaaaccuuauuguac

SEQ ID NO: 1902054 - RNA, 22 nt, Human
cccuugaggaaacaacagcuuu

SEQ ID NO: 1902055 - RNA, 13 nt, Human
cccuucccucacc

SEQ ID NO: 1902056 - RNA, 21 nt, Human
cccugcucuccgaccagacac

SEQ ID NO: 1902057 - RNA, 22 nt, Human
cccugcucuccgaccagacacc

SEQ ID NO: 1902058 - RNA, 15 nt, Human
cccugccucucugca

SEQ ID NO: 1902059 - RNA, 22 nt, Human
cccugcgggugaacaaagcagc

SEQ ID NO: 1902060 - RNA, 17 nt, Human
cccugcgguagauggga

SEQ ID NO: 1902061 - RNA, 19 nt, Human
cccugcuccagaagauagc

SEQ ID NO: 1902062 - RNA, 12 nt, Human
cccugaggccca

SEQ ID NO: 1902063 - RNA, 20 nt, Human
cccugaggcagguccccaga

SEQ ID NO: 1902064 - RNA, 18 nt, Human
cccugaggcaggucccca

SEQ ID NO: 1902065 - RNA, 17 nt, Human
cccugaggcaggucccc

SEQ ID NO: 1902066 - RNA, 21 nt, Human
cccugaggcagguccccagac

SEQ ID NO: 1902067 - RNA, 13 nt, Human
cccugccucucug

SEQ ID NO: 1902068 - RNA, 14 nt, Human
cccugccucucugc

SEQ ID NO: 1902069 - RNA, 11 nt, Human
cccugccuccu

SEQ ID NO: 1902070 - RNA, 16 nt, Human
cccugccucaggccuc

SEQ ID NO: 1902071 - RNA, 21 nt, Human
cccugccucaggccucugugc

SEQ ID NO: 1902072 - RNA, 12 nt, Human
cccugccuccau

SEQ ID NO: 1902073 - RNA, 13 nt, Human
cccugccuccauc

SEQ ID NO: 1902074 - RNA, 18 nt, Human
cccugccuccauccuagu

SEQ ID NO: 1902075 - RNA, 21 nt, Human
cccugcaucugaccagcagcg

SEQ ID NO: 1902076 - RNA, 16 nt, Human
cccugcaucugaccag

SEQ ID NO: 1902077 - RNA, 18 nt, Human
cccugcaucugaccagca

SEQ ID NO: 1902078 - RNA, 19 nt, Human
cccugcaucugaccagcag

SEQ ID NO: 1902079 - RNA, 11 nt, Human
cccucugccca

SEQ ID NO: 1902080 - RNA, 14 nt, Human
cccucuccuuccug

SEQ ID NO: 1902081 - RNA, 15 nt, Human
cccucugcccacucc

SEQ ID NO: 1902082 - RNA, 18 nt, Human
cccucugcccacucccug

SEQ ID NO: 1902083 - RNA, 19 nt, Human
cccucugcccacucccugc

SEQ ID NO: 1902084 - RNA, 17 nt, Human
cccucuccuuccugugu

SEQ ID NO: 1902085 - RNA, 13 nt, Human
cccucugccccau

SEQ ID NO: 1902086 - RNA, 12 nt, Human
cccucuuucccu

SEQ ID NO: 1902087 - RNA, 17 nt, Human
cccucuuucccucccuu

SEQ ID NO: 1902088 - RNA, 20 nt, Human
cccucuuucccucccuuccu

SEQ ID NO: 1902089 - RNA, 18 nt, Human
cccucugccccauccucc

SEQ ID NO: 1902090 - RNA, 15 nt, Human
cccucugccccaucc

SEQ ID NO: 1902091 - RNA, 14 nt, Human
cccucccacagcgc

SEQ ID NO: 1902092 - RNA, 12 nt, Human
cccucccacagc

SEQ ID NO: 1902093 - RNA, 23 nt, Human
cccucccucuuucccucccuucc

SEQ ID NO: 1902094 - RNA, 14 nt, Human
cuaaaugaauguuu

SEQ ID NO: 1902095 - RNA, 12 nt, Human
cuaaaugaaugu

SEQ ID NO: 1902096 - RNA, 16 nt, Human
cuaaauucaugcugcu

SEQ ID NO: 1902097 - RNA, 19 nt, Human
cuaaauugacacuuaaaaa

SEQ ID NO: 1902098 - RNA, 19 nt, Human
cuaaauucuuucauuuuag

SEQ ID NO: 1902099 - RNA, 23 nt, Human
cuaacauauaauguuguuauuua

SEQ ID NO: 1902100 - RNA, 22 nt, Human
cuaacauauaauguuguuauuu

SEQ ID NO: 1902101 - RNA, 12 nt, Human
cuaacauauaau

SEQ ID NO: 1902102 - RNA, 17 nt, Human
cuaacagcucaggaucu

SEQ ID NO: 1902103 - RNA, 14 nt, Human
cuaaccacgcugga

SEQ ID NO: 1902104 - RNA, 12 nt, Human
cuaaccacgcug

SEQ ID NO: 1902105 - RNA, 13 nt, Human
cuaagagggaggg

SEQ ID NO: 1902106 - RNA, 15 nt, Human
cuaagagggagggag

SEQ ID NO: 1902107 - RNA, 22 nt, Human
cuaagagggagggagggcucca

SEQ ID NO: 1902108 - RNA, 23 nt, Human
cuaagagggagggagggcuccag

SEQ ID NO: 1902109 - RNA, 18 nt, Human
cuaagaguugagcucucg

SEQ ID NO: 1902110 - RNA, 21 nt, Human
cuaagaguugagcucucggaa

SEQ ID NO: 1902111 - RNA, 23 nt, Human
cuaaauaaagcuugcaacaaaau

SEQ ID NO: 1902112 - RNA, 22 nt, Human
cuaaaugaaaaucgugacaaca

SEQ ID NO: 1902113 - RNA, 17 nt, Human
cuaaauauauuuuaaga

SEQ ID NO: 1902114 - RNA, 21 nt, Human
cuaaaucuccaaaauaaaacu

SEQ ID NO: 1902115 - RNA, 17 nt, Human
cuaaacucauuuauaaa

SEQ ID NO: 1902116 - RNA, 22 nt, Human
cuaaacucauuuauaaagcuaa

SEQ ID NO: 1902117 - RNA, 14 nt, Human
cuaaacucauuuau

SEQ ID NO: 1902118 - RNA, 15 nt, Human
cuaaacucauuuaua

SEQ ID NO: 1902119 - RNA, 23 nt, Human
cgggaccccgagccuggcuccaa

SEQ ID NO: 1902120 - RNA, 20 nt, Human
cgggaggcagagguugcagu

SEQ ID NO: 1902121 - RNA, 23 nt, Human
cgggaggauguucugggacacag

SEQ ID NO: 1902122 - RNA, 20 nt, Human
cuaaaagugggcuugauucu

SEQ ID NO: 1902123 - RNA, 11 nt, Human
cuaaaaauaau

SEQ ID NO: 1902124 - RNA, 23 nt, Human
cuaaaagugggcuugauucugca

SEQ ID NO: 1902125 - RNA, 16 nt, Human
cuaaaaaacaaaacaa

SEQ ID NO: 1902126 - RNA, 13 nt, Human
cguuuucaaaauu

SEQ ID NO: 1902127 - RNA, 12 nt, Human
cuaauaucagca

SEQ ID NO: 1902128 - RNA, 20 nt, Human
cuaauagacuaaaugaaauc

SEQ ID NO: 1902129 - RNA, 17 nt, Human
cuaauagacuaaaugaa

SEQ ID NO: 1902130 - RNA, 18 nt, Human
cuaauagacuaaaugaaa

SEQ ID NO: 1902131 - RNA, 23 nt, Human
cuaauagacaauuuauuauggca

SEQ ID NO: 1902132 - RNA, 19 nt, Human
cuaauagacaauuuauuau

SEQ ID NO: 1902133 - RNA, 17 nt, Human
cuaauagacaauuuauu

SEQ ID NO: 1902134 - RNA, 13 nt, Human
cuaauagaacuca

SEQ ID NO: 1902135 - RNA, 20 nt, Human
cuaauagaacucaguuuuaa

SEQ ID NO: 1902136 - RNA, 17 nt, Human
cuaauaccucugugugc

SEQ ID NO: 1902137 - RNA, 16 nt, Human
cuaauaccucugugug

SEQ ID NO: 1902138 - RNA, 15 nt, Human
cuaauaccucugugu

SEQ ID NO: 1902139 - RNA, 13 nt, Human
cuaauaccucugu

SEQ ID NO: 1902140 - RNA, 12 nt, Human
cuaauacaccag

SEQ ID NO: 1902141 - RNA, 18 nt, Human
cuaauaaucauuggauuc

SEQ ID NO: 1902142 - RNA, 14 nt, Human
cuaauaaagcugug

SEQ ID NO: 1902143 - RNA, 21 nt, Human
cuaagcuucacuguaaaauaa

SEQ ID NO: 1902144 - RNA, 22 nt, Human
cuaagcuggagugcuuaucccu

SEQ ID NO: 1902145 - RNA, 22 nt, Human
cuaagcuauucaguaauaacuc

SEQ ID NO: 1902146 - RNA, 21 nt, Human
cuaaucagggaggucauuuug

SEQ ID NO: 1902147 - RNA, 20 nt, Human
cuaaucagggaggucauuuu

SEQ ID NO: 1902148 - RNA, 19 nt, Human
cuaaucagggaggucauuu

SEQ ID NO: 1902149 - RNA, 20 nt, Human
cuaauauggccacaguaguc

SEQ ID NO: 1902150 - RNA, 18 nt, Human
cuaauauguaacaagcca

SEQ ID NO: 1902151 - RNA, 13 nt, Human
cuaaugggacacu

SEQ ID NO: 1902152 - RNA, 12 nt, Human
cuaaugggacac

SEQ ID NO: 1902153 - RNA, 19 nt, Human
cuaaugcuccuuguuccua

SEQ ID NO: 1902154 - RNA, 12 nt, Human
cuaaugcuccuu

SEQ ID NO: 1902155 - RNA, 18 nt, Human
cuaaugcuccuuguuccu

SEQ ID NO: 1902156 - RNA, 23 nt, Human
cuacacgagauacagaauuuuau

SEQ ID NO: 1902157 - RNA, 18 nt, Human
cuacaccuuucuccuuug

SEQ ID NO: 1902158 - RNA, 20 nt, Human
cuacaccuuucuccuuugua

SEQ ID NO: 1902159 - RNA, 15 nt, Human
cuacaccuuucuccu

SEQ ID NO: 1902160 - RNA, 15 nt, Human
cuaauuccacaccuu

SEQ ID NO: 1902161 - RNA, 17 nt, Human
cuaauuccacaccuuuu

SEQ ID NO: 1902162 - RNA, 21 nt, Human
cuacacaggggaaaagaggag

SEQ ID NO: 1902163 - RNA, 18 nt, Human
cuaccauccccuguagag

SEQ ID NO: 1902164 - RNA, 13 nt, Human
cuaccauucagug

SEQ ID NO: 1902165 - RNA, 22 nt, Human
cuacauuauaaaugucucuuua

SEQ ID NO: 1902166 - RNA, 14 nt, Human
cuacauucuguuaa

SEQ ID NO: 1902167 - RNA, 13 nt, Human
cuacauucuguua

SEQ ID NO: 1902168 - RNA, 12 nt, Human
cuacauucauuu

SEQ ID NO: 1902169 - RNA, 17 nt, Human
cuacccagcgagcccug

SEQ ID NO: 1902170 - RNA, 15 nt, Human
cuacccagcgagccc

SEQ ID NO: 1902171 - RNA, 13 nt, Human
cuacccacccucc

SEQ ID NO: 1902172 - RNA, 18 nt, Human
cuacccagcgagcccugg

SEQ ID NO: 1902173 - RNA, 13 nt, Human
cuacccaggugcu

SEQ ID NO: 1902174 - RNA, 13 nt, Human
cuacccauccccg

SEQ ID NO: 1902175 - RNA, 15 nt, Human
cuacccauccccgca

SEQ ID NO: 1902176 - RNA, 17 nt, Human
cuacccucuuagaaaaa

SEQ ID NO: 1902177 - RNA, 13 nt, Human
cuacccucacaau

SEQ ID NO: 1902178 - RNA, 20 nt, Human
cuacagaggccaugggccuc

SEQ ID NO: 1902179 - RNA, 18 nt, Human
cuacagaggccaugggcc

SEQ ID NO: 1902180 - RNA, 22 nt, Human
cuacagaggccaugggccuccu

SEQ ID NO: 1902181 - RNA, 13 nt, Human
cuacacugugcug

SEQ ID NO: 1902182 - RNA, 14 nt, Human
cuacacugugcuga

SEQ ID NO: 1902183 - RNA, 17 nt, Human
cuacacugugcugaguc

SEQ ID NO: 1902184 - RNA, 23 nt, Human
cuacagcuugaccgugaggccag

SEQ ID NO: 1902185 - RNA, 19 nt, Human
cuacagcuuugaucccuga

SEQ ID NO: 1902186 - RNA, 19 nt, Human
cuacagcuugaccgugagg

SEQ ID NO: 1902187 - RNA, 22 nt, Human
cuacagcuugaccgugaggcca

SEQ ID NO: 1902188 - RNA, 13 nt, Human
cuacaguccuccc

SEQ ID NO: 1902189 - RNA, 18 nt, Human
cuacauggaguauauguc

SEQ ID NO: 1902190 - RNA, 20 nt, Human
cuacauggaguauaugucaa

SEQ ID NO: 1902191 - RNA, 16 nt, Human
cuacaggugugaguca

SEQ ID NO: 1902192 - RNA, 17 nt, Human
cuacagguuuggguaca

SEQ ID NO: 1902193 - RNA, 14 nt, Human
cuacaggugugagu

SEQ ID NO: 1902194 - RNA, 16 nt, Human
cuacaggagugagcac

SEQ ID NO: 1902195 - RNA, 15 nt, Human
cuacaggagugagca

SEQ ID NO: 1902196 - RNA, 14 nt, Human
cuacaggagugagc

SEQ ID NO: 1902197 - RNA, 17 nt, Human
cuacaggcacccaccau

SEQ ID NO: 1902198 - RNA, 15 nt, Human
cuacaggcacccacc

SEQ ID NO: 1902199 - RNA, 13 nt, Human
cuacaggggccag

SEQ ID NO: 1902200 - RNA, 14 nt, Human
cuacaggggccaga

SEQ ID NO: 1902201 - RNA, 16 nt, Human
cuacaggggccagaag

SEQ ID NO: 1902202 - RNA, 22 nt, Human
cuagaaaacgcgaccuuggccg

SEQ ID NO: 1902203 - RNA, 20 nt, Human
cuacuguccuacccacccuc

SEQ ID NO: 1902204 - RNA, 19 nt, Human
cuacuguaauuuuauauga

SEQ ID NO: 1902205 - RNA, 17 nt, Human
cuacuguaauuuuauau

SEQ ID NO: 1902206 - RNA, 23 nt, Human
cuacuguuuuaauuuauacuggc

SEQ ID NO: 1902207 - RNA, 23 nt, Human
cuagaaaugauccccagcuguuu

SEQ ID NO: 1902208 - RNA, 18 nt, Human
cuagaaagaauauuuggu

SEQ ID NO: 1902209 - RNA, 21 nt, Human
cuagagguucaaagauauuuu

SEQ ID NO: 1902210 - RNA, 18 nt, Human
cuagagguucaaagauau

SEQ ID NO: 1902211 - RNA, 17 nt, Human
cuagagguucaaagaua

SEQ ID NO: 1902212 - RNA, 14 nt, Human
cuagagggaccucu

SEQ ID NO: 1902213 - RNA, 15 nt, Human
cuagagggaccucuc

SEQ ID NO: 1902214 - RNA, 16 nt, Human
cuagagggaccucucc

SEQ ID NO: 1902215 - RNA, 17 nt, Human
cuagagggaccucuccc

SEQ ID NO: 1902216 - RNA, 13 nt, Human
cuagagagggagg

SEQ ID NO: 1902217 - RNA, 21 nt, Human
cuagagagggaggcaagcccu

SEQ ID NO: 1902218 - RNA, 22 nt, Human
cuagagagggaggcaagcccug

SEQ ID NO: 1902219 - RNA, 23 nt, Human
cuagagagggaggcaagcccugu

SEQ ID NO: 1902220 - RNA, 12 nt, Human
cuagagagggag

SEQ ID NO: 1902221 - RNA, 15 nt, Human
cuacucgaguuacag

SEQ ID NO: 1902222 - RNA, 16 nt, Human
cuacucgaguuacaga

SEQ ID NO: 1902223 - RNA, 19 nt, Human
cuacucgaguuacagacaa

SEQ ID NO: 1902224 - RNA, 19 nt, Human
cuacuguccuacccacccu

SEQ ID NO: 1902225 - RNA, 16 nt, Human
cuacuguaauuuuaua

SEQ ID NO: 1902226 - RNA, 18 nt, Human
cuacugggagccuaccca

SEQ ID NO: 1902227 - RNA, 15 nt, Human
cuacugggagccuac

SEQ ID NO: 1902228 - RNA, 14 nt, Human
cuacugggagccua

SEQ ID NO: 1902229 - RNA, 13 nt, Human
cuacucuguguca

SEQ ID NO: 1902230 - RNA, 12 nt, Human
cuacucuguguc

SEQ ID NO: 1902231 - RNA, 18 nt, Human
cuacugcaccauuuaaaa

SEQ ID NO: 1902232 - RNA, 14 nt, Human
cuacugcaccauuu

SEQ ID NO: 1902233 - RNA, 12 nt, Human
cuacucuccuca

SEQ ID NO: 1902234 - RNA, 13 nt, Human
cuacucuccucau

SEQ ID NO: 1902235 - RNA, 22 nt, Human
cuacucuggagguuuguuuaga

SEQ ID NO: 1902236 - RNA, 17 nt, Human
cuacucuccucaucucu

SEQ ID NO: 1902237 - RNA, 16 nt, Human
cuacucgggaagcuga

SEQ ID NO: 1902238 - RNA, 23 nt, Human
cuagccuuagaagucacacagua

SEQ ID NO: 1902239 - RNA, 22 nt, Human
cuagccuuagaagucacacagu

SEQ ID NO: 1902240 - RNA, 21 nt, Human
cuagccuuagaagucacacag

SEQ ID NO: 1902241 - RNA, 22 nt, Human
cuagccugugccucugggacug

SEQ ID NO: 1902242 - RNA, 21 nt, Human
cuagccugugccucugggacu

SEQ ID NO: 1902243 - RNA, 19 nt, Human
cuagccugugccucuggga

SEQ ID NO: 1902244 - RNA, 16 nt, Human
cuagauacuguaucau

SEQ ID NO: 1902245 - RNA, 13 nt, Human
cuagauacuguau

SEQ ID NO: 1902246 - RNA, 24 nt, Human
cuagauacuguaucaugacaaaga

SEQ ID NO: 1902247 - RNA, 19 nt, Human
cuagcucuauguuuacaaa

SEQ ID NO: 1902248 - RNA, 20 nt, Human
cuagcucuauguuuacaaau

SEQ ID NO: 1902249 - RNA, 23 nt, Human
cuagcucuauguuuacaaaugga

SEQ ID NO: 1902250 - RNA, 12 nt, Human
cuagcugggggu

SEQ ID NO: 1902251 - RNA, 18 nt, Human
cuagcugggggugggcca

SEQ ID NO: 1902252 - RNA, 19 nt, Human
cuagcugggggugggccag

SEQ ID NO: 1902253 - RNA, 20 nt, Human
cuagcugggggugggccagg

SEQ ID NO: 1902254 - RNA, 21 nt, Human
cuagcugggggugggccaggc

SEQ ID NO: 1902255 - RNA, 22 nt, Human
cuagcugggggugggccaggcu

SEQ ID NO: 1902256 - RNA, 18 nt, Human
cuagcuguugagcuguuu

SEQ ID NO: 1902257 - RNA, 16 nt, Human
cuauugauaauuuaga

SEQ ID NO: 1902258 - RNA, 21 nt, Human
cuauugauauaaauaaaacau

SEQ ID NO: 1902259 - RNA, 21 nt, Human
cuauucuuucgaaagaagaaa

SEQ ID NO: 1902260 - RNA, 23 nt, Human
cuauucaguaauaacucuacccu

SEQ ID NO: 1902261 - RNA, 19 nt, Human
cuauucaguggcgagaaau

SEQ ID NO: 1902262 - RNA, 14 nt, Human
cuauucucuccaaa

SEQ ID NO: 1902263 - RNA, 21 nt, Human
cuauucucuccaaaaaugcac

SEQ ID NO: 1902264 - RNA, 21 nt, Human
cuauggggauagaugugugga

SEQ ID NO: 1902265 - RNA, 20 nt, Human
cuauguaguccgugcugaca

SEQ ID NO: 1902266 - RNA, 20 nt, Human
cuauggggauagaugugugg

SEQ ID NO: 1902267 - RNA, 19 nt, Human
cuauggggauagaugugug

SEQ ID NO: 1902268 - RNA, 13 nt, Human
cuauguaucaaug

SEQ ID NO: 1902269 - RNA, 16 nt, Human
cuauguaucaaugagu

SEQ ID NO: 1902270 - RNA, 17 nt, Human
cuauucaguaauaacuc

SEQ ID NO: 1902271 - RNA, 12 nt, Human
cuaugcacauau

SEQ ID NO: 1902272 - RNA, 22 nt, Human
cuaugaaguuuuuuuuauacag

SEQ ID NO: 1902273 - RNA, 21 nt, Human
cuauagccuggggugggguca

SEQ ID NO: 1902274 - RNA, 19 nt, Human
cuauacuugcuuuguguuc

SEQ ID NO: 1902275 - RNA, 12 nt, Human
cuauagccuggg

SEQ ID NO: 1902276 - RNA, 13 nt, Human
cuauagccugggg

SEQ ID NO: 1902277 - RNA, 14 nt, Human
cuauagccuggggu

SEQ ID NO: 1902278 - RNA, 18 nt, Human
cuauagccuggggugggg

SEQ ID NO: 1902279 - RNA, 13 nt, Human
cuauaauuuaaau

SEQ ID NO: 1902280 - RNA, 12 nt, Human
cuauaauuuaaa

SEQ ID NO: 1902281 - RNA, 20 nt, Human
cuaggaacacuccuucacag

SEQ ID NO: 1902282 - RNA, 17 nt, Human
cuaggaaaauauuuuga

SEQ ID NO: 1902283 - RNA, 15 nt, Human
cuaggaaaauauuuu

SEQ ID NO: 1902284 - RNA, 15 nt, Human
cuaggaagacuuugg

SEQ ID NO: 1902285 - RNA, 17 nt, Human
cuaggaagacuuuggaa

SEQ ID NO: 1902286 - RNA, 21 nt, Human
cuauagccuaggugacagagu

SEQ ID NO: 1902287 - RNA, 20 nt, Human
cuauagccuaggugacagag

SEQ ID NO: 1902288 - RNA, 18 nt, Human
cuauagccuaggugacag

SEQ ID NO: 1902289 - RNA, 19 nt, Human
cuauagccuaggugacaga

SEQ ID NO: 1902290 - RNA, 14 nt, Human
cucaacucuccucc

SEQ ID NO: 1902291 - RNA, 19 nt, Human
cucaacccccauuucuauu

SEQ ID NO: 1902292 - RNA, 22 nt, Human
cucaacccccauuucuauuuau

SEQ ID NO: 1902293 - RNA, 17 nt, Human
cucaaauuucuaaaucu

SEQ ID NO: 1902294 - RNA, 15 nt, Human
cucaaauuucuaaau

SEQ ID NO: 1902295 - RNA, 21 nt, Human
cuauuugcaauuccugcuccu

SEQ ID NO: 1902296 - RNA, 14 nt, Human
cucaaauuucuaaa

SEQ ID NO: 1902297 - RNA, 16 nt, Human
cuauuugagacuccuc

SEQ ID NO: 1902298 - RNA, 11 nt, Human
cuauuugcaau

SEQ ID NO: 1902299 - RNA, 18 nt, Human
cuauuugcaauuccugcu

SEQ ID NO: 1902300 - RNA, 12 nt, Human
cuauuucucuuu

SEQ ID NO: 1902301 - RNA, 14 nt, Human
cuauuucucuuucu

SEQ ID NO: 1902302 - RNA, 17 nt, Human
cuauuucucuuucuuua

SEQ ID NO: 1902303 - RNA, 14 nt, Human
cuauuuauuuacug

SEQ ID NO: 1902304 - RNA, 15 nt, Human
cuauuuauuuacuga

SEQ ID NO: 1902305 - RNA, 18 nt, Human
cuauuuauuuacugagcu

SEQ ID NO: 1902306 - RNA, 16 nt, Human
cucaacucuccuccag

SEQ ID NO: 1902307 - RNA, 18 nt, Human
cucaacucuccuccagag

SEQ ID NO: 1902308 - RNA, 13 nt, Human
cucaagauuccca

SEQ ID NO: 1902309 - RNA, 14 nt, Human
cucaagauucccag

SEQ ID NO: 1902310 - RNA, 15 nt, Human
cucaagauucccagg

SEQ ID NO: 1902311 - RNA, 16 nt, Human
cucaagauucccagga

SEQ ID NO: 1902312 - RNA, 17 nt, Human
cucaagauucccaggag

SEQ ID NO: 1902313 - RNA, 21 nt, Human
cucaagauucccaggaguucu

SEQ ID NO: 1902314 - RNA, 17 nt, Human
cucaagcccgcggggac

SEQ ID NO: 1902315 - RNA, 14 nt, Human
cucaaguccucuuu

SEQ ID NO: 1902316 - RNA, 15 nt, Human
cucaaguagcauuua

SEQ ID NO: 1902317 - RNA, 18 nt, Human
cucaaguagcauuuacug

SEQ ID NO: 1902318 - RNA, 20 nt, Human
cucaaguagcauuuacugug

SEQ ID NO: 1902319 - RNA, 14 nt, Human
cucaaguagcauuu

SEQ ID NO: 1902320 - RNA, 23 nt, Human
cucacacggacacucaaaagcug

SEQ ID NO: 1902321 - RNA, 13 nt, Human
cucacacucaccc

SEQ ID NO: 1902322 - RNA, 13 nt, Human
cucacacugagaa

SEQ ID NO: 1902323 - RNA, 12 nt, Human
cucacacugaga

SEQ ID NO: 1902324 - RNA, 15 nt, Human
cucacaccugaacug

SEQ ID NO: 1902325 - RNA, 20 nt, Human
cucacacugagaauguaaga

SEQ ID NO: 1902326 - RNA, 14 nt, Human
cucacacugagaau

SEQ ID NO: 1902327 - RNA, 18 nt, Human
cuauuguuagucucuuga

SEQ ID NO: 1902328 - RNA, 9 nt, Human
cuauuuaag

SEQ ID NO: 1902329 - RNA, 16 nt, Human
cuauugcugcuugagg

SEQ ID NO: 1902330 - RNA, 16 nt, Human
cuauuggaaaaaccac

SEQ ID NO: 1902331 - RNA, 17 nt, Human
cucaguuuuaucauuuu

SEQ ID NO: 1902332 - RNA, 18 nt, Human
cucaguuuuaucauuuuc

SEQ ID NO: 1902333 - RNA, 14 nt, Human
cucauaaaaagcaa

SEQ ID NO: 1902334 - RNA, 17 nt, Human
cucauaaaaagcaaaac

SEQ ID NO: 1902335 - RNA, 14 nt, Human
cucauucuaaugau

SEQ ID NO: 1902336 - RNA, 18 nt, Human
cucauucuaaugauggcc

SEQ ID NO: 1902337 - RNA, 20 nt, Human
cucauucuaaugauggccca

SEQ ID NO: 1902338 - RNA, 17 nt, Human
cucaguucuugccacuu

SEQ ID NO: 1902339 - RNA, 17 nt, Human
cucaguucucuucacuc

SEQ ID NO: 1902340 - RNA, 16 nt, Human
cucaguucucuucacu

SEQ ID NO: 1902341 - RNA, 12 nt, Human
cucauucuucug

SEQ ID NO: 1902342 - RNA, 17 nt, Human
cucauugaccugaggcc

SEQ ID NO: 1902343 - RNA, 22 nt, Human
cucauucuccuuguguuacuaa

SEQ ID NO: 1902344 - RNA, 18 nt, Human
cucauucuccuuguguua

SEQ ID NO: 1902345 - RNA, 19 nt, Human
cucauugaccugaggcccu

SEQ ID NO: 1902346 - RNA, 21 nt, Human
cucauugaccugaggcccuuc

SEQ ID NO: 1902347 - RNA, 22 nt, Human
cucauuucaccccucccuuucu

SEQ ID NO: 1902348 - RNA, 19 nt, Human
cucauuucaccccucccuu

SEQ ID NO: 1902349 - RNA, 17 nt, Human
cucauuucaccccuccc

SEQ ID NO: 1902350 - RNA, 14 nt, Human
cucauuucaccccu

SEQ ID NO: 1902351 - RNA, 18 nt, Human
cucauugcugagccucug

SEQ ID NO: 1902352 - RNA, 21 nt, Human
cucauucuaaugauggcccau

SEQ ID NO: 1902353 - RNA, 16 nt, Human
cucauugcugagccuc

SEQ ID NO: 1902354 - RNA, 15 nt, Human
cucauugcugagccu

SEQ ID NO: 1902355 - RNA, 21 nt, Human
cucauuugucacacacuuugg

SEQ ID NO: 1902356 - RNA, 23 nt, Human
cucauuucaccccucccuuucuc

SEQ ID NO: 1902357 - RNA, 21 nt, Human
cuccaaacccucgaggcggau

SEQ ID NO: 1902358 - RNA, 14 nt, Human
cuccaaaccuucac

SEQ ID NO: 1902359 - RNA, 15 nt, Human
cuccaaaccuucaca

SEQ ID NO: 1902360 - RNA, 16 nt, Human
cuccaaaccuucacac

SEQ ID NO: 1902361 - RNA, 21 nt, Human
cuccaaaccuucacacacaga

SEQ ID NO: 1902362 - RNA, 17 nt, Human
cuccaagcucccaggca

SEQ ID NO: 1902363 - RNA, 15 nt, Human
cuccaaacccucgag

SEQ ID NO: 1902364 - RNA, 17 nt, Human
cuccaaacccucgaggc

SEQ ID NO: 1902365 - RNA, 16 nt, Human
cuccagagucagaagu

SEQ ID NO: 1902366 - RNA, 16 nt, Human
cuccagaugcagggca

SEQ ID NO: 1902367 - RNA, 20 nt, Human
cuccagaguggggaugacau

SEQ ID NO: 1902368 - RNA, 17 nt, Human
cuccagaugcagggcag

SEQ ID NO: 1902369 - RNA, 18 nt, Human
cuccagaugcagggcagu

SEQ ID NO: 1902370 - RNA, 21 nt, Human
cuccagaugcagggcagucau

SEQ ID NO: 1902371 - RNA, 17 nt, Human
cuccagauguuuccaga

SEQ ID NO: 1902372 - RNA, 16 nt, Human
cuccacucucccccac

SEQ ID NO: 1902373 - RNA, 11 nt, Human
cuccagaccug

SEQ ID NO: 1902374 - RNA, 12 nt, Human
cuccagaccuga

SEQ ID NO: 1902375 - RNA, 14 nt, Human
cuccagaccugauc

SEQ ID NO: 1902376 - RNA, 19 nt, Human
cuccagaccugauccugga

SEQ ID NO: 1902377 - RNA, 23 nt, Human
cuccagaccugauccuggaggcc

SEQ ID NO: 1902378 - RNA, 18 nt, Human
cuccagcucaccagcccc

SEQ ID NO: 1902379 - RNA, 16 nt, Human
cuccagcucaccagcc

SEQ ID NO: 1902380 - RNA, 15 nt, Human
cuccagcucaccagc

SEQ ID NO: 1902381 - RNA, 11 nt, Human
cuccagccccu

SEQ ID NO: 1902382 - RNA, 19 nt, Human
cuccagauguuuccagacu

SEQ ID NO: 1902383 - RNA, 13 nt, Human
cuccagccccugg

SEQ ID NO: 1902384 - RNA, 14 nt, Human
cuccagccccugga

SEQ ID NO: 1902385 - RNA, 14 nt, Human
cuccacucuccucu

SEQ ID NO: 1902386 - RNA, 15 nt, Human
cuccacucuccccca

SEQ ID NO: 1902387 - RNA, 13 nt, Human
cuccacucucccc

SEQ ID NO: 1902388 - RNA, 22 nt, Human
cuccaaguccacaguggaacca

SEQ ID NO: 1902389 - RNA, 20 nt, Human
cuccaaggggaaucagaacu

SEQ ID NO: 1902390 - RNA, 13 nt, Human
cuccaccaggaac

SEQ ID NO: 1902391 - RNA, 14 nt, Human
cuccaccaggaacc

SEQ ID NO: 1902392 - RNA, 15 nt, Human
cuccaccaggaaccu

SEQ ID NO: 1902393 - RNA, 16 nt, Human
cuccaccagucauuuu

SEQ ID NO: 1902394 - RNA, 14 nt, Human
cucccauuuccuga

SEQ ID NO: 1902395 - RNA, 22 nt, Human
cucccauugucccucugcccca

SEQ ID NO: 1902396 - RNA, 14 nt, Human
cucccauuccugaa

SEQ ID NO: 1902397 - RNA, 15 nt, Human
cucccauuccugaag

SEQ ID NO: 1902398 - RNA, 16 nt, Human
cucccauuccugaaga

SEQ ID NO: 1902399 - RNA, 17 nt, Human
cucccauuccugaagaa

SEQ ID NO: 1902400 - RNA, 19 nt, Human
cucccauuccugaagaacc

SEQ ID NO: 1902401 - RNA, 17 nt, Human
cucccauugucccucug

SEQ ID NO: 1902402 - RNA, 19 nt, Human
cucccauugucccucugcc

SEQ ID NO: 1902403 - RNA, 14 nt, Human
cucccauccagggc

SEQ ID NO: 1902404 - RNA, 15 nt, Human
cucccauccagggcc

SEQ ID NO: 1902405 - RNA, 22 nt, Human
cucccauccagggcccccaucu

SEQ ID NO: 1902406 - RNA, 13 nt, Human
cucccacagagac

SEQ ID NO: 1902407 - RNA, 15 nt, Human
cucccacagagacaa

SEQ ID NO: 1902408 - RNA, 21 nt, Human
cucccaauuucagacucccau

SEQ ID NO: 1902409 - RNA, 19 nt, Human
cucccaauuucagacuccc

SEQ ID NO: 1902410 - RNA, 12 nt, Human
cucccaggcucu

SEQ ID NO: 1902411 - RNA, 13 nt, Human
cucccaggcucuc

SEQ ID NO: 1902412 - RNA, 16 nt, Human
cucccaucacuucccu

SEQ ID NO: 1902413 - RNA, 23 nt, Human
cucccaaagugcugggauuacag

SEQ ID NO: 1902414 - RNA, 16 nt, Human
cucccaaagugcuggg

SEQ ID NO: 1902415 - RNA, 15 nt, Human
cucccaaaugagcca

SEQ ID NO: 1902416 - RNA, 15 nt, Human
cucccacaaaggaga

SEQ ID NO: 1902417 - RNA, 14 nt, Human
cucccaacucaccc

SEQ ID NO: 1902418 - RNA, 15 nt, Human
cucccaacucacccc

SEQ ID NO: 1902419 - RNA, 15 nt, Human
cuccagcucuuuccu

SEQ ID NO: 1902420 - RNA, 23 nt, Human
cucccgaauagcugggacuacag

SEQ ID NO: 1902421 - RNA, 20 nt, Human
cucccgaauagcugggacua

SEQ ID NO: 1902422 - RNA, 15 nt, Human
cucccuucauccuuc

SEQ ID NO: 1902423 - RNA, 18 nt, Human
cucccucagucuggcccu

SEQ ID NO: 1902424 - RNA, 20 nt, Human
cuccccagccccaucccaaa

SEQ ID NO: 1902425 - RNA, 18 nt, Human
cuccccagcccagagaca

SEQ ID NO: 1902426 - RNA, 14 nt, Human
cuccccagcccaga

SEQ ID NO: 1902427 - RNA, 15 nt, Human
cuccccagcccagag

SEQ ID NO: 1902428 - RNA, 16 nt, Human
cuccccagcccagaga

SEQ ID NO: 1902429 - RNA, 17 nt, Human
cuccccagcccagagac

SEQ ID NO: 1902430 - RNA, 16 nt, Human
cuccccucuccuuccu

SEQ ID NO: 1902431 - RNA, 13 nt, Human
cuccccagcccag

SEQ ID NO: 1902432 - RNA, 21 nt, Human
cuccccugcuggguguggcgc

SEQ ID NO: 1902433 - RNA, 23 nt, Human
cuccccugcuggguguggcgcag

SEQ ID NO: 1902434 - RNA, 16 nt, Human
cuccccugaccuguga

SEQ ID NO: 1902435 - RNA, 17 nt, Human
cuccccugaccugugag

SEQ ID NO: 1902436 - RNA, 22 nt, Human
cuccccugaccugugagcccag

SEQ ID NO: 1902437 - RNA, 17 nt, Human
cucagcuuccccaacac

SEQ ID NO: 1902438 - RNA, 22 nt, Human
cucagcuuccccaacacgcagg

SEQ ID NO: 1902439 - RNA, 20 nt, Human
cucagcucuuggcuccacug

SEQ ID NO: 1902440 - RNA, 14 nt, Human
cucagcucugggcc

SEQ ID NO: 1902441 - RNA, 23 nt, Human
cucagcucugggccauucuccac

SEQ ID NO: 1902442 - RNA, 17 nt, Human
cucagcucuuggcucca

SEQ ID NO: 1902443 - RNA, 18 nt, Human
cucagcucuuggcuccac

SEQ ID NO: 1902444 - RNA, 16 nt, Human
cucagcuucuccugug

SEQ ID NO: 1902445 - RNA, 12 nt, Human
cucaggaagaac

SEQ ID NO: 1902446 - RNA, 13 nt, Human
cucaggaagaaca

SEQ ID NO: 1902447 - RNA, 14 nt, Human
cucaggaagaacac

SEQ ID NO: 1902448 - RNA, 12 nt, Human
cucaggagcccu

SEQ ID NO: 1902449 - RNA, 13 nt, Human
cucaggagcccug

SEQ ID NO: 1902450 - RNA, 14 nt, Human
cucaggacugcgac

SEQ ID NO: 1902451 - RNA, 19 nt, Human
cucaggacagaugccacac

SEQ ID NO: 1902452 - RNA, 12 nt, Human
cucaggacagau

SEQ ID NO: 1902453 - RNA, 14 nt, Human
cucaggacagaugc

SEQ ID NO: 1902454 - RNA, 16 nt, Human
cucaggacagaugcca

SEQ ID NO: 1902455 - RNA, 18 nt, Human
cucaggacagaugccaca

SEQ ID NO: 1902456 - RNA, 14 nt, Human
cucaggagcccugg

SEQ ID NO: 1902457 - RNA, 15 nt, Human
cucaggagcccuggg

SEQ ID NO: 1902458 - RNA, 16 nt, Human
cucaggagcccuggga

SEQ ID NO: 1902459 - RNA, 17 nt, Human
cucaggagcccugggag

SEQ ID NO: 1902460 - RNA, 20 nt, Human
cucaggagcccugggaggcu

SEQ ID NO: 1902461 - RNA, 21 nt, Human
cucaggagcccugggaggcuc

SEQ ID NO: 1902462 - RNA, 22 nt, Human
cucaggagcccugggaggcucu

SEQ ID NO: 1902463 - RNA, 23 nt, Human
cucaggagcccugggaggcucug

SEQ ID NO: 1902464 - RNA, 24 nt, Human
cucaggagcccugggaggcucugg

SEQ ID NO: 1902465 - RNA, 18 nt, Human
cucaggaggcaggaccuu

SEQ ID NO: 1902466 - RNA, 17 nt, Human
cucaggaggcaggaccu

SEQ ID NO: 1902467 - RNA, 16 nt, Human
cucaggaggcaggacc

SEQ ID NO: 1902468 - RNA, 15 nt, Human
cucaggcagguggga

SEQ ID NO: 1902469 - RNA, 18 nt, Human
cucaggcaggugggaugg

SEQ ID NO: 1902470 - RNA, 18 nt, Human
cucagggccuggcucagg

SEQ ID NO: 1902471 - RNA, 19 nt, Human
cucagggccuggcucaggu

SEQ ID NO: 1902472 - RNA, 20 nt, Human
cucagggccuggcucaggug

SEQ ID NO: 1902473 - RNA, 20 nt, Human
cucagggcagcgccaggcug

SEQ ID NO: 1902474 - RNA, 23 nt, Human
cucaggugauccacccaccucag

SEQ ID NO: 1902475 - RNA, 22 nt, Human
cucaggugauccacccaccuca

SEQ ID NO: 1902476 - RNA, 12 nt, Human
cucagguggcca

SEQ ID NO: 1902477 - RNA, 13 nt, Human
cucagguggccau

SEQ ID NO: 1902478 - RNA, 15 nt, Human
cucagguggccaugc

SEQ ID NO: 1902479 - RNA, 18 nt, Human
cucagguggccaugccuc

SEQ ID NO: 1902480 - RNA, 19 nt, Human
cucagguggccaugccuca

SEQ ID NO: 1902481 - RNA, 20 nt, Human
cucagguggccaugccucag

SEQ ID NO: 1902482 - RNA, 19 nt, Human
cucagguggggucacucug

SEQ ID NO: 1902483 - RNA, 20 nt, Human
cucagguggggucacucugg

SEQ ID NO: 1902484 - RNA, 21 nt, Human
cucagguggggucacucuggc

SEQ ID NO: 1902485 - RNA, 21 nt, Human
cucagguggccaugccucagc

SEQ ID NO: 1902486 - RNA, 24 nt, Human
cucagggucccugguggcagcuca

SEQ ID NO: 1902487 - RNA, 14 nt, Human
cucagggccugguc

SEQ ID NO: 1902488 - RNA, 20 nt, Human
cucagggucccugguggcag

SEQ ID NO: 1902489 - RNA, 21 nt, Human
cucagggucccugguggcagc

SEQ ID NO: 1902490 - RNA, 22 nt, Human
cucagggucccugguggcagcu

SEQ ID NO: 1902491 - RNA, 23 nt, Human
cucagcggggacagcuccuucug

SEQ ID NO: 1902492 - RNA, 17 nt, Human
cucagcccugacccugu

SEQ ID NO: 1902493 - RNA, 21 nt, Human
cucagcggggacagcuccuuc

SEQ ID NO: 1902494 - RNA, 20 nt, Human
cucagcggggacagcuccuu

SEQ ID NO: 1902495 - RNA, 19 nt, Human
cucagcggggacagcuccu

SEQ ID NO: 1902496 - RNA, 18 nt, Human
cucagcggggacagcucc

SEQ ID NO: 1902497 - RNA, 16 nt, Human
cucagcggggacagcu

SEQ ID NO: 1902498 - RNA, 15 nt, Human
cucagcggggacagc

SEQ ID NO: 1902499 - RNA, 14 nt, Human
cucagcggggacag

SEQ ID NO: 1902500 - RNA, 13 nt, Human
cucagcccugacc

SEQ ID NO: 1902501 - RNA, 14 nt, Human
cucagcccugaccc

SEQ ID NO: 1902502 - RNA, 15 nt, Human
cucagcccugacccu

SEQ ID NO: 1902503 - RNA, 22 nt, Human
cucagcauccuggcacccggcc

SEQ ID NO: 1902504 - RNA, 21 nt, Human
cucagcauccuggcacccggc

SEQ ID NO: 1902505 - RNA, 13 nt, Human
cucagcauccugg

SEQ ID NO: 1902506 - RNA, 20 nt, Human
cucagcagcugguaaucuug

SEQ ID NO: 1902507 - RNA, 19 nt, Human
cucagcaaaagaugcuucu

SEQ ID NO: 1902508 - RNA, 20 nt, Human
cucagcaaaagaugcuucuc

SEQ ID NO: 1902509 - RNA, 16 nt, Human
cucagcaggggagggu

SEQ ID NO: 1902510 - RNA, 21 nt, Human
cucagcaaaagaugcuucuca

SEQ ID NO: 1902511 - RNA, 15 nt, Human
cucagcauccuggca

SEQ ID NO: 1902512 - RNA, 19 nt, Human
cucacuguugcccaggcug

SEQ ID NO: 1902513 - RNA, 18 nt, Human
cucacuguugcccaggcu

SEQ ID NO: 1902514 - RNA, 17 nt, Human
cucacuguugcccaggc

SEQ ID NO: 1902515 - RNA, 16 nt, Human
cucacuguugcccagg

SEQ ID NO: 1902516 - RNA, 23 nt, Human
cucagagagggugggagugggcc

SEQ ID NO: 1902517 - RNA, 19 nt, Human
cucagagagggugggagug

SEQ ID NO: 1902518 - RNA, 16 nt, Human
cucagaucuucugugg

SEQ ID NO: 1902519 - RNA, 19 nt, Human
cucagaggcgcacugugac

SEQ ID NO: 1902520 - RNA, 17 nt, Human
cucagaggcgcacugug

SEQ ID NO: 1902521 - RNA, 18 nt, Human
cucagaggcgcacuguga

SEQ ID NO: 1902522 - RNA, 16 nt, Human
cucacugcagccucaa

SEQ ID NO: 1902523 - RNA, 15 nt, Human
cucacugcagccuca

SEQ ID NO: 1902524 - RNA, 23 nt, Human
cucacugcuaagaauauuugaau

SEQ ID NO: 1902525 - RNA, 22 nt, Human
cucacugcuaagaauauuugaa

SEQ ID NO: 1902526 - RNA, 21 nt, Human
cucacugcuaagaauauuuga

SEQ ID NO: 1902527 - RNA, 20 nt, Human
cucacugcuaagaauauuug

SEQ ID NO: 1902528 - RNA, 15 nt, Human
cucacuguugcccag

SEQ ID NO: 1902529 - RNA, 14 nt, Human
cucacuguugccca

SEQ ID NO: 1902530 - RNA, 13 nt, Human
cucacuggggccu

SEQ ID NO: 1902531 - RNA, 16 nt, Human
cucacuggggccuaca

SEQ ID NO: 1902532 - RNA, 18 nt, Human
cucacuggggccuacagc

SEQ ID NO: 1902533 - RNA, 13 nt, Human
cgcaccuaaagca

SEQ ID NO: 1902534 - RNA, 20 nt, Human
cgcaccuaaagcagccagcc

SEQ ID NO: 1902535 - RNA, 23 nt, Human
cgcaccgaaaaacuaaaaauaau

SEQ ID NO: 1902536 - RNA, 21 nt, Human
cgaugggcccaauucuuacaa

SEQ ID NO: 1902537 - RNA, 13 nt, Human
cgcacugggcuug

SEQ ID NO: 1902538 - RNA, 14 nt, Human
cgcaccugccucag

SEQ ID NO: 1902539 - RNA, 15 nt, Human
cgcaccugccucagg

SEQ ID NO: 1902540 - RNA, 16 nt, Human
cgcaccugccucagga

SEQ ID NO: 1902541 - RNA, 23 nt, Human
cgcacuucgggaggucgaggcag

SEQ ID NO: 1902542 - RNA, 17 nt, Human
cgcacugugacccccag

SEQ ID NO: 1902543 - RNA, 12 nt, Human
cgcacugccucu

SEQ ID NO: 1902544 - RNA, 17 nt, Human
cgcacugggcuugggga

SEQ ID NO: 1902545 - RNA, 14 nt, Human
cgcagagcuggccg

SEQ ID NO: 1902546 - RNA, 22 nt, Human
cgcacugugacccccagcuccg

SEQ ID NO: 1902547 - RNA, 19 nt, Human
cgcagcauauucaggaagc

SEQ ID NO: 1902548 - RNA, 20 nt, Human
cgcagcauauucaggaagcu

SEQ ID NO: 1902549 - RNA, 15 nt, Human
cgcagcccugcagag

SEQ ID NO: 1902550 - RNA, 17 nt, Human
cgcagcccugcagaggg

SEQ ID NO: 1902551 - RNA, 16 nt, Human
cgaggacagggaggug

SEQ ID NO: 1902552 - RNA, 17 nt, Human
cgaggagguaaugaauu

SEQ ID NO: 1902553 - RNA, 19 nt, Human
cgagcccugguggcagugg

SEQ ID NO: 1902554 - RNA, 13 nt, Human
cgagccuggcucc

SEQ ID NO: 1902555 - RNA, 16 nt, Human
cgcuuugauucauagu

SEQ ID NO: 1902556 - RNA, 14 nt, Human
cgcuucugccugca

SEQ ID NO: 1902557 - RNA, 21 nt, Human
cgcugugcugcccugcccacc

SEQ ID NO: 1902558 - RNA, 23 nt, Human
cgcugugcugcccugcccaccug

SEQ ID NO: 1902559 - RNA, 19 nt, Human
cgcugugcugcccugccca

SEQ ID NO: 1902560 - RNA, 11 nt, Human
cgcugugcugc

SEQ ID NO: 1902561 - RNA, 13 nt, Human
cgcugugcugccc

SEQ ID NO: 1902562 - RNA, 14 nt, Human
cgcugugcugcccu

SEQ ID NO: 1902563 - RNA, 20 nt, Human
cgcuccugccgcagagcugg

SEQ ID NO: 1902564 - RNA, 19 nt, Human
cgcuccugccgcagagcug

SEQ ID NO: 1902565 - RNA, 18 nt, Human
cgcuccugccgcagagcu

SEQ ID NO: 1902566 - RNA, 17 nt, Human
cggaauaguuggcuagg

SEQ ID NO: 1902567 - RNA, 16 nt, Human
cggaauaguuggcuag

SEQ ID NO: 1902568 - RNA, 14 nt, Human
cgcuuucuacccag

SEQ ID NO: 1902569 - RNA, 16 nt, Human
cgcuuucuacccagcg

SEQ ID NO: 1902570 - RNA, 16 nt, Human
cgcuuucuagcuguug

SEQ ID NO: 1902571 - RNA, 22 nt, Human
cgcuuucuagcuguugagcugu

SEQ ID NO: 1902572 - RNA, 22 nt, Human
cggacagccacggccaggccag

SEQ ID NO: 1902573 - RNA, 21 nt, Human
cggacagccacggccaggcca

SEQ ID NO: 1902574 - RNA, 15 nt, Human
cggacaguggcagga

SEQ ID NO: 1902575 - RNA, 13 nt, Human
cggacaguggcag

SEQ ID NO: 1902576 - RNA, 15 nt, Human
cggagaaaggaaggg

SEQ ID NO: 1902577 - RNA, 17 nt, Human
cggagaaaggaagggcu

SEQ ID NO: 1902578 - RNA, 18 nt, Human
cgcccgggcccagaggag

SEQ ID NO: 1902579 - RNA, 17 nt, Human
cgcccgggcccagagga

SEQ ID NO: 1902580 - RNA, 16 nt, Human
cgcccgggcccagagg

SEQ ID NO: 1902581 - RNA, 14 nt, Human
cgcccgggcccaga

SEQ ID NO: 1902582 - RNA, 13 nt, Human
cgcccgggcccag

SEQ ID NO: 1902583 - RNA, 14 nt, Human
cgcgacaaugcaaa

SEQ ID NO: 1902584 - RNA, 14 nt, Human
cgccuuucccaacu

SEQ ID NO: 1902585 - RNA, 15 nt, Human
cgcgacaaugcaaac

SEQ ID NO: 1902586 - RNA, 19 nt, Human
cgcgguggcucacgccugu

SEQ ID NO: 1902587 - RNA, 18 nt, Human
cgcuacccgggaaggggg

SEQ ID NO: 1902588 - RNA, 17 nt, Human
cgcuacccgggaagggg

SEQ ID NO: 1902589 - RNA, 21 nt, Human
cgcuacccgggaagggggcug

SEQ ID NO: 1902590 - RNA, 24 nt, Human
cgcuacccgggaagggggcuggga

SEQ ID NO: 1902591 - RNA, 15 nt, Human
cgcggggacauuggg

SEQ ID NO: 1902592 - RNA, 21 nt, Human
cgcgucgcccucccaggcucu

SEQ ID NO: 1902593 - RNA, 21 nt, Human
cgcccagucuggaaugcagug

SEQ ID NO: 1902594 - RNA, 19 nt, Human
cgcccagucuggaaugcag

SEQ ID NO: 1902595 - RNA, 13 nt, Human
cgcccagucugga

SEQ ID NO: 1902596 - RNA, 12 nt, Human
cgcccaaggccc

SEQ ID NO: 1902597 - RNA, 12 nt, Human
cgcacuguggau

SEQ ID NO: 1902598 - RNA, 18 nt, Human
cgcagcccugcagagggc

SEQ ID NO: 1902599 - RNA, 19 nt, Human
cgcagcccugcagagggca

SEQ ID NO: 1902600 - RNA, 24 nt, Human
cgcaggaagacccaacacauggga

SEQ ID NO: 1902601 - RNA, 20 nt, Human
cggccaggccagagggagug

SEQ ID NO: 1902602 - RNA, 12 nt, Human
cggccaggccag

SEQ ID NO: 1902603 - RNA, 22 nt, Human
cggccagccccuggccccagga

SEQ ID NO: 1902604 - RNA, 11 nt, Human
cggccaggcca

SEQ ID NO: 1902605 - RNA, 14 nt, Human
cggcuggcagccca

SEQ ID NO: 1902606 - RNA, 15 nt, Human
cggccucccaaagug

SEQ ID NO: 1902607 - RNA, 20 nt, Human
cggcccuccuacccugcgcc

SEQ ID NO: 1902608 - RNA, 23 nt, Human
cggcccuccuacccugcgcccag

SEQ ID NO: 1902609 - RNA, 22 nt, Human
cggcccuccuacccugcgccca

SEQ ID NO: 1902610 - RNA, 14 nt, Human
cggcuggccuggcc

SEQ ID NO: 1902611 - RNA, 23 nt, Human
cggcuggcagcccaccccucaac

SEQ ID NO: 1902612 - RNA, 13 nt, Human
cggcuggccuggc

SEQ ID NO: 1902613 - RNA, 18 nt, Human
cgggaauuuucaucuagg

SEQ ID NO: 1902614 - RNA, 16 nt, Human
cgggaagggggcuggg

SEQ ID NO: 1902615 - RNA, 19 nt, Human
cgggaagggggcugggaca

SEQ ID NO: 1902616 - RNA, 20 nt, Human
cgggaagggggcugggacau

SEQ ID NO: 1902617 - RNA, 20 nt, Human
cgggaauuuucaucuaggau

SEQ ID NO: 1902618 - RNA, 19 nt, Human
ccuuguaauucuaaaugaa

SEQ ID NO: 1902619 - RNA, 16 nt, Human
ccuuguaauucuaaau

SEQ ID NO: 1902620 - RNA, 21 nt, Human
ccuuggugucgggcaugacac

SEQ ID NO: 1902621 - RNA, 19 nt, Human
ccuuggugucgggcaugac

SEQ ID NO: 1902622 - RNA, 20 nt, Human
ccuuggugucgggcaugaca

SEQ ID NO: 1902623 - RNA, 16 nt, Human
ccuuggcugcagggag

SEQ ID NO: 1902624 - RNA, 14 nt, Human
ccuuggggagcagg

SEQ ID NO: 1902625 - RNA, 23 nt, Human
ccuuggccgcaccuaaagcagcc

SEQ ID NO: 1902626 - RNA, 22 nt, Human
ccuuggcucaaguccucuuuuc

SEQ ID NO: 1902627 - RNA, 15 nt, Human
ccuuggauugucccc

SEQ ID NO: 1902628 - RNA, 18 nt, Human
ccuugaggaaacaacagc

SEQ ID NO: 1902629 - RNA, 21 nt, Human
ccuugaggaaacaacagcuuu

SEQ ID NO: 1902630 - RNA, 21 nt, Human
ccuugacagggcacaccgggc

SEQ ID NO: 1902631 - RNA, 18 nt, Human
ccuugacagggcacaccg

SEQ ID NO: 1902632 - RNA, 17 nt, Human
ccuucucuccagccccu

SEQ ID NO: 1902633 - RNA, 18 nt, Human
ccuucucuccagccccug

SEQ ID NO: 1902634 - RNA, 14 nt, Human
ccuugagaaaccuu

SEQ ID NO: 1902635 - RNA, 19 nt, Human
ccuugagaaaccuuauugu

SEQ ID NO: 1902636 - RNA, 18 nt, Human
ccuugagaagauucuucc

SEQ ID NO: 1902637 - RNA, 19 nt, Human
ccuucucuccagccccugg

SEQ ID NO: 1902638 - RNA, 14 nt, Human
ccuuccagcccaga

SEQ ID NO: 1902639 - RNA, 13 nt, Human
ccuuccagcccag

SEQ ID NO: 1902640 - RNA, 20 nt, Human
ccugugccucugggacugga

SEQ ID NO: 1902641 - RNA, 17 nt, Human
ccugugccuuuugccau

SEQ ID NO: 1902642 - RNA, 18 nt, Human
ccuguggaucaaauccag

SEQ ID NO: 1902643 - RNA, 20 nt, Human
ccuguggaugauaaaacaca

SEQ ID NO: 1902644 - RNA, 20 nt, Human
ccugugggcccccaaaugga

SEQ ID NO: 1902645 - RNA, 18 nt, Human
ccuucggccuccauccug

SEQ ID NO: 1902646 - RNA, 17 nt, Human
ccuuccuguucugaacu

SEQ ID NO: 1902647 - RNA, 16 nt, Human
ccuucgggcugugccc

SEQ ID NO: 1902648 - RNA, 15 nt, Human
ccuucgggcugugcc

SEQ ID NO: 1902649 - RNA, 17 nt, Human
ccuucggccuccauccu

SEQ ID NO: 1902650 - RNA, 16 nt, Human
ccuucggccuccaucc

SEQ ID NO: 1902651 - RNA, 15 nt, Human
ccuuccuguucugaa

SEQ ID NO: 1902652 - RNA, 21 nt, Human
ccuuccuggagcccagaggag

SEQ ID NO: 1902653 - RNA, 17 nt, Human
ccuuccauggacuuugu

SEQ ID NO: 1902654 - RNA, 13 nt, Human
ccuuccaggggug

SEQ ID NO: 1902655 - RNA, 22 nt, Human
ccuuccaguguccuuagaacau

SEQ ID NO: 1902656 - RNA, 12 nt, Human
ccuucucuccag

SEQ ID NO: 1902657 - RNA, 13 nt, Human
ccuucucuccagc

SEQ ID NO: 1902658 - RNA, 15 nt, Human
ccuucucuccagccc

SEQ ID NO: 1902659 - RNA, 16 nt, Human
ccuucucuccagcccc

SEQ ID NO: 1902660 - RNA, 21 nt, Human
ccuucucucaucucuuagcuc

SEQ ID NO: 1902661 - RNA, 17 nt, Human
ccuucucucaucucuua

SEQ ID NO: 1902662 - RNA, 16 nt, Human
ccuucucucaucucuu

SEQ ID NO: 1902663 - RNA, 17 nt, Human
ccuucuccucuuguaaa

SEQ ID NO: 1902664 - RNA, 15 nt, Human
ccuucucucaucucu

SEQ ID NO: 1902665 - RNA, 15 nt, Human
ccuucuccucuugua

SEQ ID NO: 1902666 - RNA, 16 nt, Human
ccuucuccucuuguaa

SEQ ID NO: 1902667 - RNA, 13 nt, Human
ccuucuaaaggug

SEQ ID NO: 1902668 - RNA, 14 nt, Human
ccuucuaaaggugu

SEQ ID NO: 1902669 - RNA, 22 nt, Human
ccuucuaaagguguugucccuu

SEQ ID NO: 1902670 - RNA, 23 nt, Human
cgaagucucuuuuuuuggcccag

SEQ ID NO: 1902671 - RNA, 17 nt, Human
cgaaucuacuaauucca

SEQ ID NO: 1902672 - RNA, 15 nt, Human
cgaauauugcugaug

SEQ ID NO: 1902673 - RNA, 17 nt, Human
cgaauauugcugauggu

SEQ ID NO: 1902674 - RNA, 18 nt, Human
cgaaugacaaaaucaucu

SEQ ID NO: 1902675 - RNA, 22 nt, Human
cgaaugacaaaaucaucuuugu

SEQ ID NO: 1902676 - RNA, 15 nt, Human
cgaauagcugggacu

SEQ ID NO: 1902677 - RNA, 16 nt, Human
cgaauagcugggacua

SEQ ID NO: 1902678 - RNA, 11 nt, Human
cgaauauugcu

SEQ ID NO: 1902679 - RNA, 12 nt, Human
cgaauauugcug

SEQ ID NO: 1902680 - RNA, 14 nt, Human
cgaauauugcugau

SEQ ID NO: 1902681 - RNA, 22 nt, Human
cgaaauguuauuuuuuaauuau

SEQ ID NO: 1902682 - RNA, 14 nt, Human
cgaaauguuauuuu

SEQ ID NO: 1902683 - RNA, 13 nt, Human
cgaaauguuauuu

SEQ ID NO: 1902684 - RNA, 19 nt, Human
cgaacauccaaccuuccca

SEQ ID NO: 1902685 - RNA, 21 nt, Human
cgaacauguuuuucuucuccc

SEQ ID NO: 1902686 - RNA, 23 nt, Human
cgaacauguuuuucuucucccuc

SEQ ID NO: 1902687 - RNA, 20 nt, Human
cgaagccaucuuucuuugga

SEQ ID NO: 1902688 - RNA, 23 nt, Human
cgaaagggacuuggaagcuccgc

SEQ ID NO: 1902689 - RNA, 17 nt, Human
ccuuuuuuggcugcuga

SEQ ID NO: 1902690 - RNA, 18 nt, Human
ccuuuuuuggcugcugaa

SEQ ID NO: 1902691 - RNA, 20 nt, Human
ccuuuuuuggcugcugaagg

SEQ ID NO: 1902692 - RNA, 22 nt, Human
ccuuuuuuggcugcugaaggcu

SEQ ID NO: 1902693 - RNA, 15 nt, Human
ccuuuuuuggcugcu

SEQ ID NO: 1902694 - RNA, 15 nt, Human
ccuuugugaggaagc

SEQ ID NO: 1902695 - RNA, 16 nt, Human
ccuuugugaggaagcc

SEQ ID NO: 1902696 - RNA, 17 nt, Human
ccuuugugaggaagccg

SEQ ID NO: 1902697 - RNA, 23 nt, Human
ccuuugugaggaagccgcugggg

SEQ ID NO: 1902698 - RNA, 22 nt, Human
ccuuuguccccaccgcagacag

SEQ ID NO: 1902699 - RNA, 23 nt, Human
ccuuuguccccaccgcagacagg

SEQ ID NO: 1902700 - RNA, 14 nt, Human
ccuuugugaggaag

SEQ ID NO: 1902701 - RNA, 15 nt, Human
ccuuugguucuggcc

SEQ ID NO: 1902702 - RNA, 20 nt, Human
ccuuugguucuggccagaau

SEQ ID NO: 1902703 - RNA, 14 nt, Human
ccuuugguucuggc

SEQ ID NO: 1902704 - RNA, 17 nt, Human
ccuugucugaacuggag

SEQ ID NO: 1902705 - RNA, 23 nt, Human
ccuuuguauucucuccuguaccu

SEQ ID NO: 1902706 - RNA, 22 nt, Human
ccuuuguauucucuccuguacc

SEQ ID NO: 1902707 - RNA, 24 nt, Human
ccuuuguauucucuccuguaccuc

SEQ ID NO: 1902708 - RNA, 16 nt, Human
ccuuuguccccaccgc

SEQ ID NO: 1902709 - RNA, 18 nt, Human
ccuuuguccccaccgcag

SEQ ID NO: 1902710 - RNA, 14 nt, Human
ccuuuguccccacc

SEQ ID NO: 1902711 - RNA, 14 nt, Human
ccuuugucccagaa

SEQ ID NO: 1902712 - RNA, 13 nt, Human
ccugcccuuggca

SEQ ID NO: 1902713 - RNA, 15 nt, Human
ccugcccugugggcc

SEQ ID NO: 1902714 - RNA, 19 nt, Human
ccugcccuuaccugccagg

SEQ ID NO: 1902715 - RNA, 21 nt, Human
ccugcccuuaccugccaggaa

SEQ ID NO: 1902716 - RNA, 22 nt, Human
ccugcccuuaccugccaggaag

SEQ ID NO: 1902717 - RNA, 14 nt, Human
ccugccuguugggc

SEQ ID NO: 1902718 - RNA, 17 nt, Human
ccugccgcagagcuggc

SEQ ID NO: 1902719 - RNA, 14 nt, Human
ccugccucagccuc

SEQ ID NO: 1902720 - RNA, 13 nt, Human
ccugccucagccu

SEQ ID NO: 1902721 - RNA, 12 nt, Human
ccugccucagcc

SEQ ID NO: 1902722 - RNA, 16 nt, Human
ccugccgcagagcugg

SEQ ID NO: 1902723 - RNA, 15 nt, Human
ccugccgcagagcug

SEQ ID NO: 1902724 - RNA, 14 nt, Human
ccugccgcagagcu

SEQ ID NO: 1902725 - RNA, 13 nt, Human
ccugccgcagagc

SEQ ID NO: 1902726 - RNA, 13 nt, Human
ccugcccuccccu

SEQ ID NO: 1902727 - RNA, 11 nt, Human
ccugcccugug

SEQ ID NO: 1902728 - RNA, 12 nt, Human
ccugcccugugg

SEQ ID NO: 1902729 - RNA, 14 nt, Human
ccugcccugugggc

SEQ ID NO: 1902730 - RNA, 16 nt, Human
ccugcccggcugcgga

SEQ ID NO: 1902731 - RNA, 14 nt, Human
ccugcccggcugcg

SEQ ID NO: 1902732 - RNA, 17 nt, Human
ccugccccugagcccau

SEQ ID NO: 1902733 - RNA, 22 nt, Human
ccugccagggacagagggggug

SEQ ID NO: 1902734 - RNA, 15 nt, Human
ccugccaggcauggu

SEQ ID NO: 1902735 - RNA, 19 nt, Human
ccugcccccgcauccccug

SEQ ID NO: 1902736 - RNA, 20 nt, Human
ccugcccccgcauccccugc

SEQ ID NO: 1902737 - RNA, 22 nt, Human
ccugcccccgcauccccugccu

SEQ ID NO: 1902738 - RNA, 23 nt, Human
ccugcccccgcauccccugccuc

SEQ ID NO: 1902739 - RNA, 12 nt, Human
ccugccaggcau

SEQ ID NO: 1902740 - RNA, 22 nt, Human
ccugccuguugggccaggagcc

SEQ ID NO: 1902741 - RNA, 17 nt, Human
ccugcacaagccagggu

SEQ ID NO: 1902742 - RNA, 16 nt, Human
ccugcacaagccaggg

SEQ ID NO: 1902743 - RNA, 15 nt, Human
ccugcacaagccagg

SEQ ID NO: 1902744 - RNA, 14 nt, Human
ccugaucagaccac

SEQ ID NO: 1902745 - RNA, 18 nt, Human
ccugaucagaccacggcu

SEQ ID NO: 1902746 - RNA, 19 nt, Human
ccugaucagaccacggcuc

SEQ ID NO: 1902747 - RNA, 13 nt, Human
ccugauccuggag

SEQ ID NO: 1902748 - RNA, 15 nt, Human
ccugauccuggaggc

SEQ ID NO: 1902749 - RNA, 18 nt, Human
ccugauccuggaggccca

SEQ ID NO: 1902750 - RNA, 19 nt, Human
ccugauccuggaggcccag

SEQ ID NO: 1902751 - RNA, 20 nt, Human
ccugauccuggaggcccagu

SEQ ID NO: 1902752 - RNA, 24 nt, Human
ccugccacccugggccuggcagcu

SEQ ID NO: 1902753 - RNA, 22 nt, Human
ccugccacccuggggagaaagu

SEQ ID NO: 1902754 - RNA, 16 nt, Human
ccugccacccugggga

SEQ ID NO: 1902755 - RNA, 15 nt, Human
ccugccacccugggc

SEQ ID NO: 1902756 - RNA, 21 nt, Human
ccugccacccugggccuggca

SEQ ID NO: 1902757 - RNA, 14 nt, Human
ccugccacccuggg

SEQ ID NO: 1902758 - RNA, 13 nt, Human
ccugccacccugg

SEQ ID NO: 1902759 - RNA, 12 nt, Human
ccugccacccug

SEQ ID NO: 1902760 - RNA, 19 nt, Human
ccugccaauggacuaacuu

SEQ ID NO: 1902761 - RNA, 17 nt, Human
ccugaggcuccacuugg

SEQ ID NO: 1902762 - RNA, 21 nt, Human
ccugaggccucuggaaagcaa

SEQ ID NO: 1902763 - RNA, 14 nt, Human
ccugaggcuccacu

SEQ ID NO: 1902764 - RNA, 13 nt, Human
ccugaggcuccac

SEQ ID NO: 1902765 - RNA, 13 nt, Human
ccugaggcugggc

SEQ ID NO: 1902766 - RNA, 14 nt, Human
ccugaggcugggcu

SEQ ID NO: 1902767 - RNA, 15 nt, Human
ccugaggcugggcuc

SEQ ID NO: 1902768 - RNA, 16 nt, Human
ccugaggcugggcucc

SEQ ID NO: 1902769 - RNA, 12 nt, Human
ccugagcuggga

SEQ ID NO: 1902770 - RNA, 15 nt, Human
ccugaggcccagagg

SEQ ID NO: 1902771 - RNA, 16 nt, Human
ccugaggcccagaggg

SEQ ID NO: 1902772 - RNA, 17 nt, Human
ccugaggcccagagggc

SEQ ID NO: 1902773 - RNA, 18 nt, Human
ccugaggcccagagggcc

SEQ ID NO: 1902774 - RNA, 15 nt, Human
ccugagccagauuuc

SEQ ID NO: 1902775 - RNA, 16 nt, Human
ccugagccagauuuca

SEQ ID NO: 1902776 - RNA, 18 nt, Human
ccugagccagauuucacu

SEQ ID NO: 1902777 - RNA, 19 nt, Human
ccugaagucacacagugag

SEQ ID NO: 1902778 - RNA, 20 nt, Human
ccugaagucacacagugagu

SEQ ID NO: 1902779 - RNA, 22 nt, Human
ccugaagucuuuguacagacaa

SEQ ID NO: 1902780 - RNA, 20 nt, Human
ccugagccagauuucacucu

SEQ ID NO: 1902781 - RNA, 23 nt, Human
ccugagcgcuccugccgcagagc

SEQ ID NO: 1902782 - RNA, 21 nt, Human
ccugagcgcuccugccgcaga

SEQ ID NO: 1902783 - RNA, 16 nt, Human
ccugagcgcuccugcc

SEQ ID NO: 1902784 - RNA, 12 nt, Human
ccugagcgcucc

SEQ ID NO: 1902785 - RNA, 17 nt, Human
ccugagcgccugggucc

SEQ ID NO: 1902786 - RNA, 21 nt, Human
ccugaagccaggccauggcua

SEQ ID NO: 1902787 - RNA, 14 nt, Human
ccugaaggccccgc

SEQ ID NO: 1902788 - RNA, 18 nt, Human
ccugaaggccccgcccag

SEQ ID NO: 1902789 - RNA, 19 nt, Human
ccugaaggccccgcccagg

SEQ ID NO: 1902790 - RNA, 22 nt, Human
ccugaaggccccgcccaggcuu

SEQ ID NO: 1902791 - RNA, 20 nt, Human
ccugaaggggccaugauggc

SEQ ID NO: 1902792 - RNA, 14 nt, Human
ccugaaggggcguc

SEQ ID NO: 1902793 - RNA, 16 nt, Human
ccugaaggggcgucug

SEQ ID NO: 1902794 - RNA, 22 nt, Human
ccugaaggggcgucuguucccc

SEQ ID NO: 1902795 - RNA, 20 nt, Human
ccugaaggccccgcccaggc

SEQ ID NO: 1902796 - RNA, 21 nt, Human
ccugaaggccccgcccaggcu

SEQ ID NO: 1902797 - RNA, 13 nt, Human
ccugaaagaggaa

SEQ ID NO: 1902798 - RNA, 13 nt, Human
ccugaaagcccug

SEQ ID NO: 1902799 - RNA, 14 nt, Human
ccugaaagcccuga

SEQ ID NO: 1902800 - RNA, 18 nt, Human
ccugaaagcccugagcuu

SEQ ID NO: 1902801 - RNA, 19 nt, Human
ccugaagagaagggcaggg

SEQ ID NO: 1902802 - RNA, 21 nt, Human
ccugaagaguccucugaauga

SEQ ID NO: 1902803 - RNA, 15 nt, Human
ccucuuccugccuag

SEQ ID NO: 1902804 - RNA, 15 nt, Human
ccucuuccuuuagga

SEQ ID NO: 1902805 - RNA, 15 nt, Human
ccugaaacaacuugg

SEQ ID NO: 1902806 - RNA, 18 nt, Human
ccucuucauggauggggg

SEQ ID NO: 1902807 - RNA, 15 nt, Human
ccucuuccaggcccc

SEQ ID NO: 1902808 - RNA, 15 nt, Human
ccugagcugggauga

SEQ ID NO: 1902809 - RNA, 22 nt, Human
ccuggccacgcagccaggacac

SEQ ID NO: 1902810 - RNA, 20 nt, Human
ccuggccacgcagccaggac

SEQ ID NO: 1902811 - RNA, 19 nt, Human
ccuggccacgcagccagga

SEQ ID NO: 1902812 - RNA, 17 nt, Human
ccuggccaucccacaag

SEQ ID NO: 1902813 - RNA, 19 nt, Human
ccuggccaucccacaagug

SEQ ID NO: 1902814 - RNA, 13 nt, Human
ccuggcccacugc

SEQ ID NO: 1902815 - RNA, 14 nt, Human
ccuggcccacugca

SEQ ID NO: 1902816 - RNA, 18 nt, Human
ccuggccacgcagccagg

SEQ ID NO: 1902817 - RNA, 15 nt, Human
ccuggccacgcagcc

SEQ ID NO: 1902818 - RNA, 20 nt, Human
ccuggccagaugcaccagcc

SEQ ID NO: 1902819 - RNA, 23 nt, Human
ccuggccagaugcaccagcccuu

SEQ ID NO: 1902820 - RNA, 21 nt, Human
ccuggccagaugcaccagccc

SEQ ID NO: 1902821 - RNA, 13 nt, Human
ccuggcacugcuu

SEQ ID NO: 1902822 - RNA, 16 nt, Human
ccuggcacugcuucca

SEQ ID NO: 1902823 - RNA, 13 nt, Human
ccuggcaugggaa

SEQ ID NO: 1902824 - RNA, 21 nt, Human
ccuggcacccggccccugcug

SEQ ID NO: 1902825 - RNA, 20 nt, Human
ccuggcacccggccccugcu

SEQ ID NO: 1902826 - RNA, 12 nt, Human
ccuggcacugcu

SEQ ID NO: 1902827 - RNA, 19 nt, Human
ccuggagacuaaccccacc

SEQ ID NO: 1902828 - RNA, 19 nt, Human
ccuggcacccggccccugc

SEQ ID NO: 1902829 - RNA, 21 nt, Human
ccugcuaauuccccagauugc

SEQ ID NO: 1902830 - RNA, 20 nt, Human
ccugccuguugggccaggag

SEQ ID NO: 1902831 - RNA, 18 nt, Human
ccugccuguugggccagg

SEQ ID NO: 1902832 - RNA, 19 nt, Human
ccugccuguugggccagga

SEQ ID NO: 1902833 - RNA, 17 nt, Human
ccuggcucccaggacac

SEQ ID NO: 1902834 - RNA, 16 nt, Human
ccuggcucccaggaca

SEQ ID NO: 1902835 - RNA, 15 nt, Human
ccuggcucccaggac

SEQ ID NO: 1902836 - RNA, 14 nt, Human
ccuggcucccagga

SEQ ID NO: 1902837 - RNA, 13 nt, Human
ccuggccccagga

SEQ ID NO: 1902838 - RNA, 12 nt, Human
ccuggccccagg

SEQ ID NO: 1902839 - RNA, 16 nt, Human
ccuggcccacugcauc

SEQ ID NO: 1902840 - RNA, 15 nt, Human
ccugggcagaaggaa

SEQ ID NO: 1902841 - RNA, 18 nt, Human
ccugggagugagcugguu

SEQ ID NO: 1902842 - RNA, 16 nt, Human
ccugggcagaaggaag

SEQ ID NO: 1902843 - RNA, 16 nt, Human
ccugggagugagcugg

SEQ ID NO: 1902844 - RNA, 22 nt, Human
ccugggaggucaaggcugcagu

SEQ ID NO: 1902845 - RNA, 20 nt, Human
ccugggggcugggcagagga

SEQ ID NO: 1902846 - RNA, 21 nt, Human
ccugggggcugggcagaggaa

SEQ ID NO: 1902847 - RNA, 19 nt, Human
ccugggggcugggcagagg

SEQ ID NO: 1902848 - RNA, 12 nt, Human
ccuggggggcag

SEQ ID NO: 1902849 - RNA, 14 nt, Human
ccuggggucuggag

SEQ ID NO: 1902850 - RNA, 21 nt, Human
ccugggguggggauagggagc

SEQ ID NO: 1902851 - RNA, 15 nt, Human
ccuggggugggguca

SEQ ID NO: 1902852 - RNA, 14 nt, Human
ccuggcaugggaau

SEQ ID NO: 1902853 - RNA, 21 nt, Human
ccuguaguugcguggacucug

SEQ ID NO: 1902854 - RNA, 16 nt, Human
ccuguauaaguggagg

SEQ ID NO: 1902855 - RNA, 18 nt, Human
ccuguauaaguggaggca

SEQ ID NO: 1902856 - RNA, 23 nt, Human
ccuguaguugcguggacucugca

SEQ ID NO: 1902857 - RNA, 13 nt, Human
ccuguagcccuaa

SEQ ID NO: 1902858 - RNA, 15 nt, Human
ccuguagagugggag

SEQ ID NO: 1902859 - RNA, 16 nt, Human
ccuguagagugggagc

SEQ ID NO: 1902860 - RNA, 14 nt, Human
ccugguggcagugg

SEQ ID NO: 1902861 - RNA, 13 nt, Human
ccugguggcagug

SEQ ID NO: 1902862 - RNA, 15 nt, Human
ccugguggcaguggg

SEQ ID NO: 1902863 - RNA, 12 nt, Human
ccuguaccucuu

SEQ ID NO: 1902864 - RNA, 10 nt, Human
ccuguaccuc

SEQ ID NO: 1902865 - RNA, 12 nt, Human
ccugucccccug

SEQ ID NO: 1902866 - RNA, 13 nt, Human
ccugucccccuga

SEQ ID NO: 1902867 - RNA, 14 nt, Human
ccugucccccugac

SEQ ID NO: 1902868 - RNA, 15 nt, Human
ccugucccccugaca

SEQ ID NO: 1902869 - RNA, 23 nt, Human
ccuguauauagcccagccaggcc

SEQ ID NO: 1902870 - RNA, 22 nt, Human
ccuguauaaguggaggcacuuu

SEQ ID NO: 1902871 - RNA, 23 nt, Human
ccuguauaaguggaggcacuuua

SEQ ID NO: 1902872 - RNA, 13 nt, Human
ccuguauauagcc

SEQ ID NO: 1902873 - RNA, 16 nt, Human
ccuguauauagcccag

SEQ ID NO: 1902874 - RNA, 21 nt, Human
ccuguauauagcccagccagg

SEQ ID NO: 1902875 - RNA, 18 nt, Human
ccugguggcagcugcggu

SEQ ID NO: 1902876 - RNA, 17 nt, Human
ccugguggcagcugcgg

SEQ ID NO: 1902877 - RNA, 16 nt, Human
ccugguggcagcugcg

SEQ ID NO: 1902878 - RNA, 15 nt, Human
ccugguggcagcugc

SEQ ID NO: 1902879 - RNA, 14 nt, Human
ccugguggcagcug

SEQ ID NO: 1902880 - RNA, 22 nt, Human
ccugguggcagcucaccucucc

SEQ ID NO: 1902881 - RNA, 19 nt, Human
ccugguggcagcucaccuc

SEQ ID NO: 1902882 - RNA, 21 nt, Human
ccugguggcagcucaccucuc

SEQ ID NO: 1902883 - RNA, 20 nt, Human
ccugguccucacacucaccc

SEQ ID NO: 1902884 - RNA, 23 nt, Human
ccuggguccaggggaggccuucc

SEQ ID NO: 1902885 - RNA, 18 nt, Human
gaaaaucuuauaauuuaa

SEQ ID NO: 1902886 - RNA, 22 nt, Human
gaaaaucuacacuccagugaga

SEQ ID NO: 1902887 - RNA, 20 nt, Human
gaaaaucagccugcuccagc

SEQ ID NO: 1902888 - RNA, 22 nt, Human
gaaaaucagccugcuccagcug

SEQ ID NO: 1902889 - RNA, 19 nt, Human
gaaaaguuuuguaaauuuc

SEQ ID NO: 1902890 - RNA, 17 nt, Human
gaaaauauuuugaucuu

SEQ ID NO: 1902891 - RNA, 13 nt, Human
gaaaauauuuaaa

SEQ ID NO: 1902892 - RNA, 19 nt, Human
gaaaauauuuugaucuuca

SEQ ID NO: 1902893 - RNA, 20 nt, Human
gaaaauauuuugaucuucaa

SEQ ID NO: 1902894 - RNA, 23 nt, Human
gaaaauauuuugaucuucaacaa

SEQ ID NO: 1902895 - RNA, 12 nt, Human
gaaaaggcaaaa

SEQ ID NO: 1902896 - RNA, 11 nt, Human
gaaaaggcagg

SEQ ID NO: 1902897 - RNA, 15 nt, Human
gaaaaguugaauuuu

SEQ ID NO: 1902898 - RNA, 14 nt, Human
gaaaaguugaauuu

SEQ ID NO: 1902899 - RNA, 19 nt, Human
gaaaagcugcugacagugu

SEQ ID NO: 1902900 - RNA, 20 nt, Human
gaaaacguggcugcuucaag

SEQ ID NO: 1902901 - RNA, 22 nt, Human
gaaaacguggcugcuucaagga

SEQ ID NO: 1902902 - RNA, 24 nt, Human
gaaaacacuguucucugcccucca

SEQ ID NO: 1902903 - RNA, 22 nt, Human
gaaaacacuguucucugcccuc

SEQ ID NO: 1902904 - RNA, 13 nt, Human
gaaaacagaccua

SEQ ID NO: 1902905 - RNA, 22 nt, Human
gaaaacaggacuuaaaaugaca

SEQ ID NO: 1902906 - RNA, 21 nt, Human
gaaaacagaccuaaugcuccu

SEQ ID NO: 1902907 - RNA, 20 nt, Human
gaaaacaggacuuaaaauga

SEQ ID NO: 1902908 - RNA, 18 nt, Human
cuuuuugaaaucagcaua

SEQ ID NO: 1902909 - RNA, 21 nt, Human
cuuuuucuuuuuuucuuuggu

SEQ ID NO: 1902910 - RNA, 15 nt, Human
cuuuuugaaaucagc

SEQ ID NO: 1902911 - RNA, 17 nt, Human
cuuuuuuggcugcugaa

SEQ ID NO: 1902912 - RNA, 20 nt, Human
cuuuuuuggcugcugaaggc

SEQ ID NO: 1902913 - RNA, 22 nt, Human
cuuuuuuggcugcugaaggcuc

SEQ ID NO: 1902914 - RNA, 18 nt, Human
gaaaacacuguucucugc

SEQ ID NO: 1902915 - RNA, 19 nt, Human
gaaaacacauuuuucuuag

SEQ ID NO: 1902916 - RNA, 18 nt, Human
gaaaacacauuuuucuua

SEQ ID NO: 1902917 - RNA, 12 nt, Human
gaaaaaggagga

SEQ ID NO: 1902918 - RNA, 15 nt, Human
gaaaaaggaggaaga

SEQ ID NO: 1902919 - RNA, 16 nt, Human
cuuuuuuggcugcuga

SEQ ID NO: 1902920 - RNA, 17 nt, Human
cuuuuuauggccuguga

SEQ ID NO: 1902921 - RNA, 20 nt, Human
cuuuuguucuugguuuguaa

SEQ ID NO: 1902922 - RNA, 13 nt, Human
cuuuuguucgcau

SEQ ID NO: 1902923 - RNA, 14 nt, Human
cuuuuguucccauc

SEQ ID NO: 1902924 - RNA, 15 nt, Human
cuuuuuauugaaucu

SEQ ID NO: 1902925 - RNA, 17 nt, Human
cuuuuuauugaaucuau

SEQ ID NO: 1902926 - RNA, 17 nt, Human
cuuuuguucccauccuc

SEQ ID NO: 1902927 - RNA, 13 nt, Human
cuuuuuauugaau

SEQ ID NO: 1902928 - RNA, 14 nt, Human
cuuuuuauugaauc

SEQ ID NO: 1902929 - RNA, 19 nt, Human
cuuuuuauugaaucuauuu

SEQ ID NO: 1902930 - RNA, 18 nt, Human
cuuuguuaguuucuccaa

SEQ ID NO: 1902931 - RNA, 17 nt, Human
cuuuguuaaguucuauu

SEQ ID NO: 1902932 - RNA, 19 nt, Human
cuuuguguucuuuguguca

SEQ ID NO: 1902933 - RNA, 12 nt, Human
cuuuuguucuug

SEQ ID NO: 1902934 - RNA, 11 nt, Human
cuuuuguucuu

SEQ ID NO: 1902935 - RNA, 19 nt, Human
gaaacuaggugcauauuua

SEQ ID NO: 1902936 - RNA, 16 nt, Human
gaaacgucuucuaaac

SEQ ID NO: 1902937 - RNA, 20 nt, Human
gaaaccuuauuguaccucuc

SEQ ID NO: 1902938 - RNA, 17 nt, Human
gaaaccuuauuguaccu

SEQ ID NO: 1902939 - RNA, 19 nt, Human
gaaaccuuauuguaccucu

SEQ ID NO: 1902940 - RNA, 14 nt, Human
gaaacccugucucu

SEQ ID NO: 1902941 - RNA, 16 nt, Human
gaaaccugggauucag

SEQ ID NO: 1902942 - RNA, 23 nt, Human
gaaacccagcucugguccauaga

SEQ ID NO: 1902943 - RNA, 21 nt, Human
gaaaccauuaugaagaagaga

SEQ ID NO: 1902944 - RNA, 13 nt, Human
gaaacccagcucu

SEQ ID NO: 1902945 - RNA, 14 nt, Human
gaaacccagcucug

SEQ ID NO: 1902946 - RNA, 15 nt, Human
gaaacccagcucugg

SEQ ID NO: 1902947 - RNA, 16 nt, Human
gaaacccagcucuggu

SEQ ID NO: 1902948 - RNA, 18 nt, Human
gaaacccagcucuggucc

SEQ ID NO: 1902949 - RNA, 19 nt, Human
gaaacccagcucuggucca

SEQ ID NO: 1902950 - RNA, 13 nt, Human
gaaacacagaaac

SEQ ID NO: 1902951 - RNA, 16 nt, Human
gaaaaugaaucccucu

SEQ ID NO: 1902952 - RNA, 20 nt, Human
gaaaaugcaacaacauguau

SEQ ID NO: 1902953 - RNA, 18 nt, Human
gaaaaugcaacaacaugu

SEQ ID NO: 1902954 - RNA, 23 nt, Human
gaaaaugauguguacccaaacgu

SEQ ID NO: 1902955 - RNA, 22 nt, Human
gaaaaugcagcagggaugcccu

SEQ ID NO: 1902956 - RNA, 14 nt, Human
gaaaaugcagcagg

SEQ ID NO: 1902957 - RNA, 17 nt, Human
gaaagcccugugcucca

SEQ ID NO: 1902958 - RNA, 14 nt, Human
gaaagcgcagaugc

SEQ ID NO: 1902959 - RNA, 17 nt, Human
gaaagcccugagcuuuc

SEQ ID NO: 1902960 - RNA, 15 nt, Human
gaaagccccagaaau

SEQ ID NO: 1902961 - RNA, 21 nt, Human
gaaagcccugagcuuucugcu

SEQ ID NO: 1902962 - RNA, 22 nt, Human
gaaagcccugagcuuucugcua

SEQ ID NO: 1902963 - RNA, 14 nt, Human
gaaagcagggacuu

SEQ ID NO: 1902964 - RNA, 19 nt, Human
gaaagacuuuuccaacccu

SEQ ID NO: 1902965 - RNA, 17 nt, Human
gaaagacuguacaaagu

SEQ ID NO: 1902966 - RNA, 21 nt, Human
gaaagaggaaugaaguacuca

SEQ ID NO: 1902967 - RNA, 21 nt, Human
gaaagaguacucuuguuuccu

SEQ ID NO: 1902968 - RNA, 15 nt, Human
gaaagaguaggaaga

SEQ ID NO: 1902969 - RNA, 16 nt, Human
gaaagaguaggaagac

SEQ ID NO: 1902970 - RNA, 17 nt, Human
gaaagcagaacagugau

SEQ ID NO: 1902971 - RNA, 22 nt, Human
gaaagcagaacagugauuacca

SEQ ID NO: 1902972 - RNA, 22 nt, Human
cuuuaucuaauaccucugugug

SEQ ID NO: 1902973 - RNA, 21 nt, Human
cuuuaucuaauaccucugugu

SEQ ID NO: 1902974 - RNA, 18 nt, Human
cuuuaucuugaauaaugu

SEQ ID NO: 1902975 - RNA, 21 nt, Human
cuuuaucuugaauaauguaag

SEQ ID NO: 1902976 - RNA, 23 nt, Human
cuuuaucuugaauaauguaagac

SEQ ID NO: 1902977 - RNA, 15 nt, Human
cuuuaugcacaaaau

SEQ ID NO: 1902978 - RNA, 20 nt, Human
cuuuauauggccucaagauc

SEQ ID NO: 1902979 - RNA, 15 nt, Human
cuuuagcgcccaguu

SEQ ID NO: 1902980 - RNA, 14 nt, Human
cuuuagcgcccagu

SEQ ID NO: 1902981 - RNA, 13 nt, Human
cuuuauaauucua

SEQ ID NO: 1902982 - RNA, 19 nt, Human
cuuuauaauucuacuuuga

SEQ ID NO: 1902983 - RNA, 13 nt, Human
cuuuacuauggcc

SEQ ID NO: 1902984 - RNA, 18 nt, Human
cuuuacggacacccccuc

SEQ ID NO: 1902985 - RNA, 22 nt, Human
cuuuaccuuuuuuauacauaaa

SEQ ID NO: 1902986 - RNA, 12 nt, Human
cuuguuccuaga

SEQ ID NO: 1902987 - RNA, 13 nt, Human
cuuguuauuuaua

SEQ ID NO: 1902988 - RNA, 15 nt, Human
cuuguuauuuauaac

SEQ ID NO: 1902989 - RNA, 23 nt, Human
cuuguacauguguagccugugca

SEQ ID NO: 1902990 - RNA, 22 nt, Human
cuuguacauguguagccugugc

SEQ ID NO: 1902991 - RNA, 20 nt, Human
cuuguacauguguagccugu

SEQ ID NO: 1902992 - RNA, 19 nt, Human
cuuguacauguguagccug

SEQ ID NO: 1902993 - RNA, 14 nt, Human
cuuguacaugugua

SEQ ID NO: 1902994 - RNA, 22 nt, Human
cuuguauagguuuuaaagaccu

SEQ ID NO: 1902995 - RNA, 12 nt, Human
cuuguccagcug

SEQ ID NO: 1902996 - RNA, 13 nt, Human
cuuguccagcuga

SEQ ID NO: 1902997 - RNA, 13 nt, Human
cuuguacaugugu

SEQ ID NO: 1902998 - RNA, 21 nt, Human
cuuguaaauagcucagguguc

SEQ ID NO: 1902999 - RNA, 22 nt, Human
cuuguacauaaugcgugcauac

SEQ ID NO: 1903000 - RNA, 21 nt, Human
cuuguacauaaugcgugcaua

SEQ ID NO: 1903001 - RNA, 19 nt, Human
cuuguacauaaugcgugca

SEQ ID NO: 1903002 - RNA, 18 nt, Human
cuuguaaauagcucaggu

SEQ ID NO: 1903003 - RNA, 17 nt, Human
cuuguaaauagcucagg

SEQ ID NO: 1903004 - RNA, 12 nt, Human
cuuguacauaau

SEQ ID NO: 1903005 - RNA, 15 nt, Human
cuuguacauaaugcg

SEQ ID NO: 1903006 - RNA, 19 nt, Human
cuugaguuuaaauuguaau

SEQ ID NO: 1903007 - RNA, 23 nt, Human
cuuggggggcugaggugggagga

SEQ ID NO: 1903008 - RNA, 16 nt, Human
cuuguaaauagcucag

SEQ ID NO: 1903009 - RNA, 13 nt, Human
cuuucuggcucuc

SEQ ID NO: 1903010 - RNA, 13 nt, Human
cuuucuguauaua

SEQ ID NO: 1903011 - RNA, 20 nt, Human
cuuucuggcuaugcauuuga

SEQ ID NO: 1903012 - RNA, 19 nt, Human
cuuucuggcuaugcauuug

SEQ ID NO: 1903013 - RNA, 18 nt, Human
cuuucuggcuaugcauuu

SEQ ID NO: 1903014 - RNA, 17 nt, Human
cuuucuggcuaugcauu

SEQ ID NO: 1903015 - RNA, 13 nt, Human
cuuuccugaggcu

SEQ ID NO: 1903016 - RNA, 15 nt, Human
cuuuccugaggcugg

SEQ ID NO: 1903017 - RNA, 19 nt, Human
cuuucugcucagcuucucc

SEQ ID NO: 1903018 - RNA, 16 nt, Human
cuuuaugguaaagaug

SEQ ID NO: 1903019 - RNA, 12 nt, Human
cuuuaugcugaa

SEQ ID NO: 1903020 - RNA, 15 nt, Human
cuuuaugcugaaaca

SEQ ID NO: 1903021 - RNA, 23 nt, Human
cuuuauguacaggaugcuuuggu

SEQ ID NO: 1903022 - RNA, 21 nt, Human
cuuuauguacaggaugcuuug

SEQ ID NO: 1903023 - RNA, 15 nt, Human
cuuuccaucuacccu

SEQ ID NO: 1903024 - RNA, 15 nt, Human
cuuuccaggaaggcu

SEQ ID NO: 1903025 - RNA, 22 nt, Human
cuuuccauuugguuuagaacau

SEQ ID NO: 1903026 - RNA, 12 nt, Human
cuuuccugaggc

SEQ ID NO: 1903027 - RNA, 19 nt, Human
cuuucccugcuuaaugaaa

SEQ ID NO: 1903028 - RNA, 11 nt, Human
cuuucccuccc

SEQ ID NO: 1903029 - RNA, 13 nt, Human
cuuucccucccuu

SEQ ID NO: 1903030 - RNA, 14 nt, Human
cuuucccucccuuc

SEQ ID NO: 1903031 - RNA, 16 nt, Human
cuuucccucccuuccu

SEQ ID NO: 1903032 - RNA, 19 nt, Human
cuuuggcuauuagagauca

SEQ ID NO: 1903033 - RNA, 19 nt, Human
cuuuggcuaugagggccuu

SEQ ID NO: 1903034 - RNA, 14 nt, Human
cuuuguccccaccg

SEQ ID NO: 1903035 - RNA, 15 nt, Human
cuuugugaggaagcc

SEQ ID NO: 1903036 - RNA, 15 nt, Human
cuuuguccccaccgc

SEQ ID NO: 1903037 - RNA, 20 nt, Human
cuuugcagacaggcaagcac

SEQ ID NO: 1903038 - RNA, 13 nt, Human
cuuugaccucugc

SEQ ID NO: 1903039 - RNA, 16 nt, Human
cuuugcagacaggcaa

SEQ ID NO: 1903040 - RNA, 22 nt, Human
cuuugcauaacguauaaaagcc

SEQ ID NO: 1903041 - RNA, 24 nt, Human
cuuugaccucugcagcaauaaagc

SEQ ID NO: 1903042 - RNA, 20 nt, Human
cuuugaccucugcagcaaua

SEQ ID NO: 1903043 - RNA, 18 nt, Human
cuuugaccucugcagcaa

SEQ ID NO: 1903044 - RNA, 17 nt, Human
cuuugaccucugcagca

SEQ ID NO: 1903045 - RNA, 15 nt, Human
cuuugaccucugcag

SEQ ID NO: 1903046 - RNA, 14 nt, Human
cuuugaccucugca

SEQ ID NO: 1903047 - RNA, 22 nt, Human
cuucucccugcacaagccaggg

SEQ ID NO: 1903048 - RNA, 13 nt, Human
cuucuccaggcug

SEQ ID NO: 1903049 - RNA, 12 nt, Human
cuucuccaggcu

SEQ ID NO: 1903050 - RNA, 17 nt, Human
cuuccuggagcccagag

SEQ ID NO: 1903051 - RNA, 16 nt, Human
cuuccuggagcccaga

SEQ ID NO: 1903052 - RNA, 22 nt, Human
cuuccuggagcccagaggaggg

SEQ ID NO: 1903053 - RNA, 16 nt, Human
cuuccuguccagcucc

SEQ ID NO: 1903054 - RNA, 11 nt, Human
cuucuccacuu

SEQ ID NO: 1903055 - RNA, 20 nt, Human
cuucuccacuuucuagccag

SEQ ID NO: 1903056 - RNA, 13 nt, Human
cuucucugaagga

SEQ ID NO: 1903057 - RNA, 18 nt, Human
cuucucucucuaaaauga

SEQ ID NO: 1903058 - RNA, 20 nt, Human
cuucuccugaaguucagcca

SEQ ID NO: 1903059 - RNA, 20 nt, Human
cuucuccuuagaaguggaag

SEQ ID NO: 1903060 - RNA, 19 nt, Human
cuucuccuucaccuuuguc

SEQ ID NO: 1903061 - RNA, 12 nt, Human
cuucucuccagc

SEQ ID NO: 1903062 - RNA, 14 nt, Human
cuucuccucuugua

SEQ ID NO: 1903063 - RNA, 15 nt, Human
cuucuccucuuguaa

SEQ ID NO: 1903064 - RNA, 17 nt, Human
cuucuccucuuguaaau

SEQ ID NO: 1903065 - RNA, 18 nt, Human
cuucuccucuuguaaaua

SEQ ID NO: 1903066 - RNA, 23 nt, Human
cuucuccucuuguaaauaaagcc

SEQ ID NO: 1903067 - RNA, 13 nt, Human
cuucucuccagcc

SEQ ID NO: 1903068 - RNA, 15 nt, Human
cuucucuccagcccc

SEQ ID NO: 1903069 - RNA, 17 nt, Human
cuucucuccagccccug

SEQ ID NO: 1903070 - RNA, 19 nt, Human
cuucucuccagccccugga

SEQ ID NO: 1903071 - RNA, 12 nt, Human
cuucugccugca

SEQ ID NO: 1903072 - RNA, 18 nt, Human
cuucugccuguggaacug

SEQ ID NO: 1903073 - RNA, 13 nt, Human
cuucugcuucagc

SEQ ID NO: 1903074 - RNA, 21 nt, Human
cuucuggugaccuuccaagag

SEQ ID NO: 1903075 - RNA, 20 nt, Human
cuucuggugaccuuccaaga

SEQ ID NO: 1903076 - RNA, 18 nt, Human
cuucuggugaccuuccaa

SEQ ID NO: 1903077 - RNA, 15 nt, Human
cuucuggguggggca

SEQ ID NO: 1903078 - RNA, 21 nt, Human
cuucuguccuacucuguguca

SEQ ID NO: 1903079 - RNA, 19 nt, Human
cuucuguccuacucugugu

SEQ ID NO: 1903080 - RNA, 18 nt, Human
cuucuguccuacucugug

SEQ ID NO: 1903081 - RNA, 17 nt, Human
cuucuguccuacucugu

SEQ ID NO: 1903082 - RNA, 16 nt, Human
cuucuguccuacucug

SEQ ID NO: 1903083 - RNA, 20 nt, Human
cuucuguacgucugacaggc

SEQ ID NO: 1903084 - RNA, 18 nt, Human
cuucuguacgucugacag

SEQ ID NO: 1903085 - RNA, 15 nt, Human
cuucuguacgucuga

SEQ ID NO: 1903086 - RNA, 14 nt, Human
cuucuguacgucug

SEQ ID NO: 1903087 - RNA, 21 nt, Human
cuucuguacgucugacaggca

SEQ ID NO: 1903088 - RNA, 13 nt, Human
cuucuguggguuu

SEQ ID NO: 1903089 - RNA, 14 nt, Human
cuucuguggguuuc

SEQ ID NO: 1903090 - RNA, 21 nt, Human
cuucuguggguuucuaaagcu

SEQ ID NO: 1903091 - RNA, 22 nt, Human
cuucuuuauaauucuacuuuga

SEQ ID NO: 1903092 - RNA, 12 nt, Human
cuugaaaaaugc

SEQ ID NO: 1903093 - RNA, 18 nt, Human
cuugaaaaaugcauguug

SEQ ID NO: 1903094 - RNA, 14 nt, Human
cuugaaaacacugu

SEQ ID NO: 1903095 - RNA, 23 nt, Human
cuugaaaacacuguucucugccc

SEQ ID NO: 1903096 - RNA, 16 nt, Human
cuugaaaauaagaaua

SEQ ID NO: 1903097 - RNA, 12 nt, Human
cuugaaaauuaa

SEQ ID NO: 1903098 - RNA, 13 nt, Human
cuugaaaauuaac

SEQ ID NO: 1903099 - RNA, 18 nt, Human
cuugaaaauuaacaugaa

SEQ ID NO: 1903100 - RNA, 22 nt, Human
cuugaaaauaagaauagaaaua

SEQ ID NO: 1903101 - RNA, 13 nt, Human
cuugaaagcugug

SEQ ID NO: 1903102 - RNA, 13 nt, Human
cuugaacuccugg

SEQ ID NO: 1903103 - RNA, 15 nt, Human
cuugaacccaggaga

SEQ ID NO: 1903104 - RNA, 21 nt, Human
cuugaacuuugaccucugcag

SEQ ID NO: 1903105 - RNA, 17 nt, Human
cuugaacuuugaccucu

SEQ ID NO: 1903106 - RNA, 13 nt, Human
cuugaccucaggu

SEQ ID NO: 1903107 - RNA, 21 nt, Human
cuugaccgugaggccagagac

SEQ ID NO: 1903108 - RNA, 18 nt, Human
cuugaccgugaggccaga

SEQ ID NO: 1903109 - RNA, 20 nt, Human
cuugaccgugaggccagaga

SEQ ID NO: 1903110 - RNA, 16 nt, Human
cuugaagacuuuucuu

SEQ ID NO: 1903111 - RNA, 17 nt, Human
cuugaccgugaggccag

SEQ ID NO: 1903112 - RNA, 22 nt, Human
cuugaccauucuccaccugcca

SEQ ID NO: 1903113 - RNA, 23 nt, Human
cuugaccauucuccaccugccag

SEQ ID NO: 1903114 - RNA, 20 nt, Human
cuugaggguugggcuggugu

SEQ ID NO: 1903115 - RNA, 19 nt, Human
cuugaggguugggcuggug

SEQ ID NO: 1903116 - RNA, 21 nt, Human
cuugaggguugggcugguguc

SEQ ID NO: 1903117 - RNA, 21 nt, Human
cuugaggaaacaacagcuuua

SEQ ID NO: 1903118 - RNA, 13 nt, Human
cuugaggaaacaa

SEQ ID NO: 1903119 - RNA, 18 nt, Human
cuugaggaaacaacagcu

SEQ ID NO: 1903120 - RNA, 20 nt, Human
cuugaggaaacaacagcuuu

SEQ ID NO: 1903121 - RNA, 15 nt, Human
cuugagccuugaacu

SEQ ID NO: 1903122 - RNA, 19 nt, Human
cuugacucuacugaucuga

SEQ ID NO: 1903123 - RNA, 18 nt, Human
cuugagccuugaacuuug

SEQ ID NO: 1903124 - RNA, 17 nt, Human
cuugagccuugaacuuu

SEQ ID NO: 1903125 - RNA, 16 nt, Human
cuugagccugggaggu

SEQ ID NO: 1903126 - RNA, 15 nt, Human
cuucacccuggagcc

SEQ ID NO: 1903127 - RNA, 18 nt, Human
cuucaccccaaucccagc

SEQ ID NO: 1903128 - RNA, 16 nt, Human
cuucaguaagccguga

SEQ ID NO: 1903129 - RNA, 23 nt, Human
cuucaguaagccgugauuuucau

SEQ ID NO: 1903130 - RNA, 16 nt, Human
cuucaguggcagcugc

SEQ ID NO: 1903131 - RNA, 15 nt, Human
cuucaguggcagcug

SEQ ID NO: 1903132 - RNA, 14 nt, Human
cuucaguggcagcu

SEQ ID NO: 1903133 - RNA, 13 nt, Human
cuucaguggcagc

SEQ ID NO: 1903134 - RNA, 18 nt, Human
cuucagugccuuauggaa

SEQ ID NO: 1903135 - RNA, 22 nt, Human
cuucagugccuuauggaacacu

SEQ ID NO: 1903136 - RNA, 17 nt, Human
cuucaguggcagcugcu

SEQ ID NO: 1903137 - RNA, 20 nt, Human
cuucauucaacccaccugcg

SEQ ID NO: 1903138 - RNA, 20 nt, Human
cuucauucuugaaagcugug

SEQ ID NO: 1903139 - RNA, 21 nt, Human
cuucauucuugaaagcugugg

SEQ ID NO: 1903140 - RNA, 17 nt, Human
cuuccacaagagcccag

SEQ ID NO: 1903141 - RNA, 19 nt, Human
cuuccacaagagcccaggc

SEQ ID NO: 1903142 - RNA, 21 nt, Human
cuuccacaagagcccaggccu

SEQ ID NO: 1903143 - RNA, 12 nt, Human
cuuccaggcugg

SEQ ID NO: 1903144 - RNA, 14 nt, Human
cuuccaggcuggga

SEQ ID NO: 1903145 - RNA, 17 nt, Human
cuucccuacaguugaaa

SEQ ID NO: 1903146 - RNA, 15 nt, Human
cuuccaggcugggag

SEQ ID NO: 1903147 - RNA, 16 nt, Human
cuuccaggcugggaga

SEQ ID NO: 1903148 - RNA, 19 nt, Human
cuuccaggcugggagagcc

SEQ ID NO: 1903149 - RNA, 19 nt, Human
cuuccagggacgaagaaga

SEQ ID NO: 1903150 - RNA, 14 nt, Human
cuuccagggguggg

SEQ ID NO: 1903151 - RNA, 15 nt, Human
cuuccagggguggga

SEQ ID NO: 1903152 - RNA, 17 nt, Human
cuuccaggggugggaca

SEQ ID NO: 1903153 - RNA, 21 nt, Human
cuuccaggggugggacacccu

SEQ ID NO: 1903154 - RNA, 22 nt, Human
cuuccagggacgaagaagagcc

SEQ ID NO: 1903155 - RNA, 23 nt, Human
cuucacagaugggugcuuggagg

SEQ ID NO: 1903156 - RNA, 14 nt, Human
cuucaaccagggau

SEQ ID NO: 1903157 - RNA, 22 nt, Human
cuucaaccagggauuguuucug

SEQ ID NO: 1903158 - RNA, 10 nt, Human
cuucaaggau

SEQ ID NO: 1903159 - RNA, 13 nt, Human
cuucaaggauccu

SEQ ID NO: 1903160 - RNA, 15 nt, Human
cuucaaggauccuga

SEQ ID NO: 1903161 - RNA, 16 nt, Human
cuucaaggauccugag

SEQ ID NO: 1903162 - RNA, 17 nt, Human
cuuauuuaaugaaagac

SEQ ID NO: 1903163 - RNA, 18 nt, Human
cuuauuuaaugaaagacu

SEQ ID NO: 1903164 - RNA, 21 nt, Human
cuucaaacuaggggacaaagc

SEQ ID NO: 1903165 - RNA, 21 nt, Human
cuguucucuugggaacugaac

SEQ ID NO: 1903166 - RNA, 16 nt, Human
cuguucuggcagaguu

SEQ ID NO: 1903167 - RNA, 19 nt, Human
cuuagauguauauauuucc

SEQ ID NO: 1903168 - RNA, 16 nt, Human
cuuagucacugagaca

SEQ ID NO: 1903169 - RNA, 13 nt, Human
cuuagauguauau

SEQ ID NO: 1903170 - RNA, 18 nt, Human
cuuagucacugagacagc

SEQ ID NO: 1903171 - RNA, 19 nt, Human
cuuagucacugagacagcc

SEQ ID NO: 1903172 - RNA, 16 nt, Human
cuuagauggauucucc

SEQ ID NO: 1903173 - RNA, 14 nt, Human
cuuagucacugaga

SEQ ID NO: 1903174 - RNA, 13 nt, Human
cuuauauuaugga

SEQ ID NO: 1903175 - RNA, 23 nt, Human
cuuaucacaaaaaagaaaaugaa

SEQ ID NO: 1903176 - RNA, 19 nt, Human
cuuauaucuauauuuuaca

SEQ ID NO: 1903177 - RNA, 16 nt, Human
cuuaucccuucuuuuu

SEQ ID NO: 1903178 - RNA, 17 nt, Human
cuuaucccuucuuuuuc

SEQ ID NO: 1903179 - RNA, 14 nt, Human
cuuaucauggucuc

SEQ ID NO: 1903180 - RNA, 15 nt, Human
cuuaucauggucuca

SEQ ID NO: 1903181 - RNA, 15 nt, Human
cuuauagaauauuua

SEQ ID NO: 1903182 - RNA, 16 nt, Human
cuuauagaauauuuau

SEQ ID NO: 1903183 - RNA, 13 nt, Human
cuuauagaauauu

SEQ ID NO: 1903184 - RNA, 14 nt, Human
cuuauagaauauuu

SEQ ID NO: 1903185 - RNA, 20 nt, Human
cuuauagaauauuuauuacc

SEQ ID NO: 1903186 - RNA, 17 nt, Human
cuuauaggaaagcuuga

SEQ ID NO: 1903187 - RNA, 21 nt, Human
cuuauaggaaagcuugaguaa

SEQ ID NO: 1903188 - RNA, 18 nt, Human
cuguacacguguccugua

SEQ ID NO: 1903189 - RNA, 17 nt, Human
cuguacacguguccugu

SEQ ID NO: 1903190 - RNA, 16 nt, Human
cuguacacguguccug

SEQ ID NO: 1903191 - RNA, 13 nt, Human
cuguacagagccc

SEQ ID NO: 1903192 - RNA, 16 nt, Human
cuguaucacucugugu

SEQ ID NO: 1903193 - RNA, 15 nt, Human
cuguaucaguggauu

SEQ ID NO: 1903194 - RNA, 22 nt, Human
cuguauauuugugauagcacuu

SEQ ID NO: 1903195 - RNA, 23 nt, Human
cuguauauuugugauagcacuuu

SEQ ID NO: 1903196 - RNA, 14 nt, Human
cuguaucacucugu

SEQ ID NO: 1903197 - RNA, 14 nt, Human
cuguauauacuuuu

SEQ ID NO: 1903198 - RNA, 15 nt, Human
cuguauauacuuuuu

SEQ ID NO: 1903199 - RNA, 16 nt, Human
cuguauauagcccagc

SEQ ID NO: 1903200 - RNA, 22 nt, Human
cuguauaaguggaggcacuuua

SEQ ID NO: 1903201 - RNA, 21 nt, Human
cuguauaaguggaggcacuuu

SEQ ID NO: 1903202 - RNA, 23 nt, Human
cuguaucccaugagccucagcau

SEQ ID NO: 1903203 - RNA, 20 nt, Human
cuguaucaguggauuuccca

SEQ ID NO: 1903204 - RNA, 21 nt, Human
cuguccagcuccaaccugcaa

SEQ ID NO: 1903205 - RNA, 17 nt, Human
cuguccagcuccaaccu

SEQ ID NO: 1903206 - RNA, 18 nt, Human
cuguccagcuccaaccug

SEQ ID NO: 1903207 - RNA, 12 nt, Human
cuguccagcucc

SEQ ID NO: 1903208 - RNA, 13 nt, Human
cuguccagcucca

SEQ ID NO: 1903209 - RNA, 14 nt, Human
cuguccagcuccaa

SEQ ID NO: 1903210 - RNA, 17 nt, Human
cugucaaggcugcuuag

SEQ ID NO: 1903211 - RNA, 19 nt, Human
cugucaaggcugcuuagaa

SEQ ID NO: 1903212 - RNA, 20 nt, Human
cugucaaggcugcuuagaau

SEQ ID NO: 1903213 - RNA, 12 nt, Human
cuguccaggcuc

SEQ ID NO: 1903214 - RNA, 13 nt, Human
cuguccaggcucg

SEQ ID NO: 1903215 - RNA, 17 nt, Human
cuguccccgcacugggc

SEQ ID NO: 1903216 - RNA, 18 nt, Human
cuguccccgcacugggcu

SEQ ID NO: 1903217 - RNA, 19 nt, Human
cuguccccgcacugggcuu

SEQ ID NO: 1903218 - RNA, 22 nt, Human
cuguccccgcacugggcuuggg

SEQ ID NO: 1903219 - RNA, 14 nt, Human
cuguccgagcuuug

SEQ ID NO: 1903220 - RNA, 20 nt, Human
cugucccuuacgugaguccu

SEQ ID NO: 1903221 - RNA, 23 nt, Human
cuguccccuucucucaucucuua

SEQ ID NO: 1903222 - RNA, 22 nt, Human
cuguccccuucucucaucucuu

SEQ ID NO: 1903223 - RNA, 21 nt, Human
cuguccccuucucucaucucu

SEQ ID NO: 1903224 - RNA, 20 nt, Human
cuguccccuucucucaucuc

SEQ ID NO: 1903225 - RNA, 19 nt, Human
cuguccccuucucucaucu

SEQ ID NO: 1903226 - RNA, 16 nt, Human
cuguccccuucucuca

SEQ ID NO: 1903227 - RNA, 14 nt, Human
cuguccccuucucu

SEQ ID NO: 1903228 - RNA, 22 nt, Human
cugucccuuacgugaguccugg

SEQ ID NO: 1903229 - RNA, 15 nt, Human
cuguccgagcuuuga

SEQ ID NO: 1903230 - RNA, 14 nt, Human
cuguccuacccacc

SEQ ID NO: 1903231 - RNA, 13 nt, Human
cuguccucagccu

SEQ ID NO: 1903232 - RNA, 15 nt, Human
cuguccucagguggc

SEQ ID NO: 1903233 - RNA, 16 nt, Human
cuguccucagguggcc

SEQ ID NO: 1903234 - RNA, 17 nt, Human
cuguccucagguggcca

SEQ ID NO: 1903235 - RNA, 18 nt, Human
cuguccucagguggccau

SEQ ID NO: 1903236 - RNA, 14 nt, Human
cuguccucagccuu

SEQ ID NO: 1903237 - RNA, 18 nt, Human
cuguccucagccuugcca

SEQ ID NO: 1903238 - RNA, 20 nt, Human
cuguccucagccuugccaga

SEQ ID NO: 1903239 - RNA, 21 nt, Human
cuguccucagccuugccagag

SEQ ID NO: 1903240 - RNA, 22 nt, Human
cuguccucagccuugccagaga

SEQ ID NO: 1903241 - RNA, 12 nt, Human
cuguccucaggu

SEQ ID NO: 1903242 - RNA, 23 nt, Human
cugucucaaaaaaacacaaaagu

SEQ ID NO: 1903243 - RNA, 16 nt, Human
cugucucaaaaaaaga

SEQ ID NO: 1903244 - RNA, 18 nt, Human
cugucucaaaaaaagaaa

SEQ ID NO: 1903245 - RNA, 18 nt, Human
cugucuagagagggaggc

SEQ ID NO: 1903246 - RNA, 14 nt, Human
cugucuagagaggg

SEQ ID NO: 1903247 - RNA, 16 nt, Human
cugucuagagagggag

SEQ ID NO: 1903248 - RNA, 17 nt, Human
cugucuagagagggagg

SEQ ID NO: 1903249 - RNA, 15 nt, Human
cuguccuccaagcca

SEQ ID NO: 1903250 - RNA, 13 nt, Human
cugucuagagagg

SEQ ID NO: 1903251 - RNA, 15 nt, Human
cuguccuccaacacc

SEQ ID NO: 1903252 - RNA, 23 nt, Human
cuguccuccaacaccaagcacag

SEQ ID NO: 1903253 - RNA, 12 nt, Human
cuguccuccaag

SEQ ID NO: 1903254 - RNA, 19 nt, Human
cuguaaucauauaauaaau

SEQ ID NO: 1903255 - RNA, 13 nt, Human
cuguaaucccagc

SEQ ID NO: 1903256 - RNA, 20 nt, Human
cuguaauccuagcacuuugg

SEQ ID NO: 1903257 - RNA, 20 nt, Human
cuguaaucgcccuacuauuc

SEQ ID NO: 1903258 - RNA, 13 nt, Human
cuguacaaaguag

SEQ ID NO: 1903259 - RNA, 15 nt, Human
cuguacaaaguagaa

SEQ ID NO: 1903260 - RNA, 13 nt, Human
cuguaauuuuaua

SEQ ID NO: 1903261 - RNA, 12 nt, Human
cuggugcugcug

SEQ ID NO: 1903262 - RNA, 16 nt, Human
cugguuccauggccuc

SEQ ID NO: 1903263 - RNA, 23 nt, Human
cugguucggauuugggguggauu

SEQ ID NO: 1903264 - RNA, 21 nt, Human
cugguucggauuuggggugga

SEQ ID NO: 1903265 - RNA, 20 nt, Human
cuguaauaaagaugauugug

SEQ ID NO: 1903266 - RNA, 23 nt, Human
cuguaaucacagcuacuugggag

SEQ ID NO: 1903267 - RNA, 14 nt, Human
cugguggcagcugc

SEQ ID NO: 1903268 - RNA, 13 nt, Human
cugguggcagcug

SEQ ID NO: 1903269 - RNA, 21 nt, Human
cugguggcagcucaccucucc

SEQ ID NO: 1903270 - RNA, 23 nt, Human
cugguggcagcucaccucucccu

SEQ ID NO: 1903271 - RNA, 14 nt, Human
cugguauuuuaucu

SEQ ID NO: 1903272 - RNA, 17 nt, Human
cuggucaaacaaacucu

SEQ ID NO: 1903273 - RNA, 18 nt, Human
cuggucaaacaaacucuc

SEQ ID NO: 1903274 - RNA, 23 nt, Human
cuggucaaacaaacucucugaac

SEQ ID NO: 1903275 - RNA, 13 nt, Human
cugguccuaccca

SEQ ID NO: 1903276 - RNA, 16 nt, Human
cugguccuacccaucc

SEQ ID NO: 1903277 - RNA, 22 nt, Human
cugguccuacccauccccgcag

SEQ ID NO: 1903278 - RNA, 17 nt, Human
cugguccuacccauccc

SEQ ID NO: 1903279 - RNA, 15 nt, Human
cugggggaagaagcu

SEQ ID NO: 1903280 - RNA, 20 nt, Human
cugggggacccaauguagga

SEQ ID NO: 1903281 - RNA, 19 nt, Human
cugggggcugggcagagga

SEQ ID NO: 1903282 - RNA, 22 nt, Human
cugggggggauuguaaaauggu

SEQ ID NO: 1903283 - RNA, 13 nt, Human
cuggggggcagug

SEQ ID NO: 1903284 - RNA, 16 nt, Human
cuggggggcaguggug

SEQ ID NO: 1903285 - RNA, 13 nt, Human
cugggggaagaag

SEQ ID NO: 1903286 - RNA, 15 nt, Human
cuggggcuggccucc

SEQ ID NO: 1903287 - RNA, 18 nt, Human
cuggggcuggccucccaa

SEQ ID NO: 1903288 - RNA, 14 nt, Human
cuggggcuggccuc

SEQ ID NO: 1903289 - RNA, 24 nt, Human
cugggcuucaguggcagcugcuuu

SEQ ID NO: 1903290 - RNA, 22 nt, Human
cuggguaacuagggaagauaau

SEQ ID NO: 1903291 - RNA, 20 nt, Human
cuggguaacuagggaagaua

SEQ ID NO: 1903292 - RNA, 15 nt, Human
cuggguacuucuuga

SEQ ID NO: 1903293 - RNA, 17 nt, Human
cuggguacuucuugaag

SEQ ID NO: 1903294 - RNA, 20 nt, Human
cuggguacuucuugaaggug

SEQ ID NO: 1903295 - RNA, 23 nt, Human
cuggguacuucuugaaggugcug

SEQ ID NO: 1903296 - RNA, 15 nt, Human
cugggguccagggag

SEQ ID NO: 1903297 - RNA, 16 nt, Human
cugggguccagggagc

SEQ ID NO: 1903298 - RNA, 13 nt, Human
cuggggucuggag

SEQ ID NO: 1903299 - RNA, 22 nt, Human
cuggggucuggaguugaucugg

SEQ ID NO: 1903300 - RNA, 14 nt, Human
cuggguucuaccca

SEQ ID NO: 1903301 - RNA, 15 nt, Human
cuggguucuacccag

SEQ ID NO: 1903302 - RNA, 16 nt, Human
cuggguucuacccagg

SEQ ID NO: 1903303 - RNA, 17 nt, Human
cuggguucuacccaggu

SEQ ID NO: 1903304 - RNA, 16 nt, Human
cugguaccaguugaaa

SEQ ID NO: 1903305 - RNA, 17 nt, Human
cugguaccaguugaaau

SEQ ID NO: 1903306 - RNA, 14 nt, Human
cugguacucaagcc

SEQ ID NO: 1903307 - RNA, 23 nt, Human
cugugugcuccuccuuggugccu

SEQ ID NO: 1903308 - RNA, 18 nt, Human
cugugugcuccuccuugg

SEQ ID NO: 1903309 - RNA, 23 nt, Human
cugugugcucaggagcccuggga

SEQ ID NO: 1903310 - RNA, 15 nt, Human
cuguguggcagucug

SEQ ID NO: 1903311 - RNA, 19 nt, Human
cugugugcucaggagcccu

SEQ ID NO: 1903312 - RNA, 16 nt, Human
cugugugcucaggagc

SEQ ID NO: 1903313 - RNA, 20 nt, Human
cugugugcucaggagcccug

SEQ ID NO: 1903314 - RNA, 21 nt, Human
cugugugcucaggagcccugg

SEQ ID NO: 1903315 - RNA, 16 nt, Human
cuguggggcccccaca

SEQ ID NO: 1903316 - RNA, 21 nt, Human
cuguggggaaccaauugcuuu

SEQ ID NO: 1903317 - RNA, 23 nt, Human
cugugucuugcaauggcagccuu

SEQ ID NO: 1903318 - RNA, 22 nt, Human
cugugucuugcaauggcagccu

SEQ ID NO: 1903319 - RNA, 21 nt, Human
cugugucuugcaauggcagcc

SEQ ID NO: 1903320 - RNA, 20 nt, Human
cugugugugcgccuacagga

SEQ ID NO: 1903321 - RNA, 12 nt, Human
cuguguguguga

SEQ ID NO: 1903322 - RNA, 14 nt, Human
cugugugugugaau

SEQ ID NO: 1903323 - RNA, 16 nt, Human
cugugugugugaauga

SEQ ID NO: 1903324 - RNA, 17 nt, Human
cugugugugugaaugaa

SEQ ID NO: 1903325 - RNA, 18 nt, Human
cugugugugugaaugaac

SEQ ID NO: 1903326 - RNA, 23 nt, Human
cugugugugugaaugaacacucu

SEQ ID NO: 1903327 - RNA, 21 nt, Human
cugugugugugaaugaacacu

SEQ ID NO: 1903328 - RNA, 13 nt, Human
cuguguguugcca

SEQ ID NO: 1903329 - RNA, 19 nt, Human
cuguguguugccacaggac

SEQ ID NO: 1903330 - RNA, 20 nt, Human
cuguguguugccacaggaca

SEQ ID NO: 1903331 - RNA, 17 nt, Human
cuguguguuuaugugug

SEQ ID NO: 1903332 - RNA, 16 nt, Human
cuguguguuuaugugu

SEQ ID NO: 1903333 - RNA, 21 nt, Human
cuguguguugccacaggacac

SEQ ID NO: 1903334 - RNA, 22 nt, Human
cuguguguugccacaggacaca

SEQ ID NO: 1903335 - RNA, 13 nt, Human
cuguguuuuaaua

SEQ ID NO: 1903336 - RNA, 13 nt, Human
cuguucucugccc

SEQ ID NO: 1903337 - RNA, 14 nt, Human
cuguucccccuuca

SEQ ID NO: 1903338 - RNA, 15 nt, Human
cuguucccccuucac

SEQ ID NO: 1903339 - RNA, 16 nt, Human
cuguucccccuucaca

SEQ ID NO: 1903340 - RNA, 17 nt, Human
cuguucccccuucacaa

SEQ ID NO: 1903341 - RNA, 23 nt, Human
cuguucccccuucacaaagccca

SEQ ID NO: 1903342 - RNA, 20 nt, Human
cuguucucugcccuccaaga

SEQ ID NO: 1903343 - RNA, 15 nt, Human
cuguucucuugggaa

SEQ ID NO: 1903344 - RNA, 18 nt, Human
cuguucucugcccuccaa

SEQ ID NO: 1903345 - RNA, 19 nt, Human
cuguucucugcccuccaag

SEQ ID NO: 1903346 - RNA, 14 nt, Human
cuguucucugcccu

SEQ ID NO: 1903347 - RNA, 15 nt, Human
cuguucucugcccuc

SEQ ID NO: 1903348 - RNA, 16 nt, Human
cuguucucugcccucc

SEQ ID NO: 1903349 - RNA, 17 nt, Human
cuguucucugcccucca

SEQ ID NO: 1903350 - RNA, 13 nt, Human
cuguuccccagag

SEQ ID NO: 1903351 - RNA, 20 nt, Human
cuguucccauguagcccccu

SEQ ID NO: 1903352 - RNA, 14 nt, Human
cuguuccccagaga

SEQ ID NO: 1903353 - RNA, 15 nt, Human
cuguuccccagagaa

SEQ ID NO: 1903354 - RNA, 16 nt, Human
cuguuccccagagaaa

SEQ ID NO: 1903355 - RNA, 17 nt, Human
cuguucccaccugcugg

SEQ ID NO: 1903356 - RNA, 23 nt, Human
cuguucaugaaagauucaaugcc

SEQ ID NO: 1903357 - RNA, 18 nt, Human
cuguucaugaaagauuca

SEQ ID NO: 1903358 - RNA, 17 nt, Human
cuguucaugaaagauuc

SEQ ID NO: 1903359 - RNA, 13 nt, Human
cuguuacugucuu

SEQ ID NO: 1903360 - RNA, 19 nt, Human
cuguucagcugguugaggu

SEQ ID NO: 1903361 - RNA, 21 nt, Human
cuguucagcugguugagguuu

SEQ ID NO: 1903362 - RNA, 15 nt, Human
cugugccuccaucag

SEQ ID NO: 1903363 - RNA, 16 nt, Human
cugugccuccaucagc

SEQ ID NO: 1903364 - RNA, 14 nt, Human
cugugccauuuugu

SEQ ID NO: 1903365 - RNA, 17 nt, Human
cugugcauguaugucuu

SEQ ID NO: 1903366 - RNA, 18 nt, Human
cugugccaugugccaggu

SEQ ID NO: 1903367 - RNA, 16 nt, Human
cugugccaugugccag

SEQ ID NO: 1903368 - RNA, 16 nt, Human
cugugcauguaugucu

SEQ ID NO: 1903369 - RNA, 15 nt, Human
cugugcauguauguc

SEQ ID NO: 1903370 - RNA, 22 nt, Human
cugugcacaaaacccagaccug

SEQ ID NO: 1903371 - RNA, 19 nt, Human
cugugcacaaaguggcaua

SEQ ID NO: 1903372 - RNA, 18 nt, Human
cugugcacaaaguggcau

SEQ ID NO: 1903373 - RNA, 19 nt, Human
cugugauggggcccugccu

SEQ ID NO: 1903374 - RNA, 20 nt, Human
cugugauggggcccugccuc

SEQ ID NO: 1903375 - RNA, 19 nt, Human
cugugcacaaaacccagac

SEQ ID NO: 1903376 - RNA, 20 nt, Human
cugugcacaaaacccagacc

SEQ ID NO: 1903377 - RNA, 18 nt, Human
cugugauggggcccugcc

SEQ ID NO: 1903378 - RNA, 17 nt, Human
cugugauggggcccugc

SEQ ID NO: 1903379 - RNA, 23 nt, Human
cugugaguacuacaguccuccca

SEQ ID NO: 1903380 - RNA, 20 nt, Human
cugugaguacuacaguccuc

SEQ ID NO: 1903381 - RNA, 21 nt, Human
cugugaguacuacaguccucc

SEQ ID NO: 1903382 - RNA, 18 nt, Human
cugucuccauguuugaug

SEQ ID NO: 1903383 - RNA, 13 nt, Human
cugucuccuagga

SEQ ID NO: 1903384 - RNA, 19 nt, Human
cugugaggggcucucucau

SEQ ID NO: 1903385 - RNA, 13 nt, Human
cugucucagggug

SEQ ID NO: 1903386 - RNA, 14 nt, Human
cugugccucuggga

SEQ ID NO: 1903387 - RNA, 16 nt, Human
cugugccucugggacu

SEQ ID NO: 1903388 - RNA, 22 nt, Human
cugugcugcccugcccaccugg

SEQ ID NO: 1903389 - RNA, 17 nt, Human
cugugccucugggacug

SEQ ID NO: 1903390 - RNA, 18 nt, Human
cugugccucugggacugg

SEQ ID NO: 1903391 - RNA, 19 nt, Human
cuguggaaaagaaacacgc

SEQ ID NO: 1903392 - RNA, 17 nt, Human
cuguggaugauaaaaca

SEQ ID NO: 1903393 - RNA, 22 nt, Human
cuguggaaaagaaacacgcacu

SEQ ID NO: 1903394 - RNA, 16 nt, Human
cuguggccaaguucuu

SEQ ID NO: 1903395 - RNA, 18 nt, Human
cuguggccaaguucuuag

SEQ ID NO: 1903396 - RNA, 22 nt, Human
cuguggccagcuuguuauuuau

SEQ ID NO: 1903397 - RNA, 23 nt, Human
cuguggccagcuuguuauuuaua

SEQ ID NO: 1903398 - RNA, 14 nt, Human
cugugggcccccaa

SEQ ID NO: 1903399 - RNA, 13 nt, Human
cuggacacaggcc

SEQ ID NO: 1903400 - RNA, 14 nt, Human
cuggacacaggccu

SEQ ID NO: 1903401 - RNA, 15 nt, Human
cuggacacaggccug

SEQ ID NO: 1903402 - RNA, 13 nt, Human
cuggaauuugaaa

SEQ ID NO: 1903403 - RNA, 17 nt, Human
cuggacaggcauguucu

SEQ ID NO: 1903404 - RNA, 14 nt, Human
cuggacaggcaugu

SEQ ID NO: 1903405 - RNA, 23 nt, Human
cuggacaggcauguucucugagg

SEQ ID NO: 1903406 - RNA, 21 nt, Human
cuggaccuugaacuggguacu

SEQ ID NO: 1903407 - RNA, 20 nt, Human
cuggaccuugaacuggguac

SEQ ID NO: 1903408 - RNA, 17 nt, Human
cuggaccuugaacuggg

SEQ ID NO: 1903409 - RNA, 13 nt, Human
cuggacuccggcc

SEQ ID NO: 1903410 - RNA, 15 nt, Human
cuggacuccggcccu

SEQ ID NO: 1903411 - RNA, 18 nt, Human
cuggacuccggcccuccu

SEQ ID NO: 1903412 - RNA, 15 nt, Human
cuggacccuguggau

SEQ ID NO: 1903413 - RNA, 16 nt, Human
cuggaccuugaacugg

SEQ ID NO: 1903414 - RNA, 12 nt, Human
cuggaccugccc

SEQ ID NO: 1903415 - RNA, 17 nt, Human
cuggaccugcccccgca

SEQ ID NO: 1903416 - RNA, 19 nt, Human
cuggaccugcccccgcauc

SEQ ID NO: 1903417 - RNA, 17 nt, Human
cuggagugcagugagcc

SEQ ID NO: 1903418 - RNA, 16 nt, Human
cuggagugcagugagc

SEQ ID NO: 1903419 - RNA, 15 nt, Human
cuggagugcagugag

SEQ ID NO: 1903420 - RNA, 14 nt, Human
cuggagugcaguga

SEQ ID NO: 1903421 - RNA, 15 nt, Human
cuggagugaggaaaa

SEQ ID NO: 1903422 - RNA, 18 nt, Human
cuggagucaucauucccu

SEQ ID NO: 1903423 - RNA, 17 nt, Human
cuggagguuuguuuaga

SEQ ID NO: 1903424 - RNA, 12 nt, Human
cuggagguuugu

SEQ ID NO: 1903425 - RNA, 22 nt, Human
cuggagguacgaaaagagggga

SEQ ID NO: 1903426 - RNA, 20 nt, Human
cuggagguggcugagccccu

SEQ ID NO: 1903427 - RNA, 17 nt, Human
cuggagguacgaaaaga

SEQ ID NO: 1903428 - RNA, 13 nt, Human
cuggagcucugcc

SEQ ID NO: 1903429 - RNA, 12 nt, Human
cuggagcucugc

SEQ ID NO: 1903430 - RNA, 16 nt, Human
cuggagcucugcccau

SEQ ID NO: 1903431 - RNA, 12 nt, Human
cuggaggcccag

SEQ ID NO: 1903432 - RNA, 13 nt, Human
cuggaggcccagu

SEQ ID NO: 1903433 - RNA, 14 nt, Human
cuggaggcccaguu

SEQ ID NO: 1903434 - RNA, 15 nt, Human
cuggaggcccaguuc

SEQ ID NO: 1903435 - RNA, 21 nt, Human
cuggaggcccaguucacccug

SEQ ID NO: 1903436 - RNA, 23 nt, Human
cuggagcccagaggagggcagca

SEQ ID NO: 1903437 - RNA, 21 nt, Human
cuggagcccagaggagggcag

SEQ ID NO: 1903438 - RNA, 22 nt, Human
cuggccaucugguuaggauggc

SEQ ID NO: 1903439 - RNA, 18 nt, Human
cuggccaucccacaagug

SEQ ID NO: 1903440 - RNA, 15 nt, Human
cuggcccacugcauc

SEQ ID NO: 1903441 - RNA, 21 nt, Human
cuggccaguggcuggaucugu

SEQ ID NO: 1903442 - RNA, 16 nt, Human
cuggcccagggcccag

SEQ ID NO: 1903443 - RNA, 19 nt, Human
cuggcaguggaacuaagaa

SEQ ID NO: 1903444 - RNA, 19 nt, Human
cuggcaguuuaaaaaaauu

SEQ ID NO: 1903445 - RNA, 15 nt, Human
cuggcaguuuaaaaa

SEQ ID NO: 1903446 - RNA, 14 nt, Human
cuggccagaugcac

SEQ ID NO: 1903447 - RNA, 21 nt, Human
cuggccagacacaggcccucc

SEQ ID NO: 1903448 - RNA, 13 nt, Human
cuggccagacaca

SEQ ID NO: 1903449 - RNA, 13 nt, Human
cuggccagaaugc

SEQ ID NO: 1903450 - RNA, 15 nt, Human
cuggccagacacagg

SEQ ID NO: 1903451 - RNA, 17 nt, Human
cuggccagacacaggcc

SEQ ID NO: 1903452 - RNA, 18 nt, Human
cuggccagacacaggccc

SEQ ID NO: 1903453 - RNA, 19 nt, Human
cuggccagacacaggcccu

SEQ ID NO: 1903454 - RNA, 21 nt, Human
cuggcacuggaugcagaaaca

SEQ ID NO: 1903455 - RNA, 22 nt, Human
cuggcacccggccccugcuggu

SEQ ID NO: 1903456 - RNA, 19 nt, Human
cuggcacugcuuccaguga

SEQ ID NO: 1903457 - RNA, 20 nt, Human
cuggcacugcuuccagugag

SEQ ID NO: 1903458 - RNA, 23 nt, Human
cuggcacugcuuccagugaggcu

SEQ ID NO: 1903459 - RNA, 20 nt, Human
cuggagugcagugagccgag

SEQ ID NO: 1903460 - RNA, 19 nt, Human
cuggcacccggccccugcu

SEQ ID NO: 1903461 - RNA, 21 nt, Human
cuggcacccggccccugcugg

SEQ ID NO: 1903462 - RNA, 20 nt, Human
cuggcacccggccccugcug

SEQ ID NO: 1903463 - RNA, 17 nt, Human
cuggccuggcacacauc

SEQ ID NO: 1903464 - RNA, 16 nt, Human
cuggccuggcacacau

SEQ ID NO: 1903465 - RNA, 14 nt, Human
cuggccuggcacac

SEQ ID NO: 1903466 - RNA, 13 nt, Human
cuggccuggcaca

SEQ ID NO: 1903467 - RNA, 22 nt, Human
cuggccuggcacacaucaggag

SEQ ID NO: 1903468 - RNA, 18 nt, Human
cuggccuggcacacauca

SEQ ID NO: 1903469 - RNA, 13 nt, Human
cuggccuggcccc

SEQ ID NO: 1903470 - RNA, 19 nt, Human
cuggccuggccccucaggg

SEQ ID NO: 1903471 - RNA, 24 nt, Human
cuggccuggccccucagggucccu

SEQ ID NO: 1903472 - RNA, 22 nt, Human
cuggccuucggccuccauccug

SEQ ID NO: 1903473 - RNA, 21 nt, Human
cuggccucugcacuccccugc

SEQ ID NO: 1903474 - RNA, 18 nt, Human
cuggccucugcacucccc

SEQ ID NO: 1903475 - RNA, 20 nt, Human
cuggccucugcacuccccug

SEQ ID NO: 1903476 - RNA, 13 nt, Human
cuggccccaggac

SEQ ID NO: 1903477 - RNA, 17 nt, Human
cuggcccagggcccaga

SEQ ID NO: 1903478 - RNA, 18 nt, Human
cuggcccagggcccagag

SEQ ID NO: 1903479 - RNA, 19 nt, Human
cuggcccagggcccagagc

SEQ ID NO: 1903480 - RNA, 20 nt, Human
cuggcccagggcccagagcc

SEQ ID NO: 1903481 - RNA, 21 nt, Human
cuggcccagggcccagagccc

SEQ ID NO: 1903482 - RNA, 22 nt, Human
cuggcccagggcccagagccca

SEQ ID NO: 1903483 - RNA, 23 nt, Human
cuggcccagggcccagagcccag

SEQ ID NO: 1903484 - RNA, 15 nt, Human
cuggcgugcaguggu

SEQ ID NO: 1903485 - RNA, 14 nt, Human
cuggcgugcagugg

SEQ ID NO: 1903486 - RNA, 14 nt, Human
cuggccugugucua

SEQ ID NO: 1903487 - RNA, 23 nt, Human
cuggccuucggccuccauccuga

SEQ ID NO: 1903488 - RNA, 16 nt, Human
cuggccuugggcccuc

SEQ ID NO: 1903489 - RNA, 20 nt, Human
cuggccuugggcccucuggu

SEQ ID NO: 1903490 - RNA, 21 nt, Human
cuggcucuuccaggcugggag

SEQ ID NO: 1903491 - RNA, 22 nt, Human
cuggcucuuccaggcugggaga

SEQ ID NO: 1903492 - RNA, 24 nt, Human
cuggcucuuccaggcugggagagc

SEQ ID NO: 1903493 - RNA, 23 nt, Human
cuggcugcagagcagugggccug

SEQ ID NO: 1903494 - RNA, 17 nt, Human
cugccgcaacaguuuuu

SEQ ID NO: 1903495 - RNA, 14 nt, Human
cugccgcagcccug

SEQ ID NO: 1903496 - RNA, 15 nt, Human
cugccgcagcccugc

SEQ ID NO: 1903497 - RNA, 17 nt, Human
cugccgcagcccugcag

SEQ ID NO: 1903498 - RNA, 18 nt, Human
cugccgcagcccugcaga

SEQ ID NO: 1903499 - RNA, 12 nt, Human
cugcccuccaag

SEQ ID NO: 1903500 - RNA, 14 nt, Human
cucccuucccaccu

SEQ ID NO: 1903501 - RNA, 15 nt, Human
cucccuucccaccuc

SEQ ID NO: 1903502 - RNA, 16 nt, Human
cucccuucccaccucu

SEQ ID NO: 1903503 - RNA, 17 nt, Human
cucccuucccaccucuc

SEQ ID NO: 1903504 - RNA, 15 nt, Human
cugccucuucucuac

SEQ ID NO: 1903505 - RNA, 17 nt, Human
cugccugcccaggcccc

SEQ ID NO: 1903506 - RNA, 16 nt, Human
cugccugcccaggccc

SEQ ID NO: 1903507 - RNA, 15 nt, Human
cugccugaagucaca

SEQ ID NO: 1903508 - RNA, 20 nt, Human
cugccugcccaggccccugc

SEQ ID NO: 1903509 - RNA, 21 nt, Human
cugccugggaucccucauccu

SEQ ID NO: 1903510 - RNA, 14 nt, Human
cugccuuggcucag

SEQ ID NO: 1903511 - RNA, 15 nt, Human
cugccuuggcucaga

SEQ ID NO: 1903512 - RNA, 17 nt, Human
cugccuuggcucagaca

SEQ ID NO: 1903513 - RNA, 18 nt, Human
cugccuuggcucagacau

SEQ ID NO: 1903514 - RNA, 22 nt, Human
cugccuuggcucagacauguuu

SEQ ID NO: 1903515 - RNA, 20 nt, Human
cugccucucugcaggucccu

SEQ ID NO: 1903516 - RNA, 21 nt, Human
cugccucucugcaggucccua

SEQ ID NO: 1903517 - RNA, 14 nt, Human
cugccuccauccua

SEQ ID NO: 1903518 - RNA, 23 nt, Human
cugccucugacacacagcucugu

SEQ ID NO: 1903519 - RNA, 22 nt, Human
cugccucugacacacagcucug

SEQ ID NO: 1903520 - RNA, 15 nt, Human
cugccucugacacac

SEQ ID NO: 1903521 - RNA, 22 nt, Human
cugccucucugcaggucccuaa

SEQ ID NO: 1903522 - RNA, 12 nt, Human
cugccucccauc

SEQ ID NO: 1903523 - RNA, 14 nt, Human
cugccucccaucac

SEQ ID NO: 1903524 - RNA, 16 nt, Human
cugccucccaucaccc

SEQ ID NO: 1903525 - RNA, 19 nt, Human
cugccucccaucacccgcu

SEQ ID NO: 1903526 - RNA, 11 nt, Human
cugccucccau

SEQ ID NO: 1903527 - RNA, 13 nt, Human
cugccuccauccu

SEQ ID NO: 1903528 - RNA, 19 nt, Human
cugcgaccacaagaaggau

SEQ ID NO: 1903529 - RNA, 19 nt, Human
cugcuccagcuguucagcu

SEQ ID NO: 1903530 - RNA, 15 nt, Human
cugcgagggcagcgg

SEQ ID NO: 1903531 - RNA, 20 nt, Human
cugcuccagcuguucagcug

SEQ ID NO: 1903532 - RNA, 19 nt, Human
cugcucuccgaccagacac

SEQ ID NO: 1903533 - RNA, 15 nt, Human
cugcuccuagaggga

SEQ ID NO: 1903534 - RNA, 17 nt, Human
cugcuccuagagggagg

SEQ ID NO: 1903535 - RNA, 21 nt, Human
cugcuccuagagggaggggcc

SEQ ID NO: 1903536 - RNA, 22 nt, Human
cugcuccuagagggaggggccu

SEQ ID NO: 1903537 - RNA, 15 nt, Human
cugcucuccuuccug

SEQ ID NO: 1903538 - RNA, 13 nt, Human
cugcucuccuucc

SEQ ID NO: 1903539 - RNA, 12 nt, Human
cugcucuccuuc

SEQ ID NO: 1903540 - RNA, 11 nt, Human
cugcugaaggc

SEQ ID NO: 1903541 - RNA, 23 nt, Human
cugcugguucaggguuggccccu

SEQ ID NO: 1903542 - RNA, 15 nt, Human
cugcugguucagggu

SEQ ID NO: 1903543 - RNA, 13 nt, Human
cugcugguucagg

SEQ ID NO: 1903544 - RNA, 11 nt, Human
cugcugggcuu

SEQ ID NO: 1903545 - RNA, 15 nt, Human
cugcuuccagugagg

SEQ ID NO: 1903546 - RNA, 21 nt, Human
cugcugguuuuaacaacugug

SEQ ID NO: 1903547 - RNA, 17 nt, Human
cugcuguaaauuuggcu

SEQ ID NO: 1903548 - RNA, 19 nt, Human
cugcuguaaauuuggcuuc

SEQ ID NO: 1903549 - RNA, 16 nt, Human
cugcuuccagugaggc

SEQ ID NO: 1903550 - RNA, 18 nt, Human
cugcuuccagugaggcuc

SEQ ID NO: 1903551 - RNA, 19 nt, Human
cugcuuccagugaggcucu

SEQ ID NO: 1903552 - RNA, 20 nt, Human
cugcuuccagugaggcucug

SEQ ID NO: 1903553 - RNA, 21 nt, Human
cugcuuccagugaggcucugc

SEQ ID NO: 1903554 - RNA, 23 nt, Human
cugcuuccagugaggcucugccc

SEQ ID NO: 1903555 - RNA, 15 nt, Human
cugcugcuggcuggu

SEQ ID NO: 1903556 - RNA, 20 nt, Human
cugcuggaguuucauguaca

SEQ ID NO: 1903557 - RNA, 21 nt, Human
cugcuggaguuucauguacaa

SEQ ID NO: 1903558 - RNA, 15 nt, Human
cugcuggacaguauc

SEQ ID NO: 1903559 - RNA, 20 nt, Human
cugcuggacaguaucacugu

SEQ ID NO: 1903560 - RNA, 22 nt, Human
cugcuggacaguaucacugucu

SEQ ID NO: 1903561 - RNA, 15 nt, Human
cugcuggaaacagac

SEQ ID NO: 1903562 - RNA, 12 nt, Human
gagacaggcaga

SEQ ID NO: 1903563 - RNA, 14 nt, Human
gagacaggcagagc

SEQ ID NO: 1903564 - RNA, 16 nt, Human
gagacaggcagagcug

SEQ ID NO: 1903565 - RNA, 19 nt, Human
gagacaggcagagcugcuc

SEQ ID NO: 1903566 - RNA, 22 nt, Human
gagacaggguuuugccauguug

SEQ ID NO: 1903567 - RNA, 19 nt, Human
gagacaggguuucaccaug

SEQ ID NO: 1903568 - RNA, 14 nt, Human
gagaccaucccuga

SEQ ID NO: 1903569 - RNA, 22 nt, Human
gagacaguugggugagaacaac

SEQ ID NO: 1903570 - RNA, 18 nt, Human
gagaccaucccugaaggc

SEQ ID NO: 1903571 - RNA, 21 nt, Human
gagaccaucccugaaggcccc

SEQ ID NO: 1903572 - RNA, 23 nt, Human
gagaaugcacaaacagaggccgc

SEQ ID NO: 1903573 - RNA, 20 nt, Human
gagacagcucugcauacuca

SEQ ID NO: 1903574 - RNA, 16 nt, Human
gagaauguaagaacua

SEQ ID NO: 1903575 - RNA, 15 nt, Human
gagaauguaagaacu

SEQ ID NO: 1903576 - RNA, 19 nt, Human
gagacagcuugaucaaagg

SEQ ID NO: 1903577 - RNA, 17 nt, Human
gagaaugucaguaugug

SEQ ID NO: 1903578 - RNA, 13 nt, Human
gagacucugucuc

SEQ ID NO: 1903579 - RNA, 20 nt, Human
gagacucgcgacaaugcaaa

SEQ ID NO: 1903580 - RNA, 21 nt, Human
gagacucgcgacaaugcaaac

SEQ ID NO: 1903581 - RNA, 19 nt, Human
gagacuccugcaggcagcc

SEQ ID NO: 1903582 - RNA, 23 nt, Human
gagacaguugggugagaacaacc

SEQ ID NO: 1903583 - RNA, 20 nt, Human
gagacuccugcaggcagcca

SEQ ID NO: 1903584 - RNA, 21 nt, Human
gagacuccugcaggcagccag

SEQ ID NO: 1903585 - RNA, 14 nt, Human
gagagggugggagu

SEQ ID NO: 1903586 - RNA, 20 nt, Human
gagagggugggagugggccc

SEQ ID NO: 1903587 - RNA, 16 nt, Human
gagagggugggagugg

SEQ ID NO: 1903588 - RNA, 19 nt, Human
gagaggggaacagacugga

SEQ ID NO: 1903589 - RNA, 13 nt, Human
gagaggggcacag

SEQ ID NO: 1903590 - RNA, 18 nt, Human
gagagccccucacacagc

SEQ ID NO: 1903591 - RNA, 13 nt, Human
gagagagcuggag

SEQ ID NO: 1903592 - RNA, 15 nt, Human
gagagcaacauuuua

SEQ ID NO: 1903593 - RNA, 15 nt, Human
gagagagaggcagaa

SEQ ID NO: 1903594 - RNA, 18 nt, Human
gagcccugguggcagugg

SEQ ID NO: 1903595 - RNA, 13 nt, Human
gagcccagcuggg

SEQ ID NO: 1903596 - RNA, 19 nt, Human
gagcccagcugggucaggc

SEQ ID NO: 1903597 - RNA, 21 nt, Human
gagcccagcugggucaggcag

SEQ ID NO: 1903598 - RNA, 22 nt, Human
gagcccagcugggucaggcagg

SEQ ID NO: 1903599 - RNA, 14 nt, Human
gagcccagcuccaa

SEQ ID NO: 1903600 - RNA, 12 nt, Human
gagcccagcucc

SEQ ID NO: 1903601 - RNA, 13 nt, Human
gagcccagcucca

SEQ ID NO: 1903602 - RNA, 18 nt, Human
gagcccagcccuccccau

SEQ ID NO: 1903603 - RNA, 22 nt, Human
gagcccagaggagggcagcaga

SEQ ID NO: 1903604 - RNA, 14 nt, Human
gagcccagaggagg

SEQ ID NO: 1903605 - RNA, 15 nt, Human
gagcccagcccuccc

SEQ ID NO: 1903606 - RNA, 19 nt, Human
gagccagggucucacuaug

SEQ ID NO: 1903607 - RNA, 23 nt, Human
gagcccacuguacuugcucuuga

SEQ ID NO: 1903608 - RNA, 19 nt, Human
gagcccacuguccugggcc

SEQ ID NO: 1903609 - RNA, 24 nt, Human
gagcccacuguccugggccugcag

SEQ ID NO: 1903610 - RNA, 23 nt, Human
gagccagauuucacucuccuugg

SEQ ID NO: 1903611 - RNA, 14 nt, Human
gagccagggucuca

SEQ ID NO: 1903612 - RNA, 21 nt, Human
gagccagcagccuggcucucc

SEQ ID NO: 1903613 - RNA, 12 nt, Human
gagcagagacca

SEQ ID NO: 1903614 - RNA, 16 nt, Human
gagcagagaauucucu

SEQ ID NO: 1903615 - RNA, 19 nt, Human
gagccaauuuaaagaaaac

SEQ ID NO: 1903616 - RNA, 20 nt, Human
gagccagauuucacucuccu

SEQ ID NO: 1903617 - RNA, 20 nt, Human
gagccaacagaagcuuccau

SEQ ID NO: 1903618 - RNA, 15 nt, Human
gagcacuaaggugug

SEQ ID NO: 1903619 - RNA, 21 nt, Human
gagcaccuuagacagucccug

SEQ ID NO: 1903620 - RNA, 22 nt, Human
gagcaccuuagacagucccugc

SEQ ID NO: 1903621 - RNA, 21 nt, Human
gagcacuaaggugugcucuga

SEQ ID NO: 1903622 - RNA, 20 nt, Human
gagcaccuuagacagucccu

SEQ ID NO: 1903623 - RNA, 15 nt, Human
gagcaagaggaggcc

SEQ ID NO: 1903624 - RNA, 20 nt, Human
gagcaaggguucccucaaga

SEQ ID NO: 1903625 - RNA, 12 nt, Human
gagcaagacucu

SEQ ID NO: 1903626 - RNA, 14 nt, Human
gagcaagacucugu

SEQ ID NO: 1903627 - RNA, 13 nt, Human
gagcaacauuuua

SEQ ID NO: 1903628 - RNA, 23 nt, Human
gagaucaaccccuucgcuccugu

SEQ ID NO: 1903629 - RNA, 16 nt, Human
gagauagccaaggcca

SEQ ID NO: 1903630 - RNA, 14 nt, Human
gagauagccaaggc

SEQ ID NO: 1903631 - RNA, 19 nt, Human
gagaucacgccacugcacu

SEQ ID NO: 1903632 - RNA, 21 nt, Human
gagauccaaaagaagccccca

SEQ ID NO: 1903633 - RNA, 22 nt, Human
gagauccaaaagaagcccccag

SEQ ID NO: 1903634 - RNA, 18 nt, Human
gagaucacgccacugcac

SEQ ID NO: 1903635 - RNA, 22 nt, Human
gagaugauacauccaaagcaga

SEQ ID NO: 1903636 - RNA, 19 nt, Human
gagaugaugaaaauauuua

SEQ ID NO: 1903637 - RNA, 18 nt, Human
gagaugaugaaaauauuu

SEQ ID NO: 1903638 - RNA, 19 nt, Human
gagaucccauccccuuguc

SEQ ID NO: 1903639 - RNA, 15 nt, Human
gagaugaagcaaaca

SEQ ID NO: 1903640 - RNA, 18 nt, Human
gagaugaagcaaacacau

SEQ ID NO: 1903641 - RNA, 20 nt, Human
gagaugaagcaaacacauua

SEQ ID NO: 1903642 - RNA, 22 nt, Human
gacugcagggacacgggcagcc

SEQ ID NO: 1903643 - RNA, 23 nt, Human
gacugaguacguugugcauuugg

SEQ ID NO: 1903644 - RNA, 21 nt, Human
gacugcagggacacgggcagc

SEQ ID NO: 1903645 - RNA, 13 nt, Human
gacugcccggcag

SEQ ID NO: 1903646 - RNA, 15 nt, Human
gacugcccggcaggg

SEQ ID NO: 1903647 - RNA, 22 nt, Human
gacugaguacguugugcauuug

SEQ ID NO: 1903648 - RNA, 21 nt, Human
gacugaguacguugugcauuu

SEQ ID NO: 1903649 - RNA, 17 nt, Human
gacucgcgacaaugcaa

SEQ ID NO: 1903650 - RNA, 16 nt, Human
gacucgagaacuuuca

SEQ ID NO: 1903651 - RNA, 19 nt, Human
gacucgagaacuuucauuu

SEQ ID NO: 1903652 - RNA, 18 nt, Human
gacuggaagcacagcuuc

SEQ ID NO: 1903653 - RNA, 21 nt, Human
gacuggaagcuaauuugcauu

SEQ ID NO: 1903654 - RNA, 20 nt, Human
gacuggaagcuaauuugcau

SEQ ID NO: 1903655 - RNA, 16 nt, Human
gacuggaagcacagcu

SEQ ID NO: 1903656 - RNA, 15 nt, Human
gacuggaagcacagc

SEQ ID NO: 1903657 - RNA, 14 nt, Human
gacuggaagcacag

SEQ ID NO: 1903658 - RNA, 12 nt, Human
gacuccugcagg

SEQ ID NO: 1903659 - RNA, 13 nt, Human
gacuccugcaggc

SEQ ID NO: 1903660 - RNA, 13 nt, Human
gacucgcgacaau

SEQ ID NO: 1903661 - RNA, 22 nt, Human
gacuccggcccuccuacccugc

SEQ ID NO: 1903662 - RNA, 13 nt, Human
gacuacaggugug

SEQ ID NO: 1903663 - RNA, 17 nt, Human
gaccuauaacugcccag

SEQ ID NO: 1903664 - RNA, 21 nt, Human
gacuacaggugugagucacca

SEQ ID NO: 1903665 - RNA, 18 nt, Human
gacuacaggugugaguca

SEQ ID NO: 1903666 - RNA, 15 nt, Human
gacuagagcuuucuu

SEQ ID NO: 1903667 - RNA, 18 nt, Human
gacuagagcuuucuuuca

SEQ ID NO: 1903668 - RNA, 15 nt, Human
gacucauucuucugu

SEQ ID NO: 1903669 - RNA, 14 nt, Human
gacucauucuucug

SEQ ID NO: 1903670 - RNA, 18 nt, Human
gacucagacauuggcacc

SEQ ID NO: 1903671 - RNA, 14 nt, Human
gacuagaugaugga

SEQ ID NO: 1903672 - RNA, 16 nt, Human
gacuagaugauggaug

SEQ ID NO: 1903673 - RNA, 21 nt, Human
gacuagaugauggaugccaau

SEQ ID NO: 1903674 - RNA, 17 nt, Human
gacuagagggaccucuc

SEQ ID NO: 1903675 - RNA, 19 nt, Human
gacuagagggaccucuccc

SEQ ID NO: 1903676 - RNA, 20 nt, Human
gacuagagggaccucuccca

SEQ ID NO: 1903677 - RNA, 23 nt, Human
gacuagagggaccucucccaggg

SEQ ID NO: 1903678 - RNA, 20 nt, Human
gacuuggggagauggaguuc

SEQ ID NO: 1903679 - RNA, 13 nt, Human
gacuugaccccga

SEQ ID NO: 1903680 - RNA, 13 nt, Human
gacuuggaagcuc

SEQ ID NO: 1903681 - RNA, 18 nt, Human
gacuugacagaacacugu

SEQ ID NO: 1903682 - RNA, 16 nt, Human
gacuugacagaacacu

SEQ ID NO: 1903683 - RNA, 16 nt, Human
gacuuaacuccuucca

SEQ ID NO: 1903684 - RNA, 19 nt, Human
gacuuaagcacacuugaca

SEQ ID NO: 1903685 - RNA, 15 nt, Human
gacuuccuugagaca

SEQ ID NO: 1903686 - RNA, 16 nt, Human
gacuuccuugagacac

SEQ ID NO: 1903687 - RNA, 20 nt, Human
gacuuccuugagacacggag

SEQ ID NO: 1903688 - RNA, 16 nt, Human
gagaaagguugaagca

SEQ ID NO: 1903689 - RNA, 22 nt, Human
gagaaaguacuucuccacccug

SEQ ID NO: 1903690 - RNA, 17 nt, Human
gagaaaggggagcccac

SEQ ID NO: 1903691 - RNA, 18 nt, Human
gagaaaggggagcccacu

SEQ ID NO: 1903692 - RNA, 19 nt, Human
gagaaagcgcagaugcuag

SEQ ID NO: 1903693 - RNA, 21 nt, Human
gagaaaugaaaaaauauauau

SEQ ID NO: 1903694 - RNA, 14 nt, Human
gagaaaugagcuug

SEQ ID NO: 1903695 - RNA, 12 nt, Human
gagaaaugaaaa

SEQ ID NO: 1903696 - RNA, 13 nt, Human
gagaaaugggacu

SEQ ID NO: 1903697 - RNA, 14 nt, Human
gagaagagaaugca

SEQ ID NO: 1903698 - RNA, 17 nt, Human
gagaacuuucauuuuuu

SEQ ID NO: 1903699 - RNA, 16 nt, Human
gagaacuuuauuucca

SEQ ID NO: 1903700 - RNA, 16 nt, Human
gagaacuuucauuuuu

SEQ ID NO: 1903701 - RNA, 15 nt, Human
gagaacuuucauuuu

SEQ ID NO: 1903702 - RNA, 16 nt, Human
gagaagagaaugcaca

SEQ ID NO: 1903703 - RNA, 16 nt, Human
gagaagcagaggaagg

SEQ ID NO: 1903704 - RNA, 22 nt, Human
gagaagccacaggccugagauu

SEQ ID NO: 1903705 - RNA, 20 nt, Human
gagaagccacaggccugaga

SEQ ID NO: 1903706 - RNA, 18 nt, Human
gagaagccacaggccuga

SEQ ID NO: 1903707 - RNA, 17 nt, Human
gagaagccacaggccug

SEQ ID NO: 1903708 - RNA, 13 nt, Human
gagaagccacagg

SEQ ID NO: 1903709 - RNA, 14 nt, Human
gaccacuguuauca

SEQ ID NO: 1903710 - RNA, 11 nt, Human
gaccagagcug

SEQ ID NO: 1903711 - RNA, 14 nt, Human
gaccacguuucuaa

SEQ ID NO: 1903712 - RNA, 14 nt, Human
gaccacgcuuucua

SEQ ID NO: 1903713 - RNA, 21 nt, Human
gaccacgcuuucuagcuguug

SEQ ID NO: 1903714 - RNA, 21 nt, Human
gaccacugcagaagacaguau

SEQ ID NO: 1903715 - RNA, 13 nt, Human
gaccacggcucga

SEQ ID NO: 1903716 - RNA, 18 nt, Human
gacaugggaaaggggaag

SEQ ID NO: 1903717 - RNA, 16 nt, Human
gacaugcgguagccag

SEQ ID NO: 1903718 - RNA, 17 nt, Human
gacaugcgguagccagc

SEQ ID NO: 1903719 - RNA, 19 nt, Human
gaccauucuccaccugcca

SEQ ID NO: 1903720 - RNA, 20 nt, Human
gaccauucuccaccugccag

SEQ ID NO: 1903721 - RNA, 12 nt, Human
gaccagccuggc

SEQ ID NO: 1903722 - RNA, 22 nt, Human
gaccagccuggccaacauggua

SEQ ID NO: 1903723 - RNA, 21 nt, Human
gaccauucuccaccugccagg

SEQ ID NO: 1903724 - RNA, 22 nt, Human
gaccauucuccaccugccaggg

SEQ ID NO: 1903725 - RNA, 18 nt, Human
gaccagagcugccaccug

SEQ ID NO: 1903726 - RNA, 19 nt, Human
gaccagagcugccaccugc

SEQ ID NO: 1903727 - RNA, 13 nt, Human
gaccagagcugcc

SEQ ID NO: 1903728 - RNA, 14 nt, Human
gaccagagcugcca

SEQ ID NO: 1903729 - RNA, 15 nt, Human
gaccagagcugccac

SEQ ID NO: 1903730 - RNA, 17 nt, Human
gaccagagcugccaccu

SEQ ID NO: 1903731 - RNA, 21 nt, Human
gaccccuccaugugggcuagu

SEQ ID NO: 1903732 - RNA, 22 nt, Human
gacccugaggcccagagggccu

SEQ ID NO: 1903733 - RNA, 18 nt, Human
gaccccuccaugugggcu

SEQ ID NO: 1903734 - RNA, 14 nt, Human
gaccccuccaugug

SEQ ID NO: 1903735 - RNA, 23 nt, Human
gacccugaggcccagagggccug

SEQ ID NO: 1903736 - RNA, 18 nt, Human
gacccaauguaggagcug

SEQ ID NO: 1903737 - RNA, 19 nt, Human
gacccaauguaggagcugc

SEQ ID NO: 1903738 - RNA, 22 nt, Human
gacccacaagaaaugaaagcag

SEQ ID NO: 1903739 - RNA, 15 nt, Human
gacccacaagaaaug

SEQ ID NO: 1903740 - RNA, 16 nt, Human
gacccaaaaggcagaa

SEQ ID NO: 1903741 - RNA, 12 nt, Human
gacccugucuca

SEQ ID NO: 1903742 - RNA, 11 nt, Human
gacccuguaua

SEQ ID NO: 1903743 - RNA, 17 nt, Human
gacccuguauauagccc

SEQ ID NO: 1903744 - RNA, 19 nt, Human
gacccuguauauagcccag

SEQ ID NO: 1903745 - RNA, 19 nt, Human
gacccuuguggucccaccc

SEQ ID NO: 1903746 - RNA, 20 nt, Human
gacccuuguggucccacccc

SEQ ID NO: 1903747 - RNA, 21 nt, Human
gacccuuguggucccacccca

SEQ ID NO: 1903748 - RNA, 19 nt, Human
gaccgugaggccagagaca

SEQ ID NO: 1903749 - RNA, 18 nt, Human
gaccgugaggccagagac

SEQ ID NO: 1903750 - RNA, 16 nt, Human
gaccgugaggccagag

SEQ ID NO: 1903751 - RNA, 17 nt, Human
gaccgugaggccagaga

SEQ ID NO: 1903752 - RNA, 16 nt, Human
gacagggaggugaccc

SEQ ID NO: 1903753 - RNA, 18 nt, Human
gacagggaggacgcucuc

SEQ ID NO: 1903754 - RNA, 23 nt, Human
gacagggcacaccgggcacucag

SEQ ID NO: 1903755 - RNA, 24 nt, Human
gacagggcacaccgggcacucaga

SEQ ID NO: 1903756 - RNA, 14 nt, Human
gacaguuaagagaa

SEQ ID NO: 1903757 - RNA, 15 nt, Human
gacaguggcaggaca

SEQ ID NO: 1903758 - RNA, 13 nt, Human
gacaguggcagga

SEQ ID NO: 1903759 - RNA, 18 nt, Human
gacaguggcaggacagga

SEQ ID NO: 1903760 - RNA, 14 nt, Human
gacaggaccaggga

SEQ ID NO: 1903761 - RNA, 15 nt, Human
gacaggaccagggau

SEQ ID NO: 1903762 - RNA, 23 nt, Human
gacaggaccagggauuuccauga

SEQ ID NO: 1903763 - RNA, 17 nt, Human
gacagggaggacgcucu

SEQ ID NO: 1903764 - RNA, 14 nt, Human
gacaugaucuucuu

SEQ ID NO: 1903765 - RNA, 14 nt, Human
gacaugauuuccuu

SEQ ID NO: 1903766 - RNA, 14 nt, Human
gacaugauuccuuc

SEQ ID NO: 1903767 - RNA, 16 nt, Human
gacaugauuccuuccu

SEQ ID NO: 1903768 - RNA, 16 nt, Human
gacaugauuuccuuga

SEQ ID NO: 1903769 - RNA, 17 nt, Human
gacaugauuuccuugaa

SEQ ID NO: 1903770 - RNA, 19 nt, Human
gacaugauuuccuugaaug

SEQ ID NO: 1903771 - RNA, 20 nt, Human
gacaugauuuccuugaaugu

SEQ ID NO: 1903772 - RNA, 14 nt, Human
gacaugggaaaggg

SEQ ID NO: 1903773 - RNA, 22 nt, Human
gacaugauuuccuugaaugugg

SEQ ID NO: 1903774 - RNA, 24 nt, Human
gacaugauuuccuugaauguggcu

SEQ ID NO: 1903775 - RNA, 14 nt, Human
gacaugcacucagc

SEQ ID NO: 1903776 - RNA, 22 nt, Human
gacaugauuccuuccuguucug

SEQ ID NO: 1903777 - RNA, 22 nt, Human
gacaguuaagagaaaugagcuu

SEQ ID NO: 1903778 - RNA, 14 nt, Human
gacauacuugaagg

SEQ ID NO: 1903779 - RNA, 15 nt, Human
gacauacuugaaggg

SEQ ID NO: 1903780 - RNA, 20 nt, Human
gacauagaauuaacacauga

SEQ ID NO: 1903781 - RNA, 17 nt, Human
gacauacuugaagggcc

SEQ ID NO: 1903782 - RNA, 18 nt, Human
gacauacuugaagggcca

SEQ ID NO: 1903783 - RNA, 19 nt, Human
gacauacuugaagggccag

SEQ ID NO: 1903784 - RNA, 20 nt, Human
gacauacuugaagggccaga

SEQ ID NO: 1903785 - RNA, 22 nt, Human
gacauacuugaagggccagagc

SEQ ID NO: 1903786 - RNA, 23 nt, Human
gacauacuugaagggccagagcc

SEQ ID NO: 1903787 - RNA, 23 nt, Human
gacauccccccgccaaaagcugc

SEQ ID NO: 1903788 - RNA, 14 nt, Human
gacagagucucacu

SEQ ID NO: 1903789 - RNA, 23 nt, Human
gacagaggggguggccucccaac

SEQ ID NO: 1903790 - RNA, 21 nt, Human
gacagaggggguggccuccca

SEQ ID NO: 1903791 - RNA, 22 nt, Human
gacagaggggguggccucccaa

SEQ ID NO: 1903792 - RNA, 17 nt, Human
gacagaggcagccccau

SEQ ID NO: 1903793 - RNA, 15 nt, Human
gacagaggggguggc

SEQ ID NO: 1903794 - RNA, 18 nt, Human
gacagaggggguggccuc

SEQ ID NO: 1903795 - RNA, 19 nt, Human
gacagaggggguggccucc

SEQ ID NO: 1903796 - RNA, 16 nt, Human
gacagaggcagcccca

SEQ ID NO: 1903797 - RNA, 14 nt, Human
gacagaggcagccc

SEQ ID NO: 1903798 - RNA, 21 nt, Human
gacagagcaagugagacccug

SEQ ID NO: 1903799 - RNA, 13 nt, Human
gacacccaggacu

SEQ ID NO: 1903800 - RNA, 14 nt, Human
gacacccaggacuu

SEQ ID NO: 1903801 - RNA, 19 nt, Human
gacagccacggccaggcca

SEQ ID NO: 1903802 - RNA, 18 nt, Human
gacagccacggccaggcc

SEQ ID NO: 1903803 - RNA, 17 nt, Human
gacagccacggccaggc

SEQ ID NO: 1903804 - RNA, 14 nt, Human
gacagccacggcca

SEQ ID NO: 1903805 - RNA, 22 nt, Human
gacagagugagacucugucuca

SEQ ID NO: 1903806 - RNA, 20 nt, Human
gacagagugagacucugucu

SEQ ID NO: 1903807 - RNA, 21 nt, Human
gacagccacggccaggccaga

SEQ ID NO: 1903808 - RNA, 20 nt, Human
gacagccacggccaggccag

SEQ ID NO: 1903809 - RNA, 16 nt, Human
gacagcugccugggau

SEQ ID NO: 1903810 - RNA, 17 nt, Human
gacagcugccugggauc

SEQ ID NO: 1903811 - RNA, 18 nt, Human
gacagcugccugggaucc

SEQ ID NO: 1903812 - RNA, 21 nt, Human
gacagcugccugggaucccuc

SEQ ID NO: 1903813 - RNA, 12 nt, Human
gacagcuuugcu

SEQ ID NO: 1903814 - RNA, 16 nt, Human
gacagcuuugcugcug

SEQ ID NO: 1903815 - RNA, 15 nt, Human
gacagcuuugcugcu

SEQ ID NO: 1903816 - RNA, 19 nt, Human
gaauguaaucaauguuucu

SEQ ID NO: 1903817 - RNA, 18 nt, Human
gaauguaaucaauguuuc

SEQ ID NO: 1903818 - RNA, 16 nt, Human
gaauguaaucaauguu

SEQ ID NO: 1903819 - RNA, 13 nt, Human
gaauguaaucaau

SEQ ID NO: 1903820 - RNA, 11 nt, Human
gaauguaauca

SEQ ID NO: 1903821 - RNA, 18 nt, Human
gaaugucaguauguggaa

SEQ ID NO: 1903822 - RNA, 16 nt, Human
gaaugucaguaugugg

SEQ ID NO: 1903823 - RNA, 13 nt, Human
gaaugucaguaug

SEQ ID NO: 1903824 - RNA, 13 nt, Human
gaaugucagugug

SEQ ID NO: 1903825 - RNA, 19 nt, Human
gaaugucaguauguggaag

SEQ ID NO: 1903826 - RNA, 18 nt, Human
gaauguggcuugagaaau

SEQ ID NO: 1903827 - RNA, 23 nt, Human
gaauugcauuuuuuaaaacaaga

SEQ ID NO: 1903828 - RNA, 21 nt, Human
gaauugcauuuuuuaaaacaa

SEQ ID NO: 1903829 - RNA, 14 nt, Human
gaauugcagaguac

SEQ ID NO: 1903830 - RNA, 12 nt, Human
gaauugcauuga

SEQ ID NO: 1903831 - RNA, 13 nt, Human
gaauugcauugac

SEQ ID NO: 1903832 - RNA, 22 nt, Human
gaauugauuugcauugaacaca

SEQ ID NO: 1903833 - RNA, 18 nt, Human
gaauugauuugcauugaa

SEQ ID NO: 1903834 - RNA, 21 nt, Human
gaauugacccacaagaaauga

SEQ ID NO: 1903835 - RNA, 16 nt, Human
gaauugacccacaaga

SEQ ID NO: 1903836 - RNA, 21 nt, Human
gaauguuuacacucuuuguaa

SEQ ID NO: 1903837 - RNA, 20 nt, Human
gaauguuuacacucuuugua

SEQ ID NO: 1903838 - RNA, 20 nt, Human
gaauguuacauuguuugucu

SEQ ID NO: 1903839 - RNA, 17 nt, Human
gaauguuacauuguuug

SEQ ID NO: 1903840 - RNA, 22 nt, Human
gaaucccacccacaugugacac

SEQ ID NO: 1903841 - RNA, 18 nt, Human
gaaucccacccacaugug

SEQ ID NO: 1903842 - RNA, 16 nt, Human
gaaucccaaauuugau

SEQ ID NO: 1903843 - RNA, 17 nt, Human
gaaucccaaauuugauu

SEQ ID NO: 1903844 - RNA, 19 nt, Human
gaaucccaaauuugauuga

SEQ ID NO: 1903845 - RNA, 20 nt, Human
gaauccagacccggcugcgu

SEQ ID NO: 1903846 - RNA, 18 nt, Human
gaauccagacccggcugc

SEQ ID NO: 1903847 - RNA, 18 nt, Human
gaaucuagggagggggaa

SEQ ID NO: 1903848 - RNA, 15 nt, Human
gaaucuacuaauucc

SEQ ID NO: 1903849 - RNA, 18 nt, Human
gaaucuacccccagaucc

SEQ ID NO: 1903850 - RNA, 22 nt, Human
gaaucuacccccagauccaagc

SEQ ID NO: 1903851 - RNA, 12 nt, Human
gaaaggcuccag

SEQ ID NO: 1903852 - RNA, 19 nt, Human
gaaucaguauaaacaaagu

SEQ ID NO: 1903853 - RNA, 21 nt, Human
gaaucaguauaaacaaaguua

SEQ ID NO: 1903854 - RNA, 21 nt, Human
gaaugaaagucuugugacuag

SEQ ID NO: 1903855 - RNA, 20 nt, Human
gaaugaaagucuugugacua

SEQ ID NO: 1903856 - RNA, 12 nt, Human
gaaucuggagac

SEQ ID NO: 1903857 - RNA, 23 nt, Human
gaaugaaagucuugugacuagug

SEQ ID NO: 1903858 - RNA, 20 nt, Human
gaaugaacacucuuuugcuu

SEQ ID NO: 1903859 - RNA, 20 nt, Human
gaaugcacaaacagaggccg

SEQ ID NO: 1903860 - RNA, 21 nt, Human
gaaugaaagggcccagagagg

SEQ ID NO: 1903861 - RNA, 18 nt, Human
gaaucucugaauuugaga

SEQ ID NO: 1903862 - RNA, 20 nt, Human
gaaugcagucuguccaggcu

SEQ ID NO: 1903863 - RNA, 22 nt, Human
gaaugcagucuguccaggcucg

SEQ ID NO: 1903864 - RNA, 21 nt, Human
gaaugcacaaacagaggccgc

SEQ ID NO: 1903865 - RNA, 22 nt, Human
gaauggcacagcccaaagaagg

SEQ ID NO: 1903866 - RNA, 13 nt, Human
gaauggcagcugc

SEQ ID NO: 1903867 - RNA, 16 nt, Human
gaauggcagcugccac

SEQ ID NO: 1903868 - RNA, 16 nt, Human
gacaaggaaaaaauaa

SEQ ID NO: 1903869 - RNA, 19 nt, Human
gacaaggagaagagcaagg

SEQ ID NO: 1903870 - RNA, 21 nt, Human
gacaaggauugcuacuguccu

SEQ ID NO: 1903871 - RNA, 19 nt, Human
gacaaggauugcuacuguc

SEQ ID NO: 1903872 - RNA, 18 nt, Human
gacaaggauugcuacugu

SEQ ID NO: 1903873 - RNA, 21 nt, Human
gacaaggaugaucuaggaaga

SEQ ID NO: 1903874 - RNA, 22 nt, Human
gacaaugcaaaccaucauugaa

SEQ ID NO: 1903875 - RNA, 16 nt, Human
gacaauggcagaugua

SEQ ID NO: 1903876 - RNA, 12 nt, Human
gacaaugugaaa

SEQ ID NO: 1903877 - RNA, 18 nt, Human
gacaaugugaaaagaaaa

SEQ ID NO: 1903878 - RNA, 19 nt, Human
gacaaugugaaaagaaaaa

SEQ ID NO: 1903879 - RNA, 20 nt, Human
gacaaugugaaaagaaaaau

SEQ ID NO: 1903880 - RNA, 19 nt, Human
gacacaggcccggcuccag

SEQ ID NO: 1903881 - RNA, 16 nt, Human
gacacaagccuucggc

SEQ ID NO: 1903882 - RNA, 21 nt, Human
gacacaggcccggcuccaggc

SEQ ID NO: 1903883 - RNA, 20 nt, Human
gacacaggcccggcuccagg

SEQ ID NO: 1903884 - RNA, 14 nt, Human
gacacaugcaaggu

SEQ ID NO: 1903885 - RNA, 13 nt, Human
gacacaggcccuc

SEQ ID NO: 1903886 - RNA, 19 nt, Human
gacacaugcaaggucauuu

SEQ ID NO: 1903887 - RNA, 15 nt, Human
gacacauguccaaga

SEQ ID NO: 1903888 - RNA, 20 nt, Human
gacacauguccaagaagccc

SEQ ID NO: 1903889 - RNA, 23 nt, Human
gacacauguccaagaagcccagg

SEQ ID NO: 1903890 - RNA, 11 nt, Human
gacaacaucug

SEQ ID NO: 1903891 - RNA, 15 nt, Human
gacaacuacagaaaa

SEQ ID NO: 1903892 - RNA, 22 nt, Human
gacaacacucauugaccugagg

SEQ ID NO: 1903893 - RNA, 23 nt, Human
gacaacacucauugaccugaggc

SEQ ID NO: 1903894 - RNA, 19 nt, Human
gacaacacugggaaacaga

SEQ ID NO: 1903895 - RNA, 15 nt, Human
gaauuguaaggaaug

SEQ ID NO: 1903896 - RNA, 23 nt, Human
gaauuggguggggggcuucauac

SEQ ID NO: 1903897 - RNA, 22 nt, Human
gaauuggguggggggcuucaua

SEQ ID NO: 1903898 - RNA, 20 nt, Human
gaauuggguggggggcuuca

SEQ ID NO: 1903899 - RNA, 20 nt, Human
gaauuucuaggacugaauua

SEQ ID NO: 1903900 - RNA, 19 nt, Human
gaauuucuaggacugaauu

SEQ ID NO: 1903901 - RNA, 22 nt, Human
gaauuucuuuugccguuauuaa

SEQ ID NO: 1903902 - RNA, 20 nt, Human
gaauuugauaugugaacagu

SEQ ID NO: 1903903 - RNA, 19 nt, Human
gauugauagaguguuauca

SEQ ID NO: 1903904 - RNA, 15 nt, Human
gauugauuugaagaa

SEQ ID NO: 1903905 - RNA, 17 nt, Human
gauugauuugaagaaca

SEQ ID NO: 1903906 - RNA, 22 nt, Human
gauugagaaguuacuuuccauu

SEQ ID NO: 1903907 - RNA, 14 nt, Human
gauucuccugccuc

SEQ ID NO: 1903908 - RNA, 15 nt, Human
gauugcaacaggcug

SEQ ID NO: 1903909 - RNA, 23 nt, Human
gauugcaggagucccugccauca

SEQ ID NO: 1903910 - RNA, 20 nt, Human
gauuacagggaugagccacc

SEQ ID NO: 1903911 - RNA, 18 nt, Human
gauuacagggaugagcca

SEQ ID NO: 1903912 - RNA, 20 nt, Human
gauucaaugccccugaauuu

SEQ ID NO: 1903913 - RNA, 19 nt, Human
gauucaaugccccugaauu

SEQ ID NO: 1903914 - RNA, 21 nt, Human
gauucaaugccccugaauuua

SEQ ID NO: 1903915 - RNA, 15 nt, Human
gauucuauuuauaug

SEQ ID NO: 1903916 - RNA, 20 nt, Human
gauucuauuuauauguacau

SEQ ID NO: 1903917 - RNA, 21 nt, Human
gauucuauuuauauguacaug

SEQ ID NO: 1903918 - RNA, 12 nt, Human
gauuuaaaucag

SEQ ID NO: 1903919 - RNA, 14 nt, Human
gauuuaacagaaau

SEQ ID NO: 1903920 - RNA, 13 nt, Human
gauuuaacagaaa

SEQ ID NO: 1903921 - RNA, 22 nt, Human
gauugcguggaauugugcugag

SEQ ID NO: 1903922 - RNA, 17 nt, Human
gauugggccccugccag

SEQ ID NO: 1903923 - RNA, 19 nt, Human
gauugggugggcaggaaaa

SEQ ID NO: 1903924 - RNA, 20 nt, Human
gauugggugggcaggaaaag

SEQ ID NO: 1903925 - RNA, 19 nt, Human
gauuugaagaacaugugag

SEQ ID NO: 1903926 - RNA, 20 nt, Human
gauuugaagaacaugugaga

SEQ ID NO: 1903927 - RNA, 13 nt, Human
gauuugacauugc

SEQ ID NO: 1903928 - RNA, 22 nt, Human
gauuuccguuaaaauaccagcc

SEQ ID NO: 1903929 - RNA, 15 nt, Human
gauuuaacagaaaug

SEQ ID NO: 1903930 - RNA, 13 nt, Human
gauuuccuugaau

SEQ ID NO: 1903931 - RNA, 17 nt, Human
gauuuccuugaaugugg

SEQ ID NO: 1903932 - RNA, 22 nt, Human
gauuuccuugaauguggcuuga

SEQ ID NO: 1903933 - RNA, 22 nt, Human
gauuuccugcuuugggaagccg

SEQ ID NO: 1903934 - RNA, 15 nt, Human
gcaaaccaucauuga

SEQ ID NO: 1903935 - RNA, 22 nt, Human
gcaaaccacacuggacuccggc

SEQ ID NO: 1903936 - RNA, 19 nt, Human
gcaaagaucuguccucagc

SEQ ID NO: 1903937 - RNA, 20 nt, Human
gcaaagaucuguccucagcc

SEQ ID NO: 1903938 - RNA, 21 nt, Human
gcaaagaucuguccucagccu

SEQ ID NO: 1903939 - RNA, 22 nt, Human
gcaaagaucuguccucagccuu

SEQ ID NO: 1903940 - RNA, 17 nt, Human
gcaaaggaguagaaaga

SEQ ID NO: 1903941 - RNA, 23 nt, Human
gcaaaugugaaucauuuuaccuu

SEQ ID NO: 1903942 - RNA, 22 nt, Human
gcaacaagaccaccacuucgaa

SEQ ID NO: 1903943 - RNA, 20 nt, Human
gcaacaagguccucugucag

SEQ ID NO: 1903944 - RNA, 19 nt, Human
gauuuugauccaagcuggu

SEQ ID NO: 1903945 - RNA, 21 nt, Human
gauuuugaaauuuuuauuaaa

SEQ ID NO: 1903946 - RNA, 15 nt, Human
gauuugcauugaaca

SEQ ID NO: 1903947 - RNA, 13 nt, Human
gauuuuaauuuug

SEQ ID NO: 1903948 - RNA, 18 nt, Human
gauuuuaaucaaguugaa

SEQ ID NO: 1903949 - RNA, 15 nt, Human
gauuuuaauuuugaa

SEQ ID NO: 1903950 - RNA, 17 nt, Human
gauuuuaaucaaguuga

SEQ ID NO: 1903951 - RNA, 16 nt, Human
gauuuugcuguagaag

SEQ ID NO: 1903952 - RNA, 15 nt, Human
gauuuugcuguauau

SEQ ID NO: 1903953 - RNA, 18 nt, Human
gauuuugcuguauauuug

SEQ ID NO: 1903954 - RNA, 22 nt, Human
gauuuugguuuuguuccccucc

SEQ ID NO: 1903955 - RNA, 19 nt, Human
gauuuugguuuuguucccc

SEQ ID NO: 1903956 - RNA, 16 nt, Human
gauuuuguaacccaga

SEQ ID NO: 1903957 - RNA, 13 nt, Human
gauuuuguaaccc

SEQ ID NO: 1903958 - RNA, 12 nt, Human
gcaaaccaucau

SEQ ID NO: 1903959 - RNA, 15 nt, Human
gcaaaccacacugga

SEQ ID NO: 1903960 - RNA, 17 nt, Human
gcaaaccacacuggacu

SEQ ID NO: 1903961 - RNA, 18 nt, Human
gcaaaccacacuggacuc

SEQ ID NO: 1903962 - RNA, 20 nt, Human
gcaaaccacacuggacuccg

SEQ ID NO: 1903963 - RNA, 16 nt, Human
gaugggugaaggcugg

SEQ ID NO: 1903964 - RNA, 21 nt, Human
gaugggugaaggcuggcauga

SEQ ID NO: 1903965 - RNA, 21 nt, Human
gaugggucaguuguaucagca

SEQ ID NO: 1903966 - RNA, 15 nt, Human
gaugggucaguugua

SEQ ID NO: 1903967 - RNA, 19 nt, Human
gaugggugcuuggaggaag

SEQ ID NO: 1903968 - RNA, 13 nt, Human
gauggggcugcac

SEQ ID NO: 1903969 - RNA, 19 nt, Human
gauggggcugcaccggcug

SEQ ID NO: 1903970 - RNA, 15 nt, Human
gauggggcugcaccg

SEQ ID NO: 1903971 - RNA, 21 nt, Human
gaugggcaacccccagccugc

SEQ ID NO: 1903972 - RNA, 24 nt, Human
gauggggcccugccuccuuuguga

SEQ ID NO: 1903973 - RNA, 20 nt, Human
gaugggcaacccccagccug

SEQ ID NO: 1903974 - RNA, 18 nt, Human
gauggccggagaggaccg

SEQ ID NO: 1903975 - RNA, 22 nt, Human
gauggcccauucuacuugcucu

SEQ ID NO: 1903976 - RNA, 20 nt, Human
gaugggagggaggcucaggu

SEQ ID NO: 1903977 - RNA, 22 nt, Human
gauggccgggcgcgguggcuca

SEQ ID NO: 1903978 - RNA, 18 nt, Human
gauggcccauucuacuug

SEQ ID NO: 1903979 - RNA, 19 nt, Human
gauggcccauucuacuugc

SEQ ID NO: 1903980 - RNA, 20 nt, Human
gauggcccauucuacuugcu

SEQ ID NO: 1903981 - RNA, 16 nt, Human
gaucagaccauaaugu

SEQ ID NO: 1903982 - RNA, 14 nt, Human
gaucagaucugaca

SEQ ID NO: 1903983 - RNA, 19 nt, Human
gaugcccaaagaugcagcc

SEQ ID NO: 1903984 - RNA, 20 nt, Human
gaugcccaaagaugcagccg

SEQ ID NO: 1903985 - RNA, 15 nt, Human
gaugccauuacauuu

SEQ ID NO: 1903986 - RNA, 20 nt, Human
gaugcugacauucaccugcc

SEQ ID NO: 1903987 - RNA, 21 nt, Human
gaugcugacauucaccugccc

SEQ ID NO: 1903988 - RNA, 22 nt, Human
gaugcuagaacucccuuucaac

SEQ ID NO: 1903989 - RNA, 20 nt, Human
gaugcuagaacucccuuuca

SEQ ID NO: 1903990 - RNA, 18 nt, Human
gaugcuagaacucccuuu

SEQ ID NO: 1903991 - RNA, 17 nt, Human
gaugugggucaaggaau

SEQ ID NO: 1903992 - RNA, 12 nt, Human
gauggugcaaug

SEQ ID NO: 1903993 - RNA, 14 nt, Human
gauggugcaaugac

SEQ ID NO: 1903994 - RNA, 13 nt, Human
gaugguaauucuu

SEQ ID NO: 1903995 - RNA, 17 nt, Human
gauggugcaaugaccuu

SEQ ID NO: 1903996 - RNA, 24 nt, Human
gaugguguucaaaaaacuuguaaa

SEQ ID NO: 1903997 - RNA, 15 nt, Human
gauggugcaaugacc

SEQ ID NO: 1903998 - RNA, 16 nt, Human
gauggugcaaugaccu

SEQ ID NO: 1903999 - RNA, 22 nt, Human
gauuacaagcgugagccacugc

SEQ ID NO: 1904000 - RNA, 15 nt, Human
gauuaaacuuaaucu

SEQ ID NO: 1904001 - RNA, 23 nt, Human
gauuacaagcgugagccacugca

SEQ ID NO: 1904002 - RNA, 18 nt, Human
gauuacaggcaugugcca

SEQ ID NO: 1904003 - RNA, 16 nt, Human
gauguuuaguaaucau

SEQ ID NO: 1904004 - RNA, 13 nt, Human
gcacaagccaggg

SEQ ID NO: 1904005 - RNA, 12 nt, Human
gcacaagccagg

SEQ ID NO: 1904006 - RNA, 21 nt, Human
gcacaagcuccaagcucccag

SEQ ID NO: 1904007 - RNA, 18 nt, Human
gcacaagcuccaagcucc

SEQ ID NO: 1904008 - RNA, 15 nt, Human
gcacaagcuccaagc

SEQ ID NO: 1904009 - RNA, 17 nt, Human
gcacaagcuccaagcuc

SEQ ID NO: 1904010 - RNA, 23 nt, Human
gcacaaauucugucucuggauua

SEQ ID NO: 1904011 - RNA, 14 nt, Human
gcacaaaguggcau

SEQ ID NO: 1904012 - RNA, 19 nt, Human
gcacaacuuuaagaggaca

SEQ ID NO: 1904013 - RNA, 17 nt, Human
gcacaagccagggugug

SEQ ID NO: 1904014 - RNA, 20 nt, Human
gcacaccgggcacucagaag

SEQ ID NO: 1904015 - RNA, 14 nt, Human
gcacacgccuccca

SEQ ID NO: 1904016 - RNA, 17 nt, Human
gcacacgccucccacug

SEQ ID NO: 1904017 - RNA, 19 nt, Human
gcacacgccucccacuggg

SEQ ID NO: 1904018 - RNA, 20 nt, Human
gcacacucauccccucacuu

SEQ ID NO: 1904019 - RNA, 20 nt, Human
gcacagaaaauggaagacag

SEQ ID NO: 1904020 - RNA, 23 nt, Human
gcacagaaaauggaagacagcuc

SEQ ID NO: 1904021 - RNA, 21 nt, Human
gcacagaaaauggaagacagc

SEQ ID NO: 1904022 - RNA, 22 nt, Human
gcacagaaaauggaagacagcu

SEQ ID NO: 1904023 - RNA, 14 nt, Human
gcacagacccugcc

SEQ ID NO: 1904024 - RNA, 15 nt, Human
gcacagacccugccc

SEQ ID NO: 1904025 - RNA, 16 nt, Human
gcacagacccugcccu

SEQ ID NO: 1904026 - RNA, 17 nt, Human
gcacagacccugcccug

SEQ ID NO: 1904027 - RNA, 15 nt, Human
gcacagaguuguuac

SEQ ID NO: 1904028 - RNA, 22 nt, Human
gcacagacccugcccugugggc

SEQ ID NO: 1904029 - RNA, 18 nt, Human
gcacagacccugcccugu

SEQ ID NO: 1904030 - RNA, 19 nt, Human
gcacagacccugcccugug

SEQ ID NO: 1904031 - RNA, 20 nt, Human
gcacagacccugcccugugg

SEQ ID NO: 1904032 - RNA, 21 nt, Human
gcacagacccugcccuguggg

SEQ ID NO: 1904033 - RNA, 23 nt, Human
gcacaaagaugggugaaggcugg

SEQ ID NO: 1904034 - RNA, 16 nt, Human
gcacaaagggcccaga

SEQ ID NO: 1904035 - RNA, 13 nt, Human
gcacaaaguggca

SEQ ID NO: 1904036 - RNA, 15 nt, Human
gcacaaacagaggcc

SEQ ID NO: 1904037 - RNA, 16 nt, Human
gcacaaacagaggccg

SEQ ID NO: 1904038 - RNA, 14 nt, Human
gcacaaacagaggc

SEQ ID NO: 1904039 - RNA, 13 nt, Human
gcacaaaacccag

SEQ ID NO: 1904040 - RNA, 23 nt, Human
gcacaaaacccagaccuguuagc

SEQ ID NO: 1904041 - RNA, 16 nt, Human
gcaauuccugcuccua

SEQ ID NO: 1904042 - RNA, 23 nt, Human
gcaauuucaaauuacucuuucuc

SEQ ID NO: 1904043 - RNA, 14 nt, Human
gcaaugugauaaaa

SEQ ID NO: 1904044 - RNA, 22 nt, Human
gcaauguagaggggaaaagaga

SEQ ID NO: 1904045 - RNA, 19 nt, Human
gcaaugucugagugaaccu

SEQ ID NO: 1904046 - RNA, 15 nt, Human
gcaauguuuauuuca

SEQ ID NO: 1904047 - RNA, 15 nt, Human
gcaauggcagccuug

SEQ ID NO: 1904048 - RNA, 13 nt, Human
gcaacucugaagg

SEQ ID NO: 1904049 - RNA, 19 nt, Human
gcaaugggagcugaggcca

SEQ ID NO: 1904050 - RNA, 20 nt, Human
gcaaugggagcugaggccac

SEQ ID NO: 1904051 - RNA, 14 nt, Human
gcaacucaucuuag

SEQ ID NO: 1904052 - RNA, 20 nt, Human
gcaccuugugucuguacacg

SEQ ID NO: 1904053 - RNA, 14 nt, Human
gcaccuugugucug

SEQ ID NO: 1904054 - RNA, 15 nt, Human
gcacgauuucuguuu

SEQ ID NO: 1904055 - RNA, 13 nt, Human
gcacgauuucugu

SEQ ID NO: 1904056 - RNA, 20 nt, Human
gcaccuuagacagucccugc

SEQ ID NO: 1904057 - RNA, 21 nt, Human
gcaccuuagacagucccugcc

SEQ ID NO: 1904058 - RNA, 22 nt, Human
gcaccccagcuggggccaggcu

SEQ ID NO: 1904059 - RNA, 12 nt, Human
gcaccauaacuu

SEQ ID NO: 1904060 - RNA, 21 nt, Human
gcaccuguaaucccagcuacu

SEQ ID NO: 1904061 - RNA, 22 nt, Human
gcacagaguuguuacauuuuua

SEQ ID NO: 1904062 - RNA, 16 nt, Human
gcacagugaagugcug

SEQ ID NO: 1904063 - RNA, 21 nt, Human
gcacagaguuguuacauuuuu

SEQ ID NO: 1904064 - RNA, 19 nt, Human
gcacagaguuguuacauuu

SEQ ID NO: 1904065 - RNA, 18 nt, Human
gcacagaguuguuacauu

SEQ ID NO: 1904066 - RNA, 16 nt, Human
gcacagaguuguuaca

SEQ ID NO: 1904067 - RNA, 14 nt, Human
gcagacaggcaagc

SEQ ID NO: 1904068 - RNA, 13 nt, Human
gcagacaggcaag

SEQ ID NO: 1904069 - RNA, 12 nt, Human
gcagacaggcaa

SEQ ID NO: 1904070 - RNA, 22 nt, Human
gcagaaggggguggugucucca

SEQ ID NO: 1904071 - RNA, 15 nt, Human
gcagaaggggguggu

SEQ ID NO: 1904072 - RNA, 14 nt, Human
gcagaagggggugg

SEQ ID NO: 1904073 - RNA, 18 nt, Human
gcacuguggauuauuuca

SEQ ID NO: 1904074 - RNA, 19 nt, Human
gcacugugacccccagcuc

SEQ ID NO: 1904075 - RNA, 11 nt, Human
gcacugugaag

SEQ ID NO: 1904076 - RNA, 14 nt, Human
gcacugugaaggac

SEQ ID NO: 1904077 - RNA, 16 nt, Human
gcacugugaaggaccc

SEQ ID NO: 1904078 - RNA, 17 nt, Human
gcacugugaaggacccu

SEQ ID NO: 1904079 - RNA, 18 nt, Human
gcacugugaaggacccuu

SEQ ID NO: 1904080 - RNA, 18 nt, Human
gcacugaggaagaacggg

SEQ ID NO: 1904081 - RNA, 13 nt, Human
gcacugaggaaga

SEQ ID NO: 1904082 - RNA, 11 nt, Human
gcacugaggaa

SEQ ID NO: 1904083 - RNA, 16 nt, Human
gcacgauuucuguuua

SEQ ID NO: 1904084 - RNA, 23 nt, Human
gcacugcuuccagugaggcucug

SEQ ID NO: 1904085 - RNA, 23 nt, Human
gagggagcuccaacucagaaggg

SEQ ID NO: 1904086 - RNA, 19 nt, Human
gagggagggcuccagacac

SEQ ID NO: 1904087 - RNA, 22 nt, Human
gagggagcaaguccuucccuuu

SEQ ID NO: 1904088 - RNA, 20 nt, Human
gaggcugggcucccuuccca

SEQ ID NO: 1904089 - RNA, 18 nt, Human
gagggagugacagaggca

SEQ ID NO: 1904090 - RNA, 20 nt, Human
gagggagggcuccagacaca

SEQ ID NO: 1904091 - RNA, 22 nt, Human
gagggagugacagaggcagccc

SEQ ID NO: 1904092 - RNA, 21 nt, Human
gagggagugacagaggcagcc

SEQ ID NO: 1904093 - RNA, 12 nt, Human
gagggaggggcc

SEQ ID NO: 1904094 - RNA, 21 nt, Human
gaggggucgacuucgggcugg

SEQ ID NO: 1904095 - RNA, 13 nt, Human
gaggguaaggcug

SEQ ID NO: 1904096 - RNA, 17 nt, Human
gaggggguggccuccca

SEQ ID NO: 1904097 - RNA, 16 nt, Human
gagggcagcgggagcc

SEQ ID NO: 1904098 - RNA, 18 nt, Human
gagggcagcgggagccuc

SEQ ID NO: 1904099 - RNA, 23 nt, Human
gagggcagcgggagccucccugc

SEQ ID NO: 1904100 - RNA, 14 nt, Human
gagggucugaggaa

SEQ ID NO: 1904101 - RNA, 13 nt, Human
gagggucugagga

SEQ ID NO: 1904102 - RNA, 23 nt, Human
gagggucuugguuccagccugcc

SEQ ID NO: 1904103 - RNA, 14 nt, Human
gagggucagccagg

SEQ ID NO: 1904104 - RNA, 15 nt, Human
gagggucagccaggg

SEQ ID NO: 1904105 - RNA, 16 nt, Human
gagggucagccagggc

SEQ ID NO: 1904106 - RNA, 18 nt, Human
gagggucagccagggccu

SEQ ID NO: 1904107 - RNA, 22 nt, Human
gagggugucccaaaaagaaagg

SEQ ID NO: 1904108 - RNA, 21 nt, Human
gaggguggugaccucugccug

SEQ ID NO: 1904109 - RNA, 14 nt, Human
gaggguggugaccu

SEQ ID NO: 1904110 - RNA, 15 nt, Human
gagggugggaguggg

SEQ ID NO: 1904111 - RNA, 12 nt, Human
gaggguggaaua

SEQ ID NO: 1904112 - RNA, 21 nt, Human
gagggugaagugaagacaaug

SEQ ID NO: 1904113 - RNA, 15 nt, Human
gagggugagugcaag

SEQ ID NO: 1904114 - RNA, 13 nt, Human
gaggucagagccu

SEQ ID NO: 1904115 - RNA, 12 nt, Human
gaggucagagcc

SEQ ID NO: 1904116 - RNA, 17 nt, Human
gaggucaaggcugcagu

SEQ ID NO: 1904117 - RNA, 22 nt, Human
gagguauucaauauccuuugcc

SEQ ID NO: 1904118 - RNA, 21 nt, Human
gagguagcuuugagguggaag

SEQ ID NO: 1904119 - RNA, 19 nt, Human
gagguagaaugacuccuug

SEQ ID NO: 1904120 - RNA, 15 nt, Human
gagguagaaugacuc

SEQ ID NO: 1904121 - RNA, 15 nt, Human
gaggguugggcuggu

SEQ ID NO: 1904122 - RNA, 14 nt, Human
gaggguugggcugg

SEQ ID NO: 1904123 - RNA, 24 nt, Human
gagguaaggaauaccugucccccu

SEQ ID NO: 1904124 - RNA, 21 nt, Human
gagguaaggaauaccuguccc

SEQ ID NO: 1904125 - RNA, 15 nt, Human
gaggccuugagaggc

SEQ ID NO: 1904126 - RNA, 19 nt, Human
gaggccuucucugaaggac

SEQ ID NO: 1904127 - RNA, 18 nt, Human
gaggccuucucugaagga

SEQ ID NO: 1904128 - RNA, 16 nt, Human
gaggccuucucugaag

SEQ ID NO: 1904129 - RNA, 18 nt, Human
gaggccucuggaaagcaa

SEQ ID NO: 1904130 - RNA, 22 nt, Human
gaggccucucauuccagaggaa

SEQ ID NO: 1904131 - RNA, 16 nt, Human
gaggcugggcucccuu

SEQ ID NO: 1904132 - RNA, 13 nt, Human
gaggcuggcacag

SEQ ID NO: 1904133 - RNA, 21 nt, Human
gaggcgcaugaauuugugaag

SEQ ID NO: 1904134 - RNA, 14 nt, Human
gaggccuuuaacca

SEQ ID NO: 1904135 - RNA, 11 nt, Human
gaggcccagag

SEQ ID NO: 1904136 - RNA, 13 nt, Human
gaggcccagaggg

SEQ ID NO: 1904137 - RNA, 14 nt, Human
gaggcccagagggc

SEQ ID NO: 1904138 - RNA, 19 nt, Human
gaggcccagagggccugca

SEQ ID NO: 1904139 - RNA, 15 nt, Human
gaggcccagagggcc

SEQ ID NO: 1904140 - RNA, 16 nt, Human
gaggcccagagggccu

SEQ ID NO: 1904141 - RNA, 22 nt, Human
gaggcccuucucuccagccccu

SEQ ID NO: 1904142 - RNA, 23 nt, Human
gaggccccagccucccugaagcc

SEQ ID NO: 1904143 - RNA, 18 nt, Human
gaggccguugauucacuu

SEQ ID NO: 1904144 - RNA, 21 nt, Human
gaggcccuucucuccagcccc

SEQ ID NO: 1904145 - RNA, 15 nt, Human
gaggcccuucucucc

SEQ ID NO: 1904146 - RNA, 20 nt, Human
gaggcccuucucuccagccc

SEQ ID NO: 1904147 - RNA, 13 nt, Human
gaggcccaguuca

SEQ ID NO: 1904148 - RNA, 18 nt, Human
gaggcccaguucacccug

SEQ ID NO: 1904149 - RNA, 20 nt, Human
gaggcccaguucacccugau

SEQ ID NO: 1904150 - RNA, 12 nt, Human
gaggccccagcc

SEQ ID NO: 1904151 - RNA, 13 nt, Human
gaggccccagccu

SEQ ID NO: 1904152 - RNA, 19 nt, Human
gaggccccagccucccuga

SEQ ID NO: 1904153 - RNA, 22 nt, Human
gaggccccagccucccugaagc

SEQ ID NO: 1904154 - RNA, 16 nt, Human
gaggccagugagccac

SEQ ID NO: 1904155 - RNA, 17 nt, Human
gaggccaugggccuccu

SEQ ID NO: 1904156 - RNA, 14 nt, Human
gaggccaugggccu

SEQ ID NO: 1904157 - RNA, 23 nt, Human
gaggccaugggccuccugugugu

SEQ ID NO: 1904158 - RNA, 21 nt, Human
gaggccaugggccuccugugu

SEQ ID NO: 1904159 - RNA, 20 nt, Human
gaggccaugggccuccugug

SEQ ID NO: 1904160 - RNA, 18 nt, Human
gaggccaugggccuccug

SEQ ID NO: 1904161 - RNA, 18 nt, Human
gaggcagccccauucugc

SEQ ID NO: 1904162 - RNA, 19 nt, Human
gaggcagccccauucugcc

SEQ ID NO: 1904163 - RNA, 19 nt, Human
gaggcagagguugcaguga

SEQ ID NO: 1904164 - RNA, 9 nt, Human
gaggcaggg

SEQ ID NO: 1904165 - RNA, 20 nt, Human
gaggcagccccauucugccu

SEQ ID NO: 1904166 - RNA, 21 nt, Human
gaggcagccccauucugccug

SEQ ID NO: 1904167 - RNA, 13 nt, Human
gaggaucucuuga

SEQ ID NO: 1904168 - RNA, 22 nt, Human
gaggaucucuugagccugggag

SEQ ID NO: 1904169 - RNA, 16 nt, Human
gaggaucucuugagcc

SEQ ID NO: 1904170 - RNA, 19 nt, Human
gaggaucucuugagccugg

SEQ ID NO: 1904171 - RNA, 20 nt, Human
gaggauugcuugagcucagg

SEQ ID NO: 1904172 - RNA, 13 nt, Human
gaggcaagagaau

SEQ ID NO: 1904173 - RNA, 22 nt, Human
gaggcaaugggagcugaggcca

SEQ ID NO: 1904174 - RNA, 13 nt, Human
gaggcaagcccug

SEQ ID NO: 1904175 - RNA, 18 nt, Human
gaggcaagguuauaugca

SEQ ID NO: 1904176 - RNA, 17 nt, Human
gaguccuagagcuacag

SEQ ID NO: 1904177 - RNA, 19 nt, Human
gaguccgaaagggacuugg

SEQ ID NO: 1904178 - RNA, 14 nt, Human
gagucgaggacagg

SEQ ID NO: 1904179 - RNA, 13 nt, Human
gaguccucugaau

SEQ ID NO: 1904180 - RNA, 16 nt, Human
gagucgaggacaggga

SEQ ID NO: 1904181 - RNA, 15 nt, Human
gagucgaggacaggg

SEQ ID NO: 1904182 - RNA, 18 nt, Human
gaguaggaagacuuugga

SEQ ID NO: 1904183 - RNA, 19 nt, Human
gaguaggaagacuuuggaa

SEQ ID NO: 1904184 - RNA, 11 nt, Human
gaguauauguc

SEQ ID NO: 1904185 - RNA, 16 nt, Human
gagugacagaggcagc

SEQ ID NO: 1904186 - RNA, 15 nt, Human
gagugacagaggcag

SEQ ID NO: 1904187 - RNA, 14 nt, Human
gagugacagaggca

SEQ ID NO: 1904188 - RNA, 17 nt, Human
gagugaagcugggagaa

SEQ ID NO: 1904189 - RNA, 15 nt, Human
gagucugaaggcugg

SEQ ID NO: 1904190 - RNA, 14 nt, Human
gagucugaaggcug

SEQ ID NO: 1904191 - RNA, 16 nt, Human
gagucuguuuuguaaa

SEQ ID NO: 1904192 - RNA, 17 nt, Human
gagucuguuuuguaaag

SEQ ID NO: 1904193 - RNA, 12 nt, Human
gagucugaaggc

SEQ ID NO: 1904194 - RNA, 13 nt, Human
gagucugaaggcu

SEQ ID NO: 1904195 - RNA, 21 nt, Human
gagucuauuuacggaacucaa

SEQ ID NO: 1904196 - RNA, 20 nt, Human
gaggucagagccugcaguua

SEQ ID NO: 1904197 - RNA, 17 nt, Human
gaggucagagccugcag

SEQ ID NO: 1904198 - RNA, 20 nt, Human
gagguguauggagagaaaac

SEQ ID NO: 1904199 - RNA, 15 nt, Human
gagguugggaggcca

SEQ ID NO: 1904200 - RNA, 17 nt, Human
gagguugggaggccauu

SEQ ID NO: 1904201 - RNA, 20 nt, Human
gagguugaucagaucugaca

SEQ ID NO: 1904202 - RNA, 20 nt, Human
gagguuucucaaagaaauuu

SEQ ID NO: 1904203 - RNA, 16 nt, Human
gagguuucaaaccucc

SEQ ID NO: 1904204 - RNA, 22 nt, Human
gaguagcugggacuacaggcac

SEQ ID NO: 1904205 - RNA, 12 nt, Human
gaguaggaagac

SEQ ID NO: 1904206 - RNA, 13 nt, Human
gaguaggaagacu

SEQ ID NO: 1904207 - RNA, 17 nt, Human
gaguaggaagacuuugg

SEQ ID NO: 1904208 - RNA, 19 nt, Human
gaguagcugggacuacagg

SEQ ID NO: 1904209 - RNA, 22 nt, Human
gaguagaaagacagagcuggga

SEQ ID NO: 1904210 - RNA, 14 nt, Human
gaguagaauugcau

SEQ ID NO: 1904211 - RNA, 17 nt, Human
gaguagaauugcauuga

SEQ ID NO: 1904212 - RNA, 21 nt, Human
gaguacuacaguccucccauc

SEQ ID NO: 1904213 - RNA, 23 nt, Human
gaguacuacaguccucccaucuc

SEQ ID NO: 1904214 - RNA, 20 nt, Human
gaguagaaagacagagcugg

SEQ ID NO: 1904215 - RNA, 17 nt, Human
gaguagaaagacagagc

SEQ ID NO: 1904216 - RNA, 22 nt, Human
gaguaauccaagcaaaugugaa

SEQ ID NO: 1904217 - RNA, 15 nt, Human
gaguaaucugagaaa

SEQ ID NO: 1904218 - RNA, 20 nt, Human
gaguacuacaguccucccau

SEQ ID NO: 1904219 - RNA, 15 nt, Human
gaguugaagacagag

SEQ ID NO: 1904220 - RNA, 17 nt, Human
gaguugaagacagagcu

SEQ ID NO: 1904221 - RNA, 21 nt, Human
gaguugaagacagagcuacac

SEQ ID NO: 1904222 - RNA, 23 nt, Human
gaguugacuugacagaacacugu

SEQ ID NO: 1904223 - RNA, 19 nt, Human
gauaacuagauggugcuga

SEQ ID NO: 1904224 - RNA, 20 nt, Human
gaguucauacccuguuacca

SEQ ID NO: 1904225 - RNA, 14 nt, Human
gaguucaucuugaa

SEQ ID NO: 1904226 - RNA, 19 nt, Human
gaguucaucuugaauugua

SEQ ID NO: 1904227 - RNA, 20 nt, Human
gaguucaucuugaauuguaa

SEQ ID NO: 1904228 - RNA, 13 nt, Human
gaguuacagacaa

SEQ ID NO: 1904229 - RNA, 15 nt, Human
gaguuacagacaaag

SEQ ID NO: 1904230 - RNA, 17 nt, Human
gaguuaagaccuggcag

SEQ ID NO: 1904231 - RNA, 21 nt, Human
gaguuaagaccuggcagcucu

SEQ ID NO: 1904232 - RNA, 12 nt, Human
gaguuacagaca

SEQ ID NO: 1904233 - RNA, 12 nt, Human
gaguuaagaccu

SEQ ID NO: 1904234 - RNA, 13 nt, Human
gaguuaagaccug

SEQ ID NO: 1904235 - RNA, 14 nt, Human
gaguuaagaccugg

SEQ ID NO: 1904236 - RNA, 20 nt, Human
gagugugccugaagucccag

SEQ ID NO: 1904237 - RNA, 13 nt, Human
gaguguguaauuu

SEQ ID NO: 1904238 - RNA, 17 nt, Human
gagugacagaggcagcc

SEQ ID NO: 1904239 - RNA, 15 nt, Human
gaguggguugauuuc

SEQ ID NO: 1904240 - RNA, 13 nt, Human
gagugggugaaua

SEQ ID NO: 1904241 - RNA, 15 nt, Human
gaguguacucccagg

SEQ ID NO: 1904242 - RNA, 20 nt, Human
gauacaggaaaagcugcuga

SEQ ID NO: 1904243 - RNA, 22 nt, Human
gauaagaaccuuuugagugccu

SEQ ID NO: 1904244 - RNA, 20 nt, Human
gauaacuagauggugcugag

SEQ ID NO: 1904245 - RNA, 23 nt, Human
gauacaggaaaagcugcugacag

SEQ ID NO: 1904246 - RNA, 21 nt, Human
gauacaggaaaagcugcugac

SEQ ID NO: 1904247 - RNA, 22 nt, Human
gauagauguguggacacauugg

SEQ ID NO: 1904248 - RNA, 14 nt, Human
gauagaugugugga

SEQ ID NO: 1904249 - RNA, 16 nt, Human
gauagcacagacccug

SEQ ID NO: 1904250 - RNA, 15 nt, Human
gauagcacagacccu

SEQ ID NO: 1904251 - RNA, 22 nt, Human
gauagccaaggccaaaggaagc

SEQ ID NO: 1904252 - RNA, 23 nt, Human
gauagcuucaccccaaucccagc

SEQ ID NO: 1904253 - RNA, 16 nt, Human
gaucacggcucacugc

SEQ ID NO: 1904254 - RNA, 15 nt, Human
gaucacggcucacug

SEQ ID NO: 1904255 - RNA, 18 nt, Human
gaucacggcucacugcag

SEQ ID NO: 1904256 - RNA, 15 nt, Human
gauauaagugugugu

SEQ ID NO: 1904257 - RNA, 24 nt, Human
gauaugauucaaaugucuauaaac

SEQ ID NO: 1904258 - RNA, 22 nt, Human
gauaugauucaaaugucuauaa

SEQ ID NO: 1904259 - RNA, 14 nt, Human
gauaugauucaaau

SEQ ID NO: 1904260 - RNA, 15 nt, Human
ggcucccacagagac

SEQ ID NO: 1904261 - RNA, 16 nt, Human
ggcuccaggcuccuuu

SEQ ID NO: 1904262 - RNA, 11 nt, Human
ggcuccaggcu

SEQ ID NO: 1904263 - RNA, 18 nt, Human
ggcuccaggccagggggc

SEQ ID NO: 1904264 - RNA, 16 nt, Human
ggcuccaggccagggg

SEQ ID NO: 1904265 - RNA, 14 nt, Human
ggcuccaggccagg

SEQ ID NO: 1904266 - RNA, 21 nt, Human
ggcucaaguccucuuuucuga

SEQ ID NO: 1904267 - RNA, 15 nt, Human
ggcucaaguccucuu

SEQ ID NO: 1904268 - RNA, 14 nt, Human
ggcucacacugaga

SEQ ID NO: 1904269 - RNA, 12 nt, Human
ggcucacacuga

SEQ ID NO: 1904270 - RNA, 16 nt, Human
ggcucacaccuguaau

SEQ ID NO: 1904271 - RNA, 16 nt, Human
ggcuccagaugcaggg

SEQ ID NO: 1904272 - RNA, 17 nt, Human
ggcuccagaugcagggc

SEQ ID NO: 1904273 - RNA, 18 nt, Human
ggcuccagaugcagggca

SEQ ID NO: 1904274 - RNA, 19 nt, Human
ggcuccagaugcagggcag

SEQ ID NO: 1904275 - RNA, 12 nt, Human
ggcuccaggagc

SEQ ID NO: 1904276 - RNA, 13 nt, Human
ggcuccaggagca

SEQ ID NO: 1904277 - RNA, 19 nt, Human
ggcuccaggagcagccaca

SEQ ID NO: 1904278 - RNA, 15 nt, Human
ggcuaguugggcuuc

SEQ ID NO: 1904279 - RNA, 23 nt, Human
ggcuagugugguguuuccuggca

SEQ ID NO: 1904280 - RNA, 16 nt, Human
ggcuaguugggcuucc

SEQ ID NO: 1904281 - RNA, 21 nt, Human
ggcuauggggauagaugugug

SEQ ID NO: 1904282 - RNA, 15 nt, Human
ggcuaugcauuugaa

SEQ ID NO: 1904283 - RNA, 19 nt, Human
ggcucaagcgauucuccug

SEQ ID NO: 1904284 - RNA, 16 nt, Human
ggcuaggaccccucca

SEQ ID NO: 1904285 - RNA, 22 nt, Human
ggcuaggaccccuccauguggg

SEQ ID NO: 1904286 - RNA, 14 nt, Human
ggcuagggggagcc

SEQ ID NO: 1904287 - RNA, 22 nt, Human
ggcuagagguucaaagauauuu

SEQ ID NO: 1904288 - RNA, 17 nt, Human
ggcuagagguucaaaga

SEQ ID NO: 1904289 - RNA, 18 nt, Human
ggcggcucggaggaagcc

SEQ ID NO: 1904290 - RNA, 19 nt, Human
ggccuggccugagcuggga

SEQ ID NO: 1904291 - RNA, 23 nt, Human
ggccugaagaguccucugaauga

SEQ ID NO: 1904292 - RNA, 13 nt, Human
ggccugaagaguc

SEQ ID NO: 1904293 - RNA, 19 nt, Human
ggccugaagaguccucuga

SEQ ID NO: 1904294 - RNA, 11 nt, Human
ggccugugagc

SEQ ID NO: 1904295 - RNA, 14 nt, Human
ggccuguccuccaa

SEQ ID NO: 1904296 - RNA, 14 nt, Human
ggccugggggcugg

SEQ ID NO: 1904297 - RNA, 20 nt, Human
ggccugggggcugggcagag

SEQ ID NO: 1904298 - RNA, 22 nt, Human
ggccugggggcugggcagagga

SEQ ID NO: 1904299 - RNA, 18 nt, Human
ggcgcugccccuggcagc

SEQ ID NO: 1904300 - RNA, 19 nt, Human
ggcgcugccccuggcagcc

SEQ ID NO: 1904301 - RNA, 21 nt, Human
ggcgcugccccuggcagcccc

SEQ ID NO: 1904302 - RNA, 23 nt, Human
ggcgcugccccuggcagccccug

SEQ ID NO: 1904303 - RNA, 20 nt, Human
ggcgccgcaaaccacacugg

SEQ ID NO: 1904304 - RNA, 22 nt, Human
ggcgccgcaaaccacacuggac

SEQ ID NO: 1904305 - RNA, 22 nt, Human
ggcgcgcaccuguaaucccagc

SEQ ID NO: 1904306 - RNA, 13 nt, Human
ggcggagcuggcc

SEQ ID NO: 1904307 - RNA, 14 nt, Human
ggcggagcuggccc

SEQ ID NO: 1904308 - RNA, 15 nt, Human
ggcggagcuggcccc

SEQ ID NO: 1904309 - RNA, 17 nt, Human
ggcggagcuggccccgc

SEQ ID NO: 1904310 - RNA, 20 nt, Human
ggcggagcuggccccgccgc

SEQ ID NO: 1904311 - RNA, 23 nt, Human
ggcggagcuggccccgccgccug

SEQ ID NO: 1904312 - RNA, 20 nt, Human
ggccuaugcacauauggacu

SEQ ID NO: 1904313 - RNA, 20 nt, Human
ggccuaggccucagccagag

SEQ ID NO: 1904314 - RNA, 21 nt, Human
ggccuaugcacauauggacuc

SEQ ID NO: 1904315 - RNA, 18 nt, Human
ggccucuuaugggcuggg

SEQ ID NO: 1904316 - RNA, 21 nt, Human
ggccucuggaaagcaaagggc

SEQ ID NO: 1904317 - RNA, 20 nt, Human
ggccucgguguggagaagcg

SEQ ID NO: 1904318 - RNA, 16 nt, Human
ggccucugugccuucu

SEQ ID NO: 1904319 - RNA, 17 nt, Human
ggccucuuaugggcugg

SEQ ID NO: 1904320 - RNA, 13 nt, Human
ggccucugcacuc

SEQ ID NO: 1904321 - RNA, 14 nt, Human
ggccucugcacucc

SEQ ID NO: 1904322 - RNA, 15 nt, Human
ggccucugcacuccc

SEQ ID NO: 1904323 - RNA, 16 nt, Human
ggccucugcacucccc

SEQ ID NO: 1904324 - RNA, 23 nt, Human
ggccuagcauacguacacauuuu

SEQ ID NO: 1904325 - RNA, 14 nt, Human
ggccuaggccucag

SEQ ID NO: 1904326 - RNA, 19 nt, Human
ggccuaagaguugagcucu

SEQ ID NO: 1904327 - RNA, 20 nt, Human
ggccuacagcuuugaucccu

SEQ ID NO: 1904328 - RNA, 23 nt, Human
ggccuacagcuuugaucccugac

SEQ ID NO: 1904329 - RNA, 12 nt, Human
ggcccugugccu

SEQ ID NO: 1904330 - RNA, 23 nt, Human
ggcccaaauuaucaagcuaauaa

SEQ ID NO: 1904331 - RNA, 21 nt, Human
ggcccaaauuaucaagcuaau

SEQ ID NO: 1904332 - RNA, 12 nt, Human
ggcccagagagg

SEQ ID NO: 1904333 - RNA, 11 nt, Human
ggcccagagag

SEQ ID NO: 1904334 - RNA, 21 nt, Human
ggcccucugcccacucccugc

SEQ ID NO: 1904335 - RNA, 14 nt, Human
ggcccucuggagug

SEQ ID NO: 1904336 - RNA, 18 nt, Human
ggcccucuggaguggcca

SEQ ID NO: 1904337 - RNA, 19 nt, Human
ggcccucuggaguggccac

SEQ ID NO: 1904338 - RNA, 19 nt, Human
ggcccucugcccacucccu

SEQ ID NO: 1904339 - RNA, 20 nt, Human
ggcccucugcccacucccug

SEQ ID NO: 1904340 - RNA, 13 nt, Human
ggcccucugccca

SEQ ID NO: 1904341 - RNA, 15 nt, Human
ggcccucugcccacu

SEQ ID NO: 1904342 - RNA, 16 nt, Human
ggcccucugcccacuc

SEQ ID NO: 1904343 - RNA, 17 nt, Human
ggcccucugcccacucc

SEQ ID NO: 1904344 - RNA, 14 nt, Human
ggcccugccuccuu

SEQ ID NO: 1904345 - RNA, 15 nt, Human
ggcccugccuccuuu

SEQ ID NO: 1904346 - RNA, 13 nt, Human
ggcccuggccuug

SEQ ID NO: 1904347 - RNA, 13 nt, Human
ggcccugccuccu

SEQ ID NO: 1904348 - RNA, 23 nt, Human
ggccacgugggcaaacaggcagu

SEQ ID NO: 1904349 - RNA, 11 nt, Human
ggccacuaagc

SEQ ID NO: 1904350 - RNA, 20 nt, Human
ggccacuaagcagaggaggg

SEQ ID NO: 1904351 - RNA, 21 nt, Human
ggccacuaagcagaggagggg

SEQ ID NO: 1904352 - RNA, 16 nt, Human
ggcauuccccaggagg

SEQ ID NO: 1904353 - RNA, 18 nt, Human
ggcaugggaaggugggcg

SEQ ID NO: 1904354 - RNA, 18 nt, Human
ggcauuccccaggaggcc

SEQ ID NO: 1904355 - RNA, 19 nt, Human
ggcauuccccaggaggcca

SEQ ID NO: 1904356 - RNA, 22 nt, Human
ggcaugggaaugaaugucagug

SEQ ID NO: 1904357 - RNA, 17 nt, Human
ggcauuccccaggaggc

SEQ ID NO: 1904358 - RNA, 18 nt, Human
ggcaugggaaugaauguc

SEQ ID NO: 1904359 - RNA, 16 nt, Human
ggccaugggccuccug

SEQ ID NO: 1904360 - RNA, 21 nt, Human
ggccaggcugaugggacagaa

SEQ ID NO: 1904361 - RNA, 20 nt, Human
ggccauucuccacagcaacc

SEQ ID NO: 1904362 - RNA, 21 nt, Human
ggccauguugugccucccugg

SEQ ID NO: 1904363 - RNA, 16 nt, Human
ggccauguugugccuc

SEQ ID NO: 1904364 - RNA, 22 nt, Human
ggccauguugugccucccuggu

SEQ ID NO: 1904365 - RNA, 23 nt, Human
ggccagcugcuugggcuucaucc

SEQ ID NO: 1904366 - RNA, 18 nt, Human
ggccaggcccucugccca

SEQ ID NO: 1904367 - RNA, 20 nt, Human
ggccagccuugaccauucuc

SEQ ID NO: 1904368 - RNA, 22 nt, Human
ggccagccuugaccauucucca

SEQ ID NO: 1904369 - RNA, 17 nt, Human
ggccagcugcuugggcu

SEQ ID NO: 1904370 - RNA, 17 nt, Human
ggcagcuugaggguugg

SEQ ID NO: 1904371 - RNA, 22 nt, Human
ggcagcugcuuuugucuauggg

SEQ ID NO: 1904372 - RNA, 20 nt, Human
ggcagcucuggacagcccca

SEQ ID NO: 1904373 - RNA, 16 nt, Human
ggcagcucaccucucc

SEQ ID NO: 1904374 - RNA, 13 nt, Human
ggcagcucagaga

SEQ ID NO: 1904375 - RNA, 21 nt, Human
ggcagcucagagaggguggga

SEQ ID NO: 1904376 - RNA, 12 nt, Human
ggcagcucagcu

SEQ ID NO: 1904377 - RNA, 15 nt, Human
ggcagcucuggacag

SEQ ID NO: 1904378 - RNA, 12 nt, Human
ggcagcucaccu

SEQ ID NO: 1904379 - RNA, 14 nt, Human
ggcagcucaccucu

SEQ ID NO: 1904380 - RNA, 22 nt, Human
ggcagcgccaggcugaccacag

SEQ ID NO: 1904381 - RNA, 21 nt, Human
ggcagcguacucaucaucaac

SEQ ID NO: 1904382 - RNA, 15 nt, Human
ggcaccuaauccagg

SEQ ID NO: 1904383 - RNA, 16 nt, Human
ggcaccuaauccaggc

SEQ ID NO: 1904384 - RNA, 16 nt, Human
ggcagugggagcugcc

SEQ ID NO: 1904385 - RNA, 14 nt, Human
ggcagugggagcug

SEQ ID NO: 1904386 - RNA, 13 nt, Human
ggcagugggagcu

SEQ ID NO: 1904387 - RNA, 20 nt, Human
ggcagggucucacucugucg

SEQ ID NO: 1904388 - RNA, 19 nt, Human
ggcagggucucacucuguc

SEQ ID NO: 1904389 - RNA, 13 nt, Human
ggcagcuucuuug

SEQ ID NO: 1904390 - RNA, 17 nt, Human
ggcaugcuaaagccuuc

SEQ ID NO: 1904391 - RNA, 11 nt, Human
ggcaugcuaaa

SEQ ID NO: 1904392 - RNA, 15 nt, Human
ggcaugaagacagau

SEQ ID NO: 1904393 - RNA, 18 nt, Human
ggcaugacacgaauauug

SEQ ID NO: 1904394 - RNA, 12 nt, Human
ggcacccuccca

SEQ ID NO: 1904395 - RNA, 22 nt, Human
ggcacccggccccugcugguuc

SEQ ID NO: 1904396 - RNA, 23 nt, Human
ggcacccaccaucaugucuggcu

SEQ ID NO: 1904397 - RNA, 20 nt, Human
ggcaaugggagcugaggcca

SEQ ID NO: 1904398 - RNA, 21 nt, Human
ggcaaugggagcugaggccac

SEQ ID NO: 1904399 - RNA, 13 nt, Human
ggcacccacccug

SEQ ID NO: 1904400 - RNA, 14 nt, Human
ggcacccacccugg

SEQ ID NO: 1904401 - RNA, 23 nt, Human
ggcaaugcuggcuguuggcuggg

SEQ ID NO: 1904402 - RNA, 15 nt, Human
ggcaaugcuggcugu

SEQ ID NO: 1904403 - RNA, 14 nt, Human
ggcaaugcuggcug

SEQ ID NO: 1904404 - RNA, 18 nt, Human
ggcaacccccagccugcu

SEQ ID NO: 1904405 - RNA, 19 nt, Human
ggcaaucauggugcucaga

SEQ ID NO: 1904406 - RNA, 21 nt, Human
ggcaauauagcaagaucccau

SEQ ID NO: 1904407 - RNA, 23 nt, Human
ggauuacaagcgugagccacugc

SEQ ID NO: 1904408 - RNA, 16 nt, Human
ggauucuuauggacaa

SEQ ID NO: 1904409 - RNA, 16 nt, Human
ggauucuuccucccuc

SEQ ID NO: 1904410 - RNA, 17 nt, Human
ggcaacccccagccugc

SEQ ID NO: 1904411 - RNA, 16 nt, Human
ggcaacccccagccug

SEQ ID NO: 1904412 - RNA, 15 nt, Human
ggauuguaaaauggu

SEQ ID NO: 1904413 - RNA, 16 nt, Human
ggauuggggucccucu

SEQ ID NO: 1904414 - RNA, 17 nt, Human
ggauuggggucccucua

SEQ ID NO: 1904415 - RNA, 17 nt, Human
ggauugcuacuguccua

SEQ ID NO: 1904416 - RNA, 18 nt, Human
ggauugggccccugccag

SEQ ID NO: 1904417 - RNA, 17 nt, Human
ggauugggccccugcca

SEQ ID NO: 1904418 - RNA, 19 nt, Human
ggauuacaagcgugagcca

SEQ ID NO: 1904419 - RNA, 17 nt, Human
ggauggaaugauggguc

SEQ ID NO: 1904420 - RNA, 15 nt, Human
ggaugcuuguacaua

SEQ ID NO: 1904421 - RNA, 16 nt, Human
ggaugcggauggccgg

SEQ ID NO: 1904422 - RNA, 19 nt, Human
ggaugcagccucacagucc

SEQ ID NO: 1904423 - RNA, 13 nt, Human
ggaugcagcauua

SEQ ID NO: 1904424 - RNA, 22 nt, Human
ggaugccaauauuaaaucugcu

SEQ ID NO: 1904425 - RNA, 16 nt, Human
ggaugcauggagauag

SEQ ID NO: 1904426 - RNA, 23 nt, Human
ggaugcacagaguuguuacauuu

SEQ ID NO: 1904427 - RNA, 21 nt, Human
ggaugauuggaggggggaggu

SEQ ID NO: 1904428 - RNA, 16 nt, Human
ggaugcagccucacag

SEQ ID NO: 1904429 - RNA, 17 nt, Human
ggaugcagccucacagu

SEQ ID NO: 1904430 - RNA, 12 nt, Human
ggauccuccagg

SEQ ID NO: 1904431 - RNA, 13 nt, Human
ggauccuccaggu

SEQ ID NO: 1904432 - RNA, 22 nt, Human
ggaucccucauccucauaccca

SEQ ID NO: 1904433 - RNA, 17 nt, Human
ggaucccucccccccau

SEQ ID NO: 1904434 - RNA, 13 nt, Human
ggaucccucaucc

SEQ ID NO: 1904435 - RNA, 17 nt, Human
ggaucccucauccucau

SEQ ID NO: 1904436 - RNA, 18 nt, Human
ggauacaaaagcauguga

SEQ ID NO: 1904437 - RNA, 14 nt, Human
ggauagaugcuggc

SEQ ID NO: 1904438 - RNA, 13 nt, Human
ggauagaugcugg

SEQ ID NO: 1904439 - RNA, 14 nt, Human
ggagugcagugagc

SEQ ID NO: 1904440 - RNA, 20 nt, Human
ggagugcaaugacacagucu

SEQ ID NO: 1904441 - RNA, 12 nt, Human
ggagugcaguga

SEQ ID NO: 1904442 - RNA, 13 nt, Human
gcuucugccugca

SEQ ID NO: 1904443 - RNA, 12 nt, Human
gcuucugccugc

SEQ ID NO: 1904444 - RNA, 16 nt, Human
gcuugaggguugggcu

SEQ ID NO: 1904445 - RNA, 22 nt, Human
gcuucucugugaacgauuuaga

SEQ ID NO: 1904446 - RNA, 15 nt, Human
gcuuccagugaggcu

SEQ ID NO: 1904447 - RNA, 21 nt, Human
gcuucauccuccucagaucuu

SEQ ID NO: 1904448 - RNA, 17 nt, Human
gcuucauuuccuguguc

SEQ ID NO: 1904449 - RNA, 16 nt, Human
gcuuccagugaggcuc

SEQ ID NO: 1904450 - RNA, 18 nt, Human
gcuuccagugaggcucug

SEQ ID NO: 1904451 - RNA, 22 nt, Human
gcuucucauccugcaggcagcu

SEQ ID NO: 1904452 - RNA, 16 nt, Human
gcuucauuuccugugu

SEQ ID NO: 1904453 - RNA, 13 nt, Human
gcuucauuuccug

SEQ ID NO: 1904454 - RNA, 12 nt, Human
gcuucauccucc

SEQ ID NO: 1904455 - RNA, 15 nt, Human
gcuucauccuccuca

SEQ ID NO: 1904456 - RNA, 18 nt, Human
gcuucaguggcagcugcu

SEQ ID NO: 1904457 - RNA, 17 nt, Human
gcuucaguggcagcugc

SEQ ID NO: 1904458 - RNA, 22 nt, Human
gcuucauacagggaugguguuc

SEQ ID NO: 1904459 - RNA, 11 nt, Human
gcuucauacag

SEQ ID NO: 1904460 - RNA, 16 nt, Human
gcuucaguggcagcug

SEQ ID NO: 1904461 - RNA, 12 nt, Human
gcuuauacacuu

SEQ ID NO: 1904462 - RNA, 20 nt, Human
gcuuauacacuuacacuuua

SEQ ID NO: 1904463 - RNA, 19 nt, Human
gcuuaucucaggggugugc

SEQ ID NO: 1904464 - RNA, 15 nt, Human
gcugccaaugggagc

SEQ ID NO: 1904465 - RNA, 16 nt, Human
gcugccaaugggagcu

SEQ ID NO: 1904466 - RNA, 19 nt, Human
gcugccaaugggagcucau

SEQ ID NO: 1904467 - RNA, 21 nt, Human
gcuguccucagguggccaugc

SEQ ID NO: 1904468 - RNA, 14 nt, Human
gcuguucagcuggu

SEQ ID NO: 1904469 - RNA, 12 nt, Human
gcuguucaugaa

SEQ ID NO: 1904470 - RNA, 21 nt, Human
gcuguucaugaaagauucaau

SEQ ID NO: 1904471 - RNA, 22 nt, Human
gcuguucccauguagcccccug

SEQ ID NO: 1904472 - RNA, 21 nt, Human
gcuuagucacugagacagccc

SEQ ID NO: 1904473 - RNA, 19 nt, Human
gcuuagucacugagacagc

SEQ ID NO: 1904474 - RNA, 20 nt, Human
gcuuagucacugagacagcc

SEQ ID NO: 1904475 - RNA, 15 nt, Human
gcuuagucacugaga

SEQ ID NO: 1904476 - RNA, 17 nt, Human
gcuuagucacugagaca

SEQ ID NO: 1904477 - RNA, 12 nt, Human
gcuguugagcug

SEQ ID NO: 1904478 - RNA, 15 nt, Human
gcuguugagcuguuu

SEQ ID NO: 1904479 - RNA, 16 nt, Human
gcuguugagcuguuuu

SEQ ID NO: 1904480 - RNA, 18 nt, Human
gcuguugagcuguuuucc

SEQ ID NO: 1904481 - RNA, 13 nt, Human
gcuuagagacagu

SEQ ID NO: 1904482 - RNA, 14 nt, Human
ggaaccaggcuugg

SEQ ID NO: 1904483 - RNA, 22 nt, Human
ggaaccaaagcgaauuuuaaaa

SEQ ID NO: 1904484 - RNA, 11 nt, Human
ggaacccagac

SEQ ID NO: 1904485 - RNA, 13 nt, Human
ggaacccagacuc

SEQ ID NO: 1904486 - RNA, 14 nt, Human
ggaacccagacuca

SEQ ID NO: 1904487 - RNA, 15 nt, Human
ggaacccagacucag

SEQ ID NO: 1904488 - RNA, 16 nt, Human
ggaacaggaaacugau

SEQ ID NO: 1904489 - RNA, 21 nt, Human
ggaaccaaagcgaauuuuaaa

SEQ ID NO: 1904490 - RNA, 21 nt, Human
ggaaaucaccgaaaacguggc

SEQ ID NO: 1904491 - RNA, 14 nt, Human
ggaaaucaccgaaa

SEQ ID NO: 1904492 - RNA, 23 nt, Human
ggaaaaucagccugcuccagcug

SEQ ID NO: 1904493 - RNA, 20 nt, Human
ggaaaaugcagcagggaugc

SEQ ID NO: 1904494 - RNA, 19 nt, Human
ggaaaaucagccugcucca

SEQ ID NO: 1904495 - RNA, 12 nt, Human
ggaaaggcucca

SEQ ID NO: 1904496 - RNA, 13 nt, Human
ggaaaggcuccag

SEQ ID NO: 1904497 - RNA, 14 nt, Human
ggaaaggcuccagg

SEQ ID NO: 1904498 - RNA, 22 nt, Human
ggaaaggcuccaggagcagcca

SEQ ID NO: 1904499 - RNA, 21 nt, Human
ggaaaggggcaggccagagcu

SEQ ID NO: 1904500 - RNA, 17 nt, Human
ggaaaggcuccaggagc

SEQ ID NO: 1904501 - RNA, 19 nt, Human
ggaaaggcuccaggagcag

SEQ ID NO: 1904502 - RNA, 20 nt, Human
ggaaaggcuccaggagcagc

SEQ ID NO: 1904503 - RNA, 21 nt, Human
ggaaaggcuccaggagcagcc

SEQ ID NO: 1904504 - RNA, 15 nt, Human
gcuuugugauuuuug

SEQ ID NO: 1904505 - RNA, 20 nt, Human
gcuugaggguugggcuggug

SEQ ID NO: 1904506 - RNA, 18 nt, Human
gcuugaggguugggcugg

SEQ ID NO: 1904507 - RNA, 20 nt, Human
gcuuuagaaagguuuugagc

SEQ ID NO: 1904508 - RNA, 21 nt, Human
gcuuuguuuguugucagcuga

SEQ ID NO: 1904509 - RNA, 18 nt, Human
ggaaaacaugcuacacac

SEQ ID NO: 1904510 - RNA, 20 nt, Human
ggaaaagcugcugacagugu

SEQ ID NO: 1904511 - RNA, 18 nt, Human
ggaaaagcugcugacagu

SEQ ID NO: 1904512 - RNA, 20 nt, Human
ggaaaaggcagggagcgagg

SEQ ID NO: 1904513 - RNA, 14 nt, Human
ggaaaagcugcuga

SEQ ID NO: 1904514 - RNA, 20 nt, Human
ggaaaagccaagaggcugca

SEQ ID NO: 1904515 - RNA, 19 nt, Human
ggaaaagcggacaucagcu

SEQ ID NO: 1904516 - RNA, 14 nt, Human
ggaaaagcagcucu

SEQ ID NO: 1904517 - RNA, 18 nt, Human
ggaaaagcagcucucccc

SEQ ID NO: 1904518 - RNA, 17 nt, Human
ggagagucacagaacaa

SEQ ID NO: 1904519 - RNA, 18 nt, Human
ggagaguuuccugaaaca

SEQ ID NO: 1904520 - RNA, 22 nt, Human
ggagaggcccucuggaguggcc

SEQ ID NO: 1904521 - RNA, 19 nt, Human
ggagaugaagcaaacacau

SEQ ID NO: 1904522 - RNA, 21 nt, Human
ggagauagccccacaggaggu

SEQ ID NO: 1904523 - RNA, 20 nt, Human
ggagauagccccacaggagg

SEQ ID NO: 1904524 - RNA, 22 nt, Human
ggagaaugucaguauguggaag

SEQ ID NO: 1904525 - RNA, 22 nt, Human
ggagaauuuagguuuuuauuag

SEQ ID NO: 1904526 - RNA, 15 nt, Human
ggacgcucucuggcc

SEQ ID NO: 1904527 - RNA, 14 nt, Human
ggacgcucucuggc

SEQ ID NO: 1904528 - RNA, 13 nt, Human
ggacgcucucugg

SEQ ID NO: 1904529 - RNA, 17 nt, Human
ggagaagcggcuggcag

SEQ ID NO: 1904530 - RNA, 18 nt, Human
ggagaagcggcuggcagc

SEQ ID NO: 1904531 - RNA, 19 nt, Human
ggagaaucacuugaacccg

SEQ ID NO: 1904532 - RNA, 15 nt, Human
ggagaaucacuugaa

SEQ ID NO: 1904533 - RNA, 17 nt, Human
ggacugugugcucagga

SEQ ID NO: 1904534 - RNA, 12 nt, Human
ggagaagccagg

SEQ ID NO: 1904535 - RNA, 13 nt, Human
ggagaagccagga

SEQ ID NO: 1904536 - RNA, 15 nt, Human
ggagaagccaggaau

SEQ ID NO: 1904537 - RNA, 20 nt, Human
ggacauugcggacagccacg

SEQ ID NO: 1904538 - RNA, 22 nt, Human
ggacagccacggccaggccaga

SEQ ID NO: 1904539 - RNA, 17 nt, Human
ggaccaaggagaugaag

SEQ ID NO: 1904540 - RNA, 21 nt, Human
ggacagccacggccaggccag

SEQ ID NO: 1904541 - RNA, 20 nt, Human
ggacagccacggccaggcca

SEQ ID NO: 1904542 - RNA, 19 nt, Human
ggacagccacggccaggcc

SEQ ID NO: 1904543 - RNA, 15 nt, Human
ggacagccacggcca

SEQ ID NO: 1904544 - RNA, 17 nt, Human
ggacacucaaaagcugg

SEQ ID NO: 1904545 - RNA, 22 nt, Human
ggacacucaaaagcugggcagg

SEQ ID NO: 1904546 - RNA, 23 nt, Human
ggacagauccagggacugaagcc

SEQ ID NO: 1904547 - RNA, 19 nt, Human
ggacagauccagggacuga

SEQ ID NO: 1904548 - RNA, 17 nt, Human
ggaccuugaacugggua

SEQ ID NO: 1904549 - RNA, 15 nt, Human
ggaccuugaacuggg

SEQ ID NO: 1904550 - RNA, 20 nt, Human
ggaccuucgggcugugcccg

SEQ ID NO: 1904551 - RNA, 19 nt, Human
ggaccuucgggcugugccc

SEQ ID NO: 1904552 - RNA, 18 nt, Human
ggaccuucgggcugugcc

SEQ ID NO: 1904553 - RNA, 17 nt, Human
ggaccuucgggcugugc

SEQ ID NO: 1904554 - RNA, 17 nt, Human
ggacgcuacccgggaag

SEQ ID NO: 1904555 - RNA, 19 nt, Human
ggacgcuacccgggaaggg

SEQ ID NO: 1904556 - RNA, 20 nt, Human
ggacgcuacccgggaagggg

SEQ ID NO: 1904557 - RNA, 13 nt, Human
ggaccagagcugc

SEQ ID NO: 1904558 - RNA, 19 nt, Human
ggaccucaggugagaagca

SEQ ID NO: 1904559 - RNA, 23 nt, Human
ggaccucaggugagaagcagagg

SEQ ID NO: 1904560 - RNA, 18 nt, Human
ggaaguacuggagaaaau

SEQ ID NO: 1904561 - RNA, 12 nt, Human
ggaaguacugga

SEQ ID NO: 1904562 - RNA, 16 nt, Human
ggaaguacuggagaaa

SEQ ID NO: 1904563 - RNA, 17 nt, Human
ggaaggggacccccgcc

SEQ ID NO: 1904564 - RNA, 22 nt, Human
ggaaggggacccccgcccccug

SEQ ID NO: 1904565 - RNA, 19 nt, Human
ggaaggugggcgggcaggg

SEQ ID NO: 1904566 - RNA, 14 nt, Human
ggaaugauuaauua

SEQ ID NO: 1904567 - RNA, 18 nt, Human
ggaagugcuaauuuugaa

SEQ ID NO: 1904568 - RNA, 20 nt, Human
ggaagugacgguuuaauggg

SEQ ID NO: 1904569 - RNA, 15 nt, Human
ggaaguccaaugugg

SEQ ID NO: 1904570 - RNA, 16 nt, Human
ggaaguccaauguggc

SEQ ID NO: 1904571 - RNA, 17 nt, Human
ggaaguccaauguggca

SEQ ID NO: 1904572 - RNA, 20 nt, Human
ggaagugaagacuggaagcu

SEQ ID NO: 1904573 - RNA, 18 nt, Human
ggaaccugacguagcugc

SEQ ID NO: 1904574 - RNA, 23 nt, Human
ggaagggacaccaagccuuggcu

SEQ ID NO: 1904575 - RNA, 23 nt, Human
ggaaggggagauaaggguaucug

SEQ ID NO: 1904576 - RNA, 16 nt, Human
ggaaggggacccccgc

SEQ ID NO: 1904577 - RNA, 19 nt, Human
ggaauuuucaucuaggauu

SEQ ID NO: 1904578 - RNA, 20 nt, Human
ggaauuuucuccaauuuuuu

SEQ ID NO: 1904579 - RNA, 17 nt, Human
ggacaaaauggaauacu

SEQ ID NO: 1904580 - RNA, 16 nt, Human
ggacaaaauggaauac

SEQ ID NO: 1904581 - RNA, 12 nt, Human
ggaauuguguuu

SEQ ID NO: 1904582 - RNA, 23 nt, Human
ggaauuggguggggggcuucaua

SEQ ID NO: 1904583 - RNA, 14 nt, Human
ggaauuucccagga

SEQ ID NO: 1904584 - RNA, 15 nt, Human
ggaauuucccaggac

SEQ ID NO: 1904585 - RNA, 16 nt, Human
ggaauuucccaggacc

SEQ ID NO: 1904586 - RNA, 17 nt, Human
ggaauuucccaggaccc

SEQ ID NO: 1904587 - RNA, 18 nt, Human
ggaauuucccaggacccu

SEQ ID NO: 1904588 - RNA, 19 nt, Human
ggaauuucccaggacccug

SEQ ID NO: 1904589 - RNA, 19 nt, Human
ggaauguuugccucugccu

SEQ ID NO: 1904590 - RNA, 15 nt, Human
ggaauuauuuuaaaa

SEQ ID NO: 1904591 - RNA, 14 nt, Human
ggaauuauuuuaaa

SEQ ID NO: 1904592 - RNA, 20 nt, Human
ggaauucaucucucuuuaau

SEQ ID NO: 1904593 - RNA, 15 nt, Human
ggaauugauuugcau

SEQ ID NO: 1904594 - RNA, 17 nt, Human
ggaauugauuugcauug

SEQ ID NO: 1904595 - RNA, 18 nt, Human
ggaauugauuugcauuga

SEQ ID NO: 1904596 - RNA, 19 nt, Human
ggaauugauuugcauugaa

SEQ ID NO: 1904597 - RNA, 17 nt, Human
ggaauuauuuuaaaaga

SEQ ID NO: 1904598 - RNA, 16 nt, Human
ggaauuauuuuaaaag

SEQ ID NO: 1904599 - RNA, 12 nt, Human
ggaaugcagugg

SEQ ID NO: 1904600 - RNA, 24 nt, Human
ggaaugauuaauuaaaacacaaca

SEQ ID NO: 1904601 - RNA, 15 nt, Human
ggaauggcacagccc

SEQ ID NO: 1904602 - RNA, 15 nt, Human
ggaauguguggccug

SEQ ID NO: 1904603 - RNA, 14 nt, Human
gcccuuuuuaagga

SEQ ID NO: 1904604 - RNA, 16 nt, Human
gccgagaucacgccac

SEQ ID NO: 1904605 - RNA, 19 nt, Human
gccgagaucacgccacugc

SEQ ID NO: 1904606 - RNA, 18 nt, Human
gccgagaucacgccacug

SEQ ID NO: 1904607 - RNA, 18 nt, Human
gccgagauugcaccacug

SEQ ID NO: 1904608 - RNA, 17 nt, Human
gccgagauugcaccacu

SEQ ID NO: 1904609 - RNA, 23 nt, Human
gcccuucucuccagccccuggau

SEQ ID NO: 1904610 - RNA, 21 nt, Human
gcccuucucuccagccccugg

SEQ ID NO: 1904611 - RNA, 22 nt, Human
gcccuucucuccagccccugga

SEQ ID NO: 1904612 - RNA, 19 nt, Human
gcccuucucuccagccccu

SEQ ID NO: 1904613 - RNA, 23 nt, Human
gcccugguggcagugggagcugc

SEQ ID NO: 1904614 - RNA, 22 nt, Human
gcccugguggcagugggagcug

SEQ ID NO: 1904615 - RNA, 21 nt, Human
gcccugguggcagugggagcu

SEQ ID NO: 1904616 - RNA, 20 nt, Human
gcccugguggcagugggagc

SEQ ID NO: 1904617 - RNA, 19 nt, Human
gcccugguggcagugggag

SEQ ID NO: 1904618 - RNA, 18 nt, Human
gcccugguggcaguggga

SEQ ID NO: 1904619 - RNA, 17 nt, Human
gcccugguggcaguggg

SEQ ID NO: 1904620 - RNA, 14 nt, Human
gcccugguggcagu

SEQ ID NO: 1904621 - RNA, 20 nt, Human
gcccuggccuugggcccucu

SEQ ID NO: 1904622 - RNA, 13 nt, Human
gcccugggaggcu

SEQ ID NO: 1904623 - RNA, 14 nt, Human
gcccugggaggcuc

SEQ ID NO: 1904624 - RNA, 15 nt, Human
gcccugggaggcucu

SEQ ID NO: 1904625 - RNA, 16 nt, Human
gcccugggaggcucug

SEQ ID NO: 1904626 - RNA, 17 nt, Human
gcccugggaucacugug

SEQ ID NO: 1904627 - RNA, 23 nt, Human
gcccugggaggcucuggagccca

SEQ ID NO: 1904628 - RNA, 17 nt, Human
gcccugggaggcucugg

SEQ ID NO: 1904629 - RNA, 18 nt, Human
gcccugggaggcucugga

SEQ ID NO: 1904630 - RNA, 19 nt, Human
gcccugggaggcucuggag

SEQ ID NO: 1904631 - RNA, 21 nt, Human
gcccugggaggcucuggagcc

SEQ ID NO: 1904632 - RNA, 12 nt, Human
gcccucugccca

SEQ ID NO: 1904633 - RNA, 16 nt, Human
gcccugagcuuucugc

SEQ ID NO: 1904634 - RNA, 18 nt, Human
gcccggcuccaggcuccu

SEQ ID NO: 1904635 - RNA, 17 nt, Human
gcccggcuccaggcucc

SEQ ID NO: 1904636 - RNA, 18 nt, Human
gcccugaguuccuagcca

SEQ ID NO: 1904637 - RNA, 16 nt, Human
gcccugaguuccuagc

SEQ ID NO: 1904638 - RNA, 12 nt, Human
gcccuggacugu

SEQ ID NO: 1904639 - RNA, 16 nt, Human
gcccuggacugugugc

SEQ ID NO: 1904640 - RNA, 22 nt, Human
gcccuggacugugugcucagga

SEQ ID NO: 1904641 - RNA, 14 nt, Human
gcccuggagguggc

SEQ ID NO: 1904642 - RNA, 15 nt, Human
gcccuggagguggcu

SEQ ID NO: 1904643 - RNA, 18 nt, Human
gcccuggagguggcugag

SEQ ID NO: 1904644 - RNA, 20 nt, Human
gcccuggagguggcugagcc

SEQ ID NO: 1904645 - RNA, 13 nt, Human
gcccuggaggugg

SEQ ID NO: 1904646 - RNA, 16 nt, Human
gcccggcuccaggcuc

SEQ ID NO: 1904647 - RNA, 18 nt, Human
gcccggcuaauuuuugua

SEQ ID NO: 1904648 - RNA, 12 nt, Human
gcccggccagcc

SEQ ID NO: 1904649 - RNA, 18 nt, Human
gcccggccagccaugucu

SEQ ID NO: 1904650 - RNA, 15 nt, Human
gccccugccacccug

SEQ ID NO: 1904651 - RNA, 14 nt, Human
gccccugccacccu

SEQ ID NO: 1904652 - RNA, 21 nt, Human
gccccuguucuggcagaguug

SEQ ID NO: 1904653 - RNA, 13 nt, Human
gccccugccaccc

SEQ ID NO: 1904654 - RNA, 15 nt, Human
gcagacucuacagag

SEQ ID NO: 1904655 - RNA, 13 nt, Human
gcagacgcccaga

SEQ ID NO: 1904656 - RNA, 19 nt, Human
gccuggccacgcagccagg

SEQ ID NO: 1904657 - RNA, 18 nt, Human
gccuggccacgcagccag

SEQ ID NO: 1904658 - RNA, 17 nt, Human
gccuggccacgcagcca

SEQ ID NO: 1904659 - RNA, 15 nt, Human
gccuggccacgcagc

SEQ ID NO: 1904660 - RNA, 13 nt, Human
gccuggcagcuca

SEQ ID NO: 1904661 - RNA, 23 nt, Human
gccuggccacgcagccaggacac

SEQ ID NO: 1904662 - RNA, 22 nt, Human
gccuggccacgcagccaggaca

SEQ ID NO: 1904663 - RNA, 21 nt, Human
gccuggccacgcagccaggac

SEQ ID NO: 1904664 - RNA, 20 nt, Human
gccuggccacgcagccagga

SEQ ID NO: 1904665 - RNA, 13 nt, Human
gccuggccagaca

SEQ ID NO: 1904666 - RNA, 14 nt, Human
gccuggccagacac

SEQ ID NO: 1904667 - RNA, 16 nt, Human
gccuggccagacacag

SEQ ID NO: 1904668 - RNA, 17 nt, Human
gccuggccagacacagg

SEQ ID NO: 1904669 - RNA, 20 nt, Human
gccuggcagcucagcuuccc

SEQ ID NO: 1904670 - RNA, 20 nt, Human
gccuggaugcggauggccgg

SEQ ID NO: 1904671 - RNA, 15 nt, Human
gccuggauggggcug

SEQ ID NO: 1904672 - RNA, 14 nt, Human
gccuggauggggcu

SEQ ID NO: 1904673 - RNA, 15 nt, Human
gccuggccagaugca

SEQ ID NO: 1904674 - RNA, 14 nt, Human
gccuggccagaugc

SEQ ID NO: 1904675 - RNA, 16 nt, Human
gccuggccagaugcac

SEQ ID NO: 1904676 - RNA, 20 nt, Human
gccuggccagacacaggccc

SEQ ID NO: 1904677 - RNA, 21 nt, Human
gccuggccagacacaggcccu

SEQ ID NO: 1904678 - RNA, 23 nt, Human
gccuggccagcagguccccagcu

SEQ ID NO: 1904679 - RNA, 15 nt, Human
gccugggcagaagga

SEQ ID NO: 1904680 - RNA, 21 nt, Human
gccugggggcugggcagagga

SEQ ID NO: 1904681 - RNA, 20 nt, Human
gccugggggcugggcagagg

SEQ ID NO: 1904682 - RNA, 17 nt, Human
gccuggggcuggccucc

SEQ ID NO: 1904683 - RNA, 14 nt, Human
gccuggggcuggcc

SEQ ID NO: 1904684 - RNA, 18 nt, Human
gccugggcagaaggaaga

SEQ ID NO: 1904685 - RNA, 16 nt, Human
gccugggcagaaggaa

SEQ ID NO: 1904686 - RNA, 17 nt, Human
gccugggcagaaggaag

SEQ ID NO: 1904687 - RNA, 20 nt, Human
gccugggugacagagcaaga

SEQ ID NO: 1904688 - RNA, 22 nt, Human
gccugggugacagagcaagacu

SEQ ID NO: 1904689 - RNA, 15 nt, Human
gccugcuccagcugu

SEQ ID NO: 1904690 - RNA, 15 nt, Human
gccugcagagcugcg

SEQ ID NO: 1904691 - RNA, 12 nt, Human
gccugcagagcu

SEQ ID NO: 1904692 - RNA, 16 nt, Human
gccugcagaauuuggg

SEQ ID NO: 1904693 - RNA, 16 nt, Human
gccugcuccagcuguu

SEQ ID NO: 1904694 - RNA, 18 nt, Human
gccugcuccagcuguuca

SEQ ID NO: 1904695 - RNA, 18 nt, Human
gccugcuuuuuauggccu

SEQ ID NO: 1904696 - RNA, 19 nt, Human
gccugcuuuuuauggccug

SEQ ID NO: 1904697 - RNA, 22 nt, Human
gccugcuuuuuauggccuguga

SEQ ID NO: 1904698 - RNA, 22 nt, Human
gccugaagucacacagugaguc

SEQ ID NO: 1904699 - RNA, 23 nt, Human
gccucucugcaggucccuaauaa

SEQ ID NO: 1904700 - RNA, 18 nt, Human
gccucucugcaggucccu

SEQ ID NO: 1904701 - RNA, 20 nt, Human
gccucucugcaggucccuaa

SEQ ID NO: 1904702 - RNA, 21 nt, Human
gccucucugcaggucccuaau

SEQ ID NO: 1904703 - RNA, 13 nt, Human
gccugagucaccu

SEQ ID NO: 1904704 - RNA, 20 nt, Human
gccugauaagcuucaaagcu

SEQ ID NO: 1904705 - RNA, 15 nt, Human
gccugauaagcuuca

SEQ ID NO: 1904706 - RNA, 16 nt, Human
gccugaucagaccacg

SEQ ID NO: 1904707 - RNA, 20 nt, Human
gccugaucagaccacggcuc

SEQ ID NO: 1904708 - RNA, 21 nt, Human
gccucaagugauucuccugcc

SEQ ID NO: 1904709 - RNA, 20 nt, Human
gccucaagugauucuccugc

SEQ ID NO: 1904710 - RNA, 19 nt, Human
gccucaagugauucuccug

SEQ ID NO: 1904711 - RNA, 17 nt, Human
gccucaaccuccugggc

SEQ ID NO: 1904712 - RNA, 16 nt, Human
gccucaaccuccuggg

SEQ ID NO: 1904713 - RNA, 14 nt, Human
gccucaaccuccug

SEQ ID NO: 1904714 - RNA, 17 nt, Human
gccuaagugcagccccg

SEQ ID NO: 1904715 - RNA, 22 nt, Human
gccuauauuuuuuguuaaauga

SEQ ID NO: 1904716 - RNA, 14 nt, Human
gccucagugccacu

SEQ ID NO: 1904717 - RNA, 12 nt, Human
gccucagugcca

SEQ ID NO: 1904718 - RNA, 15 nt, Human
gccucaggccucugu

SEQ ID NO: 1904719 - RNA, 23 nt, Human
gccucagccucccaaagugcugg

SEQ ID NO: 1904720 - RNA, 16 nt, Human
gccucagccucccaag

SEQ ID NO: 1904721 - RNA, 18 nt, Human
gccucagccuccugagua

SEQ ID NO: 1904722 - RNA, 16 nt, Human
gccucagccuccugag

SEQ ID NO: 1904723 - RNA, 21 nt, Human
gccucccacgacugcccggca

SEQ ID NO: 1904724 - RNA, 18 nt, Human
gccuccccucuccuuccu

SEQ ID NO: 1904725 - RNA, 12 nt, Human
gccucccacugg

SEQ ID NO: 1904726 - RNA, 13 nt, Human
gccucccacuggg

SEQ ID NO: 1904727 - RNA, 14 nt, Human
gccucccacgacug

SEQ ID NO: 1904728 - RNA, 21 nt, Human
gccucccgaauagcugggacu

SEQ ID NO: 1904729 - RNA, 21 nt, Human
gccuccccucuccuuccugug

SEQ ID NO: 1904730 - RNA, 19 nt, Human
gccuccccucuccuuccug

SEQ ID NO: 1904731 - RNA, 15 nt, Human
gccucagugccacua

SEQ ID NO: 1904732 - RNA, 21 nt, Human
gccucccaacucaccccagcc

SEQ ID NO: 1904733 - RNA, 22 nt, Human
gccucccaacucaccccagccc

SEQ ID NO: 1904734 - RNA, 23 nt, Human
gccucccaacucaccccagcccc

SEQ ID NO: 1904735 - RNA, 13 nt, Human
gccucccacagac

SEQ ID NO: 1904736 - RNA, 15 nt, Human
gccucccgaguagcu

SEQ ID NO: 1904737 - RNA, 23 nt, Human
gccucccgaauagcugggacuac

SEQ ID NO: 1904738 - RNA, 17 nt, Human
gccucccgaguagcugg

SEQ ID NO: 1904739 - RNA, 17 nt, Human
gccucggccucccaaag

SEQ ID NO: 1904740 - RNA, 19 nt, Human
gccucucugcaggucccua

SEQ ID NO: 1904741 - RNA, 16 nt, Human
gcugcauacccgggca

SEQ ID NO: 1904742 - RNA, 22 nt, Human
gcugcaucccccccaccucucc

SEQ ID NO: 1904743 - RNA, 17 nt, Human
gcugcauuuaaaagaua

SEQ ID NO: 1904744 - RNA, 18 nt, Human
gcugauggugcaaugacc

SEQ ID NO: 1904745 - RNA, 21 nt, Human
gcugauggugcaaugaccuuu

SEQ ID NO: 1904746 - RNA, 21 nt, Human
gcugcaguugccagucacccc

SEQ ID NO: 1904747 - RNA, 18 nt, Human
gcugcaguugccagucac

SEQ ID NO: 1904748 - RNA, 20 nt, Human
gcugcaguugccagucaccc

SEQ ID NO: 1904749 - RNA, 15 nt, Human
gcugauggugcaaug

SEQ ID NO: 1904750 - RNA, 16 nt, Human
gcugauggugcaauga

SEQ ID NO: 1904751 - RNA, 13 nt, Human
gcugaugacucaa

SEQ ID NO: 1904752 - RNA, 23 nt, Human
gcugaugacucaagauucccagg

SEQ ID NO: 1904753 - RNA, 22 nt, Human
gcugaugacucaagauucccag

SEQ ID NO: 1904754 - RNA, 22 nt, Human
gcugagugggggaucacagccu

SEQ ID NO: 1904755 - RNA, 23 nt, Human
gcugagugggggaucacagccuc

SEQ ID NO: 1904756 - RNA, 13 nt, Human
gcugaguuggugu

SEQ ID NO: 1904757 - RNA, 18 nt, Human
gcugaguuguugagucug

SEQ ID NO: 1904758 - RNA, 21 nt, Human
gcugaguuguugagucuguuu

SEQ ID NO: 1904759 - RNA, 15 nt, Human
gcugagucugaaggc

SEQ ID NO: 1904760 - RNA, 16 nt, Human
gcugagucugaaggcu

SEQ ID NO: 1904761 - RNA, 18 nt, Human
gcugagucugaaggcugg

SEQ ID NO: 1904762 - RNA, 19 nt, Human
gcugagucugaaggcuggg

SEQ ID NO: 1904763 - RNA, 22 nt, Human
gcugagugaaaaaucuguggaa

SEQ ID NO: 1904764 - RNA, 12 nt, Human
gcucuucuccag

SEQ ID NO: 1904765 - RNA, 20 nt, Human
gcucuucucauuucaccccu

SEQ ID NO: 1904766 - RNA, 16 nt, Human
gcucuucucauuucac

SEQ ID NO: 1904767 - RNA, 15 nt, Human
gcucuucucauuuca

SEQ ID NO: 1904768 - RNA, 14 nt, Human
gcucuucucauuuc

SEQ ID NO: 1904769 - RNA, 22 nt, Human
gcucuuccaggcugggagagcc

SEQ ID NO: 1904770 - RNA, 12 nt, Human
gcucuucucauu

SEQ ID NO: 1904771 - RNA, 20 nt, Human
gcucuuccgaaaaccaggcc

SEQ ID NO: 1904772 - RNA, 19 nt, Human
gcucuuccaggcugggaga

SEQ ID NO: 1904773 - RNA, 18 nt, Human
gcucuuccaggcugggag

SEQ ID NO: 1904774 - RNA, 20 nt, Human
gcucuggacagccccacccu

SEQ ID NO: 1904775 - RNA, 22 nt, Human
gcucuggacagccccacccugg

SEQ ID NO: 1904776 - RNA, 11 nt, Human
gcucuggaccu

SEQ ID NO: 1904777 - RNA, 12 nt, Human
gcucuggaccug

SEQ ID NO: 1904778 - RNA, 13 nt, Human
gcucuggaccugc

SEQ ID NO: 1904779 - RNA, 14 nt, Human
gcucuggaccugcc

SEQ ID NO: 1904780 - RNA, 15 nt, Human
gcucuggaccugccc

SEQ ID NO: 1904781 - RNA, 17 nt, Human
gcucuggaccugccccc

SEQ ID NO: 1904782 - RNA, 22 nt, Human
gcucuggaccugcccccgcauc

SEQ ID NO: 1904783 - RNA, 16 nt, Human
gcucuucuccaggcug

SEQ ID NO: 1904784 - RNA, 14 nt, Human
gcucuucuccaggc

SEQ ID NO: 1904785 - RNA, 23 nt, Human
gcucuucucauuucaccccuccc

SEQ ID NO: 1904786 - RNA, 22 nt, Human
gcucuucucauuucaccccucc

SEQ ID NO: 1904787 - RNA, 14 nt, Human
gcucuugaugccug

SEQ ID NO: 1904788 - RNA, 15 nt, Human
gcucuugaugccugg

SEQ ID NO: 1904789 - RNA, 16 nt, Human
gcucuugaugccuggc

SEQ ID NO: 1904790 - RNA, 21 nt, Human
gcugacagacacaggcccggc

SEQ ID NO: 1904791 - RNA, 13 nt, Human
gcugacagcugcu

SEQ ID NO: 1904792 - RNA, 14 nt, Human
gcugacagcugcuc

SEQ ID NO: 1904793 - RNA, 14 nt, Human
gcucuuuccuccuu

SEQ ID NO: 1904794 - RNA, 15 nt, Human
gcucuuuccuccuuc

SEQ ID NO: 1904795 - RNA, 17 nt, Human
gcucuuuccuccuucca

SEQ ID NO: 1904796 - RNA, 17 nt, Human
gcucuugaugccuggcg

SEQ ID NO: 1904797 - RNA, 17 nt, Human
gcugacucacaccugaa

SEQ ID NO: 1904798 - RNA, 22 nt, Human
gcugacccagccccuugagaaa

SEQ ID NO: 1904799 - RNA, 15 nt, Human
gcugacagcugcucc

SEQ ID NO: 1904800 - RNA, 17 nt, Human
gcugacagcugcuccua

SEQ ID NO: 1904801 - RNA, 18 nt, Human
gcugacagcugcuccuag

SEQ ID NO: 1904802 - RNA, 17 nt, Human
gcucucccauuuccuga

SEQ ID NO: 1904803 - RNA, 17 nt, Human
gcucgagcaugccugga

SEQ ID NO: 1904804 - RNA, 16 nt, Human
gcucgagcaugccugg

SEQ ID NO: 1904805 - RNA, 21 nt, Human
gcuccuucuguccuacucugu

SEQ ID NO: 1904806 - RNA, 19 nt, Human
gcucccuucccaccucucu

SEQ ID NO: 1904807 - RNA, 15 nt, Human
gcuccuucuguccua

SEQ ID NO: 1904808 - RNA, 15 nt, Human
gcucccuucccaccu

SEQ ID NO: 1904809 - RNA, 16 nt, Human
gcucccuucccaccuc

SEQ ID NO: 1904810 - RNA, 18 nt, Human
gcucccuucccaccucuc

SEQ ID NO: 1904811 - RNA, 17 nt, Human
gcucuccgaccagacac

SEQ ID NO: 1904812 - RNA, 13 nt, Human
gcucuccgaccag

SEQ ID NO: 1904813 - RNA, 19 nt, Human
gcucuccgaccagacaccu

SEQ ID NO: 1904814 - RNA, 13 nt, Human
gcucucuggccuu

SEQ ID NO: 1904815 - RNA, 12 nt, Human
gcucucuggccu

SEQ ID NO: 1904816 - RNA, 11 nt, Human
gcucucuggcc

SEQ ID NO: 1904817 - RNA, 22 nt, Human
gcucuccuuccuggagcccaga

SEQ ID NO: 1904818 - RNA, 12 nt, Human
gcucuccuuccu

SEQ ID NO: 1904819 - RNA, 11 nt, Human
gcucuccuucc

SEQ ID NO: 1904820 - RNA, 21 nt, Human
gcucucggaacugcaugcugc

SEQ ID NO: 1904821 - RNA, 19 nt, Human
gcucucggaacugcaugcu

SEQ ID NO: 1904822 - RNA, 14 nt, Human
gcucugcccuuggu

SEQ ID NO: 1904823 - RNA, 23 nt, Human
gcucugcccuugguuaggcauug

SEQ ID NO: 1904824 - RNA, 11 nt, Human
gcucugccucc

SEQ ID NO: 1904825 - RNA, 20 nt, Human
gcucucuggccuucggccuc

SEQ ID NO: 1904826 - RNA, 19 nt, Human
gcucucuggccuucggccu

SEQ ID NO: 1904827 - RNA, 15 nt, Human
gcucucuggccuucg

SEQ ID NO: 1904828 - RNA, 14 nt, Human
gcucucuggccuuc

SEQ ID NO: 1904829 - RNA, 14 nt, Human
gcucugcuccucuc

SEQ ID NO: 1904830 - RNA, 13 nt, Human
gcucugcuccucu

SEQ ID NO: 1904831 - RNA, 13 nt, Human
gcucugccuccca

SEQ ID NO: 1904832 - RNA, 14 nt, Human
gcucugccucccau

SEQ ID NO: 1904833 - RNA, 15 nt, Human
gcucugccucccauc

SEQ ID NO: 1904834 - RNA, 22 nt, Human
gcucugccucccaucacccgcu

SEQ ID NO: 1904835 - RNA, 23 nt, Human
gcucugcugacagacacaggccc

SEQ ID NO: 1904836 - RNA, 20 nt, Human
gcucugcugacagacacagg

SEQ ID NO: 1904837 - RNA, 19 nt, Human
gcucugcugacagacacag

SEQ ID NO: 1904838 - RNA, 18 nt, Human
gcucugcugacagacaca

SEQ ID NO: 1904839 - RNA, 14 nt, Human
gcucugcugacaga

SEQ ID NO: 1904840 - RNA, 13 nt, Human
gcucugcugacag

SEQ ID NO: 1904841 - RNA, 21 nt, Human
gcucugcuccucuccccagca

SEQ ID NO: 1904842 - RNA, 19 nt, Human
gcucugcuccucuccccag

SEQ ID NO: 1904843 - RNA, 22 nt, Human
gcucuggacaggcauguucucu

SEQ ID NO: 1904844 - RNA, 21 nt, Human
gcucuggacaggcauguucuc

SEQ ID NO: 1904845 - RNA, 16 nt, Human
gcucuggacaggcaug

SEQ ID NO: 1904846 - RNA, 15 nt, Human
gcucuggacaggcau

SEQ ID NO: 1904847 - RNA, 14 nt, Human
gcucuggacaggca

SEQ ID NO: 1904848 - RNA, 16 nt, Human
gcucuggacagcccca

SEQ ID NO: 1904849 - RNA, 19 nt, Human
gcucuggacagccccaccc

SEQ ID NO: 1904850 - RNA, 14 nt, Human
gcucugcuugacaa

SEQ ID NO: 1904851 - RNA, 21 nt, Human
gcucugcuugacaacaucuga

SEQ ID NO: 1904852 - RNA, 20 nt, Human
gcuccauuuuuagugaaaua

SEQ ID NO: 1904853 - RNA, 15 nt, Human
gcuccauggcugcca

SEQ ID NO: 1904854 - RNA, 24 nt, Human
gcuccaggcuccuuuagcgcccag

SEQ ID NO: 1904855 - RNA, 20 nt, Human
gcuccagcuguucagcuggu

SEQ ID NO: 1904856 - RNA, 23 nt, Human
gcuccaggcuccuuuagcgccca

SEQ ID NO: 1904857 - RNA, 16 nt, Human
gcuccaggcuccuuua

SEQ ID NO: 1904858 - RNA, 13 nt, Human
gcuccaggcuccu

SEQ ID NO: 1904859 - RNA, 11 nt, Human
gcuccagcugu

SEQ ID NO: 1904860 - RNA, 19 nt, Human
gcuccaaacccucgaggcg

SEQ ID NO: 1904861 - RNA, 14 nt, Human
gcuccaaaccuuca

SEQ ID NO: 1904862 - RNA, 15 nt, Human
gcuccaaaccuucac

SEQ ID NO: 1904863 - RNA, 21 nt, Human
gcuccaaaccuucacacacag

SEQ ID NO: 1904864 - RNA, 22 nt, Human
gcuccaaaccuucacacacaga

SEQ ID NO: 1904865 - RNA, 14 nt, Human
gcuccaagaauuuc

SEQ ID NO: 1904866 - RNA, 15 nt, Human
gcuccaaccugcaaa

SEQ ID NO: 1904867 - RNA, 18 nt, Human
gcuccaaccugcaaagau

SEQ ID NO: 1904868 - RNA, 21 nt, Human
gcuccaaccugcaaagaucug

SEQ ID NO: 1904869 - RNA, 13 nt, Human
gcuccaagcuccc

SEQ ID NO: 1904870 - RNA, 14 nt, Human
gcuccaagcuccca

SEQ ID NO: 1904871 - RNA, 15 nt, Human
gcuccaagcucccag

SEQ ID NO: 1904872 - RNA, 21 nt, Human
gcuccaagcucccaggcauuc

SEQ ID NO: 1904873 - RNA, 20 nt, Human
gcuccaaggggaaucagaac

SEQ ID NO: 1904874 - RNA, 21 nt, Human
gcuccaaggggaaucagaacu

SEQ ID NO: 1904875 - RNA, 23 nt, Human
gcuccaaggggaaucagaacuca

SEQ ID NO: 1904876 - RNA, 16 nt, Human
gcuccaagcucccagg

SEQ ID NO: 1904877 - RNA, 17 nt, Human
gcuccaagcucccaggc

SEQ ID NO: 1904878 - RNA, 18 nt, Human
gcuccaagcucccaggca

SEQ ID NO: 1904879 - RNA, 19 nt, Human
gcuccaagcucccaggcau

SEQ ID NO: 1904880 - RNA, 18 nt, Human
gcucaggugucccugcac

SEQ ID NO: 1904881 - RNA, 22 nt, Human
gcucagcggggacagcuccuuc

SEQ ID NO: 1904882 - RNA, 21 nt, Human
gcucagcggggacagcuccuu

SEQ ID NO: 1904883 - RNA, 20 nt, Human
gcucagcggggacagcuccu

SEQ ID NO: 1904884 - RNA, 15 nt, Human
gcucagcggggacag

SEQ ID NO: 1904885 - RNA, 19 nt, Human
gcucaggugucccugcacu

SEQ ID NO: 1904886 - RNA, 17 nt, Human
gcuccaaacccucgagg

SEQ ID NO: 1904887 - RNA, 18 nt, Human
gcuccaaacccucgaggc

SEQ ID NO: 1904888 - RNA, 16 nt, Human
gcuccaaacccucgag

SEQ ID NO: 1904889 - RNA, 22 nt, Human
gcucagugucuggcugcagagc

SEQ ID NO: 1904890 - RNA, 19 nt, Human
gcucaccagccccagugcc

SEQ ID NO: 1904891 - RNA, 17 nt, Human
gcuaugagcuggggaug

SEQ ID NO: 1904892 - RNA, 23 nt, Human
gcucaccagccccagugcccaca

SEQ ID NO: 1904893 - RNA, 20 nt, Human
gcucaccagccccagugccc

SEQ ID NO: 1904894 - RNA, 17 nt, Human
gcucagcaaaagaugcu

SEQ ID NO: 1904895 - RNA, 20 nt, Human
gcucagcaaaagaugcuucu

SEQ ID NO: 1904896 - RNA, 22 nt, Human
gcucagcaaaagaugcuucuca

SEQ ID NO: 1904897 - RNA, 23 nt, Human
gcucagcaaaagaugcuucucac

SEQ ID NO: 1904898 - RNA, 12 nt, Human
gcucagccagca

SEQ ID NO: 1904899 - RNA, 13 nt, Human
gcucagccagcac

SEQ ID NO: 1904900 - RNA, 14 nt, Human
gcucagccagcacu

SEQ ID NO: 1904901 - RNA, 19 nt, Human
gccugugcauguaugucuu

SEQ ID NO: 1904902 - RNA, 23 nt, Human
gccugugagcuaggaauuguguu

SEQ ID NO: 1904903 - RNA, 16 nt, Human
gcgguccacccaggag

SEQ ID NO: 1904904 - RNA, 13 nt, Human
gcggggacagcuc

SEQ ID NO: 1904905 - RNA, 12 nt, Human
gcggggacagcu

SEQ ID NO: 1904906 - RNA, 15 nt, Human
gcgggcuuccuccug

SEQ ID NO: 1904907 - RNA, 19 nt, Human
gcgguccacccaggagccc

SEQ ID NO: 1904908 - RNA, 18 nt, Human
gcgguccacccaggagcc

SEQ ID NO: 1904909 - RNA, 16 nt, Human
gcgucauuacagggca

SEQ ID NO: 1904910 - RNA, 22 nt, Human
gcgucauuacagggcacaggcc

SEQ ID NO: 1904911 - RNA, 23 nt, Human
gcgucauuacagggcacaggcca

SEQ ID NO: 1904912 - RNA, 19 nt, Human
gcuaaauccuuuacuguua

SEQ ID NO: 1904913 - RNA, 13 nt, Human
gcuaaaugugaau

SEQ ID NO: 1904914 - RNA, 16 nt, Human
gcuaaaugugaaugau

SEQ ID NO: 1904915 - RNA, 22 nt, Human
gcuaaauuacucaggaagaaca

SEQ ID NO: 1904916 - RNA, 21 nt, Human
gcuaagagggagggagggcuc

SEQ ID NO: 1904917 - RNA, 22 nt, Human
gcuaagagggagggagggcucc

SEQ ID NO: 1904918 - RNA, 16 nt, Human
gcuaacaccagacaga

SEQ ID NO: 1904919 - RNA, 23 nt, Human
gcgugagccacugcaccgggcca

SEQ ID NO: 1904920 - RNA, 16 nt, Human
gcuaaagcccagagac

SEQ ID NO: 1904921 - RNA, 19 nt, Human
gcgugaucaaagccacacu

SEQ ID NO: 1904922 - RNA, 15 nt, Human
gcgugaucaaagcca

SEQ ID NO: 1904923 - RNA, 14 nt, Human
gcuaaagccuuccu

SEQ ID NO: 1904924 - RNA, 18 nt, Human
gcgugagccacugcaccg

SEQ ID NO: 1904925 - RNA, 12 nt, Human
gcuagccagagg

SEQ ID NO: 1904926 - RNA, 13 nt, Human
gcuagccagagga

SEQ ID NO: 1904927 - RNA, 15 nt, Human
gcuagccagaggacu

SEQ ID NO: 1904928 - RNA, 18 nt, Human
gcuagccagaggacugug

SEQ ID NO: 1904929 - RNA, 16 nt, Human
gcuaucucccccagcc

SEQ ID NO: 1904930 - RNA, 17 nt, Human
gcuaucucccccagccc

SEQ ID NO: 1904931 - RNA, 18 nt, Human
gcuaucucccccagcccc

SEQ ID NO: 1904932 - RNA, 23 nt, Human
gcuaucucccccagccccauccu

SEQ ID NO: 1904933 - RNA, 19 nt, Human
gcuaucucccccagcccca

SEQ ID NO: 1904934 - RNA, 20 nt, Human
gcuaucucccccagccccau

SEQ ID NO: 1904935 - RNA, 21 nt, Human
gcuaucucccccagccccauc

SEQ ID NO: 1904936 - RNA, 22 nt, Human
gcuaucucccccagccccaucc

SEQ ID NO: 1904937 - RNA, 23 nt, Human
gcuaagagggagggagggcucca

SEQ ID NO: 1904938 - RNA, 17 nt, Human
gcuaagcaaaaugugau

SEQ ID NO: 1904939 - RNA, 14 nt, Human
gcuacccgggaagg

SEQ ID NO: 1904940 - RNA, 15 nt, Human
gcuacccgggaaggg

SEQ ID NO: 1904941 - RNA, 16 nt, Human
gcuacccgcagaguuc

SEQ ID NO: 1904942 - RNA, 21 nt, Human
gcuacccgggaagggggcugg

SEQ ID NO: 1904943 - RNA, 22 nt, Human
gcuacccgcagaguucucagaa

SEQ ID NO: 1904944 - RNA, 21 nt, Human
gcuagagguucaaagauauuu

SEQ ID NO: 1904945 - RNA, 19 nt, Human
gcuagagguucaaagauau

SEQ ID NO: 1904946 - RNA, 18 nt, Human
gcuagagguucaaagaua

SEQ ID NO: 1904947 - RNA, 23 nt, Human
guacuuuauuuucuauaauuuaa

SEQ ID NO: 1904948 - RNA, 21 nt, Human
guacuuguggacacagcucuu

SEQ ID NO: 1904949 - RNA, 10 nt, Human
guacuuugug

SEQ ID NO: 1904950 - RNA, 14 nt, Human
guacuuuggaggcc

SEQ ID NO: 1904951 - RNA, 20 nt, Human
guagaaaagggaacugaaca

SEQ ID NO: 1904952 - RNA, 21 nt, Human
guagaaagacagagcugggau

SEQ ID NO: 1904953 - RNA, 18 nt, Human
guagaaagacagagcugg

SEQ ID NO: 1904954 - RNA, 16 nt, Human
guagagcggagaaagg

SEQ ID NO: 1904955 - RNA, 15 nt, Human
guagaggagaaacug

SEQ ID NO: 1904956 - RNA, 19 nt, Human
guacuucuccacccugcuc

SEQ ID NO: 1904957 - RNA, 18 nt, Human
guacuucuccacccugcu

SEQ ID NO: 1904958 - RNA, 17 nt, Human
guacuucuccacccugc

SEQ ID NO: 1904959 - RNA, 16 nt, Human
guacuucuccacccug

SEQ ID NO: 1904960 - RNA, 21 nt, Human
guacuucuccacccugcucuc

SEQ ID NO: 1904961 - RNA, 20 nt, Human
guacuucuccacccugcucu

SEQ ID NO: 1904962 - RNA, 14 nt, Human
guacuugcucuuga

SEQ ID NO: 1904963 - RNA, 20 nt, Human
guacuuguggacacagcucu

SEQ ID NO: 1904964 - RNA, 16 nt, Human
guacuuguggacacag

SEQ ID NO: 1904965 - RNA, 22 nt, Human
guacuugcucuugaugccuggc

SEQ ID NO: 1904966 - RNA, 15 nt, Human
guacuugcucuugau

SEQ ID NO: 1904967 - RNA, 16 nt, Human
guacuugcucuugaug

SEQ ID NO: 1904968 - RNA, 18 nt, Human
guacuugcucuugaugcc

SEQ ID NO: 1904969 - RNA, 19 nt, Human
guacuugcucuugaugccu

SEQ ID NO: 1904970 - RNA, 15 nt, Human
guaccgcaaugugac

SEQ ID NO: 1904971 - RNA, 16 nt, Human
guacccacugcucugg

SEQ ID NO: 1904972 - RNA, 22 nt, Human
guaccucuugagccuugaacuu

SEQ ID NO: 1904973 - RNA, 21 nt, Human
guaccucuugagccuugaacu

SEQ ID NO: 1904974 - RNA, 13 nt, Human
guaccucuugagc

SEQ ID NO: 1904975 - RNA, 21 nt, Human
guaccuucagaauaagcuucc

SEQ ID NO: 1904976 - RNA, 15 nt, Human
guacgucugacaggc

SEQ ID NO: 1904977 - RNA, 14 nt, Human
guacgucugacagg

SEQ ID NO: 1904978 - RNA, 17 nt, Human
guacgucugacaggcaa

SEQ ID NO: 1904979 - RNA, 14 nt, Human
guacguugugcauu

SEQ ID NO: 1904980 - RNA, 16 nt, Human
guacguugugcauuug

SEQ ID NO: 1904981 - RNA, 15 nt, Human
guacguugugcauuu

SEQ ID NO: 1904982 - RNA, 15 nt, Human
guacuucuccacccu

SEQ ID NO: 1904983 - RNA, 14 nt, Human
guacuucuccaccc

SEQ ID NO: 1904984 - RNA, 15 nt, Human
guacuacaauuuaaa

SEQ ID NO: 1904985 - RNA, 12 nt, Human
guacuacaauuu

SEQ ID NO: 1904986 - RNA, 17 nt, Human
guacguugugcauuugg

SEQ ID NO: 1904987 - RNA, 15 nt, Human
guacuaaggaaucuu

SEQ ID NO: 1904988 - RNA, 23 nt, Human
guacuaaggaaucuuucugcuuu

SEQ ID NO: 1904989 - RNA, 15 nt, Human
guaauucuaaaugaa

SEQ ID NO: 1904990 - RNA, 14 nt, Human
guaauucuaaauga

SEQ ID NO: 1904991 - RNA, 12 nt, Human
guaauucuaaau

SEQ ID NO: 1904992 - RNA, 22 nt, Human
guaauucuaaaugaauguuuac

SEQ ID NO: 1904993 - RNA, 18 nt, Human
guaauucuaaaugaaugu

SEQ ID NO: 1904994 - RNA, 18 nt, Human
guacacuguuucaaacuu

SEQ ID NO: 1904995 - RNA, 15 nt, Human
guaauucuuauucuu

SEQ ID NO: 1904996 - RNA, 17 nt, Human
guaauucuuauucuuuc

SEQ ID NO: 1904997 - RNA, 15 nt, Human
guaauugacaugugc

SEQ ID NO: 1904998 - RNA, 21 nt, Human
guaauuaaguacuauguauca

SEQ ID NO: 1904999 - RNA, 14 nt, Human
guaauuaaguacua

SEQ ID NO: 1905000 - RNA, 17 nt, Human
guaauuaaguacuaugu

SEQ ID NO: 1905001 - RNA, 20 nt, Human
guaauuaaguacuauguauc

SEQ ID NO: 1905002 - RNA, 14 nt, Human
guaaucugagaaac

SEQ ID NO: 1905003 - RNA, 17 nt, Human
guaaucugagaaacaau

SEQ ID NO: 1905004 - RNA, 19 nt, Human
guaaucugagaaacaauga

SEQ ID NO: 1905005 - RNA, 11 nt, Human
guaaugaaaac

SEQ ID NO: 1905006 - RNA, 13 nt, Human
guaaugaaaacca

SEQ ID NO: 1905007 - RNA, 16 nt, Human
guaaugaaacuuggau

SEQ ID NO: 1905008 - RNA, 15 nt, Human
guaaugaaacuugga

SEQ ID NO: 1905009 - RNA, 15 nt, Human
guacccacugcucug

SEQ ID NO: 1905010 - RNA, 13 nt, Human
guacaguuuuuau

SEQ ID NO: 1905011 - RNA, 12 nt, Human
guacaguuuuua

SEQ ID NO: 1905012 - RNA, 20 nt, Human
guacauaaugcgugcauacc

SEQ ID NO: 1905013 - RNA, 14 nt, Human
guacagucuuguau

SEQ ID NO: 1905014 - RNA, 13 nt, Human
guacagucuugua

SEQ ID NO: 1905015 - RNA, 16 nt, Human
guacagucuuguauua

SEQ ID NO: 1905016 - RNA, 14 nt, Human
guacaguuuuauuu

SEQ ID NO: 1905017 - RNA, 16 nt, Human
guacagacaacaaacc

SEQ ID NO: 1905018 - RNA, 15 nt, Human
guacagacagaaaaa

SEQ ID NO: 1905019 - RNA, 21 nt, Human
guacacuguuucaaacuuuac

SEQ ID NO: 1905020 - RNA, 20 nt, Human
guacacuguuucaaacuuua

SEQ ID NO: 1905021 - RNA, 19 nt, Human
guacacuguuucaaacuuu

SEQ ID NO: 1905022 - RNA, 12 nt, Human
guacagagccca

SEQ ID NO: 1905023 - RNA, 18 nt, Human
guacagagcccacgcccc

SEQ ID NO: 1905024 - RNA, 22 nt, Human
guacagagcccacgcccccacu

SEQ ID NO: 1905025 - RNA, 20 nt, Human
guacagcaaggagauuuaca

SEQ ID NO: 1905026 - RNA, 18 nt, Human
guacaggaugcuuugguu

SEQ ID NO: 1905027 - RNA, 23 nt, Human
gguuuugccauguuggccaggcu

SEQ ID NO: 1905028 - RNA, 14 nt, Human
gguuuuguuccccu

SEQ ID NO: 1905029 - RNA, 22 nt, Human
gguuuuguuccccuccuccacu

SEQ ID NO: 1905030 - RNA, 19 nt, Human
gguuuuguuccccuccucc

SEQ ID NO: 1905031 - RNA, 15 nt, Human
gguuuuuauuaguac

SEQ ID NO: 1905032 - RNA, 15 nt, Human
gguuuucuguucuuu

SEQ ID NO: 1905033 - RNA, 15 nt, Human
gguuuucuguuacuu

SEQ ID NO: 1905034 - RNA, 13 nt, Human
gguuuucuguucu

SEQ ID NO: 1905035 - RNA, 12 nt, Human
gguuuucuguuc

SEQ ID NO: 1905036 - RNA, 17 nt, Human
gguuuacagucuauuug

SEQ ID NO: 1905037 - RNA, 20 nt, Human
gguuuucacauuggaaacaa

SEQ ID NO: 1905038 - RNA, 10 nt, Human
gguuuuccug

SEQ ID NO: 1905039 - RNA, 12 nt, Human
guaaaaauacaa

SEQ ID NO: 1905040 - RNA, 18 nt, Human
guaaaaacaaagaaauua

SEQ ID NO: 1905041 - RNA, 20 nt, Human
guaaaaacaaagaaauuaug

SEQ ID NO: 1905042 - RNA, 15 nt, Human
guaaaagacuuuuuu

SEQ ID NO: 1905043 - RNA, 19 nt, Human
guaaaagaaagaaagaaaa

SEQ ID NO: 1905044 - RNA, 21 nt, Human
gguucaagcgauucuucugcu

SEQ ID NO: 1905045 - RNA, 17 nt, Human
gguggccucccaacuca

SEQ ID NO: 1905046 - RNA, 13 nt, Human
gguggccucccaa

SEQ ID NO: 1905047 - RNA, 19 nt, Human
gguggccuaagaguugagc

SEQ ID NO: 1905048 - RNA, 14 nt, Human
gguugaagcaccaa

SEQ ID NO: 1905049 - RNA, 12 nt, Human
gguucagcuugu

SEQ ID NO: 1905050 - RNA, 23 nt, Human
gguucaagcgauucuucugcuuc

SEQ ID NO: 1905051 - RNA, 22 nt, Human
gguucaagcgauucuucugcuu

SEQ ID NO: 1905052 - RNA, 20 nt, Human
gguucacugcaaccuccgcc

SEQ ID NO: 1905053 - RNA, 13 nt, Human
gguuggugggggc

SEQ ID NO: 1905054 - RNA, 13 nt, Human
gguuuaagcuguu

SEQ ID NO: 1905055 - RNA, 18 nt, Human
gguuggcaaaaaggcagg

SEQ ID NO: 1905056 - RNA, 19 nt, Human
gguugcuguuuuccucccu

SEQ ID NO: 1905057 - RNA, 20 nt, Human
gguugcuguuuuccucccuu

SEQ ID NO: 1905058 - RNA, 21 nt, Human
gguugcuguuuuccucccuuc

SEQ ID NO: 1905059 - RNA, 14 nt, Human
gguugggcuggugu

SEQ ID NO: 1905060 - RNA, 18 nt, Human
gguugcuguuuuccuccc

SEQ ID NO: 1905061 - RNA, 20 nt, Human
guaaaugggggugcauuuga

SEQ ID NO: 1905062 - RNA, 19 nt, Human
guaaaugggggugcauuug

SEQ ID NO: 1905063 - RNA, 18 nt, Human
guaaaugggggugcauuu

SEQ ID NO: 1905064 - RNA, 14 nt, Human
guaaaucuuuuaca

SEQ ID NO: 1905065 - RNA, 22 nt, Human
guaaauuaacuuuuauaaacuu

SEQ ID NO: 1905066 - RNA, 21 nt, Human
guaaauuaacuuuuauaaacu

SEQ ID NO: 1905067 - RNA, 17 nt, Human
guaaauuaacuuuuaua

SEQ ID NO: 1905068 - RNA, 16 nt, Human
guaaauuaacuuuuau

SEQ ID NO: 1905069 - RNA, 15 nt, Human
guaaauuaacuuuua

SEQ ID NO: 1905070 - RNA, 16 nt, Human
guaaaguccccagaga

SEQ ID NO: 1905071 - RNA, 23 nt, Human
guaaaguccccagagaaagcgca

SEQ ID NO: 1905072 - RNA, 13 nt, Human
guaaauaaaaaga

SEQ ID NO: 1905073 - RNA, 18 nt, Human
guaaaguccccagagaaa

SEQ ID NO: 1905074 - RNA, 13 nt, Human
guaaauaaagccc

SEQ ID NO: 1905075 - RNA, 14 nt, Human
guaaauaaagcccu

SEQ ID NO: 1905076 - RNA, 15 nt, Human
guaaauaaagcccug

SEQ ID NO: 1905077 - RNA, 16 nt, Human
guaaauaaaggaacca

SEQ ID NO: 1905078 - RNA, 18 nt, Human
guaaggaauaccuguccc

SEQ ID NO: 1905079 - RNA, 20 nt, Human
guaaggaauaccuguccccc

SEQ ID NO: 1905080 - RNA, 21 nt, Human
guaaggaauaccugucccccu

SEQ ID NO: 1905081 - RNA, 23 nt, Human
guaaggaauaccugucccccuga

SEQ ID NO: 1905082 - RNA, 13 nt, Human
guaaggaaugauu

SEQ ID NO: 1905083 - RNA, 22 nt, Human
guaaguauucuuauuuaaugaa

SEQ ID NO: 1905084 - RNA, 23 nt, Human
guaaauuaacuuuuauaaacuuu

SEQ ID NO: 1905085 - RNA, 18 nt, Human
guaacuucuuauggaauu

SEQ ID NO: 1905086 - RNA, 20 nt, Human
guaacuucuuauggaauuga

SEQ ID NO: 1905087 - RNA, 21 nt, Human
guaacuucuuauggaauugau

SEQ ID NO: 1905088 - RNA, 19 nt, Human
guaagaucguucucugccu

SEQ ID NO: 1905089 - RNA, 13 nt, Human
ggugaaggcuggc

SEQ ID NO: 1905090 - RNA, 18 nt, Human
ggugaagugaagacaaug

SEQ ID NO: 1905091 - RNA, 19 nt, Human
ggucugaggaauccagacc

SEQ ID NO: 1905092 - RNA, 14 nt, Human
ggugaacauugcaa

SEQ ID NO: 1905093 - RNA, 16 nt, Human
ggugaacuugguuccc

SEQ ID NO: 1905094 - RNA, 16 nt, Human
ggucugacccacugcu

SEQ ID NO: 1905095 - RNA, 15 nt, Human
ggucugacccacugc

SEQ ID NO: 1905096 - RNA, 16 nt, Human
ggucucacucugucgc

SEQ ID NO: 1905097 - RNA, 12 nt, Human
ggucucacucug

SEQ ID NO: 1905098 - RNA, 21 nt, Human
ggucucacuauguugcccagg

SEQ ID NO: 1905099 - RNA, 22 nt, Human
ggucucacuauguugcccaggc

SEQ ID NO: 1905100 - RNA, 23 nt, Human
gguccuagaaauuccccacccug

SEQ ID NO: 1905101 - RNA, 17 nt, Human
gguccuacccauccccg

SEQ ID NO: 1905102 - RNA, 20 nt, Human
gguccuacccauccccgcag

SEQ ID NO: 1905103 - RNA, 22 nt, Human
ggucccugguggcagcucaccu

SEQ ID NO: 1905104 - RNA, 18 nt, Human
ggucccuaauaaagcugu

SEQ ID NO: 1905105 - RNA, 14 nt, Human
ggucccugguggca

SEQ ID NO: 1905106 - RNA, 12 nt, Human
ggucccuaauaa

SEQ ID NO: 1905107 - RNA, 13 nt, Human
ggucccuaauaaa

SEQ ID NO: 1905108 - RNA, 16 nt, Human
ggucccuaauaaagcu

SEQ ID NO: 1905109 - RNA, 17 nt, Human
ggucccuaauaaagcug

SEQ ID NO: 1905110 - RNA, 17 nt, Human
ggugaggggcuggcacu

SEQ ID NO: 1905111 - RNA, 21 nt, Human
ggugaccucugccugaaguca

SEQ ID NO: 1905112 - RNA, 16 nt, Human
ggugaccucugccuga

SEQ ID NO: 1905113 - RNA, 14 nt, Human
ggugaccucugccu

SEQ ID NO: 1905114 - RNA, 20 nt, Human
ggugauauccauucuuucug

SEQ ID NO: 1905115 - RNA, 15 nt, Human
ggugauauccauucu

SEQ ID NO: 1905116 - RNA, 13 nt, Human
ggugccccaggac

SEQ ID NO: 1905117 - RNA, 14 nt, Human
ggugccccaggacc

SEQ ID NO: 1905118 - RNA, 15 nt, Human
ggugccccaggacca

SEQ ID NO: 1905119 - RNA, 16 nt, Human
ggugccccaggaccag

SEQ ID NO: 1905120 - RNA, 17 nt, Human
ggugccccaggaccagc

SEQ ID NO: 1905121 - RNA, 20 nt, Human
ggugccccaggaccagcuca

SEQ ID NO: 1905122 - RNA, 21 nt, Human
ggugccccaggaccagcucag

SEQ ID NO: 1905123 - RNA, 22 nt, Human
ggugccccaggaccagcucagg

SEQ ID NO: 1905124 - RNA, 23 nt, Human
ggugccccaggaccagcucagga

SEQ ID NO: 1905125 - RNA, 13 nt, Human
gguggcagcugcg

SEQ ID NO: 1905126 - RNA, 12 nt, Human
gguggcagcugc

SEQ ID NO: 1905127 - RNA, 11 nt, Human
gguggcagcug

SEQ ID NO: 1905128 - RNA, 13 nt, Human
gguggcagcucac

SEQ ID NO: 1905129 - RNA, 23 nt, Human
gguggcagcugcgguccacccag

SEQ ID NO: 1905130 - RNA, 15 nt, Human
gguggcagcugcggu

SEQ ID NO: 1905131 - RNA, 16 nt, Human
gguggcagugggagcu

SEQ ID NO: 1905132 - RNA, 15 nt, Human
ggugcgaucuggguu

SEQ ID NO: 1905133 - RNA, 23 nt, Human
ggugcuaucucccccagccccau

SEQ ID NO: 1905134 - RNA, 22 nt, Human
ggugcuaucucccccagcccca

SEQ ID NO: 1905135 - RNA, 19 nt, Human
gguaccccuuucuggcucu

SEQ ID NO: 1905136 - RNA, 17 nt, Human
gguacccacugcucugg

SEQ ID NO: 1905137 - RNA, 20 nt, Human
ggguuucaccauguuggcca

SEQ ID NO: 1905138 - RNA, 15 nt, Human
ggguugggcuggugu

SEQ ID NO: 1905139 - RNA, 21 nt, Human
gguacuuguggacacagcucu

SEQ ID NO: 1905140 - RNA, 22 nt, Human
gguacuuguggacacagcucuu

SEQ ID NO: 1905141 - RNA, 19 nt, Human
ggguuggccccugcccggc

SEQ ID NO: 1905142 - RNA, 16 nt, Human
ggguuggccccugccc

SEQ ID NO: 1905143 - RNA, 20 nt, Human
ggguucugccugccagcugc

SEQ ID NO: 1905144 - RNA, 21 nt, Human
ggguucugccugccagcugca

SEQ ID NO: 1905145 - RNA, 23 nt, Human
ggguucccuuuuuuggcugcuga

SEQ ID NO: 1905146 - RNA, 22 nt, Human
ggguucuacccaggugcuagga

SEQ ID NO: 1905147 - RNA, 17 nt, Human
ggguucuacccaggugc

SEQ ID NO: 1905148 - RNA, 19 nt, Human
ggguuccagcaccacacuc

SEQ ID NO: 1905149 - RNA, 19 nt, Human
gggugcugggccccugccu

SEQ ID NO: 1905150 - RNA, 18 nt, Human
gggugcugggccccugcc

SEQ ID NO: 1905151 - RNA, 16 nt, Human
ggucagagccugcagu

SEQ ID NO: 1905152 - RNA, 15 nt, Human
ggucagagccugcag

SEQ ID NO: 1905153 - RNA, 14 nt, Human
ggucagagccugca

SEQ ID NO: 1905154 - RNA, 13 nt, Human
ggucagagccugc

SEQ ID NO: 1905155 - RNA, 12 nt, Human
ggucagagccug

SEQ ID NO: 1905156 - RNA, 22 nt, Human
ggucacucuggcagcucagaga

SEQ ID NO: 1905157 - RNA, 16 nt, Human
ggucacucuggcagcu

SEQ ID NO: 1905158 - RNA, 20 nt, Human
ggucacucuggcagcucaga

SEQ ID NO: 1905159 - RNA, 14 nt, Human
ggucacacacugau

SEQ ID NO: 1905160 - RNA, 14 nt, Human
gguagaccugucuc

SEQ ID NO: 1905161 - RNA, 19 nt, Human
gguagaccugucuccuggc

SEQ ID NO: 1905162 - RNA, 22 nt, Human
gguagaccugucuccuggcggu

SEQ ID NO: 1905163 - RNA, 13 nt, Human
ggucccccuucca

SEQ ID NO: 1905164 - RNA, 18 nt, Human
ggucccccuuccauggac

SEQ ID NO: 1905165 - RNA, 23 nt, Human
ggucccccuuccauggacuuugu

SEQ ID NO: 1905166 - RNA, 14 nt, Human
ggucccacucaguc

SEQ ID NO: 1905167 - RNA, 12 nt, Human
ggucccacucag

SEQ ID NO: 1905168 - RNA, 22 nt, Human
ggucccacucaguccauagcag

SEQ ID NO: 1905169 - RNA, 22 nt, Human
ggucccaccccacacacgccag

SEQ ID NO: 1905170 - RNA, 23 nt, Human
ggucagcccaaaccaccagaagc

SEQ ID NO: 1905171 - RNA, 13 nt, Human
ggucagccagggc

SEQ ID NO: 1905172 - RNA, 19 nt, Human
ggucagccagggccugcga

SEQ ID NO: 1905173 - RNA, 16 nt, Human
gggccuggcagcucag

SEQ ID NO: 1905174 - RNA, 12 nt, Human
gggccuggcuca

SEQ ID NO: 1905175 - RNA, 12 nt, Human
gggccuggccug

SEQ ID NO: 1905176 - RNA, 18 nt, Human
gggccuggucguuuucaa

SEQ ID NO: 1905177 - RNA, 14 nt, Human
gggccuggcucagg

SEQ ID NO: 1905178 - RNA, 16 nt, Human
gggccuggcucaggug

SEQ ID NO: 1905179 - RNA, 13 nt, Human
ggcucccaggaca

SEQ ID NO: 1905180 - RNA, 16 nt, Human
gggcccggccagccau

SEQ ID NO: 1905181 - RNA, 13 nt, Human
gggcccggccagc

SEQ ID NO: 1905182 - RNA, 13 nt, Human
gggcucccuuccc

SEQ ID NO: 1905183 - RNA, 16 nt, Human
gggcgcgguggcucac

SEQ ID NO: 1905184 - RNA, 14 nt, Human
gggcucccuuccca

SEQ ID NO: 1905185 - RNA, 17 nt, Human
gggcucccuucccaccu

SEQ ID NO: 1905186 - RNA, 18 nt, Human
gggcucccuucccaccuc

SEQ ID NO: 1905187 - RNA, 23 nt, Human
gggcucccuucccaccucucuca

SEQ ID NO: 1905188 - RNA, 18 nt, Human
gggcgaucgcggcggagc

SEQ ID NO: 1905189 - RNA, 22 nt, Human
gggcgaucgcggcggagcuggc

SEQ ID NO: 1905190 - RNA, 22 nt, Human
gggcgccgcaaaccacacugga

SEQ ID NO: 1905191 - RNA, 16 nt, Human
gggcugaggugggagg

SEQ ID NO: 1905192 - RNA, 14 nt, Human
gggcugcaccggcu

SEQ ID NO: 1905193 - RNA, 23 nt, Human
gggcugguucuguaauugugugu

SEQ ID NO: 1905194 - RNA, 18 nt, Human
gggcuguaaaaugcauga

SEQ ID NO: 1905195 - RNA, 16 nt, Human
gggcugucaucugugc

SEQ ID NO: 1905196 - RNA, 14 nt, Human
gggcuucaguggca

SEQ ID NO: 1905197 - RNA, 16 nt, Human
gggcuuacggcccugg

SEQ ID NO: 1905198 - RNA, 18 nt, Human
gggcuuacggcccuggcc

SEQ ID NO: 1905199 - RNA, 17 nt, Human
gggcugucaucugugca

SEQ ID NO: 1905200 - RNA, 15 nt, Human
gggcucuucucauuu

SEQ ID NO: 1905201 - RNA, 12 nt, Human
gggcucuucuca

SEQ ID NO: 1905202 - RNA, 13 nt, Human
gggcucugccucc

SEQ ID NO: 1905203 - RNA, 15 nt, Human
gggcucugccuccca

SEQ ID NO: 1905204 - RNA, 16 nt, Human
gggcucugccucccau

SEQ ID NO: 1905205 - RNA, 17 nt, Human
gggcucugccucccauc

SEQ ID NO: 1905206 - RNA, 20 nt, Human
gggcucugccucccaucacc

SEQ ID NO: 1905207 - RNA, 23 nt, Human
gggcucucauguuuucaacugcc

SEQ ID NO: 1905208 - RNA, 17 nt, Human
ggggcuggcacugacug

SEQ ID NO: 1905209 - RNA, 13 nt, Human
ggggcugggacau

SEQ ID NO: 1905210 - RNA, 16 nt, Human
ggggcugggcagagga

SEQ ID NO: 1905211 - RNA, 17 nt, Human
ggggcugggcagaggaa

SEQ ID NO: 1905212 - RNA, 17 nt, Human
gggggaacucagaucca

SEQ ID NO: 1905213 - RNA, 22 nt, Human
ggggcuuagggucggaacccaa

SEQ ID NO: 1905214 - RNA, 14 nt, Human
ggggcugccagggg

SEQ ID NO: 1905215 - RNA, 23 nt, Human
ggguacuuguggacacagcucuu

SEQ ID NO: 1905216 - RNA, 23 nt, Human
ggguagagcggagaaaggaaggg

SEQ ID NO: 1905217 - RNA, 22 nt, Human
ggguacuuguggacacagcucu

SEQ ID NO: 1905218 - RNA, 19 nt, Human
ggguacuuguggacacagc

SEQ ID NO: 1905219 - RNA, 15 nt, Human
ggguacccacugcuc

SEQ ID NO: 1905220 - RNA, 13 nt, Human
ggguacccacugc

SEQ ID NO: 1905221 - RNA, 18 nt, Human
ggguacccacugcucugg

SEQ ID NO: 1905222 - RNA, 23 nt, Human
gggguucccuuuuuuggcugcug

SEQ ID NO: 1905223 - RNA, 14 nt, Human
ggggugaggagcug

SEQ ID NO: 1905224 - RNA, 15 nt, Human
ggggugaggagcugg

SEQ ID NO: 1905225 - RNA, 16 nt, Human
ggggugcccacaggcc

SEQ ID NO: 1905226 - RNA, 17 nt, Human
ggggaucacagccucug

SEQ ID NO: 1905227 - RNA, 13 nt, Human
ggggauagaugug

SEQ ID NO: 1905228 - RNA, 21 nt, Human
ggggaucccucccccccaugc

SEQ ID NO: 1905229 - RNA, 22 nt, Human
ggggaucaucugccgugccugg

SEQ ID NO: 1905230 - RNA, 23 nt, Human
ggggaucccucccccccaugcac

SEQ ID NO: 1905231 - RNA, 21 nt, Human
gggcuuggggaccagagcugc

SEQ ID NO: 1905232 - RNA, 11 nt, Human
ggggagcccac

SEQ ID NO: 1905233 - RNA, 19 nt, Human
ggggagcccacuguccugg

SEQ ID NO: 1905234 - RNA, 13 nt, Human
ggggaguggccac

SEQ ID NO: 1905235 - RNA, 17 nt, Human
ggggaguuaagaccugg

SEQ ID NO: 1905236 - RNA, 21 nt, Human
ggggaguuaagaccuggcagc

SEQ ID NO: 1905237 - RNA, 20 nt, Human
ggggagggugacaguggccg

SEQ ID NO: 1905238 - RNA, 22 nt, Human
ggggagccccuucugcucagcu

SEQ ID NO: 1905239 - RNA, 18 nt, Human
gggcuucaguggcagcug

SEQ ID NO: 1905240 - RNA, 17 nt, Human
gggcuucaguggcagcu

SEQ ID NO: 1905241 - RNA, 16 nt, Human
gggcuucaguggcagc

SEQ ID NO: 1905242 - RNA, 15 nt, Human
gggcuucaguggcag

SEQ ID NO: 1905243 - RNA, 20 nt, Human
gggcuucaguggcagcugcu

SEQ ID NO: 1905244 - RNA, 19 nt, Human
gggcuucaguggcagcugc

SEQ ID NO: 1905245 - RNA, 19 nt, Human
gggcuucauccuccucaga

SEQ ID NO: 1905246 - RNA, 13 nt, Human
gggcuucauacac

SEQ ID NO: 1905247 - RNA, 20 nt, Human
gggcuucauccuccucagau

SEQ ID NO: 1905248 - RNA, 19 nt, Human
gggcuucauacacaugaga

SEQ ID NO: 1905249 - RNA, 20 nt, Human
gggcuuggggaccagagcug

SEQ ID NO: 1905250 - RNA, 11 nt, Human
guccagaagga

SEQ ID NO: 1905251 - RNA, 14 nt, Human
guccagaaggagac

SEQ ID NO: 1905252 - RNA, 16 nt, Human
guccagaaggagacag

SEQ ID NO: 1905253 - RNA, 17 nt, Human
guccagaaggagacagg

SEQ ID NO: 1905254 - RNA, 19 nt, Human
guccagaaggagacaggca

SEQ ID NO: 1905255 - RNA, 20 nt, Human
guccagaaggagacaggcag

SEQ ID NO: 1905256 - RNA, 17 nt, Human
guccagcugagcgccag

SEQ ID NO: 1905257 - RNA, 14 nt, Human
guccagcuccaacc

SEQ ID NO: 1905258 - RNA, 16 nt, Human
guccacccaggagccc

SEQ ID NO: 1905259 - RNA, 15 nt, Human
guccacccaggagcc

SEQ ID NO: 1905260 - RNA, 14 nt, Human
guccacccaggagc

SEQ ID NO: 1905261 - RNA, 16 nt, Human
gucaugcccuccucuc

SEQ ID NO: 1905262 - RNA, 17 nt, Human
gucaugcccuccucucc

SEQ ID NO: 1905263 - RNA, 18 nt, Human
gucaugcccuccucuccc

SEQ ID NO: 1905264 - RNA, 15 nt, Human
gucccacucagucca

SEQ ID NO: 1905265 - RNA, 14 nt, Human
gucccacucagucc

SEQ ID NO: 1905266 - RNA, 17 nt, Human
guccaggauuccucuuu

SEQ ID NO: 1905267 - RNA, 21 nt, Human
guccagggagcauuuuccucc

SEQ ID NO: 1905268 - RNA, 17 nt, Human
gucccagauacuugggg

SEQ ID NO: 1905269 - RNA, 22 nt, Human
gucccagauuggcucacacuga

SEQ ID NO: 1905270 - RNA, 21 nt, Human
gucccagauuggcucacacug

SEQ ID NO: 1905271 - RNA, 17 nt, Human
gucccagauuggcucac

SEQ ID NO: 1905272 - RNA, 20 nt, Human
gucccagaaugccuccugca

SEQ ID NO: 1905273 - RNA, 21 nt, Human
gucauauaagauucauauuua

SEQ ID NO: 1905274 - RNA, 19 nt, Human
gucauagauguuuccuugc

SEQ ID NO: 1905275 - RNA, 22 nt, Human
gucauaacuagaacugaauuuu

SEQ ID NO: 1905276 - RNA, 20 nt, Human
gucauacuaucuacucuccu

SEQ ID NO: 1905277 - RNA, 21 nt, Human
gucauacuaucuacucuccuc

SEQ ID NO: 1905278 - RNA, 22 nt, Human
gucauacuaucuacucuccuca

SEQ ID NO: 1905279 - RNA, 17 nt, Human
gucauaacuagaacuga

SEQ ID NO: 1905280 - RNA, 23 nt, Human
gucagcccaaaccaccagaagcc

SEQ ID NO: 1905281 - RNA, 22 nt, Human
gucagcccaaaccaccagaagc

SEQ ID NO: 1905282 - RNA, 14 nt, Human
gucagccagggccu

SEQ ID NO: 1905283 - RNA, 16 nt, Human
gucagccagggccugc

SEQ ID NO: 1905284 - RNA, 10 nt, Human
gucagccagg

SEQ ID NO: 1905285 - RNA, 13 nt, Human
gucagccagggcc

SEQ ID NO: 1905286 - RNA, 19 nt, Human
gucaagugaaaaaggagga

SEQ ID NO: 1905287 - RNA, 18 nt, Human
gucaaggcugcuuagaau

SEQ ID NO: 1905288 - RNA, 16 nt, Human
gucaagugaaaaagga

SEQ ID NO: 1905289 - RNA, 18 nt, Human
gucaagugaaaaaggagg

SEQ ID NO: 1905290 - RNA, 13 nt, Human
gucaagcuccucc

SEQ ID NO: 1905291 - RNA, 15 nt, Human
gucaagcuccuccuc

SEQ ID NO: 1905292 - RNA, 17 nt, Human
gucaagcuccuccuccc

SEQ ID NO: 1905293 - RNA, 19 nt, Human
gucaagcuccuccucccug

SEQ ID NO: 1905294 - RNA, 20 nt, Human
gucaagcuccuccucccugc

SEQ ID NO: 1905295 - RNA, 21 nt, Human
gucaagcuccuccucccugca

SEQ ID NO: 1905296 - RNA, 19 nt, Human
gucaagagggucugaggaa

SEQ ID NO: 1905297 - RNA, 18 nt, Human
gucaagagggucugagga

SEQ ID NO: 1905298 - RNA, 14 nt, Human
guauuuguuaaugg

SEQ ID NO: 1905299 - RNA, 20 nt, Human
guauuugggaagugaagacu

SEQ ID NO: 1905300 - RNA, 20 nt, Human
gucaccugaagacucauucu

SEQ ID NO: 1905301 - RNA, 13 nt, Human
gucaccccggcca

SEQ ID NO: 1905302 - RNA, 15 nt, Human
gucaccccggccacc

SEQ ID NO: 1905303 - RNA, 16 nt, Human
gucaauuacaggaagu

SEQ ID NO: 1905304 - RNA, 15 nt, Human
gucaauguacuagga

SEQ ID NO: 1905305 - RNA, 13 nt, Human
gucaauuacagga

SEQ ID NO: 1905306 - RNA, 15 nt, Human
gucaauuacaggaag

SEQ ID NO: 1905307 - RNA, 18 nt, Human
guauucaauauccuuugc

SEQ ID NO: 1905308 - RNA, 14 nt, Human
guauuauaccuuuu

SEQ ID NO: 1905309 - RNA, 21 nt, Human
guauuagaguuucaaccauga

SEQ ID NO: 1905310 - RNA, 15 nt, Human
guauuauguguguuu

SEQ ID NO: 1905311 - RNA, 15 nt, Human
guauuacuucugcua

SEQ ID NO: 1905312 - RNA, 14 nt, Human
guauuacuucugcu

SEQ ID NO: 1905313 - RNA, 13 nt, Human
guauuacuucugc

SEQ ID NO: 1905314 - RNA, 22 nt, Human
guauuacaguggggaaugaaga

SEQ ID NO: 1905315 - RNA, 15 nt, Human
guagagugggagcug

SEQ ID NO: 1905316 - RNA, 20 nt, Human
guauuacaguggggaaugaa

SEQ ID NO: 1905317 - RNA, 13 nt, Human
guagagugggagc

SEQ ID NO: 1905318 - RNA, 15 nt, Human
guccucccagcuccu

SEQ ID NO: 1905319 - RNA, 21 nt, Human
guccucccaauuucagacucc

SEQ ID NO: 1905320 - RNA, 12 nt, Human
guccucccaucu

SEQ ID NO: 1905321 - RNA, 13 nt, Human
guccucccaucuc

SEQ ID NO: 1905322 - RNA, 14 nt, Human
guccucccaucuca

SEQ ID NO: 1905323 - RNA, 23 nt, Human
guccucccaucucacacaugagc

SEQ ID NO: 1905324 - RNA, 17 nt, Human
guccuggcaugggaaug

SEQ ID NO: 1905325 - RNA, 15 nt, Human
guccuggccauccca

SEQ ID NO: 1905326 - RNA, 16 nt, Human
guccuggccaucccac

SEQ ID NO: 1905327 - RNA, 17 nt, Human
guccuggccaucccaca

SEQ ID NO: 1905328 - RNA, 18 nt, Human
guccuggccaucccacaa

SEQ ID NO: 1905329 - RNA, 16 nt, Human
guccugggagugagcu

SEQ ID NO: 1905330 - RNA, 15 nt, Human
guccugggagugagc

SEQ ID NO: 1905331 - RNA, 21 nt, Human
guccuguaguugcguggacuc

SEQ ID NO: 1905332 - RNA, 23 nt, Human
guccuguaguugcguggacucug

SEQ ID NO: 1905333 - RNA, 18 nt, Human
guccugggagugagcugg

SEQ ID NO: 1905334 - RNA, 17 nt, Human
guccugggagugagcug

SEQ ID NO: 1905335 - RNA, 19 nt, Human
guccugggagugagcuggu

SEQ ID NO: 1905336 - RNA, 13 nt, Human
guccugggccugc

SEQ ID NO: 1905337 - RNA, 14 nt, Human
guccugggccugca

SEQ ID NO: 1905338 - RNA, 17 nt, Human
guccugggccugcagaa

SEQ ID NO: 1905339 - RNA, 12 nt, Human
gucccagugccg

SEQ ID NO: 1905340 - RNA, 15 nt, Human
gucccuggggcuagg

SEQ ID NO: 1905341 - RNA, 13 nt, Human
guccuacucugug

SEQ ID NO: 1905342 - RNA, 17 nt, Human
gucccugguggcagcuc

SEQ ID NO: 1905343 - RNA, 16 nt, Human
gucccugguggcagcu

SEQ ID NO: 1905344 - RNA, 22 nt, Human
gucccuggggcuagggggagcc

SEQ ID NO: 1905345 - RNA, 23 nt, Human
guccuacucugugucaggugggg

SEQ ID NO: 1905346 - RNA, 15 nt, Human
guccuacucuguguc

SEQ ID NO: 1905347 - RNA, 23 nt, Human
guccuagaaauuccccacccuga

SEQ ID NO: 1905348 - RNA, 13 nt, Human
guccucacacuca

SEQ ID NO: 1905349 - RNA, 12 nt, Human
guccucagccuu

SEQ ID NO: 1905350 - RNA, 14 nt, Human
guccucagccuugc

SEQ ID NO: 1905351 - RNA, 16 nt, Human
guccucagccuugcca

SEQ ID NO: 1905352 - RNA, 20 nt, Human
guccucagccuugccagaga

SEQ ID NO: 1905353 - RNA, 21 nt, Human
guccucagccuugccagagau

SEQ ID NO: 1905354 - RNA, 14 nt, Human
guccucagguggcc

SEQ ID NO: 1905355 - RNA, 15 nt, Human
guccucagguggcca

SEQ ID NO: 1905356 - RNA, 21 nt, Human
guccuccaacaccaagcacag

SEQ ID NO: 1905357 - RNA, 22 nt, Human
guccuccaacaccaagcacagc

SEQ ID NO: 1905358 - RNA, 14 nt, Human
guccuccaagccag

SEQ ID NO: 1905359 - RNA, 16 nt, Human
guccucagguggccau

SEQ ID NO: 1905360 - RNA, 17 nt, Human
guccucagguggccaug

SEQ ID NO: 1905361 - RNA, 23 nt, Human
guccucagguggccaugccucag

SEQ ID NO: 1905362 - RNA, 22 nt, Human
gucucacuugugcaguguugac

SEQ ID NO: 1905363 - RNA, 23 nt, Human
gucucacuguugcccaggcuggc

SEQ ID NO: 1905364 - RNA, 22 nt, Human
gucucacuguugcccaggcugg

SEQ ID NO: 1905365 - RNA, 21 nt, Human
gucucacuguugcccaggcug

SEQ ID NO: 1905366 - RNA, 20 nt, Human
gucucacuguugcccaggcu

SEQ ID NO: 1905367 - RNA, 19 nt, Human
gucucacuguugcccaggc

SEQ ID NO: 1905368 - RNA, 18 nt, Human
gucucacuguugcccagg

SEQ ID NO: 1905369 - RNA, 17 nt, Human
gucucacuguugcccag

SEQ ID NO: 1905370 - RNA, 16 nt, Human
gucucacuguugccca

SEQ ID NO: 1905371 - RNA, 23 nt, Human
gucucacuauguugcccaggcag

SEQ ID NO: 1905372 - RNA, 13 nt, Human
gucucacuguugc

SEQ ID NO: 1905373 - RNA, 21 nt, Human
gucucacuauguugcccaggc

SEQ ID NO: 1905374 - RNA, 20 nt, Human
gucucacuauguugcccagg

SEQ ID NO: 1905375 - RNA, 15 nt, Human
guccuuaccagcaga

SEQ ID NO: 1905376 - RNA, 16 nt, Human
guccuuaccagcagag

SEQ ID NO: 1905377 - RNA, 17 nt, Human
guccuuaccagcagagc

SEQ ID NO: 1905378 - RNA, 16 nt, Human
gucuaaacaaugcuga

SEQ ID NO: 1905379 - RNA, 15 nt, Human
gucuacacugugcug

SEQ ID NO: 1905380 - RNA, 21 nt, Human
gucuaaacaaugcugauuugg

SEQ ID NO: 1905381 - RNA, 21 nt, Human
gucugaggaauccagacccgg

SEQ ID NO: 1905382 - RNA, 14 nt, Human
gucugagugaaccu

SEQ ID NO: 1905383 - RNA, 15 nt, Human
gucugaguggcuuca

SEQ ID NO: 1905384 - RNA, 23 nt, Human
gucugaguggcuucacuccugcu

SEQ ID NO: 1905385 - RNA, 19 nt, Human
gucugauucccaagcucug

SEQ ID NO: 1905386 - RNA, 18 nt, Human
gucugauucccaagcucu

SEQ ID NO: 1905387 - RNA, 17 nt, Human
gucugauucccaagcuc

SEQ ID NO: 1905388 - RNA, 21 nt, Human
gucugauucccaagcucugcu

SEQ ID NO: 1905389 - RNA, 20 nt, Human
gucugauucccaagcucugc

SEQ ID NO: 1905390 - RNA, 20 nt, Human
gucugcauuucgguggcuag

SEQ ID NO: 1905391 - RNA, 21 nt, Human
gucugcauuucgguggcuagu

SEQ ID NO: 1905392 - RNA, 19 nt, Human
gucugaggaauccagaccc

SEQ ID NO: 1905393 - RNA, 18 nt, Human
gucugaggaauccagacc

SEQ ID NO: 1905394 - RNA, 15 nt, Human
gucugacccacugcu

SEQ ID NO: 1905395 - RNA, 14 nt, Human
gucugacccacugc

SEQ ID NO: 1905396 - RNA, 13 nt, Human
gucugacccacug

SEQ ID NO: 1905397 - RNA, 13 nt, Human
gucucgugguagg

SEQ ID NO: 1905398 - RNA, 15 nt, Human
gucucugugagacuc

SEQ ID NO: 1905399 - RNA, 17 nt, Human
gugccauagucacaugg

SEQ ID NO: 1905400 - RNA, 20 nt, Human
gugcccacaggaucagucug

SEQ ID NO: 1905401 - RNA, 13 nt, Human
gugcccacaggcc

SEQ ID NO: 1905402 - RNA, 21 nt, Human
gugcccacaggccgcccugcg

SEQ ID NO: 1905403 - RNA, 12 nt, Human
gugccccaggac

SEQ ID NO: 1905404 - RNA, 14 nt, Human
gugccccaggacca

SEQ ID NO: 1905405 - RNA, 15 nt, Human
gugccccaggaccag

SEQ ID NO: 1905406 - RNA, 19 nt, Human
gugccccaggaccagcuca

SEQ ID NO: 1905407 - RNA, 21 nt, Human
gugccccaggaccagcucagg

SEQ ID NO: 1905408 - RNA, 19 nt, Human
gugcccccacugaccagaa

SEQ ID NO: 1905409 - RNA, 13 nt, Human
gugcccccacuga

SEQ ID NO: 1905410 - RNA, 15 nt, Human
gugcccccacugacc

SEQ ID NO: 1905411 - RNA, 18 nt, Human
gugcccccacugaccaga

SEQ ID NO: 1905412 - RNA, 19 nt, Human
gugcauaaguuaacuucca

SEQ ID NO: 1905413 - RNA, 21 nt, Human
gugcagguagaccugucuccu

SEQ ID NO: 1905414 - RNA, 15 nt, Human
gugcagguagaccug

SEQ ID NO: 1905415 - RNA, 17 nt, Human
gugcagggacaaagagg

SEQ ID NO: 1905416 - RNA, 22 nt, Human
gugcagguagaccugucuccug

SEQ ID NO: 1905417 - RNA, 22 nt, Human
gugcaguaucaugcccugugca

SEQ ID NO: 1905418 - RNA, 22 nt, Human
gugcaacaagguccucugucag

SEQ ID NO: 1905419 - RNA, 22 nt, Human
gugccagguuuuuggucugacc

SEQ ID NO: 1905420 - RNA, 20 nt, Human
gugccagguuuuuggucuga

SEQ ID NO: 1905421 - RNA, 22 nt, Human
gugcaugaagguuucugaaaau

SEQ ID NO: 1905422 - RNA, 21 nt, Human
gugcauaccacuuuuguucuu

SEQ ID NO: 1905423 - RNA, 14 nt, Human
gugcauaccacuuu

SEQ ID NO: 1905424 - RNA, 13 nt, Human
gugcauaccacuu

SEQ ID NO: 1905425 - RNA, 20 nt, Human
gugauccacccaccucagcc

SEQ ID NO: 1905426 - RNA, 18 nt, Human
gugauccacccaccucag

SEQ ID NO: 1905427 - RNA, 15 nt, Human
gugauccacccaccu

SEQ ID NO: 1905428 - RNA, 13 nt, Human
gugaggccagaga

SEQ ID NO: 1905429 - RNA, 23 nt, Human
gugaggcaaugggagcugaggcc

SEQ ID NO: 1905430 - RNA, 11 nt, Human
gugaggccaga

SEQ ID NO: 1905431 - RNA, 18 nt, Human
gugauccucccaccucag

SEQ ID NO: 1905432 - RNA, 15 nt, Human
gugauccucccaccu

SEQ ID NO: 1905433 - RNA, 14 nt, Human
gugauccucccacc

SEQ ID NO: 1905434 - RNA, 22 nt, Human
gugauccucccaccucagccuc

SEQ ID NO: 1905435 - RNA, 20 nt, Human
gugauccucccaccucagcc

SEQ ID NO: 1905436 - RNA, 23 nt, Human
gugauccucccaccucagccucc

SEQ ID NO: 1905437 - RNA, 23 nt, Human
gugauucuccugccucagccucc

SEQ ID NO: 1905438 - RNA, 13 nt, Human
gugauucuccugc

SEQ ID NO: 1905439 - RNA, 17 nt, Human
gugauugacagcuuugc

SEQ ID NO: 1905440 - RNA, 21 nt, Human
gugauugacagcuuugcugcu

SEQ ID NO: 1905441 - RNA, 22 nt, Human
gugauugacagcuuugcugcug

SEQ ID NO: 1905442 - RNA, 23 nt, Human
gugauugacagcuuugcugcuga

SEQ ID NO: 1905443 - RNA, 14 nt, Human
gugauuguggaaug

SEQ ID NO: 1905444 - RNA, 19 nt, Human
gugauuguggaauggagau

SEQ ID NO: 1905445 - RNA, 23 nt, Human
gugauuguggaauggagauucag

SEQ ID NO: 1905446 - RNA, 16 nt, Human
gugauuuugcuguaga

SEQ ID NO: 1905447 - RNA, 22 nt, Human
gugauucuccugccucagccuc

SEQ ID NO: 1905448 - RNA, 20 nt, Human
gugauucuccugccucagcc

SEQ ID NO: 1905449 - RNA, 19 nt, Human
gugauucuccugccucagc

SEQ ID NO: 1905450 - RNA, 18 nt, Human
gugauucuccugccucag

SEQ ID NO: 1905451 - RNA, 17 nt, Human
gugauucuccugccuca

SEQ ID NO: 1905452 - RNA, 16 nt, Human
gugauucuccugccuc

SEQ ID NO: 1905453 - RNA, 14 nt, Human
gugauucuccugcc

SEQ ID NO: 1905454 - RNA, 24 nt, Human
gugaaacccagucacugugagcuc

SEQ ID NO: 1905455 - RNA, 14 nt, Human
gugaaaagaaaaau

SEQ ID NO: 1905456 - RNA, 23 nt, Human
gugaaaagaaaaaugagccuggc

SEQ ID NO: 1905457 - RNA, 15 nt, Human
gugaaaacggagcug

SEQ ID NO: 1905458 - RNA, 19 nt, Human
gugaaaaguccuugauugu

SEQ ID NO: 1905459 - RNA, 19 nt, Human
gugaaagaaaauaacaaua

SEQ ID NO: 1905460 - RNA, 20 nt, Human
gugaaagcaucacuugggau

SEQ ID NO: 1905461 - RNA, 12 nt, Human
gugaaacuggau

SEQ ID NO: 1905462 - RNA, 18 nt, Human
gugaaauuauucauaauu

SEQ ID NO: 1905463 - RNA, 20 nt, Human
gugaaauuauucauaauuau

SEQ ID NO: 1905464 - RNA, 12 nt, Human
gugaaauuccca

SEQ ID NO: 1905465 - RNA, 23 nt, Human
gugaaauucccaacaaacauuga

SEQ ID NO: 1905466 - RNA, 13 nt, Human
gugaaaucauuca

SEQ ID NO: 1905467 - RNA, 19 nt, Human
gugaaaggaaagagggagg

SEQ ID NO: 1905468 - RNA, 16 nt, Human
gugaaucacguaaagc

SEQ ID NO: 1905469 - RNA, 18 nt, Human
gugaaucacguaaagcua

SEQ ID NO: 1905470 - RNA, 22 nt, Human
gugagcucccaggugcagccag

SEQ ID NO: 1905471 - RNA, 16 nt, Human
gugagcuccuaagcca

SEQ ID NO: 1905472 - RNA, 14 nt, Human
gugagcuacaaaug

SEQ ID NO: 1905473 - RNA, 14 nt, Human
gugagccacugcac

SEQ ID NO: 1905474 - RNA, 11 nt, Human
gugaggaagcc

SEQ ID NO: 1905475 - RNA, 16 nt, Human
gugaggaagccgcugg

SEQ ID NO: 1905476 - RNA, 19 nt, Human
gugaggaagccgcuggggc

SEQ ID NO: 1905477 - RNA, 13 nt, Human
gugagccacugca

SEQ ID NO: 1905478 - RNA, 17 nt, Human
gugacugaucucucgug

SEQ ID NO: 1905479 - RNA, 16 nt, Human
gugacaacacuugugu

SEQ ID NO: 1905480 - RNA, 15 nt, Human
gugacugaauuucuu

SEQ ID NO: 1905481 - RNA, 18 nt, Human
gugacugaauuucuuuug

SEQ ID NO: 1905482 - RNA, 16 nt, Human
gugacugaauuucuuu

SEQ ID NO: 1905483 - RNA, 20 nt, Human
gugaccuuccaagagccuga

SEQ ID NO: 1905484 - RNA, 19 nt, Human
gugaccuuccaagagccug

SEQ ID NO: 1905485 - RNA, 21 nt, Human
gugcugaagcuuauuaaugcu

SEQ ID NO: 1905486 - RNA, 15 nt, Human
gugcugaagcuuauu

SEQ ID NO: 1905487 - RNA, 14 nt, Human
gugcugaagcuuau

SEQ ID NO: 1905488 - RNA, 23 nt, Human
gugcugaaugguuuucaaaauaa

SEQ ID NO: 1905489 - RNA, 19 nt, Human
gugcugaaugguuuucaaa

SEQ ID NO: 1905490 - RNA, 20 nt, Human
gugcugaaugguuuucaaaa

SEQ ID NO: 1905491 - RNA, 18 nt, Human
gugcucuggacaggcaug

SEQ ID NO: 1905492 - RNA, 17 nt, Human
gugcucuggacaggcau

SEQ ID NO: 1905493 - RNA, 16 nt, Human
gugcucuggacaggca

SEQ ID NO: 1905494 - RNA, 15 nt, Human
gugcucuggacaggc

SEQ ID NO: 1905495 - RNA, 22 nt, Human
gugccgagaaggaagccuccca

SEQ ID NO: 1905496 - RNA, 21 nt, Human
gugccuuggggacaagagcag

SEQ ID NO: 1905497 - RNA, 19 nt, Human
gugcugccauccagguuca

SEQ ID NO: 1905498 - RNA, 18 nt, Human
gugcugccauccagguuc

SEQ ID NO: 1905499 - RNA, 15 nt, Human
gugcugccauccagg

SEQ ID NO: 1905500 - RNA, 20 nt, Human
gugcugcauuuaaaagauac

SEQ ID NO: 1905501 - RNA, 19 nt, Human
gugcugcauuuaaaagaua

SEQ ID NO: 1905502 - RNA, 12 nt, Human
gugcugcauuua

SEQ ID NO: 1905503 - RNA, 23 nt, Human
gugcugaguugguguugacaugu

SEQ ID NO: 1905504 - RNA, 12 nt, Human
gugcugagucug

SEQ ID NO: 1905505 - RNA, 21 nt, Human
gugcugacggccagggagaag

SEQ ID NO: 1905506 - RNA, 23 nt, Human
gugcugacggccagggagaagcu

SEQ ID NO: 1905507 - RNA, 11 nt, Human
gugcugagaag

SEQ ID NO: 1905508 - RNA, 13 nt, Human
gugcugagaagcu

SEQ ID NO: 1905509 - RNA, 14 nt, Human
gugcugagaagcuu

SEQ ID NO: 1905510 - RNA, 15 nt, Human
gugcugacggccagg

SEQ ID NO: 1905511 - RNA, 16 nt, Human
gugcugacggccaggg

SEQ ID NO: 1905512 - RNA, 18 nt, Human
gugcugacggccagggag

SEQ ID NO: 1905513 - RNA, 15 nt, Human
gugcugacagcugcu

SEQ ID NO: 1905514 - RNA, 16 nt, Human
gugcugacagcugcuc

SEQ ID NO: 1905515 - RNA, 17 nt, Human
gugcugacagcugcucc

SEQ ID NO: 1905516 - RNA, 16 nt, Human
gugcugagucugaagg

SEQ ID NO: 1905517 - RNA, 17 nt, Human
gugcugagucugaaggc

SEQ ID NO: 1905518 - RNA, 18 nt, Human
gugcugagucugaaggcu

SEQ ID NO: 1905519 - RNA, 19 nt, Human
gugcugagucugaaggcug

SEQ ID NO: 1905520 - RNA, 21 nt, Human
gugcuuaucccauagccagga

SEQ ID NO: 1905521 - RNA, 22 nt, Human
gugcugccauccagguucagcu

SEQ ID NO: 1905522 - RNA, 11 nt, Human
gugcugcccug

SEQ ID NO: 1905523 - RNA, 12 nt, Human
gugcuuggagga

SEQ ID NO: 1905524 - RNA, 13 nt, Human
gugcuuggaggaa

SEQ ID NO: 1905525 - RNA, 15 nt, Human
gugcuuggaggaagg

SEQ ID NO: 1905526 - RNA, 16 nt, Human
gugcuucaacauucuu

SEQ ID NO: 1905527 - RNA, 18 nt, Human
guggaaaaauagccugcc

SEQ ID NO: 1905528 - RNA, 23 nt, Human
guggaaaagccaagaggcugcag

SEQ ID NO: 1905529 - RNA, 18 nt, Human
guggaaaugcgcaugagu

SEQ ID NO: 1905530 - RNA, 15 nt, Human
gugcuuuaugcugaa

SEQ ID NO: 1905531 - RNA, 17 nt, Human
gugcuuuaugcugaaac

SEQ ID NO: 1905532 - RNA, 13 nt, Human
gugcuuuauauuu

SEQ ID NO: 1905533 - RNA, 14 nt, Human
gugcuuuaugcuga

SEQ ID NO: 1905534 - RNA, 18 nt, Human
guggaugccugguggcag

SEQ ID NO: 1905535 - RNA, 16 nt, Human
guggaugccugguggc

SEQ ID NO: 1905536 - RNA, 17 nt, Human
guggaguucaucuugaa

SEQ ID NO: 1905537 - RNA, 15 nt, Human
guggagucauucuca

SEQ ID NO: 1905538 - RNA, 23 nt, Human
guggagggacaaguggacucagg

SEQ ID NO: 1905539 - RNA, 23 nt, Human
guggaggagcucaggacacuaau

SEQ ID NO: 1905540 - RNA, 20 nt, Human
guggaggagcucaggacacu

SEQ ID NO: 1905541 - RNA, 13 nt, Human
guggaggcacuuu

SEQ ID NO: 1905542 - RNA, 14 nt, Human
guggaggcacuuua

SEQ ID NO: 1905543 - RNA, 16 nt, Human
guggaggagcucagga

SEQ ID NO: 1905544 - RNA, 22 nt, Human
guggaacguuuuuccuguucuu

SEQ ID NO: 1905545 - RNA, 20 nt, Human
guggagaagcggcuggcagc

SEQ ID NO: 1905546 - RNA, 22 nt, Human
guggagaagccacaggccugag

SEQ ID NO: 1905547 - RNA, 20 nt, Human
guggagaagccacaggccug

SEQ ID NO: 1905548 - RNA, 17 nt, Human
guggagaagccacaggc

SEQ ID NO: 1905549 - RNA, 19 nt, Human
guggcagcugcuuuugucu

SEQ ID NO: 1905550 - RNA, 13 nt, Human
guggcagcugcuu

SEQ ID NO: 1905551 - RNA, 12 nt, Human
guggcagcugcu

SEQ ID NO: 1905552 - RNA, 23 nt, Human
guggcagcugcgguccacccagg

SEQ ID NO: 1905553 - RNA, 22 nt, Human
guggcagcugcgguccacccag

SEQ ID NO: 1905554 - RNA, 21 nt, Human
guggcagcugcgguccaccca

SEQ ID NO: 1905555 - RNA, 20 nt, Human
guggaugccugguggcagcu

SEQ ID NO: 1905556 - RNA, 19 nt, Human
guggcagcugcgguccacc

SEQ ID NO: 1905557 - RNA, 17 nt, Human
guggcagugggagcugc

SEQ ID NO: 1905558 - RNA, 16 nt, Human
guggcagugggagcug

SEQ ID NO: 1905559 - RNA, 15 nt, Human
guggcagugggagcu

SEQ ID NO: 1905560 - RNA, 11 nt, Human
guggcagucug

SEQ ID NO: 1905561 - RNA, 21 nt, Human
guggcagugggagcugccugu

SEQ ID NO: 1905562 - RNA, 19 nt, Human
guggcagugggagcugccu

SEQ ID NO: 1905563 - RNA, 15 nt, Human
guggcaguuuggcaa

SEQ ID NO: 1905564 - RNA, 14 nt, Human
guggccaaguucuu

SEQ ID NO: 1905565 - RNA, 16 nt, Human
guggccaaggagcugc

SEQ ID NO: 1905566 - RNA, 15 nt, Human
guggccaaggagcug

SEQ ID NO: 1905567 - RNA, 17 nt, Human
guggccaaggagcugcu

SEQ ID NO: 1905568 - RNA, 18 nt, Human
guggccaaggagcugcua

SEQ ID NO: 1905569 - RNA, 19 nt, Human
guggccaaggagcugcuau

SEQ ID NO: 1905570 - RNA, 13 nt, Human
guggcccaggacc

SEQ ID NO: 1905571 - RNA, 23 nt, Human
uaucugcuuuugguuauaaugug

SEQ ID NO: 1905572 - RNA, 20 nt, Human
uaucuaauaccucugugugc

SEQ ID NO: 1905573 - RNA, 13 nt, Human
uaucuaauuuaua

SEQ ID NO: 1905574 - RNA, 13 nt, Human
uaucuacucuccu

SEQ ID NO: 1905575 - RNA, 15 nt, Human
uaucuaauaccucug

SEQ ID NO: 1905576 - RNA, 16 nt, Human
uaucuaauaccucugu

SEQ ID NO: 1905577 - RNA, 21 nt, Human
uaucuaauauguaacaagcca

SEQ ID NO: 1905578 - RNA, 16 nt, Human
uaucgucacugcuuaa

SEQ ID NO: 1905579 - RNA, 14 nt, Human
uauccuucagccug

SEQ ID NO: 1905580 - RNA, 15 nt, Human
uauccuucagccuga

SEQ ID NO: 1905581 - RNA, 15 nt, Human
uaucguaaaauuaag

SEQ ID NO: 1905582 - RNA, 18 nt, Human
uaucguaaaauuaagaaa

SEQ ID NO: 1905583 - RNA, 16 nt, Human
uaucuaaauguugaaa

SEQ ID NO: 1905584 - RNA, 19 nt, Human
uauauguuuuaagaggcag

SEQ ID NO: 1905585 - RNA, 23 nt, Human
uaucugucauuugagcagggcuc

SEQ ID NO: 1905586 - RNA, 21 nt, Human
uaucugucauuugagcagggc

SEQ ID NO: 1905587 - RNA, 20 nt, Human
uaucugucauuugagcaggg

SEQ ID NO: 1905588 - RNA, 20 nt, Human
uaugaaguuuuuuuuauaca

SEQ ID NO: 1905589 - RNA, 14 nt, Human
uaucuugaagacuu

SEQ ID NO: 1905590 - RNA, 17 nt, Human
uaucuguuuacaguguu

SEQ ID NO: 1905591 - RNA, 16 nt, Human
uaucuguuuacagugu

SEQ ID NO: 1905592 - RNA, 12 nt, Human
uaugaauaacau

SEQ ID NO: 1905593 - RNA, 12 nt, Human
uaugacacaugc

SEQ ID NO: 1905594 - RNA, 22 nt, Human
uaugacacaugcaaggucauuu

SEQ ID NO: 1905595 - RNA, 22 nt, Human
uaugcaccuugugucuguacac

SEQ ID NO: 1905596 - RNA, 20 nt, Human
uaugcaccuugugucuguac

SEQ ID NO: 1905597 - RNA, 19 nt, Human
uaugcaccuugugucugua

SEQ ID NO: 1905598 - RNA, 18 nt, Human
uaugcaccuugugucugu

SEQ ID NO: 1905599 - RNA, 20 nt, Human
uaugcacauauggacucugc

SEQ ID NO: 1905600 - RNA, 19 nt, Human
uaugcacauauggacucug

SEQ ID NO: 1905601 - RNA, 14 nt, Human
uaugcaccuugugu

SEQ ID NO: 1905602 - RNA, 20 nt, Human
uaugcauauuauuuuauguu

SEQ ID NO: 1905603 - RNA, 18 nt, Human
uaugcaugaaguaauaug

SEQ ID NO: 1905604 - RNA, 13 nt, Human
uaugcaugaagua

SEQ ID NO: 1905605 - RNA, 22 nt, Human
uaugcuuauacacuuacacuuu

SEQ ID NO: 1905606 - RNA, 16 nt, Human
uaugcuucauacaggg

SEQ ID NO: 1905607 - RNA, 14 nt, Human
uaugcuucauacag

SEQ ID NO: 1905608 - RNA, 13 nt, Human
uaugcuucauaca

SEQ ID NO: 1905609 - RNA, 12 nt, Human
uaugcuucauac

SEQ ID NO: 1905610 - RNA, 13 nt, Human
uauggaacacucu

SEQ ID NO: 1905611 - RNA, 16 nt, Human
uauggaacacucugag

SEQ ID NO: 1905612 - RNA, 17 nt, Human
uauggaacacucugaga

SEQ ID NO: 1905613 - RNA, 18 nt, Human
uauggaacacucugagac

SEQ ID NO: 1905614 - RNA, 13 nt, Human
uaugcuucuuuca

SEQ ID NO: 1905615 - RNA, 17 nt, Human
uaugcuucauacaggga

SEQ ID NO: 1905616 - RNA, 17 nt, Human
uauggacaaugacccag

SEQ ID NO: 1905617 - RNA, 18 nt, Human
uauggaauugauuugcau

SEQ ID NO: 1905618 - RNA, 11 nt, Human
uauggaauuga

SEQ ID NO: 1905619 - RNA, 19 nt, Human
uauggaauugauuugcauu

SEQ ID NO: 1905620 - RNA, 19 nt, Human
uauggaacacucugagacu

SEQ ID NO: 1905621 - RNA, 13 nt, Human
uaugcacauaugg

SEQ ID NO: 1905622 - RNA, 14 nt, Human
uaugcacacauuuu

SEQ ID NO: 1905623 - RNA, 13 nt, Human
uaugcacacauuu

SEQ ID NO: 1905624 - RNA, 18 nt, Human
uaugcaaucaaaucugcu

SEQ ID NO: 1905625 - RNA, 12 nt, Human
uaugauuuuuaa

SEQ ID NO: 1905626 - RNA, 23 nt, Human
uaugauuuuuaaagaaaaguuuu

SEQ ID NO: 1905627 - RNA, 16 nt, Human
uaugacuccagaauuu

SEQ ID NO: 1905628 - RNA, 16 nt, Human
uaugaccuucuaggaa

SEQ ID NO: 1905629 - RNA, 18 nt, Human
uaugaccuucuaggaagc

SEQ ID NO: 1905630 - RNA, 17 nt, Human
uaugacuccagaauuuc

SEQ ID NO: 1905631 - RNA, 23 nt, Human
uaugacuccagaauuucccaaag

SEQ ID NO: 1905632 - RNA, 15 nt, Human
uaugagacacaggau

SEQ ID NO: 1905633 - RNA, 23 nt, Human
uaugagcuggggaugucucucau

SEQ ID NO: 1905634 - RNA, 21 nt, Human
uaugauucaaaugucuauaaa

SEQ ID NO: 1905635 - RNA, 16 nt, Human
uaugauucaaaugucu

SEQ ID NO: 1905636 - RNA, 22 nt, Human
uaguugcguggacucugcacau

SEQ ID NO: 1905637 - RNA, 18 nt, Human
uauaaacuuuaccuuuuu

SEQ ID NO: 1905638 - RNA, 17 nt, Human
uauaauauacuauauuu

SEQ ID NO: 1905639 - RNA, 15 nt, Human
uauaauacuguauuu

SEQ ID NO: 1905640 - RNA, 16 nt, Human
uauaauaaauguacau

SEQ ID NO: 1905641 - RNA, 20 nt, Human
uauaauauacuauauuuaug

SEQ ID NO: 1905642 - RNA, 15 nt, Human
uauaauauauuugug

SEQ ID NO: 1905643 - RNA, 22 nt, Human
uauaauauuuuuaauuaaauaa

SEQ ID NO: 1905644 - RNA, 16 nt, Human
uauaauauauuugugu

SEQ ID NO: 1905645 - RNA, 22 nt, Human
uauaauauauuuguguauuuaa

SEQ ID NO: 1905646 - RNA, 14 nt, Human
uauaaauuccucuu

SEQ ID NO: 1905647 - RNA, 20 nt, Human
uauaaauuccucuuugcuuu

SEQ ID NO: 1905648 - RNA, 18 nt, Human
uauaauguuguuauuuaa

SEQ ID NO: 1905649 - RNA, 19 nt, Human
uauaauguuguuauuuaaa

SEQ ID NO: 1905650 - RNA, 17 nt, Human
uauaauguuguuauuua

SEQ ID NO: 1905651 - RNA, 15 nt, Human
uauaauucacauugu

SEQ ID NO: 1905652 - RNA, 21 nt, Human
uauaugcucugcauguuacau

SEQ ID NO: 1905653 - RNA, 20 nt, Human
uauauguauuuaaaaaaauc

SEQ ID NO: 1905654 - RNA, 23 nt, Human
uauauaaauuuuuuuuguuucau

SEQ ID NO: 1905655 - RNA, 18 nt, Human
uauacgauaaauaacuuu

SEQ ID NO: 1905656 - RNA, 13 nt, Human
uauacuggcaugc

SEQ ID NO: 1905657 - RNA, 23 nt, Human
uauacuggcaugcuaaagccuuc

SEQ ID NO: 1905658 - RNA, 14 nt, Human
uaggacccaagcag

SEQ ID NO: 1905659 - RNA, 16 nt, Human
uaggacccaagcagag

SEQ ID NO: 1905660 - RNA, 18 nt, Human
uaggccaugggacaggga

SEQ ID NO: 1905661 - RNA, 16 nt, Human
uaggccaugggacagg

SEQ ID NO: 1905662 - RNA, 18 nt, Human
uaggccuggccagaugca

SEQ ID NO: 1905663 - RNA, 21 nt, Human
uaggccuuccucucuccagau

SEQ ID NO: 1905664 - RNA, 15 nt, Human
uaggccuggccagau

SEQ ID NO: 1905665 - RNA, 12 nt, Human
uaggaauugacc

SEQ ID NO: 1905666 - RNA, 16 nt, Human
uaggaauuguguuuau

SEQ ID NO: 1905667 - RNA, 20 nt, Human
uaggacauaaauuagagguc

SEQ ID NO: 1905668 - RNA, 15 nt, Human
guggcugagccccug

SEQ ID NO: 1905669 - RNA, 17 nt, Human
guggcugagccccuguc

SEQ ID NO: 1905670 - RNA, 16 nt, Human
uaggucagugcaaaua

SEQ ID NO: 1905671 - RNA, 15 nt, Human
uaggucucaauaccu

SEQ ID NO: 1905672 - RNA, 20 nt, Human
uaggucuagccuauguggau

SEQ ID NO: 1905673 - RNA, 16 nt, Human
uagguaaauuacaguu

SEQ ID NO: 1905674 - RNA, 13 nt, Human
uagguaacuucau

SEQ ID NO: 1905675 - RNA, 11 nt, Human
uagguauuuug

SEQ ID NO: 1905676 - RNA, 19 nt, Human
uagggaaaaaccagcgugu

SEQ ID NO: 1905677 - RNA, 20 nt, Human
uagggaaaaaccagcgugug

SEQ ID NO: 1905678 - RNA, 21 nt, Human
uagggaaaaaccagcguguga

SEQ ID NO: 1905679 - RNA, 23 nt, Human
uaggccuuccucucuccagaugu

SEQ ID NO: 1905680 - RNA, 16 nt, Human
uaggcucauuuacugu

SEQ ID NO: 1905681 - RNA, 17 nt, Human
uaggcucauuuacuguu

SEQ ID NO: 1905682 - RNA, 20 nt, Human
uaggcucauuuacuguuuua

SEQ ID NO: 1905683 - RNA, 13 nt, Human
uaguguucauaaa

SEQ ID NO: 1905684 - RNA, 20 nt, Human
uaguugcaacuuuguauaaa

SEQ ID NO: 1905685 - RNA, 16 nt, Human
uagugccuucuaaagg

SEQ ID NO: 1905686 - RNA, 19 nt, Human
uagugccuucuaaaggugu

SEQ ID NO: 1905687 - RNA, 23 nt, Human
uaggugacagagugagacucugu

SEQ ID NO: 1905688 - RNA, 20 nt, Human
uaguaggugaguuuucaccu

SEQ ID NO: 1905689 - RNA, 13 nt, Human
uaguaucaaaaga

SEQ ID NO: 1905690 - RNA, 20 nt, Human
ucaaggacuuucugaagccu

SEQ ID NO: 1905691 - RNA, 13 nt, Human
ucaaggauccuga

SEQ ID NO: 1905692 - RNA, 14 nt, Human
ucaaggauccugag

SEQ ID NO: 1905693 - RNA, 15 nt, Human
ucaaggauccugagc

SEQ ID NO: 1905694 - RNA, 16 nt, Human
ucaaggauccugagcc

SEQ ID NO: 1905695 - RNA, 17 nt, Human
ucaaggauccugagcca

SEQ ID NO: 1905696 - RNA, 19 nt, Human
ucaagcgauucuucugcuu

SEQ ID NO: 1905697 - RNA, 18 nt, Human
ucaagcgauucuucugcu

SEQ ID NO: 1905698 - RNA, 21 nt, Human
ucaagcgauucuucugcuuca

SEQ ID NO: 1905699 - RNA, 12 nt, Human
ucaagccaccaa

SEQ ID NO: 1905700 - RNA, 20 nt, Human
ucaagccaccaacauacucc

SEQ ID NO: 1905701 - RNA, 19 nt, Human
ucaaccccuucgcuccugu

SEQ ID NO: 1905702 - RNA, 18 nt, Human
ucaaccccuucgcuccug

SEQ ID NO: 1905703 - RNA, 15 nt, Human
ucaaccuccugggcu

SEQ ID NO: 1905704 - RNA, 20 nt, Human
ucaaccccuucgcuccugug

SEQ ID NO: 1905705 - RNA, 16 nt, Human
ucaaccuccugggcua

SEQ ID NO: 1905706 - RNA, 17 nt, Human
ucaaccucuucuggcuc

SEQ ID NO: 1905707 - RNA, 18 nt, Human
ucaaccucuucuggcuca

SEQ ID NO: 1905708 - RNA, 20 nt, Human
ucaacucuccuccagaguca

SEQ ID NO: 1905709 - RNA, 19 nt, Human
ucaaccucuucuggcucaa

SEQ ID NO: 1905710 - RNA, 14 nt, Human
ucaaacuggggccu

SEQ ID NO: 1905711 - RNA, 16 nt, Human
ucaaacuggggccucc

SEQ ID NO: 1905712 - RNA, 19 nt, Human
ucaaacuggggccuccaga

SEQ ID NO: 1905713 - RNA, 20 nt, Human
ucaaacuggggccuccagaa

SEQ ID NO: 1905714 - RNA, 22 nt, Human
ucaaacuggggccuccagaacu

SEQ ID NO: 1905715 - RNA, 23 nt, Human
ucaaacuggggccuccagaacuc

SEQ ID NO: 1905716 - RNA, 14 nt, Human
uauuugcaauuccu

SEQ ID NO: 1905717 - RNA, 18 nt, Human
uauuugcacuaagauauu

SEQ ID NO: 1905718 - RNA, 23 nt, Human
uauuugaauguaugcuucauaca

SEQ ID NO: 1905719 - RNA, 22 nt, Human
uauuugaauguaugcuucauac

SEQ ID NO: 1905720 - RNA, 12 nt, Human
ucaaagagguuu

SEQ ID NO: 1905721 - RNA, 23 nt, Human
ucaaagagguuuuaaaaaaaucc

SEQ ID NO: 1905722 - RNA, 21 nt, Human
ucaaagaggcugaggcuggca

SEQ ID NO: 1905723 - RNA, 22 nt, Human
ucaaacuuccagugcaacacug

SEQ ID NO: 1905724 - RNA, 19 nt, Human
ucaaauggggccagaucca

SEQ ID NO: 1905725 - RNA, 20 nt, Human
ucaaauggggccagauccag

SEQ ID NO: 1905726 - RNA, 20 nt, Human
ucaaaugguaggcauuuccu

SEQ ID NO: 1905727 - RNA, 21 nt, Human
ucaaaugguaggcauuuccua

SEQ ID NO: 1905728 - RNA, 18 nt, Human
ucaauguuucuucuaggu

SEQ ID NO: 1905729 - RNA, 22 nt, Human
ucaauaaaaaaaagaaaugaaa

SEQ ID NO: 1905730 - RNA, 18 nt, Human
ucaauguuuuuaaaaauc

SEQ ID NO: 1905731 - RNA, 14 nt, Human
ucaauguuuuuaaa

SEQ ID NO: 1905732 - RNA, 19 nt, Human
ucaauuagaauaguguucu

SEQ ID NO: 1905733 - RNA, 14 nt, Human
ucaauuccaccugc

SEQ ID NO: 1905734 - RNA, 23 nt, Human
ucaauuccaacacugauuucccc

SEQ ID NO: 1905735 - RNA, 22 nt, Human
ucacaagacccaaaaggcagaa

SEQ ID NO: 1905736 - RNA, 14 nt, Human
ucaauuccucuggg

SEQ ID NO: 1905737 - RNA, 18 nt, Human
ucacaagggacgcuuugg

SEQ ID NO: 1905738 - RNA, 20 nt, Human
ucacaagggacgcuuuggga

SEQ ID NO: 1905739 - RNA, 19 nt, Human
ucacacacagacuguuguc

SEQ ID NO: 1905740 - RNA, 22 nt, Human
ucacacacagacuguugucccu

SEQ ID NO: 1905741 - RNA, 15 nt, Human
ucacacacuuuggcu

SEQ ID NO: 1905742 - RNA, 12 nt, Human
ucacacacugau

SEQ ID NO: 1905743 - RNA, 22 nt, Human
ucacacaugagcaucaggccag

SEQ ID NO: 1905744 - RNA, 23 nt, Human
ucacacaugagcaucaggccagg

SEQ ID NO: 1905745 - RNA, 23 nt, Human
ucacaccaggcuugccugcaggc

SEQ ID NO: 1905746 - RNA, 22 nt, Human
ucacaccaggcuugccugcagg

SEQ ID NO: 1905747 - RNA, 21 nt, Human
ucacaccaggcuugccugcag

SEQ ID NO: 1905748 - RNA, 14 nt, Human
ucacauuggaaaca

SEQ ID NO: 1905749 - RNA, 20 nt, Human
ucacauuccugaacaggaua

SEQ ID NO: 1905750 - RNA, 12 nt, Human
ucacauuuaaau

SEQ ID NO: 1905751 - RNA, 22 nt, Human
ucacauuguauucagaguugau

SEQ ID NO: 1905752 - RNA, 17 nt, Human
ucacauuggaaacaagu

SEQ ID NO: 1905753 - RNA, 14 nt, Human
ucacauuuauucug

SEQ ID NO: 1905754 - RNA, 21 nt, Human
ucaccaaaucagcugcuacua

SEQ ID NO: 1905755 - RNA, 17 nt, Human
ucaccaacgucugugcc

SEQ ID NO: 1905756 - RNA, 18 nt, Human
ucaccaacgucugugcca

SEQ ID NO: 1905757 - RNA, 13 nt, Human
ucaccaagcccag

SEQ ID NO: 1905758 - RNA, 20 nt, Human
ucaccacucaaaggccagac

SEQ ID NO: 1905759 - RNA, 22 nt, Human
ucaccacucaaaggccagaccu

SEQ ID NO: 1905760 - RNA, 23 nt, Human
ucaccacucaaaggccagaccug

SEQ ID NO: 1905761 - RNA, 18 nt, Human
ucacccgcuaagagggag

SEQ ID NO: 1905762 - RNA, 22 nt, Human
ucaccccugguucucaucuuuc

SEQ ID NO: 1905763 - RNA, 21 nt, Human
ucaccccugguucucaucuuu

SEQ ID NO: 1905764 - RNA, 22 nt, Human
ucaccgaaaacguggcugcuuc

SEQ ID NO: 1905765 - RNA, 23 nt, Human
ucaccgaaaacguggcugcuuca

SEQ ID NO: 1905766 - RNA, 15 nt, Human
ucaccgaaaacgugg

SEQ ID NO: 1905767 - RNA, 19 nt, Human
ucaccgaaaacguggcugc

SEQ ID NO: 1905768 - RNA, 20 nt, Human
ucaccgaaaacguggcugcu

SEQ ID NO: 1905769 - RNA, 21 nt, Human
ucaccgaaaacguggcugcuu

SEQ ID NO: 1905770 - RNA, 19 nt, Human
ucacccgcuaagagggagg

SEQ ID NO: 1905771 - RNA, 23 nt, Human
ucacccugauuuaggagaagcca

SEQ ID NO: 1905772 - RNA, 12 nt, Human
ucacccuuuucu

SEQ ID NO: 1905773 - RNA, 14 nt, Human
ucaccgaaaacgug

SEQ ID NO: 1905774 - RNA, 16 nt, Human
uauggacucugcacau

SEQ ID NO: 1905775 - RNA, 12 nt, Human
uauggacucugc

SEQ ID NO: 1905776 - RNA, 15 nt, Human
uauggacucugcaca

SEQ ID NO: 1905777 - RNA, 15 nt, Human
uauggagagaaaaca

SEQ ID NO: 1905778 - RNA, 14 nt, Human
uauggaggcaggag

SEQ ID NO: 1905779 - RNA, 13 nt, Human
uauguguguuuua

SEQ ID NO: 1905780 - RNA, 21 nt, Human
uauguugcccaggcaggucuu

SEQ ID NO: 1905781 - RNA, 12 nt, Human
uauguugaauac

SEQ ID NO: 1905782 - RNA, 15 nt, Human
uauguugaauacuuu

SEQ ID NO: 1905783 - RNA, 18 nt, Human
uauguugguagauucuaa

SEQ ID NO: 1905784 - RNA, 22 nt, Human
uauguucuuaguggauguucug

SEQ ID NO: 1905785 - RNA, 16 nt, Human
uauguucagaagaaau

SEQ ID NO: 1905786 - RNA, 17 nt, Human
uauguucuaagaaguga

SEQ ID NO: 1905787 - RNA, 16 nt, Human
uauuaagaaagacuau

SEQ ID NO: 1905788 - RNA, 17 nt, Human
uauuaaauggaaacuga

SEQ ID NO: 1905789 - RNA, 15 nt, Human
uauuaaaugcccagc

SEQ ID NO: 1905790 - RNA, 17 nt, Human
uauuaaaugcccagccc

SEQ ID NO: 1905791 - RNA, 19 nt, Human
uauuaaaugcccagccccu

SEQ ID NO: 1905792 - RNA, 15 nt, Human
uauuaucaacaauag

SEQ ID NO: 1905793 - RNA, 13 nt, Human
uauuauuuauaua

SEQ ID NO: 1905794 - RNA, 16 nt, Human
uauuauuuucaccugu

SEQ ID NO: 1905795 - RNA, 15 nt, Human
uauuauuuucaccug

SEQ ID NO: 1905796 - RNA, 20 nt, Human
uauuauggaggcaggaguuu

SEQ ID NO: 1905797 - RNA, 17 nt, Human
uauuauauuuacaaaug

SEQ ID NO: 1905798 - RNA, 14 nt, Human
uauuauaccuuuuu

SEQ ID NO: 1905799 - RNA, 19 nt, Human
uauuauaauuuuuuucaau

SEQ ID NO: 1905800 - RNA, 13 nt, Human
uauuauaccuuuu

SEQ ID NO: 1905801 - RNA, 12 nt, Human
uauuauaccuuu

SEQ ID NO: 1905802 - RNA, 15 nt, Human
uauuaaguuguuaau

SEQ ID NO: 1905803 - RNA, 14 nt, Human
uauuaaggaagaca

SEQ ID NO: 1905804 - RNA, 22 nt, Human
uauugcagcgauuaauaacagg

SEQ ID NO: 1905805 - RNA, 22 nt, Human
uauugcauuuggauuggggucc

SEQ ID NO: 1905806 - RNA, 20 nt, Human
uauugauaugcuuauacacu

SEQ ID NO: 1905807 - RNA, 16 nt, Human
uauucauuuuuguuau

SEQ ID NO: 1905808 - RNA, 15 nt, Human
uauugcccacgcugg

SEQ ID NO: 1905809 - RNA, 14 nt, Human
uauugcccacgcug

SEQ ID NO: 1905810 - RNA, 13 nt, Human
uauugcccacgcu

SEQ ID NO: 1905811 - RNA, 15 nt, Human
uauugcuugcacaaa

SEQ ID NO: 1905812 - RNA, 23 nt, Human
uauugcugauggugcaaugaccu

SEQ ID NO: 1905813 - RNA, 22 nt, Human
uauugcugauggugcaaugacc

SEQ ID NO: 1905814 - RNA, 23 nt, Human
uauuguuccagcaguuuucaagu

SEQ ID NO: 1905815 - RNA, 22 nt, Human
uauuuauuaaaugcccagcccc

SEQ ID NO: 1905816 - RNA, 13 nt, Human
uauuuauguuugc

SEQ ID NO: 1905817 - RNA, 19 nt, Human
uauuuauuauuuucaccug

SEQ ID NO: 1905818 - RNA, 14 nt, Human
uauuuauuauuuau

SEQ ID NO: 1905819 - RNA, 21 nt, Human
uauuugaauguaugcuucaua

SEQ ID NO: 1905820 - RNA, 17 nt, Human
uauuuaugggauccugg

SEQ ID NO: 1905821 - RNA, 13 nt, Human
uauuuaucuucau

SEQ ID NO: 1905822 - RNA, 15 nt, Human
uauuuaucugauuaa

SEQ ID NO: 1905823 - RNA, 16 nt, Human
uauuuaucugauuaag

SEQ ID NO: 1905824 - RNA, 21 nt, Human
uauuuaucugauuaaguuguc

SEQ ID NO: 1905825 - RNA, 15 nt, Human
uauuuauauguacau

SEQ ID NO: 1905826 - RNA, 17 nt, Human
uauuuauauguacauga

SEQ ID NO: 1905827 - RNA, 20 nt, Human
ucauuuacuguggcuucuua

SEQ ID NO: 1905828 - RNA, 15 nt, Human
ucauuuacuguggcu

SEQ ID NO: 1905829 - RNA, 13 nt, Human
ucauuuacugugg

SEQ ID NO: 1905830 - RNA, 11 nt, Human
ucauuuacugu

SEQ ID NO: 1905831 - RNA, 22 nt, Human
ucauuuauaaagcuaaaauaac

SEQ ID NO: 1905832 - RNA, 15 nt, Human
ucauuuacuguuuua

SEQ ID NO: 1905833 - RNA, 16 nt, Human
ucauuaggauggcuag

SEQ ID NO: 1905834 - RNA, 14 nt, Human
ucauggugcucaga

SEQ ID NO: 1905835 - RNA, 16 nt, Human
ucauggucucagucau

SEQ ID NO: 1905836 - RNA, 13 nt, Human
uccaaaguacacu

SEQ ID NO: 1905837 - RNA, 20 nt, Human
uccaaagaguagaauugcau

SEQ ID NO: 1905838 - RNA, 13 nt, Human
uccaaaccuucac

SEQ ID NO: 1905839 - RNA, 14 nt, Human
uccaaaccuucaca

SEQ ID NO: 1905840 - RNA, 18 nt, Human
uccaaaccuucacacaca

SEQ ID NO: 1905841 - RNA, 22 nt, Human
uccaaaccuucacacacagacu

SEQ ID NO: 1905842 - RNA, 23 nt, Human
uccaaaccuucacacacagacug

SEQ ID NO: 1905843 - RNA, 13 nt, Human
uccaaaacugccu

SEQ ID NO: 1905844 - RNA, 12 nt, Human
uccaaaacugcc

SEQ ID NO: 1905845 - RNA, 14 nt, Human
uccaaaagaagccc

SEQ ID NO: 1905846 - RNA, 15 nt, Human
uccaaaagaagcccc

SEQ ID NO: 1905847 - RNA, 18 nt, Human
uccaaaagaagcccccag

SEQ ID NO: 1905848 - RNA, 21 nt, Human
uccaaaagaagcccccagcua

SEQ ID NO: 1905849 - RNA, 14 nt, Human
ucaucauccuaagc

SEQ ID NO: 1905850 - RNA, 17 nt, Human
ucaucaaugaaugaaug

SEQ ID NO: 1905851 - RNA, 12 nt, Human
ucauagcagcuu

SEQ ID NO: 1905852 - RNA, 15 nt, Human
ucauagauguuuccu

SEQ ID NO: 1905853 - RNA, 18 nt, Human
ucauagcagauuuuaauu

SEQ ID NO: 1905854 - RNA, 11 nt, Human
ucauagcagcu

SEQ ID NO: 1905855 - RNA, 20 nt, Human
ucaguguacauggaauaaca

SEQ ID NO: 1905856 - RNA, 18 nt, Human
ucaguguaccauuugccu

SEQ ID NO: 1905857 - RNA, 19 nt, Human
ucaguguaccauuugccuc

SEQ ID NO: 1905858 - RNA, 17 nt, Human
ucauccacugugccaug

SEQ ID NO: 1905859 - RNA, 14 nt, Human
ucauccacugugcc

SEQ ID NO: 1905860 - RNA, 18 nt, Human
ucauccacugugccaugu

SEQ ID NO: 1905861 - RNA, 16 nt, Human
ucaucuccccaucauu

SEQ ID NO: 1905862 - RNA, 22 nt, Human
ucaucucccaccuagcagcacc

SEQ ID NO: 1905863 - RNA, 12 nt, Human
ucaucucccacc

SEQ ID NO: 1905864 - RNA, 17 nt, Human
ucaugcuguucaugaaa

SEQ ID NO: 1905865 - RNA, 13 nt, Human
ucauggucucagu

SEQ ID NO: 1905866 - RNA, 21 nt, Human
ucaggccugggggcugggcag

SEQ ID NO: 1905867 - RNA, 11 nt, Human
ucaggccucug

SEQ ID NO: 1905868 - RNA, 12 nt, Human
ucaggaguuccu

SEQ ID NO: 1905869 - RNA, 23 nt, Human
ucaggaucucuuagcauuuuaau

SEQ ID NO: 1905870 - RNA, 11 nt, Human
ucaggagcccu

SEQ ID NO: 1905871 - RNA, 12 nt, Human
ucaggagcccug

SEQ ID NO: 1905872 - RNA, 14 nt, Human
ucaggagcccuggg

SEQ ID NO: 1905873 - RNA, 15 nt, Human
ucaggagcccuggga

SEQ ID NO: 1905874 - RNA, 13 nt, Human
ucaggacacuaau

SEQ ID NO: 1905875 - RNA, 12 nt, Human
ucaggacacuaa

SEQ ID NO: 1905876 - RNA, 24 nt, Human
ucagcuccagcucaccagccccag

SEQ ID NO: 1905877 - RNA, 23 nt, Human
ucagcuccagcucaccagcccca

SEQ ID NO: 1905878 - RNA, 23 nt, Human
ucagcucugcaagaauugaagca

SEQ ID NO: 1905879 - RNA, 19 nt, Human
ucagcucugggccauucuc

SEQ ID NO: 1905880 - RNA, 19 nt, Human
ucagcucuuggcuccacug

SEQ ID NO: 1905881 - RNA, 23 nt, Human
ucaggaagcucagggccuggcuc

SEQ ID NO: 1905882 - RNA, 16 nt, Human
ucagcuguaguccuca

SEQ ID NO: 1905883 - RNA, 20 nt, Human
ucagguggggcagcuugagg

SEQ ID NO: 1905884 - RNA, 16 nt, Human
ucagucaauauuuuua

SEQ ID NO: 1905885 - RNA, 13 nt, Human
ucagucacagcca

SEQ ID NO: 1905886 - RNA, 14 nt, Human
ucagucacagccac

SEQ ID NO: 1905887 - RNA, 15 nt, Human
ucagucacagccacc

SEQ ID NO: 1905888 - RNA, 23 nt, Human
ucagucugauucccaagcucugc

SEQ ID NO: 1905889 - RNA, 22 nt, Human
ucagucugauucccaagcucug

SEQ ID NO: 1905890 - RNA, 21 nt, Human
ucagucugauucccaagcucu

SEQ ID NO: 1905891 - RNA, 19 nt, Human
ucagguggggcagcuugag

SEQ ID NO: 1905892 - RNA, 18 nt, Human
ucagguggggcagcuuga

SEQ ID NO: 1905893 - RNA, 23 nt, Human
ucaggugauccacccaccucagc

SEQ ID NO: 1905894 - RNA, 16 nt, Human
ucaggugauccaccca

SEQ ID NO: 1905895 - RNA, 23 nt, Human
ucaggugagaagcagaggaagga

SEQ ID NO: 1905896 - RNA, 16 nt, Human
ucaggucaggaguucg

SEQ ID NO: 1905897 - RNA, 11 nt, Human
ucccaggacac

SEQ ID NO: 1905898 - RNA, 11 nt, Human
ucccaggaccc

SEQ ID NO: 1905899 - RNA, 23 nt, Human
ucccaggcauuccccaggaggcc

SEQ ID NO: 1905900 - RNA, 12 nt, Human
ucccaggacccu

SEQ ID NO: 1905901 - RNA, 24 nt, Human
ucccaggcauuccccaggaggcca

SEQ ID NO: 1905902 - RNA, 22 nt, Human
ucccagcugugcucuggacagg

SEQ ID NO: 1905903 - RNA, 21 nt, Human
ucccagcugugcucuggacag

SEQ ID NO: 1905904 - RNA, 23 nt, Human
ucccagcugugcucuggacaggc

SEQ ID NO: 1905905 - RNA, 19 nt, Human
ucccaugagccucagcauc

SEQ ID NO: 1905906 - RNA, 18 nt, Human
ucccaugagccucagcau

SEQ ID NO: 1905907 - RNA, 21 nt, Human
ucccaucugugaaaggaaaga

SEQ ID NO: 1905908 - RNA, 15 nt, Human
ucccaucuuccaagg

SEQ ID NO: 1905909 - RNA, 18 nt, Human
ucccaccuuggcugcagg

SEQ ID NO: 1905910 - RNA, 20 nt, Human
ucccagcugugcucuggaca

SEQ ID NO: 1905911 - RNA, 17 nt, Human
ucccaccuuggcugcag

SEQ ID NO: 1905912 - RNA, 16 nt, Human
ucccaccuuggcugca

SEQ ID NO: 1905913 - RNA, 13 nt, Human
ucccaccuuggcu

SEQ ID NO: 1905914 - RNA, 22 nt, Human
uccauucacaguucuuugggcc

SEQ ID NO: 1905915 - RNA, 20 nt, Human
uccaugugggcuaguugggc

SEQ ID NO: 1905916 - RNA, 22 nt, Human
ucccaccucucucacuccuuga

SEQ ID NO: 1905917 - RNA, 18 nt, Human
uccccagauugcaacagg

SEQ ID NO: 1905918 - RNA, 13 nt, Human
uccccagauugca

SEQ ID NO: 1905919 - RNA, 22 nt, Human
uccccagagaaaggggagccca

SEQ ID NO: 1905920 - RNA, 23 nt, Human
uccccagagaaaggggagcccac

SEQ ID NO: 1905921 - RNA, 20 nt, Human
ucccaugagccucagcaucc

SEQ ID NO: 1905922 - RNA, 22 nt, Human
uccccagcaagugagagcuggg

SEQ ID NO: 1905923 - RNA, 21 nt, Human
uccccagcaagugagagcugg

SEQ ID NO: 1905924 - RNA, 20 nt, Human
uccccagcaagugagagcug

SEQ ID NO: 1905925 - RNA, 23 nt, Human
uccccagauugcaacaggcuggg

SEQ ID NO: 1905926 - RNA, 22 nt, Human
uccccagauugcaacaggcugg

SEQ ID NO: 1905927 - RNA, 20 nt, Human
uccccagauugcaacaggcu

SEQ ID NO: 1905928 - RNA, 19 nt, Human
uccccagauugcaacaggc

SEQ ID NO: 1905929 - RNA, 22 nt, Human
ucccccagccccauccucugua

SEQ ID NO: 1905930 - RNA, 20 nt, Human
ucccccagccccauccucug

SEQ ID NO: 1905931 - RNA, 21 nt, Human
ucccccagccccauccucugu

SEQ ID NO: 1905932 - RNA, 15 nt, Human
uccccaggaggccag

SEQ ID NO: 1905933 - RNA, 16 nt, Human
uccccaggaggccagc

SEQ ID NO: 1905934 - RNA, 17 nt, Human
ucccccagccccauccu

SEQ ID NO: 1905935 - RNA, 17 nt, Human
uccccaggaggccagcc

SEQ ID NO: 1905936 - RNA, 14 nt, Human
uccccaggaggcca

SEQ ID NO: 1905937 - RNA, 12 nt, Human
uccccagcccag

SEQ ID NO: 1905938 - RNA, 13 nt, Human
uccccagcccaga

SEQ ID NO: 1905939 - RNA, 14 nt, Human
uccccagcccagag

SEQ ID NO: 1905940 - RNA, 15 nt, Human
uccccagcccagaga

SEQ ID NO: 1905941 - RNA, 16 nt, Human
uccccagcccagagac

SEQ ID NO: 1905942 - RNA, 17 nt, Human
uccccagcccagagaca

SEQ ID NO: 1905943 - RNA, 12 nt, Human
uccauaaucacu

SEQ ID NO: 1905944 - RNA, 20 nt, Human
uccaguuuuuuguuauauag

SEQ ID NO: 1905945 - RNA, 20 nt, Human
uccagguuuaagcuguuacu

SEQ ID NO: 1905946 - RNA, 22 nt, Human
uccaggggugggacacccugug

SEQ ID NO: 1905947 - RNA, 17 nt, Human
uccagggugugugcucg

SEQ ID NO: 1905948 - RNA, 20 nt, Human
uccaugggccauaugaaaag

SEQ ID NO: 1905949 - RNA, 14 nt, Human
uccauagagagcaa

SEQ ID NO: 1905950 - RNA, 15 nt, Human
uccauagagagcaag

SEQ ID NO: 1905951 - RNA, 14 nt, Human
uccagcaccacacu

SEQ ID NO: 1905952 - RNA, 15 nt, Human
uccagcucuuuccuc

SEQ ID NO: 1905953 - RNA, 18 nt, Human
uccagcucuuuccuccuu

SEQ ID NO: 1905954 - RNA, 21 nt, Human
uccagcucuuuccuccuucca

SEQ ID NO: 1905955 - RNA, 16 nt, Human
uccagcugagcgccag

SEQ ID NO: 1905956 - RNA, 19 nt, Human
uccaggggugggacacccu

SEQ ID NO: 1905957 - RNA, 20 nt, Human
uccaggggugggacacccug

SEQ ID NO: 1905958 - RNA, 12 nt, Human
uccaggagcagc

SEQ ID NO: 1905959 - RNA, 13 nt, Human
uccaggagcagcc

SEQ ID NO: 1905960 - RNA, 14 nt, Human
uccaggagcagcca

SEQ ID NO: 1905961 - RNA, 15 nt, Human
uccaggagcagccac

SEQ ID NO: 1905962 - RNA, 23 nt, Human
uccagaaagaaaacuuguauuau

SEQ ID NO: 1905963 - RNA, 20 nt, Human
uccacuuuuuuuuguauguu

SEQ ID NO: 1905964 - RNA, 20 nt, Human
uccacuuucuagccagagga

SEQ ID NO: 1905965 - RNA, 21 nt, Human
uccacuuucuagccagaggag

SEQ ID NO: 1905966 - RNA, 23 nt, Human
uccacuuggucugugagaugcua

SEQ ID NO: 1905967 - RNA, 19 nt, Human
uccacuuucuagccagagg

SEQ ID NO: 1905968 - RNA, 16 nt, Human
uccaaaguacacuguu

SEQ ID NO: 1905969 - RNA, 14 nt, Human
uccaaaguacacug

SEQ ID NO: 1905970 - RNA, 17 nt, Human
uccacuuggucugugag

SEQ ID NO: 1905971 - RNA, 21 nt, Human
uccacuuggucugugagaugc

SEQ ID NO: 1905972 - RNA, 16 nt, Human
uccugagaccacagag

SEQ ID NO: 1905973 - RNA, 23 nt, Human
uccugagccagugucaggaggaa

SEQ ID NO: 1905974 - RNA, 23 nt, Human
uccugacugucucccgggacuac

SEQ ID NO: 1905975 - RNA, 13 nt, Human
uccuccucccugc

SEQ ID NO: 1905976 - RNA, 14 nt, Human
uccuccucccugca

SEQ ID NO: 1905977 - RNA, 17 nt, Human
uccuccucccugcaucu

SEQ ID NO: 1905978 - RNA, 18 nt, Human
uccuccucccugcaucug

SEQ ID NO: 1905979 - RNA, 21 nt, Human
uccugaggcuccacuuggucu

SEQ ID NO: 1905980 - RNA, 20 nt, Human
uccugaggcuccacuugguc

SEQ ID NO: 1905981 - RNA, 19 nt, Human
uccugaggcuccacuuggu

SEQ ID NO: 1905982 - RNA, 13 nt, Human
uccugccaggcau

SEQ ID NO: 1905983 - RNA, 14 nt, Human
uccugccaggcaug

SEQ ID NO: 1905984 - RNA, 18 nt, Human
uccugccccugagcccau

SEQ ID NO: 1905985 - RNA, 17 nt, Human
uccugccccugagccca

SEQ ID NO: 1905986 - RNA, 23 nt, Human
uccuggcacccggccccugcugg

SEQ ID NO: 1905987 - RNA, 13 nt, Human
uccuggcacugcu

SEQ ID NO: 1905988 - RNA, 16 nt, Human
uccuggcacugcuucc

SEQ ID NO: 1905989 - RNA, 12 nt, Human
uccuggccucaa

SEQ ID NO: 1905990 - RNA, 11 nt, Human
uccuguagccc

SEQ ID NO: 1905991 - RNA, 13 nt, Human
uccuguagcccua

SEQ ID NO: 1905992 - RNA, 14 nt, Human
uccuggaguucugg

SEQ ID NO: 1905993 - RNA, 15 nt, Human
uccuggaggcccagu

SEQ ID NO: 1905994 - RNA, 18 nt, Human
uccuggaggcccaguuca

SEQ ID NO: 1905995 - RNA, 22 nt, Human
uccuggagcccagaggagggca

SEQ ID NO: 1905996 - RNA, 13 nt, Human
uccuggaggccca

SEQ ID NO: 1905997 - RNA, 14 nt, Human
uccuggaggcccag

SEQ ID NO: 1905998 - RNA, 18 nt, Human
uccuggagcccagaggag

SEQ ID NO: 1905999 - RNA, 15 nt, Human
uccuggagcccagag

SEQ ID NO: 1906000 - RNA, 20 nt, Human
uccugcccuuaccugccagg

SEQ ID NO: 1906001 - RNA, 17 nt, Human
uccugccgcagagcugg

SEQ ID NO: 1906002 - RNA, 16 nt, Human
uccugccgcagagcug

SEQ ID NO: 1906003 - RNA, 15 nt, Human
uccugccgcagagcu

SEQ ID NO: 1906004 - RNA, 13 nt, Human
uccugccgcagag

SEQ ID NO: 1906005 - RNA, 20 nt, Human
uccugccgcagagcuggccg

SEQ ID NO: 1906006 - RNA, 18 nt, Human
uccugccgcagagcuggc

SEQ ID NO: 1906007 - RNA, 17 nt, Human
uccugcccuuaccugcc

SEQ ID NO: 1906008 - RNA, 12 nt, Human
uccuaguuccac

SEQ ID NO: 1906009 - RNA, 21 nt, Human
uccuaguuaaucaucauuuuu

SEQ ID NO: 1906010 - RNA, 23 nt, Human
uccuauauuguuuucaguguaca

SEQ ID NO: 1906011 - RNA, 19 nt, Human
uccuaucaccuauuuccau

SEQ ID NO: 1906012 - RNA, 15 nt, Human
uccuacccugcgccc

SEQ ID NO: 1906013 - RNA, 18 nt, Human
uccucauuagcauuuugc

SEQ ID NO: 1906014 - RNA, 17 nt, Human
uccuccaacaccaagca

SEQ ID NO: 1906015 - RNA, 22 nt, Human
uccuccaacaccaagcacagca

SEQ ID NO: 1906016 - RNA, 12 nt, Human
uccuccaagcca

SEQ ID NO: 1906017 - RNA, 14 nt, Human
uccuccaagccagc

SEQ ID NO: 1906018 - RNA, 10 nt, Human
uccuccaggu

SEQ ID NO: 1906019 - RNA, 13 nt, Human
uccucccaccuca

SEQ ID NO: 1906020 - RNA, 12 nt, Human
uccucccaccuc

SEQ ID NO: 1906021 - RNA, 20 nt, Human
uccucccaauuucagacucc

SEQ ID NO: 1906022 - RNA, 21 nt, Human
uccucccaauuucagacuccc

SEQ ID NO: 1906023 - RNA, 17 nt, Human
uccuccaucgcaguguu

SEQ ID NO: 1906024 - RNA, 16 nt, Human
uccgcuuucuacccag

SEQ ID NO: 1906025 - RNA, 20 nt, Human
uccgcuuucuacccagcgag

SEQ ID NO: 1906026 - RNA, 18 nt, Human
uccgcuuucuacccagcg

SEQ ID NO: 1906027 - RNA, 20 nt, Human
uccuaagcuauucaguaaua

SEQ ID NO: 1906028 - RNA, 21 nt, Human
uccuaagcuauucaguaauaa

SEQ ID NO: 1906029 - RNA, 14 nt, Human
uccgccucuugggu

SEQ ID NO: 1906030 - RNA, 15 nt, Human
ucccuuccucuuucc

SEQ ID NO: 1906031 - RNA, 16 nt, Human
ucccuuccucuuucca

SEQ ID NO: 1906032 - RNA, 22 nt, Human
ucccccuucacaaagcccaagg

SEQ ID NO: 1906033 - RNA, 14 nt, Human
ucccccuucacaaa

SEQ ID NO: 1906034 - RNA, 15 nt, Human
ucccccuucacaaag

SEQ ID NO: 1906035 - RNA, 15 nt, Human
ucccccuuccaugga

SEQ ID NO: 1906036 - RNA, 13 nt, Human
ucccccccaugca

SEQ ID NO: 1906037 - RNA, 17 nt, Human
ucccccccaugcacugu

SEQ ID NO: 1906038 - RNA, 18 nt, Human
ucccccccaugcacugug

SEQ ID NO: 1906039 - RNA, 13 nt, Human
ucgugacaacacu

SEQ ID NO: 1906040 - RNA, 16 nt, Human
ucggcagauacugucu

SEQ ID NO: 1906041 - RNA, 16 nt, Human
ucggauuuggggugga

SEQ ID NO: 1906042 - RNA, 20 nt, Human
ucggaucuggggcucuggga

SEQ ID NO: 1906043 - RNA, 14 nt, Human
uccuuagaagugga

SEQ ID NO: 1906044 - RNA, 15 nt, Human
uccuuagaacauuuu

SEQ ID NO: 1906045 - RNA, 20 nt, Human
uccuuagaacauuuuaauuc

SEQ ID NO: 1906046 - RNA, 20 nt, Human
ucgugguaggacuguagaaa

SEQ ID NO: 1906047 - RNA, 15 nt, Human
ucgugguaggacugu

SEQ ID NO: 1906048 - RNA, 14 nt, Human
ucgugguaggacug

SEQ ID NO: 1906049 - RNA, 20 nt, Human
ucuaaaggcuaccuuuguau

SEQ ID NO: 1906050 - RNA, 19 nt, Human
ucuaaaggcuaccuuugua

SEQ ID NO: 1906051 - RNA, 17 nt, Human
ucuaaaggcuaccuuug

SEQ ID NO: 1906052 - RNA, 18 nt, Human
ucuaaaggcuaccuuugu

SEQ ID NO: 1906053 - RNA, 17 nt, Human
ucuaugacacaugcaag

SEQ ID NO: 1906054 - RNA, 14 nt, Human
ucuaugacacaugc

SEQ ID NO: 1906055 - RNA, 15 nt, Human
ucuaggaagacuuug

SEQ ID NO: 1906056 - RNA, 16 nt, Human
ucuaggaagacuuugg

SEQ ID NO: 1906057 - RNA, 19 nt, Human
ucuaggaagacuuuggaaa

SEQ ID NO: 1906058 - RNA, 21 nt, Human
ucuaggaagacuuuggaaaga

SEQ ID NO: 1906059 - RNA, 18 nt, Human
ucuacuugcucuggaccu

SEQ ID NO: 1906060 - RNA, 17 nt, Human
ucuacuugcucuggacc

SEQ ID NO: 1906061 - RNA, 14 nt, Human
ucuagugccuucua

SEQ ID NO: 1906062 - RNA, 18 nt, Human
ucuagugccuucuaaagg

SEQ ID NO: 1906063 - RNA, 23 nt, Human
ucuagugccuucuaaagguguug

SEQ ID NO: 1906064 - RNA, 16 nt, Human
ucuacagaggccaugg

SEQ ID NO: 1906065 - RNA, 15 nt, Human
ucuacagaggccaug

SEQ ID NO: 1906066 - RNA, 16 nt, Human
ucuacacauacaugua

SEQ ID NO: 1906067 - RNA, 23 nt, Human
ucuacaaucucccuucacaaguu

SEQ ID NO: 1906068 - RNA, 15 nt, Human
ucuacaaugugaacu

SEQ ID NO: 1906069 - RNA, 17 nt, Human
ucuacaaugugaacuuu

SEQ ID NO: 1906070 - RNA, 19 nt, Human
ucuacaaugugaacuuuau

SEQ ID NO: 1906071 - RNA, 20 nt, Human
ucuacaaugugaacuuuauu

SEQ ID NO: 1906072 - RNA, 14 nt, Human
ucuaccuuccugca

SEQ ID NO: 1906073 - RNA, 13 nt, Human
ucuacuugcucug

SEQ ID NO: 1906074 - RNA, 14 nt, Human
ucuacuugcucugg

SEQ ID NO: 1906075 - RNA, 15 nt, Human
ucuacuugcucugga

SEQ ID NO: 1906076 - RNA, 16 nt, Human
ucuacuugcucuggac

SEQ ID NO: 1906077 - RNA, 19 nt, Human
ucuacugggagccuaccca

SEQ ID NO: 1906078 - RNA, 16 nt, Human
ucuacugggagccuac

SEQ ID NO: 1906079 - RNA, 23 nt, Human
ucucaguccaugaagauguagag

SEQ ID NO: 1906080 - RNA, 13 nt, Human
ucuaugggacuca

SEQ ID NO: 1906081 - RNA, 12 nt, Human
ucuaugggacuc

SEQ ID NO: 1906082 - RNA, 19 nt, Human
ucuaugggacucaaugcac

SEQ ID NO: 1906083 - RNA, 16 nt, Human
ucucauacucaccuca

SEQ ID NO: 1906084 - RNA, 18 nt, Human
ucucauacucaccucacc

SEQ ID NO: 1906085 - RNA, 15 nt, Human
ucucauccugcaggc

SEQ ID NO: 1906086 - RNA, 13 nt, Human
ucucauccugcag

SEQ ID NO: 1906087 - RNA, 17 nt, Human
ucucaucucuuagcucc

SEQ ID NO: 1906088 - RNA, 19 nt, Human
ucucaucgccagacaacug

SEQ ID NO: 1906089 - RNA, 20 nt, Human
ucucaucucuuagcuccccu

SEQ ID NO: 1906090 - RNA, 12 nt, Human
ucucaucuuucu

SEQ ID NO: 1906091 - RNA, 22 nt, Human
ucucaucuuucuugaucaacau

SEQ ID NO: 1906092 - RNA, 13 nt, Human
ucucaucuuucuu

SEQ ID NO: 1906093 - RNA, 16 nt, Human
ucuccacccugcucuc

SEQ ID NO: 1906094 - RNA, 14 nt, Human
ucuccacccugcuc

SEQ ID NO: 1906095 - RNA, 17 nt, Human
ucuccacccugcucucc

SEQ ID NO: 1906096 - RNA, 13 nt, Human
ucuccacccugcu

SEQ ID NO: 1906097 - RNA, 18 nt, Human
ucucaugccccuggcugg

SEQ ID NO: 1906098 - RNA, 21 nt, Human
ucucaugccccuggcugggac

SEQ ID NO: 1906099 - RNA, 15 nt, Human
ucucaugauuuacag

SEQ ID NO: 1906100 - RNA, 22 nt, Human
ucuccaccugccagggacagag

SEQ ID NO: 1906101 - RNA, 17 nt, Human
ucuccaccugccaggga

SEQ ID NO: 1906102 - RNA, 19 nt, Human
ucuccaccugccagggaca

SEQ ID NO: 1906103 - RNA, 14 nt, Human
ucuccaccugccag

SEQ ID NO: 1906104 - RNA, 15 nt, Human
ucuccaccugccagg

SEQ ID NO: 1906105 - RNA, 16 nt, Human
ucuccaccugccaggg

SEQ ID NO: 1906106 - RNA, 13 nt, Human
ucucccccagccc

SEQ ID NO: 1906107 - RNA, 18 nt, Human
ucuccccucagagugcaa

SEQ ID NO: 1906108 - RNA, 13 nt, Human
ucuccccucagag

SEQ ID NO: 1906109 - RNA, 12 nt, Human
ucucccccagcc

SEQ ID NO: 1906110 - RNA, 20 nt, Human
ucucccccacccccuccccg

SEQ ID NO: 1906111 - RNA, 19 nt, Human
ucucccccacccccucccc

SEQ ID NO: 1906112 - RNA, 11 nt, Human
ucuccaggcug

SEQ ID NO: 1906113 - RNA, 15 nt, Human
ucucccccacccccu

SEQ ID NO: 1906114 - RNA, 12 nt, Human
ucucccccaccc

SEQ ID NO: 1906115 - RNA, 18 nt, Human
ucucccucagucuggccc

SEQ ID NO: 1906116 - RNA, 23 nt, Human
ucucccucagucuggcccuuccu

SEQ ID NO: 1906117 - RNA, 15 nt, Human
ucuccccugccccca

SEQ ID NO: 1906118 - RNA, 14 nt, Human
ucuccccugccccc

SEQ ID NO: 1906119 - RNA, 12 nt, Human
ucuccccugccc

SEQ ID NO: 1906120 - RNA, 16 nt, Human
ucuccccugcccccag

SEQ ID NO: 1906121 - RNA, 22 nt, Human
ucuccagccccuggaugcagcc

SEQ ID NO: 1906122 - RNA, 16 nt, Human
ucuccagccccuggau

SEQ ID NO: 1906123 - RNA, 18 nt, Human
ucuccagccccuggaugc

SEQ ID NO: 1906124 - RNA, 17 nt, Human
ucuccacucaguugcaa

SEQ ID NO: 1906125 - RNA, 14 nt, Human
ucuccagauguuuc

SEQ ID NO: 1906126 - RNA, 15 nt, Human
ucuccagauguuucc

SEQ ID NO: 1906127 - RNA, 18 nt, Human
ucuccagauguuuccaga

SEQ ID NO: 1906128 - RNA, 19 nt, Human
ucuccagauguuuccagac

SEQ ID NO: 1906129 - RNA, 12 nt, Human
ucuccagccccu

SEQ ID NO: 1906130 - RNA, 13 nt, Human
ucuccagccccug

SEQ ID NO: 1906131 - RNA, 14 nt, Human
ucuccagccccugg

SEQ ID NO: 1906132 - RNA, 15 nt, Human
ucuccagccccugga

SEQ ID NO: 1906133 - RNA, 20 nt, Human
ugaaucccacccacauguga

SEQ ID NO: 1906134 - RNA, 13 nt, Human
ugaaucuuugugc

SEQ ID NO: 1906135 - RNA, 22 nt, Human
ugaaucauuuuaccuuugacaa

SEQ ID NO: 1906136 - RNA, 23 nt, Human
ugaaucauuuuaccuuugacaaa

SEQ ID NO: 1906137 - RNA, 21 nt, Human
ugaaugaaagucuugugacua

SEQ ID NO: 1906138 - RNA, 23 nt, Human
ugaaugaaagucuugugacuagu

SEQ ID NO: 1906139 - RNA, 20 nt, Human
ugaaugaaagucuugugacu

SEQ ID NO: 1906140 - RNA, 14 nt, Human
ugaaugagaaucua

SEQ ID NO: 1906141 - RNA, 23 nt, Human
ugaaugaugauccuaggcauuug

SEQ ID NO: 1906142 - RNA, 16 nt, Human
ugaauuauuuucucuc

SEQ ID NO: 1906143 - RNA, 17 nt, Human
ugaauuaugaaacuuuu

SEQ ID NO: 1906144 - RNA, 15 nt, Human
ugaauuaugaaacuu

SEQ ID NO: 1906145 - RNA, 13 nt, Human
ugaauuaugaaac

SEQ ID NO: 1906146 - RNA, 15 nt, Human
ugaauuaucuauaca

SEQ ID NO: 1906147 - RNA, 18 nt, Human
ugaauugagcugcagaaa

SEQ ID NO: 1906148 - RNA, 20 nt, Human
ugaauugaggggauuaauau

SEQ ID NO: 1906149 - RNA, 15 nt, Human
ugaacucuuaaucaa

SEQ ID NO: 1906150 - RNA, 23 nt, Human
ugaagauaaguguauuuuucaau

SEQ ID NO: 1906151 - RNA, 14 nt, Human
ugaagauacugaaa

SEQ ID NO: 1906152 - RNA, 14 nt, Human
ugaacucuuaauca

SEQ ID NO: 1906153 - RNA, 17 nt, Human
ugaacuccuggccucaa

SEQ ID NO: 1906154 - RNA, 18 nt, Human
ugaagauacugaaauaaa

SEQ ID NO: 1906155 - RNA, 16 nt, Human
ugaagauacugaaaua

SEQ ID NO: 1906156 - RNA, 15 nt, Human
ugaagauacugaaau

SEQ ID NO: 1906157 - RNA, 20 nt, Human
ugaaggacauugcggacagc

SEQ ID NO: 1906158 - RNA, 19 nt, Human
ugaaggacauugcggacag

SEQ ID NO: 1906159 - RNA, 22 nt, Human
ugaaggacauugcggacagcca

SEQ ID NO: 1906160 - RNA, 12 nt, Human
ugaaggacccuu

SEQ ID NO: 1906161 - RNA, 18 nt, Human
ugaaggcaaaauugcaaa

SEQ ID NO: 1906162 - RNA, 15 nt, Human
ugaaggccccgccca

SEQ ID NO: 1906163 - RNA, 16 nt, Human
ugaaggccccgcccag

SEQ ID NO: 1906164 - RNA, 17 nt, Human
ugaaggccccgcccagg

SEQ ID NO: 1906165 - RNA, 21 nt, Human
ugaauaaaaacuuugcuaaau

SEQ ID NO: 1906166 - RNA, 14 nt, Human
ugaauaaaaacuuu

SEQ ID NO: 1906167 - RNA, 20 nt, Human
ugaauaaaaacuuugcuaaa

SEQ ID NO: 1906168 - RNA, 16 nt, Human
ugaccaggcauccucc

SEQ ID NO: 1906169 - RNA, 20 nt, Human
ugaccagcaccaucucuccu

SEQ ID NO: 1906170 - RNA, 16 nt, Human
ugaccauucuccaccu

SEQ ID NO: 1906171 - RNA, 17 nt, Human
ugaccauucuccaccug

SEQ ID NO: 1906172 - RNA, 18 nt, Human
ugaccauucuccaccugc

SEQ ID NO: 1906173 - RNA, 19 nt, Human
ugaccauucuccaccugcc

SEQ ID NO: 1906174 - RNA, 17 nt, Human
ugacccuguauauagcc

SEQ ID NO: 1906175 - RNA, 18 nt, Human
ugacccuguauauagccc

SEQ ID NO: 1906176 - RNA, 19 nt, Human
ugacccuguauauagccca

SEQ ID NO: 1906177 - RNA, 20 nt, Human
ugacccuguauauagcccag

SEQ ID NO: 1906178 - RNA, 13 nt, Human
ugaccgugaggcc

SEQ ID NO: 1906179 - RNA, 14 nt, Human
ugaccgugaggcca

SEQ ID NO: 1906180 - RNA, 16 nt, Human
ugaccgugaggccaga

SEQ ID NO: 1906181 - RNA, 20 nt, Human
ugaccgugaggccagagaca

SEQ ID NO: 1906182 - RNA, 13 nt, Human
ugacaugucuuuu

SEQ ID NO: 1906183 - RNA, 15 nt, Human
ugacaugucuuuucu

SEQ ID NO: 1906184 - RNA, 15 nt, Human
ugaccacagcacagc

SEQ ID NO: 1906185 - RNA, 16 nt, Human
ugaccacagcacagcc

SEQ ID NO: 1906186 - RNA, 17 nt, Human
ugaccacagcacagcca

SEQ ID NO: 1906187 - RNA, 19 nt, Human
ugaccacagcacagccaac

SEQ ID NO: 1906188 - RNA, 21 nt, Human
ugaccacgcuuucuagcuguu

SEQ ID NO: 1906189 - RNA, 19 nt, Human
ugaccagcaccaucucucc

SEQ ID NO: 1906190 - RNA, 20 nt, Human
ugaccacugcagaagacagu

SEQ ID NO: 1906191 - RNA, 22 nt, Human
ugaccacgcuuucuagcuguug

SEQ ID NO: 1906192 - RNA, 21 nt, Human
ugaauugcauuuuuuaaaaca

SEQ ID NO: 1906193 - RNA, 22 nt, Human
ugaauugcauuuuuuaaaacaa

SEQ ID NO: 1906194 - RNA, 18 nt, Human
ugacaaggauugcuacug

SEQ ID NO: 1906195 - RNA, 21 nt, Human
ugacagaacacugucuugaag

SEQ ID NO: 1906196 - RNA, 17 nt, Human
ugacagaacacugucuu

SEQ ID NO: 1906197 - RNA, 16 nt, Human
ugacagaacacugucu

SEQ ID NO: 1906198 - RNA, 15 nt, Human
ugacagaacacuguc

SEQ ID NO: 1906199 - RNA, 14 nt, Human
ugacagaacacugu

SEQ ID NO: 1906200 - RNA, 13 nt, Human
ugacagaacacug

SEQ ID NO: 1906201 - RNA, 19 nt, Human
ugacagagugagacucugu

SEQ ID NO: 1906202 - RNA, 23 nt, Human
ugacauaaguauuuaauucaugu

SEQ ID NO: 1906203 - RNA, 17 nt, Human
ugacauacauccaacau

SEQ ID NO: 1906204 - RNA, 17 nt, Human
ugacagagugagacucu

SEQ ID NO: 1906205 - RNA, 14 nt, Human
ugacagagugagac

SEQ ID NO: 1906206 - RNA, 23 nt, Human
ugacagaggcagccccauucugc

SEQ ID NO: 1906207 - RNA, 18 nt, Human
ugacagaggcagccccau

SEQ ID NO: 1906208 - RNA, 17 nt, Human
ugacagaggcagcccca

SEQ ID NO: 1906209 - RNA, 16 nt, Human
ugacagaggcagcccc

SEQ ID NO: 1906210 - RNA, 15 nt, Human
ugacagaggcagccc

SEQ ID NO: 1906211 - RNA, 14 nt, Human
ugacagaggcagcc

SEQ ID NO: 1906212 - RNA, 23 nt, Human
ugacagacacaggcccggcucca

SEQ ID NO: 1906213 - RNA, 20 nt, Human
ugacagacacaggcccggcu

SEQ ID NO: 1906214 - RNA, 13 nt, Human
ugacagaggcagc

SEQ ID NO: 1906215 - RNA, 14 nt, Human
ucuuguuucaauuc

SEQ ID NO: 1906216 - RNA, 16 nt, Human
ucuuguguguuuauug

SEQ ID NO: 1906217 - RNA, 12 nt, Human
ucuuguguuucu

SEQ ID NO: 1906218 - RNA, 21 nt, Human
ucuuguguguuuauugucaaa

SEQ ID NO: 1906219 - RNA, 17 nt, Human
ucuuucacauuuaaaua

SEQ ID NO: 1906220 - RNA, 23 nt, Human
ucuuucacccuuuucuguuugcu

SEQ ID NO: 1906221 - RNA, 15 nt, Human
ucuugcaugaggcua

SEQ ID NO: 1906222 - RNA, 17 nt, Human
ucuugcauauuuuguaa

SEQ ID NO: 1906223 - RNA, 16 nt, Human
ucucccuucauccuuc

SEQ ID NO: 1906224 - RNA, 20 nt, Human
ucuccucugcugcuggcugg

SEQ ID NO: 1906225 - RNA, 23 nt, Human
ucuugcaauggcagccuuggcaa

SEQ ID NO: 1906226 - RNA, 12 nt, Human
ucuuugccaagu

SEQ ID NO: 1906227 - RNA, 23 nt, Human
ucuuugauucuccuucagcccuc

SEQ ID NO: 1906228 - RNA, 20 nt, Human
ucuuugauucuccuucagcc

SEQ ID NO: 1906229 - RNA, 19 nt, Human
ucuuugauucuccuucagc

SEQ ID NO: 1906230 - RNA, 16 nt, Human
ucuuugauucuccuuc

SEQ ID NO: 1906231 - RNA, 15 nt, Human
ucuuugauucuccuu

SEQ ID NO: 1906232 - RNA, 12 nt, Human
ucuuucuuugga

SEQ ID NO: 1906233 - RNA, 15 nt, Human
ucuuugauccuucuc

SEQ ID NO: 1906234 - RNA, 21 nt, Human
ucuuuggacagaagcagcucu

SEQ ID NO: 1906235 - RNA, 22 nt, Human
ucuuuggacagaagcagcucuu

SEQ ID NO: 1906236 - RNA, 19 nt, Human
ucuuuggacagaagcagcu

SEQ ID NO: 1906237 - RNA, 17 nt, Human
ucuuuggacacucacac

SEQ ID NO: 1906238 - RNA, 12 nt, Human
ucuuugcuuugc

SEQ ID NO: 1906239 - RNA, 13 nt, Human
ucuuugcuuugcu

SEQ ID NO: 1906240 - RNA, 23 nt, Human
ucuuugcuuugcuuucugcucag

SEQ ID NO: 1906241 - RNA, 18 nt, Human
ucuuugcuuugcuuucug

SEQ ID NO: 1906242 - RNA, 21 nt, Human
ucuuugccaagaccuuucaaa

SEQ ID NO: 1906243 - RNA, 17 nt, Human
ucuuuccaaaguacacu

SEQ ID NO: 1906244 - RNA, 12 nt, Human
ucuuucaugagu

SEQ ID NO: 1906245 - RNA, 14 nt, Human
ucuuucaugaguuu

SEQ ID NO: 1906246 - RNA, 22 nt, Human
ucuuuccacuccuccuagccac

SEQ ID NO: 1906247 - RNA, 21 nt, Human
ucuuuccacuccuccuagcca

SEQ ID NO: 1906248 - RNA, 14 nt, Human
ucuuuccaaaguac

SEQ ID NO: 1906249 - RNA, 13 nt, Human
ucuuuccaaagua

SEQ ID NO: 1906250 - RNA, 16 nt, Human
ucuuucagccaagaau

SEQ ID NO: 1906251 - RNA, 19 nt, Human
ucuuucagccaagaauucu

SEQ ID NO: 1906252 - RNA, 20 nt, Human
ucuuucagccaagaauucuu

SEQ ID NO: 1906253 - RNA, 21 nt, Human
ucuuucagccaagaauucuua

SEQ ID NO: 1906254 - RNA, 23 nt, Human
ugaacaagcaaacccagacggcu

SEQ ID NO: 1906255 - RNA, 18 nt, Human
ugaacacaaacuguaaau

SEQ ID NO: 1906256 - RNA, 19 nt, Human
ugaacaguuguguuugaag

SEQ ID NO: 1906257 - RNA, 22 nt, Human
ugaacagcggcuggacuuggag

SEQ ID NO: 1906258 - RNA, 21 nt, Human
ugaacagcggcuggacuugga

SEQ ID NO: 1906259 - RNA, 15 nt, Human
ugaacagcggcugga

SEQ ID NO: 1906260 - RNA, 16 nt, Human
ugaacuccuggccuca

SEQ ID NO: 1906261 - RNA, 20 nt, Human
ugaaccaccacacccagccc

SEQ ID NO: 1906262 - RNA, 17 nt, Human
ugaaccaccacacccag

SEQ ID NO: 1906263 - RNA, 23 nt, Human
ugaaccacaucuugcucugcuga

SEQ ID NO: 1906264 - RNA, 19 nt, Human
ugaaccacaucuugcucug

SEQ ID NO: 1906265 - RNA, 22 nt, Human
ugaaccaagaacuuuccaggaa

SEQ ID NO: 1906266 - RNA, 18 nt, Human
ugaacauugcaauagaaa

SEQ ID NO: 1906267 - RNA, 22 nt, Human
ugaacaguuuaucgaccaguuu

SEQ ID NO: 1906268 - RNA, 12 nt, Human
ugaaauuauuca

SEQ ID NO: 1906269 - RNA, 19 nt, Human
ugaaauuaagaaggcaaaa

SEQ ID NO: 1906270 - RNA, 21 nt, Human
ugaaauuaagaaggcaaaaau

SEQ ID NO: 1906271 - RNA, 23 nt, Human
ugaaauuaagaaggcaaaaaugu

SEQ ID NO: 1906272 - RNA, 16 nt, Human
ugaaauauuuuacagu

SEQ ID NO: 1906273 - RNA, 17 nt, Human
ugaaacaagaagccaca

SEQ ID NO: 1906274 - RNA, 16 nt, Human
ugaaacaacuuggaaa

SEQ ID NO: 1906275 - RNA, 15 nt, Human
ugaaacaacuuggaa

SEQ ID NO: 1906276 - RNA, 11 nt, Human
ugaaacccagu

SEQ ID NO: 1906277 - RNA, 20 nt, Human
ugaaacccagucacugugag

SEQ ID NO: 1906278 - RNA, 14 nt, Human
ugaaacauuuuguc

SEQ ID NO: 1906279 - RNA, 16 nt, Human
ucuuuucacaaauaaa

SEQ ID NO: 1906280 - RNA, 15 nt, Human
ucuuuucacaaauaa

SEQ ID NO: 1906281 - RNA, 14 nt, Human
ucuuuucacaaaua

SEQ ID NO: 1906282 - RNA, 13 nt, Human
ucuuuucacaaau

SEQ ID NO: 1906283 - RNA, 12 nt, Human
ucuuuucacaaa

SEQ ID NO: 1906284 - RNA, 20 nt, Human
ugaaaagcuccauuuuuagu

SEQ ID NO: 1906285 - RNA, 13 nt, Human
ugaaaauuuugau

SEQ ID NO: 1906286 - RNA, 21 nt, Human
ugaaaauuuugauguuuuaag

SEQ ID NO: 1906287 - RNA, 19 nt, Human
ugaaaauuuugauguuuua

SEQ ID NO: 1906288 - RNA, 13 nt, Human
ugaaagggcccag

SEQ ID NO: 1906289 - RNA, 23 nt, Human
ugaaagggaguauuacaaaaaca

SEQ ID NO: 1906290 - RNA, 18 nt, Human
ugaaagcccugagcuuuc

SEQ ID NO: 1906291 - RNA, 15 nt, Human
ugaaagccccagaaa

SEQ ID NO: 1906292 - RNA, 16 nt, Human
ugaaagccccagaaau

SEQ ID NO: 1906293 - RNA, 17 nt, Human
ugaaagccccagaaauc

SEQ ID NO: 1906294 - RNA, 21 nt, Human
ugagaccacagagagagggga

SEQ ID NO: 1906295 - RNA, 14 nt, Human
ugagaccacuguua

SEQ ID NO: 1906296 - RNA, 19 nt, Human
ugagacucgcgacaaugca

SEQ ID NO: 1906297 - RNA, 16 nt, Human
ugagacucgagaacuu

SEQ ID NO: 1906298 - RNA, 15 nt, Human
ugagacucgagaacu

SEQ ID NO: 1906299 - RNA, 12 nt, Human
ugagacucgaga

SEQ ID NO: 1906300 - RNA, 21 nt, Human
ugaccucaggugauccaccca

SEQ ID NO: 1906301 - RNA, 20 nt, Human
ugaccucaggugauccaccc

SEQ ID NO: 1906302 - RNA, 19 nt, Human
ugaccgcgacuaauuucaa

SEQ ID NO: 1906303 - RNA, 17 nt, Human
ugagaaauuuauaaacu

SEQ ID NO: 1906304 - RNA, 19 nt, Human
ugagaacaaccaaaaucuu

SEQ ID NO: 1906305 - RNA, 16 nt, Human
ugagagugaacaaauu

SEQ ID NO: 1906306 - RNA, 17 nt, Human
ugagacucgagaacuuu

SEQ ID NO: 1906307 - RNA, 20 nt, Human
ugagacucgcgacaaugcaa

SEQ ID NO: 1906308 - RNA, 21 nt, Human
ugagacucgcgacaaugcaaa

SEQ ID NO: 1906309 - RNA, 22 nt, Human
ugagacucgcgacaaugcaaac

SEQ ID NO: 1906310 - RNA, 23 nt, Human
ugagacucgcgacaaugcaaacc

SEQ ID NO: 1906311 - RNA, 15 nt, Human
ugagcagggcucagc

SEQ ID NO: 1906312 - RNA, 14 nt, Human
ugagcagggcucag

SEQ ID NO: 1906313 - RNA, 13 nt, Human
ugagcagggcuca

SEQ ID NO: 1906314 - RNA, 12 nt, Human
ugagcagggcuc

SEQ ID NO: 1906315 - RNA, 15 nt, Human
ugagaucaaaacggu

SEQ ID NO: 1906316 - RNA, 14 nt, Human
ugagaucagccugg

SEQ ID NO: 1906317 - RNA, 15 nt, Human
ugagaucagccuggg

SEQ ID NO: 1906318 - RNA, 16 nt, Human
ugagcaucaggccagg

SEQ ID NO: 1906319 - RNA, 17 nt, Human
ugagcagggcucagcgg

SEQ ID NO: 1906320 - RNA, 16 nt, Human
ugagcagggcucagcg

SEQ ID NO: 1906321 - RNA, 19 nt, Human
ugagcagggcucagcgggg

SEQ ID NO: 1906322 - RNA, 18 nt, Human
ugagcaucaggccaggcc

SEQ ID NO: 1906323 - RNA, 19 nt, Human
ugagcaucaggccaggccc

SEQ ID NO: 1906324 - RNA, 20 nt, Human
ugagcaucaggccaggcccu

SEQ ID NO: 1906325 - RNA, 21 nt, Human
ugagccucagcauccuggcac

SEQ ID NO: 1906326 - RNA, 18 nt, Human
ugagccucagcauccugg

SEQ ID NO: 1906327 - RNA, 22 nt, Human
ugagccucagcauccuggcacc

SEQ ID NO: 1906328 - RNA, 17 nt, Human
ugagccucagcauccug

SEQ ID NO: 1906329 - RNA, 21 nt, Human
ugagccgagaucacgccacug

SEQ ID NO: 1906330 - RNA, 19 nt, Human
ugagccgagaucacgccac

SEQ ID NO: 1906331 - RNA, 12 nt, Human
ugagccucugcu

SEQ ID NO: 1906332 - RNA, 14 nt, Human
ugagccucugcucc

SEQ ID NO: 1906333 - RNA, 16 nt, Human
ugagccucugcucccc

SEQ ID NO: 1906334 - RNA, 17 nt, Human
ugagccucugcucccca

SEQ ID NO: 1906335 - RNA, 18 nt, Human
ugagccucugcuccccag

SEQ ID NO: 1906336 - RNA, 16 nt, Human
ugagcucucggaacug

SEQ ID NO: 1906337 - RNA, 20 nt, Human
ugagcucucggaacugcaug

SEQ ID NO: 1906338 - RNA, 17 nt, Human
ugagggaacagagaggu

SEQ ID NO: 1906339 - RNA, 14 nt, Human
ugagggagauccca

SEQ ID NO: 1906340 - RNA, 13 nt, Human
ugaggcucugccc

SEQ ID NO: 1906341 - RNA, 14 nt, Human
ugaggcucugcccu

SEQ ID NO: 1906342 - RNA, 20 nt, Human
ugaggcuccacuuggucugu

SEQ ID NO: 1906343 - RNA, 18 nt, Human
ugaggcuccacuuggucu

SEQ ID NO: 1906344 - RNA, 12 nt, Human
ugaggugggagg

SEQ ID NO: 1906345 - RNA, 13 nt, Human
ugaggugggagga

SEQ ID NO: 1906346 - RNA, 14 nt, Human
ugaggugggagaug

SEQ ID NO: 1906347 - RNA, 16 nt, Human
ugaggagcuugaaacc

SEQ ID NO: 1906348 - RNA, 17 nt, Human
ugaggcagguccccaga

SEQ ID NO: 1906349 - RNA, 16 nt, Human
ugaggcagguccccag

SEQ ID NO: 1906350 - RNA, 14 nt, Human
ugaggcaggucccc

SEQ ID NO: 1906351 - RNA, 13 nt, Human
ugagcugggauga

SEQ ID NO: 1906352 - RNA, 20 nt, Human
ugagcuggggaugucucuca

SEQ ID NO: 1906353 - RNA, 12 nt, Human
ugaggagcuggg

SEQ ID NO: 1906354 - RNA, 13 nt, Human
ugaggagcugggg

SEQ ID NO: 1906355 - RNA, 20 nt, Human
ugaggagcuggggaucccuc

SEQ ID NO: 1906356 - RNA, 23 nt, Human
ugaggcauuuguuugaacugaua

SEQ ID NO: 1906357 - RNA, 23 nt, Human
ugaggcuagugugguguuuccug

SEQ ID NO: 1906358 - RNA, 21 nt, Human
ugaggcauuuguuugaacuga

SEQ ID NO: 1906359 - RNA, 17 nt, Human
ugaggcuaguguggugu

SEQ ID NO: 1906360 - RNA, 20 nt, Human
ugaggcauuuguuugaacug

SEQ ID NO: 1906361 - RNA, 19 nt, Human
ugaggcauuuguuugaacu

SEQ ID NO: 1906362 - RNA, 12 nt, Human
ugaggcauuugu

SEQ ID NO: 1906363 - RNA, 23 nt, Human
ugaguugacuugacagaacacug

SEQ ID NO: 1906364 - RNA, 19 nt, Human
ugaguuucucucacauuac

SEQ ID NO: 1906365 - RNA, 14 nt, Human
ugagugagcaugcc

SEQ ID NO: 1906366 - RNA, 16 nt, Human
ugaguugauagcacag

SEQ ID NO: 1906367 - RNA, 20 nt, Human
ugaguugauagcacagaccc

SEQ ID NO: 1906368 - RNA, 18 nt, Human
ugauaacuagauggugcu

SEQ ID NO: 1906369 - RNA, 21 nt, Human
ugauaacuagauggugcugag

SEQ ID NO: 1906370 - RNA, 22 nt, Human
ugauaacuagauggugcugaga

SEQ ID NO: 1906371 - RNA, 23 nt, Human
ugauaacuagauggugcugagaa

SEQ ID NO: 1906372 - RNA, 23 nt, Human
ugaguuuucaccucgaauuuugu

SEQ ID NO: 1906373 - RNA, 13 nt, Human
ugagucugaaggc

SEQ ID NO: 1906374 - RNA, 15 nt, Human
ugagucugaaggcug

SEQ ID NO: 1906375 - RNA, 17 nt, Human
ugagucugaaggcuggg

SEQ ID NO: 1906376 - RNA, 18 nt, Human
ugagucugaaggcugggu

SEQ ID NO: 1906377 - RNA, 17 nt, Human
ugagugaaccuguauaa

SEQ ID NO: 1906378 - RNA, 16 nt, Human
ugagucuguuuuguaa

SEQ ID NO: 1906379 - RNA, 17 nt, Human
ugagucuguuuuguaaa

SEQ ID NO: 1906380 - RNA, 18 nt, Human
ugagucuguuuuguaaag

SEQ ID NO: 1906381 - RNA, 19 nt, Human
ugagucgaggacagggagg

SEQ ID NO: 1906382 - RNA, 17 nt, Human
ugagucgcgcaccgaaa

SEQ ID NO: 1906383 - RNA, 21 nt, Human
ugaggugggaggaucucuuga

SEQ ID NO: 1906384 - RNA, 13 nt, Human
ugaguccagaagu

SEQ ID NO: 1906385 - RNA, 19 nt, Human
ugaguccagaaguuugaga

SEQ ID NO: 1906386 - RNA, 18 nt, Human
ugauccaagcaagacuga

SEQ ID NO: 1906387 - RNA, 17 nt, Human
ugauccaagcugguccc

SEQ ID NO: 1906388 - RNA, 15 nt, Human
ugauccaagcugguc

SEQ ID NO: 1906389 - RNA, 14 nt, Human
ugauccaagcuggu

SEQ ID NO: 1906390 - RNA, 13 nt, Human
ugauccaagcugg

SEQ ID NO: 1906391 - RNA, 12 nt, Human
ugaucaggaccu

SEQ ID NO: 1906392 - RNA, 20 nt, Human
ugaucaggaccuccaagcca

SEQ ID NO: 1906393 - RNA, 13 nt, Human
ugauagcacagac

SEQ ID NO: 1906394 - RNA, 14 nt, Human
ugauagcacagacc

SEQ ID NO: 1906395 - RNA, 21 nt, Human
ugauagacacauaugaggggg

SEQ ID NO: 1906396 - RNA, 22 nt, Human
ugauagacacauaugaggggga

SEQ ID NO: 1906397 - RNA, 19 nt, Human
ugauccacccaccucagcc

SEQ ID NO: 1906398 - RNA, 18 nt, Human
ugauccacccaccucagc

SEQ ID NO: 1906399 - RNA, 17 nt, Human
ugauccacccaccucag

SEQ ID NO: 1906400 - RNA, 17 nt, Human
ugaucucucgugauuga

SEQ ID NO: 1906401 - RNA, 15 nt, Human
ugaucuggaacccag

SEQ ID NO: 1906402 - RNA, 17 nt, Human
ugaucuggaacccagac

SEQ ID NO: 1906403 - RNA, 18 nt, Human
ugaucuggaacccagacu

SEQ ID NO: 1906404 - RNA, 19 nt, Human
ugaucuggaacccagacuc

SEQ ID NO: 1906405 - RNA, 19 nt, Human
ugaucugugaauugagcug

SEQ ID NO: 1906406 - RNA, 20 nt, Human
ugaucuucuuuauaauucua

SEQ ID NO: 1906407 - RNA, 14 nt, Human
ugaucuucaacaaa

SEQ ID NO: 1906408 - RNA, 15 nt, Human
ugaucuucaacaaau

SEQ ID NO: 1906409 - RNA, 21 nt, Human
ugaucuucaacaaauugcccu

SEQ ID NO: 1906410 - RNA, 22 nt, Human
ugaucuucaacaaauugcccuu

SEQ ID NO: 1906411 - RNA, 20 nt, Human
ugaugcuacaggauuugaaa

SEQ ID NO: 1906412 - RNA, 11 nt, Human
ugaugccuggc

SEQ ID NO: 1906413 - RNA, 23 nt, Human
ugaugcuacaggauuugaaauug

SEQ ID NO: 1906414 - RNA, 23 nt, Human
ugaugcgggccagugcuccagcc

SEQ ID NO: 1906415 - RNA, 16 nt, Human
ugaucuuugcagacag

SEQ ID NO: 1906416 - RNA, 18 nt, Human
ugaucuuugcagacaggc

SEQ ID NO: 1906417 - RNA, 13 nt, Human
ugaugguuguaca

SEQ ID NO: 1906418 - RNA, 14 nt, Human
ugaugguuguacau

SEQ ID NO: 1906419 - RNA, 16 nt, Human
ugaugcuucuucagag

SEQ ID NO: 1906420 - RNA, 17 nt, Human
ugaugcuucuucagaga

SEQ ID NO: 1906421 - RNA, 18 nt, Human
ugaugcuucuucagagac

SEQ ID NO: 1906422 - RNA, 18 nt, Human
ugaugugggucaaggaau

SEQ ID NO: 1906423 - RNA, 16 nt, Human
ugauguguuaucucuu

SEQ ID NO: 1906424 - RNA, 13 nt, Human
ugauuauauguca

SEQ ID NO: 1906425 - RNA, 13 nt, Human
ugauuacugucaa

SEQ ID NO: 1906426 - RNA, 24 nt, Human
ugauuacugucaaggcugcuuaga

SEQ ID NO: 1906427 - RNA, 20 nt, Human
ugauguucuuucacccuuuu

SEQ ID NO: 1906428 - RNA, 16 nt, Human
ugauuaccagggacug

SEQ ID NO: 1906429 - RNA, 20 nt, Human
ugauucaacagguuuuccug

SEQ ID NO: 1906430 - RNA, 16 nt, Human
ugauuauuuauuauuu

SEQ ID NO: 1906431 - RNA, 13 nt, Human
ugauucagacagc

SEQ ID NO: 1906432 - RNA, 14 nt, Human
ugauucagacagcu

SEQ ID NO: 1906433 - RNA, 15 nt, Human
ugauucagacagcug

SEQ ID NO: 1906434 - RNA, 16 nt, Human
ugauucagacagcugc

SEQ ID NO: 1906435 - RNA, 20 nt, Human
ugauucacuucacgcuuuca

SEQ ID NO: 1906436 - RNA, 21 nt, Human
ugauucuccugccucagccuc

SEQ ID NO: 1906437 - RNA, 23 nt, Human
ugauucagacagcugccugggau

SEQ ID NO: 1906438 - RNA, 21 nt, Human
ugauucuccuucagcccucac

SEQ ID NO: 1906439 - RNA, 19 nt, Human
ugauucuccuucagcccuc

SEQ ID NO: 1906440 - RNA, 18 nt, Human
ugauucuccuucagcccu

SEQ ID NO: 1906441 - RNA, 16 nt, Human
ugauucuccuucagcc

SEQ ID NO: 1906442 - RNA, 14 nt, Human
ugauucuccuucag

SEQ ID NO: 1906443 - RNA, 13 nt, Human
ugauucuccuuca

SEQ ID NO: 1906444 - RNA, 12 nt, Human
ugauucuccuuc

SEQ ID NO: 1906445 - RNA, 18 nt, Human
ugauucagacagcugccu

SEQ ID NO: 1906446 - RNA, 19 nt, Human
ugauucagacagcugccug

SEQ ID NO: 1906447 - RNA, 20 nt, Human
ugauucagacagcugccugg

SEQ ID NO: 1906448 - RNA, 21 nt, Human
ugauucagacagcugccuggg

SEQ ID NO: 1906449 - RNA, 17 nt, Human
ugauugacagcuuugcu

SEQ ID NO: 1906450 - RNA, 19 nt, Human
ugauugacagcuuugcugc

SEQ ID NO: 1906451 - RNA, 12 nt, Human
ugauugacagcu

SEQ ID NO: 1906452 - RNA, 13 nt, Human
ugauugacagcuu

SEQ ID NO: 1906453 - RNA, 12 nt, Human
ugauugauuuga

SEQ ID NO: 1906454 - RNA, 21 nt, Human
ugauugacagcuuugcugcug

SEQ ID NO: 1906455 - RNA, 14 nt, Human
ugauugauuugaag

SEQ ID NO: 1906456 - RNA, 23 nt, Human
ugauucuccuucagcccucaccc

SEQ ID NO: 1906457 - RNA, 16 nt, Human
ugauucugcaguaaau

SEQ ID NO: 1906458 - RNA, 22 nt, Human
ugauucugcaguaaaucuuuua

SEQ ID NO: 1906459 - RNA, 16 nt, Human
ugauugugucucuugg

SEQ ID NO: 1906460 - RNA, 18 nt, Human
ugauuguucgggugugca

SEQ ID NO: 1906461 - RNA, 19 nt, Human
ugauuguucgggugugcaa

SEQ ID NO: 1906462 - RNA, 21 nt, Human
ugauuguggaauggagauuca

SEQ ID NO: 1906463 - RNA, 14 nt, Human
ugauuguggaaugg

SEQ ID NO: 1906464 - RNA, 18 nt, Human
ugauuguggaauggagau

SEQ ID NO: 1906465 - RNA, 13 nt, Human
ugauuggaggggg

SEQ ID NO: 1906466 - RNA, 21 nt, Human
ugauuggaggggggagguggg

SEQ ID NO: 1906467 - RNA, 12 nt, Human
ugcugcugcugc

SEQ ID NO: 1906468 - RNA, 12 nt, Human
ugcugcuugagg

SEQ ID NO: 1906469 - RNA, 20 nt, Human
ugcugggauuacagguguga

SEQ ID NO: 1906470 - RNA, 19 nt, Human
ugcugcuugaggcaacuca

SEQ ID NO: 1906471 - RNA, 14 nt, Human
ugcugggccccugc

SEQ ID NO: 1906472 - RNA, 16 nt, Human
ugcugggccccugccu

SEQ ID NO: 1906473 - RNA, 17 nt, Human
ugcugggccccugccuc

SEQ ID NO: 1906474 - RNA, 18 nt, Human
ugcugggccccugccucu

SEQ ID NO: 1906475 - RNA, 19 nt, Human
ugcugggccccugccucuc

SEQ ID NO: 1906476 - RNA, 21 nt, Human
ugcugggccccugccucucug

SEQ ID NO: 1906477 - RNA, 22 nt, Human
ugcugggccccugccucucugc

SEQ ID NO: 1906478 - RNA, 23 nt, Human
ugcugggccccugccucucugca

SEQ ID NO: 1906479 - RNA, 24 nt, Human
ugcugggccccugccucucugcag

SEQ ID NO: 1906480 - RNA, 15 nt, Human
ugcugccugcuuuuu

SEQ ID NO: 1906481 - RNA, 17 nt, Human
ugcugccugcuuuuuau

SEQ ID NO: 1906482 - RNA, 14 nt, Human
ugcugcauuuaaaa

SEQ ID NO: 1906483 - RNA, 23 nt, Human
ugcugcauuuaaaagauacaguu

SEQ ID NO: 1906484 - RNA, 19 nt, Human
ugcugcauuuaaaagauac

SEQ ID NO: 1906485 - RNA, 18 nt, Human
ugcugcauuuaaaagaua

SEQ ID NO: 1906486 - RNA, 17 nt, Human
ugcugcauuuaaaagau

SEQ ID NO: 1906487 - RNA, 18 nt, Human
ugcuguaacuuucugaaa

SEQ ID NO: 1906488 - RNA, 18 nt, Human
ugcugguuuuucaguuuu

SEQ ID NO: 1906489 - RNA, 16 nt, Human
ugcugguuuuucaguu

SEQ ID NO: 1906490 - RNA, 18 nt, Human
ugcuguaaauuuggcuuc

SEQ ID NO: 1906491 - RNA, 19 nt, Human
ugcuguaaauuuggcuucu

SEQ ID NO: 1906492 - RNA, 20 nt, Human
ugcuguaaauuuggcuucug

SEQ ID NO: 1906493 - RNA, 15 nt, Human
ugcugguuuuucagu

SEQ ID NO: 1906494 - RNA, 12 nt, Human
ugcugguuuuuc

SEQ ID NO: 1906495 - RNA, 15 nt, Human
ugcugguuuuaacaa

SEQ ID NO: 1906496 - RNA, 16 nt, Human
ugcugguuuuaacaac

SEQ ID NO: 1906497 - RNA, 13 nt, Human
ugcugguuuuagu

SEQ ID NO: 1906498 - RNA, 17 nt, Human
ugcuguucaugaaagau

SEQ ID NO: 1906499 - RNA, 22 nt, Human
ugcuguucucuugggaacugaa

SEQ ID NO: 1906500 - RNA, 16 nt, Human
ugcuguucaugaaaga

SEQ ID NO: 1906501 - RNA, 16 nt, Human
ugcuguuaucccugcc

SEQ ID NO: 1906502 - RNA, 17 nt, Human
ugcugggcuugucugua

SEQ ID NO: 1906503 - RNA, 20 nt, Human
ugcugggggggauuguaaaa

SEQ ID NO: 1906504 - RNA, 13 nt, Human
ugcuggguguggc

SEQ ID NO: 1906505 - RNA, 23 nt, Human
ugcucuccgaccagacaccuuga

SEQ ID NO: 1906506 - RNA, 16 nt, Human
ugcucuagugccuucu

SEQ ID NO: 1906507 - RNA, 14 nt, Human
ugcucuagugccuu

SEQ ID NO: 1906508 - RNA, 17 nt, Human
ugcucuugaugccuggc

SEQ ID NO: 1906509 - RNA, 13 nt, Human
ugcucuagugccu

SEQ ID NO: 1906510 - RNA, 15 nt, Human
ugcucaggagcccug

SEQ ID NO: 1906511 - RNA, 17 nt, Human
ugcucacauaucuguca

SEQ ID NO: 1906512 - RNA, 18 nt, Human
ugcucaggagcccuggga

SEQ ID NO: 1906513 - RNA, 19 nt, Human
ugcucaggagcccugggag

SEQ ID NO: 1906514 - RNA, 20 nt, Human
ugcucaggagcccugggagg

SEQ ID NO: 1906515 - RNA, 14 nt, Human
ugcucagaccagcu

SEQ ID NO: 1906516 - RNA, 19 nt, Human
ugcucagggaaaagcagcu

SEQ ID NO: 1906517 - RNA, 17 nt, Human
ugcuagaacucccuuuc

SEQ ID NO: 1906518 - RNA, 15 nt, Human
ugcuagaacucccuu

SEQ ID NO: 1906519 - RNA, 14 nt, Human
ugcuagaacucccu

SEQ ID NO: 1906520 - RNA, 13 nt, Human
ugcuagaacuccc

SEQ ID NO: 1906521 - RNA, 22 nt, Human
ugcuaggaacacuccuucacag

SEQ ID NO: 1906522 - RNA, 20 nt, Human
ugcuaggcccccggguguga

SEQ ID NO: 1906523 - RNA, 21 nt, Human
ugcuaggaacacuccuucaca

SEQ ID NO: 1906524 - RNA, 20 nt, Human
ugcuaggaacacuccuucac

SEQ ID NO: 1906525 - RNA, 17 nt, Human
ugcggacagccacggcc

SEQ ID NO: 1906526 - RNA, 20 nt, Human
ugcuaacuagcuuggaaacu

SEQ ID NO: 1906527 - RNA, 22 nt, Human
ugcuaacuagcuuggaaacugg

SEQ ID NO: 1906528 - RNA, 22 nt, Human
ugcuacuguccuacccacccuc

SEQ ID NO: 1906529 - RNA, 21 nt, Human
ugcuacuguccuacccacccu

SEQ ID NO: 1906530 - RNA, 22 nt, Human
ugcuaagaauauuugaauguau

SEQ ID NO: 1906531 - RNA, 21 nt, Human
ugcuaagaauauuugaaugua

SEQ ID NO: 1906532 - RNA, 17 nt, Human
ugcuaagaauauuugaa

SEQ ID NO: 1906533 - RNA, 19 nt, Human
ugcuacucaaguagcauuu

SEQ ID NO: 1906534 - RNA, 20 nt, Human
ugccuugcauaauggucaga

SEQ ID NO: 1906535 - RNA, 13 nt, Human
ugccuuggcucag

SEQ ID NO: 1906536 - RNA, 16 nt, Human
ugccuuggcucagaca

SEQ ID NO: 1906537 - RNA, 17 nt, Human
ugccuuggcucagacau

SEQ ID NO: 1906538 - RNA, 19 nt, Human
ugccuuggcucagacaugu

SEQ ID NO: 1906539 - RNA, 17 nt, Human
ugcgccaccgcccagag

SEQ ID NO: 1906540 - RNA, 22 nt, Human
ugcauaguaccaaucauuuuaa

SEQ ID NO: 1906541 - RNA, 18 nt, Human
ugcauauuauuuuauguu

SEQ ID NO: 1906542 - RNA, 19 nt, Human
ugcauauguugaauacuuu

SEQ ID NO: 1906543 - RNA, 21 nt, Human
ugcauaguaccaaucauuuua

SEQ ID NO: 1906544 - RNA, 20 nt, Human
ugcauaguaccaaucauuuu

SEQ ID NO: 1906545 - RNA, 19 nt, Human
ugcaguuugagacaggaga

SEQ ID NO: 1906546 - RNA, 16 nt, Human
ugcaguugccagucac

SEQ ID NO: 1906547 - RNA, 21 nt, Human
ugcaguggugcgaucuggguu

SEQ ID NO: 1906548 - RNA, 21 nt, Human
ugcagggcagucauuggcugu

SEQ ID NO: 1906549 - RNA, 20 nt, Human
ugcaguggugcgaucugggu

SEQ ID NO: 1906550 - RNA, 13 nt, Human
ugcagggcaguca

SEQ ID NO: 1906551 - RNA, 14 nt, Human
ugcagggcagucau

SEQ ID NO: 1906552 - RNA, 21 nt, Human
ugcaguuacacuaaaagguga

SEQ ID NO: 1906553 - RNA, 14 nt, Human
ugcagugugaaaag

SEQ ID NO: 1906554 - RNA, 13 nt, Human
ugcagggaguccg

SEQ ID NO: 1906555 - RNA, 16 nt, Human
ugcagggacaaagagg

SEQ ID NO: 1906556 - RNA, 15 nt, Human
ugcagggacaaagag

SEQ ID NO: 1906557 - RNA, 16 nt, Human
ugccacuaaauugaca

SEQ ID NO: 1906558 - RNA, 20 nt, Human
ugccaggaagccagcaggcu

SEQ ID NO: 1906559 - RNA, 22 nt, Human
ugccaggaagccagcaggcucu

SEQ ID NO: 1906560 - RNA, 14 nt, Human
ugccaggcauggug

SEQ ID NO: 1906561 - RNA, 23 nt, Human
ugcauuuggugguuucagaaaug

SEQ ID NO: 1906562 - RNA, 18 nt, Human
ugccaaaaugcucuagug

SEQ ID NO: 1906563 - RNA, 15 nt, Human
ugcauuuguauauuu

SEQ ID NO: 1906564 - RNA, 17 nt, Human
ugccaaaaugcucuagu

SEQ ID NO: 1906565 - RNA, 21 nt, Human
ugcauuuggugguuucagaaa

SEQ ID NO: 1906566 - RNA, 21 nt, Human
ugcauggugccccaggaccag

SEQ ID NO: 1906567 - RNA, 22 nt, Human
ugcauggugccccaggaccagc

SEQ ID NO: 1906568 - RNA, 17 nt, Human
ugcauggugccccagga

SEQ ID NO: 1906569 - RNA, 18 nt, Human
ugcauggugccccaggac

SEQ ID NO: 1906570 - RNA, 19 nt, Human
ugcauggugccccaggacc

SEQ ID NO: 1906571 - RNA, 20 nt, Human
ugcauggugccccaggacca

SEQ ID NO: 1906572 - RNA, 15 nt, Human
ugccucaagagaagg

SEQ ID NO: 1906573 - RNA, 14 nt, Human
ugccucaagagaag

SEQ ID NO: 1906574 - RNA, 20 nt, Human
ugccucggccucccaaagug

SEQ ID NO: 1906575 - RNA, 15 nt, Human
ugcccugcccaccug

SEQ ID NO: 1906576 - RNA, 20 nt, Human
ugcccggcuaauuuuuguaa

SEQ ID NO: 1906577 - RNA, 16 nt, Human
ugcccugcccaccugg

SEQ ID NO: 1906578 - RNA, 20 nt, Human
ugcccugcccaccuggccuc

SEQ ID NO: 1906579 - RNA, 23 nt, Human
ugcccugugaguacuacaguccu

SEQ ID NO: 1906580 - RNA, 22 nt, Human
ugccguuacuuuucauauuugc

SEQ ID NO: 1906581 - RNA, 16 nt, Human
ugccccuggcagcccc

SEQ ID NO: 1906582 - RNA, 14 nt, Human
ugcccggcugcgga

SEQ ID NO: 1906583 - RNA, 12 nt, Human
ugcccggcugcg

SEQ ID NO: 1906584 - RNA, 20 nt, Human
ugcccaggcuggcgugcagu

SEQ ID NO: 1906585 - RNA, 19 nt, Human
ugcccaggcuggcgugcag

SEQ ID NO: 1906586 - RNA, 18 nt, Human
ugcccaggcuggcgugca

SEQ ID NO: 1906587 - RNA, 15 nt, Human
uggcucccaggacac

SEQ ID NO: 1906588 - RNA, 14 nt, Human
uggcucccaggaca

SEQ ID NO: 1906589 - RNA, 13 nt, Human
uggcucccaggac

SEQ ID NO: 1906590 - RNA, 12 nt, Human
uggcuccucuca

SEQ ID NO: 1906591 - RNA, 14 nt, Human
uggcuccucucagu

SEQ ID NO: 1906592 - RNA, 11 nt, Human
uggcugcuuca

SEQ ID NO: 1906593 - RNA, 13 nt, Human
uggcuccucucag

SEQ ID NO: 1906594 - RNA, 15 nt, Human
uggcugcuucaagga

SEQ ID NO: 1906595 - RNA, 16 nt, Human
uggcugcuucaaggau

SEQ ID NO: 1906596 - RNA, 15 nt, Human
uggcgggguggggug

SEQ ID NO: 1906597 - RNA, 23 nt, Human
uggccucccaacucaccccagcc

SEQ ID NO: 1906598 - RNA, 18 nt, Human
uggccucccacagacuca

SEQ ID NO: 1906599 - RNA, 22 nt, Human
uggcgcagcauauucaggaagc

SEQ ID NO: 1906600 - RNA, 23 nt, Human
uggcgcagcauauucaggaagcu

SEQ ID NO: 1906601 - RNA, 16 nt, Human
uggcgcugccccuggc

SEQ ID NO: 1906602 - RNA, 23 nt, Human
uggcgcugccccuggcagccccu

SEQ ID NO: 1906603 - RNA, 17 nt, Human
uggccuaugcacauaug

SEQ ID NO: 1906604 - RNA, 15 nt, Human
uggccuaugcacaua

SEQ ID NO: 1906605 - RNA, 14 nt, Human
uggccuaugcacau

SEQ ID NO: 1906606 - RNA, 13 nt, Human
uggccuaugcaca

SEQ ID NO: 1906607 - RNA, 20 nt, Human
uggccuaugcacauauggac

SEQ ID NO: 1906608 - RNA, 20 nt, Human
uggccccugcccggcugcgg

SEQ ID NO: 1906609 - RNA, 16 nt, Human
uggccccugcccggcu

SEQ ID NO: 1906610 - RNA, 15 nt, Human
uggccccugcccggc

SEQ ID NO: 1906611 - RNA, 14 nt, Human
uggccccugcccgg

SEQ ID NO: 1906612 - RNA, 21 nt, Human
uggccccgccgccugguacuc

SEQ ID NO: 1906613 - RNA, 17 nt, Human
uggcccaggugaguccu

SEQ ID NO: 1906614 - RNA, 13 nt, Human
uggccccgccgcc

SEQ ID NO: 1906615 - RNA, 15 nt, Human
uggccccgccgccug

SEQ ID NO: 1906616 - RNA, 20 nt, Human
uggccccgccgccugguacu

SEQ ID NO: 1906617 - RNA, 13 nt, Human
uggccaggcuggu

SEQ ID NO: 1906618 - RNA, 17 nt, Human
uggcccagggcccagag

SEQ ID NO: 1906619 - RNA, 18 nt, Human
uggcccagggcccagagc

SEQ ID NO: 1906620 - RNA, 20 nt, Human
uggcccagggcccagagccc

SEQ ID NO: 1906621 - RNA, 21 nt, Human
uggcccagggcccagagccca

SEQ ID NO: 1906622 - RNA, 22 nt, Human
uggcccagggcccagagcccag

SEQ ID NO: 1906623 - RNA, 23 nt, Human
uggcccagggcccagagcccagc

SEQ ID NO: 1906624 - RNA, 18 nt, Human
uggccagaugcaccagcc

SEQ ID NO: 1906625 - RNA, 17 nt, Human
uggccagaugcaccagc

SEQ ID NO: 1906626 - RNA, 17 nt, Human
uggcagaguugaagaca

SEQ ID NO: 1906627 - RNA, 19 nt, Human
uggcagaguugaagacaga

SEQ ID NO: 1906628 - RNA, 21 nt, Human
uggcagaguggauucuugaac

SEQ ID NO: 1906629 - RNA, 15 nt, Human
uggcagaguugaaga

SEQ ID NO: 1906630 - RNA, 19 nt, Human
uggccagaugcaccagccc

SEQ ID NO: 1906631 - RNA, 14 nt, Human
uggacacuguacaa

SEQ ID NO: 1906632 - RNA, 23 nt, Human
uggacacuuaauacuaccuugaa

SEQ ID NO: 1906633 - RNA, 14 nt, Human
uggacaggcuggcu

SEQ ID NO: 1906634 - RNA, 23 nt, Human
uggacaguaucacugucuuuccu

SEQ ID NO: 1906635 - RNA, 21 nt, Human
uggacaguaucacugucuuuc

SEQ ID NO: 1906636 - RNA, 17 nt, Human
uggacugaccuggucca

SEQ ID NO: 1906637 - RNA, 19 nt, Human
uggacugaccugguccaca

SEQ ID NO: 1906638 - RNA, 17 nt, Human
uggacuccggcccuccu

SEQ ID NO: 1906639 - RNA, 16 nt, Human
uggacugaggccugag

SEQ ID NO: 1906640 - RNA, 15 nt, Human
uggacugaggccuga

SEQ ID NO: 1906641 - RNA, 14 nt, Human
uggacugaggccug

SEQ ID NO: 1906642 - RNA, 11 nt, Human
uggacugaggc

SEQ ID NO: 1906643 - RNA, 14 nt, Human
uggacuccggcccu

SEQ ID NO: 1906644 - RNA, 14 nt, Human
uggacucagggcag

SEQ ID NO: 1906645 - RNA, 15 nt, Human
uggacucagggcagc

SEQ ID NO: 1906646 - RNA, 18 nt, Human
uggacucagggcagcgcc

SEQ ID NO: 1906647 - RNA, 20 nt, Human
uggacucagggcagcgccag

SEQ ID NO: 1906648 - RNA, 21 nt, Human
uggaggaaggaaacccagcuc

SEQ ID NO: 1906649 - RNA, 23 nt, Human
uggaggaaggaaacccagcucug

SEQ ID NO: 1906650 - RNA, 22 nt, Human
uggaggagcucaggacacuaau

SEQ ID NO: 1906651 - RNA, 20 nt, Human
uggaggagcucaggacacua

SEQ ID NO: 1906652 - RNA, 21 nt, Human
uggaguuucauguacaagaug

SEQ ID NO: 1906653 - RNA, 15 nt, Human
uggaucugugagggg

SEQ ID NO: 1906654 - RNA, 16 nt, Human
uggcaaaaaggcagga

SEQ ID NO: 1906655 - RNA, 20 nt, Human
uggauuuuugacucuggcaa

SEQ ID NO: 1906656 - RNA, 19 nt, Human
uggauuuuugacucuggca

SEQ ID NO: 1906657 - RNA, 17 nt, Human
uggauuuuugucuugug

SEQ ID NO: 1906658 - RNA, 19 nt, Human
uggaucugugaggggcucu

SEQ ID NO: 1906659 - RNA, 12 nt, Human
uggcaaaaaggc

SEQ ID NO: 1906660 - RNA, 17 nt, Human
uggcaaagcuuuuagaa

SEQ ID NO: 1906661 - RNA, 18 nt, Human
uggcaaagcuuuuagaaa

SEQ ID NO: 1906662 - RNA, 16 nt, Human
uggcaaagcuuuuaga

SEQ ID NO: 1906663 - RNA, 19 nt, Human
uggcaaacucuccaccaca

SEQ ID NO: 1906664 - RNA, 20 nt, Human
uggcaaaaggaucuuugugg

SEQ ID NO: 1906665 - RNA, 21 nt, Human
uggcaaaaggaucuuuguggc

SEQ ID NO: 1906666 - RNA, 15 nt, Human
uggcacuauaaugua

SEQ ID NO: 1906667 - RNA, 16 nt, Human
uggcacuauaauguaa

SEQ ID NO: 1906668 - RNA, 22 nt, Human
uggcagaauggggugcaugaag

SEQ ID NO: 1906669 - RNA, 17 nt, Human
uggcaaggguucaccug

SEQ ID NO: 1906670 - RNA, 15 nt, Human
uggucccccuuccau

SEQ ID NO: 1906671 - RNA, 16 nt, Human
uggucccccuuccaug

SEQ ID NO: 1906672 - RNA, 18 nt, Human
uggucccccuuccaugga

SEQ ID NO: 1906673 - RNA, 23 nt, Human
uggucccccuuccauggacuuug

SEQ ID NO: 1906674 - RNA, 17 nt, Human
ugguccuaaucuucuga

SEQ ID NO: 1906675 - RNA, 19 nt, Human
ugguccuaaucuucugaac

SEQ ID NO: 1906676 - RNA, 14 nt, Human
ugguccucacacuc

SEQ ID NO: 1906677 - RNA, 12 nt, Human
ugguccuaccca

SEQ ID NO: 1906678 - RNA, 13 nt, Human
ugguccugcugca

SEQ ID NO: 1906679 - RNA, 15 nt, Human
ugguccugcugcagu

SEQ ID NO: 1906680 - RNA, 23 nt, Human
ugguccugcugcaguugccaguc

SEQ ID NO: 1906681 - RNA, 14 nt, Human
uggucccccuucca

SEQ ID NO: 1906682 - RNA, 22 nt, Human
uggucacaggaaguagaggagg

SEQ ID NO: 1906683 - RNA, 22 nt, Human
uggucaaacaaacucucugaac

SEQ ID NO: 1906684 - RNA, 13 nt, Human
ugggucaaggaau

SEQ ID NO: 1906685 - RNA, 16 nt, Human
uggucaaacaaacucu

SEQ ID NO: 1906686 - RNA, 21 nt, Human
uggucaaacaaacucucugaa

SEQ ID NO: 1906687 - RNA, 22 nt, Human
uggugaccucugccugaaguca

SEQ ID NO: 1906688 - RNA, 17 nt, Human
uggugaccucugccuga

SEQ ID NO: 1906689 - RNA, 16 nt, Human
uggugaccucugccug

SEQ ID NO: 1906690 - RNA, 15 nt, Human
uggugaccucugccu

SEQ ID NO: 1906691 - RNA, 19 nt, Human
uggugacuuuccucuuugg

SEQ ID NO: 1906692 - RNA, 22 nt, Human
uggugaccuuccaagagccuga

SEQ ID NO: 1906693 - RNA, 21 nt, Human
uggugaccuuccaagagccug

SEQ ID NO: 1906694 - RNA, 21 nt, Human
uggugcaaugaccuuucaaua

SEQ ID NO: 1906695 - RNA, 21 nt, Human
uggugcagguagaccugucuc

SEQ ID NO: 1906696 - RNA, 23 nt, Human
uggugcagguagaccugucuccu

SEQ ID NO: 1906697 - RNA, 15 nt, Human
uggugcagugugaaa

SEQ ID NO: 1906698 - RNA, 14 nt, Human
uggugaccucugcc

SEQ ID NO: 1906699 - RNA, 13 nt, Human
uggugaccucugc

SEQ ID NO: 1906700 - RNA, 19 nt, Human
uggucuacacugugcugag

SEQ ID NO: 1906701 - RNA, 15 nt, Human
uggucuacacugugc

SEQ ID NO: 1906702 - RNA, 16 nt, Human
uggucuacacugugcu

SEQ ID NO: 1906703 - RNA, 17 nt, Human
uggucuacacugugcug

SEQ ID NO: 1906704 - RNA, 18 nt, Human
uggucuacacugugcuga

SEQ ID NO: 1906705 - RNA, 17 nt, Human
uggucggaaaacaugcu

SEQ ID NO: 1906706 - RNA, 14 nt, Human
uggucggaaaacau

SEQ ID NO: 1906707 - RNA, 23 nt, Human
ugggcagagcagagaccaucccu

SEQ ID NO: 1906708 - RNA, 14 nt, Human
ugggauguuucugu

SEQ ID NO: 1906709 - RNA, 13 nt, Human
ugggcagggagcg

SEQ ID NO: 1906710 - RNA, 21 nt, Human
ugggccccugccucucugcag

SEQ ID NO: 1906711 - RNA, 23 nt, Human
ugggccccugccucucugcaggu

SEQ ID NO: 1906712 - RNA, 13 nt, Human
ugggcccucuggu

SEQ ID NO: 1906713 - RNA, 14 nt, Human
ugggccuggcuccc

SEQ ID NO: 1906714 - RNA, 16 nt, Human
ugggcccucugguuug

SEQ ID NO: 1906715 - RNA, 14 nt, Human
ugggcccucugguu

SEQ ID NO: 1906716 - RNA, 20 nt, Human
uggcugggggccucagugcc

SEQ ID NO: 1906717 - RNA, 22 nt, Human
ugggagugaggaugucugggcc

SEQ ID NO: 1906718 - RNA, 17 nt, Human
uggcugggggccucagu

SEQ ID NO: 1906719 - RNA, 16 nt, Human
uggcugggggccucag

SEQ ID NO: 1906720 - RNA, 13 nt, Human
ugggaguguguaa

SEQ ID NO: 1906721 - RNA, 11 nt, Human
ugggagugugu

SEQ ID NO: 1906722 - RNA, 14 nt, Human
ugggagugggccca

SEQ ID NO: 1906723 - RNA, 16 nt, Human
ugggagugggcccaau

SEQ ID NO: 1906724 - RNA, 22 nt, Human
ugggauuacaagcgugagccac

SEQ ID NO: 1906725 - RNA, 22 nt, Human
ugggcagagcagagaccauccc

SEQ ID NO: 1906726 - RNA, 14 nt, Human
ugggauccuccagg

SEQ ID NO: 1906727 - RNA, 12 nt, Human
ugggauccucca

SEQ ID NO: 1906728 - RNA, 13 nt, Human
ugggauccuccag

SEQ ID NO: 1906729 - RNA, 18 nt, Human
uggguacuuguggacaca

SEQ ID NO: 1906730 - RNA, 17 nt, Human
uggguacuuguggacac

SEQ ID NO: 1906731 - RNA, 16 nt, Human
uggguacuucuugaag

SEQ ID NO: 1906732 - RNA, 19 nt, Human
uggguacuucuugaaggug

SEQ ID NO: 1906733 - RNA, 13 nt, Human
ugggggugggcca

SEQ ID NO: 1906734 - RNA, 16 nt, Human
ugggggugggccaggc

SEQ ID NO: 1906735 - RNA, 13 nt, Human
uggggggggugcu

SEQ ID NO: 1906736 - RNA, 16 nt, Human
ugggggaguggccaca

SEQ ID NO: 1906737 - RNA, 14 nt, Human
ugggggucugugug

SEQ ID NO: 1906738 - RNA, 23 nt, Human
uggggaugagaaagguugaagca

SEQ ID NO: 1906739 - RNA, 20 nt, Human
uggggccaggcugggucgcc

SEQ ID NO: 1906740 - RNA, 20 nt, Human
uggggaucccucccccccau

SEQ ID NO: 1906741 - RNA, 15 nt, Human
uggggaugagaaagg

SEQ ID NO: 1906742 - RNA, 15 nt, Human
uggggauauaauacu

SEQ ID NO: 1906743 - RNA, 21 nt, Human
uggggccaggcugggucgccc

SEQ ID NO: 1906744 - RNA, 22 nt, Human
uggggccaggcugggucgcccu

SEQ ID NO: 1906745 - RNA, 20 nt, Human
uggggccaguuggucccccu

SEQ ID NO: 1906746 - RNA, 13 nt, Human
ugggcuugauucu

SEQ ID NO: 1906747 - RNA, 14 nt, Human
ugggcuugauucug

SEQ ID NO: 1906748 - RNA, 20 nt, Human
uggggauagauguguggaca

SEQ ID NO: 1906749 - RNA, 18 nt, Human
uggggauagaugugugga

SEQ ID NO: 1906750 - RNA, 17 nt, Human
uggggauagaugugugg

SEQ ID NO: 1906751 - RNA, 16 nt, Human
uggggauagaugugug

SEQ ID NO: 1906752 - RNA, 12 nt, Human
uuaaagacagag

SEQ ID NO: 1906753 - RNA, 11 nt, Human
uuaaagacaga

SEQ ID NO: 1906754 - RNA, 21 nt, Human
uuaaauguuuuuuuuuaaaga

SEQ ID NO: 1906755 - RNA, 23 nt, Human
uuaaauguuuuuuuuuaaagacu

SEQ ID NO: 1906756 - RNA, 17 nt, Human
uuaaccacuucagcuga

SEQ ID NO: 1906757 - RNA, 17 nt, Human
uuaaccccgucaacaaa

SEQ ID NO: 1906758 - RNA, 18 nt, Human
uuaaccccgucaacaaau

SEQ ID NO: 1906759 - RNA, 19 nt, Human
uuaaccccgucaacaaauc

SEQ ID NO: 1906760 - RNA, 12 nt, Human
uuaacuagaauu

SEQ ID NO: 1906761 - RNA, 14 nt, Human
uuaacuagaauuua

SEQ ID NO: 1906762 - RNA, 16 nt, Human
uuaacuucacauauug

SEQ ID NO: 1906763 - RNA, 15 nt, Human
uuaacuuuuauaaac

SEQ ID NO: 1906764 - RNA, 17 nt, Human
uuaacuuuuauaaacuu

SEQ ID NO: 1906765 - RNA, 16 nt, Human
uuaacuuuuauaaacu

SEQ ID NO: 1906766 - RNA, 18 nt, Human
uuaacuuuuauaaacuuu

SEQ ID NO: 1906767 - RNA, 12 nt, Human
uuaacuucugcc

SEQ ID NO: 1906768 - RNA, 12 nt, Human
uuaacucaauau

SEQ ID NO: 1906769 - RNA, 12 nt, Human
uuaacucagucu

SEQ ID NO: 1906770 - RNA, 19 nt, Human
uuaacuauuuuauuuucua

SEQ ID NO: 1906771 - RNA, 15 nt, Human
uuaacuagaauuuau

SEQ ID NO: 1906772 - RNA, 16 nt, Human
uuaacuagaauuuauu

SEQ ID NO: 1906773 - RNA, 21 nt, Human
uuaacuagaauuuauucaauu

SEQ ID NO: 1906774 - RNA, 20 nt, Human
uuacaagcgugagccacugc

SEQ ID NO: 1906775 - RNA, 17 nt, Human
uuacaagcccccccuuc

SEQ ID NO: 1906776 - RNA, 19 nt, Human
uuacaagcccccccuucca

SEQ ID NO: 1906777 - RNA, 20 nt, Human
uuacaagcccccccuuccac

SEQ ID NO: 1906778 - RNA, 21 nt, Human
uuacaagcgugagccacugca

SEQ ID NO: 1906779 - RNA, 23 nt, Human
uuaaugccgauauacucuagaug

SEQ ID NO: 1906780 - RNA, 18 nt, Human
uuaaugcaucuagauuau

SEQ ID NO: 1906781 - RNA, 17 nt, Human
uuaagcuguuacugucu

SEQ ID NO: 1906782 - RNA, 14 nt, Human
uuaagcuguuucca

SEQ ID NO: 1906783 - RNA, 18 nt, Human
uuaauauugauaugcuua

SEQ ID NO: 1906784 - RNA, 22 nt, Human
uuaauauugauaugcuuauaca

SEQ ID NO: 1906785 - RNA, 20 nt, Human
uguuucauauugaugugugu

SEQ ID NO: 1906786 - RNA, 15 nt, Human
uguuucaaacuuuac

SEQ ID NO: 1906787 - RNA, 16 nt, Human
uguuuagauaauacac

SEQ ID NO: 1906788 - RNA, 23 nt, Human
uggugccccaggaccagcucagg

SEQ ID NO: 1906789 - RNA, 19 nt, Human
uguuuagaagaaguguguc

SEQ ID NO: 1906790 - RNA, 16 nt, Human
uguuuagaagaagugu

SEQ ID NO: 1906791 - RNA, 20 nt, Human
uggugccccaggaccagcuc

SEQ ID NO: 1906792 - RNA, 21 nt, Human
uggugccccaggaccagcuca

SEQ ID NO: 1906793 - RNA, 16 nt, Human
uggugccccaggacca

SEQ ID NO: 1906794 - RNA, 17 nt, Human
uggugccccaggaccag

SEQ ID NO: 1906795 - RNA, 18 nt, Human
uggugccccaggaccagc

SEQ ID NO: 1906796 - RNA, 19 nt, Human
uggugccccaggaccagcu

SEQ ID NO: 1906797 - RNA, 13 nt, Human
uggugccccagga

SEQ ID NO: 1906798 - RNA, 14 nt, Human
uggugccccaggac

SEQ ID NO: 1906799 - RNA, 20 nt, Human
uguuuuaagaggcagggucu

SEQ ID NO: 1906800 - RNA, 13 nt, Human
uguuugugauuga

SEQ ID NO: 1906801 - RNA, 17 nt, Human
uguuugucugucuucau

SEQ ID NO: 1906802 - RNA, 19 nt, Human
uguuugucugucuucauag

SEQ ID NO: 1906803 - RNA, 17 nt, Human
uguuuguaagugaagug

SEQ ID NO: 1906804 - RNA, 20 nt, Human
uguuuccagacuuccuugag

SEQ ID NO: 1906805 - RNA, 23 nt, Human
uguuuccuggcacugcuuccagu

SEQ ID NO: 1906806 - RNA, 23 nt, Human
uguuuccagacuuccuugagaca

SEQ ID NO: 1906807 - RNA, 18 nt, Human
uguuuuuuuuuaaagacu

SEQ ID NO: 1906808 - RNA, 17 nt, Human
uuaaaagauacaguuac

SEQ ID NO: 1906809 - RNA, 14 nt, Human
uuaaaagauacagu

SEQ ID NO: 1906810 - RNA, 19 nt, Human
uguuuuaaggaugcuugua

SEQ ID NO: 1906811 - RNA, 19 nt, Human
uguuuuguaaaguccccag

SEQ ID NO: 1906812 - RNA, 17 nt, Human
uguuuugucuuacaaag

SEQ ID NO: 1906813 - RNA, 22 nt, Human
uguuuuaagaggcagggucuca

SEQ ID NO: 1906814 - RNA, 18 nt, Human
uguuuuaaggaugcuugu

SEQ ID NO: 1906815 - RNA, 10 nt, Human
uguuuuuaaa

SEQ ID NO: 1906816 - RNA, 21 nt, Human
uuaaaauaccagccaguaaau

SEQ ID NO: 1906817 - RNA, 21 nt, Human
uuaaaagaugcaauguagagg

SEQ ID NO: 1906818 - RNA, 19 nt, Human
uuaaacugguauuuuaucu

SEQ ID NO: 1906819 - RNA, 13 nt, Human
uuaaacugguauu

SEQ ID NO: 1906820 - RNA, 22 nt, Human
uuaaacugguauuuuaucuuug

SEQ ID NO: 1906821 - RNA, 19 nt, Human
uuaaagaaguaugggaaau

SEQ ID NO: 1906822 - RNA, 22 nt, Human
uuaaacucuguugcaagugcaa

SEQ ID NO: 1906823 - RNA, 19 nt, Human
uuaaacucuucacaaaauc

SEQ ID NO: 1906824 - RNA, 14 nt, Human
uuaaaaguaaaugu

SEQ ID NO: 1906825 - RNA, 15 nt, Human
uuaggauggcaggac

SEQ ID NO: 1906826 - RNA, 18 nt, Human
uuaggauguugaaaaagu

SEQ ID NO: 1906827 - RNA, 19 nt, Human
uuaggagggaguuaucuaa

SEQ ID NO: 1906828 - RNA, 15 nt, Human
uuaggaagagaaacc

SEQ ID NO: 1906829 - RNA, 12 nt, Human
uuaggagaagcc

SEQ ID NO: 1906830 - RNA, 13 nt, Human
uuaggagaagcca

SEQ ID NO: 1906831 - RNA, 16 nt, Human
uuaggagaagccagga

SEQ ID NO: 1906832 - RNA, 17 nt, Human
uuaggagaagccaggaa

SEQ ID NO: 1906833 - RNA, 22 nt, Human
uuaggccaaaaaaauguaagau

SEQ ID NO: 1906834 - RNA, 16 nt, Human
uuaggccuuccucucu

SEQ ID NO: 1906835 - RNA, 17 nt, Human
uuaguagagacaggguu

SEQ ID NO: 1906836 - RNA, 19 nt, Human
uuaggcugguggcccagga

SEQ ID NO: 1906837 - RNA, 16 nt, Human
uuaggcugguggccca

SEQ ID NO: 1906838 - RNA, 17 nt, Human
uuaggcugguggcccag

SEQ ID NO: 1906839 - RNA, 18 nt, Human
uuaggcugguggcccagg

SEQ ID NO: 1906840 - RNA, 16 nt, Human
uuaguaugaggcauuu

SEQ ID NO: 1906841 - RNA, 18 nt, Human
uuaguaugaggcauuugu

SEQ ID NO: 1906842 - RNA, 14 nt, Human
uuaguguucauaaa

SEQ ID NO: 1906843 - RNA, 18 nt, Human
uuagucucuaaagaguuu

SEQ ID NO: 1906844 - RNA, 22 nt, Human
uuagucucuuguauuaaacucu

SEQ ID NO: 1906845 - RNA, 12 nt, Human
uuagcugcuucu

SEQ ID NO: 1906846 - RNA, 20 nt, Human
uuagcugcuucuauguuuca

SEQ ID NO: 1906847 - RNA, 18 nt, Human
uuagcuccccuccaaccu

SEQ ID NO: 1906848 - RNA, 14 nt, Human
uuagcuccccucca

SEQ ID NO: 1906849 - RNA, 13 nt, Human
uuagcuccccucc

SEQ ID NO: 1906850 - RNA, 22 nt, Human
uuagauaauacaccacuacauu

SEQ ID NO: 1906851 - RNA, 21 nt, Human
uuagcuaaacggauuccaaag

SEQ ID NO: 1906852 - RNA, 14 nt, Human
uuagaguugauacu

SEQ ID NO: 1906853 - RNA, 15 nt, Human
uuacuuuccauugcu

SEQ ID NO: 1906854 - RNA, 18 nt, Human
uuacuuuaaaaggagcca

SEQ ID NO: 1906855 - RNA, 17 nt, Human
uuacuuuaaaaggagcc

SEQ ID NO: 1906856 - RNA, 15 nt, Human
uuagacagucccugc

SEQ ID NO: 1906857 - RNA, 14 nt, Human
uuacuuuguguuca

SEQ ID NO: 1906858 - RNA, 16 nt, Human
uuacuuuucauauuug

SEQ ID NO: 1906859 - RNA, 21 nt, Human
uuacuuuucauauuugcacua

SEQ ID NO: 1906860 - RNA, 16 nt, Human
uuagacagucccugcc

SEQ ID NO: 1906861 - RNA, 17 nt, Human
uuagacagucccugcca

SEQ ID NO: 1906862 - RNA, 18 nt, Human
uuagacagucccugccaa

SEQ ID NO: 1906863 - RNA, 14 nt, Human
uuagacagucccug

SEQ ID NO: 1906864 - RNA, 19 nt, Human
uuagaaaauguuauuuaac

SEQ ID NO: 1906865 - RNA, 23 nt, Human
uuagagacaguugggugagaaca

SEQ ID NO: 1906866 - RNA, 18 nt, Human
uuacuguuagucauuugc

SEQ ID NO: 1906867 - RNA, 13 nt, Human
uuacugugucuuu

SEQ ID NO: 1906868 - RNA, 14 nt, Human
uuacugugucuuug

SEQ ID NO: 1906869 - RNA, 21 nt, Human
uuacuuaaaccgccaaggcug

SEQ ID NO: 1906870 - RNA, 16 nt, Human
uuacuguggcuucuua

SEQ ID NO: 1906871 - RNA, 17 nt, Human
uuacugucuuuuuucua

SEQ ID NO: 1906872 - RNA, 19 nt, Human
uuacuauggcccuggccua

SEQ ID NO: 1906873 - RNA, 19 nt, Human
uuacugucuuuuuucuaaa

SEQ ID NO: 1906874 - RNA, 18 nt, Human
uuacuuagguguggggga

SEQ ID NO: 1906875 - RNA, 12 nt, Human
uuacuucugcua

SEQ ID NO: 1906876 - RNA, 23 nt, Human
uuacuucuuauacauuugauaaa

SEQ ID NO: 1906877 - RNA, 11 nt, Human
uuacuucugcu

SEQ ID NO: 1906878 - RNA, 17 nt, Human
uuacuaguuucccuugc

SEQ ID NO: 1906879 - RNA, 21 nt, Human
uuacuaggugcccagaaugag

SEQ ID NO: 1906880 - RNA, 14 nt, Human
uuacuagguaacuu

SEQ ID NO: 1906881 - RNA, 16 nt, Human
uuacuagguaacuuca

SEQ ID NO: 1906882 - RNA, 17 nt, Human
uuacuagguaacuucau

SEQ ID NO: 1906883 - RNA, 19 nt, Human
uuacuagguaacuucauau

SEQ ID NO: 1906884 - RNA, 16 nt, Human
uuacuaauagacaauu

SEQ ID NO: 1906885 - RNA, 14 nt, Human
uuacuaaguuuuua

SEQ ID NO: 1906886 - RNA, 13 nt, Human
uuacuaaguuuuu

SEQ ID NO: 1906887 - RNA, 12 nt, Human
uuccuauaugca

SEQ ID NO: 1906888 - RNA, 15 nt, Human
uucccuuugugcaca

SEQ ID NO: 1906889 - RNA, 21 nt, Human
uucccuuugacgccaucccag

SEQ ID NO: 1906890 - RNA, 22 nt, Human
uucccuuugacgccaucccagc

SEQ ID NO: 1906891 - RNA, 20 nt, Human
uucccuuugacgccauccca

SEQ ID NO: 1906892 - RNA, 13 nt, Human
uuccucauuagca

SEQ ID NO: 1906893 - RNA, 21 nt, Human
uuccucacaccaggcuugccu

SEQ ID NO: 1906894 - RNA, 12 nt, Human
uucccugaggug

SEQ ID NO: 1906895 - RNA, 16 nt, Human
uucccugaaggaacca

SEQ ID NO: 1906896 - RNA, 17 nt, Human
uucccugcuuaaugaaa

SEQ ID NO: 1906897 - RNA, 19 nt, Human
uucccuucgacagcauuuu

SEQ ID NO: 1906898 - RNA, 14 nt, Human
uucgggcuggccau

SEQ ID NO: 1906899 - RNA, 13 nt, Human
uucgggcugugcc

SEQ ID NO: 1906900 - RNA, 12 nt, Human
uucgggcugugc

SEQ ID NO: 1906901 - RNA, 20 nt, Human
uucgggaggucgaggcagga

SEQ ID NO: 1906902 - RNA, 20 nt, Human
uuccuuguagccuuuugacu

SEQ ID NO: 1906903 - RNA, 18 nt, Human
uuccuuguagccuuuuga

SEQ ID NO: 1906904 - RNA, 19 nt, Human
uuccuuguagccuuuugac

SEQ ID NO: 1906905 - RNA, 16 nt, Human
uuccuuguagccuuuu

SEQ ID NO: 1906906 - RNA, 24 nt, Human
uuccuugagacacggagcccagcc

SEQ ID NO: 1906907 - RNA, 18 nt, Human
uucuaaaaauugugauca

SEQ ID NO: 1906908 - RNA, 14 nt, Human
uucgggcugugccc

SEQ ID NO: 1906909 - RNA, 12 nt, Human
uucguucugugg

SEQ ID NO: 1906910 - RNA, 15 nt, Human
uucuaaagauggaaa

SEQ ID NO: 1906911 - RNA, 13 nt, Human
uucuaaagcugcc

SEQ ID NO: 1906912 - RNA, 17 nt, Human
uucuaaagcugccagcc

SEQ ID NO: 1906913 - RNA, 20 nt, Human
uuccuugaguugauucagcu

SEQ ID NO: 1906914 - RNA, 22 nt, Human
uuccuugagacacggagcccag

SEQ ID NO: 1906915 - RNA, 14 nt, Human
uuccuggcacugcu

SEQ ID NO: 1906916 - RNA, 16 nt, Human
uuccuggagcccagag

SEQ ID NO: 1906917 - RNA, 15 nt, Human
uuccuggagcccaga

SEQ ID NO: 1906918 - RNA, 17 nt, Human
uuccugccaggcauggu

SEQ ID NO: 1906919 - RNA, 23 nt, Human
uuccugaugcuucuucagagacu

SEQ ID NO: 1906920 - RNA, 18 nt, Human
uuccugaugcuucuucag

SEQ ID NO: 1906921 - RNA, 19 nt, Human
uuccugaugcuucuucaga

SEQ ID NO: 1906922 - RNA, 15 nt, Human
uuccugaugcuucuu

SEQ ID NO: 1906923 - RNA, 13 nt, Human
uuccauucucacc

SEQ ID NO: 1906924 - RNA, 16 nt, Human
uucccauuugcuccuu

SEQ ID NO: 1906925 - RNA, 15 nt, Human
uuccccaggaggcca

SEQ ID NO: 1906926 - RNA, 16 nt, Human
uuccccaggaggccag

SEQ ID NO: 1906927 - RNA, 17 nt, Human
uucccauguagcccccu

SEQ ID NO: 1906928 - RNA, 19 nt, Human
uucccauccucuucuuuua

SEQ ID NO: 1906929 - RNA, 11 nt, Human
uucccucccuu

SEQ ID NO: 1906930 - RNA, 17 nt, Human
uucccucccuuccucuu

SEQ ID NO: 1906931 - RNA, 20 nt, Human
uucccucccuuccucuuucc

SEQ ID NO: 1906932 - RNA, 23 nt, Human
uucccccaaauuuaaagaaguau

SEQ ID NO: 1906933 - RNA, 21 nt, Human
uucccccaccccauuucucuc

SEQ ID NO: 1906934 - RNA, 17 nt, Human
uuccccaucuucuaaac

SEQ ID NO: 1906935 - RNA, 18 nt, Human
uuccccaucuucuaaacc

SEQ ID NO: 1906936 - RNA, 21 nt, Human
uuccccaggaggccagccuug

SEQ ID NO: 1906937 - RNA, 17 nt, Human
uuccccaggaggccagc

SEQ ID NO: 1906938 - RNA, 18 nt, Human
uuccccaggaggccagcc

SEQ ID NO: 1906939 - RNA, 19 nt, Human
uuccccaggaggccagccu

SEQ ID NO: 1906940 - RNA, 20 nt, Human
uuccccaggaggccagccuu

SEQ ID NO: 1906941 - RNA, 15 nt, Human
uuccaaauucugcuu

SEQ ID NO: 1906942 - RNA, 21 nt, Human
uuccaaagaguagaauugcau

SEQ ID NO: 1906943 - RNA, 18 nt, Human
uuccacucaggucuguuu

SEQ ID NO: 1906944 - RNA, 18 nt, Human
uuccacuccuccuagcca

SEQ ID NO: 1906945 - RNA, 16 nt, Human
uuccacuccuccuagc

SEQ ID NO: 1906946 - RNA, 21 nt, Human
uuccacuccuccuagccaccc

SEQ ID NO: 1906947 - RNA, 16 nt, Human
uucauuuccugugucu

SEQ ID NO: 1906948 - RNA, 15 nt, Human
uucauuuccuguguc

SEQ ID NO: 1906949 - RNA, 17 nt, Human
uucaugcaaacuuuauu

SEQ ID NO: 1906950 - RNA, 21 nt, Human
uucaucuugaauuguaaggaa

SEQ ID NO: 1906951 - RNA, 17 nt, Human
uucaugaaagauucaau

SEQ ID NO: 1906952 - RNA, 15 nt, Human
uucaugaaagauuca

SEQ ID NO: 1906953 - RNA, 11 nt, Human
uucaggaagcu

SEQ ID NO: 1906954 - RNA, 13 nt, Human
uucaggaagcuca

SEQ ID NO: 1906955 - RNA, 16 nt, Human
uuauuaaugcuaaggg

SEQ ID NO: 1906956 - RNA, 15 nt, Human
uuauuaaugcuaagg

SEQ ID NO: 1906957 - RNA, 14 nt, Human
uuauuaauugcuuu

SEQ ID NO: 1906958 - RNA, 15 nt, Human
uuauuaauugcuuug

SEQ ID NO: 1906959 - RNA, 14 nt, Human
uuauuaaugcuaag

SEQ ID NO: 1906960 - RNA, 13 nt, Human
uuauuaaugcuaa

SEQ ID NO: 1906961 - RNA, 10 nt, Human
uuauuaaagg

SEQ ID NO: 1906962 - RNA, 18 nt, Human
uuauuaaauacaaaacuu

SEQ ID NO: 1906963 - RNA, 12 nt, Human
uuaugcuuuugg

SEQ ID NO: 1906964 - RNA, 15 nt, Human
uuauugcccacgcug

SEQ ID NO: 1906965 - RNA, 19 nt, Human
uuauugcagcgauuaauaa

SEQ ID NO: 1906966 - RNA, 11 nt, Human
uuauucugcuc

SEQ ID NO: 1906967 - RNA, 14 nt, Human
uuauugacacagaa

SEQ ID NO: 1906968 - RNA, 19 nt, Human
uuauugacacagaaaaugu

SEQ ID NO: 1906969 - RNA, 23 nt, Human
uuauugacacagaaaauguugag

SEQ ID NO: 1906970 - RNA, 18 nt, Human
uuauugaaucuauuuaag

SEQ ID NO: 1906971 - RNA, 20 nt, Human
uuauugaaucuauuuaagua

SEQ ID NO: 1906972 - RNA, 16 nt, Human
uuauggaacacucuga

SEQ ID NO: 1906973 - RNA, 15 nt, Human
uuaugccuuuuauuu

SEQ ID NO: 1906974 - RNA, 13 nt, Human
uuaugcugaaaca

SEQ ID NO: 1906975 - RNA, 22 nt, Human
uuaugcaugaaguaauaugcac

SEQ ID NO: 1906976 - RNA, 17 nt, Human
uuaugcauguuuguugu

SEQ ID NO: 1906977 - RNA, 14 nt, Human
uuaugcauagauaa

SEQ ID NO: 1906978 - RNA, 20 nt, Human
uuaugcaagggacugugugu

SEQ ID NO: 1906979 - RNA, 16 nt, Human
uuaugcaugaaguaau

SEQ ID NO: 1906980 - RNA, 16 nt, Human
uuaucuugucucuggg

SEQ ID NO: 1906981 - RNA, 17 nt, Human
uuaucuugucucugggc

SEQ ID NO: 1906982 - RNA, 17 nt, Human
uuaucuagauacuguau

SEQ ID NO: 1906983 - RNA, 17 nt, Human
uuaucuauacauaucuu

SEQ ID NO: 1906984 - RNA, 20 nt, Human
uuaucuugaauaauguaaga

SEQ ID NO: 1906985 - RNA, 15 nt, Human
uuaguugcuguaugu

SEQ ID NO: 1906986 - RNA, 13 nt, Human
uuaguugcuguau

SEQ ID NO: 1906987 - RNA, 20 nt, Human
uuaguugcaacuuuguauaa

SEQ ID NO: 1906988 - RNA, 16 nt, Human
uuaucuagauacugua

SEQ ID NO: 1906989 - RNA, 16 nt, Human
uuaguuccucauuagc

SEQ ID NO: 1906990 - RNA, 14 nt, Human
uuaguuccuugagu

SEQ ID NO: 1906991 - RNA, 13 nt, Human
uuaguugcaacuu

SEQ ID NO: 1906992 - RNA, 14 nt, Human
uucaccuugaagaa

SEQ ID NO: 1906993 - RNA, 22 nt, Human
uucaccuguuuuuaagcuguuu

SEQ ID NO: 1906994 - RNA, 23 nt, Human
uucaccuguuuuuaagcuguuuc

SEQ ID NO: 1906995 - RNA, 19 nt, Human
uucaccuguuuuuaagcug

SEQ ID NO: 1906996 - RNA, 21 nt, Human
uucaccuguuuuuaagcuguu

SEQ ID NO: 1906997 - RNA, 17 nt, Human
uucacaaacagaaaaca

SEQ ID NO: 1906998 - RNA, 18 nt, Human
uucaccugccccaacucu

SEQ ID NO: 1906999 - RNA, 15 nt, Human
uucacaaacuuuuau

SEQ ID NO: 1907000 - RNA, 15 nt, Human
uucacgugguccuaa

SEQ ID NO: 1907001 - RNA, 18 nt, Human
uucacggaagagccuugc

SEQ ID NO: 1907002 - RNA, 14 nt, Human
uucacguagaacau

SEQ ID NO: 1907003 - RNA, 13 nt, Human
uucaauaggaaaa

SEQ ID NO: 1907004 - RNA, 15 nt, Human
uucaauaggaaaaac

SEQ ID NO: 1907005 - RNA, 18 nt, Human
uucaauaggaaaaacuga

SEQ ID NO: 1907006 - RNA, 20 nt, Human
uucaauaggaaaaacugauu

SEQ ID NO: 1907007 - RNA, 21 nt, Human
uucaacugccaaaaugcucua

SEQ ID NO: 1907008 - RNA, 12 nt, Human
uucaauuguaaa

SEQ ID NO: 1907009 - RNA, 14 nt, Human
uucaauuguaaauu

SEQ ID NO: 1907010 - RNA, 19 nt, Human
uucaauuuccaagagcuga

SEQ ID NO: 1907011 - RNA, 17 nt, Human
uucaauuuccaagagcu

SEQ ID NO: 1907012 - RNA, 21 nt, Human
uucagaguugaugguuguaca

SEQ ID NO: 1907013 - RNA, 22 nt, Human
uucagaguugaugguuguacau

SEQ ID NO: 1907014 - RNA, 19 nt, Human
uucagagacuccugcaggc

SEQ ID NO: 1907015 - RNA, 20 nt, Human
uucagacauagaauuaacac

SEQ ID NO: 1907016 - RNA, 21 nt, Human
uucagacagcugccugggauc

SEQ ID NO: 1907017 - RNA, 16 nt, Human
uucagacauagaauua

SEQ ID NO: 1907018 - RNA, 13 nt, Human
uucacucuccuug

SEQ ID NO: 1907019 - RNA, 14 nt, Human
uucacuccugcugu

SEQ ID NO: 1907020 - RNA, 17 nt, Human
uuauugucaaaguggug

SEQ ID NO: 1907021 - RNA, 15 nt, Human
uuauuguaccucucu

SEQ ID NO: 1907022 - RNA, 17 nt, Human
uuauuguaccucucuua

SEQ ID NO: 1907023 - RNA, 18 nt, Human
uuauugucaaagugguga

SEQ ID NO: 1907024 - RNA, 12 nt, Human
uuauugcauuug

SEQ ID NO: 1907025 - RNA, 12 nt, Human
uuauuguaccuc

SEQ ID NO: 1907026 - RNA, 14 nt, Human
uuauuguaccucuc

SEQ ID NO: 1907027 - RNA, 20 nt, Human
uuauuuuauguugcauagaa

SEQ ID NO: 1907028 - RNA, 12 nt, Human
uuauuuuaagac

SEQ ID NO: 1907029 - RNA, 13 nt, Human
uucaaagccauuu

SEQ ID NO: 1907030 - RNA, 14 nt, Human
uucaaagccauuuu

SEQ ID NO: 1907031 - RNA, 21 nt, Human
uuugaaauuguauuacaaauc

SEQ ID NO: 1907032 - RNA, 18 nt, Human
uuugaagcacagugauca

SEQ ID NO: 1907033 - RNA, 16 nt, Human
uuugaagcuacugugu

SEQ ID NO: 1907034 - RNA, 18 nt, Human
uuugaagcuacugugugu

SEQ ID NO: 1907035 - RNA, 12 nt, Human
uuugaaggcaaa

SEQ ID NO: 1907036 - RNA, 13 nt, Human
uuugaaggcaaaa

SEQ ID NO: 1907037 - RNA, 19 nt, Human
uuucuuguguguuuauugu

SEQ ID NO: 1907038 - RNA, 21 nt, Human
uuucuugccucuguccccuuc

SEQ ID NO: 1907039 - RNA, 18 nt, Human
uuucuugccucugucccc

SEQ ID NO: 1907040 - RNA, 18 nt, Human
uuucuuaaccagaucauu

SEQ ID NO: 1907041 - RNA, 16 nt, Human
uuugagaucagccugg

SEQ ID NO: 1907042 - RNA, 17 nt, Human
uuugagaucagccuggg

SEQ ID NO: 1907043 - RNA, 19 nt, Human
uuugaauauaaacacuaua

SEQ ID NO: 1907044 - RNA, 18 nt, Human
uuugaauauaaacacuau

SEQ ID NO: 1907045 - RNA, 17 nt, Human
uuugaauauaaacacua

SEQ ID NO: 1907046 - RNA, 21 nt, Human
uuugaggguguauauuuucug

SEQ ID NO: 1907047 - RNA, 20 nt, Human
uuugguaaaauacuucuuga

SEQ ID NO: 1907048 - RNA, 14 nt, Human
uuuggguucugccu

SEQ ID NO: 1907049 - RNA, 15 nt, Human
uuuggguucugccug

SEQ ID NO: 1907050 - RNA, 16 nt, Human
uuuggguucugccugc

SEQ ID NO: 1907051 - RNA, 20 nt, Human
uuugguucauuaauucuaua

SEQ ID NO: 1907052 - RNA, 13 nt, Human
uuugguucuaaua

SEQ ID NO: 1907053 - RNA, 12 nt, Human
uuugguucugug

SEQ ID NO: 1907054 - RNA, 15 nt, Human
uuuguauucucuccu

SEQ ID NO: 1907055 - RNA, 18 nt, Human
uuuguauguuuuuuuucu

SEQ ID NO: 1907056 - RNA, 10 nt, Human
uuuguauguu

SEQ ID NO: 1907057 - RNA, 12 nt, Human
uuuguauguuuu

SEQ ID NO: 1907058 - RNA, 17 nt, Human
uuuguaaaguccccaga

SEQ ID NO: 1907059 - RNA, 16 nt, Human
uuugcuugaaagaaaa

SEQ ID NO: 1907060 - RNA, 14 nt, Human
uuugcuugaaagaa

SEQ ID NO: 1907061 - RNA, 16 nt, Human
uuugcuucucucucua

SEQ ID NO: 1907062 - RNA, 15 nt, Human
uuuggacccugaggc

SEQ ID NO: 1907063 - RNA, 19 nt, Human
uuuggacccugaggcccag

SEQ ID NO: 1907064 - RNA, 15 nt, Human
uuugcuuucugcuca

SEQ ID NO: 1907065 - RNA, 16 nt, Human
uuuggacuguuuuguu

SEQ ID NO: 1907066 - RNA, 14 nt, Human
uuugauccaagcug

SEQ ID NO: 1907067 - RNA, 17 nt, Human
uuugauaugugaacagu

SEQ ID NO: 1907068 - RNA, 15 nt, Human
uuugauaugugaaca

SEQ ID NO: 1907069 - RNA, 14 nt, Human
uuugauaugugaac

SEQ ID NO: 1907070 - RNA, 15 nt, Human
uuugccaagaccuuu

SEQ ID NO: 1907071 - RNA, 20 nt, Human
uuucucuccagccugacuug

SEQ ID NO: 1907072 - RNA, 16 nt, Human
uuucuccuuuguacuu

SEQ ID NO: 1907073 - RNA, 18 nt, Human
uuucuacccagcgagccc

SEQ ID NO: 1907074 - RNA, 15 nt, Human
uuucuacccagcgag

SEQ ID NO: 1907075 - RNA, 22 nt, Human
uuucuacccagcgagcccuggu

SEQ ID NO: 1907076 - RNA, 21 nt, Human
uuucuacaaugugaacuuuau

SEQ ID NO: 1907077 - RNA, 14 nt, Human
uuucugaaauaaca

SEQ ID NO: 1907078 - RNA, 20 nt, Human
uuucugaaaauuaacacugc

SEQ ID NO: 1907079 - RNA, 19 nt, Human
uuucugaaaauuaacacug

SEQ ID NO: 1907080 - RNA, 16 nt, Human
uuucucuccucacaca

SEQ ID NO: 1907081 - RNA, 23 nt, Human
uuucugauaacuagauggugcug

SEQ ID NO: 1907082 - RNA, 12 nt, Human
uuucugaaauuu

SEQ ID NO: 1907083 - RNA, 17 nt, Human
uuucuaaaguaaaaaca

SEQ ID NO: 1907084 - RNA, 22 nt, Human
uuucuaaaguaaaaacaaagaa

SEQ ID NO: 1907085 - RNA, 19 nt, Human
uuucuaaaucuccaaaaua

SEQ ID NO: 1907086 - RNA, 17 nt, Human
uuucuacaaugugaacu

SEQ ID NO: 1907087 - RNA, 18 nt, Human
uuucuacaaugugaacuu

SEQ ID NO: 1907088 - RNA, 22 nt, Human
uuucuacaaugugaacuuuauu

SEQ ID NO: 1907089 - RNA, 19 nt, Human
uuuccuggcacugcuucca

SEQ ID NO: 1907090 - RNA, 13 nt, Human
uuuccucugcuuu

SEQ ID NO: 1907091 - RNA, 17 nt, Human
uuuccucugcuuugaaa

SEQ ID NO: 1907092 - RNA, 23 nt, Human
uuuccuggcacugcuuccaguga

SEQ ID NO: 1907093 - RNA, 22 nt, Human
uuuccuccugaggcuuuggauu

SEQ ID NO: 1907094 - RNA, 14 nt, Human
uuuccuccuuccau

SEQ ID NO: 1907095 - RNA, 21 nt, Human
uuuccuccugaggcuuuggau

SEQ ID NO: 1907096 - RNA, 20 nt, Human
uuuccucccuucugcuacug

SEQ ID NO: 1907097 - RNA, 15 nt, Human
uuuccuaaggcugca

SEQ ID NO: 1907098 - RNA, 17 nt, Human
uuuccuaaggcugcaag

SEQ ID NO: 1907099 - RNA, 22 nt, Human
uuucaauuccaccugcaaucaa

SEQ ID NO: 1907100 - RNA, 14 nt, Human
uuucaauuuccaag

SEQ ID NO: 1907101 - RNA, 17 nt, Human
uuucagccaagaauucu

SEQ ID NO: 1907102 - RNA, 22 nt, Human
uuuaugauacuugaaaauuaac

SEQ ID NO: 1907103 - RNA, 20 nt, Human
uuuaugccuuuuauuucuua

SEQ ID NO: 1907104 - RNA, 21 nt, Human
uuuaugcugaaacagaauacu

SEQ ID NO: 1907105 - RNA, 14 nt, Human
uuucauuucaacug

SEQ ID NO: 1907106 - RNA, 19 nt, Human
uuucauuugguucauuaau

SEQ ID NO: 1907107 - RNA, 21 nt, Human
uuucauuuguuuguuuuccuu

SEQ ID NO: 1907108 - RNA, 17 nt, Human
uuucagugaaagcauca

SEQ ID NO: 1907109 - RNA, 20 nt, Human
uuuccuaaauauauuuuaag

SEQ ID NO: 1907110 - RNA, 17 nt, Human
uuuccacucaggucugu

SEQ ID NO: 1907111 - RNA, 18 nt, Human
uuuccacuccuccuagcc

SEQ ID NO: 1907112 - RNA, 19 nt, Human
uuuccacuccuccuagcca

SEQ ID NO: 1907113 - RNA, 20 nt, Human
uuucauuuuuuuccaggcug

SEQ ID NO: 1907114 - RNA, 15 nt, Human
uuucauuuuuuucca

SEQ ID NO: 1907115 - RNA, 22 nt, Human
uuucauuuuguaacaaaugaac

SEQ ID NO: 1907116 - RNA, 22 nt, Human
uuuaaaacaagaaaguuucccc

SEQ ID NO: 1907117 - RNA, 21 nt, Human
uuuaaaacaagaaaguuuccc

SEQ ID NO: 1907118 - RNA, 13 nt, Human
uuguuuguuuucc

SEQ ID NO: 1907119 - RNA, 13 nt, Human
uuguuugucuuua

SEQ ID NO: 1907120 - RNA, 20 nt, Human
uuguuuggggaugagaaagg

SEQ ID NO: 1907121 - RNA, 12 nt, Human
uuguuucuguuu

SEQ ID NO: 1907122 - RNA, 19 nt, Human
uuguuuauuaguuuugcau

SEQ ID NO: 1907123 - RNA, 19 nt, Human
uugucuuuggugaacauug

SEQ ID NO: 1907124 - RNA, 20 nt, Human
uugucuuuggacccugaggc

SEQ ID NO: 1907125 - RNA, 24 nt, Human
uugucuuuggacccugaggcccag

SEQ ID NO: 1907126 - RNA, 15 nt, Human
uugucuuuggacccu

SEQ ID NO: 1907127 - RNA, 14 nt, Human
uugucuuuaacugu

SEQ ID NO: 1907128 - RNA, 13 nt, Human
uuguucaaacauu

SEQ ID NO: 1907129 - RNA, 14 nt, Human
uuguuauuuauaac

SEQ ID NO: 1907130 - RNA, 18 nt, Human
uuguuuagaagaagugug

SEQ ID NO: 1907131 - RNA, 15 nt, Human
uuguuuagaagaagu

SEQ ID NO: 1907132 - RNA, 12 nt, Human
uuuaaaaugucu

SEQ ID NO: 1907133 - RNA, 16 nt, Human
uuuaaaaugagaaauc

SEQ ID NO: 1907134 - RNA, 16 nt, Human
uuuaaaauugugaugu

SEQ ID NO: 1907135 - RNA, 13 nt, Human
uuuaacagaaaug

SEQ ID NO: 1907136 - RNA, 13 nt, Human
uuuaaaagauaca

SEQ ID NO: 1907137 - RNA, 20 nt, Human
uuuaaaagauaaauauuaua

SEQ ID NO: 1907138 - RNA, 18 nt, Human
uuuaaaagaugcaaugua

SEQ ID NO: 1907139 - RNA, 16 nt, Human
uuuaaaauauuuaucu

SEQ ID NO: 1907140 - RNA, 20 nt, Human
uuuaaaaguuacuccuuuua

SEQ ID NO: 1907141 - RNA, 17 nt, Human
uuuacagaugaauguau

SEQ ID NO: 1907142 - RNA, 16 nt, Human
uuuacauggcuggagc

SEQ ID NO: 1907143 - RNA, 19 nt, Human
uuuacccacacacagauaa

SEQ ID NO: 1907144 - RNA, 13 nt, Human
uuuacagagacag

SEQ ID NO: 1907145 - RNA, 20 nt, Human
uuuacagaggacaguauuug

SEQ ID NO: 1907146 - RNA, 22 nt, Human
uuuaauaaacacucuugaaaaa

SEQ ID NO: 1907147 - RNA, 13 nt, Human
uuuaauaaaccau

SEQ ID NO: 1907148 - RNA, 21 nt, Human
uuuaaccccgucaacaaaucu

SEQ ID NO: 1907149 - RNA, 14 nt, Human
uuuaauaaacacuc

SEQ ID NO: 1907150 - RNA, 15 nt, Human
uuuaauaaacacucu

SEQ ID NO: 1907151 - RNA, 14 nt, Human
uuuaaccucuaaau

SEQ ID NO: 1907152 - RNA, 16 nt, Human
uuuaaccccgucaaca

SEQ ID NO: 1907153 - RNA, 17 nt, Human
uuuaaccccgucaacaa

SEQ ID NO: 1907154 - RNA, 18 nt, Human
uuuaaccccgucaacaaa

SEQ ID NO: 1907155 - RNA, 21 nt, Human
uuuaaccauggugcuuguuaa

SEQ ID NO: 1907156 - RNA, 15 nt, Human
uuuaacagaaaugua

SEQ ID NO: 1907157 - RNA, 14 nt, Human
uuuaacagaaaugu

SEQ ID NO: 1907158 - RNA, 19 nt, Human
uuuagacccuauugcugcu

SEQ ID NO: 1907159 - RNA, 16 nt, Human
uuuagacagucucacu

SEQ ID NO: 1907160 - RNA, 20 nt, Human
uuuagacagucucacuuugu

SEQ ID NO: 1907161 - RNA, 17 nt, Human
uuuaguugcaacuuugu

SEQ ID NO: 1907162 - RNA, 18 nt, Human
uuuaguugcaacuuugua

SEQ ID NO: 1907163 - RNA, 22 nt, Human
uuuagacccuauugcugcuuga

SEQ ID NO: 1907164 - RNA, 18 nt, Human
uuuauaaacuuuaccuuu

SEQ ID NO: 1907165 - RNA, 20 nt, Human
uuuauacauaaacaagacca

SEQ ID NO: 1907166 - RNA, 12 nt, Human
uuuauacauaaa

SEQ ID NO: 1907167 - RNA, 16 nt, Human
uuuauacucuuucugu

SEQ ID NO: 1907168 - RNA, 18 nt, Human
uuuauacucuuucuguau

SEQ ID NO: 1907169 - RNA, 20 nt, Human
uuuauacucuuucuguauau

SEQ ID NO: 1907170 - RNA, 17 nt, Human
uuuauacuggcaugcua

SEQ ID NO: 1907171 - RNA, 13 nt, Human
uuuauacuguaua

SEQ ID NO: 1907172 - RNA, 12 nt, Human
uuuaucauuuuc

SEQ ID NO: 1907173 - RNA, 14 nt, Human
uuuaucuugucucu

SEQ ID NO: 1907174 - RNA, 13 nt, Human
uuuaucugauuaa

SEQ ID NO: 1907175 - RNA, 17 nt, Human
uugccuucuacuuuuaa

SEQ ID NO: 1907176 - RNA, 21 nt, Human
uugccauguuggccaggcugg

SEQ ID NO: 1907177 - RNA, 20 nt, Human
uugccauguuggccaggcug

SEQ ID NO: 1907178 - RNA, 14 nt, Human
uugcugcuugaggc

SEQ ID NO: 1907179 - RNA, 16 nt, Human
uugcugcuugaggcaa

SEQ ID NO: 1907180 - RNA, 13 nt, Human
uugcugcugaagg

SEQ ID NO: 1907181 - RNA, 16 nt, Human
uugcugucccuuuucc

SEQ ID NO: 1907182 - RNA, 18 nt, Human
uugcugucccuuuuccuu

SEQ ID NO: 1907183 - RNA, 15 nt, Human
uuggacacuguacaa

SEQ ID NO: 1907184 - RNA, 16 nt, Human
uuggacagaagcagcu

SEQ ID NO: 1907185 - RNA, 19 nt, Human
uuggacagaagcagcucuu

SEQ ID NO: 1907186 - RNA, 13 nt, Human
uuggaauacuuuu

SEQ ID NO: 1907187 - RNA, 18 nt, Human
uuggacaaaauggaauac

SEQ ID NO: 1907188 - RNA, 19 nt, Human
uuggaagcuccgcuuucua

SEQ ID NO: 1907189 - RNA, 15 nt, Human
uuggauuguccccga

SEQ ID NO: 1907190 - RNA, 14 nt, Human
uuggauuugacauu

SEQ ID NO: 1907191 - RNA, 22 nt, Human
uuggauuugacauugcguuuga

SEQ ID NO: 1907192 - RNA, 15 nt, Human
uuggacccugaggcc

SEQ ID NO: 1907193 - RNA, 18 nt, Human
uuggacccugaggcccag

SEQ ID NO: 1907194 - RNA, 19 nt, Human
uuggacccugaggcccaga

SEQ ID NO: 1907195 - RNA, 21 nt, Human
uuggacccugaggcccagagg

SEQ ID NO: 1907196 - RNA, 13 nt, Human
uuggcaccagaca

SEQ ID NO: 1907197 - RNA, 17 nt, Human
uuggcaccagacaccca

SEQ ID NO: 1907198 - RNA, 20 nt, Human
uuggcaccagacacccagga

SEQ ID NO: 1907199 - RNA, 21 nt, Human
uuggcaccagacacccaggac

SEQ ID NO: 1907200 - RNA, 23 nt, Human
uuggcaccagacacccaggacuu

SEQ ID NO: 1907201 - RNA, 19 nt, Human
uuggcaccuaauccaggca

SEQ ID NO: 1907202 - RNA, 21 nt, Human
uuggcaccuaauccaggcaga

SEQ ID NO: 1907203 - RNA, 16 nt, Human
uuggcagcucuacucu

SEQ ID NO: 1907204 - RNA, 20 nt, Human
uuggucugacccacugcuuu

SEQ ID NO: 1907205 - RNA, 13 nt, Human
uuguaaaauggug

SEQ ID NO: 1907206 - RNA, 12 nt, Human
uuguaaaauggu

SEQ ID NO: 1907207 - RNA, 15 nt, Human
uuggucugugagaug

SEQ ID NO: 1907208 - RNA, 13 nt, Human
uugggauuaauau

SEQ ID NO: 1907209 - RNA, 23 nt, Human
uuggcuucacggaagagccuugc

SEQ ID NO: 1907210 - RNA, 21 nt, Human
uugggaaggggacccccgccc

SEQ ID NO: 1907211 - RNA, 20 nt, Human
uugggaccccuggugguuca

SEQ ID NO: 1907212 - RNA, 16 nt, Human
uugggaccccuggugg

SEQ ID NO: 1907213 - RNA, 15 nt, Human
uugggaccccuggug

SEQ ID NO: 1907214 - RNA, 14 nt, Human
uugggaccccuggu

SEQ ID NO: 1907215 - RNA, 16 nt, Human
uuguaccgcaauguga

SEQ ID NO: 1907216 - RNA, 11 nt, Human
uuguaccucuc

SEQ ID NO: 1907217 - RNA, 20 nt, Human
uuguaaaauggugugaccac

SEQ ID NO: 1907218 - RNA, 18 nt, Human
uuguacuuuagggaagua

SEQ ID NO: 1907219 - RNA, 22 nt, Human
uuguagaagucacauuccugaa

SEQ ID NO: 1907220 - RNA, 17 nt, Human
uuguagaagucacauuc

SEQ ID NO: 1907221 - RNA, 15 nt, Human
uuguagcauccugga

SEQ ID NO: 1907222 - RNA, 17 nt, Human
uuguagcauccucuuua

SEQ ID NO: 1907223 - RNA, 14 nt, Human
uugucuaugggacu

SEQ ID NO: 1907224 - RNA, 22 nt, Human
uugucaaaguggugagaggcau

SEQ ID NO: 1907225 - RNA, 20 nt, Human
uugucuaugggacucaaugc

SEQ ID NO: 1907226 - RNA, 12 nt, Human
uugucucugggc

SEQ ID NO: 1907227 - RNA, 23 nt, Human
uugaauugcauuuuuuaaaacaa

SEQ ID NO: 1907228 - RNA, 19 nt, Human
uugagccuugaacuuugac

SEQ ID NO: 1907229 - RNA, 15 nt, Human
uugagcuauugcugu

SEQ ID NO: 1907230 - RNA, 16 nt, Human
uugagccuugaacuuu

SEQ ID NO: 1907231 - RNA, 15 nt, Human
uugagccuugaacuu

SEQ ID NO: 1907232 - RNA, 14 nt, Human
uugagccuugaacu

SEQ ID NO: 1907233 - RNA, 14 nt, Human
uugagccugggagg

SEQ ID NO: 1907234 - RNA, 19 nt, Human
uugaauuaaauguucaucu

SEQ ID NO: 1907235 - RNA, 20 nt, Human
uugaauugaggggauuaaua

SEQ ID NO: 1907236 - RNA, 18 nt, Human
uugaucccuucuguuggu

SEQ ID NO: 1907237 - RNA, 17 nt, Human
uugauccagaaagaaaa

SEQ ID NO: 1907238 - RNA, 17 nt, Human
uugauucagacagcugc

SEQ ID NO: 1907239 - RNA, 21 nt, Human
uugauucagacagcugccugg

SEQ ID NO: 1907240 - RNA, 23 nt, Human
uugauucagacagcugccuggga

SEQ ID NO: 1907241 - RNA, 16 nt, Human
uugauucagcucugca

SEQ ID NO: 1907242 - RNA, 18 nt, Human
uugauauuugugcauuuu

SEQ ID NO: 1907243 - RNA, 20 nt, Human
uugauauuugugcauuuucu

SEQ ID NO: 1907244 - RNA, 21 nt, Human
uugauauuugugcauuuucua

SEQ ID NO: 1907245 - RNA, 17 nt, Human
uugaucaacaucuuuuc

SEQ ID NO: 1907246 - RNA, 22 nt, Human
uugaucaacaucuuuucuugcc

SEQ ID NO: 1907247 - RNA, 18 nt, Human
uugaucaacaucuuuucu

SEQ ID NO: 1907248 - RNA, 18 nt, Human
uugaucagaucugacaug

SEQ ID NO: 1907249 - RNA, 16 nt, Human
uugauaugcuuauaca

SEQ ID NO: 1907250 - RNA, 16 nt, Human
uugauaugugaacagu

SEQ ID NO: 1907251 - RNA, 19 nt, Human
uugccauguuggccaggcu

SEQ ID NO: 1907252 - RNA, 18 nt, Human
uugccauguuggccaggc

SEQ ID NO: 1907253 - RNA, 17 nt, Human
uugccauguuggccagg

SEQ ID NO: 1907254 - RNA, 16 nt, Human
uugccauguuggccag

SEQ ID NO: 1907255 - RNA, 16 nt, Human
uugcauaacguauaaa

SEQ ID NO: 1907256 - RNA, 13 nt, Human
uugcauaagguuu

SEQ ID NO: 1907257 - RNA, 12 nt, Human
uugcauaauaaa

SEQ ID NO: 1907258 - RNA, 19 nt, Human
uugccagagauccaaaaga

SEQ ID NO: 1907259 - RNA, 23 nt, Human
uugcagacaggcaagcaccuccu

SEQ ID NO: 1907260 - RNA, 18 nt, Human
uugcagcgauuaauaaca

SEQ ID NO: 1907261 - RNA, 19 nt, Human
uugcagcgauuaauaacag

SEQ ID NO: 1907262 - RNA, 13 nt, Human
uugauucauaaug

SEQ ID NO: 1907263 - RNA, 17 nt, Human
uugauucauaaugacuu

SEQ ID NO: 1907264 - RNA, 20 nt, Human
uugauucuccuucagcccuc

SEQ ID NO: 1907265 - RNA, 17 nt, Human
uugauucuccuucagcc

SEQ ID NO: 1907266 - RNA, 13 nt, Human
uugauucuccuuc

SEQ ID NO: 1907267 - RNA, 12 nt, Human
uugauucuccuu

SEQ ID NO: 1907268 - RNA, 14 nt, Human
uugaucuggaaccc

SEQ ID NO: 1907269 - RNA, 19 nt, Human
uugauucauaguaacuucu

SEQ ID NO: 1907270 - RNA, 20 nt, Human
uugcacuugugauuauuuau

SEQ ID NO: 1907271 - RNA, 17 nt, Human
uugcacuugugauuauu

SEQ ID NO: 1907272 - RNA, 21 nt, Human
uucuucauaacaauuuuagga

SEQ ID NO: 1907273 - RNA, 18 nt, Human
uucuucauaacaauuuua

SEQ ID NO: 1907274 - RNA, 22 nt, Human
uucuugugccauagucacaugg

SEQ ID NO: 1907275 - RNA, 14 nt, Human
uucuuguguguuua

SEQ ID NO: 1907276 - RNA, 13 nt, Human
uucuucagagacu

SEQ ID NO: 1907277 - RNA, 15 nt, Human
uucuuauggaauuga

SEQ ID NO: 1907278 - RNA, 17 nt, Human
uucuuauggaauugauu

SEQ ID NO: 1907279 - RNA, 18 nt, Human
uucuuauggaauugauuu

SEQ ID NO: 1907280 - RNA, 22 nt, Human
uucuuauggaauugauuugcau

SEQ ID NO: 1907281 - RNA, 17 nt, Human
uucuuagggaaggauac

SEQ ID NO: 1907282 - RNA, 22 nt, Human
uucuuauaggaaagcuugagua

SEQ ID NO: 1907283 - RNA, 13 nt, Human
uucugugcagcca

SEQ ID NO: 1907284 - RNA, 15 nt, Human
uucuguauauacuuu

SEQ ID NO: 1907285 - RNA, 16 nt, Human
uucuguauauacuuuu

SEQ ID NO: 1907286 - RNA, 17 nt, Human
uucuguauauacuuuuu

SEQ ID NO: 1907287 - RNA, 17 nt, Human
uucuguaucuacuuuaa

SEQ ID NO: 1907288 - RNA, 21 nt, Human
uucuguaucuacuuuaauaaa

SEQ ID NO: 1907289 - RNA, 20 nt, Human
uucuggcagaguugaagaca

SEQ ID NO: 1907290 - RNA, 16 nt, Human
uucuggcuaugcauuu

SEQ ID NO: 1907291 - RNA, 15 nt, Human
uucuggccucccaca

SEQ ID NO: 1907292 - RNA, 14 nt, Human
uucuggccucccac

SEQ ID NO: 1907293 - RNA, 21 nt, Human
uugaaaaucuuauaauuuaaa

SEQ ID NO: 1907294 - RNA, 21 nt, Human
uucuuuccugaggcugggcuc

SEQ ID NO: 1907295 - RNA, 12 nt, Human
uucuuuaaugcu

SEQ ID NO: 1907296 - RNA, 18 nt, Human
uucuuuaaugcuuuuaua

SEQ ID NO: 1907297 - RNA, 18 nt, Human
uugaaaauuaacaugaau

SEQ ID NO: 1907298 - RNA, 21 nt, Human
uucuuucccugcuuaaugaaa

SEQ ID NO: 1907299 - RNA, 21 nt, Human
uugaaaauaagaauagaaaua

SEQ ID NO: 1907300 - RNA, 15 nt, Human
uugaacuuugaccuc

SEQ ID NO: 1907301 - RNA, 12 nt, Human
uugaaugaugcc

SEQ ID NO: 1907302 - RNA, 16 nt, Human
uugaaugaugccauga

SEQ ID NO: 1907303 - RNA, 19 nt, Human
uugaauguggcuugagaaa

SEQ ID NO: 1907304 - RNA, 21 nt, Human
uugaauguggcuugagaaaua

SEQ ID NO: 1907305 - RNA, 22 nt, Human
uugaauguggcuugagaaauau

SEQ ID NO: 1907306 - RNA, 18 nt, Human
uugaacuuugaccucugc

SEQ ID NO: 1907307 - RNA, 17 nt, Human
uugaacuuugaccucug

SEQ ID NO: 1907308 - RNA, 20 nt, Human
uugaacuuugaccucugcag

SEQ ID NO: 1907309 - RNA, 16 nt, Human
uugaagagguuuuaaa

SEQ ID NO: 1907310 - RNA, 20 nt, Human
uugaagcacagugaucaagu

SEQ ID NO: 1907311 - RNA, 21 nt, Human
uugaagagguuuuaaagcuuc

SEQ ID NO: 1907312 - RNA, 11 nt, Human
uuuguggggag

SEQ ID NO: 1907313 - RNA, 15 nt, Human
auguuucuucuaggu

SEQ ID NO: 1907314 - RNA, 14 nt, Human
auguuugccucugc

SEQ ID NO: 1907315 - RNA, 17 nt, Human
auguuugccucugccuc

SEQ ID NO: 1907316 - RNA, 15 nt, Human
auguuugccucugcc

SEQ ID NO: 1907317 - RNA, 14 nt, Human
auguucuuaauucu

SEQ ID NO: 1907318 - RNA, 13 nt, Human
auguucucugagg

SEQ ID NO: 1907319 - RNA, 17 nt, Human
auguucucucuucucca

SEQ ID NO: 1907320 - RNA, 16 nt, Human
auguucucucuucucc

SEQ ID NO: 1907321 - RNA, 14 nt, Human
auguucugggacac

SEQ ID NO: 1907322 - RNA, 17 nt, Human
auguucucugaggacac

SEQ ID NO: 1907323 - RNA, 15 nt, Human
auguucugggacaca

SEQ ID NO: 1907324 - RNA, 23 nt, Human
auguguagccugugcauguaugu

SEQ ID NO: 1907325 - RNA, 17 nt, Human
auguguagccugugcau

SEQ ID NO: 1907326 - RNA, 16 nt, Human
auguguagccugugca

SEQ ID NO: 1907327 - RNA, 15 nt, Human
auguguagccugugc

SEQ ID NO: 1907328 - RNA, 13 nt, Human
auguguaaguauu

SEQ ID NO: 1907329 - RNA, 17 nt, Human
auguguaagacaaaaag

SEQ ID NO: 1907330 - RNA, 19 nt, Human
auguguaagacaaaaagcu

SEQ ID NO: 1907331 - RNA, 17 nt, Human
auguauuuauaaauaua

SEQ ID NO: 1907332 - RNA, 13 nt, Human
augucacaggcag

SEQ ID NO: 1907333 - RNA, 23 nt, Human
auguauuguuugggauccuauug

SEQ ID NO: 1907334 - RNA, 20 nt, Human
auguaauuguuugucuuuaa

SEQ ID NO: 1907335 - RNA, 17 nt, Human
augugaaaucauucauu

SEQ ID NO: 1907336 - RNA, 18 nt, Human
augugaaaucauucauuu

SEQ ID NO: 1907337 - RNA, 16 nt, Human
augugaacagcggcug

SEQ ID NO: 1907338 - RNA, 19 nt, Human
augucacaggcagguccag

SEQ ID NO: 1907339 - RNA, 14 nt, Human
augugaaacauguu

SEQ ID NO: 1907340 - RNA, 14 nt, Human
augugaaaucauuc

SEQ ID NO: 1907341 - RNA, 18 nt, Human
augugaaaaggcaaaaag

SEQ ID NO: 1907342 - RNA, 20 nt, Human
augggugcuuggaggaagga

SEQ ID NO: 1907343 - RNA, 21 nt, Human
augggugcuuggaggaaggaa

SEQ ID NO: 1907344 - RNA, 23 nt, Human
augggugcuuggaggaaggaaac

SEQ ID NO: 1907345 - RNA, 20 nt, Human
augguaauucuuauucuuuc

SEQ ID NO: 1907346 - RNA, 17 nt, Human
augguaggcauuuccua

SEQ ID NO: 1907347 - RNA, 18 nt, Human
augguaggcauuuccuau

SEQ ID NO: 1907348 - RNA, 16 nt, Human
auggagggaauaauac

SEQ ID NO: 1907349 - RNA, 18 nt, Human
augcuuuagaaagguuuu

SEQ ID NO: 1907350 - RNA, 15 nt, Human
augcuuguacauaau

SEQ ID NO: 1907351 - RNA, 16 nt, Human
augcuuguacauaaug

SEQ ID NO: 1907352 - RNA, 18 nt, Human
auggauaggcacaggaaa

SEQ ID NO: 1907353 - RNA, 17 nt, Human
auggauaggcacaggaa

SEQ ID NO: 1907354 - RNA, 18 nt, Human
auggcuggagcuagaauu

SEQ ID NO: 1907355 - RNA, 17 nt, Human
auggcuuuugugcauua

SEQ ID NO: 1907356 - RNA, 16 nt, Human
auggcuuuugugcauu

SEQ ID NO: 1907357 - RNA, 18 nt, Human
auggcuuuugugcauuau

SEQ ID NO: 1907358 - RNA, 16 nt, Human
augcugcccugugagu

SEQ ID NO: 1907359 - RNA, 13 nt, Human
augcugcccugug

SEQ ID NO: 1907360 - RNA, 14 nt, Human
augcugcccuguga

SEQ ID NO: 1907361 - RNA, 15 nt, Human
augcugcccugugag

SEQ ID NO: 1907362 - RNA, 22 nt, Human
augcugacauucaccugcccca

SEQ ID NO: 1907363 - RNA, 19 nt, Human
augcugacauucaccugcc

SEQ ID NO: 1907364 - RNA, 20 nt, Human
augcugacauucaccugccc

SEQ ID NO: 1907365 - RNA, 18 nt, Human
augaugaaaugaggucag

SEQ ID NO: 1907366 - RNA, 15 nt, Human
augaucuuuucaagu

SEQ ID NO: 1907367 - RNA, 19 nt, Human
augaugaaaauauuuaaag

SEQ ID NO: 1907368 - RNA, 23 nt, Human
augaugaaaugaggucagagccu

SEQ ID NO: 1907369 - RNA, 12 nt, Human
augaugaaugag

SEQ ID NO: 1907370 - RNA, 15 nt, Human
augaugaaugagaau

SEQ ID NO: 1907371 - RNA, 20 nt, Human
augaugacaacuacagaaaa

SEQ ID NO: 1907372 - RNA, 15 nt, Human
augaugauccuaggc

SEQ ID NO: 1907373 - RNA, 18 nt, Human
augcacaaacagaggccg

SEQ ID NO: 1907374 - RNA, 21 nt, Human
augauggcccauucuacuugc

SEQ ID NO: 1907375 - RNA, 12 nt, Human
augauggcccau

SEQ ID NO: 1907376 - RNA, 15 nt, Human
augauggcccauucu

SEQ ID NO: 1907377 - RNA, 15 nt, Human
augauggaugccaau

SEQ ID NO: 1907378 - RNA, 19 nt, Human
augauggaugccaauauua

SEQ ID NO: 1907379 - RNA, 19 nt, Human
augauggcccauucuacuu

SEQ ID NO: 1907380 - RNA, 20 nt, Human
augauggcccauucuacuug

SEQ ID NO: 1907381 - RNA, 16 nt, Human
augaugggucaguugu

SEQ ID NO: 1907382 - RNA, 15 nt, Human
augcacaaauucugu

SEQ ID NO: 1907383 - RNA, 22 nt, Human
augcacaaauucugucucugga

SEQ ID NO: 1907384 - RNA, 23 nt, Human
augcacaaauucugucucuggau

SEQ ID NO: 1907385 - RNA, 17 nt, Human
augaucuuugcagacag

SEQ ID NO: 1907386 - RNA, 21 nt, Human
augaucuuugcagacaggcaa

SEQ ID NO: 1907387 - RNA, 15 nt, Human
augaugaaaauauuu

SEQ ID NO: 1907388 - RNA, 13 nt, Human
augaugaaaauau

SEQ ID NO: 1907389 - RNA, 19 nt, Human
augaucuuugcagacaggc

SEQ ID NO: 1907390 - RNA, 18 nt, Human
augaucuuugcagacagg

SEQ ID NO: 1907391 - RNA, 19 nt, Human
augccuggauggggcugca

SEQ ID NO: 1907392 - RNA, 20 nt, Human
augccuggauggggcugcac

SEQ ID NO: 1907393 - RNA, 23 nt, Human
augcacagaguuguuacauuuuu

SEQ ID NO: 1907394 - RNA, 22 nt, Human
augcacagaguuguuacauuuu

SEQ ID NO: 1907395 - RNA, 21 nt, Human
augcacagaguuguuacauuu

SEQ ID NO: 1907396 - RNA, 19 nt, Human
augcacagaguuguuacau

SEQ ID NO: 1907397 - RNA, 15 nt, Human
augcacacauuuuuu

SEQ ID NO: 1907398 - RNA, 14 nt, Human
augcacacauuuuu

SEQ ID NO: 1907399 - RNA, 13 nt, Human
augcacacauuuu

SEQ ID NO: 1907400 - RNA, 19 nt, Human
auccucaguuuuugugaaa

SEQ ID NO: 1907401 - RNA, 19 nt, Human
aucccaugagccucagcau

SEQ ID NO: 1907402 - RNA, 12 nt, Human
auccccaauaau

SEQ ID NO: 1907403 - RNA, 19 nt, Human
auccccaauaauugcagaa

SEQ ID NO: 1907404 - RNA, 21 nt, Human
auccccaauaauugcagaacu

SEQ ID NO: 1907405 - RNA, 22 nt, Human
auccccaauaauugcagaacua

SEQ ID NO: 1907406 - RNA, 19 nt, Human
auccagacccggcugcgug

SEQ ID NO: 1907407 - RNA, 17 nt, Human
auccucauacccacccc

SEQ ID NO: 1907408 - RNA, 19 nt, Human
auccuucccugucugccag

SEQ ID NO: 1907409 - RNA, 22 nt, Human
auccuucccugucugccagggc

SEQ ID NO: 1907410 - RNA, 19 nt, Human
aucgccagcugaugacuca

SEQ ID NO: 1907411 - RNA, 21 nt, Human
aucgccagcugaugacucaag

SEQ ID NO: 1907412 - RNA, 23 nt, Human
aucgccagcugaugacucaagau

SEQ ID NO: 1907413 - RNA, 20 nt, Human
aucgcggcggagcuggcccc

SEQ ID NO: 1907414 - RNA, 22 nt, Human
aucgcggcggagcuggccccgc

SEQ ID NO: 1907415 - RNA, 14 nt, Human
aucaugucuggcua

SEQ ID NO: 1907416 - RNA, 12 nt, Human
aucaugugaaau

SEQ ID NO: 1907417 - RNA, 14 nt, Human
aucaccuauuucca

SEQ ID NO: 1907418 - RNA, 15 nt, Human
aucaccuauuuccau

SEQ ID NO: 1907419 - RNA, 22 nt, Human
aucaccuauuuccauucaacaa

SEQ ID NO: 1907420 - RNA, 23 nt, Human
aucacccgcuaagagggagggag

SEQ ID NO: 1907421 - RNA, 13 nt, Human
aucaccagacagg

SEQ ID NO: 1907422 - RNA, 20 nt, Human
aucaccaacgucugugccau

SEQ ID NO: 1907423 - RNA, 22 nt, Human
aucaaauauauucagccuggcu

SEQ ID NO: 1907424 - RNA, 13 nt, Human
aucacagccucug

SEQ ID NO: 1907425 - RNA, 14 nt, Human
aucaaauauauuca

SEQ ID NO: 1907426 - RNA, 14 nt, Human
aucaaagccacacu

SEQ ID NO: 1907427 - RNA, 16 nt, Human
aucaaagccacacucu

SEQ ID NO: 1907428 - RNA, 20 nt, Human
aucaaagagguuuuaaaaaa

SEQ ID NO: 1907429 - RNA, 23 nt, Human
aucaaagagguuuuaaaaaaauc

SEQ ID NO: 1907430 - RNA, 12 nt, Human
aucaaaaugcuu

SEQ ID NO: 1907431 - RNA, 22 nt, Human
aucaaaaugcuuuuuauuucug

SEQ ID NO: 1907432 - RNA, 13 nt, Human
aucaaaaugcuuu

SEQ ID NO: 1907433 - RNA, 21 nt, Human
auauuucccugaaggaaccaa

SEQ ID NO: 1907434 - RNA, 18 nt, Human
aucugggggccucuucug

SEQ ID NO: 1907435 - RNA, 16 nt, Human
aucuggggcucuggga

SEQ ID NO: 1907436 - RNA, 14 nt, Human
aucuucaacaaauu

SEQ ID NO: 1907437 - RNA, 12 nt, Human
aucuucaacaaa

SEQ ID NO: 1907438 - RNA, 13 nt, Human
aucuucaacaaau

SEQ ID NO: 1907439 - RNA, 21 nt, Human
aucuuauuagggagaaaauuc

SEQ ID NO: 1907440 - RNA, 22 nt, Human
aucuuauuagggagaaaauuca

SEQ ID NO: 1907441 - RNA, 13 nt, Human
aucuuauucacau

SEQ ID NO: 1907442 - RNA, 22 nt, Human
aucucugcaggaaauggcugug

SEQ ID NO: 1907443 - RNA, 17 nt, Human
aucucucuuuaauauaa

SEQ ID NO: 1907444 - RNA, 20 nt, Human
aucuggagaccagggagccu

SEQ ID NO: 1907445 - RNA, 21 nt, Human
aucuggagaccagggagccuu

SEQ ID NO: 1907446 - RNA, 22 nt, Human
aucuggagaccagggagccuuu

SEQ ID NO: 1907447 - RNA, 14 nt, Human
aucuucccucuccc

SEQ ID NO: 1907448 - RNA, 21 nt, Human
aucuucuaaacccaauccaaa

SEQ ID NO: 1907449 - RNA, 13 nt, Human
aucuauuuaagua

SEQ ID NO: 1907450 - RNA, 16 nt, Human
aucuauuuaucuucau

SEQ ID NO: 1907451 - RNA, 14 nt, Human
aucuauuuuggauu

SEQ ID NO: 1907452 - RNA, 20 nt, Human
aucuccgucaacucauauuu

SEQ ID NO: 1907453 - RNA, 16 nt, Human
aucuauacauaucuuu

SEQ ID NO: 1907454 - RNA, 15 nt, Human
aucuauacuugcuuu

SEQ ID NO: 1907455 - RNA, 21 nt, Human
augaaguacucauacauguua

SEQ ID NO: 1907456 - RNA, 20 nt, Human
augaaaaugcaacaacaugu

SEQ ID NO: 1907457 - RNA, 15 nt, Human
augaaguuguaggua

SEQ ID NO: 1907458 - RNA, 14 nt, Human
augaccagcaaaua

SEQ ID NO: 1907459 - RNA, 22 nt, Human
augaggcauuuguuugaacuga

SEQ ID NO: 1907460 - RNA, 21 nt, Human
augaggcauuuguuugaacug

SEQ ID NO: 1907461 - RNA, 14 nt, Human
augaggcauuuguu

SEQ ID NO: 1907462 - RNA, 13 nt, Human
augaggcauuugu

SEQ ID NO: 1907463 - RNA, 19 nt, Human
augaggggacauuuuggug

SEQ ID NO: 1907464 - RNA, 20 nt, Human
augagggucuugguuccagc

SEQ ID NO: 1907465 - RNA, 13 nt, Human
augagggucuugg

SEQ ID NO: 1907466 - RNA, 15 nt, Human
augaaaacacauuuu

SEQ ID NO: 1907467 - RNA, 14 nt, Human
augaaaacacauuu

SEQ ID NO: 1907468 - RNA, 16 nt, Human
augaaaacacauuuuu

SEQ ID NO: 1907469 - RNA, 16 nt, Human
augaaaauauuuaaag

SEQ ID NO: 1907470 - RNA, 14 nt, Human
augaaaauauuuaa

SEQ ID NO: 1907471 - RNA, 13 nt, Human
augaaaauauuua

SEQ ID NO: 1907472 - RNA, 12 nt, Human
augaaaauauuu

SEQ ID NO: 1907473 - RNA, 14 nt, Human
auaucagcaagucu

SEQ ID NO: 1907474 - RNA, 18 nt, Human
auauauuuuuuucugaaa

SEQ ID NO: 1907475 - RNA, 16 nt, Human
auauggacucugcaca

SEQ ID NO: 1907476 - RNA, 15 nt, Human
auauggacucugcac

SEQ ID NO: 1907477 - RNA, 16 nt, Human
auaugcaguuuuccuu

SEQ ID NO: 1907478 - RNA, 20 nt, Human
auaugcaguaaaagaaagaa

SEQ ID NO: 1907479 - RNA, 20 nt, Human
auaugcucugcauguuacau

SEQ ID NO: 1907480 - RNA, 13 nt, Human
auauggccacagu

SEQ ID NO: 1907481 - RNA, 17 nt, Human
auaugcaccuugugucu

SEQ ID NO: 1907482 - RNA, 15 nt, Human
auaugcaccuugugu

SEQ ID NO: 1907483 - RNA, 21 nt, Human
auaugcaccuugugucuguac

SEQ ID NO: 1907484 - RNA, 20 nt, Human
auaugcaccuugugucugua

SEQ ID NO: 1907485 - RNA, 19 nt, Human
auaugcaccuugugucugu

SEQ ID NO: 1907486 - RNA, 17 nt, Human
auaugcagauuuugccc

SEQ ID NO: 1907487 - RNA, 16 nt, Human
auaugcucugcauguu

SEQ ID NO: 1907488 - RNA, 17 nt, Human
auaugcucugcauguua

SEQ ID NO: 1907489 - RNA, 19 nt, Human
auauucaggaagcucaggg

SEQ ID NO: 1907490 - RNA, 14 nt, Human
auauuauuuuaugu

SEQ ID NO: 1907491 - RNA, 15 nt, Human
auauuauuuuauguu

SEQ ID NO: 1907492 - RNA, 22 nt, Human
auauuauuuuauguugcauaga

SEQ ID NO: 1907493 - RNA, 19 nt, Human
auauuucccugaaggaacc

SEQ ID NO: 1907494 - RNA, 23 nt, Human
auauuuccaggcugcauuuguau

SEQ ID NO: 1907495 - RNA, 22 nt, Human
auauuuccaggcugcauuugua

SEQ ID NO: 1907496 - RNA, 21 nt, Human
auauaauaaauguacauuaau

SEQ ID NO: 1907497 - RNA, 21 nt, Human
auaguaccauuuauacaaauu

SEQ ID NO: 1907498 - RNA, 17 nt, Human
auaguaccaaucauuuu

SEQ ID NO: 1907499 - RNA, 14 nt, Human
auaguaccauuuau

SEQ ID NO: 1907500 - RNA, 19 nt, Human
auaguaccauuuauacaaa

SEQ ID NO: 1907501 - RNA, 17 nt, Human
auauaauauauuugugu

SEQ ID NO: 1907502 - RNA, 20 nt, Human
auauaauauauuuguguauu

SEQ ID NO: 1907503 - RNA, 17 nt, Human
auagccuaggugacaga

SEQ ID NO: 1907504 - RNA, 15 nt, Human
auagccuaggugaca

SEQ ID NO: 1907505 - RNA, 24 nt, Human
auagguuuggacaaaauggaauac

SEQ ID NO: 1907506 - RNA, 21 nt, Human
auaguaacuucuuauggaauu

SEQ ID NO: 1907507 - RNA, 19 nt, Human
auaguaacuucuuauggaa

SEQ ID NO: 1907508 - RNA, 13 nt, Human
auauacacacagc

SEQ ID NO: 1907509 - RNA, 16 nt, Human
auagcagacaguguuu

SEQ ID NO: 1907510 - RNA, 17 nt, Human
auagcacagacccugcc

SEQ ID NO: 1907511 - RNA, 18 nt, Human
auagcacagacccugccc

SEQ ID NO: 1907512 - RNA, 15 nt, Human
auagcacagacccug

SEQ ID NO: 1907513 - RNA, 22 nt, Human
auagaaauaaaggaugugauug

SEQ ID NO: 1907514 - RNA, 16 nt, Human
auagaaagugccagaa

SEQ ID NO: 1907515 - RNA, 19 nt, Human
auagaaagugccagaaagu

SEQ ID NO: 1907516 - RNA, 15 nt, Human
auagcagcuuauuca

SEQ ID NO: 1907517 - RNA, 11 nt, Human
auagcacuuuc

SEQ ID NO: 1907518 - RNA, 14 nt, Human
auagcagauuuuaa

SEQ ID NO: 1907519 - RNA, 22 nt, Human
auagcagauuuuaauuuugaau

SEQ ID NO: 1907520 - RNA, 23 nt, Human
auacuugaagggccagagccagg

SEQ ID NO: 1907521 - RNA, 12 nt, Human
auacuugcuuug

SEQ ID NO: 1907522 - RNA, 14 nt, Human
auaacaaugaaagu

SEQ ID NO: 1907523 - RNA, 14 nt, Human
auaaagcaaauaga

SEQ ID NO: 1907524 - RNA, 18 nt, Human
auaaagcaaauagacaca

SEQ ID NO: 1907525 - RNA, 12 nt, Human
auaaagcaaaua

SEQ ID NO: 1907526 - RNA, 20 nt, Human
auaaauuugguucuaauaga

SEQ ID NO: 1907527 - RNA, 20 nt, Human
auaacauguaauuaaguacu

SEQ ID NO: 1907528 - RNA, 12 nt, Human
auaacauguaau

SEQ ID NO: 1907529 - RNA, 13 nt, Human
auaacauguaauu

SEQ ID NO: 1907530 - RNA, 18 nt, Human
auaacauguaauuaagua

SEQ ID NO: 1907531 - RNA, 23 nt, Human
aguuugauuaaauucuugcaaag

SEQ ID NO: 1907532 - RNA, 11 nt, Human
aguuugcuuag

SEQ ID NO: 1907533 - RNA, 12 nt, Human
auaaaaagcaaa

SEQ ID NO: 1907534 - RNA, 18 nt, Human
aguuuggcaaacucucca

SEQ ID NO: 1907535 - RNA, 13 nt, Human
aguuugcuuagaa

SEQ ID NO: 1907536 - RNA, 14 nt, Human
aguuugcuuagaaa

SEQ ID NO: 1907537 - RNA, 16 nt, Human
aguuuggcaaacucuc

SEQ ID NO: 1907538 - RNA, 16 nt, Human
auaaaaagcaaaacaa

SEQ ID NO: 1907539 - RNA, 13 nt, Human
auaaaaagcaaaa

SEQ ID NO: 1907540 - RNA, 17 nt, Human
auaaaaagcuuccauga

SEQ ID NO: 1907541 - RNA, 21 nt, Human
auaaaaagcuuccaugauucu

SEQ ID NO: 1907542 - RNA, 18 nt, Human
auaaaacauuuucacaca

SEQ ID NO: 1907543 - RNA, 20 nt, Human
auaaaacauuuucacacaau

SEQ ID NO: 1907544 - RNA, 15 nt, Human
auaaaacuggcuuug

SEQ ID NO: 1907545 - RNA, 16 nt, Human
aguuugauuaaauucu

SEQ ID NO: 1907546 - RNA, 20 nt, Human
aguuugagaucagccugggc

SEQ ID NO: 1907547 - RNA, 18 nt, Human
aguuugagaucagccugg

SEQ ID NO: 1907548 - RNA, 19 nt, Human
aguuugagaucagccuggg

SEQ ID NO: 1907549 - RNA, 22 nt, Human
aguuugauuaaauucuugcaaa

SEQ ID NO: 1907550 - RNA, 20 nt, Human
aguuugauuaaauucuugca

SEQ ID NO: 1907551 - RNA, 18 nt, Human
aguuugauuaaauucuug

SEQ ID NO: 1907552 - RNA, 17 nt, Human
aguuugauuaaauucuu

SEQ ID NO: 1907553 - RNA, 22 nt, Human
aguuguuacauuuuuaagugcu

SEQ ID NO: 1907554 - RNA, 20 nt, Human
aguuguuacauuuuuaagug

SEQ ID NO: 1907555 - RNA, 19 nt, Human
aguuguuacauuuuuaagu

SEQ ID NO: 1907556 - RNA, 22 nt, Human
aguuugaaucuauuuaucuuca

SEQ ID NO: 1907557 - RNA, 19 nt, Human
auaauguuguuauuuaaag

SEQ ID NO: 1907558 - RNA, 16 nt, Human
auacaaugaugcuauu

SEQ ID NO: 1907559 - RNA, 21 nt, Human
auacaaugaugcuauuugcaa

SEQ ID NO: 1907560 - RNA, 22 nt, Human
auacaaugaugcuauuugcaau

SEQ ID NO: 1907561 - RNA, 17 nt, Human
auacaaugcugugcccu

SEQ ID NO: 1907562 - RNA, 14 nt, Human
auacaaugcugugc

SEQ ID NO: 1907563 - RNA, 13 nt, Human
auacacuuacacu

SEQ ID NO: 1907564 - RNA, 22 nt, Human
auacacuuacacuuuaugcaca

SEQ ID NO: 1907565 - RNA, 13 nt, Human
auacccaccccca

SEQ ID NO: 1907566 - RNA, 14 nt, Human
auacccacccccac

SEQ ID NO: 1907567 - RNA, 16 nt, Human
auacccacccccaccc

SEQ ID NO: 1907568 - RNA, 17 nt, Human
auacccacccccaccca

SEQ ID NO: 1907569 - RNA, 13 nt, Human
auacagaaaaguu

SEQ ID NO: 1907570 - RNA, 14 nt, Human
auaccugucccccu

SEQ ID NO: 1907571 - RNA, 15 nt, Human
auaccugucccccug

SEQ ID NO: 1907572 - RNA, 16 nt, Human
auaccugucccccuga

SEQ ID NO: 1907573 - RNA, 17 nt, Human
auaccugucccccugac

SEQ ID NO: 1907574 - RNA, 14 nt, Human
auaauguuguuauu

SEQ ID NO: 1907575 - RNA, 19 nt, Human
auaauguaaacaauaucag

SEQ ID NO: 1907576 - RNA, 18 nt, Human
auaaggguaucuggugac

SEQ ID NO: 1907577 - RNA, 13 nt, Human
auaauggucagag

SEQ ID NO: 1907578 - RNA, 19 nt, Human
auaaugggguccuggccau

SEQ ID NO: 1907579 - RNA, 22 nt, Human
auaagccagacaucaacagaua

SEQ ID NO: 1907580 - RNA, 21 nt, Human
auaagccagacaucaacagau

SEQ ID NO: 1907581 - RNA, 18 nt, Human
aguaacccccacuggacu

SEQ ID NO: 1907582 - RNA, 23 nt, Human
aguaaccaucacugguugcacuu

SEQ ID NO: 1907583 - RNA, 17 nt, Human
aguaacaugaggggaca

SEQ ID NO: 1907584 - RNA, 14 nt, Human
aguacguugugcau

SEQ ID NO: 1907585 - RNA, 15 nt, Human
aguacguugugcauu

SEQ ID NO: 1907586 - RNA, 16 nt, Human
aggucuguucuuucca

SEQ ID NO: 1907587 - RNA, 15 nt, Human
aggucuguucuuucc

SEQ ID NO: 1907588 - RNA, 13 nt, Human
aggucuguucuuu

SEQ ID NO: 1907589 - RNA, 18 nt, Human
aguaaaugggggugcauu

SEQ ID NO: 1907590 - RNA, 15 nt, Human
aguaaaucuuuuaca

SEQ ID NO: 1907591 - RNA, 13 nt, Human
aguacucauacau

SEQ ID NO: 1907592 - RNA, 20 nt, Human
aguacuggcugauggaguaa

SEQ ID NO: 1907593 - RNA, 12 nt, Human
aguacuauguau

SEQ ID NO: 1907594 - RNA, 14 nt, Human
aguacuauguauca

SEQ ID NO: 1907595 - RNA, 12 nt, Human
aguacuucuuuu

SEQ ID NO: 1907596 - RNA, 17 nt, Human
aguacuucuccacccug

SEQ ID NO: 1907597 - RNA, 14 nt, Human
aguacuauaauuua

SEQ ID NO: 1907598 - RNA, 19 nt, Human
aguacuacaguccucccau

SEQ ID NO: 1907599 - RNA, 22 nt, Human
aguacuacaguccucccaucuc

SEQ ID NO: 1907600 - RNA, 18 nt, Human
aguacguugugcauuugg

SEQ ID NO: 1907601 - RNA, 17 nt, Human
aguacguugugcauuug

SEQ ID NO: 1907602 - RNA, 16 nt, Human
aguacguugugcauuu

SEQ ID NO: 1907603 - RNA, 23 nt, Human
aguacuugggagaccuguaauca

SEQ ID NO: 1907604 - RNA, 17 nt, Human
aguacuuuggaggcccc

SEQ ID NO: 1907605 - RNA, 21 nt, Human
aguaugaggcauuuguuugaa

SEQ ID NO: 1907606 - RNA, 20 nt, Human
aguaugaggcauuuguuuga

SEQ ID NO: 1907607 - RNA, 15 nt, Human
aguaucucagggccu

SEQ ID NO: 1907608 - RNA, 17 nt, Human
aguaugaggcauuuguu

SEQ ID NO: 1907609 - RNA, 14 nt, Human
aguauuuuguuuca

SEQ ID NO: 1907610 - RNA, 23 nt, Human
aguaugaggcauuuguuugaacu

SEQ ID NO: 1907611 - RNA, 17 nt, Human
aguauuuuguuucagug

SEQ ID NO: 1907612 - RNA, 22 nt, Human
agucacacaguauuacuucugc

SEQ ID NO: 1907613 - RNA, 18 nt, Human
agucacaaagaacaugua

SEQ ID NO: 1907614 - RNA, 17 nt, Human
agucaaaacuacaaauc

SEQ ID NO: 1907615 - RNA, 14 nt, Human
agucaauuaacaau

SEQ ID NO: 1907616 - RNA, 19 nt, Human
aguccuuaccagcagagca

SEQ ID NO: 1907617 - RNA, 11 nt, Human
aguccuuccac

SEQ ID NO: 1907618 - RNA, 19 nt, Human
aguccucuuuucugagagg

SEQ ID NO: 1907619 - RNA, 20 nt, Human
aguccuuaccagcagagcac

SEQ ID NO: 1907620 - RNA, 22 nt, Human
aguccucuuuucugagaggacu

SEQ ID NO: 1907621 - RNA, 17 nt, Human
aguccaacaauguuguu

SEQ ID NO: 1907622 - RNA, 19 nt, Human
agugucaaugcagccccca

SEQ ID NO: 1907623 - RNA, 14 nt, Human
agugucaggaggaa

SEQ ID NO: 1907624 - RNA, 12 nt, Human
agugucuggcug

SEQ ID NO: 1907625 - RNA, 22 nt, Human
agugucucggagggauuccccu

SEQ ID NO: 1907626 - RNA, 17 nt, Human
aguggcuuuaaugaaua

SEQ ID NO: 1907627 - RNA, 14 nt, Human
agugucuggcugca

SEQ ID NO: 1907628 - RNA, 13 nt, Human
agugucuggcugc

SEQ ID NO: 1907629 - RNA, 24 nt, Human
agugauccucccaccucagccucc

SEQ ID NO: 1907630 - RNA, 18 nt, Human
agugauccucccaccuca

SEQ ID NO: 1907631 - RNA, 15 nt, Human
agugauccucccacc

SEQ ID NO: 1907632 - RNA, 14 nt, Human
agugauccucccac

SEQ ID NO: 1907633 - RNA, 17 nt, Human
agugauucuccugccuc

SEQ ID NO: 1907634 - RNA, 15 nt, Human
agugauucuccugcc

SEQ ID NO: 1907635 - RNA, 18 nt, Human
agugccuuacacaauggu

SEQ ID NO: 1907636 - RNA, 14 nt, Human
agugauucuccugc

SEQ ID NO: 1907637 - RNA, 20 nt, Human
agugaucuuuuguucccauc

SEQ ID NO: 1907638 - RNA, 18 nt, Human
agugccuuauggaacacu

SEQ ID NO: 1907639 - RNA, 16 nt, Human
agugccuuauggaaca

SEQ ID NO: 1907640 - RNA, 15 nt, Human
agugcuaauuuugaa

SEQ ID NO: 1907641 - RNA, 10 nt, Human
agugccuuau

SEQ ID NO: 1907642 - RNA, 13 nt, Human
agugccuuaugga

SEQ ID NO: 1907643 - RNA, 14 nt, Human
agugccuuauggaa

SEQ ID NO: 1907644 - RNA, 15 nt, Human
agugccuuauggaac

SEQ ID NO: 1907645 - RNA, 18 nt, Human
agugcuaauuuugaaaaa

SEQ ID NO: 1907646 - RNA, 20 nt, Human
agugcuaauuuugaaaaacu

SEQ ID NO: 1907647 - RNA, 18 nt, Human
aguucagguaacaggcag

SEQ ID NO: 1907648 - RNA, 13 nt, Human
aguucaucuugaa

SEQ ID NO: 1907649 - RNA, 15 nt, Human
aguucaucuugaauu

SEQ ID NO: 1907650 - RNA, 19 nt, Human
aguucaucuugaauuguaa

SEQ ID NO: 1907651 - RNA, 15 nt, Human
aguucagccacccug

SEQ ID NO: 1907652 - RNA, 16 nt, Human
aguucagccacccuga

SEQ ID NO: 1907653 - RNA, 13 nt, Human
aguucagcuuggg

SEQ ID NO: 1907654 - RNA, 14 nt, Human
aguucagcuugggg

SEQ ID NO: 1907655 - RNA, 16 nt, Human
aguugauacuacaguu

SEQ ID NO: 1907656 - RNA, 13 nt, Human
aguugucuaaaca

SEQ ID NO: 1907657 - RNA, 18 nt, Human
aguugugacaacuuccug

SEQ ID NO: 1907658 - RNA, 20 nt, Human
aguugugacaacuuccugag

SEQ ID NO: 1907659 - RNA, 22 nt, Human
aguucaucuugaauuguaagga

SEQ ID NO: 1907660 - RNA, 22 nt, Human
aguugacuugacagaacacugu

SEQ ID NO: 1907661 - RNA, 15 nt, Human
agacugaggggucga

SEQ ID NO: 1907662 - RNA, 22 nt, Human
agacugaguacguugugcauuu

SEQ ID NO: 1907663 - RNA, 22 nt, Human
agacugaccaauauuguacagu

SEQ ID NO: 1907664 - RNA, 20 nt, Human
agacugaccuugaugagcug

SEQ ID NO: 1907665 - RNA, 20 nt, Human
agacugaguacguugugcau

SEQ ID NO: 1907666 - RNA, 18 nt, Human
agacucugucucagucca

SEQ ID NO: 1907667 - RNA, 13 nt, Human
agacucugucuca

SEQ ID NO: 1907668 - RNA, 18 nt, Human
agacucugucucaaaaaa

SEQ ID NO: 1907669 - RNA, 16 nt, Human
agacgcugugcugccc

SEQ ID NO: 1907670 - RNA, 16 nt, Human
agagagaccacuuuuc

SEQ ID NO: 1907671 - RNA, 20 nt, Human
agacuggaagcuaauuugca

SEQ ID NO: 1907672 - RNA, 21 nt, Human
agacuggaagcuaauuugcau

SEQ ID NO: 1907673 - RNA, 13 nt, Human
agagccagggucu

SEQ ID NO: 1907674 - RNA, 13 nt, Human
agagcccaccuug

SEQ ID NO: 1907675 - RNA, 17 nt, Human
agagagggaggcaagcc

SEQ ID NO: 1907676 - RNA, 18 nt, Human
agagagggaggcaagccc

SEQ ID NO: 1907677 - RNA, 15 nt, Human
agagagaggcaaugg

SEQ ID NO: 1907678 - RNA, 14 nt, Human
agagagaggcagaa

SEQ ID NO: 1907679 - RNA, 17 nt, Human
agagccucaaaugagaa

SEQ ID NO: 1907680 - RNA, 14 nt, Human
agagccucaaauga

SEQ ID NO: 1907681 - RNA, 15 nt, Human
agagccugagaguga

SEQ ID NO: 1907682 - RNA, 20 nt, Human
agaggagcugggagccgggc

SEQ ID NO: 1907683 - RNA, 23 nt, Human
agaggagggcagcagaagggggu

SEQ ID NO: 1907684 - RNA, 12 nt, Human
agaggaggggcc

SEQ ID NO: 1907685 - RNA, 14 nt, Human
agaggaggggccgc

SEQ ID NO: 1907686 - RNA, 18 nt, Human
agaggaggggccgcugcc

SEQ ID NO: 1907687 - RNA, 20 nt, Human
agaggaggggccgcugccac

SEQ ID NO: 1907688 - RNA, 22 nt, Human
agaggaggggccgcugccaccc

SEQ ID NO: 1907689 - RNA, 23 nt, Human
agaggacuuuucuuuguggcuuc

SEQ ID NO: 1907690 - RNA, 22 nt, Human
agaggacuuuucuuuguggcuu

SEQ ID NO: 1907691 - RNA, 21 nt, Human
agaggacuuuucuuuguggcu

SEQ ID NO: 1907692 - RNA, 16 nt, Human
agaggacaagggaaau

SEQ ID NO: 1907693 - RNA, 17 nt, Human
agaggggguggccuccc

SEQ ID NO: 1907694 - RNA, 19 nt, Human
agaggggguggccucccaa

SEQ ID NO: 1907695 - RNA, 22 nt, Human
agaggggggaagaucaggucau

SEQ ID NO: 1907696 - RNA, 13 nt, Human
agagggccugcaa

SEQ ID NO: 1907697 - RNA, 16 nt, Human
agagggccugcaaggg

SEQ ID NO: 1907698 - RNA, 13 nt, Human
agaggaaugaagu

SEQ ID NO: 1907699 - RNA, 18 nt, Human
acuuuccucuuccugccu

SEQ ID NO: 1907700 - RNA, 21 nt, Human
acuuuccucuuuggucuacac

SEQ ID NO: 1907701 - RNA, 19 nt, Human
acuuuccuccugaggcuuu

SEQ ID NO: 1907702 - RNA, 21 nt, Human
agaagacacugaugggcaacc

SEQ ID NO: 1907703 - RNA, 13 nt, Human
agaagacacugau

SEQ ID NO: 1907704 - RNA, 21 nt, Human
agaagagauugugguuucauu

SEQ ID NO: 1907705 - RNA, 22 nt, Human
agaagagaguccauauuucaau

SEQ ID NO: 1907706 - RNA, 22 nt, Human
agaagguuugguccagccuggu

SEQ ID NO: 1907707 - RNA, 14 nt, Human
agaaguaacuuacu

SEQ ID NO: 1907708 - RNA, 21 nt, Human
agaagucacauuccugaacag

SEQ ID NO: 1907709 - RNA, 20 nt, Human
agaagucacauuccugaaca

SEQ ID NO: 1907710 - RNA, 18 nt, Human
agaagucacauuccugaa

SEQ ID NO: 1907711 - RNA, 18 nt, Human
agaaguaggggaagacau

SEQ ID NO: 1907712 - RNA, 19 nt, Human
agaaguaggggaagacaug

SEQ ID NO: 1907713 - RNA, 20 nt, Human
agaaggggguggugucucca

SEQ ID NO: 1907714 - RNA, 13 nt, Human
agaaggggguggu

SEQ ID NO: 1907715 - RNA, 18 nt, Human
agaaugaaagggcccaga

SEQ ID NO: 1907716 - RNA, 21 nt, Human
agaagugaaaaucuacacucc

SEQ ID NO: 1907717 - RNA, 18 nt, Human
agaagugaauaacugcaa

SEQ ID NO: 1907718 - RNA, 22 nt, Human
agaagucacauuccugaacagg

SEQ ID NO: 1907719 - RNA, 19 nt, Human
agaaugcacaaacagaggc

SEQ ID NO: 1907720 - RNA, 22 nt, Human
agaaugcacaaacagaggccgc

SEQ ID NO: 1907721 - RNA, 20 nt, Human
agaaugcuguacaucuauuu

SEQ ID NO: 1907722 - RNA, 14 nt, Human
agaaugcuguacau

SEQ ID NO: 1907723 - RNA, 15 nt, Human
agaaugcuguacauc

SEQ ID NO: 1907724 - RNA, 13 nt, Human
agaaugcuguaca

SEQ ID NO: 1907725 - RNA, 22 nt, Human
agaaugcugcaggacuugagaa

SEQ ID NO: 1907726 - RNA, 19 nt, Human
agacccaaaaggcagaagc

SEQ ID NO: 1907727 - RNA, 17 nt, Human
agacccaaaaggcagaa

SEQ ID NO: 1907728 - RNA, 13 nt, Human
agaccagccuggc

SEQ ID NO: 1907729 - RNA, 15 nt, Human
agaccagccuggcca

SEQ ID NO: 1907730 - RNA, 12 nt, Human
agaccagcucuu

SEQ ID NO: 1907731 - RNA, 13 nt, Human
agaccagcucuuc

SEQ ID NO: 1907732 - RNA, 22 nt, Human
agacccaacacaugggaccuau

SEQ ID NO: 1907733 - RNA, 21 nt, Human
agacagagucucacuguugcc

SEQ ID NO: 1907734 - RNA, 22 nt, Human
agacagauacuccuccaagguu

SEQ ID NO: 1907735 - RNA, 22 nt, Human
agacagccaacuauggccugug

SEQ ID NO: 1907736 - RNA, 15 nt, Human
agaccacguuucuaa

SEQ ID NO: 1907737 - RNA, 20 nt, Human
agacagagucucacuguugc

SEQ ID NO: 1907738 - RNA, 19 nt, Human
agacagagucucacuguug

SEQ ID NO: 1907739 - RNA, 11 nt, Human
agacagagucu

SEQ ID NO: 1907740 - RNA, 12 nt, Human
agacagagcugg

SEQ ID NO: 1907741 - RNA, 13 nt, Human
agacagagcuaca

SEQ ID NO: 1907742 - RNA, 23 nt, Human
agacaaugacuuacuguacauga

SEQ ID NO: 1907743 - RNA, 15 nt, Human
agacagagcuacaca

SEQ ID NO: 1907744 - RNA, 22 nt, Human
agacaaugacuuacuguacaug

SEQ ID NO: 1907745 - RNA, 21 nt, Human
agacaaugacuuacuguacau

SEQ ID NO: 1907746 - RNA, 20 nt, Human
agacaaugacuuacuguaca

SEQ ID NO: 1907747 - RNA, 13 nt, Human
agcaaacccagac

SEQ ID NO: 1907748 - RNA, 13 nt, Human
agcaaacacauua

SEQ ID NO: 1907749 - RNA, 15 nt, Human
agcaaacccagacgg

SEQ ID NO: 1907750 - RNA, 18 nt, Human
agcaaaagaugcuucuca

SEQ ID NO: 1907751 - RNA, 21 nt, Human
agauugcaacaggcugggcuu

SEQ ID NO: 1907752 - RNA, 20 nt, Human
agauugcaacaggcugggcu

SEQ ID NO: 1907753 - RNA, 23 nt, Human
agauugcaacaggcugggcuuca

SEQ ID NO: 1907754 - RNA, 19 nt, Human
agauucuuuccugaggcug

SEQ ID NO: 1907755 - RNA, 21 nt, Human
agauucuuuccugaggcuggg

SEQ ID NO: 1907756 - RNA, 23 nt, Human
agauucuucccauucuccauuug

SEQ ID NO: 1907757 - RNA, 20 nt, Human
agcaaaggagauuggaagga

SEQ ID NO: 1907758 - RNA, 23 nt, Human
agcaaaggaguagaaagacagag

SEQ ID NO: 1907759 - RNA, 14 nt, Human
agaugagugagcau

SEQ ID NO: 1907760 - RNA, 19 nt, Human
agaugaaguuuuacauugu

SEQ ID NO: 1907761 - RNA, 16 nt, Human
agaugauacauccaaa

SEQ ID NO: 1907762 - RNA, 20 nt, Human
agaugauacauccaaagcag

SEQ ID NO: 1907763 - RNA, 18 nt, Human
agaugaugaaaauauuua

SEQ ID NO: 1907764 - RNA, 17 nt, Human
agauggugcugagaagc

SEQ ID NO: 1907765 - RNA, 14 nt, Human
agauggugcugaga

SEQ ID NO: 1907766 - RNA, 23 nt, Human
agaugaugaaaauauuuaaaggc

SEQ ID NO: 1907767 - RNA, 19 nt, Human
agauguagaggagaaacug

SEQ ID NO: 1907768 - RNA, 16 nt, Human
agauguagaggagaaa

SEQ ID NO: 1907769 - RNA, 19 nt, Human
agauguaaaguuauucuug

SEQ ID NO: 1907770 - RNA, 19 nt, Human
agauucuucccauucucca

SEQ ID NO: 1907771 - RNA, 22 nt, Human
agauucuucccauucuccauuu

SEQ ID NO: 1907772 - RNA, 21 nt, Human
agagugcaagccccugcucca

SEQ ID NO: 1907773 - RNA, 18 nt, Human
agaugaacagacugaccu

SEQ ID NO: 1907774 - RNA, 18 nt, Human
agaucuguccucagccuu

SEQ ID NO: 1907775 - RNA, 15 nt, Human
agaucuguccucagc

SEQ ID NO: 1907776 - RNA, 17 nt, Human
agaucuguccucagccu

SEQ ID NO: 1907777 - RNA, 16 nt, Human
agaugaaggagaggca

SEQ ID NO: 1907778 - RNA, 17 nt, Human
agaugaagcaaacacau

SEQ ID NO: 1907779 - RNA, 18 nt, Human
agaugaagcaaacacauu

SEQ ID NO: 1907780 - RNA, 15 nt, Human
agaugaaguuuuaca

SEQ ID NO: 1907781 - RNA, 19 nt, Human
agaugaagcaaacacauua

SEQ ID NO: 1907782 - RNA, 13 nt, Human
agaucuggaaccu

SEQ ID NO: 1907783 - RNA, 14 nt, Human
agaucuggaaccuc

SEQ ID NO: 1907784 - RNA, 14 nt, Human
agaucuguccucag

SEQ ID NO: 1907785 - RNA, 15 nt, Human
agaucuggaaccuca

SEQ ID NO: 1907786 - RNA, 17 nt, Human
agaucuggaaccucagc

SEQ ID NO: 1907787 - RNA, 19 nt, Human
agaucuggaaccucagccu

SEQ ID NO: 1907788 - RNA, 20 nt, Human
agaucuggaaccucagccug

SEQ ID NO: 1907789 - RNA, 14 nt, Human
agcacagacccugc

SEQ ID NO: 1907790 - RNA, 15 nt, Human
agcacagacccugcc

SEQ ID NO: 1907791 - RNA, 12 nt, Human
agcacagacccu

SEQ ID NO: 1907792 - RNA, 23 nt, Human
agcacaaugucucacaugggaca

SEQ ID NO: 1907793 - RNA, 19 nt, Human
agcacaacuuuaagaggac

SEQ ID NO: 1907794 - RNA, 15 nt, Human
agcaaugccugccca

SEQ ID NO: 1907795 - RNA, 21 nt, Human
agcacgauuucuguuuagaua

SEQ ID NO: 1907796 - RNA, 19 nt, Human
agcacgauuucuguuuaga

SEQ ID NO: 1907797 - RNA, 17 nt, Human
agcacgauuucuguuua

SEQ ID NO: 1907798 - RNA, 16 nt, Human
agcacagacccugccc

SEQ ID NO: 1907799 - RNA, 14 nt, Human
agcacacagggcag

SEQ ID NO: 1907800 - RNA, 15 nt, Human
agcacuuauuuaaug

SEQ ID NO: 1907801 - RNA, 13 nt, Human
agcagccugagca

SEQ ID NO: 1907802 - RNA, 19 nt, Human
agcagccugagcaacucuu

SEQ ID NO: 1907803 - RNA, 18 nt, Human
agcauccuggcacccggc

SEQ ID NO: 1907804 - RNA, 17 nt, Human
agcauccuggcacccgg

SEQ ID NO: 1907805 - RNA, 14 nt, Human
agcauccuggcacc

SEQ ID NO: 1907806 - RNA, 18 nt, Human
agccaaagcuaggccugg

SEQ ID NO: 1907807 - RNA, 16 nt, Human
agccaaagcuaggccu

SEQ ID NO: 1907808 - RNA, 11 nt, Human
agccaaagagu

SEQ ID NO: 1907809 - RNA, 20 nt, Human
agccaaggccaaaggaagca

SEQ ID NO: 1907810 - RNA, 13 nt, Human
agccagaggagag

SEQ ID NO: 1907811 - RNA, 15 nt, Human
agccagaggagagag

SEQ ID NO: 1907812 - RNA, 14 nt, Human
agccagcaggcucu

SEQ ID NO: 1907813 - RNA, 17 nt, Human
agccagaggagagagga

SEQ ID NO: 1907814 - RNA, 18 nt, Human
agccagaggagagaggac

SEQ ID NO: 1907815 - RNA, 23 nt, Human
agcccacgcccccacuggugaca

SEQ ID NO: 1907816 - RNA, 14 nt, Human
agcccacgccccca

SEQ ID NO: 1907817 - RNA, 15 nt, Human
agcccacgcccccac

SEQ ID NO: 1907818 - RNA, 14 nt, Human
agcccaccuuggcu

SEQ ID NO: 1907819 - RNA, 16 nt, Human
agcccaccuuggcuca

SEQ ID NO: 1907820 - RNA, 15 nt, Human
agcccaccccucaac

SEQ ID NO: 1907821 - RNA, 16 nt, Human
agccagcaggcucuca

SEQ ID NO: 1907822 - RNA, 15 nt, Human
agcccaauauuauaa

SEQ ID NO: 1907823 - RNA, 16 nt, Human
agcccaauauuauaau

SEQ ID NO: 1907824 - RNA, 20 nt, Human
agcccaauauuauaauuuuu

SEQ ID NO: 1907825 - RNA, 13 nt, Human
agcauccuggcac

SEQ ID NO: 1907826 - RNA, 12 nt, Human
agcccuccccau

SEQ ID NO: 1907827 - RNA, 19 nt, Human
agcccuccccauggagcca

SEQ ID NO: 1907828 - RNA, 20 nt, Human
agcccuccccauggagccag

SEQ ID NO: 1907829 - RNA, 21 nt, Human
agcccuccccauggagccagc

SEQ ID NO: 1907830 - RNA, 17 nt, Human
agcccgggcucugccuc

SEQ ID NO: 1907831 - RNA, 18 nt, Human
agcccgggcucugccucc

SEQ ID NO: 1907832 - RNA, 20 nt, Human
agcccgggcucugccuccca

SEQ ID NO: 1907833 - RNA, 21 nt, Human
agcccgggcucugccucccau

SEQ ID NO: 1907834 - RNA, 19 nt, Human
agccccauucugccugccc

SEQ ID NO: 1907835 - RNA, 18 nt, Human
agccccauucugccugcc

SEQ ID NO: 1907836 - RNA, 17 nt, Human
agccccauucugccugc

SEQ ID NO: 1907837 - RNA, 15 nt, Human
agccccauccucugu

SEQ ID NO: 1907838 - RNA, 17 nt, Human
agccccauccucuguac

SEQ ID NO: 1907839 - RNA, 23 nt, Human
agccccauccucuguacagagcc

SEQ ID NO: 1907840 - RNA, 14 nt, Human
aggccagugagcca

SEQ ID NO: 1907841 - RNA, 18 nt, Human
aggccaggugcaaccagg

SEQ ID NO: 1907842 - RNA, 16 nt, Human
aggccauaaaacaggu

SEQ ID NO: 1907843 - RNA, 21 nt, Human
aggccauccuucccugucugc

SEQ ID NO: 1907844 - RNA, 15 nt, Human
aggccaggcccucug

SEQ ID NO: 1907845 - RNA, 12 nt, Human
aggccaggugca

SEQ ID NO: 1907846 - RNA, 13 nt, Human
aggccaggccagc

SEQ ID NO: 1907847 - RNA, 15 nt, Human
aggccaggccagcug

SEQ ID NO: 1907848 - RNA, 21 nt, Human
aggccaucugggcuccuccag

SEQ ID NO: 1907849 - RNA, 22 nt, Human
aggccaucugggcuccuccagg

SEQ ID NO: 1907850 - RNA, 19 nt, Human
aggcauuccccaggaggcc

SEQ ID NO: 1907851 - RNA, 20 nt, Human
aggcauuccccaggaggcca

SEQ ID NO: 1907852 - RNA, 23 nt, Human
aggccagcugcuugggcuucauc

SEQ ID NO: 1907853 - RNA, 13 nt, Human
aggccaggcccuc

SEQ ID NO: 1907854 - RNA, 14 nt, Human
aggccaggcccucu

SEQ ID NO: 1907855 - RNA, 22 nt, Human
aggcccucugcccacucccugc

SEQ ID NO: 1907856 - RNA, 23 nt, Human
aggcccucugcccacucccugca

SEQ ID NO: 1907857 - RNA, 13 nt, Human
aggcccucuggag

SEQ ID NO: 1907858 - RNA, 15 nt, Human
aggcccucuggagug

SEQ ID NO: 1907859 - RNA, 20 nt, Human
aggcccucuggaguggccac

SEQ ID NO: 1907860 - RNA, 21 nt, Human
aggcccucuggaguggccacu

SEQ ID NO: 1907861 - RNA, 22 nt, Human
aggcccucuggaguggccacua

SEQ ID NO: 1907862 - RNA, 12 nt, Human
aggcccuucucu

SEQ ID NO: 1907863 - RNA, 15 nt, Human
aggcccuucucucca

SEQ ID NO: 1907864 - RNA, 19 nt, Human
aggcccuucucuccagccc

SEQ ID NO: 1907865 - RNA, 19 nt, Human
aggcauguucucugaggac

SEQ ID NO: 1907866 - RNA, 18 nt, Human
aggcauguucucugagga

SEQ ID NO: 1907867 - RNA, 18 nt, Human
aggcauuccccaggaggc

SEQ ID NO: 1907868 - RNA, 17 nt, Human
aggcauuccccaggagg

SEQ ID NO: 1907869 - RNA, 17 nt, Human
aggcauguucucugagg

SEQ ID NO: 1907870 - RNA, 21 nt, Human
aggcaugugaugagaggaaau

SEQ ID NO: 1907871 - RNA, 19 nt, Human
aggcaugugaugagaggaa

SEQ ID NO: 1907872 - RNA, 20 nt, Human
aggcaugugaugagaggaaa

SEQ ID NO: 1907873 - RNA, 17 nt, Human
aggcaugugaugagagg

SEQ ID NO: 1907874 - RNA, 15 nt, Human
aggcaugguggccca

SEQ ID NO: 1907875 - RNA, 21 nt, Human
aggagaggcaacauccaaaau

SEQ ID NO: 1907876 - RNA, 20 nt, Human
aggagaggcaacauccaaaa

SEQ ID NO: 1907877 - RNA, 22 nt, Human
aggcuguaucccaugagccuca

SEQ ID NO: 1907878 - RNA, 13 nt, Human
aggcugguggccc

SEQ ID NO: 1907879 - RNA, 14 nt, Human
aggcugguggccca

SEQ ID NO: 1907880 - RNA, 17 nt, Human
aggcuuagucacugaga

SEQ ID NO: 1907881 - RNA, 15 nt, Human
aggcugguggcccag

SEQ ID NO: 1907882 - RNA, 21 nt, Human
aggcuguaucccaugagccuc

SEQ ID NO: 1907883 - RNA, 20 nt, Human
aggcuguaucccaugagccu

SEQ ID NO: 1907884 - RNA, 22 nt, Human
aggcuggucucaaacuccugac

SEQ ID NO: 1907885 - RNA, 18 nt, Human
aggcuuagucacugagac

SEQ ID NO: 1907886 - RNA, 15 nt, Human
agggacccuccacca

SEQ ID NO: 1907887 - RNA, 15 nt, Human
agggacugaggggag

SEQ ID NO: 1907888 - RNA, 14 nt, Human
aggcuaccuuugua

SEQ ID NO: 1907889 - RNA, 13 nt, Human
aggcuaccuuugu

SEQ ID NO: 1907890 - RNA, 15 nt, Human
aggcuaccuuuguau

SEQ ID NO: 1907891 - RNA, 13 nt, Human
aggcugaccacag

SEQ ID NO: 1907892 - RNA, 14 nt, Human
aggcugaccacagc

SEQ ID NO: 1907893 - RNA, 19 nt, Human
aggcuaaauuacucaggaa

SEQ ID NO: 1907894 - RNA, 18 nt, Human
aggcuggguucugauccu

SEQ ID NO: 1907895 - RNA, 14 nt, Human
aggcugaggcuggc

SEQ ID NO: 1907896 - RNA, 15 nt, Human
aggcugaggcuggca

SEQ ID NO: 1907897 - RNA, 16 nt, Human
aggcugaggcuggcac

SEQ ID NO: 1907898 - RNA, 17 nt, Human
aggcugaggcuggcaca

SEQ ID NO: 1907899 - RNA, 16 nt, Human
aggcugaccacagcac

SEQ ID NO: 1907900 - RNA, 17 nt, Human
aggcugaccacagcaca

SEQ ID NO: 1907901 - RNA, 18 nt, Human
aggcugaccacagcacag

SEQ ID NO: 1907902 - RNA, 21 nt, Human
aggcugaccacagcacagcca

SEQ ID NO: 1907903 - RNA, 21 nt, Human
aggcuaaagcccagagacagc

SEQ ID NO: 1907904 - RNA, 18 nt, Human
aggcuaaagcccagagac

SEQ ID NO: 1907905 - RNA, 14 nt, Human
aggcggugggcacc

SEQ ID NO: 1907906 - RNA, 21 nt, Human
aggcggugggcacccacccug

SEQ ID NO: 1907907 - RNA, 15 nt, Human
agggucagaaacagg

SEQ ID NO: 1907908 - RNA, 19 nt, Human
agggucagaaacaggaccg

SEQ ID NO: 1907909 - RNA, 12 nt, Human
agggucccuggu

SEQ ID NO: 1907910 - RNA, 14 nt, Human
agggucccuggugg

SEQ ID NO: 1907911 - RNA, 21 nt, Human
aggguaucuggugacuuuccu

SEQ ID NO: 1907912 - RNA, 13 nt, Human
aggguauuccaga

SEQ ID NO: 1907913 - RNA, 16 nt, Human
agggucccugguggca

SEQ ID NO: 1907914 - RNA, 17 nt, Human
agggucccugguggcag

SEQ ID NO: 1907915 - RNA, 20 nt, Human
agggucccugguggcagcuc

SEQ ID NO: 1907916 - RNA, 22 nt, Human
agggucccugguggcagcucac

SEQ ID NO: 1907917 - RNA, 17 nt, Human
agggucggaacccaagc

SEQ ID NO: 1907918 - RNA, 22 nt, Human
agggucggaacccaagcuuaga

SEQ ID NO: 1907919 - RNA, 22 nt, Human
aggggcccaaauucuuucagug

SEQ ID NO: 1907920 - RNA, 14 nt, Human
agggccuggccuga

SEQ ID NO: 1907921 - RNA, 18 nt, Human
aggggcaggaggaagggg

SEQ ID NO: 1907922 - RNA, 13 nt, Human
aggggcaggagga

SEQ ID NO: 1907923 - RNA, 12 nt, Human
aggggcaggagg

SEQ ID NO: 1907924 - RNA, 14 nt, Human
agggccugcaaggg

SEQ ID NO: 1907925 - RNA, 15 nt, Human
agggccugcaaggga

SEQ ID NO: 1907926 - RNA, 17 nt, Human
agggccugcgagggcag

SEQ ID NO: 1907927 - RNA, 12 nt, Human
agggccuggccu

SEQ ID NO: 1907928 - RNA, 13 nt, Human
agggccuggccug

SEQ ID NO: 1907929 - RNA, 22 nt, Human
agggaucaaccagcuaagaaaa

SEQ ID NO: 1907930 - RNA, 16 nt, Human
agggaugguguucaaa

SEQ ID NO: 1907931 - RNA, 16 nt, Human
agggauacccauccca

SEQ ID NO: 1907932 - RNA, 21 nt, Human
agggaucaaccagcuaagaaa

SEQ ID NO: 1907933 - RNA, 14 nt, Human
aggguuuuccaaug

SEQ ID NO: 1907934 - RNA, 23 nt, Human
aggguuuugccauguuggccagg

SEQ ID NO: 1907935 - RNA, 22 nt, Human
aggguuuugccauguuggccag

SEQ ID NO: 1907936 - RNA, 14 nt, Human
agguaacaggcaga

SEQ ID NO: 1907937 - RNA, 13 nt, Human
agguaacaggcag

SEQ ID NO: 1907938 - RNA, 22 nt, Human
agguacgaaaagaggggaagag

SEQ ID NO: 1907939 - RNA, 16 nt, Human
agguaacaggcagaua

SEQ ID NO: 1907940 - RNA, 13 nt, Human
agguacucuccug

SEQ ID NO: 1907941 - RNA, 14 nt, Human
agguacucuccugg

SEQ ID NO: 1907942 - RNA, 23 nt, Human
aggucccuaauaaagcugugugg

SEQ ID NO: 1907943 - RNA, 11 nt, Human
aggucuagccu

SEQ ID NO: 1907944 - RNA, 13 nt, Human
agguccucuguca

SEQ ID NO: 1907945 - RNA, 14 nt, Human
agguccucugucag

SEQ ID NO: 1907946 - RNA, 19 nt, Human
agguccucugucagucaca

SEQ ID NO: 1907947 - RNA, 23 nt, Human
agguccucugucagucacagcca

SEQ ID NO: 1907948 - RNA, 20 nt, Human
agggucucacuauguugccc

SEQ ID NO: 1907949 - RNA, 19 nt, Human
agccuggcucccaggacac

SEQ ID NO: 1907950 - RNA, 18 nt, Human
agccuggcucccaggaca

SEQ ID NO: 1907951 - RNA, 17 nt, Human
agccuggcucccaggac

SEQ ID NO: 1907952 - RNA, 18 nt, Human
agccuggcuucaaauugu

SEQ ID NO: 1907953 - RNA, 22 nt, Human
agccuggcuccaaacccucgag

SEQ ID NO: 1907954 - RNA, 17 nt, Human
agccuggcuucaaauug

SEQ ID NO: 1907955 - RNA, 13 nt, Human
agccuggcuccaa

SEQ ID NO: 1907956 - RNA, 20 nt, Human
agccuggcuccaaacccucg

SEQ ID NO: 1907957 - RNA, 12 nt, Human
agccugggaggu

SEQ ID NO: 1907958 - RNA, 20 nt, Human
agccugggaggucaaggcug

SEQ ID NO: 1907959 - RNA, 19 nt, Human
agcgagcccugguggcagu

SEQ ID NO: 1907960 - RNA, 13 nt, Human
agcgagcccuggu

SEQ ID NO: 1907961 - RNA, 14 nt, Human
agccuggggcuggc

SEQ ID NO: 1907962 - RNA, 18 nt, Human
agccuuugguucuggcca

SEQ ID NO: 1907963 - RNA, 19 nt, Human
agccuuugguucuggccag

SEQ ID NO: 1907964 - RNA, 16 nt, Human
agcuaauaaaauauca

SEQ ID NO: 1907965 - RNA, 15 nt, Human
agcuaauaaaauauc

SEQ ID NO: 1907966 - RNA, 14 nt, Human
agcuaauaaaauau

SEQ ID NO: 1907967 - RNA, 20 nt, Human
agcuaauaaaauaucauuca

SEQ ID NO: 1907968 - RNA, 19 nt, Human
agcuaauaaaauaucauuc

SEQ ID NO: 1907969 - RNA, 18 nt, Human
agcuaauaaaauaucauu

SEQ ID NO: 1907970 - RNA, 17 nt, Human
agcuaauaaaauaucau

SEQ ID NO: 1907971 - RNA, 23 nt, Human
agcuaauaaaauaucauucagca

SEQ ID NO: 1907972 - RNA, 21 nt, Human
agcuaauaaaauaucauucag

SEQ ID NO: 1907973 - RNA, 17 nt, Human
agcuaaacggauuccaa

SEQ ID NO: 1907974 - RNA, 16 nt, Human
agcucaccagccccag

SEQ ID NO: 1907975 - RNA, 20 nt, Human
agcuaauuugcauuaaauuc

SEQ ID NO: 1907976 - RNA, 22 nt, Human
agcuaauuugcauuaaauucac

SEQ ID NO: 1907977 - RNA, 13 nt, Human
agcuaauuugcau

SEQ ID NO: 1907978 - RNA, 14 nt, Human
agcuaauuugcauu

SEQ ID NO: 1907979 - RNA, 19 nt, Human
agcuaauucuuugaccugu

SEQ ID NO: 1907980 - RNA, 20 nt, Human
agcucaccagccccagugcc

SEQ ID NO: 1907981 - RNA, 19 nt, Human
agcucaccagccccagugc

SEQ ID NO: 1907982 - RNA, 12 nt, Human
agcucaccucuc

SEQ ID NO: 1907983 - RNA, 15 nt, Human
agcucaccucucccu

SEQ ID NO: 1907984 - RNA, 18 nt, Human
agcucaccucucccuugg

SEQ ID NO: 1907985 - RNA, 19 nt, Human
agcucaccucucccuugga

SEQ ID NO: 1907986 - RNA, 12 nt, Human
agcucagagagg

SEQ ID NO: 1907987 - RNA, 18 nt, Human
agcucagagaggguggga

SEQ ID NO: 1907988 - RNA, 19 nt, Human
agcucagaggcgcacugug

SEQ ID NO: 1907989 - RNA, 22 nt, Human
agcucagaggcgcacugugacc

SEQ ID NO: 1907990 - RNA, 14 nt, Human
agcucagagagggu

SEQ ID NO: 1907991 - RNA, 15 nt, Human
agcugaaccugggua

SEQ ID NO: 1907992 - RNA, 13 nt, Human
agcugaggccaca

SEQ ID NO: 1907993 - RNA, 17 nt, Human
agcugaggccacacuca

SEQ ID NO: 1907994 - RNA, 17 nt, Human
agcugaggcaauucuaa

SEQ ID NO: 1907995 - RNA, 12 nt, Human
agcugagcgcca

SEQ ID NO: 1907996 - RNA, 14 nt, Human
agcugagcgccagg

SEQ ID NO: 1907997 - RNA, 15 nt, Human
agcugagcgccagga

SEQ ID NO: 1907998 - RNA, 17 nt, Human
agcugagcgccaggaug

SEQ ID NO: 1907999 - RNA, 18 nt, Human
agcugcgguccacccagg

SEQ ID NO: 1908000 - RNA, 17 nt, Human
agcugcgguccacccag

SEQ ID NO: 1908001 - RNA, 16 nt, Human
agcugcgguccaccca

SEQ ID NO: 1908002 - RNA, 13 nt, Human
agcugcgguccac

SEQ ID NO: 1908003 - RNA, 20 nt, Human
agcugcgguccacccaggag

SEQ ID NO: 1908004 - RNA, 19 nt, Human
agcugcgguccacccagga

SEQ ID NO: 1908005 - RNA, 12 nt, Human
agcugcugacag

SEQ ID NO: 1908006 - RNA, 21 nt, Human
agcugcgguccacccaggagc

SEQ ID NO: 1908007 - RNA, 17 nt, Human
agcuggucccacucagu

SEQ ID NO: 1908008 - RNA, 16 nt, Human
agcuggucccacucag

SEQ ID NO: 1908009 - RNA, 14 nt, Human
agcugcugacagug

SEQ ID NO: 1908010 - RNA, 13 nt, Human
agcugcugacagu

SEQ ID NO: 1908011 - RNA, 19 nt, Human
agcuggucccacucagucc

SEQ ID NO: 1908012 - RNA, 18 nt, Human
agcuggucccacucaguc

SEQ ID NO: 1908013 - RNA, 22 nt, Human
agcugguuuuuagcggagacgg

SEQ ID NO: 1908014 - RNA, 18 nt, Human
agcuucacuguaaaauaa

SEQ ID NO: 1908015 - RNA, 12 nt, Human
agcuucaaagcu

SEQ ID NO: 1908016 - RNA, 18 nt, Human
agcuucaccccaauccca

SEQ ID NO: 1908017 - RNA, 20 nt, Human
agcuucaccccaaucccagc

SEQ ID NO: 1908018 - RNA, 18 nt, Human
agcuucauuuccuguguc

SEQ ID NO: 1908019 - RNA, 21 nt, Human
agcuucaccccaaucccagcu

SEQ ID NO: 1908020 - RNA, 19 nt, Human
agcuucauuuccugugucu

SEQ ID NO: 1908021 - RNA, 14 nt, Human
agcuucucugugaa

SEQ ID NO: 1908022 - RNA, 12 nt, Human
agcuucuccugu

SEQ ID NO: 1908023 - RNA, 16 nt, Human
agcuucuccuguguga

SEQ ID NO: 1908024 - RNA, 21 nt, Human
agcuucuccugugugauugac

SEQ ID NO: 1908025 - RNA, 13 nt, Human
agcuucucuguga

SEQ ID NO: 1908026 - RNA, 23 nt, Human
agcuuuguuuguugucagcugaa

SEQ ID NO: 1908027 - RNA, 23 nt, Human
aggaacuuaaauaaugugaaacu

SEQ ID NO: 1908028 - RNA, 22 nt, Human
aggaauaccugucccccugaca

SEQ ID NO: 1908029 - RNA, 15 nt, Human
aggaauaccuguccc

SEQ ID NO: 1908030 - RNA, 18 nt, Human
aggaauaccugucccccu

SEQ ID NO: 1908031 - RNA, 21 nt, Human
aggaacuuaaauaaugugaaa

SEQ ID NO: 1908032 - RNA, 22 nt, Human
aggaacugcugggcuuggcagc

SEQ ID NO: 1908033 - RNA, 20 nt, Human
aggaacaaggcaaggcuguc

SEQ ID NO: 1908034 - RNA, 23 nt, Human
aggaacaaggcaaggcugucaau

SEQ ID NO: 1908035 - RNA, 15 nt, Human
aggaaccacaccaca

SEQ ID NO: 1908036 - RNA, 17 nt, Human
aggaaccacaccacauc

SEQ ID NO: 1908037 - RNA, 16 nt, Human
aggaaccauaaucaau

SEQ ID NO: 1908038 - RNA, 15 nt, Human
aggaaccaaagcgaa

SEQ ID NO: 1908039 - RNA, 13 nt, Human
aggaaccaaagcg

SEQ ID NO: 1908040 - RNA, 15 nt, Human
agcuuuuaugugaaa

SEQ ID NO: 1908041 - RNA, 12 nt, Human
aggaacaaggca

SEQ ID NO: 1908042 - RNA, 13 nt, Human
aggaacaaggcaa

SEQ ID NO: 1908043 - RNA, 16 nt, Human
aggaacaaggcaaggc

SEQ ID NO: 1908044 - RNA, 17 nt, Human
aggaacaaggcaaggcu

SEQ ID NO: 1908045 - RNA, 19 nt, Human
aggaacaaggcaaggcugu

SEQ ID NO: 1908046 - RNA, 12 nt, Human
aggacccaagca

SEQ ID NO: 1908047 - RNA, 15 nt, Human
aggacccugaagggg

SEQ ID NO: 1908048 - RNA, 19 nt, Human
aggacccugaaggggccau

SEQ ID NO: 1908049 - RNA, 15 nt, Human
aggagaggagagggg

SEQ ID NO: 1908050 - RNA, 16 nt, Human
aggaccuguggccaag

SEQ ID NO: 1908051 - RNA, 17 nt, Human
aggaccuggcugccaua

SEQ ID NO: 1908052 - RNA, 13 nt, Human
aggaccuggcugc

SEQ ID NO: 1908053 - RNA, 16 nt, Human
aggaccuggcugccau

SEQ ID NO: 1908054 - RNA, 24 nt, Human
aggaccagcucaggacagaugcca

SEQ ID NO: 1908055 - RNA, 21 nt, Human
aaacaggcaguuggccagaga

SEQ ID NO: 1908056 - RNA, 11 nt, Human
aaacaggcagu

SEQ ID NO: 1908057 - RNA, 12 nt, Human
aaacaggcagcu

SEQ ID NO: 1908058 - RNA, 14 nt, Human
aaacagcugccucu

SEQ ID NO: 1908059 - RNA, 17 nt, Human
aaacagcuaaugggaca

SEQ ID NO: 1908060 - RNA, 21 nt, Human
aaacaggacuuaaaaugacau

SEQ ID NO: 1908061 - RNA, 15 nt, Human
aaacagccugugucu

SEQ ID NO: 1908062 - RNA, 15 nt, Human
aaaauuagccaagug

SEQ ID NO: 1908063 - RNA, 13 nt, Human
aaaauuaagaaag

SEQ ID NO: 1908064 - RNA, 20 nt, Human
aaaauuaagaaaggauaaag

SEQ ID NO: 1908065 - RNA, 14 nt, Human
aaaauuaacacugc

SEQ ID NO: 1908066 - RNA, 22 nt, Human
aaaauuaacaugaauauuuagu

SEQ ID NO: 1908067 - RNA, 12 nt, Human
aaaauuaagaaa

SEQ ID NO: 1908068 - RNA, 21 nt, Human
aaaauccacuuuaucuugaau

SEQ ID NO: 1908069 - RNA, 18 nt, Human
aaaaucaaaacaaaaaaa

SEQ ID NO: 1908070 - RNA, 15 nt, Human
aaaaucaaaacaaaa

SEQ ID NO: 1908071 - RNA, 21 nt, Human
aaaauauuuugaucuucaaca

SEQ ID NO: 1908072 - RNA, 15 nt, Human
aaaauaaaaaacacu

SEQ ID NO: 1908073 - RNA, 21 nt, Human
aaagaaccaagaaaaaggaau

SEQ ID NO: 1908074 - RNA, 19 nt, Human
aaagaggcugaggcuggca

SEQ ID NO: 1908075 - RNA, 20 nt, Human
aaacugauuuuuuuuuccuu

SEQ ID NO: 1908076 - RNA, 13 nt, Human
aaacugauuuuuu

SEQ ID NO: 1908077 - RNA, 19 nt, Human
aaacugauuuuuuuuuccu

SEQ ID NO: 1908078 - RNA, 17 nt, Human
aaacucuugaccucagg

SEQ ID NO: 1908079 - RNA, 14 nt, Human
aaacccuucagugc

SEQ ID NO: 1908080 - RNA, 21 nt, Human
aaacccugucucuacuaaaaa

SEQ ID NO: 1908081 - RNA, 17 nt, Human
aaaccccaucucuacaa

SEQ ID NO: 1908082 - RNA, 22 nt, Human
aaacccauauuguaaaacaggu

SEQ ID NO: 1908083 - RNA, 18 nt, Human
aaacccagcucuggucca

SEQ ID NO: 1908084 - RNA, 15 nt, Human
aaagauacaguuacu

SEQ ID NO: 1908085 - RNA, 16 nt, Human
aaagauaaauauuaua

SEQ ID NO: 1908086 - RNA, 11 nt, Human
aaagagguuuu

SEQ ID NO: 1908087 - RNA, 13 nt, Human
aaagauaaauauu

SEQ ID NO: 1908088 - RNA, 15 nt, Human
aaagauaaauauuau

SEQ ID NO: 1908089 - RNA, 14 nt, Human
aaagauaaauauua

SEQ ID NO: 1908090 - RNA, 13 nt, Human
aaagaggugugca

SEQ ID NO: 1908091 - RNA, 11 nt, Human
aaauaaauuau

SEQ ID NO: 1908092 - RNA, 16 nt, Human
aaagugccagaaagug

SEQ ID NO: 1908093 - RNA, 19 nt, Human
aaaguauuuuauucuuauu

SEQ ID NO: 1908094 - RNA, 16 nt, Human
aaauaaacgucuuaaa

SEQ ID NO: 1908095 - RNA, 15 nt, Human
aaauaaacgucuuaa

SEQ ID NO: 1908096 - RNA, 22 nt, Human
aaauaaaacauuuucacacaau

SEQ ID NO: 1908097 - RNA, 18 nt, Human
aaauaaaacauuuucaca

SEQ ID NO: 1908098 - RNA, 12 nt, Human
aaauaaaacauu

SEQ ID NO: 1908099 - RNA, 19 nt, Human
aaaggcagaagcaacccaa

SEQ ID NO: 1908100 - RNA, 18 nt, Human
aaagcccaaagugguaua

SEQ ID NO: 1908101 - RNA, 15 nt, Human
aaagccaagaggcug

SEQ ID NO: 1908102 - RNA, 15 nt, Human
aaagcccagagacag

SEQ ID NO: 1908103 - RNA, 18 nt, Human
aaagcccaagggaucugg

SEQ ID NO: 1908104 - RNA, 14 nt, Human
aaagccccagaaau

SEQ ID NO: 1908105 - RNA, 23 nt, Human
aaagcccaagggaucugguccua

SEQ ID NO: 1908106 - RNA, 14 nt, Human
aaaggcuccaggag

SEQ ID NO: 1908107 - RNA, 14 nt, Human
aaaggcuaccuuug

SEQ ID NO: 1908108 - RNA, 17 nt, Human
aaaggcuaccuuuguau

SEQ ID NO: 1908109 - RNA, 22 nt, Human
aaaggcuccaggagcagccaca

SEQ ID NO: 1908110 - RNA, 21 nt, Human
aaaggcuccaggagcagccac

SEQ ID NO: 1908111 - RNA, 15 nt, Human
aaagccaaagcuagg

SEQ ID NO: 1908112 - RNA, 12 nt, Human
aaagcauuuaua

SEQ ID NO: 1908113 - RNA, 15 nt, Human
aaagcauuuauaaau

SEQ ID NO: 1908114 - RNA, 14 nt, Human
aacgaaacccacuc

SEQ ID NO: 1908115 - RNA, 15 nt, Human
aacguauaaaagccu

SEQ ID NO: 1908116 - RNA, 18 nt, Human
aacggggcucuucucauu

SEQ ID NO: 1908117 - RNA, 16 nt, Human
aacggggcucuucuca

SEQ ID NO: 1908118 - RNA, 17 nt, Human
aacucaaacucuuaaaa

SEQ ID NO: 1908119 - RNA, 18 nt, Human
aacucaaauggggccaga

SEQ ID NO: 1908120 - RNA, 21 nt, Human
aacucaaauggggccagaucc

SEQ ID NO: 1908121 - RNA, 22 nt, Human
aacucaaauggggccagaucca

SEQ ID NO: 1908122 - RNA, 23 nt, Human
aacucaaauggggccagauccag

SEQ ID NO: 1908123 - RNA, 16 nt, Human
aacucaccccagcccc

SEQ ID NO: 1908124 - RNA, 17 nt, Human
aacucaccccagcccca

SEQ ID NO: 1908125 - RNA, 18 nt, Human
aacucaccccagccccaa

SEQ ID NO: 1908126 - RNA, 18 nt, Human
aacucauauuuucaugcu

SEQ ID NO: 1908127 - RNA, 16 nt, Human
aacucauauuuucaug

SEQ ID NO: 1908128 - RNA, 15 nt, Human
aacucauauuuucau

SEQ ID NO: 1908129 - RNA, 13 nt, Human
aacuguucccacc

SEQ ID NO: 1908130 - RNA, 15 nt, Human
aacuguucccaccug

SEQ ID NO: 1908131 - RNA, 18 nt, Human
aacuguucccaccugcug

SEQ ID NO: 1908132 - RNA, 19 nt, Human
aacuguguuucaaguucaa

SEQ ID NO: 1908133 - RNA, 22 nt, Human
aacuguguuucaaguucaaucc

SEQ ID NO: 1908134 - RNA, 17 nt, Human
aacugagcuuggaagcu

SEQ ID NO: 1908135 - RNA, 13 nt, Human
aacugagcuugga

SEQ ID NO: 1908136 - RNA, 21 nt, Human
aacugagcuuggaagcuucug

SEQ ID NO: 1908137 - RNA, 12 nt, Human
aacaggaccggg

SEQ ID NO: 1908138 - RNA, 10 nt, Human
aacagcucag

SEQ ID NO: 1908139 - RNA, 17 nt, Human
aacaggaccggguggaa

SEQ ID NO: 1908140 - RNA, 19 nt, Human
aacaggacuuaaaaugaca

SEQ ID NO: 1908141 - RNA, 14 nt, Human
aacagcucaggauc

SEQ ID NO: 1908142 - RNA, 15 nt, Human
aacaucccuccuggg

SEQ ID NO: 1908143 - RNA, 16 nt, Human
aacagcuaaugggaca

SEQ ID NO: 1908144 - RNA, 15 nt, Human
aacagccugugucuu

SEQ ID NO: 1908145 - RNA, 20 nt, Human
aacagcggcuggacuuggag

SEQ ID NO: 1908146 - RNA, 21 nt, Human
aacacuauauggcagugucuu

SEQ ID NO: 1908147 - RNA, 20 nt, Human
aacacuauauggcagugucu

SEQ ID NO: 1908148 - RNA, 18 nt, Human
aacacuauauggcagugu

SEQ ID NO: 1908149 - RNA, 14 nt, Human
aacacuauauggca

SEQ ID NO: 1908150 - RNA, 13 nt, Human
aacccuucagugc

SEQ ID NO: 1908151 - RNA, 19 nt, Human
aaccaguguuguggauuua

SEQ ID NO: 1908152 - RNA, 15 nt, Human
aacauggaaguacua

SEQ ID NO: 1908153 - RNA, 21 nt, Human
aaccagggagccccuuugaug

SEQ ID NO: 1908154 - RNA, 15 nt, Human
aaccagggagcugca

SEQ ID NO: 1908155 - RNA, 15 nt, Human
aaccagggauuguuu

SEQ ID NO: 1908156 - RNA, 16 nt, Human
aaccagggauuguuuc

SEQ ID NO: 1908157 - RNA, 19 nt, Human
aaccagggauuguuucugu

SEQ ID NO: 1908158 - RNA, 22 nt, Human
aacaugcuacacacugcauguu

SEQ ID NO: 1908159 - RNA, 14 nt, Human
aacaucuauucucu

SEQ ID NO: 1908160 - RNA, 11 nt, Human
aacccuucucc

SEQ ID NO: 1908161 - RNA, 18 nt, Human
aacccuucuccucuugua

SEQ ID NO: 1908162 - RNA, 20 nt, Human
aacccuucuccucuuguaaa

SEQ ID NO: 1908163 - RNA, 21 nt, Human
aacccuucuccucuuguaaau

SEQ ID NO: 1908164 - RNA, 16 nt, Human
aacacccuauauuuug

SEQ ID NO: 1908165 - RNA, 17 nt, Human
aacacuaacaugauuug

SEQ ID NO: 1908166 - RNA, 19 nt, Human
aacaccucugcacaagcug

SEQ ID NO: 1908167 - RNA, 18 nt, Human
aacacuaacuaugcaugg

SEQ ID NO: 1908168 - RNA, 22 nt, Human
aacaaaccuguuucugcagcca

SEQ ID NO: 1908169 - RNA, 16 nt, Human
aacaaacucucugaac

SEQ ID NO: 1908170 - RNA, 23 nt, Human
aacaaaguuacuagguaacuuca

SEQ ID NO: 1908171 - RNA, 13 nt, Human
aacaaaguuacua

SEQ ID NO: 1908172 - RNA, 21 nt, Human
aacacauacaggaagguagaa

SEQ ID NO: 1908173 - RNA, 19 nt, Human
aacaaaugaacgauaugua

SEQ ID NO: 1908174 - RNA, 19 nt, Human
aacaaaucuaggaaaauau

SEQ ID NO: 1908175 - RNA, 20 nt, Human
aacaaaucuaggaaaauauu

SEQ ID NO: 1908176 - RNA, 21 nt, Human
aacaaaucuaggaaaauauuu

SEQ ID NO: 1908177 - RNA, 23 nt, Human
aacaaaucuaggaaaauauuuug

SEQ ID NO: 1908178 - RNA, 22 nt, Human
aaauguuuuuuuuuaaagacuu

SEQ ID NO: 1908179 - RNA, 12 nt, Human
aaauuaacuuuu

SEQ ID NO: 1908180 - RNA, 22 nt, Human
aaauugacacuuaaaaaugguu

SEQ ID NO: 1908181 - RNA, 14 nt, Human
aaauuaacuuuuau

SEQ ID NO: 1908182 - RNA, 13 nt, Human
aaauuaacuuuua

SEQ ID NO: 1908183 - RNA, 18 nt, Human
aaauugaugggauuuggu

SEQ ID NO: 1908184 - RNA, 15 nt, Human
aacaaaauuucuauu

SEQ ID NO: 1908185 - RNA, 13 nt, Human
aacaaaauuucua

SEQ ID NO: 1908186 - RNA, 14 nt, Human
aacaaacaaacaaa

SEQ ID NO: 1908187 - RNA, 18 nt, Human
aacaaacauugaugcuga

SEQ ID NO: 1908188 - RNA, 22 nt, Human
aaauugguuggagaauuuaggu

SEQ ID NO: 1908189 - RNA, 16 nt, Human
aaauugguucuuuauu

SEQ ID NO: 1908190 - RNA, 18 nt, Human
aaauguuuuuuuuuaaag

SEQ ID NO: 1908191 - RNA, 21 nt, Human
aaauguuuuuuuuuaaagacu

SEQ ID NO: 1908192 - RNA, 15 nt, Human
aaauguucuuugggg

SEQ ID NO: 1908193 - RNA, 20 nt, Human
aaauguucaucaaugaauga

SEQ ID NO: 1908194 - RNA, 18 nt, Human
aaaucugcuuuuuaaaga

SEQ ID NO: 1908195 - RNA, 20 nt, Human
aaaucugcuggaguuucaug

SEQ ID NO: 1908196 - RNA, 18 nt, Human
aaaucugacccagugccc

SEQ ID NO: 1908197 - RNA, 22 nt, Human
aaaucugcuggaguuucaugua

SEQ ID NO: 1908198 - RNA, 19 nt, Human
aaaugcuaaugucaaacuu

SEQ ID NO: 1908199 - RNA, 21 nt, Human
aaaugcuaaugucaaacuuga

SEQ ID NO: 1908200 - RNA, 22 nt, Human
aaaucuccaaaauaaaacuuuu

SEQ ID NO: 1908201 - RNA, 14 nt, Human
aaaucugacccagu

SEQ ID NO: 1908202 - RNA, 20 nt, Human
aaaucugacccagugccccc

SEQ ID NO: 1908203 - RNA, 15 nt, Human
aaauggacguguuau

SEQ ID NO: 1908204 - RNA, 17 nt, Human
aaauggacguguuauga

SEQ ID NO: 1908205 - RNA, 19 nt, Human
aaauggacauaggacucaa

SEQ ID NO: 1908206 - RNA, 14 nt, Human
aaauggacguguua

SEQ ID NO: 1908207 - RNA, 17 nt, Human
aaauggaauacucuuau

SEQ ID NO: 1908208 - RNA, 18 nt, Human
aauaauaccuaagccuuc

SEQ ID NO: 1908209 - RNA, 15 nt, Human
aauaauaaauauuua

SEQ ID NO: 1908210 - RNA, 13 nt, Human
aagugcugcauuu

SEQ ID NO: 1908211 - RNA, 14 nt, Human
aagugcugcauuua

SEQ ID NO: 1908212 - RNA, 15 nt, Human
aaguucuuaguugcu

SEQ ID NO: 1908213 - RNA, 22 nt, Human
aaguucuuaguugcuguauguc

SEQ ID NO: 1908214 - RNA, 22 nt, Human
aagugggcuugauucugcagua

SEQ ID NO: 1908215 - RNA, 12 nt, Human
aagugggcuuga

SEQ ID NO: 1908216 - RNA, 16 nt, Human
aagugggcuugauucu

SEQ ID NO: 1908217 - RNA, 11 nt, Human
aauaaagcugu

SEQ ID NO: 1908218 - RNA, 19 nt, Human
aauaaagcuguguggcagu

SEQ ID NO: 1908219 - RNA, 18 nt, Human
aauaaagccuucaaacuc

SEQ ID NO: 1908220 - RNA, 15 nt, Human
aauaaacgucuuaaa

SEQ ID NO: 1908221 - RNA, 16 nt, Human
aauaaaggaugugauu

SEQ ID NO: 1908222 - RNA, 14 nt, Human
aauaauaaauauuu

SEQ ID NO: 1908223 - RNA, 10 nt, Human
aauaaaccau

SEQ ID NO: 1908224 - RNA, 12 nt, Human
aauaaaauuuuu

SEQ ID NO: 1908225 - RNA, 16 nt, Human
aaguugcagugagcug

SEQ ID NO: 1908226 - RNA, 16 nt, Human
aauagaaauccaauug

SEQ ID NO: 1908227 - RNA, 22 nt, Human
aauagaaauaaaggaugugauu

SEQ ID NO: 1908228 - RNA, 17 nt, Human
aauagaaauggggaacu

SEQ ID NO: 1908229 - RNA, 20 nt, Human
aauacgugggcauucaaaug

SEQ ID NO: 1908230 - RNA, 19 nt, Human
aauacgugggcauucaaau

SEQ ID NO: 1908231 - RNA, 14 nt, Human
aauacuaccuugaa

SEQ ID NO: 1908232 - RNA, 15 nt, Human
aauacuaccuugaaa

SEQ ID NO: 1908233 - RNA, 16 nt, Human
aauacuaccuugaaaa

SEQ ID NO: 1908234 - RNA, 16 nt, Human
aauauaggaacuuaaa

SEQ ID NO: 1908235 - RNA, 14 nt, Human
aauauaaacacuau

SEQ ID NO: 1908236 - RNA, 13 nt, Human
aauauaaacacua

SEQ ID NO: 1908237 - RNA, 12 nt, Human
aauauaaauguu

SEQ ID NO: 1908238 - RNA, 19 nt, Human
aauauaaauguuaagaaaa

SEQ ID NO: 1908239 - RNA, 14 nt, Human
aauaugcuggcugg

SEQ ID NO: 1908240 - RNA, 16 nt, Human
aauaugcuggcuggag

SEQ ID NO: 1908241 - RNA, 14 nt, Human
aauauggaacuuac

SEQ ID NO: 1908242 - RNA, 15 nt, Human
aauauggaacuuaca

SEQ ID NO: 1908243 - RNA, 16 nt, Human
aauauggaacuuacau

SEQ ID NO: 1908244 - RNA, 17 nt, Human
aauauggaacuuacauu

SEQ ID NO: 1908245 - RNA, 20 nt, Human
aauauggaacuuacauuguu

SEQ ID NO: 1908246 - RNA, 24 nt, Human
aauauggaacuuacauuguucaau

SEQ ID NO: 1908247 - RNA, 17 nt, Human
aaugcuaagggcaggcc

SEQ ID NO: 1908248 - RNA, 23 nt, Human
aaugcgugcauaccacuuuuguu

SEQ ID NO: 1908249 - RNA, 21 nt, Human
aaugcgugcauaccacuuuug

SEQ ID NO: 1908250 - RNA, 23 nt, Human
aaugcucuuuacuucauggacuu

SEQ ID NO: 1908251 - RNA, 15 nt, Human
aaugcucagaccagc

SEQ ID NO: 1908252 - RNA, 19 nt, Human
aaugcuccuuguuccuaga

SEQ ID NO: 1908253 - RNA, 11 nt, Human
aaugcucuagu

SEQ ID NO: 1908254 - RNA, 13 nt, Human
aaugggacacuaa

SEQ ID NO: 1908255 - RNA, 14 nt, Human
aaugggagcucaug

SEQ ID NO: 1908256 - RNA, 21 nt, Human
aaugggagcugaggccacacu

SEQ ID NO: 1908257 - RNA, 17 nt, Human
aauggggccagauccag

SEQ ID NO: 1908258 - RNA, 17 nt, Human
aaugggggugcauuuga

SEQ ID NO: 1908259 - RNA, 15 nt, Human
aaugggggugcauuu

SEQ ID NO: 1908260 - RNA, 22 nt, Human
aauggggccagauccagccugg

SEQ ID NO: 1908261 - RNA, 17 nt, Human
aaugggguccuggccau

SEQ ID NO: 1908262 - RNA, 18 nt, Human
aaugggguccuggccauc

SEQ ID NO: 1908263 - RNA, 22 nt, Human
aaugguauuugaauuaaauguu

SEQ ID NO: 1908264 - RNA, 15 nt, Human
aaugucacaggcagg

SEQ ID NO: 1908265 - RNA, 22 nt, Human
aaucauuuuaauuauuauucuu

SEQ ID NO: 1908266 - RNA, 20 nt, Human
aaucauuuuaauuauuauuc

SEQ ID NO: 1908267 - RNA, 19 nt, Human
aaucauuuuaauuauuauu

SEQ ID NO: 1908268 - RNA, 17 nt, Human
aaucauuuuaauuauua

SEQ ID NO: 1908269 - RNA, 16 nt, Human
aaucauuuuaauuauu

SEQ ID NO: 1908270 - RNA, 15 nt, Human
aaucauuuuaauuau

SEQ ID NO: 1908271 - RNA, 19 nt, Human
aauccaccugccucggccu

SEQ ID NO: 1908272 - RNA, 18 nt, Human
aauccaccugccucggcc

SEQ ID NO: 1908273 - RNA, 20 nt, Human
aauccaaauggcgucuggaa

SEQ ID NO: 1908274 - RNA, 13 nt, Human
aauccaaauggcg

SEQ ID NO: 1908275 - RNA, 14 nt, Human
aauccaaacuugga

SEQ ID NO: 1908276 - RNA, 21 nt, Human
aauccaaacuuggauuuuuga

SEQ ID NO: 1908277 - RNA, 14 nt, Human
aaucuggagaccag

SEQ ID NO: 1908278 - RNA, 18 nt, Human
aaucucccuucacaaguu

SEQ ID NO: 1908279 - RNA, 21 nt, Human
aaucuccaccagucauuuuuc

SEQ ID NO: 1908280 - RNA, 22 nt, Human
aaucuccaccagucauuuuuca

SEQ ID NO: 1908281 - RNA, 15 nt, Human
aaugauagcuacugu

SEQ ID NO: 1908282 - RNA, 16 nt, Human
aaugauuaauuaaaac

SEQ ID NO: 1908283 - RNA, 21 nt, Human
aaugauguguacccaaacgug

SEQ ID NO: 1908284 - RNA, 12 nt, Human
aaugauuaauua

SEQ ID NO: 1908285 - RNA, 13 nt, Human
aaugauuaauuaa

SEQ ID NO: 1908286 - RNA, 21 nt, Human
aaugaacacucuuuugcuuua

SEQ ID NO: 1908287 - RNA, 15 nt, Human
aaugaacacucuuuu

SEQ ID NO: 1908288 - RNA, 18 nt, Human
aaugaacacucuuuugcu

SEQ ID NO: 1908289 - RNA, 20 nt, Human
aaggcaaagcacgaaauguu

SEQ ID NO: 1908290 - RNA, 21 nt, Human
aaggcaaaggguccagaagga

SEQ ID NO: 1908291 - RNA, 14 nt, Human
aaggcaaaauugca

SEQ ID NO: 1908292 - RNA, 15 nt, Human
aaggcaaaauugcaa

SEQ ID NO: 1908293 - RNA, 19 nt, Human
aaggcaaaauugcaaaucu

SEQ ID NO: 1908294 - RNA, 12 nt, Human
aaggaauuuuau

SEQ ID NO: 1908295 - RNA, 12 nt, Human
aaggcaaaauug

SEQ ID NO: 1908296 - RNA, 14 nt, Human
aagcugcugacagu

SEQ ID NO: 1908297 - RNA, 22 nt, Human
aagcugccagccgagauagcca

SEQ ID NO: 1908298 - RNA, 11 nt, Human
aagcugccagc

SEQ ID NO: 1908299 - RNA, 12 nt, Human
aagcugccagcc

SEQ ID NO: 1908300 - RNA, 20 nt, Human
aagcgugagccacugcaccg

SEQ ID NO: 1908301 - RNA, 17 nt, Human
aagcgugagccacugca

SEQ ID NO: 1908302 - RNA, 21 nt, Human
aagcgugagccacugcaccgg

SEQ ID NO: 1908303 - RNA, 23 nt, Human
aaggaaugauuaauuaaaacaca

SEQ ID NO: 1908304 - RNA, 16 nt, Human
aagcugcugacagugu

SEQ ID NO: 1908305 - RNA, 14 nt, Human
aagcugcuuuauuc

SEQ ID NO: 1908306 - RNA, 17 nt, Human
aagcgauucuucugcuu

SEQ ID NO: 1908307 - RNA, 16 nt, Human
aagcgauucuucugcu

SEQ ID NO: 1908308 - RNA, 14 nt, Human
aagcgauucuucug

SEQ ID NO: 1908309 - RNA, 15 nt, Human
aagcgauucuucugc

SEQ ID NO: 1908310 - RNA, 15 nt, Human
aagccagcaggcucu

SEQ ID NO: 1908311 - RNA, 19 nt, Human
aagccagcaggcucucagg

SEQ ID NO: 1908312 - RNA, 18 nt, Human
aagccagcaggcucucag

SEQ ID NO: 1908313 - RNA, 21 nt, Human
aagccaccaacauacucccau

SEQ ID NO: 1908314 - RNA, 18 nt, Human
aagcagguucccaagcuc

SEQ ID NO: 1908315 - RNA, 19 nt, Human
aagcagguucccaagcuca

SEQ ID NO: 1908316 - RNA, 22 nt, Human
aagggcaggcccaaauuaucaa

SEQ ID NO: 1908317 - RNA, 20 nt, Human
aagggacuuggaagcuccgc

SEQ ID NO: 1908318 - RNA, 15 nt, Human
aagggaucugguccu

SEQ ID NO: 1908319 - RNA, 19 nt, Human
aagggaguguacucccagg

SEQ ID NO: 1908320 - RNA, 15 nt, Human
aagggauaugugaaa

SEQ ID NO: 1908321 - RNA, 15 nt, Human
aagggacugagaaau

SEQ ID NO: 1908322 - RNA, 17 nt, Human
aagggacugagaaauuu

SEQ ID NO: 1908323 - RNA, 12 nt, Human
aaguagaggagg

SEQ ID NO: 1908324 - RNA, 17 nt, Human
aaguagcauuuacugug

SEQ ID NO: 1908325 - RNA, 11 nt, Human
aaguagcauuu

SEQ ID NO: 1908326 - RNA, 16 nt, Human
aaguagcauuuacugu

SEQ ID NO: 1908327 - RNA, 19 nt, Human
aacuuaccugggcauucuu

SEQ ID NO: 1908328 - RNA, 14 nt, Human
aacuuacuuagugu

SEQ ID NO: 1908329 - RNA, 22 nt, Human
aagacagcuucucauccugcag

SEQ ID NO: 1908330 - RNA, 19 nt, Human
aacuuacauuguucaauua

SEQ ID NO: 1908331 - RNA, 20 nt, Human
aacuuacauuguucaauuag

SEQ ID NO: 1908332 - RNA, 21 nt, Human
aacuuacauuguucaauuaga

SEQ ID NO: 1908333 - RNA, 22 nt, Human
aacuuacauuguucaauuagaa

SEQ ID NO: 1908334 - RNA, 23 nt, Human
aagacagugaaagaaaauaacaa

SEQ ID NO: 1908335 - RNA, 14 nt, Human
aagacaugcagccu

SEQ ID NO: 1908336 - RNA, 21 nt, Human
aagacagggcugauaagcuaa

SEQ ID NO: 1908337 - RNA, 16 nt, Human
aagacuuuggaaagag

SEQ ID NO: 1908338 - RNA, 15 nt, Human
aagacuuuuaugaua

SEQ ID NO: 1908339 - RNA, 18 nt, Human
aagagaagggcagggcug

SEQ ID NO: 1908340 - RNA, 13 nt, Human
aagagagaaacaa

SEQ ID NO: 1908341 - RNA, 19 nt, Human
aagauugagaaguuacuuu

SEQ ID NO: 1908342 - RNA, 14 nt, Human
aagauugagaaguu

SEQ ID NO: 1908343 - RNA, 22 nt, Human
aagauugagaaguuacuuucca

SEQ ID NO: 1908344 - RNA, 22 nt, Human
aagauucuucccauucuccauu

SEQ ID NO: 1908345 - RNA, 15 nt, Human
aagauucuucccauu

SEQ ID NO: 1908346 - RNA, 19 nt, Human
aagauucuucccauucucc

SEQ ID NO: 1908347 - RNA, 20 nt, Human
aagauucuucccauucucca

SEQ ID NO: 1908348 - RNA, 21 nt, Human
aagauucuucccauucuccau

SEQ ID NO: 1908349 - RNA, 23 nt, Human
aagauucuucccauucuccauuu

SEQ ID NO: 1908350 - RNA, 20 nt, Human
aagauucauauuuacuucuu

SEQ ID NO: 1908351 - RNA, 21 nt, Human
aagauucaaugccccugaauu

SEQ ID NO: 1908352 - RNA, 20 nt, Human
aagauucaaugccccugaau

SEQ ID NO: 1908353 - RNA, 20 nt, Human
aagauacugaaauaaacguc

SEQ ID NO: 1908354 - RNA, 16 nt, Human
aagauacugaaauaaa

SEQ ID NO: 1908355 - RNA, 14 nt, Human
aagauacugaaaua

SEQ ID NO: 1908356 - RNA, 19 nt, Human
aagauuuugaaauuuuuau

SEQ ID NO: 1908357 - RNA, 19 nt, Human
aagccaccaacauacuccc

SEQ ID NO: 1908358 - RNA, 22 nt, Human
aagcagaggaggggccgcugcc

SEQ ID NO: 1908359 - RNA, 15 nt, Human
aagcagggacuugaa

SEQ ID NO: 1908360 - RNA, 15 nt, Human
aagcagaggaggggc

SEQ ID NO: 1908361 - RNA, 20 nt, Human
aagcagaggaggggccgcug

SEQ ID NO: 1908362 - RNA, 21 nt, Human
aagcagaggaaggagaggaga

SEQ ID NO: 1908363 - RNA, 12 nt, Human
aagcagaggagg

SEQ ID NO: 1908364 - RNA, 14 nt, Human
aagcagaggagggg

SEQ ID NO: 1908365 - RNA, 16 nt, Human
acccacaugugacaca

SEQ ID NO: 1908366 - RNA, 15 nt, Human
acccacaugugacac

SEQ ID NO: 1908367 - RNA, 17 nt, Human
acccacccccacccaag

SEQ ID NO: 1908368 - RNA, 15 nt, Human
acccacccccaccca

SEQ ID NO: 1908369 - RNA, 15 nt, Human
acccacccuccuuuc

SEQ ID NO: 1908370 - RNA, 13 nt, Human
acccaugcugccc

SEQ ID NO: 1908371 - RNA, 17 nt, Human
acccauccccgcagugu

SEQ ID NO: 1908372 - RNA, 23 nt, Human
acccaugccucccccuagccauu

SEQ ID NO: 1908373 - RNA, 20 nt, Human
acccauauuguaaaacaggu

SEQ ID NO: 1908374 - RNA, 16 nt, Human
acccauauuguaaaac

SEQ ID NO: 1908375 - RNA, 23 nt, Human
acccauauccuuacccuccuugg

SEQ ID NO: 1908376 - RNA, 20 nt, Human
accauaguaccauuuauaca

SEQ ID NO: 1908377 - RNA, 14 nt, Human
accaucaagccacc

SEQ ID NO: 1908378 - RNA, 21 nt, Human
accauaguaccauuuauacaa

SEQ ID NO: 1908379 - RNA, 23 nt, Human
accauaguaccauuuauacaaau

SEQ ID NO: 1908380 - RNA, 12 nt, Human
accaucauugaa

SEQ ID NO: 1908381 - RNA, 15 nt, Human
accaucauugaaauc

SEQ ID NO: 1908382 - RNA, 15 nt, Human
accaucaagccacca

SEQ ID NO: 1908383 - RNA, 16 nt, Human
accaucccugaaggcc

SEQ ID NO: 1908384 - RNA, 23 nt, Human
accaucauugaaaucuuuuugcu

SEQ ID NO: 1908385 - RNA, 14 nt, Human
accaucucuuuacc

SEQ ID NO: 1908386 - RNA, 12 nt, Human
acaugugacaca

SEQ ID NO: 1908387 - RNA, 15 nt, Human
acaugugacacauau

SEQ ID NO: 1908388 - RNA, 14 nt, Human
acaugugacacaua

SEQ ID NO: 1908389 - RNA, 23 nt, Human
acaugucuuuucuugcaugaggc

SEQ ID NO: 1908390 - RNA, 19 nt, Human
acaugccucucucaggcca

SEQ ID NO: 1908391 - RNA, 16 nt, Human
acauuuccuaaauaua

SEQ ID NO: 1908392 - RNA, 17 nt, Human
acauuuccuaaauauau

SEQ ID NO: 1908393 - RNA, 15 nt, Human
acauuuaccaaucau

SEQ ID NO: 1908394 - RNA, 18 nt, Human
acauuuaccaaucauauu

SEQ ID NO: 1908395 - RNA, 16 nt, Human
acauuuaccuuuuuga

SEQ ID NO: 1908396 - RNA, 19 nt, Human
accaaggcugauuaaacca

SEQ ID NO: 1908397 - RNA, 17 nt, Human
accaaggagaugaagca

SEQ ID NO: 1908398 - RNA, 20 nt, Human
accaaggcugauuaaaccaa

SEQ ID NO: 1908399 - RNA, 20 nt, Human
accagccccagugcccacag

SEQ ID NO: 1908400 - RNA, 19 nt, Human
accagccccagugcccaca

SEQ ID NO: 1908401 - RNA, 18 nt, Human
accagccccagugcccac

SEQ ID NO: 1908402 - RNA, 17 nt, Human
accagccccagugccca

SEQ ID NO: 1908403 - RNA, 16 nt, Human
accagccccagugccc

SEQ ID NO: 1908404 - RNA, 14 nt, Human
accagcagaaaugc

SEQ ID NO: 1908405 - RNA, 12 nt, Human
accagcagagca

SEQ ID NO: 1908406 - RNA, 13 nt, Human
accagcagagcac

SEQ ID NO: 1908407 - RNA, 14 nt, Human
acaucaggaguuca

SEQ ID NO: 1908408 - RNA, 22 nt, Human
acaucagcuggucaaacaaacu

SEQ ID NO: 1908409 - RNA, 17 nt, Human
acauacaacacaaagag

SEQ ID NO: 1908410 - RNA, 18 nt, Human
acauacaacacaaagaga

SEQ ID NO: 1908411 - RNA, 16 nt, Human
acauaagauaaaugug

SEQ ID NO: 1908412 - RNA, 16 nt, Human
acaugcaaggucauuu

SEQ ID NO: 1908413 - RNA, 21 nt, Human
acaugauuuccuugaaugugg

SEQ ID NO: 1908414 - RNA, 17 nt, Human
acaugcaaggucauuuu

SEQ ID NO: 1908415 - RNA, 18 nt, Human
acaugcaaggucauuuuu

SEQ ID NO: 1908416 - RNA, 23 nt, Human
acaugauuuccuugaauguggcu

SEQ ID NO: 1908417 - RNA, 14 nt, Human
acaugccacaagga

SEQ ID NO: 1908418 - RNA, 15 nt, Human
acaugccucucucag

SEQ ID NO: 1908419 - RNA, 16 nt, Human
acaugccucucucagg

SEQ ID NO: 1908420 - RNA, 17 nt, Human
acaugccucucucaggc

SEQ ID NO: 1908421 - RNA, 18 nt, Human
acaugccucucucaggcc

SEQ ID NO: 1908422 - RNA, 23 nt, Human
acagugagucgaggacagggagg

SEQ ID NO: 1908423 - RNA, 20 nt, Human
acagugauuaccagggacug

SEQ ID NO: 1908424 - RNA, 21 nt, Human
acagugauuaccagggacuga

SEQ ID NO: 1908425 - RNA, 13 nt, Human
acaguguacaguc

SEQ ID NO: 1908426 - RNA, 12 nt, Human
acaguguacagu

SEQ ID NO: 1908427 - RNA, 15 nt, Human
acaguggggaaugaa

SEQ ID NO: 1908428 - RNA, 19 nt, Human
acaguggggaaugaagaua

SEQ ID NO: 1908429 - RNA, 18 nt, Human
acaguguacagucuugua

SEQ ID NO: 1908430 - RNA, 17 nt, Human
acaguguacagucuugu

SEQ ID NO: 1908431 - RNA, 15 nt, Human
acaguguacagucuu

SEQ ID NO: 1908432 - RNA, 16 nt, Human
acaguguagcuugccc

SEQ ID NO: 1908433 - RNA, 14 nt, Human
acaggcaaugcugg

SEQ ID NO: 1908434 - RNA, 21 nt, Human
acagggcugauaagcuaacac

SEQ ID NO: 1908435 - RNA, 16 nt, Human
acaggucuucaucgaa

SEQ ID NO: 1908436 - RNA, 21 nt, Human
acaggucuuuccuaaggcugc

SEQ ID NO: 1908437 - RNA, 23 nt, Human
acaggugugagucaccaagccca

SEQ ID NO: 1908438 - RNA, 22 nt, Human
acaggugugagucaccaagccc

SEQ ID NO: 1908439 - RNA, 19 nt, Human
acaggugugaaccaccaca

SEQ ID NO: 1908440 - RNA, 22 nt, Human
acagugagucgaggacagggag

SEQ ID NO: 1908441 - RNA, 18 nt, Human
acagugagggagauccca

SEQ ID NO: 1908442 - RNA, 14 nt, Human
acagcucuguccug

SEQ ID NO: 1908443 - RNA, 23 nt, Human
acagcuccuucuguccuacucug

SEQ ID NO: 1908444 - RNA, 18 nt, Human
acagcuccuucuguccua

SEQ ID NO: 1908445 - RNA, 16 nt, Human
acagcuccuucugucc

SEQ ID NO: 1908446 - RNA, 17 nt, Human
acagaggggguggccuc

SEQ ID NO: 1908447 - RNA, 18 nt, Human
acagaggggguggccucc

SEQ ID NO: 1908448 - RNA, 19 nt, Human
acagaggggguggccuccc

SEQ ID NO: 1908449 - RNA, 21 nt, Human
acagaggggguggccucccaa

SEQ ID NO: 1908450 - RNA, 17 nt, Human
acagcucuguccuggga

SEQ ID NO: 1908451 - RNA, 16 nt, Human
acagcucuguccuggg

SEQ ID NO: 1908452 - RNA, 13 nt, Human
acagcucuguccu

SEQ ID NO: 1908453 - RNA, 17 nt, Human
acagcugaguuguugag

SEQ ID NO: 1908454 - RNA, 23 nt, Human
acaggcaagcaccuccugccucg

SEQ ID NO: 1908455 - RNA, 20 nt, Human
acaggcaagcaccuccugcc

SEQ ID NO: 1908456 - RNA, 13 nt, Human
acagcugccuggg

SEQ ID NO: 1908457 - RNA, 14 nt, Human
acacugggaggcca

SEQ ID NO: 1908458 - RNA, 15 nt, Human
acacugggaggccag

SEQ ID NO: 1908459 - RNA, 20 nt, Human
acacugggaggccagugagc

SEQ ID NO: 1908460 - RNA, 20 nt, Human
acacugggagaaaugaaaaa

SEQ ID NO: 1908461 - RNA, 22 nt, Human
acacugugcugagucugaaggc

SEQ ID NO: 1908462 - RNA, 17 nt, Human
acacugugcugagucug

SEQ ID NO: 1908463 - RNA, 14 nt, Human
acagacaaagcgug

SEQ ID NO: 1908464 - RNA, 13 nt, Human
acagaagcuucca

SEQ ID NO: 1908465 - RNA, 23 nt, Human
acagaggccaugggccuccugug

SEQ ID NO: 1908466 - RNA, 21 nt, Human
acagaggccaugggccuccug

SEQ ID NO: 1908467 - RNA, 17 nt, Human
acagaggccaugggccu

SEQ ID NO: 1908468 - RNA, 13 nt, Human
acagaggcagccc

SEQ ID NO: 1908469 - RNA, 23 nt, Human
acagaggacaguauuugugggga

SEQ ID NO: 1908470 - RNA, 19 nt, Human
acacgggcagccuggcucc

SEQ ID NO: 1908471 - RNA, 16 nt, Human
acacgggcagccuggc

SEQ ID NO: 1908472 - RNA, 20 nt, Human
acacggccacaucaaagagg

SEQ ID NO: 1908473 - RNA, 20 nt, Human
acacguaaugaaacuuggau

SEQ ID NO: 1908474 - RNA, 12 nt, Human
acacggccacau

SEQ ID NO: 1908475 - RNA, 14 nt, Human
acacggccacauca

SEQ ID NO: 1908476 - RNA, 15 nt, Human
acacgaauauugcug

SEQ ID NO: 1908477 - RNA, 21 nt, Human
acacgaauauugcugauggug

SEQ ID NO: 1908478 - RNA, 21 nt, Human
acacagcucuucuccaggcug

SEQ ID NO: 1908479 - RNA, 20 nt, Human
acacagcucuucuccaggcu

SEQ ID NO: 1908480 - RNA, 22 nt, Human
acacagcucuucuccaggcugu

SEQ ID NO: 1908481 - RNA, 14 nt, Human
acacauuuuuuaaa

SEQ ID NO: 1908482 - RNA, 19 nt, Human
acacaaaaguuucucuuuu

SEQ ID NO: 1908483 - RNA, 19 nt, Human
acacagcucuucuccaggc

SEQ ID NO: 1908484 - RNA, 20 nt, Human
acaccacuacauucuguuaa

SEQ ID NO: 1908485 - RNA, 17 nt, Human
acaccacuacauucugu

SEQ ID NO: 1908486 - RNA, 12 nt, Human
acacgaauauug

SEQ ID NO: 1908487 - RNA, 14 nt, Human
acacgaauauugcu

SEQ ID NO: 1908488 - RNA, 15 nt, Human
acaccacuacauucu

SEQ ID NO: 1908489 - RNA, 19 nt, Human
acacauuuuuuaaaugcac

SEQ ID NO: 1908490 - RNA, 18 nt, Human
acacauuuuuuaaaugca

SEQ ID NO: 1908491 - RNA, 16 nt, Human
acacauuuuuuaaaug

SEQ ID NO: 1908492 - RNA, 13 nt, Human
acaauuuauuaug

SEQ ID NO: 1908493 - RNA, 14 nt, Human
acaauuuauuaugg

SEQ ID NO: 1908494 - RNA, 13 nt, Human
acaauuuaaagca

SEQ ID NO: 1908495 - RNA, 20 nt, Human
acaauuuaaagcaaaggagu

SEQ ID NO: 1908496 - RNA, 14 nt, Human
acaauuuaaagcaa

SEQ ID NO: 1908497 - RNA, 16 nt, Human
acaaggauugcuacug

SEQ ID NO: 1908498 - RNA, 20 nt, Human
acaaggaugaucuaggaaga

SEQ ID NO: 1908499 - RNA, 22 nt, Human
acaaggauagaugcuggcccag

SEQ ID NO: 1908500 - RNA, 16 nt, Human
aauuuugugcccccau

SEQ ID NO: 1908501 - RNA, 14 nt, Human
aauuuugauguuuu

SEQ ID NO: 1908502 - RNA, 18 nt, Human
aauuuucaucuaggauuu

SEQ ID NO: 1908503 - RNA, 12 nt, Human
acaaagaaauua

SEQ ID NO: 1908504 - RNA, 13 nt, Human
acaaacuuuuaua

SEQ ID NO: 1908505 - RNA, 14 nt, Human
acaaagaaauuaug

SEQ ID NO: 1908506 - RNA, 16 nt, Human
acaaagaaauuaugug

SEQ ID NO: 1908507 - RNA, 13 nt, Human
acaaaaugaaacg

SEQ ID NO: 1908508 - RNA, 22 nt, Human
acaaaaugaaacgcaaccacca

SEQ ID NO: 1908509 - RNA, 14 nt, Human
acaaaauggaauac

SEQ ID NO: 1908510 - RNA, 13 nt, Human
acaaaauggaaua

SEQ ID NO: 1908511 - RNA, 13 nt, Human
acaaccugaaccu

SEQ ID NO: 1908512 - RNA, 14 nt, Human
acaaccugaaccua

SEQ ID NO: 1908513 - RNA, 18 nt, Human
acaaccugaaccuaggag

SEQ ID NO: 1908514 - RNA, 16 nt, Human
acaagaaaugaaagca

SEQ ID NO: 1908515 - RNA, 15 nt, Human
acaagaaaugaaagc

SEQ ID NO: 1908516 - RNA, 20 nt, Human
aauuuauuuaugggauccug

SEQ ID NO: 1908517 - RNA, 12 nt, Human
aauuuauucaau

SEQ ID NO: 1908518 - RNA, 21 nt, Human
aauuuauucaauuccucuggg

SEQ ID NO: 1908519 - RNA, 15 nt, Human
aauugugaugugucc

SEQ ID NO: 1908520 - RNA, 14 nt, Human
aauugugauguguc

SEQ ID NO: 1908521 - RNA, 11 nt, Human
aauugugaugu

SEQ ID NO: 1908522 - RNA, 17 nt, Human
aauuuauuauggcacau

SEQ ID NO: 1908523 - RNA, 19 nt, Human
aaugucacaggcaggucca

SEQ ID NO: 1908524 - RNA, 16 nt, Human
aaugucacaggcaggu

SEQ ID NO: 1908525 - RNA, 23 nt, Human
aauuggguggggggcuucauaca

SEQ ID NO: 1908526 - RNA, 15 nt, Human
aauugguucuuuauu

SEQ ID NO: 1908527 - RNA, 21 nt, Human
aauugguuggagaauuuaggu

SEQ ID NO: 1908528 - RNA, 22 nt, Human
aauuggguggggggcuucauac

SEQ ID NO: 1908529 - RNA, 21 nt, Human
aauuggguggggggcuucaua

SEQ ID NO: 1908530 - RNA, 16 nt, Human
aauuguaaggaaugau

SEQ ID NO: 1908531 - RNA, 24 nt, Human
aauuguaaauugaaucaguauaaa

SEQ ID NO: 1908532 - RNA, 12 nt, Human
aauuguaaggaa

SEQ ID NO: 1908533 - RNA, 17 nt, Human
aauuguaaauugaauca

SEQ ID NO: 1908534 - RNA, 16 nt, Human
aauuguauuuuaguaa

SEQ ID NO: 1908535 - RNA, 17 nt, Human
aauuuccugggagcuuu

SEQ ID NO: 1908536 - RNA, 21 nt, Human
aauuuccugggagcuuuugua

SEQ ID NO: 1908537 - RNA, 18 nt, Human
aauuuccugggagcuuuu

SEQ ID NO: 1908538 - RNA, 13 nt, Human
aauuucagacucc

SEQ ID NO: 1908539 - RNA, 23 nt, Human
aauuucagacucccauuccugaa

SEQ ID NO: 1908540 - RNA, 21 nt, Human
aauuucagcuucuauauauug

SEQ ID NO: 1908541 - RNA, 16 nt, Human
aauuucaaaaugcuuu

SEQ ID NO: 1908542 - RNA, 23 nt, Human
aauuuauuuuuaccuucacugug

SEQ ID NO: 1908543 - RNA, 12 nt, Human
aauuucaaaaug

SEQ ID NO: 1908544 - RNA, 23 nt, Human
acucuagaaaacgcgaccuuggc

SEQ ID NO: 1908545 - RNA, 19 nt, Human
acucuagaaaacgcgaccu

SEQ ID NO: 1908546 - RNA, 21 nt, Human
acucuagaugaaguuuuacau

SEQ ID NO: 1908547 - RNA, 22 nt, Human
acucuagaugaaguuuuacauu

SEQ ID NO: 1908548 - RNA, 19 nt, Human
acucugucucaaaaaaaca

SEQ ID NO: 1908549 - RNA, 19 nt, Human
acucugugucagguggggc

SEQ ID NO: 1908550 - RNA, 21 nt, Human
acucugugucagguggggcag

SEQ ID NO: 1908551 - RNA, 17 nt, Human
acucugucucaguccau

SEQ ID NO: 1908552 - RNA, 15 nt, Human
acucugucucagucc

SEQ ID NO: 1908553 - RNA, 21 nt, Human
acucugucuaaaaaacaaaac

SEQ ID NO: 1908554 - RNA, 15 nt, Human
acucugugucugagu

SEQ ID NO: 1908555 - RNA, 16 nt, Human
acucugugucugagug

SEQ ID NO: 1908556 - RNA, 22 nt, Human
acucugugucugaguggcuuca

SEQ ID NO: 1908557 - RNA, 11 nt, Human
acuauuuuauu

SEQ ID NO: 1908558 - RNA, 17 nt, Human
acuauuuuauuuucuaa

SEQ ID NO: 1908559 - RNA, 22 nt, Human
acugaugggcaacccccagccu

SEQ ID NO: 1908560 - RNA, 12 nt, Human
acugaugggcaa

SEQ ID NO: 1908561 - RNA, 22 nt, Human
acugauggcuaauguacugcau

SEQ ID NO: 1908562 - RNA, 13 nt, Human
acugaucucucgu

SEQ ID NO: 1908563 - RNA, 11 nt, Human
acugaugcugc

SEQ ID NO: 1908564 - RNA, 12 nt, Human
acugaugcugcc

SEQ ID NO: 1908565 - RNA, 14 nt, Human
acugaugcugcccc

SEQ ID NO: 1908566 - RNA, 15 nt, Human
acugaugcugccccu

SEQ ID NO: 1908567 - RNA, 19 nt, Human
acugaugcugccccucauc

SEQ ID NO: 1908568 - RNA, 20 nt, Human
acugaugcugccccucaucu

SEQ ID NO: 1908569 - RNA, 15 nt, Human
acugaugcuuagaug

SEQ ID NO: 1908570 - RNA, 23 nt, Human
acugacauuguuggccaaagcca

SEQ ID NO: 1908571 - RNA, 22 nt, Human
acugacauuguuggccaaagcc

SEQ ID NO: 1908572 - RNA, 21 nt, Human
acugaccaauauuguacaguu

SEQ ID NO: 1908573 - RNA, 20 nt, Human
acugaccaauauuguacagu

SEQ ID NO: 1908574 - RNA, 22 nt, Human
acugaccaauauuguacaguuu

SEQ ID NO: 1908575 - RNA, 12 nt, Human
acugaccagaac

SEQ ID NO: 1908576 - RNA, 14 nt, Human
acugaccagaacua

SEQ ID NO: 1908577 - RNA, 23 nt, Human
acugauuuuuuuuuccuucagug

SEQ ID NO: 1908578 - RNA, 21 nt, Human
acugauuuuuuuuuccuucag

SEQ ID NO: 1908579 - RNA, 22 nt, Human
acugauuuuuuuuuccuucagu

SEQ ID NO: 1908580 - RNA, 15 nt, Human
acugcuuuuggucug

SEQ ID NO: 1908581 - RNA, 22 nt, Human
acugcccggcaggguccuagaa

SEQ ID NO: 1908582 - RNA, 20 nt, Human
acugcuuuuggucuguguga

SEQ ID NO: 1908583 - RNA, 16 nt, Human
acugcuuuuggucugu

SEQ ID NO: 1908584 - RNA, 20 nt, Human
acuggaagcuaauuugcauu

SEQ ID NO: 1908585 - RNA, 20 nt, Human
acugcccuccagcucuuucc

SEQ ID NO: 1908586 - RNA, 23 nt, Human
acugcccuccagcucuuuccucc

SEQ ID NO: 1908587 - RNA, 15 nt, Human
acugcccggcagggu

SEQ ID NO: 1908588 - RNA, 20 nt, Human
acuugggagaccuguaauca

SEQ ID NO: 1908589 - RNA, 16 nt, Human
acuugggaggcugagg

SEQ ID NO: 1908590 - RNA, 22 nt, Human
acuugggaggcugagaugggag

SEQ ID NO: 1908591 - RNA, 15 nt, Human
acuuuauuuuguguu

SEQ ID NO: 1908592 - RNA, 17 nt, Human
acuuuaugcuaagugaa

SEQ ID NO: 1908593 - RNA, 12 nt, Human
acuuuaugcuaa

SEQ ID NO: 1908594 - RNA, 20 nt, Human
acuuuauuaaauacaaaacu

SEQ ID NO: 1908595 - RNA, 12 nt, Human
acuuuauuaaau

SEQ ID NO: 1908596 - RNA, 15 nt, Human
acuuuauuaaauaca

SEQ ID NO: 1908597 - RNA, 20 nt, Human
acuucugccauauucuguug

SEQ ID NO: 1908598 - RNA, 13 nt, Human
acuucugccucuu

SEQ ID NO: 1908599 - RNA, 12 nt, Human
acuucugccugu

SEQ ID NO: 1908600 - RNA, 17 nt, Human
acuucuuauacauuuga

SEQ ID NO: 1908601 - RNA, 18 nt, Human
acuucuuauacauuugau

SEQ ID NO: 1908602 - RNA, 14 nt, Human
acuuaaaaaugguu

SEQ ID NO: 1908603 - RNA, 13 nt, Human
acuuaaaaauggu

SEQ ID NO: 1908604 - RNA, 21 nt, Human
acuuaaaaaugguuuaaaugg

SEQ ID NO: 1908605 - RNA, 14 nt, Human
acuuaaauaaugug

SEQ ID NO: 1908606 - RNA, 18 nt, Human
accucaguuuuaucauuu

SEQ ID NO: 1908607 - RNA, 17 nt, Human
accucaguuuuaucauu

SEQ ID NO: 1908608 - RNA, 15 nt, Human
accucaggugaucca

SEQ ID NO: 1908609 - RNA, 18 nt, Human
accucaggugagaagcag

SEQ ID NO: 1908610 - RNA, 12 nt, Human
accucagggcac

SEQ ID NO: 1908611 - RNA, 14 nt, Human
accucaggccuggg

SEQ ID NO: 1908612 - RNA, 22 nt, Human
accucaggccugggggcugggc

SEQ ID NO: 1908613 - RNA, 16 nt, Human
accgugaggccagaga

SEQ ID NO: 1908614 - RNA, 17 nt, Human
accgugaggccagagac

SEQ ID NO: 1908615 - RNA, 12 nt, Human
accucaggccug

SEQ ID NO: 1908616 - RNA, 13 nt, Human
accucaggccugg

SEQ ID NO: 1908617 - RNA, 15 nt, Human
accgggcagggccgc

SEQ ID NO: 1908618 - RNA, 19 nt, Human
accgggccacagagaaagu

SEQ ID NO: 1908619 - RNA, 15 nt, Human
accgggccacagaga

SEQ ID NO: 1908620 - RNA, 14 nt, Human
accgugaggccaga

SEQ ID NO: 1908621 - RNA, 14 nt, Human
accgguggggcugg

SEQ ID NO: 1908622 - RNA, 20 nt, Human
accgggcacucagaagacac

SEQ ID NO: 1908623 - RNA, 19 nt, Human
accggcuggccuggccccu

SEQ ID NO: 1908624 - RNA, 17 nt, Human
accggcuggccuggccc

SEQ ID NO: 1908625 - RNA, 18 nt, Human
accggcuggccuggcccc

SEQ ID NO: 1908626 - RNA, 14 nt, Human
accggcuggccugg

SEQ ID NO: 1908627 - RNA, 15 nt, Human
accggcuggccuggc

SEQ ID NO: 1908628 - RNA, 17 nt, Human
acccuguuaccauuuug

SEQ ID NO: 1908629 - RNA, 14 nt, Human
acccaugcugcccu

SEQ ID NO: 1908630 - RNA, 15 nt, Human
acccaugcugcccug

SEQ ID NO: 1908631 - RNA, 22 nt, Human
acccugugauggggcccugccu

SEQ ID NO: 1908632 - RNA, 16 nt, Human
accccacacacgccag

SEQ ID NO: 1908633 - RNA, 14 nt, Human
accccaaucccagc

SEQ ID NO: 1908634 - RNA, 15 nt, Human
accugccagggacag

SEQ ID NO: 1908635 - RNA, 16 nt, Human
accugccagggacaga

SEQ ID NO: 1908636 - RNA, 18 nt, Human
accugccagggacagagg

SEQ ID NO: 1908637 - RNA, 12 nt, Human
accugccaggga

SEQ ID NO: 1908638 - RNA, 13 nt, Human
accugccagggac

SEQ ID NO: 1908639 - RNA, 11 nt, Human
accugccaggg

SEQ ID NO: 1908640 - RNA, 21 nt, Human
accucuugagccuugaacuuu

SEQ ID NO: 1908641 - RNA, 20 nt, Human
accucuugagccuugaacuu

SEQ ID NO: 1908642 - RNA, 19 nt, Human
accucuugagccuugaacu

SEQ ID NO: 1908643 - RNA, 17 nt, Human
accucuugagccuugaa

SEQ ID NO: 1908644 - RNA, 22 nt, Human
acuaaugaccacaccugccucu

SEQ ID NO: 1908645 - RNA, 14 nt, Human
acuaaucuuucugc

SEQ ID NO: 1908646 - RNA, 17 nt, Human
acuauugcuugcacaaa

SEQ ID NO: 1908647 - RNA, 15 nt, Human
acuauugcauuuuac

SEQ ID NO: 1908648 - RNA, 16 nt, Human
acuauuguuagucucu

SEQ ID NO: 1908649 - RNA, 18 nt, Human
acuagguaacuucauauu

SEQ ID NO: 1908650 - RNA, 22 nt, Human
acuaggugcccagaaugaggcu

SEQ ID NO: 1908651 - RNA, 17 nt, Human
acuagggaagauaauau

SEQ ID NO: 1908652 - RNA, 13 nt, Human
acgcagccaggac

SEQ ID NO: 1908653 - RNA, 12 nt, Human
acgcagccagga

SEQ ID NO: 1908654 - RNA, 19 nt, Human
acgcuggagugcagugagc

SEQ ID NO: 1908655 - RNA, 17 nt, Human
acgcaccugccucagga

SEQ ID NO: 1908656 - RNA, 14 nt, Human
acgcagccaggaca

SEQ ID NO: 1908657 - RNA, 18 nt, Human
acgcuggcuccccaaagg

SEQ ID NO: 1908658 - RNA, 11 nt, Human
acgcuggcucc

SEQ ID NO: 1908659 - RNA, 23 nt, Human
acgcugucccuaguaaaaauaca

SEQ ID NO: 1908660 - RNA, 15 nt, Human
acggaagagccuugc

SEQ ID NO: 1908661 - RNA, 16 nt, Human
acggaagagccuugcg

SEQ ID NO: 1908662 - RNA, 15 nt, Human
acggacgcuggcucc

SEQ ID NO: 1908663 - RNA, 19 nt, Human
acggacgaaccuugaaaac

SEQ ID NO: 1908664 - RNA, 15 nt, Human
acggaauaguuggcu

SEQ ID NO: 1908665 - RNA, 23 nt, Human
acgucugacaggcaaugcuggcu

SEQ ID NO: 1908666 - RNA, 15 nt, Human
acgucugacaggcaa

SEQ ID NO: 1908667 - RNA, 14 nt, Human
acguggcucagcca

SEQ ID NO: 1908668 - RNA, 15 nt, Human
acuaauagacaauuu

SEQ ID NO: 1908669 - RNA, 15 nt, Human
acuaacuaugcaugg

SEQ ID NO: 1908670 - RNA, 17 nt, Human
acuaacuaucaaauaga

SEQ ID NO: 1908671 - RNA, 23 nt, Human
acuaacuaugcauggugccccag

SEQ ID NO: 1908672 - RNA, 11 nt, Human
acguggcugcu

SEQ ID NO: 1908673 - RNA, 17 nt, Human
acguggcucagccagca

SEQ ID NO: 1908674 - RNA, 19 nt, Human
acguggcucagccagcacu

SEQ ID NO: 1908675 - RNA, 19 nt, Human
accuguggccaaguucuua

SEQ ID NO: 1908676 - RNA, 18 nt, Human
accuguggccaaguucuu

SEQ ID NO: 1908677 - RNA, 15 nt, Human
accugugagcccagc

SEQ ID NO: 1908678 - RNA, 17 nt, Human
accugugagcccagcug

SEQ ID NO: 1908679 - RNA, 18 nt, Human
accugugagcccagcugg

SEQ ID NO: 1908680 - RNA, 11 nt, Human
accugugucuc

SEQ ID NO: 1908681 - RNA, 18 nt, Human
accuguguauuuuuuaaa

SEQ ID NO: 1908682 - RNA, 21 nt, Human
gccucauuuagagaggaaaag

SEQ ID NO: 1908683 - RNA, 19 nt, Human
gccuccagaacucacuggg

SEQ ID NO: 1908684 - RNA, 14 nt, Human
gccuccagggcugg

SEQ ID NO: 1908685 - RNA, 13 nt, Human
gccuccagggcug

SEQ ID NO: 1908686 - RNA, 12 nt, Human
gccuccagggcu

SEQ ID NO: 1908687 - RNA, 19 nt, Human
gccuccaggaaccacacca

SEQ ID NO: 1908688 - RNA, 19 nt, Human
gccuccuuugugaggaagc

SEQ ID NO: 1908689 - RNA, 20 nt, Human
gccuccuuugugaggaagcc

SEQ ID NO: 1908690 - RNA, 21 nt, Human
gccuccuuugugaggaagccg

SEQ ID NO: 1908691 - RNA, 20 nt, Human
gccuccauccugaggcucca

SEQ ID NO: 1908692 - RNA, 16 nt, Human
gccuccauccugaggc

SEQ ID NO: 1908693 - RNA, 20 nt, Human
gccuccagggcuggacugag

SEQ ID NO: 1908694 - RNA, 19 nt, Human
gccuccagggcuggacuga

SEQ ID NO: 1908695 - RNA, 18 nt, Human
gccuccagggcuggacug

SEQ ID NO: 1908696 - RNA, 17 nt, Human
gccuccagggcuggacu

SEQ ID NO: 1908697 - RNA, 16 nt, Human
gccuccagggcuggac

SEQ ID NO: 1908698 - RNA, 13 nt, Human
gccugcuccagcu

SEQ ID NO: 1908699 - RNA, 17 nt, Human
gccugcuccagaccuga

SEQ ID NO: 1908700 - RNA, 21 nt, Human
gccugcuccagaccugauccu

SEQ ID NO: 1908701 - RNA, 23 nt, Human
gccugcuaauuccccagauugca

SEQ ID NO: 1908702 - RNA, 17 nt, Human
gccugcuaauuccccag

SEQ ID NO: 1908703 - RNA, 12 nt, Human
gccugcuccaga

SEQ ID NO: 1908704 - RNA, 13 nt, Human
gccugcuccagac

SEQ ID NO: 1908705 - RNA, 14 nt, Human
gccugcuccagacc

SEQ ID NO: 1908706 - RNA, 15 nt, Human
gccugcuccagaccu

SEQ ID NO: 1908707 - RNA, 16 nt, Human
gccugcuccagaccug

SEQ ID NO: 1908708 - RNA, 14 nt, Human
gccucgcaggaaga

SEQ ID NO: 1908709 - RNA, 14 nt, Human
gcgauucuucugcu

SEQ ID NO: 1908710 - RNA, 17 nt, Human
gcgauucuucugcuuca

SEQ ID NO: 1908711 - RNA, 13 nt, Human
gcgauucuucugc

SEQ ID NO: 1908712 - RNA, 17 nt, Human
gcgauucuccugccuca

SEQ ID NO: 1908713 - RNA, 17 nt, Human
gcggagcaagaggaggc

SEQ ID NO: 1908714 - RNA, 18 nt, Human
gcggagcaagaggaggcc

SEQ ID NO: 1908715 - RNA, 12 nt, Human
gcggagcuggcc

SEQ ID NO: 1908716 - RNA, 16 nt, Human
gcggaggagagagagg

SEQ ID NO: 1908717 - RNA, 14 nt, Human
gcggagcuggcccc

SEQ ID NO: 1908718 - RNA, 17 nt, Human
gcggagcuggccccgcc

SEQ ID NO: 1908719 - RNA, 21 nt, Human
gcguggcgcaguggcccugag

SEQ ID NO: 1908720 - RNA, 20 nt, Human
gcguggcgcaguggcccuga

SEQ ID NO: 1908721 - RNA, 20 nt, Human
gcgugguggacaugcacagc

SEQ ID NO: 1908722 - RNA, 14 nt, Human
gcgugcacacacca

SEQ ID NO: 1908723 - RNA, 20 nt, Human
gcgugaucaaagccacacuc

SEQ ID NO: 1908724 - RNA, 18 nt, Human
gcgugcacacaccagagc

SEQ ID NO: 1908725 - RNA, 13 nt, Human
gcggccggccagc

SEQ ID NO: 1908726 - RNA, 16 nt, Human
gcuaauuuuucauuuu

SEQ ID NO: 1908727 - RNA, 18 nt, Human
gcuaauuuugaaaaacug

SEQ ID NO: 1908728 - RNA, 12 nt, Human
gcuaauuugcau

SEQ ID NO: 1908729 - RNA, 13 nt, Human
gcuaauuugcauu

SEQ ID NO: 1908730 - RNA, 15 nt, Human
gcuaauuugcauuaa

SEQ ID NO: 1908731 - RNA, 17 nt, Human
gcguuucuaugacacau

SEQ ID NO: 1908732 - RNA, 15 nt, Human
gcuaauuuuuguaau

SEQ ID NO: 1908733 - RNA, 16 nt, Human
gcuaauuuuuguaauu

SEQ ID NO: 1908734 - RNA, 17 nt, Human
gcuaauuuuuguaauuu

SEQ ID NO: 1908735 - RNA, 23 nt, Human
gcuacuggcaaaaggaucuuugu

SEQ ID NO: 1908736 - RNA, 20 nt, Human
gcuacaaauacucuuaggaa

SEQ ID NO: 1908737 - RNA, 20 nt, Human
gcuacuguccuacccacccu

SEQ ID NO: 1908738 - RNA, 19 nt, Human
gcuacuguccuacccaccc

SEQ ID NO: 1908739 - RNA, 15 nt, Human
gcuacugugugugug

SEQ ID NO: 1908740 - RNA, 18 nt, Human
gcuacugugugugugaau

SEQ ID NO: 1908741 - RNA, 19 nt, Human
gcuacugugugugugaaug

SEQ ID NO: 1908742 - RNA, 21 nt, Human
gcuacugugugugugaaugaa

SEQ ID NO: 1908743 - RNA, 18 nt, Human
gcuacuguaaggcaauca

SEQ ID NO: 1908744 - RNA, 19 nt, Human
gcuacuguaaggcaaucau

SEQ ID NO: 1908745 - RNA, 18 nt, Human
gcuacuguaauuuuauau

SEQ ID NO: 1908746 - RNA, 22 nt, Human
gcuacuguaauuuuauaugaag

SEQ ID NO: 1908747 - RNA, 11 nt, Human
gcuagaaauga

SEQ ID NO: 1908748 - RNA, 17 nt, Human
gcuacuugggaggcuga

SEQ ID NO: 1908749 - RNA, 13 nt, Human
gcuacuugggagg

SEQ ID NO: 1908750 - RNA, 18 nt, Human
gcccaggccccugccacc

SEQ ID NO: 1908751 - RNA, 17 nt, Human
gcccaggccccugccac

SEQ ID NO: 1908752 - RNA, 14 nt, Human
gccaugugccaggu

SEQ ID NO: 1908753 - RNA, 19 nt, Human
gccaucaaaaugcuuuuua

SEQ ID NO: 1908754 - RNA, 14 nt, Human
gccaucaaaaugcu

SEQ ID NO: 1908755 - RNA, 15 nt, Human
gccaucaaaaugcuu

SEQ ID NO: 1908756 - RNA, 16 nt, Human
gccaucaaaaugcuuu

SEQ ID NO: 1908757 - RNA, 18 nt, Human
gccaucaaaaugcuuuuu

SEQ ID NO: 1908758 - RNA, 16 nt, Human
gccauguguuccaagg

SEQ ID NO: 1908759 - RNA, 15 nt, Human
gccauguguuccaag

SEQ ID NO: 1908760 - RNA, 13 nt, Human
gcccaggccccug

SEQ ID NO: 1908761 - RNA, 15 nt, Human
gcccaggccccugcc

SEQ ID NO: 1908762 - RNA, 16 nt, Human
gcccaggcaggucuug

SEQ ID NO: 1908763 - RNA, 14 nt, Human
gcccaggcaggucu

SEQ ID NO: 1908764 - RNA, 12 nt, Human
gcccaggcaggu

SEQ ID NO: 1908765 - RNA, 13 nt, Human
gcccaggcagguc

SEQ ID NO: 1908766 - RNA, 15 nt, Human
gccccuggaugcagc

SEQ ID NO: 1908767 - RNA, 11 nt, Human
gcccuaucugu

SEQ ID NO: 1908768 - RNA, 13 nt, Human
gcccauucuacuu

SEQ ID NO: 1908769 - RNA, 14 nt, Human
gcccauucuacuug

SEQ ID NO: 1908770 - RNA, 15 nt, Human
gcccauucuacuugc

SEQ ID NO: 1908771 - RNA, 17 nt, Human
gcccauucuacuugcuc

SEQ ID NO: 1908772 - RNA, 18 nt, Human
gcccauucuacuugcucu

SEQ ID NO: 1908773 - RNA, 19 nt, Human
gcccauucuacuugcucug

SEQ ID NO: 1908774 - RNA, 20 nt, Human
gcccauucuacuugcucugg

SEQ ID NO: 1908775 - RNA, 21 nt, Human
gccccaacucuccccugaccu

SEQ ID NO: 1908776 - RNA, 21 nt, Human
gcccauucuacuugcucugga

SEQ ID NO: 1908777 - RNA, 22 nt, Human
gcccauucuacuugcucuggac

SEQ ID NO: 1908778 - RNA, 22 nt, Human
gccccugcugguucaggguugg

SEQ ID NO: 1908779 - RNA, 17 nt, Human
gccccugccucucugca

SEQ ID NO: 1908780 - RNA, 18 nt, Human
gccccugccucucugcag

SEQ ID NO: 1908781 - RNA, 15 nt, Human
gccccugccucucug

SEQ ID NO: 1908782 - RNA, 16 nt, Human
gccccugccucucugc

SEQ ID NO: 1908783 - RNA, 16 nt, Human
gcccccgcauccccug

SEQ ID NO: 1908784 - RNA, 18 nt, Human
gcccccgcauccccugcc

SEQ ID NO: 1908785 - RNA, 20 nt, Human
gcccccgcauccccugccuc

SEQ ID NO: 1908786 - RNA, 19 nt, Human
gccccaaucccuuuauuac

SEQ ID NO: 1908787 - RNA, 18 nt, Human
gccccaaucccuuuauua

SEQ ID NO: 1908788 - RNA, 13 nt, Human
gccagccaugucu

SEQ ID NO: 1908789 - RNA, 14 nt, Human
gccaggauggaaug

SEQ ID NO: 1908790 - RNA, 22 nt, Human
gccaggccagagggagugacag

SEQ ID NO: 1908791 - RNA, 12 nt, Human
gccaggccagcu

SEQ ID NO: 1908792 - RNA, 15 nt, Human
gccaggccagaggga

SEQ ID NO: 1908793 - RNA, 21 nt, Human
gccaggccacaagacccuugu

SEQ ID NO: 1908794 - RNA, 13 nt, Human
gccaggccacaag

SEQ ID NO: 1908795 - RNA, 18 nt, Human
gccaggccacaagacccu

SEQ ID NO: 1908796 - RNA, 13 nt, Human
gccaggcccucug

SEQ ID NO: 1908797 - RNA, 14 nt, Human
gccaggcccucugc

SEQ ID NO: 1908798 - RNA, 13 nt, Human
gccaggccccagg

SEQ ID NO: 1908799 - RNA, 13 nt, Human
gccaggccagcug

SEQ ID NO: 1908800 - RNA, 14 nt, Human
gccaggccccaggc

SEQ ID NO: 1908801 - RNA, 15 nt, Human
gccagugcuccagcc

SEQ ID NO: 1908802 - RNA, 23 nt, Human
gccaguggcuggaucugugaggg

SEQ ID NO: 1908803 - RNA, 14 nt, Human
gccaguggcuggau

SEQ ID NO: 1908804 - RNA, 13 nt, Human
gccagugugacaa

SEQ ID NO: 1908805 - RNA, 13 nt, Human
gccaguugguccc

SEQ ID NO: 1908806 - RNA, 19 nt, Human
gccauauacucuucaagga

SEQ ID NO: 1908807 - RNA, 16 nt, Human
gccauagucacauggc

SEQ ID NO: 1908808 - RNA, 16 nt, Human
gccauaugaaaaggcu

SEQ ID NO: 1908809 - RNA, 22 nt, Human
gccaguuggucccccuuccaug

SEQ ID NO: 1908810 - RNA, 23 nt, Human
gccaguuggucccccuuccaugg

SEQ ID NO: 1908811 - RNA, 22 nt, Human
gccauaaaacagguaauauaaa

SEQ ID NO: 1908812 - RNA, 16 nt, Human
gccaguuggucccccu

SEQ ID NO: 1908813 - RNA, 18 nt, Human
gccaguuggucccccuuc

SEQ ID NO: 1908814 - RNA, 20 nt, Human
gccaguuggucccccuucca

SEQ ID NO: 1908815 - RNA, 21 nt, Human
gccaguuggucccccuuccau

SEQ ID NO: 1908816 - RNA, 14 nt, Human
gcuuugaucccuuc

SEQ ID NO: 1908817 - RNA, 17 nt, Human
gcuuugaucccuucuua

SEQ ID NO: 1908818 - RNA, 14 nt, Human
gcuuugaucccuga

SEQ ID NO: 1908819 - RNA, 15 nt, Human
gcuuugaucccugac

SEQ ID NO: 1908820 - RNA, 18 nt, Human
gcuuuugucuaugggacu

SEQ ID NO: 1908821 - RNA, 15 nt, Human
gcuuuuggucugugu

SEQ ID NO: 1908822 - RNA, 18 nt, Human
ggaaaauuuuaaaaauac

SEQ ID NO: 1908823 - RNA, 22 nt, Human
gcuuuuuucucugauacagaaa

SEQ ID NO: 1908824 - RNA, 13 nt, Human
ggaaacaacagcu

SEQ ID NO: 1908825 - RNA, 16 nt, Human
ggaaacaacagcuuua

SEQ ID NO: 1908826 - RNA, 16 nt, Human
ggaaacccagcucugg

SEQ ID NO: 1908827 - RNA, 13 nt, Human
ggaaacagacucg

SEQ ID NO: 1908828 - RNA, 22 nt, Human
ggaaacagacucgauucauauu

SEQ ID NO: 1908829 - RNA, 15 nt, Human
gcuuuuuuaucaugu

SEQ ID NO: 1908830 - RNA, 18 nt, Human
gcuuuuuuaucaugugaa

SEQ ID NO: 1908831 - RNA, 20 nt, Human
gcuuuuuuaucaugugaaau

SEQ ID NO: 1908832 - RNA, 12 nt, Human
gcuuuugugcau

SEQ ID NO: 1908833 - RNA, 17 nt, Human
gcuuuuuauuucugcau

SEQ ID NO: 1908834 - RNA, 21 nt, Human
gcuuuuuauuucugcauaugu

SEQ ID NO: 1908835 - RNA, 15 nt, Human
gcuuuuuauuucugc

SEQ ID NO: 1908836 - RNA, 18 nt, Human
ggaagacccaacacaugg

SEQ ID NO: 1908837 - RNA, 20 nt, Human
ggaagacccaacacauggga

SEQ ID NO: 1908838 - RNA, 17 nt, Human
ggaagacuucaucccuc

SEQ ID NO: 1908839 - RNA, 20 nt, Human
ggaagacuucaucccucugg

SEQ ID NO: 1908840 - RNA, 18 nt, Human
ggaaacgaaacccacucu

SEQ ID NO: 1908841 - RNA, 14 nt, Human
ggaaaugggcagag

SEQ ID NO: 1908842 - RNA, 16 nt, Human
ggaaaugggcagagca

SEQ ID NO: 1908843 - RNA, 17 nt, Human
ggaaaugggcagagcag

SEQ ID NO: 1908844 - RNA, 18 nt, Human
ggaaaugggcagagcaga

SEQ ID NO: 1908845 - RNA, 22 nt, Human
ggaaaugggcagagcagagacc

SEQ ID NO: 1908846 - RNA, 15 nt, Human
ggaacaaggcaaggc

SEQ ID NO: 1908847 - RNA, 17 nt, Human
ggaacaaggcaaggcug

SEQ ID NO: 1908848 - RNA, 21 nt, Human
ggaacaaggcaaggcugucaa

SEQ ID NO: 1908849 - RNA, 14 nt, Human
ggaagacaauguga

SEQ ID NO: 1908850 - RNA, 16 nt, Human
ggaagacaaugugaaa

SEQ ID NO: 1908851 - RNA, 21 nt, Human
ggaagaacggggcucuucuca

SEQ ID NO: 1908852 - RNA, 11 nt, Human
ggaagaacacc

SEQ ID NO: 1908853 - RNA, 23 nt, Human
ggaacuuggggaguuaagaccug

SEQ ID NO: 1908854 - RNA, 15 nt, Human
ggaacugcugggcuu

SEQ ID NO: 1908855 - RNA, 14 nt, Human
ggaacugcugggcu

SEQ ID NO: 1908856 - RNA, 14 nt, Human
ggaacacggccaca

SEQ ID NO: 1908857 - RNA, 13 nt, Human
ggaacaccuccuc

SEQ ID NO: 1908858 - RNA, 23 nt, Human
ggaacaaggcaaggcugucaauu

SEQ ID NO: 1908859 - RNA, 15 nt, Human
ggaacacuccuucac

SEQ ID NO: 1908860 - RNA, 17 nt, Human
ggaacugaacauuccag

SEQ ID NO: 1908861 - RNA, 19 nt, Human
ggaacacuccuucacagau

SEQ ID NO: 1908862 - RNA, 16 nt, Human
ggaacugcaugcugcu

SEQ ID NO: 1908863 - RNA, 15 nt, Human
ggaacugcaugcugc

SEQ ID NO: 1908864 - RNA, 23 nt, Human
gcugguucaggguuggccccugc

SEQ ID NO: 1908865 - RNA, 21 nt, Human
gcugguucggauuuggggugg

SEQ ID NO: 1908866 - RNA, 20 nt, Human
gcugguucggauuuggggug

SEQ ID NO: 1908867 - RNA, 12 nt, Human
gcugguucugua

SEQ ID NO: 1908868 - RNA, 21 nt, Human
gcugugcacaaaguggcauaa

SEQ ID NO: 1908869 - RNA, 19 nt, Human
gcugugcacaaaguggcau

SEQ ID NO: 1908870 - RNA, 23 nt, Human
gcuguacaucuauuuuggauugu

SEQ ID NO: 1908871 - RNA, 20 nt, Human
gcuguagacauuugcuauga

SEQ ID NO: 1908872 - RNA, 12 nt, Human
gcuguacaucua

SEQ ID NO: 1908873 - RNA, 16 nt, Human
gcuguacaucuauuuu

SEQ ID NO: 1908874 - RNA, 20 nt, Human
gcuguacaucuauuuuggau

SEQ ID NO: 1908875 - RNA, 22 nt, Human
gcuguacaucuauuuuggauug

SEQ ID NO: 1908876 - RNA, 13 nt, Human
gcuggaucuguga

SEQ ID NO: 1908877 - RNA, 20 nt, Human
gcuggagugcagugguguga

SEQ ID NO: 1908878 - RNA, 16 nt, Human
gcuggaguuucaugua

SEQ ID NO: 1908879 - RNA, 15 nt, Human
gcuucaguggcagcu

SEQ ID NO: 1908880 - RNA, 14 nt, Human
gcuucaguggcagc

SEQ ID NO: 1908881 - RNA, 16 nt, Human
gcuucaaauuguaagc

SEQ ID NO: 1908882 - RNA, 22 nt, Human
gcuucaacauucuuugcaagau

SEQ ID NO: 1908883 - RNA, 14 nt, Human
gcuucaaggauccu

SEQ ID NO: 1908884 - RNA, 14 nt, Human
gcuguuggcugggg

SEQ ID NO: 1908885 - RNA, 13 nt, Human
gcuguuggcuggg

SEQ ID NO: 1908886 - RNA, 22 nt, Human
gcuuacaagccagcuggagaaa

SEQ ID NO: 1908887 - RNA, 19 nt, Human
gcuuacaagccagcuggag

SEQ ID NO: 1908888 - RNA, 13 nt, Human
gcuuacaagccag

SEQ ID NO: 1908889 - RNA, 17 nt, Human
gcuguuuucccugaccu

SEQ ID NO: 1908890 - RNA, 15 nt, Human
gcuguuuuccucccu

SEQ ID NO: 1908891 - RNA, 16 nt, Human
gcuguuuuccucccuu

SEQ ID NO: 1908892 - RNA, 18 nt, Human
gcuguuuuccucccuucu

SEQ ID NO: 1908893 - RNA, 20 nt, Human
gcuguuuuccucccuucugc

SEQ ID NO: 1908894 - RNA, 21 nt, Human
gcuguuuuccucccuucugcu

SEQ ID NO: 1908895 - RNA, 22 nt, Human
gcuguuuuccucccuucugcua

SEQ ID NO: 1908896 - RNA, 22 nt, Human
gcuuccagugaggcucugcccu

SEQ ID NO: 1908897 - RNA, 23 nt, Human
gcuuccagugaggcucugcccuu

SEQ ID NO: 1908898 - RNA, 14 nt, Human
gcuuccaugauucu

SEQ ID NO: 1908899 - RNA, 15 nt, Human
gcuuccaugauucua

SEQ ID NO: 1908900 - RNA, 18 nt, Human
gcuuccaugauucuauuu

SEQ ID NO: 1908901 - RNA, 19 nt, Human
gcuuccaugauucuauuua

SEQ ID NO: 1908902 - RNA, 12 nt, Human
gcuuccauucca

SEQ ID NO: 1908903 - RNA, 16 nt, Human
gcuuccuguccuccca

SEQ ID NO: 1908904 - RNA, 21 nt, Human
gcuuccuguccucccagcucc

SEQ ID NO: 1908905 - RNA, 21 nt, Human
gcuucuuaaucuuuucacaaa

SEQ ID NO: 1908906 - RNA, 19 nt, Human
gcuucuuaaucuuuucaca

SEQ ID NO: 1908907 - RNA, 12 nt, Human
gcuucuucagag

SEQ ID NO: 1908908 - RNA, 23 nt, Human
gcuucuuaaucuuuucacaaaua

SEQ ID NO: 1908909 - RNA, 22 nt, Human
gcuucuuaaucuuuucacaaau

SEQ ID NO: 1908910 - RNA, 15 nt, Human
gcuucuucagagacu

SEQ ID NO: 1908911 - RNA, 20 nt, Human
gcuugaccgugaggccagag

SEQ ID NO: 1908912 - RNA, 15 nt, Human
gcuugacaacaucug

SEQ ID NO: 1908913 - RNA, 13 nt, Human
gcuugaacccagg

SEQ ID NO: 1908914 - RNA, 17 nt, Human
gcuuguaaauagcucag

SEQ ID NO: 1908915 - RNA, 16 nt, Human
gcuugaccgugaggcc

SEQ ID NO: 1908916 - RNA, 22 nt, Human
gcuugaccuuuaagagaaauga

SEQ ID NO: 1908917 - RNA, 23 nt, Human
gcuugaccgugaggccagagaca

SEQ ID NO: 1908918 - RNA, 18 nt, Human
gcuugaccuuuaagagaa

SEQ ID NO: 1908919 - RNA, 19 nt, Human
gcuuguaaauagcucaggu

SEQ ID NO: 1908920 - RNA, 18 nt, Human
gcuuguaaauagcucagg

SEQ ID NO: 1908921 - RNA, 19 nt, Human
gcuuuccucaucaggccau

SEQ ID NO: 1908922 - RNA, 13 nt, Human
gcuuucugcucag

SEQ ID NO: 1908923 - RNA, 19 nt, Human
gcuuucugaagcuuuacca

SEQ ID NO: 1908924 - RNA, 18 nt, Human
gcuuucugcucagcuucu

SEQ ID NO: 1908925 - RNA, 19 nt, Human
gcuuucugcucagcuucuc

SEQ ID NO: 1908926 - RNA, 21 nt, Human
gcuuucugcucagcuucuccu

SEQ ID NO: 1908927 - RNA, 22 nt, Human
gcuuugagguggaagagggcug

SEQ ID NO: 1908928 - RNA, 19 nt, Human
gcuuugagguggaagaggg

SEQ ID NO: 1908929 - RNA, 12 nt, Human
gcugcugacagu

SEQ ID NO: 1908930 - RNA, 18 nt, Human
gcugcuccuagagggagg

SEQ ID NO: 1908931 - RNA, 16 nt, Human
gcugcuccuagaggga

SEQ ID NO: 1908932 - RNA, 17 nt, Human
gcugccauccagguuca

SEQ ID NO: 1908933 - RNA, 13 nt, Human
gcugccccuggca

SEQ ID NO: 1908934 - RNA, 15 nt, Human
gcugccccuggcagc

SEQ ID NO: 1908935 - RNA, 16 nt, Human
gcugccccuggcagcc

SEQ ID NO: 1908936 - RNA, 17 nt, Human
gcugccccuggcagccc

SEQ ID NO: 1908937 - RNA, 15 nt, Human
gcugcuccuagaggg

SEQ ID NO: 1908938 - RNA, 13 nt, Human
gcugcacccucag

SEQ ID NO: 1908939 - RNA, 15 nt, Human
gcugcacccucaggc

SEQ ID NO: 1908940 - RNA, 16 nt, Human
gcugcacccucaggca

SEQ ID NO: 1908941 - RNA, 20 nt, Human
gcugcacugaugcugccccu

SEQ ID NO: 1908942 - RNA, 20 nt, Human
gcugcagagcagugggccug

SEQ ID NO: 1908943 - RNA, 21 nt, Human
gcugcagagcagugggccugg

SEQ ID NO: 1908944 - RNA, 13 nt, Human
gcugccauccagg

SEQ ID NO: 1908945 - RNA, 12 nt, Human
gcugccauccag

SEQ ID NO: 1908946 - RNA, 17 nt, Human
gcugcaggggcauggga

SEQ ID NO: 1908947 - RNA, 21 nt, Human
gcugcagccugcgccaccgcc

SEQ ID NO: 1908948 - RNA, 16 nt, Human
gcugcagccugcgcca

SEQ ID NO: 1908949 - RNA, 17 nt, Human
gcugcaggacuugagaa

SEQ ID NO: 1908950 - RNA, 15 nt, Human
gcugaggugggagga

SEQ ID NO: 1908951 - RNA, 13 nt, Human
gcugaggcuggca

SEQ ID NO: 1908952 - RNA, 17 nt, Human
gcucucaggccagcugc

SEQ ID NO: 1908953 - RNA, 18 nt, Human
gcucucaggccagcugcu

SEQ ID NO: 1908954 - RNA, 19 nt, Human
gcucucaggccagcugcuu

SEQ ID NO: 1908955 - RNA, 20 nt, Human
gcucucaggccagcugcuug

SEQ ID NO: 1908956 - RNA, 19 nt, Human
gcuccucuccccagcaagu

SEQ ID NO: 1908957 - RNA, 16 nt, Human
gcuccucuccccagca

SEQ ID NO: 1908958 - RNA, 16 nt, Human
gcuccucuccccagcc

SEQ ID NO: 1908959 - RNA, 18 nt, Human
gcuccucuccccagccca

SEQ ID NO: 1908960 - RNA, 19 nt, Human
gcuccucuccccagcccag

SEQ ID NO: 1908961 - RNA, 20 nt, Human
gcuccucuccccagcccaga

SEQ ID NO: 1908962 - RNA, 21 nt, Human
gcuccucuccccagcccagag

SEQ ID NO: 1908963 - RNA, 22 nt, Human
gcuccucuccccagcccagaga

SEQ ID NO: 1908964 - RNA, 23 nt, Human
gcuccucuccccagcccagagac

SEQ ID NO: 1908965 - RNA, 19 nt, Human
gcucuacugaggugcuaug

SEQ ID NO: 1908966 - RNA, 17 nt, Human
gcuccucuccagucuga

SEQ ID NO: 1908967 - RNA, 18 nt, Human
gcucucaaguuaucaggg

SEQ ID NO: 1908968 - RNA, 15 nt, Human
gcucuauguuuacaa

SEQ ID NO: 1908969 - RNA, 16 nt, Human
gcucuauguuuacaaa

SEQ ID NO: 1908970 - RNA, 12 nt, Human
gcucuagugccu

SEQ ID NO: 1908971 - RNA, 15 nt, Human
gcucuagugccuucu

SEQ ID NO: 1908972 - RNA, 9 nt, Human
gcuccagac

SEQ ID NO: 1908973 - RNA, 20 nt, Human
gcuccacuuggucugugaga

SEQ ID NO: 1908974 - RNA, 23 nt, Human
gcuccagacacauguccaagaag

SEQ ID NO: 1908975 - RNA, 18 nt, Human
gcuccagacacaugucca

SEQ ID NO: 1908976 - RNA, 21 nt, Human
gcuccagacacauguccaaga

SEQ ID NO: 1908977 - RNA, 17 nt, Human
gcuccagaugcagggca

SEQ ID NO: 1908978 - RNA, 18 nt, Human
gcuccagaugcagggcag

SEQ ID NO: 1908979 - RNA, 19 nt, Human
gcuccagaugcagggcagu

SEQ ID NO: 1908980 - RNA, 21 nt, Human
gcuccagaugcagggcaguca

SEQ ID NO: 1908981 - RNA, 22 nt, Human
gcuccagaugcagggcagucau

SEQ ID NO: 1908982 - RNA, 23 nt, Human
gcuccagaccugauccuggaggc

SEQ ID NO: 1908983 - RNA, 21 nt, Human
gcuccagaccugauccuggag

SEQ ID NO: 1908984 - RNA, 22 nt, Human
gcuccagaccugauccuggagg

SEQ ID NO: 1908985 - RNA, 12 nt, Human
gcuccagaccug

SEQ ID NO: 1908986 - RNA, 13 nt, Human
gcuccagaccuga

SEQ ID NO: 1908987 - RNA, 20 nt, Human
gcuccagaccugauccugga

SEQ ID NO: 1908988 - RNA, 14 nt, Human
gcucccaggugcag

SEQ ID NO: 1908989 - RNA, 19 nt, Human
gcucccaggugcagccaga

SEQ ID NO: 1908990 - RNA, 20 nt, Human
gcucccaggugcagccagag

SEQ ID NO: 1908991 - RNA, 22 nt, Human
gcucccaggugcagccagaggc

SEQ ID NO: 1908992 - RNA, 17 nt, Human
gcuccagcucaccagcc

SEQ ID NO: 1908993 - RNA, 23 nt, Human
gcucccaggcauuccccaggagg

SEQ ID NO: 1908994 - RNA, 14 nt, Human
gcuccagcucacca

SEQ ID NO: 1908995 - RNA, 13 nt, Human
gcuccagcucacc

SEQ ID NO: 1908996 - RNA, 15 nt, Human
gcuccucuccccagc

SEQ ID NO: 1908997 - RNA, 12 nt, Human
gcuccucucagu

SEQ ID NO: 1908998 - RNA, 20 nt, Human
gcuccuccucccugcaucug

SEQ ID NO: 1908999 - RNA, 16 nt, Human
gcuccuccucccugca

SEQ ID NO: 1909000 - RNA, 18 nt, Human
gcuccuccucccugcauc

SEQ ID NO: 1909001 - RNA, 14 nt, Human
gcuccuccucccug

SEQ ID NO: 1909002 - RNA, 15 nt, Human
gcuccuccucccugc

SEQ ID NO: 1909003 - RNA, 22 nt, Human
gcucucuuuuucuccaggguca

SEQ ID NO: 1909004 - RNA, 23 nt, Human
gcucucuuuuucuccagggucag

SEQ ID NO: 1909005 - RNA, 20 nt, Human
gcucugaucauccacugugc

SEQ ID NO: 1909006 - RNA, 22 nt, Human
gcucugaucauccacugugcca

SEQ ID NO: 1909007 - RNA, 21 nt, Human
gcucugaucauccacugugcc

SEQ ID NO: 1909008 - RNA, 15 nt, Human
gcucugcccauccug

SEQ ID NO: 1909009 - RNA, 15 nt, Human
gcucuggagcccacu

SEQ ID NO: 1909010 - RNA, 16 nt, Human
gcucuggagcccacug

SEQ ID NO: 1909011 - RNA, 21 nt, Human
gcucugcccauccugccccug

SEQ ID NO: 1909012 - RNA, 17 nt, Human
gcucugugcccacccuc

SEQ ID NO: 1909013 - RNA, 17 nt, Human
gcucuggagcccacugu

SEQ ID NO: 1909014 - RNA, 14 nt, Human
gcugaaaaaaaauu

SEQ ID NO: 1909015 - RNA, 16 nt, Human
gcugaaacagaauacu

SEQ ID NO: 1909016 - RNA, 13 nt, Human
gcugacagacaca

SEQ ID NO: 1909017 - RNA, 14 nt, Human
gcugaggccucuca

SEQ ID NO: 1909018 - RNA, 13 nt, Human
gcugagccucugc

SEQ ID NO: 1909019 - RNA, 19 nt, Human
gcugagccucugcucccca

SEQ ID NO: 1909020 - RNA, 20 nt, Human
gcugagccucugcuccccag

SEQ ID NO: 1909021 - RNA, 23 nt, Human
gcugaaggcucgagcaugccugg

SEQ ID NO: 1909022 - RNA, 17 nt, Human
gcugaauacagaggcaa

SEQ ID NO: 1909023 - RNA, 12 nt, Human
ggccugagcugg

SEQ ID NO: 1909024 - RNA, 15 nt, Human
ggccugagcugggau

SEQ ID NO: 1909025 - RNA, 13 nt, Human
ggccuccauccug

SEQ ID NO: 1909026 - RNA, 15 nt, Human
ggccuccagaacuca

SEQ ID NO: 1909027 - RNA, 20 nt, Human
ggccuccagaacucacuggg

SEQ ID NO: 1909028 - RNA, 23 nt, Human
ggccuccaaguccacaguggaac

SEQ ID NO: 1909029 - RNA, 22 nt, Human
ggccgcugccacccaccucccu

SEQ ID NO: 1909030 - RNA, 23 nt, Human
ggccgcugccacccaccucccug

SEQ ID NO: 1909031 - RNA, 15 nt, Human
ggccggccagccccu

SEQ ID NO: 1909032 - RNA, 12 nt, Human
ggccuucucuga

SEQ ID NO: 1909033 - RNA, 23 nt, Human
ggccuucggccuccauccugagg

SEQ ID NO: 1909034 - RNA, 20 nt, Human
ggccuguggaucaaauccag

SEQ ID NO: 1909035 - RNA, 21 nt, Human
ggccugugucuaguuguuuga

SEQ ID NO: 1909036 - RNA, 21 nt, Human
ggccuggccagaugcaccagc

SEQ ID NO: 1909037 - RNA, 15 nt, Human
ggccugaucagacca

SEQ ID NO: 1909038 - RNA, 18 nt, Human
ggccugaucagaccacgg

SEQ ID NO: 1909039 - RNA, 20 nt, Human
ggccugaucagaccacggcu

SEQ ID NO: 1909040 - RNA, 14 nt, Human
ggccuuuggcuuca

SEQ ID NO: 1909041 - RNA, 21 nt, Human
ggcggugggcacccacccugg

SEQ ID NO: 1909042 - RNA, 22 nt, Human
ggcggugggcacccacccuggg

SEQ ID NO: 1909043 - RNA, 13 nt, Human
ggccuuuggcuuc

SEQ ID NO: 1909044 - RNA, 19 nt, Human
ggccuugggcccucugguu

SEQ ID NO: 1909045 - RNA, 16 nt, Human
ggccuucucugaagga

SEQ ID NO: 1909046 - RNA, 15 nt, Human
ggccuucucugaagg

SEQ ID NO: 1909047 - RNA, 16 nt, Human
ggccuugaguccccca

SEQ ID NO: 1909048 - RNA, 23 nt, Human
ggcucagcggggacagcuccuuc

SEQ ID NO: 1909049 - RNA, 22 nt, Human
ggcucagcggggacagcuccuu

SEQ ID NO: 1909050 - RNA, 21 nt, Human
ggcucagcggggacagcuccu

SEQ ID NO: 1909051 - RNA, 23 nt, Human
ggcucagcaaaagaugcuucuca

SEQ ID NO: 1909052 - RNA, 19 nt, Human
ggcucagcaaaagaugcuu

SEQ ID NO: 1909053 - RNA, 15 nt, Human
ggcucagccagcacu

SEQ ID NO: 1909054 - RNA, 19 nt, Human
ggcgugcaguggugcgauc

SEQ ID NO: 1909055 - RNA, 16 nt, Human
ggcgucuguucccccu

SEQ ID NO: 1909056 - RNA, 14 nt, Human
ggcgugcaguggug

SEQ ID NO: 1909057 - RNA, 16 nt, Human
ggcucacugcagccuc

SEQ ID NO: 1909058 - RNA, 17 nt, Human
ggcucacugcagccuca

SEQ ID NO: 1909059 - RNA, 17 nt, Human
ggcagugggagcugccu

SEQ ID NO: 1909060 - RNA, 24 nt, Human
ggcacugcuuccagugaggcucug

SEQ ID NO: 1909061 - RNA, 15 nt, Human
ggcaccagcagccug

SEQ ID NO: 1909062 - RNA, 17 nt, Human
ggcaccagacacccagg

SEQ ID NO: 1909063 - RNA, 18 nt, Human
ggcaccagacacccagga

SEQ ID NO: 1909064 - RNA, 19 nt, Human
ggcaccagacacccaggac

SEQ ID NO: 1909065 - RNA, 20 nt, Human
ggcaccagacacccaggacu

SEQ ID NO: 1909066 - RNA, 16 nt, Human
ggcaccagcagccugg

SEQ ID NO: 1909067 - RNA, 21 nt, Human
ggcauagcuccccgcuucugc

SEQ ID NO: 1909068 - RNA, 19 nt, Human
ggcagugggagcugccugu

SEQ ID NO: 1909069 - RNA, 18 nt, Human
ggcagugggagcugccug

SEQ ID NO: 1909070 - RNA, 18 nt, Human
ggcauccaguaucuugaa

SEQ ID NO: 1909071 - RNA, 22 nt, Human
ggcauauauuggguuccauucu

SEQ ID NO: 1909072 - RNA, 18 nt, Human
ggcauuuuacuguacaga

SEQ ID NO: 1909073 - RNA, 20 nt, Human
ggcauccuuccucacaccag

SEQ ID NO: 1909074 - RNA, 15 nt, Human
ggccaugauggcaac

SEQ ID NO: 1909075 - RNA, 18 nt, Human
ggccaugauggcaacaga

SEQ ID NO: 1909076 - RNA, 22 nt, Human
ggccaugauggcaacagaucug

SEQ ID NO: 1909077 - RNA, 14 nt, Human
ggccaugccucagc

SEQ ID NO: 1909078 - RNA, 21 nt, Human
ggccaucugguuaggauggca

SEQ ID NO: 1909079 - RNA, 22 nt, Human
ggccaucugggcuccuccaggg

SEQ ID NO: 1909080 - RNA, 22 nt, Human
ggccaucugguuaggauggcag

SEQ ID NO: 1909081 - RNA, 20 nt, Human
ggccauccuucccugucugc

SEQ ID NO: 1909082 - RNA, 13 nt, Human
ggccagugcucca

SEQ ID NO: 1909083 - RNA, 15 nt, Human
ggccagugcuccagc

SEQ ID NO: 1909084 - RNA, 16 nt, Human
ggccagugugacaagg

SEQ ID NO: 1909085 - RNA, 19 nt, Human
ggccaguggcuggaucugu

SEQ ID NO: 1909086 - RNA, 14 nt, Human
ggccaucccacaag

SEQ ID NO: 1909087 - RNA, 23 nt, Human
ggccagagagccuggugcugcug

SEQ ID NO: 1909088 - RNA, 21 nt, Human
ggccaaacucaccugccccuc

SEQ ID NO: 1909089 - RNA, 11 nt, Human
ggccagagcca

SEQ ID NO: 1909090 - RNA, 12 nt, Human
ggccagagccag

SEQ ID NO: 1909091 - RNA, 13 nt, Human
ggccagagccagg

SEQ ID NO: 1909092 - RNA, 17 nt, Human
ggccaaacucaccugcc

SEQ ID NO: 1909093 - RNA, 14 nt, Human
ggccaaacaagugu

SEQ ID NO: 1909094 - RNA, 22 nt, Human
ggccagagcuacccgcagaguu

SEQ ID NO: 1909095 - RNA, 14 nt, Human
ggccagagccaggg

SEQ ID NO: 1909096 - RNA, 14 nt, Human
ggccaggcuggucu

SEQ ID NO: 1909097 - RNA, 14 nt, Human
ggccagccaugucu

SEQ ID NO: 1909098 - RNA, 15 nt, Human
ggccagccaugucug

SEQ ID NO: 1909099 - RNA, 18 nt, Human
ggccaggcuggucucaaa

SEQ ID NO: 1909100 - RNA, 16 nt, Human
ggccaggcuggucuca

SEQ ID NO: 1909101 - RNA, 15 nt, Human
ggccagggagaagcu

SEQ ID NO: 1909102 - RNA, 16 nt, Human
ggccagggagaagcuc

SEQ ID NO: 1909103 - RNA, 17 nt, Human
ggccagggagaagcucc

SEQ ID NO: 1909104 - RNA, 18 nt, Human
ggccagggagaagcuccu

SEQ ID NO: 1909105 - RNA, 15 nt, Human
ggcccaggugagucc

SEQ ID NO: 1909106 - RNA, 19 nt, Human
ggcccagggcccagagccc

SEQ ID NO: 1909107 - RNA, 21 nt, Human
ggcccagggcccagagcccag

SEQ ID NO: 1909108 - RNA, 22 nt, Human
ggcccagggcccagagcccagc

SEQ ID NO: 1909109 - RNA, 16 nt, Human
ggcccagggcccagag

SEQ ID NO: 1909110 - RNA, 15 nt, Human
ggcccagggcccaga

SEQ ID NO: 1909111 - RNA, 17 nt, Human
ggcccagggcccagagc

SEQ ID NO: 1909112 - RNA, 18 nt, Human
ggcccagggcccagagcc

SEQ ID NO: 1909113 - RNA, 22 nt, Human
ggcccaggaccaucauccuacu

SEQ ID NO: 1909114 - RNA, 22 nt, Human
ggccgcaccuaaagcagccagc

SEQ ID NO: 1909115 - RNA, 21 nt, Human
ggccgcaccuaaagcagccag

SEQ ID NO: 1909116 - RNA, 12 nt, Human
ggccgcugccac

SEQ ID NO: 1909117 - RNA, 13 nt, Human
ggccgcugccacc

SEQ ID NO: 1909118 - RNA, 15 nt, Human
ggccgcugccaccca

SEQ ID NO: 1909119 - RNA, 19 nt, Human
ggccgcugccacccaccuc

SEQ ID NO: 1909120 - RNA, 21 nt, Human
ggccgcugccacccaccuccc

SEQ ID NO: 1909121 - RNA, 18 nt, Human
ggcccuucucuccagccc

SEQ ID NO: 1909122 - RNA, 13 nt, Human
ggccgaguccaag

SEQ ID NO: 1909123 - RNA, 16 nt, Human
ggccgaguccaagcug

SEQ ID NO: 1909124 - RNA, 16 nt, Human
ggcccuucucuccagc

SEQ ID NO: 1909125 - RNA, 17 nt, Human
ggcccuucucuccagcc

SEQ ID NO: 1909126 - RNA, 17 nt, Human
ggcccugugccuuggug

SEQ ID NO: 1909127 - RNA, 15 nt, Human
ggagcauugggaccu

SEQ ID NO: 1909128 - RNA, 20 nt, Human
ggagguggagguugcaguga

SEQ ID NO: 1909129 - RNA, 23 nt, Human
ggaggugaacaagcaaacccaga

SEQ ID NO: 1909130 - RNA, 19 nt, Human
ggagguggagguugcagug

SEQ ID NO: 1909131 - RNA, 14 nt, Human
ggaggugaccccag

SEQ ID NO: 1909132 - RNA, 14 nt, Human
ggaggucgaggcag

SEQ ID NO: 1909133 - RNA, 20 nt, Human
ggaggucaaggcugcaguga

SEQ ID NO: 1909134 - RNA, 16 nt, Human
ggaggggggagguggg

SEQ ID NO: 1909135 - RNA, 17 nt, Human
ggaggccuuccagggac

SEQ ID NO: 1909136 - RNA, 21 nt, Human
ggagguagcuuugagguggaa

SEQ ID NO: 1909137 - RNA, 21 nt, Human
ggagcugccuguucagcucca

SEQ ID NO: 1909138 - RNA, 20 nt, Human
ggagcuggccccgccgccug

SEQ ID NO: 1909139 - RNA, 12 nt, Human
ggagcugccugu

SEQ ID NO: 1909140 - RNA, 14 nt, Human
ggagcugcaggggc

SEQ ID NO: 1909141 - RNA, 20 nt, Human
ggagcugcaggggcauggga

SEQ ID NO: 1909142 - RNA, 12 nt, Human
ggagcugcaggg

SEQ ID NO: 1909143 - RNA, 22 nt, Human
ggagccccgaggccuucucuga

SEQ ID NO: 1909144 - RNA, 16 nt, Human
ggagccccgaggccuu

SEQ ID NO: 1909145 - RNA, 20 nt, Human
ggagccaacagaagcuucca

SEQ ID NO: 1909146 - RNA, 21 nt, Human
ggagccagcucccucuauuua

SEQ ID NO: 1909147 - RNA, 16 nt, Human
ggagcccagcccuccc

SEQ ID NO: 1909148 - RNA, 19 nt, Human
ggagcccagcccuccccau

SEQ ID NO: 1909149 - RNA, 14 nt, Human
ggagcccacugucc

SEQ ID NO: 1909150 - RNA, 17 nt, Human
ggagcccacuguccugg

SEQ ID NO: 1909151 - RNA, 18 nt, Human
ggagcccacuguccuggg

SEQ ID NO: 1909152 - RNA, 20 nt, Human
ggagcccacuguccugggcc

SEQ ID NO: 1909153 - RNA, 22 nt, Human
ggagcccacuguccugggccug

SEQ ID NO: 1909154 - RNA, 23 nt, Human
ggagcccacuguccugggccugc

SEQ ID NO: 1909155 - RNA, 20 nt, Human
ggaggaaggaaacccagcuc

SEQ ID NO: 1909156 - RNA, 23 nt, Human
ggaggaaggaaacccagcucugg

SEQ ID NO: 1909157 - RNA, 21 nt, Human
ggaggaaggcuuacacccaca

SEQ ID NO: 1909158 - RNA, 19 nt, Human
ggaggaaggaaacccagcu

SEQ ID NO: 1909159 - RNA, 17 nt, Human
ggagcuggggaucccuc

SEQ ID NO: 1909160 - RNA, 12 nt, Human
ggaggccagccu

SEQ ID NO: 1909161 - RNA, 11 nt, Human
ggaggccagcc

SEQ ID NO: 1909162 - RNA, 15 nt, Human
ggauguucugggaca

SEQ ID NO: 1909163 - RNA, 13 nt, Human
ggaugucugggcc

SEQ ID NO: 1909164 - RNA, 16 nt, Human
ggauguucugggacac

SEQ ID NO: 1909165 - RNA, 22 nt, Human
ggauguugaaaaaguucugcag

SEQ ID NO: 1909166 - RNA, 13 nt, Human
ggcaccagacacc

SEQ ID NO: 1909167 - RNA, 16 nt, Human
ggcaccagacacccag

SEQ ID NO: 1909168 - RNA, 17 nt, Human
ggcacaggccauggaug

SEQ ID NO: 1909169 - RNA, 23 nt, Human
ggcacaggccauggauggaaaac

SEQ ID NO: 1909170 - RNA, 17 nt, Human
ggcacaaagggcccaga

SEQ ID NO: 1909171 - RNA, 24 nt, Human
ggcacagaaaauggaagacagcuc

SEQ ID NO: 1909172 - RNA, 15 nt, Human
ggagugcagugagcc

SEQ ID NO: 1909173 - RNA, 22 nt, Human
ggagugcuuaucccuucuuuuu

SEQ ID NO: 1909174 - RNA, 14 nt, Human
ggaguggccacaga

SEQ ID NO: 1909175 - RNA, 15 nt, Human
ggaguucugguuccu

SEQ ID NO: 1909176 - RNA, 14 nt, Human
ggaguucugcucau

SEQ ID NO: 1909177 - RNA, 14 nt, Human
ggaguugaucugga

SEQ ID NO: 1909178 - RNA, 17 nt, Human
ggaguugaucuggaacc

SEQ ID NO: 1909179 - RNA, 21 nt, Human
ggaguugaucuggaacccaga

SEQ ID NO: 1909180 - RNA, 22 nt, Human
ggaguugaucuggaacccagac

SEQ ID NO: 1909181 - RNA, 14 nt, Human
ggauaauuagcauc

SEQ ID NO: 1909182 - RNA, 21 nt, Human
ggauggcaggacgugggcugg

SEQ ID NO: 1909183 - RNA, 22 nt, Human
ggauggcaggacgugggcuggg

SEQ ID NO: 1909184 - RNA, 18 nt, Human
ggauggauuuccagccaa

SEQ ID NO: 1909185 - RNA, 16 nt, Human
ggauggggcugcaccg

SEQ ID NO: 1909186 - RNA, 15 nt, Human
ggauccuccaggugc

SEQ ID NO: 1909187 - RNA, 14 nt, Human
ggauccuccaggug

SEQ ID NO: 1909188 - RNA, 13 nt, Human
ggauccugagcca

SEQ ID NO: 1909189 - RNA, 14 nt, Human
ggauccugagccag

SEQ ID NO: 1909190 - RNA, 19 nt, Human
ggauaauuagcaucucagg

SEQ ID NO: 1909191 - RNA, 18 nt, Human
ggaucuggggcucuggga

SEQ ID NO: 1909192 - RNA, 17 nt, Human
ggaucugguccuaccca

SEQ ID NO: 1909193 - RNA, 14 nt, Human
gggaagagggggcg

SEQ ID NO: 1909194 - RNA, 16 nt, Human
gggaaggauacaaaag

SEQ ID NO: 1909195 - RNA, 13 nt, Human
gggaaggauacaa

SEQ ID NO: 1909196 - RNA, 13 nt, Human
gggacagaggggg

SEQ ID NO: 1909197 - RNA, 22 nt, Human
gggacagaggggguggccuccc

SEQ ID NO: 1909198 - RNA, 23 nt, Human
gggacagaggggguggccuccca

SEQ ID NO: 1909199 - RNA, 16 nt, Human
gggacagcuccuucug

SEQ ID NO: 1909200 - RNA, 21 nt, Human
gggacagcuccuucuguccua

SEQ ID NO: 1909201 - RNA, 14 nt, Human
aaaaaucuauauuu

SEQ ID NO: 1909202 - RNA, 14 nt, Human
aaaaaucucaaauu

SEQ ID NO: 1909203 - RNA, 22 nt, Human
aaaacagguagaauuaucuaau

SEQ ID NO: 1909204 - RNA, 21 nt, Human
aaaacaggucuucaucgaauc

SEQ ID NO: 1909205 - RNA, 15 nt, Human
aaaacaugcuacaca

SEQ ID NO: 1909206 - RNA, 20 nt, Human
aaaacaguccuucaaacuuc

SEQ ID NO: 1909207 - RNA, 21 nt, Human
aaaaccaauguucucucuucu

SEQ ID NO: 1909208 - RNA, 15 nt, Human
aaaacccagauaaag

SEQ ID NO: 1909209 - RNA, 21 nt, Human
aaaacccagcaacagaaaaau

SEQ ID NO: 1909210 - RNA, 19 nt, Human
aaaaccaauguuuugcagu

SEQ ID NO: 1909211 - RNA, 22 nt, Human
aaaacugcugacuguuuucucu

SEQ ID NO: 1909212 - RNA, 23 nt, Human
aaaacugcugacuguuuucucuu

SEQ ID NO: 1909213 - RNA, 13 nt, Human
aaaagaugcuucu

SEQ ID NO: 1909214 - RNA, 23 nt, Human
gggcagccuggcucccaggacac

SEQ ID NO: 1909215 - RNA, 22 nt, Human
gggcagccuggcucccaggaca

SEQ ID NO: 1909216 - RNA, 13 nt, Human
gggcagcgccagg

SEQ ID NO: 1909217 - RNA, 15 nt, Human
gggcagcgccaggcu

SEQ ID NO: 1909218 - RNA, 16 nt, Human
gggcagcgccaggcug

SEQ ID NO: 1909219 - RNA, 20 nt, Human
gggcagccuggcucccagga

SEQ ID NO: 1909220 - RNA, 18 nt, Human
gggcagccuggcucccag

SEQ ID NO: 1909221 - RNA, 15 nt, Human
gggcagccuggcucc

SEQ ID NO: 1909222 - RNA, 21 nt, Human
gggcagcgggagccucccugc

SEQ ID NO: 1909223 - RNA, 12 nt, Human
gggcagggcagc

SEQ ID NO: 1909224 - RNA, 19 nt, Human
aaaagggacugagaaauuu

SEQ ID NO: 1909225 - RNA, 12 nt, Human
gggcagggagcg

SEQ ID NO: 1909226 - RNA, 19 nt, Human
aaaagguaugcaaucaaau

SEQ ID NO: 1909227 - RNA, 14 nt, Human
aaaagguaaaacuu

SEQ ID NO: 1909228 - RNA, 23 nt, Human
aaaagguaaaacuuuuuauauuu

SEQ ID NO: 1909229 - RNA, 15 nt, Human
gggcaggccagagcu

SEQ ID NO: 1909230 - RNA, 16 nt, Human
gggcagagcagagacc

SEQ ID NO: 1909231 - RNA, 18 nt, Human
gggcaacccccagccugc

SEQ ID NO: 1909232 - RNA, 16 nt, Human
gggcaacccccagccu

SEQ ID NO: 1909233 - RNA, 17 nt, Human
gggcagagcagagacca

SEQ ID NO: 1909234 - RNA, 22 nt, Human
gggcagagcagagaccaucccu

SEQ ID NO: 1909235 - RNA, 14 nt, Human
gggcagaggaaagc

SEQ ID NO: 1909236 - RNA, 17 nt, Human
gggauuguaaaauggug

SEQ ID NO: 1909237 - RNA, 16 nt, Human
gggauuguaaaauggu

SEQ ID NO: 1909238 - RNA, 15 nt, Human
gggauugggccccug

SEQ ID NO: 1909239 - RNA, 15 nt, Human
gggauuacaggugug

SEQ ID NO: 1909240 - RNA, 17 nt, Human
gggaggccagugagcca

SEQ ID NO: 1909241 - RNA, 21 nt, Human
gggagcaggcggugggcaccc

SEQ ID NO: 1909242 - RNA, 15 nt, Human
gggagcaggcggugg

SEQ ID NO: 1909243 - RNA, 13 nt, Human
gggaggcucaggu

SEQ ID NO: 1909244 - RNA, 19 nt, Human
gggagauggaguucuugug

SEQ ID NO: 1909245 - RNA, 17 nt, Human
gggagauucaagggacc

SEQ ID NO: 1909246 - RNA, 15 nt, Human
aaaagaugcaaugua

SEQ ID NO: 1909247 - RNA, 21 nt, Human
aaaagcacacucauccccuca

SEQ ID NO: 1909248 - RNA, 17 nt, Human
aaaagcagcucuccccu

SEQ ID NO: 1909249 - RNA, 16 nt, Human
aaaagcagcucucccc

SEQ ID NO: 1909250 - RNA, 12 nt, Human
gggagaagcucc

SEQ ID NO: 1909251 - RNA, 22 nt, Human
gggagaaugucaguauguggaa

SEQ ID NO: 1909252 - RNA, 19 nt, Human
gggagaaugucaguaugug

SEQ ID NO: 1909253 - RNA, 22 nt, Human
gggaggcucuggagcccacugu

SEQ ID NO: 1909254 - RNA, 14 nt, Human
gggagggcuccaga

SEQ ID NO: 1909255 - RNA, 15 nt, Human
gggagggcuccagac

SEQ ID NO: 1909256 - RNA, 17 nt, Human
gggagggcuccagacac

SEQ ID NO: 1909257 - RNA, 18 nt, Human
gggagggcuccagacaca

SEQ ID NO: 1909258 - RNA, 17 nt, Human
gggaggucgaggcagga

SEQ ID NO: 1909259 - RNA, 18 nt, Human
gggaggucgaggcaggag

SEQ ID NO: 1909260 - RNA, 19 nt, Human
gggaggucgaggcaggagg

SEQ ID NO: 1909261 - RNA, 16 nt, Human
gggaugguguucaaaa

SEQ ID NO: 1909262 - RNA, 14 nt, Human
gggaugucucucau

SEQ ID NO: 1909263 - RNA, 20 nt, Human
gggauuaauaugaaaacuua

SEQ ID NO: 1909264 - RNA, 15 nt, Human
gggaggcucaggucc

SEQ ID NO: 1909265 - RNA, 16 nt, Human
gggaugcccuggaggu

SEQ ID NO: 1909266 - RNA, 14 nt, Human
gggccgccagggag

SEQ ID NO: 1909267 - RNA, 17 nt, Human
gggccuaggccucagcc

SEQ ID NO: 1909268 - RNA, 18 nt, Human
gggccagugcuccagcca

SEQ ID NO: 1909269 - RNA, 22 nt, Human
gggccaugauggcaacagaucu

SEQ ID NO: 1909270 - RNA, 23 nt, Human
gggccaugauggcaacagaucug

SEQ ID NO: 1909271 - RNA, 14 nt, Human
gggccaguuggucc

SEQ ID NO: 1909272 - RNA, 18 nt, Human
gggccaguuggucccccu

SEQ ID NO: 1909273 - RNA, 22 nt, Human
gggccaguuggucccccuucca

SEQ ID NO: 1909274 - RNA, 23 nt, Human
gggccaguuggucccccuuccau

SEQ ID NO: 1909275 - RNA, 20 nt, Human
gggccucuuaugggcugggu

SEQ ID NO: 1909276 - RNA, 19 nt, Human
gggccucuuaugggcuggg

SEQ ID NO: 1909277 - RNA, 13 nt, Human
gggccuccugugu

SEQ ID NO: 1909278 - RNA, 15 nt, Human
gggccuccugugugu

SEQ ID NO: 1909279 - RNA, 14 nt, Human
gggccuccagaacu

SEQ ID NO: 1909280 - RNA, 15 nt, Human
gggcgggaggauguu

SEQ ID NO: 1909281 - RNA, 14 nt, Human
gggccagugcucca

SEQ ID NO: 1909282 - RNA, 18 nt, Human
gggccagucccugaggca

SEQ ID NO: 1909283 - RNA, 21 nt, Human
gggccagucccugaggcaggu

SEQ ID NO: 1909284 - RNA, 14 nt, Human
gggccaggcugggu

SEQ ID NO: 1909285 - RNA, 15 nt, Human
gggccaggcuggguc

SEQ ID NO: 1909286 - RNA, 21 nt, Human
gggccaggcugggucgcccug

SEQ ID NO: 1909287 - RNA, 13 nt, Human
gggccaggcuggg

SEQ ID NO: 1909288 - RNA, 11 nt, Human
gggccaggagc

SEQ ID NO: 1909289 - RNA, 19 nt, Human
gggccagauccagccuggg

SEQ ID NO: 1909290 - RNA, 14 nt, Human
aaaaugagccuggc

SEQ ID NO: 1909291 - RNA, 21 nt, Human
aaaaugagccuggcaagaaug

SEQ ID NO: 1909292 - RNA, 21 nt, Human
aaaaugaguuaccuacauuuu

SEQ ID NO: 1909293 - RNA, 16 nt, Human
aaaaucuguggugguc

SEQ ID NO: 1909294 - RNA, 20 nt, Human
aaacaagcacuaaacaaaga

SEQ ID NO: 1909295 - RNA, 16 nt, Human
aaacacauuuuucuua

SEQ ID NO: 1909296 - RNA, 20 nt, Human
aaacaagaccacguuucuaa

SEQ ID NO: 1909297 - RNA, 16 nt, Human
aaacaaaacaaaacaa

SEQ ID NO: 1909298 - RNA, 21 nt, Human
aaacaaaaauuagguauuuug

SEQ ID NO: 1909299 - RNA, 17 nt, Human
aaacaccggguuccagc

SEQ ID NO: 1909300 - RNA, 20 nt, Human
ggggacagcuccuucugucc

SEQ ID NO: 1909301 - RNA, 14 nt, Human
ggggacagcuccuu

SEQ ID NO: 1909302 - RNA, 12 nt, Human
ggggacagcucc

SEQ ID NO: 1909303 - RNA, 17 nt, Human
aaacauccaauauuuuc

SEQ ID NO: 1909304 - RNA, 19 nt, Human
aaacauccaauauuuucuu

SEQ ID NO: 1909305 - RNA, 15 nt, Human
aaacaucuauucucu

SEQ ID NO: 1909306 - RNA, 20 nt, Human
aaacaucuauucucuccaaa

SEQ ID NO: 1909307 - RNA, 13 nt, Human
ggggccagaucca

SEQ ID NO: 1909308 - RNA, 14 nt, Human
ggggccagauccag

SEQ ID NO: 1909309 - RNA, 17 nt, Human
ggggccagauccagccu

SEQ ID NO: 1909310 - RNA, 19 nt, Human
ggggccagauccagccugg

SEQ ID NO: 1909311 - RNA, 15 nt, Human
aaaauuucuauuaaa

SEQ ID NO: 1909312 - RNA, 13 nt, Human
aaaaugucuuuau

SEQ ID NO: 1909313 - RNA, 14 nt, Human
gggcugguucugua

SEQ ID NO: 1909314 - RNA, 22 nt, Human
gggcuggguucuacccaggugc

SEQ ID NO: 1909315 - RNA, 15 nt, Human
aaaaugugauaugua

SEQ ID NO: 1909316 - RNA, 18 nt, Human
aaaaugugccauuuugca

SEQ ID NO: 1909317 - RNA, 21 nt, Human
gggcugcaugcgggcuuccuc

SEQ ID NO: 1909318 - RNA, 18 nt, Human
gggcugcaugcgggcuuc

SEQ ID NO: 1909319 - RNA, 18 nt, Human
gggcucagagugggguag

SEQ ID NO: 1909320 - RNA, 10 nt, Human
gggcucagca

SEQ ID NO: 1909321 - RNA, 22 nt, Human
gggcugcaccggcuggccuggc

SEQ ID NO: 1909322 - RNA, 18 nt, Human
gggcucagcaaaagaugc

SEQ ID NO: 1909323 - RNA, 12 nt, Human
gggcugggcaga

SEQ ID NO: 1909324 - RNA, 20 nt, Human
gggcuggguucuacccaggu

SEQ ID NO: 1909325 - RNA, 22 nt, Human
aaaguuuccccaccagugaaug

SEQ ID NO: 1909326 - RNA, 16 nt, Human
aaaguuuguugaaaca

SEQ ID NO: 1909327 - RNA, 16 nt, Human
aaaguuugcuuagaaa

SEQ ID NO: 1909328 - RNA, 15 nt, Human
aaaguuugcuuagaa

SEQ ID NO: 1909329 - RNA, 23 nt, Human
aaaguuucucuuuucaaaacauu

SEQ ID NO: 1909330 - RNA, 21 nt, Human
aaaguuucucuuuucaaaaca

SEQ ID NO: 1909331 - RNA, 16 nt, Human
aaaguugaauuuuaca

SEQ ID NO: 1909332 - RNA, 12 nt, Human
aaaguggugaga

SEQ ID NO: 1909333 - RNA, 14 nt, Human
gguuugggaccccu

SEQ ID NO: 1909334 - RNA, 20 nt, Human
gguuuggacaaaauggaaua

SEQ ID NO: 1909335 - RNA, 14 nt, Human
gguuugcaaggaag

SEQ ID NO: 1909336 - RNA, 17 nt, Human
gguuugccgguggugca

SEQ ID NO: 1909337 - RNA, 21 nt, Human
gguuugccgguggugcaggua

SEQ ID NO: 1909338 - RNA, 18 nt, Human
gguuugaauauaaacacu

SEQ ID NO: 1909339 - RNA, 15 nt, Human
gguuugaauauaaac

SEQ ID NO: 1909340 - RNA, 19 nt, Human
aaaguuauugugauauccu

SEQ ID NO: 1909341 - RNA, 13 nt, Human
aaagugugcuuua

SEQ ID NO: 1909342 - RNA, 14 nt, Human
aaagugugcuuuau

SEQ ID NO: 1909343 - RNA, 19 nt, Human
aaagugugcuuuaugcuga

SEQ ID NO: 1909344 - RNA, 22 nt, Human
aaagugugcuuuaugcugaaac

SEQ ID NO: 1909345 - RNA, 23 nt, Human
aaagugugcuuuaugcugaaaca

SEQ ID NO: 1909346 - RNA, 12 nt, Human
aaauaaugugaa

SEQ ID NO: 1909347 - RNA, 13 nt, Human
aaauaaugucucu

SEQ ID NO: 1909348 - RNA, 12 nt, Human
aaauaaugucuc

SEQ ID NO: 1909349 - RNA, 13 nt, Human
aaauaaugugaaa

SEQ ID NO: 1909350 - RNA, 15 nt, Human
aaaguuuucccuuga

SEQ ID NO: 1909351 - RNA, 19 nt, Human
guaaaauaaauauugucuu

SEQ ID NO: 1909352 - RNA, 20 nt, Human
guaaaauaaauauugucuuu

SEQ ID NO: 1909353 - RNA, 17 nt, Human
guaaauuuaugugaugg

SEQ ID NO: 1909354 - RNA, 16 nt, Human
guaaauuuaugugaug

SEQ ID NO: 1909355 - RNA, 19 nt, Human
guaaauugaaucaguauaa

SEQ ID NO: 1909356 - RNA, 18 nt, Human
gguucucccccuuucucu

SEQ ID NO: 1909357 - RNA, 12 nt, Human
gguucucaucuu

SEQ ID NO: 1909358 - RNA, 19 nt, Human
gguuccucguucucccugg

SEQ ID NO: 1909359 - RNA, 16 nt, Human
gguuuagaaagcuugc

SEQ ID NO: 1909360 - RNA, 17 nt, Human
gguuuaggcugguggcc

SEQ ID NO: 1909361 - RNA, 20 nt, Human
gguuuaggcugguggcccag

SEQ ID NO: 1909362 - RNA, 22 nt, Human
gguuuaggcugguggcccagga

SEQ ID NO: 1909363 - RNA, 19 nt, Human
gguucugccugccagcugc

SEQ ID NO: 1909364 - RNA, 20 nt, Human
gguucugccugccagcugca

SEQ ID NO: 1909365 - RNA, 19 nt, Human
gguuucaccauguuggcca

SEQ ID NO: 1909366 - RNA, 19 nt, Human
gguuucaccauguugccca

SEQ ID NO: 1909367 - RNA, 13 nt, Human
gguuucagaaaug

SEQ ID NO: 1909368 - RNA, 12 nt, Human
gguuucagaaau

SEQ ID NO: 1909369 - RNA, 14 nt, Human
gguuucagaaaugu

SEQ ID NO: 1909370 - RNA, 13 nt, Human
gguuucugaaaau

SEQ ID NO: 1909371 - RNA, 21 nt, Human
gguucccuuugacgccauccc

SEQ ID NO: 1909372 - RNA, 22 nt, Human
gguucccuuugacgccauccca

SEQ ID NO: 1909373 - RNA, 14 nt, Human
gguuccagccugcc

SEQ ID NO: 1909374 - RNA, 21 nt, Human
gguucaggguuggccccugcc

SEQ ID NO: 1909375 - RNA, 18 nt, Human
gguucaggguuggccccu

SEQ ID NO: 1909376 - RNA, 22 nt, Human
gguucaggguuggccccugccc

SEQ ID NO: 1909377 - RNA, 13 nt, Human
ggugugcucugau

SEQ ID NO: 1909378 - RNA, 21 nt, Human
ggugugcggccuuuggcuuca

SEQ ID NO: 1909379 - RNA, 12 nt, Human
gguguggaagag

SEQ ID NO: 1909380 - RNA, 18 nt, Human
ggugugagucaccaagcc

SEQ ID NO: 1909381 - RNA, 20 nt, Human
ggugugcaaugucugaguga

SEQ ID NO: 1909382 - RNA, 15 nt, Human
ggugugcacaucucu

SEQ ID NO: 1909383 - RNA, 16 nt, Human
ggugugcacaucucug

SEQ ID NO: 1909384 - RNA, 18 nt, Human
ggugugcacaucucugcu

SEQ ID NO: 1909385 - RNA, 23 nt, Human
ggugugcacaucucugcuugagu

SEQ ID NO: 1909386 - RNA, 16 nt, Human
ggugugacugaauuuc

SEQ ID NO: 1909387 - RNA, 16 nt, Human
ggugugaccacugcag

SEQ ID NO: 1909388 - RNA, 23 nt, Human
ggugucuccaaccccccagcacu

SEQ ID NO: 1909389 - RNA, 19 nt, Human
ggugucuccaaccccccag

SEQ ID NO: 1909390 - RNA, 13 nt, Human
ggugucgggcaug

SEQ ID NO: 1909391 - RNA, 15 nt, Human
gguggggucaugccc

SEQ ID NO: 1909392 - RNA, 19 nt, Human
gguggggucaugcccuccu

SEQ ID NO: 1909393 - RNA, 16 nt, Human
ggugucgggcaugaca

SEQ ID NO: 1909394 - RNA, 17 nt, Human
gguggggggggugcugg

SEQ ID NO: 1909395 - RNA, 15 nt, Human
gguggggucacucug

SEQ ID NO: 1909396 - RNA, 23 nt, Human
gguggggucacucuggcagcuca

SEQ ID NO: 1909397 - RNA, 17 nt, Human
gguggggcagcuugagg

SEQ ID NO: 1909398 - RNA, 13 nt, Human
gguggggcagcuu

SEQ ID NO: 1909399 - RNA, 19 nt, Human
ggugggauccuccaggugc

SEQ ID NO: 1909400 - RNA, 17 nt, Human
ggugggcacccacccug

SEQ ID NO: 1909401 - RNA, 18 nt, Human
ggugggcacccacccugg

SEQ ID NO: 1909402 - RNA, 14 nt, Human
ggugggcaggaaaa

SEQ ID NO: 1909403 - RNA, 12 nt, Human
ggugggccaggc

SEQ ID NO: 1909404 - RNA, 14 nt, Human
ggugggccaggcug

SEQ ID NO: 1909405 - RNA, 16 nt, Human
aaagccuguuuaagag

SEQ ID NO: 1909406 - RNA, 18 nt, Human
aaagccuguuuaagagac

SEQ ID NO: 1909407 - RNA, 20 nt, Human
ggugggaggauugcuugagc

SEQ ID NO: 1909408 - RNA, 14 nt, Human
aaagcgaauuuuaa

SEQ ID NO: 1909409 - RNA, 14 nt, Human
ggugggauccucca

SEQ ID NO: 1909410 - RNA, 15 nt, Human
ggugggauccuccag

SEQ ID NO: 1909411 - RNA, 14 nt, Human
gguccacagggcac

SEQ ID NO: 1909412 - RNA, 22 nt, Human
gguaugaucacggcucacugca

SEQ ID NO: 1909413 - RNA, 14 nt, Human
gguaugcaaucaaa

SEQ ID NO: 1909414 - RNA, 16 nt, Human
gguaggaacugcuggg

SEQ ID NO: 1909415 - RNA, 21 nt, Human
gguaugaccuucuaggaagcu

SEQ ID NO: 1909416 - RNA, 17 nt, Human
gguagcuuugaggugga

SEQ ID NO: 1909417 - RNA, 15 nt, Human
gguccacagggcacc

SEQ ID NO: 1909418 - RNA, 17 nt, Human
gguccacccaggagccc

SEQ ID NO: 1909419 - RNA, 12 nt, Human
gguccagggagc

SEQ ID NO: 1909420 - RNA, 16 nt, Human
gguccagggagcaggc

SEQ ID NO: 1909421 - RNA, 16 nt, Human
gguccacccaggagcc

SEQ ID NO: 1909422 - RNA, 15 nt, Human
gguccacccaggagc

SEQ ID NO: 1909423 - RNA, 13 nt, Human
gguccacccagga

SEQ ID NO: 1909424 - RNA, 12 nt, Human
gguccacccagg

SEQ ID NO: 1909425 - RNA, 15 nt, Human
gguccauagagagca

SEQ ID NO: 1909426 - RNA, 22 nt, Human
aaacuuuaccuuuuuuauacau

SEQ ID NO: 1909427 - RNA, 17 nt, Human
aaacuuuaccuuuuuua

SEQ ID NO: 1909428 - RNA, 18 nt, Human
aaacuuuacuauggcccu

SEQ ID NO: 1909429 - RNA, 12 nt, Human
aaacuuuacuau

SEQ ID NO: 1909430 - RNA, 17 nt, Human
aaagacuaucuaaaugu

SEQ ID NO: 1909431 - RNA, 20 nt, Human
gguaacaggcagauacagga

SEQ ID NO: 1909432 - RNA, 14 nt, Human
gguaacaggcagau

SEQ ID NO: 1909433 - RNA, 18 nt, Human
gguaacuagggaagauaa

SEQ ID NO: 1909434 - RNA, 17 nt, Human
ggguuucuaaagcugcc

SEQ ID NO: 1909435 - RNA, 20 nt, Human
gguaaucuugcucugcuuga

SEQ ID NO: 1909436 - RNA, 17 nt, Human
ggguggaugccuggugg

SEQ ID NO: 1909437 - RNA, 15 nt, Human
ggguggcaccagcag

SEQ ID NO: 1909438 - RNA, 13 nt, Human
ggguggaugccug

SEQ ID NO: 1909439 - RNA, 19 nt, Human
ggguggcaccagcagccug

SEQ ID NO: 1909440 - RNA, 20 nt, Human
ggguggggaccucaggccug

SEQ ID NO: 1909441 - RNA, 15 nt, Human
gggugggcaggaaaa

SEQ ID NO: 1909442 - RNA, 13 nt, Human
gggugggccaggc

SEQ ID NO: 1909443 - RNA, 19 nt, Human
gggugggccaggcugaugg

SEQ ID NO: 1909444 - RNA, 17 nt, Human
ggguguggcgcagcaua

SEQ ID NO: 1909445 - RNA, 21 nt, Human
gggugugcaaugucugaguga

SEQ ID NO: 1909446 - RNA, 17 nt, Human
gggugugcacaucucug

SEQ ID NO: 1909447 - RNA, 21 nt, Human
ggguggggucaugcccuccuc

SEQ ID NO: 1909448 - RNA, 12 nt, Human
ggguggugaccu

SEQ ID NO: 1909449 - RNA, 17 nt, Human
ggguggggucaugcccu

SEQ ID NO: 1909450 - RNA, 15 nt, Human
ggguggggggggugc

SEQ ID NO: 1909451 - RNA, 14 nt, Human
gggugggccaggcu

SEQ ID NO: 1909452 - RNA, 18 nt, Human
ggguggggggggugcugg

SEQ ID NO: 1909453 - RNA, 21 nt, Human
gguccugcugcaguugccagu

SEQ ID NO: 1909454 - RNA, 23 nt, Human
gguccugcugcaguugccaguca

SEQ ID NO: 1909455 - RNA, 13 nt, Human
gguccucugucag

SEQ ID NO: 1909456 - RNA, 21 nt, Human
gguccucugucagucacagcc

SEQ ID NO: 1909457 - RNA, 23 nt, Human
gguccucugucagucacagccac

SEQ ID NO: 1909458 - RNA, 13 nt, Human
aaagcaaaggaga

SEQ ID NO: 1909459 - RNA, 14 nt, Human
aaagcaaaacaaaa

SEQ ID NO: 1909460 - RNA, 14 nt, Human
aaagauuuuaauca

SEQ ID NO: 1909461 - RNA, 15 nt, Human
aaagauuuuaaucaa

SEQ ID NO: 1909462 - RNA, 18 nt, Human
aaagauuuuaaucaaguu

SEQ ID NO: 1909463 - RNA, 13 nt, Human
ggucggaaaacau

SEQ ID NO: 1909464 - RNA, 21 nt, Human
gguccuggccaucccacaagu

SEQ ID NO: 1909465 - RNA, 12 nt, Human
gguccuggccau

SEQ ID NO: 1909466 - RNA, 13 nt, Human
gguccuggccauc

SEQ ID NO: 1909467 - RNA, 14 nt, Human
gguccuggccaucc

SEQ ID NO: 1909468 - RNA, 16 nt, Human
gguccuggccauccca

SEQ ID NO: 1909469 - RNA, 17 nt, Human
ggucuacacugugcuga

SEQ ID NO: 1909470 - RNA, 17 nt, Human
ggucuguguguguguau

SEQ ID NO: 1909471 - RNA, 11 nt, Human
ggucugugugu

SEQ ID NO: 1909472 - RNA, 14 nt, Human
ggucggaaaacaug

SEQ ID NO: 1909473 - RNA, 15 nt, Human
ggucggaacccaagc

SEQ ID NO: 1909474 - RNA, 21 nt, Human
gguggaugccugguggcagcu

SEQ ID NO: 1909475 - RNA, 14 nt, Human
gguggaugccuggu

SEQ ID NO: 1909476 - RNA, 22 nt, Human
aaagcagcguuucuaugacaca

SEQ ID NO: 1909477 - RNA, 18 nt, Human
aaagcagcguuucuauga

SEQ ID NO: 1909478 - RNA, 16 nt, Human
aaagcagcguuucuau

SEQ ID NO: 1909479 - RNA, 17 nt, Human
aaagcaggcagaacuca

SEQ ID NO: 1909480 - RNA, 15 nt, Human
aaagcagcucucccc

SEQ ID NO: 1909481 - RNA, 19 nt, Human
aaagcaggcagaacucauc

SEQ ID NO: 1909482 - RNA, 17 nt, Human
aaagcagggacuugaac

SEQ ID NO: 1909483 - RNA, 16 nt, Human
aaagcaucacuuggga

SEQ ID NO: 1909484 - RNA, 18 nt, Human
aaagcagcucuccccuca

SEQ ID NO: 1909485 - RNA, 19 nt, Human
ggugcugggccccugccuc

SEQ ID NO: 1909486 - RNA, 15 nt, Human
ggugcuguccucagg

SEQ ID NO: 1909487 - RNA, 19 nt, Human
ggugcuguccucagguggc

SEQ ID NO: 1909488 - RNA, 20 nt, Human
ggugcuguccucagguggcc

SEQ ID NO: 1909489 - RNA, 23 nt, Human
ggugcuguccucagguggccaug

SEQ ID NO: 1909490 - RNA, 20 nt, Human
ggugcugggccccugccucu

SEQ ID NO: 1909491 - RNA, 18 nt, Human
ggugcaaugaccuuucaa

SEQ ID NO: 1909492 - RNA, 19 nt, Human
ggugcaaugaccuuucaau

SEQ ID NO: 1909493 - RNA, 20 nt, Human
ggugcaaugaccuuucaaua

SEQ ID NO: 1909494 - RNA, 21 nt, Human
ggucuguguguguguaugugg

SEQ ID NO: 1909495 - RNA, 20 nt, Human
ggucuguguguguguaugug

SEQ ID NO: 1909496 - RNA, 12 nt, Human
gauucuccuuca

SEQ ID NO: 1909497 - RNA, 17 nt, Human
gauucuccuucagcccu

SEQ ID NO: 1909498 - RNA, 13 nt, Human
gauucuccuucag

SEQ ID NO: 1909499 - RNA, 18 nt, Human
gauucuccuucagcccuc

SEQ ID NO: 1909500 - RNA, 14 nt, Human
gauuaccagggacu

SEQ ID NO: 1909501 - RNA, 18 nt, Human
gauuacugccuauuuuaa

SEQ ID NO: 1909502 - RNA, 20 nt, Human
gauuacaggugugaaccacc

SEQ ID NO: 1909503 - RNA, 12 nt, Human
gaugugaagcca

SEQ ID NO: 1909504 - RNA, 13 nt, Human
gaugugaagccaa

SEQ ID NO: 1909505 - RNA, 14 nt, Human
gaugugaagccaau

SEQ ID NO: 1909506 - RNA, 23 nt, Human
gaugugaagccaauucagacagg

SEQ ID NO: 1909507 - RNA, 16 nt, Human
gaugcuggcccagggc

SEQ ID NO: 1909508 - RNA, 17 nt, Human
gaugcuggcccagggcc

SEQ ID NO: 1909509 - RNA, 19 nt, Human
gaugcuggcccagggccca

SEQ ID NO: 1909510 - RNA, 21 nt, Human
gaugcuggcccagggcccaga

SEQ ID NO: 1909511 - RNA, 22 nt, Human
gaugcuggcccagggcccagag

SEQ ID NO: 1909512 - RNA, 23 nt, Human
gaugcuggcccagggcccagagc

SEQ ID NO: 1909513 - RNA, 21 nt, Human
gauuauuuucuacacauacau

SEQ ID NO: 1909514 - RNA, 12 nt, Human
gaucucuugagc

SEQ ID NO: 1909515 - RNA, 16 nt, Human
gaucucuugagccugg

SEQ ID NO: 1909516 - RNA, 17 nt, Human
gaucucuugagccuggg

SEQ ID NO: 1909517 - RNA, 15 nt, Human
gaucucuaacuucac

SEQ ID NO: 1909518 - RNA, 15 nt, Human
gauauuuuuuucuuu

SEQ ID NO: 1909519 - RNA, 16 nt, Human
gauauuuugcuuugug

SEQ ID NO: 1909520 - RNA, 13 nt, Human
gauccagccuggg

SEQ ID NO: 1909521 - RNA, 21 nt, Human
gauccagccuggggucuggag

SEQ ID NO: 1909522 - RNA, 12 nt, Human
gauccaggacua

SEQ ID NO: 1909523 - RNA, 12 nt, Human
gauccagggaca

SEQ ID NO: 1909524 - RNA, 13 nt, Human
gauccagggacag

SEQ ID NO: 1909525 - RNA, 14 nt, Human
gauccagggacaga

SEQ ID NO: 1909526 - RNA, 15 nt, Human
gauccagggacagag

SEQ ID NO: 1909527 - RNA, 18 nt, Human
gauccagggacagaggcc

SEQ ID NO: 1909528 - RNA, 22 nt, Human
gauccagggacagaggccccag

SEQ ID NO: 1909529 - RNA, 16 nt, Human
gauccagggacugaag

SEQ ID NO: 1909530 - RNA, 14 nt, Human
gaugaucuuugcag

SEQ ID NO: 1909531 - RNA, 21 nt, Human
gaugaucuuugcagacaggca

SEQ ID NO: 1909532 - RNA, 20 nt, Human
gaugaucuuugcagacaggc

SEQ ID NO: 1909533 - RNA, 21 nt, Human
gaugaugaaaugaggucagag

SEQ ID NO: 1909534 - RNA, 12 nt, Human
gaugcuggccca

SEQ ID NO: 1909535 - RNA, 13 nt, Human
gaugcuggcccag

SEQ ID NO: 1909536 - RNA, 14 nt, Human
gaugcuggcccagg

SEQ ID NO: 1909537 - RNA, 15 nt, Human
gaugcuggcccaggg

SEQ ID NO: 1909538 - RNA, 17 nt, Human
gauacgacaacuugcac

SEQ ID NO: 1909539 - RNA, 11 nt, Human
gauacuacagu

SEQ ID NO: 1909540 - RNA, 16 nt, Human
gauacuacaguuuguu

SEQ ID NO: 1909541 - RNA, 13 nt, Human
gauacccauccca

SEQ ID NO: 1909542 - RNA, 14 nt, Human
gauacccaucccau

SEQ ID NO: 1909543 - RNA, 20 nt, Human
gauauguaccuaacgaagua

SEQ ID NO: 1909544 - RNA, 14 nt, Human
gauaugugaacagu

SEQ ID NO: 1909545 - RNA, 13 nt, Human
gauaugugaacag

SEQ ID NO: 1909546 - RNA, 15 nt, Human
gauaugugaaacaau

SEQ ID NO: 1909547 - RNA, 17 nt, Human
gauaugugaaacaaugu

SEQ ID NO: 1909548 - RNA, 16 nt, Human
gauacuugaaaauuaa

SEQ ID NO: 1909549 - RNA, 18 nt, Human
gauaugcaguuuuccuua

SEQ ID NO: 1909550 - RNA, 15 nt, Human
gauaugcaaaagcug

SEQ ID NO: 1909551 - RNA, 17 nt, Human
gauacuugaaaauuaac

SEQ ID NO: 1909552 - RNA, 14 nt, Human
gauaugcaaaagcu

SEQ ID NO: 1909553 - RNA, 20 nt, Human
gaguuugggguaugggagag

SEQ ID NO: 1909554 - RNA, 18 nt, Human
gagugccuuacacaaugg

SEQ ID NO: 1909555 - RNA, 20 nt, Human
gaguuguuacauuuuuaagu

SEQ ID NO: 1909556 - RNA, 16 nt, Human
gaguuguuacauuuuu

SEQ ID NO: 1909557 - RNA, 19 nt, Human
gaguggacuguucccugag

SEQ ID NO: 1909558 - RNA, 15 nt, Human
gaguuucauguacaa

SEQ ID NO: 1909559 - RNA, 18 nt, Human
gaguuucauguacaagau

SEQ ID NO: 1909560 - RNA, 14 nt, Human
gaggucuguucuuu

SEQ ID NO: 1909561 - RNA, 13 nt, Human
gaggucuguucuu

SEQ ID NO: 1909562 - RNA, 12 nt, Human
gaggugggaucc

SEQ ID NO: 1909563 - RNA, 20 nt, Human
gaggugggaggaucuuuuga

SEQ ID NO: 1909564 - RNA, 18 nt, Human
gagucaauuggaaagacu

SEQ ID NO: 1909565 - RNA, 11 nt, Human
gaggugggagg

SEQ ID NO: 1909566 - RNA, 12 nt, Human
gagugagcuggu

SEQ ID NO: 1909567 - RNA, 13 nt, Human
gagucccaccuug

SEQ ID NO: 1909568 - RNA, 21 nt, Human
gagucccaccuuggcugcagg

SEQ ID NO: 1909569 - RNA, 24 nt, Human
gagugagcacuaaggugugcucug

SEQ ID NO: 1909570 - RNA, 12 nt, Human
gagugcagugag

SEQ ID NO: 1909571 - RNA, 11 nt, Human
gagugcaguga

SEQ ID NO: 1909572 - RNA, 18 nt, Human
gagugaggaugucugggc

SEQ ID NO: 1909573 - RNA, 14 nt, Human
gagucaccaagccc

SEQ ID NO: 1909574 - RNA, 13 nt, Human
gagucaccaagcc

SEQ ID NO: 1909575 - RNA, 15 nt, Human
gagucaccaagccca

SEQ ID NO: 1909576 - RNA, 22 nt, Human
gagucacaaagaacauguagaa

SEQ ID NO: 1909577 - RNA, 20 nt, Human
gagucccaccuuggcugcag

SEQ ID NO: 1909578 - RNA, 16 nt, Human
gagucccaccuuggcu

SEQ ID NO: 1909579 - RNA, 14 nt, Human
gcauacguacacau

SEQ ID NO: 1909580 - RNA, 20 nt, Human
gcauaccacuuuuguucuug

SEQ ID NO: 1909581 - RNA, 17 nt, Human
gcauaccacuuuuguuc

SEQ ID NO: 1909582 - RNA, 11 nt, Human
gcauaauaaau

SEQ ID NO: 1909583 - RNA, 14 nt, Human
gcauaauaaaugcu

SEQ ID NO: 1909584 - RNA, 20 nt, Human
gcauaauaaaugcuucagug

SEQ ID NO: 1909585 - RNA, 22 nt, Human
gcauaacguauaaaagccuguu

SEQ ID NO: 1909586 - RNA, 17 nt, Human
gcaguuuucaagucaaa

SEQ ID NO: 1909587 - RNA, 13 nt, Human
gcagggaaacagc

SEQ ID NO: 1909588 - RNA, 19 nt, Human
gcagggacuugaacccaua

SEQ ID NO: 1909589 - RNA, 15 nt, Human
gcaggcuucaaacua

SEQ ID NO: 1909590 - RNA, 19 nt, Human
gcagggagcggccggccag

SEQ ID NO: 1909591 - RNA, 13 nt, Human
gcagucacugaau

SEQ ID NO: 1909592 - RNA, 21 nt, Human
gcaguaucaugcccugugcaa

SEQ ID NO: 1909593 - RNA, 19 nt, Human
gcagcugcgguccacccag

SEQ ID NO: 1909594 - RNA, 17 nt, Human
gcagcugcgguccaccc

SEQ ID NO: 1909595 - RNA, 20 nt, Human
gcaggcucucaggccagcug

SEQ ID NO: 1909596 - RNA, 22 nt, Human
gcaggcucucaggccagcugcu

SEQ ID NO: 1909597 - RNA, 23 nt, Human
gcaggcucucaggccagcugcuu

SEQ ID NO: 1909598 - RNA, 13 nt, Human
gcagccaggacac

SEQ ID NO: 1909599 - RNA, 12 nt, Human
gcagccagaggc

SEQ ID NO: 1909600 - RNA, 14 nt, Human
gcagccagaggcac

SEQ ID NO: 1909601 - RNA, 12 nt, Human
gcagccaggcca

SEQ ID NO: 1909602 - RNA, 14 nt, Human
gcagccacuauugu

SEQ ID NO: 1909603 - RNA, 16 nt, Human
gcagccacauuccuga

SEQ ID NO: 1909604 - RNA, 19 nt, Human
gcagccaggacaccgggca

SEQ ID NO: 1909605 - RNA, 16 nt, Human
gcagccaggccacaag

SEQ ID NO: 1909606 - RNA, 13 nt, Human
gcagccaggccac

SEQ ID NO: 1909607 - RNA, 14 nt, Human
gcagccaggccaca

SEQ ID NO: 1909608 - RNA, 14 nt, Human
gauucugagagcug

SEQ ID NO: 1909609 - RNA, 13 nt, Human
gauucugagagcu

SEQ ID NO: 1909610 - RNA, 19 nt, Human
gcaagucucuuuauauggc

SEQ ID NO: 1909611 - RNA, 13 nt, Human
gcaagugagagcu

SEQ ID NO: 1909612 - RNA, 23 nt, Human
gcaauaaggggagaguaacccug

SEQ ID NO: 1909613 - RNA, 22 nt, Human
gcacaagcuccaagcucccagg

SEQ ID NO: 1909614 - RNA, 23 nt, Human
gcacaagcuccaagcucccaggc

SEQ ID NO: 1909615 - RNA, 14 nt, Human
gcacaagcugcacc

SEQ ID NO: 1909616 - RNA, 16 nt, Human
gcaauaaaucugaccc

SEQ ID NO: 1909617 - RNA, 18 nt, Human
gcaauaaaucugacccag

SEQ ID NO: 1909618 - RNA, 19 nt, Human
gcaauaaaucugacccagu

SEQ ID NO: 1909619 - RNA, 21 nt, Human
gcaauaaaucugacccagugc

SEQ ID NO: 1909620 - RNA, 18 nt, Human
gcacauauggacucugca

SEQ ID NO: 1909621 - RNA, 13 nt, Human
gcacauauggacu

SEQ ID NO: 1909622 - RNA, 13 nt, Human
gcacaugccucuc

SEQ ID NO: 1909623 - RNA, 16 nt, Human
gcacaucucugcuuga

SEQ ID NO: 1909624 - RNA, 21 nt, Human
gcacaucagcacgauuucugu

SEQ ID NO: 1909625 - RNA, 20 nt, Human
gcacaucagcacgauuucug

SEQ ID NO: 1909626 - RNA, 19 nt, Human
gcacaucagcacgauuucu

SEQ ID NO: 1909627 - RNA, 22 nt, Human
gcacaugccucucucaggccaa

SEQ ID NO: 1909628 - RNA, 20 nt, Human
gcacaugccucucucaggcc

SEQ ID NO: 1909629 - RNA, 21 nt, Human
gcacaugccucucucaggcca

SEQ ID NO: 1909630 - RNA, 14 nt, Human
gcacaugccucucu

SEQ ID NO: 1909631 - RNA, 17 nt, Human
gcacaugccucucucag

SEQ ID NO: 1909632 - RNA, 18 nt, Human
gcacaugccucucucagg

SEQ ID NO: 1909633 - RNA, 19 nt, Human
gcacaugccucucucaggc

SEQ ID NO: 1909634 - RNA, 18 nt, Human
gcaccggcuggccuggcc

SEQ ID NO: 1909635 - RNA, 14 nt, Human
gcaccguacugugg

SEQ ID NO: 1909636 - RNA, 21 nt, Human
gcaccggcuggccuggccccu

SEQ ID NO: 1909637 - RNA, 23 nt, Human
gcaccggcuggccuggccccuca

SEQ ID NO: 1909638 - RNA, 19 nt, Human
gcaccggcuggccuggccc

SEQ ID NO: 1909639 - RNA, 15 nt, Human
gcaccuaauccaggc

SEQ ID NO: 1909640 - RNA, 16 nt, Human
gcaccuaauccaggca

SEQ ID NO: 1909641 - RNA, 14 nt, Human
gcaccuaaagcagc

SEQ ID NO: 1909642 - RNA, 18 nt, Human
gcaccuaaagcagccagc

SEQ ID NO: 1909643 - RNA, 17 nt, Human
gcaccuaaagcagccag

SEQ ID NO: 1909644 - RNA, 16 nt, Human
gcaccuaaagcagcca

SEQ ID NO: 1909645 - RNA, 14 nt, Human
gcaccguucugugc

SEQ ID NO: 1909646 - RNA, 15 nt, Human
gcaccguucugugca

SEQ ID NO: 1909647 - RNA, 12 nt, Human
gcacugacauug

SEQ ID NO: 1909648 - RNA, 17 nt, Human
gcacugacugggcauag

SEQ ID NO: 1909649 - RNA, 16 nt, Human
gcacuuguccagcuga

SEQ ID NO: 1909650 - RNA, 17 nt, Human
gcacuugugauuauuua

SEQ ID NO: 1909651 - RNA, 20 nt, Human
gcacuugugauuauuuauua

SEQ ID NO: 1909652 - RNA, 21 nt, Human
gcacuugugauuauuuauuau

SEQ ID NO: 1909653 - RNA, 23 nt, Human
gcacuugugauuauuuauuauuu

SEQ ID NO: 1909654 - RNA, 16 nt, Human
gcacugacugggcaua

SEQ ID NO: 1909655 - RNA, 22 nt, Human
gcacuuucuacaaugugaacuu

SEQ ID NO: 1909656 - RNA, 20 nt, Human
gcacuuuagggcuguaaaau

SEQ ID NO: 1909657 - RNA, 21 nt, Human
gcacuuucuacaaugugaacu

SEQ ID NO: 1909658 - RNA, 19 nt, Human
gcagagcagagaccauccc

SEQ ID NO: 1909659 - RNA, 20 nt, Human
gcagagcagagaccaucccu

SEQ ID NO: 1909660 - RNA, 21 nt, Human
gcagagcagugggccuggcca

SEQ ID NO: 1909661 - RNA, 24 nt, Human
gcagagcaccuuagacagucccug

SEQ ID NO: 1909662 - RNA, 12 nt, Human
gcagagcagaga

SEQ ID NO: 1909663 - RNA, 14 nt, Human
gcagagcagagacc

SEQ ID NO: 1909664 - RNA, 15 nt, Human
gcagagcagagacca

SEQ ID NO: 1909665 - RNA, 19 nt, Human
gcagagcaccuuagacagu

SEQ ID NO: 1909666 - RNA, 22 nt, Human
gcagagcaccuuagacaguccc

SEQ ID NO: 1909667 - RNA, 23 nt, Human
gcagagcaccuuagacagucccu

SEQ ID NO: 1909668 - RNA, 11 nt, Human
gaaugaauguc

SEQ ID NO: 1909669 - RNA, 14 nt, Human
gaaugaaugucagu

SEQ ID NO: 1909670 - RNA, 18 nt, Human
gaaugaaugucaguguga

SEQ ID NO: 1909671 - RNA, 22 nt, Human
gaaugaaugucagugugacuga

SEQ ID NO: 1909672 - RNA, 12 nt, Human
gaaugacuccuu

SEQ ID NO: 1909673 - RNA, 20 nt, Human
gaaugagauuaauuccuuuc

SEQ ID NO: 1909674 - RNA, 19 nt, Human
gaagugugggucugugugu

SEQ ID NO: 1909675 - RNA, 18 nt, Human
gaagugugggucugugug

SEQ ID NO: 1909676 - RNA, 17 nt, Human
gaagugugggucugugu

SEQ ID NO: 1909677 - RNA, 14 nt, Human
gaaauccauucaca

SEQ ID NO: 1909678 - RNA, 14 nt, Human
gaagcuaauuugca

SEQ ID NO: 1909679 - RNA, 15 nt, Human
gaagcuaauuugcau

SEQ ID NO: 1909680 - RNA, 16 nt, Human
gaagcuaauuugcauu

SEQ ID NO: 1909681 - RNA, 17 nt, Human
gaagcuaauuugcauua

SEQ ID NO: 1909682 - RNA, 14 nt, Human
gaagcucagggccu

SEQ ID NO: 1909683 - RNA, 15 nt, Human
gaagcucagggccug

SEQ ID NO: 1909684 - RNA, 15 nt, Human
gaagcuacugugugu

SEQ ID NO: 1909685 - RNA, 20 nt, Human
gaagcuacugugugugugaa

SEQ ID NO: 1909686 - RNA, 22 nt, Human
gaagcuacugugugugugaaug

SEQ ID NO: 1909687 - RNA, 23 nt, Human
gaagcuacugugugugugaauga

SEQ ID NO: 1909688 - RNA, 23 nt, Human
gaagcucagggccuggcucaggu

SEQ ID NO: 1909689 - RNA, 20 nt, Human
gaagcucagggccuggcuca

SEQ ID NO: 1909690 - RNA, 21 nt, Human
gaagcucagggccuggcucag

SEQ ID NO: 1909691 - RNA, 16 nt, Human
gaagcucagggccugg

SEQ ID NO: 1909692 - RNA, 17 nt, Human
gaagcucagggccuggc

SEQ ID NO: 1909693 - RNA, 18 nt, Human
gaagcucagggccuggcu

SEQ ID NO: 1909694 - RNA, 19 nt, Human
gaagcucagggccuggcuc

SEQ ID NO: 1909695 - RNA, 17 nt, Human
gaagggagcuagccaga

SEQ ID NO: 1909696 - RNA, 18 nt, Human
gaagggauaugugaaaca

SEQ ID NO: 1909697 - RNA, 19 nt, Human
gaaggcucgagcaugccug

SEQ ID NO: 1909698 - RNA, 15 nt, Human
gaaggcuauggggau

SEQ ID NO: 1909699 - RNA, 16 nt, Human
gaaggcucgagcaugc

SEQ ID NO: 1909700 - RNA, 17 nt, Human
gaaggcucgagcaugcc

SEQ ID NO: 1909701 - RNA, 17 nt, Human
gaagcugggguucauga

SEQ ID NO: 1909702 - RNA, 21 nt, Human
gaagcugucauaaaaagacaa

SEQ ID NO: 1909703 - RNA, 19 nt, Human
gaagucuuuguacagacaa

SEQ ID NO: 1909704 - RNA, 20 nt, Human
gaagucuuuguacagacaac

SEQ ID NO: 1909705 - RNA, 18 nt, Human
gaagucuuuguacagaca

SEQ ID NO: 1909706 - RNA, 19 nt, Human
gaagggcagggcugaggcc

SEQ ID NO: 1909707 - RNA, 17 nt, Human
gaagugaauaacugcaa

SEQ ID NO: 1909708 - RNA, 14 nt, Human
gaagucuuuuguuc

SEQ ID NO: 1909709 - RNA, 13 nt, Human
gaagggccagagc

SEQ ID NO: 1909710 - RNA, 20 nt, Human
gaagugcuggcaaccacuaa

SEQ ID NO: 1909711 - RNA, 21 nt, Human
gacacacagcucuguccuggg

SEQ ID NO: 1909712 - RNA, 14 nt, Human
gacacacagcucug

SEQ ID NO: 1909713 - RNA, 18 nt, Human
gacaaaaucaucuuugug

SEQ ID NO: 1909714 - RNA, 15 nt, Human
gacaaaauggaauac

SEQ ID NO: 1909715 - RNA, 19 nt, Human
gacacacagcucuguccug

SEQ ID NO: 1909716 - RNA, 18 nt, Human
gacacacagcucuguccu

SEQ ID NO: 1909717 - RNA, 17 nt, Human
gacacacagcucugucc

SEQ ID NO: 1909718 - RNA, 15 nt, Human
gacacacagcucugu

SEQ ID NO: 1909719 - RNA, 23 nt, Human
gaauuuuggcugugucucccuuc

SEQ ID NO: 1909720 - RNA, 20 nt, Human
gaauuuugugcccccaugua

SEQ ID NO: 1909721 - RNA, 21 nt, Human
gaauuuugugcccccauguaa

SEQ ID NO: 1909722 - RNA, 19 nt, Human
gaauuuuguuuucuugauu

SEQ ID NO: 1909723 - RNA, 20 nt, Human
gaauuugugaagguggaaau

SEQ ID NO: 1909724 - RNA, 22 nt, Human
gaauuaucuauacauaucuuua

SEQ ID NO: 1909725 - RNA, 12 nt, Human
gaauuaugaaac

SEQ ID NO: 1909726 - RNA, 14 nt, Human
gaauuaucuaauuu

SEQ ID NO: 1909727 - RNA, 16 nt, Human
gaauuauaaaagccag

SEQ ID NO: 1909728 - RNA, 19 nt, Human
gaauuuuggcugugucucc

SEQ ID NO: 1909729 - RNA, 23 nt, Human
gaauuuuaaaagaugcaauguag

SEQ ID NO: 1909730 - RNA, 21 nt, Human
gaauuuuaaaagaugcaaugu

SEQ ID NO: 1909731 - RNA, 15 nt, Human
gaauuuuaaaagaug

SEQ ID NO: 1909732 - RNA, 12 nt, Human
gaauuuuaaaag

SEQ ID NO: 1909733 - RNA, 15 nt, Human
gacauucaccugccc

SEQ ID NO: 1909734 - RNA, 16 nt, Human
gacauucaccugcccc

SEQ ID NO: 1909735 - RNA, 17 nt, Human
gacauucaccugcccca

SEQ ID NO: 1909736 - RNA, 14 nt, Human
gacauucaccugcc

SEQ ID NO: 1909737 - RNA, 13 nt, Human
gacacuguacaag

SEQ ID NO: 1909738 - RNA, 12 nt, Human
gacacuguacaa

SEQ ID NO: 1909739 - RNA, 15 nt, Human
gacacugaugggcaa

SEQ ID NO: 1909740 - RNA, 16 nt, Human
gacacuuaaaaauggu

SEQ ID NO: 1909741 - RNA, 13 nt, Human
gacacugaugggc

SEQ ID NO: 1909742 - RNA, 23 nt, Human
gacacugaaauauacacacagca

SEQ ID NO: 1909743 - RNA, 12 nt, Human
gacagacacagg

SEQ ID NO: 1909744 - RNA, 21 nt, Human
gacagcccgggcucugccucc

SEQ ID NO: 1909745 - RNA, 22 nt, Human
gacagcccgggcucugccuccc

SEQ ID NO: 1909746 - RNA, 23 nt, Human
gacagcccgggcucugccuccca

SEQ ID NO: 1909747 - RNA, 23 nt, Human
gacagacaacacugggaaacaga

SEQ ID NO: 1909748 - RNA, 20 nt, Human
gacacuuaauacuaccuuga

SEQ ID NO: 1909749 - RNA, 14 nt, Human
gacagugaaagaaa

SEQ ID NO: 1909750 - RNA, 13 nt, Human
gacagucucacuu

SEQ ID NO: 1909751 - RNA, 15 nt, Human
gacaguauuuguggg

SEQ ID NO: 1909752 - RNA, 11 nt, Human
gacagcuccuu

SEQ ID NO: 1909753 - RNA, 12 nt, Human
gacagcuccacc

SEQ ID NO: 1909754 - RNA, 22 nt, Human
gacaggguuuugccauguuggc

SEQ ID NO: 1909755 - RNA, 20 nt, Human
gacaggguuuugccauguug

SEQ ID NO: 1909756 - RNA, 18 nt, Human
gacagcuccacccuggcc

SEQ ID NO: 1909757 - RNA, 21 nt, Human
gagaagcuuuugaauaaaaac

SEQ ID NO: 1909758 - RNA, 22 nt, Human
gagaagcuuuugaauaaaaacu

SEQ ID NO: 1909759 - RNA, 12 nt, Human
gagaaggaagcc

SEQ ID NO: 1909760 - RNA, 16 nt, Human
gagaagcggcuggcag

SEQ ID NO: 1909761 - RNA, 13 nt, Human
gagaagcggcugg

SEQ ID NO: 1909762 - RNA, 15 nt, Human
gagaagcggcuggca

SEQ ID NO: 1909763 - RNA, 15 nt, Human
gagaaucacuugaac

SEQ ID NO: 1909764 - RNA, 14 nt, Human
gagaaucacuugaa

SEQ ID NO: 1909765 - RNA, 19 nt, Human
gagaagugaauaacugcaa

SEQ ID NO: 1909766 - RNA, 21 nt, Human
gagacccugucucaaaaaaag

SEQ ID NO: 1909767 - RNA, 23 nt, Human
gagacuaaccccaccacacccuc

SEQ ID NO: 1909768 - RNA, 21 nt, Human
gacuuuucuuuguggcuuccu

SEQ ID NO: 1909769 - RNA, 23 nt, Human
gacuuuucuuucagccaagaauu

SEQ ID NO: 1909770 - RNA, 18 nt, Human
gacuuuugaaaagaggug

SEQ ID NO: 1909771 - RNA, 22 nt, Human
gacuauauuugggccugcucca

SEQ ID NO: 1909772 - RNA, 22 nt, Human
gacuaucuaaauguugaaagau

SEQ ID NO: 1909773 - RNA, 17 nt, Human
gacucuuuugccauuaa

SEQ ID NO: 1909774 - RNA, 16 nt, Human
gacugaaaaccucucc

SEQ ID NO: 1909775 - RNA, 17 nt, Human
gacugaaaaccucuccu

SEQ ID NO: 1909776 - RNA, 18 nt, Human
gacugaaaaccucuccuc

SEQ ID NO: 1909777 - RNA, 20 nt, Human
gacugaaaaccucuccucau

SEQ ID NO: 1909778 - RNA, 12 nt, Human
gacucugcacau

SEQ ID NO: 1909779 - RNA, 19 nt, Human
gacucugcacaugucuugu

SEQ ID NO: 1909780 - RNA, 15 nt, Human
gacucugcacauguc

SEQ ID NO: 1909781 - RNA, 14 nt, Human
gacucugcacauga

SEQ ID NO: 1909782 - RNA, 16 nt, Human
gacucuggcaaagcuu

SEQ ID NO: 1909783 - RNA, 12 nt, Human
gacucugucuca

SEQ ID NO: 1909784 - RNA, 14 nt, Human
gagcagggcucagc

SEQ ID NO: 1909785 - RNA, 22 nt, Human
gagcauguacugagccuuguaa

SEQ ID NO: 1909786 - RNA, 17 nt, Human
gagcauggguucauccu

SEQ ID NO: 1909787 - RNA, 22 nt, Human
gagcaugccuggauggggcugc

SEQ ID NO: 1909788 - RNA, 21 nt, Human
gagcagggcucagcggggaca

SEQ ID NO: 1909789 - RNA, 12 nt, Human
gagcaucaggcc

SEQ ID NO: 1909790 - RNA, 22 nt, Human
gagcugggagccgggccgcaga

SEQ ID NO: 1909791 - RNA, 16 nt, Human
gagcugggagccgggc

SEQ ID NO: 1909792 - RNA, 14 nt, Human
gagcugggagccgg

SEQ ID NO: 1909793 - RNA, 13 nt, Human
gagcugggagccg

SEQ ID NO: 1909794 - RNA, 18 nt, Human
gagcugggugucaagagg

SEQ ID NO: 1909795 - RNA, 19 nt, Human
gagcuggggaugucucuca

SEQ ID NO: 1909796 - RNA, 22 nt, Human
gagcugccuguucagcuccagc

SEQ ID NO: 1909797 - RNA, 21 nt, Human
gagcugccuguucagcuccag

SEQ ID NO: 1909798 - RNA, 15 nt, Human
gagcugccuuggcuc

SEQ ID NO: 1909799 - RNA, 18 nt, Human
gagcggagaaaggaaggg

SEQ ID NO: 1909800 - RNA, 21 nt, Human
gagcggagaaaggaagggcug

SEQ ID NO: 1909801 - RNA, 19 nt, Human
gagccuugaacuuugaccu

SEQ ID NO: 1909802 - RNA, 22 nt, Human
gagccuugaacuuugaccucug

SEQ ID NO: 1909803 - RNA, 18 nt, Human
gagccuuugguucuggcc

SEQ ID NO: 1909804 - RNA, 23 nt, Human
gagccuuugguucuggccagaau

SEQ ID NO: 1909805 - RNA, 14 nt, Human
gagccuuccagggg

SEQ ID NO: 1909806 - RNA, 15 nt, Human
gagccuuccaggggu

SEQ ID NO: 1909807 - RNA, 16 nt, Human
gagccuuccaggggug

SEQ ID NO: 1909808 - RNA, 17 nt, Human
gagccuuccaggggugg

SEQ ID NO: 1909809 - RNA, 23 nt, Human
gagauuucaucugcucuccuucc

SEQ ID NO: 1909810 - RNA, 13 nt, Human
gagauuuacaacu

SEQ ID NO: 1909811 - RNA, 22 nt, Human
gagauuucaucugcucuccuuc

SEQ ID NO: 1909812 - RNA, 21 nt, Human
gagauuucaucugcucuccuu

SEQ ID NO: 1909813 - RNA, 20 nt, Human
gagauuucaucugcucuccu

SEQ ID NO: 1909814 - RNA, 19 nt, Human
gagauuucaucugcucucc

SEQ ID NO: 1909815 - RNA, 17 nt, Human
gagauuucaucugcucu

SEQ ID NO: 1909816 - RNA, 13 nt, Human
gagauuucaucug

SEQ ID NO: 1909817 - RNA, 21 nt, Human
gagauugcaccacugcacucc

SEQ ID NO: 1909818 - RNA, 18 nt, Human
gagauugcaccacugcac

SEQ ID NO: 1909819 - RNA, 14 nt, Human
gagauguagccccu

SEQ ID NO: 1909820 - RNA, 18 nt, Human
gagauggaguucuugugc

SEQ ID NO: 1909821 - RNA, 20 nt, Human
gagauggaaguugcagugag

SEQ ID NO: 1909822 - RNA, 21 nt, Human
gagaugaugccaugggcccuc

SEQ ID NO: 1909823 - RNA, 22 nt, Human
gagaggcauccaguaucuugaa

SEQ ID NO: 1909824 - RNA, 20 nt, Human
gagaugaugaaaauauuuaa

SEQ ID NO: 1909825 - RNA, 14 nt, Human
gagaggcauccagu

SEQ ID NO: 1909826 - RNA, 17 nt, Human
gagacuccugcaggcag

SEQ ID NO: 1909827 - RNA, 18 nt, Human
gagacuccugcaggcagc

SEQ ID NO: 1909828 - RNA, 20 nt, Human
gagaggcagaagaacccugg

SEQ ID NO: 1909829 - RNA, 15 nt, Human
gagacuccugcaggc

SEQ ID NO: 1909830 - RNA, 16 nt, Human
gagacuccugcaggca

SEQ ID NO: 1909831 - RNA, 22 nt, Human
cuuuccugaggcugggcucccu

SEQ ID NO: 1909832 - RNA, 23 nt, Human
cuuucagccaagaauucuuaaau

SEQ ID NO: 1909833 - RNA, 20 nt, Human
cuuucagccaagaauucuua

SEQ ID NO: 1909834 - RNA, 15 nt, Human
cuuucacaaaaaaga

SEQ ID NO: 1909835 - RNA, 16 nt, Human
cuuucacaaaaaagaa

SEQ ID NO: 1909836 - RNA, 14 nt, Human
cuuucacaaaaaag

SEQ ID NO: 1909837 - RNA, 22 nt, Human
cuuucaaugguuugcaaggaag

SEQ ID NO: 1909838 - RNA, 21 nt, Human
cuuucaaugguuugcaaggaa

SEQ ID NO: 1909839 - RNA, 23 nt, Human
cuuucaauaggaaaaacugauuu

SEQ ID NO: 1909840 - RNA, 20 nt, Human
cuuucaaugguuugcaagga

SEQ ID NO: 1909841 - RNA, 15 nt, Human
cuuugaucccuucug

SEQ ID NO: 1909842 - RNA, 21 nt, Human
cuuugaugauuaauucaccuu

SEQ ID NO: 1909843 - RNA, 14 nt, Human
cuuugauguauuuu

SEQ ID NO: 1909844 - RNA, 17 nt, Human
cuuugauguauuuuccc

SEQ ID NO: 1909845 - RNA, 16 nt, Human
cuuucuagccagagga

SEQ ID NO: 1909846 - RNA, 14 nt, Human
cuuucuagcuguug

SEQ ID NO: 1909847 - RNA, 17 nt, Human
cuuucuacccagcgagc

SEQ ID NO: 1909848 - RNA, 15 nt, Human
cuuucuagccagagg

SEQ ID NO: 1909849 - RNA, 13 nt, Human
cuuuguaaugaaa

SEQ ID NO: 1909850 - RNA, 18 nt, Human
cuuuuaugugaaacaugu

SEQ ID NO: 1909851 - RNA, 14 nt, Human
cuuuuaugugaaac

SEQ ID NO: 1909852 - RNA, 15 nt, Human
cuuuuauguaguaau

SEQ ID NO: 1909853 - RNA, 18 nt, Human
cuuuuauguaguaauuga

SEQ ID NO: 1909854 - RNA, 22 nt, Human
cuuuuauguaguaauugacaug

SEQ ID NO: 1909855 - RNA, 23 nt, Human
cuuuuauguaguaauugacaugu

SEQ ID NO: 1909856 - RNA, 12 nt, Human
cuuuuauacucu

SEQ ID NO: 1909857 - RNA, 17 nt, Human
cuuuuauacucuuucug

SEQ ID NO: 1909858 - RNA, 19 nt, Human
cuuuuauacucuuucugua

SEQ ID NO: 1909859 - RNA, 20 nt, Human
cuuuuauacucuuucuguau

SEQ ID NO: 1909860 - RNA, 14 nt, Human
cuuuuauaaacuuu

SEQ ID NO: 1909861 - RNA, 13 nt, Human
cuuuuauaaacuu

SEQ ID NO: 1909862 - RNA, 14 nt, Human
cuuuguacuuugug

SEQ ID NO: 1909863 - RNA, 15 nt, Human
gaaacuuuuggaagg

SEQ ID NO: 1909864 - RNA, 13 nt, Human
gaaacuuuuggaa

SEQ ID NO: 1909865 - RNA, 21 nt, Human
gaaagaaaauaccaaggaaca

SEQ ID NO: 1909866 - RNA, 20 nt, Human
gaaagacuaucuaaauguug

SEQ ID NO: 1909867 - RNA, 21 nt, Human
gaaaggcuccaggagcagcca

SEQ ID NO: 1909868 - RNA, 20 nt, Human
gaaaggcuccaggagcagcc

SEQ ID NO: 1909869 - RNA, 22 nt, Human
gaaaggcuccaggagcagccac

SEQ ID NO: 1909870 - RNA, 22 nt, Human
gaaagggacuuggaagcuccgc

SEQ ID NO: 1909871 - RNA, 19 nt, Human
gaaagggacuuggaagcuc

SEQ ID NO: 1909872 - RNA, 20 nt, Human
gaaagggacgcuacccggga

SEQ ID NO: 1909873 - RNA, 19 nt, Human
gaaaucaccgaaaacgugg

SEQ ID NO: 1909874 - RNA, 18 nt, Human
gaaaauggaaccaggcuu

SEQ ID NO: 1909875 - RNA, 19 nt, Human
gaaaauggacguguuauga

SEQ ID NO: 1909876 - RNA, 23 nt, Human
gaaaauggacguguuaugacucc

SEQ ID NO: 1909877 - RNA, 15 nt, Human
gaaaauguaugugua

SEQ ID NO: 1909878 - RNA, 15 nt, Human
gaaaauggaaccagg

SEQ ID NO: 1909879 - RNA, 21 nt, Human
gaaaauggaagacagcucuua

SEQ ID NO: 1909880 - RNA, 18 nt, Human
gaaaagaaaaaugagccu

SEQ ID NO: 1909881 - RNA, 23 nt, Human
gaaaaugcagcagggaugcccug

SEQ ID NO: 1909882 - RNA, 14 nt, Human
gaaaaacugauuuu

SEQ ID NO: 1909883 - RNA, 17 nt, Human
cuuuugccauuaaacuu

SEQ ID NO: 1909884 - RNA, 23 nt, Human
cuuuugcccacacuugggagcaa

SEQ ID NO: 1909885 - RNA, 16 nt, Human
cuuuugccguuauuaa

SEQ ID NO: 1909886 - RNA, 18 nt, Human
cuuuuggaagguauuuaa

SEQ ID NO: 1909887 - RNA, 13 nt, Human
cuuuugcauucuc

SEQ ID NO: 1909888 - RNA, 14 nt, Human
cuuuugcauucucc

SEQ ID NO: 1909889 - RNA, 15 nt, Human
cuuuugcauucuccc

SEQ ID NO: 1909890 - RNA, 18 nt, Human
cuuuugucuaugggacuc

SEQ ID NO: 1909891 - RNA, 19 nt, Human
cuuuuguagaagucacauu

SEQ ID NO: 1909892 - RNA, 12 nt, Human
cuuuuguaauuu

SEQ ID NO: 1909893 - RNA, 15 nt, Human
cuuuuggcauuuuac

SEQ ID NO: 1909894 - RNA, 15 nt, Human
cuuuuuuucuacugu

SEQ ID NO: 1909895 - RNA, 19 nt, Human
cuuuuuuuccaucuuuaca

SEQ ID NO: 1909896 - RNA, 13 nt, Human
cuuuugugcauua

SEQ ID NO: 1909897 - RNA, 12 nt, Human
cuuuugugcauu

SEQ ID NO: 1909898 - RNA, 23 nt, Human
cuuuuuuggcugcugaaggcucg

SEQ ID NO: 1909899 - RNA, 20 nt, Human
cuuuuuuguguuuuuaaaag

SEQ ID NO: 1909900 - RNA, 23 nt, Human
cuuuuuuuuuuuuuaaagacaga

SEQ ID NO: 1909901 - RNA, 22 nt, Human
cuuuuuuuuuuuuuaaagacag

SEQ ID NO: 1909902 - RNA, 11 nt, Human
gaaaaacaggu

SEQ ID NO: 1909903 - RNA, 18 nt, Human
gaaaaaccagaggcagcu

SEQ ID NO: 1909904 - RNA, 19 nt, Human
gaaaaaaaucguccaggga

SEQ ID NO: 1909905 - RNA, 20 nt, Human
gaaaaaaaauguucuuuggg

SEQ ID NO: 1909906 - RNA, 23 nt, Human
cuucuucagagacuccugcaggc

SEQ ID NO: 1909907 - RNA, 15 nt, Human
cuucuguugucaccu

SEQ ID NO: 1909908 - RNA, 19 nt, Human
cuucuguugucaccuucac

SEQ ID NO: 1909909 - RNA, 20 nt, Human
cuucuguugucaccuucacc

SEQ ID NO: 1909910 - RNA, 21 nt, Human
cuucuguugucaccuucaccu

SEQ ID NO: 1909911 - RNA, 20 nt, Human
cuucugacccaugcugcccu

SEQ ID NO: 1909912 - RNA, 21 nt, Human
cuucugacccaugcugcccug

SEQ ID NO: 1909913 - RNA, 22 nt, Human
cuucugacccaugcugcccugu

SEQ ID NO: 1909914 - RNA, 23 nt, Human
cuucugacccaugcugcccugug

SEQ ID NO: 1909915 - RNA, 21 nt, Human
cuucuacuuuuaaguugcuga

SEQ ID NO: 1909916 - RNA, 13 nt, Human
cuucuacuuuuaa

SEQ ID NO: 1909917 - RNA, 13 nt, Human
cuucuaggaagcu

SEQ ID NO: 1909918 - RNA, 19 nt, Human
cuucuaggguuauugcauu

SEQ ID NO: 1909919 - RNA, 15 nt, Human
cuucucaagauacug

SEQ ID NO: 1909920 - RNA, 17 nt, Human
cuuccugcaacaccuug

SEQ ID NO: 1909921 - RNA, 20 nt, Human
cuugacagggcacaccgggc

SEQ ID NO: 1909922 - RNA, 22 nt, Human
cuugacaaagucaagccacaug

SEQ ID NO: 1909923 - RNA, 13 nt, Human
cuugacagggcac

SEQ ID NO: 1909924 - RNA, 19 nt, Human
cuugacaaagucaagccac

SEQ ID NO: 1909925 - RNA, 16 nt, Human
cuugacaaagucaagc

SEQ ID NO: 1909926 - RNA, 15 nt, Human
cuugacagggcacac

SEQ ID NO: 1909927 - RNA, 14 nt, Human
cuugacagggcaca

SEQ ID NO: 1909928 - RNA, 18 nt, Human
cuugaauuguaaggaaug

SEQ ID NO: 1909929 - RNA, 19 nt, Human
cuugaauuguaaggaauga

SEQ ID NO: 1909930 - RNA, 20 nt, Human
cuuggcgcugccccuggcag

SEQ ID NO: 1909931 - RNA, 12 nt, Human
cuuggcgcugcc

SEQ ID NO: 1909932 - RNA, 14 nt, Human
cuuggcgcugcccc

SEQ ID NO: 1909933 - RNA, 17 nt, Human
cuuggcgcugccccugg

SEQ ID NO: 1909934 - RNA, 21 nt, Human
cuuggcacccaagaccucagg

SEQ ID NO: 1909935 - RNA, 20 nt, Human
cuuggcaccagacacccagg

SEQ ID NO: 1909936 - RNA, 21 nt, Human
cuuggcaccagacacccagga

SEQ ID NO: 1909937 - RNA, 16 nt, Human
cuuggcaccagacacc

SEQ ID NO: 1909938 - RNA, 19 nt, Human
cuuggcaccagacacccag

SEQ ID NO: 1909939 - RNA, 12 nt, Human
cuugaugccugg

SEQ ID NO: 1909940 - RNA, 21 nt, Human
cuugaugagcugugcacaaag

SEQ ID NO: 1909941 - RNA, 18 nt, Human
cuugaugaccaaaguccu

SEQ ID NO: 1909942 - RNA, 21 nt, Human
cuugaugaccaaaguccuuuu

SEQ ID NO: 1909943 - RNA, 13 nt, Human
cuugaugccuggc

SEQ ID NO: 1909944 - RNA, 13 nt, Human
cuugccugcaggc

SEQ ID NO: 1909945 - RNA, 12 nt, Human
cuugccugcagg

SEQ ID NO: 1909946 - RNA, 12 nt, Human
cugugcugaguc

SEQ ID NO: 1909947 - RNA, 14 nt, Human
cugugcugagucug

SEQ ID NO: 1909948 - RNA, 19 nt, Human
cugugcugagucugaaggc

SEQ ID NO: 1909949 - RNA, 13 nt, Human
cuuauggaacacu

SEQ ID NO: 1909950 - RNA, 16 nt, Human
cuuauggaacacucug

SEQ ID NO: 1909951 - RNA, 17 nt, Human
cuuauggaacacucuga

SEQ ID NO: 1909952 - RNA, 19 nt, Human
cuuauggaacacucugaga

SEQ ID NO: 1909953 - RNA, 20 nt, Human
cuuauggaacacucugagac

SEQ ID NO: 1909954 - RNA, 21 nt, Human
cuuauggaacacucugagacu

SEQ ID NO: 1909955 - RNA, 17 nt, Human
cuuauuagggagaaaau

SEQ ID NO: 1909956 - RNA, 21 nt, Human
cuucaccuuuguccccaccgc

SEQ ID NO: 1909957 - RNA, 23 nt, Human
cuuauuguagcauccuggaauau

SEQ ID NO: 1909958 - RNA, 13 nt, Human
cuuauuguaccuc

SEQ ID NO: 1909959 - RNA, 14 nt, Human
cuuauuguaccucu

SEQ ID NO: 1909960 - RNA, 15 nt, Human
cuuauuguaccucuc

SEQ ID NO: 1909961 - RNA, 18 nt, Human
cuuauuggcagcucuacu

SEQ ID NO: 1909962 - RNA, 22 nt, Human
cuucaccuuuguccccaccgca

SEQ ID NO: 1909963 - RNA, 20 nt, Human
cuuauuguagcauccuggaa

SEQ ID NO: 1909964 - RNA, 18 nt, Human
cuuauuguaccucucuua

SEQ ID NO: 1909965 - RNA, 15 nt, Human
cuucacggaagagcc

SEQ ID NO: 1909966 - RNA, 19 nt, Human
cuucacggaagagccuugc

SEQ ID NO: 1909967 - RNA, 11 nt, Human
cuucccaccuc

SEQ ID NO: 1909968 - RNA, 21 nt, Human
cuucccaccucucucacuccu

SEQ ID NO: 1909969 - RNA, 23 nt, Human
cuucccaccucucucacuccuug

SEQ ID NO: 1909970 - RNA, 22 nt, Human
cuucaugcaggugaaacccagu

SEQ ID NO: 1909971 - RNA, 21 nt, Human
cuuccagugaggcucugcccu

SEQ ID NO: 1909972 - RNA, 22 nt, Human
cuuccagugaggcucugcccuu

SEQ ID NO: 1909973 - RNA, 23 nt, Human
cuuccagugaggcucugcccuug

SEQ ID NO: 1909974 - RNA, 18 nt, Human
cuuccaguguccuuagaa

SEQ ID NO: 1909975 - RNA, 19 nt, Human
cuuccaguguccuuagaac

SEQ ID NO: 1909976 - RNA, 15 nt, Human
cuucauauugcugag

SEQ ID NO: 1909977 - RNA, 18 nt, Human
cuucauagcagauuuuaa

SEQ ID NO: 1909978 - RNA, 22 nt, Human
cuucauacagggaugguguuca

SEQ ID NO: 1909979 - RNA, 13 nt, Human
cuucauacaggga

SEQ ID NO: 1909980 - RNA, 12 nt, Human
cuucauacaggg

SEQ ID NO: 1909981 - RNA, 19 nt, Human
cuucauaacaauuuuagga

SEQ ID NO: 1909982 - RNA, 15 nt, Human
cuucauaacaauuuu

SEQ ID NO: 1909983 - RNA, 10 nt, Human
cuucauacac

SEQ ID NO: 1909984 - RNA, 9 nt, Human
cuucauaca

SEQ ID NO: 1909985 - RNA, 20 nt, Human
cuucagagacuccugcaggc

SEQ ID NO: 1909986 - RNA, 17 nt, Human
cuucacuguccuccaag

SEQ ID NO: 1909987 - RNA, 18 nt, Human
cuucagagacuccugcag

SEQ ID NO: 1909988 - RNA, 19 nt, Human
cuucagagacuccugcagg

SEQ ID NO: 1909989 - RNA, 15 nt, Human
cuucacuguaaaaua

SEQ ID NO: 1909990 - RNA, 17 nt, Human
cuucagagacuccugca

SEQ ID NO: 1909991 - RNA, 21 nt, Human
cuucacguagaacauugguau

SEQ ID NO: 1909992 - RNA, 13 nt, Human
cuucacuccugcu

SEQ ID NO: 1909993 - RNA, 14 nt, Human
cuucacuccugcug

SEQ ID NO: 1909994 - RNA, 15 nt, Human
cuucacuccugcugu

SEQ ID NO: 1909995 - RNA, 20 nt, Human
cugagacucgcgacaaugca

SEQ ID NO: 1909996 - RNA, 17 nt, Human
cugagacucgcgacaau

SEQ ID NO: 1909997 - RNA, 19 nt, Human
cugagacucgcgacaaugc

SEQ ID NO: 1909998 - RNA, 17 nt, Human
cugaccuugaugagcug

SEQ ID NO: 1909999 - RNA, 16 nt, Human
cugaccuugaugagcu

SEQ ID NO: 1910000 - RNA, 15 nt, Human
cugcauguuugugau

SEQ ID NO: 1910001 - RNA, 13 nt, Human
cugcauguuacau

SEQ ID NO: 1910002 - RNA, 17 nt, Human
cugcauuucgguggcua

SEQ ID NO: 1910003 - RNA, 18 nt, Human
cugcauuucgguggcuag

SEQ ID NO: 1910004 - RNA, 22 nt, Human
cugcauuuaaaagauacaguua

SEQ ID NO: 1910005 - RNA, 20 nt, Human
cugcauuuaaaagauacagu

SEQ ID NO: 1910006 - RNA, 16 nt, Human
cugcauuuguauauuu

SEQ ID NO: 1910007 - RNA, 22 nt, Human
cugccaaaaugcucuagugccu

SEQ ID NO: 1910008 - RNA, 15 nt, Human
cugccaaaaugcucu

SEQ ID NO: 1910009 - RNA, 16 nt, Human
cugccaaaaugcucua

SEQ ID NO: 1910010 - RNA, 15 nt, Human
cugccaaugggagcu

SEQ ID NO: 1910011 - RNA, 17 nt, Human
cugccaaugggagcuca

SEQ ID NO: 1910012 - RNA, 23 nt, Human
cugccauauucuguuggccagug

SEQ ID NO: 1910013 - RNA, 22 nt, Human
cugccauauucuguuggccagu

SEQ ID NO: 1910014 - RNA, 21 nt, Human
cugccauauucuguuggccag

SEQ ID NO: 1910015 - RNA, 20 nt, Human
cugccauauucuguuggcca

SEQ ID NO: 1910016 - RNA, 11 nt, Human
cugccagggac

SEQ ID NO: 1910017 - RNA, 12 nt, Human
cugccagggaca

SEQ ID NO: 1910018 - RNA, 15 nt, Human
cugccagggacagag

SEQ ID NO: 1910019 - RNA, 12 nt, Human
cugccauccagg

SEQ ID NO: 1910020 - RNA, 22 nt, Human
cugccaucauguuuacagagga

SEQ ID NO: 1910021 - RNA, 17 nt, Human
cugccaucauguuuaca

SEQ ID NO: 1910022 - RNA, 23 nt, Human
cugccaucauguuuacagaggac

SEQ ID NO: 1910023 - RNA, 22 nt, Human
cugccccauccuccagcaggga

SEQ ID NO: 1910024 - RNA, 13 nt, Human
cugccccauccuc

SEQ ID NO: 1910025 - RNA, 16 nt, Human
cugccccauccuccag

SEQ ID NO: 1910026 - RNA, 17 nt, Human
cugccccauccuccagc

SEQ ID NO: 1910027 - RNA, 18 nt, Human
cugccccauccuccagca

SEQ ID NO: 1910028 - RNA, 21 nt, Human
cugccccauccuccagcaggg

SEQ ID NO: 1910029 - RNA, 14 nt, Human
cugccccucaacuc

SEQ ID NO: 1910030 - RNA, 22 nt, Human
cugccccucaacucuccuccag

SEQ ID NO: 1910031 - RNA, 12 nt, Human
cugcccugugag

SEQ ID NO: 1910032 - RNA, 13 nt, Human
cugcccugugagu

SEQ ID NO: 1910033 - RNA, 15 nt, Human
cugcccugugggccc

SEQ ID NO: 1910034 - RNA, 16 nt, Human
cugcccugugggcccc

SEQ ID NO: 1910035 - RNA, 18 nt, Human
cugcccugugggccccca

SEQ ID NO: 1910036 - RNA, 13 nt, Human
cugcuuaacuuca

SEQ ID NO: 1910037 - RNA, 13 nt, Human
cugcuucagccuc

SEQ ID NO: 1910038 - RNA, 17 nt, Human
cugcuuaacuucacaua

SEQ ID NO: 1910039 - RNA, 15 nt, Human
cugcuuaacuucaca

SEQ ID NO: 1910040 - RNA, 16 nt, Human
cugcuucagccucccg

SEQ ID NO: 1910041 - RNA, 14 nt, Human
cugcuucagccucc

SEQ ID NO: 1910042 - RNA, 17 nt, Human
cugcuuuuuauggccug

SEQ ID NO: 1910043 - RNA, 22 nt, Human
cugcuuuuuaaagaaugcucuu

SEQ ID NO: 1910044 - RNA, 18 nt, Human
cugcuuuuuauggccugu

SEQ ID NO: 1910045 - RNA, 16 nt, Human
cuggaaauauuaagaa

SEQ ID NO: 1910046 - RNA, 17 nt, Human
cuggaacacuaaugagg

SEQ ID NO: 1910047 - RNA, 13 nt, Human
cuggaacccagac

SEQ ID NO: 1910048 - RNA, 13 nt, Human
cuggacugugugc

SEQ ID NO: 1910049 - RNA, 14 nt, Human
cuggaacccagacu

SEQ ID NO: 1910050 - RNA, 16 nt, Human
cuggaacccagacuca

SEQ ID NO: 1910051 - RNA, 18 nt, Human
cuggaacccagacucaga

SEQ ID NO: 1910052 - RNA, 19 nt, Human
cuggaacccagacucagac

SEQ ID NO: 1910053 - RNA, 22 nt, Human
cuggaacccagacucagacauu

SEQ ID NO: 1910054 - RNA, 12 nt, Human
cuggaaccucag

SEQ ID NO: 1910055 - RNA, 15 nt, Human
cuggaaccucagccu

SEQ ID NO: 1910056 - RNA, 16 nt, Human
cuggaaccucagccug

SEQ ID NO: 1910057 - RNA, 17 nt, Human
cuggaaccucagccugg

SEQ ID NO: 1910058 - RNA, 18 nt, Human
cuggaaccucagccuggc

SEQ ID NO: 1910059 - RNA, 20 nt, Human
cuggaaccucagccuggcca

SEQ ID NO: 1910060 - RNA, 22 nt, Human
cuggaaccucagccuggccaga

SEQ ID NO: 1910061 - RNA, 23 nt, Human
cuggaaccucagccuggccagac

SEQ ID NO: 1910062 - RNA, 11 nt, Human
cugcugacagu

SEQ ID NO: 1910063 - RNA, 23 nt, Human
cugcugacagacacaggcccggc

SEQ ID NO: 1910064 - RNA, 21 nt, Human
cugcugacagacacaggcccg

SEQ ID NO: 1910065 - RNA, 20 nt, Human
cugcugacagacacaggccc

SEQ ID NO: 1910066 - RNA, 19 nt, Human
cugcugacagacacaggcc

SEQ ID NO: 1910067 - RNA, 18 nt, Human
cugcugacagacacaggc

SEQ ID NO: 1910068 - RNA, 15 nt, Human
cugcugacagacaca

SEQ ID NO: 1910069 - RNA, 22 nt, Human
cugccugggaucccucauccuc

SEQ ID NO: 1910070 - RNA, 18 nt, Human
cugccucgaacuggcugc

SEQ ID NO: 1910071 - RNA, 17 nt, Human
cugccucgaacuggcug

SEQ ID NO: 1910072 - RNA, 15 nt, Human
cugccucgaacuggc

SEQ ID NO: 1910073 - RNA, 23 nt, Human
cugccugggaucccucauccuca

SEQ ID NO: 1910074 - RNA, 15 nt, Human
cugccuguucagcuc

SEQ ID NO: 1910075 - RNA, 14 nt, Human
cugccuguucagcu

SEQ ID NO: 1910076 - RNA, 16 nt, Human
cugccugguccucaca

SEQ ID NO: 1910077 - RNA, 16 nt, Human
cugcuaauuccccaga

SEQ ID NO: 1910078 - RNA, 23 nt, Human
cugcuacaaauacucuuaggaag

SEQ ID NO: 1910079 - RNA, 16 nt, Human
cugccuguugggccag

SEQ ID NO: 1910080 - RNA, 14 nt, Human
cugccuguugggcc

SEQ ID NO: 1910081 - RNA, 18 nt, Human
cugccuguugggccagga

SEQ ID NO: 1910082 - RNA, 19 nt, Human
cugccuguugggccaggag

SEQ ID NO: 1910083 - RNA, 15 nt, Human
cugcuacagagcaga

SEQ ID NO: 1910084 - RNA, 13 nt, Human
cugcucagcucug

SEQ ID NO: 1910085 - RNA, 14 nt, Human
cugcucagcucugg

SEQ ID NO: 1910086 - RNA, 16 nt, Human
cugcucagcucugggc

SEQ ID NO: 1910087 - RNA, 22 nt, Human
cugcucagcucugggccauucu

SEQ ID NO: 1910088 - RNA, 13 nt, Human
cugcucagcuucu

SEQ ID NO: 1910089 - RNA, 19 nt, Human
cugguuugccgguggugca

SEQ ID NO: 1910090 - RNA, 21 nt, Human
cuguaggaagguuaauguuca

SEQ ID NO: 1910091 - RNA, 14 nt, Human
cugucacucauugc

SEQ ID NO: 1910092 - RNA, 21 nt, Human
cugucacucauugcugagccu

SEQ ID NO: 1910093 - RNA, 22 nt, Human
cuguacuugcucuugaugccug

SEQ ID NO: 1910094 - RNA, 21 nt, Human
cuguacuugcucuugaugccu

SEQ ID NO: 1910095 - RNA, 23 nt, Human
cuguacuugcucuugaugccugg

SEQ ID NO: 1910096 - RNA, 22 nt, Human
cuguaaaaugcaugauuuugua

SEQ ID NO: 1910097 - RNA, 16 nt, Human
cugucauuugagcagg

SEQ ID NO: 1910098 - RNA, 18 nt, Human
cugucauuugagcagggc

SEQ ID NO: 1910099 - RNA, 17 nt, Human
cugucauuugagcaggg

SEQ ID NO: 1910100 - RNA, 20 nt, Human
cugucauuugagcagggcuc

SEQ ID NO: 1910101 - RNA, 18 nt, Human
cugucagccauuccuguu

SEQ ID NO: 1910102 - RNA, 22 nt, Human
cugucacucauugcugagccuc

SEQ ID NO: 1910103 - RNA, 23 nt, Human
cugucacucauugcugagccucu

SEQ ID NO: 1910104 - RNA, 17 nt, Human
cugucacugcucuggac

SEQ ID NO: 1910105 - RNA, 24 nt, Human
cugucacugcucuggacugugugg

SEQ ID NO: 1910106 - RNA, 13 nt, Human
cugucacuguggg

SEQ ID NO: 1910107 - RNA, 15 nt, Human
cugugaagagaacca

SEQ ID NO: 1910108 - RNA, 14 nt, Human
cugugaaggacccu

SEQ ID NO: 1910109 - RNA, 19 nt, Human
cugugcuccauggcugcca

SEQ ID NO: 1910110 - RNA, 15 nt, Human
cugugcucuggacag

SEQ ID NO: 1910111 - RNA, 14 nt, Human
cugugcucuggaca

SEQ ID NO: 1910112 - RNA, 21 nt, Human
cugugagaugcuagaacuccc

SEQ ID NO: 1910113 - RNA, 16 nt, Human
cugugagaugcuagaa

SEQ ID NO: 1910114 - RNA, 20 nt, Human
cugugagacucgagaacuuu

SEQ ID NO: 1910115 - RNA, 18 nt, Human
cugugagacucgagaacu

SEQ ID NO: 1910116 - RNA, 19 nt, Human
cugucgagaaacagccugu

SEQ ID NO: 1910117 - RNA, 13 nt, Human
cugucgcccaguc

SEQ ID NO: 1910118 - RNA, 23 nt, Human
cuggugacuuuccucuuuggucu

SEQ ID NO: 1910119 - RNA, 21 nt, Human
cuggugagagggccgggcaga

SEQ ID NO: 1910120 - RNA, 22 nt, Human
cuggugagagggccgggcagag

SEQ ID NO: 1910121 - RNA, 23 nt, Human
cuggugagagggccgggcagagg

SEQ ID NO: 1910122 - RNA, 14 nt, Human
cuggguucacugca

SEQ ID NO: 1910123 - RNA, 15 nt, Human
cuggugacuuuccuc

SEQ ID NO: 1910124 - RNA, 20 nt, Human
cuggugacuuuccucuuugg

SEQ ID NO: 1910125 - RNA, 21 nt, Human
cuggugacuuuccucuuuggu

SEQ ID NO: 1910126 - RNA, 23 nt, Human
cuggguggcaccagcagccugga

SEQ ID NO: 1910127 - RNA, 22 nt, Human
cuggguggcaccagcagccugg

SEQ ID NO: 1910128 - RNA, 11 nt, Human
cuggggccucc

SEQ ID NO: 1910129 - RNA, 12 nt, Human
cuggggccucca

SEQ ID NO: 1910130 - RNA, 15 nt, Human
cuggggccuccagaa

SEQ ID NO: 1910131 - RNA, 17 nt, Human
cuggggccuccagaacu

SEQ ID NO: 1910132 - RNA, 16 nt, Human
cuggguguggcgcagc

SEQ ID NO: 1910133 - RNA, 17 nt, Human
cuggguguggcgcagca

SEQ ID NO: 1910134 - RNA, 17 nt, Human
cugggcagaaggaagac

SEQ ID NO: 1910135 - RNA, 18 nt, Human
cuggggccaggcuggguc

SEQ ID NO: 1910136 - RNA, 16 nt, Human
cuggggccgaaagaac

SEQ ID NO: 1910137 - RNA, 22 nt, Human
cuggggaugucucucaugacca

SEQ ID NO: 1910138 - RNA, 16 nt, Human
cuggggauugggcccc

SEQ ID NO: 1910139 - RNA, 22 nt, Human
cuggggauugggccccugccag

SEQ ID NO: 1910140 - RNA, 18 nt, Human
cuggggauugggccccug

SEQ ID NO: 1910141 - RNA, 18 nt, Human
cugggcagaaggaagacu

SEQ ID NO: 1910142 - RNA, 16 nt, Human
cugggcagaaggaaga

SEQ ID NO: 1910143 - RNA, 15 nt, Human
cugggacguggcuca

SEQ ID NO: 1910144 - RNA, 16 nt, Human
cugggacguggcucag

SEQ ID NO: 1910145 - RNA, 17 nt, Human
cugggacguggcucagc

SEQ ID NO: 1910146 - RNA, 18 nt, Human
cugggacguggcucagcc

SEQ ID NO: 1910147 - RNA, 20 nt, Human
cuggacugucuucucccugc

SEQ ID NO: 1910148 - RNA, 16 nt, Human
cuggacugugugcuca

SEQ ID NO: 1910149 - RNA, 17 nt, Human
cuggagaccagggagcc

SEQ ID NO: 1910150 - RNA, 18 nt, Human
cuggagaccagggagccu

SEQ ID NO: 1910151 - RNA, 19 nt, Human
cuggagaccagggagccuu

SEQ ID NO: 1910152 - RNA, 12 nt, Human
cuggcagcucag

SEQ ID NO: 1910153 - RNA, 17 nt, Human
cuggagacuaaccccac

SEQ ID NO: 1910154 - RNA, 13 nt, Human
cuggcagcucaga

SEQ ID NO: 1910155 - RNA, 14 nt, Human
cuggcagcucagag

SEQ ID NO: 1910156 - RNA, 13 nt, Human
cuggccccucagg

SEQ ID NO: 1910157 - RNA, 23 nt, Human
cuggccccgccgccugguacuca

SEQ ID NO: 1910158 - RNA, 12 nt, Human
cuggccccgccg

SEQ ID NO: 1910159 - RNA, 14 nt, Human
cuggccccgccgcc

SEQ ID NO: 1910160 - RNA, 16 nt, Human
cuggccccgccgccug

SEQ ID NO: 1910161 - RNA, 22 nt, Human
cuggccccgccgccugguacuc

SEQ ID NO: 1910162 - RNA, 15 nt, Human
cuggcagcucagaga

SEQ ID NO: 1910163 - RNA, 12 nt, Human
cuggcagcucug

SEQ ID NO: 1910164 - RNA, 17 nt, Human
cuggcagcucuggacag

SEQ ID NO: 1910165 - RNA, 18 nt, Human
cuggcagcucuggacagc

SEQ ID NO: 1910166 - RNA, 20 nt, Human
cuggcagcucuggacagccc

SEQ ID NO: 1910167 - RNA, 21 nt, Human
cuggcagcucuggacagcccc

SEQ ID NO: 1910168 - RNA, 13 nt, Human
cugggacacaguu

SEQ ID NO: 1910169 - RNA, 12 nt, Human
cugggacacagu

SEQ ID NO: 1910170 - RNA, 16 nt, Human
cuggcuccaggccagg

SEQ ID NO: 1910171 - RNA, 13 nt, Human
cuggcucaucucu

SEQ ID NO: 1910172 - RNA, 19 nt, Human
cuggcuccaaacccucgag

SEQ ID NO: 1910173 - RNA, 20 nt, Human
cuggcuccaaacccucgagg

SEQ ID NO: 1910174 - RNA, 14 nt, Human
cuggcuccagaugc

SEQ ID NO: 1910175 - RNA, 20 nt, Human
cuggcuccagaugcagggca

SEQ ID NO: 1910176 - RNA, 21 nt, Human
cuggcuccagaugcagggcag

SEQ ID NO: 1910177 - RNA, 17 nt, Human
cuggccccucagggucc

SEQ ID NO: 1910178 - RNA, 18 nt, Human
cuggccccucaggguccc

SEQ ID NO: 1910179 - RNA, 20 nt, Human
cuggccccucagggucccug

SEQ ID NO: 1910180 - RNA, 21 nt, Human
cuggccccucagggucccugg

SEQ ID NO: 1910181 - RNA, 17 nt, Human
auugcuaucuauugaua

SEQ ID NO: 1910182 - RNA, 21 nt, Human
auugcuaucuauugauaauuu

SEQ ID NO: 1910183 - RNA, 22 nt, Human
auugcuacuguccuacccaccc

SEQ ID NO: 1910184 - RNA, 20 nt, Human
auugcuacuguccuacccac

SEQ ID NO: 1910185 - RNA, 18 nt, Human
auugauagaguguuauca

SEQ ID NO: 1910186 - RNA, 18 nt, Human
auugauauaaauaaaaca

SEQ ID NO: 1910187 - RNA, 19 nt, Human
auugauauaaauaaaacau

SEQ ID NO: 1910188 - RNA, 17 nt, Human
auugauaugcuuauaca

SEQ ID NO: 1910189 - RNA, 15 nt, Human
auugcuacuguccua

SEQ ID NO: 1910190 - RNA, 21 nt, Human
auugauaagaaccuuuugagu

SEQ ID NO: 1910191 - RNA, 15 nt, Human
auugagucaaauggu

SEQ ID NO: 1910192 - RNA, 23 nt, Human
auugagguguauggagagaaaac

SEQ ID NO: 1910193 - RNA, 14 nt, Human
auucuucugcuuca

SEQ ID NO: 1910194 - RNA, 16 nt, Human
auucuugaaagcugug

SEQ ID NO: 1910195 - RNA, 14 nt, Human
auucuugaagucag

SEQ ID NO: 1910196 - RNA, 11 nt, Human
auucuuuccug

SEQ ID NO: 1910197 - RNA, 12 nt, Human
auucuucugcuu

SEQ ID NO: 1910198 - RNA, 11 nt, Human
auucuucugcu

SEQ ID NO: 1910199 - RNA, 16 nt, Human
auucauaguaacuucu

SEQ ID NO: 1910200 - RNA, 17 nt, Human
auucauaguaacuucuu

SEQ ID NO: 1910201 - RNA, 18 nt, Human
auucauaguaacuucuua

SEQ ID NO: 1910202 - RNA, 13 nt, Human
auucuuuccugag

SEQ ID NO: 1910203 - RNA, 23 nt, Human
auuguaauaggcguaacuaauuu

SEQ ID NO: 1910204 - RNA, 18 nt, Human
auugcuugagcucaggag

SEQ ID NO: 1910205 - RNA, 14 nt, Human
auuguaaaauggug

SEQ ID NO: 1910206 - RNA, 16 nt, Human
auuguuagucucuuga

SEQ ID NO: 1910207 - RNA, 19 nt, Human
auugugugugcucugcuuc

SEQ ID NO: 1910208 - RNA, 22 nt, Human
auugugugugcagacuucagga

SEQ ID NO: 1910209 - RNA, 19 nt, Human
auugugugugcagacuuca

SEQ ID NO: 1910210 - RNA, 21 nt, Human
auugugucucuugguccugcu

SEQ ID NO: 1910211 - RNA, 23 nt, Human
auugugucucuugguccugcugc

SEQ ID NO: 1910212 - RNA, 12 nt, Human
auugcugcuuga

SEQ ID NO: 1910213 - RNA, 23 nt, Human
auugcugauggugcaaugaccuu

SEQ ID NO: 1910214 - RNA, 23 nt, Human
auugcugagccucugcuccccag

SEQ ID NO: 1910215 - RNA, 14 nt, Human
auugcuugagcuca

SEQ ID NO: 1910216 - RNA, 21 nt, Human
auugcugagagaaauauggaa

SEQ ID NO: 1910217 - RNA, 22 nt, Human
auugcugagagaaauauggaac

SEQ ID NO: 1910218 - RNA, 23 nt, Human
auugcugagagaaauauggaacu

SEQ ID NO: 1910219 - RNA, 14 nt, Human
auugcugagccucu

SEQ ID NO: 1910220 - RNA, 16 nt, Human
auugcugagccucugc

SEQ ID NO: 1910221 - RNA, 22 nt, Human
auugcugagccucugcucccca

SEQ ID NO: 1910222 - RNA, 15 nt, Human
auugcugauggugca

SEQ ID NO: 1910223 - RNA, 16 nt, Human
auugcugauggugcaa

SEQ ID NO: 1910224 - RNA, 18 nt, Human
auugcugauggugcaaug

SEQ ID NO: 1910225 - RNA, 19 nt, Human
auugcugauggugcaauga

SEQ ID NO: 1910226 - RNA, 16 nt, Human
auuguugagcuauugc

SEQ ID NO: 1910227 - RNA, 19 nt, Human
auuguugagcuauugcugu

SEQ ID NO: 1910228 - RNA, 22 nt, Human
auguuucuucuagguucuaaaa

SEQ ID NO: 1910229 - RNA, 18 nt, Human
auguuugccucugccucu

SEQ ID NO: 1910230 - RNA, 21 nt, Human
auuacagaugggcaaauuaag

SEQ ID NO: 1910231 - RNA, 20 nt, Human
auuacaggcaccugccacca

SEQ ID NO: 1910232 - RNA, 22 nt, Human
auuacaggcaccugccaccaug

SEQ ID NO: 1910233 - RNA, 16 nt, Human
auuacaggugugaacc

SEQ ID NO: 1910234 - RNA, 19 nt, Human
auuacagaugggcaaauua

SEQ ID NO: 1910235 - RNA, 17 nt, Human
auuacaggaaguacugg

SEQ ID NO: 1910236 - RNA, 19 nt, Human
auuacaguggggaaugaag

SEQ ID NO: 1910237 - RNA, 19 nt, Human
auuagcauuugucaacaaa

SEQ ID NO: 1910238 - RNA, 18 nt, Human
auuagccgggcauggugg

SEQ ID NO: 1910239 - RNA, 12 nt, Human
auuagcugcuuc

SEQ ID NO: 1910240 - RNA, 13 nt, Human
auuaauucuauaa

SEQ ID NO: 1910241 - RNA, 19 nt, Human
auuaauucaccuuccagug

SEQ ID NO: 1910242 - RNA, 14 nt, Human
auuaauucuauaag

SEQ ID NO: 1910243 - RNA, 12 nt, Human
auuaauugcuuu

SEQ ID NO: 1910244 - RNA, 13 nt, Human
auuaauugcuuug

SEQ ID NO: 1910245 - RNA, 14 nt, Human
auuaauugcuuuga

SEQ ID NO: 1910246 - RNA, 18 nt, Human
auuaggugugacugaauu

SEQ ID NO: 1910247 - RNA, 16 nt, Human
auuaggugugacugaa

SEQ ID NO: 1910248 - RNA, 18 nt, Human
auuagggagaaaauucaa

SEQ ID NO: 1910249 - RNA, 20 nt, Human
auuagggagaaaauucaauu

SEQ ID NO: 1910250 - RNA, 23 nt, Human
auuagggagaaaauucaauugua

SEQ ID NO: 1910251 - RNA, 13 nt, Human
auuagguauuuug

SEQ ID NO: 1910252 - RNA, 13 nt, Human
auuagcugcuucu

SEQ ID NO: 1910253 - RNA, 21 nt, Human
auuagcugcuucuauguuuca

SEQ ID NO: 1910254 - RNA, 21 nt, Human
auuaggugugacugaauuucu

SEQ ID NO: 1910255 - RNA, 18 nt, Human
auuaugaaacuuuuggaa

SEQ ID NO: 1910256 - RNA, 19 nt, Human
auucacaagacccaaaagg

SEQ ID NO: 1910257 - RNA, 17 nt, Human
auucaauuccucuggga

SEQ ID NO: 1910258 - RNA, 18 nt, Human
auucaauuccucugggaa

SEQ ID NO: 1910259 - RNA, 13 nt, Human
auucaauuguaaa

SEQ ID NO: 1910260 - RNA, 14 nt, Human
auucaauuguaaau

SEQ ID NO: 1910261 - RNA, 18 nt, Human
auucaauuguaaauugaa

SEQ ID NO: 1910262 - RNA, 20 nt, Human
auucaaugccccugaauuua

SEQ ID NO: 1910263 - RNA, 18 nt, Human
auucaaugccccugaauu

SEQ ID NO: 1910264 - RNA, 16 nt, Human
auucaaauguauuaca

SEQ ID NO: 1910265 - RNA, 14 nt, Human
auucaauuccucug

SEQ ID NO: 1910266 - RNA, 16 nt, Human
auucaauuccucuggg

SEQ ID NO: 1910267 - RNA, 23 nt, Human
auuaugcaugaaguaauaugcac

SEQ ID NO: 1910268 - RNA, 21 nt, Human
auuaugaugugggucaaggaa

SEQ ID NO: 1910269 - RNA, 23 nt, Human
auuaugagacacaggaugaagca

SEQ ID NO: 1910270 - RNA, 14 nt, Human
auucauaaugacuu

SEQ ID NO: 1910271 - RNA, 15 nt, Human
auucauaaugacuua

SEQ ID NO: 1910272 - RNA, 21 nt, Human
auucauaauuauuauuuggcc

SEQ ID NO: 1910273 - RNA, 19 nt, Human
auucauaaugacuuaagca

SEQ ID NO: 1910274 - RNA, 22 nt, Human
auucauagcagcuuauucacaa

SEQ ID NO: 1910275 - RNA, 19 nt, Human
auucauagcagcuuauuca

SEQ ID NO: 1910276 - RNA, 22 nt, Human
auucacaguucuuugggccaga

SEQ ID NO: 1910277 - RNA, 19 nt, Human
auuuuauagcuacuaauuu

SEQ ID NO: 1910278 - RNA, 17 nt, Human
auuuguuuguuuuccuu

SEQ ID NO: 1910279 - RNA, 17 nt, Human
auuuuauagcuacuaau

SEQ ID NO: 1910280 - RNA, 23 nt, Human
auuuguuugaacugauaaagaug

SEQ ID NO: 1910281 - RNA, 22 nt, Human
auuuguuugaacugauaaagau

SEQ ID NO: 1910282 - RNA, 22 nt, Human
auuuguggggagggauuugggg

SEQ ID NO: 1910283 - RNA, 14 nt, Human
auuuguguauuuaa

SEQ ID NO: 1910284 - RNA, 22 nt, Human
auuuguguauuuaacagggagg

SEQ ID NO: 1910285 - RNA, 13 nt, Human
auuugcuccuuuc

SEQ ID NO: 1910286 - RNA, 18 nt, Human
auuugugauagcacuuuc

SEQ ID NO: 1910287 - RNA, 16 nt, Human
auuugugcauuuucua

SEQ ID NO: 1910288 - RNA, 20 nt, Human
auuugugauacaaugcugug

SEQ ID NO: 1910289 - RNA, 15 nt, Human
auuugugauagcacu

SEQ ID NO: 1910290 - RNA, 17 nt, Human
auuugugauagcacuuu

SEQ ID NO: 1910291 - RNA, 17 nt, Human
auuugugauacaaugcu

SEQ ID NO: 1910292 - RNA, 15 nt, Human
auuugugauacaaug

SEQ ID NO: 1910293 - RNA, 21 nt, Human
auuuuaugccuuuuauuucuu

SEQ ID NO: 1910294 - RNA, 20 nt, Human
auuuuaugccuuuuauuucu

SEQ ID NO: 1910295 - RNA, 16 nt, Human
auuugcauugaacaca

SEQ ID NO: 1910296 - RNA, 21 nt, Human
auuugcauugaacacaaacug

SEQ ID NO: 1910297 - RNA, 22 nt, Human
auuugcauugaacacaaacugu

SEQ ID NO: 1910298 - RNA, 20 nt, Human
auuugcuaugagcuggggau

SEQ ID NO: 1910299 - RNA, 16 nt, Human
auuugcuaugagcugg

SEQ ID NO: 1910300 - RNA, 13 nt, Human
auuugauugauuu

SEQ ID NO: 1910301 - RNA, 16 nt, Human
auuugauugauuugaa

SEQ ID NO: 1910302 - RNA, 18 nt, Human
auuugcauuaaauucaca

SEQ ID NO: 1910303 - RNA, 19 nt, Human
auuugcauuaaauucacaa

SEQ ID NO: 1910304 - RNA, 23 nt, Human
auuugcauuaaauucacaaacuu

SEQ ID NO: 1910305 - RNA, 22 nt, Human
caaagcacgaaauguuauuuuu

SEQ ID NO: 1910306 - RNA, 20 nt, Human
caaagcacgaaauguuauuu

SEQ ID NO: 1910307 - RNA, 12 nt, Human
caaagcagacag

SEQ ID NO: 1910308 - RNA, 13 nt, Human
caaagcagacagc

SEQ ID NO: 1910309 - RNA, 15 nt, Human
caaagcagacagcuc

SEQ ID NO: 1910310 - RNA, 16 nt, Human
caaagcagacagcucc

SEQ ID NO: 1910311 - RNA, 17 nt, Human
caaagcagacagcucca

SEQ ID NO: 1910312 - RNA, 19 nt, Human
caaagcagacagcuccacc

SEQ ID NO: 1910313 - RNA, 12 nt, Human
caaagcagccac

SEQ ID NO: 1910314 - RNA, 13 nt, Human
caaagcagccacg

SEQ ID NO: 1910315 - RNA, 20 nt, Human
caaagaugggugaaggcugg

SEQ ID NO: 1910316 - RNA, 21 nt, Human
caaagaugggugaaggcuggc

SEQ ID NO: 1910317 - RNA, 22 nt, Human
caaagaugggugaaggcuggca

SEQ ID NO: 1910318 - RNA, 23 nt, Human
caaagauauuuugcuuugugauu

SEQ ID NO: 1910319 - RNA, 22 nt, Human
caaagauauuuugcuuugugau

SEQ ID NO: 1910320 - RNA, 21 nt, Human
caaagucucuggaauuugaaa

SEQ ID NO: 1910321 - RNA, 14 nt, Human
caaaguagaagucu

SEQ ID NO: 1910322 - RNA, 21 nt, Human
caaaguagaagucuuagaugu

SEQ ID NO: 1910323 - RNA, 22 nt, Human
caaaguacacuguuucaaacuu

SEQ ID NO: 1910324 - RNA, 15 nt, Human
caaagcagugcaugc

SEQ ID NO: 1910325 - RNA, 17 nt, Human
caaagcagugcaugcug

SEQ ID NO: 1910326 - RNA, 15 nt, Human
caacacgcaggagca

SEQ ID NO: 1910327 - RNA, 19 nt, Human
caacacgcaccugccucag

SEQ ID NO: 1910328 - RNA, 16 nt, Human
caacacgcaggagcac

SEQ ID NO: 1910329 - RNA, 14 nt, Human
caacacuaacauga

SEQ ID NO: 1910330 - RNA, 20 nt, Human
caaauggaaaugggcagagc

SEQ ID NO: 1910331 - RNA, 21 nt, Human
caaauggaaaugggcagagca

SEQ ID NO: 1910332 - RNA, 22 nt, Human
caaauggaaaugggcagagcag

SEQ ID NO: 1910333 - RNA, 20 nt, Human
caacaccucugcacaagcug

SEQ ID NO: 1910334 - RNA, 15 nt, Human
caacacgcaccugcc

SEQ ID NO: 1910335 - RNA, 17 nt, Human
caacacgcaccugccuc

SEQ ID NO: 1910336 - RNA, 17 nt, Human
caacaaucccaaggccc

SEQ ID NO: 1910337 - RNA, 15 nt, Human
caacaccaagcacag

SEQ ID NO: 1910338 - RNA, 22 nt, Human
caacaccaagcacagcagccug

SEQ ID NO: 1910339 - RNA, 24 nt, Human
caaacccagacggcuccacuagga

SEQ ID NO: 1910340 - RNA, 20 nt, Human
caaacccagacggcuccacu

SEQ ID NO: 1910341 - RNA, 21 nt, Human
caaaccaucauugaaaucuuu

SEQ ID NO: 1910342 - RNA, 19 nt, Human
caaaccaucauugaaaucu

SEQ ID NO: 1910343 - RNA, 16 nt, Human
caaaagaugcuucuca

SEQ ID NO: 1910344 - RNA, 20 nt, Human
caaaaaaaaaaaaaaauuag

SEQ ID NO: 1910345 - RNA, 18 nt, Human
caaaagaugcuucucacu

SEQ ID NO: 1910346 - RNA, 19 nt, Human
caaaaggaucuuuguggcc

SEQ ID NO: 1910347 - RNA, 20 nt, Human
caaaaggaucuuuguggcca

SEQ ID NO: 1910348 - RNA, 15 nt, Human
caaaaggcagaagca

SEQ ID NO: 1910349 - RNA, 21 nt, Human
caaaaggaucuuuguggccaa

SEQ ID NO: 1910350 - RNA, 22 nt, Human
caaaaggaucuuuguggccaag

SEQ ID NO: 1910351 - RNA, 24 nt, Human
caaaaggaucuuuguggccaagga

SEQ ID NO: 1910352 - RNA, 20 nt, Human
caaagauauuuugcuuugug

SEQ ID NO: 1910353 - RNA, 18 nt, Human
caaagauauuuugcuuug

SEQ ID NO: 1910354 - RNA, 16 nt, Human
cacccucccacccggc

SEQ ID NO: 1910355 - RNA, 17 nt, Human
cacccucauucuacuga

SEQ ID NO: 1910356 - RNA, 14 nt, Human
cacccucaggcagg

SEQ ID NO: 1910357 - RNA, 16 nt, Human
cacccuggggagaaag

SEQ ID NO: 1910358 - RNA, 15 nt, Human
cacccuggggagaaa

SEQ ID NO: 1910359 - RNA, 17 nt, Human
cacccugaaagcccuga

SEQ ID NO: 1910360 - RNA, 16 nt, Human
cacccucuaaauggga

SEQ ID NO: 1910361 - RNA, 13 nt, Human
caccucagccucc

SEQ ID NO: 1910362 - RNA, 23 nt, Human
caccuacaguguacagucuugua

SEQ ID NO: 1910363 - RNA, 20 nt, Human
caccuacaguguacagucuu

SEQ ID NO: 1910364 - RNA, 14 nt, Human
caccucagccuccc

SEQ ID NO: 1910365 - RNA, 17 nt, Human
cacccuggggagaaagu

SEQ ID NO: 1910366 - RNA, 20 nt, Human
caccuaauccaggcagaucc

SEQ ID NO: 1910367 - RNA, 21 nt, Human
caccuaauccaggcagaucca

SEQ ID NO: 1910368 - RNA, 22 nt, Human
caccuaauccaggcagauccag

SEQ ID NO: 1910369 - RNA, 17 nt, Human
caccuacaguguacagu

SEQ ID NO: 1910370 - RNA, 16 nt, Human
caccuacaguguacag

SEQ ID NO: 1910371 - RNA, 13 nt, Human
caccuacagugua

SEQ ID NO: 1910372 - RNA, 23 nt, Human
caccugccucggccucccaaagu

SEQ ID NO: 1910373 - RNA, 14 nt, Human
caccugccccucaa

SEQ ID NO: 1910374 - RNA, 15 nt, Human
caccugccccucaac

SEQ ID NO: 1910375 - RNA, 16 nt, Human
caccugccccucaacu

SEQ ID NO: 1910376 - RNA, 13 nt, Human
caccuuggcugca

SEQ ID NO: 1910377 - RNA, 15 nt, Human
caccuuggcucaagu

SEQ ID NO: 1910378 - RNA, 14 nt, Human
caccuuggcugcag

SEQ ID NO: 1910379 - RNA, 17 nt, Human
caccugccuguugggcc

SEQ ID NO: 1910380 - RNA, 13 nt, Human
caccugccucagg

SEQ ID NO: 1910381 - RNA, 14 nt, Human
caccugccucagga

SEQ ID NO: 1910382 - RNA, 20 nt, Human
caccugccucaggacugcga

SEQ ID NO: 1910383 - RNA, 19 nt, Human
caccugccuguugggccag

SEQ ID NO: 1910384 - RNA, 24 nt, Human
caccugccuguugggccaggagcc

SEQ ID NO: 1910385 - RNA, 11 nt, Human
caccccagccc

SEQ ID NO: 1910386 - RNA, 12 nt, Human
cacucuuuguaa

SEQ ID NO: 1910387 - RNA, 15 nt, Human
cacucuuuugcuuua

SEQ ID NO: 1910388 - RNA, 23 nt, Human
cacucuuuugcuuuauuccagaa

SEQ ID NO: 1910389 - RNA, 15 nt, Human
cacucuuuguaagag

SEQ ID NO: 1910390 - RNA, 23 nt, Human
cacucuuggagccugcagagcug

SEQ ID NO: 1910391 - RNA, 22 nt, Human
cacucuuggagccugcagagcu

SEQ ID NO: 1910392 - RNA, 21 nt, Human
cacucuuggagccugcagagc

SEQ ID NO: 1910393 - RNA, 12 nt, Human
cacuccccugcu

SEQ ID NO: 1910394 - RNA, 13 nt, Human
cacuccccugcug

SEQ ID NO: 1910395 - RNA, 14 nt, Human
cacuccccugcugg

SEQ ID NO: 1910396 - RNA, 15 nt, Human
cacuccccugcuggg

SEQ ID NO: 1910397 - RNA, 17 nt, Human
cacugaauuccauuuuu

SEQ ID NO: 1910398 - RNA, 16 nt, Human
cacuccagccugggug

SEQ ID NO: 1910399 - RNA, 16 nt, Human
cacucauugcugagcc

SEQ ID NO: 1910400 - RNA, 19 nt, Human
cacucauugcugagccucu

SEQ ID NO: 1910401 - RNA, 21 nt, Human
cacucauugcugagccucugc

SEQ ID NO: 1910402 - RNA, 23 nt, Human
cacucauugcugagccucugcuc

SEQ ID NO: 1910403 - RNA, 17 nt, Human
cacuuauucucaagaag

SEQ ID NO: 1910404 - RNA, 12 nt, Human
cacuuaugauuu

SEQ ID NO: 1910405 - RNA, 14 nt, Human
cacuuguccagcug

SEQ ID NO: 1910406 - RNA, 15 nt, Human
cacuuguccagcuga

SEQ ID NO: 1910407 - RNA, 16 nt, Human
cacuuacacuuuaugc

SEQ ID NO: 1910408 - RNA, 18 nt, Human
cacuuacacuuuaugcac

SEQ ID NO: 1910409 - RNA, 20 nt, Human
cacugguugcacuuaugauu

SEQ ID NO: 1910410 - RNA, 15 nt, Human
cacugguugcacuua

SEQ ID NO: 1910411 - RNA, 19 nt, Human
cacugggguccagggagca

SEQ ID NO: 1910412 - RNA, 22 nt, Human
cacugguucuucuuggucucag

SEQ ID NO: 1910413 - RNA, 12 nt, Human
cacugcagccuc

SEQ ID NO: 1910414 - RNA, 21 nt, Human
cacugcagaagacaguauggc

SEQ ID NO: 1910415 - RNA, 20 nt, Human
cacugcacuccagccugggu

SEQ ID NO: 1910416 - RNA, 15 nt, Human
cacugcacuccagcc

SEQ ID NO: 1910417 - RNA, 16 nt, Human
cacugcacuccagccu

SEQ ID NO: 1910418 - RNA, 18 nt, Human
cacugcacuccagccugg

SEQ ID NO: 1910419 - RNA, 19 nt, Human
cacugcacuccagccuggg

SEQ ID NO: 1910420 - RNA, 19 nt, Human
cacugcacuauagccuagg

SEQ ID NO: 1910421 - RNA, 13 nt, Human
cacugcagccuca

SEQ ID NO: 1910422 - RNA, 16 nt, Human
cacugcauaccaaccu

SEQ ID NO: 1910423 - RNA, 16 nt, Human
cacugcauguuuguga

SEQ ID NO: 1910424 - RNA, 18 nt, Human
cacugggagaaaugaaaa

SEQ ID NO: 1910425 - RNA, 14 nt, Human
cacuggggccuaca

SEQ ID NO: 1910426 - RNA, 16 nt, Human
cacuggggccuacagc

SEQ ID NO: 1910427 - RNA, 13 nt, Human
cacugggaaacag

SEQ ID NO: 1910428 - RNA, 18 nt, Human
cacugggaaacagaggcu

SEQ ID NO: 1910429 - RNA, 21 nt, Human
caagcuaauaaaauaucauuc

SEQ ID NO: 1910430 - RNA, 19 nt, Human
caagcuaauaaaauaucau

SEQ ID NO: 1910431 - RNA, 17 nt, Human
caagcuaauaaaauauc

SEQ ID NO: 1910432 - RNA, 16 nt, Human
caagcuaauaaaauau

SEQ ID NO: 1910433 - RNA, 22 nt, Human
caagcuaauaaaauaucauuca

SEQ ID NO: 1910434 - RNA, 23 nt, Human
caagcuaauaaaauaucauucag

SEQ ID NO: 1910435 - RNA, 21 nt, Human
caagcucagaggcgcacugug

SEQ ID NO: 1910436 - RNA, 13 nt, Human
caagcucugcucc

SEQ ID NO: 1910437 - RNA, 12 nt, Human
caagcuccaagc

SEQ ID NO: 1910438 - RNA, 14 nt, Human
caagcucugcuccu

SEQ ID NO: 1910439 - RNA, 13 nt, Human
caagcugcacccu

SEQ ID NO: 1910440 - RNA, 14 nt, Human
caagcugcacccuc

SEQ ID NO: 1910441 - RNA, 18 nt, Human
caagcugcacccucaggc

SEQ ID NO: 1910442 - RNA, 20 nt, Human
caagcugcacccucaggcag

SEQ ID NO: 1910443 - RNA, 17 nt, Human
caaguccacaguggaac

SEQ ID NO: 1910444 - RNA, 14 nt, Human
caagucaaauuaau

SEQ ID NO: 1910445 - RNA, 15 nt, Human
caagucaaauuaaua

SEQ ID NO: 1910446 - RNA, 16 nt, Human
caagucaaauuaauaa

SEQ ID NO: 1910447 - RNA, 13 nt, Human
caagucaagugaa

SEQ ID NO: 1910448 - RNA, 17 nt, Human
caagucaagugaaaaag

SEQ ID NO: 1910449 - RNA, 17 nt, Human
caaggccaaaggaagca

SEQ ID NO: 1910450 - RNA, 18 nt, Human
caaggccaaaggaagcac

SEQ ID NO: 1910451 - RNA, 15 nt, Human
caaggccaaaggaag

SEQ ID NO: 1910452 - RNA, 16 nt, Human
caaggccaaaggaagc

SEQ ID NO: 1910453 - RNA, 19 nt, Human
caauaaagcagcguuucua

SEQ ID NO: 1910454 - RNA, 14 nt, Human
caauaaagcauuua

SEQ ID NO: 1910455 - RNA, 15 nt, Human
caauaaagcauuuau

SEQ ID NO: 1910456 - RNA, 16 nt, Human
caauaaagcauuuaua

SEQ ID NO: 1910457 - RNA, 19 nt, Human
caauaaagcauuuauaaau

SEQ ID NO: 1910458 - RNA, 13 nt, Human
cacacaucaggag

SEQ ID NO: 1910459 - RNA, 20 nt, Human
cacacaugagcaucaggcca

SEQ ID NO: 1910460 - RNA, 23 nt, Human
cacacagugagucgaggacaggg

SEQ ID NO: 1910461 - RNA, 21 nt, Human
cacacagugagucgaggacag

SEQ ID NO: 1910462 - RNA, 15 nt, Human
cacacauacacacac

SEQ ID NO: 1910463 - RNA, 23 nt, Human
cacacaguauuacuucugcuaca

SEQ ID NO: 1910464 - RNA, 20 nt, Human
cacacaguauuacuucugcu

SEQ ID NO: 1910465 - RNA, 18 nt, Human
cacacagugagucgagga

SEQ ID NO: 1910466 - RNA, 12 nt, Human
cacacagggcag

SEQ ID NO: 1910467 - RNA, 21 nt, Human
cacagacauacuaaccagcag

SEQ ID NO: 1910468 - RNA, 19 nt, Human
cacagacauacuaaccagc

SEQ ID NO: 1910469 - RNA, 11 nt, Human
cacagccucug

SEQ ID NO: 1910470 - RNA, 13 nt, Human
cacagacccugcc

SEQ ID NO: 1910471 - RNA, 23 nt, Human
cacagaaaauggaagacagcucu

SEQ ID NO: 1910472 - RNA, 19 nt, Human
cacagaaaauucuucucca

SEQ ID NO: 1910473 - RNA, 18 nt, Human
cacagacauacuaaccag

SEQ ID NO: 1910474 - RNA, 21 nt, Human
cacacaugagcaucaggccag

SEQ ID NO: 1910475 - RNA, 22 nt, Human
cacacaugagcaucaggccagg

SEQ ID NO: 1910476 - RNA, 18 nt, Human
cacagaaaauggaagaca

SEQ ID NO: 1910477 - RNA, 19 nt, Human
cacagaaaauggaagacag

SEQ ID NO: 1910478 - RNA, 20 nt, Human
cacagaaaauggaagacagc

SEQ ID NO: 1910479 - RNA, 22 nt, Human
cacagaaaauggaagacagcuc

SEQ ID NO: 1910480 - RNA, 21 nt, Human
cacaguauuacuucugcuaca

SEQ ID NO: 1910481 - RNA, 20 nt, Human
cacaguauuacuucugcuac

SEQ ID NO: 1910482 - RNA, 19 nt, Human
cacaggggaaaagaggagu

SEQ ID NO: 1910483 - RNA, 23 nt, Human
cacaggccugagauuucaucugc

SEQ ID NO: 1910484 - RNA, 22 nt, Human
cacaggccugagauuucaucug

SEQ ID NO: 1910485 - RNA, 18 nt, Human
cacaggucuuuccuaagg

SEQ ID NO: 1910486 - RNA, 20 nt, Human
cacaggucuuuccuaaggcu

SEQ ID NO: 1910487 - RNA, 17 nt, Human
cacaggggaaaagagga

SEQ ID NO: 1910488 - RNA, 18 nt, Human
cacaggggaaaagaggag

SEQ ID NO: 1910489 - RNA, 20 nt, Human
cacaggccugagauuucauc

SEQ ID NO: 1910490 - RNA, 19 nt, Human
cacaggccugagauuucau

SEQ ID NO: 1910491 - RNA, 15 nt, Human
cacaggccugagauu

SEQ ID NO: 1910492 - RNA, 14 nt, Human
cacaggccugagau

SEQ ID NO: 1910493 - RNA, 13 nt, Human
cacaggccugaga

SEQ ID NO: 1910494 - RNA, 19 nt, Human
cacagcgcuggccgggacc

SEQ ID NO: 1910495 - RNA, 22 nt, Human
cacagcgcuggccgggaccccg

SEQ ID NO: 1910496 - RNA, 15 nt, Human
caauucuugccaaau

SEQ ID NO: 1910497 - RNA, 12 nt, Human
caauggcagccu

SEQ ID NO: 1910498 - RNA, 11 nt, Human
caauggcagcc

SEQ ID NO: 1910499 - RNA, 14 nt, Human
caauggcagaugua

SEQ ID NO: 1910500 - RNA, 13 nt, Human
caauuuaaagcaa

SEQ ID NO: 1910501 - RNA, 17 nt, Human
cacaagagcccaggccu

SEQ ID NO: 1910502 - RNA, 17 nt, Human
cacaagcuccaagcucc

SEQ ID NO: 1910503 - RNA, 23 nt, Human
cacaagcuccaagcucccaggca

SEQ ID NO: 1910504 - RNA, 17 nt, Human
cacaagcugcacccuca

SEQ ID NO: 1910505 - RNA, 23 nt, Human
cacaagcugcacccucaggcagg

SEQ ID NO: 1910506 - RNA, 16 nt, Human
cacaagagcccaggcc

SEQ ID NO: 1910507 - RNA, 13 nt, Human
cacaagcuccaag

SEQ ID NO: 1910508 - RNA, 14 nt, Human
cacaagcuccaagc

SEQ ID NO: 1910509 - RNA, 15 nt, Human
cacaagcuccaagcu

SEQ ID NO: 1910510 - RNA, 14 nt, Human
cacaagagcccagg

SEQ ID NO: 1910511 - RNA, 20 nt, Human
cacacagcucuguccuggga

SEQ ID NO: 1910512 - RNA, 17 nt, Human
cacacagcucuguccug

SEQ ID NO: 1910513 - RNA, 15 nt, Human
cauagccaggaaacu

SEQ ID NO: 1910514 - RNA, 15 nt, Human
cauagcaugacauuu

SEQ ID NO: 1910515 - RNA, 17 nt, Human
cauagcaugacauuucu

SEQ ID NO: 1910516 - RNA, 18 nt, Human
cauagcaugacauuucuu

SEQ ID NO: 1910517 - RNA, 21 nt, Human
cauaaugcgugcauaccacuu

SEQ ID NO: 1910518 - RNA, 15 nt, Human
cauacaauuccaaac

SEQ ID NO: 1910519 - RNA, 16 nt, Human
cauacaacacaaagag

SEQ ID NO: 1910520 - RNA, 15 nt, Human
cauacaacacaaaga

SEQ ID NO: 1910521 - RNA, 17 nt, Human
cauacaacacaaagaga

SEQ ID NO: 1910522 - RNA, 21 nt, Human
cauauuaccacagacauacua

SEQ ID NO: 1910523 - RNA, 20 nt, Human
cauauuaccacagacauacu

SEQ ID NO: 1910524 - RNA, 17 nt, Human
cauauuaccacagacau

SEQ ID NO: 1910525 - RNA, 23 nt, Human
cauaggacucaaaguuucagaga

SEQ ID NO: 1910526 - RNA, 17 nt, Human
cauaggaggcuucuguu

SEQ ID NO: 1910527 - RNA, 17 nt, Human
caguuuggcaaacucuc

SEQ ID NO: 1910528 - RNA, 17 nt, Human
cauaaugcgugcauacc

SEQ ID NO: 1910529 - RNA, 14 nt, Human
cauaaugcgugcau

SEQ ID NO: 1910530 - RNA, 12 nt, Human
caguuuaaagca

SEQ ID NO: 1910531 - RNA, 16 nt, Human
caguuuaaaaaaauug

SEQ ID NO: 1910532 - RNA, 18 nt, Human
caguuuaaaaaaauuggu

SEQ ID NO: 1910533 - RNA, 18 nt, Human
cagucaccccggccaccu

SEQ ID NO: 1910534 - RNA, 19 nt, Human
cauccugugccuccaucag

SEQ ID NO: 1910535 - RNA, 21 nt, Human
caucgaaucuacuaauuccac

SEQ ID NO: 1910536 - RNA, 18 nt, Human
caucugugaaaggaaaga

SEQ ID NO: 1910537 - RNA, 19 nt, Human
caucugugaaaggaaagag

SEQ ID NO: 1910538 - RNA, 21 nt, Human
caucuuagguuggcaaaaagg

SEQ ID NO: 1910539 - RNA, 22 nt, Human
caucuuagguuggcaaaaaggc

SEQ ID NO: 1910540 - RNA, 17 nt, Human
caucccagccccaauga

SEQ ID NO: 1910541 - RNA, 16 nt, Human
caucccagccccaaug

SEQ ID NO: 1910542 - RNA, 13 nt, Human
caucccagcccca

SEQ ID NO: 1910543 - RNA, 14 nt, Human
caucccagccccaa

SEQ ID NO: 1910544 - RNA, 14 nt, Human
caucaggccaggcc

SEQ ID NO: 1910545 - RNA, 20 nt, Human
caucaggccaggcccucugc

SEQ ID NO: 1910546 - RNA, 21 nt, Human
caucaggccaggcccucugcc

SEQ ID NO: 1910547 - RNA, 22 nt, Human
caucaggccaggcccucugccc

SEQ ID NO: 1910548 - RNA, 23 nt, Human
caucaggccaggcccucugccca

SEQ ID NO: 1910549 - RNA, 23 nt, Human
cauccuggcacccggccccugcu

SEQ ID NO: 1910550 - RNA, 18 nt, Human
caucagcacgauuucugu

SEQ ID NO: 1910551 - RNA, 17 nt, Human
caucagcacgauuucug

SEQ ID NO: 1910552 - RNA, 13 nt, Human
caucaggccaggc

SEQ ID NO: 1910553 - RNA, 19 nt, Human
caucagcacgauuucuguu

SEQ ID NO: 1910554 - RNA, 22 nt, Human
caugcaaggucauuuuuuuuaa

SEQ ID NO: 1910555 - RNA, 16 nt, Human
caugauuuacagagaa

SEQ ID NO: 1910556 - RNA, 18 nt, Human
caugcaaggucauuuuuu

SEQ ID NO: 1910557 - RNA, 17 nt, Human
caugcaaggucauuuuu

SEQ ID NO: 1910558 - RNA, 14 nt, Human
caugauuccuuccu

SEQ ID NO: 1910559 - RNA, 16 nt, Human
caugauuccuuccugu

SEQ ID NO: 1910560 - RNA, 19 nt, Human
caugauuccuuccuguucu

SEQ ID NO: 1910561 - RNA, 14 nt, Human
caugauucuauuua

SEQ ID NO: 1910562 - RNA, 19 nt, Human
caugcugcuggacaguauc

SEQ ID NO: 1910563 - RNA, 22 nt, Human
cauggccuuugcuugaaagaaa

SEQ ID NO: 1910564 - RNA, 19 nt, Human
cauggccuuugcuugaaag

SEQ ID NO: 1910565 - RNA, 16 nt, Human
caugcugcccugugag

SEQ ID NO: 1910566 - RNA, 18 nt, Human
caugcugcccugugagua

SEQ ID NO: 1910567 - RNA, 17 nt, Human
caugacacgaauauugc

SEQ ID NO: 1910568 - RNA, 18 nt, Human
caugacacgaauauugcu

SEQ ID NO: 1910569 - RNA, 13 nt, Human
caugacauuucuu

SEQ ID NO: 1910570 - RNA, 12 nt, Human
caugaccagcaa

SEQ ID NO: 1910571 - RNA, 15 nt, Human
caugaccagcaaaua

SEQ ID NO: 1910572 - RNA, 14 nt, Human
caugaauuugugaa

SEQ ID NO: 1910573 - RNA, 14 nt, Human
caugacacgaauau

SEQ ID NO: 1910574 - RNA, 23 nt, Human
ccaccuacuuuucuuuccucaga

SEQ ID NO: 1910575 - RNA, 15 nt, Human
ccaccuuggcucaag

SEQ ID NO: 1910576 - RNA, 14 nt, Human
ccaccuuggcucaa

SEQ ID NO: 1910577 - RNA, 19 nt, Human
ccaccgcagacaggaccag

SEQ ID NO: 1910578 - RNA, 18 nt, Human
ccaccgcagacaggacca

SEQ ID NO: 1910579 - RNA, 13 nt, Human
ccacccugcucuc

SEQ ID NO: 1910580 - RNA, 18 nt, Human
ccaccaucaccagacagg

SEQ ID NO: 1910581 - RNA, 20 nt, Human
ccaccaucaagccaccaaca

SEQ ID NO: 1910582 - RNA, 14 nt, Human
ccaccgcagacagg

SEQ ID NO: 1910583 - RNA, 17 nt, Human
ccaccgcagacaggacc

SEQ ID NO: 1910584 - RNA, 20 nt, Human
ccacccuggccgaguccaag

SEQ ID NO: 1910585 - RNA, 21 nt, Human
ccacccuggccgaguccaagc

SEQ ID NO: 1910586 - RNA, 22 nt, Human
ccacccuggccgaguccaagcu

SEQ ID NO: 1910587 - RNA, 13 nt, Human
ccacccugggacc

SEQ ID NO: 1910588 - RNA, 12 nt, Human
ccacccugggac

SEQ ID NO: 1910589 - RNA, 23 nt, Human
ccacagaaaagaaaguucaugcu

SEQ ID NO: 1910590 - RNA, 13 nt, Human
ccaccagaagccc

SEQ ID NO: 1910591 - RNA, 12 nt, Human
ccaccagaagcc

SEQ ID NO: 1910592 - RNA, 11 nt, Human
ccaccagaagc

SEQ ID NO: 1910593 - RNA, 16 nt, Human
ccaccaucaagccacc

SEQ ID NO: 1910594 - RNA, 17 nt, Human
ccaccaucaagccacca

SEQ ID NO: 1910595 - RNA, 14 nt, Human
ccaccaggaaccuc

SEQ ID NO: 1910596 - RNA, 16 nt, Human
ccaccaggaaccucuu

SEQ ID NO: 1910597 - RNA, 18 nt, Human
ccaccaggaaccucuuca

SEQ ID NO: 1910598 - RNA, 18 nt, Human
ccaccagaagcccagaau

SEQ ID NO: 1910599 - RNA, 16 nt, Human
ccaccagaagcccaga

SEQ ID NO: 1910600 - RNA, 15 nt, Human
ccaccagaagcccag

SEQ ID NO: 1910601 - RNA, 14 nt, Human
ccaccagaagccca

SEQ ID NO: 1910602 - RNA, 19 nt, Human
ccaaauuaucaagcuaaua

SEQ ID NO: 1910603 - RNA, 23 nt, Human
ccaacuuguauuaaagacagagg

SEQ ID NO: 1910604 - RNA, 22 nt, Human
ccaaauuaucaagcuaauaaaa

SEQ ID NO: 1910605 - RNA, 18 nt, Human
ccaaauuaucaagcuaau

SEQ ID NO: 1910606 - RNA, 12 nt, Human
ccaaauuaagag

SEQ ID NO: 1910607 - RNA, 22 nt, Human
ccaaaugagggucuugguucca

SEQ ID NO: 1910608 - RNA, 22 nt, Human
ccaaagugguauagaaaugcug

SEQ ID NO: 1910609 - RNA, 19 nt, Human
ccaaagugguauagaaaug

SEQ ID NO: 1910610 - RNA, 22 nt, Human
ccaaagugcugggauuacaggg

SEQ ID NO: 1910611 - RNA, 20 nt, Human
ccaagcuggucccacucagu

SEQ ID NO: 1910612 - RNA, 23 nt, Human
ccaaugcacuuuguucuggcucu

SEQ ID NO: 1910613 - RNA, 20 nt, Human
ccaaugcacuuuguucuggc

SEQ ID NO: 1910614 - RNA, 22 nt, Human
ccaaugcacuuuguucuggcuc

SEQ ID NO: 1910615 - RNA, 20 nt, Human
ccaauguucucucuucucca

SEQ ID NO: 1910616 - RNA, 13 nt, Human
ccaaugccaaaaa

SEQ ID NO: 1910617 - RNA, 15 nt, Human
cauuucaacuguuug

SEQ ID NO: 1910618 - RNA, 16 nt, Human
cauuucaccccucccu

SEQ ID NO: 1910619 - RNA, 15 nt, Human
cauuucaccccuccc

SEQ ID NO: 1910620 - RNA, 14 nt, Human
cauuucaccccucc

SEQ ID NO: 1910621 - RNA, 13 nt, Human
cauuucaccccuc

SEQ ID NO: 1910622 - RNA, 23 nt, Human
cauuucaccccucccuuucuccc

SEQ ID NO: 1910623 - RNA, 22 nt, Human
cauuucaccccucccuuucucc

SEQ ID NO: 1910624 - RNA, 21 nt, Human
cauuucaccccucccuuucuc

SEQ ID NO: 1910625 - RNA, 20 nt, Human
cauuucaccccucccuuucu

SEQ ID NO: 1910626 - RNA, 19 nt, Human
cauuucaccccucccuuuc

SEQ ID NO: 1910627 - RNA, 18 nt, Human
cauuucaccccucccuuu

SEQ ID NO: 1910628 - RNA, 17 nt, Human
cauuucaccccucccuu

SEQ ID NO: 1910629 - RNA, 16 nt, Human
cauuuauucugcucac

SEQ ID NO: 1910630 - RNA, 23 nt, Human
cauugggaaggggacccccgccc

SEQ ID NO: 1910631 - RNA, 22 nt, Human
cauuggcucuugaacugagcuu

SEQ ID NO: 1910632 - RNA, 20 nt, Human
cauuggcaccuaauccaggc

SEQ ID NO: 1910633 - RNA, 21 nt, Human
cauuggcaccuaauccaggca

SEQ ID NO: 1910634 - RNA, 17 nt, Human
ccaaaaaaugcuugcuu

SEQ ID NO: 1910635 - RNA, 17 nt, Human
ccaaaacucuccucugc

SEQ ID NO: 1910636 - RNA, 16 nt, Human
cauuugguucauuaau

SEQ ID NO: 1910637 - RNA, 20 nt, Human
cauuugguucauuaauucua

SEQ ID NO: 1910638 - RNA, 21 nt, Human
cauuugguucauuaauucuau

SEQ ID NO: 1910639 - RNA, 23 nt, Human
cauuuggugguuucagaaaugug

SEQ ID NO: 1910640 - RNA, 22 nt, Human
cauuuggugguuucagaaaugu

SEQ ID NO: 1910641 - RNA, 21 nt, Human
cauugcggacagccacggcca

SEQ ID NO: 1910642 - RNA, 17 nt, Human
cauugcggacagccacg

SEQ ID NO: 1910643 - RNA, 15 nt, Human
cauugcggacagcca

SEQ ID NO: 1910644 - RNA, 14 nt, Human
cauugcggacagcc

SEQ ID NO: 1910645 - RNA, 18 nt, Human
cauugcugggcuugucug

SEQ ID NO: 1910646 - RNA, 16 nt, Human
cauugcugagccucug

SEQ ID NO: 1910647 - RNA, 17 nt, Human
cauugcugagccucugc

SEQ ID NO: 1910648 - RNA, 18 nt, Human
cauugcugagccucugcu

SEQ ID NO: 1910649 - RNA, 21 nt, Human
cauugcugagccucugcuccc

SEQ ID NO: 1910650 - RNA, 23 nt, Human
cauugcguuugaccuuuuaugua

SEQ ID NO: 1910651 - RNA, 14 nt, Human
cauugcugagccuc

SEQ ID NO: 1910652 - RNA, 15 nt, Human
cauugcugagccucu

SEQ ID NO: 1910653 - RNA, 13 nt, Human
cauucucauugaa

SEQ ID NO: 1910654 - RNA, 18 nt, Human
cauuaucuagauacugua

SEQ ID NO: 1910655 - RNA, 23 nt, Human
cauuaugaugugggucaaggaau

SEQ ID NO: 1910656 - RNA, 22 nt, Human
cauuaugaugugggucaaggaa

SEQ ID NO: 1910657 - RNA, 16 nt, Human
cauucuccuuguguua

SEQ ID NO: 1910658 - RNA, 12 nt, Human
cauucuccauuu

SEQ ID NO: 1910659 - RNA, 14 nt, Human
cauucuccacagca

SEQ ID NO: 1910660 - RNA, 17 nt, Human
cauucuccauuuguuau

SEQ ID NO: 1910661 - RNA, 15 nt, Human
cauguucucugagga

SEQ ID NO: 1910662 - RNA, 17 nt, Human
cauuaucuagauacugu

SEQ ID NO: 1910663 - RNA, 16 nt, Human
cauuaucuagauacug

SEQ ID NO: 1910664 - RNA, 12 nt, Human
cauuaucuagau

SEQ ID NO: 1910665 - RNA, 15 nt, Human
cauuaggauggcuag

SEQ ID NO: 1910666 - RNA, 22 nt, Human
cauggcugccaaugggagcuca

SEQ ID NO: 1910667 - RNA, 22 nt, Human
cauggcuggagcuagaauuuga

SEQ ID NO: 1910668 - RNA, 13 nt, Human
cagccagaggcac

SEQ ID NO: 1910669 - RNA, 16 nt, Human
cagcauauucaggaag

SEQ ID NO: 1910670 - RNA, 17 nt, Human
cagcauauucaggaagc

SEQ ID NO: 1910671 - RNA, 18 nt, Human
cagcauauucaggaagcu

SEQ ID NO: 1910672 - RNA, 17 nt, Human
cagcacugaggaagaac

SEQ ID NO: 1910673 - RNA, 15 nt, Human
cagcacugaggaaga

SEQ ID NO: 1910674 - RNA, 13 nt, Human
cagcacugaggaa

SEQ ID NO: 1910675 - RNA, 12 nt, Human
cagcacugagga

SEQ ID NO: 1910676 - RNA, 11 nt, Human
cagcacugagg

SEQ ID NO: 1910677 - RNA, 21 nt, Human
cagauugcaacaggcugggcu

SEQ ID NO: 1910678 - RNA, 17 nt, Human
cagauuggcucacacug

SEQ ID NO: 1910679 - RNA, 20 nt, Human
cagauuggcucacacugaga

SEQ ID NO: 1910680 - RNA, 18 nt, Human
cagauuggcucacacuga

SEQ ID NO: 1910681 - RNA, 15 nt, Human
cagauuucacucucc

SEQ ID NO: 1910682 - RNA, 16 nt, Human
cagauuucacucuccu

SEQ ID NO: 1910683 - RNA, 18 nt, Human
cagauuucacucuccuug

SEQ ID NO: 1910684 - RNA, 17 nt, Human
cagcccccacauccugu

SEQ ID NO: 1910685 - RNA, 24 nt, Human
cagccccauucugccugcccaggc

SEQ ID NO: 1910686 - RNA, 23 nt, Human
cagccccauucugccugcccagg

SEQ ID NO: 1910687 - RNA, 22 nt, Human
cagccccauucugccugcccag

SEQ ID NO: 1910688 - RNA, 20 nt, Human
cagccccauucugccugccc

SEQ ID NO: 1910689 - RNA, 19 nt, Human
cagccccauucugccugcc

SEQ ID NO: 1910690 - RNA, 19 nt, Human
cagccccgugggguuccuc

SEQ ID NO: 1910691 - RNA, 23 nt, Human
cagccgccaugcuccuggcccac

SEQ ID NO: 1910692 - RNA, 13 nt, Human
cagcccuuagcag

SEQ ID NO: 1910693 - RNA, 23 nt, Human
cagccugagcgacagugagacuc

SEQ ID NO: 1910694 - RNA, 14 nt, Human
cagcggggacagcu

SEQ ID NO: 1910695 - RNA, 20 nt, Human
cagcgggagccucccugccu

SEQ ID NO: 1910696 - RNA, 18 nt, Human
cagcgggagccucccugc

SEQ ID NO: 1910697 - RNA, 23 nt, Human
cagcgggaauggcagcugccacg

SEQ ID NO: 1910698 - RNA, 22 nt, Human
cagcgggaauggcagcugccac

SEQ ID NO: 1910699 - RNA, 16 nt, Human
cagcgggaauggcagc

SEQ ID NO: 1910700 - RNA, 18 nt, Human
cagcggcuggacuuggag

SEQ ID NO: 1910701 - RNA, 16 nt, Human
cagcggcuggacuugg

SEQ ID NO: 1910702 - RNA, 17 nt, Human
cagcggcuggaauuggg

SEQ ID NO: 1910703 - RNA, 17 nt, Human
cagccugccacucaggc

SEQ ID NO: 1910704 - RNA, 16 nt, Human
cagccugccacucagg

SEQ ID NO: 1910705 - RNA, 12 nt, Human
cagccugccacu

SEQ ID NO: 1910706 - RNA, 11 nt, Human
cagccugccac

SEQ ID NO: 1910707 - RNA, 14 nt, Human
cagcguuucuauga

SEQ ID NO: 1910708 - RNA, 19 nt, Human
cagcgggagccucccugcc

SEQ ID NO: 1910709 - RNA, 16 nt, Human
cagcguuucuaugaca

SEQ ID NO: 1910710 - RNA, 19 nt, Human
cagcguuucuaugacacau

SEQ ID NO: 1910711 - RNA, 20 nt, Human
cagagagccuggugcugcug

SEQ ID NO: 1910712 - RNA, 19 nt, Human
cagagagccuggugcugcu

SEQ ID NO: 1910713 - RNA, 22 nt, Human
cagagagaggggagaagccugg

SEQ ID NO: 1910714 - RNA, 23 nt, Human
cagagacuccugcaggcagccag

SEQ ID NO: 1910715 - RNA, 21 nt, Human
cagagacuccugcaggcagcc

SEQ ID NO: 1910716 - RNA, 22 nt, Human
cagagacuccugcaggcagcca

SEQ ID NO: 1910717 - RNA, 20 nt, Human
cagagacuccugcaggcagc

SEQ ID NO: 1910718 - RNA, 14 nt, Human
cagagccugcaguu

SEQ ID NO: 1910719 - RNA, 20 nt, Human
cagagagggugggagugggc

SEQ ID NO: 1910720 - RNA, 22 nt, Human
cagagagggugggagugggccc

SEQ ID NO: 1910721 - RNA, 16 nt, Human
cagagagggugggagu

SEQ ID NO: 1910722 - RNA, 17 nt, Human
cagagcuacacagggga

SEQ ID NO: 1910723 - RNA, 22 nt, Human
cagagcuacacaggggaaaaga

SEQ ID NO: 1910724 - RNA, 9 nt, Human
cagagcugg

SEQ ID NO: 1910725 - RNA, 20 nt, Human
cagagcuacccgcagaguuc

SEQ ID NO: 1910726 - RNA, 16 nt, Human
cagagcugcgggcugg

SEQ ID NO: 1910727 - RNA, 23 nt, Human
cagauacaggaaaagcugcugac

SEQ ID NO: 1910728 - RNA, 22 nt, Human
cagaucauugugaaauuauuca

SEQ ID NO: 1910729 - RNA, 12 nt, Human
cagauccagccu

SEQ ID NO: 1910730 - RNA, 18 nt, Human
cagauccagccugggguc

SEQ ID NO: 1910731 - RNA, 13 nt, Human
cagauccagccug

SEQ ID NO: 1910732 - RNA, 14 nt, Human
cagauccagccugg

SEQ ID NO: 1910733 - RNA, 15 nt, Human
cagauccagccuggg

SEQ ID NO: 1910734 - RNA, 17 nt, Human
cagauccagccuggggu

SEQ ID NO: 1910735 - RNA, 16 nt, Human
cagaucauugugaaau

SEQ ID NO: 1910736 - RNA, 15 nt, Human
caggacaccgggcag

SEQ ID NO: 1910737 - RNA, 13 nt, Human
caggacagaugcc

SEQ ID NO: 1910738 - RNA, 14 nt, Human
caggacagaugcca

SEQ ID NO: 1910739 - RNA, 17 nt, Human
caggacagaugccacac

SEQ ID NO: 1910740 - RNA, 13 nt, Human
caggaccucaggu

SEQ ID NO: 1910741 - RNA, 18 nt, Human
caggaggcaggaccuucg

SEQ ID NO: 1910742 - RNA, 15 nt, Human
caggaggcaggaccu

SEQ ID NO: 1910743 - RNA, 13 nt, Human
caggaccagggau

SEQ ID NO: 1910744 - RNA, 21 nt, Human
caggaccagggauuuccauga

SEQ ID NO: 1910745 - RNA, 17 nt, Human
caggacccugaaggggc

SEQ ID NO: 1910746 - RNA, 18 nt, Human
caggacccugaaggggcc

SEQ ID NO: 1910747 - RNA, 14 nt, Human
caggacaggaaaaa

SEQ ID NO: 1910748 - RNA, 18 nt, Human
caggacaugcgguagcca

SEQ ID NO: 1910749 - RNA, 20 nt, Human
caggacaugcgguagccagc

SEQ ID NO: 1910750 - RNA, 21 nt, Human
caggacaugcgguagccagca

SEQ ID NO: 1910751 - RNA, 22 nt, Human
caggacaugcgguagccagcac

SEQ ID NO: 1910752 - RNA, 23 nt, Human
caggacaugcgguagccagcaca

SEQ ID NO: 1910753 - RNA, 15 nt, Human
caggaccagcucagg

SEQ ID NO: 1910754 - RNA, 16 nt, Human
caggaccagcucagga

SEQ ID NO: 1910755 - RNA, 17 nt, Human
caggaccagcucaggac

SEQ ID NO: 1910756 - RNA, 19 nt, Human
caggaccagcucaggacag

SEQ ID NO: 1910757 - RNA, 20 nt, Human
caggaccagcucaggacaga

SEQ ID NO: 1910758 - RNA, 20 nt, Human
caggcaaugcuggcuguugg

SEQ ID NO: 1910759 - RNA, 19 nt, Human
caggcaaugcuggcuguug

SEQ ID NO: 1910760 - RNA, 12 nt, Human
caggaggccagc

SEQ ID NO: 1910761 - RNA, 13 nt, Human
caggaggccagcc

SEQ ID NO: 1910762 - RNA, 21 nt, Human
caggcaaugcuggcuguuggc

SEQ ID NO: 1910763 - RNA, 13 nt, Human
caggccagcugcu

SEQ ID NO: 1910764 - RNA, 15 nt, Human
caggccagcugcuug

SEQ ID NO: 1910765 - RNA, 13 nt, Human
caggccaggcccu

SEQ ID NO: 1910766 - RNA, 14 nt, Human
caggccaggcccuc

SEQ ID NO: 1910767 - RNA, 15 nt, Human
caggccaggcccucu

SEQ ID NO: 1910768 - RNA, 16 nt, Human
caggccaggcccucug

SEQ ID NO: 1910769 - RNA, 15 nt, Human
caggccagcugccuc

SEQ ID NO: 1910770 - RNA, 19 nt, Human
cagcuguucagcugguuga

SEQ ID NO: 1910771 - RNA, 16 nt, Human
cagcuguucagcuggu

SEQ ID NO: 1910772 - RNA, 15 nt, Human
cagcuguucagcugg

SEQ ID NO: 1910773 - RNA, 17 nt, Human
cagcuuauucacaagac

SEQ ID NO: 1910774 - RNA, 16 nt, Human
cagcuuauucacaaga

SEQ ID NO: 1910775 - RNA, 20 nt, Human
caggaaaagcugcugacagu

SEQ ID NO: 1910776 - RNA, 19 nt, Human
caggaaaagcugcugacag

SEQ ID NO: 1910777 - RNA, 23 nt, Human
caggaaaggcuccaggagcagcc

SEQ ID NO: 1910778 - RNA, 21 nt, Human
caggaaaggcuccaggagcag

SEQ ID NO: 1910779 - RNA, 22 nt, Human
caggaaaggcuccaggagcagc

SEQ ID NO: 1910780 - RNA, 16 nt, Human
cagggaggucauuuug

SEQ ID NO: 1910781 - RNA, 16 nt, Human
cagggaggggaagagg

SEQ ID NO: 1910782 - RNA, 16 nt, Human
cagggagggcuucugc

SEQ ID NO: 1910783 - RNA, 15 nt, Human
cagggcucagcgggg

SEQ ID NO: 1910784 - RNA, 12 nt, Human
cagggcucagcg

SEQ ID NO: 1910785 - RNA, 20 nt, Human
cagggcucagcggggacagc

SEQ ID NO: 1910786 - RNA, 21 nt, Human
cagggcuggacugaggccuga

SEQ ID NO: 1910787 - RNA, 20 nt, Human
cagggcuggacugaggccug

SEQ ID NO: 1910788 - RNA, 15 nt, Human
caggcugggcuucag

SEQ ID NO: 1910789 - RNA, 22 nt, Human
cagggaggacgcucucuggccu

SEQ ID NO: 1910790 - RNA, 14 nt, Human
caggcugggcuuca

SEQ ID NO: 1910791 - RNA, 19 nt, Human
caggcuggcgugcaguggu

SEQ ID NO: 1910792 - RNA, 18 nt, Human
caggcuggcgugcagugg

SEQ ID NO: 1910793 - RNA, 17 nt, Human
caggcuggcgugcagug

SEQ ID NO: 1910794 - RNA, 23 nt, Human
caggccugggggcugggcagagg

SEQ ID NO: 1910795 - RNA, 16 nt, Human
caggcugggagagccu

SEQ ID NO: 1910796 - RNA, 18 nt, Human
caggcugggagagccuuc

SEQ ID NO: 1910797 - RNA, 19 nt, Human
caggcugggagagccuucc

SEQ ID NO: 1910798 - RNA, 20 nt, Human
caggcugggagagccuucca

SEQ ID NO: 1910799 - RNA, 20 nt, Human
caggccugggggcugggcag

SEQ ID NO: 1910800 - RNA, 22 nt, Human
caggccugggggcugggcagag

SEQ ID NO: 1910801 - RNA, 23 nt, Human
cagggcuggacugaggccugagc

SEQ ID NO: 1910802 - RNA, 22 nt, Human
cagggcuggacugaggccugag

SEQ ID NO: 1910803 - RNA, 23 nt, Human
cagguuuuuggucugacccacug

SEQ ID NO: 1910804 - RNA, 19 nt, Human
caguaaaaaaaaaaaaugg

SEQ ID NO: 1910805 - RNA, 20 nt, Human
caggugcugacuucaucucc

SEQ ID NO: 1910806 - RNA, 21 nt, Human
caggugcugacuucaucuccc

SEQ ID NO: 1910807 - RNA, 23 nt, Human
caggugcugacuucaucucccac

SEQ ID NO: 1910808 - RNA, 21 nt, Human
caggguuggccccugcccggc

SEQ ID NO: 1910809 - RNA, 17 nt, Human
caggguuggccccugcc

SEQ ID NO: 1910810 - RNA, 14 nt, Human
caggugcugccauc

SEQ ID NO: 1910811 - RNA, 13 nt, Human
caggugcugccau

SEQ ID NO: 1910812 - RNA, 19 nt, Human
caggguuucaccauguugc

SEQ ID NO: 1910813 - RNA, 18 nt, Human
caguaaaugggggugcau

SEQ ID NO: 1910814 - RNA, 12 nt, Human
caguaaaucuuu

SEQ ID NO: 1910815 - RNA, 20 nt, Human
caguaaaucuuuuacaacug

SEQ ID NO: 1910816 - RNA, 14 nt, Human
caguaaaauagcug

SEQ ID NO: 1910817 - RNA, 20 nt, Human
caguaaaauagcugagggaa

SEQ ID NO: 1910818 - RNA, 20 nt, Human
caguaaaugggggugcauuu

SEQ ID NO: 1910819 - RNA, 19 nt, Human
caguaaaugggggugcauu

SEQ ID NO: 1910820 - RNA, 14 nt, Human
cagucaccccggcc

SEQ ID NO: 1910821 - RNA, 16 nt, Human
cagucaccccggccac

SEQ ID NO: 1910822 - RNA, 17 nt, Human
cagucaccccggccacc

SEQ ID NO: 1910823 - RNA, 15 nt, Human
caguauuugugggga

SEQ ID NO: 1910824 - RNA, 23 nt, Human
cagggucucacucugucgcccag

SEQ ID NO: 1910825 - RNA, 16 nt, Human
caggguuggccccugc

SEQ ID NO: 1910826 - RNA, 15 nt, Human
caggguuggccccug

SEQ ID NO: 1910827 - RNA, 20 nt, Human
cagggugcaguaucaugccc

SEQ ID NO: 1910828 - RNA, 21 nt, Human
cagggucucuaccauccccug

SEQ ID NO: 1910829 - RNA, 23 nt, Human
ccaggaaacucugcauucuagua

SEQ ID NO: 1910830 - RNA, 16 nt, Human
ccagcuuaucucaggg

SEQ ID NO: 1910831 - RNA, 19 nt, Human
ccagcuuaaaggggcuaga

SEQ ID NO: 1910832 - RNA, 17 nt, Human
ccagcuguucagcuggu

SEQ ID NO: 1910833 - RNA, 22 nt, Human
ccagcucaccagccccagugcc

SEQ ID NO: 1910834 - RNA, 16 nt, Human
ccagcuguucagcugg

SEQ ID NO: 1910835 - RNA, 16 nt, Human
ccagcucaccagcccc

SEQ ID NO: 1910836 - RNA, 15 nt, Human
ccagcucaccagccc

SEQ ID NO: 1910837 - RNA, 11 nt, Human
ccagccccugg

SEQ ID NO: 1910838 - RNA, 12 nt, Human
ccagccccugga

SEQ ID NO: 1910839 - RNA, 18 nt, Human
ccagcuacaccuuucucc

SEQ ID NO: 1910840 - RNA, 19 nt, Human
ccagcuacaccuuucuccu

SEQ ID NO: 1910841 - RNA, 20 nt, Human
ccagcuacaccuuucuccuu

SEQ ID NO: 1910842 - RNA, 16 nt, Human
ccaggaaaggcuccag

SEQ ID NO: 1910843 - RNA, 24 nt, Human
ccaggaaccacaccacaucuaagc

SEQ ID NO: 1910844 - RNA, 14 nt, Human
ccaggaaaggcucc

SEQ ID NO: 1910845 - RNA, 15 nt, Human
ccaggaaaggcucca

SEQ ID NO: 1910846 - RNA, 12 nt, Human
ccaggaagccag

SEQ ID NO: 1910847 - RNA, 14 nt, Human
ccaggaagccagca

SEQ ID NO: 1910848 - RNA, 13 nt, Human
ccaggaagccagc

SEQ ID NO: 1910849 - RNA, 13 nt, Human
ccagcaggcucuc

SEQ ID NO: 1910850 - RNA, 15 nt, Human
ccagcaggcucucag

SEQ ID NO: 1910851 - RNA, 19 nt, Human
ccagcagcgccuuucccaa

SEQ ID NO: 1910852 - RNA, 17 nt, Human
ccagcagcgccuuuccc

SEQ ID NO: 1910853 - RNA, 18 nt, Human
ccagcagcgccuuuccca

SEQ ID NO: 1910854 - RNA, 12 nt, Human
ccagcagcgccu

SEQ ID NO: 1910855 - RNA, 16 nt, Human
ccaccuuggcucaagu

SEQ ID NO: 1910856 - RNA, 17 nt, Human
ccagagggccugcaagg

SEQ ID NO: 1910857 - RNA, 18 nt, Human
ccagagggccugcaaggg

SEQ ID NO: 1910858 - RNA, 19 nt, Human
ccagagggccugcaaggga

SEQ ID NO: 1910859 - RNA, 20 nt, Human
ccagagggccugcaagggag

SEQ ID NO: 1910860 - RNA, 13 nt, Human
ccagauccagccu

SEQ ID NO: 1910861 - RNA, 14 nt, Human
ccagauccagccug

SEQ ID NO: 1910862 - RNA, 15 nt, Human
ccagauccagccugg

SEQ ID NO: 1910863 - RNA, 16 nt, Human
ccagauccagccuggg

SEQ ID NO: 1910864 - RNA, 21 nt, Human
ccagaguggggaugacaugca

SEQ ID NO: 1910865 - RNA, 15 nt, Human
ccagaugcaccagcc

SEQ ID NO: 1910866 - RNA, 17 nt, Human
ccagaugcaccagcccu

SEQ ID NO: 1910867 - RNA, 18 nt, Human
ccagaugcaccagcccuu

SEQ ID NO: 1910868 - RNA, 23 nt, Human
ccagaugcaccagcccuuagcag

SEQ ID NO: 1910869 - RNA, 10 nt, Human
ccagggucag

SEQ ID NO: 1910870 - RNA, 17 nt, Human
ccagggucagaaacagg

SEQ ID NO: 1910871 - RNA, 18 nt, Human
ccagggucagaaacagga

SEQ ID NO: 1910872 - RNA, 19 nt, Human
ccagggucagaaacaggac

SEQ ID NO: 1910873 - RNA, 13 nt, Human
ccagggucccugg

SEQ ID NO: 1910874 - RNA, 18 nt, Human
ccaggcuggcgugcagug

SEQ ID NO: 1910875 - RNA, 17 nt, Human
ccaggcuggcgugcagu

SEQ ID NO: 1910876 - RNA, 19 nt, Human
ccaggcuggcgugcagugg

SEQ ID NO: 1910877 - RNA, 22 nt, Human
ccagggcuggacugaggccuga

SEQ ID NO: 1910878 - RNA, 21 nt, Human
ccaggcuccuuuagcgcccag

SEQ ID NO: 1910879 - RNA, 20 nt, Human
ccaggcuccuuuagcgccca

SEQ ID NO: 1910880 - RNA, 19 nt, Human
ccaggggaaaaucagccug

SEQ ID NO: 1910881 - RNA, 21 nt, Human
ccagggcuuacggcccuggcc

SEQ ID NO: 1910882 - RNA, 22 nt, Human
ccagggcuuacggcccuggccu

SEQ ID NO: 1910883 - RNA, 20 nt, Human
ccaggggaaaaucagccugc

SEQ ID NO: 1910884 - RNA, 13 nt, Human
ccaggggugggac

SEQ ID NO: 1910885 - RNA, 23 nt, Human
ccaggggugggacacccugugau

SEQ ID NO: 1910886 - RNA, 19 nt, Human
ccaggggugggacacccug

SEQ ID NO: 1910887 - RNA, 14 nt, Human
ccaggggugggaca

SEQ ID NO: 1910888 - RNA, 17 nt, Human
ccaggggugggacaccc

SEQ ID NO: 1910889 - RNA, 13 nt, Human
ccaggcagaucca

SEQ ID NO: 1910890 - RNA, 15 nt, Human
ccaggcagauccagg

SEQ ID NO: 1910891 - RNA, 16 nt, Human
ccaggcagauccagga

SEQ ID NO: 1910892 - RNA, 17 nt, Human
ccaggcagauccaggac

SEQ ID NO: 1910893 - RNA, 18 nt, Human
ccaggcagauccaggacu

SEQ ID NO: 1910894 - RNA, 19 nt, Human
ccaggcagauccaggacua

SEQ ID NO: 1910895 - RNA, 20 nt, Human
ccauggucggaaaacaugcu

SEQ ID NO: 1910896 - RNA, 14 nt, Human
ccauggugcuuguu

SEQ ID NO: 1910897 - RNA, 23 nt, Human
ccaugagccucagcauccuggca

SEQ ID NO: 1910898 - RNA, 21 nt, Human
ccaugagccucagcauccugg

SEQ ID NO: 1910899 - RNA, 23 nt, Human
ccaguuggucccccuuccaugga

SEQ ID NO: 1910900 - RNA, 23 nt, Human
ccaguuccuuucaaugguuugca

SEQ ID NO: 1910901 - RNA, 22 nt, Human
ccaguuccuuucaaugguuugc

SEQ ID NO: 1910902 - RNA, 21 nt, Human
ccaguuccuuucaaugguuug

SEQ ID NO: 1910903 - RNA, 14 nt, Human
ccaucccagcccca

SEQ ID NO: 1910904 - RNA, 15 nt, Human
ccaucccagccccaa

SEQ ID NO: 1910905 - RNA, 13 nt, Human
ccaucccagcccc

SEQ ID NO: 1910906 - RNA, 14 nt, Human
ccaucccugaaggc

SEQ ID NO: 1910907 - RNA, 15 nt, Human
ccaucccugaaggcc

SEQ ID NO: 1910908 - RNA, 17 nt, Human
ccaucccugaaggcccc

SEQ ID NO: 1910909 - RNA, 20 nt, Human
ccaucccugaaggccccgcc

SEQ ID NO: 1910910 - RNA, 20 nt, Human
ccaguuggguggaugccugg

SEQ ID NO: 1910911 - RNA, 19 nt, Human
ccaguuggguggaugccug

SEQ ID NO: 1910912 - RNA, 17 nt, Human
ccaguuggguggaugcc

SEQ ID NO: 1910913 - RNA, 13 nt, Human
ccaguucacccug

SEQ ID NO: 1910914 - RNA, 15 nt, Human
ccaguucagcuuggg

SEQ ID NO: 1910915 - RNA, 14 nt, Human
cccacccacaugug

SEQ ID NO: 1910916 - RNA, 12 nt, Human
cccacccccacc

SEQ ID NO: 1910917 - RNA, 15 nt, Human
cccacccccacccaa

SEQ ID NO: 1910918 - RNA, 17 nt, Human
cccacccccacccaagg

SEQ ID NO: 1910919 - RNA, 18 nt, Human
cccacccugaaagcccug

SEQ ID NO: 1910920 - RNA, 20 nt, Human
cccacccaagggccuggccu

SEQ ID NO: 1910921 - RNA, 21 nt, Human
cccacccaagggccuggccug

SEQ ID NO: 1910922 - RNA, 22 nt, Human
cccacccaagggccuggccuga

SEQ ID NO: 1910923 - RNA, 14 nt, Human
cccacccugggacc

SEQ ID NO: 1910924 - RNA, 13 nt, Human
cccacugcucugg

SEQ ID NO: 1910925 - RNA, 12 nt, Human
cccacugcucug

SEQ ID NO: 1910926 - RNA, 19 nt, Human
cccacugcuuuuggucugu

SEQ ID NO: 1910927 - RNA, 22 nt, Human
cccacugcuuuuggucugugug

SEQ ID NO: 1910928 - RNA, 22 nt, Human
cccagccacggacgcuggcucc

SEQ ID NO: 1910929 - RNA, 23 nt, Human
cccagcucugguccauagagagc

SEQ ID NO: 1910930 - RNA, 20 nt, Human
cccauauuuguacaccaaua

SEQ ID NO: 1910931 - RNA, 19 nt, Human
cccauauuguaaaacaggu

SEQ ID NO: 1910932 - RNA, 18 nt, Human
cccauauuguaaaacagg

SEQ ID NO: 1910933 - RNA, 15 nt, Human
cccauauuguaaaac

SEQ ID NO: 1910934 - RNA, 22 nt, Human
cccagggcccagagcccagcuc

SEQ ID NO: 1910935 - RNA, 13 nt, Human
cccagggcccaga

SEQ ID NO: 1910936 - RNA, 14 nt, Human
cccagggcccagag

SEQ ID NO: 1910937 - RNA, 15 nt, Human
cccagggcccagagc

SEQ ID NO: 1910938 - RNA, 16 nt, Human
cccagggcccagagcc

SEQ ID NO: 1910939 - RNA, 17 nt, Human
cccagggcccagagccc

SEQ ID NO: 1910940 - RNA, 19 nt, Human
cccagggcccagagcccag

SEQ ID NO: 1910941 - RNA, 20 nt, Human
cccagggcccagagcccagc

SEQ ID NO: 1910942 - RNA, 17 nt, Human
cccaggcuggcgugcag

SEQ ID NO: 1910943 - RNA, 13 nt, Human
cccaggcuggcgu

SEQ ID NO: 1910944 - RNA, 19 nt, Human
cccaggcuggagugcagug

SEQ ID NO: 1910945 - RNA, 16 nt, Human
cccaggaaaggcccag

SEQ ID NO: 1910946 - RNA, 13 nt, Human
cccauccucugua

SEQ ID NO: 1910947 - RNA, 14 nt, Human
cccauccuccagca

SEQ ID NO: 1910948 - RNA, 15 nt, Human
cccauccuccagcag

SEQ ID NO: 1910949 - RNA, 16 nt, Human
cccauccuccagcagg

SEQ ID NO: 1910950 - RNA, 18 nt, Human
cccauccuccagcaggga

SEQ ID NO: 1910951 - RNA, 14 nt, Human
ccccgcuucugccu

SEQ ID NO: 1910952 - RNA, 21 nt, Human
ccccgacgccacagcccagcc

SEQ ID NO: 1910953 - RNA, 18 nt, Human
ccccgacgccacagccca

SEQ ID NO: 1910954 - RNA, 14 nt, Human
ccccgacgccacag

SEQ ID NO: 1910955 - RNA, 23 nt, Human
ccccgaggccuucucugaaggac

SEQ ID NO: 1910956 - RNA, 22 nt, Human
ccccagcaagugagagcugggu

SEQ ID NO: 1910957 - RNA, 16 nt, Human
ccccagcacugaggaa

SEQ ID NO: 1910958 - RNA, 15 nt, Human
ccccagcacugagga

SEQ ID NO: 1910959 - RNA, 13 nt, Human
ccccagcacugag

SEQ ID NO: 1910960 - RNA, 12 nt, Human
ccccagcacuga

SEQ ID NO: 1910961 - RNA, 21 nt, Human
ccccagcaagugagagcuggg

SEQ ID NO: 1910962 - RNA, 22 nt, Human
ccccagagaaagcgcagaugcu

SEQ ID NO: 1910963 - RNA, 23 nt, Human
ccccgacccuugccgucuaccug

SEQ ID NO: 1910964 - RNA, 17 nt, Human
ccccauuucuauuuauu

SEQ ID NO: 1910965 - RNA, 20 nt, Human
ccccauuucuauuuauuuac

SEQ ID NO: 1910966 - RNA, 22 nt, Human
cccccaaauggaaaugggcaga

SEQ ID NO: 1910967 - RNA, 13 nt, Human
ccccauuucuauu

SEQ ID NO: 1910968 - RNA, 21 nt, Human
ccccaucucaugccccuggcu

SEQ ID NO: 1910969 - RNA, 23 nt, Human
ccccaucucaugccccuggcugg

SEQ ID NO: 1910970 - RNA, 23 nt, Human
ccccaucgccagcugaugacuca

SEQ ID NO: 1910971 - RNA, 19 nt, Human
ccccaucgccagcugauga

SEQ ID NO: 1910972 - RNA, 22 nt, Human
ccccaucgccagcugaugacuc

SEQ ID NO: 1910973 - RNA, 22 nt, Human
ccccaaaacucuccucugcugc

SEQ ID NO: 1910974 - RNA, 23 nt, Human
cccauuguggucacaggaaguag

SEQ ID NO: 1910975 - RNA, 22 nt, Human
cccauuguggucacaggaagua

SEQ ID NO: 1910976 - RNA, 15 nt, Human
cccauugucccucug

SEQ ID NO: 1910977 - RNA, 18 nt, Human
cccauugucccucugccc

SEQ ID NO: 1910978 - RNA, 23 nt, Human
ccccaaaacucuccucugcugcu

SEQ ID NO: 1910979 - RNA, 20 nt, Human
cccauugucccucugcccca

SEQ ID NO: 1910980 - RNA, 21 nt, Human
ccccagacuccaccaagccug

SEQ ID NO: 1910981 - RNA, 18 nt, Human
cccuauuagagaagagau

SEQ ID NO: 1910982 - RNA, 23 nt, Human
cccgggaggcagagguugcagug

SEQ ID NO: 1910983 - RNA, 17 nt, Human
cccggccaccugcggug

SEQ ID NO: 1910984 - RNA, 16 nt, Human
cccggcuccaggcucc

SEQ ID NO: 1910985 - RNA, 15 nt, Human
cccggcuccaggcuc

SEQ ID NO: 1910986 - RNA, 14 nt, Human
cccggcuccaggcu

SEQ ID NO: 1910987 - RNA, 13 nt, Human
cccggcuccaggc

SEQ ID NO: 1910988 - RNA, 12 nt, Human
cccggcuccagg

SEQ ID NO: 1910989 - RNA, 11 nt, Human
cccggcuccag

SEQ ID NO: 1910990 - RNA, 13 nt, Human
cccggccaccugc

SEQ ID NO: 1910991 - RNA, 14 nt, Human
cccggccaccugcg

SEQ ID NO: 1910992 - RNA, 14 nt, Human
cccgaauagcuggg

SEQ ID NO: 1910993 - RNA, 20 nt, Human
ccccuuugaugauuaauuca

SEQ ID NO: 1910994 - RNA, 12 nt, Human
ccccuuuugcau

SEQ ID NO: 1910995 - RNA, 21 nt, Human
ccccuuuauguacaggaugcu

SEQ ID NO: 1910996 - RNA, 19 nt, Human
ccugacuuggggagaugga

SEQ ID NO: 1910997 - RNA, 13 nt, Human
ccugacugucucc

SEQ ID NO: 1910998 - RNA, 23 nt, Human
ccugacuuggggagauggaguuc

SEQ ID NO: 1910999 - RNA, 14 nt, Human
ccugacucucagca

SEQ ID NO: 1911000 - RNA, 13 nt, Human
ccucuuggguuca

SEQ ID NO: 1911001 - RNA, 12 nt, Human
ccucuuguaaau

SEQ ID NO: 1911002 - RNA, 13 nt, Human
ccucuuguaaaua

SEQ ID NO: 1911003 - RNA, 14 nt, Human
ccucuuguaaauaa

SEQ ID NO: 1911004 - RNA, 17 nt, Human
ccucuuguaaauaaagc

SEQ ID NO: 1911005 - RNA, 18 nt, Human
ccucuuguaaauaaagcc

SEQ ID NO: 1911006 - RNA, 20 nt, Human
ccucuuguaaauaaagcccu

SEQ ID NO: 1911007 - RNA, 17 nt, Human
ccugacccuguauauag

SEQ ID NO: 1911008 - RNA, 19 nt, Human
ccugacccuguauauagcc

SEQ ID NO: 1911009 - RNA, 16 nt, Human
ccugaccucccucuaa

SEQ ID NO: 1911010 - RNA, 19 nt, Human
ccucuugagccuugaacuu

SEQ ID NO: 1911011 - RNA, 13 nt, Human
ccucuugagccuu

SEQ ID NO: 1911012 - RNA, 18 nt, Human
ccugagaccacagagaga

SEQ ID NO: 1911013 - RNA, 12 nt, Human
ccugagaccaca

SEQ ID NO: 1911014 - RNA, 17 nt, Human
ccugagaucucugcagg

SEQ ID NO: 1911015 - RNA, 22 nt, Human
ccugaguaaaaaagcugugugc

SEQ ID NO: 1911016 - RNA, 22 nt, Human
ccugcacuugcagacucuacag

SEQ ID NO: 1911017 - RNA, 19 nt, Human
ccugaguagcuggauuaca

SEQ ID NO: 1911018 - RNA, 15 nt, Human
ccugaguagcuggau

SEQ ID NO: 1911019 - RNA, 20 nt, Human
ccugaguagcuggauuacag

SEQ ID NO: 1911020 - RNA, 16 nt, Human
ccugcagaauuugggu

SEQ ID NO: 1911021 - RNA, 22 nt, Human
ccucugccugaagucacacagu

SEQ ID NO: 1911022 - RNA, 14 nt, Human
ccucugcuccccag

SEQ ID NO: 1911023 - RNA, 23 nt, Human
ccucucugcaggucccuaauaaa

SEQ ID NO: 1911024 - RNA, 21 nt, Human
ccucucugcaggucccuaaua

SEQ ID NO: 1911025 - RNA, 22 nt, Human
ccucucugcaggucccuaauaa

SEQ ID NO: 1911026 - RNA, 13 nt, Human
ccucugcugcugg

SEQ ID NO: 1911027 - RNA, 14 nt, Human
ccucugcugcuggc

SEQ ID NO: 1911028 - RNA, 15 nt, Human
ccucugcugcuggcu

SEQ ID NO: 1911029 - RNA, 16 nt, Human
ccucugcugcuggcug

SEQ ID NO: 1911030 - RNA, 17 nt, Human
ccucugcugcuggcugg

SEQ ID NO: 1911031 - RNA, 18 nt, Human
ccucugcugcuggcuggu

SEQ ID NO: 1911032 - RNA, 13 nt, Human
ccucucugcaggu

SEQ ID NO: 1911033 - RNA, 15 nt, Human
ccucucugcaggucc

SEQ ID NO: 1911034 - RNA, 20 nt, Human
ccucucugcaggucccuaau

SEQ ID NO: 1911035 - RNA, 12 nt, Human
ccucucugcacc

SEQ ID NO: 1911036 - RNA, 14 nt, Human
ccucucucaggcca

SEQ ID NO: 1911037 - RNA, 13 nt, Human
ccucucucacucc

SEQ ID NO: 1911038 - RNA, 14 nt, Human
ccucucucacuccu

SEQ ID NO: 1911039 - RNA, 15 nt, Human
ccucucucacuccuu

SEQ ID NO: 1911040 - RNA, 17 nt, Human
ccucucucacuccuuga

SEQ ID NO: 1911041 - RNA, 12 nt, Human
ccucucucaggc

SEQ ID NO: 1911042 - RNA, 18 nt, Human
ccuggcacccggccccug

SEQ ID NO: 1911043 - RNA, 15 nt, Human
ccuggaguucugguu

SEQ ID NO: 1911044 - RNA, 22 nt, Human
ccuggagguggcugagccccug

SEQ ID NO: 1911045 - RNA, 23 nt, Human
ccuggagguggcugagccccugu

SEQ ID NO: 1911046 - RNA, 16 nt, Human
ccuggaguucugguuc

SEQ ID NO: 1911047 - RNA, 17 nt, Human
ccuggaguucugguucc

SEQ ID NO: 1911048 - RNA, 14 nt, Human
ccuggagguggcug

SEQ ID NO: 1911049 - RNA, 21 nt, Human
ccuggagguggcugagccccu

SEQ ID NO: 1911050 - RNA, 19 nt, Human
ccuggaugcagccucacag

SEQ ID NO: 1911051 - RNA, 14 nt, Human
ccuggaugcagccu

SEQ ID NO: 1911052 - RNA, 17 nt, Human
ccuggaugcagccucac

SEQ ID NO: 1911053 - RNA, 13 nt, Human
ccuggaugcagcc

SEQ ID NO: 1911054 - RNA, 16 nt, Human
ccugcccaggccccug

SEQ ID NO: 1911055 - RNA, 15 nt, Human
ccugcccaggccccu

SEQ ID NO: 1911056 - RNA, 14 nt, Human
ccugcccaggcccc

SEQ ID NO: 1911057 - RNA, 12 nt, Human
ccugcugggugu

SEQ ID NO: 1911058 - RNA, 16 nt, Human
ccugcccauuggagag

SEQ ID NO: 1911059 - RNA, 21 nt, Human
ccugccccaacucuccccuga

SEQ ID NO: 1911060 - RNA, 21 nt, Human
ccugcuggguguggcgcagca

SEQ ID NO: 1911061 - RNA, 14 nt, Human
ccugcugggugugg

SEQ ID NO: 1911062 - RNA, 20 nt, Human
ccugcuggguguggcgcagc

SEQ ID NO: 1911063 - RNA, 15 nt, Human
ccuggaggagcagag

SEQ ID NO: 1911064 - RNA, 12 nt, Human
ccuggaggccca

SEQ ID NO: 1911065 - RNA, 13 nt, Human
ccuggaggcccag

SEQ ID NO: 1911066 - RNA, 14 nt, Human
ccuggaggcccagu

SEQ ID NO: 1911067 - RNA, 16 nt, Human
ccuggaggcccaguuc

SEQ ID NO: 1911068 - RNA, 12 nt, Human
ccuggccucugc

SEQ ID NO: 1911069 - RNA, 18 nt, Human
ccuggccgaguccaagcu

SEQ ID NO: 1911070 - RNA, 19 nt, Human
ccuggccgaguccaagcug

SEQ ID NO: 1911071 - RNA, 16 nt, Human
ccuggccucugcacuc

SEQ ID NO: 1911072 - RNA, 13 nt, Human
ccuggccugagcu

SEQ ID NO: 1911073 - RNA, 14 nt, Human
ccuggccucugcac

SEQ ID NO: 1911074 - RNA, 15 nt, Human
ccuggccucugcacu

SEQ ID NO: 1911075 - RNA, 20 nt, Human
ccgccagggagaccuggaca

SEQ ID NO: 1911076 - RNA, 21 nt, Human
ccgccaaaagcugcucaggga

SEQ ID NO: 1911077 - RNA, 16 nt, Human
ccgacccuugccgucu

SEQ ID NO: 1911078 - RNA, 17 nt, Human
ccgccaaggcuggggga

SEQ ID NO: 1911079 - RNA, 20 nt, Human
ccgaauguugagguggacuc

SEQ ID NO: 1911080 - RNA, 20 nt, Human
ccgaauagcugggacuacag

SEQ ID NO: 1911081 - RNA, 13 nt, Human
cccuucugcuacu

SEQ ID NO: 1911082 - RNA, 14 nt, Human
cccuucugcucagc

SEQ ID NO: 1911083 - RNA, 23 nt, Human
cccuucugcucagcucugggcca

SEQ ID NO: 1911084 - RNA, 16 nt, Human
ccgccaugcuccuggc

SEQ ID NO: 1911085 - RNA, 20 nt, Human
ccgcccaggcuuagucacug

SEQ ID NO: 1911086 - RNA, 11 nt, Human
ccgcccccugc

SEQ ID NO: 1911087 - RNA, 16 nt, Human
ccgcccccugcccucc

SEQ ID NO: 1911088 - RNA, 17 nt, Human
ccgcccccugcccuccc

SEQ ID NO: 1911089 - RNA, 18 nt, Human
cccuucgcuccugugucu

SEQ ID NO: 1911090 - RNA, 16 nt, Human
cccuucgcuccugugu

SEQ ID NO: 1911091 - RNA, 16 nt, Human
cccuucuaccuuccug

SEQ ID NO: 1911092 - RNA, 21 nt, Human
cccuucugacccaugcugccc

SEQ ID NO: 1911093 - RNA, 22 nt, Human
cccuucugacccaugcugcccu

SEQ ID NO: 1911094 - RNA, 23 nt, Human
cccuucugacccaugcugcccug

SEQ ID NO: 1911095 - RNA, 24 nt, Human
cccugugccuuggugugcuguauc

SEQ ID NO: 1911096 - RNA, 14 nt, Human
cccuggcagccccu

SEQ ID NO: 1911097 - RNA, 16 nt, Human
cccuggcagccccugu

SEQ ID NO: 1911098 - RNA, 13 nt, Human
cccuggccccagg

SEQ ID NO: 1911099 - RNA, 14 nt, Human
cccuggccccagga

SEQ ID NO: 1911100 - RNA, 21 nt, Human
cccuggccuugggcccucugg

SEQ ID NO: 1911101 - RNA, 22 nt, Human
cccuggccuugggcccucuggu

SEQ ID NO: 1911102 - RNA, 11 nt, Human
cccuggccuga

SEQ ID NO: 1911103 - RNA, 16 nt, Human
cccuggcuccaggcca

SEQ ID NO: 1911104 - RNA, 13 nt, Human
cccuggcuccagg

SEQ ID NO: 1911105 - RNA, 23 nt, Human
cccuggcugggacguggcucagc

SEQ ID NO: 1911106 - RNA, 13 nt, Human
cccugcccugugg

SEQ ID NO: 1911107 - RNA, 12 nt, Human
cccugcccugug

SEQ ID NO: 1911108 - RNA, 11 nt, Human
cccugcccugu

SEQ ID NO: 1911109 - RNA, 22 nt, Human
cccucaccccugguucucaucu

SEQ ID NO: 1911110 - RNA, 20 nt, Human
cccucaccccugguucucau

SEQ ID NO: 1911111 - RNA, 13 nt, Human
cccucaccccugg

SEQ ID NO: 1911112 - RNA, 14 nt, Human
cccugcccuguggg

SEQ ID NO: 1911113 - RNA, 15 nt, Human
cccugcccugugggc

SEQ ID NO: 1911114 - RNA, 16 nt, Human
cccugcccugugggcc

SEQ ID NO: 1911115 - RNA, 20 nt, Human
cccugcccugugggccccca

SEQ ID NO: 1911116 - RNA, 21 nt, Human
cccugcccugugggcccccaa

SEQ ID NO: 1911117 - RNA, 12 nt, Human
cccuggcagccc

SEQ ID NO: 1911118 - RNA, 13 nt, Human
cccuggcagcccc

SEQ ID NO: 1911119 - RNA, 17 nt, Human
ccucaagaugaaggcaa

SEQ ID NO: 1911120 - RNA, 15 nt, Human
ccucaacucuccucc

SEQ ID NO: 1911121 - RNA, 15 nt, Human
ccucaagagaaggca

SEQ ID NO: 1911122 - RNA, 22 nt, Human
ccucagccucccaaagugcugg

SEQ ID NO: 1911123 - RNA, 11 nt, Human
ccucagccucc

SEQ ID NO: 1911124 - RNA, 15 nt, Human
ccuauuuuaauaaac

SEQ ID NO: 1911125 - RNA, 18 nt, Human
ccuauuuccauucaacaa

SEQ ID NO: 1911126 - RNA, 12 nt, Human
ccuauuucucuu

SEQ ID NO: 1911127 - RNA, 12 nt, Human
ccucaaccucuu

SEQ ID NO: 1911128 - RNA, 17 nt, Human
ccucaaccucuucuggc

SEQ ID NO: 1911129 - RNA, 20 nt, Human
ccucaaccucuucuggcuca

SEQ ID NO: 1911130 - RNA, 18 nt, Human
ccucaacguauuguuucg

SEQ ID NO: 1911131 - RNA, 13 nt, Human
ccuauuucucuuu

SEQ ID NO: 1911132 - RNA, 15 nt, Human
ccuauuucucuuucu

SEQ ID NO: 1911133 - RNA, 16 nt, Human
ccuauuucucuuucuu

SEQ ID NO: 1911134 - RNA, 16 nt, Human
ccucaaccuccugggc

SEQ ID NO: 1911135 - RNA, 22 nt, Human
ccucagccucccgaauagcugg

SEQ ID NO: 1911136 - RNA, 23 nt, Human
ccucagccucccaaagugcuggg

SEQ ID NO: 1911137 - RNA, 22 nt, Human
ccucagccucccaaguagcugg

SEQ ID NO: 1911138 - RNA, 15 nt, Human
ccucauguccacugg

SEQ ID NO: 1911139 - RNA, 13 nt, Human
ccucauguucuua

SEQ ID NO: 1911140 - RNA, 14 nt, Human
ccucagccuccuga

SEQ ID NO: 1911141 - RNA, 20 nt, Human
ccucauguccacugguucuu

SEQ ID NO: 1911142 - RNA, 19 nt, Human
ccucauguucuuaauucuu

SEQ ID NO: 1911143 - RNA, 18 nt, Human
ccucauuagcauuuugcu

SEQ ID NO: 1911144 - RNA, 21 nt, Human
ccuccaaguccacaguggaac

SEQ ID NO: 1911145 - RNA, 18 nt, Human
ccuccaaguccacagugg

SEQ ID NO: 1911146 - RNA, 22 nt, Human
ccucccaaggggcccaaauucu

SEQ ID NO: 1911147 - RNA, 15 nt, Human
ccucccaggcucuca

SEQ ID NO: 1911148 - RNA, 20 nt, Human
ccucccaauuucagacuccc

SEQ ID NO: 1911149 - RNA, 19 nt, Human
ccucccaauuucagacucc

SEQ ID NO: 1911150 - RNA, 17 nt, Human
ccguaggacccaagcag

SEQ ID NO: 1911151 - RNA, 18 nt, Human
ccggcuaauuuuuguaau

SEQ ID NO: 1911152 - RNA, 22 nt, Human
ccguaguagauguucuacuuug

SEQ ID NO: 1911153 - RNA, 11 nt, Human
ccgucaacaaa

SEQ ID NO: 1911154 - RNA, 16 nt, Human
ccguagguuauuuuca

SEQ ID NO: 1911155 - RNA, 23 nt, Human
ccuaauaaagcuguguggcaguc

SEQ ID NO: 1911156 - RNA, 13 nt, Human
ccuaauccaggca

SEQ ID NO: 1911157 - RNA, 14 nt, Human
ccuaauccaggcag

SEQ ID NO: 1911158 - RNA, 15 nt, Human
ccuaauccaggcaga

SEQ ID NO: 1911159 - RNA, 18 nt, Human
ccuagagggaggggccua

SEQ ID NO: 1911160 - RNA, 18 nt, Human
ccuagaguagaguggagg

SEQ ID NO: 1911161 - RNA, 22 nt, Human
ccuagaguagaguggagggagg

SEQ ID NO: 1911162 - RNA, 14 nt, Human
ccuaauaaagcugu

SEQ ID NO: 1911163 - RNA, 18 nt, Human
ccuaagaguugagcucuc

SEQ ID NO: 1911164 - RNA, 23 nt, Human
ccuaagcaaacccagugucagga

SEQ ID NO: 1911165 - RNA, 12 nt, Human
ccuaaggcugca

SEQ ID NO: 1911166 - RNA, 22 nt, Human
ccuaaggcugcaagguuuaggc

SEQ ID NO: 1911167 - RNA, 23 nt, Human
ccuaggcauuugcugaauacaga

SEQ ID NO: 1911168 - RNA, 20 nt, Human
ccuaggagugccccauucuu

SEQ ID NO: 1911169 - RNA, 23 nt, Human
ccuagauggcagucacugaauuc

SEQ ID NO: 1911170 - RNA, 16 nt, Human
cgaguagcugggacua

SEQ ID NO: 1911171 - RNA, 15 nt, Human
cgaguagcugggacu

SEQ ID NO: 1911172 - RNA, 14 nt, Human
cgaguagcugggac

SEQ ID NO: 1911173 - RNA, 13 nt, Human
cgaguagcuggga

SEQ ID NO: 1911174 - RNA, 17 nt, Human
cgaguuacagacaaagc

SEQ ID NO: 1911175 - RNA, 18 nt, Human
cgaguuacagacaaagcg

SEQ ID NO: 1911176 - RNA, 22 nt, Human
cgagugugaagcuuccuuggcu

SEQ ID NO: 1911177 - RNA, 14 nt, Human
cgccuacaggagug

SEQ ID NO: 1911178 - RNA, 16 nt, Human
cgccucccacuggggu

SEQ ID NO: 1911179 - RNA, 19 nt, Human
cgccucccacuggggucca

SEQ ID NO: 1911180 - RNA, 20 nt, Human
cgccgccugguacucaagcc

SEQ ID NO: 1911181 - RNA, 14 nt, Human
cgccgccugguacu

SEQ ID NO: 1911182 - RNA, 15 nt, Human
cgccgccugguacuc

SEQ ID NO: 1911183 - RNA, 21 nt, Human
cgccgcaaaccacacuggacu

SEQ ID NO: 1911184 - RNA, 22 nt, Human
cgccgcaaaccacacuggacuc

SEQ ID NO: 1911185 - RNA, 23 nt, Human
cgccgcaaaccacacuggacucc

SEQ ID NO: 1911186 - RNA, 23 nt, Human
cgccaaggcugggggaagaagcu

SEQ ID NO: 1911187 - RNA, 19 nt, Human
cgccgcaaaccacacugga

SEQ ID NO: 1911188 - RNA, 20 nt, Human
cgccgcaaaccacacuggac

SEQ ID NO: 1911189 - RNA, 13 nt, Human
cgccaaggcuggg

SEQ ID NO: 1911190 - RNA, 16 nt, Human
cgccaaggcuggggga

SEQ ID NO: 1911191 - RNA, 12 nt, Human
cgccaaggcugg

SEQ ID NO: 1911192 - RNA, 14 nt, Human
cgccuccgagggac

SEQ ID NO: 1911193 - RNA, 16 nt, Human
cgccuccccugcccca

SEQ ID NO: 1911194 - RNA, 18 nt, Human
cggcucacugcagccuca

SEQ ID NO: 1911195 - RNA, 19 nt, Human
cggcucacugcagccucaa

SEQ ID NO: 1911196 - RNA, 16 nt, Human
cggcucggaggaagcc

SEQ ID NO: 1911197 - RNA, 20 nt, Human
cggcucggaggaagccccca

SEQ ID NO: 1911198 - RNA, 14 nt, Human
cggagucccaccuu

SEQ ID NO: 1911199 - RNA, 13 nt, Human
cggcggagcuggc

SEQ ID NO: 1911200 - RNA, 19 nt, Human
cggcggagcuggccccgcc

SEQ ID NO: 1911201 - RNA, 21 nt, Human
cggcggagcuggccccgccgc

SEQ ID NO: 1911202 - RNA, 14 nt, Human
cggagcaagaggag

SEQ ID NO: 1911203 - RNA, 12 nt, Human
ccuuuuuuauac

SEQ ID NO: 1911204 - RNA, 13 nt, Human
ccuuuugcauucu

SEQ ID NO: 1911205 - RNA, 23 nt, Human
cgaccagacaccuugacagggca

SEQ ID NO: 1911206 - RNA, 19 nt, Human
ccuuuuuuauacauaaaca

SEQ ID NO: 1911207 - RNA, 18 nt, Human
ccuuuuuuauacauaaac

SEQ ID NO: 1911208 - RNA, 17 nt, Human
ccuuuuuuauacauaaa

SEQ ID NO: 1911209 - RNA, 16 nt, Human
cgacagugagacucug

SEQ ID NO: 1911210 - RNA, 15 nt, Human
cgacagugagacucu

SEQ ID NO: 1911211 - RNA, 20 nt, Human
ccuuuagcgcccaguugggu

SEQ ID NO: 1911212 - RNA, 14 nt, Human
ccuuuagcgcccag

SEQ ID NO: 1911213 - RNA, 23 nt, Human
ccuuuugaacgcccccccccacc

SEQ ID NO: 1911214 - RNA, 12 nt, Human
ccuuuucuauuc

SEQ ID NO: 1911215 - RNA, 17 nt, Human
ccuugccgucuaccuga

SEQ ID NO: 1911216 - RNA, 20 nt, Human
ccuugccgucuaccugaggg

SEQ ID NO: 1911217 - RNA, 20 nt, Human
ccuucugaaaaaguauccug

SEQ ID NO: 1911218 - RNA, 20 nt, Human
ccuggccugagcugggauga

SEQ ID NO: 1911219 - RNA, 14 nt, Human
ccuggccugagcug

SEQ ID NO: 1911220 - RNA, 15 nt, Human
ccuggccugagcugg

SEQ ID NO: 1911221 - RNA, 12 nt, Human
ccuucugaccca

SEQ ID NO: 1911222 - RNA, 16 nt, Human
ccuucugacccaugcu

SEQ ID NO: 1911223 - RNA, 17 nt, Human
ccuucugacccaugcug

SEQ ID NO: 1911224 - RNA, 20 nt, Human
ccuucugacccaugcugccc

SEQ ID NO: 1911225 - RNA, 22 nt, Human
ccuucuggaauaaggagaauga

SEQ ID NO: 1911226 - RNA, 17 nt, Human
ccuucuggccucccaca

SEQ ID NO: 1911227 - RNA, 12 nt, Human
ccuucugcucag

SEQ ID NO: 1911228 - RNA, 13 nt, Human
ccuucugcuacug

SEQ ID NO: 1911229 - RNA, 17 nt, Human
ccuucugcucagcucug

SEQ ID NO: 1911230 - RNA, 23 nt, Human
ccuucugacccaugcugcccugu

SEQ ID NO: 1911231 - RNA, 21 nt, Human
ccuucugacccaugcugcccu

SEQ ID NO: 1911232 - RNA, 22 nt, Human
ccuucugacccaugcugcccug

SEQ ID NO: 1911233 - RNA, 20 nt, Human
ccuucuggccucccacagac

SEQ ID NO: 1911234 - RNA, 18 nt, Human
ccuucuggccucccacag

SEQ ID NO: 1911235 - RNA, 22 nt, Human
cuaguuccaccaucaagccacc

SEQ ID NO: 1911236 - RNA, 15 nt, Human
cuauaaauuccucuu

SEQ ID NO: 1911237 - RNA, 17 nt, Human
cuauaaauuccucuuug

SEQ ID NO: 1911238 - RNA, 15 nt, Human
cuaguuguuaucaau

SEQ ID NO: 1911239 - RNA, 23 nt, Human
cuauaaauuccucuuugcuuugc

SEQ ID NO: 1911240 - RNA, 19 nt, Human
cuauaaauuccucuuugcu

SEQ ID NO: 1911241 - RNA, 22 nt, Human
cuauaaauuccucuuugcuuug

SEQ ID NO: 1911242 - RNA, 18 nt, Human
cuaguuccaccaucaagc

SEQ ID NO: 1911243 - RNA, 20 nt, Human
cuaguuccaccaucaagcca

SEQ ID NO: 1911244 - RNA, 21 nt, Human
cuagggaaaaaccagcgugug

SEQ ID NO: 1911245 - RNA, 19 nt, Human
cuagggaaaaaccagcgug

SEQ ID NO: 1911246 - RNA, 16 nt, Human
cuagccuauguggauu

SEQ ID NO: 1911247 - RNA, 18 nt, Human
cuagccggccacuuugga

SEQ ID NO: 1911248 - RNA, 15 nt, Human
cuaccugaggggccu

SEQ ID NO: 1911249 - RNA, 11 nt, Human
cuaccugaggg

SEQ ID NO: 1911250 - RNA, 14 nt, Human
cuaccugaggggcc

SEQ ID NO: 1911251 - RNA, 19 nt, Human
cuagaaauuccccacccug

SEQ ID NO: 1911252 - RNA, 16 nt, Human
cuagaaauugacacaa

SEQ ID NO: 1911253 - RNA, 20 nt, Human
cuagaaauugacacaagugg

SEQ ID NO: 1911254 - RNA, 23 nt, Human
cuagcagcagggagggcuucugc

SEQ ID NO: 1911255 - RNA, 17 nt, Human
cuagcauggcugccaau

SEQ ID NO: 1911256 - RNA, 23 nt, Human
cuagccaaaugguuuaacuucug

SEQ ID NO: 1911257 - RNA, 18 nt, Human
cuagccaccgccuccuac

SEQ ID NO: 1911258 - RNA, 15 nt, Human
cuagaacugaauuuu

SEQ ID NO: 1911259 - RNA, 22 nt, Human
cuagcagcagggagggcuucug

SEQ ID NO: 1911260 - RNA, 19 nt, Human
cuagaacucccuuucaaca

SEQ ID NO: 1911261 - RNA, 18 nt, Human
cuagaacucccuuucaac

SEQ ID NO: 1911262 - RNA, 17 nt, Human
cuagaacucccuuucaa

SEQ ID NO: 1911263 - RNA, 16 nt, Human
cuagaacucccuuuca

SEQ ID NO: 1911264 - RNA, 22 nt, Human
cuaagugauccucccaccucag

SEQ ID NO: 1911265 - RNA, 20 nt, Human
cuaagugauccucccaccuc

SEQ ID NO: 1911266 - RNA, 18 nt, Human
cuaagugaggaugaaaaa

SEQ ID NO: 1911267 - RNA, 12 nt, Human
cuaauuuauaaa

SEQ ID NO: 1911268 - RNA, 14 nt, Human
cuaauuuuuguaau

SEQ ID NO: 1911269 - RNA, 20 nt, Human
cuaauuuuuguaauuuuagu

SEQ ID NO: 1911270 - RNA, 21 nt, Human
cuacaaacaaaauuucuauua

SEQ ID NO: 1911271 - RNA, 10 nt, Human
cuacaaauca

SEQ ID NO: 1911272 - RNA, 15 nt, Human
cuacaguccucccau

SEQ ID NO: 1911273 - RNA, 16 nt, Human
cuacaguccucccauc

SEQ ID NO: 1911274 - RNA, 17 nt, Human
cuacaguccucccaucu

SEQ ID NO: 1911275 - RNA, 18 nt, Human
cuacaguccucccaucuc

SEQ ID NO: 1911276 - RNA, 17 nt, Human
cuacaguguacagucuu

SEQ ID NO: 1911277 - RNA, 16 nt, Human
cuacaguguacagucu

SEQ ID NO: 1911278 - RNA, 15 nt, Human
cuacaguguacaguc

SEQ ID NO: 1911279 - RNA, 13 nt, Human
cuacaguugaaaa

SEQ ID NO: 1911280 - RNA, 20 nt, Human
cuacaguguacagucuugua

SEQ ID NO: 1911281 - RNA, 15 nt, Human
cuacaugagguacug

SEQ ID NO: 1911282 - RNA, 13 nt, Human
cuacaugagaaca

SEQ ID NO: 1911283 - RNA, 14 nt, Human
cuacaugagaacaa

SEQ ID NO: 1911284 - RNA, 17 nt, Human
cuacaugagaacaaaca

SEQ ID NO: 1911285 - RNA, 18 nt, Human
cuacauacaauuccaaac

SEQ ID NO: 1911286 - RNA, 23 nt, Human
cuaagugaaauaagccagacauc

SEQ ID NO: 1911287 - RNA, 20 nt, Human
cuaagugaaauaagccagac

SEQ ID NO: 1911288 - RNA, 16 nt, Human
cuaaacuuccccaucu

SEQ ID NO: 1911289 - RNA, 20 nt, Human
cuaaacuuccccaucuucua

SEQ ID NO: 1911290 - RNA, 17 nt, Human
cggcucuggccuccaag

SEQ ID NO: 1911291 - RNA, 16 nt, Human
cuaacuucaccauauu

SEQ ID NO: 1911292 - RNA, 14 nt, Human
cuaagaaaagauuu

SEQ ID NO: 1911293 - RNA, 15 nt, Human
cuaagaaaagauuuu

SEQ ID NO: 1911294 - RNA, 21 nt, Human
cuaagaaaagauuuuaaucaa

SEQ ID NO: 1911295 - RNA, 20 nt, Human
cuaagaaaagauuuuaauca

SEQ ID NO: 1911296 - RNA, 15 nt, Human
cuaacuucaccauau

SEQ ID NO: 1911297 - RNA, 19 nt, Human
cuaaagaguuuauuuuaag

SEQ ID NO: 1911298 - RNA, 18 nt, Human
cuaaagaguuuauuuuaa

SEQ ID NO: 1911299 - RNA, 20 nt, Human
cucccugcacaagccagggu

SEQ ID NO: 1911300 - RNA, 19 nt, Human
cucccugcacaagccaggg

SEQ ID NO: 1911301 - RNA, 20 nt, Human
cucccugcaucugaccagca

SEQ ID NO: 1911302 - RNA, 12 nt, Human
cucccugacccu

SEQ ID NO: 1911303 - RNA, 14 nt, Human
cucccugacccugu

SEQ ID NO: 1911304 - RNA, 16 nt, Human
cucccugacccuguau

SEQ ID NO: 1911305 - RNA, 17 nt, Human
cucccugacccuguaua

SEQ ID NO: 1911306 - RNA, 23 nt, Human
cucccugacccuguauauagccc

SEQ ID NO: 1911307 - RNA, 14 nt, Human
cuccccgcuucugc

SEQ ID NO: 1911308 - RNA, 13 nt, Human
cuccccucagagu

SEQ ID NO: 1911309 - RNA, 16 nt, Human
cuccccucagagugca

SEQ ID NO: 1911310 - RNA, 15 nt, Human
cuccccuccaaccug

SEQ ID NO: 1911311 - RNA, 21 nt, Human
cuccagugagacagcucugca

SEQ ID NO: 1911312 - RNA, 19 nt, Human
cuccagucugaucugugaa

SEQ ID NO: 1911313 - RNA, 13 nt, Human
cucccaccucagc

SEQ ID NO: 1911314 - RNA, 12 nt, Human
cucccaccucag

SEQ ID NO: 1911315 - RNA, 18 nt, Human
cucccaccuagcagcacc

SEQ ID NO: 1911316 - RNA, 19 nt, Human
cuccgcuuucuacccagcg

SEQ ID NO: 1911317 - RNA, 20 nt, Human
cuccagggucagaaacagga

SEQ ID NO: 1911318 - RNA, 21 nt, Human
cuccagggucagaaacaggac

SEQ ID NO: 1911319 - RNA, 16 nt, Human
cuccagggugugugcu

SEQ ID NO: 1911320 - RNA, 11 nt, Human
cuccaggugca

SEQ ID NO: 1911321 - RNA, 16 nt, Human
cuccaagaccuucucc

SEQ ID NO: 1911322 - RNA, 13 nt, Human
cuccaaccugcaa

SEQ ID NO: 1911323 - RNA, 17 nt, Human
cuccaagaccuucuccu

SEQ ID NO: 1911324 - RNA, 18 nt, Human
cuccaagaccuucuccuu

SEQ ID NO: 1911325 - RNA, 21 nt, Human
cuccaagaccuucuccuucac

SEQ ID NO: 1911326 - RNA, 22 nt, Human
cuccacuuucuagccagaggag

SEQ ID NO: 1911327 - RNA, 14 nt, Human
cuccagaagauagc

SEQ ID NO: 1911328 - RNA, 15 nt, Human
cuccagaagauagcu

SEQ ID NO: 1911329 - RNA, 15 nt, Human
cuccagaauuuccca

SEQ ID NO: 1911330 - RNA, 18 nt, Human
cuccagaauuucccaaag

SEQ ID NO: 1911331 - RNA, 23 nt, Human
cuccagaagauagcuucacccca

SEQ ID NO: 1911332 - RNA, 17 nt, Human
cuccagacacaugucca

SEQ ID NO: 1911333 - RNA, 19 nt, Human
cuccagacacauguccaag

SEQ ID NO: 1911334 - RNA, 13 nt, Human
cucagcggggaca

SEQ ID NO: 1911335 - RNA, 22 nt, Human
cucagccuugccagagauccaa

SEQ ID NO: 1911336 - RNA, 13 nt, Human
cucaggccagcug

SEQ ID NO: 1911337 - RNA, 14 nt, Human
cucaggccagcugc

SEQ ID NO: 1911338 - RNA, 15 nt, Human
cucaggccagcugcu

SEQ ID NO: 1911339 - RNA, 20 nt, Human
cucaggccagcugcuugggc

SEQ ID NO: 1911340 - RNA, 21 nt, Human
cucaggccagcugcuugggcu

SEQ ID NO: 1911341 - RNA, 22 nt, Human
cucaggccagcugcuugggcuu

SEQ ID NO: 1911342 - RNA, 22 nt, Human
cucagccuccugaguagcugga

SEQ ID NO: 1911343 - RNA, 14 nt, Human
cucagccuccugag

SEQ ID NO: 1911344 - RNA, 15 nt, Human
cucagccuugccaga

SEQ ID NO: 1911345 - RNA, 16 nt, Human
cucagccuugccagag

SEQ ID NO: 1911346 - RNA, 17 nt, Human
cucagccuugccagaga

SEQ ID NO: 1911347 - RNA, 18 nt, Human
cucagccuugccagagau

SEQ ID NO: 1911348 - RNA, 19 nt, Human
cucagccuugccagagauc

SEQ ID NO: 1911349 - RNA, 20 nt, Human
cucagccuugccagagaucc

SEQ ID NO: 1911350 - RNA, 21 nt, Human
cucagccuugccagagaucca

SEQ ID NO: 1911351 - RNA, 13 nt, Human
cucagccucccaa

SEQ ID NO: 1911352 - RNA, 22 nt, Human
cuauccaucaugaccagcaaau

SEQ ID NO: 1911353 - RNA, 16 nt, Human
cucagccucccaaagu

SEQ ID NO: 1911354 - RNA, 14 nt, Human
cucagccucccaaa

SEQ ID NO: 1911355 - RNA, 21 nt, Human
cucagccucccaaagugcugg

SEQ ID NO: 1911356 - RNA, 23 nt, Human
cucagccucccgaauagcuggga

SEQ ID NO: 1911357 - RNA, 13 nt, Human
cucagccucccga

SEQ ID NO: 1911358 - RNA, 22 nt, Human
cucagccucccaaagugcuggg

SEQ ID NO: 1911359 - RNA, 13 nt, Human
cucaggccugggg

SEQ ID NO: 1911360 - RNA, 16 nt, Human
cucaggcccaaagccu

SEQ ID NO: 1911361 - RNA, 14 nt, Human
cucaggccuggggg

SEQ ID NO: 1911362 - RNA, 20 nt, Human
cucaggccugggggcugggc

SEQ ID NO: 1911363 - RNA, 21 nt, Human
cucaggccugggggcugggca

SEQ ID NO: 1911364 - RNA, 17 nt, Human
cucagucuggcccuucc

SEQ ID NO: 1911365 - RNA, 18 nt, Human
cucagucuggcccuuccu

SEQ ID NO: 1911366 - RNA, 13 nt, Human
cucagugccacua

SEQ ID NO: 1911367 - RNA, 12 nt, Human
cucaucuuucuu

SEQ ID NO: 1911368 - RNA, 15 nt, Human
cucaucuuucuugau

SEQ ID NO: 1911369 - RNA, 13 nt, Human
cucaucuuucuug

SEQ ID NO: 1911370 - RNA, 16 nt, Human
cuccaaagucucugga

SEQ ID NO: 1911371 - RNA, 15 nt, Human
cuccaacaccaagca

SEQ ID NO: 1911372 - RNA, 16 nt, Human
cuccaacaccaagcac

SEQ ID NO: 1911373 - RNA, 18 nt, Human
cuccaacaccaagcacag

SEQ ID NO: 1911374 - RNA, 22 nt, Human
cuccaacaccaagcacagcagc

SEQ ID NO: 1911375 - RNA, 19 nt, Human
cuccaaccccccagcacug

SEQ ID NO: 1911376 - RNA, 18 nt, Human
cuccaaccccccagcacu

SEQ ID NO: 1911377 - RNA, 17 nt, Human
cuccaaccccccagcac

SEQ ID NO: 1911378 - RNA, 15 nt, Human
cuccaaccccccagc

SEQ ID NO: 1911379 - RNA, 14 nt, Human
cuccaaccccccag

SEQ ID NO: 1911380 - RNA, 23 nt, Human
cuccaacaccaagcacagcagcc

SEQ ID NO: 1911381 - RNA, 23 nt, Human
cuccaaccccccagcacugagga

SEQ ID NO: 1911382 - RNA, 22 nt, Human
cuccaaccccccagcacugagg

SEQ ID NO: 1911383 - RNA, 21 nt, Human
cuccaaccccccagcacugag

SEQ ID NO: 1911384 - RNA, 20 nt, Human
cuccaaccccccagcacuga

SEQ ID NO: 1911385 - RNA, 19 nt, Human
cucauguucuuaauucuua

SEQ ID NO: 1911386 - RNA, 18 nt, Human
cucauguucuuaauucuu

SEQ ID NO: 1911387 - RNA, 14 nt, Human
cucauguucuuaau

SEQ ID NO: 1911388 - RNA, 12 nt, Human
cucauguucuua

SEQ ID NO: 1911389 - RNA, 23 nt, Human
cugaagcuuauuaaugcuaaggg

SEQ ID NO: 1911390 - RNA, 18 nt, Human
cugaagcuuauuaaugcu

SEQ ID NO: 1911391 - RNA, 17 nt, Human
cugaagcuuauuaaugc

SEQ ID NO: 1911392 - RNA, 16 nt, Human
cugaagcuuauuaaug

SEQ ID NO: 1911393 - RNA, 14 nt, Human
cugaagcuuauuaa

SEQ ID NO: 1911394 - RNA, 12 nt, Human
cugaagcuuauu

SEQ ID NO: 1911395 - RNA, 21 nt, Human
cugaagcuuauuaaugcuaag

SEQ ID NO: 1911396 - RNA, 20 nt, Human
cugaagcuuauuaaugcuaa

SEQ ID NO: 1911397 - RNA, 18 nt, Human
cugaagcuuuaccagcug

SEQ ID NO: 1911398 - RNA, 14 nt, Human
cugaagcuuuacca

SEQ ID NO: 1911399 - RNA, 16 nt, Human
cugaaaauguaugugu

SEQ ID NO: 1911400 - RNA, 17 nt, Human
cugaaaauuaacacugc

SEQ ID NO: 1911401 - RNA, 16 nt, Human
cugaaaauuaacacug

SEQ ID NO: 1911402 - RNA, 21 nt, Human
cugaaggacauugcggacagc

SEQ ID NO: 1911403 - RNA, 20 nt, Human
cugaaggacauugcggacag

SEQ ID NO: 1911404 - RNA, 19 nt, Human
cugaaggacauugcggaca

SEQ ID NO: 1911405 - RNA, 13 nt, Human
cugaaggccccgc

SEQ ID NO: 1911406 - RNA, 14 nt, Human
cugaaggccccgcc

SEQ ID NO: 1911407 - RNA, 17 nt, Human
cugaaggccccgcccag

SEQ ID NO: 1911408 - RNA, 18 nt, Human
cugaaggccccgcccagg

SEQ ID NO: 1911409 - RNA, 15 nt, Human
cucuuggagccugca

SEQ ID NO: 1911410 - RNA, 14 nt, Human
cugaaaaccucucc

SEQ ID NO: 1911411 - RNA, 15 nt, Human
cugaaaaccucuccu

SEQ ID NO: 1911412 - RNA, 17 nt, Human
cugaaaaccucuccuca

SEQ ID NO: 1911413 - RNA, 20 nt, Human
cugaaaaccucuccucaugu

SEQ ID NO: 1911414 - RNA, 14 nt, Human
cucuuggagccugc

SEQ ID NO: 1911415 - RNA, 23 nt, Human
cugacccugcuucaaauauuucc

SEQ ID NO: 1911416 - RNA, 12 nt, Human
cugacccuguau

SEQ ID NO: 1911417 - RNA, 13 nt, Human
cugacccuguaua

SEQ ID NO: 1911418 - RNA, 15 nt, Human
cugacccuguauaua

SEQ ID NO: 1911419 - RNA, 18 nt, Human
cugacccuguauauagcc

SEQ ID NO: 1911420 - RNA, 19 nt, Human
cugacccuguauauagccc

SEQ ID NO: 1911421 - RNA, 20 nt, Human
cugacccuguauauagccca

SEQ ID NO: 1911422 - RNA, 21 nt, Human
cugacccuguauauagcccag

SEQ ID NO: 1911423 - RNA, 22 nt, Human
cugacccuguauauagcccagc

SEQ ID NO: 1911424 - RNA, 13 nt, Human
cugacccugugga

SEQ ID NO: 1911425 - RNA, 18 nt, Human
cugacccaugcugcccug

SEQ ID NO: 1911426 - RNA, 17 nt, Human
cugacccaugcugcccu

SEQ ID NO: 1911427 - RNA, 19 nt, Human
cugacccaugcugcccugu

SEQ ID NO: 1911428 - RNA, 20 nt, Human
cugacccaugcugcccugug

SEQ ID NO: 1911429 - RNA, 21 nt, Human
cugaccugugagcccagcugg

SEQ ID NO: 1911430 - RNA, 21 nt, Human
cugaccucccucuaauuuauc

SEQ ID NO: 1911431 - RNA, 17 nt, Human
cugaccugugagcccag

SEQ ID NO: 1911432 - RNA, 18 nt, Human
cugaccugugagcccagc

SEQ ID NO: 1911433 - RNA, 20 nt, Human
cugaccugugagcccagcug

SEQ ID NO: 1911434 - RNA, 18 nt, Human
cugaccucccucuaauuu

SEQ ID NO: 1911435 - RNA, 20 nt, Human
cugaccucccucuaauuuau

SEQ ID NO: 1911436 - RNA, 20 nt, Human
cugaaggggcgucuguuccc

SEQ ID NO: 1911437 - RNA, 23 nt, Human
cugaaggggccaugauggcaaca

SEQ ID NO: 1911438 - RNA, 15 nt, Human
cugaaggggccauga

SEQ ID NO: 1911439 - RNA, 19 nt, Human
cugaaggggccaugauggc

SEQ ID NO: 1911440 - RNA, 19 nt, Human
cugaagggauaugugaaac

SEQ ID NO: 1911441 - RNA, 21 nt, Human
cugaagggauaugugaaacaa

SEQ ID NO: 1911442 - RNA, 14 nt, Human
cugacagacacagg

SEQ ID NO: 1911443 - RNA, 12 nt, Human
cugacagacaca

SEQ ID NO: 1911444 - RNA, 15 nt, Human
cugacagacacaggc

SEQ ID NO: 1911445 - RNA, 18 nt, Human
cucugcacaugucuugua

SEQ ID NO: 1911446 - RNA, 18 nt, Human
cucugcaccguacugugg

SEQ ID NO: 1911447 - RNA, 14 nt, Human
cucugcacuccccu

SEQ ID NO: 1911448 - RNA, 16 nt, Human
cucugcacaugucuug

SEQ ID NO: 1911449 - RNA, 15 nt, Human
cucugcacaugucuu

SEQ ID NO: 1911450 - RNA, 19 nt, Human
cucugcagcaauaaagcag

SEQ ID NO: 1911451 - RNA, 18 nt, Human
cucugcagcaauaaagca

SEQ ID NO: 1911452 - RNA, 23 nt, Human
cucugcagcaauaaagcagcguu

SEQ ID NO: 1911453 - RNA, 22 nt, Human
cucugcgugcagggacaaagag

SEQ ID NO: 1911454 - RNA, 23 nt, Human
cucugcgugcagggacaaagagg

SEQ ID NO: 1911455 - RNA, 17 nt, Human
cucuguacagagcccac

SEQ ID NO: 1911456 - RNA, 21 nt, Human
cucuguacagagcccacgccc

SEQ ID NO: 1911457 - RNA, 15 nt, Human
cucugguccauagag

SEQ ID NO: 1911458 - RNA, 19 nt, Human
cucugcugacagacacagg

SEQ ID NO: 1911459 - RNA, 18 nt, Human
cucugcugacagacacag

SEQ ID NO: 1911460 - RNA, 17 nt, Human
cucugcugacagacaca

SEQ ID NO: 1911461 - RNA, 15 nt, Human
cucugguuaucuaau

SEQ ID NO: 1911462 - RNA, 19 nt, Human
cucugguccauagagagca

SEQ ID NO: 1911463 - RNA, 16 nt, Human
cucugguccauagaga

SEQ ID NO: 1911464 - RNA, 18 nt, Human
cucugguccauagagagc

SEQ ID NO: 1911465 - RNA, 21 nt, Human
cucuccgaccagacaccuuga

SEQ ID NO: 1911466 - RNA, 16 nt, Human
cucuccucacacacag

SEQ ID NO: 1911467 - RNA, 13 nt, Human
cucuccccagccc

SEQ ID NO: 1911468 - RNA, 15 nt, Human
cucuccccagcccag

SEQ ID NO: 1911469 - RNA, 16 nt, Human
cucuccccagcccaga

SEQ ID NO: 1911470 - RNA, 17 nt, Human
cucuccccagcccagag

SEQ ID NO: 1911471 - RNA, 18 nt, Human
cucuccccagcccagaga

SEQ ID NO: 1911472 - RNA, 19 nt, Human
cucuccccagcccagagac

SEQ ID NO: 1911473 - RNA, 20 nt, Human
cucuccccagcccagagaca

SEQ ID NO: 1911474 - RNA, 15 nt, Human
cucugaaggacauug

SEQ ID NO: 1911475 - RNA, 11 nt, Human
cucucuggccu

SEQ ID NO: 1911476 - RNA, 23 nt, Human
cucuccucaucucuaacagcuca

SEQ ID NO: 1911477 - RNA, 12 nt, Human
cucuccucaucu

SEQ ID NO: 1911478 - RNA, 14 nt, Human
cucuccucaucucu

SEQ ID NO: 1911479 - RNA, 20 nt, Human
cucuccucauguucugcuuu

SEQ ID NO: 1911480 - RNA, 12 nt, Human
cucucuggccuu

SEQ ID NO: 1911481 - RNA, 15 nt, Human
cucucacuccuugaa

SEQ ID NO: 1911482 - RNA, 21 nt, Human
cucucacuuguuuuauuuaac

SEQ ID NO: 1911483 - RNA, 19 nt, Human
cucucagauuguaccauug

SEQ ID NO: 1911484 - RNA, 12 nt, Human
cucucacuccuu

SEQ ID NO: 1911485 - RNA, 14 nt, Human
cucucacuccuuga

SEQ ID NO: 1911486 - RNA, 16 nt, Human
cucuauuuauguuugc

SEQ ID NO: 1911487 - RNA, 17 nt, Human
cucuauuuauguuugca

SEQ ID NO: 1911488 - RNA, 20 nt, Human
cucuauguuuacaaauggac

SEQ ID NO: 1911489 - RNA, 15 nt, Human
cucuauguuuacaaa

SEQ ID NO: 1911490 - RNA, 16 nt, Human
gugaugcccugcccuu

SEQ ID NO: 1911491 - RNA, 22 nt, Human
gugaugcuaaagguuguauugc

SEQ ID NO: 1911492 - RNA, 22 nt, Human
gugaugcgcaugucacggaggg

SEQ ID NO: 1911493 - RNA, 14 nt, Human
gugauggggcccug

SEQ ID NO: 1911494 - RNA, 16 nt, Human
gugauggggcccugcc

SEQ ID NO: 1911495 - RNA, 17 nt, Human
gugauggggcccugccu

SEQ ID NO: 1911496 - RNA, 18 nt, Human
gugauggggcccugccuc

SEQ ID NO: 1911497 - RNA, 16 nt, Human
gugaugagaggaaauc

SEQ ID NO: 1911498 - RNA, 14 nt, Human
gugaugagaggaaa

SEQ ID NO: 1911499 - RNA, 22 nt, Human
aacuucuuauaggaaagcuuga

SEQ ID NO: 1911500 - RNA, 15 nt, Human
aacuucuuauggaau

SEQ ID NO: 1911501 - RNA, 13 nt, Human
aacuucugccugu

SEQ ID NO: 1911502 - RNA, 16 nt, Human
aacuucuuauggaauu

SEQ ID NO: 1911503 - RNA, 17 nt, Human
aacuucuuauggaauug

SEQ ID NO: 1911504 - RNA, 19 nt, Human
aacuucuuauggaauugau

SEQ ID NO: 1911505 - RNA, 24 nt, Human
aacuucuuauggaauugauuugca

SEQ ID NO: 1911506 - RNA, 22 nt, Human
aacuucuccccugguagaaaga

SEQ ID NO: 1911507 - RNA, 22 nt, Human
aacuuccagguguuacuguaau

SEQ ID NO: 1911508 - RNA, 17 nt, Human
aacuuccccaucuucua

SEQ ID NO: 1911509 - RNA, 18 nt, Human
aacuuccccaucuucuaa

SEQ ID NO: 1911510 - RNA, 19 nt, Human
aacuuccagguguuacugu

SEQ ID NO: 1911511 - RNA, 13 nt, Human
aacuuccaauuua

SEQ ID NO: 1911512 - RNA, 16 nt, Human
aacuguaccaugugcu

SEQ ID NO: 1911513 - RNA, 22 nt, Human
aacuguaccaugugcuacaggg

SEQ ID NO: 1911514 - RNA, 14 nt, Human
aacuguacugggcc

SEQ ID NO: 1911515 - RNA, 22 nt, Human
aacugguauuuuaucuuugauu

SEQ ID NO: 1911516 - RNA, 13 nt, Human
aacugguauuuua

SEQ ID NO: 1911517 - RNA, 13 nt, Human
aacuguaaauaaa

SEQ ID NO: 1911518 - RNA, 23 nt, Human
gugcauguaugucuuggacacug

SEQ ID NO: 1911519 - RNA, 19 nt, Human
gugcauguguguucaugca

SEQ ID NO: 1911520 - RNA, 19 nt, Human
gugcauuaucuagauacug

SEQ ID NO: 1911521 - RNA, 15 nt, Human
gugcauuaucuagau

SEQ ID NO: 1911522 - RNA, 23 nt, Human
gugcauuaucuagauacuguauc

SEQ ID NO: 1911523 - RNA, 13 nt, Human
gugccucccuggu

SEQ ID NO: 1911524 - RNA, 15 nt, Human
gugccucccugguga

SEQ ID NO: 1911525 - RNA, 12 nt, Human
gugccucccugg

SEQ ID NO: 1911526 - RNA, 16 nt, Human
gugcauguaugucuug

SEQ ID NO: 1911527 - RNA, 22 nt, Human
gugcaugcugucccuuacguga

SEQ ID NO: 1911528 - RNA, 21 nt, Human
gugcacacaccagagcccacc

SEQ ID NO: 1911529 - RNA, 23 nt, Human
gugcacaaaguggcauaaaaaac

SEQ ID NO: 1911530 - RNA, 14 nt, Human
gugcacaaaguggc

SEQ ID NO: 1911531 - RNA, 21 nt, Human
gugcacaaaguggcauaaaaa

SEQ ID NO: 1911532 - RNA, 18 nt, Human
gugcacaaaacccagacc

SEQ ID NO: 1911533 - RNA, 13 nt, Human
gugcaaccaggga

SEQ ID NO: 1911534 - RNA, 23 nt, Human
gugcaaccucuuggccugaucag

SEQ ID NO: 1911535 - RNA, 19 nt, Human
gugauggggcccugccucc

SEQ ID NO: 1911536 - RNA, 21 nt, Human
gugcaaugucugagugaaccu

SEQ ID NO: 1911537 - RNA, 22 nt, Human
gugcaaugaccuuucaauagga

SEQ ID NO: 1911538 - RNA, 15 nt, Human
gugcaagccccugcu

SEQ ID NO: 1911539 - RNA, 12 nt, Human
gugcaagagagg

SEQ ID NO: 1911540 - RNA, 21 nt, Human
aacuggguacuuguggacaca

SEQ ID NO: 1911541 - RNA, 16 nt, Human
aacuggguacuugugg

SEQ ID NO: 1911542 - RNA, 22 nt, Human
aacugggggagggugaagugaa

SEQ ID NO: 1911543 - RNA, 21 nt, Human
aacugggggagggugaaguga

SEQ ID NO: 1911544 - RNA, 15 nt, Human
aacuggauuaaacuu

SEQ ID NO: 1911545 - RNA, 11 nt, Human
aacuggcugca

SEQ ID NO: 1911546 - RNA, 16 nt, Human
aacuggauuaaacuua

SEQ ID NO: 1911547 - RNA, 23 nt, Human
aacugcugacuguuuucucuuga

SEQ ID NO: 1911548 - RNA, 20 nt, Human
aacugcugacuguuuucucu

SEQ ID NO: 1911549 - RNA, 21 nt, Human
aacugcugacuguuuucucuu

SEQ ID NO: 1911550 - RNA, 15 nt, Human
aacugcugacuguuu

SEQ ID NO: 1911551 - RNA, 20 nt, Human
aacugccucgaaacacagaa

SEQ ID NO: 1911552 - RNA, 15 nt, Human
aacugcaaagugaag

SEQ ID NO: 1911553 - RNA, 18 nt, Human
aacugcaaagugaaguug

SEQ ID NO: 1911554 - RNA, 17 nt, Human
gugaacuugggccacug

SEQ ID NO: 1911555 - RNA, 19 nt, Human
gugaacuugggccacugug

SEQ ID NO: 1911556 - RNA, 21 nt, Human
gugagaugcuagaacucccuu

SEQ ID NO: 1911557 - RNA, 15 nt, Human
gugaacuuuauuaaa

SEQ ID NO: 1911558 - RNA, 18 nt, Human
gugaacuucuugaaucua

SEQ ID NO: 1911559 - RNA, 17 nt, Human
gugaggccagagacaca

SEQ ID NO: 1911560 - RNA, 22 nt, Human
gugaggccagagacacaagccu

SEQ ID NO: 1911561 - RNA, 22 nt, Human
gugagucgaggacagggaggug

SEQ ID NO: 1911562 - RNA, 21 nt, Human
gugagguggaauuauuuuaaa

SEQ ID NO: 1911563 - RNA, 21 nt, Human
aacucuucaaucucuugcacu

SEQ ID NO: 1911564 - RNA, 19 nt, Human
aacucuguugcaagugcaa

SEQ ID NO: 1911565 - RNA, 22 nt, Human
aacucuguugcaagugcaauaa

SEQ ID NO: 1911566 - RNA, 13 nt, Human
aacugaaagugaa

SEQ ID NO: 1911567 - RNA, 18 nt, Human
aacucuucacaaaaucug

SEQ ID NO: 1911568 - RNA, 12 nt, Human
aacccccacugg

SEQ ID NO: 1911569 - RNA, 16 nt, Human
aacccccacuggacug

SEQ ID NO: 1911570 - RNA, 19 nt, Human
aaccccccagcacugagga

SEQ ID NO: 1911571 - RNA, 18 nt, Human
aaccccccagcacugagg

SEQ ID NO: 1911572 - RNA, 14 nt, Human
aaccccccagcacu

SEQ ID NO: 1911573 - RNA, 11 nt, Human
aaccccccagc

SEQ ID NO: 1911574 - RNA, 20 nt, Human
aaccccuggcuccaggccag

SEQ ID NO: 1911575 - RNA, 17 nt, Human
aaccccccauuucuucc

SEQ ID NO: 1911576 - RNA, 20 nt, Human
aaccccggggugcccacagg

SEQ ID NO: 1911577 - RNA, 14 nt, Human
aaccccgucaacaa

SEQ ID NO: 1911578 - RNA, 15 nt, Human
aaccccgucaacaaa

SEQ ID NO: 1911579 - RNA, 16 nt, Human
aaccccgucaacaaau

SEQ ID NO: 1911580 - RNA, 17 nt, Human
aaccccgucaacaaauc

SEQ ID NO: 1911581 - RNA, 18 nt, Human
aaccccgucaacaaaucu

SEQ ID NO: 1911582 - RNA, 21 nt, Human
aacccagacggcuccacuagg

SEQ ID NO: 1911583 - RNA, 23 nt, Human
aacccagaccuguuagcagacag

SEQ ID NO: 1911584 - RNA, 12 nt, Human
aacccagacuca

SEQ ID NO: 1911585 - RNA, 14 nt, Human
aacccagacucaga

SEQ ID NO: 1911586 - RNA, 22 nt, Human
aacccagaccuguuagcagaca

SEQ ID NO: 1911587 - RNA, 14 nt, Human
aacccagauaaagg

SEQ ID NO: 1911588 - RNA, 15 nt, Human
aacccagacucagac

SEQ ID NO: 1911589 - RNA, 16 nt, Human
aacccagacucagaca

SEQ ID NO: 1911590 - RNA, 18 nt, Human
aacccagacucagacauu

SEQ ID NO: 1911591 - RNA, 10 nt, Human
aacccagcuc

SEQ ID NO: 1911592 - RNA, 23 nt, Human
aacccagcaacagaaaaauggag

SEQ ID NO: 1911593 - RNA, 13 nt, Human
aacccagauuuug

SEQ ID NO: 1911594 - RNA, 21 nt, Human
aacccagauuuugcuguauau

SEQ ID NO: 1911595 - RNA, 16 nt, Human
aacccagcaacagaaa

SEQ ID NO: 1911596 - RNA, 17 nt, Human
aacccagcaacagaaaa

SEQ ID NO: 1911597 - RNA, 22 nt, Human
aaccucgagguuucucaaagaa

SEQ ID NO: 1911598 - RNA, 21 nt, Human
aaccucgagguuucucaaaga

SEQ ID NO: 1911599 - RNA, 24 nt, Human
aaccucuaaauucuuucauuuuag

SEQ ID NO: 1911600 - RNA, 12 nt, Human
aaccucuaaauu

SEQ ID NO: 1911601 - RNA, 15 nt, Human
aaccugaaccuagga

SEQ ID NO: 1911602 - RNA, 18 nt, Human
aaccugagccccaaaagg

SEQ ID NO: 1911603 - RNA, 17 nt, Human
aaccugacguagcugca

SEQ ID NO: 1911604 - RNA, 16 nt, Human
aacccgggaggcagag

SEQ ID NO: 1911605 - RNA, 23 nt, Human
aacccgagucauucguucugugg

SEQ ID NO: 1911606 - RNA, 20 nt, Human
aaccucagccuggccagaca

SEQ ID NO: 1911607 - RNA, 14 nt, Human
aaccucauucccca

SEQ ID NO: 1911608 - RNA, 15 nt, Human
aaccaagucaaguga

SEQ ID NO: 1911609 - RNA, 19 nt, Human
aaccaccacacccagccca

SEQ ID NO: 1911610 - RNA, 20 nt, Human
aaccacauuggagauguuua

SEQ ID NO: 1911611 - RNA, 21 nt, Human
aacaguuaauuaguuaacagu

SEQ ID NO: 1911612 - RNA, 21 nt, Human
aaccaccacacccagcccacu

SEQ ID NO: 1911613 - RNA, 17 nt, Human
aaccaccagaagcccag

SEQ ID NO: 1911614 - RNA, 14 nt, Human
aaccaccagaagcc

SEQ ID NO: 1911615 - RNA, 12 nt, Human
aaccaucauuga

SEQ ID NO: 1911616 - RNA, 17 nt, Human
aaccaucauugaaaucu

SEQ ID NO: 1911617 - RNA, 18 nt, Human
aaccaucauugaaaucuu

SEQ ID NO: 1911618 - RNA, 14 nt, Human
aacccaauccaaau

SEQ ID NO: 1911619 - RNA, 15 nt, Human
aaccauuuucauuug

SEQ ID NO: 1911620 - RNA, 15 nt, Human
aacccaagcuuagaa

SEQ ID NO: 1911621 - RNA, 16 nt, Human
aacccaagcuuagaac

SEQ ID NO: 1911622 - RNA, 23 nt, Human
aaccauuuugcugucccuuuucc

SEQ ID NO: 1911623 - RNA, 22 nt, Human
aacccaaauuacguguacuaca

SEQ ID NO: 1911624 - RNA, 23 nt, Human
aacccaaauguucaucaaugaau

SEQ ID NO: 1911625 - RNA, 20 nt, Human
gucuguacacguguccugua

SEQ ID NO: 1911626 - RNA, 19 nt, Human
gucuguacacguguccugu

SEQ ID NO: 1911627 - RNA, 14 nt, Human
gucuguacacgugu

SEQ ID NO: 1911628 - RNA, 21 nt, Human
gucuguacacguguccuguag

SEQ ID NO: 1911629 - RNA, 16 nt, Human
gucuguaucacucugu

SEQ ID NO: 1911630 - RNA, 15 nt, Human
gucuguaucagugga

SEQ ID NO: 1911631 - RNA, 22 nt, Human
gucuguaucaguggauuuccca

SEQ ID NO: 1911632 - RNA, 23 nt, Human
gucuguaucaguggauuucccau

SEQ ID NO: 1911633 - RNA, 14 nt, Human
gucuggcccuuccu

SEQ ID NO: 1911634 - RNA, 12 nt, Human
gucuggcagccu

SEQ ID NO: 1911635 - RNA, 22 nt, Human
gucuggcagccucccauccagg

SEQ ID NO: 1911636 - RNA, 20 nt, Human
aaccugagccccaaaaggua

SEQ ID NO: 1911637 - RNA, 16 nt, Human
gucuuucacauuuaaa

SEQ ID NO: 1911638 - RNA, 16 nt, Human
gucuuuggugaacauu

SEQ ID NO: 1911639 - RNA, 15 nt, Human
gucuuuaaaugcugc

SEQ ID NO: 1911640 - RNA, 14 nt, Human
gucuucuaaacuuc

SEQ ID NO: 1911641 - RNA, 23 nt, Human
gucuucuaaacuuccccaucuuc

SEQ ID NO: 1911642 - RNA, 17 nt, Human
gucuuuaaaugcugcuu

SEQ ID NO: 1911643 - RNA, 14 nt, Human
gucuuuaacuguca

SEQ ID NO: 1911644 - RNA, 15 nt, Human
gucuuuuguucgcau

SEQ ID NO: 1911645 - RNA, 15 nt, Human
gucuuuuuaaaaaua

SEQ ID NO: 1911646 - RNA, 22 nt, Human
aaccuguauaaguggaggcacu

SEQ ID NO: 1911647 - RNA, 12 nt, Human
aaccugugucuc

SEQ ID NO: 1911648 - RNA, 18 nt, Human
aaccuugaaaacuuuaug

SEQ ID NO: 1911649 - RNA, 22 nt, Human
aacuacaugagaacaaacagau

SEQ ID NO: 1911650 - RNA, 20 nt, Human
aacuacugcaccauuuaaaa

SEQ ID NO: 1911651 - RNA, 16 nt, Human
aacuacugcaccauuu

SEQ ID NO: 1911652 - RNA, 17 nt, Human
aacuacugcaccauuua

SEQ ID NO: 1911653 - RNA, 17 nt, Human
aacuaugcauggugccc

SEQ ID NO: 1911654 - RNA, 22 nt, Human
aacuaugcauggugccccagga

SEQ ID NO: 1911655 - RNA, 23 nt, Human
aacuaugcauggugccccaggac

SEQ ID NO: 1911656 - RNA, 22 nt, Human
aacucaucuagguaaauuacag

SEQ ID NO: 1911657 - RNA, 12 nt, Human
aacuccuggccu

SEQ ID NO: 1911658 - RNA, 23 nt, Human
gugaaccaccacacccagcccac

SEQ ID NO: 1911659 - RNA, 22 nt, Human
gugaaccaccacacccagccca

SEQ ID NO: 1911660 - RNA, 14 nt, Human
gugaaccuguauaa

SEQ ID NO: 1911661 - RNA, 14 nt, Human
gugaacgauuuaga

SEQ ID NO: 1911662 - RNA, 16 nt, Human
gugaacgauuuagaaa

SEQ ID NO: 1911663 - RNA, 17 nt, Human
aacucuccucugcugcu

SEQ ID NO: 1911664 - RNA, 16 nt, Human
aacucuccucugcugc

SEQ ID NO: 1911665 - RNA, 15 nt, Human
aacucuccuccagag

SEQ ID NO: 1911666 - RNA, 18 nt, Human
aacucuccuccagaguca

SEQ ID NO: 1911667 - RNA, 14 nt, Human
aaauuauuaaagga

SEQ ID NO: 1911668 - RNA, 15 nt, Human
aaauuauuaaaggaa

SEQ ID NO: 1911669 - RNA, 22 nt, Human
aaauuaguaggcucauuuacug

SEQ ID NO: 1911670 - RNA, 13 nt, Human
aaauuaauaaucu

SEQ ID NO: 1911671 - RNA, 18 nt, Human
aaauuagguauuuugucc

SEQ ID NO: 1911672 - RNA, 14 nt, Human
aaauuaagaaagga

SEQ ID NO: 1911673 - RNA, 14 nt, Human
aaauuaagaaggca

SEQ ID NO: 1911674 - RNA, 15 nt, Human
aaauuaagaaggcaa

SEQ ID NO: 1911675 - RNA, 24 nt, Human
aaaugucuaguuguaacaccauga

SEQ ID NO: 1911676 - RNA, 19 nt, Human
aaaugucuaguuguaacac

SEQ ID NO: 1911677 - RNA, 21 nt, Human
aaaugucacguuuuguuuugu

SEQ ID NO: 1911678 - RNA, 15 nt, Human
aaauguauuacagug

SEQ ID NO: 1911679 - RNA, 16 nt, Human
aaauucugucucugga

SEQ ID NO: 1911680 - RNA, 19 nt, Human
aaauuguaagcaugcacaa

SEQ ID NO: 1911681 - RNA, 18 nt, Human
aaauucugucucuggauu

SEQ ID NO: 1911682 - RNA, 20 nt, Human
aaauuguaagcaugcacaaa

SEQ ID NO: 1911683 - RNA, 15 nt, Human
aaauuuaugugaugg

SEQ ID NO: 1911684 - RNA, 22 nt, Human
aaauugugugugcucugcuuca

SEQ ID NO: 1911685 - RNA, 21 nt, Human
aaauugugugugcucugcuuc

SEQ ID NO: 1911686 - RNA, 12 nt, Human
aaauuuauguga

SEQ ID NO: 1911687 - RNA, 13 nt, Human
aaauugugugugc

SEQ ID NO: 1911688 - RNA, 15 nt, Human
aaauugugauguguc

SEQ ID NO: 1911689 - RNA, 12 nt, Human
aaauugugaugu

SEQ ID NO: 1911690 - RNA, 22 nt, Human
guauuuuguuuuugucuuaaaa

SEQ ID NO: 1911691 - RNA, 21 nt, Human
guauuuuucaauaaagcauuu

SEQ ID NO: 1911692 - RNA, 20 nt, Human
gucaaacaaacucucugaac

SEQ ID NO: 1911693 - RNA, 18 nt, Human
guauuuuucaauaaagca

SEQ ID NO: 1911694 - RNA, 17 nt, Human
gucaacacuaacaugau

SEQ ID NO: 1911695 - RNA, 18 nt, Human
guaucaggugcugccauc

SEQ ID NO: 1911696 - RNA, 16 nt, Human
guaucaggugcugcca

SEQ ID NO: 1911697 - RNA, 22 nt, Human
guauauuuguauuuaaaugaaa

SEQ ID NO: 1911698 - RNA, 20 nt, Human
guauauuugugauagcacuu

SEQ ID NO: 1911699 - RNA, 21 nt, Human
guauauuugugauagcacuuu

SEQ ID NO: 1911700 - RNA, 23 nt, Human
guauauuugugauagcacuuucu

SEQ ID NO: 1911701 - RNA, 16 nt, Human
guauauuuuauaucaa

SEQ ID NO: 1911702 - RNA, 19 nt, Human
guauaaguggaggcacuuu

SEQ ID NO: 1911703 - RNA, 20 nt, Human
guauaaguggaggcacuuua

SEQ ID NO: 1911704 - RNA, 21 nt, Human
guauaaguggaggcacuuuag

SEQ ID NO: 1911705 - RNA, 15 nt, Human
guauaauauuuuuaa

SEQ ID NO: 1911706 - RNA, 12 nt, Human
guauaauauuuu

SEQ ID NO: 1911707 - RNA, 13 nt, Human
guauauuguguuu

SEQ ID NO: 1911708 - RNA, 19 nt, Human
guauauuguguuuguguau

SEQ ID NO: 1911709 - RNA, 20 nt, Human
guauauuguguuuguguauu

SEQ ID NO: 1911710 - RNA, 14 nt, Human
guaugguggcuggg

SEQ ID NO: 1911711 - RNA, 21 nt, Human
guaugcuucauacagggaugg

SEQ ID NO: 1911712 - RNA, 16 nt, Human
guaugguggcuggguu

SEQ ID NO: 1911713 - RNA, 15 nt, Human
guaugguggcugggu

SEQ ID NO: 1911714 - RNA, 21 nt, Human
guaucccaugagccucagcau

SEQ ID NO: 1911715 - RNA, 15 nt, Human
guaugcuucauacag

SEQ ID NO: 1911716 - RNA, 14 nt, Human
guaugcuucauaca

SEQ ID NO: 1911717 - RNA, 13 nt, Human
guaugcuucauac

SEQ ID NO: 1911718 - RNA, 12 nt, Human
guaugcuucaua

SEQ ID NO: 1911719 - RNA, 22 nt, Human
guaucaggugcugccauccagg

SEQ ID NO: 1911720 - RNA, 21 nt, Human
guaucaguggauuucccaucc

SEQ ID NO: 1911721 - RNA, 17 nt, Human
guaucaugcccugugca

SEQ ID NO: 1911722 - RNA, 19 nt, Human
guaucccaugagccucagc

SEQ ID NO: 1911723 - RNA, 18 nt, Human
guaucaugcccugugcaa

SEQ ID NO: 1911724 - RNA, 12 nt, Human
guaacaggcaga

SEQ ID NO: 1911725 - RNA, 22 nt, Human
guaacaggaaaauuuuaaaaau

SEQ ID NO: 1911726 - RNA, 19 nt, Human
aaaugguaggcauuuccua

SEQ ID NO: 1911727 - RNA, 22 nt, Human
aaauguaagaucguucucugcc

SEQ ID NO: 1911728 - RNA, 14 nt, Human
aaauguaagaucgu

SEQ ID NO: 1911729 - RNA, 19 nt, Human
guauaaaagggacugagaa

SEQ ID NO: 1911730 - RNA, 18 nt, Human
gucauaacuaaauaaagc

SEQ ID NO: 1911731 - RNA, 14 nt, Human
aaauuugauugauu

SEQ ID NO: 1911732 - RNA, 13 nt, Human
gucauaacuagaa

SEQ ID NO: 1911733 - RNA, 15 nt, Human
gucagugugacugau

SEQ ID NO: 1911734 - RNA, 14 nt, Human
gucagucacagcca

SEQ ID NO: 1911735 - RNA, 16 nt, Human
gucagucacagccacc

SEQ ID NO: 1911736 - RNA, 13 nt, Human
gucaguuguauca

SEQ ID NO: 1911737 - RNA, 13 nt, Human
gucagucacagcc

SEQ ID NO: 1911738 - RNA, 21 nt, Human
gucaguauguggaaguguggg

SEQ ID NO: 1911739 - RNA, 17 nt, Human
gucaguauguggaagug

SEQ ID NO: 1911740 - RNA, 18 nt, Human
aaauuuguuauaaugaau

SEQ ID NO: 1911741 - RNA, 15 nt, Human
aaauuugauugauuu

SEQ ID NO: 1911742 - RNA, 17 nt, Human
aaauuugauugauuuga

SEQ ID NO: 1911743 - RNA, 18 nt, Human
aaauuuggccaaacaagu

SEQ ID NO: 1911744 - RNA, 15 nt, Human
aaauuugguucuaau

SEQ ID NO: 1911745 - RNA, 16 nt, Human
aaauuugguucuaaua

SEQ ID NO: 1911746 - RNA, 22 nt, Human
gucacacaguauuacuucugcu

SEQ ID NO: 1911747 - RNA, 12 nt, Human
gucacagccacc

SEQ ID NO: 1911748 - RNA, 21 nt, Human
gucacacaguauuacuucugc

SEQ ID NO: 1911749 - RNA, 12 nt, Human
gucaacaaaucu

SEQ ID NO: 1911750 - RNA, 22 nt, Human
gucaacaaaucuaggaaaauau

SEQ ID NO: 1911751 - RNA, 17 nt, Human
gucagaauagaaauuag

SEQ ID NO: 1911752 - RNA, 19 nt, Human
gucagaauuagcugcuucu

SEQ ID NO: 1911753 - RNA, 13 nt, Human
gucagaauagaaa

SEQ ID NO: 1911754 - RNA, 13 nt, Human
gucaggaguuccu

SEQ ID NO: 1911755 - RNA, 23 nt, Human
gucaggaguucgagaccagccug

SEQ ID NO: 1911756 - RNA, 13 nt, Human
gucaggcagggug

SEQ ID NO: 1911757 - RNA, 12 nt, Human
aacaauaaaaga

SEQ ID NO: 1911758 - RNA, 18 nt, Human
aacaaggcaaggcuguca

SEQ ID NO: 1911759 - RNA, 21 nt, Human
aacaaggcaaggcugucaauu

SEQ ID NO: 1911760 - RNA, 16 nt, Human
aacaauguauuuucuu

SEQ ID NO: 1911761 - RNA, 20 nt, Human
aacaauguuguuuuaagacu

SEQ ID NO: 1911762 - RNA, 15 nt, Human
aacaaggcaaggcug

SEQ ID NO: 1911763 - RNA, 16 nt, Human
aacaaggcaaggcugu

SEQ ID NO: 1911764 - RNA, 19 nt, Human
aacaagagcacuacauuca

SEQ ID NO: 1911765 - RNA, 23 nt, Human
aaauuuugauguuuuaaggaugc

SEQ ID NO: 1911766 - RNA, 18 nt, Human
aaauuuugauguuuuaag

SEQ ID NO: 1911767 - RNA, 16 nt, Human
gucccaccuuggcugc

SEQ ID NO: 1911768 - RNA, 15 nt, Human
gucccaccuuggcug

SEQ ID NO: 1911769 - RNA, 14 nt, Human
gucccaccuuggcu

SEQ ID NO: 1911770 - RNA, 11 nt, Human
guccccccacc

SEQ ID NO: 1911771 - RNA, 12 nt, Human
guccccccaccc

SEQ ID NO: 1911772 - RNA, 13 nt, Human
guccauagagagc

SEQ ID NO: 1911773 - RNA, 14 nt, Human
guccauagagagca

SEQ ID NO: 1911774 - RNA, 21 nt, Human
gucccaccccacacacgccag

SEQ ID NO: 1911775 - RNA, 13 nt, Human
guccaagaagccc

SEQ ID NO: 1911776 - RNA, 15 nt, Human
guccaagaagcccag

SEQ ID NO: 1911777 - RNA, 16 nt, Human
guccaagaagcccagg

SEQ ID NO: 1911778 - RNA, 20 nt, Human
guccaagaagcccaggaaag

SEQ ID NO: 1911779 - RNA, 17 nt, Human
guccaagaagcccagga

SEQ ID NO: 1911780 - RNA, 18 nt, Human
guccaagaagcccaggaa

SEQ ID NO: 1911781 - RNA, 21 nt, Human
gucauuuuuuuuaagaaaaag

SEQ ID NO: 1911782 - RNA, 19 nt, Human
gucauuuuuuuuaagaaaa

SEQ ID NO: 1911783 - RNA, 20 nt, Human
gucauuuuucagaccuuuua

SEQ ID NO: 1911784 - RNA, 19 nt, Human
aacacagaaaccuuuuuaa

SEQ ID NO: 1911785 - RNA, 16 nt, Human
aacagauaaauaguuu

SEQ ID NO: 1911786 - RNA, 13 nt, Human
aacagaucuggaa

SEQ ID NO: 1911787 - RNA, 22 nt, Human
aacagaucuggaaccucagccu

SEQ ID NO: 1911788 - RNA, 21 nt, Human
aacagaucuggaaccucagcc

SEQ ID NO: 1911789 - RNA, 14 nt, Human
aacagaagcuucca

SEQ ID NO: 1911790 - RNA, 16 nt, Human
aacagaagcuuccauu

SEQ ID NO: 1911791 - RNA, 23 nt, Human
aacagaauacuguuaaaggaaaa

SEQ ID NO: 1911792 - RNA, 22 nt, Human
aacagugauuaccagggacuga

SEQ ID NO: 1911793 - RNA, 15 nt, Human
aacagugauuaccag

SEQ ID NO: 1911794 - RNA, 18 nt, Human
aacagguaauauaaaaag

SEQ ID NO: 1911795 - RNA, 15 nt, Human
aacagguaauauaaa

SEQ ID NO: 1911796 - RNA, 11 nt, Human
aacagggaggg

SEQ ID NO: 1911797 - RNA, 12 nt, Human
guccuacucugu

SEQ ID NO: 1911798 - RNA, 14 nt, Human
guccuacccauccc

SEQ ID NO: 1911799 - RNA, 16 nt, Human
guccuacccauccccg

SEQ ID NO: 1911800 - RNA, 18 nt, Human
guccuacccauccccgca

SEQ ID NO: 1911801 - RNA, 15 nt, Human
guccuacccacccuc

SEQ ID NO: 1911802 - RNA, 16 nt, Human
guccuacccacccucc

SEQ ID NO: 1911803 - RNA, 15 nt, Human
aacagaaauguacag

SEQ ID NO: 1911804 - RNA, 14 nt, Human
aacagaaauguaca

SEQ ID NO: 1911805 - RNA, 13 nt, Human
aacagaaauguac

SEQ ID NO: 1911806 - RNA, 12 nt, Human
aacagaaaugua

SEQ ID NO: 1911807 - RNA, 14 nt, Human
gucccccuuccaug

SEQ ID NO: 1911808 - RNA, 22 nt, Human
guccccccacccucauucuacu

SEQ ID NO: 1911809 - RNA, 13 nt, Human
guccccccacccu

SEQ ID NO: 1911810 - RNA, 16 nt, Human
gucccccuuccaugga

SEQ ID NO: 1911811 - RNA, 18 nt, Human
gucccccuuccauggacu

SEQ ID NO: 1911812 - RNA, 23 nt, Human
guugcguggacucugcacauguc

SEQ ID NO: 1911813 - RNA, 23 nt, Human
guugcuucuucuacuucagucuu

SEQ ID NO: 1911814 - RNA, 13 nt, Human
guugcccaggcug

SEQ ID NO: 1911815 - RNA, 12 nt, Human
guugcccaggcu

SEQ ID NO: 1911816 - RNA, 23 nt, Human
guugcccaggcaggucuugaacu

SEQ ID NO: 1911817 - RNA, 16 nt, Human
aaggccaaaggaagca

SEQ ID NO: 1911818 - RNA, 14 nt, Human
aaggccauaaaaca

SEQ ID NO: 1911819 - RNA, 17 nt, Human
aaggccauaaaacaggu

SEQ ID NO: 1911820 - RNA, 18 nt, Human
aaggccauaaaacaggua

SEQ ID NO: 1911821 - RNA, 24 nt, Human
aaggccauaaaacagguaauauaa

SEQ ID NO: 1911822 - RNA, 22 nt, Human
aaggccaucugggcuccuccag

SEQ ID NO: 1911823 - RNA, 22 nt, Human
aaggccauccuucccugucugc

SEQ ID NO: 1911824 - RNA, 22 nt, Human
aaggcccuaucuguuuacagug

SEQ ID NO: 1911825 - RNA, 21 nt, Human
aaggcccacgagcuuguucuu

SEQ ID NO: 1911826 - RNA, 21 nt, Human
aaggauacaaaagcaugugag

SEQ ID NO: 1911827 - RNA, 13 nt, Human
aaggauacaaaag

SEQ ID NO: 1911828 - RNA, 15 nt, Human
aaggauagaugcugg

SEQ ID NO: 1911829 - RNA, 18 nt, Human
aaggaauaccuguccccc

SEQ ID NO: 1911830 - RNA, 11 nt, Human
aaggagagcua

SEQ ID NO: 1911831 - RNA, 15 nt, Human
aaggagaugaagcaa

SEQ ID NO: 1911832 - RNA, 20 nt, Human
aaggagaggcaacauccaaa

SEQ ID NO: 1911833 - RNA, 14 nt, Human
aaggagauuuacaa

SEQ ID NO: 1911834 - RNA, 17 nt, Human
aaggagauuuacaacug

SEQ ID NO: 1911835 - RNA, 16 nt, Human
aaggagccuaggccag

SEQ ID NO: 1911836 - RNA, 21 nt, Human
aaggagccuaggccaggugca

SEQ ID NO: 1911837 - RNA, 18 nt, Human
aaggagccuaggccaggu

SEQ ID NO: 1911838 - RNA, 19 nt, Human
aaggagccuaggccaggug

SEQ ID NO: 1911839 - RNA, 20 nt, Human
aaggaggggauagagagaga

SEQ ID NO: 1911840 - RNA, 17 nt, Human
aaggagucaaaacuaca

SEQ ID NO: 1911841 - RNA, 12 nt, Human
aaggagggugag

SEQ ID NO: 1911842 - RNA, 18 nt, Human
aaggaggaagagaaaaaa

SEQ ID NO: 1911843 - RNA, 12 nt, Human
aaggagcugcua

SEQ ID NO: 1911844 - RNA, 14 nt, Human
aaggagcugcuaua

SEQ ID NO: 1911845 - RNA, 18 nt, Human
aaggagcugcuauagccu

SEQ ID NO: 1911846 - RNA, 20 nt, Human
aaggagcugcuauagccugg

SEQ ID NO: 1911847 - RNA, 21 nt, Human
aaggagcugcuauagccuggg

SEQ ID NO: 1911848 - RNA, 14 nt, Human
aaggaagacuucau

SEQ ID NO: 1911849 - RNA, 15 nt, Human
aaggaagacuucauc

SEQ ID NO: 1911850 - RNA, 13 nt, Human
aaggaagcacaug

SEQ ID NO: 1911851 - RNA, 16 nt, Human
aaggaagcacaugccu

SEQ ID NO: 1911852 - RNA, 22 nt, Human
aaggaagccacagcugguggua

SEQ ID NO: 1911853 - RNA, 17 nt, Human
aaggaauaccugucccc

SEQ ID NO: 1911854 - RNA, 15 nt, Human
aaggaaagagggagg

SEQ ID NO: 1911855 - RNA, 23 nt, Human
aaggaaccaaagcgaauuuuaaa

SEQ ID NO: 1911856 - RNA, 22 nt, Human
aaggaaccaaagcgaauuuuaa

SEQ ID NO: 1911857 - RNA, 16 nt, Human
guuuacacucuuugua

SEQ ID NO: 1911858 - RNA, 14 nt, Human
guuuacagucuauu

SEQ ID NO: 1911859 - RNA, 16 nt, Human
guuuacagucuauuug

SEQ ID NO: 1911860 - RNA, 21 nt, Human
guuuacagucuauuugagacu

SEQ ID NO: 1911861 - RNA, 13 nt, Human
guuuauugucaaa

SEQ ID NO: 1911862 - RNA, 15 nt, Human
guuuacaguguuccg

SEQ ID NO: 1911863 - RNA, 13 nt, Human
guuuacaguguuc

SEQ ID NO: 1911864 - RNA, 15 nt, Human
guugggcugguguca

SEQ ID NO: 1911865 - RNA, 13 nt, Human
guugggcuggugu

SEQ ID NO: 1911866 - RNA, 15 nt, Human
guugggccaggagcc

SEQ ID NO: 1911867 - RNA, 17 nt, Human
guugggccaggagccuc

SEQ ID NO: 1911868 - RNA, 22 nt, Human
aaggcucgagcaugccuggaug

SEQ ID NO: 1911869 - RNA, 19 nt, Human
aaggcucgagcaugccugg

SEQ ID NO: 1911870 - RNA, 20 nt, Human
aaggcucgagcaugccugga

SEQ ID NO: 1911871 - RNA, 19 nt, Human
aaggcuccaggagcagcca

SEQ ID NO: 1911872 - RNA, 22 nt, Human
aaggcuccaggagcagccacau

SEQ ID NO: 1911873 - RNA, 16 nt, Human
aaggcucgagcaugcc

SEQ ID NO: 1911874 - RNA, 18 nt, Human
aaggcucgagcaugccug

SEQ ID NO: 1911875 - RNA, 13 nt, Human
guuucaaacuuua

SEQ ID NO: 1911876 - RNA, 13 nt, Human
guuuauuuuaaga

SEQ ID NO: 1911877 - RNA, 16 nt, Human
guuucaaacuuuacua

SEQ ID NO: 1911878 - RNA, 14 nt, Human
guuucaaacuuuac

SEQ ID NO: 1911879 - RNA, 16 nt, Human
aaggcuccaggagcag

SEQ ID NO: 1911880 - RNA, 18 nt, Human
aaggcuccaggagcagcc

SEQ ID NO: 1911881 - RNA, 15 nt, Human
aaggcuccaggagca

SEQ ID NO: 1911882 - RNA, 22 nt, Human
aaggggcccaaauucuuucagu

SEQ ID NO: 1911883 - RNA, 18 nt, Human
aaggggcgucuguucccc

SEQ ID NO: 1911884 - RNA, 20 nt, Human
aagguagaaauaucugaaaa

SEQ ID NO: 1911885 - RNA, 19 nt, Human
guuucuauguguagggcgg

SEQ ID NO: 1911886 - RNA, 14 nt, Human
guuucucaaagaaa

SEQ ID NO: 1911887 - RNA, 18 nt, Human
guuucucaaagaaauuuc

SEQ ID NO: 1911888 - RNA, 17 nt, Human
guuucucaaagaaauuu

SEQ ID NO: 1911889 - RNA, 18 nt, Human
guuucugaaagggacgcu

SEQ ID NO: 1911890 - RNA, 20 nt, Human
guuucugaaaauuaacacug

SEQ ID NO: 1911891 - RNA, 21 nt, Human
guuucugaaaauuaacacugc

SEQ ID NO: 1911892 - RNA, 12 nt, Human
aaggucauuuuu

SEQ ID NO: 1911893 - RNA, 18 nt, Human
aagguauuuaauagguuu

SEQ ID NO: 1911894 - RNA, 16 nt, Human
aaguaaggaauuuuau

SEQ ID NO: 1911895 - RNA, 22 nt, Human
guuucuaugacacaugcaaggu

SEQ ID NO: 1911896 - RNA, 23 nt, Human
aagucuugugacuagugcugaag

SEQ ID NO: 1911897 - RNA, 20 nt, Human
aagucuugugacuagugcug

SEQ ID NO: 1911898 - RNA, 19 nt, Human
aagucuugugacuagugcu

SEQ ID NO: 1911899 - RNA, 14 nt, Human
aagucuugugacua

SEQ ID NO: 1911900 - RNA, 22 nt, Human
aagucuugugacuagugcugaa

SEQ ID NO: 1911901 - RNA, 21 nt, Human
aagucuugugacuagugcuga

SEQ ID NO: 1911902 - RNA, 14 nt, Human
aagucuuuuguucg

SEQ ID NO: 1911903 - RNA, 16 nt, Human
aagucuuucacauuua

SEQ ID NO: 1911904 - RNA, 14 nt, Human
aaguauuuuauucu

SEQ ID NO: 1911905 - RNA, 13 nt, Human
aaguauuugggaa

SEQ ID NO: 1911906 - RNA, 14 nt, Human
aagugagagcuggg

SEQ ID NO: 1911907 - RNA, 12 nt, Human
aagugagagagg

SEQ ID NO: 1911908 - RNA, 15 nt, Human
aagugagagcugggu

SEQ ID NO: 1911909 - RNA, 15 nt, Human
guuuuucauaaagca

SEQ ID NO: 1911910 - RNA, 14 nt, Human
guuuuucaguuuuc

SEQ ID NO: 1911911 - RNA, 19 nt, Human
guuuuuccuguucuuaaga

SEQ ID NO: 1911912 - RNA, 18 nt, Human
aagugagacuuugagggu

SEQ ID NO: 1911913 - RNA, 13 nt, Human
aagugaagacugg

SEQ ID NO: 1911914 - RNA, 16 nt, Human
aagugaagacuggaag

SEQ ID NO: 1911915 - RNA, 19 nt, Human
aagugaagacaaugacuua

SEQ ID NO: 1911916 - RNA, 17 nt, Human
aagugaagacaaugacu

SEQ ID NO: 1911917 - RNA, 21 nt, Human
aagugaaaaaggaggaagaga

SEQ ID NO: 1911918 - RNA, 18 nt, Human
aagucuuuuguucgcaug

SEQ ID NO: 1911919 - RNA, 20 nt, Human
aaguacacuguuucaaacuu

SEQ ID NO: 1911920 - RNA, 19 nt, Human
aaguacacuguuucaaacu

SEQ ID NO: 1911921 - RNA, 23 nt, Human
aaguacacuguuucaaacuuuac

SEQ ID NO: 1911922 - RNA, 22 nt, Human
guuuugccauguuggccaggcu

SEQ ID NO: 1911923 - RNA, 21 nt, Human
guuuugccauguuggccaggc

SEQ ID NO: 1911924 - RNA, 20 nt, Human
guuuugccauguuggccagg

SEQ ID NO: 1911925 - RNA, 16 nt, Human
guuuugccauguuggc

SEQ ID NO: 1911926 - RNA, 14 nt, Human
guuucugccgcagc

SEQ ID NO: 1911927 - RNA, 15 nt, Human
guuucugccgcagcc

SEQ ID NO: 1911928 - RNA, 21 nt, Human
aaguaauccaccugccucggc

SEQ ID NO: 1911929 - RNA, 18 nt, Human
aaguacacuguuucaaac

SEQ ID NO: 1911930 - RNA, 13 nt, Human
aaguacacuguuu

SEQ ID NO: 1911931 - RNA, 19 nt, Human
uaaaauaucauucagcaac

SEQ ID NO: 1911932 - RNA, 15 nt, Human
uaaaauauuuaucug

SEQ ID NO: 1911933 - RNA, 16 nt, Human
aagugaggaugaaaaa

SEQ ID NO: 1911934 - RNA, 18 nt, Human
aagugauucuccugccuc

SEQ ID NO: 1911935 - RNA, 17 nt, Human
aagugauucuccugccu

SEQ ID NO: 1911936 - RNA, 16 nt, Human
aagugauucuccugcc

SEQ ID NO: 1911937 - RNA, 15 nt, Human
aagugauucuccugc

SEQ ID NO: 1911938 - RNA, 19 nt, Human
aagugauucuccugccuca

SEQ ID NO: 1911939 - RNA, 20 nt, Human
aagugauucuccugccucag

SEQ ID NO: 1911940 - RNA, 18 nt, Human
uaaaauaucauucagcaa

SEQ ID NO: 1911941 - RNA, 18 nt, Human
uaaaauacgguaccuggc

SEQ ID NO: 1911942 - RNA, 22 nt, Human
uaaaauaccagccaguaaaugg

SEQ ID NO: 1911943 - RNA, 20 nt, Human
uaaaagacagugaaagaaaa

SEQ ID NO: 1911944 - RNA, 13 nt, Human
uaaaagacuuuuu

SEQ ID NO: 1911945 - RNA, 22 nt, Human
uaaaagugggcuugauucugca

SEQ ID NO: 1911946 - RNA, 23 nt, Human
uaaaagugggcuugauucugcag

SEQ ID NO: 1911947 - RNA, 15 nt, Human
uaaaaaucucaaauu

SEQ ID NO: 1911948 - RNA, 17 nt, Human
uaaaaaucucaaauuuc

SEQ ID NO: 1911949 - RNA, 16 nt, Human
uaaaaaucucaaauuu

SEQ ID NO: 1911950 - RNA, 21 nt, Human
uaaaaauaaaaaacacuggga

SEQ ID NO: 1911951 - RNA, 17 nt, Human
uaaaaauaaauuugguu

SEQ ID NO: 1911952 - RNA, 18 nt, Human
uaaaaauaaaaaacacug

SEQ ID NO: 1911953 - RNA, 19 nt, Human
uaaaaauaaaaaacacugg

SEQ ID NO: 1911954 - RNA, 15 nt, Human
uaaaaaguggaaaaa

SEQ ID NO: 1911955 - RNA, 15 nt, Human
guuuuucuucucccu

SEQ ID NO: 1911956 - RNA, 20 nt, Human
uaaaacuugauguguuaucu

SEQ ID NO: 1911957 - RNA, 22 nt, Human
uaaaacuugauguguuaucucu

SEQ ID NO: 1911958 - RNA, 12 nt, Human
uaaaagaauugu

SEQ ID NO: 1911959 - RNA, 21 nt, Human
uaaaaaucucaaauuucuaaa

SEQ ID NO: 1911960 - RNA, 20 nt, Human
uaaaaaucucaaauuucuaa

SEQ ID NO: 1911961 - RNA, 19 nt, Human
uaaaaaucucaaauuucua

SEQ ID NO: 1911962 - RNA, 15 nt, Human
guuaggauggcagga

SEQ ID NO: 1911963 - RNA, 19 nt, Human
guuaggcauugugggaagg

SEQ ID NO: 1911964 - RNA, 20 nt, Human
guuaggcauugugggaaggg

SEQ ID NO: 1911965 - RNA, 18 nt, Human
guuaagagaaaugagcuu

SEQ ID NO: 1911966 - RNA, 14 nt, Human
guuaagauuccuaa

SEQ ID NO: 1911967 - RNA, 11 nt, Human
guuaagagaaa

SEQ ID NO: 1911968 - RNA, 12 nt, Human
guuaagagaaau

SEQ ID NO: 1911969 - RNA, 20 nt, Human
guuagaauaauaaauauuua

SEQ ID NO: 1911970 - RNA, 18 nt, Human
guuacuuuucauauuugc

SEQ ID NO: 1911971 - RNA, 21 nt, Human
guuacuuuucauauuugcacu

SEQ ID NO: 1911972 - RNA, 22 nt, Human
guuacuuuucauauuugcacua

SEQ ID NO: 1911973 - RNA, 21 nt, Human
guuauuuuuuaauuauuauuu

SEQ ID NO: 1911974 - RNA, 20 nt, Human
guucaaagauauuuugcuuu

SEQ ID NO: 1911975 - RNA, 22 nt, Human
guucaaagauauuuugcuuugu

SEQ ID NO: 1911976 - RNA, 21 nt, Human
guucaaagauauuuugcuuug

SEQ ID NO: 1911977 - RNA, 18 nt, Human
guucaagcgauucuucug

SEQ ID NO: 1911978 - RNA, 15 nt, Human
guucaaacauuuacc

SEQ ID NO: 1911979 - RNA, 16 nt, Human
guuauuuuuuaauuau

SEQ ID NO: 1911980 - RNA, 23 nt, Human
guuauuuuuauuuauuuaaauuu

SEQ ID NO: 1911981 - RNA, 13 nt, Human
guuagggaauggc

SEQ ID NO: 1911982 - RNA, 16 nt, Human
aagcuaggccuggcca

SEQ ID NO: 1911983 - RNA, 12 nt, Human
aagcuaggccug

SEQ ID NO: 1911984 - RNA, 20 nt, Human
aagccugaguuugcuuucaa

SEQ ID NO: 1911985 - RNA, 24 nt, Human
aagccugaaggggcgucuguuccc

SEQ ID NO: 1911986 - RNA, 15 nt, Human
aagccugaugcugac

SEQ ID NO: 1911987 - RNA, 13 nt, Human
guucagccugccu

SEQ ID NO: 1911988 - RNA, 13 nt, Human
guucagcuccagc

SEQ ID NO: 1911989 - RNA, 15 nt, Human
guucagcuccagcuc

SEQ ID NO: 1911990 - RNA, 12 nt, Human
aagcucagggcc

SEQ ID NO: 1911991 - RNA, 13 nt, Human
aagcucagggccu

SEQ ID NO: 1911992 - RNA, 16 nt, Human
aagcucagggccuggc

SEQ ID NO: 1911993 - RNA, 17 nt, Human
aagcucagggccuggcu

SEQ ID NO: 1911994 - RNA, 20 nt, Human
aagcucagggccuggcucag

SEQ ID NO: 1911995 - RNA, 18 nt, Human
aagcucagggccuggcuc

SEQ ID NO: 1911996 - RNA, 19 nt, Human
aagcucagggccuggcuca

SEQ ID NO: 1911997 - RNA, 17 nt, Human
aagcuccaagcucccag

SEQ ID NO: 1911998 - RNA, 18 nt, Human
aagcuccaagcucccagg

SEQ ID NO: 1911999 - RNA, 21 nt, Human
gugugugcgccuacaggagug

SEQ ID NO: 1912000 - RNA, 17 nt, Human
gugugugaaugaacacu

SEQ ID NO: 1912001 - RNA, 17 nt, Human
gugugugcucugcuuca

SEQ ID NO: 1912002 - RNA, 16 nt, Human
gugugugggagugugu

SEQ ID NO: 1912003 - RNA, 12 nt, Human
aagcagugcaug

SEQ ID NO: 1912004 - RNA, 14 nt, Human
aagcagugcaugcu

SEQ ID NO: 1912005 - RNA, 15 nt, Human
aagcagugcaugcug

SEQ ID NO: 1912006 - RNA, 20 nt, Human
aagcagugcaugcugucccu

SEQ ID NO: 1912007 - RNA, 16 nt, Human
aagcauuuacuuugug

SEQ ID NO: 1912008 - RNA, 12 nt, Human
aagcauuuauaa

SEQ ID NO: 1912009 - RNA, 22 nt, Human
aagccaaagcuaggccuggcca

SEQ ID NO: 1912010 - RNA, 14 nt, Human
aagcccaggaaagg

SEQ ID NO: 1912011 - RNA, 17 nt, Human
aagcccaggaaaggcuc

SEQ ID NO: 1912012 - RNA, 22 nt, Human
aagccaagaggcugcagccagg

SEQ ID NO: 1912013 - RNA, 18 nt, Human
aagccaagaggcugcagc

SEQ ID NO: 1912014 - RNA, 19 nt, Human
aagcccaggaaaggcucca

SEQ ID NO: 1912015 - RNA, 22 nt, Human
aagcccaggaaaggcuccagga

SEQ ID NO: 1912016 - RNA, 19 nt, Human
aagcccaguucagcuuggg

SEQ ID NO: 1912017 - RNA, 18 nt, Human
aagcccaguucagcuugg

SEQ ID NO: 1912018 - RNA, 19 nt, Human
aagcccugagcuuucugcu

SEQ ID NO: 1912019 - RNA, 19 nt, Human
aagcccugggaucacugug

SEQ ID NO: 1912020 - RNA, 16 nt, Human
aagcccccccuuccac

SEQ ID NO: 1912021 - RNA, 16 nt, Human
aagcccccagcuaaga

SEQ ID NO: 1912022 - RNA, 21 nt, Human
aagcccccagcuaagaaccug

SEQ ID NO: 1912023 - RNA, 23 nt, Human
aagcccccagcuaagaaccugga

SEQ ID NO: 1912024 - RNA, 14 nt, Human
aagcccccaccgug

SEQ ID NO: 1912025 - RNA, 20 nt, Human
aagcccccaccgugggcagg

SEQ ID NO: 1912026 - RNA, 21 nt, Human
aagcccugugcuccauggcug

SEQ ID NO: 1912027 - RNA, 22 nt, Human
aagcccuguugacacaggucuu

SEQ ID NO: 1912028 - RNA, 20 nt, Human
aagccgcuggggccaguugg

SEQ ID NO: 1912029 - RNA, 14 nt, Human
guuaagaccuggca

SEQ ID NO: 1912030 - RNA, 16 nt, Human
guuaagaccuggcagc

SEQ ID NO: 1912031 - RNA, 17 nt, Human
guuaagacaugauuucc

SEQ ID NO: 1912032 - RNA, 19 nt, Human
guuaagacaugauuuccuu

SEQ ID NO: 1912033 - RNA, 22 nt, Human
guuaagacaugauuuccuugaa

SEQ ID NO: 1912034 - RNA, 13 nt, Human
guuaagaccuggc

SEQ ID NO: 1912035 - RNA, 18 nt, Human
aagaucucugcagggccg

SEQ ID NO: 1912036 - RNA, 18 nt, Human
aagaucuguccucagccu

SEQ ID NO: 1912037 - RNA, 17 nt, Human
aagaucuguccucagcc

SEQ ID NO: 1912038 - RNA, 18 nt, Human
aagaucucagugguuaag

SEQ ID NO: 1912039 - RNA, 17 nt, Human
aagaucguucucugccu

SEQ ID NO: 1912040 - RNA, 16 nt, Human
aagaucguucucugcc

SEQ ID NO: 1912041 - RNA, 13 nt, Human
aagaguaggaaga

SEQ ID NO: 1912042 - RNA, 14 nt, Human
aagaguaggaagac

SEQ ID NO: 1912043 - RNA, 19 nt, Human
aagaugcuucucacugcca

SEQ ID NO: 1912044 - RNA, 17 nt, Human
aagaugcuucucacugc

SEQ ID NO: 1912045 - RNA, 16 nt, Human
aagaugcuucucacug

SEQ ID NO: 1912046 - RNA, 15 nt, Human
aagaugaacagacug

SEQ ID NO: 1912047 - RNA, 17 nt, Human
aagaugaacagacugac

SEQ ID NO: 1912048 - RNA, 23 nt, Human
aagaugaaggagaggcaacaucc

SEQ ID NO: 1912049 - RNA, 17 nt, Human
guggggucacucuggca

SEQ ID NO: 1912050 - RNA, 20 nt, Human
guggggucacucuggcagcu

SEQ ID NO: 1912051 - RNA, 21 nt, Human
guggggucacucuggcagcuc

SEQ ID NO: 1912052 - RNA, 22 nt, Human
guggggucacucuggcagcuca

SEQ ID NO: 1912053 - RNA, 15 nt, Human
guggggucaugcccu

SEQ ID NO: 1912054 - RNA, 19 nt, Human
gugggguagguugggagaa

SEQ ID NO: 1912055 - RNA, 21 nt, Human
guggggucaugcccuccucuc

SEQ ID NO: 1912056 - RNA, 19 nt, Human
guggggucaugcccuccuc

SEQ ID NO: 1912057 - RNA, 22 nt, Human
aagagggucugaggaauccaga

SEQ ID NO: 1912058 - RNA, 12 nt, Human
aagaguaggaag

SEQ ID NO: 1912059 - RNA, 15 nt, Human
aagaguagaauugca

SEQ ID NO: 1912060 - RNA, 23 nt, Human
aagagggagggagggcuccagac

SEQ ID NO: 1912061 - RNA, 14 nt, Human
aagaggcugcagcc

SEQ ID NO: 1912062 - RNA, 22 nt, Human
aagaggcugaggcuggcacagg

SEQ ID NO: 1912063 - RNA, 18 nt, Human
aagaugggugaaggcugg

SEQ ID NO: 1912064 - RNA, 13 nt, Human
aagauguagagga

SEQ ID NO: 1912065 - RNA, 22 nt, Human
aagauggguccaggauuccucu

SEQ ID NO: 1912066 - RNA, 17 nt, Human
guguauuuacgcuuuga

SEQ ID NO: 1912067 - RNA, 21 nt, Human
guguauuuacgcuuugauuca

SEQ ID NO: 1912068 - RNA, 20 nt, Human
gugucaagagggucugagga

SEQ ID NO: 1912069 - RNA, 23 nt, Human
guguauuuuucaauaaagcauuu

SEQ ID NO: 1912070 - RNA, 23 nt, Human
guguauuuuuuuacuaauagaca

SEQ ID NO: 1912071 - RNA, 17 nt, Human
guguauuuuuuuacuaa

SEQ ID NO: 1912072 - RNA, 16 nt, Human
gugucagcauagaagu

SEQ ID NO: 1912073 - RNA, 23 nt, Human
gugucaggaugguaauucuuauu

SEQ ID NO: 1912074 - RNA, 21 nt, Human
gugugaccacugcagaagaca

SEQ ID NO: 1912075 - RNA, 15 nt, Human
gugugaaugaacacu

SEQ ID NO: 1912076 - RNA, 22 nt, Human
gugugacaaggauugcuacugu

SEQ ID NO: 1912077 - RNA, 14 nt, Human
gugugaaugaacac

SEQ ID NO: 1912078 - RNA, 20 nt, Human
gugucagguggggcagcuug

SEQ ID NO: 1912079 - RNA, 16 nt, Human
gugugguagagugugc

SEQ ID NO: 1912080 - RNA, 17 nt, Human
guguggguaccuguauu

SEQ ID NO: 1912081 - RNA, 14 nt, Human
gugugggucugugu

SEQ ID NO: 1912082 - RNA, 16 nt, Human
guguggguaccuguau

SEQ ID NO: 1912083 - RNA, 19 nt, Human
guguguccaaaacugccuc

SEQ ID NO: 1912084 - RNA, 20 nt, Human
gugugucuuuccucccugaa

SEQ ID NO: 1912085 - RNA, 18 nt, Human
guguguccaaaacugccu

SEQ ID NO: 1912086 - RNA, 20 nt, Human
gugugucacccuuaggccag

SEQ ID NO: 1912087 - RNA, 15 nt, Human
guguguauguggggg

SEQ ID NO: 1912088 - RNA, 13 nt, Human
guguguauguggg

SEQ ID NO: 1912089 - RNA, 15 nt, Human
aagaccuucuccuuc

SEQ ID NO: 1912090 - RNA, 18 nt, Human
aagaccuucuccuucacc

SEQ ID NO: 1912091 - RNA, 19 nt, Human
aagaccuucuccuucaccu

SEQ ID NO: 1912092 - RNA, 13 nt, Human
aagacgcugugcu

SEQ ID NO: 1912093 - RNA, 13 nt, Human
aagaccuuucaaa

SEQ ID NO: 1912094 - RNA, 15 nt, Human
aagacgcugugcugc

SEQ ID NO: 1912095 - RNA, 17 nt, Human
aagacgcugugcugccc

SEQ ID NO: 1912096 - RNA, 18 nt, Human
aagacgcugugcugcccu

SEQ ID NO: 1912097 - RNA, 19 nt, Human
aagacgcugugcugcccug

SEQ ID NO: 1912098 - RNA, 20 nt, Human
aagacgcugugcugcccugc

SEQ ID NO: 1912099 - RNA, 22 nt, Human
aagacgugauuuugcuguagaa

SEQ ID NO: 1912100 - RNA, 16 nt, Human
aagacgugauuuugcu

SEQ ID NO: 1912101 - RNA, 23 nt, Human
aagacgugauuuugcuguagaag

SEQ ID NO: 1912102 - RNA, 15 nt, Human
aagacguguuugugu

SEQ ID NO: 1912103 - RNA, 16 nt, Human
aagacguguuuguguu

SEQ ID NO: 1912104 - RNA, 23 nt, Human
aagacguguuuguguuugugugu

SEQ ID NO: 1912105 - RNA, 23 nt, Human
aagacugaguacguugugcauuu

SEQ ID NO: 1912106 - RNA, 20 nt, Human
aagacuauccaacuuaacau

SEQ ID NO: 1912107 - RNA, 18 nt, Human
aagacuuccagagccuca

SEQ ID NO: 1912108 - RNA, 16 nt, Human
aagacuuccagagccu

SEQ ID NO: 1912109 - RNA, 20 nt, Human
aagacuugcauuuaaaugug

SEQ ID NO: 1912110 - RNA, 16 nt, Human
aagacuuuggaaagac

SEQ ID NO: 1912111 - RNA, 11 nt, Human
aagagccacag

SEQ ID NO: 1912112 - RNA, 21 nt, Human
guggccucccaacucacccca

SEQ ID NO: 1912113 - RNA, 22 nt, Human
guggccucccaacucaccccag

SEQ ID NO: 1912114 - RNA, 23 nt, Human
aagaggaaugaaguacucauaca

SEQ ID NO: 1912115 - RNA, 15 nt, Human
aagagccacaggucu

SEQ ID NO: 1912116 - RNA, 22 nt, Human
aagagccacaggucuuuauguu

SEQ ID NO: 1912117 - RNA, 22 nt, Human
aagaggacauaaugggguccug

SEQ ID NO: 1912118 - RNA, 14 nt, Human
aagaggaugcugug

SEQ ID NO: 1912119 - RNA, 17 nt, Human
aagaggaugcugugaaa

SEQ ID NO: 1912120 - RNA, 17 nt, Human
guggccgcccaaggccc

SEQ ID NO: 1912121 - RNA, 23 nt, Human
gugggaggaucucuugagccugg

SEQ ID NO: 1912122 - RNA, 18 nt, Human
gugggagcugccuguuca

SEQ ID NO: 1912123 - RNA, 15 nt, Human
gugggagcugccugu

SEQ ID NO: 1912124 - RNA, 15 nt, Human
guggggucacucugg

SEQ ID NO: 1912125 - RNA, 14 nt, Human
gugggagcugccug

SEQ ID NO: 1912126 - RNA, 15 nt, Human
gugggacacccugug

SEQ ID NO: 1912127 - RNA, 13 nt, Human
gugggacacccug

SEQ ID NO: 1912128 - RNA, 22 nt, Human
guggcgcagcauauucaggaag

SEQ ID NO: 1912129 - RNA, 20 nt, Human
guggcgacucuauagacucu

SEQ ID NO: 1912130 - RNA, 20 nt, Human
aauagucuagacuaaaagau

SEQ ID NO: 1912131 - RNA, 14 nt, Human
aauagucuagaugg

SEQ ID NO: 1912132 - RNA, 21 nt, Human
aauagucuagauggcuccucu

SEQ ID NO: 1912133 - RNA, 19 nt, Human
aauagucuagacuaaaaga

SEQ ID NO: 1912134 - RNA, 20 nt, Human
aauagucuagauggcuccuc

SEQ ID NO: 1912135 - RNA, 15 nt, Human
aauauauuuaagaua

SEQ ID NO: 1912136 - RNA, 20 nt, Human
aauauauuuaagauaauuau

SEQ ID NO: 1912137 - RNA, 19 nt, Human
aauauauuuaagauaauua

SEQ ID NO: 1912138 - RNA, 21 nt, Human
aauauauuuuaagacgaaaca

SEQ ID NO: 1912139 - RNA, 21 nt, Human
aauaguucagguaacaggcag

SEQ ID NO: 1912140 - RNA, 21 nt, Human
aauauauucagccuggcuuca

SEQ ID NO: 1912141 - RNA, 22 nt, Human
aauaguuaagacaugauuuccu

SEQ ID NO: 1912142 - RNA, 23 nt, Human
aauaguuaagacaugauuuccuu

SEQ ID NO: 1912143 - RNA, 21 nt, Human
aauaguuaagacaugauuucc

SEQ ID NO: 1912144 - RNA, 20 nt, Human
uaacaugaauauuuaguguu

SEQ ID NO: 1912145 - RNA, 21 nt, Human
uaacaugaauauuuaguguuc

SEQ ID NO: 1912146 - RNA, 14 nt, Human
uaacaugaauauuu

SEQ ID NO: 1912147 - RNA, 18 nt, Human
uaacaugaggggacauuu

SEQ ID NO: 1912148 - RNA, 19 nt, Human
uaacaugaggggacauuuu

SEQ ID NO: 1912149 - RNA, 20 nt, Human
uaacaugaggggacauuuug

SEQ ID NO: 1912150 - RNA, 19 nt, Human
uaacauguaauuaaguacu

SEQ ID NO: 1912151 - RNA, 23 nt, Human
uaacaugaggggacauuuuggug

SEQ ID NO: 1912152 - RNA, 19 nt, Human
uaacaugaauauuuagugu

SEQ ID NO: 1912153 - RNA, 13 nt, Human
uaacguauaaaag

SEQ ID NO: 1912154 - RNA, 17 nt, Human
uaacguauaaaagccug

SEQ ID NO: 1912155 - RNA, 16 nt, Human
uaacuagauggugcug

SEQ ID NO: 1912156 - RNA, 18 nt, Human
uaacuagauggugcugag

SEQ ID NO: 1912157 - RNA, 19 nt, Human
uaacuagauggugcugaga

SEQ ID NO: 1912158 - RNA, 20 nt, Human
uaacuagauggugcugagaa

SEQ ID NO: 1912159 - RNA, 21 nt, Human
uaacuagauggugcugagaag

SEQ ID NO: 1912160 - RNA, 13 nt, Human
uaacuucacauau

SEQ ID NO: 1912161 - RNA, 17 nt, Human
uaacuuccaugugaggg

SEQ ID NO: 1912162 - RNA, 15 nt, Human
uaacuagcuuggaaa

SEQ ID NO: 1912163 - RNA, 16 nt, Human
uaacuugucuuuggac

SEQ ID NO: 1912164 - RNA, 20 nt, Human
uaacuugucuuuggacccug

SEQ ID NO: 1912165 - RNA, 17 nt, Human
uaacuucuuauggaauu

SEQ ID NO: 1912166 - RNA, 13 nt, Human
uaacuucugccug

SEQ ID NO: 1912167 - RNA, 18 nt, Human
uaacuucuuauggaauug

SEQ ID NO: 1912168 - RNA, 19 nt, Human
uaacuucuuauggaauuga

SEQ ID NO: 1912169 - RNA, 13 nt, Human
uaagaagugaaaa

SEQ ID NO: 1912170 - RNA, 13 nt, Human
uaagaaggcaaaa

SEQ ID NO: 1912171 - RNA, 17 nt, Human
uaagaaggcaaaaaugu

SEQ ID NO: 1912172 - RNA, 18 nt, Human
uaagaaggcaaaaaugua

SEQ ID NO: 1912173 - RNA, 14 nt, Human
uaagaauucaaacu

SEQ ID NO: 1912174 - RNA, 18 nt, Human
uaagaauucaaacugggg

SEQ ID NO: 1912175 - RNA, 23 nt, Human
uaagacaaaaagcuacuuauugu

SEQ ID NO: 1912176 - RNA, 18 nt, Human
uaagaccuggcagcucug

SEQ ID NO: 1912177 - RNA, 17 nt, Human
uaagaccuggcagcucu

SEQ ID NO: 1912178 - RNA, 22 nt, Human
uaagaauucaaacuggggccuc

SEQ ID NO: 1912179 - RNA, 20 nt, Human
uaaauuaacuuuuauaaacu

SEQ ID NO: 1912180 - RNA, 19 nt, Human
uaaauuaacuuuuauaaac

SEQ ID NO: 1912181 - RNA, 16 nt, Human
uaaauguuaagaaaaa

SEQ ID NO: 1912182 - RNA, 18 nt, Human
uaaaugaaaaucgugaca

SEQ ID NO: 1912183 - RNA, 21 nt, Human
aaguguauuuuuuuacuaaua

SEQ ID NO: 1912184 - RNA, 18 nt, Human
aaguguauuuuuuuacua

SEQ ID NO: 1912185 - RNA, 13 nt, Human
aaguguauuuuuc

SEQ ID NO: 1912186 - RNA, 15 nt, Human
aaguguauuuuucaa

SEQ ID NO: 1912187 - RNA, 22 nt, Human
aaguguauuuuucaauaaagca

SEQ ID NO: 1912188 - RNA, 21 nt, Human
uaaauuaugggaaucaagauu

SEQ ID NO: 1912189 - RNA, 20 nt, Human
uaaauuaugggaaucaagau

SEQ ID NO: 1912190 - RNA, 21 nt, Human
uaaauuaacuuuuauaaacuu

SEQ ID NO: 1912191 - RNA, 13 nt, Human
aauacagaggcaa

SEQ ID NO: 1912192 - RNA, 21 nt, Human
aauacaccagguagaacacaa

SEQ ID NO: 1912193 - RNA, 16 nt, Human
aauacagggcauuuug

SEQ ID NO: 1912194 - RNA, 17 nt, Human
aauaccagccaguaaau

SEQ ID NO: 1912195 - RNA, 19 nt, Human
aauaccagccaguaaaugg

SEQ ID NO: 1912196 - RNA, 12 nt, Human
aauaccaaggaa

SEQ ID NO: 1912197 - RNA, 16 nt, Human
aauaccucugugugcu

SEQ ID NO: 1912198 - RNA, 15 nt, Human
aauaccucugugugc

SEQ ID NO: 1912199 - RNA, 14 nt, Human
aauaccucugugug

SEQ ID NO: 1912200 - RNA, 13 nt, Human
aauaccucugugu

SEQ ID NO: 1912201 - RNA, 15 nt, Human
aauaccugucccccu

SEQ ID NO: 1912202 - RNA, 18 nt, Human
aauaccugucccccugac

SEQ ID NO: 1912203 - RNA, 19 nt, Human
aauaccugucccccugaca

SEQ ID NO: 1912204 - RNA, 21 nt, Human
aauaccugucccccugacaac

SEQ ID NO: 1912205 - RNA, 18 nt, Human
aauagcgucauaacuaga

SEQ ID NO: 1912206 - RNA, 16 nt, Human
aauagacuaaaugaaa

SEQ ID NO: 1912207 - RNA, 15 nt, Human
aauagacuaaaugaa

SEQ ID NO: 1912208 - RNA, 18 nt, Human
aaucagggaggucauuuu

SEQ ID NO: 1912209 - RNA, 19 nt, Human
aaucagggaggucauuuug

SEQ ID NO: 1912210 - RNA, 14 nt, Human
aaucaguauaaaca

SEQ ID NO: 1912211 - RNA, 15 nt, Human
aaucaguauaaacaa

SEQ ID NO: 1912212 - RNA, 17 nt, Human
aaucaguauaaacaaag

SEQ ID NO: 1912213 - RNA, 19 nt, Human
aaucagccugcuccagcug

SEQ ID NO: 1912214 - RNA, 13 nt, Human
aaucagccugcuc

SEQ ID NO: 1912215 - RNA, 18 nt, Human
aaucagccugcuccagcu

SEQ ID NO: 1912216 - RNA, 11 nt, Human
aaucagccugc

SEQ ID NO: 1912217 - RNA, 20 nt, Human
aaucacguaaagcuagaaau

SEQ ID NO: 1912218 - RNA, 21 nt, Human
aaucacguaaagcuagaaaug

SEQ ID NO: 1912219 - RNA, 19 nt, Human
aauauuuucuuuaaugcuu

SEQ ID NO: 1912220 - RNA, 21 nt, Human
aauauuuucuuuaaugcuuuu

SEQ ID NO: 1912221 - RNA, 19 nt, Human
aauauuuauuauuuucacc

SEQ ID NO: 1912222 - RNA, 20 nt, Human
aauauuuauuauuuucaccu

SEQ ID NO: 1912223 - RNA, 18 nt, Human
aauauuuucuuuaaugcu

SEQ ID NO: 1912224 - RNA, 15 nt, Human
uaagacguguuugug

SEQ ID NO: 1912225 - RNA, 12 nt, Human
aauauuuauuac

SEQ ID NO: 1912226 - RNA, 13 nt, Human
aauauuuauuacc

SEQ ID NO: 1912227 - RNA, 14 nt, Human
aauauuuauuaccu

SEQ ID NO: 1912228 - RNA, 15 nt, Human
aauauuuauuaccuc

SEQ ID NO: 1912229 - RNA, 16 nt, Human
aauauuuauuaccucu

SEQ ID NO: 1912230 - RNA, 17 nt, Human
aauauuuauuaccucug

SEQ ID NO: 1912231 - RNA, 18 nt, Human
aauauuuauuaccucuga

SEQ ID NO: 1912232 - RNA, 12 nt, Human
aauauuuauuau

SEQ ID NO: 1912233 - RNA, 22 nt, Human
uaaggaauuuuauuuuuuucug

SEQ ID NO: 1912234 - RNA, 17 nt, Human
uaaggaauaccuguccc

SEQ ID NO: 1912235 - RNA, 18 nt, Human
uaaggaauaccugucccc

SEQ ID NO: 1912236 - RNA, 13 nt, Human
uaaggaagacaau

SEQ ID NO: 1912237 - RNA, 9 nt, Human
uaaggaaua

SEQ ID NO: 1912238 - RNA, 14 nt, Human
uaagauucauauuu

SEQ ID NO: 1912239 - RNA, 14 nt, Human
uaagcaaaauguga

SEQ ID NO: 1912240 - RNA, 21 nt, Human
uaagcaaaaugugauauguac

SEQ ID NO: 1912241 - RNA, 15 nt, Human
uaagcaaaaugugau

SEQ ID NO: 1912242 - RNA, 21 nt, Human
uaagcuauucaguaauaacuc

SEQ ID NO: 1912243 - RNA, 21 nt, Human
uaaguuuccuuccagcccaga

SEQ ID NO: 1912244 - RNA, 19 nt, Human
uaaguuuccuuccagccca

SEQ ID NO: 1912245 - RNA, 17 nt, Human
uaaguguguguuuuuca

SEQ ID NO: 1912246 - RNA, 21 nt, Human
uaaguuacacauuuuucagau

SEQ ID NO: 1912247 - RNA, 21 nt, Human
uaaguauucuuauuuaaugaa

SEQ ID NO: 1912248 - RNA, 18 nt, Human
aaucccacccacauguga

SEQ ID NO: 1912249 - RNA, 14 nt, Human
aaucccagcaauuu

SEQ ID NO: 1912250 - RNA, 17 nt, Human
aaucccacccacaugug

SEQ ID NO: 1912251 - RNA, 17 nt, Human
aaucccauuuaaaaaaa

SEQ ID NO: 1912252 - RNA, 21 nt, Human
aaucccaaauuugauugauuu

SEQ ID NO: 1912253 - RNA, 20 nt, Human
aauccucaguuuuugugaaa

SEQ ID NO: 1912254 - RNA, 13 nt, Human
aaucucaaauaac

SEQ ID NO: 1912255 - RNA, 12 nt, Human
aaucuauuuaag

SEQ ID NO: 1912256 - RNA, 17 nt, Human
aaucuauuuaucuucau

SEQ ID NO: 1912257 - RNA, 18 nt, Human
aaucuaugauuccaggug

SEQ ID NO: 1912258 - RNA, 15 nt, Human
aaucuaugauuccag

SEQ ID NO: 1912259 - RNA, 11 nt, Human
aaucuauuuaa

SEQ ID NO: 1912260 - RNA, 21 nt, Human
aaucggaucuggggcucuggg

SEQ ID NO: 1912261 - RNA, 22 nt, Human
aaucggaucuggggcucuggga

SEQ ID NO: 1912262 - RNA, 23 nt, Human
aaucggaucuggggcucugggau

SEQ ID NO: 1912263 - RNA, 14 nt, Human
aauggaaccaggcu

SEQ ID NO: 1912264 - RNA, 19 nt, Human
aaugcuuuagaaagguuuu

SEQ ID NO: 1912265 - RNA, 16 nt, Human
aauggaaccaggcuug

SEQ ID NO: 1912266 - RNA, 17 nt, Human
aauggaaccaggcuugg

SEQ ID NO: 1912267 - RNA, 18 nt, Human
aaugcuuuagaaagguuu

SEQ ID NO: 1912268 - RNA, 13 nt, Human
aauggaagacagc

SEQ ID NO: 1912269 - RNA, 18 nt, Human
aaugcugguuuuucaguu

SEQ ID NO: 1912270 - RNA, 22 nt, Human
aaugcuggcuguuggcuggggg

SEQ ID NO: 1912271 - RNA, 21 nt, Human
aaugcuggcuguuggcugggg

SEQ ID NO: 1912272 - RNA, 16 nt, Human
aaugcaugauuuugua

SEQ ID NO: 1912273 - RNA, 17 nt, Human
aaugcaugauuuuguaa

SEQ ID NO: 1912274 - RNA, 19 nt, Human
aaugcaugauuuuguaacc

SEQ ID NO: 1912275 - RNA, 16 nt, Human
aaugcaucuagauuau

SEQ ID NO: 1912276 - RNA, 19 nt, Human
aaugcaucuagauuaugga

SEQ ID NO: 1912277 - RNA, 18 nt, Human
uaauuuuuuugagacaga

SEQ ID NO: 1912278 - RNA, 21 nt, Human
uacaaaaaaaaaaaaaaauua

SEQ ID NO: 1912279 - RNA, 14 nt, Human
uaauuuuuguaauu

SEQ ID NO: 1912280 - RNA, 16 nt, Human
uacaaugcugugcccu

SEQ ID NO: 1912281 - RNA, 18 nt, Human
uacaaugaugcuauuugc

SEQ ID NO: 1912282 - RNA, 14 nt, Human
uacaaugcugugcc

SEQ ID NO: 1912283 - RNA, 13 nt, Human
uacaaugcugugc

SEQ ID NO: 1912284 - RNA, 22 nt, Human
uacaauuaaaaaaaaagaucug

SEQ ID NO: 1912285 - RNA, 18 nt, Human
uacaauuaaaaaaaaaga

SEQ ID NO: 1912286 - RNA, 19 nt, Human
aauguaaucaauguuucuu

SEQ ID NO: 1912287 - RNA, 13 nt, Human
uacagacaaagcg

SEQ ID NO: 1912288 - RNA, 14 nt, Human
uacagacaaagcgu

SEQ ID NO: 1912289 - RNA, 15 nt, Human
uacagacaaagcgug

SEQ ID NO: 1912290 - RNA, 23 nt, Human
uacagagcagacaguuaagagaa

SEQ ID NO: 1912291 - RNA, 23 nt, Human
uacagagaagugaauaacugcaa

SEQ ID NO: 1912292 - RNA, 19 nt, Human
uacagagcccacgccccca

SEQ ID NO: 1912293 - RNA, 22 nt, Human
uacagagcccacgcccccacug

SEQ ID NO: 1912294 - RNA, 19 nt, Human
uacagacaaagcguggugg

SEQ ID NO: 1912295 - RNA, 17 nt, Human
uacagagacagaaagca

SEQ ID NO: 1912296 - RNA, 15 nt, Human
uacagagaagugaau

SEQ ID NO: 1912297 - RNA, 16 nt, Human
aaugguuuucaaaaua

SEQ ID NO: 1912298 - RNA, 16 nt, Human
aaugguuuucuugugu

SEQ ID NO: 1912299 - RNA, 20 nt, Human
aauguaaaggagucaaaacu

SEQ ID NO: 1912300 - RNA, 21 nt, Human
aauguaaaggagucaaaacua

SEQ ID NO: 1912301 - RNA, 23 nt, Human
aauguaaaggagucaaaacuaca

SEQ ID NO: 1912302 - RNA, 14 nt, Human
aaugguuuucaaaa

SEQ ID NO: 1912303 - RNA, 19 nt, Human
aaugguuugcaaggaagcc

SEQ ID NO: 1912304 - RNA, 18 nt, Human
aaugguuugcaaggaagc

SEQ ID NO: 1912305 - RNA, 17 nt, Human
aaugguuugcaaggaag

SEQ ID NO: 1912306 - RNA, 18 nt, Human
aauggaagacagcucuua

SEQ ID NO: 1912307 - RNA, 16 nt, Human
aauggaagacagcucu

SEQ ID NO: 1912308 - RNA, 18 nt, Human
aauggauaaaaucugaua

SEQ ID NO: 1912309 - RNA, 22 nt, Human
aaugagaagaaaauggaaccag

SEQ ID NO: 1912310 - RNA, 12 nt, Human
aaugagaaaucu

SEQ ID NO: 1912311 - RNA, 22 nt, Human
aaugagaaaucuaaaaaacgaa

SEQ ID NO: 1912312 - RNA, 11 nt, Human
aaugagccugg

SEQ ID NO: 1912313 - RNA, 17 nt, Human
aaugagaggcauuuccc

SEQ ID NO: 1912314 - RNA, 18 nt, Human
aaugagauuaauuccuuu

SEQ ID NO: 1912315 - RNA, 17 nt, Human
aaugagauuaauuccuu

SEQ ID NO: 1912316 - RNA, 20 nt, Human
aaugagaaaaugucuuuauu

SEQ ID NO: 1912317 - RNA, 17 nt, Human
aaugacuaauucuugca

SEQ ID NO: 1912318 - RNA, 18 nt, Human
aaugacuaauucuugcau

SEQ ID NO: 1912319 - RNA, 20 nt, Human
aaugacuaauucuugcauau

SEQ ID NO: 1912320 - RNA, 21 nt, Human
aaugaccuuucaauaggaaaa

SEQ ID NO: 1912321 - RNA, 20 nt, Human
aaugaccuuucaauaggaaa

SEQ ID NO: 1912322 - RNA, 18 nt, Human
aaugaggucagagccugc

SEQ ID NO: 1912323 - RNA, 16 nt, Human
aaugaggucagagccu

SEQ ID NO: 1912324 - RNA, 14 nt, Human
aaugagccuggcaa

SEQ ID NO: 1912325 - RNA, 12 nt, Human
aaugagccuggc

SEQ ID NO: 1912326 - RNA, 13 nt, Human
aaugagccuggca

SEQ ID NO: 1912327 - RNA, 19 nt, Human
aaugaguuaccuacauuuu

SEQ ID NO: 1912328 - RNA, 13 nt, Human
uaauuauuauuua

SEQ ID NO: 1912329 - RNA, 12 nt, Human
uaauuauuauuu

SEQ ID NO: 1912330 - RNA, 14 nt, Human
uaauuauuauucuu

SEQ ID NO: 1912331 - RNA, 12 nt, Human
uaauuauuauuc

SEQ ID NO: 1912332 - RNA, 13 nt, Human
aaugcaccuggaa

SEQ ID NO: 1912333 - RNA, 14 nt, Human
aaugcaaaccauca

SEQ ID NO: 1912334 - RNA, 13 nt, Human
aaugcaaaaaucu

SEQ ID NO: 1912335 - RNA, 12 nt, Human
aaugcaaaccau

SEQ ID NO: 1912336 - RNA, 11 nt, Human
aaugcaaacca

SEQ ID NO: 1912337 - RNA, 13 nt, Human
aaugauuuuuaaa

SEQ ID NO: 1912338 - RNA, 16 nt, Human
aaugauuucauucaau

SEQ ID NO: 1912339 - RNA, 22 nt, Human
uaauuauuauuuauauauguau

SEQ ID NO: 1912340 - RNA, 17 nt, Human
uaauuauuauuuauaua

SEQ ID NO: 1912341 - RNA, 14 nt, Human
uaauuauuauuuau

SEQ ID NO: 1912342 - RNA, 22 nt, Human
uaauuccguagguuauuuucag

SEQ ID NO: 1912343 - RNA, 19 nt, Human
uaauuccucaacguauugu

SEQ ID NO: 1912344 - RNA, 12 nt, Human
uaauuuaaagcc

SEQ ID NO: 1912345 - RNA, 19 nt, Human
uaauuuaaagccacaacca

SEQ ID NO: 1912346 - RNA, 20 nt, Human
uaauuuaaaauugugaugug

SEQ ID NO: 1912347 - RNA, 19 nt, Human
uaauuuaaaauugugaugu

SEQ ID NO: 1912348 - RNA, 13 nt, Human
uaauuuauaaaaa

SEQ ID NO: 1912349 - RNA, 16 nt, Human
uaauuuauaaaaaggu

SEQ ID NO: 1912350 - RNA, 21 nt, Human
uacauuagucauucaauaaau

SEQ ID NO: 1912351 - RNA, 13 nt, Human
uacauucauuuag

SEQ ID NO: 1912352 - RNA, 15 nt, Human
uacauucauuuagcu

SEQ ID NO: 1912353 - RNA, 22 nt, Human
aauuaaguuagggaauggcaca

SEQ ID NO: 1912354 - RNA, 15 nt, Human
aauuaauaaucuuau

SEQ ID NO: 1912355 - RNA, 13 nt, Human
uacauuuccuaaa

SEQ ID NO: 1912356 - RNA, 12 nt, Human
uacauucuguua

SEQ ID NO: 1912357 - RNA, 18 nt, Human
uaccagccaguaaauggg

SEQ ID NO: 1912358 - RNA, 22 nt, Human
uaccagcagagcaccuuagaca

SEQ ID NO: 1912359 - RNA, 13 nt, Human
uaccagcagagca

SEQ ID NO: 1912360 - RNA, 14 nt, Human
uaccagcagagcac

SEQ ID NO: 1912361 - RNA, 12 nt, Human
uaccagcagagc

SEQ ID NO: 1912362 - RNA, 19 nt, Human
uaccagggacugaggggag

SEQ ID NO: 1912363 - RNA, 16 nt, Human
uacccccuccuucaga

SEQ ID NO: 1912364 - RNA, 17 nt, Human
uacccccuccuucagac

SEQ ID NO: 1912365 - RNA, 14 nt, Human
uaccauucagugau

SEQ ID NO: 1912366 - RNA, 23 nt, Human
uaccauucagugauuacugucaa

SEQ ID NO: 1912367 - RNA, 13 nt, Human
uacccccuccuuc

SEQ ID NO: 1912368 - RNA, 17 nt, Human
uaccaugugcuacaggg

SEQ ID NO: 1912369 - RNA, 15 nt, Human
aauguuguuauuuaa

SEQ ID NO: 1912370 - RNA, 13 nt, Human
aauuaacuuuuau

SEQ ID NO: 1912371 - RNA, 12 nt, Human
aauuaacuuuua

SEQ ID NO: 1912372 - RNA, 16 nt, Human
aauuaacuuuuauaaa

SEQ ID NO: 1912373 - RNA, 15 nt, Human
aauuaacuuuuauaa

SEQ ID NO: 1912374 - RNA, 16 nt, Human
aauuaaguacuaugua

SEQ ID NO: 1912375 - RNA, 17 nt, Human
aauuaaguacuauguau

SEQ ID NO: 1912376 - RNA, 21 nt, Human
aauguuauuuuuuaauuauua

SEQ ID NO: 1912377 - RNA, 20 nt, Human
aauguucaucaaugaaugaa

SEQ ID NO: 1912378 - RNA, 16 nt, Human
aauguucaucaaugaa

SEQ ID NO: 1912379 - RNA, 17 nt, Human
uacagggguucuggaaa

SEQ ID NO: 1912380 - RNA, 15 nt, Human
uacaggggccagaag

SEQ ID NO: 1912381 - RNA, 13 nt, Human
uacaggggccaga

SEQ ID NO: 1912382 - RNA, 20 nt, Human
uacagggcacaggccaugga

SEQ ID NO: 1912383 - RNA, 17 nt, Human
uacagggaugguguuca

SEQ ID NO: 1912384 - RNA, 21 nt, Human
aaugugcugaaugguuuucaa

SEQ ID NO: 1912385 - RNA, 22 nt, Human
aauguggcaaggaaaaacaggu

SEQ ID NO: 1912386 - RNA, 16 nt, Human
aauguuacauuauuau

SEQ ID NO: 1912387 - RNA, 15 nt, Human
aauguuacauuguuu

SEQ ID NO: 1912388 - RNA, 15 nt, Human
aauguuacauuauua

SEQ ID NO: 1912389 - RNA, 15 nt, Human
aauguuagauaguua

SEQ ID NO: 1912390 - RNA, 20 nt, Human
aauguuauuuuuuaauuauu

SEQ ID NO: 1912391 - RNA, 19 nt, Human
aauguuauuuuuuaauuau

SEQ ID NO: 1912392 - RNA, 13 nt, Human
aauguucaucaau

SEQ ID NO: 1912393 - RNA, 14 nt, Human
aauguuauuuaaca

SEQ ID NO: 1912394 - RNA, 15 nt, Human
uacccgggcagggcu

SEQ ID NO: 1912395 - RNA, 23 nt, Human
uacccgggaagggggcugggaca

SEQ ID NO: 1912396 - RNA, 18 nt, Human
uacccccuccuucagaca

SEQ ID NO: 1912397 - RNA, 23 nt, Human
uaccucuugagccuugaacuuug

SEQ ID NO: 1912398 - RNA, 13 nt, Human
uaccucuuggcug

SEQ ID NO: 1912399 - RNA, 22 nt, Human
uaccucuugagccuugaacuuu

SEQ ID NO: 1912400 - RNA, 16 nt, Human
uaccugaagucuuugu

SEQ ID NO: 1912401 - RNA, 13 nt, Human
uaccugaggggcc

SEQ ID NO: 1912402 - RNA, 15 nt, Human
uaccugaggggccuc

SEQ ID NO: 1912403 - RNA, 23 nt, Human
uaccugaagcuaucguaaaauua

SEQ ID NO: 1912404 - RNA, 13 nt, Human
uaccugaagucuu

SEQ ID NO: 1912405 - RNA, 14 nt, Human
uaccugaagucuuu

SEQ ID NO: 1912406 - RNA, 17 nt, Human
aauuacaggaaguacug

SEQ ID NO: 1912407 - RNA, 19 nt, Human
aauuacaggaaguacugga

SEQ ID NO: 1912408 - RNA, 20 nt, Human
aauuacaggaaguacuggag

SEQ ID NO: 1912409 - RNA, 16 nt, Human
uaccugaggggccucu

SEQ ID NO: 1912410 - RNA, 16 nt, Human
uaccugccaggaagcc

SEQ ID NO: 1912411 - RNA, 22 nt, Human
uaccuguguauuuuuuaaagcu

SEQ ID NO: 1912412 - RNA, 22 nt, Human
uaccuguuuuguggucagcugu

SEQ ID NO: 1912413 - RNA, 21 nt, Human
aauuauuauucuucauaacaa

SEQ ID NO: 1912414 - RNA, 13 nt, Human
aauuauuauucuu

SEQ ID NO: 1912415 - RNA, 18 nt, Human
aauuauuauuuauauaug

SEQ ID NO: 1912416 - RNA, 16 nt, Human
aauuauuauuuauaua

SEQ ID NO: 1912417 - RNA, 13 nt, Human
aauuauuauuuau

SEQ ID NO: 1912418 - RNA, 11 nt, Human
aauuauuauuu

SEQ ID NO: 1912419 - RNA, 21 nt, Human
aauuauuauuuauauauguau

SEQ ID NO: 1912420 - RNA, 21 nt, Human
aauuauuuauuaaaugcccag

SEQ ID NO: 1912421 - RNA, 22 nt, Human
aauuaugugccagauuuaugca

SEQ ID NO: 1912422 - RNA, 22 nt, Human
aauuagaaaauguuauuuaaca

SEQ ID NO: 1912423 - RNA, 15 nt, Human
aauuagaauaguguu

SEQ ID NO: 1912424 - RNA, 22 nt, Human
aauuauuuauuaaaugcccagc

SEQ ID NO: 1912425 - RNA, 12 nt, Human
aauuauuuuaaa

SEQ ID NO: 1912426 - RNA, 15 nt, Human
aauuauuuuaaaaga

SEQ ID NO: 1912427 - RNA, 17 nt, Human
aauucaauuguaaauug

SEQ ID NO: 1912428 - RNA, 14 nt, Human
aauucaauuguaaa

SEQ ID NO: 1912429 - RNA, 17 nt, Human
aauucaguuguuagugu

SEQ ID NO: 1912430 - RNA, 22 nt, Human
aauucaguuguuagugugucuu

SEQ ID NO: 1912431 - RNA, 18 nt, Human
aauucaucccaacugucu

SEQ ID NO: 1912432 - RNA, 11 nt, Human
aauucaguugu

SEQ ID NO: 1912433 - RNA, 19 nt, Human
aauucaauuguaaauugaa

SEQ ID NO: 1912434 - RNA, 23 nt, Human
aauucaauuguaaauugaaucag

SEQ ID NO: 1912435 - RNA, 13 nt, Human
aauucacaaacuu

SEQ ID NO: 1912436 - RNA, 14 nt, Human
acaggagaccuggc

SEQ ID NO: 1912437 - RNA, 18 nt, Human
acaggacuuaaaaugaca

SEQ ID NO: 1912438 - RNA, 15 nt, Human
acaggcagauacagg

SEQ ID NO: 1912439 - RNA, 20 nt, Human
acaggaaaauuuuaaaaaua

SEQ ID NO: 1912440 - RNA, 17 nt, Human
acaggcccggcuccagg

SEQ ID NO: 1912441 - RNA, 16 nt, Human
acaggcccggcuccag

SEQ ID NO: 1912442 - RNA, 22 nt, Human
acaggcccggcuccaggcuccu

SEQ ID NO: 1912443 - RNA, 21 nt, Human
acaggcccggcuccaggcucc

SEQ ID NO: 1912444 - RNA, 20 nt, Human
acaggcccggcuccaggcuc

SEQ ID NO: 1912445 - RNA, 18 nt, Human
acaggcccggcuccaggc

SEQ ID NO: 1912446 - RNA, 21 nt, Human
acaggcccucccuguucccca

SEQ ID NO: 1912447 - RNA, 22 nt, Human
acaggcccucccuguuccccag

SEQ ID NO: 1912448 - RNA, 23 nt, Human
acaggcccucccuguuccccaga

SEQ ID NO: 1912449 - RNA, 21 nt, Human
uaugucucgugguaggacugu

SEQ ID NO: 1912450 - RNA, 21 nt, Human
acaggccugagauuucaucug

SEQ ID NO: 1912451 - RNA, 17 nt, Human
acaggccugagauuuca

SEQ ID NO: 1912452 - RNA, 15 nt, Human
acaggccugagauuu

SEQ ID NO: 1912453 - RNA, 16 nt, Human
acaggccgcccugcgg

SEQ ID NO: 1912454 - RNA, 19 nt, Human
acagcuaaugggacacuaa

SEQ ID NO: 1912455 - RNA, 17 nt, Human
acagcuaaugggacacu

SEQ ID NO: 1912456 - RNA, 16 nt, Human
acagcuaaugggacac

SEQ ID NO: 1912457 - RNA, 15 nt, Human
acagcuaaugggaca

SEQ ID NO: 1912458 - RNA, 15 nt, Human
acagcuauauuucug

SEQ ID NO: 1912459 - RNA, 21 nt, Human
acagcuucauuuccugugucu

SEQ ID NO: 1912460 - RNA, 19 nt, Human
acagcuucauuuccugugu

SEQ ID NO: 1912461 - RNA, 17 nt, Human
acagcuucauuuccugu

SEQ ID NO: 1912462 - RNA, 17 nt, Human
acagcuugaccgugagg

SEQ ID NO: 1912463 - RNA, 20 nt, Human
acagcuucucauccugcagg

SEQ ID NO: 1912464 - RNA, 20 nt, Human
acagcuugaccgugaggcca

SEQ ID NO: 1912465 - RNA, 21 nt, Human
acagcuugaccgugaggccag

SEQ ID NO: 1912466 - RNA, 21 nt, Human
acaggaaaagcugcugacagu

SEQ ID NO: 1912467 - RNA, 20 nt, Human
acaggaaaagcugcugacag

SEQ ID NO: 1912468 - RNA, 19 nt, Human
acaggaaaagcugcugaca

SEQ ID NO: 1912469 - RNA, 18 nt, Human
acaggaaaagcugcugac

SEQ ID NO: 1912470 - RNA, 22 nt, Human
acagcuugaccgugaggccaga

SEQ ID NO: 1912471 - RNA, 23 nt, Human
acagcuugaccgugaggccagag

SEQ ID NO: 1912472 - RNA, 21 nt, Human
acagcuucucauccugcaggc

SEQ ID NO: 1912473 - RNA, 16 nt, Human
uaugggaaucaagauu

SEQ ID NO: 1912474 - RNA, 23 nt, Human
uaugggaaaugagaggcauuucc

SEQ ID NO: 1912475 - RNA, 10 nt, Human
uaugggagag

SEQ ID NO: 1912476 - RNA, 21 nt, Human
uaugguaggaacugcugggcu

SEQ ID NO: 1912477 - RNA, 23 nt, Human
uaugggacucaaugcacugacau

SEQ ID NO: 1912478 - RNA, 16 nt, Human
uaugggacucaaugca

SEQ ID NO: 1912479 - RNA, 22 nt, Human
uauggcccuggccuagcauacg

SEQ ID NO: 1912480 - RNA, 21 nt, Human
uauggcccuggccuagcauac

SEQ ID NO: 1912481 - RNA, 20 nt, Human
uauggcccuggccuagcaua

SEQ ID NO: 1912482 - RNA, 13 nt, Human
uauggcagugucu

SEQ ID NO: 1912483 - RNA, 16 nt, Human
uauggcagugucuuuc

SEQ ID NO: 1912484 - RNA, 19 nt, Human
acagcggcuggacuuggag

SEQ ID NO: 1912485 - RNA, 18 nt, Human
acagcggcuggacuugga

SEQ ID NO: 1912486 - RNA, 13 nt, Human
acagcgcuaugca

SEQ ID NO: 1912487 - RNA, 14 nt, Human
uaugguauuugagu

SEQ ID NO: 1912488 - RNA, 17 nt, Human
uaugauacuugaaaauu

SEQ ID NO: 1912489 - RNA, 22 nt, Human
uaugcaugaaguaauaugcaca

SEQ ID NO: 1912490 - RNA, 18 nt, Human
uaugcauggugccccagg

SEQ ID NO: 1912491 - RNA, 20 nt, Human
uaugcauggugccccaggac

SEQ ID NO: 1912492 - RNA, 21 nt, Human
uaugcauggugccccaggacc

SEQ ID NO: 1912493 - RNA, 22 nt, Human
uaugcauggugccccaggacca

SEQ ID NO: 1912494 - RNA, 23 nt, Human
uaugcauggugccccaggaccag

SEQ ID NO: 1912495 - RNA, 12 nt, Human
acagcaagucag

SEQ ID NO: 1912496 - RNA, 16 nt, Human
acagcaagucaggguu

SEQ ID NO: 1912497 - RNA, 12 nt, Human
acagcacagcca

SEQ ID NO: 1912498 - RNA, 15 nt, Human
acagcccgggcucug

SEQ ID NO: 1912499 - RNA, 16 nt, Human
acagcccgggcucugc

SEQ ID NO: 1912500 - RNA, 20 nt, Human
uaugaagcuuuuaugugaaa

SEQ ID NO: 1912501 - RNA, 22 nt, Human
uaugaagcuuuuaugugaaaca

SEQ ID NO: 1912502 - RNA, 23 nt, Human
uaugaagcuuuuaugugaaacau

SEQ ID NO: 1912503 - RNA, 23 nt, Human
uaugaggcauuuguuugaacuga

SEQ ID NO: 1912504 - RNA, 21 nt, Human
uaugaggcauuuguuugaacu

SEQ ID NO: 1912505 - RNA, 15 nt, Human
uaugaggcauuuguu

SEQ ID NO: 1912506 - RNA, 14 nt, Human
uaugaggcauuugu

SEQ ID NO: 1912507 - RNA, 15 nt, Human
uaugaaaacuuauga

SEQ ID NO: 1912508 - RNA, 13 nt, Human
uaugaaaacuuau

SEQ ID NO: 1912509 - RNA, 18 nt, Human
uauagccuaggugacaga

SEQ ID NO: 1912510 - RNA, 22 nt, Human
uauagcccagccaggccccagg

SEQ ID NO: 1912511 - RNA, 23 nt, Human
uauaggaacuuaaauaaugugaa

SEQ ID NO: 1912512 - RNA, 12 nt, Human
uauaggaauuga

SEQ ID NO: 1912513 - RNA, 16 nt, Human
acacucauugaccuga

SEQ ID NO: 1912514 - RNA, 21 nt, Human
uauaucuauauuuuacauaaa

SEQ ID NO: 1912515 - RNA, 19 nt, Human
uauauauuuuuuucugaaa

SEQ ID NO: 1912516 - RNA, 14 nt, Human
uauauauuuuaauu

SEQ ID NO: 1912517 - RNA, 11 nt, Human
uauauauuucc

SEQ ID NO: 1912518 - RNA, 18 nt, Human
uauaauuuaccugaaguc

SEQ ID NO: 1912519 - RNA, 21 nt, Human
uauaauuuaccugaagucuuu

SEQ ID NO: 1912520 - RNA, 22 nt, Human
uauacacuuacacuuuaugcac

SEQ ID NO: 1912521 - RNA, 18 nt, Human
uauaaguggaggcacuuu

SEQ ID NO: 1912522 - RNA, 19 nt, Human
uauaaguggaggcacuuua

SEQ ID NO: 1912523 - RNA, 16 nt, Human
uauacauagcaugaca

SEQ ID NO: 1912524 - RNA, 22 nt, Human
uauacauagcaugacauuucuu

SEQ ID NO: 1912525 - RNA, 21 nt, Human
uauacauaucuuuauuaauca

SEQ ID NO: 1912526 - RNA, 15 nt, Human
uauacauaucuuuau

SEQ ID NO: 1912527 - RNA, 18 nt, Human
uauacauaucuuuauuaa

SEQ ID NO: 1912528 - RNA, 17 nt, Human
uagucacugagacagcc

SEQ ID NO: 1912529 - RNA, 20 nt, Human
uagucacugagacagcccgg

SEQ ID NO: 1912530 - RNA, 15 nt, Human
acacuaaugaggaaa

SEQ ID NO: 1912531 - RNA, 22 nt, Human
acacuaaugaggaaacugcacu

SEQ ID NO: 1912532 - RNA, 21 nt, Human
acacucaaaagcugggcaggu

SEQ ID NO: 1912533 - RNA, 19 nt, Human
uauaagugauugcugguuu

SEQ ID NO: 1912534 - RNA, 14 nt, Human
uauaacugcccagc

SEQ ID NO: 1912535 - RNA, 13 nt, Human
acagaaauguaca

SEQ ID NO: 1912536 - RNA, 19 nt, Human
acagacauacuaaccagca

SEQ ID NO: 1912537 - RNA, 18 nt, Human
acagacauacuaaccagc

SEQ ID NO: 1912538 - RNA, 16 nt, Human
acagaaagguuuucuu

SEQ ID NO: 1912539 - RNA, 11 nt, Human
acagaaaaacc

SEQ ID NO: 1912540 - RNA, 18 nt, Human
acacuuacacuuuaugca

SEQ ID NO: 1912541 - RNA, 21 nt, Human
acacuuacacuuuaugcacaa

SEQ ID NO: 1912542 - RNA, 18 nt, Human
acacuguuucaaacuuua

SEQ ID NO: 1912543 - RNA, 17 nt, Human
acacuguuucaaacuuu

SEQ ID NO: 1912544 - RNA, 17 nt, Human
acacucauugaccugag

SEQ ID NO: 1912545 - RNA, 20 nt, Human
acacuguuucaaacuuuacu

SEQ ID NO: 1912546 - RNA, 16 nt, Human
acacuuacacuuuaug

SEQ ID NO: 1912547 - RNA, 14 nt, Human
acacuuaauacuac

SEQ ID NO: 1912548 - RNA, 22 nt, Human
uaucacccagaagaaaauagug

SEQ ID NO: 1912549 - RNA, 19 nt, Human
uaucacccagaagaaaaua

SEQ ID NO: 1912550 - RNA, 22 nt, Human
uaucaauuggaaaggaagaaaa

SEQ ID NO: 1912551 - RNA, 16 nt, Human
acagaccuaaugcucc

SEQ ID NO: 1912552 - RNA, 17 nt, Human
uaucagaauucucagaa

SEQ ID NO: 1912553 - RNA, 14 nt, Human
uaucagcacgugug

SEQ ID NO: 1912554 - RNA, 19 nt, Human
uauccaacaucaacaucuu

SEQ ID NO: 1912555 - RNA, 15 nt, Human
uaucagcacgugugg

SEQ ID NO: 1912556 - RNA, 18 nt, Human
uaucuauacauaucuuua

SEQ ID NO: 1912557 - RNA, 20 nt, Human
uaucuauacauaucuuuauu

SEQ ID NO: 1912558 - RNA, 15 nt, Human
uauccccucuacucu

SEQ ID NO: 1912559 - RNA, 21 nt, Human
uacuuugccuuuccauaauca

SEQ ID NO: 1912560 - RNA, 20 nt, Human
aauuccacaccuuuuauuga

SEQ ID NO: 1912561 - RNA, 16 nt, Human
aauuccacaccuuuua

SEQ ID NO: 1912562 - RNA, 16 nt, Human
aauuccacacccucac

SEQ ID NO: 1912563 - RNA, 19 nt, Human
uacuuuucauauuugcacu

SEQ ID NO: 1912564 - RNA, 20 nt, Human
uacuuuucauauuugcacua

SEQ ID NO: 1912565 - RNA, 16 nt, Human
uagaacucccuuucaa

SEQ ID NO: 1912566 - RNA, 18 nt, Human
uagaacucccuuucaaca

SEQ ID NO: 1912567 - RNA, 17 nt, Human
uagaacucccuuucaac

SEQ ID NO: 1912568 - RNA, 14 nt, Human
uagaagaagugugu

SEQ ID NO: 1912569 - RNA, 21 nt, Human
uagacagagucucacuguugc

SEQ ID NO: 1912570 - RNA, 18 nt, Human
uagacagucucacuuugu

SEQ ID NO: 1912571 - RNA, 17 nt, Human
uagacagucccugccaa

SEQ ID NO: 1912572 - RNA, 21 nt, Human
uagacagucccugccaaugga

SEQ ID NO: 1912573 - RNA, 21 nt, Human
uagacauuugcuaugagcugg

SEQ ID NO: 1912574 - RNA, 20 nt, Human
aauuugugauacaaugcugu

SEQ ID NO: 1912575 - RNA, 18 nt, Human
aauuuggcuucuguuguc

SEQ ID NO: 1912576 - RNA, 18 nt, Human
aauuugugauacaaugcu

SEQ ID NO: 1912577 - RNA, 17 nt, Human
aauuugugauacaaugc

SEQ ID NO: 1912578 - RNA, 14 nt, Human
aauuugugauacaa

SEQ ID NO: 1912579 - RNA, 18 nt, Human
aauuugggggaaaauuua

SEQ ID NO: 1912580 - RNA, 12 nt, Human
aauuuggcuucu

SEQ ID NO: 1912581 - RNA, 10 nt, Human
uagacagagu

SEQ ID NO: 1912582 - RNA, 16 nt, Human
uagacagucccugcca

SEQ ID NO: 1912583 - RNA, 21 nt, Human
uagacacuccccgaagucuuu

SEQ ID NO: 1912584 - RNA, 18 nt, Human
uagacaauuuauuauggc

SEQ ID NO: 1912585 - RNA, 19 nt, Human
uagacacauaugaggggga

SEQ ID NO: 1912586 - RNA, 19 nt, Human
uagaauuugauaugugaac

SEQ ID NO: 1912587 - RNA, 20 nt, Human
uagaauuugauaugugaaca

SEQ ID NO: 1912588 - RNA, 22 nt, Human
uagaauuugauaugugaacagu

SEQ ID NO: 1912589 - RNA, 22 nt, Human
uagcacagacccugcccugugg

SEQ ID NO: 1912590 - RNA, 24 nt, Human
uagcacagacccugcccugugggc

SEQ ID NO: 1912591 - RNA, 12 nt, Human
uagccaaggcca

SEQ ID NO: 1912592 - RNA, 20 nt, Human
uagccaaaugguuuaacuuc

SEQ ID NO: 1912593 - RNA, 20 nt, Human
uagccacauuuggaauacuu

SEQ ID NO: 1912594 - RNA, 13 nt, Human
uagccaaggccaa

SEQ ID NO: 1912595 - RNA, 21 nt, Human
uagccacauuuggaauacuuu

SEQ ID NO: 1912596 - RNA, 18 nt, Human
uagccaccgccuccuaca

SEQ ID NO: 1912597 - RNA, 18 nt, Human
uagccacccaccacacug

SEQ ID NO: 1912598 - RNA, 19 nt, Human
uagccaccgccuccuacag

SEQ ID NO: 1912599 - RNA, 14 nt, Human
uagcacagacccug

SEQ ID NO: 1912600 - RNA, 20 nt, Human
uagcacagacccugcccugu

SEQ ID NO: 1912601 - RNA, 21 nt, Human
uagcacagacccugcccugug

SEQ ID NO: 1912602 - RNA, 15 nt, Human
uagcacagacccugc

SEQ ID NO: 1912603 - RNA, 21 nt, Human
uagcacaacgugguacuauuu

SEQ ID NO: 1912604 - RNA, 13 nt, Human
uagagggaggggc

SEQ ID NO: 1912605 - RNA, 14 nt, Human
uagagggaggggcc

SEQ ID NO: 1912606 - RNA, 24 nt, Human
uagaggggaaaagagaugaugaaa

SEQ ID NO: 1912607 - RNA, 15 nt, Human
uagagggaccucucc

SEQ ID NO: 1912608 - RNA, 19 nt, Human
uagagggaccucucccagg

SEQ ID NO: 1912609 - RNA, 20 nt, Human
uagagggaccucucccaggg

SEQ ID NO: 1912610 - RNA, 14 nt, Human
uagagccagggucu

SEQ ID NO: 1912611 - RNA, 23 nt, Human
acaaauacucuuaggaagagaaa

SEQ ID NO: 1912612 - RNA, 15 nt, Human
acaaauacucuuagg

SEQ ID NO: 1912613 - RNA, 17 nt, Human
acaaauacucuuaggaa

SEQ ID NO: 1912614 - RNA, 22 nt, Human
uagagcggagaaaggaagggcu

SEQ ID NO: 1912615 - RNA, 22 nt, Human
acaaaggugaaaauuguuugua

SEQ ID NO: 1912616 - RNA, 14 nt, Human
acaaaaucuguuua

SEQ ID NO: 1912617 - RNA, 12 nt, Human
aauuuuacauuu

SEQ ID NO: 1912618 - RNA, 20 nt, Human
aauuuuacauggcuggagcu

SEQ ID NO: 1912619 - RNA, 12 nt, Human
acaaaaaagaag

SEQ ID NO: 1912620 - RNA, 11 nt, Human
acaaaaaagug

SEQ ID NO: 1912621 - RNA, 16 nt, Human
acaaaaagcuacuuau

SEQ ID NO: 1912622 - RNA, 19 nt, Human
acaaaaauucucaguucuc

SEQ ID NO: 1912623 - RNA, 12 nt, Human
acaaaacaaaac

SEQ ID NO: 1912624 - RNA, 22 nt, Human
acaaaaagguaaaacuuuuuau

SEQ ID NO: 1912625 - RNA, 15 nt, Human
acaaaacuacaugag

SEQ ID NO: 1912626 - RNA, 14 nt, Human
acaaaaauuaggua

SEQ ID NO: 1912627 - RNA, 12 nt, Human
acaaaacaaaaa

SEQ ID NO: 1912628 - RNA, 16 nt, Human
acacaggccugcucuc

SEQ ID NO: 1912629 - RNA, 13 nt, Human
acacaggcccucc

SEQ ID NO: 1912630 - RNA, 16 nt, Human
acacaggcccucccug

SEQ ID NO: 1912631 - RNA, 24 nt, Human
acacaggcccggcuccaggcuccu

SEQ ID NO: 1912632 - RNA, 23 nt, Human
acacaggcccggcuccaggcucc

SEQ ID NO: 1912633 - RNA, 22 nt, Human
acacaggcccggcuccaggcuc

SEQ ID NO: 1912634 - RNA, 21 nt, Human
acacaggcccggcuccaggcu

SEQ ID NO: 1912635 - RNA, 20 nt, Human
acacaggcccggcuccaggc

SEQ ID NO: 1912636 - RNA, 19 nt, Human
acacaggcccggcuccagg

SEQ ID NO: 1912637 - RNA, 18 nt, Human
acacaggcccggcuccag

SEQ ID NO: 1912638 - RNA, 17 nt, Human
acacaggcccggcucca

SEQ ID NO: 1912639 - RNA, 16 nt, Human
acacaggcccggcucc

SEQ ID NO: 1912640 - RNA, 17 nt, Human
acacacagacucauauu

SEQ ID NO: 1912641 - RNA, 16 nt, Human
acacaguauuacuucu

SEQ ID NO: 1912642 - RNA, 22 nt, Human
uagguuuggacaaaauggaaua

SEQ ID NO: 1912643 - RNA, 15 nt, Human
acacaggucuuuccu

SEQ ID NO: 1912644 - RNA, 14 nt, Human
acacaggucuuucc

SEQ ID NO: 1912645 - RNA, 16 nt, Human
acacaggucuuuccua

SEQ ID NO: 1912646 - RNA, 11 nt, Human
acacagggcag

SEQ ID NO: 1912647 - RNA, 15 nt, Human
uagguuuuuauuagu

SEQ ID NO: 1912648 - RNA, 15 nt, Human
uaguaaaaauacaaa

SEQ ID NO: 1912649 - RNA, 22 nt, Human
uaguagagacaggguuuugcca

SEQ ID NO: 1912650 - RNA, 15 nt, Human
uaguagagacagggu

SEQ ID NO: 1912651 - RNA, 23 nt, Human
uagucacauggccuaugcacaua

SEQ ID NO: 1912652 - RNA, 14 nt, Human
uagucacugagaca

SEQ ID NO: 1912653 - RNA, 14 nt, Human
uaguagagacaggg

SEQ ID NO: 1912654 - RNA, 14 nt, Human
uaguaauugacaug

SEQ ID NO: 1912655 - RNA, 12 nt, Human
uaguaaucauau

SEQ ID NO: 1912656 - RNA, 23 nt, Human
acaaugcaaaccaucauugaaau

SEQ ID NO: 1912657 - RNA, 20 nt, Human
acaaugaugcuauuugcaau

SEQ ID NO: 1912658 - RNA, 18 nt, Human
acaaugaugcuauuugca

SEQ ID NO: 1912659 - RNA, 19 nt, Human
acaaugcaaaccaucauug

SEQ ID NO: 1912660 - RNA, 21 nt, Human
acaaugcaaaccaucauugaa

SEQ ID NO: 1912661 - RNA, 12 nt, Human
acacaauacaau

SEQ ID NO: 1912662 - RNA, 14 nt, Human
acacaauacaauaa

SEQ ID NO: 1912663 - RNA, 19 nt, Human
acacaaggauagaugcugg

SEQ ID NO: 1912664 - RNA, 23 nt, Human
acacaaggauagaugcuggccca

SEQ ID NO: 1912665 - RNA, 15 nt, Human
uaggguuauaauaau

SEQ ID NO: 1912666 - RNA, 17 nt, Human
uaggguuauaauaaugu

SEQ ID NO: 1912667 - RNA, 15 nt, Human
uagggucggaaccca

SEQ ID NO: 1912668 - RNA, 19 nt, Human
uaggguaagugagagaggg

SEQ ID NO: 1912669 - RNA, 22 nt, Human
acaaugacuuacuguacaugaa

SEQ ID NO: 1912670 - RNA, 20 nt, Human
acaaugacuuacuguacaug

SEQ ID NO: 1912671 - RNA, 11 nt, Human
acaaugcaaac

SEQ ID NO: 1912672 - RNA, 16 nt, Human
acaaugcaaaccauca

SEQ ID NO: 1912673 - RNA, 17 nt, Human
acaaugcaaaccaucau

SEQ ID NO: 1912674 - RNA, 18 nt, Human
acaaugcaaaccaucauu

SEQ ID NO: 1912675 - RNA, 17 nt, Human
uagcgcccaguugggug

SEQ ID NO: 1912676 - RNA, 14 nt, Human
uagcgcccaguugg

SEQ ID NO: 1912677 - RNA, 21 nt, Human
uagccuuagaagucacacagu

SEQ ID NO: 1912678 - RNA, 20 nt, Human
uagccuuagaagucacacag

SEQ ID NO: 1912679 - RNA, 22 nt, Human
acaaaucuaggaaaauauuuug

SEQ ID NO: 1912680 - RNA, 18 nt, Human
acaaaucuaggaaaauau

SEQ ID NO: 1912681 - RNA, 13 nt, Human
uaggaaaaacuga

SEQ ID NO: 1912682 - RNA, 14 nt, Human
uaggaaaaacugau

SEQ ID NO: 1912683 - RNA, 23 nt, Human
uagcuuuuuucucugauacagaa

SEQ ID NO: 1912684 - RNA, 13 nt, Human
uagcuuuuuucuc

SEQ ID NO: 1912685 - RNA, 16 nt, Human
uagcuuuugugucuua

SEQ ID NO: 1912686 - RNA, 19 nt, Human
uagcuuuugugucuuacau

SEQ ID NO: 1912687 - RNA, 20 nt, Human
uagcuuggaaacuggaugag

SEQ ID NO: 1912688 - RNA, 15 nt, Human
uagcuuggaaacugg

SEQ ID NO: 1912689 - RNA, 18 nt, Human
uagcuaaacggauuccaa

SEQ ID NO: 1912690 - RNA, 19 nt, Human
uagcuaaacggauuccaaa

SEQ ID NO: 1912691 - RNA, 20 nt, Human
uagcuaaacggauuccaaag

SEQ ID NO: 1912692 - RNA, 23 nt, Human
uagggaucaaccagcuaagaaaa

SEQ ID NO: 1912693 - RNA, 13 nt, Human
uagggaagauaau

SEQ ID NO: 1912694 - RNA, 14 nt, Human
uagggcuguaaaau

SEQ ID NO: 1912695 - RNA, 22 nt, Human
uagggcaggagugagaggucuc

SEQ ID NO: 1912696 - RNA, 16 nt, Human
uagggggaacucuagc

SEQ ID NO: 1912697 - RNA, 16 nt, Human
uaggaaaaacugauuu

SEQ ID NO: 1912698 - RNA, 17 nt, Human
uaggaaaaacugauuuu

SEQ ID NO: 1912699 - RNA, 13 nt, Human
uaggaaaauauuu

SEQ ID NO: 1912700 - RNA, 14 nt, Human
uaggauacugcugc

SEQ ID NO: 1912701 - RNA, 17 nt, Human
uaggagugugugauuuu

SEQ ID NO: 1912702 - RNA, 15 nt, Human
uaggcaggaccugug

SEQ ID NO: 1912703 - RNA, 14 nt, Human
uaggcaggaccugu

SEQ ID NO: 1912704 - RNA, 13 nt, Human
uaggauguugaaa

SEQ ID NO: 1912705 - RNA, 14 nt, Human
uaggauguaaaucu

SEQ ID NO: 1912706 - RNA, 17 nt, Human
acucagaagggagcuag

SEQ ID NO: 1912707 - RNA, 14 nt, Human
acucagaauucucu

SEQ ID NO: 1912708 - RNA, 22 nt, Human
acucagaauucucuaguuugau

SEQ ID NO: 1912709 - RNA, 21 nt, Human
acucagaauucucuaguuuga

SEQ ID NO: 1912710 - RNA, 18 nt, Human
acucagaagacacugaug

SEQ ID NO: 1912711 - RNA, 17 nt, Human
acucagaagacacugau

SEQ ID NO: 1912712 - RNA, 16 nt, Human
acucagaagacacuga

SEQ ID NO: 1912713 - RNA, 15 nt, Human
acucagaagacacug

SEQ ID NO: 1912714 - RNA, 14 nt, Human
acucagaagacacu

SEQ ID NO: 1912715 - RNA, 21 nt, Human
acucaccugccccucaacucu

SEQ ID NO: 1912716 - RNA, 14 nt, Human
acucaccugccccu

SEQ ID NO: 1912717 - RNA, 19 nt, Human
acucaccugccccucaacu

SEQ ID NO: 1912718 - RNA, 23 nt, Human
acucaucuagguaaauuacaguu

SEQ ID NO: 1912719 - RNA, 18 nt, Human
acucagacauuggcaccu

SEQ ID NO: 1912720 - RNA, 12 nt, Human
acucaucuuagg

SEQ ID NO: 1912721 - RNA, 21 nt, Human
acucaucuagguaaauuacag

SEQ ID NO: 1912722 - RNA, 16 nt, Human
acucauugaccugagg

SEQ ID NO: 1912723 - RNA, 17 nt, Human
acucauugaccugaggc

SEQ ID NO: 1912724 - RNA, 18 nt, Human
acucauugaccugaggcc

SEQ ID NO: 1912725 - RNA, 22 nt, Human
acucauugaccugaggcccuuc

SEQ ID NO: 1912726 - RNA, 14 nt, Human
acuccaccaagccu

SEQ ID NO: 1912727 - RNA, 18 nt, Human
ucccucagucuggcccuu

SEQ ID NO: 1912728 - RNA, 22 nt, Human
ucccucaccuuggcaccagaca

SEQ ID NO: 1912729 - RNA, 20 nt, Human
ucccucagucuggcccuucc

SEQ ID NO: 1912730 - RNA, 11 nt, Human
ucccucuuucc

SEQ ID NO: 1912731 - RNA, 13 nt, Human
ucccucuuucccu

SEQ ID NO: 1912732 - RNA, 12 nt, Human
ucccuccccccc

SEQ ID NO: 1912733 - RNA, 14 nt, Human
ucccucccccccau

SEQ ID NO: 1912734 - RNA, 16 nt, Human
ucccucccccccaugc

SEQ ID NO: 1912735 - RNA, 21 nt, Human
ucccucccccccaugcacugu

SEQ ID NO: 1912736 - RNA, 23 nt, Human
ucccugaaggccccgcccaggcu

SEQ ID NO: 1912737 - RNA, 16 nt, Human
ucccugacccuguaua

SEQ ID NO: 1912738 - RNA, 21 nt, Human
ucccugaccucccucuaauuu

SEQ ID NO: 1912739 - RNA, 17 nt, Human
ucccugacccuguauau

SEQ ID NO: 1912740 - RNA, 22 nt, Human
ucccugacccuguauauagccc

SEQ ID NO: 1912741 - RNA, 16 nt, Human
ucccugaccucccucu

SEQ ID NO: 1912742 - RNA, 17 nt, Human
ucccugaccucccucua

SEQ ID NO: 1912743 - RNA, 17 nt, Human
acucaccccagccccaa

SEQ ID NO: 1912744 - RNA, 16 nt, Human
acucaccucuaaaaca

SEQ ID NO: 1912745 - RNA, 18 nt, Human
ucccugaaggccccgccc

SEQ ID NO: 1912746 - RNA, 21 nt, Human
ucccugaaggccccgcccagg

SEQ ID NO: 1912747 - RNA, 22 nt, Human
ucccugaaggccccgcccaggc

SEQ ID NO: 1912748 - RNA, 18 nt, Human
uccccgcuucugccugca

SEQ ID NO: 1912749 - RNA, 21 nt, Human
acucacauuuauucugcucac

SEQ ID NO: 1912750 - RNA, 20 nt, Human
acucacauggcuauguuuua

SEQ ID NO: 1912751 - RNA, 20 nt, Human
acucacauuuauucugcuca

SEQ ID NO: 1912752 - RNA, 19 nt, Human
acucacauuuauucugcuc

SEQ ID NO: 1912753 - RNA, 14 nt, Human
acucaaugcacuga

SEQ ID NO: 1912754 - RNA, 19 nt, Human
acucacauggcuauguuuu

SEQ ID NO: 1912755 - RNA, 16 nt, Human
acucacauggcuaugu

SEQ ID NO: 1912756 - RNA, 23 nt, Human
acucaauauuuuccaugaaaaug

SEQ ID NO: 1912757 - RNA, 22 nt, Human
acucaauauuuuccaugaaaau

SEQ ID NO: 1912758 - RNA, 21 nt, Human
acucaauauuuuccaugaaaa

SEQ ID NO: 1912759 - RNA, 18 nt, Human
acucaauauuuuccauga

SEQ ID NO: 1912760 - RNA, 15 nt, Human
acucaauauuuucca

SEQ ID NO: 1912761 - RNA, 12 nt, Human
acucaauauuuu

SEQ ID NO: 1912762 - RNA, 14 nt, Human
uccccuaaccucau

SEQ ID NO: 1912763 - RNA, 23 nt, Human
uccccguaugaguuagaauaaua

SEQ ID NO: 1912764 - RNA, 14 nt, Human
uccccucucugcac

SEQ ID NO: 1912765 - RNA, 12 nt, Human
acuauguaucaa

SEQ ID NO: 1912766 - RNA, 12 nt, Human
acuauaauguaa

SEQ ID NO: 1912767 - RNA, 13 nt, Human
acuagaugaugga

SEQ ID NO: 1912768 - RNA, 13 nt, Human
acuauaauguaag

SEQ ID NO: 1912769 - RNA, 14 nt, Human
acuauaauguaagc

SEQ ID NO: 1912770 - RNA, 20 nt, Human
acuaugcauggugccccagg

SEQ ID NO: 1912771 - RNA, 21 nt, Human
acuaugcauggugccccagga

SEQ ID NO: 1912772 - RNA, 22 nt, Human
acuaugcauggugccccaggac

SEQ ID NO: 1912773 - RNA, 23 nt, Human
acuaugcauggugccccaggacc

SEQ ID NO: 1912774 - RNA, 24 nt, Human
acuaugcauggugccccaggacca

SEQ ID NO: 1912775 - RNA, 21 nt, Human
acuauaauguaagcucuacug

SEQ ID NO: 1912776 - RNA, 18 nt, Human
acuacggaauaguuggcu

SEQ ID NO: 1912777 - RNA, 20 nt, Human
acuacgggggggagaaggaa

SEQ ID NO: 1912778 - RNA, 17 nt, Human
acuaccuugaaaauaag

SEQ ID NO: 1912779 - RNA, 16 nt, Human
acuagaacugaauuuu

SEQ ID NO: 1912780 - RNA, 14 nt, Human
acuacuagggaaau

SEQ ID NO: 1912781 - RNA, 23 nt, Human
acuagaacugaauuuugucuuua

SEQ ID NO: 1912782 - RNA, 19 nt, Human
acuagaacugaauuuuguc

SEQ ID NO: 1912783 - RNA, 18 nt, Human
acuagaacugaauuuugu

SEQ ID NO: 1912784 - RNA, 17 nt, Human
acuagaacugaauuuug

SEQ ID NO: 1912785 - RNA, 15 nt, Human
acuagaauuuauuca

SEQ ID NO: 1912786 - RNA, 22 nt, Human
acuagagggaccucucccaggg

SEQ ID NO: 1912787 - RNA, 20 nt, Human
acuagagggaccucucccag

SEQ ID NO: 1912788 - RNA, 21 nt, Human
acuagagggaccucucccagg

SEQ ID NO: 1912789 - RNA, 13 nt, Human
acguacacacaca

SEQ ID NO: 1912790 - RNA, 12 nt, Human
acguacacauuu

SEQ ID NO: 1912791 - RNA, 14 nt, Human
acguacacauuuua

SEQ ID NO: 1912792 - RNA, 13 nt, Human
acguacacauuuu

SEQ ID NO: 1912793 - RNA, 20 nt, Human
uccccaucgccagcugauga

SEQ ID NO: 1912794 - RNA, 19 nt, Human
uccccaucgccagcugaug

SEQ ID NO: 1912795 - RNA, 19 nt, Human
ucccccacccccuccccgc

SEQ ID NO: 1912796 - RNA, 14 nt, Human
uccccaucuucuaa

SEQ ID NO: 1912797 - RNA, 19 nt, Human
ucccccaccccauuucucu

SEQ ID NO: 1912798 - RNA, 13 nt, Human
uccguuaaaauac

SEQ ID NO: 1912799 - RNA, 13 nt, Human
uccgugcugacag

SEQ ID NO: 1912800 - RNA, 17 nt, Human
uccgugcugacagcugc

SEQ ID NO: 1912801 - RNA, 18 nt, Human
uccgugcugacagcugcu

SEQ ID NO: 1912802 - RNA, 19 nt, Human
uccgugcugacagcugcuc

SEQ ID NO: 1912803 - RNA, 21 nt, Human
uccgugcugacagcugcuccu

SEQ ID NO: 1912804 - RNA, 15 nt, Human
uccguuaaaauacca

SEQ ID NO: 1912805 - RNA, 20 nt, Human
uccuacccugcgcccagucc

SEQ ID NO: 1912806 - RNA, 21 nt, Human
uccggcccuccuacccugcgc

SEQ ID NO: 1912807 - RNA, 23 nt, Human
uccggcccuccuacccugcgccc

SEQ ID NO: 1912808 - RNA, 12 nt, Human
uccuacucugug

SEQ ID NO: 1912809 - RNA, 20 nt, Human
uccuagccacccaccacacu

SEQ ID NO: 1912810 - RNA, 21 nt, Human
uccuagccugugccucuggga

SEQ ID NO: 1912811 - RNA, 21 nt, Human
uccuagccaccgccuccuaca

SEQ ID NO: 1912812 - RNA, 16 nt, Human
acucgaguuacagaca

SEQ ID NO: 1912813 - RNA, 19 nt, Human
acucgauucauauugaaua

SEQ ID NO: 1912814 - RNA, 17 nt, Human
acucgagaacuuucauu

SEQ ID NO: 1912815 - RNA, 13 nt, Human
acucgagaacuuu

SEQ ID NO: 1912816 - RNA, 23 nt, Human
acuccuuccaguguccuuagaac

SEQ ID NO: 1912817 - RNA, 21 nt, Human
acucuuauugcccacgcugga

SEQ ID NO: 1912818 - RNA, 19 nt, Human
acucuggcagcucagagag

SEQ ID NO: 1912819 - RNA, 20 nt, Human
acucuggcagcucagagagg

SEQ ID NO: 1912820 - RNA, 16 nt, Human
acucuggcagcucaga

SEQ ID NO: 1912821 - RNA, 17 nt, Human
acucuggcagcucagag

SEQ ID NO: 1912822 - RNA, 17 nt, Human
acucuucacaaaaucug

SEQ ID NO: 1912823 - RNA, 13 nt, Human
acucuugaaaaau

SEQ ID NO: 1912824 - RNA, 12 nt, Human
acucuucucagc

SEQ ID NO: 1912825 - RNA, 17 nt, Human
acucgcgacaaugcaaa

SEQ ID NO: 1912826 - RNA, 15 nt, Human
acucgcgacaaugca

SEQ ID NO: 1912827 - RNA, 16 nt, Human
acucgcgacaaugcaa

SEQ ID NO: 1912828 - RNA, 14 nt, Human
uccucucuccagau

SEQ ID NO: 1912829 - RNA, 19 nt, Human
uccucucuccagauguuuc

SEQ ID NO: 1912830 - RNA, 14 nt, Human
uccucccuucugcu

SEQ ID NO: 1912831 - RNA, 15 nt, Human
uccucccuucugcua

SEQ ID NO: 1912832 - RNA, 16 nt, Human
uccucccuucugcuac

SEQ ID NO: 1912833 - RNA, 17 nt, Human
uccucccuucugcuacu

SEQ ID NO: 1912834 - RNA, 18 nt, Human
uccucccuucugcuacug

SEQ ID NO: 1912835 - RNA, 18 nt, Human
uccucucccauugucccu

SEQ ID NO: 1912836 - RNA, 19 nt, Human
uccucucccauugucccuc

SEQ ID NO: 1912837 - RNA, 21 nt, Human
uccucuccccagcccagagac

SEQ ID NO: 1912838 - RNA, 23 nt, Human
uccucuccccagcccagagacau

SEQ ID NO: 1912839 - RNA, 20 nt, Human
uccucucccauugucccucu

SEQ ID NO: 1912840 - RNA, 22 nt, Human
uccucucccauugucccucugc

SEQ ID NO: 1912841 - RNA, 23 nt, Human
uccucucccauugucccucugcc

SEQ ID NO: 1912842 - RNA, 21 nt, Human
uccucccaccucagccucccg

SEQ ID NO: 1912843 - RNA, 10 nt, Human
uccucccuuc

SEQ ID NO: 1912844 - RNA, 13 nt, Human
uccucccuucugc

SEQ ID NO: 1912845 - RNA, 20 nt, Human
uccucccaccucagccuccc

SEQ ID NO: 1912846 - RNA, 18 nt, Human
uccucccaccucagccuc

SEQ ID NO: 1912847 - RNA, 16 nt, Human
uccucccaccucagcc

SEQ ID NO: 1912848 - RNA, 15 nt, Human
uccucccaccucagc

SEQ ID NO: 1912849 - RNA, 14 nt, Human
uccucccaccucag

SEQ ID NO: 1912850 - RNA, 21 nt, Human
acucuugaaaaaugcauguug

SEQ ID NO: 1912851 - RNA, 14 nt, Human
acucuugaaaaaug

SEQ ID NO: 1912852 - RNA, 19 nt, Human
acucuugaaaaaugcaugu

SEQ ID NO: 1912853 - RNA, 23 nt, Human
uccucuuuggucuacacugugcu

SEQ ID NO: 1912854 - RNA, 20 nt, Human
uccucuuguaaauaaagccc

SEQ ID NO: 1912855 - RNA, 18 nt, Human
uccucuuguaaauaaagc

SEQ ID NO: 1912856 - RNA, 19 nt, Human
uccucuuguaaauaaagcc

SEQ ID NO: 1912857 - RNA, 21 nt, Human
uccucuuguaaauaaagcccu

SEQ ID NO: 1912858 - RNA, 15 nt, Human
uccucuuuucucugc

SEQ ID NO: 1912859 - RNA, 13 nt, Human
uccugaagaacca

SEQ ID NO: 1912860 - RNA, 14 nt, Human
uccugaagaaccag

SEQ ID NO: 1912861 - RNA, 16 nt, Human
uccugaagaaccaguc

SEQ ID NO: 1912862 - RNA, 18 nt, Human
uccugaagaaccaguccc

SEQ ID NO: 1912863 - RNA, 23 nt, Human
uccugaagaaccaguccccccac

SEQ ID NO: 1912864 - RNA, 12 nt, Human
uccucugcugcu

SEQ ID NO: 1912865 - RNA, 12 nt, Human
uccucuuguaaa

SEQ ID NO: 1912866 - RNA, 15 nt, Human
uccugaagaauugaa

SEQ ID NO: 1912867 - RNA, 14 nt, Human
acucuuucuguaua

SEQ ID NO: 1912868 - RNA, 16 nt, Human
uccugaccucagguga

SEQ ID NO: 1912869 - RNA, 21 nt, Human
acucuuucuguauauacuuuu

SEQ ID NO: 1912870 - RNA, 22 nt, Human
acucuuucuguauauacuuuuu

SEQ ID NO: 1912871 - RNA, 15 nt, Human
acugaaaaccucucc

SEQ ID NO: 1912872 - RNA, 16 nt, Human
acugaaaaccucuccu

SEQ ID NO: 1912873 - RNA, 20 nt, Human
acugaaaaggaggggucugg

SEQ ID NO: 1912874 - RNA, 17 nt, Human
acugaaaaccucuccuc

SEQ ID NO: 1912875 - RNA, 22 nt, Human
accuucaguaacccccacugga

SEQ ID NO: 1912876 - RNA, 15 nt, Human
accuuccaagagccu

SEQ ID NO: 1912877 - RNA, 17 nt, Human
accuucacacacagacu

SEQ ID NO: 1912878 - RNA, 23 nt, Human
accuucacacacagacuguuguc

SEQ ID NO: 1912879 - RNA, 22 nt, Human
accuucacugugaccuugagaa

SEQ ID NO: 1912880 - RNA, 14 nt, Human
accuucagaauaag

SEQ ID NO: 1912881 - RNA, 21 nt, Human
accuggguaacuagggaagau

SEQ ID NO: 1912882 - RNA, 22 nt, Human
accuggggggcaguggugugga

SEQ ID NO: 1912883 - RNA, 15 nt, Human
accuucgggcugugc

SEQ ID NO: 1912884 - RNA, 14 nt, Human
accuucgggcugug

SEQ ID NO: 1912885 - RNA, 17 nt, Human
accuucgggcugugccc

SEQ ID NO: 1912886 - RNA, 16 nt, Human
accuucgggcugugcc

SEQ ID NO: 1912887 - RNA, 18 nt, Human
accuucgggcugugcccg

SEQ ID NO: 1912888 - RNA, 16 nt, Human
accuuccaagagccug

SEQ ID NO: 1912889 - RNA, 18 nt, Human
accuuuuuuauacauaaa

SEQ ID NO: 1912890 - RNA, 17 nt, Human
accuuuuuuauacauaa

SEQ ID NO: 1912891 - RNA, 16 nt, Human
accuuuuuuauacaua

SEQ ID NO: 1912892 - RNA, 14 nt, Human
accuuuguccccac

SEQ ID NO: 1912893 - RNA, 15 nt, Human
accuuuguccccacc

SEQ ID NO: 1912894 - RNA, 16 nt, Human
accuuuguccccaccg

SEQ ID NO: 1912895 - RNA, 14 nt, Human
accuuuuuuauaca

SEQ ID NO: 1912896 - RNA, 14 nt, Human
accuucuccuucac

SEQ ID NO: 1912897 - RNA, 22 nt, Human
accuucuccuucaccuuugucc

SEQ ID NO: 1912898 - RNA, 18 nt, Human
accuucuggccucccaca

SEQ ID NO: 1912899 - RNA, 22 nt, Human
accuucuggccucccacagacu

SEQ ID NO: 1912900 - RNA, 13 nt, Human
accuuugucccca

SEQ ID NO: 1912901 - RNA, 17 nt, Human
accuugaugagcugugc

SEQ ID NO: 1912902 - RNA, 18 nt, Human
uccaaggguacuaaggaa

SEQ ID NO: 1912903 - RNA, 18 nt, Human
uccaauguggcaaggaaa

SEQ ID NO: 1912904 - RNA, 18 nt, Human
uccaaauggcgucuggaa

SEQ ID NO: 1912905 - RNA, 20 nt, Human
uccaaauggcgucuggaagu

SEQ ID NO: 1912906 - RNA, 21 nt, Human
uccaaggggaaucagaacuca

SEQ ID NO: 1912907 - RNA, 20 nt, Human
uccacccaggagccccgagg

SEQ ID NO: 1912908 - RNA, 17 nt, Human
uccacccaggagccccg

SEQ ID NO: 1912909 - RNA, 13 nt, Human
uccacccaccuca

SEQ ID NO: 1912910 - RNA, 12 nt, Human
uccacccaccuc

SEQ ID NO: 1912911 - RNA, 18 nt, Human
uccaccaucaagccacca

SEQ ID NO: 1912912 - RNA, 12 nt, Human
accuggccucug

SEQ ID NO: 1912913 - RNA, 13 nt, Human
accuggccucugc

SEQ ID NO: 1912914 - RNA, 21 nt, Human
accuggcuuuuuauuguauuu

SEQ ID NO: 1912915 - RNA, 16 nt, Human
accuggcugccauacu

SEQ ID NO: 1912916 - RNA, 20 nt, Human
accuggcuuuucuuucuacc

SEQ ID NO: 1912917 - RNA, 18 nt, Human
accugggauucaggaaug

SEQ ID NO: 1912918 - RNA, 17 nt, Human
accuggacacaggccug

SEQ ID NO: 1912919 - RNA, 14 nt, Human
accuggacacaggc

SEQ ID NO: 1912920 - RNA, 20 nt, Human
accuggaauauauaaccagu

SEQ ID NO: 1912921 - RNA, 23 nt, Human
accugccuguugggccaggagcc

SEQ ID NO: 1912922 - RNA, 21 nt, Human
accugccucggccucccaaag

SEQ ID NO: 1912923 - RNA, 23 nt, Human
accugccucggccucccaaagug

SEQ ID NO: 1912924 - RNA, 16 nt, Human
accugcggugcuaucu

SEQ ID NO: 1912925 - RNA, 21 nt, Human
accugcgucucauacucaccu

SEQ ID NO: 1912926 - RNA, 22 nt, Human
ucauuuugguaaaauacuucuu

SEQ ID NO: 1912927 - RNA, 17 nt, Human
ucauuuuguaacaaaug

SEQ ID NO: 1912928 - RNA, 20 nt, Human
ucauuuuguaacaaaugaac

SEQ ID NO: 1912929 - RNA, 19 nt, Human
ucauuuuuaguagagacag

SEQ ID NO: 1912930 - RNA, 18 nt, Human
ucauuuuucagaccuuuu

SEQ ID NO: 1912931 - RNA, 18 nt, Human
ucauuuuuuuuaagaaaa

SEQ ID NO: 1912932 - RNA, 17 nt, Human
ucauuuuuuuuaagaaa

SEQ ID NO: 1912933 - RNA, 14 nt, Human
ucauuugucacaca

SEQ ID NO: 1912934 - RNA, 18 nt, Human
ucauuugguucauuaauu

SEQ ID NO: 1912935 - RNA, 16 nt, Human
ucauuugucacacacu

SEQ ID NO: 1912936 - RNA, 20 nt, Human
ucauuugguucauuaauucu

SEQ ID NO: 1912937 - RNA, 17 nt, Human
accugauuaacugaggc

SEQ ID NO: 1912938 - RNA, 22 nt, Human
accugauuaacugaggcaucca

SEQ ID NO: 1912939 - RNA, 14 nt, Human
accugauugugucu

SEQ ID NO: 1912940 - RNA, 16 nt, Human
accugaggggccucuu

SEQ ID NO: 1912941 - RNA, 22 nt, Human
accugauccuggaggcccaguu

SEQ ID NO: 1912942 - RNA, 13 nt, Human
accugauccugga

SEQ ID NO: 1912943 - RNA, 20 nt, Human
accugauccuggaggcccag

SEQ ID NO: 1912944 - RNA, 14 nt, Human
accugaggggccuc

SEQ ID NO: 1912945 - RNA, 18 nt, Human
accugccaggaagccagc

SEQ ID NO: 1912946 - RNA, 19 nt, Human
accugccaggaagccagca

SEQ ID NO: 1912947 - RNA, 16 nt, Human
accugccaggaagcca

SEQ ID NO: 1912948 - RNA, 17 nt, Human
accugccaggaagccag

SEQ ID NO: 1912949 - RNA, 15 nt, Human
accugcaaagaucug

SEQ ID NO: 1912950 - RNA, 16 nt, Human
accugcaaagaucugu

SEQ ID NO: 1912951 - RNA, 22 nt, Human
accugcaaagaucuguccucag

SEQ ID NO: 1912952 - RNA, 16 nt, Human
ucauaauaaguugcau

SEQ ID NO: 1912953 - RNA, 12 nt, Human
ucauaaugacuu

SEQ ID NO: 1912954 - RNA, 15 nt, Human
ucauaaucuuugcuu

SEQ ID NO: 1912955 - RNA, 14 nt, Human
ucauaaucuuugcu

SEQ ID NO: 1912956 - RNA, 18 nt, Human
accugaagacucauucuu

SEQ ID NO: 1912957 - RNA, 16 nt, Human
accugaacugaacacc

SEQ ID NO: 1912958 - RNA, 14 nt, Human
accugaaccuagga

SEQ ID NO: 1912959 - RNA, 19 nt, Human
accugaauuuuggcugugu

SEQ ID NO: 1912960 - RNA, 22 nt, Human
accugaagcuaucguaaaauua

SEQ ID NO: 1912961 - RNA, 23 nt, Human
accugaggcccuucucuccagcc

SEQ ID NO: 1912962 - RNA, 17 nt, Human
accugagccccaaaagg

SEQ ID NO: 1912963 - RNA, 12 nt, Human
accugagcccca

SEQ ID NO: 1912964 - RNA, 14 nt, Human
acgacacacuuuga

SEQ ID NO: 1912965 - RNA, 15 nt, Human
acgacugcccggcag

SEQ ID NO: 1912966 - RNA, 18 nt, Human
acgccaggggaaaaucag

SEQ ID NO: 1912967 - RNA, 23 nt, Human
acgccaggggaaaaucagccugc

SEQ ID NO: 1912968 - RNA, 11 nt, Human
acgccauccca

SEQ ID NO: 1912969 - RNA, 14 nt, Human
acgccaucccagcc

SEQ ID NO: 1912970 - RNA, 15 nt, Human
acgccaucccagccc

SEQ ID NO: 1912971 - RNA, 16 nt, Human
acgccaucccagcccc

SEQ ID NO: 1912972 - RNA, 17 nt, Human
acgccaucccagcccca

SEQ ID NO: 1912973 - RNA, 18 nt, Human
acgccaucccagccccaa

SEQ ID NO: 1912974 - RNA, 19 nt, Human
uccacgcacaugcgacccc

SEQ ID NO: 1912975 - RNA, 18 nt, Human
uccaggcugggagagccu

SEQ ID NO: 1912976 - RNA, 14 nt, Human
uccaggcugggaga

SEQ ID NO: 1912977 - RNA, 17 nt, Human
uccaggcugggagagcc

SEQ ID NO: 1912978 - RNA, 14 nt, Human
acgaauauugcuga

SEQ ID NO: 1912979 - RNA, 17 nt, Human
acgaagccaucuuucuu

SEQ ID NO: 1912980 - RNA, 15 nt, Human
acgaagaagagccac

SEQ ID NO: 1912981 - RNA, 17 nt, Human
acgaagaagagccacag

SEQ ID NO: 1912982 - RNA, 18 nt, Human
acgaagaagagccacagu

SEQ ID NO: 1912983 - RNA, 14 nt, Human
uccagggacugaag

SEQ ID NO: 1912984 - RNA, 19 nt, Human
uccagggagcauuuuccuc

SEQ ID NO: 1912985 - RNA, 14 nt, Human
uccagggacagagg

SEQ ID NO: 1912986 - RNA, 15 nt, Human
uccagggacagaggc

SEQ ID NO: 1912987 - RNA, 19 nt, Human
uccagggacagaggcccca

SEQ ID NO: 1912988 - RNA, 21 nt, Human
uccagggacagaggccccagc

SEQ ID NO: 1912989 - RNA, 23 nt, Human
uccagggacagaggccccagccu

SEQ ID NO: 1912990 - RNA, 21 nt, Human
uccagggacgaagaagagcca

SEQ ID NO: 1912991 - RNA, 23 nt, Human
acgcgugcacacaccagagccca

SEQ ID NO: 1912992 - RNA, 20 nt, Human
acgccgcccuaaaagcacac

SEQ ID NO: 1912993 - RNA, 14 nt, Human
acgcccccacuggu

SEQ ID NO: 1912994 - RNA, 14 nt, Human
acgcccccccccac

SEQ ID NO: 1912995 - RNA, 16 nt, Human
acgcccccccccaccc

SEQ ID NO: 1912996 - RNA, 23 nt, Human
acgcccccccccaccccuggggg

SEQ ID NO: 1912997 - RNA, 18 nt, Human
acgcuacccgggaagggg

SEQ ID NO: 1912998 - RNA, 16 nt, Human
acgcucucuggccuuc

SEQ ID NO: 1912999 - RNA, 15 nt, Human
acgcucucuggccuu

SEQ ID NO: 1913000 - RNA, 13 nt, Human
acgcuacccggga

SEQ ID NO: 1913001 - RNA, 17 nt, Human
acgcuacccgggaaggg

SEQ ID NO: 1913002 - RNA, 21 nt, Human
acggagucccaccuuggcugc

SEQ ID NO: 1913003 - RNA, 12 nt, Human
acggauuccaaa

SEQ ID NO: 1913004 - RNA, 16 nt, Human
acggccaggccagagg

SEQ ID NO: 1913005 - RNA, 17 nt, Human
acggccagggagaagcu

SEQ ID NO: 1913006 - RNA, 23 nt, Human
acggccagggagaagcuccucuc

SEQ ID NO: 1913007 - RNA, 18 nt, Human
acggccagggagaagcuc

SEQ ID NO: 1913008 - RNA, 17 nt, Human
acgcucucuggccuucg

SEQ ID NO: 1913009 - RNA, 19 nt, Human
acggagucccaccuuggcu

SEQ ID NO: 1913010 - RNA, 15 nt, Human
acggagcccagcccu

SEQ ID NO: 1913011 - RNA, 20 nt, Human
acggagcccagcccucccca

SEQ ID NO: 1913012 - RNA, 22 nt, Human
ucccacccacaugugacacaua

SEQ ID NO: 1913013 - RNA, 18 nt, Human
ucccacccacaugugaca

SEQ ID NO: 1913014 - RNA, 16 nt, Human
ucccacccacauguga

SEQ ID NO: 1913015 - RNA, 15 nt, Human
ucccacccacaugug

SEQ ID NO: 1913016 - RNA, 11 nt, Human
ucccaccccac

SEQ ID NO: 1913017 - RNA, 14 nt, Human
ucccaccccacaca

SEQ ID NO: 1913018 - RNA, 18 nt, Human
acggggcucuucucauuu

SEQ ID NO: 1913019 - RNA, 15 nt, Human
acggggcucuucuca

SEQ ID NO: 1913020 - RNA, 16 nt, Human
ucccaccuagcagcac

SEQ ID NO: 1913021 - RNA, 15 nt, Human
ucccaaagugcuggg

SEQ ID NO: 1913022 - RNA, 17 nt, Human
uccauuuguuaucuggg

SEQ ID NO: 1913023 - RNA, 19 nt, Human
uccauuuguuaucugggaa

SEQ ID NO: 1913024 - RNA, 16 nt, Human
ucccaaagugcuggga

SEQ ID NO: 1913025 - RNA, 20 nt, Human
ucccaaagugcugggauuac

SEQ ID NO: 1913026 - RNA, 21 nt, Human
ucccaaagugcugggauuaca

SEQ ID NO: 1913027 - RNA, 14 nt, Human
ucccacaaaggaga

SEQ ID NO: 1913028 - RNA, 17 nt, Human
ucccaauuucagacucc

SEQ ID NO: 1913029 - RNA, 18 nt, Human
ucccaauuucagacuccc

SEQ ID NO: 1913030 - RNA, 23 nt, Human
ucccaauuucagacucccauucc

SEQ ID NO: 1913031 - RNA, 15 nt, Human
uccaugaguccccug

SEQ ID NO: 1913032 - RNA, 16 nt, Human
uccaugaguccccugu

SEQ ID NO: 1913033 - RNA, 17 nt, Human
uccaugaguccccuguu

SEQ ID NO: 1913034 - RNA, 22 nt, Human
uccaugaagauguagaggagaa

SEQ ID NO: 1913035 - RNA, 12 nt, Human
uccaugaaaaug

SEQ ID NO: 1913036 - RNA, 20 nt, Human
uccaucucuuguuuaaauuc

SEQ ID NO: 1913037 - RNA, 11 nt, Human
uccauccugag

SEQ ID NO: 1913038 - RNA, 13 nt, Human
uccaucuuuacaa

SEQ ID NO: 1913039 - RNA, 14 nt, Human
acggcucacugcag

SEQ ID NO: 1913040 - RNA, 12 nt, Human
acggcccuggcc

SEQ ID NO: 1913041 - RNA, 14 nt, Human
acggcccuggccuu

SEQ ID NO: 1913042 - RNA, 23 nt, Human
acggcccuggccuugggcccucu

SEQ ID NO: 1913043 - RNA, 15 nt, Human
acggcucacugcagc

SEQ ID NO: 1913044 - RNA, 20 nt, Human
uccagugaggcucugcccuu

SEQ ID NO: 1913045 - RNA, 18 nt, Human
uccagugaggcucugccc

SEQ ID NO: 1913046 - RNA, 19 nt, Human
uccagugaggcucugcccu

SEQ ID NO: 1913047 - RNA, 17 nt, Human
uccagugaggcucugcc

SEQ ID NO: 1913048 - RNA, 14 nt, Human
uccagugagacagc

SEQ ID NO: 1913049 - RNA, 20 nt, Human
acauggccuaugcacauaug

SEQ ID NO: 1913050 - RNA, 18 nt, Human
acauggccuaugcacaua

SEQ ID NO: 1913051 - RNA, 17 nt, Human
acauggccuaugcacau

SEQ ID NO: 1913052 - RNA, 20 nt, Human
acauggcucuaaaaaguuuu

SEQ ID NO: 1913053 - RNA, 14 nt, Human
acauggccuuugcu

SEQ ID NO: 1913054 - RNA, 15 nt, Human
acauggaguauaugu

SEQ ID NO: 1913055 - RNA, 19 nt, Human
acauggaguauaugucaag

SEQ ID NO: 1913056 - RNA, 23 nt, Human
acaugagcaucaggccaggcccu

SEQ ID NO: 1913057 - RNA, 16 nt, Human
acaugaggggacauuu

SEQ ID NO: 1913058 - RNA, 17 nt, Human
acaugaggggacauuuu

SEQ ID NO: 1913059 - RNA, 20 nt, Human
acauggaauaacauguaauu

SEQ ID NO: 1913060 - RNA, 18 nt, Human
acauggaauaacauguaa

SEQ ID NO: 1913061 - RNA, 14 nt, Human
acauggaaguacua

SEQ ID NO: 1913062 - RNA, 16 nt, Human
acaugagguacugaga

SEQ ID NO: 1913063 - RNA, 14 nt, Human
acaugucuuguaca

SEQ ID NO: 1913064 - RNA, 13 nt, Human
acaugucuuguac

SEQ ID NO: 1913065 - RNA, 19 nt, Human
acaugucuuguacaugugu

SEQ ID NO: 1913066 - RNA, 16 nt, Human
acaugucuuguacaug

SEQ ID NO: 1913067 - RNA, 22 nt, Human
acaugucuuguacauguguagc

SEQ ID NO: 1913068 - RNA, 21 nt, Human
acaugucuuuucuugcaugag

SEQ ID NO: 1913069 - RNA, 17 nt, Human
acauuaagccuuccaca

SEQ ID NO: 1913070 - RNA, 14 nt, Human
acauguauaauauu

SEQ ID NO: 1913071 - RNA, 20 nt, Human
acauguauaauauuuuuaau

SEQ ID NO: 1913072 - RNA, 19 nt, Human
acauguauaauauuuuuaa

SEQ ID NO: 1913073 - RNA, 13 nt, Human
acaugagcaucag

SEQ ID NO: 1913074 - RNA, 15 nt, Human
acaugagaacaaaca

SEQ ID NO: 1913075 - RNA, 22 nt, Human
acaugaaaacacauuuuucuua

SEQ ID NO: 1913076 - RNA, 23 nt, Human
acaugaaaacacauuuuucuuag

SEQ ID NO: 1913077 - RNA, 13 nt, Human
ucaaauauauuca

SEQ ID NO: 1913078 - RNA, 23 nt, Human
ucaaauacgugggcauucaaaug

SEQ ID NO: 1913079 - RNA, 20 nt, Human
ucaaauacgugggcauucaa

SEQ ID NO: 1913080 - RNA, 22 nt, Human
ucaaauacgugggcauucaaau

SEQ ID NO: 1913081 - RNA, 21 nt, Human
ucaaauacgugggcauucaaa

SEQ ID NO: 1913082 - RNA, 22 nt, Human
ucaaagauauuuugcuuuguga

SEQ ID NO: 1913083 - RNA, 20 nt, Human
ucaaagauauuuugcuuugu

SEQ ID NO: 1913084 - RNA, 13 nt, Human
ucaaagauauuuu

SEQ ID NO: 1913085 - RNA, 16 nt, Human
ucaaaagcugggcagg

SEQ ID NO: 1913086 - RNA, 14 nt, Human
uauuuuaagacgaa

SEQ ID NO: 1913087 - RNA, 22 nt, Human
uauuuuaagacgaaacauuugu

SEQ ID NO: 1913088 - RNA, 21 nt, Human
uauuuuaaaagauaaauauua

SEQ ID NO: 1913089 - RNA, 16 nt, Human
acaugaaaacacauuu

SEQ ID NO: 1913090 - RNA, 15 nt, Human
acaugaaaacacauu

SEQ ID NO: 1913091 - RNA, 22 nt, Human
uauuuguaggggaacucauuug

SEQ ID NO: 1913092 - RNA, 22 nt, Human
uauuuguuaaugguuugaauau

SEQ ID NO: 1913093 - RNA, 20 nt, Human
uauuuguuaaugguuugaau

SEQ ID NO: 1913094 - RNA, 16 nt, Human
acaucuugcucugcug

SEQ ID NO: 1913095 - RNA, 15 nt, Human
acaucuugcucugcu

SEQ ID NO: 1913096 - RNA, 14 nt, Human
uaugugccagauuu

SEQ ID NO: 1913097 - RNA, 19 nt, Human
uaugugccagauuuaugca

SEQ ID NO: 1913098 - RNA, 20 nt, Human
uaugugggggucuguguguu

SEQ ID NO: 1913099 - RNA, 19 nt, Human
uaugugggggucugugugu

SEQ ID NO: 1913100 - RNA, 18 nt, Human
uaugugggggucugugug

SEQ ID NO: 1913101 - RNA, 17 nt, Human
acaucuugcucugcuga

SEQ ID NO: 1913102 - RNA, 22 nt, Human
acaucuugcucugcugacagac

SEQ ID NO: 1913103 - RNA, 19 nt, Human
acaucuuggucagauuuga

SEQ ID NO: 1913104 - RNA, 24 nt, Human
acaucuuuucuugccucugucccc

SEQ ID NO: 1913105 - RNA, 17 nt, Human
uauuuuguguuuaggaa

SEQ ID NO: 1913106 - RNA, 20 nt, Human
uauuuuguguuuaggaacua

SEQ ID NO: 1913107 - RNA, 16 nt, Human
uauuuuguaacuucca

SEQ ID NO: 1913108 - RNA, 17 nt, Human
uauuuuuguagagccag

SEQ ID NO: 1913109 - RNA, 17 nt, Human
uauuuuuauuuguuugu

SEQ ID NO: 1913110 - RNA, 18 nt, Human
uauuuuucaauaaagcau

SEQ ID NO: 1913111 - RNA, 20 nt, Human
uauuuuucaauaaagcauuu

SEQ ID NO: 1913112 - RNA, 15 nt, Human
uauuuugcuuuguga

SEQ ID NO: 1913113 - RNA, 13 nt, Human
uauuuugcuuugu

SEQ ID NO: 1913114 - RNA, 20 nt, Human
uauuuugcuuugugauuuuu

SEQ ID NO: 1913115 - RNA, 20 nt, Human
uauuuuggauuguauauugu

SEQ ID NO: 1913116 - RNA, 23 nt, Human
uauuuuggauuguauauuguguu

SEQ ID NO: 1913117 - RNA, 15 nt, Human
uauuuugaucuucaa

SEQ ID NO: 1913118 - RNA, 16 nt, Human
uauuuugaucuucaac

SEQ ID NO: 1913119 - RNA, 18 nt, Human
uauuuugaucuucaacaa

SEQ ID NO: 1913120 - RNA, 12 nt, Human
uauuuugaucuu

SEQ ID NO: 1913121 - RNA, 14 nt, Human
uauuuugaucuuca

SEQ ID NO: 1913122 - RNA, 14 nt, Human
uauuuuaauaaaca

SEQ ID NO: 1913123 - RNA, 17 nt, Human
uauuuuaauaaacacuc

SEQ ID NO: 1913124 - RNA, 13 nt, Human
uauuuuacauaaa

SEQ ID NO: 1913125 - RNA, 19 nt, Human
ucacauuacuguauauacu

SEQ ID NO: 1913126 - RNA, 21 nt, Human
ucacauggccuaugcacauau

SEQ ID NO: 1913127 - RNA, 16 nt, Human
ucacauggccuaugca

SEQ ID NO: 1913128 - RNA, 15 nt, Human
ucacaugggacaaag

SEQ ID NO: 1913129 - RNA, 17 nt, Human
ucaccagccccagugcc

SEQ ID NO: 1913130 - RNA, 17 nt, Human
ucacauuccugaacagg

SEQ ID NO: 1913131 - RNA, 13 nt, Human
ucacauuccugaa

SEQ ID NO: 1913132 - RNA, 20 nt, Human
ucacauauugauuuccguua

SEQ ID NO: 1913133 - RNA, 18 nt, Human
ucacauauugauuuccgu

SEQ ID NO: 1913134 - RNA, 16 nt, Human
ucacauauugauuucc

SEQ ID NO: 1913135 - RNA, 15 nt, Human
ucacagaugggugcu

SEQ ID NO: 1913136 - RNA, 16 nt, Human
ucacagccaccccuga

SEQ ID NO: 1913137 - RNA, 14 nt, Human
ucacagaugggugc

SEQ ID NO: 1913138 - RNA, 16 nt, Human
ucacagccacuuggga

SEQ ID NO: 1913139 - RNA, 19 nt, Human
ucacagcuccaagaauuuc

SEQ ID NO: 1913140 - RNA, 13 nt, Human
ucaauuuaaaaaa

SEQ ID NO: 1913141 - RNA, 12 nt, Human
ucaauuuaaaaa

SEQ ID NO: 1913142 - RNA, 20 nt, Human
accaaccacugcgaccacaa

SEQ ID NO: 1913143 - RNA, 17 nt, Human
accaacauacucccauc

SEQ ID NO: 1913144 - RNA, 16 nt, Human
accaacauacucccau

SEQ ID NO: 1913145 - RNA, 16 nt, Human
accaaaucagcugcua

SEQ ID NO: 1913146 - RNA, 19 nt, Human
accaaaucagcugcuacua

SEQ ID NO: 1913147 - RNA, 19 nt, Human
accaaaaacugaaagugaa

SEQ ID NO: 1913148 - RNA, 21 nt, Human
accaaugccaaaaaaagacag

SEQ ID NO: 1913149 - RNA, 23 nt, Human
accacacccagcccacuucugcc

SEQ ID NO: 1913150 - RNA, 21 nt, Human
accacacccagcccacuucug

SEQ ID NO: 1913151 - RNA, 20 nt, Human
accacacccagcccacuucu

SEQ ID NO: 1913152 - RNA, 16 nt, Human
accacacccagcccac

SEQ ID NO: 1913153 - RNA, 15 nt, Human
accacacccagccca

SEQ ID NO: 1913154 - RNA, 17 nt, Human
accacacagaggcugcc

SEQ ID NO: 1913155 - RNA, 18 nt, Human
acauuauuaucaacaaua

SEQ ID NO: 1913156 - RNA, 17 nt, Human
ucaagagggucugagga

SEQ ID NO: 1913157 - RNA, 22 nt, Human
ucaagauucccaggaguucugc

SEQ ID NO: 1913158 - RNA, 19 nt, Human
ucaagauucccaggaguuc

SEQ ID NO: 1913159 - RNA, 20 nt, Human
ucaagauucccaggaguucu

SEQ ID NO: 1913160 - RNA, 19 nt, Human
ucaagauacugcuacugua

SEQ ID NO: 1913161 - RNA, 16 nt, Human
ucaagauucccaggag

SEQ ID NO: 1913162 - RNA, 17 nt, Human
ucaagauucccaggagu

SEQ ID NO: 1913163 - RNA, 17 nt, Human
ucaagcaagauuucaga

SEQ ID NO: 1913164 - RNA, 22 nt, Human
ucaauaggaaaaacugauuuuu

SEQ ID NO: 1913165 - RNA, 16 nt, Human
ucaauauuuuccauga

SEQ ID NO: 1913166 - RNA, 15 nt, Human
ucaauauuuuccaug

SEQ ID NO: 1913167 - RNA, 24 nt, Human
ucaaguacauaaaguacauaacaa

SEQ ID NO: 1913168 - RNA, 18 nt, Human
ucaauauuuuccaugaaa

SEQ ID NO: 1913169 - RNA, 17 nt, Human
ucaauauuuuccaugaa

SEQ ID NO: 1913170 - RNA, 16 nt, Human
ucaauauuuuuagaua

SEQ ID NO: 1913171 - RNA, 17 nt, Human
ucaauaggaaaaacuga

SEQ ID NO: 1913172 - RNA, 17 nt, Human
ucaagugauucuccugc

SEQ ID NO: 1913173 - RNA, 18 nt, Human
ucaauaggaaaaacugau

SEQ ID NO: 1913174 - RNA, 19 nt, Human
ucaauaggaaaaacugauu

SEQ ID NO: 1913175 - RNA, 16 nt, Human
ucaagugauucuccug

SEQ ID NO: 1913176 - RNA, 19 nt, Human
ucaaguaauccaccugccu

SEQ ID NO: 1913177 - RNA, 23 nt, Human
acauuuuucuuagggaaggauac

SEQ ID NO: 1913178 - RNA, 13 nt, Human
acauuuuucuuag

SEQ ID NO: 1913179 - RNA, 21 nt, Human
accaaaaaagcuguauuuuga

SEQ ID NO: 1913180 - RNA, 21 nt, Human
acauuuuucagauauaaaaga

SEQ ID NO: 1913181 - RNA, 18 nt, Human
acauuuuuaagugcugca

SEQ ID NO: 1913182 - RNA, 15 nt, Human
acauuuuuaagugcu

SEQ ID NO: 1913183 - RNA, 18 nt, Human
acauuuuacuuuuuccug

SEQ ID NO: 1913184 - RNA, 13 nt, Human
acauuuuaauuca

SEQ ID NO: 1913185 - RNA, 15 nt, Human
acauuuuaaugcacc

SEQ ID NO: 1913186 - RNA, 19 nt, Human
acauuuuaaugcaccugaa

SEQ ID NO: 1913187 - RNA, 22 nt, Human
acauugcggacagccacggcca

SEQ ID NO: 1913188 - RNA, 21 nt, Human
acauugcggacagccacggcc

SEQ ID NO: 1913189 - RNA, 15 nt, Human
acauugcguuugacc

SEQ ID NO: 1913190 - RNA, 23 nt, Human
acauugcguuugaccuuuuaugu

SEQ ID NO: 1913191 - RNA, 15 nt, Human
ucaauccuaccuguu

SEQ ID NO: 1913192 - RNA, 16 nt, Human
acauuggaaacaaguc

SEQ ID NO: 1913193 - RNA, 21 nt, Human
acauuggcaccuaauccaggc

SEQ ID NO: 1913194 - RNA, 22 nt, Human
acauuggcaccuaauccaggca

SEQ ID NO: 1913195 - RNA, 15 nt, Human
acauugggaagggga

SEQ ID NO: 1913196 - RNA, 19 nt, Human
acauugggaaggggacccc

SEQ ID NO: 1913197 - RNA, 23 nt, Human
acauugggaaggggacccccgcc

SEQ ID NO: 1913198 - RNA, 22 nt, Human
acauugguauucgcuugagaaa

SEQ ID NO: 1913199 - RNA, 17 nt, Human
acccccacuggacugac

SEQ ID NO: 1913200 - RNA, 12 nt, Human
acccccagccug

SEQ ID NO: 1913201 - RNA, 13 nt, Human
acccccagccugc

SEQ ID NO: 1913202 - RNA, 17 nt, Human
ucaggcaggugggaugg

SEQ ID NO: 1913203 - RNA, 18 nt, Human
ucaggcaggugggaugga

SEQ ID NO: 1913204 - RNA, 13 nt, Human
ucaggccagcugc

SEQ ID NO: 1913205 - RNA, 14 nt, Human
ucaggccagcugcu

SEQ ID NO: 1913206 - RNA, 13 nt, Human
ucaggccaggccc

SEQ ID NO: 1913207 - RNA, 14 nt, Human
ucaggccaggcccu

SEQ ID NO: 1913208 - RNA, 15 nt, Human
ucaggccaggcccuc

SEQ ID NO: 1913209 - RNA, 16 nt, Human
ucaggccaggcccucu

SEQ ID NO: 1913210 - RNA, 19 nt, Human
ucaggguuggccccugccc

SEQ ID NO: 1913211 - RNA, 18 nt, Human
ucaggguuggccccugcc

SEQ ID NO: 1913212 - RNA, 23 nt, Human
ucaggguuggccccugcccggcu

SEQ ID NO: 1913213 - RNA, 19 nt, Human
acccgcuaagagggaggga

SEQ ID NO: 1913214 - RNA, 19 nt, Human
ucaggccaggcccucugcc

SEQ ID NO: 1913215 - RNA, 17 nt, Human
ucaggccaggcccucug

SEQ ID NO: 1913216 - RNA, 18 nt, Human
ucaggccaggcccucugc

SEQ ID NO: 1913217 - RNA, 12 nt, Human
ucaggggugugc

SEQ ID NO: 1913218 - RNA, 19 nt, Human
ucaggggugugcggccuuu

SEQ ID NO: 1913219 - RNA, 23 nt, Human
ucaggggugugcggccuuuggcu

SEQ ID NO: 1913220 - RNA, 17 nt, Human
ucaggguuggccccugc

SEQ ID NO: 1913221 - RNA, 21 nt, Human
acccuccuuucaccacaugug

SEQ ID NO: 1913222 - RNA, 23 nt, Human
acccucccucuacugggagccua

SEQ ID NO: 1913223 - RNA, 15 nt, Human
acccgggaggcagag

SEQ ID NO: 1913224 - RNA, 17 nt, Human
acccucauucuacugaa

SEQ ID NO: 1913225 - RNA, 17 nt, Human
acccucauguucuuaau

SEQ ID NO: 1913226 - RNA, 15 nt, Human
acccucauguucuua

SEQ ID NO: 1913227 - RNA, 14 nt, Human
acccucauguucuu

SEQ ID NO: 1913228 - RNA, 22 nt, Human
acccgggaagggggcugggaca

SEQ ID NO: 1913229 - RNA, 19 nt, Human
acccgggaagggggcuggg

SEQ ID NO: 1913230 - RNA, 20 nt, Human
acccgggaagggggcuggga

SEQ ID NO: 1913231 - RNA, 14 nt, Human
acccucgaggcgga

SEQ ID NO: 1913232 - RNA, 18 nt, Human
acccucgaggcggaucuu

SEQ ID NO: 1913233 - RNA, 11 nt, Human
acccugaggcc

SEQ ID NO: 1913234 - RNA, 13 nt, Human
acccugaggccca

SEQ ID NO: 1913235 - RNA, 19 nt, Human
acccugaggcccagagggc

SEQ ID NO: 1913236 - RNA, 21 nt, Human
acccugaggcccagagggccu

SEQ ID NO: 1913237 - RNA, 23 nt, Human
acccugaggcccagagggccugc

SEQ ID NO: 1913238 - RNA, 18 nt, Human
acccugaggccucuggaa

SEQ ID NO: 1913239 - RNA, 20 nt, Human
acccugauuuaggagaagcc

SEQ ID NO: 1913240 - RNA, 22 nt, Human
acccugauuuaggagaagccag

SEQ ID NO: 1913241 - RNA, 23 nt, Human
acccugauuuaggagaagccagg

SEQ ID NO: 1913242 - RNA, 22 nt, Human
acccugcgcccaguccuuccac

SEQ ID NO: 1913243 - RNA, 16 nt, Human
ucauaagcgaucacuu

SEQ ID NO: 1913244 - RNA, 15 nt, Human
ucauaacuagaacug

SEQ ID NO: 1913245 - RNA, 22 nt, Human
ucauaagagccacaggucuuua

SEQ ID NO: 1913246 - RNA, 24 nt, Human
ucauaaagcaggcagaacucaucu

SEQ ID NO: 1913247 - RNA, 14 nt, Human
ucauaaagaauugu

SEQ ID NO: 1913248 - RNA, 13 nt, Human
ucauaacuagaac

SEQ ID NO: 1913249 - RNA, 18 nt, Human
ucauaaauaaaguuuguu

SEQ ID NO: 1913250 - RNA, 19 nt, Human
ucaguuguuagugugucuu

SEQ ID NO: 1913251 - RNA, 13 nt, Human
ucaguuuuaacua

SEQ ID NO: 1913252 - RNA, 16 nt, Human
ucaguggcagcugcuu

SEQ ID NO: 1913253 - RNA, 15 nt, Human
ucaguggcagcugcu

SEQ ID NO: 1913254 - RNA, 14 nt, Human
ucaguggcagcugc

SEQ ID NO: 1913255 - RNA, 19 nt, Human
ucagugccuuauggaacac

SEQ ID NO: 1913256 - RNA, 20 nt, Human
ucagugccuuauggaacacu

SEQ ID NO: 1913257 - RNA, 22 nt, Human
ucagugccuuauggaacacucu

SEQ ID NO: 1913258 - RNA, 23 nt, Human
ucagugccuuauggaacacucug

SEQ ID NO: 1913259 - RNA, 22 nt, Human
ucaggugucccugcacuugcag

SEQ ID NO: 1913260 - RNA, 17 nt, Human
ucagguuugaguagagg

SEQ ID NO: 1913261 - RNA, 13 nt, Human
ucaguaauaacuc

SEQ ID NO: 1913262 - RNA, 13 nt, Human
ucaguaagccgug

SEQ ID NO: 1913263 - RNA, 20 nt, Human
accgaaaacguggcugcuuc

SEQ ID NO: 1913264 - RNA, 15 nt, Human
acccuugugguccca

SEQ ID NO: 1913265 - RNA, 20 nt, Human
acccuugccgucuaccugag

SEQ ID NO: 1913266 - RNA, 17 nt, Human
acccuggaaaaugaauc

SEQ ID NO: 1913267 - RNA, 18 nt, Human
ucaggugucccugcacuu

SEQ ID NO: 1913268 - RNA, 17 nt, Human
ucaggugucccugcacu

SEQ ID NO: 1913269 - RNA, 15 nt, Human
ucaggugucccugca

SEQ ID NO: 1913270 - RNA, 23 nt, Human
ucagguggggucacucuggcagc

SEQ ID NO: 1913271 - RNA, 22 nt, Human
ucagguggggucacucuggcag

SEQ ID NO: 1913272 - RNA, 21 nt, Human
accgaacugauguaaguaaac

SEQ ID NO: 1913273 - RNA, 21 nt, Human
accgaaaacguggcugcuuca

SEQ ID NO: 1913274 - RNA, 22 nt, Human
accgaaaacguggcugcuucaa

SEQ ID NO: 1913275 - RNA, 22 nt, Human
accccagccuggccacgcagcc

SEQ ID NO: 1913276 - RNA, 21 nt, Human
accccagccuggccacgcagc

SEQ ID NO: 1913277 - RNA, 18 nt, Human
accccagccuggccacgc

SEQ ID NO: 1913278 - RNA, 19 nt, Human
accccagcuggggccaggc

SEQ ID NO: 1913279 - RNA, 22 nt, Human
accccagcuggggccaggcugg

SEQ ID NO: 1913280 - RNA, 11 nt, Human
acccaggugcu

SEQ ID NO: 1913281 - RNA, 23 nt, Human
acccaggugcuaggaacacuccu

SEQ ID NO: 1913282 - RNA, 13 nt, Human
accccagguuucu

SEQ ID NO: 1913283 - RNA, 17 nt, Human
acccagcgagcccuggu

SEQ ID NO: 1913284 - RNA, 16 nt, Human
acccagcgagcccugg

SEQ ID NO: 1913285 - RNA, 13 nt, Human
acccagcgagccc

SEQ ID NO: 1913286 - RNA, 15 nt, Human
acccaggagccccga

SEQ ID NO: 1913287 - RNA, 23 nt, Human
acccaggacuuauuuaaacucug

SEQ ID NO: 1913288 - RNA, 23 nt, Human
acccaggagauggaaguugcagu

SEQ ID NO: 1913289 - RNA, 13 nt, Human
acccaggagcccc

SEQ ID NO: 1913290 - RNA, 15 nt, Human
ucagauuuccagucu

SEQ ID NO: 1913291 - RNA, 17 nt, Human
ucagauuuccagucucc

SEQ ID NO: 1913292 - RNA, 16 nt, Human
ucagaucucuaacuuc

SEQ ID NO: 1913293 - RNA, 15 nt, Human
ucagaucucuaacuu

SEQ ID NO: 1913294 - RNA, 23 nt, Human
ucagaucugacaugauuccuucc

SEQ ID NO: 1913295 - RNA, 16 nt, Human
ucagagacuccugcag

SEQ ID NO: 1913296 - RNA, 23 nt, Human
ucagagacuccugcaggcagcca

SEQ ID NO: 1913297 - RNA, 15 nt, Human
acccagcccacuucu

SEQ ID NO: 1913298 - RNA, 23 nt, Human
ucagaaguuucugccgcagcccu

SEQ ID NO: 1913299 - RNA, 19 nt, Human
acccagauuuugcuguaua

SEQ ID NO: 1913300 - RNA, 20 nt, Human
acccagauuuugcuguauau

SEQ ID NO: 1913301 - RNA, 17 nt, Human
acccagcaacagaaaaa

SEQ ID NO: 1913302 - RNA, 16 nt, Human
ucagaauagaaauuag

SEQ ID NO: 1913303 - RNA, 21 nt, Human
ucagaauagccacauuuggaa

SEQ ID NO: 1913304 - RNA, 18 nt, Human
ucagaauuagcugcuucu

SEQ ID NO: 1913305 - RNA, 22 nt, Human
ucagaauagccacauuuggaau

SEQ ID NO: 1913306 - RNA, 23 nt, Human
ucagaauagccacauuuggaaua

SEQ ID NO: 1913307 - RNA, 22 nt, Human
ucagagacuccugcaggcagcc

SEQ ID NO: 1913308 - RNA, 15 nt, Human
ucagagaccauugca

SEQ ID NO: 1913309 - RNA, 20 nt, Human
ucagaauucucagaaucuca

SEQ ID NO: 1913310 - RNA, 10 nt, Human
ucagaauucu

SEQ ID NO: 1913311 - RNA, 12 nt, Human
ucagaauucuca

SEQ ID NO: 1913312 - RNA, 22 nt, Human
accaugcgacacugggaggcca

SEQ ID NO: 1913313 - RNA, 23 nt, Human
accaugcgacacugggaggccag

SEQ ID NO: 1913314 - RNA, 20 nt, Human
accaugcccggcuaauuuuu

SEQ ID NO: 1913315 - RNA, 22 nt, Human
accaugugcuacaggggccaga

SEQ ID NO: 1913316 - RNA, 22 nt, Human
accauuuugggguacccacugc

SEQ ID NO: 1913317 - RNA, 20 nt, Human
acccaaauguucaucaauga

SEQ ID NO: 1913318 - RNA, 16 nt, Human
acccaaauguucauca

SEQ ID NO: 1913319 - RNA, 20 nt, Human
acccacugcuuuuggucugu

SEQ ID NO: 1913320 - RNA, 21 nt, Human
acccagauaaagguucaugca

SEQ ID NO: 1913321 - RNA, 21 nt, Human
accauuuugggguacccacug

SEQ ID NO: 1913322 - RNA, 23 nt, Human
accauuuugcugucccuuuuccu

SEQ ID NO: 1913323 - RNA, 22 nt, Human
accauuuugcugucccuuuucc

SEQ ID NO: 1913324 - RNA, 19 nt, Human
accauucuccaccugccag

SEQ ID NO: 1913325 - RNA, 20 nt, Human
accauucuccaccugccagg

SEQ ID NO: 1913326 - RNA, 21 nt, Human
accauucuccaccugccaggg

SEQ ID NO: 1913327 - RNA, 15 nt, Human
ucacuucacccugga

SEQ ID NO: 1913328 - RNA, 17 nt, Human
ucacuucacgcuuucag

SEQ ID NO: 1913329 - RNA, 15 nt, Human
ucacuguugcccagg

SEQ ID NO: 1913330 - RNA, 18 nt, Human
ucacugcaaccuccgccu

SEQ ID NO: 1913331 - RNA, 14 nt, Human
ucacuguugcccag

SEQ ID NO: 1913332 - RNA, 18 nt, Human
ucacugcaacuucugccu

SEQ ID NO: 1913333 - RNA, 17 nt, Human
ucacugcaacuucugcc

SEQ ID NO: 1913334 - RNA, 18 nt, Human
ucacugcaaccucuaccu

SEQ ID NO: 1913335 - RNA, 21 nt, Human
ucacuauguugcccaggcagg

SEQ ID NO: 1913336 - RNA, 22 nt, Human
ucaccagccccagugcccacag

SEQ ID NO: 1913337 - RNA, 19 nt, Human
ucacauuccugaacaggau

SEQ ID NO: 1913338 - RNA, 13 nt, Human
ucacucauugcug

SEQ ID NO: 1913339 - RNA, 23 nt, Human
ucacugagacagcccgggcucug

SEQ ID NO: 1913340 - RNA, 18 nt, Human
ucacucuuggagccugca

SEQ ID NO: 1913341 - RNA, 17 nt, Human
ucacucuuggagccugc

SEQ ID NO: 1913342 - RNA, 16 nt, Human
ucacucuuggagccug

SEQ ID NO: 1913343 - RNA, 14 nt, Human
ucacucuuggagcc

SEQ ID NO: 1913344 - RNA, 15 nt, Human
ucacucauugcugag

SEQ ID NO: 1913345 - RNA, 17 nt, Human
ucacucauugcugagcc

SEQ ID NO: 1913346 - RNA, 18 nt, Human
ucacucauugcugagccu

SEQ ID NO: 1913347 - RNA, 19 nt, Human
ucacucauugcugagccuc

SEQ ID NO: 1913348 - RNA, 20 nt, Human
ucacucauugcugagccucu

SEQ ID NO: 1913349 - RNA, 22 nt, Human
ucacucauugcugagccucugc

SEQ ID NO: 1913350 - RNA, 18 nt, Human
acuuguauuaaagacaga

SEQ ID NO: 1913351 - RNA, 15 nt, Human
acuuguauuaugugu

SEQ ID NO: 1913352 - RNA, 14 nt, Human
acuugucuuuggac

SEQ ID NO: 1913353 - RNA, 21 nt, Human
acuuggacuuguccucagcag

SEQ ID NO: 1913354 - RNA, 13 nt, Human
acuuguauuaugu

SEQ ID NO: 1913355 - RNA, 14 nt, Human
acuuguauuaugug

SEQ ID NO: 1913356 - RNA, 14 nt, Human
acuuggaagcuccg

SEQ ID NO: 1913357 - RNA, 22 nt, Human
acuugccgcgucgcccucccag

SEQ ID NO: 1913358 - RNA, 23 nt, Human
acuugccgcgucgcccucccagg

SEQ ID NO: 1913359 - RNA, 21 nt, Human
acuugaguuacaccagaccug

SEQ ID NO: 1913360 - RNA, 18 nt, Human
acuugaguuacaccagac

SEQ ID NO: 1913361 - RNA, 22 nt, Human
acuugaccccgacgccacagcc

SEQ ID NO: 1913362 - RNA, 20 nt, Human
acuugacagaacacugucuu

SEQ ID NO: 1913363 - RNA, 18 nt, Human
acuugacagaacacuguc

SEQ ID NO: 1913364 - RNA, 17 nt, Human
acuugacagaacacugu

SEQ ID NO: 1913365 - RNA, 14 nt, Human
acuugaagggccag

SEQ ID NO: 1913366 - RNA, 19 nt, Human
acuugagaauuacccuuuu

SEQ ID NO: 1913367 - RNA, 17 nt, Human
acuugaaaauuaacaug

SEQ ID NO: 1913368 - RNA, 18 nt, Human
acuugaaaauuaacauga

SEQ ID NO: 1913369 - RNA, 16 nt, Human
acuugaaaauuaacau

SEQ ID NO: 1913370 - RNA, 23 nt, Human
acuugaacccgggaggcagaggu

SEQ ID NO: 1913371 - RNA, 18 nt, Human
acuucuccacccugcucu

SEQ ID NO: 1913372 - RNA, 22 nt, Human
acuucggcagauacugucucuu

SEQ ID NO: 1913373 - RNA, 14 nt, Human
acuucucuuccuug

SEQ ID NO: 1913374 - RNA, 17 nt, Human
acuucgggaggucgagg

SEQ ID NO: 1913375 - RNA, 20 nt, Human
acuucgggaggucgaggcag

SEQ ID NO: 1913376 - RNA, 20 nt, Human
acuuccugagggaucuauac

SEQ ID NO: 1913377 - RNA, 16 nt, Human
ucuauuguuucuuuca

SEQ ID NO: 1913378 - RNA, 16 nt, Human
ucucaaaaaaagaaaa

SEQ ID NO: 1913379 - RNA, 13 nt, Human
ucuauaauuuaaa

SEQ ID NO: 1913380 - RNA, 18 nt, Human
ucuauacauaucuuuauu

SEQ ID NO: 1913381 - RNA, 15 nt, Human
ucuauacauaucuuu

SEQ ID NO: 1913382 - RNA, 23 nt, Human
ucuaguuugauuaaauucuugca

SEQ ID NO: 1913383 - RNA, 21 nt, Human
ucuaggaaaauauuuugaucu

SEQ ID NO: 1913384 - RNA, 22 nt, Human
ucuaggaaaauauuuugaucuu

SEQ ID NO: 1913385 - RNA, 16 nt, Human
ucuaggaaaauauuuu

SEQ ID NO: 1913386 - RNA, 21 nt, Human
ucuagcugggggugggccagg

SEQ ID NO: 1913387 - RNA, 11 nt, Human
ucuagcuguug

SEQ ID NO: 1913388 - RNA, 18 nt, Human
ucuagcuguugagcuguu

SEQ ID NO: 1913389 - RNA, 19 nt, Human
ucuagcuguugagcuguuu

SEQ ID NO: 1913390 - RNA, 24 nt, Human
ucuagauacuguaucaugacaaag

SEQ ID NO: 1913391 - RNA, 11 nt, Human
acuucccccaa

SEQ ID NO: 1913392 - RNA, 16 nt, Human
acuucccccaaauuua

SEQ ID NO: 1913393 - RNA, 19 nt, Human
ucuagaugaaguuuuacau

SEQ ID NO: 1913394 - RNA, 20 nt, Human
ucuagaugaaguuuuacauu

SEQ ID NO: 1913395 - RNA, 21 nt, Human
ucuagaugaaguuuuacauug

SEQ ID NO: 1913396 - RNA, 22 nt, Human
ucuagaugaaguuuuacauugu

SEQ ID NO: 1913397 - RNA, 23 nt, Human
ucuagaugaaguuuuacauuguu

SEQ ID NO: 1913398 - RNA, 18 nt, Human
ucuagauggcuccucuca

SEQ ID NO: 1913399 - RNA, 19 nt, Human
ucuagauggcuccucucag

SEQ ID NO: 1913400 - RNA, 20 nt, Human
ucuagauggcuccucucagu

SEQ ID NO: 1913401 - RNA, 16 nt, Human
acuucaugcaggugaa

SEQ ID NO: 1913402 - RNA, 22 nt, Human
acuucauggccuuugauaaaug

SEQ ID NO: 1913403 - RNA, 23 nt, Human
acuucauggccuuugauaaaugu

SEQ ID NO: 1913404 - RNA, 14 nt, Human
acuucauucuugaa

SEQ ID NO: 1913405 - RNA, 15 nt, Human
acuucauucuugaaa

SEQ ID NO: 1913406 - RNA, 19 nt, Human
acuucauucuugaaagcug

SEQ ID NO: 1913407 - RNA, 21 nt, Human
acuucauucuugaaagcugug

SEQ ID NO: 1913408 - RNA, 18 nt, Human
acuucaggcuugauaaua

SEQ ID NO: 1913409 - RNA, 20 nt, Human
acuucaggcuugauaauacu

SEQ ID NO: 1913410 - RNA, 20 nt, Human
acuuccagugcaacacugaa

SEQ ID NO: 1913411 - RNA, 22 nt, Human
acuuccaugugaggguuuucag

SEQ ID NO: 1913412 - RNA, 20 nt, Human
acuuccagguguuacuguaa

SEQ ID NO: 1913413 - RNA, 21 nt, Human
acuuccagguguuacuguaau

SEQ ID NO: 1913414 - RNA, 18 nt, Human
acuuccaauuuacauacu

SEQ ID NO: 1913415 - RNA, 17 nt, Human
acuuccacugccauccu

SEQ ID NO: 1913416 - RNA, 12 nt, Human
ucuaccugaggg

SEQ ID NO: 1913417 - RNA, 19 nt, Human
ucuaccugaggggccucuu

SEQ ID NO: 1913418 - RNA, 15 nt, Human
ucuaccucuuggcug

SEQ ID NO: 1913419 - RNA, 15 nt, Human
acuuacuguacauga

SEQ ID NO: 1913420 - RNA, 20 nt, Human
acuuagagguggggagcaga

SEQ ID NO: 1913421 - RNA, 14 nt, Human
acuuacuguacaug

SEQ ID NO: 1913422 - RNA, 13 nt, Human
acuuacuguacau

SEQ ID NO: 1913423 - RNA, 15 nt, Human
ucuacccauauuaca

SEQ ID NO: 1913424 - RNA, 21 nt, Human
ucuacccucuuagaaaaacca

SEQ ID NO: 1913425 - RNA, 15 nt, Human
ucuaagccugaaggg

SEQ ID NO: 1913426 - RNA, 16 nt, Human
ucuaagccugaagggg

SEQ ID NO: 1913427 - RNA, 14 nt, Human
ucuaagccugaagg

SEQ ID NO: 1913428 - RNA, 17 nt, Human
ucuaaacuuccccaucu

SEQ ID NO: 1913429 - RNA, 20 nt, Human
ucuaaagaguuuauuuuaag

SEQ ID NO: 1913430 - RNA, 17 nt, Human
ucuaaagcugccagccg

SEQ ID NO: 1913431 - RNA, 21 nt, Human
ucuaaagaguuuauuuuaaga

SEQ ID NO: 1913432 - RNA, 16 nt, Human
ucuaaaggcuaccuuu

SEQ ID NO: 1913433 - RNA, 13 nt, Human
ucuaaaggcuacc

SEQ ID NO: 1913434 - RNA, 23 nt, Human
ucgucacugcuuaacuucacaua

SEQ ID NO: 1913435 - RNA, 13 nt, Human
ucguucucccugg

SEQ ID NO: 1913436 - RNA, 13 nt, Human
ucguucucugccu

SEQ ID NO: 1913437 - RNA, 11 nt, Human
ucguucugugg

SEQ ID NO: 1913438 - RNA, 20 nt, Human
ucuaaacaaugcugauuugg

SEQ ID NO: 1913439 - RNA, 16 nt, Human
ucuaaacccaauccaa

SEQ ID NO: 1913440 - RNA, 19 nt, Human
ucuaaacccaauccaaaug

SEQ ID NO: 1913441 - RNA, 13 nt, Human
ucgggcugugccc

SEQ ID NO: 1913442 - RNA, 12 nt, Human
ucgggcugugcc

SEQ ID NO: 1913443 - RNA, 21 nt, Human
acuguuaauaguucagguaac

SEQ ID NO: 1913444 - RNA, 17 nt, Human
acuguuaauaguucagg

SEQ ID NO: 1913445 - RNA, 18 nt, Human
acuguguuucaaguucaa

SEQ ID NO: 1913446 - RNA, 16 nt, Human
acuguuaaaggaaaaa

SEQ ID NO: 1913447 - RNA, 14 nt, Human
acuguguguugcca

SEQ ID NO: 1913448 - RNA, 19 nt, Human
acuguguguugccacagga

SEQ ID NO: 1913449 - RNA, 20 nt, Human
acuguguguugccacaggac

SEQ ID NO: 1913450 - RNA, 22 nt, Human
acuguguguugccacaggacac

SEQ ID NO: 1913451 - RNA, 14 nt, Human
acuguguuucaagu

SEQ ID NO: 1913452 - RNA, 15 nt, Human
acuguguuucaaguu

SEQ ID NO: 1913453 - RNA, 22 nt, Human
acuguggggaaccaauugcuuu

SEQ ID NO: 1913454 - RNA, 22 nt, Human
acuguggggugugcacaucucu

SEQ ID NO: 1913455 - RNA, 15 nt, Human
acugugugugugaau

SEQ ID NO: 1913456 - RNA, 16 nt, Human
acugugugugugaaug

SEQ ID NO: 1913457 - RNA, 18 nt, Human
acugugugugugaaugaa

SEQ ID NO: 1913458 - RNA, 22 nt, Human
acugugugugugaaugaacacu

SEQ ID NO: 1913459 - RNA, 14 nt, Human
acuguccugggccu

SEQ ID NO: 1913460 - RNA, 20 nt, Human
acuguaucaugacaaagacu

SEQ ID NO: 1913461 - RNA, 16 nt, Human
acuguaucaugacaaa

SEQ ID NO: 1913462 - RNA, 22 nt, Human
acuguaucucuaauacagugug

SEQ ID NO: 1913463 - RNA, 23 nt, Human
acugucaaaaaguuugguucugu

SEQ ID NO: 1913464 - RNA, 20 nt, Human
acugucaaggcugcuuagaa

SEQ ID NO: 1913465 - RNA, 21 nt, Human
acugucaaggcugcuuagaau

SEQ ID NO: 1913466 - RNA, 22 nt, Human
acugucaaggcugcuuagaauc

SEQ ID NO: 1913467 - RNA, 14 nt, Human
acugucacucauug

SEQ ID NO: 1913468 - RNA, 15 nt, Human
acugucacucauugc

SEQ ID NO: 1913469 - RNA, 16 nt, Human
acuguccuccaagcca

SEQ ID NO: 1913470 - RNA, 18 nt, Human
acuguccuccaagccagc

SEQ ID NO: 1913471 - RNA, 18 nt, Human
acuggguacuuguggaca

SEQ ID NO: 1913472 - RNA, 17 nt, Human
acuggguacuuguggac

SEQ ID NO: 1913473 - RNA, 16 nt, Human
acuguacaaaguagaa

SEQ ID NO: 1913474 - RNA, 22 nt, Human
acuguacaaaguagaagucuua

SEQ ID NO: 1913475 - RNA, 18 nt, Human
acuguacagacagaaaaa

SEQ ID NO: 1913476 - RNA, 16 nt, Human
acuguacaugaaaaca

SEQ ID NO: 1913477 - RNA, 19 nt, Human
acuguacaugaaaacacau

SEQ ID NO: 1913478 - RNA, 23 nt, Human
acuguacuugcucuugaugccug

SEQ ID NO: 1913479 - RNA, 15 nt, Human
acuguacugggccau

SEQ ID NO: 1913480 - RNA, 14 nt, Human
acuguaucaugaca

SEQ ID NO: 1913481 - RNA, 15 nt, Human
acuguacuugcucuu

SEQ ID NO: 1913482 - RNA, 21 nt, Human
acuguacaugaaaacacauuu

SEQ ID NO: 1913483 - RNA, 20 nt, Human
acuguacaugaaaacacauu

SEQ ID NO: 1913484 - RNA, 23 nt, Human
ucgcugugucagcauagaaguaa

SEQ ID NO: 1913485 - RNA, 20 nt, Human
acugggccauguugugccuc

SEQ ID NO: 1913486 - RNA, 21 nt, Human
ucgcucuguugcccaggcugg

SEQ ID NO: 1913487 - RNA, 21 nt, Human
acugggcuuggggaccagagc

SEQ ID NO: 1913488 - RNA, 22 nt, Human
acugggcuuggggaccagagcu

SEQ ID NO: 1913489 - RNA, 21 nt, Human
acuggggccuacagcuuugau

SEQ ID NO: 1913490 - RNA, 12 nt, Human
acuggggccucc

SEQ ID NO: 1913491 - RNA, 13 nt, Human
acuggggccucca

SEQ ID NO: 1913492 - RNA, 16 nt, Human
acuggggccuccagaa

SEQ ID NO: 1913493 - RNA, 15 nt, Human
acuggguacuugugg

SEQ ID NO: 1913494 - RNA, 17 nt, Human
acuggggccuccagaac

SEQ ID NO: 1913495 - RNA, 14 nt, Human
ucgcuccugugucu

SEQ ID NO: 1913496 - RNA, 18 nt, Human
ucgcccuggacugugugc

SEQ ID NO: 1913497 - RNA, 13 nt, Human
ucgcccucccagg

SEQ ID NO: 1913498 - RNA, 17 nt, Human
ucgcccucccaggcucu

SEQ ID NO: 1913499 - RNA, 14 nt, Human
ucgcccucccaggc

SEQ ID NO: 1913500 - RNA, 17 nt, Human
acugaaauauacacaca

SEQ ID NO: 1913501 - RNA, 15 nt, Human
acugaaauauacaca

SEQ ID NO: 1913502 - RNA, 16 nt, Human
acugaaauauacacac

SEQ ID NO: 1913503 - RNA, 14 nt, Human
ucgccccagcaggu

SEQ ID NO: 1913504 - RNA, 20 nt, Human
ucgccccagcaggugcugac

SEQ ID NO: 1913505 - RNA, 20 nt, Human
acuuugccuuuccauaauca

SEQ ID NO: 1913506 - RNA, 23 nt, Human
acuuugaggguguauauuuucug

SEQ ID NO: 1913507 - RNA, 19 nt, Human
acuuuguauaaaagggacu

SEQ ID NO: 1913508 - RNA, 23 nt, Human
acuuuggaaagaguaggaagacu

SEQ ID NO: 1913509 - RNA, 12 nt, Human
acuuuggaaaga

SEQ ID NO: 1913510 - RNA, 13 nt, Human
acuuuggaaagag

SEQ ID NO: 1913511 - RNA, 14 nt, Human
acuuuggaaagagu

SEQ ID NO: 1913512 - RNA, 19 nt, Human
acuuucuuuucuggaaugu

SEQ ID NO: 1913513 - RNA, 15 nt, Human
acuuucuuuucugga

SEQ ID NO: 1913514 - RNA, 13 nt, Human
acuuuagggaagu

SEQ ID NO: 1913515 - RNA, 14 nt, Human
acuuguggacacag

SEQ ID NO: 1913516 - RNA, 17 nt, Human
acuugugauuauuuauu

SEQ ID NO: 1913517 - RNA, 20 nt, Human
acuugugauuauuuauuauu

SEQ ID NO: 1913518 - RNA, 16 nt, Human
acuugugauuauuuau

SEQ ID NO: 1913519 - RNA, 16 nt, Human
acuuuaaaaggagcca

SEQ ID NO: 1913520 - RNA, 15 nt, Human
acuuguggacacagc

SEQ ID NO: 1913521 - RNA, 22 nt, Human
acuuguuuuauuuaaccucuaa

SEQ ID NO: 1913522 - RNA, 16 nt, Human
acuuuguguucaccuu

SEQ ID NO: 1913523 - RNA, 10 nt, Human
acuuugugcu

SEQ ID NO: 1913524 - RNA, 20 nt, Human
acuuugucgcccaggcugga

SEQ ID NO: 1913525 - RNA, 18 nt, Human
acuuuguguucaccuugu

SEQ ID NO: 1913526 - RNA, 20 nt, Human
ucuccuuaaagaguguggca

SEQ ID NO: 1913527 - RNA, 21 nt, Human
ucuccuuagaaguggaaguag

SEQ ID NO: 1913528 - RNA, 15 nt, Human
ucuccuuagaagugg

SEQ ID NO: 1913529 - RNA, 21 nt, Human
ucuccuuggugucgggcauga

SEQ ID NO: 1913530 - RNA, 23 nt, Human
ucuccuuggugucgggcaugaca

SEQ ID NO: 1913531 - RNA, 17 nt, Human
ucucgcucuguugccca

SEQ ID NO: 1913532 - RNA, 21 nt, Human
ucucggaacugcaugcugcug

SEQ ID NO: 1913533 - RNA, 22 nt, Human
ucucucacuuguuuuauuuaac

SEQ ID NO: 1913534 - RNA, 21 nt, Human
ucucucacuuguuuuauuuaa

SEQ ID NO: 1913535 - RNA, 12 nt, Human
ucucucaggcca

SEQ ID NO: 1913536 - RNA, 14 nt, Human
ucucuccauucccg

SEQ ID NO: 1913537 - RNA, 21 nt, Human
ucucucaggccaaacucaccu

SEQ ID NO: 1913538 - RNA, 19 nt, Human
ucucugcaggucccuaaua

SEQ ID NO: 1913539 - RNA, 20 nt, Human
ucucugcaggucccuaauaa

SEQ ID NO: 1913540 - RNA, 21 nt, Human
ucucugcaggucccuaauaaa

SEQ ID NO: 1913541 - RNA, 22 nt, Human
ucucugcaggucccuaauaaag

SEQ ID NO: 1913542 - RNA, 16 nt, Human
ucucuugguccugcug

SEQ ID NO: 1913543 - RNA, 17 nt, Human
ucucuugguccugcugc

SEQ ID NO: 1913544 - RNA, 18 nt, Human
ucucuugguccugcugca

SEQ ID NO: 1913545 - RNA, 19 nt, Human
agaaaaaauauuuucccua

SEQ ID NO: 1913546 - RNA, 17 nt, Human
agaaaaaauauuuuccu

SEQ ID NO: 1913547 - RNA, 23 nt, Human
agaaaaaauauuuuccugccagg

SEQ ID NO: 1913548 - RNA, 18 nt, Human
agaaaaaugagccuggca

SEQ ID NO: 1913549 - RNA, 12 nt, Human
agaaaagauuuu

SEQ ID NO: 1913550 - RNA, 15 nt, Human
agaaaagauuuuaau

SEQ ID NO: 1913551 - RNA, 18 nt, Human
agaaaagauuuuaaucaa

SEQ ID NO: 1913552 - RNA, 20 nt, Human
agaaaagauuuuaaucaagu

SEQ ID NO: 1913553 - RNA, 22 nt, Human
agaaacuguucccaccugcugg

SEQ ID NO: 1913554 - RNA, 15 nt, Human
agaaacuguucccac

SEQ ID NO: 1913555 - RNA, 21 nt, Human
agaaacuguucccaccugcug

SEQ ID NO: 1913556 - RNA, 12 nt, Human
agaaaugaaaaa

SEQ ID NO: 1913557 - RNA, 13 nt, Human
agaaaugaaaaaa

SEQ ID NO: 1913558 - RNA, 16 nt, Human
agaaaugaaaaaauau

SEQ ID NO: 1913559 - RNA, 21 nt, Human
agaaaugcugguuuuucaguu

SEQ ID NO: 1913560 - RNA, 20 nt, Human
agaaaugcugguuuuucagu

SEQ ID NO: 1913561 - RNA, 20 nt, Human
agaaaugggacuuaacuccu

SEQ ID NO: 1913562 - RNA, 15 nt, Human
agaaaugccuuaccc

SEQ ID NO: 1913563 - RNA, 18 nt, Human
ucugaaggcuggguucug

SEQ ID NO: 1913564 - RNA, 20 nt, Human
ucugaaggguaauuauauag

SEQ ID NO: 1913565 - RNA, 20 nt, Human
agaaagcagaacagugauua

SEQ ID NO: 1913566 - RNA, 18 nt, Human
agaaagcagaacagugau

SEQ ID NO: 1913567 - RNA, 17 nt, Human
agaaagcagaacaguga

SEQ ID NO: 1913568 - RNA, 20 nt, Human
agaaagacuaucuaaauguu

SEQ ID NO: 1913569 - RNA, 22 nt, Human
agaaagacuaucuaaauguuga

SEQ ID NO: 1913570 - RNA, 18 nt, Human
agaaagacagagcuggga

SEQ ID NO: 1913571 - RNA, 19 nt, Human
agaagcucucgggcuagga

SEQ ID NO: 1913572 - RNA, 22 nt, Human
agaagcuccucuccccagccca

SEQ ID NO: 1913573 - RNA, 23 nt, Human
agaagcuccucuccccagcccag

SEQ ID NO: 1913574 - RNA, 16 nt, Human
agaaggagacaggcag

SEQ ID NO: 1913575 - RNA, 14 nt, Human
agaagcuccucucc

SEQ ID NO: 1913576 - RNA, 17 nt, Human
agaagcuccucucccca

SEQ ID NO: 1913577 - RNA, 18 nt, Human
agaagcuccucuccccag

SEQ ID NO: 1913578 - RNA, 20 nt, Human
agaagcuccucuccccagcc

SEQ ID NO: 1913579 - RNA, 11 nt, Human
agaaggcaaaa

SEQ ID NO: 1913580 - RNA, 22 nt, Human
agaaguuugagaucagccuggg

SEQ ID NO: 1913581 - RNA, 20 nt, Human
agaauagccacauuuggaau

SEQ ID NO: 1913582 - RNA, 19 nt, Human
agaauagccacauuuggaa

SEQ ID NO: 1913583 - RNA, 21 nt, Human
agaauagccacauuuggaaua

SEQ ID NO: 1913584 - RNA, 20 nt, Human
agaauaguugaaccuauuuc

SEQ ID NO: 1913585 - RNA, 16 nt, Human
agaauauaaaaaacuu

SEQ ID NO: 1913586 - RNA, 21 nt, Human
agaauaguugaaccuauuucu

SEQ ID NO: 1913587 - RNA, 23 nt, Human
agaauaguugaaccuauuucucu

SEQ ID NO: 1913588 - RNA, 13 nt, Human
agaauauaauacu

SEQ ID NO: 1913589 - RNA, 13 nt, Human
agaauaaacuggc

SEQ ID NO: 1913590 - RNA, 10 nt, Human
ucuggccuuc

SEQ ID NO: 1913591 - RNA, 17 nt, Human
agaagccugaugcugac

SEQ ID NO: 1913592 - RNA, 21 nt, Human
agaagccugaugcugacauuc

SEQ ID NO: 1913593 - RNA, 18 nt, Human
ucuggcagcucagagagg

SEQ ID NO: 1913594 - RNA, 21 nt, Human
ucuggcagcucagagagggug

SEQ ID NO: 1913595 - RNA, 13 nt, Human
ucuggccucccac

SEQ ID NO: 1913596 - RNA, 14 nt, Human
ucuggccucccaca

SEQ ID NO: 1913597 - RNA, 17 nt, Human
ucuggcagcucagagag

SEQ ID NO: 1913598 - RNA, 20 nt, Human
ucuggcagaguugaagacag

SEQ ID NO: 1913599 - RNA, 23 nt, Human
ucuggcagaguugaagacagagc

SEQ ID NO: 1913600 - RNA, 16 nt, Human
ucugccuguggaacug

SEQ ID NO: 1913601 - RNA, 22 nt, Human
ucugcuuugggguuuaucagaa

SEQ ID NO: 1913602 - RNA, 17 nt, Human
ucuggaaccucagccug

SEQ ID NO: 1913603 - RNA, 21 nt, Human
ucuggcaaagcuuuuagaaau

SEQ ID NO: 1913604 - RNA, 13 nt, Human
ucuggaaguccaa

SEQ ID NO: 1913605 - RNA, 23 nt, Human
ucuggaaccucagccuggccaga

SEQ ID NO: 1913606 - RNA, 18 nt, Human
ucuggaaccucagccugg

SEQ ID NO: 1913607 - RNA, 19 nt, Human
ucuggaaccucagccuggc

SEQ ID NO: 1913608 - RNA, 20 nt, Human
ucuggaaccucagccuggcc

SEQ ID NO: 1913609 - RNA, 21 nt, Human
ucuggaaccucagccuggcca

SEQ ID NO: 1913610 - RNA, 21 nt, Human
ucugcaggucccuaauaaagc

SEQ ID NO: 1913611 - RNA, 19 nt, Human
ucugcaggucccuaauaaa

SEQ ID NO: 1913612 - RNA, 22 nt, Human
ucugcaggucccuaauaaagcu

SEQ ID NO: 1913613 - RNA, 23 nt, Human
ucugcaggucccuaauaaagcug

SEQ ID NO: 1913614 - RNA, 12 nt, Human
agaaauuaugug

SEQ ID NO: 1913615 - RNA, 13 nt, Human
agaaccuggaacu

SEQ ID NO: 1913616 - RNA, 20 nt, Human
agaaccuggaacuuggggag

SEQ ID NO: 1913617 - RNA, 21 nt, Human
agaaccuggaacuuggggagu

SEQ ID NO: 1913618 - RNA, 15 nt, Human
ucugcaguaaaucuu

SEQ ID NO: 1913619 - RNA, 21 nt, Human
agaacugaauuuugucuuuau

SEQ ID NO: 1913620 - RNA, 16 nt, Human
agaacucccuuucaac

SEQ ID NO: 1913621 - RNA, 15 nt, Human
agaacucccuuucaa

SEQ ID NO: 1913622 - RNA, 17 nt, Human
agaacucccuuucaaca

SEQ ID NO: 1913623 - RNA, 20 nt, Human
agaacucaaauggggccaga

SEQ ID NO: 1913624 - RNA, 14 nt, Human
agaacucacugggg

SEQ ID NO: 1913625 - RNA, 16 nt, Human
agaacucacuggggcc

SEQ ID NO: 1913626 - RNA, 19 nt, Human
agaaccuuuugagugccuu

SEQ ID NO: 1913627 - RNA, 23 nt, Human
agaaccuuuugagugccuuacac

SEQ ID NO: 1913628 - RNA, 19 nt, Human
agaacucaaauggggccag

SEQ ID NO: 1913629 - RNA, 12 nt, Human
ucugcccuuggu

SEQ ID NO: 1913630 - RNA, 23 nt, Human
ucugcccuugguuaggcauugug

SEQ ID NO: 1913631 - RNA, 15 nt, Human
ucugccccauccucc

SEQ ID NO: 1913632 - RNA, 18 nt, Human
ucugccccauccuccagc

SEQ ID NO: 1913633 - RNA, 19 nt, Human
ucugccccauccuccagca

SEQ ID NO: 1913634 - RNA, 21 nt, Human
ucugccccauccuccagcagg

SEQ ID NO: 1913635 - RNA, 23 nt, Human
ucugcccacucccugcaaccuga

SEQ ID NO: 1913636 - RNA, 20 nt, Human
ucugcccauccugccccuga

SEQ ID NO: 1913637 - RNA, 23 nt, Human
agaagcccaggaaaggcuccagg

SEQ ID NO: 1913638 - RNA, 12 nt, Human
agaagcccccag

SEQ ID NO: 1913639 - RNA, 14 nt, Human
agaagcccccagcu

SEQ ID NO: 1913640 - RNA, 17 nt, Human
agaagcccccagcuaag

SEQ ID NO: 1913641 - RNA, 23 nt, Human
agaagcccccagcuaagaaccug

SEQ ID NO: 1913642 - RNA, 24 nt, Human
agaagcccccagcuaagaaccugg

SEQ ID NO: 1913643 - RNA, 19 nt, Human
agaagcaacccaaauguuc

SEQ ID NO: 1913644 - RNA, 16 nt, Human
agaagcagaggaagga

SEQ ID NO: 1913645 - RNA, 15 nt, Human
agaacuuuauuucca

SEQ ID NO: 1913646 - RNA, 18 nt, Human
agaacuuucauuuuuuuc

SEQ ID NO: 1913647 - RNA, 16 nt, Human
agaacuuucauuuuuu

SEQ ID NO: 1913648 - RNA, 15 nt, Human
agaacuuucauuuuu

SEQ ID NO: 1913649 - RNA, 14 nt, Human
agaacuuucauuuu

SEQ ID NO: 1913650 - RNA, 12 nt, Human
agaagcagcucu

SEQ ID NO: 1913651 - RNA, 13 nt, Human
agaagcagcucuu

SEQ ID NO: 1913652 - RNA, 15 nt, Human
agaagcauacaacuu

SEQ ID NO: 1913653 - RNA, 18 nt, Human
agaagcccaauauuauaa

SEQ ID NO: 1913654 - RNA, 22 nt, Human
agaagccaggaauuucccagga

SEQ ID NO: 1913655 - RNA, 21 nt, Human
agaagccacaggccugagauu

SEQ ID NO: 1913656 - RNA, 19 nt, Human
agaagccacaggccugaga

SEQ ID NO: 1913657 - RNA, 12 nt, Human
agaagccaggaa

SEQ ID NO: 1913658 - RNA, 13 nt, Human
agaagccaggaau

SEQ ID NO: 1913659 - RNA, 20 nt, Human
ugaaaaucuuauaauuuaaa

SEQ ID NO: 1913660 - RNA, 19 nt, Human
ugaaaaucgugacaacacu

SEQ ID NO: 1913661 - RNA, 17 nt, Human
ugaaaauguauguguaa

SEQ ID NO: 1913662 - RNA, 16 nt, Human
ugaaacgcaaccacca

SEQ ID NO: 1913663 - RNA, 12 nt, Human
ugaaacuuggau

SEQ ID NO: 1913664 - RNA, 16 nt, Human
ugaaaaucgugacaac

SEQ ID NO: 1913665 - RNA, 14 nt, Human
ugaaaauauuuaaa

SEQ ID NO: 1913666 - RNA, 13 nt, Human
ugaaaauauuuaa

SEQ ID NO: 1913667 - RNA, 12 nt, Human
ugaaaauauuua

SEQ ID NO: 1913668 - RNA, 11 nt, Human
ugaaaauauuu

SEQ ID NO: 1913669 - RNA, 16 nt, Human
ugaaaaggcaaaaagc

SEQ ID NO: 1913670 - RNA, 20 nt, Human
ugaaaaaggaggaagagaaa

SEQ ID NO: 1913671 - RNA, 22 nt, Human
ugaaaaaggaggaagagaaaaa

SEQ ID NO: 1913672 - RNA, 22 nt, Human
ugaaaaaguauccugcuucuga

SEQ ID NO: 1913673 - RNA, 22 nt, Human
ugaaaaaguucugcagauaaac

SEQ ID NO: 1913674 - RNA, 23 nt, Human
ugaaaaaauauauaucaaauaua

SEQ ID NO: 1913675 - RNA, 16 nt, Human
ugaaaaaggaggaaga

SEQ ID NO: 1913676 - RNA, 9 nt, Human
ugaaaaaga

SEQ ID NO: 1913677 - RNA, 12 nt, Human
ucuuuuacaacu

SEQ ID NO: 1913678 - RNA, 21 nt, Human
ucuuucugcagaaacagaaag

SEQ ID NO: 1913679 - RNA, 10 nt, Human
ucuuucugua

SEQ ID NO: 1913680 - RNA, 21 nt, Human
ucuuucuggcuaugcauuuga

SEQ ID NO: 1913681 - RNA, 20 nt, Human
ucuuucuggcuaugcauuug

SEQ ID NO: 1913682 - RNA, 14 nt, Human
ucuuucugauaacu

SEQ ID NO: 1913683 - RNA, 20 nt, Human
ucuuucugauaacuagaugg

SEQ ID NO: 1913684 - RNA, 23 nt, Human
ucuuucugauaacuagauggugc

SEQ ID NO: 1913685 - RNA, 22 nt, Human
ucuuuggugaacauugcaauag

SEQ ID NO: 1913686 - RNA, 17 nt, Human
ucuuugugucaacauga

SEQ ID NO: 1913687 - RNA, 19 nt, Human
ucuuugguuuaauuuaaag

SEQ ID NO: 1913688 - RNA, 16 nt, Human
ucuuuggugaacauug

SEQ ID NO: 1913689 - RNA, 22 nt, Human
ucuuuggucuacacugugcuga

SEQ ID NO: 1913690 - RNA, 17 nt, Human
agagacauacuugaagg

SEQ ID NO: 1913691 - RNA, 22 nt, Human
agagacauacuugaagggccag

SEQ ID NO: 1913692 - RNA, 23 nt, Human
agagacauacuugaagggccaga

SEQ ID NO: 1913693 - RNA, 23 nt, Human
agagacaguugggugagaacaac

SEQ ID NO: 1913694 - RNA, 20 nt, Human
agagacaguugggugagaac

SEQ ID NO: 1913695 - RNA, 22 nt, Human
agagacaguugggugagaacaa

SEQ ID NO: 1913696 - RNA, 22 nt, Human
agagaucaaccccuucgcuccu

SEQ ID NO: 1913697 - RNA, 23 nt, Human
agagacuccugcaggcagccagg

SEQ ID NO: 1913698 - RNA, 19 nt, Human
agagcaagacgcugugcug

SEQ ID NO: 1913699 - RNA, 23 nt, Human
agagcaagacgcugugcugcccu

SEQ ID NO: 1913700 - RNA, 13 nt, Human
ugaaagacuguac

SEQ ID NO: 1913701 - RNA, 15 nt, Human
ugaaagacuguacaa

SEQ ID NO: 1913702 - RNA, 12 nt, Human
ugaaacuuuugg

SEQ ID NO: 1913703 - RNA, 11 nt, Human
agagacuccug

SEQ ID NO: 1913704 - RNA, 17 nt, Human
agagacuccugcaggca

SEQ ID NO: 1913705 - RNA, 18 nt, Human
agagacuccugcaggcag

SEQ ID NO: 1913706 - RNA, 19 nt, Human
agagacuccugcaggcagc

SEQ ID NO: 1913707 - RNA, 20 nt, Human
agagacuccugcaggcagcc

SEQ ID NO: 1913708 - RNA, 21 nt, Human
agagacuccugcaggcagcca

SEQ ID NO: 1913709 - RNA, 22 nt, Human
agagacuccugcaggcagccag

SEQ ID NO: 1913710 - RNA, 22 nt, Human
agagcaccuuagacagucccug

SEQ ID NO: 1913711 - RNA, 21 nt, Human
agagcaccuuagacagucccu

SEQ ID NO: 1913712 - RNA, 23 nt, Human
agagcaccuuagacagucccugc

SEQ ID NO: 1913713 - RNA, 14 nt, Human
agagcaagacucug

SEQ ID NO: 1913714 - RNA, 22 nt, Human
agagccaggggggugaggagcu

SEQ ID NO: 1913715 - RNA, 14 nt, Human
agagcugccaccug

SEQ ID NO: 1913716 - RNA, 11 nt, Human
agagcugaggc

SEQ ID NO: 1913717 - RNA, 20 nt, Human
agagcuagcagcagggaggg

SEQ ID NO: 1913718 - RNA, 23 nt, Human
agagccaggggggugaggagcug

SEQ ID NO: 1913719 - RNA, 13 nt, Human
agagccuuccagg

SEQ ID NO: 1913720 - RNA, 15 nt, Human
agagccuuccagggg

SEQ ID NO: 1913721 - RNA, 17 nt, Human
agagccuuccaggggug

SEQ ID NO: 1913722 - RNA, 22 nt, Human
agagccuuccaggggugggaca

SEQ ID NO: 1913723 - RNA, 13 nt, Human
agaccuguaauca

SEQ ID NO: 1913724 - RNA, 23 nt, Human
agaccuggcagcucuggacagcc

SEQ ID NO: 1913725 - RNA, 17 nt, Human
agaccuggcagcucugg

SEQ ID NO: 1913726 - RNA, 18 nt, Human
agaccuggcagcucugga

SEQ ID NO: 1913727 - RNA, 18 nt, Human
agaccuguuagcagacag

SEQ ID NO: 1913728 - RNA, 15 nt, Human
agaccugucuccugg

SEQ ID NO: 1913729 - RNA, 16 nt, Human
agaccugucuccuggc

SEQ ID NO: 1913730 - RNA, 14 nt, Human
agaccugucuccug

SEQ ID NO: 1913731 - RNA, 11 nt, Human
agaccuggcag

SEQ ID NO: 1913732 - RNA, 14 nt, Human
agaccuggcagcuc

SEQ ID NO: 1913733 - RNA, 15 nt, Human
agaccuggcagcucu

SEQ ID NO: 1913734 - RNA, 16 nt, Human
agaccuggcagcucug

SEQ ID NO: 1913735 - RNA, 11 nt, Human
agaccuucucc

SEQ ID NO: 1913736 - RNA, 19 nt, Human
agaccuguuagcagacagg

SEQ ID NO: 1913737 - RNA, 15 nt, Human
agaccuucuccuuca

SEQ ID NO: 1913738 - RNA, 18 nt, Human
agaccuucuccuucaccu

SEQ ID NO: 1913739 - RNA, 21 nt, Human
agaccuucuccuucaccuuug

SEQ ID NO: 1913740 - RNA, 23 nt, Human
agaccuucuccuucaccuuuguc

SEQ ID NO: 1913741 - RNA, 16 nt, Human
ucuugagccuugaacu

SEQ ID NO: 1913742 - RNA, 13 nt, Human
ucuugagccuggg

SEQ ID NO: 1913743 - RNA, 16 nt, Human
ucuugagccugggagg

SEQ ID NO: 1913744 - RNA, 23 nt, Human
agacucaggccaagaaacgucuu

SEQ ID NO: 1913745 - RNA, 19 nt, Human
agacucaggccaagaaacg

SEQ ID NO: 1913746 - RNA, 20 nt, Human
agacucaggccaagaaacgu

SEQ ID NO: 1913747 - RNA, 13 nt, Human
ucuugauucauaa

SEQ ID NO: 1913748 - RNA, 14 nt, Human
ucuugauuauccau

SEQ ID NO: 1913749 - RNA, 23 nt, Human
ucuugauuauccauauugaguca

SEQ ID NO: 1913750 - RNA, 21 nt, Human
ucuugaugccuggcggggugg

SEQ ID NO: 1913751 - RNA, 22 nt, Human
ucuugcaauggcagccuuggca

SEQ ID NO: 1913752 - RNA, 18 nt, Human
ucuugcaauggcagccuu

SEQ ID NO: 1913753 - RNA, 19 nt, Human
ucuugcaauggcagccuug

SEQ ID NO: 1913754 - RNA, 17 nt, Human
ucuuggcuuggugagga

SEQ ID NO: 1913755 - RNA, 17 nt, Human
ucuuggucagauuugaa

SEQ ID NO: 1913756 - RNA, 14 nt, Human
ucuugguccugcug

SEQ ID NO: 1913757 - RNA, 13 nt, Human
ucuugggaacuga

SEQ ID NO: 1913758 - RNA, 14 nt, Human
ucuugggaacugaa

SEQ ID NO: 1913759 - RNA, 21 nt, Human
ucuuuauuaaauguagaaagu

SEQ ID NO: 1913760 - RNA, 17 nt, Human
ucuuuauuaaauguaga

SEQ ID NO: 1913761 - RNA, 16 nt, Human
ucuuuaugauuuuuaa

SEQ ID NO: 1913762 - RNA, 15 nt, Human
ucuuuauguugaguc

SEQ ID NO: 1913763 - RNA, 16 nt, Human
ucuuuauuaaucacua

SEQ ID NO: 1913764 - RNA, 17 nt, Human
ucuuuccugaggcuggg

SEQ ID NO: 1913765 - RNA, 15 nt, Human
ucuugguccugcugc

SEQ ID NO: 1913766 - RNA, 17 nt, Human
ucuugguccugcugcag

SEQ ID NO: 1913767 - RNA, 16 nt, Human
ucuuuaaaugcugcuu

SEQ ID NO: 1913768 - RNA, 19 nt, Human
ucuugguccugcugcaguu

SEQ ID NO: 1913769 - RNA, 16 nt, Human
ucuucugggcacccuc

SEQ ID NO: 1913770 - RNA, 19 nt, Human
ucuucugcuucagccuccc

SEQ ID NO: 1913771 - RNA, 12 nt, Human
ucuucugcuuca

SEQ ID NO: 1913772 - RNA, 21 nt, Human
ucuucugaacuuggcgcugcc

SEQ ID NO: 1913773 - RNA, 20 nt, Human
ucuucuguacgucugacagg

SEQ ID NO: 1913774 - RNA, 15 nt, Human
ucuucuguacgucug

SEQ ID NO: 1913775 - RNA, 20 nt, Human
ucuucuguggguuucuaaag

SEQ ID NO: 1913776 - RNA, 18 nt, Human
agacaucaacagauaaau

SEQ ID NO: 1913777 - RNA, 17 nt, Human
agacaucaacagauaaa

SEQ ID NO: 1913778 - RNA, 19 nt, Human
agacauacuaaccagcaga

SEQ ID NO: 1913779 - RNA, 21 nt, Human
agacauagaauuaacacauga

SEQ ID NO: 1913780 - RNA, 15 nt, Human
agacauuggcaccua

SEQ ID NO: 1913781 - RNA, 12 nt, Human
agacauugcacc

SEQ ID NO: 1913782 - RNA, 19 nt, Human
agacccccuggagacuaac

SEQ ID NO: 1913783 - RNA, 15 nt, Human
agacccccuggagac

SEQ ID NO: 1913784 - RNA, 14 nt, Human
agacccccuggaga

SEQ ID NO: 1913785 - RNA, 13 nt, Human
agacccccuggag

SEQ ID NO: 1913786 - RNA, 21 nt, Human
ucuuccaggcugggagagccu

SEQ ID NO: 1913787 - RNA, 13 nt, Human
ucuucacaaaauc

SEQ ID NO: 1913788 - RNA, 20 nt, Human
ucuucagagacuccugcagg

SEQ ID NO: 1913789 - RNA, 15 nt, Human
ucuuccaggcuggga

SEQ ID NO: 1913790 - RNA, 17 nt, Human
ucuuccaggcugggaga

SEQ ID NO: 1913791 - RNA, 20 nt, Human
ucuuccaggcugggagagcc

SEQ ID NO: 1913792 - RNA, 17 nt, Human
ucuucagagacuccugc

SEQ ID NO: 1913793 - RNA, 18 nt, Human
ucuucagagacuccugca

SEQ ID NO: 1913794 - RNA, 12 nt, Human
ucuucagagacu

SEQ ID NO: 1913795 - RNA, 20 nt, Human
ucuucaaccagggauuguuu

SEQ ID NO: 1913796 - RNA, 14 nt, Human
agaaucacuugaac

SEQ ID NO: 1913797 - RNA, 15 nt, Human
ucuuccucccucccu

SEQ ID NO: 1913798 - RNA, 14 nt, Human
ucuuccucccuccc

SEQ ID NO: 1913799 - RNA, 19 nt, Human
ucuucccuacaguugaaaa

SEQ ID NO: 1913800 - RNA, 22 nt, Human
ucuucccuacaguugaaaaaca

SEQ ID NO: 1913801 - RNA, 13 nt, Human
ucuucccauucuc

SEQ ID NO: 1913802 - RNA, 14 nt, Human
ucuucccauucucc

SEQ ID NO: 1913803 - RNA, 15 nt, Human
ucuucccauucucca

SEQ ID NO: 1913804 - RNA, 19 nt, Human
ucuucccauucuccauuug

SEQ ID NO: 1913805 - RNA, 15 nt, Human
ugaauacuuuauaaa

SEQ ID NO: 1913806 - RNA, 14 nt, Human
ugaagucacacagu

SEQ ID NO: 1913807 - RNA, 22 nt, Human
ugaaggguaauuauauaguuac

SEQ ID NO: 1913808 - RNA, 13 nt, Human
ugaauaaagugcu

SEQ ID NO: 1913809 - RNA, 16 nt, Human
ugaauaaauaaaugua

SEQ ID NO: 1913810 - RNA, 16 nt, Human
ugaauacuuuuuacaa

SEQ ID NO: 1913811 - RNA, 14 nt, Human
ugaauauaaacacu

SEQ ID NO: 1913812 - RNA, 11 nt, Human
ugaauguauuu

SEQ ID NO: 1913813 - RNA, 23 nt, Human
ugaauguaugcuucauacaggga

SEQ ID NO: 1913814 - RNA, 20 nt, Human
ugaauguaugcuucauacag

SEQ ID NO: 1913815 - RNA, 19 nt, Human
ugaauguaugcuucauaca

SEQ ID NO: 1913816 - RNA, 14 nt, Human
ugaauguaugcuuc

SEQ ID NO: 1913817 - RNA, 15 nt, Human
agagguuaagguggg

SEQ ID NO: 1913818 - RNA, 18 nt, Human
agagggaggcaagcccug

SEQ ID NO: 1913819 - RNA, 16 nt, Human
agagguggggagcaga

SEQ ID NO: 1913820 - RNA, 23 nt, Human
agaggugugcaagagagggaugc

SEQ ID NO: 1913821 - RNA, 22 nt, Human
agaggugugcaagagagggaug

SEQ ID NO: 1913822 - RNA, 20 nt, Human
ugaagcuaucguaaaauuaa

SEQ ID NO: 1913823 - RNA, 14 nt, Human
ugaagcuacugugu

SEQ ID NO: 1913824 - RNA, 22 nt, Human
ugaagcuacugugugugugaau

SEQ ID NO: 1913825 - RNA, 18 nt, Human
ugaagggccagagccagg

SEQ ID NO: 1913826 - RNA, 19 nt, Human
ugaagggccagagccaggg

SEQ ID NO: 1913827 - RNA, 22 nt, Human
ugaaggggccaaggagggugag

SEQ ID NO: 1913828 - RNA, 10 nt, Human
ugaaggggcg

SEQ ID NO: 1913829 - RNA, 18 nt, Human
ugaagccuuucuuuugga

SEQ ID NO: 1913830 - RNA, 19 nt, Human
ugaagccaauucagacagg

SEQ ID NO: 1913831 - RNA, 16 nt, Human
agagggaggcaagccc

SEQ ID NO: 1913832 - RNA, 17 nt, Human
agagggaggcaagcccu

SEQ ID NO: 1913833 - RNA, 16 nt, Human
agagggagggagggcu

SEQ ID NO: 1913834 - RNA, 14 nt, Human
agaggcccucugga

SEQ ID NO: 1913835 - RNA, 18 nt, Human
agaggcccucuggagugg

SEQ ID NO: 1913836 - RNA, 16 nt, Human
ugaaaguccagaaacu

SEQ ID NO: 1913837 - RNA, 18 nt, Human
ugaaaguccagaaacugu

SEQ ID NO: 1913838 - RNA, 12 nt, Human
agaggccccagc

SEQ ID NO: 1913839 - RNA, 13 nt, Human
agaggccccagcc

SEQ ID NO: 1913840 - RNA, 14 nt, Human
agaggccccagccu

SEQ ID NO: 1913841 - RNA, 15 nt, Human
agaggccccagccuc

SEQ ID NO: 1913842 - RNA, 16 nt, Human
agaggccccagccucc

SEQ ID NO: 1913843 - RNA, 23 nt, Human
agaggccccagccucccugaagc

SEQ ID NO: 1913844 - RNA, 22 nt, Human
ugacacauaugcaccuuguguc

SEQ ID NO: 1913845 - RNA, 21 nt, Human
ugacacauaugcaccuugugu

SEQ ID NO: 1913846 - RNA, 18 nt, Human
ugacacaggucuuuccua

SEQ ID NO: 1913847 - RNA, 20 nt, Human
ugacacaugcaaggucauuu

SEQ ID NO: 1913848 - RNA, 12 nt, Human
ugacacaugcaa

SEQ ID NO: 1913849 - RNA, 18 nt, Human
ugacacacagcucugucc

SEQ ID NO: 1913850 - RNA, 16 nt, Human
ugacacacagcucugu

SEQ ID NO: 1913851 - RNA, 19 nt, Human
ugacaaagacugaguacgu

SEQ ID NO: 1913852 - RNA, 23 nt, Human
ugacacagaaaauguugagaauc

SEQ ID NO: 1913853 - RNA, 19 nt, Human
ugacacacagcucuguccu

SEQ ID NO: 1913854 - RNA, 23 nt, Human
ugacacagucuuggcucacugca

SEQ ID NO: 1913855 - RNA, 22 nt, Human
ugacacagucuuggcucacugc

SEQ ID NO: 1913856 - RNA, 16 nt, Human
ugacacaggucuuucc

SEQ ID NO: 1913857 - RNA, 17 nt, Human
ugacacaggucuuuccu

SEQ ID NO: 1913858 - RNA, 23 nt, Human
ugaauuugugaagguggaaauaa

SEQ ID NO: 1913859 - RNA, 23 nt, Human
ugaauuucuuuugccguuauuaa

SEQ ID NO: 1913860 - RNA, 13 nt, Human
ugaauuugugaag

SEQ ID NO: 1913861 - RNA, 21 nt, Human
ugaauuugugaagguggaaau

SEQ ID NO: 1913862 - RNA, 18 nt, Human
agauaauacaccacuaca

SEQ ID NO: 1913863 - RNA, 17 nt, Human
agauaaggguaucuggu

SEQ ID NO: 1913864 - RNA, 13 nt, Human
agauaacuaggaa

SEQ ID NO: 1913865 - RNA, 20 nt, Human
agaguuguuacauuuuuaag

SEQ ID NO: 1913866 - RNA, 19 nt, Human
agaguuguuacauuuuuaa

SEQ ID NO: 1913867 - RNA, 13 nt, Human
agaguuuccugaa

SEQ ID NO: 1913868 - RNA, 16 nt, Human
agaguuucaaccauga

SEQ ID NO: 1913869 - RNA, 17 nt, Human
agaguuguuacauuuuu

SEQ ID NO: 1913870 - RNA, 22 nt, Human
agagucagaaguuucugccgca

SEQ ID NO: 1913871 - RNA, 15 nt, Human
agagucacuggaaca

SEQ ID NO: 1913872 - RNA, 15 nt, Human
ugaauguauuuauuu

SEQ ID NO: 1913873 - RNA, 22 nt, Human
agauacaguuacucagaauucu

SEQ ID NO: 1913874 - RNA, 11 nt, Human
agauacuguau

SEQ ID NO: 1913875 - RNA, 20 nt, Human
agauacaggaaaagcugcug

SEQ ID NO: 1913876 - RNA, 13 nt, Human
agauacaguuacu

SEQ ID NO: 1913877 - RNA, 18 nt, Human
agauaauauuaaggaaga

SEQ ID NO: 1913878 - RNA, 22 nt, Human
agauaauauuaaggaagacaau

SEQ ID NO: 1913879 - RNA, 16 nt, Human
agauacuguaucauga

SEQ ID NO: 1913880 - RNA, 15 nt, Human
agauacuguaucaug

SEQ ID NO: 1913881 - RNA, 18 nt, Human
agaucaaaagguuaauaa

SEQ ID NO: 1913882 - RNA, 21 nt, Human
agauauuuugcuuugugauuu

SEQ ID NO: 1913883 - RNA, 20 nt, Human
agauauuuugcuuugugauu

SEQ ID NO: 1913884 - RNA, 20 nt, Human
ugagaagaaaauggaaccag

SEQ ID NO: 1913885 - RNA, 14 nt, Human
ugagaagaaaacau

SEQ ID NO: 1913886 - RNA, 17 nt, Human
ugagaagaaaacaucua

SEQ ID NO: 1913887 - RNA, 17 nt, Human
ugagaacuuuauuucca

SEQ ID NO: 1913888 - RNA, 14 nt, Human
agcaagauuucaga

SEQ ID NO: 1913889 - RNA, 22 nt, Human
ugagaagaaaauggaaccaggc

SEQ ID NO: 1913890 - RNA, 23 nt, Human
ugagaagaaaacaucuauucucu

SEQ ID NO: 1913891 - RNA, 20 nt, Human
ugagaagcagaggaaggaga

SEQ ID NO: 1913892 - RNA, 22 nt, Human
ugagaagauucuucccauucuc

SEQ ID NO: 1913893 - RNA, 23 nt, Human
ugagaagauucuucccauucucc

SEQ ID NO: 1913894 - RNA, 23 nt, Human
agcaagacgcugugcugcccugc

SEQ ID NO: 1913895 - RNA, 12 nt, Human
agcaagacucug

SEQ ID NO: 1913896 - RNA, 17 nt, Human
agcaagacuguuagccc

SEQ ID NO: 1913897 - RNA, 12 nt, Human
agcaagaggagg

SEQ ID NO: 1913898 - RNA, 17 nt, Human
agcaagacgcugugcug

SEQ ID NO: 1913899 - RNA, 20 nt, Human
agcaagacgcugugcugccc

SEQ ID NO: 1913900 - RNA, 21 nt, Human
agcaagacgcugugcugcccu

SEQ ID NO: 1913901 - RNA, 22 nt, Human
agcaagacgcugugcugcccug

SEQ ID NO: 1913902 - RNA, 13 nt, Human
agcaagacgcugu

SEQ ID NO: 1913903 - RNA, 16 nt, Human
agcaagacgcugugcu

SEQ ID NO: 1913904 - RNA, 16 nt, Human
agcaacucuugauuau

SEQ ID NO: 1913905 - RNA, 20 nt, Human
agcaacucuugauuauccau

SEQ ID NO: 1913906 - RNA, 14 nt, Human
agcaacucuugauu

SEQ ID NO: 1913907 - RNA, 21 nt, Human
agauuuugaaauuuuuauuaa

SEQ ID NO: 1913908 - RNA, 17 nt, Human
agauuugaacucuucaa

SEQ ID NO: 1913909 - RNA, 23 nt, Human
agauuuccagucuccaccaggaa

SEQ ID NO: 1913910 - RNA, 22 nt, Human
agauuggcucacacugagaaug

SEQ ID NO: 1913911 - RNA, 15 nt, Human
agauuuccagucucc

SEQ ID NO: 1913912 - RNA, 19 nt, Human
agauuggcucacacugaga

SEQ ID NO: 1913913 - RNA, 14 nt, Human
agauuggcucacac

SEQ ID NO: 1913914 - RNA, 22 nt, Human
agauucauauuuacuucuuaua

SEQ ID NO: 1913915 - RNA, 19 nt, Human
ugacuuacuguacaugaaa

SEQ ID NO: 1913916 - RNA, 17 nt, Human
agauucccaggaguucu

SEQ ID NO: 1913917 - RNA, 22 nt, Human
agauucccaggaguucugcuca

SEQ ID NO: 1913918 - RNA, 19 nt, Human
agauucccaggaguucugc

SEQ ID NO: 1913919 - RNA, 13 nt, Human
agauuggaaggaa

SEQ ID NO: 1913920 - RNA, 13 nt, Human
ugacuagugcuga

SEQ ID NO: 1913921 - RNA, 14 nt, Human
ugacucaagauucc

SEQ ID NO: 1913922 - RNA, 15 nt, Human
ugacucaagauuccc

SEQ ID NO: 1913923 - RNA, 16 nt, Human
ugacucaagauuccca

SEQ ID NO: 1913924 - RNA, 17 nt, Human
ugacucaagauucccag

SEQ ID NO: 1913925 - RNA, 18 nt, Human
ugacucaagauucccagg

SEQ ID NO: 1913926 - RNA, 19 nt, Human
ugacucaagauucccagga

SEQ ID NO: 1913927 - RNA, 20 nt, Human
ugacucaagauucccaggag

SEQ ID NO: 1913928 - RNA, 21 nt, Human
ugacucaagauucccaggagu

SEQ ID NO: 1913929 - RNA, 22 nt, Human
ugacucaagauucccaggaguu

SEQ ID NO: 1913930 - RNA, 17 nt, Human
ugaccuucuaggaagcu

SEQ ID NO: 1913931 - RNA, 17 nt, Human
ugaccuugaugagcugu

SEQ ID NO: 1913932 - RNA, 23 nt, Human
ugacuagaugauggaugccaaua

SEQ ID NO: 1913933 - RNA, 16 nt, Human
ugacuuacuguacaug

SEQ ID NO: 1913934 - RNA, 15 nt, Human
ugacuuacuguacau

SEQ ID NO: 1913935 - RNA, 13 nt, Human
ugacuuacuguac

SEQ ID NO: 1913936 - RNA, 19 nt, Human
ugacucacaccugaacuga

SEQ ID NO: 1913937 - RNA, 14 nt, Human
ugacucacaccuga

SEQ ID NO: 1913938 - RNA, 18 nt, Human
ugaccugaggcccuucuc

SEQ ID NO: 1913939 - RNA, 19 nt, Human
ugaccugaggcccuucucu

SEQ ID NO: 1913940 - RNA, 18 nt, Human
ugaccuuccaagagccug

SEQ ID NO: 1913941 - RNA, 20 nt, Human
ugaccuuccaagagccugag

SEQ ID NO: 1913942 - RNA, 19 nt, Human
ugaccuuccaagagccuga

SEQ ID NO: 1913943 - RNA, 20 nt, Human
ugaccugugagcccagcugg

SEQ ID NO: 1913944 - RNA, 14 nt, Human
ugacccaugcugcc

SEQ ID NO: 1913945 - RNA, 15 nt, Human
ugacccaugcugccc

SEQ ID NO: 1913946 - RNA, 21 nt, Human
ugacccaugcugcccugugag

SEQ ID NO: 1913947 - RNA, 12 nt, Human
ugacccaugcug

SEQ ID NO: 1913948 - RNA, 16 nt, Human
ugacccaugcugcccu

SEQ ID NO: 1913949 - RNA, 22 nt, Human
agauggaaguugcagugagcug

SEQ ID NO: 1913950 - RNA, 23 nt, Human
agauggaaguugcagugagcuga

SEQ ID NO: 1913951 - RNA, 14 nt, Human
agauguuuccagac

SEQ ID NO: 1913952 - RNA, 21 nt, Human
agauguuuccagacuuccuug

SEQ ID NO: 1913953 - RNA, 23 nt, Human
agauguuuccagacuuccuugag

SEQ ID NO: 1913954 - RNA, 16 nt, Human
agaugccgcauuugga

SEQ ID NO: 1913955 - RNA, 16 nt, Human
agaugcagggcaguca

SEQ ID NO: 1913956 - RNA, 10 nt, Human
agauggaaag

SEQ ID NO: 1913957 - RNA, 16 nt, Human
ugacacuuaaaaaugg

SEQ ID NO: 1913958 - RNA, 17 nt, Human
ugacacuuaaaaauggu

SEQ ID NO: 1913959 - RNA, 13 nt, Human
agaugcagggcag

SEQ ID NO: 1913960 - RNA, 20 nt, Human
agcaucacaugaacuuguaa

SEQ ID NO: 1913961 - RNA, 12 nt, Human
agcaucaggcca

SEQ ID NO: 1913962 - RNA, 13 nt, Human
agcaucaggccag

SEQ ID NO: 1913963 - RNA, 21 nt, Human
ugaucacggcucacugcagcc

SEQ ID NO: 1913964 - RNA, 20 nt, Human
ugaucacggcucacugcagc

SEQ ID NO: 1913965 - RNA, 22 nt, Human
agcauauucaggaagcucaggg

SEQ ID NO: 1913966 - RNA, 19 nt, Human
ugaucacggcucacugcag

SEQ ID NO: 1913967 - RNA, 21 nt, Human
ugaucaacaucuuuucuugcc

SEQ ID NO: 1913968 - RNA, 18 nt, Human
ugaucaacaucuuuucuu

SEQ ID NO: 1913969 - RNA, 17 nt, Human
ugaucaacaucuuuucu

SEQ ID NO: 1913970 - RNA, 14 nt, Human
ugaucaacaucuuu

SEQ ID NO: 1913971 - RNA, 23 nt, Human
ugaucaacaucuuuucuugccuc

SEQ ID NO: 1913972 - RNA, 18 nt, Human
ugaucaaagccacacucu

SEQ ID NO: 1913973 - RNA, 19 nt, Human
ugauauguugguagauucu

SEQ ID NO: 1913974 - RNA, 16 nt, Human
ugauaugugaacaguu

SEQ ID NO: 1913975 - RNA, 15 nt, Human
ugauaugugaacagu

SEQ ID NO: 1913976 - RNA, 19 nt, Human
ugauagacacauaugaggg

SEQ ID NO: 1913977 - RNA, 21 nt, Human
ugauagaaggcuauggggaua

SEQ ID NO: 1913978 - RNA, 16 nt, Human
ugauauuugugcauuu

SEQ ID NO: 1913979 - RNA, 17 nt, Human
ugauauuugugcauuuu

SEQ ID NO: 1913980 - RNA, 19 nt, Human
ugauauuugugcauuuucu

SEQ ID NO: 1913981 - RNA, 15 nt, Human
ugauauguauuguuu

SEQ ID NO: 1913982 - RNA, 21 nt, Human
agcauguacugagccuuguaa

SEQ ID NO: 1913983 - RNA, 12 nt, Human
agcauggcugcc

SEQ ID NO: 1913984 - RNA, 20 nt, Human
agcaugucgucaaagcugaa

SEQ ID NO: 1913985 - RNA, 17 nt, Human
agcaugucgucaaagcu

SEQ ID NO: 1913986 - RNA, 14 nt, Human
agcaucaggccagg

SEQ ID NO: 1913987 - RNA, 16 nt, Human
agcaucaggccaggcc

SEQ ID NO: 1913988 - RNA, 17 nt, Human
agcaucaggccaggccc

SEQ ID NO: 1913989 - RNA, 18 nt, Human
agcaucaggccaggcccu

SEQ ID NO: 1913990 - RNA, 19 nt, Human
agcaucaggccaggcccuc

SEQ ID NO: 1913991 - RNA, 20 nt, Human
agcaucaggccaggcccucu

SEQ ID NO: 1913992 - RNA, 21 nt, Human
agcauugggugagguaauaaa

SEQ ID NO: 1913993 - RNA, 20 nt, Human
agcauuucgcgauggacaga

SEQ ID NO: 1913994 - RNA, 23 nt, Human
agcauugugugugcagacuucag

SEQ ID NO: 1913995 - RNA, 15 nt, Human
agcauugauauuugu

SEQ ID NO: 1913996 - RNA, 18 nt, Human
agcauugauauuugugca

SEQ ID NO: 1913997 - RNA, 21 nt, Human
agcauugauauuugugcauuu

SEQ ID NO: 1913998 - RNA, 19 nt, Human
agcauugauauuugugcau

SEQ ID NO: 1913999 - RNA, 23 nt, Human
agcauaaguuucugggaccucag

SEQ ID NO: 1914000 - RNA, 17 nt, Human
agcauaaguuucuggga

SEQ ID NO: 1914001 - RNA, 19 nt, Human
ugagacacaggaugaagca

SEQ ID NO: 1914002 - RNA, 21 nt, Human
agcauaauacuugcuuuggaa

SEQ ID NO: 1914003 - RNA, 15 nt, Human
agcauacguacacau

SEQ ID NO: 1914004 - RNA, 12 nt, Human
ugagaauuaccc

SEQ ID NO: 1914005 - RNA, 16 nt, Human
ugagacacaggaugaa

SEQ ID NO: 1914006 - RNA, 21 nt, Human
agcauacguacacauuuuauu

SEQ ID NO: 1914007 - RNA, 20 nt, Human
agcauacguacacauuuuau

SEQ ID NO: 1914008 - RNA, 19 nt, Human
agcauacguacacauuuua

SEQ ID NO: 1914009 - RNA, 18 nt, Human
agcauacguacacauuuu

SEQ ID NO: 1914010 - RNA, 17 nt, Human
agcauacguacacauuu

SEQ ID NO: 1914011 - RNA, 16 nt, Human
agcauacguacacauu

SEQ ID NO: 1914012 - RNA, 22 nt, Human
ugaguaacugauuuguaacaag

SEQ ID NO: 1914013 - RNA, 15 nt, Human
ugaguacuacagucc

SEQ ID NO: 1914014 - RNA, 22 nt, Human
ugaguaaaauaaauauugucuu

SEQ ID NO: 1914015 - RNA, 14 nt, Human
agcauauucaggaa

SEQ ID NO: 1914016 - RNA, 13 nt, Human
ugaguagcuggau

SEQ ID NO: 1914017 - RNA, 14 nt, Human
ugaguagaggcuua

SEQ ID NO: 1914018 - RNA, 17 nt, Human
ugaguacuacaguccuc

SEQ ID NO: 1914019 - RNA, 21 nt, Human
ugaguacuacaguccucccau

SEQ ID NO: 1914020 - RNA, 22 nt, Human
ugaguacuacaguccucccauc

SEQ ID NO: 1914021 - RNA, 23 nt, Human
ugaguacuacaguccucccaucu

SEQ ID NO: 1914022 - RNA, 17 nt, Human
ugaguucauacccuguu

SEQ ID NO: 1914023 - RNA, 20 nt, Human
ugauaagaaccuuuugagug

SEQ ID NO: 1914024 - RNA, 24 nt, Human
ugauaagcagucauccucagauca

SEQ ID NO: 1914025 - RNA, 21 nt, Human
ugauacaaugcugugcccuaa

SEQ ID NO: 1914026 - RNA, 12 nt, Human
ugauacagaaaa

SEQ ID NO: 1914027 - RNA, 20 nt, Human
ugauacaaugcugugcccua

SEQ ID NO: 1914028 - RNA, 17 nt, Human
ugauacuacaguuuguu

SEQ ID NO: 1914029 - RNA, 14 nt, Human
ugauacuacaguuu

SEQ ID NO: 1914030 - RNA, 23 nt, Human
ugagugggggaucacagccucug

SEQ ID NO: 1914031 - RNA, 21 nt, Human
ugagugggugaauaauacagu

SEQ ID NO: 1914032 - RNA, 23 nt, Human
ugagucacaaagaacauguagaa

SEQ ID NO: 1914033 - RNA, 18 nt, Human
ugaguucauaaauuuaug

SEQ ID NO: 1914034 - RNA, 17 nt, Human
ugagucaccaagcccag

SEQ ID NO: 1914035 - RNA, 16 nt, Human
ugagucaccaagccca

SEQ ID NO: 1914036 - RNA, 17 nt, Human
ugagugccuuacacaau

SEQ ID NO: 1914037 - RNA, 20 nt, Human
ugagugccuuacacaauggu

SEQ ID NO: 1914038 - RNA, 14 nt, Human
ugagucaccaagcc

SEQ ID NO: 1914039 - RNA, 14 nt, Human
ugagucaauuggaa

SEQ ID NO: 1914040 - RNA, 19 nt, Human
agccacggacgcuggcucc

SEQ ID NO: 1914041 - RNA, 23 nt, Human
agccaccuuuugggaauguuuua

SEQ ID NO: 1914042 - RNA, 15 nt, Human
agccacggccaggcc

SEQ ID NO: 1914043 - RNA, 15 nt, Human
ugauccagcccugag

SEQ ID NO: 1914044 - RNA, 18 nt, Human
ugauccagcccugaguuc

SEQ ID NO: 1914045 - RNA, 17 nt, Human
ugauccagcccugaguu

SEQ ID NO: 1914046 - RNA, 20 nt, Human
ugauccuggaggcccaguuc

SEQ ID NO: 1914047 - RNA, 20 nt, Human
ugaugacaacuacagaaaaa

SEQ ID NO: 1914048 - RNA, 24 nt, Human
ugaugagcugugcacaaaguggca

SEQ ID NO: 1914049 - RNA, 19 nt, Human
ugaugagcugugcacaaag

SEQ ID NO: 1914050 - RNA, 14 nt, Human
agccacauuccuga

SEQ ID NO: 1914051 - RNA, 18 nt, Human
agccacauuccugaugcu

SEQ ID NO: 1914052 - RNA, 19 nt, Human
agccaccaacauacuccca

SEQ ID NO: 1914053 - RNA, 15 nt, Human
agccacauuuggaau

SEQ ID NO: 1914054 - RNA, 20 nt, Human
agccacauuuggaauacuuu

SEQ ID NO: 1914055 - RNA, 20 nt, Human
agccaccaacauacucccau

SEQ ID NO: 1914056 - RNA, 23 nt, Human
agccaccaacauacucccaucug

SEQ ID NO: 1914057 - RNA, 14 nt, Human
agccacggccaggc

SEQ ID NO: 1914058 - RNA, 22 nt, Human
agccaccuuuugggaauguuuu

SEQ ID NO: 1914059 - RNA, 22 nt, Human
agccaccgaagccgccugugga

SEQ ID NO: 1914060 - RNA, 21 nt, Human
agccaccgaagccgccugugg

SEQ ID NO: 1914061 - RNA, 20 nt, Human
agccaccgaagccgccugug

SEQ ID NO: 1914062 - RNA, 15 nt, Human
agccaccgaagccgc

SEQ ID NO: 1914063 - RNA, 21 nt, Human
agccacauuuggaauacuuuu

SEQ ID NO: 1914064 - RNA, 22 nt, Human
agccacauuuggaauacuuuuu

SEQ ID NO: 1914065 - RNA, 23 nt, Human
agccacauuuggaauacuuuuug

SEQ ID NO: 1914066 - RNA, 15 nt, Human
agccacugagcaaug

SEQ ID NO: 1914067 - RNA, 14 nt, Human
ugauuaccagggac

SEQ ID NO: 1914068 - RNA, 15 nt, Human
ugauuaauuaaaaca

SEQ ID NO: 1914069 - RNA, 12 nt, Human
ugauuaaaccaa

SEQ ID NO: 1914070 - RNA, 21 nt, Human
ugauuaauucaccuuccagug

SEQ ID NO: 1914071 - RNA, 19 nt, Human
ugauuaauuaaauagcuuu

SEQ ID NO: 1914072 - RNA, 22 nt, Human
agccacugcaccgggccacaga

SEQ ID NO: 1914073 - RNA, 21 nt, Human
agccacugcaccgggccacag

SEQ ID NO: 1914074 - RNA, 13 nt, Human
agccacugcaccg

SEQ ID NO: 1914075 - RNA, 13 nt, Human
agccacugaagua

SEQ ID NO: 1914076 - RNA, 18 nt, Human
ugauguuuuaaggaugcu

SEQ ID NO: 1914077 - RNA, 17 nt, Human
ugauguuuuaaggaugc

SEQ ID NO: 1914078 - RNA, 14 nt, Human
ugaugauccuaggc

SEQ ID NO: 1914079 - RNA, 20 nt, Human
ugaugauccuaggcauuugc

SEQ ID NO: 1914080 - RNA, 17 nt, Human
ugauggugcaaugaccu

SEQ ID NO: 1914081 - RNA, 23 nt, Human
ugauggugcaaugaccuuucaau

SEQ ID NO: 1914082 - RNA, 16 nt, Human
ugauggugcaaugacc

SEQ ID NO: 1914083 - RNA, 22 nt, Human
agccaggacaccgggcagggcc

SEQ ID NO: 1914084 - RNA, 20 nt, Human
agccaggaauuucccaggac

SEQ ID NO: 1914085 - RNA, 21 nt, Human
agccaggaauuucccaggacc

SEQ ID NO: 1914086 - RNA, 22 nt, Human
agccaggaauuucccaggaccc

SEQ ID NO: 1914087 - RNA, 23 nt, Human
agccaggaauuucccaggacccu

SEQ ID NO: 1914088 - RNA, 17 nt, Human
agccaggaauuucccag

SEQ ID NO: 1914089 - RNA, 19 nt, Human
agccaggaauuucccagga

SEQ ID NO: 1914090 - RNA, 12 nt, Human
agccaggccaca

SEQ ID NO: 1914091 - RNA, 14 nt, Human
agccaggccacaag

SEQ ID NO: 1914092 - RNA, 23 nt, Human
agccaguaaaugggggugcauuu

SEQ ID NO: 1914093 - RNA, 12 nt, Human
agccagggucuc

SEQ ID NO: 1914094 - RNA, 21 nt, Human
agccaggccacaagacccuug

SEQ ID NO: 1914095 - RNA, 22 nt, Human
agccaggccacaagacccuugu

SEQ ID NO: 1914096 - RNA, 14 nt, Human
agccaggccccagg

SEQ ID NO: 1914097 - RNA, 15 nt, Human
agccaggccccaggc

SEQ ID NO: 1914098 - RNA, 15 nt, Human
agccaggccacuggc

SEQ ID NO: 1914099 - RNA, 22 nt, Human
agcccacuucugccauauucug

SEQ ID NO: 1914100 - RNA, 11 nt, Human
agcccagagac

SEQ ID NO: 1914101 - RNA, 10 nt, Human
agcccagaga

SEQ ID NO: 1914102 - RNA, 12 nt, Human
agcccagagaca

SEQ ID NO: 1914103 - RNA, 21 nt, Human
agcccagagacauacuugaag

SEQ ID NO: 1914104 - RNA, 22 nt, Human
agcccagagacauacuugaagg

SEQ ID NO: 1914105 - RNA, 15 nt, Human
agccaugucugcauu

SEQ ID NO: 1914106 - RNA, 22 nt, Human
agccaugggcacaaagggccca

SEQ ID NO: 1914107 - RNA, 23 nt, Human
agccaugggcacaaagggcccag

SEQ ID NO: 1914108 - RNA, 14 nt, Human
agccaugucugcau

SEQ ID NO: 1914109 - RNA, 13 nt, Human
agccaucaaaaug

SEQ ID NO: 1914110 - RNA, 14 nt, Human
agccaucaaaaugc

SEQ ID NO: 1914111 - RNA, 15 nt, Human
agccaucaaaaugcu

SEQ ID NO: 1914112 - RNA, 16 nt, Human
agccaucaaaaugcuu

SEQ ID NO: 1914113 - RNA, 19 nt, Human
agcccaggaaaggcuccag

SEQ ID NO: 1914114 - RNA, 13 nt, Human
agcccagcugggu

SEQ ID NO: 1914115 - RNA, 15 nt, Human
agcccagcuggguca

SEQ ID NO: 1914116 - RNA, 16 nt, Human
agcccagcugggucag

SEQ ID NO: 1914117 - RNA, 20 nt, Human
agcccaggaaaggcuccagg

SEQ ID NO: 1914118 - RNA, 21 nt, Human
agcccaggaaaggcuccagga

SEQ ID NO: 1914119 - RNA, 13 nt, Human
agcccagcccucc

SEQ ID NO: 1914120 - RNA, 12 nt, Human
agcccagcucca

SEQ ID NO: 1914121 - RNA, 16 nt, Human
agcccagaggagggca

SEQ ID NO: 1914122 - RNA, 15 nt, Human
agcccagaggagggc

SEQ ID NO: 1914123 - RNA, 14 nt, Human
agcccagaggaggg

SEQ ID NO: 1914124 - RNA, 12 nt, Human
agcccagaggag

SEQ ID NO: 1914125 - RNA, 15 nt, Human
ugauucauaaugacu

SEQ ID NO: 1914126 - RNA, 13 nt, Human
ugauucagcucug

SEQ ID NO: 1914127 - RNA, 14 nt, Human
ugauucagcucugc

SEQ ID NO: 1914128 - RNA, 24 nt, Human
agcccaggaaaggcuccaggagca

SEQ ID NO: 1914129 - RNA, 22 nt, Human
agcccaggaaaggcuccaggag

SEQ ID NO: 1914130 - RNA, 23 nt, Human
agcccaggaaaggcuccaggagc

SEQ ID NO: 1914131 - RNA, 18 nt, Human
ugauucccaagcucugcu

SEQ ID NO: 1914132 - RNA, 16 nt, Human
ugauucccaagcucug

SEQ ID NO: 1914133 - RNA, 15 nt, Human
ugauucccaagcucu

SEQ ID NO: 1914134 - RNA, 21 nt, Human
ugauucccaagcucugcuccu

SEQ ID NO: 1914135 - RNA, 19 nt, Human
ugauucccaagcucugcuc

SEQ ID NO: 1914136 - RNA, 18 nt, Human
ugauuccuuccuguucug

SEQ ID NO: 1914137 - RNA, 19 nt, Human
ugauuccuuccuguucuga

SEQ ID NO: 1914138 - RNA, 20 nt, Human
ugauuccuuccuguucugaa

SEQ ID NO: 1914139 - RNA, 16 nt, Human
agccuuguaauucuaa

SEQ ID NO: 1914140 - RNA, 18 nt, Human
agccuuguaauucuaaau

SEQ ID NO: 1914141 - RNA, 16 nt, Human
agccuuccacacucac

SEQ ID NO: 1914142 - RNA, 11 nt, Human
agccuuccagg

SEQ ID NO: 1914143 - RNA, 14 nt, Human
agccuuccaggggu

SEQ ID NO: 1914144 - RNA, 16 nt, Human
agccuuccaggggugg

SEQ ID NO: 1914145 - RNA, 17 nt, Human
agccuuccagggguggg

SEQ ID NO: 1914146 - RNA, 18 nt, Human
agcggagacggaguccca

SEQ ID NO: 1914147 - RNA, 20 nt, Human
agcggagaaaggaagggcug

SEQ ID NO: 1914148 - RNA, 20 nt, Human
ugcauuaucuagauacugua

SEQ ID NO: 1914149 - RNA, 17 nt, Human
agcgccuuucccaacuc

SEQ ID NO: 1914150 - RNA, 20 nt, Human
agcgccuuucccaacucuag

SEQ ID NO: 1914151 - RNA, 16 nt, Human
agcggagaaaggaagg

SEQ ID NO: 1914152 - RNA, 22 nt, Human
ugcauuaucuagauacuguauc

SEQ ID NO: 1914153 - RNA, 21 nt, Human
ugcauuaucuagauacuguau

SEQ ID NO: 1914154 - RNA, 23 nt, Human
ugcauugaacacaaacuguaaau

SEQ ID NO: 1914155 - RNA, 22 nt, Human
ugcauugaccgcgacuaauuuc

SEQ ID NO: 1914156 - RNA, 20 nt, Human
ugcauugaccgcgacuaauu

SEQ ID NO: 1914157 - RNA, 15 nt, Human
ugccacaaggacuuc

SEQ ID NO: 1914158 - RNA, 16 nt, Human
ugccacaaggacuucc

SEQ ID NO: 1914159 - RNA, 13 nt, Human
ugccaaguuuguu

SEQ ID NO: 1914160 - RNA, 16 nt, Human
agccuggugcugcugc

SEQ ID NO: 1914161 - RNA, 15 nt, Human
agccuggugcugcug

SEQ ID NO: 1914162 - RNA, 14 nt, Human
agccuggugcugcu

SEQ ID NO: 1914163 - RNA, 20 nt, Human
agccuggucagcccaaacca

SEQ ID NO: 1914164 - RNA, 21 nt, Human
agccugugccucugggacugg

SEQ ID NO: 1914165 - RNA, 18 nt, Human
agccugguuuagccugga

SEQ ID NO: 1914166 - RNA, 16 nt, Human
agccugugucuuuaaa

SEQ ID NO: 1914167 - RNA, 23 nt, Human
agccugugucuuuaaaugcugcu

SEQ ID NO: 1914168 - RNA, 13 nt, Human
agccuguuuaaga

SEQ ID NO: 1914169 - RNA, 12 nt, Human
ugcauaccacuu

SEQ ID NO: 1914170 - RNA, 12 nt, Human
ugcauaccaacc

SEQ ID NO: 1914171 - RNA, 14 nt, Human
ugcauaccaaccug

SEQ ID NO: 1914172 - RNA, 18 nt, Human
ugcauaccaaccugggca

SEQ ID NO: 1914173 - RNA, 18 nt, Human
ugcauaagguuuuuaugc

SEQ ID NO: 1914174 - RNA, 14 nt, Human
ugcauaccacuuuu

SEQ ID NO: 1914175 - RNA, 15 nt, Human
agccugcuccagcug

SEQ ID NO: 1914176 - RNA, 16 nt, Human
agccugcuccagcugu

SEQ ID NO: 1914177 - RNA, 17 nt, Human
agccugcuccagcuguu

SEQ ID NO: 1914178 - RNA, 22 nt, Human
agccugggugacagagcaagug

SEQ ID NO: 1914179 - RNA, 15 nt, Human
agccuggggucugga

SEQ ID NO: 1914180 - RNA, 20 nt, Human
agccugggguggggucaugc

SEQ ID NO: 1914181 - RNA, 19 nt, Human
agccugggguggggucaug

SEQ ID NO: 1914182 - RNA, 23 nt, Human
agccugggguggggucaugcccu

SEQ ID NO: 1914183 - RNA, 16 nt, Human
agccuggucagcccaa

SEQ ID NO: 1914184 - RNA, 15 nt, Human
agccuggucagccca

SEQ ID NO: 1914185 - RNA, 19 nt, Human
agccugcuccagcuguuca

SEQ ID NO: 1914186 - RNA, 22 nt, Human
agccugcuccagcuguucagcu

SEQ ID NO: 1914187 - RNA, 12 nt, Human
agcuagccagag

SEQ ID NO: 1914188 - RNA, 17 nt, Human
agcuagccagaggacug

SEQ ID NO: 1914189 - RNA, 19 nt, Human
agcuagccagaggacugug

SEQ ID NO: 1914190 - RNA, 18 nt, Human
agcuagacgagcaggcuu

SEQ ID NO: 1914191 - RNA, 12 nt, Human
agcuagaaauga

SEQ ID NO: 1914192 - RNA, 16 nt, Human
agcuagaauuugauau

SEQ ID NO: 1914193 - RNA, 13 nt, Human
agcuagaauuuga

SEQ ID NO: 1914194 - RNA, 11 nt, Human
agcuagaaaug

SEQ ID NO: 1914195 - RNA, 16 nt, Human
agcuacuugggaggcu

SEQ ID NO: 1914196 - RNA, 18 nt, Human
agcuacuugggaggcuga

SEQ ID NO: 1914197 - RNA, 17 nt, Human
agcuacuugggaggcug

SEQ ID NO: 1914198 - RNA, 19 nt, Human
agcuacuaauuuuaaaaug

SEQ ID NO: 1914199 - RNA, 23 nt, Human
agcuaccucaaccaaugccaaaa

SEQ ID NO: 1914200 - RNA, 14 nt, Human
agcuaccucaacca

SEQ ID NO: 1914201 - RNA, 22 nt, Human
agcgugagccacugcaccgggc

SEQ ID NO: 1914202 - RNA, 15 nt, Human
agcgugcauaaguua

SEQ ID NO: 1914203 - RNA, 19 nt, Human
agcgugagccacugcaccg

SEQ ID NO: 1914204 - RNA, 18 nt, Human
agcguacucaucaucaac

SEQ ID NO: 1914205 - RNA, 17 nt, Human
ugccagacccccuggag

SEQ ID NO: 1914206 - RNA, 22 nt, Human
agcggugcuguccucagguggc

SEQ ID NO: 1914207 - RNA, 16 nt, Human
ugcccacaggaucagu

SEQ ID NO: 1914208 - RNA, 19 nt, Human
ugcccacaggaucagucug

SEQ ID NO: 1914209 - RNA, 20 nt, Human
ugcccacaggaucagucuga

SEQ ID NO: 1914210 - RNA, 12 nt, Human
ugcccacaggcc

SEQ ID NO: 1914211 - RNA, 21 nt, Human
ugcccagccccuucugaccca

SEQ ID NO: 1914212 - RNA, 20 nt, Human
ugcccagccccuucugaccc

SEQ ID NO: 1914213 - RNA, 14 nt, Human
ugcccacaggccgc

SEQ ID NO: 1914214 - RNA, 21 nt, Human
ugcccacaggccgcccugcgg

SEQ ID NO: 1914215 - RNA, 18 nt, Human
ugcccagcggacaguggc

SEQ ID NO: 1914216 - RNA, 16 nt, Human
agcuccaaccugcaaa

SEQ ID NO: 1914217 - RNA, 18 nt, Human
agcuccaaccugcaaaga

SEQ ID NO: 1914218 - RNA, 13 nt, Human
agcuccaaccugc

SEQ ID NO: 1914219 - RNA, 14 nt, Human
agcuccaaccugca

SEQ ID NO: 1914220 - RNA, 15 nt, Human
agcuccaaccugcaa

SEQ ID NO: 1914221 - RNA, 21 nt, Human
agcucauucuccuuguguuac

SEQ ID NO: 1914222 - RNA, 20 nt, Human
agcucauucuccuuguguua

SEQ ID NO: 1914223 - RNA, 18 nt, Human
agcucauaagagccacag

SEQ ID NO: 1914224 - RNA, 21 nt, Human
agcucaggugucccugcacuu

SEQ ID NO: 1914225 - RNA, 20 nt, Human
agcucaggugucccugcacu

SEQ ID NO: 1914226 - RNA, 22 nt, Human
agcucaggugucccugcacuug

SEQ ID NO: 1914227 - RNA, 18 nt, Human
agcucaggugucccugca

SEQ ID NO: 1914228 - RNA, 13 nt, Human
agcucaggacaga

SEQ ID NO: 1914229 - RNA, 17 nt, Human
agcucaggacagaugcc

SEQ ID NO: 1914230 - RNA, 18 nt, Human
agcucaggacagaugcca

SEQ ID NO: 1914231 - RNA, 15 nt, Human
agcuaggccuggcca

SEQ ID NO: 1914232 - RNA, 14 nt, Human
agcuaggccuggcc

SEQ ID NO: 1914233 - RNA, 16 nt, Human
agcuaggccuggccag

SEQ ID NO: 1914234 - RNA, 12 nt, Human
agcuaggccugg

SEQ ID NO: 1914235 - RNA, 18 nt, Human
agcuaggaauuguguuua

SEQ ID NO: 1914236 - RNA, 18 nt, Human
ugcacccacccaggagug

SEQ ID NO: 1914237 - RNA, 17 nt, Human
ugcacccacccaggagu

SEQ ID NO: 1914238 - RNA, 19 nt, Human
ugcaccauuuaaaaacagg

SEQ ID NO: 1914239 - RNA, 20 nt, Human
ugcacacauuuuuuaaaugc

SEQ ID NO: 1914240 - RNA, 10 nt, Human
ugcacacauu

SEQ ID NO: 1914241 - RNA, 15 nt, Human
ugcacgugugugcac

SEQ ID NO: 1914242 - RNA, 14 nt, Human
ugcacgugugugca

SEQ ID NO: 1914243 - RNA, 16 nt, Human
ugcacccucaggcagg

SEQ ID NO: 1914244 - RNA, 17 nt, Human
ugcacccucaggcaggu

SEQ ID NO: 1914245 - RNA, 23 nt, Human
agcccugguggcagugggagcug

SEQ ID NO: 1914246 - RNA, 22 nt, Human
agcccugguggcagugggagcu

SEQ ID NO: 1914247 - RNA, 15 nt, Human
ugcacaagcugcacc

SEQ ID NO: 1914248 - RNA, 18 nt, Human
ugcacaagcugcacccuc

SEQ ID NO: 1914249 - RNA, 21 nt, Human
ugcacaagcugcacccucagg

SEQ ID NO: 1914250 - RNA, 21 nt, Human
agcccugguggcagugggagc

SEQ ID NO: 1914251 - RNA, 17 nt, Human
agccccuugagaaaccu

SEQ ID NO: 1914252 - RNA, 15 nt, Human
agccccuucugcuca

SEQ ID NO: 1914253 - RNA, 16 nt, Human
agccccuucugcucag

SEQ ID NO: 1914254 - RNA, 19 nt, Human
agccccuucugcucagcuc

SEQ ID NO: 1914255 - RNA, 22 nt, Human
agccccuucugcucagcucugg

SEQ ID NO: 1914256 - RNA, 20 nt, Human
agccccuucugacccaugcu

SEQ ID NO: 1914257 - RNA, 24 nt, Human
agccccuucugacccaugcugccc

SEQ ID NO: 1914258 - RNA, 22 nt, Human
agccccuggaugcagccucaca

SEQ ID NO: 1914259 - RNA, 19 nt, Human
agccccuggaugcagccuc

SEQ ID NO: 1914260 - RNA, 17 nt, Human
agccccuggaugcagcc

SEQ ID NO: 1914261 - RNA, 18 nt, Human
agccccuggaugcagccu

SEQ ID NO: 1914262 - RNA, 16 nt, Human
agccccgaggccuucu

SEQ ID NO: 1914263 - RNA, 19 nt, Human
agcccccagcuaagaaccu

SEQ ID NO: 1914264 - RNA, 20 nt, Human
agcccccagcuaagaaccug

SEQ ID NO: 1914265 - RNA, 22 nt, Human
agcccccagcuaagaaccugga

SEQ ID NO: 1914266 - RNA, 22 nt, Human
agccccgaggccuucucugaag

SEQ ID NO: 1914267 - RNA, 17 nt, Human
agccccgaggccuucuc

SEQ ID NO: 1914268 - RNA, 24 nt, Human
agccccaaaacucuccucugcugc

SEQ ID NO: 1914269 - RNA, 19 nt, Human
agcccccaccgugggcagg

SEQ ID NO: 1914270 - RNA, 12 nt, Human
agcccccagcua

SEQ ID NO: 1914271 - RNA, 21 nt, Human
agccccaaaacucuccucugc

SEQ ID NO: 1914272 - RNA, 22 nt, Human
agccccaaaacucuccucugcu

SEQ ID NO: 1914273 - RNA, 20 nt, Human
agccccaaaacucuccucug

SEQ ID NO: 1914274 - RNA, 18 nt, Human
agcccauggcacucuaug

SEQ ID NO: 1914275 - RNA, 20 nt, Human
ugauucuccugccucagccu

SEQ ID NO: 1914276 - RNA, 18 nt, Human
agcccaguucagcuuggg

SEQ ID NO: 1914277 - RNA, 19 nt, Human
ugauucuccugccucagcc

SEQ ID NO: 1914278 - RNA, 15 nt, Human
ugauucuccugccuc

SEQ ID NO: 1914279 - RNA, 21 nt, Human
ugauucuauuuauauguacau

SEQ ID NO: 1914280 - RNA, 22 nt, Human
ugauucuauuuauauguacaug

SEQ ID NO: 1914281 - RNA, 23 nt, Human
ugcacuauagccuaggugacaga

SEQ ID NO: 1914282 - RNA, 23 nt, Human
agcccuucuaccuuccugcaaca

SEQ ID NO: 1914283 - RNA, 16 nt, Human
agccucccaaagugcu

SEQ ID NO: 1914284 - RNA, 20 nt, Human
agccucauguccacugguuc

SEQ ID NO: 1914285 - RNA, 23 nt, Human
agccucagcauccuggcacccgg

SEQ ID NO: 1914286 - RNA, 22 nt, Human
agccucagcauccuggcacccg

SEQ ID NO: 1914287 - RNA, 12 nt, Human
agccucaucucu

SEQ ID NO: 1914288 - RNA, 15 nt, Human
agccucauguccacu

SEQ ID NO: 1914289 - RNA, 21 nt, Human
agccucagcauccuggcaccc

SEQ ID NO: 1914290 - RNA, 20 nt, Human
agccucagcauccuggcacc

SEQ ID NO: 1914291 - RNA, 19 nt, Human
agccucagcauccuggcac

SEQ ID NO: 1914292 - RNA, 17 nt, Human
agccucagcauccuggc

SEQ ID NO: 1914293 - RNA, 17 nt, Human
agccucccaaagugcug

SEQ ID NO: 1914294 - RNA, 22 nt, Human
agccugaaggggcgucuguucc

SEQ ID NO: 1914295 - RNA, 22 nt, Human
agccugaaagaggaaugaagua

SEQ ID NO: 1914296 - RNA, 16 nt, Human
ugcagccucacagucc

SEQ ID NO: 1914297 - RNA, 13 nt, Human
ugcagccucacag

SEQ ID NO: 1914298 - RNA, 15 nt, Human
ugcagccucacaguc

SEQ ID NO: 1914299 - RNA, 14 nt, Human
ugcagccugcgcca

SEQ ID NO: 1914300 - RNA, 22 nt, Human
ugcauaacguauaaaagccugu

SEQ ID NO: 1914301 - RNA, 23 nt, Human
ugcauaacguauaaaagccuguu

SEQ ID NO: 1914302 - RNA, 14 nt, Human
ugcauaaguuaacu

SEQ ID NO: 1914303 - RNA, 17 nt, Human
ugcauaaguuaacuucc

SEQ ID NO: 1914304 - RNA, 14 nt, Human
ugcaguaaaucuuu

SEQ ID NO: 1914305 - RNA, 15 nt, Human
ugcaguaaaucuuuu

SEQ ID NO: 1914306 - RNA, 18 nt, Human
ugcaguaaaucuuuuaca

SEQ ID NO: 1914307 - RNA, 21 nt, Human
ugcaguaaaucuuuuacaacu

SEQ ID NO: 1914308 - RNA, 12 nt, Human
ugcaggucccua

SEQ ID NO: 1914309 - RNA, 14 nt, Human
ugcaggucccuaau

SEQ ID NO: 1914310 - RNA, 15 nt, Human
ugcaggucccuaaua

SEQ ID NO: 1914311 - RNA, 16 nt, Human
ugcaggucccuaauaa

SEQ ID NO: 1914312 - RNA, 17 nt, Human
aggagcugggagccggg

SEQ ID NO: 1914313 - RNA, 18 nt, Human
aggagcugggagccgggc

SEQ ID NO: 1914314 - RNA, 15 nt, Human
aggagcugggagccg

SEQ ID NO: 1914315 - RNA, 12 nt, Human
aggagcugggga

SEQ ID NO: 1914316 - RNA, 20 nt, Human
aggagcuggggaucccuccc

SEQ ID NO: 1914317 - RNA, 11 nt, Human
aggagcuuccu

SEQ ID NO: 1914318 - RNA, 16 nt, Human
aggagcuuccuguccu

SEQ ID NO: 1914319 - RNA, 21 nt, Human
aggagcuggggaucccucccc

SEQ ID NO: 1914320 - RNA, 20 nt, Human
aggagcuuccuguccuccca

SEQ ID NO: 1914321 - RNA, 22 nt, Human
aggagcugacucacaccugaac

SEQ ID NO: 1914322 - RNA, 13 nt, Human
aggauccugagcc

SEQ ID NO: 1914323 - RNA, 14 nt, Human
aggauccugagcca

SEQ ID NO: 1914324 - RNA, 14 nt, Human
aggauagaugcugg

SEQ ID NO: 1914325 - RNA, 13 nt, Human
aggauacugcugc

SEQ ID NO: 1914326 - RNA, 19 nt, Human
uggaagggauggggugcca

SEQ ID NO: 1914327 - RNA, 20 nt, Human
uggaagcuucuggugaccuu

SEQ ID NO: 1914328 - RNA, 17 nt, Human
uggaagguauuuaauag

SEQ ID NO: 1914329 - RNA, 13 nt, Human
uggaagguauuua

SEQ ID NO: 1914330 - RNA, 18 nt, Human
uggaaguacuauaauuua

SEQ ID NO: 1914331 - RNA, 16 nt, Human
uggaagcacagcuuca

SEQ ID NO: 1914332 - RNA, 17 nt, Human
uggaaaugggcagagca

SEQ ID NO: 1914333 - RNA, 18 nt, Human
uggaaaugggcagagcag

SEQ ID NO: 1914334 - RNA, 21 nt, Human
ugcuugaggcaacucaucuua

SEQ ID NO: 1914335 - RNA, 20 nt, Human
aggacauaaauuagaggucu

SEQ ID NO: 1914336 - RNA, 13 nt, Human
aggacauaauggg

SEQ ID NO: 1914337 - RNA, 20 nt, Human
aggacauaaugggguccugg

SEQ ID NO: 1914338 - RNA, 15 nt, Human
aggacauaauggggu

SEQ ID NO: 1914339 - RNA, 14 nt, Human
ugcuugagucaggu

SEQ ID NO: 1914340 - RNA, 20 nt, Human
ugcuugagucagguuugagu

SEQ ID NO: 1914341 - RNA, 23 nt, Human
ugcuugagucagguuugaguaga

SEQ ID NO: 1914342 - RNA, 19 nt, Human
aggacaguauuugugggga

SEQ ID NO: 1914343 - RNA, 12 nt, Human
aggacaguauuu

SEQ ID NO: 1914344 - RNA, 14 nt, Human
ugcuuggaggaagg

SEQ ID NO: 1914345 - RNA, 15 nt, Human
ugcuuggaggaagga

SEQ ID NO: 1914346 - RNA, 16 nt, Human
ugcuuggaggaaggaa

SEQ ID NO: 1914347 - RNA, 13 nt, Human
ugcuuguacauaa

SEQ ID NO: 1914348 - RNA, 12 nt, Human
ugcuuguacaua

SEQ ID NO: 1914349 - RNA, 17 nt, Human
ugcuuuuggucugugug

SEQ ID NO: 1914350 - RNA, 14 nt, Human
ugcuuuuggucugu

SEQ ID NO: 1914351 - RNA, 21 nt, Human
ugcuuuuggggggcauauauu

SEQ ID NO: 1914352 - RNA, 16 nt, Human
ugcuuugugauuuuug

SEQ ID NO: 1914353 - RNA, 14 nt, Human
ugcuuugugauuuu

SEQ ID NO: 1914354 - RNA, 12 nt, Human
ugcuuugugauu

SEQ ID NO: 1914355 - RNA, 22 nt, Human
ugcuuguacauaaugcgugcau

SEQ ID NO: 1914356 - RNA, 15 nt, Human
ugcuuguauagguuu

SEQ ID NO: 1914357 - RNA, 16 nt, Human
ugcuuguacauaaugc

SEQ ID NO: 1914358 - RNA, 14 nt, Human
ugcuuguacauaau

SEQ ID NO: 1914359 - RNA, 12 nt, Human
aggcaccucaag

SEQ ID NO: 1914360 - RNA, 18 nt, Human
aggcaccucaagaagaag

SEQ ID NO: 1914361 - RNA, 20 nt, Human
aggcaccucacaggccccag

SEQ ID NO: 1914362 - RNA, 22 nt, Human
aggcacccaccaucaugucugg

SEQ ID NO: 1914363 - RNA, 21 nt, Human
aggcacccaccaucaugucug

SEQ ID NO: 1914364 - RNA, 20 nt, Human
aggcacccaccaucaugucu

SEQ ID NO: 1914365 - RNA, 14 nt, Human
aggcaaugcuggcu

SEQ ID NO: 1914366 - RNA, 13 nt, Human
aggcaaucauggu

SEQ ID NO: 1914367 - RNA, 17 nt, Human
aggcaagguuauaugca

SEQ ID NO: 1914368 - RNA, 13 nt, Human
uggagaagcggcu

SEQ ID NO: 1914369 - RNA, 22 nt, Human
uggagaagcggcuggcagccca

SEQ ID NO: 1914370 - RNA, 23 nt, Human
uggagaagccacaggccugagau

SEQ ID NO: 1914371 - RNA, 22 nt, Human
uggagaagccacaggccugaga

SEQ ID NO: 1914372 - RNA, 15 nt, Human
uggacugugugcuca

SEQ ID NO: 1914373 - RNA, 20 nt, Human
uggacuuguccucagcagcu

SEQ ID NO: 1914374 - RNA, 15 nt, Human
uggacuuguccucag

SEQ ID NO: 1914375 - RNA, 13 nt, Human
uggacacaggccu

SEQ ID NO: 1914376 - RNA, 15 nt, Human
uggacacaggccugc

SEQ ID NO: 1914377 - RNA, 23 nt, Human
uggacacagcucuucuccaggcu

SEQ ID NO: 1914378 - RNA, 16 nt, Human
uggacccugaggccca

SEQ ID NO: 1914379 - RNA, 18 nt, Human
uggacccugaggcccaga

SEQ ID NO: 1914380 - RNA, 19 nt, Human
uggacccugaggcccagag

SEQ ID NO: 1914381 - RNA, 20 nt, Human
uggacccugaggcccagagg

SEQ ID NO: 1914382 - RNA, 21 nt, Human
uggacccugaggcccagaggg

SEQ ID NO: 1914383 - RNA, 23 nt, Human
uggacccuguggaugauaaaaca

SEQ ID NO: 1914384 - RNA, 15 nt, Human
uggacccugaggccc

SEQ ID NO: 1914385 - RNA, 15 nt, Human
uggaccuuaggccuu

SEQ ID NO: 1914386 - RNA, 16 nt, Human
uggaccuuaggccuuc

SEQ ID NO: 1914387 - RNA, 17 nt, Human
uggaccuuaggccuucc

SEQ ID NO: 1914388 - RNA, 19 nt, Human
uggaccuuaggccuuccuc

SEQ ID NO: 1914389 - RNA, 21 nt, Human
uggaccuuaggccuuccucuc

SEQ ID NO: 1914390 - RNA, 20 nt, Human
uggaccuugaacuggguacu

SEQ ID NO: 1914391 - RNA, 16 nt, Human
aggcaaaggguccaga

SEQ ID NO: 1914392 - RNA, 19 nt, Human
aggcaaaggguccagaagg

SEQ ID NO: 1914393 - RNA, 20 nt, Human
aggcaaaggguccagaagga

SEQ ID NO: 1914394 - RNA, 20 nt, Human
uggaauuauuuuaaaagaua

SEQ ID NO: 1914395 - RNA, 19 nt, Human
aggaucucuugagccuggg

SEQ ID NO: 1914396 - RNA, 19 nt, Human
aggcaaaauugcaaaucuu

SEQ ID NO: 1914397 - RNA, 20 nt, Human
aggcaaaauugcaaaucuug

SEQ ID NO: 1914398 - RNA, 17 nt, Human
aggaucucuugagccug

SEQ ID NO: 1914399 - RNA, 18 nt, Human
aggaucucuugagccugg

SEQ ID NO: 1914400 - RNA, 14 nt, Human
uggacacagcucuu

SEQ ID NO: 1914401 - RNA, 13 nt, Human
uggacacagcucu

SEQ ID NO: 1914402 - RNA, 22 nt, Human
uggacacagcucuucuccaggc

SEQ ID NO: 1914403 - RNA, 21 nt, Human
uggacacagcucuucuccagg

SEQ ID NO: 1914404 - RNA, 19 nt, Human
uggaauugauuugcauuga

SEQ ID NO: 1914405 - RNA, 20 nt, Human
uggaauugauuugcauugaa

SEQ ID NO: 1914406 - RNA, 22 nt, Human
uggaauugauuugcauugaaca

SEQ ID NO: 1914407 - RNA, 12 nt, Human
uggaauugauuu

SEQ ID NO: 1914408 - RNA, 15 nt, Human
uggaauugauuugca

SEQ ID NO: 1914409 - RNA, 16 nt, Human
uggaauugauuugcau

SEQ ID NO: 1914410 - RNA, 17 nt, Human
uggaauugauuugcauu

SEQ ID NO: 1914411 - RNA, 18 nt, Human
uggaauugauuugcauug

SEQ ID NO: 1914412 - RNA, 12 nt, Human
aggccccugcca

SEQ ID NO: 1914413 - RNA, 16 nt, Human
aggccugagauuucau

SEQ ID NO: 1914414 - RNA, 17 nt, Human
aggccccgcccaggcuu

SEQ ID NO: 1914415 - RNA, 21 nt, Human
aggccccuauguaguccgugc

SEQ ID NO: 1914416 - RNA, 22 nt, Human
aggccugagcgcuccugccgca

SEQ ID NO: 1914417 - RNA, 21 nt, Human
aggccugagcgcuccugccgc

SEQ ID NO: 1914418 - RNA, 19 nt, Human
aggccugagcgcuccugcc

SEQ ID NO: 1914419 - RNA, 18 nt, Human
aggccugagcgcuccugc

SEQ ID NO: 1914420 - RNA, 14 nt, Human
aggccugagcgcuc

SEQ ID NO: 1914421 - RNA, 23 nt, Human
aggccugagauuucaucugcucu

SEQ ID NO: 1914422 - RNA, 22 nt, Human
aggccugagauuucaucugcuc

SEQ ID NO: 1914423 - RNA, 21 nt, Human
aggccugagauuucaucugcu

SEQ ID NO: 1914424 - RNA, 20 nt, Human
aggccugagauuucaucugc

SEQ ID NO: 1914425 - RNA, 19 nt, Human
aggccugagauuucaucug

SEQ ID NO: 1914426 - RNA, 17 nt, Human
aggccugagauuucauc

SEQ ID NO: 1914427 - RNA, 23 nt, Human
uggccagugugacaaggauugcu

SEQ ID NO: 1914428 - RNA, 13 nt, Human
uggccaucccaca

SEQ ID NO: 1914429 - RNA, 22 nt, Human
uggccaugaagaggaugcugug

SEQ ID NO: 1914430 - RNA, 23 nt, Human
uggccaaagccaaagcuaggccu

SEQ ID NO: 1914431 - RNA, 21 nt, Human
uggccaaagccaaagcuaggc

SEQ ID NO: 1914432 - RNA, 16 nt, Human
uggccaaacaaguguu

SEQ ID NO: 1914433 - RNA, 17 nt, Human
uggccacaguagucuug

SEQ ID NO: 1914434 - RNA, 14 nt, Human
uggccuucggccuc

SEQ ID NO: 1914435 - RNA, 20 nt, Human
aggccugggggcugggcaga

SEQ ID NO: 1914436 - RNA, 12 nt, Human
aggccuggggac

SEQ ID NO: 1914437 - RNA, 18 nt, Human
aggccugggggcugggca

SEQ ID NO: 1914438 - RNA, 18 nt, Human
uggccuggccccucaggg

SEQ ID NO: 1914439 - RNA, 21 nt, Human
uggccuggccccucagggucc

SEQ ID NO: 1914440 - RNA, 21 nt, Human
uggccuguucuucuauggguu

SEQ ID NO: 1914441 - RNA, 18 nt, Human
uggccugagcugggauga

SEQ ID NO: 1914442 - RNA, 21 nt, Human
uggccugaagaguccucugaa

SEQ ID NO: 1914443 - RNA, 13 nt, Human
uggccucuucaga

SEQ ID NO: 1914444 - RNA, 23 nt, Human
uggccgggcgcgguggcucacgc

SEQ ID NO: 1914445 - RNA, 13 nt, Human
uggcccacgcacu

SEQ ID NO: 1914446 - RNA, 17 nt, Human
uggccaugaugacaacu

SEQ ID NO: 1914447 - RNA, 14 nt, Human
uggccaugccucag

SEQ ID NO: 1914448 - RNA, 15 nt, Human
uggccaugccucagc

SEQ ID NO: 1914449 - RNA, 17 nt, Human
uggccaugccucagccc

SEQ ID NO: 1914450 - RNA, 18 nt, Human
uggccaugccucagcccu

SEQ ID NO: 1914451 - RNA, 20 nt, Human
uggccaugccucagcccuga

SEQ ID NO: 1914452 - RNA, 14 nt, Human
aggccagagggagu

SEQ ID NO: 1914453 - RNA, 19 nt, Human
aggccacaagacccuugug

SEQ ID NO: 1914454 - RNA, 17 nt, Human
aggccacaagacccuug

SEQ ID NO: 1914455 - RNA, 18 nt, Human
aggccacaagacccuugu

SEQ ID NO: 1914456 - RNA, 17 nt, Human
uggcagccuuggcaaac

SEQ ID NO: 1914457 - RNA, 15 nt, Human
uggcagcucaccucu

SEQ ID NO: 1914458 - RNA, 16 nt, Human
aggccacaagacccuu

SEQ ID NO: 1914459 - RNA, 19 nt, Human
uggcagcucaccucucccu

SEQ ID NO: 1914460 - RNA, 20 nt, Human
aggccagagggagugacaga

SEQ ID NO: 1914461 - RNA, 21 nt, Human
aggcccagagggccugcaagg

SEQ ID NO: 1914462 - RNA, 16 nt, Human
aggccccgcccaggcu

SEQ ID NO: 1914463 - RNA, 12 nt, Human
aggccccagccu

SEQ ID NO: 1914464 - RNA, 13 nt, Human
aggccccagccuc

SEQ ID NO: 1914465 - RNA, 14 nt, Human
aggccccagccucc

SEQ ID NO: 1914466 - RNA, 17 nt, Human
aggcccaguucacccug

SEQ ID NO: 1914467 - RNA, 17 nt, Human
aggcagccccauucugc

SEQ ID NO: 1914468 - RNA, 16 nt, Human
aggcagccccauucug

SEQ ID NO: 1914469 - RNA, 18 nt, Human
aggcagccaggccacaag

SEQ ID NO: 1914470 - RNA, 16 nt, Human
aggccaaaggaagcac

SEQ ID NO: 1914471 - RNA, 18 nt, Human
aggccaaaggaagcacau

SEQ ID NO: 1914472 - RNA, 19 nt, Human
aggccaaaggaagcacaug

SEQ ID NO: 1914473 - RNA, 16 nt, Human
aggccaaggugggagg

SEQ ID NO: 1914474 - RNA, 18 nt, Human
aggccaaggcggguggau

SEQ ID NO: 1914475 - RNA, 20 nt, Human
uggagguacgaaaagagggg

SEQ ID NO: 1914476 - RNA, 18 nt, Human
uggaugggggaacucaga

SEQ ID NO: 1914477 - RNA, 21 nt, Human
uggaugggggaacucagaucc

SEQ ID NO: 1914478 - RNA, 22 nt, Human
uggaugggggaacucagaucca

SEQ ID NO: 1914479 - RNA, 14 nt, Human
uggaguauauguca

SEQ ID NO: 1914480 - RNA, 17 nt, Human
uggauuauauuaugaag

SEQ ID NO: 1914481 - RNA, 13 nt, Human
uggauuggauuug

SEQ ID NO: 1914482 - RNA, 14 nt, Human
uggauugggguccc

SEQ ID NO: 1914483 - RNA, 21 nt, Human
uggauuguccccgacccuugc

SEQ ID NO: 1914484 - RNA, 13 nt, Human
uggauuguccccg

SEQ ID NO: 1914485 - RNA, 19 nt, Human
ugcuccuccuuggugccug

SEQ ID NO: 1914486 - RNA, 16 nt, Human
ugcucuggacaggcau

SEQ ID NO: 1914487 - RNA, 15 nt, Human
ugcucuggacaggca

SEQ ID NO: 1914488 - RNA, 14 nt, Human
ugcucuggacaggc

SEQ ID NO: 1914489 - RNA, 14 nt, Human
ugcuccuagaggga

SEQ ID NO: 1914490 - RNA, 24 nt, Human
ugcuccuagagggaggggccuagg

SEQ ID NO: 1914491 - RNA, 20 nt, Human
ugcuccuagagggaggggcc

SEQ ID NO: 1914492 - RNA, 19 nt, Human
ugcucauucuaaugauggc

SEQ ID NO: 1914493 - RNA, 21 nt, Human
ugcucauucuaaugauggccc

SEQ ID NO: 1914494 - RNA, 23 nt, Human
ugcucauucuaaugauggcccau

SEQ ID NO: 1914495 - RNA, 20 nt, Human
ugcuaucucccccagcccca

SEQ ID NO: 1914496 - RNA, 18 nt, Human
ugcuauuguagagccaga

SEQ ID NO: 1914497 - RNA, 19 nt, Human
ugcuaucucccccagcccc

SEQ ID NO: 1914498 - RNA, 13 nt, Human
agcuuuaaaagaa

SEQ ID NO: 1914499 - RNA, 15 nt, Human
agcuuuaaaagaaaa

SEQ ID NO: 1914500 - RNA, 14 nt, Human
agcuuuaccagcug

SEQ ID NO: 1914501 - RNA, 12 nt, Human
aggaagcucagg

SEQ ID NO: 1914502 - RNA, 22 nt, Human
aggaagcccccaccgugggcag

SEQ ID NO: 1914503 - RNA, 23 nt, Human
aggaaggaaacccagcucugguc

SEQ ID NO: 1914504 - RNA, 20 nt, Human
aggaaggaaacccagcucug

SEQ ID NO: 1914505 - RNA, 22 nt, Human
aggaaggaaacccagcucuggu

SEQ ID NO: 1914506 - RNA, 18 nt, Human
aggaagccgcuggggcca

SEQ ID NO: 1914507 - RNA, 19 nt, Human
aggaagccgcuggggccag

SEQ ID NO: 1914508 - RNA, 20 nt, Human
aggaagccgcuggggccagu

SEQ ID NO: 1914509 - RNA, 22 nt, Human
aggaagcacaugccucucucag

SEQ ID NO: 1914510 - RNA, 21 nt, Human
aggaagccagcaggcucucag

SEQ ID NO: 1914511 - RNA, 22 nt, Human
aggaagccagcaggcucucagg

SEQ ID NO: 1914512 - RNA, 23 nt, Human
aggaagccagcaggcucucaggc

SEQ ID NO: 1914513 - RNA, 16 nt, Human
ugcugacuguuuucuc

SEQ ID NO: 1914514 - RNA, 13 nt, Human
aggaaaggcucca

SEQ ID NO: 1914515 - RNA, 14 nt, Human
aggaaaggcuccag

SEQ ID NO: 1914516 - RNA, 15 nt, Human
aggaaaggcuccagg

SEQ ID NO: 1914517 - RNA, 16 nt, Human
aggaaaggcuccagga

SEQ ID NO: 1914518 - RNA, 15 nt, Human
aggaaauagaauuga

SEQ ID NO: 1914519 - RNA, 11 nt, Human
aggaagcacau

SEQ ID NO: 1914520 - RNA, 16 nt, Human
aggaagcacaugccuc

SEQ ID NO: 1914521 - RNA, 17 nt, Human
aggaagcacaugccucu

SEQ ID NO: 1914522 - RNA, 15 nt, Human
aggaaaucaccgaaa

SEQ ID NO: 1914523 - RNA, 19 nt, Human
aggaaaucaccgaaaacgu

SEQ ID NO: 1914524 - RNA, 13 nt, Human
ugcugcccugccc

SEQ ID NO: 1914525 - RNA, 16 nt, Human
ugcugcccugcccacc

SEQ ID NO: 1914526 - RNA, 17 nt, Human
ugcugcccugcccaccu

SEQ ID NO: 1914527 - RNA, 18 nt, Human
ugcugcccugcccaccug

SEQ ID NO: 1914528 - RNA, 11 nt, Human
ugcugcccugu

SEQ ID NO: 1914529 - RNA, 19 nt, Human
ugcugcccugcccaccugg

SEQ ID NO: 1914530 - RNA, 21 nt, Human
ugcugcccugcccaccuggcc

SEQ ID NO: 1914531 - RNA, 20 nt, Human
ugcuggaguuucauguacaa

SEQ ID NO: 1914532 - RNA, 17 nt, Human
ugcugggauuacaggug

SEQ ID NO: 1914533 - RNA, 21 nt, Human
ugcugggauuacaagcgugag

SEQ ID NO: 1914534 - RNA, 23 nt, Human
ugcuguauccauccauggggcug

SEQ ID NO: 1914535 - RNA, 21 nt, Human
ugcuggcuguuggcugggggc

SEQ ID NO: 1914536 - RNA, 19 nt, Human
ugcuggcuguuggcugggg

SEQ ID NO: 1914537 - RNA, 19 nt, Human
ugcugggauuacaagcgug

SEQ ID NO: 1914538 - RNA, 19 nt, Human
aggacagauccagggacug

SEQ ID NO: 1914539 - RNA, 18 nt, Human
aggacacuaaccacgcug

SEQ ID NO: 1914540 - RNA, 16 nt, Human
ugcuuccagugaggcu

SEQ ID NO: 1914541 - RNA, 20 nt, Human
ugcuucaaggauccugagcc

SEQ ID NO: 1914542 - RNA, 21 nt, Human
ugcuucaaggauccugagcca

SEQ ID NO: 1914543 - RNA, 23 nt, Human
ugcuucaaggauccugagccaga

SEQ ID NO: 1914544 - RNA, 17 nt, Human
ugcugucccuuacguga

SEQ ID NO: 1914545 - RNA, 21 nt, Human
ugcuguauauuugugauagca

SEQ ID NO: 1914546 - RNA, 19 nt, Human
ugcugucccuuacgugagu

SEQ ID NO: 1914547 - RNA, 15 nt, Human
ugcugucccuuuucc

SEQ ID NO: 1914548 - RNA, 17 nt, Human
ugcugucccuuuuccuu

SEQ ID NO: 1914549 - RNA, 21 nt, Human
ugcuucaaaaacauucuuaca

SEQ ID NO: 1914550 - RNA, 13 nt, Human
ugcuucaaaaaca

SEQ ID NO: 1914551 - RNA, 14 nt, Human
ugcuuagaaaagaa

SEQ ID NO: 1914552 - RNA, 19 nt, Human
ugcuuagaauccaaacuug

SEQ ID NO: 1914553 - RNA, 22 nt, Human
ugcggacagccacggccaggcc

SEQ ID NO: 1914554 - RNA, 23 nt, Human
ugcggacagccacggccaggcca

SEQ ID NO: 1914555 - RNA, 13 nt, Human
ugcggauggccgg

SEQ ID NO: 1914556 - RNA, 17 nt, Human
ugccuuuggcagaguuc

SEQ ID NO: 1914557 - RNA, 18 nt, Human
ugcgguccacccaggagc

SEQ ID NO: 1914558 - RNA, 22 nt, Human
ugcgggugaacaaagcagccac

SEQ ID NO: 1914559 - RNA, 23 nt, Human
ugcgggugaacaaagcagccacg

SEQ ID NO: 1914560 - RNA, 17 nt, Human
ugcggugcuaucucccc

SEQ ID NO: 1914561 - RNA, 21 nt, Human
ugcggugcuaucucccccagc

SEQ ID NO: 1914562 - RNA, 17 nt, Human
ugcgguccacccaggag

SEQ ID NO: 1914563 - RNA, 18 nt, Human
ugcgggugaacaaagcag

SEQ ID NO: 1914564 - RNA, 21 nt, Human
ugcgggugaacaaagcagcca

SEQ ID NO: 1914565 - RNA, 17 nt, Human
ugcggccuuuggcuuca

SEQ ID NO: 1914566 - RNA, 19 nt, Human
ugcggccuuuggcuucacg

SEQ ID NO: 1914567 - RNA, 20 nt, Human
ugcgggcuuccuccuggugu

SEQ ID NO: 1914568 - RNA, 11 nt, Human
ugcuacacacu

SEQ ID NO: 1914569 - RNA, 13 nt, Human
agcuguugagcug

SEQ ID NO: 1914570 - RNA, 14 nt, Human
agcuguugagcugu

SEQ ID NO: 1914571 - RNA, 15 nt, Human
agcuguugagcuguu

SEQ ID NO: 1914572 - RNA, 16 nt, Human
agcuguugagcuguuu

SEQ ID NO: 1914573 - RNA, 17 nt, Human
agcuguugagcuguuuu

SEQ ID NO: 1914574 - RNA, 19 nt, Human
agcuugaccgugaggccag

SEQ ID NO: 1914575 - RNA, 14 nt, Human
agcuucuuugccaa

SEQ ID NO: 1914576 - RNA, 10 nt, Human
agcuuagaac

SEQ ID NO: 1914577 - RNA, 18 nt, Human
agcuuguaaauagcucag

SEQ ID NO: 1914578 - RNA, 23 nt, Human
agcuuggggacaggggcaggagg

SEQ ID NO: 1914579 - RNA, 22 nt, Human
agcuugaggguugggcuggugu

SEQ ID NO: 1914580 - RNA, 18 nt, Human
agcuugaggguugggcug

SEQ ID NO: 1914581 - RNA, 14 nt, Human
agcuugaggguugg

SEQ ID NO: 1914582 - RNA, 20 nt, Human
agcugccuguucagcuccag

SEQ ID NO: 1914583 - RNA, 14 nt, Human
ugccuggauggggc

SEQ ID NO: 1914584 - RNA, 15 nt, Human
ugccuggauggggcu

SEQ ID NO: 1914585 - RNA, 22 nt, Human
agcugccuguucagcuccagcu

SEQ ID NO: 1914586 - RNA, 21 nt, Human
agcugccuguucagcuccagc

SEQ ID NO: 1914587 - RNA, 21 nt, Human
agcugcuugggcuucauccuc

SEQ ID NO: 1914588 - RNA, 21 nt, Human
agcugcuuuugucuaugggac

SEQ ID NO: 1914589 - RNA, 13 nt, Human
agcuggccccgcc

SEQ ID NO: 1914590 - RNA, 15 nt, Human
ugccucugccucuga

SEQ ID NO: 1914591 - RNA, 14 nt, Human
ugccucugccucug

SEQ ID NO: 1914592 - RNA, 13 nt, Human
ugccucugccucu

SEQ ID NO: 1914593 - RNA, 14 nt, Human
ugcccaggcagguc

SEQ ID NO: 1914594 - RNA, 13 nt, Human
ugcccaggcaggu

SEQ ID NO: 1914595 - RNA, 12 nt, Human
ugcccaggcagg

SEQ ID NO: 1914596 - RNA, 19 nt, Human
ugcccagcggacaguggca

SEQ ID NO: 1914597 - RNA, 20 nt, Human
ugcccagcggacaguggcag

SEQ ID NO: 1914598 - RNA, 21 nt, Human
ugcccagcggacaguggcagg

SEQ ID NO: 1914599 - RNA, 22 nt, Human
ugcccagcggacaguggcagga

SEQ ID NO: 1914600 - RNA, 16 nt, Human
ugccugcccaggcccc

SEQ ID NO: 1914601 - RNA, 15 nt, Human
ugccugcccaggccc

SEQ ID NO: 1914602 - RNA, 14 nt, Human
ugccugcccaggcc

SEQ ID NO: 1914603 - RNA, 15 nt, Human
ugccugcccuauucu

SEQ ID NO: 1914604 - RNA, 20 nt, Human
ugccuguucagcuccagcuc

SEQ ID NO: 1914605 - RNA, 18 nt, Human
ugccuguucagcuccagc

SEQ ID NO: 1914606 - RNA, 13 nt, Human
agcuguucagcug

SEQ ID NO: 1914607 - RNA, 14 nt, Human
agcuguucagcugg

SEQ ID NO: 1914608 - RNA, 14 nt, Human
agcuguuacugucu

SEQ ID NO: 1914609 - RNA, 20 nt, Human
agcugugugcucuccaagcc

SEQ ID NO: 1914610 - RNA, 15 nt, Human
ugccuuauggaacac

SEQ ID NO: 1914611 - RNA, 16 nt, Human
ugccuuauggaacacu

SEQ ID NO: 1914612 - RNA, 21 nt, Human
ugccuguucagcuccagcuca

SEQ ID NO: 1914613 - RNA, 19 nt, Human
ugccuguugggccaggagc

SEQ ID NO: 1914614 - RNA, 20 nt, Human
ugccuguugggccaggagcc

SEQ ID NO: 1914615 - RNA, 15 nt, Human
agcugggacuacagg

SEQ ID NO: 1914616 - RNA, 14 nt, Human
agcuggccccgccg

SEQ ID NO: 1914617 - RNA, 15 nt, Human
agcuggccccgccgc

SEQ ID NO: 1914618 - RNA, 18 nt, Human
agcuggccccgccgccug

SEQ ID NO: 1914619 - RNA, 19 nt, Human
agcuggccccgccgccugg

SEQ ID NO: 1914620 - RNA, 20 nt, Human
agcugugcucuggacaggca

SEQ ID NO: 1914621 - RNA, 19 nt, Human
agcugugcucuggacaggc

SEQ ID NO: 1914622 - RNA, 23 nt, Human
agcugugcucuggacaggcaugu

SEQ ID NO: 1914623 - RNA, 18 nt, Human
agcugugugcucuccaag

SEQ ID NO: 1914624 - RNA, 21 nt, Human
agcugugcucuggacaggcau

SEQ ID NO: 1914625 - RNA, 14 nt, Human
agcuguguggcagu

SEQ ID NO: 1914626 - RNA, 16 nt, Human
agcuguguggcagucu

SEQ ID NO: 1914627 - RNA, 16 nt, Human
ugggcugggcccacaa

SEQ ID NO: 1914628 - RNA, 18 nt, Human
ugggcuggguucuaccca

SEQ ID NO: 1914629 - RNA, 19 nt, Human
ugggcuggguucuacccag

SEQ ID NO: 1914630 - RNA, 15 nt, Human
uggggaaugaagaua

SEQ ID NO: 1914631 - RNA, 14 nt, Human
uggggaaugaagau

SEQ ID NO: 1914632 - RNA, 13 nt, Human
uggggaccucagg

SEQ ID NO: 1914633 - RNA, 17 nt, Human
uggggaccagagcugcc

SEQ ID NO: 1914634 - RNA, 18 nt, Human
uggggaccagagcugcca

SEQ ID NO: 1914635 - RNA, 22 nt, Human
uggggacaggggcaggaggaag

SEQ ID NO: 1914636 - RNA, 20 nt, Human
uggggacaggggcaggagga

SEQ ID NO: 1914637 - RNA, 14 nt, Human
uggggaccagagcu

SEQ ID NO: 1914638 - RNA, 15 nt, Human
uggggaccagagcug

SEQ ID NO: 1914639 - RNA, 23 nt, Human
agggcuucugccauuucugagau

SEQ ID NO: 1914640 - RNA, 18 nt, Human
ugggcucccuucccaccu

SEQ ID NO: 1914641 - RNA, 19 nt, Human
ugggcucccuucccaccuc

SEQ ID NO: 1914642 - RNA, 20 nt, Human
ugggcucccuucccaccucu

SEQ ID NO: 1914643 - RNA, 21 nt, Human
ugggcucccuucccaccucuc

SEQ ID NO: 1914644 - RNA, 14 nt, Human
ugggguacccacug

SEQ ID NO: 1914645 - RNA, 20 nt, Human
ugggggaacucagauccagg

SEQ ID NO: 1914646 - RNA, 18 nt, Human
ugggggaacucagaucca

SEQ ID NO: 1914647 - RNA, 20 nt, Human
uggggcugcaccggcuggcc

SEQ ID NO: 1914648 - RNA, 14 nt, Human
uggggcugauugua

SEQ ID NO: 1914649 - RNA, 16 nt, Human
uggggcugguucugua

SEQ ID NO: 1914650 - RNA, 20 nt, Human
ugggguacccacugcucugg

SEQ ID NO: 1914651 - RNA, 16 nt, Human
ugggguacccacugcu

SEQ ID NO: 1914652 - RNA, 15 nt, Human
ugggguacccacugc

SEQ ID NO: 1914653 - RNA, 17 nt, Human
uggggucacucuggcag

SEQ ID NO: 1914654 - RNA, 18 nt, Human
uggggucacucuggcagc

SEQ ID NO: 1914655 - RNA, 15 nt, Human
ugggguaugggagag

SEQ ID NO: 1914656 - RNA, 21 nt, Human
ugggguagguugggagaaugu

SEQ ID NO: 1914657 - RNA, 15 nt, Human
ugggguagguuggga

SEQ ID NO: 1914658 - RNA, 18 nt, Human
uggggcggugagagggga

SEQ ID NO: 1914659 - RNA, 20 nt, Human
uggggcuagggggagccccu

SEQ ID NO: 1914660 - RNA, 13 nt, Human
uggggcucuggga

SEQ ID NO: 1914661 - RNA, 15 nt, Human
uggggcccugccucc

SEQ ID NO: 1914662 - RNA, 16 nt, Human
uggggcccugccuccu

SEQ ID NO: 1914663 - RNA, 18 nt, Human
uggggccuacagcuuuga

SEQ ID NO: 1914664 - RNA, 12 nt, Human
uggggagaaagu

SEQ ID NO: 1914665 - RNA, 23 nt, Human
uggggaccucaggccugggggcu

SEQ ID NO: 1914666 - RNA, 14 nt, Human
uggggcccugccuc

SEQ ID NO: 1914667 - RNA, 16 nt, Human
uggggaguuaagaccu

SEQ ID NO: 1914668 - RNA, 17 nt, Human
uggggaguuaagaccug

SEQ ID NO: 1914669 - RNA, 18 nt, Human
uggggaguuaagaccugg

SEQ ID NO: 1914670 - RNA, 19 nt, Human
uggggaguuaagaccuggc

SEQ ID NO: 1914671 - RNA, 20 nt, Human
uggggaguuaagaccuggca

SEQ ID NO: 1914672 - RNA, 18 nt, Human
ugggcccacaaaggcaaa

SEQ ID NO: 1914673 - RNA, 15 nt, Human
agggagggcuucugc

SEQ ID NO: 1914674 - RNA, 12 nt, Human
agggaggggccu

SEQ ID NO: 1914675 - RNA, 19 nt, Human
agggagugacagaggcagc

SEQ ID NO: 1914676 - RNA, 21 nt, Human
agggcagcagaaggggguggu

SEQ ID NO: 1914677 - RNA, 15 nt, Human
agggcagcagaaggg

SEQ ID NO: 1914678 - RNA, 18 nt, Human
agggagugacagaggcag

SEQ ID NO: 1914679 - RNA, 17 nt, Human
agggagugacagaggca

SEQ ID NO: 1914680 - RNA, 17 nt, Human
agggaggugaccccagg

SEQ ID NO: 1914681 - RNA, 15 nt, Human
agggaggggccuagg

SEQ ID NO: 1914682 - RNA, 19 nt, Human
agggaggggccuaggccuc

SEQ ID NO: 1914683 - RNA, 20 nt, Human
agggaggggccuaggccuca

SEQ ID NO: 1914684 - RNA, 20 nt, Human
agggcagccgucaccccugc

SEQ ID NO: 1914685 - RNA, 14 nt, Human
agggcagcgccagg

SEQ ID NO: 1914686 - RNA, 16 nt, Human
agggcagcgccaggcu

SEQ ID NO: 1914687 - RNA, 20 nt, Human
agggcaggcccaaauuauca

SEQ ID NO: 1914688 - RNA, 20 nt, Human
agggcagucauuggcugucu

SEQ ID NO: 1914689 - RNA, 19 nt, Human
agggccgcccgggcccaga

SEQ ID NO: 1914690 - RNA, 18 nt, Human
agggccgggcagaggggc

SEQ ID NO: 1914691 - RNA, 20 nt, Human
agggccgcccgggcccagag

SEQ ID NO: 1914692 - RNA, 16 nt, Human
agggccgggcagaggg

SEQ ID NO: 1914693 - RNA, 20 nt, Human
agggccgccagggagaccug

SEQ ID NO: 1914694 - RNA, 23 nt, Human
agggccgccagggagaccuggac

SEQ ID NO: 1914695 - RNA, 20 nt, Human
agggccgggcagaggggcag

SEQ ID NO: 1914696 - RNA, 12 nt, Human
agggcccagagc

SEQ ID NO: 1914697 - RNA, 13 nt, Human
agggcccagagcc

SEQ ID NO: 1914698 - RNA, 14 nt, Human
agggcccagagccc

SEQ ID NO: 1914699 - RNA, 15 nt, Human
agggcccagagccca

SEQ ID NO: 1914700 - RNA, 16 nt, Human
agggcccagagcccag

SEQ ID NO: 1914701 - RNA, 23 nt, Human
agggcccagagaggguggugacc

SEQ ID NO: 1914702 - RNA, 23 nt, Human
ugggauugacagaagcuucugcc

SEQ ID NO: 1914703 - RNA, 16 nt, Human
ugggcaacccccagcc

SEQ ID NO: 1914704 - RNA, 20 nt, Human
ugggagguggagguugcagu

SEQ ID NO: 1914705 - RNA, 17 nt, Human
ugggauucaggaaugug

SEQ ID NO: 1914706 - RNA, 19 nt, Human
ugggagguugaucagaucu

SEQ ID NO: 1914707 - RNA, 18 nt, Human
ugggaggucaaggcugca

SEQ ID NO: 1914708 - RNA, 19 nt, Human
ugggaggucaaggcugcag

SEQ ID NO: 1914709 - RNA, 20 nt, Human
ugggaggucaaggcugcagu

SEQ ID NO: 1914710 - RNA, 23 nt, Human
ugggaggucaaggcugcagugag

SEQ ID NO: 1914711 - RNA, 17 nt, Human
ugggaggucaaggcugc

SEQ ID NO: 1914712 - RNA, 16 nt, Human
aggccuuccucucucc

SEQ ID NO: 1914713 - RNA, 18 nt, Human
aggccuuccucucuccag

SEQ ID NO: 1914714 - RNA, 19 nt, Human
aggccuuccucucuccaga

SEQ ID NO: 1914715 - RNA, 17 nt, Human
aggccuuaucuccaaga

SEQ ID NO: 1914716 - RNA, 19 nt, Human
aggccuuaucuccaagacc

SEQ ID NO: 1914717 - RNA, 15 nt, Human
aggccuuccucucuc

SEQ ID NO: 1914718 - RNA, 21 nt, Human
ugggcaacccccagccugcua

SEQ ID NO: 1914719 - RNA, 22 nt, Human
ugggcacacgccucccacuggg

SEQ ID NO: 1914720 - RNA, 20 nt, Human
ugggcaacccccagccugcu

SEQ ID NO: 1914721 - RNA, 17 nt, Human
ugggcaacccccagccu

SEQ ID NO: 1914722 - RNA, 22 nt, Human
ugggccacuucuggguggggca

SEQ ID NO: 1914723 - RNA, 14 nt, Human
ugggcacccacccu

SEQ ID NO: 1914724 - RNA, 16 nt, Human
ugggcacccacccugg

SEQ ID NO: 1914725 - RNA, 20 nt, Human
ugggcacccacccugggacc

SEQ ID NO: 1914726 - RNA, 13 nt, Human
ugggccagacaug

SEQ ID NO: 1914727 - RNA, 18 nt, Human
ugggccagacaugccaca

SEQ ID NO: 1914728 - RNA, 19 nt, Human
ugggccagacaugccacaa

SEQ ID NO: 1914729 - RNA, 13 nt, Human
ugggccaggagcc

SEQ ID NO: 1914730 - RNA, 20 nt, Human
ugggcccaaugcacuuuguu

SEQ ID NO: 1914731 - RNA, 18 nt, Human
ugggccauguugugccuc

SEQ ID NO: 1914732 - RNA, 19 nt, Human
ugggccauucuccacagca

SEQ ID NO: 1914733 - RNA, 20 nt, Human
ugggccauucuccacagcaa

SEQ ID NO: 1914734 - RNA, 14 nt, Human
ugggccaggagccu

SEQ ID NO: 1914735 - RNA, 16 nt, Human
ugggccaggagccucc

SEQ ID NO: 1914736 - RNA, 15 nt, Human
agggugugcccucac

SEQ ID NO: 1914737 - RNA, 22 nt, Human
aggguguccggucccuguccca

SEQ ID NO: 1914738 - RNA, 13 nt, Human
aggguuauaauaa

SEQ ID NO: 1914739 - RNA, 12 nt, Human
agggugugugcu

SEQ ID NO: 1914740 - RNA, 17 nt, Human
uggucugacccacugcu

SEQ ID NO: 1914741 - RNA, 16 nt, Human
uggucugacccacugc

SEQ ID NO: 1914742 - RNA, 14 nt, Human
uggucccaccccac

SEQ ID NO: 1914743 - RNA, 15 nt, Human
uggucccaccccaca

SEQ ID NO: 1914744 - RNA, 21 nt, Human
uggucagguauuucaguucuu

SEQ ID NO: 1914745 - RNA, 18 nt, Human
uggucaccaaaucagcug

SEQ ID NO: 1914746 - RNA, 22 nt, Human
uggucagauuugaacucuucaa

SEQ ID NO: 1914747 - RNA, 20 nt, Human
uggucaccaaaucagcugcu

SEQ ID NO: 1914748 - RNA, 10 nt, Human
uggucagccc

SEQ ID NO: 1914749 - RNA, 12 nt, Human
uggucagcccaa

SEQ ID NO: 1914750 - RNA, 11 nt, Human
uggucagccca

SEQ ID NO: 1914751 - RNA, 13 nt, Human
uggucccacucag

SEQ ID NO: 1914752 - RNA, 16 nt, Human
uggucccaccccacac

SEQ ID NO: 1914753 - RNA, 16 nt, Human
uggucucaaacucuug

SEQ ID NO: 1914754 - RNA, 23 nt, Human
uggucucaaacucuugaccucag

SEQ ID NO: 1914755 - RNA, 17 nt, Human
uggucucaaacucuuga

SEQ ID NO: 1914756 - RNA, 18 nt, Human
uggucucaaacuccugac

SEQ ID NO: 1914757 - RNA, 14 nt, Human
uggucuccacuggg

SEQ ID NO: 1914758 - RNA, 13 nt, Human
aggguugggcugg

SEQ ID NO: 1914759 - RNA, 23 nt, Human
aggguuggccccugcccggcugc

SEQ ID NO: 1914760 - RNA, 18 nt, Human
aggguuggccccugcccg

SEQ ID NO: 1914761 - RNA, 17 nt, Human
agguagaaauaucugaa

SEQ ID NO: 1914762 - RNA, 19 nt, Human
agguagaaauaucugaaaa

SEQ ID NO: 1914763 - RNA, 23 nt, Human
agguagaaauaucugaaaaugua

SEQ ID NO: 1914764 - RNA, 23 nt, Human
agguauaauucacauuguauuca

SEQ ID NO: 1914765 - RNA, 21 nt, Human
agguaugcaaucaaaucugcu

SEQ ID NO: 1914766 - RNA, 12 nt, Human
aggucagagccu

SEQ ID NO: 1914767 - RNA, 20 nt, Human
aggucauuuuuuuuaagaaa

SEQ ID NO: 1914768 - RNA, 17 nt, Human
aggucauuuuuuuuaag

SEQ ID NO: 1914769 - RNA, 20 nt, Human
agguauucaauauccuuugc

SEQ ID NO: 1914770 - RNA, 21 nt, Human
agggucucacucugucgccca

SEQ ID NO: 1914771 - RNA, 22 nt, Human
agggucucacucugucgcccag

SEQ ID NO: 1914772 - RNA, 21 nt, Human
ugggucgcccuggacugugug

SEQ ID NO: 1914773 - RNA, 15 nt, Human
agggugggagugggc

SEQ ID NO: 1914774 - RNA, 12 nt, Human
ugggucugugug

SEQ ID NO: 1914775 - RNA, 22 nt, Human
ugggugcuuggaggaaggaaac

SEQ ID NO: 1914776 - RNA, 22 nt, Human
uggguggcaccagcagccugga

SEQ ID NO: 1914777 - RNA, 15 nt, Human
ugggugcuuggagga

SEQ ID NO: 1914778 - RNA, 19 nt, Human
ugggugcuuggaggaagga

SEQ ID NO: 1914779 - RNA, 20 nt, Human
ugguaggaacugcugggcuu

SEQ ID NO: 1914780 - RNA, 13 nt, Human
ugguaggaacugc

SEQ ID NO: 1914781 - RNA, 17 nt, Human
ugguacucauuaaaaaa

SEQ ID NO: 1914782 - RNA, 16 nt, Human
ugguacuaacuuuccu

SEQ ID NO: 1914783 - RNA, 15 nt, Human
ugguaaucuugcucu

SEQ ID NO: 1914784 - RNA, 16 nt, Human
ugggugggcaggaaaa

SEQ ID NO: 1914785 - RNA, 16 nt, Human
uggguggggggcuuca

SEQ ID NO: 1914786 - RNA, 18 nt, Human
ugggugggcaggaaaagg

SEQ ID NO: 1914787 - RNA, 20 nt, Human
uggguggggaggaaauagaa

SEQ ID NO: 1914788 - RNA, 23 nt, Human
agggucucacuauguugcccagg

SEQ ID NO: 1914789 - RNA, 22 nt, Human
agggucucacuauguugcccag

SEQ ID NO: 1914790 - RNA, 21 nt, Human
agggucucacuauguugccca

SEQ ID NO: 1914791 - RNA, 24 nt, Human
agggguucccuuuuuuggcugcug

SEQ ID NO: 1914792 - RNA, 20 nt, Human
aggggugggacacccuguga

SEQ ID NO: 1914793 - RNA, 22 nt, Human
aggggugggacacccugugaug

SEQ ID NO: 1914794 - RNA, 15 nt, Human
aggggguggccuccc

SEQ ID NO: 1914795 - RNA, 17 nt, Human
aggggguggccucccaa

SEQ ID NO: 1914796 - RNA, 18 nt, Human
aggggguggccucccaac

SEQ ID NO: 1914797 - RNA, 20 nt, Human
uggggucacucuggcagcuc

SEQ ID NO: 1914798 - RNA, 19 nt, Human
uggggucacucuggcagcu

SEQ ID NO: 1914799 - RNA, 23 nt, Human
aggggcgccgcaaaccacacugg

SEQ ID NO: 1914800 - RNA, 23 nt, Human
aggggagcaaaaucgaugcagug

SEQ ID NO: 1914801 - RNA, 16 nt, Human
aggggcgucuguuccc

SEQ ID NO: 1914802 - RNA, 19 nt, Human
aggggcgucuguucccccu

SEQ ID NO: 1914803 - RNA, 21 nt, Human
aggggcgucuguucccccuuc

SEQ ID NO: 1914804 - RNA, 22 nt, Human
aggggcgucuguucccccuuca

SEQ ID NO: 1914805 - RNA, 20 nt, Human
aggggcgugggaguggccug

SEQ ID NO: 1914806 - RNA, 21 nt, Human
agggggagccccuucugcuca

SEQ ID NO: 1914807 - RNA, 22 nt, Human
agggggagccccuucugcucag

SEQ ID NO: 1914808 - RNA, 17 nt, Human
uguaccauguacaugaa

SEQ ID NO: 1914809 - RNA, 12 nt, Human
uguaccauguac

SEQ ID NO: 1914810 - RNA, 19 nt, Human
uguaccaugugcuacaggg

SEQ ID NO: 1914811 - RNA, 13 nt, Human
uguacuuugugcu

SEQ ID NO: 1914812 - RNA, 13 nt, Human
uguagagugggag

SEQ ID NO: 1914813 - RNA, 14 nt, Human
uguagagugggagc

SEQ ID NO: 1914814 - RNA, 18 nt, Human
uguagaggagaaacugga

SEQ ID NO: 1914815 - RNA, 11 nt, Human
uguagaaaaca

SEQ ID NO: 1914816 - RNA, 14 nt, Human
uguaauuugugaua

SEQ ID NO: 1914817 - RNA, 22 nt, Human
uguaauuuaaaauugugaugug

SEQ ID NO: 1914818 - RNA, 21 nt, Human
uguaauuuaaaauugugaugu

SEQ ID NO: 1914819 - RNA, 15 nt, Human
uguaauuguuugucu

SEQ ID NO: 1914820 - RNA, 19 nt, Human
uguaauuguuugucuuuaa

SEQ ID NO: 1914821 - RNA, 23 nt, Human
aguaaggaauuuuauuuuuuucu

SEQ ID NO: 1914822 - RNA, 19 nt, Human
aguaaaaauacaaaaauua

SEQ ID NO: 1914823 - RNA, 18 nt, Human
aguaaggaguucauuuua

SEQ ID NO: 1914824 - RNA, 20 nt, Human
aguaauaugcacacauuuuu

SEQ ID NO: 1914825 - RNA, 17 nt, Human
aguaauaugcacacauu

SEQ ID NO: 1914826 - RNA, 19 nt, Human
aguaauaugcacacauuuu

SEQ ID NO: 1914827 - RNA, 18 nt, Human
aguaauaugcacacauuu

SEQ ID NO: 1914828 - RNA, 12 nt, Human
aguaaaaauaca

SEQ ID NO: 1914829 - RNA, 13 nt, Human
aguaaaaauacaa

SEQ ID NO: 1914830 - RNA, 20 nt, Human
aguaagccgugauuuucauu

SEQ ID NO: 1914831 - RNA, 11 nt, Human
agguuuuccug

SEQ ID NO: 1914832 - RNA, 12 nt, Human
aguagagacagg

SEQ ID NO: 1914833 - RNA, 17 nt, Human
aguagaagucuuagaug

SEQ ID NO: 1914834 - RNA, 15 nt, Human
aguagaggcuuagag

SEQ ID NO: 1914835 - RNA, 18 nt, Human
uguaggaagguuaauguu

SEQ ID NO: 1914836 - RNA, 20 nt, Human
uguaggaagguuaauguuca

SEQ ID NO: 1914837 - RNA, 22 nt, Human
uguaggagcugccuuggcucag

SEQ ID NO: 1914838 - RNA, 12 nt, Human
uguaggagcugc

SEQ ID NO: 1914839 - RNA, 15 nt, Human
uguaggagcugccuu

SEQ ID NO: 1914840 - RNA, 14 nt, Human
aguacacuguuuca

SEQ ID NO: 1914841 - RNA, 20 nt, Human
aguacacuguuucaaacuuu

SEQ ID NO: 1914842 - RNA, 16 nt, Human
aguacacuguuucaaa

SEQ ID NO: 1914843 - RNA, 19 nt, Human
aguacuuuuggcauuuuac

SEQ ID NO: 1914844 - RNA, 22 nt, Human
aguacuuuggaggccccuaugu

SEQ ID NO: 1914845 - RNA, 19 nt, Human
aguacuuuggaggccccua

SEQ ID NO: 1914846 - RNA, 21 nt, Human
aguagaaagacagagcuggga

SEQ ID NO: 1914847 - RNA, 20 nt, Human
aguagaaagacagagcuggg

SEQ ID NO: 1914848 - RNA, 15 nt, Human
aguaauccaagcaaa

SEQ ID NO: 1914849 - RNA, 14 nt, Human
aguaauccaccugc

SEQ ID NO: 1914850 - RNA, 21 nt, Human
aguaauccaagcaaaugugaa

SEQ ID NO: 1914851 - RNA, 19 nt, Human
aguacaccacaagggucac

SEQ ID NO: 1914852 - RNA, 15 nt, Human
aguacaauucuuacu

SEQ ID NO: 1914853 - RNA, 14 nt, Human
aggugcagccagag

SEQ ID NO: 1914854 - RNA, 15 nt, Human
aggugcagccagagg

SEQ ID NO: 1914855 - RNA, 16 nt, Human
aggugcagccagaggc

SEQ ID NO: 1914856 - RNA, 17 nt, Human
aggugcagccagaggca

SEQ ID NO: 1914857 - RNA, 18 nt, Human
aggugcagccagaggcac

SEQ ID NO: 1914858 - RNA, 12 nt, Human
agguggccaugc

SEQ ID NO: 1914859 - RNA, 13 nt, Human
aggugcagccaga

SEQ ID NO: 1914860 - RNA, 21 nt, Human
aggugcacaagcuccaagcuc

SEQ ID NO: 1914861 - RNA, 20 nt, Human
aggugggauccuccaggugc

SEQ ID NO: 1914862 - RNA, 18 nt, Human
agguggccaugccucagc

SEQ ID NO: 1914863 - RNA, 19 nt, Human
agguggccaugccucagcc

SEQ ID NO: 1914864 - RNA, 23 nt, Human
aggucuugaacuccuggccucaa

SEQ ID NO: 1914865 - RNA, 18 nt, Human
agguccccagcuuuggcu

SEQ ID NO: 1914866 - RNA, 10 nt, Human
aggucccuaa

SEQ ID NO: 1914867 - RNA, 17 nt, Human
agguccccagcuuuggc

SEQ ID NO: 1914868 - RNA, 11 nt, Human
agguccccaga

SEQ ID NO: 1914869 - RNA, 11 nt, Human
aggucuuuccu

SEQ ID NO: 1914870 - RNA, 16 nt, Human
aggugcacaagcucca

SEQ ID NO: 1914871 - RNA, 17 nt, Human
aggugcacaagcuccaa

SEQ ID NO: 1914872 - RNA, 18 nt, Human
aggugcacaagcuccaag

SEQ ID NO: 1914873 - RNA, 20 nt, Human
aggugcacaagcuccaagcu

SEQ ID NO: 1914874 - RNA, 15 nt, Human
aggugcacaagcucc

SEQ ID NO: 1914875 - RNA, 13 nt, Human
aggugcaaccagg

SEQ ID NO: 1914876 - RNA, 15 nt, Human
aggugcaaccaggga

SEQ ID NO: 1914877 - RNA, 17 nt, Human
aggugguuauggagagg

SEQ ID NO: 1914878 - RNA, 23 nt, Human
agguugggagaaugucaguaugu

SEQ ID NO: 1914879 - RNA, 16 nt, Human
agguugaucagaucug

SEQ ID NO: 1914880 - RNA, 17 nt, Human
uguaacuuucugaaaua

SEQ ID NO: 1914881 - RNA, 19 nt, Human
uguaacuuccaugugaggg

SEQ ID NO: 1914882 - RNA, 14 nt, Human
agguuggugggggc

SEQ ID NO: 1914883 - RNA, 19 nt, Human
uguaagaacuacaaacaaa

SEQ ID NO: 1914884 - RNA, 20 nt, Human
uguaagaucguucucugccu

SEQ ID NO: 1914885 - RNA, 19 nt, Human
uguaagaucguucucugcc

SEQ ID NO: 1914886 - RNA, 15 nt, Human
uguaaguaaacgguc

SEQ ID NO: 1914887 - RNA, 23 nt, Human
uguaauuaaguacuauguaucaa

SEQ ID NO: 1914888 - RNA, 20 nt, Human
uguaauuuaaaauugugaug

SEQ ID NO: 1914889 - RNA, 18 nt, Human
uguaauuuaaaauuguga

SEQ ID NO: 1914890 - RNA, 17 nt, Human
uguaauuuaaaauugug

SEQ ID NO: 1914891 - RNA, 16 nt, Human
agucuagacuaaaaga

SEQ ID NO: 1914892 - RNA, 17 nt, Human
agucuagauggcuccuc

SEQ ID NO: 1914893 - RNA, 18 nt, Human
agucuagauggcuccucu

SEQ ID NO: 1914894 - RNA, 19 nt, Human
agucuagauggcuccucuc

SEQ ID NO: 1914895 - RNA, 20 nt, Human
agucuagauggcuccucuca

SEQ ID NO: 1914896 - RNA, 17 nt, Human
agucucacuguugccca

SEQ ID NO: 1914897 - RNA, 16 nt, Human
agucucacuguugccc

SEQ ID NO: 1914898 - RNA, 23 nt, Human
aguccgaaagggacuuggaagcu

SEQ ID NO: 1914899 - RNA, 22 nt, Human
aguccgugcugacagcugcucc

SEQ ID NO: 1914900 - RNA, 23 nt, Human
aguccgugcugacagcugcuccu

SEQ ID NO: 1914901 - RNA, 21 nt, Human
aguccgugcugacagcugcuc

SEQ ID NO: 1914902 - RNA, 20 nt, Human
aguccgugcugacagcugcu

SEQ ID NO: 1914903 - RNA, 12 nt, Human
agucccugccaa

SEQ ID NO: 1914904 - RNA, 23 nt, Human
agucccugaggcagguccccaga

SEQ ID NO: 1914905 - RNA, 22 nt, Human
agucccugaggcagguccccag

SEQ ID NO: 1914906 - RNA, 22 nt, Human
aguccaggcuuuuuuaucaugu

SEQ ID NO: 1914907 - RNA, 20 nt, Human
agucccugaggcaggucccc

SEQ ID NO: 1914908 - RNA, 19 nt, Human
agucccugaggcagguccc

SEQ ID NO: 1914909 - RNA, 22 nt, Human
ugucuaaacaaugcugauuugg

SEQ ID NO: 1914910 - RNA, 20 nt, Human
ugucuaaacaaugcugauuu

SEQ ID NO: 1914911 - RNA, 21 nt, Human
ugucuaaacaaugcugauuug

SEQ ID NO: 1914912 - RNA, 22 nt, Human
agucagaaguuucugccgcagc

SEQ ID NO: 1914913 - RNA, 18 nt, Human
ugucuaaaaaacaaaaca

SEQ ID NO: 1914914 - RNA, 16 nt, Human
ugucuaaacaaugcug

SEQ ID NO: 1914915 - RNA, 17 nt, Human
ugucuaaacaaugcuga

SEQ ID NO: 1914916 - RNA, 13 nt, Human
ugucuaaaaaaca

SEQ ID NO: 1914917 - RNA, 14 nt, Human
ugucuaaaaaacaa

SEQ ID NO: 1914918 - RNA, 19 nt, Human
agucagaauuagcugcuuc

SEQ ID NO: 1914919 - RNA, 15 nt, Human
ugucgcccagucugg

SEQ ID NO: 1914920 - RNA, 14 nt, Human
ugucgcccagucug

SEQ ID NO: 1914921 - RNA, 12 nt, Human
ugucgggcauga

SEQ ID NO: 1914922 - RNA, 14 nt, Human
ugucgggcaugaca

SEQ ID NO: 1914923 - RNA, 15 nt, Human
ugucgggcaugacac

SEQ ID NO: 1914924 - RNA, 16 nt, Human
uguccuacccacccuc

SEQ ID NO: 1914925 - RNA, 13 nt, Human
uguccgagcuuug

SEQ ID NO: 1914926 - RNA, 14 nt, Human
uguccgagcuuuga

SEQ ID NO: 1914927 - RNA, 22 nt, Human
uguccuaaaacaccugguagga

SEQ ID NO: 1914928 - RNA, 17 nt, Human
ugucccuuuuccuuuuu

SEQ ID NO: 1914929 - RNA, 19 nt, Human
ugucaagagggucugagga

SEQ ID NO: 1914930 - RNA, 15 nt, Human
ugucaagccauaauu

SEQ ID NO: 1914931 - RNA, 16 nt, Human
uguauuuuuuuacuaa

SEQ ID NO: 1914932 - RNA, 14 nt, Human
uguauuuuuuaaag

SEQ ID NO: 1914933 - RNA, 16 nt, Human
uguauuuuuuaaagcu

SEQ ID NO: 1914934 - RNA, 17 nt, Human
uguauuuuuuaaagcua

SEQ ID NO: 1914935 - RNA, 14 nt, Human
uguauuuuuuuacu

SEQ ID NO: 1914936 - RNA, 19 nt, Human
uguauuuuucaauaaagca

SEQ ID NO: 1914937 - RNA, 14 nt, Human
uguaguaauugaca

SEQ ID NO: 1914938 - RNA, 15 nt, Human
uguaguaauugacau

SEQ ID NO: 1914939 - RNA, 16 nt, Human
uguaguaauugacaug

SEQ ID NO: 1914940 - RNA, 17 nt, Human
aguaggaagacuuugga

SEQ ID NO: 1914941 - RNA, 18 nt, Human
aguaggaagacuuuggaa

SEQ ID NO: 1914942 - RNA, 19 nt, Human
aguaggaagacuuuggaaa

SEQ ID NO: 1914943 - RNA, 22 nt, Human
aguaggaagacuuuggaaagac

SEQ ID NO: 1914944 - RNA, 16 nt, Human
aguaggaagacuuugg

SEQ ID NO: 1914945 - RNA, 17 nt, Human
aguaggcucauuuacug

SEQ ID NO: 1914946 - RNA, 18 nt, Human
aguaggggaagacaugca

SEQ ID NO: 1914947 - RNA, 18 nt, Human
aguagugccuuuacuuca

SEQ ID NO: 1914948 - RNA, 23 nt, Human
ugucauuugcuggagcucugccc

SEQ ID NO: 1914949 - RNA, 22 nt, Human
ugucaguauguggaaguguggg

SEQ ID NO: 1914950 - RNA, 18 nt, Human
ugucaguauguggaagug

SEQ ID NO: 1914951 - RNA, 20 nt, Human
ugucaguauguggaagugug

SEQ ID NO: 1914952 - RNA, 19 nt, Human
ugucaguauguggaagugu

SEQ ID NO: 1914953 - RNA, 16 nt, Human
ugucagguggggcagc

SEQ ID NO: 1914954 - RNA, 22 nt, Human
ugucaggggcggggagggugac

SEQ ID NO: 1914955 - RNA, 19 nt, Human
ugucagcugaaccugggua

SEQ ID NO: 1914956 - RNA, 19 nt, Human
agucacugagacagcccgg

SEQ ID NO: 1914957 - RNA, 18 nt, Human
agucacugagacagcccg

SEQ ID NO: 1914958 - RNA, 16 nt, Human
ugucagcugaaccugg

SEQ ID NO: 1914959 - RNA, 14 nt, Human
agucaccaagccca

SEQ ID NO: 1914960 - RNA, 13 nt, Human
agucaccaagccc

SEQ ID NO: 1914961 - RNA, 21 nt, Human
aguauuugggaagugaagacu

SEQ ID NO: 1914962 - RNA, 20 nt, Human
agucacauuccugaacagga

SEQ ID NO: 1914963 - RNA, 18 nt, Human
agucacauuccugaacag

SEQ ID NO: 1914964 - RNA, 19 nt, Human
agucacauuccugaacagg

SEQ ID NO: 1914965 - RNA, 17 nt, Human
aguauuugggaagugaa

SEQ ID NO: 1914966 - RNA, 19 nt, Human
aguauguggaagugugggu

SEQ ID NO: 1914967 - RNA, 17 nt, Human
aguauguggaagugugg

SEQ ID NO: 1914968 - RNA, 15 nt, Human
aguauguggaagugu

SEQ ID NO: 1914969 - RNA, 13 nt, Human
aguauaaacaaag

SEQ ID NO: 1914970 - RNA, 16 nt, Human
aguauaaacaaaguua

SEQ ID NO: 1914971 - RNA, 17 nt, Human
aguauaaacaaaguuac

SEQ ID NO: 1914972 - RNA, 19 nt, Human
aguauaaacaaaguuacua

SEQ ID NO: 1914973 - RNA, 22 nt, Human
agugccguguguugcaugcagc

SEQ ID NO: 1914974 - RNA, 20 nt, Human
agugcugcauuuaaaagaua

SEQ ID NO: 1914975 - RNA, 17 nt, Human
agugccuuacacaaugg

SEQ ID NO: 1914976 - RNA, 15 nt, Human
agugccuuacacaau

SEQ ID NO: 1914977 - RNA, 21 nt, Human
agugccuguaaucacagcuac

SEQ ID NO: 1914978 - RNA, 19 nt, Human
agugcugggauuacaggug

SEQ ID NO: 1914979 - RNA, 17 nt, Human
agugcugggauuacagg

SEQ ID NO: 1914980 - RNA, 19 nt, Human
agugcugggauuacaggcu

SEQ ID NO: 1914981 - RNA, 20 nt, Human
agugcugggauuacaagcgu

SEQ ID NO: 1914982 - RNA, 22 nt, Human
agugcugcauuuaaaagauaca

SEQ ID NO: 1914983 - RNA, 16 nt, Human
agugcuuccaaggaug

SEQ ID NO: 1914984 - RNA, 19 nt, Human
ugugucagcauagaaguaa

SEQ ID NO: 1914985 - RNA, 12 nt, Human
ugugguuucauu

SEQ ID NO: 1914986 - RNA, 15 nt, Human
ugugguuaaugccau

SEQ ID NO: 1914987 - RNA, 20 nt, Human
ugugguuaaugccauggaca

SEQ ID NO: 1914988 - RNA, 16 nt, Human
uguggugcagugugaa

SEQ ID NO: 1914989 - RNA, 17 nt, Human
uguggugcagugugaaa

SEQ ID NO: 1914990 - RNA, 14 nt, Human
ugugguuaaugcca

SEQ ID NO: 1914991 - RNA, 14 nt, Human
uguggugguuguga

SEQ ID NO: 1914992 - RNA, 13 nt, Human
uguggucuccacu

SEQ ID NO: 1914993 - RNA, 21 nt, Human
uguuaacauggacaugaucuu

SEQ ID NO: 1914994 - RNA, 17 nt, Human
uguuaacauuuuuggua

SEQ ID NO: 1914995 - RNA, 20 nt, Human
uguuaacauuuuugguaguc

SEQ ID NO: 1914996 - RNA, 18 nt, Human
uguguugccacaggacac

SEQ ID NO: 1914997 - RNA, 23 nt, Human
uguguugccacaggacacaguca

SEQ ID NO: 1914998 - RNA, 19 nt, Human
uguuaaugauagcuacugu

SEQ ID NO: 1914999 - RNA, 17 nt, Human
uguuaaugguuugaaua

SEQ ID NO: 1915000 - RNA, 15 nt, Human
uguuaaugcuuucug

SEQ ID NO: 1915001 - RNA, 11 nt, Human
aguggaaaaau

SEQ ID NO: 1915002 - RNA, 18 nt, Human
aguggaaaaauagccugc

SEQ ID NO: 1915003 - RNA, 19 nt, Human
aguggaaaaauagccugcc

SEQ ID NO: 1915004 - RNA, 19 nt, Human
ugugucagguggggcagcu

SEQ ID NO: 1915005 - RNA, 17 nt, Human
ugugucagguggggcag

SEQ ID NO: 1915006 - RNA, 20 nt, Human
ugugucagguggggcagcuu

SEQ ID NO: 1915007 - RNA, 19 nt, Human
ugugucuaggcaggaccug

SEQ ID NO: 1915008 - RNA, 13 nt, Human
ugugucucuuggu

SEQ ID NO: 1915009 - RNA, 20 nt, Human
ugugucuaggcaggaccugu

SEQ ID NO: 1915010 - RNA, 16 nt, Human
ugugucucuugguccu

SEQ ID NO: 1915011 - RNA, 14 nt, Human
uguguuaugaagca

SEQ ID NO: 1915012 - RNA, 16 nt, Human
uguguguguguaugug

SEQ ID NO: 1915013 - RNA, 13 nt, Human
uguguguguguau

SEQ ID NO: 1915014 - RNA, 18 nt, Human
agugcaaugacacagucu

SEQ ID NO: 1915015 - RNA, 16 nt, Human
agugcaaugacacagu

SEQ ID NO: 1915016 - RNA, 24 nt, Human
agugauucuccugccucagccucc

SEQ ID NO: 1915017 - RNA, 22 nt, Human
agugauucuccugccucagccu

SEQ ID NO: 1915018 - RNA, 16 nt, Human
agugagucgaggacag

SEQ ID NO: 1915019 - RNA, 14 nt, Human
agugcccacaggau

SEQ ID NO: 1915020 - RNA, 14 nt, Human
agugcccccacuga

SEQ ID NO: 1915021 - RNA, 20 nt, Human
agugccccauucuuuuguaa

SEQ ID NO: 1915022 - RNA, 16 nt, Human
agugcccccacugacc

SEQ ID NO: 1915023 - RNA, 19 nt, Human
agugccccauucuuuugua

SEQ ID NO: 1915024 - RNA, 16 nt, Human
agugccaaaaacaaca

SEQ ID NO: 1915025 - RNA, 15 nt, Human
agugccaaguuuguu

SEQ ID NO: 1915026 - RNA, 17 nt, Human
agugcagccguuugaga

SEQ ID NO: 1915027 - RNA, 18 nt, Human
agugcagccguuugagaa

SEQ ID NO: 1915028 - RNA, 15 nt, Human
ugugcucuggacagg

SEQ ID NO: 1915029 - RNA, 23 nt, Human
ugugcucugaucauccacugugc

SEQ ID NO: 1915030 - RNA, 12 nt, Human
ugugcucugauc

SEQ ID NO: 1915031 - RNA, 22 nt, Human
ugugcucugaucauccacugug

SEQ ID NO: 1915032 - RNA, 16 nt, Human
ugugccucccugguga

SEQ ID NO: 1915033 - RNA, 14 nt, Human
ugugccucccuggu

SEQ ID NO: 1915034 - RNA, 19 nt, Human
agucucacuguugcccagg

SEQ ID NO: 1915035 - RNA, 18 nt, Human
agucucacuguugcccag

SEQ ID NO: 1915036 - RNA, 20 nt, Human
agucucacuguugcccaggc

SEQ ID NO: 1915037 - RNA, 21 nt, Human
agucucacuguugcccaggcu

SEQ ID NO: 1915038 - RNA, 21 nt, Human
ugugcccuaaaguguauuuuu

SEQ ID NO: 1915039 - RNA, 20 nt, Human
ugugcccuaaaguguauuuu

SEQ ID NO: 1915040 - RNA, 19 nt, Human
ugugcucuggacaggcaug

SEQ ID NO: 1915041 - RNA, 14 nt, Human
ugugcucugcuuca

SEQ ID NO: 1915042 - RNA, 18 nt, Human
ugugcucuggacaggcau

SEQ ID NO: 1915043 - RNA, 16 nt, Human
ugugcucuggacaggc

SEQ ID NO: 1915044 - RNA, 13 nt, Human
ugugcugcccugc

SEQ ID NO: 1915045 - RNA, 14 nt, Human
ugugcugcccugcc

SEQ ID NO: 1915046 - RNA, 15 nt, Human
ugugcugcccugccc

SEQ ID NO: 1915047 - RNA, 16 nt, Human
uguggauuuuuuccua

SEQ ID NO: 1915048 - RNA, 17 nt, Human
uguggcaaggaaaaaca

SEQ ID NO: 1915049 - RNA, 13 nt, Human
uguuguuauuuaa

SEQ ID NO: 1915050 - RNA, 11 nt, Human
uguuguuauuu

SEQ ID NO: 1915051 - RNA, 15 nt, Human
uguuguuccuuuuga

SEQ ID NO: 1915052 - RNA, 14 nt, Human
uguuguuccuuuug

SEQ ID NO: 1915053 - RNA, 18 nt, Human
uguuguuccuuuugaaag

SEQ ID NO: 1915054 - RNA, 20 nt, Human
uguuuagauaauacaccacu

SEQ ID NO: 1915055 - RNA, 16 nt, Human
uguugugugugggagu

SEQ ID NO: 1915056 - RNA, 16 nt, Human
uguugugccucccugg

SEQ ID NO: 1915057 - RNA, 15 nt, Human
uguugugugugggag

SEQ ID NO: 1915058 - RNA, 14 nt, Human
uguuguguguggga

SEQ ID NO: 1915059 - RNA, 22 nt, Human
uguugguuacccuccuagcuuu

SEQ ID NO: 1915060 - RNA, 16 nt, Human
uguugucugcaacucu

SEQ ID NO: 1915061 - RNA, 13 nt, Human
uguugucugcaac

SEQ ID NO: 1915062 - RNA, 13 nt, Human
uguuuaguaauca

SEQ ID NO: 1915063 - RNA, 17 nt, Human
uguuuagcagcagccuu

SEQ ID NO: 1915064 - RNA, 22 nt, Human
uguuuagcagcagccuuuaaug

SEQ ID NO: 1915065 - RNA, 14 nt, Human
uguuuaguaaucau

SEQ ID NO: 1915066 - RNA, 17 nt, Human
uguuuaguaaucauauu

SEQ ID NO: 1915067 - RNA, 14 nt, Human
uguuuauugucaaa

SEQ ID NO: 1915068 - RNA, 19 nt, Human
uguuuauuaguuuugcaua

SEQ ID NO: 1915069 - RNA, 14 nt, Human
uguuuaugcuuuug

SEQ ID NO: 1915070 - RNA, 21 nt, Human
aguucaauaaaugucuguuga

SEQ ID NO: 1915071 - RNA, 19 nt, Human
aguucaauaaaugucuguu

SEQ ID NO: 1915072 - RNA, 18 nt, Human
aguucaauaaaugucugu

SEQ ID NO: 1915073 - RNA, 13 nt, Human
aguucaauccuac

SEQ ID NO: 1915074 - RNA, 16 nt, Human
aguucaauucucauuu

SEQ ID NO: 1915075 - RNA, 16 nt, Human
aguuaucuaaaagaaa

SEQ ID NO: 1915076 - RNA, 23 nt, Human
aguuccucauuagcauuuugcua

SEQ ID NO: 1915077 - RNA, 15 nt, Human
aguucuaguugcuug

SEQ ID NO: 1915078 - RNA, 19 nt, Human
aguucggugagcuacaaau

SEQ ID NO: 1915079 - RNA, 20 nt, Human
aguucggugagcuacaaaug

SEQ ID NO: 1915080 - RNA, 23 nt, Human
aguguuaucagucauaacuaaau

SEQ ID NO: 1915081 - RNA, 16 nt, Human
aguguuaucagucaua

SEQ ID NO: 1915082 - RNA, 19 nt, Human
aguguguguuuuucauaaa

SEQ ID NO: 1915083 - RNA, 15 nt, Human
uguugcccaggcugg

SEQ ID NO: 1915084 - RNA, 21 nt, Human
uguugcccaggcuggagugca

SEQ ID NO: 1915085 - RNA, 14 nt, Human
uguugcccaggcug

SEQ ID NO: 1915086 - RNA, 13 nt, Human
uguugcccaggcu

SEQ ID NO: 1915087 - RNA, 19 nt, Human
uguucuuucacccuuuucu

SEQ ID NO: 1915088 - RNA, 20 nt, Human
uguucuugguuuguaaauua

SEQ ID NO: 1915089 - RNA, 22 nt, Human
uguucuugguuuguaaauuaac

SEQ ID NO: 1915090 - RNA, 19 nt, Human
aguuagaauaauaaauauu

SEQ ID NO: 1915091 - RNA, 18 nt, Human
aguuagaauaauaaauau

SEQ ID NO: 1915092 - RNA, 15 nt, Human
aguuagaauaauaaa

SEQ ID NO: 1915093 - RNA, 14 nt, Human
uguuauuuaaagaa

SEQ ID NO: 1915094 - RNA, 18 nt, Human
uguuauuuaacagcugaa

SEQ ID NO: 1915095 - RNA, 19 nt, Human
uguuccccuccuccacucu

SEQ ID NO: 1915096 - RNA, 17 nt, Human
uguuccccuccuccacu

SEQ ID NO: 1915097 - RNA, 12 nt, Human
uguuccccuccu

SEQ ID NO: 1915098 - RNA, 15 nt, Human
uguuccccuccucca

SEQ ID NO: 1915099 - RNA, 13 nt, Human
uguuccccuccuc

SEQ ID NO: 1915100 - RNA, 23 nt, Human
uguuccccuccuccacucucccc

SEQ ID NO: 1915101 - RNA, 18 nt, Human
uguucuagcauggcugcc

SEQ ID NO: 1915102 - RNA, 18 nt, Human
uguucuuaguuugcaguu

SEQ ID NO: 1915103 - RNA, 15 nt, Human
uguucuacuuuguuc

SEQ ID NO: 1915104 - RNA, 20 nt, Human
uguuaucaaaacuuucuuuu

SEQ ID NO: 1915105 - RNA, 21 nt, Human
uguuaucagucaauauuuuua

SEQ ID NO: 1915106 - RNA, 23 nt, Human
agugugggucuguguguguguau

SEQ ID NO: 1915107 - RNA, 19 nt, Human
agugugggucugugugugu

SEQ ID NO: 1915108 - RNA, 13 nt, Human
uguuauccuauuu

SEQ ID NO: 1915109 - RNA, 19 nt, Human
uguuauccuuuuuuaaaag

SEQ ID NO: 1915110 - RNA, 16 nt, Human
aguggaaccagcccag

SEQ ID NO: 1915111 - RNA, 22 nt, Human
aguggaaagacagcuucucauc

SEQ ID NO: 1915112 - RNA, 19 nt, Human
aguggagaacugggcuugc

SEQ ID NO: 1915113 - RNA, 14 nt, Human
aguggaggcacuuu

SEQ ID NO: 1915114 - RNA, 17 nt, Human
aguggaggcacuuuagg

SEQ ID NO: 1915115 - RNA, 15 nt, Human
agugugggucugugu

SEQ ID NO: 1915116 - RNA, 17 nt, Human
agugugggucugugugu

SEQ ID NO: 1915117 - RNA, 16 nt, Human
agugugggucugugug

SEQ ID NO: 1915118 - RNA, 17 nt, Human
auaaaauaucauucagc

SEQ ID NO: 1915119 - RNA, 16 nt, Human
auaaaauaucauucag

SEQ ID NO: 1915120 - RNA, 15 nt, Human
auaaaauaucauuca

SEQ ID NO: 1915121 - RNA, 13 nt, Human
auaaaauaucauu

SEQ ID NO: 1915122 - RNA, 19 nt, Human
auaaaauaucauucagcaa

SEQ ID NO: 1915123 - RNA, 18 nt, Human
auaaaauaucauucagca

SEQ ID NO: 1915124 - RNA, 20 nt, Human
uuaagaaaaaggaugcacag

SEQ ID NO: 1915125 - RNA, 21 nt, Human
uuaagaaaaaggaugcacaga

SEQ ID NO: 1915126 - RNA, 13 nt, Human
auaaaagccuguu

SEQ ID NO: 1915127 - RNA, 20 nt, Human
aguuuuuauugcuuguugga

SEQ ID NO: 1915128 - RNA, 15 nt, Human
aguuuuuauugcuug

SEQ ID NO: 1915129 - RNA, 18 nt, Human
auaaaagccuguuuaaga

SEQ ID NO: 1915130 - RNA, 22 nt, Human
aguuuccccaccagugaaugaa

SEQ ID NO: 1915131 - RNA, 23 nt, Human
aguuuccccaccagugaaugaaa

SEQ ID NO: 1915132 - RNA, 17 nt, Human
aguuuccccaccaguga

SEQ ID NO: 1915133 - RNA, 15 nt, Human
aguuuuguaaauuuc

SEQ ID NO: 1915134 - RNA, 12 nt, Human
aguuuuguaaau

SEQ ID NO: 1915135 - RNA, 23 nt, Human
aguuuuuauggcuuuugugcauu

SEQ ID NO: 1915136 - RNA, 20 nt, Human
uuaaucuuuucacaaauaaa

SEQ ID NO: 1915137 - RNA, 19 nt, Human
uuaaucuuuucacaaauaa

SEQ ID NO: 1915138 - RNA, 18 nt, Human
uuaaucuuuucacaaaua

SEQ ID NO: 1915139 - RNA, 22 nt, Human
uuaaucuccaccagucauuuuu

SEQ ID NO: 1915140 - RNA, 17 nt, Human
uuaaucuuuucacaaau

SEQ ID NO: 1915141 - RNA, 18 nt, Human
uuaaugaaagacuguaca

SEQ ID NO: 1915142 - RNA, 22 nt, Human
uuaaucugguuuauuuuuguuc

SEQ ID NO: 1915143 - RNA, 19 nt, Human
uuaaugaaagacuguacaa

SEQ ID NO: 1915144 - RNA, 21 nt, Human
uuaauugacuuauuuauauaa

SEQ ID NO: 1915145 - RNA, 12 nt, Human
uuaauugcuuug

SEQ ID NO: 1915146 - RNA, 13 nt, Human
uuaauugcuuuga

SEQ ID NO: 1915147 - RNA, 13 nt, Human
uuaaucauuaggu

SEQ ID NO: 1915148 - RNA, 14 nt, Human
uuaaucaaguugaa

SEQ ID NO: 1915149 - RNA, 17 nt, Human
uuaaucaaguugaauug

SEQ ID NO: 1915150 - RNA, 23 nt, Human
uuaaucauuaggugugacugaau

SEQ ID NO: 1915151 - RNA, 22 nt, Human
uuaaucauuaggugugacugaa

SEQ ID NO: 1915152 - RNA, 20 nt, Human
auaaaauaucauucagcaac

SEQ ID NO: 1915153 - RNA, 22 nt, Human
uuaagaaagacuaucuaaaugu

SEQ ID NO: 1915154 - RNA, 9 nt, Human
uuaaggugg

SEQ ID NO: 1915155 - RNA, 22 nt, Human
uuaagggaguguacucccaggg

SEQ ID NO: 1915156 - RNA, 18 nt, Human
uuaaggugauauauuuaa

SEQ ID NO: 1915157 - RNA, 14 nt, Human
uuaagugcugcauu

SEQ ID NO: 1915158 - RNA, 19 nt, Human
uuaagugcugcauuuaaaa

SEQ ID NO: 1915159 - RNA, 16 nt, Human
uuaagugcugcauuua

SEQ ID NO: 1915160 - RNA, 15 nt, Human
uuaagugcugcauuu

SEQ ID NO: 1915161 - RNA, 14 nt, Human
aguugcuuguaaaa

SEQ ID NO: 1915162 - RNA, 13 nt, Human
aguugggcuuccu

SEQ ID NO: 1915163 - RNA, 19 nt, Human
aguugggcuuccucauagu

SEQ ID NO: 1915164 - RNA, 17 nt, Human
aguuggguggaugccug

SEQ ID NO: 1915165 - RNA, 15 nt, Human
aguugggugagaaca

SEQ ID NO: 1915166 - RNA, 17 nt, Human
aguuggggucuggcagc

SEQ ID NO: 1915167 - RNA, 21 nt, Human
aguuggggucuggcagccucc

SEQ ID NO: 1915168 - RNA, 23 nt, Human
aguugccagucaccccggccacc

SEQ ID NO: 1915169 - RNA, 14 nt, Human
aguuuaaauuguaa

SEQ ID NO: 1915170 - RNA, 18 nt, Human
aguuuaaaacagaagccu

SEQ ID NO: 1915171 - RNA, 17 nt, Human
aguuggucccccuucca

SEQ ID NO: 1915172 - RNA, 15 nt, Human
aguuuaaaaaaauug

SEQ ID NO: 1915173 - RNA, 11 nt, Human
aguuggucccc

SEQ ID NO: 1915174 - RNA, 13 nt, Human
aguuggucccccu

SEQ ID NO: 1915175 - RNA, 13 nt, Human
uuaaaaaaaaucc

SEQ ID NO: 1915176 - RNA, 12 nt, Human
uuaaaaaaagaa

SEQ ID NO: 1915177 - RNA, 12 nt, Human
uuaaaaaaauca

SEQ ID NO: 1915178 - RNA, 20 nt, Human
uuaaaaaaauugguuggaga

SEQ ID NO: 1915179 - RNA, 18 nt, Human
uuaaaaaaaucaaaacaa

SEQ ID NO: 1915180 - RNA, 18 nt, Human
uuaaaaaaagaagagaaa

SEQ ID NO: 1915181 - RNA, 18 nt, Human
aguuuaauugacuuauuu

SEQ ID NO: 1915182 - RNA, 15 nt, Human
aguuuaauugacuua

SEQ ID NO: 1915183 - RNA, 14 nt, Human
aguuuaauugacuu

SEQ ID NO: 1915184 - RNA, 17 nt, Human
uuaaaaaucucaaauuu

SEQ ID NO: 1915185 - RNA, 16 nt, Human
uuaaaaaucucaaauu

SEQ ID NO: 1915186 - RNA, 15 nt, Human
uuaaaaaucucaaau

SEQ ID NO: 1915187 - RNA, 14 nt, Human
uuaaaaaucucaaa

SEQ ID NO: 1915188 - RNA, 22 nt, Human
uuaaacaaauguaugauuacau

SEQ ID NO: 1915189 - RNA, 15 nt, Human
uuaaauaaugugaaa

SEQ ID NO: 1915190 - RNA, 12 nt, Human
uuaaaguauuuu

SEQ ID NO: 1915191 - RNA, 18 nt, Human
uuaaauaaugugaaacug

SEQ ID NO: 1915192 - RNA, 16 nt, Human
uuaaauaaugugaaac

SEQ ID NO: 1915193 - RNA, 15 nt, Human
uuaaauacaaaacuu

SEQ ID NO: 1915194 - RNA, 16 nt, Human
uuaaauacaaaacuuc

SEQ ID NO: 1915195 - RNA, 18 nt, Human
uuaaauacaaaacuucca

SEQ ID NO: 1915196 - RNA, 20 nt, Human
uuaacagaaauguacagcaa

SEQ ID NO: 1915197 - RNA, 15 nt, Human
aguuucauguacaag

SEQ ID NO: 1915198 - RNA, 18 nt, Human
aguuucauguacaagaug

SEQ ID NO: 1915199 - RNA, 21 nt, Human
aguuucauguacaagaugaag

SEQ ID NO: 1915200 - RNA, 19 nt, Human
uuaacagaaauguacagca

SEQ ID NO: 1915201 - RNA, 14 nt, Human
auaaauaaaaauaa

SEQ ID NO: 1915202 - RNA, 15 nt, Human
auaaauaguuuauga

SEQ ID NO: 1915203 - RNA, 20 nt, Human
auaaauauugucuuuuugua

SEQ ID NO: 1915204 - RNA, 21 nt, Human
auaaauauugucuuuuuguau

SEQ ID NO: 1915205 - RNA, 23 nt, Human
auaaauauugucuuuuuguaugu

SEQ ID NO: 1915206 - RNA, 11 nt, Human
auaaauauuua

SEQ ID NO: 1915207 - RNA, 13 nt, Human
auaaauaaaaaua

SEQ ID NO: 1915208 - RNA, 17 nt, Human
auaaagguucaugcaaa

SEQ ID NO: 1915209 - RNA, 15 nt, Human
auaaagguucaugca

SEQ ID NO: 1915210 - RNA, 22 nt, Human
auaacgauaaaagacagugaaa

SEQ ID NO: 1915211 - RNA, 14 nt, Human
auaacguauaaaag

SEQ ID NO: 1915212 - RNA, 23 nt, Human
auaaccguuuccuuucauuuacu

SEQ ID NO: 1915213 - RNA, 20 nt, Human
auaaccaugugaaaaggcaa

SEQ ID NO: 1915214 - RNA, 13 nt, Human
auaaauuccucuu

SEQ ID NO: 1915215 - RNA, 20 nt, Human
auaaauuccucuuugcuuug

SEQ ID NO: 1915216 - RNA, 11 nt, Human
auaaauuauuu

SEQ ID NO: 1915217 - RNA, 19 nt, Human
uuacccucauguucuuaau

SEQ ID NO: 1915218 - RNA, 13 nt, Human
uuaccuuugacaa

SEQ ID NO: 1915219 - RNA, 20 nt, Human
uuaccuuugacaaagguaaa

SEQ ID NO: 1915220 - RNA, 18 nt, Human
uuacccuccuagcuuucc

SEQ ID NO: 1915221 - RNA, 20 nt, Human
uuagacagagucucacuguu

SEQ ID NO: 1915222 - RNA, 13 nt, Human
uuagacagucccu

SEQ ID NO: 1915223 - RNA, 13 nt, Human
uuagacagagucu

SEQ ID NO: 1915224 - RNA, 20 nt, Human
uuagaacacugguuuaaagg

SEQ ID NO: 1915225 - RNA, 16 nt, Human
uuacugaagccuuucu

SEQ ID NO: 1915226 - RNA, 22 nt, Human
uuagaaagaagcccaauauuau

SEQ ID NO: 1915227 - RNA, 15 nt, Human
auaauaaauguacau

SEQ ID NO: 1915228 - RNA, 12 nt, Human
auaauacaccac

SEQ ID NO: 1915229 - RNA, 20 nt, Human
auaauacaccacuacauucu

SEQ ID NO: 1915230 - RNA, 18 nt, Human
auaauacaccacuacauu

SEQ ID NO: 1915231 - RNA, 19 nt, Human
auaauacuugcuuuggaaa

SEQ ID NO: 1915232 - RNA, 22 nt, Human
auaauacuauauuuauacugua

SEQ ID NO: 1915233 - RNA, 18 nt, Human
auaauccuaaacauauga

SEQ ID NO: 1915234 - RNA, 18 nt, Human
auaaucucuccauucccg

SEQ ID NO: 1915235 - RNA, 15 nt, Human
auaaucuauaugcug

SEQ ID NO: 1915236 - RNA, 15 nt, Human
auaaugcgugcauac

SEQ ID NO: 1915237 - RNA, 15 nt, Human
auaaugaaugaaaca

SEQ ID NO: 1915238 - RNA, 22 nt, Human
auaauugacaggauuauuggaa

SEQ ID NO: 1915239 - RNA, 14 nt, Human
uuagcggagacgga

SEQ ID NO: 1915240 - RNA, 16 nt, Human
uuagccuuugucccag

SEQ ID NO: 1915241 - RNA, 18 nt, Human
uuagccaagugugguaga

SEQ ID NO: 1915242 - RNA, 18 nt, Human
auaauuuaccugaagucu

SEQ ID NO: 1915243 - RNA, 18 nt, Human
uuagcaaauucuguuuuu

SEQ ID NO: 1915244 - RNA, 20 nt, Human
uuagggaaggauacaaaagc

SEQ ID NO: 1915245 - RNA, 16 nt, Human
uuaggugugacugaau

SEQ ID NO: 1915246 - RNA, 16 nt, Human
uuaggugaggaagcaa

SEQ ID NO: 1915247 - RNA, 21 nt, Human
uuaggugugacugaauuucuu

SEQ ID NO: 1915248 - RNA, 13 nt, Human
uuagggagaaaau

SEQ ID NO: 1915249 - RNA, 17 nt, Human
uuagggagaaaauucaa

SEQ ID NO: 1915250 - RNA, 15 nt, Human
uuaguuucuccaagc

SEQ ID NO: 1915251 - RNA, 22 nt, Human
uuaguuugcaguuacacuaaaa

SEQ ID NO: 1915252 - RNA, 24 nt, Human
uuaguaacaugaggggacauuuug

SEQ ID NO: 1915253 - RNA, 22 nt, Human
uuuuaaaacaagaaaguuuccc

SEQ ID NO: 1915254 - RNA, 17 nt, Human
uuuuaaaaauagacacu

SEQ ID NO: 1915255 - RNA, 18 nt, Human
uuuguuugaacugauaaa

SEQ ID NO: 1915256 - RNA, 13 nt, Human
uuuguuugugcau

SEQ ID NO: 1915257 - RNA, 15 nt, Human
uuuuaagaggcaggg

SEQ ID NO: 1915258 - RNA, 16 nt, Human
uuuuaagaggcagggu

SEQ ID NO: 1915259 - RNA, 22 nt, Human
uuuuaagauaaauuauaaguua

SEQ ID NO: 1915260 - RNA, 19 nt, Human
uuuuaagacguguuugugu

SEQ ID NO: 1915261 - RNA, 13 nt, Human
uuuuaacucaaua

SEQ ID NO: 1915262 - RNA, 16 nt, Human
uuuuaacuagaauuua

SEQ ID NO: 1915263 - RNA, 21 nt, Human
uuuuaaccccgucaacaaauc

SEQ ID NO: 1915264 - RNA, 12 nt, Human
uuuuaacuagaa

SEQ ID NO: 1915265 - RNA, 16 nt, Human
uuuuaaccccgucaac

SEQ ID NO: 1915266 - RNA, 18 nt, Human
uuuuaaccccgucaacaa

SEQ ID NO: 1915267 - RNA, 20 nt, Human
uuuuaaccccgucaacaaau

SEQ ID NO: 1915268 - RNA, 12 nt, Human
uuuuaagcuguu

SEQ ID NO: 1915269 - RNA, 16 nt, Human
uuuuaaguaaggaauu

SEQ ID NO: 1915270 - RNA, 15 nt, Human
uuuuaagugcugcau

SEQ ID NO: 1915271 - RNA, 16 nt, Human
augucuguugaugacu

SEQ ID NO: 1915272 - RNA, 19 nt, Human
augucuguaucacucugug

SEQ ID NO: 1915273 - RNA, 14 nt, Human
augucugcauuucg

SEQ ID NO: 1915274 - RNA, 15 nt, Human
augucugagugaacc

SEQ ID NO: 1915275 - RNA, 16 nt, Human
augucugagugaaccu

SEQ ID NO: 1915276 - RNA, 22 nt, Human
augucugagugaaccuguauaa

SEQ ID NO: 1915277 - RNA, 13 nt, Human
uuuguagagccag

SEQ ID NO: 1915278 - RNA, 20 nt, Human
uuuguaacccagauuuugcu

SEQ ID NO: 1915279 - RNA, 17 nt, Human
uuuguaaauuuauguga

SEQ ID NO: 1915280 - RNA, 21 nt, Human
uuuguaacccagauuuugcug

SEQ ID NO: 1915281 - RNA, 17 nt, Human
uuugucugucuucauag

SEQ ID NO: 1915282 - RNA, 18 nt, Human
uuuguaggggaacucauu

SEQ ID NO: 1915283 - RNA, 20 nt, Human
uuuguaggggaacucauuug

SEQ ID NO: 1915284 - RNA, 17 nt, Human
uuuguagaagucacauu

SEQ ID NO: 1915285 - RNA, 14 nt, Human
uuuguuugaacuga

SEQ ID NO: 1915286 - RNA, 13 nt, Human
uuuguuugaacug

SEQ ID NO: 1915287 - RNA, 12 nt, Human
uuuguuugaacu

SEQ ID NO: 1915288 - RNA, 18 nt, Human
uuugugaggaagccgcug

SEQ ID NO: 1915289 - RNA, 19 nt, Human
uuugugaggaagccgcugg

SEQ ID NO: 1915290 - RNA, 21 nt, Human
uuugcuguagaagauggcacu

SEQ ID NO: 1915291 - RNA, 18 nt, Human
uuugcuguauauuuguga

SEQ ID NO: 1915292 - RNA, 13 nt, Human
uuugcuguagaag

SEQ ID NO: 1915293 - RNA, 12 nt, Human
uuugcuuagaaa

SEQ ID NO: 1915294 - RNA, 16 nt, Human
uuugcuuagaaaagaa

SEQ ID NO: 1915295 - RNA, 15 nt, Human
uuugcuucaaaaaca

SEQ ID NO: 1915296 - RNA, 14 nt, Human
uuuggggauauuuu

SEQ ID NO: 1915297 - RNA, 22 nt, Human
uuugggaggccaaggugggagg

SEQ ID NO: 1915298 - RNA, 22 nt, Human
uuugggaaaaaaacauacacaa

SEQ ID NO: 1915299 - RNA, 20 nt, Human
uuugggaagugaagacugga

SEQ ID NO: 1915300 - RNA, 22 nt, Human
uuugggaagugaagacuggaag

SEQ ID NO: 1915301 - RNA, 22 nt, Human
uuugccauguuggccaggcugg

SEQ ID NO: 1915302 - RNA, 19 nt, Human
uuugcuaugagcuggggau

SEQ ID NO: 1915303 - RNA, 23 nt, Human
uuugcucagugucuggcugcaga

SEQ ID NO: 1915304 - RNA, 22 nt, Human
uuugggggaaaauuuagaaaua

SEQ ID NO: 1915305 - RNA, 21 nt, Human
auguagucagaauuagcugcu

SEQ ID NO: 1915306 - RNA, 15 nt, Human
auguaucaaugagua

SEQ ID NO: 1915307 - RNA, 15 nt, Human
auguaucugagcagg

SEQ ID NO: 1915308 - RNA, 17 nt, Human
auguaugcuucauacag

SEQ ID NO: 1915309 - RNA, 20 nt, Human
auguaugcuucauacaggga

SEQ ID NO: 1915310 - RNA, 12 nt, Human
auguauguguaa

SEQ ID NO: 1915311 - RNA, 13 nt, Human
augucaguaugug

SEQ ID NO: 1915312 - RNA, 23 nt, Human
augucaggggcggggagggugac

SEQ ID NO: 1915313 - RNA, 16 nt, Human
auguccacugguucuu

SEQ ID NO: 1915314 - RNA, 22 nt, Human
augucuauaaaccgaacugaug

SEQ ID NO: 1915315 - RNA, 17 nt, Human
augucuauuaaggugau

SEQ ID NO: 1915316 - RNA, 21 nt, Human
augucagugugacugaucucu

SEQ ID NO: 1915317 - RNA, 14 nt, Human
augucaguaugugg

SEQ ID NO: 1915318 - RNA, 15 nt, Human
augucagugugacug

SEQ ID NO: 1915319 - RNA, 16 nt, Human
augucagugugacuga

SEQ ID NO: 1915320 - RNA, 19 nt, Human
auguccaagaagcccagga

SEQ ID NO: 1915321 - RNA, 18 nt, Human
auguccaagaagcccagg

SEQ ID NO: 1915322 - RNA, 23 nt, Human
auguccaagaagcccaggaaagg

SEQ ID NO: 1915323 - RNA, 22 nt, Human
auguuuacacucuuuguaagag

SEQ ID NO: 1915324 - RNA, 19 nt, Human
auguuuacagaggacagua

SEQ ID NO: 1915325 - RNA, 17 nt, Human
auguuuacagaggacag

SEQ ID NO: 1915326 - RNA, 15 nt, Human
auguuuacagaggac

SEQ ID NO: 1915327 - RNA, 14 nt, Human
auguuuuccaugag

SEQ ID NO: 1915328 - RNA, 23 nt, Human
auguuuauuucauaaagaauugu

SEQ ID NO: 1915329 - RNA, 22 nt, Human
uuuucuccaauuuuuuuuuccu

SEQ ID NO: 1915330 - RNA, 18 nt, Human
auguugugccucccuggu

SEQ ID NO: 1915331 - RNA, 18 nt, Human
auguuuuucuucucccuc

SEQ ID NO: 1915332 - RNA, 17 nt, Human
auguuuuuguguauuug

SEQ ID NO: 1915333 - RNA, 17 nt, Human
auguuuuucuucucccu

SEQ ID NO: 1915334 - RNA, 18 nt, Human
auuaaccacuucagcuga

SEQ ID NO: 1915335 - RNA, 20 nt, Human
auuaaccacuucagcugacu

SEQ ID NO: 1915336 - RNA, 17 nt, Human
auuaaccacuucagcug

SEQ ID NO: 1915337 - RNA, 21 nt, Human
auuaaacuuaaucuaaaugga

SEQ ID NO: 1915338 - RNA, 19 nt, Human
auuaaacuuaaucuaaaug

SEQ ID NO: 1915339 - RNA, 16 nt, Human
auuaaacuuaaucuaa

SEQ ID NO: 1915340 - RNA, 17 nt, Human
auuaaacuuaaucuaaa

SEQ ID NO: 1915341 - RNA, 12 nt, Human
auuaacuuuuau

SEQ ID NO: 1915342 - RNA, 20 nt, Human
auuaacuuuuauaaacuuua

SEQ ID NO: 1915343 - RNA, 19 nt, Human
auuaacuuuuauaaacuuu

SEQ ID NO: 1915344 - RNA, 17 nt, Human
auuaacuuuuauaaacu

SEQ ID NO: 1915345 - RNA, 16 nt, Human
auuaacuuuuauaaac

SEQ ID NO: 1915346 - RNA, 23 nt, Human
auuaacuuuuauaaacuuuaccu

SEQ ID NO: 1915347 - RNA, 13 nt, Human
auuaagaaagacu

SEQ ID NO: 1915348 - RNA, 14 nt, Human
auuaagaaagacua

SEQ ID NO: 1915349 - RNA, 15 nt, Human
auuaagaaggcaaaa

SEQ ID NO: 1915350 - RNA, 19 nt, Human
auuaagaaggcaaaaaugu

SEQ ID NO: 1915351 - RNA, 22 nt, Human
auuaagaaggcaaaaauguaaa

SEQ ID NO: 1915352 - RNA, 13 nt, Human
auguugaggugga

SEQ ID NO: 1915353 - RNA, 16 nt, Human
auguugagaaucccaa

SEQ ID NO: 1915354 - RNA, 22 nt, Human
auguugagaaucccaaauuuga

SEQ ID NO: 1915355 - RNA, 16 nt, Human
auguuggccaggcugg

SEQ ID NO: 1915356 - RNA, 14 nt, Human
auguuggccaggcu

SEQ ID NO: 1915357 - RNA, 13 nt, Human
auguuggccaggc

SEQ ID NO: 1915358 - RNA, 23 nt, Human
uuuuagaguugauacuacaguuu

SEQ ID NO: 1915359 - RNA, 18 nt, Human
uuuuagauacuuugcuag

SEQ ID NO: 1915360 - RNA, 19 nt, Human
uuuuaguugcaacuuugua

SEQ ID NO: 1915361 - RNA, 13 nt, Human
uuuuauaaacuuu

SEQ ID NO: 1915362 - RNA, 12 nt, Human
uuuuauaaacuu

SEQ ID NO: 1915363 - RNA, 14 nt, Human
uuuuaaguugcuga

SEQ ID NO: 1915364 - RNA, 22 nt, Human
uuuuaaguuacacauuuuucag

SEQ ID NO: 1915365 - RNA, 21 nt, Human
uuuuaaguuacacauuuuuca

SEQ ID NO: 1915366 - RNA, 21 nt, Human
uuuuaagugcugcauuuaaaa

SEQ ID NO: 1915367 - RNA, 17 nt, Human
uuuuaagugcugcauuu

SEQ ID NO: 1915368 - RNA, 16 nt, Human
uuuuaagugcugcauu

SEQ ID NO: 1915369 - RNA, 21 nt, Human
auguucaucauccuaagcuau

SEQ ID NO: 1915370 - RNA, 19 nt, Human
auguucaucaaugaaugaa

SEQ ID NO: 1915371 - RNA, 14 nt, Human
auguugaauacuuu

SEQ ID NO: 1915372 - RNA, 15 nt, Human
auguugaauacuuuu

SEQ ID NO: 1915373 - RNA, 19 nt, Human
auguugaauacuuuuuaca

SEQ ID NO: 1915374 - RNA, 17 nt, Human
uuuuauaaacuuuaccu

SEQ ID NO: 1915375 - RNA, 14 nt, Human
uuuuauaaacuuua

SEQ ID NO: 1915376 - RNA, 19 nt, Human
uuuuauaaacuuuaccuuu

SEQ ID NO: 1915377 - RNA, 19 nt, Human
uuuuaugccuuuuauuucu

SEQ ID NO: 1915378 - RNA, 22 nt, Human
uuuuauguugcauagaauaaaa

SEQ ID NO: 1915379 - RNA, 19 nt, Human
uuuuaugugaaacauguuu

SEQ ID NO: 1915380 - RNA, 19 nt, Human
uuuuauguaguaauugaca

SEQ ID NO: 1915381 - RNA, 18 nt, Human
uuuuaugugaaacauguu

SEQ ID NO: 1915382 - RNA, 19 nt, Human
uuuuccagguuuaagcugu

SEQ ID NO: 1915383 - RNA, 19 nt, Human
uuuuccaugaaaaugcaac

SEQ ID NO: 1915384 - RNA, 18 nt, Human
uuuuccaugaaaaugcaa

SEQ ID NO: 1915385 - RNA, 13 nt, Human
uuuuccaggcugg

SEQ ID NO: 1915386 - RNA, 21 nt, Human
uuuucagauauaaaagacuga

SEQ ID NO: 1915387 - RNA, 19 nt, Human
uuuucagauauaaaagacu

SEQ ID NO: 1915388 - RNA, 22 nt, Human
uuuucagauauaaaagacugac

SEQ ID NO: 1915389 - RNA, 13 nt, Human
uuuucagcauuga

SEQ ID NO: 1915390 - RNA, 17 nt, Human
uuuucagauauaaaaga

SEQ ID NO: 1915391 - RNA, 21 nt, Human
uuuuauucagcucauggacuu

SEQ ID NO: 1915392 - RNA, 16 nt, Human
auuccaccugcaauca

SEQ ID NO: 1915393 - RNA, 20 nt, Human
auuccacuuauaggaauuga

SEQ ID NO: 1915394 - RNA, 14 nt, Human
auucaguuuucauu

SEQ ID NO: 1915395 - RNA, 13 nt, Human
auucaguuuucau

SEQ ID NO: 1915396 - RNA, 15 nt, Human
auucaguuuucauuu

SEQ ID NO: 1915397 - RNA, 19 nt, Human
auuccccaggaggccagcc

SEQ ID NO: 1915398 - RNA, 20 nt, Human
auucccuucgacagcauuuu

SEQ ID NO: 1915399 - RNA, 23 nt, Human
auucccuucgacagcauuuuccu

SEQ ID NO: 1915400 - RNA, 22 nt, Human
auuccccacccugaaagcccug

SEQ ID NO: 1915401 - RNA, 20 nt, Human
auuccccagauugcaacagg

SEQ ID NO: 1915402 - RNA, 16 nt, Human
auuccccaggaggcca

SEQ ID NO: 1915403 - RNA, 17 nt, Human
auucagcggaauauuga

SEQ ID NO: 1915404 - RNA, 14 nt, Human
auucagcucaugga

SEQ ID NO: 1915405 - RNA, 21 nt, Human
auucaguuguuagugugucuu

SEQ ID NO: 1915406 - RNA, 21 nt, Human
auucaggaauguguggccugc

SEQ ID NO: 1915407 - RNA, 23 nt, Human
auucaggaagcucagggccuggc

SEQ ID NO: 1915408 - RNA, 16 nt, Human
auucaguuguuagugu

SEQ ID NO: 1915409 - RNA, 14 nt, Human
auucagcucugcaa

SEQ ID NO: 1915410 - RNA, 18 nt, Human
auucagcucugcaagaau

SEQ ID NO: 1915411 - RNA, 21 nt, Human
auucaggaagcucagggccug

SEQ ID NO: 1915412 - RNA, 22 nt, Human
auucaggaagcucagggccugg

SEQ ID NO: 1915413 - RNA, 16 nt, Human
auuauuuauauaugua

SEQ ID NO: 1915414 - RNA, 23 nt, Human
auuauuuauuaaaugcccagccc

SEQ ID NO: 1915415 - RNA, 13 nt, Human
auuauuuuaaaag

SEQ ID NO: 1915416 - RNA, 13 nt, Human
auuauuuauuauu

SEQ ID NO: 1915417 - RNA, 16 nt, Human
auuauuuuauguugca

SEQ ID NO: 1915418 - RNA, 14 nt, Human
auuauuuuaaaaga

SEQ ID NO: 1915419 - RNA, 18 nt, Human
auuauuuuauguugcaua

SEQ ID NO: 1915420 - RNA, 11 nt, Human
auuauuaaagg

SEQ ID NO: 1915421 - RNA, 20 nt, Human
auuauguuuuuuaaaauauu

SEQ ID NO: 1915422 - RNA, 16 nt, Human
auuauguuuuuuaaaa

SEQ ID NO: 1915423 - RNA, 23 nt, Human
auuaucaagcuaauaaaauauca

SEQ ID NO: 1915424 - RNA, 22 nt, Human
auuaucaagcuaauaaaauauc

SEQ ID NO: 1915425 - RNA, 17 nt, Human
auuaucaagcuaauaaa

SEQ ID NO: 1915426 - RNA, 16 nt, Human
auuaucaagcuaauaa

SEQ ID NO: 1915427 - RNA, 15 nt, Human
auuaucaagcuaaua

SEQ ID NO: 1915428 - RNA, 17 nt, Human
auuauauuuacaaaugg

SEQ ID NO: 1915429 - RNA, 14 nt, Human
auuauccauauuga

SEQ ID NO: 1915430 - RNA, 17 nt, Human
auuauccauauugaguc

SEQ ID NO: 1915431 - RNA, 22 nt, Human
auuauaauauacuauauuuaug

SEQ ID NO: 1915432 - RNA, 13 nt, Human
auuagaauagugu

SEQ ID NO: 1915433 - RNA, 22 nt, Human
auuagaauaguguucugcaaaa

SEQ ID NO: 1915434 - RNA, 19 nt, Human
auuagaaaauguuauuuaa

SEQ ID NO: 1915435 - RNA, 22 nt, Human
auuagaaaauguuauuuaacag

SEQ ID NO: 1915436 - RNA, 13 nt, Human
auuagaaaauguu

SEQ ID NO: 1915437 - RNA, 18 nt, Human
auuagaaaauguuauuua

SEQ ID NO: 1915438 - RNA, 16 nt, Human
auuauauuuacaaaug

SEQ ID NO: 1915439 - RNA, 22 nt, Human
uuuuuguuccacaaguuaaaua

SEQ ID NO: 1915440 - RNA, 16 nt, Human
auuaagaucucagugg

SEQ ID NO: 1915441 - RNA, 20 nt, Human
auuaagagagucuauuuacg

SEQ ID NO: 1915442 - RNA, 12 nt, Human
uuuuuuaaaaaa

SEQ ID NO: 1915443 - RNA, 20 nt, Human
auuaauauggggaugcagca

SEQ ID NO: 1915444 - RNA, 12 nt, Human
auuaauaugaaa

SEQ ID NO: 1915445 - RNA, 14 nt, Human
auuaauaugaaaac

SEQ ID NO: 1915446 - RNA, 15 nt, Human
auuaauaugaaaacu

SEQ ID NO: 1915447 - RNA, 19 nt, Human
auuaccacagacauacuaa

SEQ ID NO: 1915448 - RNA, 22 nt, Human
auuaccugaauuuuggcugugu

SEQ ID NO: 1915449 - RNA, 12 nt, Human
auuaccagggac

SEQ ID NO: 1915450 - RNA, 13 nt, Human
auuacucuuucuc

SEQ ID NO: 1915451 - RNA, 13 nt, Human
auuaccucugaua

SEQ ID NO: 1915452 - RNA, 15 nt, Human
auuguauuacaaauc

SEQ ID NO: 1915453 - RNA, 14 nt, Human
auuguauuacaaau

SEQ ID NO: 1915454 - RNA, 15 nt, Human
auugugaaauuauuc

SEQ ID NO: 1915455 - RNA, 13 nt, Human
auugugccccugc

SEQ ID NO: 1915456 - RNA, 15 nt, Human
auugucuuuuuguau

SEQ ID NO: 1915457 - RNA, 23 nt, Human
auugugaaauaaaacuggcuuug

SEQ ID NO: 1915458 - RNA, 21 nt, Human
auuguuugggauccuauugaa

SEQ ID NO: 1915459 - RNA, 12 nt, Human
auuguuugaacc

SEQ ID NO: 1915460 - RNA, 23 nt, Human
auuggcuuuggguugcaggaccu

SEQ ID NO: 1915461 - RNA, 21 nt, Human
auuggcucacacugagaaugu

SEQ ID NO: 1915462 - RNA, 21 nt, Human
auuggcucuugaacugagcuu

SEQ ID NO: 1915463 - RNA, 20 nt, Human
auugcguuugaccuuuuaug

SEQ ID NO: 1915464 - RNA, 21 nt, Human
auugcguuugaccuuuuaugu

SEQ ID NO: 1915465 - RNA, 17 nt, Human
auuguauauuguguuug

SEQ ID NO: 1915466 - RNA, 16 nt, Human
auuuacaaaugggaaa

SEQ ID NO: 1915467 - RNA, 22 nt, Human
auuuacaacugggggaggguga

SEQ ID NO: 1915468 - RNA, 19 nt, Human
auuuacccuucuuuucuga

SEQ ID NO: 1915469 - RNA, 23 nt, Human
auuuaauuuuuuugagacagagu

SEQ ID NO: 1915470 - RNA, 19 nt, Human
auuuaauuuuuuugagaca

SEQ ID NO: 1915471 - RNA, 18 nt, Human
auuuaaccucuaaauucu

SEQ ID NO: 1915472 - RNA, 16 nt, Human
auuuaaccucuaaauu

SEQ ID NO: 1915473 - RNA, 17 nt, Human
auuuaacagggagggga

SEQ ID NO: 1915474 - RNA, 22 nt, Human
auuuaacagcugaauuaucuau

SEQ ID NO: 1915475 - RNA, 16 nt, Human
auuuaacagaaaugua

SEQ ID NO: 1915476 - RNA, 15 nt, Human
auuuaacagaaaugu

SEQ ID NO: 1915477 - RNA, 21 nt, Human
auuuaaaggcccuaucuguuu

SEQ ID NO: 1915478 - RNA, 20 nt, Human
auuuaaaggcccuaucuguu

SEQ ID NO: 1915479 - RNA, 18 nt, Human
auuuaaaggcccuaucug

SEQ ID NO: 1915480 - RNA, 19 nt, Human
auuuaacagaaauguacag

SEQ ID NO: 1915481 - RNA, 17 nt, Human
auuuaacagaaauguac

SEQ ID NO: 1915482 - RNA, 20 nt, Human
auuuaacagaaauguacagc

SEQ ID NO: 1915483 - RNA, 15 nt, Human
auuuaacagcugaau

SEQ ID NO: 1915484 - RNA, 21 nt, Human
auuuaacagcugaauuaucua

SEQ ID NO: 1915485 - RNA, 20 nt, Human
auuuaaaauugugauguguc

SEQ ID NO: 1915486 - RNA, 19 nt, Human
auuuaaaauugugaugugu

SEQ ID NO: 1915487 - RNA, 15 nt, Human
auuuaaacaaacaaa

SEQ ID NO: 1915488 - RNA, 13 nt, Human
auugacagaagcu

SEQ ID NO: 1915489 - RNA, 20 nt, Human
auugacacuuaaaaaugguu

SEQ ID NO: 1915490 - RNA, 16 nt, Human
auucuccaccugccag

SEQ ID NO: 1915491 - RNA, 17 nt, Human
auucuccaccugccagg

SEQ ID NO: 1915492 - RNA, 18 nt, Human
auucucagaaucucaaau

SEQ ID NO: 1915493 - RNA, 20 nt, Human
auucucagaaucucaaauaa

SEQ ID NO: 1915494 - RNA, 13 nt, Human
auucuccaccugc

SEQ ID NO: 1915495 - RNA, 14 nt, Human
auucucagaaucuc

SEQ ID NO: 1915496 - RNA, 22 nt, Human
auucuacuugcucuggaccugc

SEQ ID NO: 1915497 - RNA, 19 nt, Human
auucucacagcuccaagaa

SEQ ID NO: 1915498 - RNA, 22 nt, Human
auucucacagcuccaagaauuu

SEQ ID NO: 1915499 - RNA, 21 nt, Human
auucucacagcuccaagaauu

SEQ ID NO: 1915500 - RNA, 13 nt, Human
auucuacuuugag

SEQ ID NO: 1915501 - RNA, 16 nt, Human
auucuacuuugagugc

SEQ ID NO: 1915502 - RNA, 12 nt, Human
auucuacuugcu

SEQ ID NO: 1915503 - RNA, 13 nt, Human
auucuacuugcuc

SEQ ID NO: 1915504 - RNA, 15 nt, Human
auucuacuugcucug

SEQ ID NO: 1915505 - RNA, 16 nt, Human
auucuacuugcucugg

SEQ ID NO: 1915506 - RNA, 17 nt, Human
auucuacuugcucugga

SEQ ID NO: 1915507 - RNA, 18 nt, Human
auucuacuugcucuggac

SEQ ID NO: 1915508 - RNA, 19 nt, Human
auucuacuugcucuggacc

SEQ ID NO: 1915509 - RNA, 20 nt, Human
auucuacuugcucuggaccu

SEQ ID NO: 1915510 - RNA, 21 nt, Human
auucuacuugcucuggaccug

SEQ ID NO: 1915511 - RNA, 23 nt, Human
auucuacuugcucuggaccugcc

SEQ ID NO: 1915512 - RNA, 18 nt, Human
auucuccaccugccaggg

SEQ ID NO: 1915513 - RNA, 20 nt, Human
auugcauuuuuuaaaacaag

SEQ ID NO: 1915514 - RNA, 19 nt, Human
auugcauuuuuuaaaacaa

SEQ ID NO: 1915515 - RNA, 18 nt, Human
auugcauuuuuuaaaaca

SEQ ID NO: 1915516 - RNA, 21 nt, Human
auugcauuuuuuaaaacaaga

SEQ ID NO: 1915517 - RNA, 23 nt, Human
auugccauuucuuccacaagagc

SEQ ID NO: 1915518 - RNA, 21 nt, Human
auugcccacgcuggagugcag

SEQ ID NO: 1915519 - RNA, 17 nt, Human
auugcccacgcuggagu

SEQ ID NO: 1915520 - RNA, 19 nt, Human
auugcggacagccacggcc

SEQ ID NO: 1915521 - RNA, 18 nt, Human
auugcggacagccacggc

SEQ ID NO: 1915522 - RNA, 16 nt, Human
auugcggacagccacg

SEQ ID NO: 1915523 - RNA, 15 nt, Human
auugcaacaggcugg

SEQ ID NO: 1915524 - RNA, 12 nt, Human
auugcaaaucuu

SEQ ID NO: 1915525 - RNA, 16 nt, Human
auugcaaaucuugaaa

SEQ ID NO: 1915526 - RNA, 17 nt, Human
auugcaaaucuugaaau

SEQ ID NO: 1915527 - RNA, 19 nt, Human
auugcaaaucuugaaauua

SEQ ID NO: 1915528 - RNA, 13 nt, Human
auugaccugaggc

SEQ ID NO: 1915529 - RNA, 18 nt, Human
auugacaggauuauugga

SEQ ID NO: 1915530 - RNA, 16 nt, Human
auucuccacagcaacc

SEQ ID NO: 1915531 - RNA, 13 nt, Human
auugacagcuuug

SEQ ID NO: 1915532 - RNA, 14 nt, Human
auugacagcuuugc

SEQ ID NO: 1915533 - RNA, 15 nt, Human
auugacagcuuugcu

SEQ ID NO: 1915534 - RNA, 16 nt, Human
auugacagcuuugcug

SEQ ID NO: 1915535 - RNA, 18 nt, Human
auugacagcuuugcugcu

SEQ ID NO: 1915536 - RNA, 19 nt, Human
auugacagcuuugcugcug

SEQ ID NO: 1915537 - RNA, 21 nt, Human
auugacccacaagaaaugaaa

SEQ ID NO: 1915538 - RNA, 23 nt, Human
auugaccgcgacuaauuucaaaa

SEQ ID NO: 1915539 - RNA, 17 nt, Human
auugaccgcgacuaauu

SEQ ID NO: 1915540 - RNA, 20 nt, Human
auugaccgcgacuaauuuca

SEQ ID NO: 1915541 - RNA, 21 nt, Human
auugcaacaggcugggcuuca

SEQ ID NO: 1915542 - RNA, 16 nt, Human
auugcaacaggcuggg

SEQ ID NO: 1915543 - RNA, 12 nt, Human
auugcaauagaa

SEQ ID NO: 1915544 - RNA, 20 nt, Human
auugcagaacuaaacucauu

SEQ ID NO: 1915545 - RNA, 22 nt, Human
auugcagaacuaaacucauuua

SEQ ID NO: 1915546 - RNA, 23 nt, Human
auugcaggagucccugccaucau

SEQ ID NO: 1915547 - RNA, 14 nt, Human
auugcuacuguccu

SEQ ID NO: 1915548 - RNA, 22 nt, Human
auuugaggucuguucuuuccaa

SEQ ID NO: 1915549 - RNA, 19 nt, Human
auuugaguguuuuaagaua

SEQ ID NO: 1915550 - RNA, 12 nt, Human
auuugaguguuu

SEQ ID NO: 1915551 - RNA, 17 nt, Human
auuugagcagggcucag

SEQ ID NO: 1915552 - RNA, 23 nt, Human
auuugaggucuguucuuuccaaa

SEQ ID NO: 1915553 - RNA, 15 nt, Human
auuugaggucuguuc

SEQ ID NO: 1915554 - RNA, 20 nt, Human
auuucuuuugccguuauuaa

SEQ ID NO: 1915555 - RNA, 19 nt, Human
auuucuuugugcuuuggcu

SEQ ID NO: 1915556 - RNA, 18 nt, Human
auuugaauguaugcuuca

SEQ ID NO: 1915557 - RNA, 17 nt, Human
auuugaauguaugcuuc

SEQ ID NO: 1915558 - RNA, 22 nt, Human
auuugaauguaugcuucauaca

SEQ ID NO: 1915559 - RNA, 21 nt, Human
auuugaauguaugcuucauac

SEQ ID NO: 1915560 - RNA, 20 nt, Human
auuugaauguaugcuucaua

SEQ ID NO: 1915561 - RNA, 20 nt, Human
auuuggugguuucagaaaug

SEQ ID NO: 1915562 - RNA, 18 nt, Human
auuuggugguuucagaaa

SEQ ID NO: 1915563 - RNA, 17 nt, Human
auuugguuuucacauug

SEQ ID NO: 1915564 - RNA, 15 nt, Human
auuugguuuucacau

SEQ ID NO: 1915565 - RNA, 22 nt, Human
auuugguuuucacauuggaaac

SEQ ID NO: 1915566 - RNA, 21 nt, Human
auuugguuuucacauuggaaa

SEQ ID NO: 1915567 - RNA, 14 nt, Human
auuugguuuuccug

SEQ ID NO: 1915568 - RNA, 16 nt, Human
auuugguuuuccugua

SEQ ID NO: 1915569 - RNA, 17 nt, Human
auuuggugguuucagaa

SEQ ID NO: 1915570 - RNA, 17 nt, Human
auuuggguucugccugc

SEQ ID NO: 1915571 - RNA, 12 nt, Human
auuuggggugga

SEQ ID NO: 1915572 - RNA, 13 nt, Human
auuuggaauacuu

SEQ ID NO: 1915573 - RNA, 14 nt, Human
auuuggaauacuuu

SEQ ID NO: 1915574 - RNA, 15 nt, Human
auuuggaauacuuuu

SEQ ID NO: 1915575 - RNA, 13 nt, Human
auuuauuauggca

SEQ ID NO: 1915576 - RNA, 22 nt, Human
auuuauuaaaugcccagccccu

SEQ ID NO: 1915577 - RNA, 20 nt, Human
auuuauuaaaugcccagccc

SEQ ID NO: 1915578 - RNA, 18 nt, Human
auuuagguuuuuauuagu

SEQ ID NO: 1915579 - RNA, 19 nt, Human
auuuagguuuuuauuagua

SEQ ID NO: 1915580 - RNA, 17 nt, Human
auuuagguuuuuauuag

SEQ ID NO: 1915581 - RNA, 21 nt, Human
auuuaguaggugaguuuucac

SEQ ID NO: 1915582 - RNA, 22 nt, Human
auuuauguuugcacuugugauu

SEQ ID NO: 1915583 - RNA, 21 nt, Human
auuuagcuaaacggauuccaa

SEQ ID NO: 1915584 - RNA, 22 nt, Human
auuuagcuaaacggauuccaaa

SEQ ID NO: 1915585 - RNA, 19 nt, Human
auuuacgcuuugauucaua

SEQ ID NO: 1915586 - RNA, 16 nt, Human
auuuaccuuuuugaaa

SEQ ID NO: 1915587 - RNA, 15 nt, Human
auuuacgcuuugauu

SEQ ID NO: 1915588 - RNA, 17 nt, Human
auuuacgcuuugauuca

SEQ ID NO: 1915589 - RNA, 23 nt, Human
auuuagcuaaacggauuccaaag

SEQ ID NO: 1915590 - RNA, 21 nt, Human
auuuagcuccaaaccuucaca

SEQ ID NO: 1915591 - RNA, 14 nt, Human
auuuaggagaagcc

SEQ ID NO: 1915592 - RNA, 17 nt, Human
auuuaggagaagccagg

SEQ ID NO: 1915593 - RNA, 14 nt, Human
auuuccugugucuu

SEQ ID NO: 1915594 - RNA, 16 nt, Human
auuuauuauggcacau

SEQ ID NO: 1915595 - RNA, 22 nt, Human
auuuccugggagcuuuuguaga

SEQ ID NO: 1915596 - RNA, 23 nt, Human
auuuccugggagcuuuuguagaa

SEQ ID NO: 1915597 - RNA, 13 nt, Human
auuucuaaaucuc

SEQ ID NO: 1915598 - RNA, 12 nt, Human
auuucuaaaucu

SEQ ID NO: 1915599 - RNA, 21 nt, Human
auuucuaaaucuccaaaauaa

SEQ ID NO: 1915600 - RNA, 14 nt, Human
auuuccuugaaugu

SEQ ID NO: 1915601 - RNA, 21 nt, Human
auuuuacuuuaaaaggagcca

SEQ ID NO: 1915602 - RNA, 18 nt, Human
auuuuauguugcauagaa

SEQ ID NO: 1915603 - RNA, 21 nt, Human
auuuuauguugcauagaauaa

SEQ ID NO: 1915604 - RNA, 14 nt, Human
auuuuauguugcau

SEQ ID NO: 1915605 - RNA, 13 nt, Human
auuuuauuaugca

SEQ ID NO: 1915606 - RNA, 15 nt, Human
auuuuauuaugcaug

SEQ ID NO: 1915607 - RNA, 14 nt, Human
auuuuauuaugcau

SEQ ID NO: 1915608 - RNA, 17 nt, Human
auuuuauuaugcaugaa

SEQ ID NO: 1915609 - RNA, 22 nt, Human
auuuuauuuguaggggaacuca

SEQ ID NO: 1915610 - RNA, 22 nt, Human
auuuuacuguacagacagaaaa

SEQ ID NO: 1915611 - RNA, 20 nt, Human
auuuuacuguacagacagaa

SEQ ID NO: 1915612 - RNA, 13 nt, Human
auuuuacauaaau

SEQ ID NO: 1915613 - RNA, 22 nt, Human
auuuguaggggaacucauuugg

SEQ ID NO: 1915614 - RNA, 19 nt, Human
auuuguaggggaacucauu

SEQ ID NO: 1915615 - RNA, 23 nt, Human
auuucuuuugccguuauuaaaaa

SEQ ID NO: 1915616 - RNA, 20 nt, Human
uucauauguaccauguacau

SEQ ID NO: 1915617 - RNA, 14 nt, Human
uucauauugaauau

SEQ ID NO: 1915618 - RNA, 18 nt, Human
uucauauugcugagagaa

SEQ ID NO: 1915619 - RNA, 19 nt, Human
uucauaauuauuauuuggc

SEQ ID NO: 1915620 - RNA, 18 nt, Human
uucagugccuuauggaac

SEQ ID NO: 1915621 - RNA, 21 nt, Human
uucauacagggaugguguuca

SEQ ID NO: 1915622 - RNA, 16 nt, Human
uucagugccaaaaaca

SEQ ID NO: 1915623 - RNA, 12 nt, Human
uucagugccuua

SEQ ID NO: 1915624 - RNA, 13 nt, Human
uucagugccuuau

SEQ ID NO: 1915625 - RNA, 13 nt, Human
uucagaaaugugu

SEQ ID NO: 1915626 - RNA, 11 nt, Human
uucagaaaugu

SEQ ID NO: 1915627 - RNA, 16 nt, Human
uucagaaagugugcuu

SEQ ID NO: 1915628 - RNA, 18 nt, Human
uucagaaagugugcuuua

SEQ ID NO: 1915629 - RNA, 12 nt, Human
auauauguauuu

SEQ ID NO: 1915630 - RNA, 21 nt, Human
uucaucccucuggggcuguuc

SEQ ID NO: 1915631 - RNA, 19 nt, Human
auauauguauauauaugca

SEQ ID NO: 1915632 - RNA, 17 nt, Human
uucaucccucuggggcu

SEQ ID NO: 1915633 - RNA, 19 nt, Human
uucaucccaacugucuuuu

SEQ ID NO: 1915634 - RNA, 12 nt, Human
auauauuuuaag

SEQ ID NO: 1915635 - RNA, 13 nt, Human
auauauuuuaaga

SEQ ID NO: 1915636 - RNA, 13 nt, Human
auauauuugugua

SEQ ID NO: 1915637 - RNA, 12 nt, Human
auauauuuaaaa

SEQ ID NO: 1915638 - RNA, 17 nt, Human
auauauuggguuccauu

SEQ ID NO: 1915639 - RNA, 21 nt, Human
auauauuggguuccauucuca

SEQ ID NO: 1915640 - RNA, 19 nt, Human
auauguaccauguacauga

SEQ ID NO: 1915641 - RNA, 14 nt, Human
auauguaccaugua

SEQ ID NO: 1915642 - RNA, 14 nt, Human
auauguacaugaga

SEQ ID NO: 1915643 - RNA, 17 nt, Human
auauguaacaagccacc

SEQ ID NO: 1915644 - RNA, 16 nt, Human
auauguaacaagccac

SEQ ID NO: 1915645 - RNA, 22 nt, Human
auaugcacacauuuuuuaaaug

SEQ ID NO: 1915646 - RNA, 16 nt, Human
auaugcacacauuuuu

SEQ ID NO: 1915647 - RNA, 15 nt, Human
auaugcacacauuuu

SEQ ID NO: 1915648 - RNA, 14 nt, Human
auaugcacacauuu

SEQ ID NO: 1915649 - RNA, 16 nt, Human
auaucugaaaauguau

SEQ ID NO: 1915650 - RNA, 17 nt, Human
auaucugaaaauguaug

SEQ ID NO: 1915651 - RNA, 20 nt, Human
auaucugaaaauguaugugu

SEQ ID NO: 1915652 - RNA, 13 nt, Human
auaucuuuauuaa

SEQ ID NO: 1915653 - RNA, 16 nt, Human
auaucuuuauuaauca

SEQ ID NO: 1915654 - RNA, 14 nt, Human
auauauuuuaagac

SEQ ID NO: 1915655 - RNA, 22 nt, Human
auauauuuguguauuuaacagg

SEQ ID NO: 1915656 - RNA, 17 nt, Human
auauauuuguguauuua

SEQ ID NO: 1915657 - RNA, 21 nt, Human
auauauuuguguauuuaacag

SEQ ID NO: 1915658 - RNA, 21 nt, Human
auaucuccgucaacucauauu

SEQ ID NO: 1915659 - RNA, 20 nt, Human
auaucuccgucaacucauau

SEQ ID NO: 1915660 - RNA, 19 nt, Human
auaucuccgucaacucaua

SEQ ID NO: 1915661 - RNA, 13 nt, Human
uucauuuacugug

SEQ ID NO: 1915662 - RNA, 19 nt, Human
uucauuuacuguggcuucu

SEQ ID NO: 1915663 - RNA, 16 nt, Human
uucauuuacuguggcu

SEQ ID NO: 1915664 - RNA, 18 nt, Human
uucauuuaggugaggaag

SEQ ID NO: 1915665 - RNA, 21 nt, Human
uucauuuagcuaaacggauuc

SEQ ID NO: 1915666 - RNA, 13 nt, Human
uuccaagagccug

SEQ ID NO: 1915667 - RNA, 15 nt, Human
uuccaaggguacuaa

SEQ ID NO: 1915668 - RNA, 17 nt, Human
uuccaaggguacuaagg

SEQ ID NO: 1915669 - RNA, 13 nt, Human
uuccaagagcuga

SEQ ID NO: 1915670 - RNA, 12 nt, Human
uuccaagagcug

SEQ ID NO: 1915671 - RNA, 22 nt, Human
uuccaagagccugagagugagg

SEQ ID NO: 1915672 - RNA, 14 nt, Human
uuccaagagccuga

SEQ ID NO: 1915673 - RNA, 16 nt, Human
auauguggaguucauc

SEQ ID NO: 1915674 - RNA, 15 nt, Human
auauguggaguucau

SEQ ID NO: 1915675 - RNA, 22 nt, Human
uuccacaagagcccaggccucc

SEQ ID NO: 1915676 - RNA, 19 nt, Human
uuccaccaucaagccacca

SEQ ID NO: 1915677 - RNA, 15 nt, Human
uuccacaccuuuuau

SEQ ID NO: 1915678 - RNA, 22 nt, Human
uuccacaccuuuuauugacaca

SEQ ID NO: 1915679 - RNA, 18 nt, Human
uuccacacucaccucuaa

SEQ ID NO: 1915680 - RNA, 17 nt, Human
uuccaggggugggacac

SEQ ID NO: 1915681 - RNA, 21 nt, Human
uuccaggcuaaacauccaaua

SEQ ID NO: 1915682 - RNA, 23 nt, Human
uucccaaagcagugcaugcuguc

SEQ ID NO: 1915683 - RNA, 18 nt, Human
uuccaguguccuuagaac

SEQ ID NO: 1915684 - RNA, 15 nt, Human
uuccagugcaacacu

SEQ ID NO: 1915685 - RNA, 19 nt, Human
uuccagugcaacacugaag

SEQ ID NO: 1915686 - RNA, 21 nt, Human
uuccagugcaacacugaagcu

SEQ ID NO: 1915687 - RNA, 21 nt, Human
uuccaggggugggacacccug

SEQ ID NO: 1915688 - RNA, 17 nt, Human
uuccagugaggcucugc

SEQ ID NO: 1915689 - RNA, 19 nt, Human
uuccagugaggcucugccc

SEQ ID NO: 1915690 - RNA, 20 nt, Human
uuccagugaggcucugcccu

SEQ ID NO: 1915691 - RNA, 21 nt, Human
uuccagugaggcucugcccuu

SEQ ID NO: 1915692 - RNA, 22 nt, Human
uuccagugaggcucugcccuug

SEQ ID NO: 1915693 - RNA, 16 nt, Human
uucccaagcucugcuc

SEQ ID NO: 1915694 - RNA, 15 nt, Human
uucccaagcucugcu

SEQ ID NO: 1915695 - RNA, 14 nt, Human
uucccaagcucugc

SEQ ID NO: 1915696 - RNA, 13 nt, Human
uucccaagcucug

SEQ ID NO: 1915697 - RNA, 15 nt, Human
uucccaacucuagcu

SEQ ID NO: 1915698 - RNA, 17 nt, Human
uucccaacucuagcugg

SEQ ID NO: 1915699 - RNA, 18 nt, Human
uucccaacucuagcuggg

SEQ ID NO: 1915700 - RNA, 18 nt, Human
uucccaagcucugcuccu

SEQ ID NO: 1915701 - RNA, 11 nt, Human
uucccaagcuc

SEQ ID NO: 1915702 - RNA, 12 nt, Human
uucccaccucuc

SEQ ID NO: 1915703 - RNA, 22 nt, Human
uucccaccucucucacuccuug

SEQ ID NO: 1915704 - RNA, 19 nt, Human
auagucuagacuaaaagau

SEQ ID NO: 1915705 - RNA, 20 nt, Human
auagucuagauggcuccucu

SEQ ID NO: 1915706 - RNA, 17 nt, Human
auaguggcuuaaaacaa

SEQ ID NO: 1915707 - RNA, 15 nt, Human
auaguggugugauuu

SEQ ID NO: 1915708 - RNA, 16 nt, Human
auaguggggagacuuc

SEQ ID NO: 1915709 - RNA, 22 nt, Human
auaguguucugcaaaaauauuu

SEQ ID NO: 1915710 - RNA, 22 nt, Human
auaguuggcuaggaccccucca

SEQ ID NO: 1915711 - RNA, 20 nt, Human
auaguuguaccgcaauguga

SEQ ID NO: 1915712 - RNA, 14 nt, Human
auauaaaaaacuuu

SEQ ID NO: 1915713 - RNA, 22 nt, Human
auaguuaagcgugcauaaguua

SEQ ID NO: 1915714 - RNA, 15 nt, Human
auaguuagaaccugg

SEQ ID NO: 1915715 - RNA, 21 nt, Human
auaguugaaccuauuucucuu

SEQ ID NO: 1915716 - RNA, 13 nt, Human
uucacuucacgcu

SEQ ID NO: 1915717 - RNA, 22 nt, Human
uucacuguccuccaagccagcg

SEQ ID NO: 1915718 - RNA, 22 nt, Human
uucacugugaccuugagaagau

SEQ ID NO: 1915719 - RNA, 21 nt, Human
auauauauuuuuuucugaaau

SEQ ID NO: 1915720 - RNA, 13 nt, Human
auauauauuuuaa

SEQ ID NO: 1915721 - RNA, 15 nt, Human
auauauauauauauu

SEQ ID NO: 1915722 - RNA, 12 nt, Human
auauauaaccag

SEQ ID NO: 1915723 - RNA, 13 nt, Human
auauauaaccagu

SEQ ID NO: 1915724 - RNA, 16 nt, Human
auauaaaagacugacc

SEQ ID NO: 1915725 - RNA, 15 nt, Human
auauaaauaaaacau

SEQ ID NO: 1915726 - RNA, 18 nt, Human
auauaaauaaaacauuuu

SEQ ID NO: 1915727 - RNA, 17 nt, Human
auaggcguaacuaauuu

SEQ ID NO: 1915728 - RNA, 17 nt, Human
auagcuuuugugucuua

SEQ ID NO: 1915729 - RNA, 22 nt, Human
auaggacucaaaguuucagaga

SEQ ID NO: 1915730 - RNA, 22 nt, Human
auaggaauugacccacaagaaa

SEQ ID NO: 1915731 - RNA, 22 nt, Human
auagcuuuucccuuuuuuuaag

SEQ ID NO: 1915732 - RNA, 15 nt, Human
auagcuuuuuucucu

SEQ ID NO: 1915733 - RNA, 12 nt, Human
auaggaaaaacu

SEQ ID NO: 1915734 - RNA, 14 nt, Human
auaggaaaaacuga

SEQ ID NO: 1915735 - RNA, 16 nt, Human
auaggaaaaacugauu

SEQ ID NO: 1915736 - RNA, 17 nt, Human
auaggaaaaacugauuu

SEQ ID NO: 1915737 - RNA, 23 nt, Human
uucacaagacccaaaaggcagaa

SEQ ID NO: 1915738 - RNA, 20 nt, Human
uucacacacagacuguuguc

SEQ ID NO: 1915739 - RNA, 20 nt, Human
uucacagaugggugcuugga

SEQ ID NO: 1915740 - RNA, 15 nt, Human
uucacaguucucucc

SEQ ID NO: 1915741 - RNA, 20 nt, Human
uucacaguucucuccuucuu

SEQ ID NO: 1915742 - RNA, 20 nt, Human
uucacaguucuuugggccag

SEQ ID NO: 1915743 - RNA, 13 nt, Human
uucacaguucucu

SEQ ID NO: 1915744 - RNA, 21 nt, Human
uucacaguucuuugggccaga

SEQ ID NO: 1915745 - RNA, 16 nt, Human
uuauuuuuuaauuauu

SEQ ID NO: 1915746 - RNA, 14 nt, Human
uuauuuuuuaauua

SEQ ID NO: 1915747 - RNA, 17 nt, Human
uuauuuuuuucugaauu

SEQ ID NO: 1915748 - RNA, 13 nt, Human
uuauuuuuuucug

SEQ ID NO: 1915749 - RNA, 17 nt, Human
uuauuuuuagacagagu

SEQ ID NO: 1915750 - RNA, 18 nt, Human
uuauuuuuagacagaguc

SEQ ID NO: 1915751 - RNA, 21 nt, Human
uucaagcgauucuucugcuuc

SEQ ID NO: 1915752 - RNA, 19 nt, Human
uucaagguaauuucuugug

SEQ ID NO: 1915753 - RNA, 21 nt, Human
uucaaaauuguuacaaauugu

SEQ ID NO: 1915754 - RNA, 17 nt, Human
uucaaaauaaaaaugag

SEQ ID NO: 1915755 - RNA, 14 nt, Human
aucccacccacaug

SEQ ID NO: 1915756 - RNA, 13 nt, Human
auccauucuuucu

SEQ ID NO: 1915757 - RNA, 15 nt, Human
auccauucuuucuga

SEQ ID NO: 1915758 - RNA, 16 nt, Human
auccauucuuucugau

SEQ ID NO: 1915759 - RNA, 19 nt, Human
auccaauauuuucuuuaau

SEQ ID NO: 1915760 - RNA, 22 nt, Human
auccaauauuuucuuuaaugcu

SEQ ID NO: 1915761 - RNA, 24 nt, Human
auccaauauuuucuuuaaugcuuu

SEQ ID NO: 1915762 - RNA, 22 nt, Human
auccaaaagaagcccccagcua

SEQ ID NO: 1915763 - RNA, 13 nt, Human
auccaaaagaagc

SEQ ID NO: 1915764 - RNA, 18 nt, Human
auccaaaagaagccccca

SEQ ID NO: 1915765 - RNA, 19 nt, Human
auccaaaagaagcccccag

SEQ ID NO: 1915766 - RNA, 20 nt, Human
auccaaacuuggauuuuuga

SEQ ID NO: 1915767 - RNA, 22 nt, Human
uucuggcucucccauuuccuga

SEQ ID NO: 1915768 - RNA, 16 nt, Human
uucuggcucucccauu

SEQ ID NO: 1915769 - RNA, 15 nt, Human
uucuggcucuuccag

SEQ ID NO: 1915770 - RNA, 10 nt, Human
uucuggcuca

SEQ ID NO: 1915771 - RNA, 20 nt, Human
uucuggcuaugcauuugaaa

SEQ ID NO: 1915772 - RNA, 18 nt, Human
uucuggcuaugcauuuga

SEQ ID NO: 1915773 - RNA, 14 nt, Human
uucugccgcagccc

SEQ ID NO: 1915774 - RNA, 15 nt, Human
uucugccgcagcccu

SEQ ID NO: 1915775 - RNA, 17 nt, Human
uucucuacucuagggaa

SEQ ID NO: 1915776 - RNA, 16 nt, Human
uucucuuuucaaaaca

SEQ ID NO: 1915777 - RNA, 11 nt, Human
uucucuuucuu

SEQ ID NO: 1915778 - RNA, 16 nt, Human
uucucuuucuuuacaa

SEQ ID NO: 1915779 - RNA, 22 nt, Human
uucucuuucuuuacaagauggg

SEQ ID NO: 1915780 - RNA, 14 nt, Human
uucugacccaugcu

SEQ ID NO: 1915781 - RNA, 13 nt, Human
uucugccgcagcc

SEQ ID NO: 1915782 - RNA, 22 nt, Human
uucuccucuuguaaauaaagcc

SEQ ID NO: 1915783 - RNA, 17 nt, Human
uucuccucuuguaaaua

SEQ ID NO: 1915784 - RNA, 19 nt, Human
uucuccucuuguaaauaaa

SEQ ID NO: 1915785 - RNA, 13 nt, Human
uucuccucuugua

SEQ ID NO: 1915786 - RNA, 14 nt, Human
uucuccucuuguaa

SEQ ID NO: 1915787 - RNA, 21 nt, Human
aucauugaaaucuuuuugcuu

SEQ ID NO: 1915788 - RNA, 22 nt, Human
aucauuggauucugagagcugu

SEQ ID NO: 1915789 - RNA, 21 nt, Human
aucauuggauucugagagcug

SEQ ID NO: 1915790 - RNA, 21 nt, Human
aucaggccaggcccucugccc

SEQ ID NO: 1915791 - RNA, 22 nt, Human
aucaggccaggcccucugccca

SEQ ID NO: 1915792 - RNA, 23 nt, Human
aucaggccaggcccucugcccac

SEQ ID NO: 1915793 - RNA, 20 nt, Human
aucaggccaggcccucugcc

SEQ ID NO: 1915794 - RNA, 23 nt, Human
uucuuaaucuuuucacaaauaaa

SEQ ID NO: 1915795 - RNA, 22 nt, Human
uucuuaaucuuuucacaaauaa

SEQ ID NO: 1915796 - RNA, 17 nt, Human
uucuuaaacaaauguau

SEQ ID NO: 1915797 - RNA, 13 nt, Human
uucuuaauucuua

SEQ ID NO: 1915798 - RNA, 15 nt, Human
uucuuacaaacaugu

SEQ ID NO: 1915799 - RNA, 23 nt, Human
uucuuccucccucccucuuuccc

SEQ ID NO: 1915800 - RNA, 23 nt, Human
aucccacccacaugugacacaua

SEQ ID NO: 1915801 - RNA, 20 nt, Human
aucccacccacaugugacac

SEQ ID NO: 1915802 - RNA, 18 nt, Human
aucccacccacaugugac

SEQ ID NO: 1915803 - RNA, 15 nt, Human
aucccacccacaugu

SEQ ID NO: 1915804 - RNA, 18 nt, Human
uucuguucuuucuggcua

SEQ ID NO: 1915805 - RNA, 21 nt, Human
uucuguuggccagugugacaa

SEQ ID NO: 1915806 - RNA, 20 nt, Human
uucuguuuuucuaggccugg

SEQ ID NO: 1915807 - RNA, 12 nt, Human
uucuugcaaagu

SEQ ID NO: 1915808 - RNA, 21 nt, Human
uucuugaucaacaucuuuucu

SEQ ID NO: 1915809 - RNA, 13 nt, Human
uucuugcaaagua

SEQ ID NO: 1915810 - RNA, 22 nt, Human
uucuuucuggcuaugcauuuga

SEQ ID NO: 1915811 - RNA, 16 nt, Human
uucuuuguaaugaaaa

SEQ ID NO: 1915812 - RNA, 19 nt, Human
uucuuugugucaacaugaa

SEQ ID NO: 1915813 - RNA, 21 nt, Human
auccuaggcauuugcugaaua

SEQ ID NO: 1915814 - RNA, 13 nt, Human
auccuaguuccac

SEQ ID NO: 1915815 - RNA, 18 nt, Human
uugaacccgggaggcaga

SEQ ID NO: 1915816 - RNA, 20 nt, Human
uugaacacaaacuguaaaua

SEQ ID NO: 1915817 - RNA, 21 nt, Human
uugaacacaaacuguaaauaa

SEQ ID NO: 1915818 - RNA, 17 nt, Human
uugaacccaggaguuca

SEQ ID NO: 1915819 - RNA, 21 nt, Human
uugaaauuuuuauuaaauuau

SEQ ID NO: 1915820 - RNA, 14 nt, Human
uugaacacaaacug

SEQ ID NO: 1915821 - RNA, 15 nt, Human
uugaacacaaacugu

SEQ ID NO: 1915822 - RNA, 18 nt, Human
uugaacacaaacuguaaa

SEQ ID NO: 1915823 - RNA, 11 nt, Human
uugaaaucuuu

SEQ ID NO: 1915824 - RNA, 20 nt, Human
uugaaauauaggaacuuaaa

SEQ ID NO: 1915825 - RNA, 15 nt, Human
uucuuuuuauugaau

SEQ ID NO: 1915826 - RNA, 13 nt, Human
uucuuuuguaauu

SEQ ID NO: 1915827 - RNA, 20 nt, Human
aucagaccauaauguuacau

SEQ ID NO: 1915828 - RNA, 16 nt, Human
aucagaccauaauguu

SEQ ID NO: 1915829 - RNA, 19 nt, Human
aucagacuaugaaguuuuu

SEQ ID NO: 1915830 - RNA, 13 nt, Human
aucaggccaggcc

SEQ ID NO: 1915831 - RNA, 14 nt, Human
aucaggccaggccc

SEQ ID NO: 1915832 - RNA, 13 nt, Human
uucucagaaucuc

SEQ ID NO: 1915833 - RNA, 14 nt, Human
uucuauaauuuaaa

SEQ ID NO: 1915834 - RNA, 13 nt, Human
uucuauaauuuaa

SEQ ID NO: 1915835 - RNA, 21 nt, Human
uucucacugccaugccagcuu

SEQ ID NO: 1915836 - RNA, 20 nt, Human
uucgaugggcccaauucuua

SEQ ID NO: 1915837 - RNA, 21 nt, Human
uucgaugggcccaauucuuac

SEQ ID NO: 1915838 - RNA, 21 nt, Human
uucgcaggauucuuccucccu

SEQ ID NO: 1915839 - RNA, 14 nt, Human
uucgcauggucaca

SEQ ID NO: 1915840 - RNA, 16 nt, Human
uucgcauggucacaca

SEQ ID NO: 1915841 - RNA, 17 nt, Human
uucgcauggucacacac

SEQ ID NO: 1915842 - RNA, 18 nt, Human
uucgcauggucacacacu

SEQ ID NO: 1915843 - RNA, 19 nt, Human
uucgcauggucacacacug

SEQ ID NO: 1915844 - RNA, 20 nt, Human
uucgcauggucacacacuga

SEQ ID NO: 1915845 - RNA, 21 nt, Human
uucgcauggucacacacugau

SEQ ID NO: 1915846 - RNA, 23 nt, Human
uucgcauggucacacacugaugc

SEQ ID NO: 1915847 - RNA, 14 nt, Human
uucgagaccagccu

SEQ ID NO: 1915848 - RNA, 15 nt, Human
uucgagaccagccug

SEQ ID NO: 1915849 - RNA, 16 nt, Human
uucgagaccagccugg

SEQ ID NO: 1915850 - RNA, 19 nt, Human
uucgagaccagccuggcca

SEQ ID NO: 1915851 - RNA, 23 nt, Human
uucgacagcauuuuccucugcuu

SEQ ID NO: 1915852 - RNA, 16 nt, Human
uucgacagcauuuucc

SEQ ID NO: 1915853 - RNA, 22 nt, Human
uucgaaaccugggauucaggaa

SEQ ID NO: 1915854 - RNA, 19 nt, Human
uucuaaaucuccaaaauaa

SEQ ID NO: 1915855 - RNA, 13 nt, Human
uucgcuccugugu

SEQ ID NO: 1915856 - RNA, 22 nt, Human
uucgcgauggacagacucacaa

SEQ ID NO: 1915857 - RNA, 15 nt, Human
uucuaaaguaaaaac

SEQ ID NO: 1915858 - RNA, 13 nt, Human
uucuaaaguaaaa

SEQ ID NO: 1915859 - RNA, 18 nt, Human
uucccuuuuuuggcugcu

SEQ ID NO: 1915860 - RNA, 19 nt, Human
uucccuuuuuuggcugcug

SEQ ID NO: 1915861 - RNA, 20 nt, Human
uucccuuuuuuggcugcuga

SEQ ID NO: 1915862 - RNA, 17 nt, Human
uucccccuucacaaagc

SEQ ID NO: 1915863 - RNA, 19 nt, Human
uuccccuaaccucauuccc

SEQ ID NO: 1915864 - RNA, 15 nt, Human
uuccccuccuccacu

SEQ ID NO: 1915865 - RNA, 11 nt, Human
auauuuuaauu

SEQ ID NO: 1915866 - RNA, 20 nt, Human
auauuuuacauaaauuuagu

SEQ ID NO: 1915867 - RNA, 16 nt, Human
auauuuuacauaaauu

SEQ ID NO: 1915868 - RNA, 15 nt, Human
auauuuuacauaaau

SEQ ID NO: 1915869 - RNA, 22 nt, Human
aucaaccccuucgcuccugugu

SEQ ID NO: 1915870 - RNA, 20 nt, Human
aucaaccccuucgcuccugu

SEQ ID NO: 1915871 - RNA, 19 nt, Human
aucaaccccuucgcuccug

SEQ ID NO: 1915872 - RNA, 15 nt, Human
aucaaguugaauuga

SEQ ID NO: 1915873 - RNA, 14 nt, Human
aucaaguuauuuuu

SEQ ID NO: 1915874 - RNA, 20 nt, Human
aucaaguauuugggaaguga

SEQ ID NO: 1915875 - RNA, 21 nt, Human
aucaaguauuugggaagugaa

SEQ ID NO: 1915876 - RNA, 15 nt, Human
auauuuuuaauuaaa

SEQ ID NO: 1915877 - RNA, 13 nt, Human
auauuuuuagaua

SEQ ID NO: 1915878 - RNA, 16 nt, Human
auauuuuccaugaaaa

SEQ ID NO: 1915879 - RNA, 18 nt, Human
auauuuuccaugaaaaug

SEQ ID NO: 1915880 - RNA, 22 nt, Human
uuccuguccagcuccaaccugc

SEQ ID NO: 1915881 - RNA, 15 nt, Human
uuccuguccagcucc

SEQ ID NO: 1915882 - RNA, 16 nt, Human
uuccuguccagcucca

SEQ ID NO: 1915883 - RNA, 17 nt, Human
uuccuguccagcuccaa

SEQ ID NO: 1915884 - RNA, 22 nt, Human
uugugauaaguucuaguugcuu

SEQ ID NO: 1915885 - RNA, 18 nt, Human
uuguggccaaggagcugc

SEQ ID NO: 1915886 - RNA, 19 nt, Human
uuguggccaaggagcugcu

SEQ ID NO: 1915887 - RNA, 19 nt, Human
uugugauacaaugcugugc

SEQ ID NO: 1915888 - RNA, 18 nt, Human
uugugauacaaugcugug

SEQ ID NO: 1915889 - RNA, 17 nt, Human
uuguggcuauuaaaacu

SEQ ID NO: 1915890 - RNA, 20 nt, Human
uuguggccaaggagcugcua

SEQ ID NO: 1915891 - RNA, 22 nt, Human
uugugacuagugcugaagcuua

SEQ ID NO: 1915892 - RNA, 23 nt, Human
uugugacuagugcugaagcuuau

SEQ ID NO: 1915893 - RNA, 21 nt, Human
uugugacuagugcugaagcuu

SEQ ID NO: 1915894 - RNA, 17 nt, Human
uugugacuagugcugaa

SEQ ID NO: 1915895 - RNA, 16 nt, Human
uugugacuagugcuga

SEQ ID NO: 1915896 - RNA, 13 nt, Human
uugugacuagugc

SEQ ID NO: 1915897 - RNA, 21 nt, Human
uugugaggaagccgcuggggc

SEQ ID NO: 1915898 - RNA, 13 nt, Human
uugugguuaaucu

SEQ ID NO: 1915899 - RNA, 20 nt, Human
uuguucuggcucuuccaggc

SEQ ID NO: 1915900 - RNA, 22 nt, Human
uuguucuggcucuuccaggcug

SEQ ID NO: 1915901 - RNA, 19 nt, Human
uuguucugcuguucucuag

SEQ ID NO: 1915902 - RNA, 17 nt, Human
uuguguguuuauuguca

SEQ ID NO: 1915903 - RNA, 19 nt, Human
uuguucuggcucuuccagg

SEQ ID NO: 1915904 - RNA, 21 nt, Human
augcacauauggacucugcac

SEQ ID NO: 1915905 - RNA, 13 nt, Human
augcaccagcccu

SEQ ID NO: 1915906 - RNA, 21 nt, Human
augcaacaacauguauaauau

SEQ ID NO: 1915907 - RNA, 19 nt, Human
augcacauauggacucugc

SEQ ID NO: 1915908 - RNA, 16 nt, Human
augcaacaacauguau

SEQ ID NO: 1915909 - RNA, 14 nt, Human
augcaacaacaugu

SEQ ID NO: 1915910 - RNA, 14 nt, Human
augcaccagcccuu

SEQ ID NO: 1915911 - RNA, 12 nt, Human
augcacuuuguu

SEQ ID NO: 1915912 - RNA, 16 nt, Human
augauuuuuaaagaaa

SEQ ID NO: 1915913 - RNA, 14 nt, Human
augauuuuuaaaga

SEQ ID NO: 1915914 - RNA, 21 nt, Human
augauuuccuugaauguggcu

SEQ ID NO: 1915915 - RNA, 21 nt, Human
augauucaacagguuuuccug

SEQ ID NO: 1915916 - RNA, 21 nt, Human
augauucaaaugucuauaaac

SEQ ID NO: 1915917 - RNA, 13 nt, Human
augauuccuuccu

SEQ ID NO: 1915918 - RNA, 15 nt, Human
augauuccuuccugu

SEQ ID NO: 1915919 - RNA, 16 nt, Human
augauuccagguggca

SEQ ID NO: 1915920 - RNA, 15 nt, Human
augauuccagguggc

SEQ ID NO: 1915921 - RNA, 20 nt, Human
augauuaaccacuucagcug

SEQ ID NO: 1915922 - RNA, 21 nt, Human
augauuaaccacuucagcuga

SEQ ID NO: 1915923 - RNA, 19 nt, Human
augauuaaccacuucagcu

SEQ ID NO: 1915924 - RNA, 15 nt, Human
uuguugucugcaacu

SEQ ID NO: 1915925 - RNA, 15 nt, Human
uuuaagauaauuaua

SEQ ID NO: 1915926 - RNA, 15 nt, Human
uuuaagauaaauuau

SEQ ID NO: 1915927 - RNA, 14 nt, Human
uuuaagauaauuau

SEQ ID NO: 1915928 - RNA, 16 nt, Human
augcacuuuguucugg

SEQ ID NO: 1915929 - RNA, 15 nt, Human
augcacuuuguucug

SEQ ID NO: 1915930 - RNA, 13 nt, Human
uuguuuucagugu

SEQ ID NO: 1915931 - RNA, 16 nt, Human
uuguuuucaguguaca

SEQ ID NO: 1915932 - RNA, 14 nt, Human
uuuaaauguuuuuu

SEQ ID NO: 1915933 - RNA, 12 nt, Human
uuuaauuuuaca

SEQ ID NO: 1915934 - RNA, 23 nt, Human
uuuaauucaucccaacugucuuu

SEQ ID NO: 1915935 - RNA, 23 nt, Human
uuuaaugccgauauacucuagau

SEQ ID NO: 1915936 - RNA, 16 nt, Human
uuuaagugcugcauuu

SEQ ID NO: 1915937 - RNA, 15 nt, Human
uuuaagugcugcauu

SEQ ID NO: 1915938 - RNA, 19 nt, Human
uuuaagugcugcauuuaaa

SEQ ID NO: 1915939 - RNA, 17 nt, Human
uuuaagugcugcauuua

SEQ ID NO: 1915940 - RNA, 19 nt, Human
augcagucuguccaggcuc

SEQ ID NO: 1915941 - RNA, 20 nt, Human
augcagucuguccaggcucg

SEQ ID NO: 1915942 - RNA, 18 nt, Human
augcaggugaaacccagu

SEQ ID NO: 1915943 - RNA, 18 nt, Human
augcagucuguccaggcu

SEQ ID NO: 1915944 - RNA, 17 nt, Human
augcaggugaaacccag

SEQ ID NO: 1915945 - RNA, 15 nt, Human
augcagggcagucau

SEQ ID NO: 1915946 - RNA, 17 nt, Human
augcagccucacagucc

SEQ ID NO: 1915947 - RNA, 13 nt, Human
augcagggcaguc

SEQ ID NO: 1915948 - RNA, 14 nt, Human
augcagccucacag

SEQ ID NO: 1915949 - RNA, 15 nt, Human
augcagccucacagu

SEQ ID NO: 1915950 - RNA, 13 nt, Human
augcagccucaca

SEQ ID NO: 1915951 - RNA, 21 nt, Human
augcagccuaaggcuguauga

SEQ ID NO: 1915952 - RNA, 15 nt, Human
augcaguuuuccuua

SEQ ID NO: 1915953 - RNA, 17 nt, Human
augccacuaaauugaca

SEQ ID NO: 1915954 - RNA, 15 nt, Human
augccacuaaauuga

SEQ ID NO: 1915955 - RNA, 21 nt, Human
auggcuauaaacaauuacaug

SEQ ID NO: 1915956 - RNA, 18 nt, Human
auggcuaccuaaaaagau

SEQ ID NO: 1915957 - RNA, 20 nt, Human
auggcuaguaucaaaagaaa

SEQ ID NO: 1915958 - RNA, 18 nt, Human
auggccuuugauaaaugu

SEQ ID NO: 1915959 - RNA, 21 nt, Human
auggccucaagaucaaugaaa

SEQ ID NO: 1915960 - RNA, 18 nt, Human
auggccuaugcacauaug

SEQ ID NO: 1915961 - RNA, 18 nt, Human
auggccguguagaagcau

SEQ ID NO: 1915962 - RNA, 21 nt, Human
auggccguguagaagcauggu

SEQ ID NO: 1915963 - RNA, 20 nt, Human
auggccuuugcuugaaagaa

SEQ ID NO: 1915964 - RNA, 16 nt, Human
auggccugggggaugu

SEQ ID NO: 1915965 - RNA, 21 nt, Human
auggccgggcgcgguggcuca

SEQ ID NO: 1915966 - RNA, 18 nt, Human
auggccggagaggaccgg

SEQ ID NO: 1915967 - RNA, 22 nt, Human
auggccacaguagucuugauga

SEQ ID NO: 1915968 - RNA, 23 nt, Human
auggcacaucagcacgauuucug

SEQ ID NO: 1915969 - RNA, 17 nt, Human
auggcacaucagcacga

SEQ ID NO: 1915970 - RNA, 24 nt, Human
auggcaacagaucuggaaccucag

SEQ ID NO: 1915971 - RNA, 16 nt, Human
auggcaacagaucugg

SEQ ID NO: 1915972 - RNA, 17 nt, Human
auggcaacagaucugga

SEQ ID NO: 1915973 - RNA, 23 nt, Human
auggcacagcccaaagaaggaaa

SEQ ID NO: 1915974 - RNA, 19 nt, Human
auggacguguuaugacucc

SEQ ID NO: 1915975 - RNA, 20 nt, Human
auggacguguuaugacucca

SEQ ID NO: 1915976 - RNA, 18 nt, Human
auggauuuccagccaaag

SEQ ID NO: 1915977 - RNA, 23 nt, Human
auggacguguuaugacuccagaa

SEQ ID NO: 1915978 - RNA, 14 nt, Human
auggcaacagaucu

SEQ ID NO: 1915979 - RNA, 15 nt, Human
auggcaacagaucug

SEQ ID NO: 1915980 - RNA, 13 nt, Human
uuucacugccaua

SEQ ID NO: 1915981 - RNA, 13 nt, Human
uuucagaaaugug

SEQ ID NO: 1915982 - RNA, 16 nt, Human
auggaagacagcucuu

SEQ ID NO: 1915983 - RNA, 16 nt, Human
auggaauacucuuaua

SEQ ID NO: 1915984 - RNA, 17 nt, Human
auggaauacucuuauau

SEQ ID NO: 1915985 - RNA, 21 nt, Human
auggaaugaugggucaguugu

SEQ ID NO: 1915986 - RNA, 16 nt, Human
uuucauauuugcacua

SEQ ID NO: 1915987 - RNA, 22 nt, Human
uuucaucugcucuccuuccugg

SEQ ID NO: 1915988 - RNA, 12 nt, Human
uuucagaccuuu

SEQ ID NO: 1915989 - RNA, 13 nt, Human
uuucagaccuuuu

SEQ ID NO: 1915990 - RNA, 21 nt, Human
uuucagacucccauuccugaa

SEQ ID NO: 1915991 - RNA, 11 nt, Human
uuucagacucc

SEQ ID NO: 1915992 - RNA, 14 nt, Human
auggacaugaucuu

SEQ ID NO: 1915993 - RNA, 14 nt, Human
auggacaggcuggc

SEQ ID NO: 1915994 - RNA, 20 nt, Human
auggacagaagaaggcagca

SEQ ID NO: 1915995 - RNA, 19 nt, Human
auggacagaagaaggcagc

SEQ ID NO: 1915996 - RNA, 19 nt, Human
auggacaggcuggcuccag

SEQ ID NO: 1915997 - RNA, 22 nt, Human
uuucccccaccccauuucucuc

SEQ ID NO: 1915998 - RNA, 23 nt, Human
uuucaugugcggggaucaucugc

SEQ ID NO: 1915999 - RNA, 20 nt, Human
uuuauggcuuuugugcauua

SEQ ID NO: 1916000 - RNA, 22 nt, Human
uuuaugggucagaguuccgacu

SEQ ID NO: 1916001 - RNA, 24 nt, Human
uuuauggcuuuugugcauuaucua

SEQ ID NO: 1916002 - RNA, 23 nt, Human
uuuauguuugcacuugugauuau

SEQ ID NO: 1916003 - RNA, 13 nt, Human
uuuaugugugugu

SEQ ID NO: 1916004 - RNA, 11 nt, Human
uuuaugugugu

SEQ ID NO: 1916005 - RNA, 12 nt, Human
uuuaugugaugg

SEQ ID NO: 1916006 - RNA, 16 nt, Human
uuuaguaucuuuuuau

SEQ ID NO: 1916007 - RNA, 15 nt, Human
uuuaguagagacagg

SEQ ID NO: 1916008 - RNA, 19 nt, Human
uuuagcaguaaaauagcug

SEQ ID NO: 1916009 - RNA, 22 nt, Human
uuuagcagcagccuuuaaugca

SEQ ID NO: 1916010 - RNA, 19 nt, Human
augcuagaacucccuuuca

SEQ ID NO: 1916011 - RNA, 16 nt, Human
augcuagaacucccuu

SEQ ID NO: 1916012 - RNA, 15 nt, Human
augcuccuuguuccu

SEQ ID NO: 1916013 - RNA, 18 nt, Human
augcuccuuguuccuaga

SEQ ID NO: 1916014 - RNA, 16 nt, Human
augcucuagugccuuc

SEQ ID NO: 1916015 - RNA, 17 nt, Human
augcucuagugccuucu

SEQ ID NO: 1916016 - RNA, 15 nt, Human
augcuagaacucccu

SEQ ID NO: 1916017 - RNA, 14 nt, Human
uuuauuaccucuga

SEQ ID NO: 1916018 - RNA, 20 nt, Human
uuuauuaccucugauaccuc

SEQ ID NO: 1916019 - RNA, 12 nt, Human
uuuauuaccccc

SEQ ID NO: 1916020 - RNA, 17 nt, Human
uuuauuacccccuccuu

SEQ ID NO: 1916021 - RNA, 23 nt, Human
uuuauuacccccuccuucagaca

SEQ ID NO: 1916022 - RNA, 13 nt, Human
uuuauuaccucug

SEQ ID NO: 1916023 - RNA, 15 nt, Human
augcucugcauguua

SEQ ID NO: 1916024 - RNA, 12 nt, Human
augcuggcccag

SEQ ID NO: 1916025 - RNA, 13 nt, Human
augcuggcccagg

SEQ ID NO: 1916026 - RNA, 15 nt, Human
augcuggcccagggc

SEQ ID NO: 1916027 - RNA, 16 nt, Human
augcuggcccagggcc

SEQ ID NO: 1916028 - RNA, 18 nt, Human
augcuggcccagggccca

SEQ ID NO: 1916029 - RNA, 13 nt, Human
augcugguuuuuc

SEQ ID NO: 1916030 - RNA, 22 nt, Human
augcuguaacuuucugaaauaa

SEQ ID NO: 1916031 - RNA, 19 nt, Human
augcuggcccagggcccag

SEQ ID NO: 1916032 - RNA, 20 nt, Human
augcuggcccagggcccaga

SEQ ID NO: 1916033 - RNA, 21 nt, Human
augcuggcccagggcccagag

SEQ ID NO: 1916034 - RNA, 22 nt, Human
augcuggcccagggcccagagc

SEQ ID NO: 1916035 - RNA, 23 nt, Human
augcuggcccagggcccagagcc

SEQ ID NO: 1916036 - RNA, 15 nt, Human
auggaagacagcucu

SEQ ID NO: 1916037 - RNA, 16 nt, Human
auggaacacucugaga

SEQ ID NO: 1916038 - RNA, 11 nt, Human
auggaacacuc

SEQ ID NO: 1916039 - RNA, 22 nt, Human
augcuguacaucuauuuuggau

SEQ ID NO: 1916040 - RNA, 23 nt, Human
augcuucauacagggaugguguu

SEQ ID NO: 1916041 - RNA, 14 nt, Human
auggaacacucuga

SEQ ID NO: 1916042 - RNA, 15 nt, Human
auggaacacucugag

SEQ ID NO: 1916043 - RNA, 19 nt, Human
augcugucccuuacgugag

SEQ ID NO: 1916044 - RNA, 12 nt, Human
augcuguacauc

SEQ ID NO: 1916045 - RNA, 16 nt, Human
augcuguacaucuauu

SEQ ID NO: 1916046 - RNA, 23 nt, Human
augcugucccuuacgugaguccu

SEQ ID NO: 1916047 - RNA, 10 nt, Human
augcuucaua

SEQ ID NO: 1916048 - RNA, 12 nt, Human
augcuucauaca

SEQ ID NO: 1916049 - RNA, 11 nt, Human
augcuucauac

SEQ ID NO: 1916050 - RNA, 19 nt, Human
augcuucauacagggaugg

SEQ ID NO: 1916051 - RNA, 16 nt, Human
augcuucauacaggga

SEQ ID NO: 1916052 - RNA, 15 nt, Human
augcuucauacaggg

SEQ ID NO: 1916053 - RNA, 13 nt, Human
augcuucauacag

SEQ ID NO: 1916054 - RNA, 23 nt, Human
augagaagaaaauggaaccaggc

SEQ ID NO: 1916055 - RNA, 16 nt, Human
augagaaggaacuucc

SEQ ID NO: 1916056 - RNA, 23 nt, Human
augagaaucuacccccagaucca

SEQ ID NO: 1916057 - RNA, 18 nt, Human
augagaccacuguuauca

SEQ ID NO: 1916058 - RNA, 13 nt, Human
augagacacagga

SEQ ID NO: 1916059 - RNA, 14 nt, Human
augagacacaggau

SEQ ID NO: 1916060 - RNA, 21 nt, Human
augagaagaaaauggaaccag

SEQ ID NO: 1916061 - RNA, 14 nt, Human
augagaacucugag

SEQ ID NO: 1916062 - RNA, 23 nt, Human
augagaaaucuaaaaaacgaaaa

SEQ ID NO: 1916063 - RNA, 13 nt, Human
augagaacaaaca

SEQ ID NO: 1916064 - RNA, 22 nt, Human
augagaaagguugaagcaccaa

SEQ ID NO: 1916065 - RNA, 21 nt, Human
augagaaagguugaagcacca

SEQ ID NO: 1916066 - RNA, 15 nt, Human
augagaaaucuaaaa

SEQ ID NO: 1916067 - RNA, 18 nt, Human
augagaaaucuaaaaaac

SEQ ID NO: 1916068 - RNA, 14 nt, Human
augaccacaccugc

SEQ ID NO: 1916069 - RNA, 17 nt, Human
augacuuacuguacaug

SEQ ID NO: 1916070 - RNA, 16 nt, Human
augacuuacuguacau

SEQ ID NO: 1916071 - RNA, 17 nt, Human
augagaaaaugucuuua

SEQ ID NO: 1916072 - RNA, 14 nt, Human
augacuuacuguac

SEQ ID NO: 1916073 - RNA, 22 nt, Human
augacuuaagcacacuugacau

SEQ ID NO: 1916074 - RNA, 19 nt, Human
augacauuguuaaaauaaa

SEQ ID NO: 1916075 - RNA, 21 nt, Human
augacauuucuuugugcuuug

SEQ ID NO: 1916076 - RNA, 22 nt, Human
augacauuucuuugugcuuugg

SEQ ID NO: 1916077 - RNA, 15 nt, Human
augaccaaaguccuu

SEQ ID NO: 1916078 - RNA, 18 nt, Human
augacacgaauauugcug

SEQ ID NO: 1916079 - RNA, 22 nt, Human
augacacaugcaaggucauuuu

SEQ ID NO: 1916080 - RNA, 14 nt, Human
augacacaugcaag

SEQ ID NO: 1916081 - RNA, 19 nt, Human
uuguauauuguguuugugu

SEQ ID NO: 1916082 - RNA, 13 nt, Human
uuguauauugugu

SEQ ID NO: 1916083 - RNA, 15 nt, Human
uuguauauuguguuu

SEQ ID NO: 1916084 - RNA, 13 nt, Human
uugguucuguguc

SEQ ID NO: 1916085 - RNA, 15 nt, Human
uugguucuaauagaa

SEQ ID NO: 1916086 - RNA, 19 nt, Human
uugguucuaauagaacuca

SEQ ID NO: 1916087 - RNA, 16 nt, Human
uugguuuaauuuaaag

SEQ ID NO: 1916088 - RNA, 22 nt, Human
augaauguuuacacucuuugua

SEQ ID NO: 1916089 - RNA, 11 nt, Human
augaauguuua

SEQ ID NO: 1916090 - RNA, 17 nt, Human
uugggccagacaugcca

SEQ ID NO: 1916091 - RNA, 14 nt, Human
uuggggauauuuuu

SEQ ID NO: 1916092 - RNA, 16 nt, Human
uugggccugcuccaga

SEQ ID NO: 1916093 - RNA, 17 nt, Human
uugggccugcuccagac

SEQ ID NO: 1916094 - RNA, 22 nt, Human
uuggggggcugaggugggagga

SEQ ID NO: 1916095 - RNA, 16 nt, Human
uuggggggcauauauu

SEQ ID NO: 1916096 - RNA, 19 nt, Human
uugggccugcuccagaccu

SEQ ID NO: 1916097 - RNA, 16 nt, Human
augaacucuuaaucaa

SEQ ID NO: 1916098 - RNA, 14 nt, Human
augaacucaacuuu

SEQ ID NO: 1916099 - RNA, 21 nt, Human
augaaccuucuggccucccac

SEQ ID NO: 1916100 - RNA, 24 nt, Human
augaaccuucuggccucccacaga

SEQ ID NO: 1916101 - RNA, 15 nt, Human
augaagauacugaaa

SEQ ID NO: 1916102 - RNA, 15 nt, Human
augaaagggcccaga

SEQ ID NO: 1916103 - RNA, 20 nt, Human
augaaugucagugugacuga

SEQ ID NO: 1916104 - RNA, 16 nt, Human
augaaugagaaucuac

SEQ ID NO: 1916105 - RNA, 13 nt, Human
augaaugaauggc

SEQ ID NO: 1916106 - RNA, 18 nt, Human
augaagauguagaggaga

SEQ ID NO: 1916107 - RNA, 17 nt, Human
augaagauacugaaaua

SEQ ID NO: 1916108 - RNA, 16 nt, Human
augaagauacugaaau

SEQ ID NO: 1916109 - RNA, 22 nt, Human
augaagauauuugcuuuaauaa

SEQ ID NO: 1916110 - RNA, 18 nt, Human
uuggcuagagguucaaag

SEQ ID NO: 1916111 - RNA, 23 nt, Human
uuggcgcugccccuggcagcccc

SEQ ID NO: 1916112 - RNA, 22 nt, Human
uuggaugggacuagagcuuucu

SEQ ID NO: 1916113 - RNA, 15 nt, Human
augaaagcagggacu

SEQ ID NO: 1916114 - RNA, 12 nt, Human
augaaagauuca

SEQ ID NO: 1916115 - RNA, 23 nt, Human
aucuuuggacagaagcagcucuu

SEQ ID NO: 1916116 - RNA, 12 nt, Human
aucuuugugaag

SEQ ID NO: 1916117 - RNA, 22 nt, Human
aucuuuuguucccauccucuuc

SEQ ID NO: 1916118 - RNA, 16 nt, Human
aucuuuuguucccauc

SEQ ID NO: 1916119 - RNA, 13 nt, Human
aucuuuuuauuca

SEQ ID NO: 1916120 - RNA, 13 nt, Human
uuggcugcaggga

SEQ ID NO: 1916121 - RNA, 17 nt, Human
aucuuuacaaaacuaca

SEQ ID NO: 1916122 - RNA, 21 nt, Human
aucuuuacaaaacuacaugag

SEQ ID NO: 1916123 - RNA, 22 nt, Human
aucuuuaauuuuacauuuccua

SEQ ID NO: 1916124 - RNA, 16 nt, Human
aucuuuaauuuuacau

SEQ ID NO: 1916125 - RNA, 21 nt, Human
aucuuuaauuuuacauuuccu

SEQ ID NO: 1916126 - RNA, 18 nt, Human
aucuuugcagacaggcaa

SEQ ID NO: 1916127 - RNA, 13 nt, Human
aucuuuauuaauc

SEQ ID NO: 1916128 - RNA, 14 nt, Human
aucuuuauuaauca

SEQ ID NO: 1916129 - RNA, 22 nt, Human
aucuuuggacagaagcagcucu

SEQ ID NO: 1916130 - RNA, 14 nt, Human
aucucagggccugg

SEQ ID NO: 1916131 - RNA, 20 nt, Human
aucucaccuccugcugggca

SEQ ID NO: 1916132 - RNA, 21 nt, Human
aucucaccuccugcugggcag

SEQ ID NO: 1916133 - RNA, 20 nt, Human
aucucagaucaguguaccau

SEQ ID NO: 1916134 - RNA, 15 nt, Human
auccuaguuccacca

SEQ ID NO: 1916135 - RNA, 19 nt, Human
auccuaguuccaccaucaa

SEQ ID NO: 1916136 - RNA, 17 nt, Human
aucucaccuccugcugg

SEQ ID NO: 1916137 - RNA, 16 nt, Human
aucucacacaugagca

SEQ ID NO: 1916138 - RNA, 15 nt, Human
aucucacacaugagc

SEQ ID NO: 1916139 - RNA, 13 nt, Human
aucuccaaaauaa

SEQ ID NO: 1916140 - RNA, 23 nt, Human
aucucagugguuaagauuccuaa

SEQ ID NO: 1916141 - RNA, 16 nt, Human
aucuccccaucauugg

SEQ ID NO: 1916142 - RNA, 20 nt, Human
aucucccaccuagcagcacc

SEQ ID NO: 1916143 - RNA, 18 nt, Human
aucucccaccuagcagca

SEQ ID NO: 1916144 - RNA, 19 nt, Human
aucucccaccuagcagcac

SEQ ID NO: 1916145 - RNA, 14 nt, Human
aucucccccagccc

SEQ ID NO: 1916146 - RNA, 18 nt, Human
aucucuuagcauuuuaau

SEQ ID NO: 1916147 - RNA, 19 nt, Human
aucucuuagcuccccucca

SEQ ID NO: 1916148 - RNA, 18 nt, Human
aucucuuagcuccccucc

SEQ ID NO: 1916149 - RNA, 16 nt, Human
aucucuuagcuccccu

SEQ ID NO: 1916150 - RNA, 13 nt, Human
aucucuuagcucc

SEQ ID NO: 1916151 - RNA, 12 nt, Human
aucucccccagc

SEQ ID NO: 1916152 - RNA, 13 nt, Human
aucucccccagcc

SEQ ID NO: 1916153 - RNA, 19 nt, Human
uugcacaaaccaauuaaac

SEQ ID NO: 1916154 - RNA, 15 nt, Human
uugcaauuccugcuc

SEQ ID NO: 1916155 - RNA, 15 nt, Human
uugauucagacagcu

SEQ ID NO: 1916156 - RNA, 16 nt, Human
uugauucagacagcug

SEQ ID NO: 1916157 - RNA, 14 nt, Human
uugcaucugaaaau

SEQ ID NO: 1916158 - RNA, 12 nt, Human
uugaugccuggc

SEQ ID NO: 1916159 - RNA, 23 nt, Human
aucucuuagcuccccuccaaccu

SEQ ID NO: 1916160 - RNA, 22 nt, Human
aucucuuagcuccccuccaacc

SEQ ID NO: 1916161 - RNA, 15 nt, Human
uugaugggauuuggu

SEQ ID NO: 1916162 - RNA, 17 nt, Human
uugaugcugacagucau

SEQ ID NO: 1916163 - RNA, 14 nt, Human
uugauucagacagc

SEQ ID NO: 1916164 - RNA, 13 nt, Human
uugauucacuuca

SEQ ID NO: 1916165 - RNA, 16 nt, Human
uugaugugugucuagg

SEQ ID NO: 1916166 - RNA, 18 nt, Human
aucugauauguauuguuu

SEQ ID NO: 1916167 - RNA, 14 nt, Human
aucugauauguauu

SEQ ID NO: 1916168 - RNA, 19 nt, Human
aucugagcucuuugcacua

SEQ ID NO: 1916169 - RNA, 18 nt, Human
aucugagcucuuugcacu

SEQ ID NO: 1916170 - RNA, 20 nt, Human
aucugagaggccacagugca

SEQ ID NO: 1916171 - RNA, 13 nt, Human
uugccgucuaccu

SEQ ID NO: 1916172 - RNA, 18 nt, Human
uugccgcgucgcccuccc

SEQ ID NO: 1916173 - RNA, 21 nt, Human
uugccgcgucgcccucccagg

SEQ ID NO: 1916174 - RNA, 12 nt, Human
uugcauucuccc

SEQ ID NO: 1916175 - RNA, 13 nt, Human
uugcauuaaauuc

SEQ ID NO: 1916176 - RNA, 20 nt, Human
uugcauuaaauucacaaacu

SEQ ID NO: 1916177 - RNA, 21 nt, Human
uugcauuaaauucacaaacuu

SEQ ID NO: 1916178 - RNA, 22 nt, Human
uugcauuaaauucacaaacuuu

SEQ ID NO: 1916179 - RNA, 14 nt, Human
uugccguuauuaaa

SEQ ID NO: 1916180 - RNA, 19 nt, Human
uugccgucuaccugagggg

SEQ ID NO: 1916181 - RNA, 15 nt, Human
uugccgucuaccuga

SEQ ID NO: 1916182 - RNA, 18 nt, Human
uugccgucuaccugaggg

SEQ ID NO: 1916183 - RNA, 22 nt, Human
uugccgcgucgcccucccaggc

SEQ ID NO: 1916184 - RNA, 16 nt, Human
uugccgguggugcagg

SEQ ID NO: 1916185 - RNA, 19 nt, Human
aucuggguucacugcaacc

SEQ ID NO: 1916186 - RNA, 22 nt, Human
aucugguaccaguugaaauuuu

SEQ ID NO: 1916187 - RNA, 17 nt, Human
aucuggguucacugcaa

SEQ ID NO: 1916188 - RNA, 14 nt, Human
aucugguccuaccc

SEQ ID NO: 1916189 - RNA, 17 nt, Human
aucugguccuacccauc

SEQ ID NO: 1916190 - RNA, 18 nt, Human
aucugguccuacccaucc

SEQ ID NO: 1916191 - RNA, 21 nt, Human
aucugguccuacccauccccg

SEQ ID NO: 1916192 - RNA, 16 nt, Human
aucuguaccucugccu

SEQ ID NO: 1916193 - RNA, 23 nt, Human
aucugugaaaggaaagagggagg

SEQ ID NO: 1916194 - RNA, 19 nt, Human
aucuugcucugcugacaga

SEQ ID NO: 1916195 - RNA, 17 nt, Human
aucuugcucugcugaca

SEQ ID NO: 1916196 - RNA, 21 nt, Human
aucuugauaccaccuauauag

SEQ ID NO: 1916197 - RNA, 15 nt, Human
aucuugcucugcuug

SEQ ID NO: 1916198 - RNA, 18 nt, Human
aucuugaauuguaaggaa

SEQ ID NO: 1916199 - RNA, 12 nt, Human
aucuguuuacag

SEQ ID NO: 1916200 - RNA, 23 nt, Human
caacuuguauuaaagacagaggc

SEQ ID NO: 1916201 - RNA, 15 nt, Human
caagaaaugaaagca

SEQ ID NO: 1916202 - RNA, 19 nt, Human
caagaaaugaaagcaggga

SEQ ID NO: 1916203 - RNA, 17 nt, Human
caagaaaugaaagcagg

SEQ ID NO: 1916204 - RNA, 14 nt, Human
caagaagcccagga

SEQ ID NO: 1916205 - RNA, 13 nt, Human
caagaagcccagg

SEQ ID NO: 1916206 - RNA, 13 nt, Human
caagagcccaggc

SEQ ID NO: 1916207 - RNA, 12 nt, Human
caagagcugagg

SEQ ID NO: 1916208 - RNA, 21 nt, Human
caagaccuucuccuucaccuu

SEQ ID NO: 1916209 - RNA, 23 nt, Human
caagaccuucuccuucaccuuug

SEQ ID NO: 1916210 - RNA, 13 nt, Human
caagacgcugugc

SEQ ID NO: 1916211 - RNA, 15 nt, Human
caagacgcugugcug

SEQ ID NO: 1916212 - RNA, 22 nt, Human
caagagaauugcuugaacccag

SEQ ID NO: 1916213 - RNA, 12 nt, Human
caacaggcuggg

SEQ ID NO: 1916214 - RNA, 17 nt, Human
caacauacucccaucug

SEQ ID NO: 1916215 - RNA, 19 nt, Human
caacauacucccaucugug

SEQ ID NO: 1916216 - RNA, 20 nt, Human
caacauacucccaucuguga

SEQ ID NO: 1916217 - RNA, 20 nt, Human
caaccuggggggcaguggug

SEQ ID NO: 1916218 - RNA, 22 nt, Human
caaauuucuaaaucuccaaaau

SEQ ID NO: 1916219 - RNA, 15 nt, Human
caaauuucuaaaucu

SEQ ID NO: 1916220 - RNA, 15 nt, Human
caaauuuuauuugua

SEQ ID NO: 1916221 - RNA, 17 nt, Human
caaauuuuauuuguagg

SEQ ID NO: 1916222 - RNA, 14 nt, Human
caaauuugauugau

SEQ ID NO: 1916223 - RNA, 17 nt, Human
caaauuugauugauuug

SEQ ID NO: 1916224 - RNA, 16 nt, Human
caaauuacucuuucuc

SEQ ID NO: 1916225 - RNA, 19 nt, Human
caaauuacucuuucuccau

SEQ ID NO: 1916226 - RNA, 11 nt, Human
caaauuagaaa

SEQ ID NO: 1916227 - RNA, 12 nt, Human
caaauuagaaaa

SEQ ID NO: 1916228 - RNA, 13 nt, Human
caaauuagaaaau

SEQ ID NO: 1916229 - RNA, 18 nt, Human
caaauuagaaaauguuau

SEQ ID NO: 1916230 - RNA, 19 nt, Human
caaauuagaaaauguuauu

SEQ ID NO: 1916231 - RNA, 22 nt, Human
caaauuagaaaauguuauuuaa

SEQ ID NO: 1916232 - RNA, 15 nt, Human
caacagaagcuucca

SEQ ID NO: 1916233 - RNA, 10 nt, Human
caacagaaaa

SEQ ID NO: 1916234 - RNA, 14 nt, Human
caacagaaaaaugg

SEQ ID NO: 1916235 - RNA, 15 nt, Human
caacagaagaacugu

SEQ ID NO: 1916236 - RNA, 13 nt, Human
caacagaucugga

SEQ ID NO: 1916237 - RNA, 14 nt, Human
caacagaucuggaa

SEQ ID NO: 1916238 - RNA, 17 nt, Human
caacagaucuggaaccu

SEQ ID NO: 1916239 - RNA, 23 nt, Human
caacagaucuggaaccucagccu

SEQ ID NO: 1916240 - RNA, 23 nt, Human
caaauauauucagccuggcuuca

SEQ ID NO: 1916241 - RNA, 23 nt, Human
caaauggaaaugggcagagcaga

SEQ ID NO: 1916242 - RNA, 18 nt, Human
caaauggcgucuggaagu

SEQ ID NO: 1916243 - RNA, 14 nt, Human
caaauguucaucaa

SEQ ID NO: 1916244 - RNA, 19 nt, Human
caaauggcgucuggaaguc

SEQ ID NO: 1916245 - RNA, 21 nt, Human
caaauggcgucuggaagucca

SEQ ID NO: 1916246 - RNA, 18 nt, Human
caaauguucaucaaugaa

SEQ ID NO: 1916247 - RNA, 22 nt, Human
caaauggcgucuggaaguccaa

SEQ ID NO: 1916248 - RNA, 19 nt, Human
caaagugcugggauuacaa

SEQ ID NO: 1916249 - RNA, 13 nt, Human
caaagugcuggga

SEQ ID NO: 1916250 - RNA, 17 nt, Human
caaagagaaaaagaaau

SEQ ID NO: 1916251 - RNA, 19 nt, Human
caaagagaaaaagaaaugc

SEQ ID NO: 1916252 - RNA, 20 nt, Human
caaagagaaaaagaaaugca

SEQ ID NO: 1916253 - RNA, 21 nt, Human
caaagagaaaaagaaaugcaa

SEQ ID NO: 1916254 - RNA, 19 nt, Human
caaagaaggaaaaggcagg

SEQ ID NO: 1916255 - RNA, 21 nt, Human
caaagaacauguagaaaacaa

SEQ ID NO: 1916256 - RNA, 22 nt, Human
caaagaacauguagaaaacaaa

SEQ ID NO: 1916257 - RNA, 16 nt, Human
caaaguuacuagguaa

SEQ ID NO: 1916258 - RNA, 21 nt, Human
caaaguuacuagguaacuuca

SEQ ID NO: 1916259 - RNA, 16 nt, Human
caaaguuccaaaaugc

SEQ ID NO: 1916260 - RNA, 18 nt, Human
caaaguuccaaaaugcca

SEQ ID NO: 1916261 - RNA, 23 nt, Human
caaagugcugggauuacaagcgu

SEQ ID NO: 1916262 - RNA, 21 nt, Human
caaaaucgaugcagugcuucc

SEQ ID NO: 1916263 - RNA, 20 nt, Human
caaaauaaaacuuuuuaaaa

SEQ ID NO: 1916264 - RNA, 16 nt, Human
caaaauaaaacuuuuu

SEQ ID NO: 1916265 - RNA, 14 nt, Human
caaaaguuucucuu

SEQ ID NO: 1916266 - RNA, 23 nt, Human
caaaacucuccucugcugcuggc

SEQ ID NO: 1916267 - RNA, 19 nt, Human
caaaacucuccucugcugc

SEQ ID NO: 1916268 - RNA, 15 nt, Human
caaaacucuccucug

SEQ ID NO: 1916269 - RNA, 16 nt, Human
caaaacucuccucugc

SEQ ID NO: 1916270 - RNA, 18 nt, Human
auuuuauuuuauuaugca

SEQ ID NO: 1916271 - RNA, 15 nt, Human
caaaacgguuuuacu

SEQ ID NO: 1916272 - RNA, 21 nt, Human
caaaacgguuuuacugcagcu

SEQ ID NO: 1916273 - RNA, 13 nt, Human
caaacagaggccg

SEQ ID NO: 1916274 - RNA, 15 nt, Human
caaacagaggccgcc

SEQ ID NO: 1916275 - RNA, 16 nt, Human
caaacagaaaacaugu

SEQ ID NO: 1916276 - RNA, 18 nt, Human
caaacaaaauuucuauua

SEQ ID NO: 1916277 - RNA, 15 nt, Human
caaacaaaauuucua

SEQ ID NO: 1916278 - RNA, 14 nt, Human
caaacaaaauuucu

SEQ ID NO: 1916279 - RNA, 11 nt, Human
caaaaugaaac

SEQ ID NO: 1916280 - RNA, 22 nt, Human
caaaaugaaacgcaaccaccac

SEQ ID NO: 1916281 - RNA, 14 nt, Human
caaaauuucuauua

SEQ ID NO: 1916282 - RNA, 21 nt, Human
caaacucuugaccucagguga

SEQ ID NO: 1916283 - RNA, 19 nt, Human
caaagaaauuuccacucag

SEQ ID NO: 1916284 - RNA, 18 nt, Human
caaagaaauuuccacuca

SEQ ID NO: 1916285 - RNA, 12 nt, Human
caaagaaauuuc

SEQ ID NO: 1916286 - RNA, 20 nt, Human
caaacucuugaccucaggug

SEQ ID NO: 1916287 - RNA, 19 nt, Human
caaacucuugaccucaggu

SEQ ID NO: 1916288 - RNA, 17 nt, Human
caaacucuugaccucag

SEQ ID NO: 1916289 - RNA, 14 nt, Human
caaacucucugaac

SEQ ID NO: 1916290 - RNA, 12 nt, Human
caaaccuucaca

SEQ ID NO: 1916291 - RNA, 13 nt, Human
caacaggcugggc

SEQ ID NO: 1916292 - RNA, 20 nt, Human
cacaaaggcaaaggguccag

SEQ ID NO: 1916293 - RNA, 13 nt, Human
cacaaagggccca

SEQ ID NO: 1916294 - RNA, 18 nt, Human
cacaagaaaugaaagcag

SEQ ID NO: 1916295 - RNA, 13 nt, Human
cacaaaggagagc

SEQ ID NO: 1916296 - RNA, 21 nt, Human
cacaagaaaugaaagcaggga

SEQ ID NO: 1916297 - RNA, 20 nt, Human
cacaagaaaugaaagcaggg

SEQ ID NO: 1916298 - RNA, 21 nt, Human
cacaaguggugguaacccugg

SEQ ID NO: 1916299 - RNA, 16 nt, Human
cacaaagggcccagau

SEQ ID NO: 1916300 - RNA, 15 nt, Human
cacaaagggcccaga

SEQ ID NO: 1916301 - RNA, 14 nt, Human
cacaagugguggua

SEQ ID NO: 1916302 - RNA, 20 nt, Human
cacaaguggugguaacccug

SEQ ID NO: 1916303 - RNA, 21 nt, Human
cacaauaccuuauuuaaguaa

SEQ ID NO: 1916304 - RNA, 13 nt, Human
cacaauacaauaa

SEQ ID NO: 1916305 - RNA, 17 nt, Human
cacacacgcgugcacac

SEQ ID NO: 1916306 - RNA, 17 nt, Human
caauguuucuucuaggu

SEQ ID NO: 1916307 - RNA, 21 nt, Human
caauguuuauuucauaaagaa

SEQ ID NO: 1916308 - RNA, 17 nt, Human
caauguuguuuuaagac

SEQ ID NO: 1916309 - RNA, 17 nt, Human
caauuacaggaaguacu

SEQ ID NO: 1916310 - RNA, 17 nt, Human
caauguuuuuaaaaauc

SEQ ID NO: 1916311 - RNA, 20 nt, Human
caaugugucuuucuuuuugg

SEQ ID NO: 1916312 - RNA, 21 nt, Human
caauaucuuuuuuuuaauaaa

SEQ ID NO: 1916313 - RNA, 12 nt, Human
caauauccuuug

SEQ ID NO: 1916314 - RNA, 13 nt, Human
caauauccuuugc

SEQ ID NO: 1916315 - RNA, 15 nt, Human
caauauccuuugccu

SEQ ID NO: 1916316 - RNA, 20 nt, Human
caauauccuuugccucaagg

SEQ ID NO: 1916317 - RNA, 22 nt, Human
caaugugaaaagaaaaaugagc

SEQ ID NO: 1916318 - RNA, 14 nt, Human
caaugugaacuuua

SEQ ID NO: 1916319 - RNA, 15 nt, Human
caaugugaacuuuau

SEQ ID NO: 1916320 - RNA, 18 nt, Human
caaugugaacuuuauuaa

SEQ ID NO: 1916321 - RNA, 19 nt, Human
caaugugaacuuuauuaaa

SEQ ID NO: 1916322 - RNA, 21 nt, Human
caaugugaacuuuauuaaaua

SEQ ID NO: 1916323 - RNA, 22 nt, Human
caaugugacuuaaugccacuaa

SEQ ID NO: 1916324 - RNA, 23 nt, Human
caauguggcaaggaaaaacaggu

SEQ ID NO: 1916325 - RNA, 13 nt, Human
caauuccaccugc

SEQ ID NO: 1916326 - RNA, 18 nt, Human
caauuacaggaaguacug

SEQ ID NO: 1916327 - RNA, 23 nt, Human
caauuaaaaaaaaagaucuguuu

SEQ ID NO: 1916328 - RNA, 18 nt, Human
caauguuuuuaaaaaucu

SEQ ID NO: 1916329 - RNA, 15 nt, Human
caauuccucugggaa

SEQ ID NO: 1916330 - RNA, 13 nt, Human
caauuccucuggg

SEQ ID NO: 1916331 - RNA, 14 nt, Human
caauuccucuggga

SEQ ID NO: 1916332 - RNA, 13 nt, Human
cacaaacagaggc

SEQ ID NO: 1916333 - RNA, 15 nt, Human
cacaaacagaggccg

SEQ ID NO: 1916334 - RNA, 14 nt, Human
cacaaacagaggcc

SEQ ID NO: 1916335 - RNA, 16 nt, Human
caauuuuuuuuuccuu

SEQ ID NO: 1916336 - RNA, 12 nt, Human
cacagagaaagu

SEQ ID NO: 1916337 - RNA, 21 nt, Human
cacagagaaaguacuucucca

SEQ ID NO: 1916338 - RNA, 20 nt, Human
cacagagaaaguacuucucc

SEQ ID NO: 1916339 - RNA, 19 nt, Human
cacagagaaaguacuucuc

SEQ ID NO: 1916340 - RNA, 23 nt, Human
cacagaugggugcuuggaggaag

SEQ ID NO: 1916341 - RNA, 21 nt, Human
cacagaguuguuacauuuuua

SEQ ID NO: 1916342 - RNA, 22 nt, Human
cacagaguuguuacauuuuuaa

SEQ ID NO: 1916343 - RNA, 13 nt, Human
cacagaggcugcc

SEQ ID NO: 1916344 - RNA, 13 nt, Human
cacagccaccccu

SEQ ID NO: 1916345 - RNA, 20 nt, Human
caaggaaaaaauaacaauga

SEQ ID NO: 1916346 - RNA, 18 nt, Human
caaggaaaaaauaacaau

SEQ ID NO: 1916347 - RNA, 23 nt, Human
caagcuggucccacucaguccau

SEQ ID NO: 1916348 - RNA, 22 nt, Human
caagcuggucccacucagucca

SEQ ID NO: 1916349 - RNA, 16 nt, Human
caaggagauuuacaac

SEQ ID NO: 1916350 - RNA, 13 nt, Human
caaggagaugaag

SEQ ID NO: 1916351 - RNA, 23 nt, Human
caaggagaugaagcaaacacauu

SEQ ID NO: 1916352 - RNA, 18 nt, Human
caaggauccugagccaga

SEQ ID NO: 1916353 - RNA, 19 nt, Human
caaggauccugagccagau

SEQ ID NO: 1916354 - RNA, 22 nt, Human
caaggauccugagccagauuuc

SEQ ID NO: 1916355 - RNA, 20 nt, Human
caaggauccugagccagauu

SEQ ID NO: 1916356 - RNA, 17 nt, Human
caaggcugcagugagcc

SEQ ID NO: 1916357 - RNA, 22 nt, Human
caaggcugcagugagccgagau

SEQ ID NO: 1916358 - RNA, 18 nt, Human
caagcgauucuucugcuu

SEQ ID NO: 1916359 - RNA, 21 nt, Human
caagcugcacccucaggcagg

SEQ ID NO: 1916360 - RNA, 17 nt, Human
caagcgauucuucugcu

SEQ ID NO: 1916361 - RNA, 15 nt, Human
caagcgauucuucug

SEQ ID NO: 1916362 - RNA, 21 nt, Human
caagcuggucccacucagucc

SEQ ID NO: 1916363 - RNA, 22 nt, Human
caagcugcacccucaggcaggu

SEQ ID NO: 1916364 - RNA, 14 nt, Human
caagaggcugcagc

SEQ ID NO: 1916365 - RNA, 17 nt, Human
caagccuuggcucuacc

SEQ ID NO: 1916366 - RNA, 18 nt, Human
caagccuggucagcccaa

SEQ ID NO: 1916367 - RNA, 17 nt, Human
caagccuggucagccca

SEQ ID NO: 1916368 - RNA, 16 nt, Human
caagccuggucagccc

SEQ ID NO: 1916369 - RNA, 15 nt, Human
caagccuggucagcc

SEQ ID NO: 1916370 - RNA, 16 nt, Human
caauaaaugucuguug

SEQ ID NO: 1916371 - RNA, 15 nt, Human
caauaaaugucuguu

SEQ ID NO: 1916372 - RNA, 14 nt, Human
caauaaaugucugu

SEQ ID NO: 1916373 - RNA, 17 nt, Human
caauaaaucugacccag

SEQ ID NO: 1916374 - RNA, 18 nt, Human
caauaaaucugacccagu

SEQ ID NO: 1916375 - RNA, 20 nt, Human
caauaaaucugacccagugc

SEQ ID NO: 1916376 - RNA, 18 nt, Human
caaggcugggggaagaag

SEQ ID NO: 1916377 - RNA, 16 nt, Human
caaggcugcuuagaau

SEQ ID NO: 1916378 - RNA, 19 nt, Human
caauagcagacaguguuuu

SEQ ID NO: 1916379 - RNA, 15 nt, Human
caauaggaaaaacug

SEQ ID NO: 1916380 - RNA, 16 nt, Human
caauaggaaaaacuga

SEQ ID NO: 1916381 - RNA, 17 nt, Human
caauaggaaaaacugau

SEQ ID NO: 1916382 - RNA, 19 nt, Human
caauagauauuuaccuuuu

SEQ ID NO: 1916383 - RNA, 18 nt, Human
caauaggaaaaacugauu

SEQ ID NO: 1916384 - RNA, 14 nt, Human
caauguuaacauuu

SEQ ID NO: 1916385 - RNA, 17 nt, Human
cacaguucaauucucau

SEQ ID NO: 1916386 - RNA, 19 nt, Human
cacaguggaaccagcccag

SEQ ID NO: 1916387 - RNA, 13 nt, Human
cacaguggaacca

SEQ ID NO: 1916388 - RNA, 22 nt, Human
cacaguggaaagacagcuucuc

SEQ ID NO: 1916389 - RNA, 13 nt, Human
cacaggaaaccag

SEQ ID NO: 1916390 - RNA, 23 nt, Human
cauaugcaccuugugucuguaca

SEQ ID NO: 1916391 - RNA, 21 nt, Human
cauaugcaccuugugucugua

SEQ ID NO: 1916392 - RNA, 20 nt, Human
cauaugcaccuugugucugu

SEQ ID NO: 1916393 - RNA, 19 nt, Human
cauaugcaccuugugucug

SEQ ID NO: 1916394 - RNA, 18 nt, Human
cauaugcaccuugugucu

SEQ ID NO: 1916395 - RNA, 17 nt, Human
cauaugcaccuuguguc

SEQ ID NO: 1916396 - RNA, 16 nt, Human
cauaugcaccuugugu

SEQ ID NO: 1916397 - RNA, 13 nt, Human
cauaugccugggc

SEQ ID NO: 1916398 - RNA, 14 nt, Human
cauauuuacuucuu

SEQ ID NO: 1916399 - RNA, 12 nt, Human
cauauuuauaaa

SEQ ID NO: 1916400 - RNA, 20 nt, Human
cauauuuacuucuuauacau

SEQ ID NO: 1916401 - RNA, 16 nt, Human
cauauuuacuucuuau

SEQ ID NO: 1916402 - RNA, 17 nt, Human
cauauuuacuucuuaua

SEQ ID NO: 1916403 - RNA, 17 nt, Human
cauauuuauaaaaauaa

SEQ ID NO: 1916404 - RNA, 12 nt, Human
cauauuucaauu

SEQ ID NO: 1916405 - RNA, 14 nt, Human
cauauuucuuuggc

SEQ ID NO: 1916406 - RNA, 12 nt, Human
cauauuugcacu

SEQ ID NO: 1916407 - RNA, 22 nt, Human
caucaagucuuucacauuuaaa

SEQ ID NO: 1916408 - RNA, 14 nt, Human
caucaagaugugac

SEQ ID NO: 1916409 - RNA, 11 nt, Human
caucaaagagg

SEQ ID NO: 1916410 - RNA, 23 nt, Human
caucaaagaggcugaggcuggca

SEQ ID NO: 1916411 - RNA, 13 nt, Human
caucaaaaugcuu

SEQ ID NO: 1916412 - RNA, 15 nt, Human
caucaaaaugcuuuu

SEQ ID NO: 1916413 - RNA, 18 nt, Human
caucaaugaaugaaugaa

SEQ ID NO: 1916414 - RNA, 12 nt, Human
cauauuuucaug

SEQ ID NO: 1916415 - RNA, 14 nt, Human
cauauuuuguaacu

SEQ ID NO: 1916416 - RNA, 18 nt, Human
cauauaauguuguuauuu

SEQ ID NO: 1916417 - RNA, 17 nt, Human
cauauaauguuguuauu

SEQ ID NO: 1916418 - RNA, 15 nt, Human
cauauaauguuguua

SEQ ID NO: 1916419 - RNA, 22 nt, Human
cauauauauguuuuaagaggca

SEQ ID NO: 1916420 - RNA, 23 nt, Human
cauauauauguuuuaagaggcag

SEQ ID NO: 1916421 - RNA, 15 nt, Human
cauaugauguacaug

SEQ ID NO: 1916422 - RNA, 17 nt, Human
cauaugauguacaugua

SEQ ID NO: 1916423 - RNA, 21 nt, Human
cauaugauguacauguacuga

SEQ ID NO: 1916424 - RNA, 17 nt, Human
cauauccguauauaucc

SEQ ID NO: 1916425 - RNA, 15 nt, Human
cauaucauguacagu

SEQ ID NO: 1916426 - RNA, 22 nt, Human
cauaguggcuuaaaacaacacu

SEQ ID NO: 1916427 - RNA, 22 nt, Human
cauaguuggggucauagauguu

SEQ ID NO: 1916428 - RNA, 20 nt, Human
cauaguaugguggcuggguu

SEQ ID NO: 1916429 - RNA, 19 nt, Human
cauaguaugguggcugggu

SEQ ID NO: 1916430 - RNA, 18 nt, Human
cauaguaugguggcuggg

SEQ ID NO: 1916431 - RNA, 11 nt, Human
cauacucugcu

SEQ ID NO: 1916432 - RNA, 18 nt, Human
cauacuaucuacucuccu

SEQ ID NO: 1916433 - RNA, 15 nt, Human
cauacuuaagcaaaa

SEQ ID NO: 1916434 - RNA, 16 nt, Human
cauacucccaucugug

SEQ ID NO: 1916435 - RNA, 15 nt, Human
cauacucccaucugu

SEQ ID NO: 1916436 - RNA, 18 nt, Human
cauacucccaucugugaa

SEQ ID NO: 1916437 - RNA, 20 nt, Human
cauacucccaucugugaaag

SEQ ID NO: 1916438 - RNA, 14 nt, Human
cauagaauaaaauu

SEQ ID NO: 1916439 - RNA, 20 nt, Human
cauagaauaaaauuuuuaau

SEQ ID NO: 1916440 - RNA, 19 nt, Human
cauagagagcaagacgcug

SEQ ID NO: 1916441 - RNA, 21 nt, Human
cauagagagcaagacgcugug

SEQ ID NO: 1916442 - RNA, 23 nt, Human
cauagagagcaagacgcugugcu

SEQ ID NO: 1916443 - RNA, 14 nt, Human
cauacuuuccugua

SEQ ID NO: 1916444 - RNA, 13 nt, Human
cauacuugaaggg

SEQ ID NO: 1916445 - RNA, 14 nt, Human
cauacuugaagggc

SEQ ID NO: 1916446 - RNA, 17 nt, Human
cauacuugaagggccag

SEQ ID NO: 1916447 - RNA, 18 nt, Human
cauacuugaagggccaga

SEQ ID NO: 1916448 - RNA, 20 nt, Human
cauacuugaagggccagagc

SEQ ID NO: 1916449 - RNA, 21 nt, Human
cauacuugaagggccagagcc

SEQ ID NO: 1916450 - RNA, 22 nt, Human
cauacuugaagggccagagcca

SEQ ID NO: 1916451 - RNA, 23 nt, Human
cauacuugaagggccagagccag

SEQ ID NO: 1916452 - RNA, 16 nt, Human
caucucaccuccugcu

SEQ ID NO: 1916453 - RNA, 17 nt, Human
caucucaccuccugcug

SEQ ID NO: 1916454 - RNA, 18 nt, Human
caucucaccuccugcugg

SEQ ID NO: 1916455 - RNA, 20 nt, Human
caucucacacaugagcauca

SEQ ID NO: 1916456 - RNA, 22 nt, Human
caucucaugccccuggcuggga

SEQ ID NO: 1916457 - RNA, 22 nt, Human
caucucagguuaagugugagua

SEQ ID NO: 1916458 - RNA, 16 nt, Human
caucucacacaugagc

SEQ ID NO: 1916459 - RNA, 17 nt, Human
caucucacacaugagca

SEQ ID NO: 1916460 - RNA, 14 nt, Human
caucuauuuuggau

SEQ ID NO: 1916461 - RNA, 16 nt, Human
caucuauuuuggauug

SEQ ID NO: 1916462 - RNA, 13 nt, Human
caucuauucucuc

SEQ ID NO: 1916463 - RNA, 20 nt, Human
caucuauucucuccaaaaau

SEQ ID NO: 1916464 - RNA, 15 nt, Human
caucuacccuccgau

SEQ ID NO: 1916465 - RNA, 12 nt, Human
caucuaggauuu

SEQ ID NO: 1916466 - RNA, 17 nt, Human
caucuagguaaauuaca

SEQ ID NO: 1916467 - RNA, 18 nt, Human
caucuagguaaauuacag

SEQ ID NO: 1916468 - RNA, 21 nt, Human
cauccucuguacagagcccac

SEQ ID NO: 1916469 - RNA, 19 nt, Human
cauccucuguacagagccc

SEQ ID NO: 1916470 - RNA, 12 nt, Human
caucuaagccug

SEQ ID NO: 1916471 - RNA, 16 nt, Human
caucuaagccugaagg

SEQ ID NO: 1916472 - RNA, 15 nt, Human
cauccucuguacaga

SEQ ID NO: 1916473 - RNA, 18 nt, Human
cauccucuguacagagcc

SEQ ID NO: 1916474 - RNA, 13 nt, Human
cauccucccaagg

SEQ ID NO: 1916475 - RNA, 16 nt, Human
cauccuccagcaggga

SEQ ID NO: 1916476 - RNA, 13 nt, Human
cauccuccagcag

SEQ ID NO: 1916477 - RNA, 14 nt, Human
cauccuccagcagg

SEQ ID NO: 1916478 - RNA, 17 nt, Human
cauccucauacccaccc

SEQ ID NO: 1916479 - RNA, 18 nt, Human
cauccucauacccacccc

SEQ ID NO: 1916480 - RNA, 21 nt, Human
cauccucauacccacccccac

SEQ ID NO: 1916481 - RNA, 22 nt, Human
cauccucauacccacccccacc

SEQ ID NO: 1916482 - RNA, 11 nt, Human
cauccuccuca

SEQ ID NO: 1916483 - RNA, 12 nt, Human
cauccuccucag

SEQ ID NO: 1916484 - RNA, 15 nt, Human
cauccuccucagauc

SEQ ID NO: 1916485 - RNA, 16 nt, Human
cauccuccucagaucu

SEQ ID NO: 1916486 - RNA, 18 nt, Human
cauccuccucagaucuuc

SEQ ID NO: 1916487 - RNA, 19 nt, Human
cauccuccucagaucuucu

SEQ ID NO: 1916488 - RNA, 15 nt, Human
cauccucauacccac

SEQ ID NO: 1916489 - RNA, 16 nt, Human
cauccucauacccacc

SEQ ID NO: 1916490 - RNA, 20 nt, Human
caucuugcucugcugacaga

SEQ ID NO: 1916491 - RNA, 14 nt, Human
caucuugcucugcu

SEQ ID NO: 1916492 - RNA, 15 nt, Human
caucuugcucugcug

SEQ ID NO: 1916493 - RNA, 13 nt, Human
caucuugcucugc

SEQ ID NO: 1916494 - RNA, 21 nt, Human
caucuucuaaacccaauccaa

SEQ ID NO: 1916495 - RNA, 23 nt, Human
caucucuuagcuccccuccaacc

SEQ ID NO: 1916496 - RNA, 21 nt, Human
caucucuuagcuccccuccaa

SEQ ID NO: 1916497 - RNA, 19 nt, Human
caucucuuagcuccccucc

SEQ ID NO: 1916498 - RNA, 18 nt, Human
caucucuuagcuccccuc

SEQ ID NO: 1916499 - RNA, 17 nt, Human
caucucuuagcuccccu

SEQ ID NO: 1916500 - RNA, 16 nt, Human
caucucuuagcucccc

SEQ ID NO: 1916501 - RNA, 21 nt, Human
caucucccaccuagcagcacc

SEQ ID NO: 1916502 - RNA, 16 nt, Human
caucucuuguuuaaau

SEQ ID NO: 1916503 - RNA, 22 nt, Human
caucuuccaaggguacuaagga

SEQ ID NO: 1916504 - RNA, 15 nt, Human
cauccagguucagcu

SEQ ID NO: 1916505 - RNA, 11 nt, Human
caucccugaag

SEQ ID NO: 1916506 - RNA, 13 nt, Human
caucccugaaggc

SEQ ID NO: 1916507 - RNA, 19 nt, Human
caucccucuggggcuguuc

SEQ ID NO: 1916508 - RNA, 21 nt, Human
cauccagggcccccaucucau

SEQ ID NO: 1916509 - RNA, 11 nt, Human
cauccagggcc

SEQ ID NO: 1916510 - RNA, 13 nt, Human
caucauugaaauc

SEQ ID NO: 1916511 - RNA, 15 nt, Human
caucaccaacgucug

SEQ ID NO: 1916512 - RNA, 14 nt, Human
caucauugaaaucu

SEQ ID NO: 1916513 - RNA, 15 nt, Human
caucauugaaaucuu

SEQ ID NO: 1916514 - RNA, 20 nt, Human
caucauugaaaucuuuuugc

SEQ ID NO: 1916515 - RNA, 21 nt, Human
caucauugaaaucuuuuugcu

SEQ ID NO: 1916516 - RNA, 23 nt, Human
cauccaaaauaguuaagacauga

SEQ ID NO: 1916517 - RNA, 15 nt, Human
cauccaaagcagaca

SEQ ID NO: 1916518 - RNA, 16 nt, Human
cauccaaagcagacag

SEQ ID NO: 1916519 - RNA, 17 nt, Human
cauccaaagcagacagc

SEQ ID NO: 1916520 - RNA, 18 nt, Human
cauccaaagcagacagcu

SEQ ID NO: 1916521 - RNA, 21 nt, Human
cauccaaagcagacagcucca

SEQ ID NO: 1916522 - RNA, 14 nt, Human
cauccaaccuuccc

SEQ ID NO: 1916523 - RNA, 16 nt, Human
cauccaaccuucccaa

SEQ ID NO: 1916524 - RNA, 22 nt, Human
caucccugaaggccccgcccag

SEQ ID NO: 1916525 - RNA, 17 nt, Human
caucccugaaggccccg

SEQ ID NO: 1916526 - RNA, 18 nt, Human
caucccugaaggccccgc

SEQ ID NO: 1916527 - RNA, 19 nt, Human
caucccugaaggccccgcc

SEQ ID NO: 1916528 - RNA, 21 nt, Human
caucccugaaggccccgccca

SEQ ID NO: 1916529 - RNA, 19 nt, Human
cauacucaauguuacuauc

SEQ ID NO: 1916530 - RNA, 13 nt, Human
cauacguacacau

SEQ ID NO: 1916531 - RNA, 16 nt, Human
cauacguacacauuuu

SEQ ID NO: 1916532 - RNA, 15 nt, Human
cauacguacacauuu

SEQ ID NO: 1916533 - RNA, 21 nt, Human
cauacuaaccagcagaaaugc

SEQ ID NO: 1916534 - RNA, 14 nt, Human
cauacuaaccagca

SEQ ID NO: 1916535 - RNA, 18 nt, Human
cauacguacacauuuuau

SEQ ID NO: 1916536 - RNA, 17 nt, Human
cauacguacacauuuua

SEQ ID NO: 1916537 - RNA, 14 nt, Human
cauacccaccccca

SEQ ID NO: 1916538 - RNA, 17 nt, Human
cauacccacccccaccc

SEQ ID NO: 1916539 - RNA, 18 nt, Human
cauacccacccccaccca

SEQ ID NO: 1916540 - RNA, 21 nt, Human
cauacccacccccacccaagg

SEQ ID NO: 1916541 - RNA, 15 nt, Human
cauaccuggcccugu

SEQ ID NO: 1916542 - RNA, 12 nt, Human
cauaaguuucug

SEQ ID NO: 1916543 - RNA, 17 nt, Human
cauaauaaaugcuucag

SEQ ID NO: 1916544 - RNA, 17 nt, Human
cauaagguuuuuaugca

SEQ ID NO: 1916545 - RNA, 16 nt, Human
cauaagguuuuuaugc

SEQ ID NO: 1916546 - RNA, 11 nt, Human
cauaagguuuu

SEQ ID NO: 1916547 - RNA, 19 nt, Human
cauaagaaaacuaagaaau

SEQ ID NO: 1916548 - RNA, 13 nt, Human
cauaacuagaacu

SEQ ID NO: 1916549 - RNA, 14 nt, Human
cauaagauaaaugu

SEQ ID NO: 1916550 - RNA, 23 nt, Human
cauaagagccacaggucuuuaug

SEQ ID NO: 1916551 - RNA, 19 nt, Human
cauaccacuuuuguucuug

SEQ ID NO: 1916552 - RNA, 11 nt, Human
cauacccaccc

SEQ ID NO: 1916553 - RNA, 12 nt, Human
cauacccacccc

SEQ ID NO: 1916554 - RNA, 18 nt, Human
cauaccacuuuuguucuu

SEQ ID NO: 1916555 - RNA, 15 nt, Human
cauaccacuuuuguu

SEQ ID NO: 1916556 - RNA, 14 nt, Human
cauaccacuuuugu

SEQ ID NO: 1916557 - RNA, 13 nt, Human
cauaccacuuuug

SEQ ID NO: 1916558 - RNA, 15 nt, Human
cauaauacuugcuuu

SEQ ID NO: 1916559 - RNA, 18 nt, Human
cauaaucacaacccuuca

SEQ ID NO: 1916560 - RNA, 16 nt, Human
cauaaccuagccuuag

SEQ ID NO: 1916561 - RNA, 20 nt, Human
cauaacagauuuuuuuugga

SEQ ID NO: 1916562 - RNA, 22 nt, Human
cauaaccaugugaaaaggcaaa

SEQ ID NO: 1916563 - RNA, 20 nt, Human
cauaaauuuaguauuuuguu

SEQ ID NO: 1916564 - RNA, 19 nt, Human
cauaaauuuaguauuuugu

SEQ ID NO: 1916565 - RNA, 13 nt, Human
cauaaagcaaaua

SEQ ID NO: 1916566 - RNA, 20 nt, Human
cauaaagcaaauagacacag

SEQ ID NO: 1916567 - RNA, 14 nt, Human
cauaaagcaggcag

SEQ ID NO: 1916568 - RNA, 16 nt, Human
cauaaagcaggcagaa

SEQ ID NO: 1916569 - RNA, 21 nt, Human
cauaaacaagaccacguuucu

SEQ ID NO: 1916570 - RNA, 20 nt, Human
cauaaacaagaccacguuuc

SEQ ID NO: 1916571 - RNA, 22 nt, Human
cauaaacaagaccacguuucua

SEQ ID NO: 1916572 - RNA, 21 nt, Human
cauaaaaauuagccaagugug

SEQ ID NO: 1916573 - RNA, 12 nt, Human
cauaaaacaggu

SEQ ID NO: 1916574 - RNA, 23 nt, Human
cauaaaaagcaaaacaaaaauua

SEQ ID NO: 1916575 - RNA, 16 nt, Human
caguuuuuuaugcuaa

SEQ ID NO: 1916576 - RNA, 15 nt, Human
caguuuuuauugcuu

SEQ ID NO: 1916577 - RNA, 17 nt, Human
caguuguuagugugucu

SEQ ID NO: 1916578 - RNA, 17 nt, Human
caguugggugagaacaa

SEQ ID NO: 1916579 - RNA, 22 nt, Human
caguugguguucaaauagcacu

SEQ ID NO: 1916580 - RNA, 16 nt, Human
caguuggccagagagc

SEQ ID NO: 1916581 - RNA, 17 nt, Human
caguuggccagagagcc

SEQ ID NO: 1916582 - RNA, 16 nt, Human
caguuggguggaugcc

SEQ ID NO: 1916583 - RNA, 23 nt, Human
caguugccagucaccccggccac

SEQ ID NO: 1916584 - RNA, 19 nt, Human
caguuggguggaugccugg

SEQ ID NO: 1916585 - RNA, 18 nt, Human
caguuggguggaugccug

SEQ ID NO: 1916586 - RNA, 18 nt, Human
caguuggucccccuucca

SEQ ID NO: 1916587 - RNA, 19 nt, Human
caguuggucccccuuccau

SEQ ID NO: 1916588 - RNA, 20 nt, Human
caguuggucccccuuccaug

SEQ ID NO: 1916589 - RNA, 21 nt, Human
caguuggucccccuuccaugg

SEQ ID NO: 1916590 - RNA, 22 nt, Human
caguuggucccccuuccaugga

SEQ ID NO: 1916591 - RNA, 20 nt, Human
caguucuuugggccagacau

SEQ ID NO: 1916592 - RNA, 21 nt, Human
caguucuuugggccagacaug

SEQ ID NO: 1916593 - RNA, 22 nt, Human
caguucuuugggccagacaugc

SEQ ID NO: 1916594 - RNA, 22 nt, Human
caguguuuucugggauaaguaa

SEQ ID NO: 1916595 - RNA, 15 nt, Human
caguguuuucuggga

SEQ ID NO: 1916596 - RNA, 24 nt, Human
caguguuggccaugaugacaacua

SEQ ID NO: 1916597 - RNA, 22 nt, Human
caguguuguggauuuaacagaa

SEQ ID NO: 1916598 - RNA, 20 nt, Human
caguguuguggauuuaacag

SEQ ID NO: 1916599 - RNA, 19 nt, Human
caguguuguggauuuaaca

SEQ ID NO: 1916600 - RNA, 18 nt, Human
caguguuccgugguuaaa

SEQ ID NO: 1916601 - RNA, 21 nt, Human
cagugugucgagucaaaaugu

SEQ ID NO: 1916602 - RNA, 15 nt, Human
caguuaaguuuuucc

SEQ ID NO: 1916603 - RNA, 13 nt, Human
caguuaagagaaa

SEQ ID NO: 1916604 - RNA, 14 nt, Human
caguuaagagaaau

SEQ ID NO: 1916605 - RNA, 14 nt, Human
caguuacucagaau

SEQ ID NO: 1916606 - RNA, 22 nt, Human
caguucggugagcuacaaaugc

SEQ ID NO: 1916607 - RNA, 15 nt, Human
caguuccuuucaaug

SEQ ID NO: 1916608 - RNA, 13 nt, Human
caguucucuccuu

SEQ ID NO: 1916609 - RNA, 14 nt, Human
caguucucuccuuc

SEQ ID NO: 1916610 - RNA, 15 nt, Human
caguucucuccuucu

SEQ ID NO: 1916611 - RNA, 22 nt, Human
caguucucuccuucuucccccc

SEQ ID NO: 1916612 - RNA, 16 nt, Human
caguucucuucacuca

SEQ ID NO: 1916613 - RNA, 12 nt, Human
caguugaaaaac

SEQ ID NO: 1916614 - RNA, 16 nt, Human
caguucuuugggccag

SEQ ID NO: 1916615 - RNA, 17 nt, Human
caguucuuugggccaga

SEQ ID NO: 1916616 - RNA, 18 nt, Human
caguucuuugggccagac

SEQ ID NO: 1916617 - RNA, 19 nt, Human
caguucuuugggccagaca

SEQ ID NO: 1916618 - RNA, 18 nt, Human
caguugaaaaacagcuga

SEQ ID NO: 1916619 - RNA, 19 nt, Human
caguugaaaaacagcugag

SEQ ID NO: 1916620 - RNA, 19 nt, Human
caguucuugccacuuuuuu

SEQ ID NO: 1916621 - RNA, 15 nt, Human
caguguacagucuug

SEQ ID NO: 1916622 - RNA, 12 nt, Human
caguguacaguc

SEQ ID NO: 1916623 - RNA, 18 nt, Human
caguguacagucuuguau

SEQ ID NO: 1916624 - RNA, 17 nt, Human
caguguacagucuugua

SEQ ID NO: 1916625 - RNA, 16 nt, Human
caguguacauggaaua

SEQ ID NO: 1916626 - RNA, 20 nt, Human
caguguacauggaauaacau

SEQ ID NO: 1916627 - RNA, 23 nt, Human
caguguacauggaauaacaugua

SEQ ID NO: 1916628 - RNA, 14 nt, Human
cagugucaaugcag

SEQ ID NO: 1916629 - RNA, 20 nt, Human
caguguccuuagaacauuuu

SEQ ID NO: 1916630 - RNA, 16 nt, Human
caguguccuuagaaca

SEQ ID NO: 1916631 - RNA, 14 nt, Human
cagugugacaagga

SEQ ID NO: 1916632 - RNA, 12 nt, Human
cagugugacuga

SEQ ID NO: 1916633 - RNA, 19 nt, Human
cagugucuggcugcagagc

SEQ ID NO: 1916634 - RNA, 17 nt, Human
cagugucuggcugcaga

SEQ ID NO: 1916635 - RNA, 14 nt, Human
cagugucucggagg

SEQ ID NO: 1916636 - RNA, 18 nt, Human
cagugugaauaaagugcu

SEQ ID NO: 1916637 - RNA, 15 nt, Human
cagugugcacuaagg

SEQ ID NO: 1916638 - RNA, 19 nt, Human
cagugugcacuaaggggcc

SEQ ID NO: 1916639 - RNA, 23 nt, Human
cagugugcacuaaggggcccggc

SEQ ID NO: 1916640 - RNA, 11 nt, Human
cagugguuaag

SEQ ID NO: 1916641 - RNA, 22 nt, Human
cagugguuccuaauccucuagg

SEQ ID NO: 1916642 - RNA, 20 nt, Human
caguggcuggaucugugagg

SEQ ID NO: 1916643 - RNA, 18 nt, Human
caguggcuggaucuguga

SEQ ID NO: 1916644 - RNA, 16 nt, Human
caguggcuggaucugu

SEQ ID NO: 1916645 - RNA, 17 nt, Human
caguggcaggacaggaa

SEQ ID NO: 1916646 - RNA, 16 nt, Human
caguggcagcugcuuu

SEQ ID NO: 1916647 - RNA, 15 nt, Human
caguggcagcugcuu

SEQ ID NO: 1916648 - RNA, 14 nt, Human
caguggcagcugcu

SEQ ID NO: 1916649 - RNA, 13 nt, Human
caguggcagcugc

SEQ ID NO: 1916650 - RNA, 12 nt, Human
caguggcagcug

SEQ ID NO: 1916651 - RNA, 16 nt, Human
caguggaaccagccca

SEQ ID NO: 1916652 - RNA, 22 nt, Human
caugcgacacugggaggccagu

SEQ ID NO: 1916653 - RNA, 23 nt, Human
caugccuggauggggcugcaccg

SEQ ID NO: 1916654 - RNA, 18 nt, Human
caugccuggauggggcug

SEQ ID NO: 1916655 - RNA, 21 nt, Human
caugccuggauggggcugcac

SEQ ID NO: 1916656 - RNA, 22 nt, Human
caugcugucccuuacgugaguc

SEQ ID NO: 1916657 - RNA, 20 nt, Human
caugcuguucaugaaagauu

SEQ ID NO: 1916658 - RNA, 19 nt, Human
caugcgguagccagcacac

SEQ ID NO: 1916659 - RNA, 21 nt, Human
caugcgguagccagcacacag

SEQ ID NO: 1916660 - RNA, 13 nt, Human
caugcgguagcca

SEQ ID NO: 1916661 - RNA, 14 nt, Human
caugcgguagccag

SEQ ID NO: 1916662 - RNA, 15 nt, Human
caugcgguagccagc

SEQ ID NO: 1916663 - RNA, 16 nt, Human
caugcgguagccagca

SEQ ID NO: 1916664 - RNA, 17 nt, Human
caugcgguagccagcac

SEQ ID NO: 1916665 - RNA, 16 nt, Human
cauggaauaacaugua

SEQ ID NO: 1916666 - RNA, 18 nt, Human
cauggacaugaucuucuu

SEQ ID NO: 1916667 - RNA, 21 nt, Human
cauggacagaagaaggcagca

SEQ ID NO: 1916668 - RNA, 15 nt, Human
cauggacagaagaag

SEQ ID NO: 1916669 - RNA, 14 nt, Human
cauggacaggcugg

SEQ ID NO: 1916670 - RNA, 15 nt, Human
cauggacaggcuggc

SEQ ID NO: 1916671 - RNA, 16 nt, Human
cauggacaggcuggcu

SEQ ID NO: 1916672 - RNA, 18 nt, Human
cauggacaggcuggcucc

SEQ ID NO: 1916673 - RNA, 20 nt, Human
cauggaaguacuauaauuua

SEQ ID NO: 1916674 - RNA, 22 nt, Human
cauggaaguacuauaauuuacc

SEQ ID NO: 1916675 - RNA, 19 nt, Human
caugcugugauugugccua

SEQ ID NO: 1916676 - RNA, 15 nt, Human
caugggccuccugug

SEQ ID NO: 1916677 - RNA, 22 nt, Human
caugggaaugaaugucagugug

SEQ ID NO: 1916678 - RNA, 17 nt, Human
caugggacagggaggac

SEQ ID NO: 1916679 - RNA, 17 nt, Human
caugggccuccugugug

SEQ ID NO: 1916680 - RNA, 16 nt, Human
caugggccuccugugu

SEQ ID NO: 1916681 - RNA, 19 nt, Human
cauggggcugauuguauuu

SEQ ID NO: 1916682 - RNA, 17 nt, Human
cauggucacacacugau

SEQ ID NO: 1916683 - RNA, 21 nt, Human
cauggucacacacugaugcuu

SEQ ID NO: 1916684 - RNA, 18 nt, Human
caugggaaugaaugucag

SEQ ID NO: 1916685 - RNA, 19 nt, Human
cauggaugggggaacucag

SEQ ID NO: 1916686 - RNA, 14 nt, Human
cauggauggaaaac

SEQ ID NO: 1916687 - RNA, 16 nt, Human
cauggaguauauguca

SEQ ID NO: 1916688 - RNA, 11 nt, Human
cauggacuuug

SEQ ID NO: 1916689 - RNA, 13 nt, Human
cauggacuuuguu

SEQ ID NO: 1916690 - RNA, 17 nt, Human
cauggagguuugaagau

SEQ ID NO: 1916691 - RNA, 10 nt, Human
cauggagcca

SEQ ID NO: 1916692 - RNA, 21 nt, Human
cauggagauagccccacagga

SEQ ID NO: 1916693 - RNA, 14 nt, Human
caugccucucucag

SEQ ID NO: 1916694 - RNA, 15 nt, Human
caugccucucucagg

SEQ ID NO: 1916695 - RNA, 23 nt, Human
caugcccugugcaaccucuuggc

SEQ ID NO: 1916696 - RNA, 11 nt, Human
caugccucagc

SEQ ID NO: 1916697 - RNA, 14 nt, Human
caugccucagcccu

SEQ ID NO: 1916698 - RNA, 16 nt, Human
caugccucagcccuga

SEQ ID NO: 1916699 - RNA, 20 nt, Human
caugcccuccucucccauug

SEQ ID NO: 1916700 - RNA, 13 nt, Human
caugcccuccucu

SEQ ID NO: 1916701 - RNA, 14 nt, Human
caugcccuccucuc

SEQ ID NO: 1916702 - RNA, 15 nt, Human
caugcccuccucucc

SEQ ID NO: 1916703 - RNA, 17 nt, Human
caugcccuccucuccca

SEQ ID NO: 1916704 - RNA, 14 nt, Human
caugcccugugcaa

SEQ ID NO: 1916705 - RNA, 18 nt, Human
caugcccugugcaaccuc

SEQ ID NO: 1916706 - RNA, 19 nt, Human
caugcccugugcaaccucu

SEQ ID NO: 1916707 - RNA, 15 nt, Human
caugccccuggcugg

SEQ ID NO: 1916708 - RNA, 16 nt, Human
caugccccuggcuggg

SEQ ID NO: 1916709 - RNA, 21 nt, Human
caugcccggcuaauuuuugua

SEQ ID NO: 1916710 - RNA, 16 nt, Human
caugccucucucaggc

SEQ ID NO: 1916711 - RNA, 17 nt, Human
caugccucucucaggcc

SEQ ID NO: 1916712 - RNA, 18 nt, Human
caugccucucucaggcca

SEQ ID NO: 1916713 - RNA, 19 nt, Human
caugccucucucaggccaa

SEQ ID NO: 1916714 - RNA, 13 nt, Human
caugccuggaugg

SEQ ID NO: 1916715 - RNA, 21 nt, Human
caugccucccccuagccauuu

SEQ ID NO: 1916716 - RNA, 19 nt, Human
caugccucagcccugaccc

SEQ ID NO: 1916717 - RNA, 20 nt, Human
caugccucagcccugacccu

SEQ ID NO: 1916718 - RNA, 14 nt, Human
caugccccuggcug

SEQ ID NO: 1916719 - RNA, 19 nt, Human
caugccagcuuaucucagg

SEQ ID NO: 1916720 - RNA, 20 nt, Human
caugccagcuuaucucaggg

SEQ ID NO: 1916721 - RNA, 17 nt, Human
caugccacaaggacuuc

SEQ ID NO: 1916722 - RNA, 21 nt, Human
caugccacaaggacuuccugu

SEQ ID NO: 1916723 - RNA, 13 nt, Human
caugccccugaac

SEQ ID NO: 1916724 - RNA, 22 nt, Human
caugcagucugggaguggggaa

SEQ ID NO: 1916725 - RNA, 15 nt, Human
cauguacaugaagaa

SEQ ID NO: 1916726 - RNA, 23 nt, Human
caugucuuguacauguguagccu

SEQ ID NO: 1916727 - RNA, 18 nt, Human
cauguaauuaaguacuau

SEQ ID NO: 1916728 - RNA, 21 nt, Human
cauguaauuaaguacuaugua

SEQ ID NO: 1916729 - RNA, 15 nt, Human
caugugaaaucauuc

SEQ ID NO: 1916730 - RNA, 22 nt, Human
caugugaaaaggcaaaaagcau

SEQ ID NO: 1916731 - RNA, 16 nt, Human
caugugaaaucauuca

SEQ ID NO: 1916732 - RNA, 17 nt, Human
caugugaaaucauucau

SEQ ID NO: 1916733 - RNA, 14 nt, Human
caugucuuuucuug

SEQ ID NO: 1916734 - RNA, 19 nt, Human
caugucuuuucuugcauga

SEQ ID NO: 1916735 - RNA, 21 nt, Human
caugucuuuucuugcaugagg

SEQ ID NO: 1916736 - RNA, 23 nt, Human
caugucuuuucuugcaugaggcu

SEQ ID NO: 1916737 - RNA, 16 nt, Human
cauggucggaaaacau

SEQ ID NO: 1916738 - RNA, 15 nt, Human
cauggugccccagga

SEQ ID NO: 1916739 - RNA, 20 nt, Human
cauggugacuuuugaaaaga

SEQ ID NO: 1916740 - RNA, 16 nt, Human
cauggugccccaggac

SEQ ID NO: 1916741 - RNA, 17 nt, Human
cauggugccccaggacc

SEQ ID NO: 1916742 - RNA, 18 nt, Human
cauggugccccaggacca

SEQ ID NO: 1916743 - RNA, 19 nt, Human
cauggugccccaggaccag

SEQ ID NO: 1916744 - RNA, 20 nt, Human
cauggugccccaggaccagc

SEQ ID NO: 1916745 - RNA, 22 nt, Human
cauggugccccaggaccagcuc

SEQ ID NO: 1916746 - RNA, 16 nt, Human
cauggugcccuggcuu

SEQ ID NO: 1916747 - RNA, 14 nt, Human
cauguaauccucaa

SEQ ID NO: 1916748 - RNA, 13 nt, Human
caugugacacaua

SEQ ID NO: 1916749 - RNA, 12 nt, Human
caugugacacau

SEQ ID NO: 1916750 - RNA, 15 nt, Human
caugugacacauaug

SEQ ID NO: 1916751 - RNA, 14 nt, Human
caugugacacauau

SEQ ID NO: 1916752 - RNA, 16 nt, Human
caugugacacauaugc

SEQ ID NO: 1916753 - RNA, 15 nt, Human
caugugcacaugcac

SEQ ID NO: 1916754 - RNA, 22 nt, Human
caugugccagggcaaugaugaa

SEQ ID NO: 1916755 - RNA, 24 nt, Human
caugugccagggcaaugaugaaug

SEQ ID NO: 1916756 - RNA, 21 nt, Human
caugugccagguuuuuggucu

SEQ ID NO: 1916757 - RNA, 22 nt, Human
caugugguuaaugccauggaca

SEQ ID NO: 1916758 - RNA, 23 nt, Human
caugugguuacacagugugaaua

SEQ ID NO: 1916759 - RNA, 16 nt, Human
caugugguuacacagu

SEQ ID NO: 1916760 - RNA, 17 nt, Human
caugugguuaaugccau

SEQ ID NO: 1916761 - RNA, 20 nt, Human
cauguuucuuuguaaugaaa

SEQ ID NO: 1916762 - RNA, 21 nt, Human
cauguuucuuuguaaugaaaa

SEQ ID NO: 1916763 - RNA, 15 nt, Human
cauguuugugauuga

SEQ ID NO: 1916764 - RNA, 22 nt, Human
cauguuucuuuguaaugaaaac

SEQ ID NO: 1916765 - RNA, 23 nt, Human
cauguuugauguaucugagcagg

SEQ ID NO: 1916766 - RNA, 15 nt, Human
cauguuuucaacugc

SEQ ID NO: 1916767 - RNA, 16 nt, Human
cauguuuucaacugcc

SEQ ID NO: 1916768 - RNA, 17 nt, Human
cauguuuucaacugcca

SEQ ID NO: 1916769 - RNA, 14 nt, Human
cauguuuuccguga

SEQ ID NO: 1916770 - RNA, 14 nt, Human
cauuaaauucacaa

SEQ ID NO: 1916771 - RNA, 17 nt, Human
cauuaaauucacaaacu

SEQ ID NO: 1916772 - RNA, 18 nt, Human
cauuaaauucacaaacuu

SEQ ID NO: 1916773 - RNA, 21 nt, Human
cauuaaauucacaaacuuuua

SEQ ID NO: 1916774 - RNA, 12 nt, Human
cauuaauucuau

SEQ ID NO: 1916775 - RNA, 22 nt, Human
cauuaccucagugagaagccag

SEQ ID NO: 1916776 - RNA, 21 nt, Human
cauuaccucagugagaagcca

SEQ ID NO: 1916777 - RNA, 21 nt, Human
cauuaaagccugaguuugcuu

SEQ ID NO: 1916778 - RNA, 15 nt, Human
cauguuuuguuuacg

SEQ ID NO: 1916779 - RNA, 13 nt, Human
cauuaaauucaca

SEQ ID NO: 1916780 - RNA, 18 nt, Human
cauguuuuucuucucccu

SEQ ID NO: 1916781 - RNA, 17 nt, Human
cauuuuaauuauuauuc

SEQ ID NO: 1916782 - RNA, 14 nt, Human
cauuuuaauucauc

SEQ ID NO: 1916783 - RNA, 23 nt, Human
cauuuuaauuuauuaauugcuuu

SEQ ID NO: 1916784 - RNA, 22 nt, Human
cauuugaggucuguucuuucca

SEQ ID NO: 1916785 - RNA, 21 nt, Human
cauuuuauuuuauuaugcaug

SEQ ID NO: 1916786 - RNA, 19 nt, Human
cauuuuauuuuauuaugca

SEQ ID NO: 1916787 - RNA, 22 nt, Human
cauuuuaauuuauuaauugcuu

SEQ ID NO: 1916788 - RNA, 22 nt, Human
cauuuugggguacccacugcuc

SEQ ID NO: 1916789 - RNA, 21 nt, Human
cauuuugggguacccacugcu

SEQ ID NO: 1916790 - RNA, 20 nt, Human
cauuuugggguacccacugc

SEQ ID NO: 1916791 - RNA, 20 nt, Human
cauuuuggagaguuuccuga

SEQ ID NO: 1916792 - RNA, 22 nt, Human
cauuuuggagaguuuccugaaa

SEQ ID NO: 1916793 - RNA, 18 nt, Human
cauuuugcuaaaugugaa

SEQ ID NO: 1916794 - RNA, 21 nt, Human
cauuuugcuaaaugugaauga

SEQ ID NO: 1916795 - RNA, 24 nt, Human
cauuuugcuaaaugugaaugauga

SEQ ID NO: 1916796 - RNA, 18 nt, Human
cauuuuuaguagagacag

SEQ ID NO: 1916797 - RNA, 19 nt, Human
cauuuuuaguagagacagg

SEQ ID NO: 1916798 - RNA, 20 nt, Human
cauuuuuaagugcugcauuu

SEQ ID NO: 1916799 - RNA, 15 nt, Human
cauuuuuaagugcug

SEQ ID NO: 1916800 - RNA, 23 nt, Human
cauuuugggguacccacugcucu

SEQ ID NO: 1916801 - RNA, 15 nt, Human
cauuuuggugagaaa

SEQ ID NO: 1916802 - RNA, 18 nt, Human
cauuuuguaacaaaugaa

SEQ ID NO: 1916803 - RNA, 20 nt, Human
cauuuuuaguagagacaggg

SEQ ID NO: 1916804 - RNA, 21 nt, Human
ccaaaauaaaacuuuuuaaaa

SEQ ID NO: 1916805 - RNA, 18 nt, Human
ccaaaauaaaacuuuuua

SEQ ID NO: 1916806 - RNA, 13 nt, Human
ccaaacgccuccc

SEQ ID NO: 1916807 - RNA, 18 nt, Human
ccaaaccuucacacacag

SEQ ID NO: 1916808 - RNA, 21 nt, Human
ccaaaccuucacacacagacu

SEQ ID NO: 1916809 - RNA, 18 nt, Human
ccaaacuuggauuuuuga

SEQ ID NO: 1916810 - RNA, 16 nt, Human
ccaaacuuggauuuuu

SEQ ID NO: 1916811 - RNA, 14 nt, Human
cauuugagcagggc

SEQ ID NO: 1916812 - RNA, 16 nt, Human
cauuugagcagggcuc

SEQ ID NO: 1916813 - RNA, 17 nt, Human
cauuugaggucuguucu

SEQ ID NO: 1916814 - RNA, 19 nt, Human
cauuugaggucuguucuuu

SEQ ID NO: 1916815 - RNA, 18 nt, Human
cauuugaggucuguucuu

SEQ ID NO: 1916816 - RNA, 23 nt, Human
cauuucuuccacaagagcccagg

SEQ ID NO: 1916817 - RNA, 21 nt, Human
cauuuacuuuguguucaccuu

SEQ ID NO: 1916818 - RNA, 17 nt, Human
cauuuacuuuguguuca

SEQ ID NO: 1916819 - RNA, 15 nt, Human
cauuuaaaguauuuu

SEQ ID NO: 1916820 - RNA, 17 nt, Human
cauuuacugugucuuug

SEQ ID NO: 1916821 - RNA, 15 nt, Human
cauugcaauagaaau

SEQ ID NO: 1916822 - RNA, 13 nt, Human
cauugcaauagaa

SEQ ID NO: 1916823 - RNA, 14 nt, Human
cauugcaauagaaa

SEQ ID NO: 1916824 - RNA, 21 nt, Human
cauuuaaaagauacaguuacu

SEQ ID NO: 1916825 - RNA, 21 nt, Human
cauuucuuccacaagagccca

SEQ ID NO: 1916826 - RNA, 10 nt, Human
cauuucucuc

SEQ ID NO: 1916827 - RNA, 15 nt, Human
cauuucucuccucac

SEQ ID NO: 1916828 - RNA, 20 nt, Human
cauuucccccaccccauuuc

SEQ ID NO: 1916829 - RNA, 21 nt, Human
cauuucccccaccccauuucu

SEQ ID NO: 1916830 - RNA, 13 nt, Human
cauugaccugagg

SEQ ID NO: 1916831 - RNA, 22 nt, Human
cauugaccugaggcccuucucu

SEQ ID NO: 1916832 - RNA, 14 nt, Human
cauugaacacaaac

SEQ ID NO: 1916833 - RNA, 15 nt, Human
cauugaacacaaacu

SEQ ID NO: 1916834 - RNA, 16 nt, Human
cauugaacacaaacug

SEQ ID NO: 1916835 - RNA, 17 nt, Human
cauugaacacaaacugu

SEQ ID NO: 1916836 - RNA, 18 nt, Human
cauugaacacaaacugua

SEQ ID NO: 1916837 - RNA, 21 nt, Human
cauugaccgcgacuaauuuca

SEQ ID NO: 1916838 - RNA, 22 nt, Human
cauugaccgcgacuaauuucaa

SEQ ID NO: 1916839 - RNA, 19 nt, Human
cauugaaaucuuuuugcuu

SEQ ID NO: 1916840 - RNA, 19 nt, Human
ccacaacaugaaaacucca

SEQ ID NO: 1916841 - RNA, 20 nt, Human
ccacaaaggcaaagggucca

SEQ ID NO: 1916842 - RNA, 16 nt, Human
ccacaaaggcaaaggg

SEQ ID NO: 1916843 - RNA, 18 nt, Human
ccacaaaggagagcuagc

SEQ ID NO: 1916844 - RNA, 16 nt, Human
ccacaagacccuugug

SEQ ID NO: 1916845 - RNA, 13 nt, Human
ccacaagagccca

SEQ ID NO: 1916846 - RNA, 22 nt, Human
ccacaagaaaugaaagcaggga

SEQ ID NO: 1916847 - RNA, 16 nt, Human
ccacaagaaaugaaag

SEQ ID NO: 1916848 - RNA, 18 nt, Human
ccaauauuguacaguuuu

SEQ ID NO: 1916849 - RNA, 16 nt, Human
ccaauauuguacaguu

SEQ ID NO: 1916850 - RNA, 15 nt, Human
ccaauauuguacagu

SEQ ID NO: 1916851 - RNA, 14 nt, Human
ccaauauuguacag

SEQ ID NO: 1916852 - RNA, 19 nt, Human
ccaauucuuacaaacaugu

SEQ ID NO: 1916853 - RNA, 18 nt, Human
ccaauucuuacaaacaug

SEQ ID NO: 1916854 - RNA, 16 nt, Human
ccaauuuuuuuuuccu

SEQ ID NO: 1916855 - RNA, 17 nt, Human
ccaauuuuuuuuuccuu

SEQ ID NO: 1916856 - RNA, 16 nt, Human
ccaauuucagacuccc

SEQ ID NO: 1916857 - RNA, 14 nt, Human
ccaaggcuggggga

SEQ ID NO: 1916858 - RNA, 13 nt, Human
ccaaggcucuguu

SEQ ID NO: 1916859 - RNA, 19 nt, Human
ccaaggcugauuaaaccaa

SEQ ID NO: 1916860 - RNA, 20 nt, Human
ccaauauucauagcagcuua

SEQ ID NO: 1916861 - RNA, 23 nt, Human
ccaagcagagguugggaggccau

SEQ ID NO: 1916862 - RNA, 22 nt, Human
ccaagagcugaggcaauucuaa

SEQ ID NO: 1916863 - RNA, 16 nt, Human
ccaagagccugagagu

SEQ ID NO: 1916864 - RNA, 13 nt, Human
ccaagaggcugca

SEQ ID NO: 1916865 - RNA, 12 nt, Human
ccaagaggcugc

SEQ ID NO: 1916866 - RNA, 14 nt, Human
ccaagcaggacaug

SEQ ID NO: 1916867 - RNA, 12 nt, Human
ccaagcucccag

SEQ ID NO: 1916868 - RNA, 13 nt, Human
ccaagcucccagg

SEQ ID NO: 1916869 - RNA, 18 nt, Human
ccaaggcuagaaccaccu

SEQ ID NO: 1916870 - RNA, 15 nt, Human
ccacaaguuaaauaa

SEQ ID NO: 1916871 - RNA, 20 nt, Human
ccacaaguuaaauaaaucau

SEQ ID NO: 1916872 - RNA, 17 nt, Human
ccacaaggacuuccugu

SEQ ID NO: 1916873 - RNA, 21 nt, Human
ccacaaggacuuccuguccag

SEQ ID NO: 1916874 - RNA, 15 nt, Human
ccacaagugguggua

SEQ ID NO: 1916875 - RNA, 21 nt, Human
ccacaaguggugguaacccug

SEQ ID NO: 1916876 - RNA, 22 nt, Human
ccacacaaggauagaugcuggc

SEQ ID NO: 1916877 - RNA, 20 nt, Human
ccacacaaggauagaugcug

SEQ ID NO: 1916878 - RNA, 22 nt, Human
ccacaaguggugguaacccugg

SEQ ID NO: 1916879 - RNA, 20 nt, Human
ccacaagagcccaggccucc

SEQ ID NO: 1916880 - RNA, 21 nt, Human
ccacaagagcccaggccuccu

SEQ ID NO: 1916881 - RNA, 16 nt, Human
ccacaagagcccaggc

SEQ ID NO: 1916882 - RNA, 17 nt, Human
ccacaagagcccaggcc

SEQ ID NO: 1916883 - RNA, 18 nt, Human
ccacaagagcccaggccu

SEQ ID NO: 1916884 - RNA, 19 nt, Human
ccacaagagcccaggccuc

SEQ ID NO: 1916885 - RNA, 17 nt, Human
ccaagaccucagggcac

SEQ ID NO: 1916886 - RNA, 12 nt, Human
ccaagagccuga

SEQ ID NO: 1916887 - RNA, 15 nt, Human
ccaagaccuucuccu

SEQ ID NO: 1916888 - RNA, 12 nt, Human
ccaaccuuccca

SEQ ID NO: 1916889 - RNA, 14 nt, Human
ccaaccuggggggc

SEQ ID NO: 1916890 - RNA, 17 nt, Human
ccaaccugcaaagaucu

SEQ ID NO: 1916891 - RNA, 18 nt, Human
ccaaccugcaaagaucug

SEQ ID NO: 1916892 - RNA, 19 nt, Human
ccaaccugcaaagaucugu

SEQ ID NO: 1916893 - RNA, 21 nt, Human
ccaaccuauuuugaaguacca

SEQ ID NO: 1916894 - RNA, 14 nt, Human
ccaaccuauuuuga

SEQ ID NO: 1916895 - RNA, 11 nt, Human
ccaacccuucu

SEQ ID NO: 1916896 - RNA, 13 nt, Human
ccaacccuucucc

SEQ ID NO: 1916897 - RNA, 21 nt, Human
ccaacccuucuccucuuguaa

SEQ ID NO: 1916898 - RNA, 13 nt, Human
ccaacccucauca

SEQ ID NO: 1916899 - RNA, 15 nt, Human
ccaacccucaucacc

SEQ ID NO: 1916900 - RNA, 16 nt, Human
ccaacaucaacaucuu

SEQ ID NO: 1916901 - RNA, 14 nt, Human
ccaacauacuccca

SEQ ID NO: 1916902 - RNA, 16 nt, Human
ccaacacgcaccugcc

SEQ ID NO: 1916903 - RNA, 17 nt, Human
ccaacacgcaccugccu

SEQ ID NO: 1916904 - RNA, 15 nt, Human
ccaaauucuuucagu

SEQ ID NO: 1916905 - RNA, 22 nt, Human
ccaaauucuuucaguggcuacc

SEQ ID NO: 1916906 - RNA, 13 nt, Human
ccaaagcagacag

SEQ ID NO: 1916907 - RNA, 14 nt, Human
ccaaagcagacagc

SEQ ID NO: 1916908 - RNA, 22 nt, Human
ccaaagaguagaauugcauuga

SEQ ID NO: 1916909 - RNA, 13 nt, Human
ccaaagaugcagc

SEQ ID NO: 1916910 - RNA, 14 nt, Human
ccaaagaugcagcc

SEQ ID NO: 1916911 - RNA, 9 nt, Human
ccaaagagu

SEQ ID NO: 1916912 - RNA, 16 nt, Human
ccagccuggccacgca

SEQ ID NO: 1916913 - RNA, 11 nt, Human
ccagccuggcc

SEQ ID NO: 1916914 - RNA, 23 nt, Human
ccagccuggccacgcagccagga

SEQ ID NO: 1916915 - RNA, 19 nt, Human
ccagccuggccacgcagcc

SEQ ID NO: 1916916 - RNA, 20 nt, Human
ccagcugagcgccaggaugg

SEQ ID NO: 1916917 - RNA, 15 nt, Human
ccagcugaugacuca

SEQ ID NO: 1916918 - RNA, 16 nt, Human
ccagcugaugacucaa

SEQ ID NO: 1916919 - RNA, 17 nt, Human
ccagcugaugacucaag

SEQ ID NO: 1916920 - RNA, 22 nt, Human
ccagcugaugacucaagauucc

SEQ ID NO: 1916921 - RNA, 23 nt, Human
ccagcugaugacucaagauuccc

SEQ ID NO: 1916922 - RNA, 15 nt, Human
ccagcugagcgccag

SEQ ID NO: 1916923 - RNA, 17 nt, Human
ccagcugagcgccagga

SEQ ID NO: 1916924 - RNA, 14 nt, Human
ccagcucuuuccuc

SEQ ID NO: 1916925 - RNA, 16 nt, Human
ccagcucuuuccuccu

SEQ ID NO: 1916926 - RNA, 17 nt, Human
ccagcucuuuccuccuu

SEQ ID NO: 1916927 - RNA, 21 nt, Human
ccagcugugcucuggacaggc

SEQ ID NO: 1916928 - RNA, 20 nt, Human
ccagcugugcucuggacagg

SEQ ID NO: 1916929 - RNA, 18 nt, Human
ccagcugugcucuggaca

SEQ ID NO: 1916930 - RNA, 18 nt, Human
ccagcugggucaggcagg

SEQ ID NO: 1916931 - RNA, 16 nt, Human
ccagcugggucaggca

SEQ ID NO: 1916932 - RNA, 17 nt, Human
ccagcugggucaggcag

SEQ ID NO: 1916933 - RNA, 13 nt, Human
ccagcugcacuga

SEQ ID NO: 1916934 - RNA, 16 nt, Human
ccagcugcuugggcuu

SEQ ID NO: 1916935 - RNA, 18 nt, Human
ccagcugcuugggcuuca

SEQ ID NO: 1916936 - RNA, 13 nt, Human
ccagcugcuuggg

SEQ ID NO: 1916937 - RNA, 15 nt, Human
ccagcugcuugggcu

SEQ ID NO: 1916938 - RNA, 17 nt, Human
ccaggcccucugcccac

SEQ ID NO: 1916939 - RNA, 18 nt, Human
ccaggcccucugcccacu

SEQ ID NO: 1916940 - RNA, 19 nt, Human
ccaggcccucugcccacuc

SEQ ID NO: 1916941 - RNA, 13 nt, Human
ccaggccuccuac

SEQ ID NO: 1916942 - RNA, 18 nt, Human
ccaggccuccuacagcuu

SEQ ID NO: 1916943 - RNA, 19 nt, Human
ccaggccuccuacagcuug

SEQ ID NO: 1916944 - RNA, 19 nt, Human
ccaggccccugccacccug

SEQ ID NO: 1916945 - RNA, 23 nt, Human
ccaggccccugccacccugggga

SEQ ID NO: 1916946 - RNA, 21 nt, Human
ccaggccccugccacccuggg

SEQ ID NO: 1916947 - RNA, 21 nt, Human
ccaggccagagggagugacag

SEQ ID NO: 1916948 - RNA, 14 nt, Human
ccaggccagaggga

SEQ ID NO: 1916949 - RNA, 14 nt, Human
ccaggagcagccac

SEQ ID NO: 1916950 - RNA, 23 nt, Human
ccagcugugcucuggacaggcau

SEQ ID NO: 1916951 - RNA, 22 nt, Human
ccagcugugcucuggacaggca

SEQ ID NO: 1916952 - RNA, 15 nt, Human
ccaggaagccagcag

SEQ ID NO: 1916953 - RNA, 17 nt, Human
ccaggaagccagcaggc

SEQ ID NO: 1916954 - RNA, 19 nt, Human
ccaggaagccagcaggcuc

SEQ ID NO: 1916955 - RNA, 15 nt, Human
ccaggaccaucaucc

SEQ ID NO: 1916956 - RNA, 14 nt, Human
ccaggacccugaag

SEQ ID NO: 1916957 - RNA, 16 nt, Human
ccaggacccugaaggg

SEQ ID NO: 1916958 - RNA, 17 nt, Human
ccaggaccagcucagga

SEQ ID NO: 1916959 - RNA, 20 nt, Human
ccaggaccagcucaggacag

SEQ ID NO: 1916960 - RNA, 13 nt, Human
ccaggaccagcuc

SEQ ID NO: 1916961 - RNA, 14 nt, Human
ccaggaccagcuca

SEQ ID NO: 1916962 - RNA, 15 nt, Human
ccaggaccagcucag

SEQ ID NO: 1916963 - RNA, 16 nt, Human
ccaggaccagcucagg

SEQ ID NO: 1916964 - RNA, 23 nt, Human
ccaggacccugaaggggccauga

SEQ ID NO: 1916965 - RNA, 18 nt, Human
ccaggacccugaaggggc

SEQ ID NO: 1916966 - RNA, 19 nt, Human
ccaggacccugaaggggcc

SEQ ID NO: 1916967 - RNA, 15 nt, Human
ccaggaccuggcugc

SEQ ID NO: 1916968 - RNA, 17 nt, Human
ccaggaccuggcugcca

SEQ ID NO: 1916969 - RNA, 18 nt, Human
ccaggaccuggcugccau

SEQ ID NO: 1916970 - RNA, 12 nt, Human
ccaggagcagcc

SEQ ID NO: 1916971 - RNA, 13 nt, Human
ccaggagcagcca

SEQ ID NO: 1916972 - RNA, 13 nt, Human
ccaggacugggcc

SEQ ID NO: 1916973 - RNA, 12 nt, Human
ccaggacugggc

SEQ ID NO: 1916974 - RNA, 17 nt, Human
ccaggacugggccacuu

SEQ ID NO: 1916975 - RNA, 14 nt, Human
ccaggacugggcca

SEQ ID NO: 1916976 - RNA, 21 nt, Human
ccaggacuuauuuaaacucug

SEQ ID NO: 1916977 - RNA, 16 nt, Human
ccagggagaccuggac

SEQ ID NO: 1916978 - RNA, 17 nt, Human
ccagggagaccuggaca

SEQ ID NO: 1916979 - RNA, 23 nt, Human
ccagggacagaggggguggccuc

SEQ ID NO: 1916980 - RNA, 23 nt, Human
ccagggacagaggccccagccuc

SEQ ID NO: 1916981 - RNA, 21 nt, Human
ccagggacagaggccccagcc

SEQ ID NO: 1916982 - RNA, 22 nt, Human
ccagggacagaggccccagccu

SEQ ID NO: 1916983 - RNA, 18 nt, Human
ccagggacgaagaagagc

SEQ ID NO: 1916984 - RNA, 19 nt, Human
ccagggacgaagaagagcc

SEQ ID NO: 1916985 - RNA, 20 nt, Human
ccagggacgaagaagagcca

SEQ ID NO: 1916986 - RNA, 21 nt, Human
ccagggacgaagaagagccac

SEQ ID NO: 1916987 - RNA, 23 nt, Human
ccagggacgaagaagagccacag

SEQ ID NO: 1916988 - RNA, 15 nt, Human
ccagggagaagcucc

SEQ ID NO: 1916989 - RNA, 13 nt, Human
ccagggagaagcu

SEQ ID NO: 1916990 - RNA, 14 nt, Human
ccagggagaagcuc

SEQ ID NO: 1916991 - RNA, 13 nt, Human
ccagggacagagg

SEQ ID NO: 1916992 - RNA, 18 nt, Human
ccagggacagaggcccca

SEQ ID NO: 1916993 - RNA, 20 nt, Human
ccagggacagaggccccagc

SEQ ID NO: 1916994 - RNA, 18 nt, Human
ccaggccuuaucuccaag

SEQ ID NO: 1916995 - RNA, 16 nt, Human
ccaucaugucuggcua

SEQ ID NO: 1916996 - RNA, 14 nt, Human
ccaucaugucuggc

SEQ ID NO: 1916997 - RNA, 20 nt, Human
ccaucauguuuacagaggac

SEQ ID NO: 1916998 - RNA, 22 nt, Human
ccaucauguuuacagaggacag

SEQ ID NO: 1916999 - RNA, 21 nt, Human
ccauccucuguacagagccca

SEQ ID NO: 1917000 - RNA, 15 nt, Human
ccauccugaggcucc

SEQ ID NO: 1917001 - RNA, 16 nt, Human
ccauccugaggcucca

SEQ ID NO: 1917002 - RNA, 16 nt, Human
ccauccucuucuuuua

SEQ ID NO: 1917003 - RNA, 23 nt, Human
ccaucucaccuccugcugggcag

SEQ ID NO: 1917004 - RNA, 20 nt, Human
ccaucucaugccccuggcug

SEQ ID NO: 1917005 - RNA, 21 nt, Human
ccaucucaugccccuggcugg

SEQ ID NO: 1917006 - RNA, 14 nt, Human
ccaucuuucuuugg

SEQ ID NO: 1917007 - RNA, 19 nt, Human
ccaucucaccuccugcugg

SEQ ID NO: 1917008 - RNA, 21 nt, Human
ccaucucaccuccugcugggc

SEQ ID NO: 1917009 - RNA, 18 nt, Human
ccaucucaccuccugcug

SEQ ID NO: 1917010 - RNA, 22 nt, Human
ccaucgccagcugaugacucaa

SEQ ID NO: 1917011 - RNA, 19 nt, Human
ccaucgccagcugaugacu

SEQ ID NO: 1917012 - RNA, 21 nt, Human
ccaucgccagcugaugacuca

SEQ ID NO: 1917013 - RNA, 23 nt, Human
ccaucgccagcugaugacucaag

SEQ ID NO: 1917014 - RNA, 20 nt, Human
ccauccuucccugucugcca

SEQ ID NO: 1917015 - RNA, 17 nt, Human
ccaucgccagcugauga

SEQ ID NO: 1917016 - RNA, 19 nt, Human
ccauauucuguuggccagu

SEQ ID NO: 1917017 - RNA, 18 nt, Human
ccauauucuguuggccag

SEQ ID NO: 1917018 - RNA, 15 nt, Human
ccauauucuguuggc

SEQ ID NO: 1917019 - RNA, 19 nt, Human
ccauauuaccacagacaua

SEQ ID NO: 1917020 - RNA, 23 nt, Human
ccauagagagcaagacgcugugc

SEQ ID NO: 1917021 - RNA, 12 nt, Human
ccaucacccgcu

SEQ ID NO: 1917022 - RNA, 16 nt, Human
ccaucaaaaugcuuuu

SEQ ID NO: 1917023 - RNA, 19 nt, Human
ccaucaaaaugcuuuuuau

SEQ ID NO: 1917024 - RNA, 23 nt, Human
ccauguuggccaggcuggucuca

SEQ ID NO: 1917025 - RNA, 22 nt, Human
cccagaggagcugggagccggg

SEQ ID NO: 1917026 - RNA, 20 nt, Human
cccagaggagcugggagccg

SEQ ID NO: 1917027 - RNA, 15 nt, Human
cccagaggagggcag

SEQ ID NO: 1917028 - RNA, 17 nt, Human
cccagagcccagcucca

SEQ ID NO: 1917029 - RNA, 12 nt, Human
cccagagcccag

SEQ ID NO: 1917030 - RNA, 13 nt, Human
cccagagcccagc

SEQ ID NO: 1917031 - RNA, 15 nt, Human
cccagagcccagcuc

SEQ ID NO: 1917032 - RNA, 16 nt, Human
cccagagcccagcucc

SEQ ID NO: 1917033 - RNA, 13 nt, Human
cccagccccaaug

SEQ ID NO: 1917034 - RNA, 18 nt, Human
cccagauuuugcuguaua

SEQ ID NO: 1917035 - RNA, 19 nt, Human
cccagauuuugcuguauau

SEQ ID NO: 1917036 - RNA, 21 nt, Human
cccagauuuugcuguauauuu

SEQ ID NO: 1917037 - RNA, 17 nt, Human
cccagauuggcucacac

SEQ ID NO: 1917038 - RNA, 22 nt, Human
cccagauuggcucacacugaga

SEQ ID NO: 1917039 - RNA, 21 nt, Human
cccagauuggcucacacugag

SEQ ID NO: 1917040 - RNA, 20 nt, Human
cccagauuggcucacacuga

SEQ ID NO: 1917041 - RNA, 19 nt, Human
cccagauuggcucacacug

SEQ ID NO: 1917042 - RNA, 17 nt, Human
cccagccccaaugaaca

SEQ ID NO: 1917043 - RNA, 11 nt, Human
cccagccccau

SEQ ID NO: 1917044 - RNA, 12 nt, Human
cccagccccauc

SEQ ID NO: 1917045 - RNA, 16 nt, Human
cccagccucccugaag

SEQ ID NO: 1917046 - RNA, 17 nt, Human
cccagccucccugaagc

SEQ ID NO: 1917047 - RNA, 18 nt, Human
cccagccucccugaagcc

SEQ ID NO: 1917048 - RNA, 18 nt, Human
cccagccccauccucugu

SEQ ID NO: 1917049 - RNA, 19 nt, Human
cccagccccauccucugua

SEQ ID NO: 1917050 - RNA, 13 nt, Human
cccagccccaucc

SEQ ID NO: 1917051 - RNA, 14 nt, Human
cccagccccauccc

SEQ ID NO: 1917052 - RNA, 14 nt, Human
cccagccccauccu

SEQ ID NO: 1917053 - RNA, 15 nt, Human
cccagccccauccuc

SEQ ID NO: 1917054 - RNA, 12 nt, Human
cccagcucuggu

SEQ ID NO: 1917055 - RNA, 13 nt, Human
cccagcucugguc

SEQ ID NO: 1917056 - RNA, 14 nt, Human
cccagcucuggucc

SEQ ID NO: 1917057 - RNA, 15 nt, Human
cccagcucuggucca

SEQ ID NO: 1917058 - RNA, 16 nt, Human
cccagcucugguccau

SEQ ID NO: 1917059 - RNA, 18 nt, Human
cccagcucugguccauag

SEQ ID NO: 1917060 - RNA, 14 nt, Human
cccagcgagcccug

SEQ ID NO: 1917061 - RNA, 19 nt, Human
cccagcuacucgggaagcu

SEQ ID NO: 1917062 - RNA, 15 nt, Human
cccagcuacuuggga

SEQ ID NO: 1917063 - RNA, 21 nt, Human
cccagcuaugguucucucgca

SEQ ID NO: 1917064 - RNA, 14 nt, Human
cccaggaggccagc

SEQ ID NO: 1917065 - RNA, 14 nt, Human
cccaggagccccga

SEQ ID NO: 1917066 - RNA, 13 nt, Human
cccaggagccccg

SEQ ID NO: 1917067 - RNA, 15 nt, Human
cccaggacugggcca

SEQ ID NO: 1917068 - RNA, 14 nt, Human
cccaggacugggcc

SEQ ID NO: 1917069 - RNA, 13 nt, Human
cccaggacugggc

SEQ ID NO: 1917070 - RNA, 12 nt, Human
cccaggacuggg

SEQ ID NO: 1917071 - RNA, 12 nt, Human
cccaggaccagc

SEQ ID NO: 1917072 - RNA, 14 nt, Human
cccaggaccagcuc

SEQ ID NO: 1917073 - RNA, 15 nt, Human
cccaggaccagcuca

SEQ ID NO: 1917074 - RNA, 16 nt, Human
cccaggaccagcucag

SEQ ID NO: 1917075 - RNA, 17 nt, Human
cccaggaccagcucagg

SEQ ID NO: 1917076 - RNA, 20 nt, Human
cccaggaccagcucaggaca

SEQ ID NO: 1917077 - RNA, 21 nt, Human
cccaggaccagcucaggacag

SEQ ID NO: 1917078 - RNA, 22 nt, Human
cccaggaccagcucaggacaga

SEQ ID NO: 1917079 - RNA, 18 nt, Human
cccaggaccuggcugcca

SEQ ID NO: 1917080 - RNA, 16 nt, Human
cccaggaccuggcugc

SEQ ID NO: 1917081 - RNA, 16 nt, Human
cccaggaccccugagu

SEQ ID NO: 1917082 - RNA, 11 nt, Human
cccaggacccu

SEQ ID NO: 1917083 - RNA, 12 nt, Human
cccaggacccug

SEQ ID NO: 1917084 - RNA, 13 nt, Human
cccaggacccuga

SEQ ID NO: 1917085 - RNA, 23 nt, Human
cccaggacccugaaggggccaug

SEQ ID NO: 1917086 - RNA, 18 nt, Human
cccaggaggccagccuug

SEQ ID NO: 1917087 - RNA, 21 nt, Human
cccagacggcuccacuaggac

SEQ ID NO: 1917088 - RNA, 12 nt, Human
cccagacucaga

SEQ ID NO: 1917089 - RNA, 13 nt, Human
cccagacucagac

SEQ ID NO: 1917090 - RNA, 16 nt, Human
cccagacucagacauu

SEQ ID NO: 1917091 - RNA, 20 nt, Human
cccagacucagacauuggca

SEQ ID NO: 1917092 - RNA, 21 nt, Human
cccagaccuguuagcagacag

SEQ ID NO: 1917093 - RNA, 22 nt, Human
cccagaccuguuagcagacagg

SEQ ID NO: 1917094 - RNA, 15 nt, Human
cccacgcccccacug

SEQ ID NO: 1917095 - RNA, 20 nt, Human
cccagacacaucgcacugug

SEQ ID NO: 1917096 - RNA, 23 nt, Human
cccagacacaucgcacuguggau

SEQ ID NO: 1917097 - RNA, 11 nt, Human
cccagacacau

SEQ ID NO: 1917098 - RNA, 13 nt, Human
cccacgcccccac

SEQ ID NO: 1917099 - RNA, 14 nt, Human
cccacgcccccacu

SEQ ID NO: 1917100 - RNA, 20 nt, Human
cccaccuuggcugcagggag

SEQ ID NO: 1917101 - RNA, 19 nt, Human
cccaccuuggcugcaggga

SEQ ID NO: 1917102 - RNA, 17 nt, Human
cccaccuuggcugcagg

SEQ ID NO: 1917103 - RNA, 16 nt, Human
cccaccuuggcugcag

SEQ ID NO: 1917104 - RNA, 12 nt, Human
cccaccuggccu

SEQ ID NO: 1917105 - RNA, 15 nt, Human
cccaccuggccucug

SEQ ID NO: 1917106 - RNA, 21 nt, Human
ccauguuggccaggcuggucu

SEQ ID NO: 1917107 - RNA, 19 nt, Human
ccauguuggccaggcuggu

SEQ ID NO: 1917108 - RNA, 15 nt, Human
ccauguuggccaggc

SEQ ID NO: 1917109 - RNA, 18 nt, Human
ccauguuggccaggcugg

SEQ ID NO: 1917110 - RNA, 13 nt, Human
ccauuccugaaga

SEQ ID NO: 1917111 - RNA, 16 nt, Human
ccauuccugaagaacc

SEQ ID NO: 1917112 - RNA, 16 nt, Human
ccaugcgacacuggga

SEQ ID NO: 1917113 - RNA, 21 nt, Human
ccaugcgacacugggaggcca

SEQ ID NO: 1917114 - RNA, 22 nt, Human
ccaugcgacacugggaggccag

SEQ ID NO: 1917115 - RNA, 13 nt, Human
ccaugcuccuggc

SEQ ID NO: 1917116 - RNA, 22 nt, Human
ccaugaaaaugcaacaacaugu

SEQ ID NO: 1917117 - RNA, 16 nt, Human
ccaugcugcccuguga

SEQ ID NO: 1917118 - RNA, 17 nt, Human
ccaugcugcccugugag

SEQ ID NO: 1917119 - RNA, 15 nt, Human
ccaugcugcccugug

SEQ ID NO: 1917120 - RNA, 15 nt, Human
ccaugcuccuggccc

SEQ ID NO: 1917121 - RNA, 18 nt, Human
ccaugcuccuggcccacu

SEQ ID NO: 1917122 - RNA, 13 nt, Human
ccaugugccaggu

SEQ ID NO: 1917123 - RNA, 23 nt, Human
ccauggcacucuauguucuaaga

SEQ ID NO: 1917124 - RNA, 16 nt, Human
ccauggauggaaaacg

SEQ ID NO: 1917125 - RNA, 14 nt, Human
ccauguuggccagg

SEQ ID NO: 1917126 - RNA, 13 nt, Human
ccauguuggccag

SEQ ID NO: 1917127 - RNA, 23 nt, Human
ccaugugcuacaggggccagaag

SEQ ID NO: 1917128 - RNA, 18 nt, Human
ccaugugcuacaggggcc

SEQ ID NO: 1917129 - RNA, 21 nt, Human
ccaugugaggguuuucagcau

SEQ ID NO: 1917130 - RNA, 12 nt, Human
ccauggaaccug

SEQ ID NO: 1917131 - RNA, 14 nt, Human
ccauggacaggcug

SEQ ID NO: 1917132 - RNA, 15 nt, Human
ccauggacaggcugg

SEQ ID NO: 1917133 - RNA, 14 nt, Human
ccauggagccagcu

SEQ ID NO: 1917134 - RNA, 17 nt, Human
ccauggagccagcuccc

SEQ ID NO: 1917135 - RNA, 18 nt, Human
ccauggagccagcucccu

SEQ ID NO: 1917136 - RNA, 22 nt, Human
ccauggagccagcucccucuau

SEQ ID NO: 1917137 - RNA, 21 nt, Human
ccccaaauggaaaugggcaga

SEQ ID NO: 1917138 - RNA, 14 nt, Human
cccauguagccccc

SEQ ID NO: 1917139 - RNA, 15 nt, Human
cccauguagcccccu

SEQ ID NO: 1917140 - RNA, 21 nt, Human
cccauguagcccccuggccuc

SEQ ID NO: 1917141 - RNA, 22 nt, Human
cccauguagcccccuggccucu

SEQ ID NO: 1917142 - RNA, 23 nt, Human
cccauguagcccccuggccucug

SEQ ID NO: 1917143 - RNA, 20 nt, Human
cccaugagccucagcauccu

SEQ ID NO: 1917144 - RNA, 16 nt, Human
cccaugagccucagca

SEQ ID NO: 1917145 - RNA, 15 nt, Human
cccaugagccucagc

SEQ ID NO: 1917146 - RNA, 14 nt, Human
cccaugcugcccug

SEQ ID NO: 1917147 - RNA, 12 nt, Human
cccaugcugccc

SEQ ID NO: 1917148 - RNA, 13 nt, Human
cccaugcugcccu

SEQ ID NO: 1917149 - RNA, 20 nt, Human
cccaucugugaaaggaaaga

SEQ ID NO: 1917150 - RNA, 14 nt, Human
cccaucucaugccc

SEQ ID NO: 1917151 - RNA, 18 nt, Human
cccaucucacacaugagc

SEQ ID NO: 1917152 - RNA, 20 nt, Human
cccaucucaugccccuggcu

SEQ ID NO: 1917153 - RNA, 13 nt, Human
cccaucucacaca

SEQ ID NO: 1917154 - RNA, 19 nt, Human
cccagucuggaaugcagug

SEQ ID NO: 1917155 - RNA, 18 nt, Human
cccagucuggaaugcagu

SEQ ID NO: 1917156 - RNA, 10 nt, Human
cccagucugg

SEQ ID NO: 1917157 - RNA, 14 nt, Human
cccaguccuuccac

SEQ ID NO: 1917158 - RNA, 16 nt, Human
cccaguccuuccaccu

SEQ ID NO: 1917159 - RNA, 17 nt, Human
cccaguccuuccaccuc

SEQ ID NO: 1917160 - RNA, 21 nt, Human
cccagugcccacaggaucagu

SEQ ID NO: 1917161 - RNA, 14 nt, Human
cccagugcccccac

SEQ ID NO: 1917162 - RNA, 15 nt, Human
cccagugccgagaag

SEQ ID NO: 1917163 - RNA, 19 nt, Human
cccagugcccccacugacc

SEQ ID NO: 1917164 - RNA, 20 nt, Human
cccagugcccccacugacca

SEQ ID NO: 1917165 - RNA, 22 nt, Human
cccagugcccccacugaccaga

SEQ ID NO: 1917166 - RNA, 20 nt, Human
cccagugguuccuaauccuc

SEQ ID NO: 1917167 - RNA, 14 nt, Human
cccaguuagcucuc

SEQ ID NO: 1917168 - RNA, 14 nt, Human
cccaguucacccug

SEQ ID NO: 1917169 - RNA, 23 nt, Human
cccaggcaggucuugaacuccug

SEQ ID NO: 1917170 - RNA, 15 nt, Human
cccaggcauucccca

SEQ ID NO: 1917171 - RNA, 15 nt, Human
cccaggaggccagcc

SEQ ID NO: 1917172 - RNA, 16 nt, Human
cccaggaggccagccu

SEQ ID NO: 1917173 - RNA, 17 nt, Human
cccaggcauuccccagg

SEQ ID NO: 1917174 - RNA, 18 nt, Human
cccaggcauuccccagga

SEQ ID NO: 1917175 - RNA, 13 nt, Human
cccagguuucuau

SEQ ID NO: 1917176 - RNA, 12 nt, Human
cccuggagccca

SEQ ID NO: 1917177 - RNA, 15 nt, Human
cccugggaggcucug

SEQ ID NO: 1917178 - RNA, 16 nt, Human
cccugggaggcucugg

SEQ ID NO: 1917179 - RNA, 17 nt, Human
cccugggaggcucugga

SEQ ID NO: 1917180 - RNA, 18 nt, Human
cccugggaggcucuggag

SEQ ID NO: 1917181 - RNA, 22 nt, Human
cccugguggcagugggagcugc

SEQ ID NO: 1917182 - RNA, 16 nt, Human
cccuggugggccaaca

SEQ ID NO: 1917183 - RNA, 21 nt, Human
cccuggacugugugcucagga

SEQ ID NO: 1917184 - RNA, 21 nt, Human
cccuggagaggcccucuggag

SEQ ID NO: 1917185 - RNA, 20 nt, Human
cccugcugguucaggguugg

SEQ ID NO: 1917186 - RNA, 19 nt, Human
cccugcugguucaggguug

SEQ ID NO: 1917187 - RNA, 13 nt, Human
cccugcugguuca

SEQ ID NO: 1917188 - RNA, 16 nt, Human
cccugccucucugcag

SEQ ID NO: 1917189 - RNA, 21 nt, Human
cccugccucucugcagguccc

SEQ ID NO: 1917190 - RNA, 22 nt, Human
cccugccucucugcaggucccu

SEQ ID NO: 1917191 - RNA, 22 nt, Human
cccugcaaccugauugugucuc

SEQ ID NO: 1917192 - RNA, 16 nt, Human
cccugcaaccugauug

SEQ ID NO: 1917193 - RNA, 12 nt, Human
cccugcagaggg

SEQ ID NO: 1917194 - RNA, 20 nt, Human
cccugcagagggcacagaaa

SEQ ID NO: 1917195 - RNA, 18 nt, Human
cccugcagagggcacaga

SEQ ID NO: 1917196 - RNA, 20 nt, Human
cccucuacugggagccuacc

SEQ ID NO: 1917197 - RNA, 17 nt, Human
cccucuacugggagccu

SEQ ID NO: 1917198 - RNA, 21 nt, Human
cccugauuuaggagaagccag

SEQ ID NO: 1917199 - RNA, 23 nt, Human
cccugauuuaggagaagccagga

SEQ ID NO: 1917200 - RNA, 15 nt, Human
cccugccacccuggg

SEQ ID NO: 1917201 - RNA, 14 nt, Human
cccugccacccugg

SEQ ID NO: 1917202 - RNA, 12 nt, Human
cccugccacccu

SEQ ID NO: 1917203 - RNA, 18 nt, Human
cccugccacccuggggag

SEQ ID NO: 1917204 - RNA, 17 nt, Human
cccugccacccugggga

SEQ ID NO: 1917205 - RNA, 14 nt, Human
cccugccuccuuug

SEQ ID NO: 1917206 - RNA, 20 nt, Human
cccugccaucauguuuacag

SEQ ID NO: 1917207 - RNA, 11 nt, Human
cccugccucuc

SEQ ID NO: 1917208 - RNA, 18 nt, Human
cccugccucucugcaggu

SEQ ID NO: 1917209 - RNA, 16 nt, Human
cccugccuccuuugug

SEQ ID NO: 1917210 - RNA, 23 nt, Human
cccugccuccuuugugaggaagc

SEQ ID NO: 1917211 - RNA, 14 nt, Human
cccugguggcagcu

SEQ ID NO: 1917212 - RNA, 22 nt, Human
ccccagccuggccacgcagcca

SEQ ID NO: 1917213 - RNA, 23 nt, Human
ccccagccuggccacgcagccag

SEQ ID NO: 1917214 - RNA, 21 nt, Human
ccccagccuggccacgcagcc

SEQ ID NO: 1917215 - RNA, 16 nt, Human
ccccagccuggccacg

SEQ ID NO: 1917216 - RNA, 13 nt, Human
ccccagccugcua

SEQ ID NO: 1917217 - RNA, 21 nt, Human
ccccagcuggggccaggcugg

SEQ ID NO: 1917218 - RNA, 22 nt, Human
ccccagcuggggccaggcuggg

SEQ ID NO: 1917219 - RNA, 15 nt, Human
ccccagccccauccu

SEQ ID NO: 1917220 - RNA, 16 nt, Human
ccccagccccauccca

SEQ ID NO: 1917221 - RNA, 23 nt, Human
ccccacaggagguggucugggac

SEQ ID NO: 1917222 - RNA, 12 nt, Human
ccccaggaggcc

SEQ ID NO: 1917223 - RNA, 22 nt, Human
ccccaggacugggccacuucug

SEQ ID NO: 1917224 - RNA, 16 nt, Human
ccccaggacugggcca

SEQ ID NO: 1917225 - RNA, 14 nt, Human
ccccaggacugggc

SEQ ID NO: 1917226 - RNA, 13 nt, Human
ccccaggacuggg

SEQ ID NO: 1917227 - RNA, 18 nt, Human
ccccaggaccagcucagg

SEQ ID NO: 1917228 - RNA, 19 nt, Human
ccccaggaccagcucagga

SEQ ID NO: 1917229 - RNA, 21 nt, Human
ccccaggaccagcucaggaca

SEQ ID NO: 1917230 - RNA, 15 nt, Human
ccccaggaccuggcu

SEQ ID NO: 1917231 - RNA, 17 nt, Human
ccccaggaccuggcugc

SEQ ID NO: 1917232 - RNA, 20 nt, Human
ccccaggaccuggcugccau

SEQ ID NO: 1917233 - RNA, 21 nt, Human
ccccaggaccuggcugccaua

SEQ ID NO: 1917234 - RNA, 15 nt, Human
ccccuggcagccccu

SEQ ID NO: 1917235 - RNA, 12 nt, Human
ccccuggcagcc

SEQ ID NO: 1917236 - RNA, 14 nt, Human
ccccuggcagcccc

SEQ ID NO: 1917237 - RNA, 22 nt, Human
ccccaggugguuauggagaggg

SEQ ID NO: 1917238 - RNA, 21 nt, Human
cccgcggggacauugggaagg

SEQ ID NO: 1917239 - RNA, 22 nt, Human
cccgcuaagagggagggagggc

SEQ ID NO: 1917240 - RNA, 15 nt, Human
cccgaggccuucucu

SEQ ID NO: 1917241 - RNA, 20 nt, Human
cccgaggccuucucugaagg

SEQ ID NO: 1917242 - RNA, 22 nt, Human
ccccuguccccgcacugggcuu

SEQ ID NO: 1917243 - RNA, 14 nt, Human
ccccuguacuccag

SEQ ID NO: 1917244 - RNA, 18 nt, Human
ccccugguucucaucuuu

SEQ ID NO: 1917245 - RNA, 19 nt, Human
ccccugggggcucucaugu

SEQ ID NO: 1917246 - RNA, 15 nt, Human
ccccugguucucauc

SEQ ID NO: 1917247 - RNA, 23 nt, Human
ccccuggugguucacucuuggag

SEQ ID NO: 1917248 - RNA, 20 nt, Human
ccccuguucuggcagaguug

SEQ ID NO: 1917249 - RNA, 14 nt, Human
ccccugucuagaga

SEQ ID NO: 1917250 - RNA, 18 nt, Human
ccccugucuagagaggga

SEQ ID NO: 1917251 - RNA, 14 nt, Human
ccccuucacaaagc

SEQ ID NO: 1917252 - RNA, 17 nt, Human
cccuccaugugggcuag

SEQ ID NO: 1917253 - RNA, 17 nt, Human
cccuccccgcccuuuuu

SEQ ID NO: 1917254 - RNA, 16 nt, Human
cccuccccgcccuuuu

SEQ ID NO: 1917255 - RNA, 20 nt, Human
cccucccuguuccccagaga

SEQ ID NO: 1917256 - RNA, 19 nt, Human
cccucccuguuccccagag

SEQ ID NO: 1917257 - RNA, 14 nt, Human
cccucccuuucucc

SEQ ID NO: 1917258 - RNA, 13 nt, Human
cccucccuuucuc

SEQ ID NO: 1917259 - RNA, 16 nt, Human
cccucccuuucucccc

SEQ ID NO: 1917260 - RNA, 13 nt, Human
cccucccucuuuc

SEQ ID NO: 1917261 - RNA, 23 nt, Human
cccucccucuacugggagccuac

SEQ ID NO: 1917262 - RNA, 22 nt, Human
cccucaucaccaacgucugugc

SEQ ID NO: 1917263 - RNA, 17 nt, Human
cccucauccucauaccc

SEQ ID NO: 1917264 - RNA, 20 nt, Human
cccucauccucauacccacc

SEQ ID NO: 1917265 - RNA, 21 nt, Human
cccucagggucccugguggca

SEQ ID NO: 1917266 - RNA, 20 nt, Human
cccucagucuggcccuuccu

SEQ ID NO: 1917267 - RNA, 21 nt, Human
cccuccaagaccuucuccuuc

SEQ ID NO: 1917268 - RNA, 19 nt, Human
cccucauuggcucuugaac

SEQ ID NO: 1917269 - RNA, 22 nt, Human
cccucauccucauacccacccc

SEQ ID NO: 1917270 - RNA, 17 nt, Human
cccucaucucucugccc

SEQ ID NO: 1917271 - RNA, 16 nt, Human
cccggcaggguccuag

SEQ ID NO: 1917272 - RNA, 22 nt, Human
cccuaaaguguauuuuuuuacu

SEQ ID NO: 1917273 - RNA, 17 nt, Human
cccuaaaguguauuuuu

SEQ ID NO: 1917274 - RNA, 14 nt, Human
cccuaaaagcacac

SEQ ID NO: 1917275 - RNA, 15 nt, Human
cccuaauaaagcugu

SEQ ID NO: 1917276 - RNA, 18 nt, Human
cccuaauaaagcugugug

SEQ ID NO: 1917277 - RNA, 21 nt, Human
cccuaaggucauuaccacagg

SEQ ID NO: 1917278 - RNA, 12 nt, Human
cccuaauaaagc

SEQ ID NO: 1917279 - RNA, 13 nt, Human
cccuaauaaagcu

SEQ ID NO: 1917280 - RNA, 14 nt, Human
cccuaauaaagcug

SEQ ID NO: 1917281 - RNA, 15 nt, Human
cccucagggucccug

SEQ ID NO: 1917282 - RNA, 16 nt, Human
cccucagggucccugg

SEQ ID NO: 1917283 - RNA, 17 nt, Human
cccucagggucccuggu

SEQ ID NO: 1917284 - RNA, 18 nt, Human
cccucagggucccuggug

SEQ ID NO: 1917285 - RNA, 19 nt, Human
cccucagggucccuggugg

SEQ ID NO: 1917286 - RNA, 17 nt, Human
ccuccuuggugccuggc

SEQ ID NO: 1917287 - RNA, 15 nt, Human
ccuccuuggugccug

SEQ ID NO: 1917288 - RNA, 21 nt, Human
ccuccuccagccgccaugcuc

SEQ ID NO: 1917289 - RNA, 15 nt, Human
ccucuccccagcaag

SEQ ID NO: 1917290 - RNA, 11 nt, Human
ccucucccagg

SEQ ID NO: 1917291 - RNA, 14 nt, Human
ccucuacugggagc

SEQ ID NO: 1917292 - RNA, 20 nt, Human
ccucuccccagcaagugaga

SEQ ID NO: 1917293 - RNA, 12 nt, Human
ccucuccccagc

SEQ ID NO: 1917294 - RNA, 14 nt, Human
ccucuccccagccc

SEQ ID NO: 1917295 - RNA, 16 nt, Human
ccucuccccagcccag

SEQ ID NO: 1917296 - RNA, 17 nt, Human
ccucuccccagcccaga

SEQ ID NO: 1917297 - RNA, 13 nt, Human
ccucucccuugga

SEQ ID NO: 1917298 - RNA, 22 nt, Human
ccucucccuuggauuguccccg

SEQ ID NO: 1917299 - RNA, 21 nt, Human
ccucucccugacccuguauau

SEQ ID NO: 1917300 - RNA, 12 nt, Human
ccucucccugac

SEQ ID NO: 1917301 - RNA, 15 nt, Human
ccucucccugacccu

SEQ ID NO: 1917302 - RNA, 20 nt, Human
ccucugacacacagcucugu

SEQ ID NO: 1917303 - RNA, 19 nt, Human
ccucugacacacagcucug

SEQ ID NO: 1917304 - RNA, 14 nt, Human
ccucugacacacag

SEQ ID NO: 1917305 - RNA, 15 nt, Human
ccucugacacacagc

SEQ ID NO: 1917306 - RNA, 20 nt, Human
ccucugaaugaaccuucugg

SEQ ID NO: 1917307 - RNA, 13 nt, Human
ccucugacacaca

SEQ ID NO: 1917308 - RNA, 18 nt, Human
ccucuccucauguucugc

SEQ ID NO: 1917309 - RNA, 21 nt, Human
ccucugacacacagcucuguc

SEQ ID NO: 1917310 - RNA, 19 nt, Human
ccucugcagcaauaaagca

SEQ ID NO: 1917311 - RNA, 13 nt, Human
ccucugcccacuc

SEQ ID NO: 1917312 - RNA, 16 nt, Human
ccucugcccacucccu

SEQ ID NO: 1917313 - RNA, 18 nt, Human
ccucugcagcaauaaagc

SEQ ID NO: 1917314 - RNA, 14 nt, Human
ccucugcagcaaua

SEQ ID NO: 1917315 - RNA, 23 nt, Human
ccucugcacuccccugcugggug

SEQ ID NO: 1917316 - RNA, 18 nt, Human
ccucugcacuccccugcu

SEQ ID NO: 1917317 - RNA, 16 nt, Human
ccucugcacuccccug

SEQ ID NO: 1917318 - RNA, 17 nt, Human
ccucugcacuccccugc

SEQ ID NO: 1917319 - RNA, 15 nt, Human
ccucugauaccucaa

SEQ ID NO: 1917320 - RNA, 14 nt, Human
ccucugauaccuca

SEQ ID NO: 1917321 - RNA, 19 nt, Human
ccucaguuuuaucauuuuc

SEQ ID NO: 1917322 - RNA, 17 nt, Human
ccuccacucucccccac

SEQ ID NO: 1917323 - RNA, 14 nt, Human
ccuccacucucccc

SEQ ID NO: 1917324 - RNA, 12 nt, Human
ccucauacccac

SEQ ID NO: 1917325 - RNA, 19 nt, Human
ccucaguucuugccacuuu

SEQ ID NO: 1917326 - RNA, 17 nt, Human
ccucaggugagaagcag

SEQ ID NO: 1917327 - RNA, 18 nt, Human
ccucaggugagaagcaga

SEQ ID NO: 1917328 - RNA, 20 nt, Human
ccucaggugagaagcagagg

SEQ ID NO: 1917329 - RNA, 21 nt, Human
ccuccagaacucacuggggcc

SEQ ID NO: 1917330 - RNA, 22 nt, Human
ccuccagaacucacuggggccu

SEQ ID NO: 1917331 - RNA, 22 nt, Human
ccuccacucucccccacccccu

SEQ ID NO: 1917332 - RNA, 19 nt, Human
ccuccacucucccccaccc

SEQ ID NO: 1917333 - RNA, 13 nt, Human
ccuccacucuccu

SEQ ID NO: 1917334 - RNA, 23 nt, Human
ccuccagggcuggacugaggccu

SEQ ID NO: 1917335 - RNA, 15 nt, Human
ccuccaggaaccaca

SEQ ID NO: 1917336 - RNA, 15 nt, Human
ccuccagcucuuucc

SEQ ID NO: 1917337 - RNA, 16 nt, Human
ccuccagcucuuuccu

SEQ ID NO: 1917338 - RNA, 22 nt, Human
ccuccagcucuuuccuccuucc

SEQ ID NO: 1917339 - RNA, 17 nt, Human
ccuccagcucuuuccuc

SEQ ID NO: 1917340 - RNA, 19 nt, Human
ccuccagcucuuuccuccu

SEQ ID NO: 1917341 - RNA, 13 nt, Human
ccuccauccugag

SEQ ID NO: 1917342 - RNA, 12 nt, Human
ccuccauccuga

SEQ ID NO: 1917343 - RNA, 17 nt, Human
ccucccaaagugcuggg

SEQ ID NO: 1917344 - RNA, 14 nt, Human
ccucccaacucacc

SEQ ID NO: 1917345 - RNA, 15 nt, Human
ccuccaugugggcua

SEQ ID NO: 1917346 - RNA, 12 nt, Human
ccuccauguggg

SEQ ID NO: 1917347 - RNA, 17 nt, Human
ccuccaggugcacaagc

SEQ ID NO: 1917348 - RNA, 17 nt, Human
ccuccagggugugugcu

SEQ ID NO: 1917349 - RNA, 11 nt, Human
ccuccaggugc

SEQ ID NO: 1917350 - RNA, 12 nt, Human
ccuccaggugca

SEQ ID NO: 1917351 - RNA, 13 nt, Human
ccuccauccuagu

SEQ ID NO: 1917352 - RNA, 18 nt, Human
ccucccgaauagcuggga

SEQ ID NO: 1917353 - RNA, 23 nt, Human
ccucccaaagugcugggauuaca

SEQ ID NO: 1917354 - RNA, 15 nt, Human
ccucccaacucaccc

SEQ ID NO: 1917355 - RNA, 15 nt, Human
ccucccccccaugca

SEQ ID NO: 1917356 - RNA, 16 nt, Human
ccucccccccaugcac

SEQ ID NO: 1917357 - RNA, 17 nt, Human
ccucccccccaugcacu

SEQ ID NO: 1917358 - RNA, 19 nt, Human
ccucccccccaugcacugu

SEQ ID NO: 1917359 - RNA, 16 nt, Human
ccuccccgcccuuuuu

SEQ ID NO: 1917360 - RNA, 20 nt, Human
ccucccgaauagcugggacu

SEQ ID NO: 1917361 - RNA, 19 nt, Human
ccucccgaauagcugggac

SEQ ID NO: 1917362 - RNA, 21 nt, Human
ccucccgaauagcugggacua

SEQ ID NO: 1917363 - RNA, 18 nt, Human
ccucccgaguagcuggga

SEQ ID NO: 1917364 - RNA, 17 nt, Human
ccucccgaguagcuggg

SEQ ID NO: 1917365 - RNA, 13 nt, Human
ccucccucuaauu

SEQ ID NO: 1917366 - RNA, 13 nt, Human
ccucccucuuucc

SEQ ID NO: 1917367 - RNA, 11 nt, Human
ccuccucagau

SEQ ID NO: 1917368 - RNA, 12 nt, Human
ccuccuccagcc

SEQ ID NO: 1917369 - RNA, 16 nt, Human
ccuccuccacucuccc

SEQ ID NO: 1917370 - RNA, 15 nt, Human
ccucaccacccacuu

SEQ ID NO: 1917371 - RNA, 16 nt, Human
ccucagaucuucugug

SEQ ID NO: 1917372 - RNA, 14 nt, Human
ccucagagugcaag

SEQ ID NO: 1917373 - RNA, 21 nt, Human
ccucagagugcaagccccugc

SEQ ID NO: 1917374 - RNA, 13 nt, Human
ccucagcccugac

SEQ ID NO: 1917375 - RNA, 15 nt, Human
ccucagcccugaccc

SEQ ID NO: 1917376 - RNA, 16 nt, Human
ccucagggucccuggu

SEQ ID NO: 1917377 - RNA, 17 nt, Human
ccucagggucccuggug

SEQ ID NO: 1917378 - RNA, 20 nt, Human
ccucagggucccugguggca

SEQ ID NO: 1917379 - RNA, 22 nt, Human
ccucagggucccugguggcagc

SEQ ID NO: 1917380 - RNA, 16 nt, Human
ccucagcccugacccu

SEQ ID NO: 1917381 - RNA, 17 nt, Human
ccucagcccugacccug

SEQ ID NO: 1917382 - RNA, 21 nt, Human
ccucagcccugacccugugga

SEQ ID NO: 1917383 - RNA, 18 nt, Human
ccucagcccugacccugu

SEQ ID NO: 1917384 - RNA, 15 nt, Human
ccuaggugacagagu

SEQ ID NO: 1917385 - RNA, 24 nt, Human
ccucacaguccuuaccagcagagc

SEQ ID NO: 1917386 - RNA, 23 nt, Human
ccucacaguccuuaccagcagag

SEQ ID NO: 1917387 - RNA, 15 nt, Human
ccuauucuuucgaaa

SEQ ID NO: 1917388 - RNA, 11 nt, Human
ccucacacagc

SEQ ID NO: 1917389 - RNA, 14 nt, Human
ccucacacucaccc

SEQ ID NO: 1917390 - RNA, 16 nt, Human
ccuauuagagaagaga

SEQ ID NO: 1917391 - RNA, 22 nt, Human
ccuaucuguuuacaguguuccg

SEQ ID NO: 1917392 - RNA, 17 nt, Human
ccuauuagagaagagau

SEQ ID NO: 1917393 - RNA, 22 nt, Human
ccucaggugagaagcagaggaa

SEQ ID NO: 1917394 - RNA, 16 nt, Human
ccggggcagggcagcc

SEQ ID NO: 1917395 - RNA, 14 nt, Human
ccggggcagggcag

SEQ ID NO: 1917396 - RNA, 17 nt, Human
ccgggaagggggcuggg

SEQ ID NO: 1917397 - RNA, 14 nt, Human
ccggagaggaccgg

SEQ ID NO: 1917398 - RNA, 22 nt, Human
cccuuguggucccaccccacac

SEQ ID NO: 1917399 - RNA, 21 nt, Human
cccuuuauugaaaaaauaaaa

SEQ ID NO: 1917400 - RNA, 22 nt, Human
cccuugguuaggcauuguggga

SEQ ID NO: 1917401 - RNA, 23 nt, Human
cccuugguuaggcauugugggaa

SEQ ID NO: 1917402 - RNA, 11 nt, Human
cccuucuuuuu

SEQ ID NO: 1917403 - RNA, 17 nt, Human
cccuuggauuguccccg

SEQ ID NO: 1917404 - RNA, 13 nt, Human
cccuucccaccuc

SEQ ID NO: 1917405 - RNA, 12 nt, Human
cccuucccaccu

SEQ ID NO: 1917406 - RNA, 14 nt, Human
cccugguucucauc

SEQ ID NO: 1917407 - RNA, 23 nt, Human
cccuggugggccaacaaagaaca

SEQ ID NO: 1917408 - RNA, 16 nt, Human
cccuggugguugcugu

SEQ ID NO: 1917409 - RNA, 13 nt, Human
cccuggugguuca

SEQ ID NO: 1917410 - RNA, 13 nt, Human
ccuaaacauauga

SEQ ID NO: 1917411 - RNA, 16 nt, Human
ccuaaaccaaaaacug

SEQ ID NO: 1917412 - RNA, 16 nt, Human
ccuaaaauucagugga

SEQ ID NO: 1917413 - RNA, 22 nt, Human
ccuacaguugaaaaacagcuga

SEQ ID NO: 1917414 - RNA, 17 nt, Human
ccuacagcuuugauccc

SEQ ID NO: 1917415 - RNA, 20 nt, Human
ccuacagcuuugaucccuga

SEQ ID NO: 1917416 - RNA, 21 nt, Human
ccuacagcuuugaucccugac

SEQ ID NO: 1917417 - RNA, 19 nt, Human
ccuacagcuugaccgugag

SEQ ID NO: 1917418 - RNA, 15 nt, Human
ccuacagcccaccug

SEQ ID NO: 1917419 - RNA, 19 nt, Human
ccuaacauaccuaagcaaa

SEQ ID NO: 1917420 - RNA, 13 nt, Human
ccuacccacccuc

SEQ ID NO: 1917421 - RNA, 18 nt, Human
ccuacccacccuccuuuc

SEQ ID NO: 1917422 - RNA, 14 nt, Human
ccuacccauccccg

SEQ ID NO: 1917423 - RNA, 19 nt, Human
ccuacccauccccgcagug

SEQ ID NO: 1917424 - RNA, 19 nt, Human
ccuacuguaauuugugaua

SEQ ID NO: 1917425 - RNA, 21 nt, Human
ccuagaaauuccccacccuga

SEQ ID NO: 1917426 - RNA, 13 nt, Human
ccuaggugacaga

SEQ ID NO: 1917427 - RNA, 22 nt, Human
ccuagguauaauucacauugua

SEQ ID NO: 1917428 - RNA, 12 nt, Human
ccguuauuaaaa

SEQ ID NO: 1917429 - RNA, 21 nt, Human
cuagacuaaaagauugagaag

SEQ ID NO: 1917430 - RNA, 14 nt, Human
cuagagcuuucuuu

SEQ ID NO: 1917431 - RNA, 22 nt, Human
cuagagcuuucuuucacaaaaa

SEQ ID NO: 1917432 - RNA, 20 nt, Human
cuagacgagcaggcuucuuc

SEQ ID NO: 1917433 - RNA, 21 nt, Human
cuagacgagcaggcuucuucc

SEQ ID NO: 1917434 - RNA, 17 nt, Human
cuagagugaacuugggc

SEQ ID NO: 1917435 - RNA, 21 nt, Human
cuagagugaacuugggccacu

SEQ ID NO: 1917436 - RNA, 17 nt, Human
cuagaguagaguggagg

SEQ ID NO: 1917437 - RNA, 15 nt, Human
cuagagguucaaaga

SEQ ID NO: 1917438 - RNA, 15 nt, Human
cuagagggaggggcc

SEQ ID NO: 1917439 - RNA, 16 nt, Human
cuagagggaggggccu

SEQ ID NO: 1917440 - RNA, 19 nt, Human
cuagagggaggggccuagg

SEQ ID NO: 1917441 - RNA, 21 nt, Human
cuagagggaggggccuaggcc

SEQ ID NO: 1917442 - RNA, 22 nt, Human
cuagagggaggggccuaggccu

SEQ ID NO: 1917443 - RNA, 18 nt, Human
cuagagggaccucuccca

SEQ ID NO: 1917444 - RNA, 19 nt, Human
cuagagggaccucucccag

SEQ ID NO: 1917445 - RNA, 20 nt, Human
cuagagggaccucucccagg

SEQ ID NO: 1917446 - RNA, 21 nt, Human
cuagagggaccucucccaggg

SEQ ID NO: 1917447 - RNA, 17 nt, Human
cuagcacuuugggaggc

SEQ ID NO: 1917448 - RNA, 13 nt, Human
cuagcacaugccc

SEQ ID NO: 1917449 - RNA, 17 nt, Human
cuagaugaaguuuuaca

SEQ ID NO: 1917450 - RNA, 16 nt, Human
cuagauggcagucacu

SEQ ID NO: 1917451 - RNA, 14 nt, Human
cuagauggcuccuc

SEQ ID NO: 1917452 - RNA, 15 nt, Human
cuagauggcuccucu

SEQ ID NO: 1917453 - RNA, 16 nt, Human
cuagauggcuccucuc

SEQ ID NO: 1917454 - RNA, 18 nt, Human
cuagauggcuccucucag

SEQ ID NO: 1917455 - RNA, 13 nt, Human
cuagauggugcug

SEQ ID NO: 1917456 - RNA, 19 nt, Human
cuagauggugcugagaagc

SEQ ID NO: 1917457 - RNA, 22 nt, Human
cuagauggugcugagaagcuuu

SEQ ID NO: 1917458 - RNA, 14 nt, Human
cuagauggugcuga

SEQ ID NO: 1917459 - RNA, 15 nt, Human
cuagauggugcugag

SEQ ID NO: 1917460 - RNA, 16 nt, Human
cuagauggugcugaga

SEQ ID NO: 1917461 - RNA, 17 nt, Human
cuagauggugcugagaa

SEQ ID NO: 1917462 - RNA, 21 nt, Human
cuacucugugucagguggggc

SEQ ID NO: 1917463 - RNA, 16 nt, Human
cuacucugugucaggu

SEQ ID NO: 1917464 - RNA, 14 nt, Human
cuacccgggaaggg

SEQ ID NO: 1917465 - RNA, 15 nt, Human
cuacccgggaagggg

SEQ ID NO: 1917466 - RNA, 20 nt, Human
cuacccgggaagggggcugg

SEQ ID NO: 1917467 - RNA, 21 nt, Human
cuacccgggaagggggcuggg

SEQ ID NO: 1917468 - RNA, 21 nt, Human
cuacuguaaggcaaucauggu

SEQ ID NO: 1917469 - RNA, 16 nt, Human
cuacuguaauuuguga

SEQ ID NO: 1917470 - RNA, 17 nt, Human
cuacuguaauuugugau

SEQ ID NO: 1917471 - RNA, 22 nt, Human
cuacuguaauaaagaugauugu

SEQ ID NO: 1917472 - RNA, 14 nt, Human
cuacugaggugcua

SEQ ID NO: 1917473 - RNA, 22 nt, Human
cuacuuauuguagcauccugga

SEQ ID NO: 1917474 - RNA, 15 nt, Human
cuacuguguguguga

SEQ ID NO: 1917475 - RNA, 17 nt, Human
cuacugugugugugaau

SEQ ID NO: 1917476 - RNA, 19 nt, Human
cuacugugugugugaauga

SEQ ID NO: 1917477 - RNA, 20 nt, Human
cuacugugugugugaaugaa

SEQ ID NO: 1917478 - RNA, 21 nt, Human
cuacugugguguuuuguuuau

SEQ ID NO: 1917479 - RNA, 19 nt, Human
cuacuugggaggcugagau

SEQ ID NO: 1917480 - RNA, 12 nt, Human
cuacuugggagg

SEQ ID NO: 1917481 - RNA, 21 nt, Human
cuacuugcucuggaccugccc

SEQ ID NO: 1917482 - RNA, 21 nt, Human
cuacuuuaauaaaugguuauu

SEQ ID NO: 1917483 - RNA, 18 nt, Human
cuacuugggaggcugaga

SEQ ID NO: 1917484 - RNA, 15 nt, Human
cuacuugggaggcug

SEQ ID NO: 1917485 - RNA, 13 nt, Human
cuacuugcucugg

SEQ ID NO: 1917486 - RNA, 14 nt, Human
cuacuugcucugga

SEQ ID NO: 1917487 - RNA, 15 nt, Human
cuacuugcucuggac

SEQ ID NO: 1917488 - RNA, 16 nt, Human
cuacuugcucuggacc

SEQ ID NO: 1917489 - RNA, 17 nt, Human
cuacuugcucuggaccu

SEQ ID NO: 1917490 - RNA, 18 nt, Human
cuacuugcucuggaccug

SEQ ID NO: 1917491 - RNA, 19 nt, Human
cuacuugcucuggaccugc

SEQ ID NO: 1917492 - RNA, 21 nt, Human
cuacuguaauuugugauacaa

SEQ ID NO: 1917493 - RNA, 19 nt, Human
cuacaagcuaaaauuagau

SEQ ID NO: 1917494 - RNA, 17 nt, Human
cuacaagcuaaaauuag

SEQ ID NO: 1917495 - RNA, 19 nt, Human
cuaaugugccuaguucuuu

SEQ ID NO: 1917496 - RNA, 18 nt, Human
cuaaugucuguaucacuc

SEQ ID NO: 1917497 - RNA, 16 nt, Human
cuaauguacugcauau

SEQ ID NO: 1917498 - RNA, 14 nt, Human
cuaauguacugcau

SEQ ID NO: 1917499 - RNA, 13 nt, Human
cuaaugauggccc

SEQ ID NO: 1917500 - RNA, 22 nt, Human
cuaaugauggcccauucuacuu

SEQ ID NO: 1917501 - RNA, 23 nt, Human
cuaaugauggcccauucuacuug

SEQ ID NO: 1917502 - RNA, 16 nt, Human
cuaaggugugcucuga

SEQ ID NO: 1917503 - RNA, 12 nt, Human
cuaauaaagcug

SEQ ID NO: 1917504 - RNA, 21 nt, Human
cuaauaaaauuuaaaagucuu

SEQ ID NO: 1917505 - RNA, 13 nt, Human
cuaauaaagcugu

SEQ ID NO: 1917506 - RNA, 17 nt, Human
cuaauccaggcagaucc

SEQ ID NO: 1917507 - RNA, 18 nt, Human
cuaauccaggcagaucca

SEQ ID NO: 1917508 - RNA, 19 nt, Human
cuaauccaggcagauccag

SEQ ID NO: 1917509 - RNA, 20 nt, Human
cuaauccaggcagauccagg

SEQ ID NO: 1917510 - RNA, 23 nt, Human
cuaauccaggcagauccaggacu

SEQ ID NO: 1917511 - RNA, 15 nt, Human
cuacagaggccaugg

SEQ ID NO: 1917512 - RNA, 13 nt, Human
cuacagaaaaacc

SEQ ID NO: 1917513 - RNA, 23 nt, Human
cuacagaaaaaccagaggcagcu

SEQ ID NO: 1917514 - RNA, 15 nt, Human
cuacacacugcaugu

SEQ ID NO: 1917515 - RNA, 13 nt, Human
cuacacacugcau

SEQ ID NO: 1917516 - RNA, 16 nt, Human
cuacaauuuaaagcaa

SEQ ID NO: 1917517 - RNA, 13 nt, Human
cuacaaugugaac

SEQ ID NO: 1917518 - RNA, 17 nt, Human
cuacaaugugaacuuua

SEQ ID NO: 1917519 - RNA, 19 nt, Human
cuacaaugugaacuuuauu

SEQ ID NO: 1917520 - RNA, 18 nt, Human
cuacaaugugaacuuuau

SEQ ID NO: 1917521 - RNA, 18 nt, Human
cuacacugugcugagucu

SEQ ID NO: 1917522 - RNA, 17 nt, Human
cuacacuccagugagac

SEQ ID NO: 1917523 - RNA, 21 nt, Human
cuacacacugcauguuuguga

SEQ ID NO: 1917524 - RNA, 16 nt, Human
cuacacuccagugaga

SEQ ID NO: 1917525 - RNA, 19 nt, Human
cuacccagcgagcccuggu

SEQ ID NO: 1917526 - RNA, 20 nt, Human
cuacccagcgagcccuggug

SEQ ID NO: 1917527 - RNA, 12 nt, Human
cuacccaggugc

SEQ ID NO: 1917528 - RNA, 15 nt, Human
cuacccgcagaguuc

SEQ ID NO: 1917529 - RNA, 22 nt, Human
cuacccacccuccuuucaccac

SEQ ID NO: 1917530 - RNA, 17 nt, Human
cuacccacccuccuuuc

SEQ ID NO: 1917531 - RNA, 17 nt, Human
cuacagaggccaugggc

SEQ ID NO: 1917532 - RNA, 17 nt, Human
cuaaccacgcuggaccu

SEQ ID NO: 1917533 - RNA, 16 nt, Human
cuaaccagcagaaaug

SEQ ID NO: 1917534 - RNA, 17 nt, Human
cuaaccagcagaaaugc

SEQ ID NO: 1917535 - RNA, 14 nt, Human
cuaagcaaaaugug

SEQ ID NO: 1917536 - RNA, 23 nt, Human
cuaagcacgggccauaugaauaa

SEQ ID NO: 1917537 - RNA, 20 nt, Human
cuaagcacgggccauaugaa

SEQ ID NO: 1917538 - RNA, 18 nt, Human
cuaagcaaaaugugauau

SEQ ID NO: 1917539 - RNA, 15 nt, Human
cuaagcaaaauguga

SEQ ID NO: 1917540 - RNA, 12 nt, Human
cuaagcagagga

SEQ ID NO: 1917541 - RNA, 13 nt, Human
cuaagcagaggag

SEQ ID NO: 1917542 - RNA, 14 nt, Human
cuaagcagaggagg

SEQ ID NO: 1917543 - RNA, 15 nt, Human
cuaagcagaggaggg

SEQ ID NO: 1917544 - RNA, 16 nt, Human
cuaagcagaggagggg

SEQ ID NO: 1917545 - RNA, 18 nt, Human
cuaagcagaggaggggcc

SEQ ID NO: 1917546 - RNA, 19 nt, Human
cuaagcagaggaggggccg

SEQ ID NO: 1917547 - RNA, 20 nt, Human
cuaagcagaggaggggccgc

SEQ ID NO: 1917548 - RNA, 23 nt, Human
cuaagcagaggaggggccgcugc

SEQ ID NO: 1917549 - RNA, 19 nt, Human
cuaagcuauucaguaauaa

SEQ ID NO: 1917550 - RNA, 21 nt, Human
cuaagcuauucaguaauaacu

SEQ ID NO: 1917551 - RNA, 17 nt, Human
cuaagccugaaggggcg

SEQ ID NO: 1917552 - RNA, 20 nt, Human
cuaagccugaaggggcgucu

SEQ ID NO: 1917553 - RNA, 15 nt, Human
cuaaggugugcucug

SEQ ID NO: 1917554 - RNA, 19 nt, Human
cuaaggucauuaccacagg

SEQ ID NO: 1917555 - RNA, 12 nt, Human
cuaaggggcccg

SEQ ID NO: 1917556 - RNA, 13 nt, Human
cuaaggggcccgg

SEQ ID NO: 1917557 - RNA, 18 nt, Human
cuaaggggcccggccagc

SEQ ID NO: 1917558 - RNA, 22 nt, Human
cuaaggggcccggccagccaug

SEQ ID NO: 1917559 - RNA, 13 nt, Human
cuaggauuucaug

SEQ ID NO: 1917560 - RNA, 14 nt, Human
cuaggauacugcug

SEQ ID NO: 1917561 - RNA, 15 nt, Human
cuaggauacugcugc

SEQ ID NO: 1917562 - RNA, 17 nt, Human
cuaggaggucucuaaga

SEQ ID NO: 1917563 - RNA, 17 nt, Human
cuaggacuucaaauugg

SEQ ID NO: 1917564 - RNA, 22 nt, Human
cuaggacugaauuaugaaacuu

SEQ ID NO: 1917565 - RNA, 23 nt, Human
cuaggaagaucucugcagggccg

SEQ ID NO: 1917566 - RNA, 22 nt, Human
cuaggaccccuccaugugggcu

SEQ ID NO: 1917567 - RNA, 20 nt, Human
cuagcagcaccguucugugc

SEQ ID NO: 1917568 - RNA, 21 nt, Human
cuagcagcaccguucugugca

SEQ ID NO: 1917569 - RNA, 12 nt, Human
cuagcagcaccg

SEQ ID NO: 1917570 - RNA, 19 nt, Human
cuagcagcaccguucugug

SEQ ID NO: 1917571 - RNA, 21 nt, Human
cuaggaagacuuuggaaagag

SEQ ID NO: 1917572 - RNA, 22 nt, Human
cuagcagcaccguucugugcac

SEQ ID NO: 1917573 - RNA, 13 nt, Human
cuaggaacacucc

SEQ ID NO: 1917574 - RNA, 15 nt, Human
cuaggaacacuccuu

SEQ ID NO: 1917575 - RNA, 12 nt, Human
cuagcagcaggg

SEQ ID NO: 1917576 - RNA, 22 nt, Human
cuaguacuugggagaccuguaa

SEQ ID NO: 1917577 - RNA, 20 nt, Human
cuaggccaggugcaaccagg

SEQ ID NO: 1917578 - RNA, 22 nt, Human
cuaggccaggugcaaccaggga

SEQ ID NO: 1917579 - RNA, 11 nt, Human
cuaggccaggu

SEQ ID NO: 1917580 - RNA, 14 nt, Human
cuaggccaggugca

SEQ ID NO: 1917581 - RNA, 16 nt, Human
cuaggcaggaccugug

SEQ ID NO: 1917582 - RNA, 15 nt, Human
cuaggcaggaccugu

SEQ ID NO: 1917583 - RNA, 21 nt, Human
cuaggcauuugcugaauacag

SEQ ID NO: 1917584 - RNA, 23 nt, Human
cuaguaucaaaagaaagaaaauc

SEQ ID NO: 1917585 - RNA, 17 nt, Human
cuaguaucaaaagaaag

SEQ ID NO: 1917586 - RNA, 15 nt, Human
cuaguaucaaaagaa

SEQ ID NO: 1917587 - RNA, 15 nt, Human
cuagugcugaagcuu

SEQ ID NO: 1917588 - RNA, 14 nt, Human
cuagugcugaagcu

SEQ ID NO: 1917589 - RNA, 13 nt, Human
cuagugcugaagc

SEQ ID NO: 1917590 - RNA, 12 nt, Human
cuagugcugaag

SEQ ID NO: 1917591 - RNA, 17 nt, Human
cuagugccuucuaaagg

SEQ ID NO: 1917592 - RNA, 21 nt, Human
cuagugcugaagcuuauuaau

SEQ ID NO: 1917593 - RNA, 20 nt, Human
cuagugcugaagcuuauuaa

SEQ ID NO: 1917594 - RNA, 17 nt, Human
cuagugcugaagcuuau

SEQ ID NO: 1917595 - RNA, 16 nt, Human
cuagugcugaagcuua

SEQ ID NO: 1917596 - RNA, 22 nt, Human
cuagugcugaagcuuauuaaug

SEQ ID NO: 1917597 - RNA, 19 nt, Human
cuagugugguguuuccugg

SEQ ID NO: 1917598 - RNA, 21 nt, Human
cuagugugguguuuccuggca

SEQ ID NO: 1917599 - RNA, 22 nt, Human
cuagugugguguuuccuggcac

SEQ ID NO: 1917600 - RNA, 23 nt, Human
cuagugugguguuuccuggcacu

SEQ ID NO: 1917601 - RNA, 23 nt, Human
cuauauuguuuucaguguacaug

SEQ ID NO: 1917602 - RNA, 20 nt, Human
cuauauuuuuuguuaaauga

SEQ ID NO: 1917603 - RNA, 22 nt, Human
cuauauuguuuucaguguacau

SEQ ID NO: 1917604 - RNA, 22 nt, Human
cuauauuuuuuguuaaaugauu

SEQ ID NO: 1917605 - RNA, 20 nt, Human
cuaucaaguauuauaccuuu

SEQ ID NO: 1917606 - RNA, 21 nt, Human
cuaucuguuuacaguguuccg

SEQ ID NO: 1917607 - RNA, 20 nt, Human
cuaucuguuuacaguguucc

SEQ ID NO: 1917608 - RNA, 14 nt, Human
cuaugacacaugca

SEQ ID NO: 1917609 - RNA, 14 nt, Human
cuaguuccaccauc

SEQ ID NO: 1917610 - RNA, 18 nt, Human
cucaagaucaaugaaaug

SEQ ID NO: 1917611 - RNA, 17 nt, Human
cucaagaucaaugaaau

SEQ ID NO: 1917612 - RNA, 17 nt, Human
cucaagauacugcuacu

SEQ ID NO: 1917613 - RNA, 21 nt, Human
cucaagauacugcuacuguaa

SEQ ID NO: 1917614 - RNA, 22 nt, Human
cucaagauacugcuacuguaau

SEQ ID NO: 1917615 - RNA, 16 nt, Human
cucaagaugaaggcaa

SEQ ID NO: 1917616 - RNA, 16 nt, Human
cucaagcgauucuccu

SEQ ID NO: 1917617 - RNA, 17 nt, Human
cucaagcgauucuccug

SEQ ID NO: 1917618 - RNA, 19 nt, Human
cucaacucuccuccagagu

SEQ ID NO: 1917619 - RNA, 18 nt, Human
cucaacuagcagauacag

SEQ ID NO: 1917620 - RNA, 13 nt, Human
cucaaauuucuaa

SEQ ID NO: 1917621 - RNA, 12 nt, Human
cucaaccucuuc

SEQ ID NO: 1917622 - RNA, 13 nt, Human
cucaaccucuucu

SEQ ID NO: 1917623 - RNA, 14 nt, Human
cucaaccucuucug

SEQ ID NO: 1917624 - RNA, 18 nt, Human
cucaaccucuucuggcuc

SEQ ID NO: 1917625 - RNA, 20 nt, Human
cucaaccucuucuggcucaa

SEQ ID NO: 1917626 - RNA, 19 nt, Human
cucaaauggggccagaucc

SEQ ID NO: 1917627 - RNA, 20 nt, Human
cucaaauggggccagaucca

SEQ ID NO: 1917628 - RNA, 21 nt, Human
cucaaauggggccagauccag

SEQ ID NO: 1917629 - RNA, 20 nt, Human
cucaacucuccuccagaguc

SEQ ID NO: 1917630 - RNA, 21 nt, Human
cucaacucuccuccagaguca

SEQ ID NO: 1917631 - RNA, 15 nt, Human
cucaacguauuguuu

SEQ ID NO: 1917632 - RNA, 16 nt, Human
cucaacguauuguuuc

SEQ ID NO: 1917633 - RNA, 21 nt, Human
cucaaccucuucuggcucaaa

SEQ ID NO: 1917634 - RNA, 18 nt, Human
cuauuuuaauaaacacuc

SEQ ID NO: 1917635 - RNA, 22 nt, Human
cuauuuuaauaaacacucuuga

SEQ ID NO: 1917636 - RNA, 12 nt, Human
cuauuuugaagu

SEQ ID NO: 1917637 - RNA, 17 nt, Human
cuauuuuggauuguaua

SEQ ID NO: 1917638 - RNA, 15 nt, Human
cucaaauggggccag

SEQ ID NO: 1917639 - RNA, 16 nt, Human
cucaaauggggccaga

SEQ ID NO: 1917640 - RNA, 17 nt, Human
cucaaauggggccagau

SEQ ID NO: 1917641 - RNA, 14 nt, Human
cuaugcauuugaaa

SEQ ID NO: 1917642 - RNA, 13 nt, Human
cucacauuuauau

SEQ ID NO: 1917643 - RNA, 19 nt, Human
cucaccagccccagugccc

SEQ ID NO: 1917644 - RNA, 20 nt, Human
cucacauagcuuacaagcca

SEQ ID NO: 1917645 - RNA, 21 nt, Human
cucaccagccccagugcccac

SEQ ID NO: 1917646 - RNA, 20 nt, Human
cucaccagccccagugccca

SEQ ID NO: 1917647 - RNA, 16 nt, Human
cucacauuacacacac

SEQ ID NO: 1917648 - RNA, 20 nt, Human
cucaagugauucuccugccu

SEQ ID NO: 1917649 - RNA, 19 nt, Human
cucaagugauucuccugcc

SEQ ID NO: 1917650 - RNA, 18 nt, Human
cucaagugauucuccugc

SEQ ID NO: 1917651 - RNA, 17 nt, Human
cucacuauguugcccag

SEQ ID NO: 1917652 - RNA, 16 nt, Human
cucacuauguugccca

SEQ ID NO: 1917653 - RNA, 17 nt, Human
cucaccccuugccauaa

SEQ ID NO: 1917654 - RNA, 23 nt, Human
cucaccccugguucucaucuuuc

SEQ ID NO: 1917655 - RNA, 21 nt, Human
cucaccccugguucucaucuu

SEQ ID NO: 1917656 - RNA, 20 nt, Human
cucaccccugguucucaucu

SEQ ID NO: 1917657 - RNA, 19 nt, Human
cucaccccugguucucauc

SEQ ID NO: 1917658 - RNA, 14 nt, Human
cucaccccagcccc

SEQ ID NO: 1917659 - RNA, 23 nt, Human
cucaccccagacuccugacuguc

SEQ ID NO: 1917660 - RNA, 12 nt, Human
cucaccccagcc

SEQ ID NO: 1917661 - RNA, 13 nt, Human
cucaccccagccc

SEQ ID NO: 1917662 - RNA, 17 nt, Human
cucaccccugguucuca

SEQ ID NO: 1917663 - RNA, 14 nt, Human
cucaccccugguuc

SEQ ID NO: 1917664 - RNA, 21 nt, Human
cuaugcauuugaaaauuuuga

SEQ ID NO: 1917665 - RNA, 12 nt, Human
cuaugcauuuga

SEQ ID NO: 1917666 - RNA, 11 nt, Human
cuaugcauuug

SEQ ID NO: 1917667 - RNA, 16 nt, Human
cguggacucugcacau

SEQ ID NO: 1917668 - RNA, 13 nt, Human
cguggacucugca

SEQ ID NO: 1917669 - RNA, 20 nt, Human
cguggaacguuuuuccuguu

SEQ ID NO: 1917670 - RNA, 15 nt, Human
cguggaacguuuuuc

SEQ ID NO: 1917671 - RNA, 15 nt, Human
cgugcugacagcugc

SEQ ID NO: 1917672 - RNA, 17 nt, Human
cgugcugacagcugcuc

SEQ ID NO: 1917673 - RNA, 16 nt, Human
cgugcugacagcugcu

SEQ ID NO: 1917674 - RNA, 19 nt, Human
cgugcucgccccagcaggu

SEQ ID NO: 1917675 - RNA, 22 nt, Human
cgugggcugggcccacaaaggc

SEQ ID NO: 1917676 - RNA, 19 nt, Human
cgugcacacaccagagccc

SEQ ID NO: 1917677 - RNA, 18 nt, Human
cgugcacacaccagagcc

SEQ ID NO: 1917678 - RNA, 18 nt, Human
cgugaaaacggagcugaa

SEQ ID NO: 1917679 - RNA, 22 nt, Human
cgugcaguggugcgaucugggu

SEQ ID NO: 1917680 - RNA, 17 nt, Human
cgugcagggacaaagag

SEQ ID NO: 1917681 - RNA, 21 nt, Human
cgugcaguggugcgaucuggg

SEQ ID NO: 1917682 - RNA, 23 nt, Human
cgugcauaccacuuuuguucuug

SEQ ID NO: 1917683 - RNA, 22 nt, Human
cgucugacaggcaaugcuggcu

SEQ ID NO: 1917684 - RNA, 21 nt, Human
cgucugacaggcaaugcuggc

SEQ ID NO: 1917685 - RNA, 20 nt, Human
cgucugacaggcaaugcugg

SEQ ID NO: 1917686 - RNA, 16 nt, Human
cgugcacacaccagag

SEQ ID NO: 1917687 - RNA, 15 nt, Human
cgugaaaacggagcu

SEQ ID NO: 1917688 - RNA, 16 nt, Human
cgugaaaacggagcug

SEQ ID NO: 1917689 - RNA, 17 nt, Human
cgugaaaacggagcuga

SEQ ID NO: 1917690 - RNA, 16 nt, Human
cgucgacguagaaccu

SEQ ID NO: 1917691 - RNA, 16 nt, Human
cgucucauacucaccu

SEQ ID NO: 1917692 - RNA, 16 nt, Human
cgucuaccugaggggc

SEQ ID NO: 1917693 - RNA, 18 nt, Human
cggugcuaucucccccag

SEQ ID NO: 1917694 - RNA, 20 nt, Human
cggugcuaucucccccagcc

SEQ ID NO: 1917695 - RNA, 21 nt, Human
cggugcuaucucccccagccc

SEQ ID NO: 1917696 - RNA, 22 nt, Human
cggugcuaucucccccagcccc

SEQ ID NO: 1917697 - RNA, 21 nt, Human
cuaaauccuuuacuguuaguc

SEQ ID NO: 1917698 - RNA, 17 nt, Human
cuaaauccuuuacuguu

SEQ ID NO: 1917699 - RNA, 18 nt, Human
cuaaauauauuuuaagac

SEQ ID NO: 1917700 - RNA, 20 nt, Human
cuaaauauauuuuaagacga

SEQ ID NO: 1917701 - RNA, 15 nt, Human
cuaaacggauuccaa

SEQ ID NO: 1917702 - RNA, 16 nt, Human
cuaaacggauuccaaa

SEQ ID NO: 1917703 - RNA, 17 nt, Human
cuaaacggauuccaaag

SEQ ID NO: 1917704 - RNA, 16 nt, Human
cuaaaugaauguuuac

SEQ ID NO: 1917705 - RNA, 15 nt, Human
cuaaauggaaccacu

SEQ ID NO: 1917706 - RNA, 15 nt, Human
cuaaaugaauguuua

SEQ ID NO: 1917707 - RNA, 20 nt, Human
cuaaaucuccaaaauaaaac

SEQ ID NO: 1917708 - RNA, 17 nt, Human
cuaaauggaaccacucu

SEQ ID NO: 1917709 - RNA, 16 nt, Human
cuaaauggaaccacuc

SEQ ID NO: 1917710 - RNA, 18 nt, Human
cuaaauggaaccacucua

SEQ ID NO: 1917711 - RNA, 15 nt, Human
cuaacauggaaguac

SEQ ID NO: 1917712 - RNA, 17 nt, Human
cuaacauggaaguacua

SEQ ID NO: 1917713 - RNA, 15 nt, Human
cuaacaugauuuggg

SEQ ID NO: 1917714 - RNA, 15 nt, Human
cuaacaccagacaga

SEQ ID NO: 1917715 - RNA, 23 nt, Human
cuaaauugacacuuaaaaauggu

SEQ ID NO: 1917716 - RNA, 16 nt, Human
cuaaauguugaaagau

SEQ ID NO: 1917717 - RNA, 18 nt, Human
cuaaacauccaauauuuu

SEQ ID NO: 1917718 - RNA, 19 nt, Human
cuaaacaaugcugauuugg

SEQ ID NO: 1917719 - RNA, 15 nt, Human
cuaaacccaauccaa

SEQ ID NO: 1917720 - RNA, 19 nt, Human
cuaaacccaauccaaaugg

SEQ ID NO: 1917721 - RNA, 16 nt, Human
cuaaacccaauccaaa

SEQ ID NO: 1917722 - RNA, 23 nt, Human
cguuuacaagcccccccuuccac

SEQ ID NO: 1917723 - RNA, 19 nt, Human
cuaaaacuacaaaaauuaa

SEQ ID NO: 1917724 - RNA, 13 nt, Human
cgcccccuuggcu

SEQ ID NO: 1917725 - RNA, 15 nt, Human
cgcccccugcccucc

SEQ ID NO: 1917726 - RNA, 19 nt, Human
cgcccccugcccuccccuc

SEQ ID NO: 1917727 - RNA, 12 nt, Human
cgcccagucugg

SEQ ID NO: 1917728 - RNA, 16 nt, Human
cgcccaguccuuccac

SEQ ID NO: 1917729 - RNA, 14 nt, Human
cgcccccugcccuc

SEQ ID NO: 1917730 - RNA, 19 nt, Human
cgccccucccacagcgcug

SEQ ID NO: 1917731 - RNA, 21 nt, Human
cgccccucccacagcgcuggc

SEQ ID NO: 1917732 - RNA, 22 nt, Human
cgcccaggcuuagucacugaga

SEQ ID NO: 1917733 - RNA, 14 nt, Human
cgcccaguccuucc

SEQ ID NO: 1917734 - RNA, 15 nt, Human
cgcccaguccuucca

SEQ ID NO: 1917735 - RNA, 22 nt, Human
cgcccagagacccaagcugccu

SEQ ID NO: 1917736 - RNA, 21 nt, Human
cgcccagauuaugagacacag

SEQ ID NO: 1917737 - RNA, 20 nt, Human
cgcccaggcuggagugcagu

SEQ ID NO: 1917738 - RNA, 16 nt, Human
cgcccuggacugugug

SEQ ID NO: 1917739 - RNA, 19 nt, Human
cgcgccaaauaaugucucu

SEQ ID NO: 1917740 - RNA, 23 nt, Human
cgcgccaaauaaugucucuguga

SEQ ID NO: 1917741 - RNA, 21 nt, Human
cgcgccaaauaaugucucugu

SEQ ID NO: 1917742 - RNA, 23 nt, Human
cgccaggggaaaaucagccugcu

SEQ ID NO: 1917743 - RNA, 15 nt, Human
cgccagcugaugacu

SEQ ID NO: 1917744 - RNA, 16 nt, Human
cgccagcugaugacuc

SEQ ID NO: 1917745 - RNA, 17 nt, Human
cgccagcugaugacuca

SEQ ID NO: 1917746 - RNA, 18 nt, Human
cgccagcugaugacucaa

SEQ ID NO: 1917747 - RNA, 20 nt, Human
cgccagcugaugacucaaga

SEQ ID NO: 1917748 - RNA, 14 nt, Human
cgccaucccagccc

SEQ ID NO: 1917749 - RNA, 16 nt, Human
cgccaucccagcccca

SEQ ID NO: 1917750 - RNA, 22 nt, Human
cgccagauucuuuccugaggcu

SEQ ID NO: 1917751 - RNA, 19 nt, Human
ccucugccccauccuccag

SEQ ID NO: 1917752 - RNA, 22 nt, Human
ccucugccccauccuccagcag

SEQ ID NO: 1917753 - RNA, 13 nt, Human
cgccagcugauga

SEQ ID NO: 1917754 - RNA, 17 nt, Human
ccucugcccacucccug

SEQ ID NO: 1917755 - RNA, 19 nt, Human
ccucugcccacucccugca

SEQ ID NO: 1917756 - RNA, 20 nt, Human
ccucugcccacucccugcaa

SEQ ID NO: 1917757 - RNA, 22 nt, Human
cgcggcucccggggcagggcag

SEQ ID NO: 1917758 - RNA, 19 nt, Human
cgcggcucccggggcaggg

SEQ ID NO: 1917759 - RNA, 23 nt, Human
cgcggcggagcuggccccgccgc

SEQ ID NO: 1917760 - RNA, 22 nt, Human
cgcuaagagggagggagggcuc

SEQ ID NO: 1917761 - RNA, 15 nt, Human
cgcggcggagcuggc

SEQ ID NO: 1917762 - RNA, 17 nt, Human
cgcggcggagcuggccc

SEQ ID NO: 1917763 - RNA, 18 nt, Human
cgcggcggagcuggcccc

SEQ ID NO: 1917764 - RNA, 21 nt, Human
cgcggcggagcuggccccgcc

SEQ ID NO: 1917765 - RNA, 22 nt, Human
cgcggcggagcuggccccgccg

SEQ ID NO: 1917766 - RNA, 16 nt, Human
cgcuacccgggaaggg

SEQ ID NO: 1917767 - RNA, 15 nt, Human
cgcucucuggccuuc

SEQ ID NO: 1917768 - RNA, 14 nt, Human
cgcucucuggccuu

SEQ ID NO: 1917769 - RNA, 20 nt, Human
cggaaaacaugcuacacacu

SEQ ID NO: 1917770 - RNA, 15 nt, Human
cggaaaacaugcuac

SEQ ID NO: 1917771 - RNA, 18 nt, Human
cgcugugcugcccugccc

SEQ ID NO: 1917772 - RNA, 13 nt, Human
cgcuugagaaaaa

SEQ ID NO: 1917773 - RNA, 15 nt, Human
cgcugugcugcccug

SEQ ID NO: 1917774 - RNA, 23 nt, Human
cgcugucccuaguaaaaauacaa

SEQ ID NO: 1917775 - RNA, 16 nt, Human
cgcugugcugcccugc

SEQ ID NO: 1917776 - RNA, 17 nt, Human
cgcugugcugcccugcc

SEQ ID NO: 1917777 - RNA, 22 nt, Human
cgcugucagccauuccuguucc

SEQ ID NO: 1917778 - RNA, 18 nt, Human
cgcucucuggccuucggc

SEQ ID NO: 1917779 - RNA, 15 nt, Human
cgguagcugugcgug

SEQ ID NO: 1917780 - RNA, 22 nt, Human
cgguagccagcacacagggcag

SEQ ID NO: 1917781 - RNA, 15 nt, Human
cgguagccagcacac

SEQ ID NO: 1917782 - RNA, 21 nt, Human
cgguagccagcacacagggca

SEQ ID NO: 1917783 - RNA, 20 nt, Human
cgguccacccaggagccccg

SEQ ID NO: 1917784 - RNA, 16 nt, Human
cgguccacccaggagc

SEQ ID NO: 1917785 - RNA, 15 nt, Human
cgguccacccaggag

SEQ ID NO: 1917786 - RNA, 14 nt, Human
cgguccacccagga

SEQ ID NO: 1917787 - RNA, 15 nt, Human
cgggucaucuguacc

SEQ ID NO: 1917788 - RNA, 20 nt, Human
cgggugaacaaagcagccac

SEQ ID NO: 1917789 - RNA, 22 nt, Human
cgggucaucuguaccucugccu

SEQ ID NO: 1917790 - RNA, 22 nt, Human
cgggugugcaaugucugaguga

SEQ ID NO: 1917791 - RNA, 21 nt, Human
cgggugaacaaagcagccacg

SEQ ID NO: 1917792 - RNA, 17 nt, Human
cggugagcuacaaaugc

SEQ ID NO: 1917793 - RNA, 21 nt, Human
cggugagaggggaacagacug

SEQ ID NO: 1917794 - RNA, 20 nt, Human
cggugagaggggaacagacu

SEQ ID NO: 1917795 - RNA, 22 nt, Human
cgggcacucagaagacacugau

SEQ ID NO: 1917796 - RNA, 14 nt, Human
cgggcacucagaag

SEQ ID NO: 1917797 - RNA, 22 nt, Human
cggggacagcuccuucuguccu

SEQ ID NO: 1917798 - RNA, 18 nt, Human
cgggaggucgaggcagga

SEQ ID NO: 1917799 - RNA, 20 nt, Human
cgggaggucgaggcaggagg

SEQ ID NO: 1917800 - RNA, 23 nt, Human
cggcuggccuggccccucagggu

SEQ ID NO: 1917801 - RNA, 22 nt, Human
cggcuggccuggccccucaggg

SEQ ID NO: 1917802 - RNA, 19 nt, Human
cggcuggccuggccccuca

SEQ ID NO: 1917803 - RNA, 19 nt, Human
cgggagccucccugccuca

SEQ ID NO: 1917804 - RNA, 22 nt, Human
cgggagccucccugccucaggc

SEQ ID NO: 1917805 - RNA, 15 nt, Human
cgggagccucccugc

SEQ ID NO: 1917806 - RNA, 17 nt, Human
cgggagccucccugccu

SEQ ID NO: 1917807 - RNA, 15 nt, Human
cgggggcagagaggg

SEQ ID NO: 1917808 - RNA, 16 nt, Human
cgggguggauuggauu

SEQ ID NO: 1917809 - RNA, 16 nt, Human
cggggugcccacaggc

SEQ ID NO: 1917810 - RNA, 15 nt, Human
cgggguauccugggg

SEQ ID NO: 1917811 - RNA, 21 nt, Human
cgggguauccugggggaccca

SEQ ID NO: 1917812 - RNA, 23 nt, Human
cggggacagcuccuucuguccua

SEQ ID NO: 1917813 - RNA, 23 nt, Human
cggggcucuucucauuucacccc

SEQ ID NO: 1917814 - RNA, 17 nt, Human
cggggcucuucucauuu

SEQ ID NO: 1917815 - RNA, 16 nt, Human
cggggcucuucucauu

SEQ ID NO: 1917816 - RNA, 14 nt, Human
cggccuccauccug

SEQ ID NO: 1917817 - RNA, 12 nt, Human
cggccuccaucc

SEQ ID NO: 1917818 - RNA, 23 nt, Human
cggccggccagccccuggcccca

SEQ ID NO: 1917819 - RNA, 14 nt, Human
cggccggccagccc

SEQ ID NO: 1917820 - RNA, 16 nt, Human
cggccggccagccccu

SEQ ID NO: 1917821 - RNA, 15 nt, Human
cggcuggacuuggag

SEQ ID NO: 1917822 - RNA, 24 nt, Human
cggccaggccagagggagugacag

SEQ ID NO: 1917823 - RNA, 15 nt, Human
cggccagccaugucu

SEQ ID NO: 1917824 - RNA, 17 nt, Human
cggccagggagaagcuc

SEQ ID NO: 1917825 - RNA, 16 nt, Human
cggccagggagaagcu

SEQ ID NO: 1917826 - RNA, 19 nt, Human
cggccccugcugguucagg

SEQ ID NO: 1917827 - RNA, 18 nt, Human
cggccccugcugguucag

SEQ ID NO: 1917828 - RNA, 13 nt, Human
cggccccugcugg

SEQ ID NO: 1917829 - RNA, 11 nt, Human
cggccaccugc

SEQ ID NO: 1917830 - RNA, 15 nt, Human
cggccaccugcggug

SEQ ID NO: 1917831 - RNA, 16 nt, Human
cggccaccugcggugc

SEQ ID NO: 1917832 - RNA, 17 nt, Human
cggccaccugcggugcu

SEQ ID NO: 1917833 - RNA, 14 nt, Human
cggaauaguuggcu

SEQ ID NO: 1917834 - RNA, 13 nt, Human
cggaagagccuug

SEQ ID NO: 1917835 - RNA, 14 nt, Human
cucuccagccugac

SEQ ID NO: 1917836 - RNA, 19 nt, Human
cucuccagccccuggaugc

SEQ ID NO: 1917837 - RNA, 24 nt, Human
cucuccccagcaagugagagcugg

SEQ ID NO: 1917838 - RNA, 12 nt, Human
cucuccucugcu

SEQ ID NO: 1917839 - RNA, 22 nt, Human
cucuccccagcaagugagagcu

SEQ ID NO: 1917840 - RNA, 14 nt, Human
cucuccccagcaag

SEQ ID NO: 1917841 - RNA, 13 nt, Human
cucuccucugcug

SEQ ID NO: 1917842 - RNA, 14 nt, Human
cucuccucugcugc

SEQ ID NO: 1917843 - RNA, 15 nt, Human
cucuccucugcugcu

SEQ ID NO: 1917844 - RNA, 18 nt, Human
cucuccucugcugcuggc

SEQ ID NO: 1917845 - RNA, 13 nt, Human
cucucucaggcca

SEQ ID NO: 1917846 - RNA, 12 nt, Human
cucucuccagau

SEQ ID NO: 1917847 - RNA, 14 nt, Human
cucucuccagaugu

SEQ ID NO: 1917848 - RNA, 17 nt, Human
cucucuccagauguuuc

SEQ ID NO: 1917849 - RNA, 12 nt, Human
cucucucacucc

SEQ ID NO: 1917850 - RNA, 23 nt, Human
cucucuacuaaaacuacaaaaau

SEQ ID NO: 1917851 - RNA, 22 nt, Human
cucucuacuaaaacuacaaaaa

SEQ ID NO: 1917852 - RNA, 14 nt, Human
cucuccuuccugug

SEQ ID NO: 1917853 - RNA, 16 nt, Human
cucuccuuccuggagc

SEQ ID NO: 1917854 - RNA, 21 nt, Human
cucuaguuugauuaaauucuu

SEQ ID NO: 1917855 - RNA, 20 nt, Human
cucuaguuugauuaaauucu

SEQ ID NO: 1917856 - RNA, 19 nt, Human
cucuaguuugauuaaauuc

SEQ ID NO: 1917857 - RNA, 15 nt, Human
cucuaguuugauuaa

SEQ ID NO: 1917858 - RNA, 14 nt, Human
cucuagugccuucu

SEQ ID NO: 1917859 - RNA, 16 nt, Human
cucuagugccuucuaa

SEQ ID NO: 1917860 - RNA, 12 nt, Human
cucucaggccaa

SEQ ID NO: 1917861 - RNA, 20 nt, Human
cucucaggccaaacucaccu

SEQ ID NO: 1917862 - RNA, 21 nt, Human
cucucaggccaaacucaccug

SEQ ID NO: 1917863 - RNA, 22 nt, Human
cucucaggccaaacucaccugc

SEQ ID NO: 1917864 - RNA, 23 nt, Human
cucucaggccaaacucaccugcc

SEQ ID NO: 1917865 - RNA, 13 nt, Human
cucucaggccagc

SEQ ID NO: 1917866 - RNA, 15 nt, Human
cucucaggccagcug

SEQ ID NO: 1917867 - RNA, 17 nt, Human
cucucaggccagcugcu

SEQ ID NO: 1917868 - RNA, 18 nt, Human
cucucaggccagcugcuu

SEQ ID NO: 1917869 - RNA, 19 nt, Human
cucucaggccagcugcuug

SEQ ID NO: 1917870 - RNA, 21 nt, Human
cucucaggccagcugcuuggg

SEQ ID NO: 1917871 - RNA, 20 nt, Human
cucucauguuuucaacugcc

SEQ ID NO: 1917872 - RNA, 15 nt, Human
cucuccaaaaaugca

SEQ ID NO: 1917873 - RNA, 14 nt, Human
cucuccagccccug

SEQ ID NO: 1917874 - RNA, 15 nt, Human
cucuccagccccugg

SEQ ID NO: 1917875 - RNA, 16 nt, Human
cucuccagccccugga

SEQ ID NO: 1917876 - RNA, 17 nt, Human
cucuccagccccuggau

SEQ ID NO: 1917877 - RNA, 18 nt, Human
cucuccagccccuggaug

SEQ ID NO: 1917878 - RNA, 16 nt, Human
cucuacccauauuaca

SEQ ID NO: 1917879 - RNA, 19 nt, Human
cucuacccauauuacagau

SEQ ID NO: 1917880 - RNA, 13 nt, Human
cucuacccuggca

SEQ ID NO: 1917881 - RNA, 20 nt, Human
cucuaccauccccuguagag

SEQ ID NO: 1917882 - RNA, 21 nt, Human
cucuacugggagccuacccac

SEQ ID NO: 1917883 - RNA, 18 nt, Human
cucuacugggagccuacc

SEQ ID NO: 1917884 - RNA, 12 nt, Human
cucuacucugcu

SEQ ID NO: 1917885 - RNA, 13 nt, Human
cucuacucugcuu

SEQ ID NO: 1917886 - RNA, 14 nt, Human
cucuacucugcuuu

SEQ ID NO: 1917887 - RNA, 16 nt, Human
cucuacucuuacuucc

SEQ ID NO: 1917888 - RNA, 22 nt, Human
cucuacuaaaaauacaaaaauu

SEQ ID NO: 1917889 - RNA, 23 nt, Human
cucuagggaaaaaccagcgugug

SEQ ID NO: 1917890 - RNA, 20 nt, Human
cucuagcugggggugggcca

SEQ ID NO: 1917891 - RNA, 23 nt, Human
cucuagcugggggugggccaggc

SEQ ID NO: 1917892 - RNA, 19 nt, Human
cucuagccaaaugguuuaa

SEQ ID NO: 1917893 - RNA, 20 nt, Human
cuccugugugugcgccuaca

SEQ ID NO: 1917894 - RNA, 16 nt, Human
cuccuucacagauggg

SEQ ID NO: 1917895 - RNA, 17 nt, Human
cuccuucacagaugggu

SEQ ID NO: 1917896 - RNA, 13 nt, Human
cuccuucaccuuu

SEQ ID NO: 1917897 - RNA, 19 nt, Human
cuccuucacagaugggugc

SEQ ID NO: 1917898 - RNA, 17 nt, Human
cucggagggauuccccu

SEQ ID NO: 1917899 - RNA, 13 nt, Human
cucggaggaagcc

SEQ ID NO: 1917900 - RNA, 17 nt, Human
cucggaggaagccccca

SEQ ID NO: 1917901 - RNA, 16 nt, Human
cucuacagaggccaug

SEQ ID NO: 1917902 - RNA, 14 nt, Human
cucuacagaggcca

SEQ ID NO: 1917903 - RNA, 19 nt, Human
cucuacagaggccaugggc

SEQ ID NO: 1917904 - RNA, 13 nt, Human
cucuacagaggcc

SEQ ID NO: 1917905 - RNA, 13 nt, Human
cucuacaaaaagc

SEQ ID NO: 1917906 - RNA, 19 nt, Human
cuccuccuuggugccuggc

SEQ ID NO: 1917907 - RNA, 22 nt, Human
cuccucuccccagcaagugaga

SEQ ID NO: 1917908 - RNA, 15 nt, Human
cuccucuccccagcc

SEQ ID NO: 1917909 - RNA, 22 nt, Human
cuccuccagccgccaugcuccu

SEQ ID NO: 1917910 - RNA, 14 nt, Human
cuccucaucucuaa

SEQ ID NO: 1917911 - RNA, 13 nt, Human
cuccuccagggug

SEQ ID NO: 1917912 - RNA, 16 nt, Human
cuccuccacucucccc

SEQ ID NO: 1917913 - RNA, 19 nt, Human
cucccuuuuaauccuggcu

SEQ ID NO: 1917914 - RNA, 20 nt, Human
cucccuuuuaauccuggcug

SEQ ID NO: 1917915 - RNA, 15 nt, Human
cuccgaccagacacc

SEQ ID NO: 1917916 - RNA, 14 nt, Human
cuccugccucagcc

SEQ ID NO: 1917917 - RNA, 13 nt, Human
cuccugccucagc

SEQ ID NO: 1917918 - RNA, 11 nt, Human
cuccugcccuu

SEQ ID NO: 1917919 - RNA, 18 nt, Human
cuccugcaggcagccagg

SEQ ID NO: 1917920 - RNA, 20 nt, Human
cuccugcaggcagccaggcc

SEQ ID NO: 1917921 - RNA, 11 nt, Human
cuccugcaggc

SEQ ID NO: 1917922 - RNA, 16 nt, Human
cuccugcaggcagcca

SEQ ID NO: 1917923 - RNA, 17 nt, Human
cuccugcaggcagccag

SEQ ID NO: 1917924 - RNA, 17 nt, Human
cuccucuccccagccca

SEQ ID NO: 1917925 - RNA, 18 nt, Human
cuccucuccccagcccag

SEQ ID NO: 1917926 - RNA, 19 nt, Human
cuccucuccccagcccaga

SEQ ID NO: 1917927 - RNA, 20 nt, Human
cuccucuccccagcccagag

SEQ ID NO: 1917928 - RNA, 21 nt, Human
cuccucuccccagcccagaga

SEQ ID NO: 1917929 - RNA, 22 nt, Human
cuccucuccccagcccagagac

SEQ ID NO: 1917930 - RNA, 23 nt, Human
cuccucuccccagcccagagaca

SEQ ID NO: 1917931 - RNA, 19 nt, Human
cuccugugugugcgccuac

SEQ ID NO: 1917932 - RNA, 16 nt, Human
cuccugugugugcgcc

SEQ ID NO: 1917933 - RNA, 15 nt, Human
cuccugccucagccu

SEQ ID NO: 1917934 - RNA, 14 nt, Human
cuccugccgcagag

SEQ ID NO: 1917935 - RNA, 17 nt, Human
cucccaggugcagccag

SEQ ID NO: 1917936 - RNA, 18 nt, Human
cucccaggugcagccaga

SEQ ID NO: 1917937 - RNA, 11 nt, Human
cucccaucugu

SEQ ID NO: 1917938 - RNA, 14 nt, Human
cucccaucugugaa

SEQ ID NO: 1917939 - RNA, 15 nt, Human
cucccaucugugaaa

SEQ ID NO: 1917940 - RNA, 18 nt, Human
cucccaucugugaaagga

SEQ ID NO: 1917941 - RNA, 23 nt, Human
cucccaucugugaaaggaaagag

SEQ ID NO: 1917942 - RNA, 18 nt, Human
cucccaaagugcugggau

SEQ ID NO: 1917943 - RNA, 22 nt, Human
cucccaaagugcugggauuaca

SEQ ID NO: 1917944 - RNA, 17 nt, Human
cucccaacucaccccag

SEQ ID NO: 1917945 - RNA, 16 nt, Human
cucccaacucacccca

SEQ ID NO: 1917946 - RNA, 22 nt, Human
cucccaacucaccccagcccca

SEQ ID NO: 1917947 - RNA, 18 nt, Human
cucacuauguugcccagg

SEQ ID NO: 1917948 - RNA, 18 nt, Human
cuccauccugaggcucca

SEQ ID NO: 1917949 - RNA, 16 nt, Human
cuccauccugaggcuc

SEQ ID NO: 1917950 - RNA, 11 nt, Human
cuccauccuga

SEQ ID NO: 1917951 - RNA, 13 nt, Human
cuccaugugggcu

SEQ ID NO: 1917952 - RNA, 17 nt, Human
cucccaaagugcuggga

SEQ ID NO: 1917953 - RNA, 16 nt, Human
cuccccaaagggugug

SEQ ID NO: 1917954 - RNA, 12 nt, Human
cuccccagcaag

SEQ ID NO: 1917955 - RNA, 12 nt, Human
cuccccugcugg

SEQ ID NO: 1917956 - RNA, 21 nt, Human
cuccccagcaagugagagcug

SEQ ID NO: 1917957 - RNA, 20 nt, Human
cuccccagcaagugagagcu

SEQ ID NO: 1917958 - RNA, 18 nt, Human
cucccgaguagcugggac

SEQ ID NO: 1917959 - RNA, 19 nt, Human
cucccgaauagcugggacu

SEQ ID NO: 1917960 - RNA, 17 nt, Human
cucccgaguagcuggga

SEQ ID NO: 1917961 - RNA, 16 nt, Human
cucccgaguagcuggg

SEQ ID NO: 1917962 - RNA, 18 nt, Human
cucccgaauagcugggac

SEQ ID NO: 1917963 - RNA, 15 nt, Human
cucccgaguagcugg

SEQ ID NO: 1917964 - RNA, 16 nt, Human
cucccgaauagcuggg

SEQ ID NO: 1917965 - RNA, 17 nt, Human
cucccgaauagcuggga

SEQ ID NO: 1917966 - RNA, 13 nt, Human
cuccccugcuggg

SEQ ID NO: 1917967 - RNA, 14 nt, Human
cuccccugcugggu

SEQ ID NO: 1917968 - RNA, 22 nt, Human
cugacuuggggagauggaguuc

SEQ ID NO: 1917969 - RNA, 21 nt, Human
cugacuuggggagauggaguu

SEQ ID NO: 1917970 - RNA, 20 nt, Human
cugacuuggggagauggagu

SEQ ID NO: 1917971 - RNA, 11 nt, Human
cugagaaauuu

SEQ ID NO: 1917972 - RNA, 14 nt, Human
cugagaaauuuaua

SEQ ID NO: 1917973 - RNA, 14 nt, Human
cugagacagcccgg

SEQ ID NO: 1917974 - RNA, 15 nt, Human
cugagacagcccggg

SEQ ID NO: 1917975 - RNA, 19 nt, Human
cugagaauguaagaacuac

SEQ ID NO: 1917976 - RNA, 17 nt, Human
cugagaauguaagaacu

SEQ ID NO: 1917977 - RNA, 23 nt, Human
cugagaagguuugguccagccug

SEQ ID NO: 1917978 - RNA, 20 nt, Human
cugagaauauaauacuguau

SEQ ID NO: 1917979 - RNA, 23 nt, Human
cugagaauauaauacuguauuug

SEQ ID NO: 1917980 - RNA, 16 nt, Human
cugacuguuuucucuu

SEQ ID NO: 1917981 - RNA, 22 nt, Human
cugacucacaccugaacugaac

SEQ ID NO: 1917982 - RNA, 18 nt, Human
cugacuguuuucucuuga

SEQ ID NO: 1917983 - RNA, 17 nt, Human
cugacuucaucucccac

SEQ ID NO: 1917984 - RNA, 23 nt, Human
cugacuucaucucccaccuagca

SEQ ID NO: 1917985 - RNA, 21 nt, Human
cugacaggcaaugcuggcugu

SEQ ID NO: 1917986 - RNA, 15 nt, Human
cugacagcugcuccu

SEQ ID NO: 1917987 - RNA, 16 nt, Human
cugacagcugcuccua

SEQ ID NO: 1917988 - RNA, 17 nt, Human
cugacagcugcuccuag

SEQ ID NO: 1917989 - RNA, 17 nt, Human
cugacagucaugcaguc

SEQ ID NO: 1917990 - RNA, 16 nt, Human
cugacaucuggaaucu

SEQ ID NO: 1917991 - RNA, 15 nt, Human
cugacaugauuccuu

SEQ ID NO: 1917992 - RNA, 20 nt, Human
cugacaugauuccuuccugu

SEQ ID NO: 1917993 - RNA, 16 nt, Human
cugacaugauuccuuc

SEQ ID NO: 1917994 - RNA, 19 nt, Human
cugaagacucauucuucug

SEQ ID NO: 1917995 - RNA, 14 nt, Human
cugaagaguccucu

SEQ ID NO: 1917996 - RNA, 15 nt, Human
cugaagaguccucug

SEQ ID NO: 1917997 - RNA, 16 nt, Human
cugaagaguccucuga

SEQ ID NO: 1917998 - RNA, 18 nt, Human
cugaagaguccucugaau

SEQ ID NO: 1917999 - RNA, 12 nt, Human
cugacagcugcu

SEQ ID NO: 1918000 - RNA, 13 nt, Human
cugacagcugcuc

SEQ ID NO: 1918001 - RNA, 14 nt, Human
cugacagcugcucc

SEQ ID NO: 1918002 - RNA, 22 nt, Human
cugacauuguuggccaaagcca

SEQ ID NO: 1918003 - RNA, 18 nt, Human
cugaccaauauuguacag

SEQ ID NO: 1918004 - RNA, 15 nt, Human
cugaccaauauugua

SEQ ID NO: 1918005 - RNA, 12 nt, Human
cugacccacugc

SEQ ID NO: 1918006 - RNA, 21 nt, Human
cugaccaauauuguacaguuu

SEQ ID NO: 1918007 - RNA, 20 nt, Human
cugaccaauauuguacaguu

SEQ ID NO: 1918008 - RNA, 19 nt, Human
cugaccaauauuguacagu

SEQ ID NO: 1918009 - RNA, 14 nt, Human
cugacccacugcuu

SEQ ID NO: 1918010 - RNA, 13 nt, Human
cugacccacugcu

SEQ ID NO: 1918011 - RNA, 13 nt, Human
cugacccaugcug

SEQ ID NO: 1918012 - RNA, 21 nt, Human
cugacccagccccuugagaaa

SEQ ID NO: 1918013 - RNA, 16 nt, Human
cugacccaugcugccc

SEQ ID NO: 1918014 - RNA, 14 nt, Human
cugacccaugcugc

SEQ ID NO: 1918015 - RNA, 15 nt, Human
cugacccaugcugcc

SEQ ID NO: 1918016 - RNA, 21 nt, Human
cugagccuuguaauucuaaau

SEQ ID NO: 1918017 - RNA, 15 nt, Human
cugagcgccaggaug

SEQ ID NO: 1918018 - RNA, 15 nt, Human
cugagcgccuggguc

SEQ ID NO: 1918019 - RNA, 14 nt, Human
cugagcgcuccugc

SEQ ID NO: 1918020 - RNA, 22 nt, Human
cugagcgccuggguccagggga

SEQ ID NO: 1918021 - RNA, 16 nt, Human
cugagccuuguaauuc

SEQ ID NO: 1918022 - RNA, 15 nt, Human
cugagccuuguaauu

SEQ ID NO: 1918023 - RNA, 20 nt, Human
cugagcgacagugagacucu

SEQ ID NO: 1918024 - RNA, 16 nt, Human
cugagcgacagugaga

SEQ ID NO: 1918025 - RNA, 12 nt, Human
cugagccucugc

SEQ ID NO: 1918026 - RNA, 14 nt, Human
cugagccucugcuc

SEQ ID NO: 1918027 - RNA, 15 nt, Human
cugagccucugcucc

SEQ ID NO: 1918028 - RNA, 16 nt, Human
cugagccucugcuccc

SEQ ID NO: 1918029 - RNA, 18 nt, Human
cugagccucugcucccca

SEQ ID NO: 1918030 - RNA, 22 nt, Human
cugagccagugucaggaggaag

SEQ ID NO: 1918031 - RNA, 16 nt, Human
cugagccagugucagg

SEQ ID NO: 1918032 - RNA, 16 nt, Human
cugagacagcccgggc

SEQ ID NO: 1918033 - RNA, 17 nt, Human
cugagacagcccgggcu

SEQ ID NO: 1918034 - RNA, 18 nt, Human
cugagacagcccgggcuc

SEQ ID NO: 1918035 - RNA, 17 nt, Human
cugagccagauuucacu

SEQ ID NO: 1918036 - RNA, 18 nt, Human
cugagccagauuucacuc

SEQ ID NO: 1918037 - RNA, 19 nt, Human
cugagccagauuucacucu

SEQ ID NO: 1918038 - RNA, 20 nt, Human
cugagccagauuucacucuc

SEQ ID NO: 1918039 - RNA, 21 nt, Human
cugagccagauuucacucucc

SEQ ID NO: 1918040 - RNA, 19 nt, Human
cugaggaucagaguaaucc

SEQ ID NO: 1918041 - RNA, 12 nt, Human
cugaggcaagag

SEQ ID NO: 1918042 - RNA, 16 nt, Human
cugaggcaagagaauu

SEQ ID NO: 1918043 - RNA, 17 nt, Human
cugaggaucagaguaau

SEQ ID NO: 1918044 - RNA, 17 nt, Human
cugagcucuuugcacua

SEQ ID NO: 1918045 - RNA, 12 nt, Human
cugaggccacac

SEQ ID NO: 1918046 - RNA, 14 nt, Human
cugaggccacacuc

SEQ ID NO: 1918047 - RNA, 20 nt, Human
cugaggccacacucagcaca

SEQ ID NO: 1918048 - RNA, 21 nt, Human
cugaggccacacucagcacaa

SEQ ID NO: 1918049 - RNA, 24 nt, Human
cugaggccacacucagcacaaggc

SEQ ID NO: 1918050 - RNA, 19 nt, Human
cugaggcagguccccagac

SEQ ID NO: 1918051 - RNA, 18 nt, Human
cugaggcagguccccaga

SEQ ID NO: 1918052 - RNA, 17 nt, Human
cugaggcagguccccag

SEQ ID NO: 1918053 - RNA, 14 nt, Human
cugaggcagguccc

SEQ ID NO: 1918054 - RNA, 12 nt, Human
cugaggcccaga

SEQ ID NO: 1918055 - RNA, 13 nt, Human
cugaggcccagag

SEQ ID NO: 1918056 - RNA, 14 nt, Human
cugaggcccagagg

SEQ ID NO: 1918057 - RNA, 15 nt, Human
cugaggcccagaggg

SEQ ID NO: 1918058 - RNA, 16 nt, Human
cugaggcccagagggc

SEQ ID NO: 1918059 - RNA, 17 nt, Human
cugaggcccagagggcc

SEQ ID NO: 1918060 - RNA, 18 nt, Human
cugaggcccagagggccu

SEQ ID NO: 1918061 - RNA, 19 nt, Human
cugaggcccagagggccug

SEQ ID NO: 1918062 - RNA, 21 nt, Human
cugaggcccagagggccugca

SEQ ID NO: 1918063 - RNA, 23 nt, Human
cugaggcccagagggccugcaag

SEQ ID NO: 1918064 - RNA, 14 nt, Human
cugaggcccuucuc

SEQ ID NO: 1918065 - RNA, 15 nt, Human
cugaggcccuucucu

SEQ ID NO: 1918066 - RNA, 18 nt, Human
cugaggcccuucucucca

SEQ ID NO: 1918067 - RNA, 19 nt, Human
cugaggcccuucucuccag

SEQ ID NO: 1918068 - RNA, 20 nt, Human
cugaggcccuucucuccagc

SEQ ID NO: 1918069 - RNA, 22 nt, Human
cucuuuauauggccucaagauc

SEQ ID NO: 1918070 - RNA, 13 nt, Human
cucuuucccuccc

SEQ ID NO: 1918071 - RNA, 17 nt, Human
cucuuucccucccuucc

SEQ ID NO: 1918072 - RNA, 23 nt, Human
cucuuuaaugucacaggcagguc

SEQ ID NO: 1918073 - RNA, 22 nt, Human
cucuuuaaugucacaggcaggu

SEQ ID NO: 1918074 - RNA, 21 nt, Human
cucuuuaaugucacaggcagg

SEQ ID NO: 1918075 - RNA, 20 nt, Human
cucuuuaaugucacaggcag

SEQ ID NO: 1918076 - RNA, 18 nt, Human
cucuuuaaugucacaggc

SEQ ID NO: 1918077 - RNA, 13 nt, Human
cucuugguccugc

SEQ ID NO: 1918078 - RNA, 15 nt, Human
cucuugguccugcug

SEQ ID NO: 1918079 - RNA, 16 nt, Human
cucuugguccugcugc

SEQ ID NO: 1918080 - RNA, 17 nt, Human
cucuugguccugcugca

SEQ ID NO: 1918081 - RNA, 19 nt, Human
cucuuggguucaagcgauu

SEQ ID NO: 1918082 - RNA, 21 nt, Human
cucuuggguucaagcgauucu

SEQ ID NO: 1918083 - RNA, 19 nt, Human
cucuuggguucaagugauu

SEQ ID NO: 1918084 - RNA, 22 nt, Human
cucuugaaauauaggaacuuaa

SEQ ID NO: 1918085 - RNA, 22 nt, Human
cucuucuuuuagcaguaaaaua

SEQ ID NO: 1918086 - RNA, 13 nt, Human
cugaacucacuuu

SEQ ID NO: 1918087 - RNA, 19 nt, Human
cugaagaauugaaaaacca

SEQ ID NO: 1918088 - RNA, 19 nt, Human
cugaacugauggguuucuc

SEQ ID NO: 1918089 - RNA, 13 nt, Human
cugaacugaacac

SEQ ID NO: 1918090 - RNA, 20 nt, Human
cugaacaccauugaaggcuu

SEQ ID NO: 1918091 - RNA, 16 nt, Human
cugaaauuuccuggga

SEQ ID NO: 1918092 - RNA, 19 nt, Human
cugaacaccauugaaggcu

SEQ ID NO: 1918093 - RNA, 18 nt, Human
cugaacaccauugaaggc

SEQ ID NO: 1918094 - RNA, 11 nt, Human
cugaacaccau

SEQ ID NO: 1918095 - RNA, 23 nt, Human
cugaaauuuccugggagcuuuug

SEQ ID NO: 1918096 - RNA, 13 nt, Human
cugaaauuuccug

SEQ ID NO: 1918097 - RNA, 15 nt, Human
cugaaagcccugagc

SEQ ID NO: 1918098 - RNA, 12 nt, Human
cucuuugcacua

SEQ ID NO: 1918099 - RNA, 17 nt, Human
cucuuucuauuguuucu

SEQ ID NO: 1918100 - RNA, 15 nt, Human
cucuuucuguauaua

SEQ ID NO: 1918101 - RNA, 16 nt, Human
cucuuuccuccuucca

SEQ ID NO: 1918102 - RNA, 19 nt, Human
cugaaauauacacacagca

SEQ ID NO: 1918103 - RNA, 18 nt, Human
cugaaauauacacacagc

SEQ ID NO: 1918104 - RNA, 23 nt, Human
cugaaagcccugagcuuucugcu

SEQ ID NO: 1918105 - RNA, 21 nt, Human
cugaaauaaacgucuuaaaua

SEQ ID NO: 1918106 - RNA, 16 nt, Human
cugaaagcccugagcu

SEQ ID NO: 1918107 - RNA, 17 nt, Human
cugaaagcccugagcuu

SEQ ID NO: 1918108 - RNA, 18 nt, Human
cugaaagcccugagcuuu

SEQ ID NO: 1918109 - RNA, 19 nt, Human
cugaaagcccugagcuuuc

SEQ ID NO: 1918110 - RNA, 18 nt, Human
cucugugagacucgagaa

SEQ ID NO: 1918111 - RNA, 17 nt, Human
cucugugagacucgaga

SEQ ID NO: 1918112 - RNA, 13 nt, Human
cucugugagacuc

SEQ ID NO: 1918113 - RNA, 22 nt, Human
cucugugcccacccuccacucu

SEQ ID NO: 1918114 - RNA, 15 nt, Human
cucugugccuucuuu

SEQ ID NO: 1918115 - RNA, 16 nt, Human
cucugugccuucuuuu

SEQ ID NO: 1918116 - RNA, 13 nt, Human
cucuuccaggcug

SEQ ID NO: 1918117 - RNA, 14 nt, Human
cucuuccaggcugg

SEQ ID NO: 1918118 - RNA, 15 nt, Human
cucuuccaggcuggg

SEQ ID NO: 1918119 - RNA, 13 nt, Human
cucuuagaaaaac

SEQ ID NO: 1918120 - RNA, 15 nt, Human
cucuuagaaaaacca

SEQ ID NO: 1918121 - RNA, 15 nt, Human
cucugugucaggugg

SEQ ID NO: 1918122 - RNA, 19 nt, Human
cucugugucagguggggca

SEQ ID NO: 1918123 - RNA, 12 nt, Human
cucuggcagcuc

SEQ ID NO: 1918124 - RNA, 14 nt, Human
cucuggcagcucag

SEQ ID NO: 1918125 - RNA, 20 nt, Human
cucuggaguggccacuaagc

SEQ ID NO: 1918126 - RNA, 12 nt, Human
cucuggaguggc

SEQ ID NO: 1918127 - RNA, 14 nt, Human
cucuggaguggcca

SEQ ID NO: 1918128 - RNA, 15 nt, Human
cucuggaguggccac

SEQ ID NO: 1918129 - RNA, 16 nt, Human
cucuggaguggccacu

SEQ ID NO: 1918130 - RNA, 22 nt, Human
cucuggacaggcauguucucug

SEQ ID NO: 1918131 - RNA, 16 nt, Human
cucuggacaggcaugu

SEQ ID NO: 1918132 - RNA, 19 nt, Human
cucuggagcccacuguacu

SEQ ID NO: 1918133 - RNA, 19 nt, Human
cucuggccuucggccucca

SEQ ID NO: 1918134 - RNA, 15 nt, Human
cucuggcagcucaga

SEQ ID NO: 1918135 - RNA, 16 nt, Human
cucuggcagcucagag

SEQ ID NO: 1918136 - RNA, 12 nt, Human
cucuggccuucg

SEQ ID NO: 1918137 - RNA, 15 nt, Human
cucuggacaggcaug

SEQ ID NO: 1918138 - RNA, 17 nt, Human
cucugcuugagucaggu

SEQ ID NO: 1918139 - RNA, 18 nt, Human
cucugcuugagucagguu

SEQ ID NO: 1918140 - RNA, 14 nt, Human
cucugcuuuaaagu

SEQ ID NO: 1918141 - RNA, 13 nt, Human
cucugcuuugaaa

SEQ ID NO: 1918142 - RNA, 19 nt, Human
cucugcuugacaacaucug

SEQ ID NO: 1918143 - RNA, 22 nt, Human
cucugccugaagucacacagug

SEQ ID NO: 1918144 - RNA, 21 nt, Human
cucugccugaagucacacagu

SEQ ID NO: 1918145 - RNA, 16 nt, Human
cucucugaaccccucc

SEQ ID NO: 1918146 - RNA, 13 nt, Human
cucucuccucccu

SEQ ID NO: 1918147 - RNA, 21 nt, Human
cuggccacgcagccaggacac

SEQ ID NO: 1918148 - RNA, 20 nt, Human
cuggccacgcagccaggaca

SEQ ID NO: 1918149 - RNA, 18 nt, Human
cuggccacgcagccagga

SEQ ID NO: 1918150 - RNA, 15 nt, Human
cuggccacgcagcca

SEQ ID NO: 1918151 - RNA, 14 nt, Human
cuggccacgcagcc

SEQ ID NO: 1918152 - RNA, 24 nt, Human
cuggcaugggaaugaaugucagug

SEQ ID NO: 1918153 - RNA, 18 nt, Human
cuggcaugcuaaagccuu

SEQ ID NO: 1918154 - RNA, 17 nt, Human
cuggcaugauccaagca

SEQ ID NO: 1918155 - RNA, 18 nt, Human
cuggcaugauccaagcaa

SEQ ID NO: 1918156 - RNA, 22 nt, Human
cuggcacuauaauguaagcucu

SEQ ID NO: 1918157 - RNA, 15 nt, Human
cuggcacuauaaugu

SEQ ID NO: 1918158 - RNA, 16 nt, Human
cuggcacuauaaugua

SEQ ID NO: 1918159 - RNA, 16 nt, Human
cuggcaugggaaugaa

SEQ ID NO: 1918160 - RNA, 18 nt, Human
cuggcaugggaaugaaug

SEQ ID NO: 1918161 - RNA, 19 nt, Human
cuggcaugggaaugaaugu

SEQ ID NO: 1918162 - RNA, 22 nt, Human
cuggcaugggaaugaaugucag

SEQ ID NO: 1918163 - RNA, 18 nt, Human
cuggcacccggccccugc

SEQ ID NO: 1918164 - RNA, 17 nt, Human
cuggcacccggccccug

SEQ ID NO: 1918165 - RNA, 16 nt, Human
cuggcacccggccccu

SEQ ID NO: 1918166 - RNA, 20 nt, Human
cuggaagugcuaauuuugaa

SEQ ID NO: 1918167 - RNA, 18 nt, Human
cuggaauauauaaccagu

SEQ ID NO: 1918168 - RNA, 17 nt, Human
cuggaaucuggagacca

SEQ ID NO: 1918169 - RNA, 18 nt, Human
cuggaaucuggagaccag

SEQ ID NO: 1918170 - RNA, 19 nt, Human
cuggaaucuggagaccagg

SEQ ID NO: 1918171 - RNA, 14 nt, Human
cuggcaagaaugug

SEQ ID NO: 1918172 - RNA, 24 nt, Human
cuggaaucuggagaccagggagcc

SEQ ID NO: 1918173 - RNA, 23 nt, Human
cuggccucaagugauucuccugc

SEQ ID NO: 1918174 - RNA, 21 nt, Human
cuggccccaggaccuggcugc

SEQ ID NO: 1918175 - RNA, 12 nt, Human
cuggccucugca

SEQ ID NO: 1918176 - RNA, 16 nt, Human
cuggccucccaaauga

SEQ ID NO: 1918177 - RNA, 13 nt, Human
cuggccucccaca

SEQ ID NO: 1918178 - RNA, 14 nt, Human
cuggccucccacag

SEQ ID NO: 1918179 - RNA, 14 nt, Human
cuggccucccaaau

SEQ ID NO: 1918180 - RNA, 16 nt, Human
cuggccccaggaccug

SEQ ID NO: 1918181 - RNA, 20 nt, Human
cuggccccaggaccuggcug

SEQ ID NO: 1918182 - RNA, 14 nt, Human
cuggccuggccccu

SEQ ID NO: 1918183 - RNA, 15 nt, Human
cuggccugagcuggg

SEQ ID NO: 1918184 - RNA, 18 nt, Human
cuggccugagcugggaug

SEQ ID NO: 1918185 - RNA, 13 nt, Human
cuggccucugcac

SEQ ID NO: 1918186 - RNA, 14 nt, Human
cuggccucugcacu

SEQ ID NO: 1918187 - RNA, 16 nt, Human
cuggccucugcacucc

SEQ ID NO: 1918188 - RNA, 16 nt, Human
cuggccugagcuggga

SEQ ID NO: 1918189 - RNA, 16 nt, Human
cuggccuggccccuca

SEQ ID NO: 1918190 - RNA, 17 nt, Human
cuggccuggccccucag

SEQ ID NO: 1918191 - RNA, 15 nt, Human
cuggccuucggccuc

SEQ ID NO: 1918192 - RNA, 21 nt, Human
cuggccuucggccuccauccu

SEQ ID NO: 1918193 - RNA, 18 nt, Human
cuggccuucggccuccau

SEQ ID NO: 1918194 - RNA, 17 nt, Human
cuggccuucggccucca

SEQ ID NO: 1918195 - RNA, 16 nt, Human
cuggccuucggccucc

SEQ ID NO: 1918196 - RNA, 19 nt, Human
cugggagccgggccgcaga

SEQ ID NO: 1918197 - RNA, 16 nt, Human
cugggagccuacccac

SEQ ID NO: 1918198 - RNA, 22 nt, Human
cugggagccuacccacccccag

SEQ ID NO: 1918199 - RNA, 19 nt, Human
cugggagccuacccacccc

SEQ ID NO: 1918200 - RNA, 15 nt, Human
cugggagauucaagg

SEQ ID NO: 1918201 - RNA, 19 nt, Human
cugggagauucaagggacc

SEQ ID NO: 1918202 - RNA, 18 nt, Human
cugggaggcucuggagcc

SEQ ID NO: 1918203 - RNA, 20 nt, Human
cugggaggcucuggagccca

SEQ ID NO: 1918204 - RNA, 21 nt, Human
cugggaggcucuggagcccac

SEQ ID NO: 1918205 - RNA, 17 nt, Human
cugggaggcucuggagc

SEQ ID NO: 1918206 - RNA, 22 nt, Human
cugggaggcucuggagcccacu

SEQ ID NO: 1918207 - RNA, 19 nt, Human
cugggaggucaaggcugca

SEQ ID NO: 1918208 - RNA, 21 nt, Human
cugggaggucaaggcugcagu

SEQ ID NO: 1918209 - RNA, 17 nt, Human
cugggauuacaggugug

SEQ ID NO: 1918210 - RNA, 20 nt, Human
cugggaugggaggagaggac

SEQ ID NO: 1918211 - RNA, 20 nt, Human
cugggauuacaggugugaac

SEQ ID NO: 1918212 - RNA, 20 nt, Human
cugggaucccucauccucau

SEQ ID NO: 1918213 - RNA, 18 nt, Human
cugggaugauuggagggg

SEQ ID NO: 1918214 - RNA, 15 nt, Human
cuggcgccuccgagg

SEQ ID NO: 1918215 - RNA, 13 nt, Human
cuggcuggaguga

SEQ ID NO: 1918216 - RNA, 13 nt, Human
cuggcugucgaga

SEQ ID NO: 1918217 - RNA, 17 nt, Human
cuggcuguuggcugggg

SEQ ID NO: 1918218 - RNA, 16 nt, Human
cuggcuguuggcuggg

SEQ ID NO: 1918219 - RNA, 20 nt, Human
cuggcugguuagagguuccc

SEQ ID NO: 1918220 - RNA, 12 nt, Human
cuggcugggacg

SEQ ID NO: 1918221 - RNA, 16 nt, Human
cuggcugggacguggc

SEQ ID NO: 1918222 - RNA, 19 nt, Human
cuggcugggacguggcuca

SEQ ID NO: 1918223 - RNA, 21 nt, Human
cuggcugggacguggcucagc

SEQ ID NO: 1918224 - RNA, 23 nt, Human
cuggcugggacguggcucagcca

SEQ ID NO: 1918225 - RNA, 18 nt, Human
cuggcuguuggcuggggg

SEQ ID NO: 1918226 - RNA, 11 nt, Human
cuggcuuuggc

SEQ ID NO: 1918227 - RNA, 14 nt, Human
cuggcuuuggcuuc

SEQ ID NO: 1918228 - RNA, 19 nt, Human
cuggcuuuuuauuguauuu

SEQ ID NO: 1918229 - RNA, 11 nt, Human
cugggaaacag

SEQ ID NO: 1918230 - RNA, 15 nt, Human
cugggaaacagaggc

SEQ ID NO: 1918231 - RNA, 16 nt, Human
cugggaaacagaggcu

SEQ ID NO: 1918232 - RNA, 17 nt, Human
cugggagagccuuccag

SEQ ID NO: 1918233 - RNA, 18 nt, Human
cugggagagccuuccagg

SEQ ID NO: 1918234 - RNA, 21 nt, Human
cugggagagccuuccaggggu

SEQ ID NO: 1918235 - RNA, 19 nt, Human
cugggagagccuuccaggg

SEQ ID NO: 1918236 - RNA, 20 nt, Human
cugggagagccuuccagggg

SEQ ID NO: 1918237 - RNA, 13 nt, Human
cugguccacaggg

SEQ ID NO: 1918238 - RNA, 13 nt, Human
cuggucagcccaa

SEQ ID NO: 1918239 - RNA, 12 nt, Human
cuggucagccca

SEQ ID NO: 1918240 - RNA, 16 nt, Human
cugguccacagggcac

SEQ ID NO: 1918241 - RNA, 22 nt, Human
cugguccacagggcaccugcca

SEQ ID NO: 1918242 - RNA, 13 nt, Human
cuggucccacuca

SEQ ID NO: 1918243 - RNA, 17 nt, Human
cuggucagguauuucag

SEQ ID NO: 1918244 - RNA, 14 nt, Human
cuggucccacucag

SEQ ID NO: 1918245 - RNA, 23 nt, Human
cuggucucaaacucuugaccuca

SEQ ID NO: 1918246 - RNA, 14 nt, Human
cuggguacuugugg

SEQ ID NO: 1918247 - RNA, 16 nt, Human
cuggguacuuguggac

SEQ ID NO: 1918248 - RNA, 18 nt, Human
cuggguacuuguggacac

SEQ ID NO: 1918249 - RNA, 19 nt, Human
cuggguacuuguggacaca

SEQ ID NO: 1918250 - RNA, 20 nt, Human
cugggcucccuucccaccuc

SEQ ID NO: 1918251 - RNA, 21 nt, Human
cugggcucccuucccaccucu

SEQ ID NO: 1918252 - RNA, 22 nt, Human
cugggcucccuucccaccucuc

SEQ ID NO: 1918253 - RNA, 15 nt, Human
cuggguuggagggug

SEQ ID NO: 1918254 - RNA, 17 nt, Human
cugggucgcccuggacu

SEQ ID NO: 1918255 - RNA, 18 nt, Human
cugggucgcccuggacug

SEQ ID NO: 1918256 - RNA, 22 nt, Human
cugggucgcccuggacugugug

SEQ ID NO: 1918257 - RNA, 23 nt, Human
cuguacaugaaaacacauuuuuc

SEQ ID NO: 1918258 - RNA, 22 nt, Human
cuguacaugaaaacacauuuuu

SEQ ID NO: 1918259 - RNA, 21 nt, Human
cuguaccucuugagccuugaa

SEQ ID NO: 1918260 - RNA, 23 nt, Human
cuguaccaugugcuacaggggcc

SEQ ID NO: 1918261 - RNA, 17 nt, Human
cuguaauuugugauaca

SEQ ID NO: 1918262 - RNA, 18 nt, Human
cuguaauuugugauacaa

SEQ ID NO: 1918263 - RNA, 22 nt, Human
cuguaauuugugauacaaugcu

SEQ ID NO: 1918264 - RNA, 21 nt, Human
cuguaauuugugauacaaugc

SEQ ID NO: 1918265 - RNA, 23 nt, Human
cuguacagagcccacgcccccac

SEQ ID NO: 1918266 - RNA, 16 nt, Human
cugguggcagcucacc

SEQ ID NO: 1918267 - RNA, 13 nt, Human
cugguggcagcuc

SEQ ID NO: 1918268 - RNA, 14 nt, Human
cugguggcagcuca

SEQ ID NO: 1918269 - RNA, 12 nt, Human
cugguggcagcu

SEQ ID NO: 1918270 - RNA, 20 nt, Human
cugguucaggguuggccccu

SEQ ID NO: 1918271 - RNA, 18 nt, Human
cuguaaggcaaucauggu

SEQ ID NO: 1918272 - RNA, 18 nt, Human
cuguaucccaugagccuc

SEQ ID NO: 1918273 - RNA, 19 nt, Human
cuguaucccaugagccuca

SEQ ID NO: 1918274 - RNA, 13 nt, Human
cuguauauacuuu

SEQ ID NO: 1918275 - RNA, 20 nt, Human
cuguaugucucgugguagga

SEQ ID NO: 1918276 - RNA, 16 nt, Human
cuguauuugagaauau

SEQ ID NO: 1918277 - RNA, 15 nt, Human
cuguaucccaugagc

SEQ ID NO: 1918278 - RNA, 14 nt, Human
cuguaucccaugag

SEQ ID NO: 1918279 - RNA, 22 nt, Human
cuguaccucuugagccuugaac

SEQ ID NO: 1918280 - RNA, 14 nt, Human
cuguaccucugccu

SEQ ID NO: 1918281 - RNA, 22 nt, Human
cugucccagugccgagaaggaa

SEQ ID NO: 1918282 - RNA, 18 nt, Human
cugucucuacuaaaaaua

SEQ ID NO: 1918283 - RNA, 12 nt, Human
cugucuccuggc

SEQ ID NO: 1918284 - RNA, 21 nt, Human
cuguccuacucugugucaggu

SEQ ID NO: 1918285 - RNA, 22 nt, Human
cugucucaaaaaaagaaaaaga

SEQ ID NO: 1918286 - RNA, 20 nt, Human
cuguccuacucugugucagg

SEQ ID NO: 1918287 - RNA, 18 nt, Human
cuguccuacucuguguca

SEQ ID NO: 1918288 - RNA, 17 nt, Human
cuguccuacucuguguc

SEQ ID NO: 1918289 - RNA, 16 nt, Human
cuguccuacucugugu

SEQ ID NO: 1918290 - RNA, 13 nt, Human
cugucccccugac

SEQ ID NO: 1918291 - RNA, 14 nt, Human
cugucccccugaca

SEQ ID NO: 1918292 - RNA, 19 nt, Human
cugucccuaguaaaaauac

SEQ ID NO: 1918293 - RNA, 21 nt, Human
cugucccuaguaaaaauacaa

SEQ ID NO: 1918294 - RNA, 15 nt, Human
cugccugcaccccug

SEQ ID NO: 1918295 - RNA, 19 nt, Human
cugccugaagucacacagu

SEQ ID NO: 1918296 - RNA, 23 nt, Human
cugccugaagucacacagugagu

SEQ ID NO: 1918297 - RNA, 21 nt, Human
cugccugccagcugcacugau

SEQ ID NO: 1918298 - RNA, 15 nt, Human
cugccugccagcugc

SEQ ID NO: 1918299 - RNA, 16 nt, Human
cugccugccagcugca

SEQ ID NO: 1918300 - RNA, 20 nt, Human
cugccugccagcugcacuga

SEQ ID NO: 1918301 - RNA, 16 nt, Human
cugccugaagucacac

SEQ ID NO: 1918302 - RNA, 18 nt, Human
cugccugaagucacacag

SEQ ID NO: 1918303 - RNA, 21 nt, Human
cugcccugcccaccuggccuc

SEQ ID NO: 1918304 - RNA, 20 nt, Human
cugcccugcccaccuggccu

SEQ ID NO: 1918305 - RNA, 17 nt, Human
cugcccugcccaccugg

SEQ ID NO: 1918306 - RNA, 23 nt, Human
cugcgguccacccaggagccccg

SEQ ID NO: 1918307 - RNA, 18 nt, Human
cugcggugcuaucucccc

SEQ ID NO: 1918308 - RNA, 19 nt, Human
cugcggugcuaucuccccc

SEQ ID NO: 1918309 - RNA, 22 nt, Human
cugccugcuuuuuauggccugu

SEQ ID NO: 1918310 - RNA, 18 nt, Human
cugcgcccaguccuucca

SEQ ID NO: 1918311 - RNA, 19 nt, Human
cugcgcccaguccuuccac

SEQ ID NO: 1918312 - RNA, 23 nt, Human
cugcgcccaguccuuccaccucg

SEQ ID NO: 1918313 - RNA, 15 nt, Human
cugcucuccgaccag

SEQ ID NO: 1918314 - RNA, 20 nt, Human
cugcuccucuccccagcaag

SEQ ID NO: 1918315 - RNA, 19 nt, Human
cugcuccucuccccagcaa

SEQ ID NO: 1918316 - RNA, 23 nt, Human
cugcuccucuccccagcaaguga

SEQ ID NO: 1918317 - RNA, 20 nt, Human
cugcggugcuaucuccccca

SEQ ID NO: 1918318 - RNA, 21 nt, Human
cugcggugcuaucucccccag

SEQ ID NO: 1918319 - RNA, 22 nt, Human
cugcggugcuaucucccccagc

SEQ ID NO: 1918320 - RNA, 23 nt, Human
cugcggugcuaucucccccagcc

SEQ ID NO: 1918321 - RNA, 16 nt, Human
cugcuccccaggggag

SEQ ID NO: 1918322 - RNA, 22 nt, Human
cugcgggugaacaaagcagcca

SEQ ID NO: 1918323 - RNA, 23 nt, Human
cugcgggugaacaaagcagccac

SEQ ID NO: 1918324 - RNA, 12 nt, Human
cugcucugguua

SEQ ID NO: 1918325 - RNA, 15 nt, Human
cugcucugugcccac

SEQ ID NO: 1918326 - RNA, 14 nt, Human
cugcugccugcuuu

SEQ ID NO: 1918327 - RNA, 23 nt, Human
cugcugccugcuuuuuauggccu

SEQ ID NO: 1918328 - RNA, 15 nt, Human
cugcugcaguugcca

SEQ ID NO: 1918329 - RNA, 14 nt, Human
cugcugcaguugcc

SEQ ID NO: 1918330 - RNA, 10 nt, Human
cugcugcagu

SEQ ID NO: 1918331 - RNA, 13 nt, Human
cugcugcaguugc

SEQ ID NO: 1918332 - RNA, 14 nt, Human
cugcugcugcugug

SEQ ID NO: 1918333 - RNA, 12 nt, Human
cugcugcuggcu

SEQ ID NO: 1918334 - RNA, 13 nt, Human
cugcugcuggcug

SEQ ID NO: 1918335 - RNA, 14 nt, Human
cugcugcuggcugg

SEQ ID NO: 1918336 - RNA, 14 nt, Human
cugcuggguguggc

SEQ ID NO: 1918337 - RNA, 15 nt, Human
cugcuggguguggcg

SEQ ID NO: 1918338 - RNA, 17 nt, Human
cugcuggguguggcgca

SEQ ID NO: 1918339 - RNA, 13 nt, Human
cugcuugaggcaa

SEQ ID NO: 1918340 - RNA, 20 nt, Human
cugcuugaggcaacucaucu

SEQ ID NO: 1918341 - RNA, 21 nt, Human
cugcuugaggcaacucaucuu

SEQ ID NO: 1918342 - RNA, 17 nt, Human
cugcuugacaacaucug

SEQ ID NO: 1918343 - RNA, 22 nt, Human
cugcuguaaauuuggcuucugu

SEQ ID NO: 1918344 - RNA, 15 nt, Human
cugcuuuuggucugu

SEQ ID NO: 1918345 - RNA, 20 nt, Human
cugcuuugggaagccgugcu

SEQ ID NO: 1918346 - RNA, 17 nt, Human
cugcuuuuggucugugu

SEQ ID NO: 1918347 - RNA, 19 nt, Human
cugcuuuugucuaugggac

SEQ ID NO: 1918348 - RNA, 17 nt, Human
cuggaagcuaauuugca

SEQ ID NO: 1918349 - RNA, 16 nt, Human
cuggaaguccaaugug

SEQ ID NO: 1918350 - RNA, 19 nt, Human
cuggaaguccaauguggca

SEQ ID NO: 1918351 - RNA, 18 nt, Human
cuggaagcuaauuugcau

SEQ ID NO: 1918352 - RNA, 19 nt, Human
cuggaagcuaauuugcauu

SEQ ID NO: 1918353 - RNA, 22 nt, Human
cuggaagcuaauuugcauuaaa

SEQ ID NO: 1918354 - RNA, 19 nt, Human
cugcuugggcuucauccuc

SEQ ID NO: 1918355 - RNA, 19 nt, Human
cugcuugugaaaggaaaga

SEQ ID NO: 1918356 - RNA, 13 nt, Human
cugcuugggcuuc

SEQ ID NO: 1918357 - RNA, 15 nt, Human
cugcuugggcuucau

SEQ ID NO: 1918358 - RNA, 17 nt, Human
cugcuugggcuucaucc

SEQ ID NO: 1918359 - RNA, 18 nt, Human
cugcuugggcuucauccu

SEQ ID NO: 1918360 - RNA, 22 nt, Human
cugcuugaggcaacucaucuua

SEQ ID NO: 1918361 - RNA, 20 nt, Human
cugcuugcuugcuuuuuaau

SEQ ID NO: 1918362 - RNA, 23 nt, Human
cugccacccugggccuggcagcu

SEQ ID NO: 1918363 - RNA, 21 nt, Human
cugccacccuggggagaaagu

SEQ ID NO: 1918364 - RNA, 16 nt, Human
cugccacccugggccu

SEQ ID NO: 1918365 - RNA, 17 nt, Human
cugccacccugggccug

SEQ ID NO: 1918366 - RNA, 14 nt, Human
cugccacccugggg

SEQ ID NO: 1918367 - RNA, 12 nt, Human
cugccacccugg

SEQ ID NO: 1918368 - RNA, 19 nt, Human
cugccagacccccuggaga

SEQ ID NO: 1918369 - RNA, 17 nt, Human
cugccagacccccugga

SEQ ID NO: 1918370 - RNA, 17 nt, Human
cugcauacccgggcagg

SEQ ID NO: 1918371 - RNA, 16 nt, Human
cugcauaccaaccugg

SEQ ID NO: 1918372 - RNA, 15 nt, Human
cugcauaugaaagga

SEQ ID NO: 1918373 - RNA, 15 nt, Human
cugcauaccaaccug

SEQ ID NO: 1918374 - RNA, 20 nt, Human
cugcaucaagaugugacaug

SEQ ID NO: 1918375 - RNA, 14 nt, Human
cugcauauguugaa

SEQ ID NO: 1918376 - RNA, 21 nt, Human
cugcauauguugaauacuuuu

SEQ ID NO: 1918377 - RNA, 20 nt, Human
cugccacccaccucccugcc

SEQ ID NO: 1918378 - RNA, 22 nt, Human
cugccacccaccucccugccuc

SEQ ID NO: 1918379 - RNA, 23 nt, Human
cugccacccaccucccugccucc

SEQ ID NO: 1918380 - RNA, 13 nt, Human
cugccaggaagcc

SEQ ID NO: 1918381 - RNA, 14 nt, Human
cugccaggaagcca

SEQ ID NO: 1918382 - RNA, 20 nt, Human
cugccaggaagccagcaggc

SEQ ID NO: 1918383 - RNA, 21 nt, Human
cugccaggaagccagcaggcu

SEQ ID NO: 1918384 - RNA, 11 nt, Human
cugccagcugc

SEQ ID NO: 1918385 - RNA, 12 nt, Human
cugccagcugca

SEQ ID NO: 1918386 - RNA, 13 nt, Human
cugccagcugcac

SEQ ID NO: 1918387 - RNA, 20 nt, Human
cugccaucucaccuccugcu

SEQ ID NO: 1918388 - RNA, 21 nt, Human
cugccauccagguucagcuug

SEQ ID NO: 1918389 - RNA, 15 nt, Human
cugccauccucccaa

SEQ ID NO: 1918390 - RNA, 22 nt, Human
cugccaggaagccagcaggcuc

SEQ ID NO: 1918391 - RNA, 16 nt, Human
cugccagcugcacuga

SEQ ID NO: 1918392 - RNA, 17 nt, Human
cugccagcugcacugau

SEQ ID NO: 1918393 - RNA, 20 nt, Human
cugcccaggccccugccacc

SEQ ID NO: 1918394 - RNA, 19 nt, Human
cugcccaggccccugccac

SEQ ID NO: 1918395 - RNA, 18 nt, Human
cugcccaggccccugcca

SEQ ID NO: 1918396 - RNA, 16 nt, Human
cugcccaggccccugc

SEQ ID NO: 1918397 - RNA, 13 nt, Human
cugccccaacucu

SEQ ID NO: 1918398 - RNA, 15 nt, Human
cugcccaggccccug

SEQ ID NO: 1918399 - RNA, 14 nt, Human
cugcccaggccccu

SEQ ID NO: 1918400 - RNA, 12 nt, Human
cugcccaccugg

SEQ ID NO: 1918401 - RNA, 15 nt, Human
cugccauuucugaga

SEQ ID NO: 1918402 - RNA, 18 nt, Human
cugccccuggcagccccu

SEQ ID NO: 1918403 - RNA, 19 nt, Human
cugccccuggcagccccug

SEQ ID NO: 1918404 - RNA, 13 nt, Human
cugcccggcaggg

SEQ ID NO: 1918405 - RNA, 20 nt, Human
cugcccggcaggguccuaga

SEQ ID NO: 1918406 - RNA, 21 nt, Human
cugcaguuugagacaggagac

SEQ ID NO: 1918407 - RNA, 19 nt, Human
cugcaguuugagacaggag

SEQ ID NO: 1918408 - RNA, 13 nt, Human
cugcaguugccag

SEQ ID NO: 1918409 - RNA, 16 nt, Human
cugcaguugccaguca

SEQ ID NO: 1918410 - RNA, 16 nt, Human
cugcagugaggcugug

SEQ ID NO: 1918411 - RNA, 19 nt, Human
cugcaggucccuaauaaag

SEQ ID NO: 1918412 - RNA, 20 nt, Human
cugcaggucccuaauaaagc

SEQ ID NO: 1918413 - RNA, 21 nt, Human
cugcaggucccuaauaaagcu

SEQ ID NO: 1918414 - RNA, 22 nt, Human
cugcaggucccuaauaaagcug

SEQ ID NO: 1918415 - RNA, 23 nt, Human
cugcaggucccuaauaaagcugu

SEQ ID NO: 1918416 - RNA, 14 nt, Human
cugcaguaaaucuu

SEQ ID NO: 1918417 - RNA, 17 nt, Human
cugcaguaaaucuuuua

SEQ ID NO: 1918418 - RNA, 11 nt, Human
cugcagguccc

SEQ ID NO: 1918419 - RNA, 12 nt, Human
cugcaggucccu

SEQ ID NO: 1918420 - RNA, 13 nt, Human
cugcaggucccua

SEQ ID NO: 1918421 - RNA, 14 nt, Human
cugcaggucccuaa

SEQ ID NO: 1918422 - RNA, 15 nt, Human
cugcaggucccuaau

SEQ ID NO: 1918423 - RNA, 16 nt, Human
cugcaggucccuaaua

SEQ ID NO: 1918424 - RNA, 17 nt, Human
cugcaggucccuaauaa

SEQ ID NO: 1918425 - RNA, 18 nt, Human
cugcaggucccuaauaaa

SEQ ID NO: 1918426 - RNA, 17 nt, Human
cugcagcaauaaagcag

SEQ ID NO: 1918427 - RNA, 15 nt, Human
cugcaccgggccaca

SEQ ID NO: 1918428 - RNA, 14 nt, Human
cugcaccgggccac

SEQ ID NO: 1918429 - RNA, 15 nt, Human
cugcaccggcuggcc

SEQ ID NO: 1918430 - RNA, 16 nt, Human
cugcaccggcuggccu

SEQ ID NO: 1918431 - RNA, 22 nt, Human
cugaggcccuucucuccagccc

SEQ ID NO: 1918432 - RNA, 23 nt, Human
cugaggcccuucucuccagcccc

SEQ ID NO: 1918433 - RNA, 14 nt, Human
cugcaccggcuggc

SEQ ID NO: 1918434 - RNA, 20 nt, Human
cugcaccgggccacagagaa

SEQ ID NO: 1918435 - RNA, 18 nt, Human
cugcaccgggccacagag

SEQ ID NO: 1918436 - RNA, 20 nt, Human
cugcacuccagccuggguga

SEQ ID NO: 1918437 - RNA, 14 nt, Human
cugcacuccccugc

SEQ ID NO: 1918438 - RNA, 13 nt, Human
cugcacuccccug

SEQ ID NO: 1918439 - RNA, 19 nt, Human
cugcacuccccugcugggu

SEQ ID NO: 1918440 - RNA, 20 nt, Human
cugcacuccccugcugggug

SEQ ID NO: 1918441 - RNA, 10 nt, Human
cugcagaggg

SEQ ID NO: 1918442 - RNA, 15 nt, Human
cugcagacgcccaga

SEQ ID NO: 1918443 - RNA, 16 nt, Human
cugcagcaauaaagca

SEQ ID NO: 1918444 - RNA, 15 nt, Human
cugcagcaauaaagc

SEQ ID NO: 1918445 - RNA, 13 nt, Human
cugcagagggcac

SEQ ID NO: 1918446 - RNA, 21 nt, Human
cugcacuccccugcugggugu

SEQ ID NO: 1918447 - RNA, 22 nt, Human
cugcagaauuuggguucugccu

SEQ ID NO: 1918448 - RNA, 22 nt, Human
cuuucuuuucuggaauguaauc

SEQ ID NO: 1918449 - RNA, 16 nt, Human
cuuucuuucacaaaaa

SEQ ID NO: 1918450 - RNA, 17 nt, Human
cuuuccugaggcugggc

SEQ ID NO: 1918451 - RNA, 16 nt, Human
cuuuccugaggcuggg

SEQ ID NO: 1918452 - RNA, 20 nt, Human
cuuuccugaggcugggcucc

SEQ ID NO: 1918453 - RNA, 21 nt, Human
cuuuccugaggcugggcuccc

SEQ ID NO: 1918454 - RNA, 15 nt, Human
cuuugcagacaggca

SEQ ID NO: 1918455 - RNA, 14 nt, Human
cuuugcagacaggc

SEQ ID NO: 1918456 - RNA, 19 nt, Human
cuuuggaaagaguaggaag

SEQ ID NO: 1918457 - RNA, 23 nt, Human
cuuuggaaagaguaggaagacuu

SEQ ID NO: 1918458 - RNA, 18 nt, Human
cuuucaauaaacuaaaga

SEQ ID NO: 1918459 - RNA, 22 nt, Human
cuuucaauaaacuaaagaaaaa

SEQ ID NO: 1918460 - RNA, 18 nt, Human
cuuucaugaguuuuuccc

SEQ ID NO: 1918461 - RNA, 22 nt, Human
cuuucaugaguuuuucccagcu

SEQ ID NO: 1918462 - RNA, 15 nt, Human
cuuucaaagccauuu

SEQ ID NO: 1918463 - RNA, 17 nt, Human
cuuucaaagccauuuua

SEQ ID NO: 1918464 - RNA, 18 nt, Human
cuugugucuguacacgug

SEQ ID NO: 1918465 - RNA, 15 nt, Human
cuugugucuguacac

SEQ ID NO: 1918466 - RNA, 14 nt, Human
cuugugucuguaca

SEQ ID NO: 1918467 - RNA, 12 nt, Human
cuugugucugua

SEQ ID NO: 1918468 - RNA, 21 nt, Human
cuuguggacacagcucuucuc

SEQ ID NO: 1918469 - RNA, 19 nt, Human
cuuuauuuuguguuuagga

SEQ ID NO: 1918470 - RNA, 17 nt, Human
cuuucauuuacuguggc

SEQ ID NO: 1918471 - RNA, 16 nt, Human
cuuucauuuacugugg

SEQ ID NO: 1918472 - RNA, 16 nt, Human
cuuuccaaaguacacu

SEQ ID NO: 1918473 - RNA, 22 nt, Human
cuuuccaaaguacacuguuuca

SEQ ID NO: 1918474 - RNA, 16 nt, Human
cuuuccaaaugcccag

SEQ ID NO: 1918475 - RNA, 14 nt, Human
cuuuccaggaaggc

SEQ ID NO: 1918476 - RNA, 21 nt, Human
cuuuccacuccuccuagccac

SEQ ID NO: 1918477 - RNA, 18 nt, Human
cuuuccacuccuccuagc

SEQ ID NO: 1918478 - RNA, 23 nt, Human
cuuuccaaagccaaugugaacag

SEQ ID NO: 1918479 - RNA, 21 nt, Human
cuuuccuagauggcagucacu

SEQ ID NO: 1918480 - RNA, 17 nt, Human
cuuuccuaaggcugcaa

SEQ ID NO: 1918481 - RNA, 20 nt, Human
cuuuccuaaggcugcaaggu

SEQ ID NO: 1918482 - RNA, 20 nt, Human
cuuuccuagauggcagucac

SEQ ID NO: 1918483 - RNA, 16 nt, Human
cuuuccuaaggcugca

SEQ ID NO: 1918484 - RNA, 15 nt, Human
cuuuucacaaauaaa

SEQ ID NO: 1918485 - RNA, 14 nt, Human
cuuuucacaaauaa

SEQ ID NO: 1918486 - RNA, 13 nt, Human
cuuuucacaaaua

SEQ ID NO: 1918487 - RNA, 12 nt, Human
cuuuucacaaau

SEQ ID NO: 1918488 - RNA, 22 nt, Human
cuuuucauuuaggugaggaagc

SEQ ID NO: 1918489 - RNA, 13 nt, Human
cuuuuccaacccu

SEQ ID NO: 1918490 - RNA, 23 nt, Human
cuuuuccaacccucaucaccaac

SEQ ID NO: 1918491 - RNA, 20 nt, Human
cuuuucgcaggauucuuccu

SEQ ID NO: 1918492 - RNA, 21 nt, Human
cuuuucgcaggauucuuccuc

SEQ ID NO: 1918493 - RNA, 15 nt, Human
cuuuuaauccuggcu

SEQ ID NO: 1918494 - RNA, 20 nt, Human
cuuuuaacuccucaauucca

SEQ ID NO: 1918495 - RNA, 21 nt, Human
cuuuuaacuccucaauuccaa

SEQ ID NO: 1918496 - RNA, 14 nt, Human
cuuuguuuuuauuu

SEQ ID NO: 1918497 - RNA, 14 nt, Human
cuuuggaggccccu

SEQ ID NO: 1918498 - RNA, 15 nt, Human
cuuuggaagaaaaaa

SEQ ID NO: 1918499 - RNA, 17 nt, Human
cuuuggaagaaaaaauc

SEQ ID NO: 1918500 - RNA, 22 nt, Human
cuuuggagaagaguguggaguc

SEQ ID NO: 1918501 - RNA, 17 nt, Human
cuuuucuuucagccaag

SEQ ID NO: 1918502 - RNA, 16 nt, Human
cuuuucuuucuaccaa

SEQ ID NO: 1918503 - RNA, 13 nt, Human
cuuuucuuuucuu

SEQ ID NO: 1918504 - RNA, 22 nt, Human
cuuuuuaauauugauaugcuua

SEQ ID NO: 1918505 - RNA, 18 nt, Human
cuuuuuuauacauaaaca

SEQ ID NO: 1918506 - RNA, 19 nt, Human
cuuuuuuaucaugugaaau

SEQ ID NO: 1918507 - RNA, 11 nt, Human
gaaaaagaaaa

SEQ ID NO: 1918508 - RNA, 16 nt, Human
gaaaaagaaaaaauau

SEQ ID NO: 1918509 - RNA, 15 nt, Human
cuuuuuuauacauaa

SEQ ID NO: 1918510 - RNA, 17 nt, Human
cuuuuuuauacauaaac

SEQ ID NO: 1918511 - RNA, 16 nt, Human
cuuuuuuauacauaaa

SEQ ID NO: 1918512 - RNA, 16 nt, Human
cuugagccaguaauug

SEQ ID NO: 1918513 - RNA, 13 nt, Human
cuugagccaguaa

SEQ ID NO: 1918514 - RNA, 19 nt, Human
cuugagccuugaacuuuga

SEQ ID NO: 1918515 - RNA, 17 nt, Human
cuugaccauucuccacc

SEQ ID NO: 1918516 - RNA, 20 nt, Human
cuugaccauucuccaccugc

SEQ ID NO: 1918517 - RNA, 14 nt, Human
cuugagagggugga

SEQ ID NO: 1918518 - RNA, 21 nt, Human
cuugaccauucuccaccugcc

SEQ ID NO: 1918519 - RNA, 13 nt, Human
cuugagcucagga

SEQ ID NO: 1918520 - RNA, 22 nt, Human
cuugagccuugaacuuugaccu

SEQ ID NO: 1918521 - RNA, 20 nt, Human
cuugagccuugaacuuugac

SEQ ID NO: 1918522 - RNA, 12 nt, Human
cuugaguaaaau

SEQ ID NO: 1918523 - RNA, 13 nt, Human
cuugaguaaaaua

SEQ ID NO: 1918524 - RNA, 14 nt, Human
cuugaguaaaauaa

SEQ ID NO: 1918525 - RNA, 18 nt, Human
cuugcagacucuacagag

SEQ ID NO: 1918526 - RNA, 21 nt, Human
cuugcaugaggcuaguguggu

SEQ ID NO: 1918527 - RNA, 21 nt, Human
cuugcaugguuuagaaagcuu

SEQ ID NO: 1918528 - RNA, 13 nt, Human
cuugcauauuuug

SEQ ID NO: 1918529 - RNA, 14 nt, Human
cuugcaauggcagc

SEQ ID NO: 1918530 - RNA, 19 nt, Human
cuugcacguauuuuaauag

SEQ ID NO: 1918531 - RNA, 22 nt, Human
cuugcaaaguaucccuacugua

SEQ ID NO: 1918532 - RNA, 16 nt, Human
cuugagucacaaagaa

SEQ ID NO: 1918533 - RNA, 18 nt, Human
cuugaacuccuggccuca

SEQ ID NO: 1918534 - RNA, 17 nt, Human
cuugaacuccuggccuc

SEQ ID NO: 1918535 - RNA, 15 nt, Human
cuugaacuccuggcc

SEQ ID NO: 1918536 - RNA, 14 nt, Human
cuugaacuccuggc

SEQ ID NO: 1918537 - RNA, 20 nt, Human
cuugaacccgggaggcagag

SEQ ID NO: 1918538 - RNA, 19 nt, Human
cuugaacccgggaggcaga

SEQ ID NO: 1918539 - RNA, 14 nt, Human
cuugaacccgggag

SEQ ID NO: 1918540 - RNA, 20 nt, Human
cuugaacuggguacuugugg

SEQ ID NO: 1918541 - RNA, 18 nt, Human
cuugaacuggguacuugu

SEQ ID NO: 1918542 - RNA, 15 nt, Human
cuugaacuuugaccu

SEQ ID NO: 1918543 - RNA, 16 nt, Human
cuugaacuggguacuu

SEQ ID NO: 1918544 - RNA, 19 nt, Human
cuugaacugagcuuggaag

SEQ ID NO: 1918545 - RNA, 17 nt, Human
cuugaacugagcuugga

SEQ ID NO: 1918546 - RNA, 19 nt, Human
cuugaacuccuggccucaa

SEQ ID NO: 1918547 - RNA, 20 nt, Human
cuugaaauuaagaaggcaaa

SEQ ID NO: 1918548 - RNA, 19 nt, Human
cuugaaauauaggaacuua

SEQ ID NO: 1918549 - RNA, 21 nt, Human
cuugaaauuaagaaggcaaaa

SEQ ID NO: 1918550 - RNA, 16 nt, Human
cuucuuuugauuaugu

SEQ ID NO: 1918551 - RNA, 13 nt, Human
cuucuuuugauua

SEQ ID NO: 1918552 - RNA, 14 nt, Human
cuucuuuugauuau

SEQ ID NO: 1918553 - RNA, 23 nt, Human
cuucuuuuagcaguaaaauagcu

SEQ ID NO: 1918554 - RNA, 12 nt, Human
cuucuuuuagca

SEQ ID NO: 1918555 - RNA, 17 nt, Human
cuuguauuaaagacaga

SEQ ID NO: 1918556 - RNA, 13 nt, Human
cuuguauuaaacu

SEQ ID NO: 1918557 - RNA, 23 nt, Human
cuuguauuaaacucuucacaaaa

SEQ ID NO: 1918558 - RNA, 17 nt, Human
cuuguauuaaguuguua

SEQ ID NO: 1918559 - RNA, 13 nt, Human
cuuguauuaaguu

SEQ ID NO: 1918560 - RNA, 23 nt, Human
cuuguauuaaguuguuaauaaaa

SEQ ID NO: 1918561 - RNA, 22 nt, Human
cuuguauuaaguuguuaauaaa

SEQ ID NO: 1918562 - RNA, 13 nt, Human
cuuguauuaugug

SEQ ID NO: 1918563 - RNA, 18 nt, Human
cuuguggacacagcucuu

SEQ ID NO: 1918564 - RNA, 17 nt, Human
cuuguggacacagcucu

SEQ ID NO: 1918565 - RNA, 18 nt, Human
cuuguauuauguguguuu

SEQ ID NO: 1918566 - RNA, 18 nt, Human
cuuguaaaggaauuuaaa

SEQ ID NO: 1918567 - RNA, 22 nt, Human
cuuggggaguuaagaccuggca

SEQ ID NO: 1918568 - RNA, 23 nt, Human
cuuggggaguuaagaccuggcag

SEQ ID NO: 1918569 - RNA, 16 nt, Human
cuuggggaccagagcu

SEQ ID NO: 1918570 - RNA, 17 nt, Human
cuuggggaccagagcug

SEQ ID NO: 1918571 - RNA, 18 nt, Human
cuuggggaccagagcugc

SEQ ID NO: 1918572 - RNA, 19 nt, Human
cuuggggaccagagcugcc

SEQ ID NO: 1918573 - RNA, 17 nt, Human
cuugccaaauauaaaua

SEQ ID NO: 1918574 - RNA, 14 nt, Human
cuugcauugcagag

SEQ ID NO: 1918575 - RNA, 13 nt, Human
cuugcuugcuuuu

SEQ ID NO: 1918576 - RNA, 17 nt, Human
cuugcuuuguguucuuu

SEQ ID NO: 1918577 - RNA, 15 nt, Human
cuugcuuuuaaaauc

SEQ ID NO: 1918578 - RNA, 18 nt, Human
cuugcuuuguguucuuug

SEQ ID NO: 1918579 - RNA, 19 nt, Human
cuugcuuuguguucuuugu

SEQ ID NO: 1918580 - RNA, 13 nt, Human
cuuggcugcaggg

SEQ ID NO: 1918581 - RNA, 12 nt, Human
cuuggcugcagg

SEQ ID NO: 1918582 - RNA, 14 nt, Human
cuuggcucagacau

SEQ ID NO: 1918583 - RNA, 16 nt, Human
cuuggcucagacaugu

SEQ ID NO: 1918584 - RNA, 23 nt, Human
cuuggcucaaguccucuuuucug

SEQ ID NO: 1918585 - RNA, 24 nt, Human
cuuggcucacugcaacuucugccu

SEQ ID NO: 1918586 - RNA, 12 nt, Human
cuuggcucagac

SEQ ID NO: 1918587 - RNA, 13 nt, Human
cuuggauuguccc

SEQ ID NO: 1918588 - RNA, 14 nt, Human
cuuggauugucccc

SEQ ID NO: 1918589 - RNA, 13 nt, Human
cuuggagccugca

SEQ ID NO: 1918590 - RNA, 18 nt, Human
cuuggagccugcagagcu

SEQ ID NO: 1918591 - RNA, 17 nt, Human
cuuggagccugcagagc

SEQ ID NO: 1918592 - RNA, 16 nt, Human
cuuggagccugcagag

SEQ ID NO: 1918593 - RNA, 15 nt, Human
cuuggagccugcaga

SEQ ID NO: 1918594 - RNA, 20 nt, Human
cuuggagccugcagagcugc

SEQ ID NO: 1918595 - RNA, 19 nt, Human
cuuggagccugcagagcug

SEQ ID NO: 1918596 - RNA, 22 nt, Human
gaagaacaucuuuaugguaaag

SEQ ID NO: 1918597 - RNA, 13 nt, Human
gaagaaccagucc

SEQ ID NO: 1918598 - RNA, 18 nt, Human
gaagaacacccucuaaau

SEQ ID NO: 1918599 - RNA, 22 nt, Human
gaacuuugaccucugcagcaau

SEQ ID NO: 1918600 - RNA, 16 nt, Human
gaacuuugaccucugc

SEQ ID NO: 1918601 - RNA, 14 nt, Human
gaacuuuauuucca

SEQ ID NO: 1918602 - RNA, 22 nt, Human
gaacuuguaaaggaauuuaaaa

SEQ ID NO: 1918603 - RNA, 22 nt, Human
gaacuuggggaguuaagaccug

SEQ ID NO: 1918604 - RNA, 18 nt, Human
gaacuuggcgcugccccu

SEQ ID NO: 1918605 - RNA, 17 nt, Human
gaacuugggccacugug

SEQ ID NO: 1918606 - RNA, 17 nt, Human
gaacuuuccaggaaggc

SEQ ID NO: 1918607 - RNA, 23 nt, Human
gaacuuucauuuuuuuccaggcu

SEQ ID NO: 1918608 - RNA, 14 nt, Human
gaacuuucauuuuu

SEQ ID NO: 1918609 - RNA, 24 nt, Human
gaacuuuccacauucagagcuuac

SEQ ID NO: 1918610 - RNA, 12 nt, Human
gaacuugguucc

SEQ ID NO: 1918611 - RNA, 13 nt, Human
gaacuuucauuuu

SEQ ID NO: 1918612 - RNA, 12 nt, Human
gaacuuucauuu

SEQ ID NO: 1918613 - RNA, 18 nt, Human
gaaccacaucuugcucug

SEQ ID NO: 1918614 - RNA, 20 nt, Human
gaaccacaucuugcucugcu

SEQ ID NO: 1918615 - RNA, 20 nt, Human
gaacuguguuucaaguucaa

SEQ ID NO: 1918616 - RNA, 16 nt, Human
gaacucccuuucaaca

SEQ ID NO: 1918617 - RNA, 17 nt, Human
gaacuuaaauaauguga

SEQ ID NO: 1918618 - RNA, 14 nt, Human
gaacuuaaauaaug

SEQ ID NO: 1918619 - RNA, 17 nt, Human
gaacuuggcgcugcccc

SEQ ID NO: 1918620 - RNA, 19 nt, Human
gaagaucucugcagggccg

SEQ ID NO: 1918621 - RNA, 22 nt, Human
gaagaucucugcagggccgcca

SEQ ID NO: 1918622 - RNA, 21 nt, Human
gaagaguguggagucauucuc

SEQ ID NO: 1918623 - RNA, 23 nt, Human
gaagauuuugaaauuuuuauuaa

SEQ ID NO: 1918624 - RNA, 17 nt, Human
gaagauugagauguguu

SEQ ID NO: 1918625 - RNA, 22 nt, Human
gaagauugagauguguucacaa

SEQ ID NO: 1918626 - RNA, 17 nt, Human
gaagauguagaggagaa

SEQ ID NO: 1918627 - RNA, 21 nt, Human
gaagauucuucccauucucca

SEQ ID NO: 1918628 - RNA, 22 nt, Human
gaagauucuucccauucuccau

SEQ ID NO: 1918629 - RNA, 15 nt, Human
gaagacuucaucccu

SEQ ID NO: 1918630 - RNA, 16 nt, Human
gaagacuucaucccuc

SEQ ID NO: 1918631 - RNA, 13 nt, Human
gaagaaguguguc

SEQ ID NO: 1918632 - RNA, 12 nt, Human
gaagagccuugc

SEQ ID NO: 1918633 - RNA, 17 nt, Human
gaagacuucaucccucu

SEQ ID NO: 1918634 - RNA, 19 nt, Human
gaagacuucaucccucugg

SEQ ID NO: 1918635 - RNA, 14 nt, Human
gaagaguccucuga

SEQ ID NO: 1918636 - RNA, 16 nt, Human
gaagaguccucugaau

SEQ ID NO: 1918637 - RNA, 22 nt, Human
gaagcuuauuaaugcuaagggc

SEQ ID NO: 1918638 - RNA, 22 nt, Human
gaagcuucuggugaccuuccaa

SEQ ID NO: 1918639 - RNA, 15 nt, Human
gaaggaacguccccu

SEQ ID NO: 1918640 - RNA, 21 nt, Human
gaaggaaacccagcucugguc

SEQ ID NO: 1918641 - RNA, 22 nt, Human
gaaggaaacccagcucuggucc

SEQ ID NO: 1918642 - RNA, 19 nt, Human
gaaggaagacuucaucccu

SEQ ID NO: 1918643 - RNA, 23 nt, Human
gaaggaaccaaagcgaauuuuaa

SEQ ID NO: 1918644 - RNA, 21 nt, Human
gaaggacauugcggacagcca

SEQ ID NO: 1918645 - RNA, 20 nt, Human
gaaggacauugcggacagcc

SEQ ID NO: 1918646 - RNA, 19 nt, Human
gaaggacauugcggacagc

SEQ ID NO: 1918647 - RNA, 18 nt, Human
gaagccuuaccacgcagu

SEQ ID NO: 1918648 - RNA, 17 nt, Human
gaagccuuaccacgcag

SEQ ID NO: 1918649 - RNA, 23 nt, Human
gaagcuuauuaaugcuaagggca

SEQ ID NO: 1918650 - RNA, 21 nt, Human
gaagcuuauuaaugcuaaggg

SEQ ID NO: 1918651 - RNA, 20 nt, Human
gaagcuuauuaaugcuaagg

SEQ ID NO: 1918652 - RNA, 19 nt, Human
gaagcuuauuaaugcuaag

SEQ ID NO: 1918653 - RNA, 17 nt, Human
gaagcuuauuaaugcua

SEQ ID NO: 1918654 - RNA, 16 nt, Human
gaagcuuauuaaugcu

SEQ ID NO: 1918655 - RNA, 15 nt, Human
gaagcuuauuaaugc

SEQ ID NO: 1918656 - RNA, 14 nt, Human
gaagcuuauuaaug

SEQ ID NO: 1918657 - RNA, 19 nt, Human
gaaggaaacccagcucugg

SEQ ID NO: 1918658 - RNA, 20 nt, Human
gaaggaaacccagcucuggu

SEQ ID NO: 1918659 - RNA, 21 nt, Human
gaagccgcuggggccaguugg

SEQ ID NO: 1918660 - RNA, 18 nt, Human
gaagccgcuggggccagu

SEQ ID NO: 1918661 - RNA, 20 nt, Human
gaagccgcuggggccaguug

SEQ ID NO: 1918662 - RNA, 14 nt, Human
gaagccgcuggggc

SEQ ID NO: 1918663 - RNA, 13 nt, Human
gaagccaaagagu

SEQ ID NO: 1918664 - RNA, 13 nt, Human
gaagggggcuggg

SEQ ID NO: 1918665 - RNA, 21 nt, Human
gaaggggcgucuguucccccu

SEQ ID NO: 1918666 - RNA, 15 nt, Human
gaagggggcugggac

SEQ ID NO: 1918667 - RNA, 13 nt, Human
gaagucacacagu

SEQ ID NO: 1918668 - RNA, 21 nt, Human
gaaguaauaugcacacauuuu

SEQ ID NO: 1918669 - RNA, 20 nt, Human
gaaguaauaugcacacauuu

SEQ ID NO: 1918670 - RNA, 19 nt, Human
gaaguaauaugcacacauu

SEQ ID NO: 1918671 - RNA, 21 nt, Human
gaaggugaggagcuugaaacc

SEQ ID NO: 1918672 - RNA, 21 nt, Human
gaagucacauuccugaacagg

SEQ ID NO: 1918673 - RNA, 20 nt, Human
gaagucacauuccugaacag

SEQ ID NO: 1918674 - RNA, 16 nt, Human
gaagucacauuccuga

SEQ ID NO: 1918675 - RNA, 14 nt, Human
gaaguccaaugugg

SEQ ID NO: 1918676 - RNA, 17 nt, Human
gaaguccaauguggcaa

SEQ ID NO: 1918677 - RNA, 18 nt, Human
gaagucuuagauguauau

SEQ ID NO: 1918678 - RNA, 15 nt, Human
gaaccaacacuaaca

SEQ ID NO: 1918679 - RNA, 20 nt, Human
gaacauguagaaaacaaaau

SEQ ID NO: 1918680 - RNA, 19 nt, Human
gaacaugugagagguuuga

SEQ ID NO: 1918681 - RNA, 23 nt, Human
gaaccaaagcgaauuuuaaaaga

SEQ ID NO: 1918682 - RNA, 20 nt, Human
gaaccaaagcgaauuuuaaa

SEQ ID NO: 1918683 - RNA, 22 nt, Human
gaacaguuguguuugaagcaca

SEQ ID NO: 1918684 - RNA, 22 nt, Human
gaacagacuggaagcacagcuu

SEQ ID NO: 1918685 - RNA, 17 nt, Human
gaacaggauauucucac

SEQ ID NO: 1918686 - RNA, 20 nt, Human
gaacaguuguguuugaagca

SEQ ID NO: 1918687 - RNA, 19 nt, Human
gaacagacuggaagcacag

SEQ ID NO: 1918688 - RNA, 20 nt, Human
gaacagacuggaagcacagc

SEQ ID NO: 1918689 - RNA, 17 nt, Human
gaacacuccuucacaga

SEQ ID NO: 1918690 - RNA, 15 nt, Human
gaacacuccuucaca

SEQ ID NO: 1918691 - RNA, 16 nt, Human
gaacacuccuucacag

SEQ ID NO: 1918692 - RNA, 21 nt, Human
gaaauuuccugggagcuuuug

SEQ ID NO: 1918693 - RNA, 19 nt, Human
gaaauuuccacucaggucu

SEQ ID NO: 1918694 - RNA, 20 nt, Human
gaaauuuccacucaggucug

SEQ ID NO: 1918695 - RNA, 23 nt, Human
gaaauucaacguuaauaauucug

SEQ ID NO: 1918696 - RNA, 19 nt, Human
gaaauucaacguuaauaau

SEQ ID NO: 1918697 - RNA, 23 nt, Human
gaaauuaguacuccccuccuuga

SEQ ID NO: 1918698 - RNA, 14 nt, Human
gaaauuaggaugua

SEQ ID NO: 1918699 - RNA, 20 nt, Human
gaaauaucugaaaauguaug

SEQ ID NO: 1918700 - RNA, 18 nt, Human
gaaauaucugaaaaugua

SEQ ID NO: 1918701 - RNA, 19 nt, Human
gaaauaucugaaaauguau

SEQ ID NO: 1918702 - RNA, 17 nt, Human
gaaauauaggaacuuaa

SEQ ID NO: 1918703 - RNA, 17 nt, Human
gaaauaaaggaugugau

SEQ ID NO: 1918704 - RNA, 21 nt, Human
gaaauaaacgucuuaaauauu

SEQ ID NO: 1918705 - RNA, 18 nt, Human
gaaauaaacgucuuaaau

SEQ ID NO: 1918706 - RNA, 17 nt, Human
gaaauaaacgucuuaaa

SEQ ID NO: 1918707 - RNA, 16 nt, Human
gaaauaaacgucuuaa

SEQ ID NO: 1918708 - RNA, 14 nt, Human
gaaauaaacgucuu

SEQ ID NO: 1918709 - RNA, 23 nt, Human
gaaauaaaaggaagccaaagagu

SEQ ID NO: 1918710 - RNA, 20 nt, Human
gaaauaaaggaugugauugu

SEQ ID NO: 1918711 - RNA, 16 nt, Human
gaaaugggcagagcag

SEQ ID NO: 1918712 - RNA, 15 nt, Human
gaaaugggcagagca

SEQ ID NO: 1918713 - RNA, 18 nt, Human
gaaaugaggucagagccu

SEQ ID NO: 1918714 - RNA, 14 nt, Human
gaaaugcaaaaauc

SEQ ID NO: 1918715 - RNA, 17 nt, Human
gaaaugcaaaaaucucu

SEQ ID NO: 1918716 - RNA, 11 nt, Human
gaaaugagcug

SEQ ID NO: 1918717 - RNA, 20 nt, Human
gaaaugagaggcauuucccc

SEQ ID NO: 1918718 - RNA, 17 nt, Human
gaaauguacagcaagga

SEQ ID NO: 1918719 - RNA, 17 nt, Human
gaaaugggcagagcaga

SEQ ID NO: 1918720 - RNA, 19 nt, Human
gaaaugggcagagcagaga

SEQ ID NO: 1918721 - RNA, 22 nt, Human
gaaagucuugugacuagugcug

SEQ ID NO: 1918722 - RNA, 21 nt, Human
gaaagucuugugacuagugcu

SEQ ID NO: 1918723 - RNA, 20 nt, Human
gaaagucuugugacuagugc

SEQ ID NO: 1918724 - RNA, 16 nt, Human
gaaagugaaaguccag

SEQ ID NO: 1918725 - RNA, 19 nt, Human
gaaagucuugugacuagug

SEQ ID NO: 1918726 - RNA, 16 nt, Human
gaaagugccagaaagu

SEQ ID NO: 1918727 - RNA, 20 nt, Human
gaaaguuuccccaccaguga

SEQ ID NO: 1918728 - RNA, 22 nt, Human
gaaaguuuggggacaugugauu

SEQ ID NO: 1918729 - RNA, 23 nt, Human
gaaaguuuccccaccagugaaug

SEQ ID NO: 1918730 - RNA, 16 nt, Human
gaaauaaaaggaagcc

SEQ ID NO: 1918731 - RNA, 17 nt, Human
gaaauaaaaggaagcca

SEQ ID NO: 1918732 - RNA, 18 nt, Human
gaaauaaaaggaagccaa

SEQ ID NO: 1918733 - RNA, 19 nt, Human
gaaauaaaaggaagccaaa

SEQ ID NO: 1918734 - RNA, 11 nt, Human
gaaaguuuccc

SEQ ID NO: 1918735 - RNA, 13 nt, Human
gaaaguucaugcu

SEQ ID NO: 1918736 - RNA, 11 nt, Human
gaaaggaaaga

SEQ ID NO: 1918737 - RNA, 16 nt, Human
gaaaggaaagaggcuc

SEQ ID NO: 1918738 - RNA, 21 nt, Human
gaaagcuugcccuggugccuc

SEQ ID NO: 1918739 - RNA, 19 nt, Human
gaaaggagccuaggccagg

SEQ ID NO: 1918740 - RNA, 22 nt, Human
gaaaggagccuaggccaggugc

SEQ ID NO: 1918741 - RNA, 20 nt, Human
gaaacuaggugcauauuuau

SEQ ID NO: 1918742 - RNA, 14 nt, Human
gaaacgcagacacu

SEQ ID NO: 1918743 - RNA, 20 nt, Human
gaaacgaagccaucuuucuu

SEQ ID NO: 1918744 - RNA, 16 nt, Human
gaaaaaugagccuggc

SEQ ID NO: 1918745 - RNA, 22 nt, Human
gaaaaagaaaugcaaaaaucuc

SEQ ID NO: 1918746 - RNA, 13 nt, Human
gaaaaagaaaugc

SEQ ID NO: 1918747 - RNA, 14 nt, Human
gaaaaagaaaugca

SEQ ID NO: 1918748 - RNA, 11 nt, Human
gaaaaauggag

SEQ ID NO: 1918749 - RNA, 14 nt, Human
gaaagauaacuagg

SEQ ID NO: 1918750 - RNA, 16 nt, Human
gaaagaucaaaagguu

SEQ ID NO: 1918751 - RNA, 14 nt, Human
gaaagcaaagggcu

SEQ ID NO: 1918752 - RNA, 14 nt, Human
gaaagcagaacagu

SEQ ID NO: 1918753 - RNA, 13 nt, Human
gaaagcagaacag

SEQ ID NO: 1918754 - RNA, 15 nt, Human
gagccgggccgcaga

SEQ ID NO: 1918755 - RNA, 14 nt, Human
gagccgggccgcag

SEQ ID NO: 1918756 - RNA, 22 nt, Human
gagccgagaucacgccacugca

SEQ ID NO: 1918757 - RNA, 21 nt, Human
gagccgagaucacgccacugc

SEQ ID NO: 1918758 - RNA, 20 nt, Human
gagccgagaucacgccacug

SEQ ID NO: 1918759 - RNA, 19 nt, Human
gagccgagaucacgccacu

SEQ ID NO: 1918760 - RNA, 11 nt, Human
gagcccacugu

SEQ ID NO: 1918761 - RNA, 18 nt, Human
gagcccacuguacuugcu

SEQ ID NO: 1918762 - RNA, 21 nt, Human
gagcccacuguacuugcucuu

SEQ ID NO: 1918763 - RNA, 18 nt, Human
gagcccacgcccccacug

SEQ ID NO: 1918764 - RNA, 15 nt, Human
gagccucagcauccu

SEQ ID NO: 1918765 - RNA, 14 nt, Human
gagccucagcaucc

SEQ ID NO: 1918766 - RNA, 17 nt, Human
gagccucagcauccugg

SEQ ID NO: 1918767 - RNA, 13 nt, Human
gagccucagcauc

SEQ ID NO: 1918768 - RNA, 14 nt, Human
gagccuaggccagg

SEQ ID NO: 1918769 - RNA, 15 nt, Human
gagccuaggccaggu

SEQ ID NO: 1918770 - RNA, 17 nt, Human
gagccuaggccaggugc

SEQ ID NO: 1918771 - RNA, 16 nt, Human
gagccuaggccaggug

SEQ ID NO: 1918772 - RNA, 17 nt, Human
gagccuacccaccccca

SEQ ID NO: 1918773 - RNA, 15 nt, Human
gagccuacccacccc

SEQ ID NO: 1918774 - RNA, 12 nt, Human
gagccugcaguu

SEQ ID NO: 1918775 - RNA, 17 nt, Human
gagccucugcuccccag

SEQ ID NO: 1918776 - RNA, 13 nt, Human
gagccuccugccc

SEQ ID NO: 1918777 - RNA, 15 nt, Human
gagccucccugccuc

SEQ ID NO: 1918778 - RNA, 19 nt, Human
gagccucccugccucaggc

SEQ ID NO: 1918779 - RNA, 16 nt, Human
gagccucugcucccca

SEQ ID NO: 1918780 - RNA, 12 nt, Human
gagccucccugc

SEQ ID NO: 1918781 - RNA, 13 nt, Human
gagccucccugcc

SEQ ID NO: 1918782 - RNA, 14 nt, Human
gagccucccugccu

SEQ ID NO: 1918783 - RNA, 20 nt, Human
gagauagccaaggccaaagg

SEQ ID NO: 1918784 - RNA, 21 nt, Human
gagauagccaaggccaaagga

SEQ ID NO: 1918785 - RNA, 17 nt, Human
gagcagagaccaucccu

SEQ ID NO: 1918786 - RNA, 18 nt, Human
gagcagagaccaucccug

SEQ ID NO: 1918787 - RNA, 16 nt, Human
gagcagagaccauccc

SEQ ID NO: 1918788 - RNA, 19 nt, Human
gagauagccaaggccaaag

SEQ ID NO: 1918789 - RNA, 22 nt, Human
gagcagccacauuccugaugcu

SEQ ID NO: 1918790 - RNA, 21 nt, Human
gagcagccacauuccugaugc

SEQ ID NO: 1918791 - RNA, 22 nt, Human
gagcagagaucacaccacugca

SEQ ID NO: 1918792 - RNA, 23 nt, Human
gagcagagaccaucccugaaggc

SEQ ID NO: 1918793 - RNA, 20 nt, Human
gagcagagaucacaccacug

SEQ ID NO: 1918794 - RNA, 19 nt, Human
gagcagagaccaucccuga

SEQ ID NO: 1918795 - RNA, 21 nt, Human
gagcagagaccaucccugaag

SEQ ID NO: 1918796 - RNA, 20 nt, Human
gagccacugcaccgggccac

SEQ ID NO: 1918797 - RNA, 15 nt, Human
gagccagauuucacu

SEQ ID NO: 1918798 - RNA, 18 nt, Human
gagccagauuucacucuc

SEQ ID NO: 1918799 - RNA, 19 nt, Human
gagccagauuucacucucc

SEQ ID NO: 1918800 - RNA, 19 nt, Human
gagccacugcaccgggcca

SEQ ID NO: 1918801 - RNA, 18 nt, Human
gagccacugcaccgggcc

SEQ ID NO: 1918802 - RNA, 17 nt, Human
gagcccaccuuggcuca

SEQ ID NO: 1918803 - RNA, 15 nt, Human
gagcccaccuuggcu

SEQ ID NO: 1918804 - RNA, 13 nt, Human
gagcccaccuugg

SEQ ID NO: 1918805 - RNA, 13 nt, Human
gagccagauuuca

SEQ ID NO: 1918806 - RNA, 13 nt, Human
gagccagcucccu

SEQ ID NO: 1918807 - RNA, 18 nt, Human
gagccagcucccucuauu

SEQ ID NO: 1918808 - RNA, 12 nt, Human
gagcuagccaga

SEQ ID NO: 1918809 - RNA, 13 nt, Human
gagcuagccagag

SEQ ID NO: 1918810 - RNA, 14 nt, Human
gagcuagccagagg

SEQ ID NO: 1918811 - RNA, 15 nt, Human
gagcuagccagagga

SEQ ID NO: 1918812 - RNA, 18 nt, Human
gagcuagccagaggacug

SEQ ID NO: 1918813 - RNA, 15 nt, Human
gagcuagcagcaggg

SEQ ID NO: 1918814 - RNA, 17 nt, Human
gagcuagcagcagggag

SEQ ID NO: 1918815 - RNA, 15 nt, Human
gagccugcaguuauu

SEQ ID NO: 1918816 - RNA, 13 nt, Human
gagcuauugcugu

SEQ ID NO: 1918817 - RNA, 21 nt, Human
gagcucccaggugcagccaga

SEQ ID NO: 1918818 - RNA, 16 nt, Human
gagcucccaggugcag

SEQ ID NO: 1918819 - RNA, 20 nt, Human
gagcucccaggugcagccag

SEQ ID NO: 1918820 - RNA, 21 nt, Human
gagcucuuggaggugucugua

SEQ ID NO: 1918821 - RNA, 15 nt, Human
gagcugaguggggga

SEQ ID NO: 1918822 - RNA, 17 nt, Human
gagcugaggcaauucua

SEQ ID NO: 1918823 - RNA, 17 nt, Human
gagcugaggccacacuc

SEQ ID NO: 1918824 - RNA, 14 nt, Human
gagcucuuugcacu

SEQ ID NO: 1918825 - RNA, 14 nt, Human
gaggaacaaggcaa

SEQ ID NO: 1918826 - RNA, 16 nt, Human
gaggaacaaggcaagg

SEQ ID NO: 1918827 - RNA, 23 nt, Human
gaggaagaacggggcucuucuca

SEQ ID NO: 1918828 - RNA, 19 nt, Human
gaggaagaacggggcucuu

SEQ ID NO: 1918829 - RNA, 17 nt, Human
gaggaagagaaaaaaua

SEQ ID NO: 1918830 - RNA, 13 nt, Human
gaggaagccgcug

SEQ ID NO: 1918831 - RNA, 14 nt, Human
gaggaagccgcugg

SEQ ID NO: 1918832 - RNA, 17 nt, Human
gaggaagccgcuggggc

SEQ ID NO: 1918833 - RNA, 18 nt, Human
gaggaagccgcuggggcc

SEQ ID NO: 1918834 - RNA, 16 nt, Human
gaggaaagcaaaggag

SEQ ID NO: 1918835 - RNA, 17 nt, Human
gaggaaagcaaaggaga

SEQ ID NO: 1918836 - RNA, 18 nt, Human
gaggaaacaacagcuuua

SEQ ID NO: 1918837 - RNA, 22 nt, Human
gaggaaaaguaaccaucacugg

SEQ ID NO: 1918838 - RNA, 22 nt, Human
gaggaaaaaaaucguccaggga

SEQ ID NO: 1918839 - RNA, 14 nt, Human
gagcuuuuguagaa

SEQ ID NO: 1918840 - RNA, 20 nt, Human
gagcuuugaaaauucagugg

SEQ ID NO: 1918841 - RNA, 22 nt, Human
gagcuuucugcuaucaaagagg

SEQ ID NO: 1918842 - RNA, 22 nt, Human
gagcuugaaacccguggcgcuu

SEQ ID NO: 1918843 - RNA, 18 nt, Human
gagacaaggagggcacag

SEQ ID NO: 1918844 - RNA, 11 nt, Human
gagacacagga

SEQ ID NO: 1918845 - RNA, 17 nt, Human
gagacacaggaugaagc

SEQ ID NO: 1918846 - RNA, 18 nt, Human
gagacacaggaugaagca

SEQ ID NO: 1918847 - RNA, 15 nt, Human
gagacacaagccuuc

SEQ ID NO: 1918848 - RNA, 17 nt, Human
gagacacaagccuucgg

SEQ ID NO: 1918849 - RNA, 18 nt, Human
gagaauugcuugaaccca

SEQ ID NO: 1918850 - RNA, 14 nt, Human
gagaauugggggcu

SEQ ID NO: 1918851 - RNA, 19 nt, Human
gagacagaguuuucacucu

SEQ ID NO: 1918852 - RNA, 16 nt, Human
gagacagccaacuaug

SEQ ID NO: 1918853 - RNA, 12 nt, Human
gagacagcccgg

SEQ ID NO: 1918854 - RNA, 16 nt, Human
gagacacggagcccag

SEQ ID NO: 1918855 - RNA, 22 nt, Human
gagaaugcacaaacagaggccg

SEQ ID NO: 1918856 - RNA, 20 nt, Human
gagaaugcacaaacagaggc

SEQ ID NO: 1918857 - RNA, 21 nt, Human
gagaaugcacaaacagaggcc

SEQ ID NO: 1918858 - RNA, 12 nt, Human
gagaagccagga

SEQ ID NO: 1918859 - RNA, 22 nt, Human
gagaagccagcuuuccucauca

SEQ ID NO: 1918860 - RNA, 22 nt, Human
gagaagccaggaauuucccagg

SEQ ID NO: 1918861 - RNA, 23 nt, Human
gagaagccaggaauuucccagga

SEQ ID NO: 1918862 - RNA, 23 nt, Human
gagaagauucuucccauucucca

SEQ ID NO: 1918863 - RNA, 19 nt, Human
gacuugugacgguguaccu

SEQ ID NO: 1918864 - RNA, 15 nt, Human
gacuccggcccuccu

SEQ ID NO: 1918865 - RNA, 21 nt, Human
gagaaaauggacguguuauga

SEQ ID NO: 1918866 - RNA, 16 nt, Human
gacuuggaagcuccgc

SEQ ID NO: 1918867 - RNA, 15 nt, Human
gacuuggaagcuccg

SEQ ID NO: 1918868 - RNA, 14 nt, Human
gacuuggaagcucc

SEQ ID NO: 1918869 - RNA, 19 nt, Human
gacucgcgacaaugcaaac

SEQ ID NO: 1918870 - RNA, 14 nt, Human
gacuccggcccucc

SEQ ID NO: 1918871 - RNA, 17 nt, Human
gacuccugcaggcagcc

SEQ ID NO: 1918872 - RNA, 18 nt, Human
gacucgcgacaaugcaaa

SEQ ID NO: 1918873 - RNA, 16 nt, Human
gagaaacagccugugu

SEQ ID NO: 1918874 - RNA, 21 nt, Human
gagaaaccuuauuguaccucu

SEQ ID NO: 1918875 - RNA, 23 nt, Human
gagaaaccuuauuguaccucucu

SEQ ID NO: 1918876 - RNA, 23 nt, Human
gagaaaguacuucuccacccugc

SEQ ID NO: 1918877 - RNA, 20 nt, Human
gagaaauauggacacuuaau

SEQ ID NO: 1918878 - RNA, 23 nt, Human
gagaaauaaaguuugcuuagaaa

SEQ ID NO: 1918879 - RNA, 14 nt, Human
gagaaauuuauaaa

SEQ ID NO: 1918880 - RNA, 17 nt, Human
gagaacaaacagaucga

SEQ ID NO: 1918881 - RNA, 19 nt, Human
gagagccuggugcugcugc

SEQ ID NO: 1918882 - RNA, 19 nt, Human
gagagggaggcaagcccug

SEQ ID NO: 1918883 - RNA, 17 nt, Human
gagagccuggugcugcu

SEQ ID NO: 1918884 - RNA, 13 nt, Human
gagagccuggugc

SEQ ID NO: 1918885 - RNA, 23 nt, Human
gagagggccgggcagaggggcag

SEQ ID NO: 1918886 - RNA, 13 nt, Human
gagagccuuccag

SEQ ID NO: 1918887 - RNA, 14 nt, Human
gagagccuuccagg

SEQ ID NO: 1918888 - RNA, 18 nt, Human
gagaggggaacagacugg

SEQ ID NO: 1918889 - RNA, 13 nt, Human
gagaggggaacag

SEQ ID NO: 1918890 - RNA, 21 nt, Human
gagagggugggagugggccca

SEQ ID NO: 1918891 - RNA, 17 nt, Human
gagauacagaauuuuau

SEQ ID NO: 1918892 - RNA, 19 nt, Human
gagagugaacaaauuuaca

SEQ ID NO: 1918893 - RNA, 14 nt, Human
gagaguuuccugaa

SEQ ID NO: 1918894 - RNA, 15 nt, Human
gagagugagguggaa

SEQ ID NO: 1918895 - RNA, 15 nt, Human
gagagugaacaaauu

SEQ ID NO: 1918896 - RNA, 17 nt, Human
gagagaagagaaugcac

SEQ ID NO: 1918897 - RNA, 18 nt, Human
gagagaaaacagaccuaa

SEQ ID NO: 1918898 - RNA, 22 nt, Human
gagagaaaacagaccuaaugcu

SEQ ID NO: 1918899 - RNA, 23 nt, Human
gagagaaaacagaccuaaugcuc

SEQ ID NO: 1918900 - RNA, 18 nt, Human
gagagaggcaauggcucc

SEQ ID NO: 1918901 - RNA, 14 nt, Human
gagacucugucuca

SEQ ID NO: 1918902 - RNA, 12 nt, Human
gagaccaucccu

SEQ ID NO: 1918903 - RNA, 16 nt, Human
gagaccagggagccuu

SEQ ID NO: 1918904 - RNA, 13 nt, Human
gagaccagccugg

SEQ ID NO: 1918905 - RNA, 14 nt, Human
gagaccagccuggc

SEQ ID NO: 1918906 - RNA, 16 nt, Human
gagacucgcgacaaug

SEQ ID NO: 1918907 - RNA, 18 nt, Human
gagacucgcgacaaugca

SEQ ID NO: 1918908 - RNA, 22 nt, Human
gagacuccugcaggcagccagg

SEQ ID NO: 1918909 - RNA, 14 nt, Human
gagacucgagaacu

SEQ ID NO: 1918910 - RNA, 20 nt, Human
gagacucgagaacuuucauu

SEQ ID NO: 1918911 - RNA, 17 nt, Human
gagacucgagaacuuuc

SEQ ID NO: 1918912 - RNA, 16 nt, Human
gagacucgagaacuuu

SEQ ID NO: 1918913 - RNA, 15 nt, Human
gagacucgagaacuu

SEQ ID NO: 1918914 - RNA, 14 nt, Human
gagacagcccgggc

SEQ ID NO: 1918915 - RNA, 17 nt, Human
gagacagcccgggcucu

SEQ ID NO: 1918916 - RNA, 18 nt, Human
gagacagcccgggcucug

SEQ ID NO: 1918917 - RNA, 19 nt, Human
gagacagcccgggcucugc

SEQ ID NO: 1918918 - RNA, 20 nt, Human
gagacagcccgggcucugcc

SEQ ID NO: 1918919 - RNA, 21 nt, Human
gagacagcccgggcucugccu

SEQ ID NO: 1918920 - RNA, 22 nt, Human
gagacagcccgggcucugccuc

SEQ ID NO: 1918921 - RNA, 23 nt, Human
gagacagcccgggcucugccucc

SEQ ID NO: 1918922 - RNA, 24 nt, Human
gagacagcccgggcucugccuccc

SEQ ID NO: 1918923 - RNA, 13 nt, Human
gagacagcucugc

SEQ ID NO: 1918924 - RNA, 18 nt, Human
gagacagcucugcauacu

SEQ ID NO: 1918925 - RNA, 15 nt, Human
gagacagcucugcau

SEQ ID NO: 1918926 - RNA, 15 nt, Human
gagacauacuugaag

SEQ ID NO: 1918927 - RNA, 18 nt, Human
gagacauacuugaagggc

SEQ ID NO: 1918928 - RNA, 20 nt, Human
gagacauacuugaagggcca

SEQ ID NO: 1918929 - RNA, 21 nt, Human
gagacauacuugaagggccag

SEQ ID NO: 1918930 - RNA, 22 nt, Human
gacacauaugcaccuugugucu

SEQ ID NO: 1918931 - RNA, 16 nt, Human
gacacauaugaggggg

SEQ ID NO: 1918932 - RNA, 15 nt, Human
gacacauaugagggg

SEQ ID NO: 1918933 - RNA, 13 nt, Human
gacacccccucgc

SEQ ID NO: 1918934 - RNA, 12 nt, Human
gacacccuguga

SEQ ID NO: 1918935 - RNA, 13 nt, Human
gacacccugugau

SEQ ID NO: 1918936 - RNA, 12 nt, Human
gacacaggccug

SEQ ID NO: 1918937 - RNA, 17 nt, Human
gacacaggcccucccug

SEQ ID NO: 1918938 - RNA, 18 nt, Human
gacacaggcccggcucca

SEQ ID NO: 1918939 - RNA, 22 nt, Human
gacacaggucuuuccuaaggcu

SEQ ID NO: 1918940 - RNA, 16 nt, Human
gacacaggucuuuccu

SEQ ID NO: 1918941 - RNA, 17 nt, Human
gacacaggucuuuccua

SEQ ID NO: 1918942 - RNA, 13 nt, Human
gacacccucaacc

SEQ ID NO: 1918943 - RNA, 22 nt, Human
gacacccugugauggggcccug

SEQ ID NO: 1918944 - RNA, 23 nt, Human
gacacccugugauggggcccugc

SEQ ID NO: 1918945 - RNA, 18 nt, Human
gacacuaaccacgcugga

SEQ ID NO: 1918946 - RNA, 17 nt, Human
gacacuaaccacgcugg

SEQ ID NO: 1918947 - RNA, 16 nt, Human
gacacuaaccacgcug

SEQ ID NO: 1918948 - RNA, 15 nt, Human
gacacuaaccacgcu

SEQ ID NO: 1918949 - RNA, 19 nt, Human
gacacgaauauugcugaug

SEQ ID NO: 1918950 - RNA, 12 nt, Human
gacaccuuucau

SEQ ID NO: 1918951 - RNA, 17 nt, Human
gacacgaauauugcuga

SEQ ID NO: 1918952 - RNA, 18 nt, Human
gacacgaauauugcugau

SEQ ID NO: 1918953 - RNA, 17 nt, Human
gacaccuugacagggca

SEQ ID NO: 1918954 - RNA, 15 nt, Human
gacaccuugacaggg

SEQ ID NO: 1918955 - RNA, 20 nt, Human
gacaccuugacagggcacac

SEQ ID NO: 1918956 - RNA, 18 nt, Human
gacaccuugacagggcac

SEQ ID NO: 1918957 - RNA, 15 nt, Human
gacacgaauauugcu

SEQ ID NO: 1918958 - RNA, 22 nt, Human
gacaaggauugcuacuguccua

SEQ ID NO: 1918959 - RNA, 14 nt, Human
gaagucuuuguaca

SEQ ID NO: 1918960 - RNA, 16 nt, Human
gaagucuuuguacaga

SEQ ID NO: 1918961 - RNA, 16 nt, Human
gacaaugacccagugg

SEQ ID NO: 1918962 - RNA, 20 nt, Human
gacaaguggacucagggcag

SEQ ID NO: 1918963 - RNA, 15 nt, Human
gacaaguggacucag

SEQ ID NO: 1918964 - RNA, 17 nt, Human
gacacaggcccggcucc

SEQ ID NO: 1918965 - RNA, 15 nt, Human
gacacaggcccggcu

SEQ ID NO: 1918966 - RNA, 13 nt, Human
gacacacagcucu

SEQ ID NO: 1918967 - RNA, 19 nt, Human
gacaauuuauuauggcaca

SEQ ID NO: 1918968 - RNA, 13 nt, Human
gacaauuuauuau

SEQ ID NO: 1918969 - RNA, 22 nt, Human
gacacaagccuucggcgccuua

SEQ ID NO: 1918970 - RNA, 22 nt, Human
gacacaaguggaccuuaggccu

SEQ ID NO: 1918971 - RNA, 12 nt, Human
gacaauuuauua

SEQ ID NO: 1918972 - RNA, 16 nt, Human
gacaaugcaaaccauc

SEQ ID NO: 1918973 - RNA, 18 nt, Human
gacaaugcaaaccaucau

SEQ ID NO: 1918974 - RNA, 21 nt, Human
gacaaugacuuacuguacaug

SEQ ID NO: 1918975 - RNA, 12 nt, Human
gacaaugcaaac

SEQ ID NO: 1918976 - RNA, 20 nt, Human
gacaaugacuuacuguacau

SEQ ID NO: 1918977 - RNA, 17 nt, Human
gacaaugacuuacugua

SEQ ID NO: 1918978 - RNA, 21 nt, Human
gacaggagaccuggcacugga

SEQ ID NO: 1918979 - RNA, 18 nt, Human
gacaggagaccuggcacu

SEQ ID NO: 1918980 - RNA, 22 nt, Human
gacagcuucucauccugcaggc

SEQ ID NO: 1918981 - RNA, 21 nt, Human
gacagcuucucauccugcagg

SEQ ID NO: 1918982 - RNA, 14 nt, Human
gacagcugccuggg

SEQ ID NO: 1918983 - RNA, 15 nt, Human
gacagcugccuggga

SEQ ID NO: 1918984 - RNA, 11 nt, Human
gacagcugcuc

SEQ ID NO: 1918985 - RNA, 14 nt, Human
gacagcugcuccua

SEQ ID NO: 1918986 - RNA, 17 nt, Human
gacagcugcuccuagag

SEQ ID NO: 1918987 - RNA, 20 nt, Human
gacagcugcuccuagaggga

SEQ ID NO: 1918988 - RNA, 21 nt, Human
gacagcugcuccuagagggag

SEQ ID NO: 1918989 - RNA, 19 nt, Human
gacaggcauguucucugag

SEQ ID NO: 1918990 - RNA, 18 nt, Human
gacaggcauguucucuga

SEQ ID NO: 1918991 - RNA, 17 nt, Human
gacaggcaaugcuggcu

SEQ ID NO: 1918992 - RNA, 16 nt, Human
gacaggcaaugcuggc

SEQ ID NO: 1918993 - RNA, 14 nt, Human
gacaggcaaugcug

SEQ ID NO: 1918994 - RNA, 16 nt, Human
gacagacacaggcccg

SEQ ID NO: 1918995 - RNA, 15 nt, Human
gacagacacaggccc

SEQ ID NO: 1918996 - RNA, 21 nt, Human
gacacuaaccacgcuggaccu

SEQ ID NO: 1918997 - RNA, 20 nt, Human
gacacuaaccacgcuggacc

SEQ ID NO: 1918998 - RNA, 14 nt, Human
gacagacacaggcc

SEQ ID NO: 1918999 - RNA, 13 nt, Human
gacagccacggcc

SEQ ID NO: 1919000 - RNA, 22 nt, Human
gacagccaacuauggccugugg

SEQ ID NO: 1919001 - RNA, 12 nt, Human
gacagcugccug

SEQ ID NO: 1919002 - RNA, 13 nt, Human
gacagcugccugg

SEQ ID NO: 1919003 - RNA, 19 nt, Human
gacagccaacuauggccug

SEQ ID NO: 1919004 - RNA, 16 nt, Human
gacagcauuuuccucu

SEQ ID NO: 1919005 - RNA, 20 nt, Human
gacagcauuuuccucugcuu

SEQ ID NO: 1919006 - RNA, 23 nt, Human
gacagcauuuuccucugcuuuga

SEQ ID NO: 1919007 - RNA, 14 nt, Human
gacaggcagagcug

SEQ ID NO: 1919008 - RNA, 16 nt, Human
gacauacuaaccagca

SEQ ID NO: 1919009 - RNA, 15 nt, Human
gacauacuaaccagc

SEQ ID NO: 1919010 - RNA, 12 nt, Human
gacaggcuggcu

SEQ ID NO: 1919011 - RNA, 14 nt, Human
gacaggcuggcucc

SEQ ID NO: 1919012 - RNA, 21 nt, Human
gacaggcuggcuccagaugca

SEQ ID NO: 1919013 - RNA, 22 nt, Human
gacaggcuggcuccagaugcag

SEQ ID NO: 1919014 - RNA, 22 nt, Human
gacauaaugggguccuggccau

SEQ ID NO: 1919015 - RNA, 23 nt, Human
gacauacuaaccagcagaaaugc

SEQ ID NO: 1919016 - RNA, 21 nt, Human
gacauagcaucuuguggcuuu

SEQ ID NO: 1919017 - RNA, 14 nt, Human
gacaucaacagaua

SEQ ID NO: 1919018 - RNA, 14 nt, Human
gacaucuggaaucu

SEQ ID NO: 1919019 - RNA, 18 nt, Human
gacaucuggaaucuggag

SEQ ID NO: 1919020 - RNA, 19 nt, Human
gacaucuggaaucuggaga

SEQ ID NO: 1919021 - RNA, 20 nt, Human
gacaucuggaaucuggagac

SEQ ID NO: 1919022 - RNA, 22 nt, Human
gacaucuggaaucuggagacca

SEQ ID NO: 1919023 - RNA, 21 nt, Human
gacaugucuuuucuugcauga

SEQ ID NO: 1919024 - RNA, 17 nt, Human
gacaugucuuuucuugc

SEQ ID NO: 1919025 - RNA, 18 nt, Human
gacaugcgguagccagca

SEQ ID NO: 1919026 - RNA, 19 nt, Human
gacaugcgguagccagcac

SEQ ID NO: 1919027 - RNA, 22 nt, Human
gacaugcgguagccagcacaca

SEQ ID NO: 1919028 - RNA, 23 nt, Human
gacaugcgguagccagcacacag

SEQ ID NO: 1919029 - RNA, 22 nt, Human
gaccccgacgccacagcccagc

SEQ ID NO: 1919030 - RNA, 20 nt, Human
gaccccgagccuggcuccaa

SEQ ID NO: 1919031 - RNA, 13 nt, Human
gaccccuccaugu

SEQ ID NO: 1919032 - RNA, 18 nt, Human
gacccugaggcccagagg

SEQ ID NO: 1919033 - RNA, 19 nt, Human
gacccugaggcccagaggg

SEQ ID NO: 1919034 - RNA, 20 nt, Human
gacccugaggcccagagggc

SEQ ID NO: 1919035 - RNA, 12 nt, Human
gacccugcccug

SEQ ID NO: 1919036 - RNA, 21 nt, Human
gacccugaggcccagagggcc

SEQ ID NO: 1919037 - RNA, 13 nt, Human
gacccugcccugu

SEQ ID NO: 1919038 - RNA, 15 nt, Human
gacccugcccugugg

SEQ ID NO: 1919039 - RNA, 16 nt, Human
gacccugcccuguggg

SEQ ID NO: 1919040 - RNA, 23 nt, Human
gacccugucucaaaaaaagaaaa

SEQ ID NO: 1919041 - RNA, 14 nt, Human
gacccaugcugccc

SEQ ID NO: 1919042 - RNA, 15 nt, Human
gacccaugcugcccu

SEQ ID NO: 1919043 - RNA, 16 nt, Human
gacccaugcugcccug

SEQ ID NO: 1919044 - RNA, 17 nt, Human
gacccaugcugcccugu

SEQ ID NO: 1919045 - RNA, 12 nt, Human
gacccacugcuu

SEQ ID NO: 1919046 - RNA, 11 nt, Human
gacccacugcu

SEQ ID NO: 1919047 - RNA, 14 nt, Human
gaccaacugucacu

SEQ ID NO: 1919048 - RNA, 23 nt, Human
gaccugauuucugagcauuuaau

SEQ ID NO: 1919049 - RNA, 14 nt, Human
gaccugauccugga

SEQ ID NO: 1919050 - RNA, 15 nt, Human
gaccugauccuggag

SEQ ID NO: 1919051 - RNA, 18 nt, Human
gaccugauccuggaggcc

SEQ ID NO: 1919052 - RNA, 21 nt, Human
gaccugauccuggaggcccag

SEQ ID NO: 1919053 - RNA, 23 nt, Human
gaccugcccccgcauccccugcc

SEQ ID NO: 1919054 - RNA, 17 nt, Human
gaccugcagacgcccag

SEQ ID NO: 1919055 - RNA, 18 nt, Human
gaccugaggcccuucucu

SEQ ID NO: 1919056 - RNA, 21 nt, Human
gaccugaggcccuucucucca

SEQ ID NO: 1919057 - RNA, 11 nt, Human
gaccucaggcc

SEQ ID NO: 1919058 - RNA, 12 nt, Human
gaccucaggccu

SEQ ID NO: 1919059 - RNA, 13 nt, Human
gaccucaggccug

SEQ ID NO: 1919060 - RNA, 15 nt, Human
gaccugaggcccuuc

SEQ ID NO: 1919061 - RNA, 14 nt, Human
gaccgugaggccag

SEQ ID NO: 1919062 - RNA, 15 nt, Human
gaccgugaggccaga

SEQ ID NO: 1919063 - RNA, 15 nt, Human
gaccggcggcucgga

SEQ ID NO: 1919064 - RNA, 14 nt, Human
gacccuguggaagc

SEQ ID NO: 1919065 - RNA, 14 nt, Human
gaccuaaugcuccu

SEQ ID NO: 1919066 - RNA, 15 nt, Human
gaccuaaugcuccuu

SEQ ID NO: 1919067 - RNA, 22 nt, Human
gaccuaaugcuccuuguuccua

SEQ ID NO: 1919068 - RNA, 15 nt, Human
gacgccacagcccag

SEQ ID NO: 1919069 - RNA, 14 nt, Human
gacgccacagccca

SEQ ID NO: 1919070 - RNA, 22 nt, Human
gacggcugggcacacgccuccc

SEQ ID NO: 1919071 - RNA, 21 nt, Human
gacggagucccaccuuggcug

SEQ ID NO: 1919072 - RNA, 23 nt, Human
gacggagucccaccuuggcugca

SEQ ID NO: 1919073 - RNA, 18 nt, Human
gacggagucccaccuugg

SEQ ID NO: 1919074 - RNA, 14 nt, Human
gacggagucccacc

SEQ ID NO: 1919075 - RNA, 18 nt, Human
gacgaagaagagccacag

SEQ ID NO: 1919076 - RNA, 17 nt, Human
gacguguuaugacucca

SEQ ID NO: 1919077 - RNA, 20 nt, Human
gacguguuaugacuccagaa

SEQ ID NO: 1919078 - RNA, 20 nt, Human
gacguacuccaacagaagaa

SEQ ID NO: 1919079 - RNA, 12 nt, Human
gacguagcugca

SEQ ID NO: 1919080 - RNA, 21 nt, Human
gacguagcugcaaaggacaga

SEQ ID NO: 1919081 - RNA, 18 nt, Human
gaccuggacacaggccug

SEQ ID NO: 1919082 - RNA, 23 nt, Human
gaccuugaacuggguacuugugg

SEQ ID NO: 1919083 - RNA, 21 nt, Human
gaccuuucaauaggaaaaacu

SEQ ID NO: 1919084 - RNA, 13 nt, Human
gaccuugaugagc

SEQ ID NO: 1919085 - RNA, 15 nt, Human
gaccuugaugagcug

SEQ ID NO: 1919086 - RNA, 14 nt, Human
gaccuugaugagcu

SEQ ID NO: 1919087 - RNA, 16 nt, Human
gacgaagaagagccac

SEQ ID NO: 1919088 - RNA, 21 nt, Human
gacgaacauccaaccuuccca

SEQ ID NO: 1919089 - RNA, 17 nt, Human
gaccuuuccugaggaag

SEQ ID NO: 1919090 - RNA, 14 nt, Human
gacuccugcaggca

SEQ ID NO: 1919091 - RNA, 15 nt, Human
gacuccugcaggcag

SEQ ID NO: 1919092 - RNA, 16 nt, Human
gacuccugcaggcagc

SEQ ID NO: 1919093 - RNA, 13 nt, Human
gacucccauuccu

SEQ ID NO: 1919094 - RNA, 22 nt, Human
gacucccauuccugaagaacca

SEQ ID NO: 1919095 - RNA, 23 nt, Human
gacucccauuccugaagaaccag

SEQ ID NO: 1919096 - RNA, 12 nt, Human
gacuacaggcac

SEQ ID NO: 1919097 - RNA, 17 nt, Human
gacuacucccccaggug

SEQ ID NO: 1919098 - RNA, 22 nt, Human
gacguguuaugacuccagaauu

SEQ ID NO: 1919099 - RNA, 14 nt, Human
gacguguuuguguu

SEQ ID NO: 1919100 - RNA, 18 nt, Human
gacuaauucuugcauauu

SEQ ID NO: 1919101 - RNA, 12 nt, Human
gacuaauuucaa

SEQ ID NO: 1919102 - RNA, 12 nt, Human
gacuaauucuug

SEQ ID NO: 1919103 - RNA, 13 nt, Human
gacuaauuucaaa

SEQ ID NO: 1919104 - RNA, 22 nt, Human
gacuaauuucaaaaugcuuuuu

SEQ ID NO: 1919105 - RNA, 17 nt, Human
gacucagggcagcgcca

SEQ ID NO: 1919106 - RNA, 18 nt, Human
gacucagggcagcgccag

SEQ ID NO: 1919107 - RNA, 23 nt, Human
gacucagggcagcgccaggcuga

SEQ ID NO: 1919108 - RNA, 12 nt, Human
gacucagggcag

SEQ ID NO: 1919109 - RNA, 13 nt, Human
gacucagggcagc

SEQ ID NO: 1919110 - RNA, 16 nt, Human
gacucagggcagcgcc

SEQ ID NO: 1919111 - RNA, 18 nt, Human
gcagaccccuuggccagc

SEQ ID NO: 1919112 - RNA, 21 nt, Human
gcagaguugaagacagagcua

SEQ ID NO: 1919113 - RNA, 18 nt, Human
gcagauaaacaguaguga

SEQ ID NO: 1919114 - RNA, 20 nt, Human
gcagaguugaagacagagcu

SEQ ID NO: 1919115 - RNA, 17 nt, Human
gcagacaguuaagagaa

SEQ ID NO: 1919116 - RNA, 22 nt, Human
gcagauacaggaaaagcugcug

SEQ ID NO: 1919117 - RNA, 15 nt, Human
gcagauacugucucu

SEQ ID NO: 1919118 - RNA, 24 nt, Human
gcagccccauucugccugcccagg

SEQ ID NO: 1919119 - RNA, 21 nt, Human
gcagccccauucugccugccc

SEQ ID NO: 1919120 - RNA, 19 nt, Human
gcagccccauucugccugc

SEQ ID NO: 1919121 - RNA, 18 nt, Human
gcagccccauucugccug

SEQ ID NO: 1919122 - RNA, 17 nt, Human
gcagccccauucugccu

SEQ ID NO: 1919123 - RNA, 23 nt, Human
gcagcaauaaagcagcguuucua

SEQ ID NO: 1919124 - RNA, 16 nt, Human
gcagcaauaaagcagc

SEQ ID NO: 1919125 - RNA, 13 nt, Human
gcagcccugcaga

SEQ ID NO: 1919126 - RNA, 20 nt, Human
gcagccccuguucuggcaga

SEQ ID NO: 1919127 - RNA, 21 nt, Human
gcagccccuguucuggcagag

SEQ ID NO: 1919128 - RNA, 20 nt, Human
gcagccccgugggguuccuc

SEQ ID NO: 1919129 - RNA, 23 nt, Human
gcaggaggaucacuugaguccag

SEQ ID NO: 1919130 - RNA, 13 nt, Human
gcaggacaggaaa

SEQ ID NO: 1919131 - RNA, 20 nt, Human
gcaggaggaucacuugaguc

SEQ ID NO: 1919132 - RNA, 23 nt, Human
gcaggaaaaggugauauccauuc

SEQ ID NO: 1919133 - RNA, 12 nt, Human
gcaggcagccag

SEQ ID NO: 1919134 - RNA, 13 nt, Human
gcaggcagccagg

SEQ ID NO: 1919135 - RNA, 14 nt, Human
gcaggcagccaggc

SEQ ID NO: 1919136 - RNA, 15 nt, Human
gcagccuuggcaaac

SEQ ID NO: 1919137 - RNA, 15 nt, Human
gcagccuuuaaugca

SEQ ID NO: 1919138 - RNA, 15 nt, Human
gcagcgccuuuccca

SEQ ID NO: 1919139 - RNA, 14 nt, Human
gcagcucaccucuc

SEQ ID NO: 1919140 - RNA, 22 nt, Human
gcagcgggagccucccugccuc

SEQ ID NO: 1919141 - RNA, 15 nt, Human
gcagcucaccucucc

SEQ ID NO: 1919142 - RNA, 21 nt, Human
gcagccuggcucccaggacac

SEQ ID NO: 1919143 - RNA, 10 nt, Human
gcagccuggg

SEQ ID NO: 1919144 - RNA, 14 nt, Human
gcagccuggggcug

SEQ ID NO: 1919145 - RNA, 17 nt, Human
gcagccuggggcuggcc

SEQ ID NO: 1919146 - RNA, 14 nt, Human
gcagcccugcagag

SEQ ID NO: 1919147 - RNA, 15 nt, Human
gcagcccugcagagg

SEQ ID NO: 1919148 - RNA, 16 nt, Human
gcagcccugcagaggg

SEQ ID NO: 1919149 - RNA, 17 nt, Human
gcagcccugcagagggc

SEQ ID NO: 1919150 - RNA, 17 nt, Human
gcacccaagaccucagg

SEQ ID NO: 1919151 - RNA, 21 nt, Human
gcacccaagaccucagggcac

SEQ ID NO: 1919152 - RNA, 20 nt, Human
gcaccauuuaaaaacaggca

SEQ ID NO: 1919153 - RNA, 22 nt, Human
gcacccaccaucaugucuggcu

SEQ ID NO: 1919154 - RNA, 19 nt, Human
gcacccggccccugcuggu

SEQ ID NO: 1919155 - RNA, 16 nt, Human
gcaccagcagccugga

SEQ ID NO: 1919156 - RNA, 14 nt, Human
gcaauggcagccuu

SEQ ID NO: 1919157 - RNA, 20 nt, Human
gcaccacugcacuccagccu

SEQ ID NO: 1919158 - RNA, 13 nt, Human
gcaauggcagccu

SEQ ID NO: 1919159 - RNA, 12 nt, Human
gcaauggcagcc

SEQ ID NO: 1919160 - RNA, 15 nt, Human
gcaccagcagccugg

SEQ ID NO: 1919161 - RNA, 14 nt, Human
gcaccagacaccca

SEQ ID NO: 1919162 - RNA, 21 nt, Human
gcaccacugcacuccagccug

SEQ ID NO: 1919163 - RNA, 22 nt, Human
gcaccacugcacuccagccugg

SEQ ID NO: 1919164 - RNA, 15 nt, Human
gcacgaaauguuauu

SEQ ID NO: 1919165 - RNA, 22 nt, Human
gcaccuugugucuguacacgug

SEQ ID NO: 1919166 - RNA, 19 nt, Human
gcaccuuagacagucccug

SEQ ID NO: 1919167 - RNA, 18 nt, Human
gcaccuuagacagucccu

SEQ ID NO: 1919168 - RNA, 21 nt, Human
gcacggaccaugcgacacugg

SEQ ID NO: 1919169 - RNA, 12 nt, Human
gcacgauuucug

SEQ ID NO: 1919170 - RNA, 20 nt, Human
gcacgguggacccagacaca

SEQ ID NO: 1919171 - RNA, 15 nt, Human
gcacccucaggcagg

SEQ ID NO: 1919172 - RNA, 21 nt, Human
gcaccuggaauauauaaccag

SEQ ID NO: 1919173 - RNA, 18 nt, Human
gcaccuggaauauauaac

SEQ ID NO: 1919174 - RNA, 22 nt, Human
gcaccuggaauauauaaccagu

SEQ ID NO: 1919175 - RNA, 14 nt, Human
gcaccuuagacagu

SEQ ID NO: 1919176 - RNA, 17 nt, Human
gcaccuuagacaguccc

SEQ ID NO: 1919177 - RNA, 19 nt, Human
gcagacaggcaagcaccuc

SEQ ID NO: 1919178 - RNA, 18 nt, Human
gcagacaggaccagggau

SEQ ID NO: 1919179 - RNA, 23 nt, Human
gcagacaggcaagcaccuccugc

SEQ ID NO: 1919180 - RNA, 15 nt, Human
gcagacagcuccacc

SEQ ID NO: 1919181 - RNA, 20 nt, Human
gcagacaggccccgugaggc

SEQ ID NO: 1919182 - RNA, 12 nt, Human
gcagacaggacc

SEQ ID NO: 1919183 - RNA, 13 nt, Human
gcagacaggacca

SEQ ID NO: 1919184 - RNA, 15 nt, Human
gcagacaggaccagg

SEQ ID NO: 1919185 - RNA, 16 nt, Human
gcacuuaugauuucau

SEQ ID NO: 1919186 - RNA, 18 nt, Human
gcacuuauuuaaugccga

SEQ ID NO: 1919187 - RNA, 16 nt, Human
gcacugcuuccaguga

SEQ ID NO: 1919188 - RNA, 18 nt, Human
gcacugcuuccagugagg

SEQ ID NO: 1919189 - RNA, 13 nt, Human
gcacugccucuca

SEQ ID NO: 1919190 - RNA, 14 nt, Human
gcacugccucucac

SEQ ID NO: 1919191 - RNA, 16 nt, Human
gcacugccucucacag

SEQ ID NO: 1919192 - RNA, 21 nt, Human
gcacugccucucacagcugag

SEQ ID NO: 1919193 - RNA, 19 nt, Human
gcacugccucucacagcug

SEQ ID NO: 1919194 - RNA, 22 nt, Human
gcacugcuuccagugaggcucu

SEQ ID NO: 1919195 - RNA, 20 nt, Human
gcacugcuuccagugaggcu

SEQ ID NO: 1919196 - RNA, 15 nt, Human
gcacguauuuuaaua

SEQ ID NO: 1919197 - RNA, 14 nt, Human
gcacguauuuuaau

SEQ ID NO: 1919198 - RNA, 21 nt, Human
gcacugcccauggacaggcug

SEQ ID NO: 1919199 - RNA, 16 nt, Human
gcaggugaaacccagu

SEQ ID NO: 1919200 - RNA, 14 nt, Human
gcagguccccagac

SEQ ID NO: 1919201 - RNA, 13 nt, Human
gcagguccccaga

SEQ ID NO: 1919202 - RNA, 17 nt, Human
gcaggugaaacccaguc

SEQ ID NO: 1919203 - RNA, 20 nt, Human
gcaggugaaacccagucacu

SEQ ID NO: 1919204 - RNA, 15 nt, Human
gcaggugaauuguuu

SEQ ID NO: 1919205 - RNA, 20 nt, Human
gcaggucuugaacuccuggc

SEQ ID NO: 1919206 - RNA, 19 nt, Human
gcaggucuugaacuccugg

SEQ ID NO: 1919207 - RNA, 22 nt, Human
gcagguccaggguuugaguuca

SEQ ID NO: 1919208 - RNA, 19 nt, Human
gcagguagaccugucuccu

SEQ ID NO: 1919209 - RNA, 22 nt, Human
gcagggugcaguaucaugcccu

SEQ ID NO: 1919210 - RNA, 17 nt, Human
gcagguagaccugucuc

SEQ ID NO: 1919211 - RNA, 15 nt, Human
gcagugcaugcuguc

SEQ ID NO: 1919212 - RNA, 16 nt, Human
gcagugcaugcugucc

SEQ ID NO: 1919213 - RNA, 18 nt, Human
gcaguggagguagaauga

SEQ ID NO: 1919214 - RNA, 20 nt, Human
gcaguggagguagaaugacu

SEQ ID NO: 1919215 - RNA, 15 nt, Human
gcagugccugauaag

SEQ ID NO: 1919216 - RNA, 23 nt, Human
gcagggccgcccgggcccagagg

SEQ ID NO: 1919217 - RNA, 15 nt, Human
gcagggccgccaggg

SEQ ID NO: 1919218 - RNA, 22 nt, Human
gcagggccgcccgggcccagag

SEQ ID NO: 1919219 - RNA, 21 nt, Human
gcagggccgcccgggcccaga

SEQ ID NO: 1919220 - RNA, 23 nt, Human
gcagggccgccagggagaccugg

SEQ ID NO: 1919221 - RNA, 21 nt, Human
gcagggcucagcggggacagc

SEQ ID NO: 1919222 - RNA, 19 nt, Human
gcagggcucagcggggaca

SEQ ID NO: 1919223 - RNA, 15 nt, Human
gcaggcagccaggcc

SEQ ID NO: 1919224 - RNA, 16 nt, Human
gcaggcagccaggcca

SEQ ID NO: 1919225 - RNA, 13 nt, Human
gcagggcagucau

SEQ ID NO: 1919226 - RNA, 19 nt, Human
gcagggccaacccuucucc

SEQ ID NO: 1919227 - RNA, 18 nt, Human
gcagggucucacucuguc

SEQ ID NO: 1919228 - RNA, 17 nt, Human
gcagggucucacucugu

SEQ ID NO: 1919229 - RNA, 22 nt, Human
gcagggcucagcggggacagcu

SEQ ID NO: 1919230 - RNA, 19 nt, Human
gcaggggagggucagccag

SEQ ID NO: 1919231 - RNA, 21 nt, Human
gcaggggagggucagccaggg

SEQ ID NO: 1919232 - RNA, 20 nt, Human
gcaggggagggucagccagg

SEQ ID NO: 1919233 - RNA, 20 nt, Human
gcauaguaccaaucauuuua

SEQ ID NO: 1919234 - RNA, 17 nt, Human
gcauagguuuaauaauu

SEQ ID NO: 1919235 - RNA, 14 nt, Human
gcauauuuuguaac

SEQ ID NO: 1919236 - RNA, 13 nt, Human
gcauagaaguaaa

SEQ ID NO: 1919237 - RNA, 17 nt, Human
gcaguuauuaacacuaa

SEQ ID NO: 1919238 - RNA, 15 nt, Human
gcagugggagcugcc

SEQ ID NO: 1919239 - RNA, 14 nt, Human
gcagugggagcugc

SEQ ID NO: 1919240 - RNA, 13 nt, Human
gcagugggagcug

SEQ ID NO: 1919241 - RNA, 23 nt, Human
gcaguggugguuuucuguucuuu

SEQ ID NO: 1919242 - RNA, 22 nt, Human
gcaguggugguuuucuguucuu

SEQ ID NO: 1919243 - RNA, 12 nt, Human
gcagugugaaaa

SEQ ID NO: 1919244 - RNA, 18 nt, Human
gcagugguguggagaagc

SEQ ID NO: 1919245 - RNA, 20 nt, Human
gcaucuuugaauacaaagaa

SEQ ID NO: 1919246 - RNA, 20 nt, Human
gcaucuuguggcuuugcaac

SEQ ID NO: 1919247 - RNA, 18 nt, Human
gcaugaaguaauaugcac

SEQ ID NO: 1919248 - RNA, 13 nt, Human
gcaugaagguuuc

SEQ ID NO: 1919249 - RNA, 16 nt, Human
gcaucugaaaauugau

SEQ ID NO: 1919250 - RNA, 14 nt, Human
gcaucugaccagca

SEQ ID NO: 1919251 - RNA, 15 nt, Human
gcaucugaccagcag

SEQ ID NO: 1919252 - RNA, 17 nt, Human
gcaucugaccagcagcg

SEQ ID NO: 1919253 - RNA, 18 nt, Human
gcaucugaccagcagcgc

SEQ ID NO: 1919254 - RNA, 20 nt, Human
gcaucugaccagcagcgccu

SEQ ID NO: 1919255 - RNA, 18 nt, Human
gcaugauccaagcaagac

SEQ ID NO: 1919256 - RNA, 19 nt, Human
gcaugauccaagcaagacu

SEQ ID NO: 1919257 - RNA, 22 nt, Human
gcaugauccaagcaagacugag

SEQ ID NO: 1919258 - RNA, 23 nt, Human
gcaugauccaagcaagacugagg

SEQ ID NO: 1919259 - RNA, 23 nt, Human
gcaugauagacacauaugagggg

SEQ ID NO: 1919260 - RNA, 16 nt, Human
gcaugaucugaaaaau

SEQ ID NO: 1919261 - RNA, 18 nt, Human
gcaugaucugaaaaauac

SEQ ID NO: 1919262 - RNA, 18 nt, Human
gcaugcgggcuuccuccu

SEQ ID NO: 1919263 - RNA, 15 nt, Human
gcaugauuuuguaac

SEQ ID NO: 1919264 - RNA, 22 nt, Human
gcauguucucugaggacacuaa

SEQ ID NO: 1919265 - RNA, 21 nt, Human
gcauguucucugaggacacua

SEQ ID NO: 1919266 - RNA, 15 nt, Human
gcauguucucugagg

SEQ ID NO: 1919267 - RNA, 16 nt, Human
gcaugcugcuggacag

SEQ ID NO: 1919268 - RNA, 16 nt, Human
gcauuuuuuaaaacaa

SEQ ID NO: 1919269 - RNA, 15 nt, Human
gcauuuuuuaaaaca

SEQ ID NO: 1919270 - RNA, 14 nt, Human
gccaaaaaaagaca

SEQ ID NO: 1919271 - RNA, 18 nt, Human
gcauuuguuugaacugau

SEQ ID NO: 1919272 - RNA, 18 nt, Human
gcauuuuuuaaaacaaga

SEQ ID NO: 1919273 - RNA, 17 nt, Human
gcauuuuuuaaaacaag

SEQ ID NO: 1919274 - RNA, 16 nt, Human
gccaaaaaaagacagg

SEQ ID NO: 1919275 - RNA, 14 nt, Human
gccaaacucaccug

SEQ ID NO: 1919276 - RNA, 16 nt, Human
gccaaacucaccugcc

SEQ ID NO: 1919277 - RNA, 12 nt, Human
gccaaaggaagc

SEQ ID NO: 1919278 - RNA, 22 nt, Human
gccaaagcuaggccuggccaga

SEQ ID NO: 1919279 - RNA, 16 nt, Human
gccaaagcuaggccug

SEQ ID NO: 1919280 - RNA, 20 nt, Human
gccaaagccaaagcuaggcc

SEQ ID NO: 1919281 - RNA, 13 nt, Human
gccaaagccaaag

SEQ ID NO: 1919282 - RNA, 16 nt, Human
gccaaagccuccucca

SEQ ID NO: 1919283 - RNA, 19 nt, Human
gccaaagccuccuccagcc

SEQ ID NO: 1919284 - RNA, 17 nt, Human
gcauuaucuagauacug

SEQ ID NO: 1919285 - RNA, 18 nt, Human
gcauuauauuuguaaauu

SEQ ID NO: 1919286 - RNA, 19 nt, Human
gcauucaaauguauuacag

SEQ ID NO: 1919287 - RNA, 21 nt, Human
gcauuugaggucuguucuuuc

SEQ ID NO: 1919288 - RNA, 13 nt, Human
gcauuugcugaau

SEQ ID NO: 1919289 - RNA, 12 nt, Human
gcauugaacaca

SEQ ID NO: 1919290 - RNA, 16 nt, Human
gcauugaacacaaacu

SEQ ID NO: 1919291 - RNA, 18 nt, Human
gcauugaacacaaacugu

SEQ ID NO: 1919292 - RNA, 19 nt, Human
gcauugaacacaaacugua

SEQ ID NO: 1919293 - RNA, 16 nt, Human
gcauuuguuugaacug

SEQ ID NO: 1919294 - RNA, 16 nt, Human
gcauuuguguugaaga

SEQ ID NO: 1919295 - RNA, 14 nt, Human
gcauuugcugaaua

SEQ ID NO: 1919296 - RNA, 17 nt, Human
gcauuugcugaauacag

SEQ ID NO: 1919297 - RNA, 14 nt, Human
gauaguagcuuccu

SEQ ID NO: 1919298 - RNA, 14 nt, Human
gauagcacuuucua

SEQ ID NO: 1919299 - RNA, 16 nt, Human
gauaguauugugcaua

SEQ ID NO: 1919300 - RNA, 23 nt, Human
gaucaagucggaucuaguccagc

SEQ ID NO: 1919301 - RNA, 13 nt, Human
gaucaaugaaaug

SEQ ID NO: 1919302 - RNA, 21 nt, Human
gaucaaguuauuuuuaauuug

SEQ ID NO: 1919303 - RNA, 18 nt, Human
gaucacgccacugcacua

SEQ ID NO: 1919304 - RNA, 16 nt, Human
gaucacgccacugcac

SEQ ID NO: 1919305 - RNA, 22 nt, Human
gaucagucugauucccaagcuc

SEQ ID NO: 1919306 - RNA, 11 nt, Human
gaucaggucau

SEQ ID NO: 1919307 - RNA, 12 nt, Human
gaucagccuggg

SEQ ID NO: 1919308 - RNA, 15 nt, Human
gaucagccugggcaa

SEQ ID NO: 1919309 - RNA, 12 nt, Human
gaucacggcuca

SEQ ID NO: 1919310 - RNA, 21 nt, Human
gaucauccacugugccaugug

SEQ ID NO: 1919311 - RNA, 16 nt, Human
gaucauccacugugcc

SEQ ID NO: 1919312 - RNA, 19 nt, Human
gaucauccacugugccaug

SEQ ID NO: 1919313 - RNA, 17 nt, Human
gaucauccacugugcca

SEQ ID NO: 1919314 - RNA, 20 nt, Human
gaucaguguaccauuugccu

SEQ ID NO: 1919315 - RNA, 14 nt, Human
gaucauugugaaau

SEQ ID NO: 1919316 - RNA, 14 nt, Human
gaucauuaucagcc

SEQ ID NO: 1919317 - RNA, 20 nt, Human
gaucauugugaaauuauuca

SEQ ID NO: 1919318 - RNA, 23 nt, Human
gauagauaggucagugcaaauac

SEQ ID NO: 1919319 - RNA, 11 nt, Human
gauacagaaaa

SEQ ID NO: 1919320 - RNA, 16 nt, Human
gauaaguguauuuuuc

SEQ ID NO: 1919321 - RNA, 22 nt, Human
gauaauacaccacuacauucug

SEQ ID NO: 1919322 - RNA, 21 nt, Human
gauaauacaccacuacauucu

SEQ ID NO: 1919323 - RNA, 18 nt, Human
gauaauacaccacuacau

SEQ ID NO: 1919324 - RNA, 14 nt, Human
gauaauacaccacu

SEQ ID NO: 1919325 - RNA, 19 nt, Human
gauacaggaaaagcugcug

SEQ ID NO: 1919326 - RNA, 18 nt, Human
gauacaggaaaagcugcu

SEQ ID NO: 1919327 - RNA, 20 nt, Human
gauagaugcuggcccagggc

SEQ ID NO: 1919328 - RNA, 21 nt, Human
gauagaugcuggcccagggcc

SEQ ID NO: 1919329 - RNA, 13 nt, Human
gauagaugugugg

SEQ ID NO: 1919330 - RNA, 12 nt, Human
gauagaugcugg

SEQ ID NO: 1919331 - RNA, 16 nt, Human
gauagaugcuggccca

SEQ ID NO: 1919332 - RNA, 17 nt, Human
gauagaugcuggcccag

SEQ ID NO: 1919333 - RNA, 18 nt, Human
gauagaugcuggcccagg

SEQ ID NO: 1919334 - RNA, 21 nt, Human
gauagcacagacccugcccug

SEQ ID NO: 1919335 - RNA, 22 nt, Human
gauagcacagacccugcccugu

SEQ ID NO: 1919336 - RNA, 12 nt, Human
gauagcacuuuc

SEQ ID NO: 1919337 - RNA, 20 nt, Human
gauagcacuuucuacaaugu

SEQ ID NO: 1919338 - RNA, 21 nt, Human
gauaaauaacuuuuuuuuaag

SEQ ID NO: 1919339 - RNA, 16 nt, Human
gauaaauaacuuuuuu

SEQ ID NO: 1919340 - RNA, 22 nt, Human
gauaaauaguuuaugauuccac

SEQ ID NO: 1919341 - RNA, 16 nt, Human
gauaaauacaaggccc

SEQ ID NO: 1919342 - RNA, 22 nt, Human
gauaaauauuauauuauauaua

SEQ ID NO: 1919343 - RNA, 15 nt, Human
gauaaauauuauauu

SEQ ID NO: 1919344 - RNA, 16 nt, Human
gauaagcuucaaagcu

SEQ ID NO: 1919345 - RNA, 19 nt, Human
gauaaaguugguaaaccuu

SEQ ID NO: 1919346 - RNA, 13 nt, Human
gaggaaggaaacc

SEQ ID NO: 1919347 - RNA, 19 nt, Human
gaggaaggaaacccagcuc

SEQ ID NO: 1919348 - RNA, 20 nt, Human
gaggaaggaaacccagcucu

SEQ ID NO: 1919349 - RNA, 21 nt, Human
gaggaaggaaacccagcucug

SEQ ID NO: 1919350 - RNA, 13 nt, Human
gaugcaccagccc

SEQ ID NO: 1919351 - RNA, 22 nt, Human
gaugcacagaguuguuacauuu

SEQ ID NO: 1919352 - RNA, 21 nt, Human
gaugcacagaguuguuacauu

SEQ ID NO: 1919353 - RNA, 16 nt, Human
gaugaaguuuuacauu

SEQ ID NO: 1919354 - RNA, 17 nt, Human
gaugaaguuuuacauug

SEQ ID NO: 1919355 - RNA, 19 nt, Human
gaugacaacuacagaaaaa

SEQ ID NO: 1919356 - RNA, 20 nt, Human
gaugacaugcacucagcucu

SEQ ID NO: 1919357 - RNA, 19 nt, Human
gaugcagccucacaguccu

SEQ ID NO: 1919358 - RNA, 14 nt, Human
gaugcagccucaca

SEQ ID NO: 1919359 - RNA, 12 nt, Human
gaugcagccuca

SEQ ID NO: 1919360 - RNA, 16 nt, Human
gaugcagcauuaugau

SEQ ID NO: 1919361 - RNA, 21 nt, Human
gaugcagcauuuuguauuugu

SEQ ID NO: 1919362 - RNA, 19 nt, Human
gaugccaauauuaaaucug

SEQ ID NO: 1919363 - RNA, 15 nt, Human
gaugccacacaagga

SEQ ID NO: 1919364 - RNA, 19 nt, Human
gaugccugguggcagcugc

SEQ ID NO: 1919365 - RNA, 18 nt, Human
gaugccugguggcagcug

SEQ ID NO: 1919366 - RNA, 20 nt, Human
gaugccugguggcagcugcg

SEQ ID NO: 1919367 - RNA, 23 nt, Human
gauggaugccaauauuaaaucug

SEQ ID NO: 1919368 - RNA, 22 nt, Human
gauggauuuccagccaaagccu

SEQ ID NO: 1919369 - RNA, 17 nt, Human
gauggauucuccacuca

SEQ ID NO: 1919370 - RNA, 15 nt, Human
gauggauuuguauca

SEQ ID NO: 1919371 - RNA, 20 nt, Human
gauggcaaagaaggagagca

SEQ ID NO: 1919372 - RNA, 14 nt, Human
gauggcuccucuca

SEQ ID NO: 1919373 - RNA, 13 nt, Human
gauggggcccugc

SEQ ID NO: 1919374 - RNA, 14 nt, Human
gauggggcccugcc

SEQ ID NO: 1919375 - RNA, 22 nt, Human
gauggggcccugccuccuuugu

SEQ ID NO: 1919376 - RNA, 21 nt, Human
gauggcuaguaucaaaagaaa

SEQ ID NO: 1919377 - RNA, 12 nt, Human
gauggcuccucu

SEQ ID NO: 1919378 - RNA, 13 nt, Human
gauggcuccucuc

SEQ ID NO: 1919379 - RNA, 14 nt, Human
gauccccagcuguu

SEQ ID NO: 1919380 - RNA, 15 nt, Human
gaucccucauccuca

SEQ ID NO: 1919381 - RNA, 16 nt, Human
gaucccucauccucau

SEQ ID NO: 1919382 - RNA, 21 nt, Human
gauccugagccagauuucacu

SEQ ID NO: 1919383 - RNA, 22 nt, Human
gauccugagccagauuucacuc

SEQ ID NO: 1919384 - RNA, 21 nt, Human
gaucgcggcggagcuggcccc

SEQ ID NO: 1919385 - RNA, 16 nt, Human
gaucuauacuugcuuu

SEQ ID NO: 1919386 - RNA, 23 nt, Human
gaucuauacuugcuuuguguucu

SEQ ID NO: 1919387 - RNA, 17 nt, Human
gaucuuugcagacaggc

SEQ ID NO: 1919388 - RNA, 18 nt, Human
gaucuuugcagacaggca

SEQ ID NO: 1919389 - RNA, 21 nt, Human
gaucuuuggacagaagcagcu

SEQ ID NO: 1919390 - RNA, 11 nt, Human
gaucuuugugg

SEQ ID NO: 1919391 - RNA, 14 nt, Human
gaucuuuguggcca

SEQ ID NO: 1919392 - RNA, 16 nt, Human
gaucuuuguggccaag

SEQ ID NO: 1919393 - RNA, 13 nt, Human
gaucuuuggacag

SEQ ID NO: 1919394 - RNA, 18 nt, Human
gaucuguuuugaaggcaa

SEQ ID NO: 1919395 - RNA, 19 nt, Human
gaucuguuuugaaggcaaa

SEQ ID NO: 1919396 - RNA, 21 nt, Human
gaucugugaggggcucucuca

SEQ ID NO: 1919397 - RNA, 23 nt, Human
gaucucagugguuaagauuccua

SEQ ID NO: 1919398 - RNA, 13 nt, Human
gaucuguuuugaa

SEQ ID NO: 1919399 - RNA, 17 nt, Human
gaucuguuuugaaggca

SEQ ID NO: 1919400 - RNA, 17 nt, Human
gaugaaaauauuuaaag

SEQ ID NO: 1919401 - RNA, 16 nt, Human
gaucuuuucaaguuaa

SEQ ID NO: 1919402 - RNA, 15 nt, Human
gaucuuuguggccaa

SEQ ID NO: 1919403 - RNA, 14 nt, Human
gaugaaaauauuua

SEQ ID NO: 1919404 - RNA, 16 nt, Human
gaugaaaauauuuaaa

SEQ ID NO: 1919405 - RNA, 15 nt, Human
gaugaaaauauuuaa

SEQ ID NO: 1919406 - RNA, 15 nt, Human
gaugaagcauuuaca

SEQ ID NO: 1919407 - RNA, 15 nt, Human
gaugaagcaaacaca

SEQ ID NO: 1919408 - RNA, 16 nt, Human
gaugaagcaaacacau

SEQ ID NO: 1919409 - RNA, 19 nt, Human
gaugaagcaaacacauuaa

SEQ ID NO: 1919410 - RNA, 21 nt, Human
gauugcaauuugcacaaguuu

SEQ ID NO: 1919411 - RNA, 14 nt, Human
gauugcaauuugca

SEQ ID NO: 1919412 - RNA, 21 nt, Human
gauugcaacaggcugggcuuc

SEQ ID NO: 1919413 - RNA, 16 nt, Human
gauugcaccacugcac

SEQ ID NO: 1919414 - RNA, 23 nt, Human
gauugcaccacugcacuccagcc

SEQ ID NO: 1919415 - RNA, 20 nt, Human
gauugcaacaggcugggcuu

SEQ ID NO: 1919416 - RNA, 18 nt, Human
gauucuuuccugaggcug

SEQ ID NO: 1919417 - RNA, 16 nt, Human
gauucuuuccugaggc

SEQ ID NO: 1919418 - RNA, 17 nt, Human
gauucuuuccugaggcu

SEQ ID NO: 1919419 - RNA, 20 nt, Human
gauucccaagcucugcuccu

SEQ ID NO: 1919420 - RNA, 19 nt, Human
gauucccaagcucugcucc

SEQ ID NO: 1919421 - RNA, 21 nt, Human
gauucccaagcucugcuccuc

SEQ ID NO: 1919422 - RNA, 13 nt, Human
gauuccuuccugu

SEQ ID NO: 1919423 - RNA, 15 nt, Human
gauuccuuccuguuc

SEQ ID NO: 1919424 - RNA, 12 nt, Human
gauucuuuccug

SEQ ID NO: 1919425 - RNA, 23 nt, Human
gauggggcugcaccggcuggccu

SEQ ID NO: 1919426 - RNA, 16 nt, Human
gaugggggaacucaga

SEQ ID NO: 1919427 - RNA, 19 nt, Human
gaugggggaacucagaucc

SEQ ID NO: 1919428 - RNA, 20 nt, Human
gaugggggaacucagaucca

SEQ ID NO: 1919429 - RNA, 22 nt, Human
gaugggggaacucagauccagg

SEQ ID NO: 1919430 - RNA, 19 nt, Human
gauucagacagcugccugg

SEQ ID NO: 1919431 - RNA, 13 nt, Human
gauucagcucugc

SEQ ID NO: 1919432 - RNA, 15 nt, Human
gauucagcucugcaa

SEQ ID NO: 1919433 - RNA, 17 nt, Human
gauuccagguggcauca

SEQ ID NO: 1919434 - RNA, 17 nt, Human
gauucauauuuacuucu

SEQ ID NO: 1919435 - RNA, 19 nt, Human
gauucauaguaacuucuua

SEQ ID NO: 1919436 - RNA, 18 nt, Human
gauucauauuuacuucuu

SEQ ID NO: 1919437 - RNA, 19 nt, Human
gauucauauuuacuucuua

SEQ ID NO: 1919438 - RNA, 22 nt, Human
gauugcaauuugcacaaguuuu

SEQ ID NO: 1919439 - RNA, 16 nt, Human
gauuuccccuuuugca

SEQ ID NO: 1919440 - RNA, 20 nt, Human
gauuucccauccccuguggg

SEQ ID NO: 1919441 - RNA, 22 nt, Human
gauuucccauccccugugggaa

SEQ ID NO: 1919442 - RNA, 22 nt, Human
gauuuccagucuccaccaggaa

SEQ ID NO: 1919443 - RNA, 18 nt, Human
gauuuccguuaaaauacc

SEQ ID NO: 1919444 - RNA, 15 nt, Human
gauuuccguuaaaau

SEQ ID NO: 1919445 - RNA, 17 nt, Human
gauuuccccuuuugcau

SEQ ID NO: 1919446 - RNA, 19 nt, Human
gauuuccccuuuugcauuc

SEQ ID NO: 1919447 - RNA, 23 nt, Human
gauuuccccuuuugcauucuccc

SEQ ID NO: 1919448 - RNA, 22 nt, Human
gauuuccccuuuugcauucucc

SEQ ID NO: 1919449 - RNA, 19 nt, Human
gauuugguguacaauucag

SEQ ID NO: 1919450 - RNA, 13 nt, Human
gauuuggggugga

SEQ ID NO: 1919451 - RNA, 22 nt, Human
gauuuggucaacacuaacauga

SEQ ID NO: 1919452 - RNA, 20 nt, Human
gauuuggggcucagaguggg

SEQ ID NO: 1919453 - RNA, 23 nt, Human
gauuugcucagugucuggcugca

SEQ ID NO: 1919454 - RNA, 19 nt, Human
gauuucuguuuagauaaua

SEQ ID NO: 1919455 - RNA, 11 nt, Human
gauuucuguuu

SEQ ID NO: 1919456 - RNA, 21 nt, Human
gauuugcauugaacacaaacu

SEQ ID NO: 1919457 - RNA, 17 nt, Human
gauuugcauugaacaca

SEQ ID NO: 1919458 - RNA, 19 nt, Human
gauuuguuaaugauagcua

SEQ ID NO: 1919459 - RNA, 22 nt, Human
gauuugucuuuggugaacauug

SEQ ID NO: 1919460 - RNA, 20 nt, Human
gauuugucuuuggugaacau

SEQ ID NO: 1919461 - RNA, 22 nt, Human
gauuuuuacguuugaagacauu

SEQ ID NO: 1919462 - RNA, 18 nt, Human
gcaaaggguccagaagga

SEQ ID NO: 1919463 - RNA, 22 nt, Human
gcaaaggguccagaaggagaca

SEQ ID NO: 1919464 - RNA, 16 nt, Human
gcaaaguaucccuacu

SEQ ID NO: 1919465 - RNA, 20 nt, Human
gcaaauccuugugggaaaag

SEQ ID NO: 1919466 - RNA, 15 nt, Human
gauuuuugucuugug

SEQ ID NO: 1919467 - RNA, 13 nt, Human
gcaaaauugcaaa

SEQ ID NO: 1919468 - RNA, 17 nt, Human
gcaaaauugcaaaucuu

SEQ ID NO: 1919469 - RNA, 17 nt, Human
gcaagaauugaagcagg

SEQ ID NO: 1919470 - RNA, 14 nt, Human
gcaacagaucugga

SEQ ID NO: 1919471 - RNA, 16 nt, Human
gcaacagaucuggaac

SEQ ID NO: 1919472 - RNA, 17 nt, Human
gcaacagaucuggaacc

SEQ ID NO: 1919473 - RNA, 18 nt, Human
gcaacagaucuggaaccu

SEQ ID NO: 1919474 - RNA, 20 nt, Human
gcaacagaucuggaaccuca

SEQ ID NO: 1919475 - RNA, 22 nt, Human
gcaacagaucuggaaccucagc

SEQ ID NO: 1919476 - RNA, 22 nt, Human
gcaaauccuugugggaaaagaa

SEQ ID NO: 1919477 - RNA, 15 nt, Human
gcaacagaaaaaugg

SEQ ID NO: 1919478 - RNA, 17 nt, Human
gcaacagaaaaauggag

SEQ ID NO: 1919479 - RNA, 12 nt, Human
gcaacagaucug

SEQ ID NO: 1919480 - RNA, 13 nt, Human
gcaacagaucugg

SEQ ID NO: 1919481 - RNA, 23 nt, Human
gcaagacgcugugcugcccugcc

SEQ ID NO: 1919482 - RNA, 19 nt, Human
gcaagagaauugcuugaac

SEQ ID NO: 1919483 - RNA, 14 nt, Human
gcaagacgcugugc

SEQ ID NO: 1919484 - RNA, 20 nt, Human
gcaagacgcugugcugcccu

SEQ ID NO: 1919485 - RNA, 21 nt, Human
gcaagacgcugugcugcccug

SEQ ID NO: 1919486 - RNA, 22 nt, Human
gcaagacgcugugcugcccugc

SEQ ID NO: 1919487 - RNA, 18 nt, Human
gcaaggagauuuacaacu

SEQ ID NO: 1919488 - RNA, 15 nt, Human
gcaagcccuguugac

SEQ ID NO: 1919489 - RNA, 23 nt, Human
gcaagcccuguugacacaggucu

SEQ ID NO: 1919490 - RNA, 15 nt, Human
gcaagccccugcucc

SEQ ID NO: 1919491 - RNA, 13 nt, Human
gcaaggcugucaa

SEQ ID NO: 1919492 - RNA, 16 nt, Human
gcaaggguucccucaa

SEQ ID NO: 1919493 - RNA, 18 nt, Human
gcaaggguucccucaaga

SEQ ID NO: 1919494 - RNA, 11 nt, Human
gcaaggcuguc

SEQ ID NO: 1919495 - RNA, 23 nt, Human
gcaaugcuggcuguuggcugggg

SEQ ID NO: 1919496 - RNA, 22 nt, Human
gcaaugcuggcuguuggcuggg

SEQ ID NO: 1919497 - RNA, 14 nt, Human
gcaaugcuggcugu

SEQ ID NO: 1919498 - RNA, 13 nt, Human
gcaaugcuggcug

SEQ ID NO: 1919499 - RNA, 23 nt, Human
gcaaugaccuuucaauaggaaaa

SEQ ID NO: 1919500 - RNA, 16 nt, Human
gcaaugaugaaugaga

SEQ ID NO: 1919501 - RNA, 17 nt, Human
gcaaugaugaaugagaa

SEQ ID NO: 1919502 - RNA, 14 nt, Human
gcaaggucauuuuu

SEQ ID NO: 1919503 - RNA, 15 nt, Human
gcaaucaaaucugcu

SEQ ID NO: 1919504 - RNA, 17 nt, Human
gcaaucaaaucugcuuu

SEQ ID NO: 1919505 - RNA, 15 nt, Human
gcaaugaccuuucaa

SEQ ID NO: 1919506 - RNA, 17 nt, Human
gcaaugaccuuucaaua

SEQ ID NO: 1919507 - RNA, 20 nt, Human
gcaaugaccuuucaauagga

SEQ ID NO: 1919508 - RNA, 22 nt, Human
gcaaugaccuuucaauaggaaa

SEQ ID NO: 1919509 - RNA, 16 nt, Human
gccucugccacugacu

SEQ ID NO: 1919510 - RNA, 18 nt, Human
gccucugccucugacaca

SEQ ID NO: 1919511 - RNA, 13 nt, Human
gccucugccucug

SEQ ID NO: 1919512 - RNA, 12 nt, Human
gccucugccucu

SEQ ID NO: 1919513 - RNA, 15 nt, Human
gccucugcacucccc

SEQ ID NO: 1919514 - RNA, 13 nt, Human
gccugcaagggag

SEQ ID NO: 1919515 - RNA, 15 nt, Human
gccugcaagggagug

SEQ ID NO: 1919516 - RNA, 21 nt, Human
gccucugacacacagcucugu

SEQ ID NO: 1919517 - RNA, 20 nt, Human
gccucugacacacagcucug

SEQ ID NO: 1919518 - RNA, 19 nt, Human
gccucugacacacagcucu

SEQ ID NO: 1919519 - RNA, 14 nt, Human
gccucugcacuccc

SEQ ID NO: 1919520 - RNA, 18 nt, Human
gccucugacacacagcuc

SEQ ID NO: 1919521 - RNA, 17 nt, Human
gccucugacacacagcu

SEQ ID NO: 1919522 - RNA, 16 nt, Human
gccucucucaggccaa

SEQ ID NO: 1919523 - RNA, 13 nt, Human
gccucucucaggc

SEQ ID NO: 1919524 - RNA, 14 nt, Human
gccucucucaggcc

SEQ ID NO: 1919525 - RNA, 20 nt, Human
gccucucauuccagaggaag

SEQ ID NO: 1919526 - RNA, 21 nt, Human
gccuccgagggacgcggcucc

SEQ ID NO: 1919527 - RNA, 13 nt, Human
gccuccgagggac

SEQ ID NO: 1919528 - RNA, 19 nt, Human
gccucucauuccagaggaa

SEQ ID NO: 1919529 - RNA, 20 nt, Human
gccuccuacagcccaccugg

SEQ ID NO: 1919530 - RNA, 19 nt, Human
gccucccgaguagcuggga

SEQ ID NO: 1919531 - RNA, 18 nt, Human
gccucccgaguagcuggg

SEQ ID NO: 1919532 - RNA, 20 nt, Human
gccucccgaguagcugggac

SEQ ID NO: 1919533 - RNA, 13 nt, Human
gccucccugguga

SEQ ID NO: 1919534 - RNA, 15 nt, Human
gccucccuggugaga

SEQ ID NO: 1919535 - RNA, 17 nt, Human
gccucccaucacccgcu

SEQ ID NO: 1919536 - RNA, 14 nt, Human
gccucccaucaccc

SEQ ID NO: 1919537 - RNA, 16 nt, Human
gccucccaucacccgc

SEQ ID NO: 1919538 - RNA, 15 nt, Human
gccucccaaaugagc

SEQ ID NO: 1919539 - RNA, 14 nt, Human
gccucccacugggg

SEQ ID NO: 1919540 - RNA, 16 nt, Human
gccucccaacucaccc

SEQ ID NO: 1919541 - RNA, 17 nt, Human
gccucccaacucacccc

SEQ ID NO: 1919542 - RNA, 18 nt, Human
gccucccaacucacccca

SEQ ID NO: 1919543 - RNA, 19 nt, Human
gccucccaacucaccccag

SEQ ID NO: 1919544 - RNA, 19 nt, Human
gccucccaaagugcuggga

SEQ ID NO: 1919545 - RNA, 13 nt, Human
gccucccaacuca

SEQ ID NO: 1919546 - RNA, 18 nt, Human
gccucccaaagugcuggg

SEQ ID NO: 1919547 - RNA, 16 nt, Human
gccucagcauccuggc

SEQ ID NO: 1919548 - RNA, 15 nt, Human
gccucagcauccugg

SEQ ID NO: 1919549 - RNA, 21 nt, Human
gccucacaguccuuaccagca

SEQ ID NO: 1919550 - RNA, 18 nt, Human
gccucacaguccuuacca

SEQ ID NO: 1919551 - RNA, 16 nt, Human
gccgucaccccugccu

SEQ ID NO: 1919552 - RNA, 22 nt, Human
gccguaguagauguucuacuuu

SEQ ID NO: 1919553 - RNA, 15 nt, Human
gccguaguagauguu

SEQ ID NO: 1919554 - RNA, 15 nt, Human
gccgguggugcaggu

SEQ ID NO: 1919555 - RNA, 15 nt, Human
gccgucuaccugagg

SEQ ID NO: 1919556 - RNA, 16 nt, Human
gccgucuaccugaggg

SEQ ID NO: 1919557 - RNA, 17 nt, Human
gccgucuaccugagggg

SEQ ID NO: 1919558 - RNA, 17 nt, Human
gccgugcucgccccagc

SEQ ID NO: 1919559 - RNA, 21 nt, Human
gccgugcucgccccagcaggu

SEQ ID NO: 1919560 - RNA, 20 nt, Human
gccgugcucgccccagcagg

SEQ ID NO: 1919561 - RNA, 20 nt, Human
gccguguaaccauggaccca

SEQ ID NO: 1919562 - RNA, 18 nt, Human
gccguguguugcaugcag

SEQ ID NO: 1919563 - RNA, 22 nt, Human
gccuaugcacauauggacucug

SEQ ID NO: 1919564 - RNA, 20 nt, Human
gccuaugcacauauggacuc

SEQ ID NO: 1919565 - RNA, 23 nt, Human
gccuaugcacauauggacucugc

SEQ ID NO: 1919566 - RNA, 14 nt, Human
gccuaugcacauau

SEQ ID NO: 1919567 - RNA, 13 nt, Human
gccucacaguccu

SEQ ID NO: 1919568 - RNA, 17 nt, Human
gccucacaguccuuacc

SEQ ID NO: 1919569 - RNA, 19 nt, Human
gccucaaccuccugggcua

SEQ ID NO: 1919570 - RNA, 18 nt, Human
gccucaaccuccugggcu

SEQ ID NO: 1919571 - RNA, 21 nt, Human
gccgcaccuaaagcagccagc

SEQ ID NO: 1919572 - RNA, 12 nt, Human
gccgcagagcug

SEQ ID NO: 1919573 - RNA, 13 nt, Human
gccgcagcccugc

SEQ ID NO: 1919574 - RNA, 12 nt, Human
gccgcagcccug

SEQ ID NO: 1919575 - RNA, 20 nt, Human
gccgcaccuaaagcagccag

SEQ ID NO: 1919576 - RNA, 19 nt, Human
gccgcaccauugaacugua

SEQ ID NO: 1919577 - RNA, 11 nt, Human
gccgcagcccu

SEQ ID NO: 1919578 - RNA, 21 nt, Human
gccgagaucacgccacugcac

SEQ ID NO: 1919579 - RNA, 20 nt, Human
gccgagaucacgccacugca

SEQ ID NO: 1919580 - RNA, 22 nt, Human
gccgagaucacgccacugcacu

SEQ ID NO: 1919581 - RNA, 20 nt, Human
gccgggcgugguggugagug

SEQ ID NO: 1919582 - RNA, 21 nt, Human
gccgggcgcgguggcucacgc

SEQ ID NO: 1919583 - RNA, 15 nt, Human
gccgggccgcagacu

SEQ ID NO: 1919584 - RNA, 19 nt, Human
gccgggaccccgagccugg

SEQ ID NO: 1919585 - RNA, 23 nt, Human
gccgggaccccgagccuggcucc

SEQ ID NO: 1919586 - RNA, 18 nt, Human
gccgggaccccgagccug

SEQ ID NO: 1919587 - RNA, 14 nt, Human
gcccuucucuccag

SEQ ID NO: 1919588 - RNA, 16 nt, Human
gcccuucucuccagcc

SEQ ID NO: 1919589 - RNA, 17 nt, Human
gcccuucucuccagccc

SEQ ID NO: 1919590 - RNA, 18 nt, Human
gcccuucucuccagcccc

SEQ ID NO: 1919591 - RNA, 18 nt, Human
gcgacacugggaggccag

SEQ ID NO: 1919592 - RNA, 12 nt, Human
gcgacagugaga

SEQ ID NO: 1919593 - RNA, 22 nt, Human
gcgacagugagacucugucuca

SEQ ID NO: 1919594 - RNA, 19 nt, Human
gcgccgcaaaccacacugg

SEQ ID NO: 1919595 - RNA, 21 nt, Human
gcgccgcaaaccacacuggac

SEQ ID NO: 1919596 - RNA, 15 nt, Human
gcgccuacaggagug

SEQ ID NO: 1919597 - RNA, 14 nt, Human
gcgccuuucccaac

SEQ ID NO: 1919598 - RNA, 15 nt, Human
gcgccuuucccaacu

SEQ ID NO: 1919599 - RNA, 16 nt, Human
gcgccuuucccaacuc

SEQ ID NO: 1919600 - RNA, 13 nt, Human
gcggacagccacg

SEQ ID NO: 1919601 - RNA, 11 nt, Human
gcggacagcca

SEQ ID NO: 1919602 - RNA, 19 nt, Human
gcgucucauacucaccuca

SEQ ID NO: 1919603 - RNA, 19 nt, Human
gcgguuccucguucucccu

SEQ ID NO: 1919604 - RNA, 22 nt, Human
gcgggugaacaaagcagccacg

SEQ ID NO: 1919605 - RNA, 21 nt, Human
gcgggugaacaaagcagccac

SEQ ID NO: 1919606 - RNA, 18 nt, Human
gcggugggcacccacccu

SEQ ID NO: 1919607 - RNA, 15 nt, Human
gcggacagccacggc

SEQ ID NO: 1919608 - RNA, 22 nt, Human
gcgggcgcacugccucucacag

SEQ ID NO: 1919609 - RNA, 18 nt, Human
gcgggcaggggaggguca

SEQ ID NO: 1919610 - RNA, 17 nt, Human
gcgggcgcacugccucu

SEQ ID NO: 1919611 - RNA, 23 nt, Human
gcgggcgcacugccucucacagc

SEQ ID NO: 1919612 - RNA, 13 nt, Human
gcuaagagggagg

SEQ ID NO: 1919613 - RNA, 15 nt, Human
gcuaaagcccagaga

SEQ ID NO: 1919614 - RNA, 17 nt, Human
gcuaagaauauuugaau

SEQ ID NO: 1919615 - RNA, 16 nt, Human
gcgucuguucccccuu

SEQ ID NO: 1919616 - RNA, 21 nt, Human
gcgucuggaaguccaaugugg

SEQ ID NO: 1919617 - RNA, 17 nt, Human
gcgucuguucccccuuc

SEQ ID NO: 1919618 - RNA, 20 nt, Human
gcuaagagggagggagggcu

SEQ ID NO: 1919619 - RNA, 20 nt, Human
gcuacacacugcauguuugu

SEQ ID NO: 1919620 - RNA, 13 nt, Human
gcuacacacugca

SEQ ID NO: 1919621 - RNA, 14 nt, Human
gcuacacaggggaa

SEQ ID NO: 1919622 - RNA, 15 nt, Human
gcuaggaacacuccu

SEQ ID NO: 1919623 - RNA, 16 nt, Human
gcuaggaacacuccuu

SEQ ID NO: 1919624 - RNA, 17 nt, Human
gcuauagccuggggugg

SEQ ID NO: 1919625 - RNA, 20 nt, Human
gcuaccuuuguauucucucc

SEQ ID NO: 1919626 - RNA, 16 nt, Human
gcuaccuuuguauucu

SEQ ID NO: 1919627 - RNA, 19 nt, Human
gcuagaacucccuuucaac

SEQ ID NO: 1919628 - RNA, 20 nt, Human
gcuacaguuuugugaaucuu

SEQ ID NO: 1919629 - RNA, 15 nt, Human
gcuacaggggccaga

SEQ ID NO: 1919630 - RNA, 13 nt, Human
gccuggugcugcu

SEQ ID NO: 1919631 - RNA, 14 nt, Human
gccugguggcagcu

SEQ ID NO: 1919632 - RNA, 18 nt, Human
gccugguggcagcugcgg

SEQ ID NO: 1919633 - RNA, 21 nt, Human
gccugguggcagcugcggucc

SEQ ID NO: 1919634 - RNA, 19 nt, Human
gccugguggcagcugcggu

SEQ ID NO: 1919635 - RNA, 13 nt, Human
gccugguggcagc

SEQ ID NO: 1919636 - RNA, 14 nt, Human
gccuggggucugga

SEQ ID NO: 1919637 - RNA, 14 nt, Human
gccugggguggggu

SEQ ID NO: 1919638 - RNA, 16 nt, Human
gccuggggugggguca

SEQ ID NO: 1919639 - RNA, 17 nt, Human
gccugguccucacacuc

SEQ ID NO: 1919640 - RNA, 22 nt, Human
gccugggguggggucaugcccu

SEQ ID NO: 1919641 - RNA, 16 nt, Human
gccuggguccagggga

SEQ ID NO: 1919642 - RNA, 22 nt, Human
gccugggggcugggcagaggaa

SEQ ID NO: 1919643 - RNA, 18 nt, Human
gccugccagcugcacuga

SEQ ID NO: 1919644 - RNA, 14 nt, Human
gccugccagcugca

SEQ ID NO: 1919645 - RNA, 15 nt, Human
gccugccagcugcac

SEQ ID NO: 1919646 - RNA, 23 nt, Human
gccugccacucaggcccaaagcc

SEQ ID NO: 1919647 - RNA, 15 nt, Human
gccugccacucaggc

SEQ ID NO: 1919648 - RNA, 10 nt, Human
gccuuaugga

SEQ ID NO: 1919649 - RNA, 14 nt, Human
gccuuauggaacac

SEQ ID NO: 1919650 - RNA, 23 nt, Human
gccuuaucuccaagaccagagau

SEQ ID NO: 1919651 - RNA, 18 nt, Human
gccuuagaagucacacag

SEQ ID NO: 1919652 - RNA, 17 nt, Human
gccuuagaagucacaca

SEQ ID NO: 1919653 - RNA, 19 nt, Human
gccuuagaagucacacagu

SEQ ID NO: 1919654 - RNA, 12 nt, Human
gccuguuuaaga

SEQ ID NO: 1919655 - RNA, 13 nt, Human
gccuguuuaagag

SEQ ID NO: 1919656 - RNA, 18 nt, Human
gccuuacccucauguucu

SEQ ID NO: 1919657 - RNA, 21 nt, Human
gccuuacacaaugguuuucuu

SEQ ID NO: 1919658 - RNA, 20 nt, Human
gccuuacacaaugguuuucu

SEQ ID NO: 1919659 - RNA, 21 nt, Human
gccuuccaggggugggacacc

SEQ ID NO: 1919660 - RNA, 15 nt, Human
gccuuccaggggugg

SEQ ID NO: 1919661 - RNA, 16 nt, Human
gccuuccagggguggg

SEQ ID NO: 1919662 - RNA, 12 nt, Human
gccuuccagggg

SEQ ID NO: 1919663 - RNA, 16 nt, Human
gccuuauggaacacuc

SEQ ID NO: 1919664 - RNA, 18 nt, Human
gccuuauggaacacucug

SEQ ID NO: 1919665 - RNA, 19 nt, Human
gccuuauggaacacucuga

SEQ ID NO: 1919666 - RNA, 20 nt, Human
gccuuauggaacacucugag

SEQ ID NO: 1919667 - RNA, 16 nt, Human
gccuuggcucagacau

SEQ ID NO: 1919668 - RNA, 14 nt, Human
gccuuggcucagac

SEQ ID NO: 1919669 - RNA, 15 nt, Human
gccuuggcucagaca

SEQ ID NO: 1919670 - RNA, 12 nt, Human
gccuuggcucag

SEQ ID NO: 1919671 - RNA, 23 nt, Human
gcgacaaugcaaaccaucauuga

SEQ ID NO: 1919672 - RNA, 13 nt, Human
gccuuuggcuuca

SEQ ID NO: 1919673 - RNA, 16 nt, Human
gccuuuggcagaguuc

SEQ ID NO: 1919674 - RNA, 15 nt, Human
gcccgggcccagagg

SEQ ID NO: 1919675 - RNA, 14 nt, Human
gcccgggcccagag

SEQ ID NO: 1919676 - RNA, 13 nt, Human
gcccgggcccaga

SEQ ID NO: 1919677 - RNA, 19 nt, Human
gcccuccaagaccuucucc

SEQ ID NO: 1919678 - RNA, 21 nt, Human
gcccuccaagaccuucuccuu

SEQ ID NO: 1919679 - RNA, 17 nt, Human
gcccuccagcucuuucc

SEQ ID NO: 1919680 - RNA, 21 nt, Human
gcccuccagcucuuuccuccu

SEQ ID NO: 1919681 - RNA, 12 nt, Human
gcccucccaggc

SEQ ID NO: 1919682 - RNA, 21 nt, Human
gcccucccaggcucucaacag

SEQ ID NO: 1919683 - RNA, 22 nt, Human
gcccuccaagaccuucuccuuc

SEQ ID NO: 1919684 - RNA, 23 nt, Human
gcccuccaagaccuucuccuuca

SEQ ID NO: 1919685 - RNA, 18 nt, Human
gcccuccccauggagcca

SEQ ID NO: 1919686 - RNA, 18 nt, Human
gcccucccuguuccccag

SEQ ID NO: 1919687 - RNA, 20 nt, Human
gcccucccuguuccccagag

SEQ ID NO: 1919688 - RNA, 17 nt, Human
gcccuccuacccugcgc

SEQ ID NO: 1919689 - RNA, 22 nt, Human
gcccucccuguuccccagagaa

SEQ ID NO: 1919690 - RNA, 21 nt, Human
gcccucccuguuccccagaga

SEQ ID NO: 1919691 - RNA, 13 nt, Human
gcccucugcccac

SEQ ID NO: 1919692 - RNA, 16 nt, Human
gcccucugcccacucc

SEQ ID NO: 1919693 - RNA, 18 nt, Human
gcccucugcccacucccu

SEQ ID NO: 1919694 - RNA, 19 nt, Human
gcccucugcccacucccug

SEQ ID NO: 1919695 - RNA, 14 nt, Human
gcccugagcuuucu

SEQ ID NO: 1919696 - RNA, 18 nt, Human
gcccuccuacccugcgcc

SEQ ID NO: 1919697 - RNA, 14 nt, Human
gcccugacccugug

SEQ ID NO: 1919698 - RNA, 17 nt, Human
gcccugacccuguggaa

SEQ ID NO: 1919699 - RNA, 16 nt, Human
gcccugcagagggcac

SEQ ID NO: 1919700 - RNA, 15 nt, Human
gcccugcagagggca

SEQ ID NO: 1919701 - RNA, 13 nt, Human
gcccugcagaggg

SEQ ID NO: 1919702 - RNA, 14 nt, Human
gcccugcagagggc

SEQ ID NO: 1919703 - RNA, 22 nt, Human
gccccgaggccuucucugaagg

SEQ ID NO: 1919704 - RNA, 18 nt, Human
gccccgaggccuucucug

SEQ ID NO: 1919705 - RNA, 14 nt, Human
gccccucagggucc

SEQ ID NO: 1919706 - RNA, 15 nt, Human
gccccgaggccuucu

SEQ ID NO: 1919707 - RNA, 16 nt, Human
gccccucagggucccu

SEQ ID NO: 1919708 - RNA, 18 nt, Human
gccccucagggucccugg

SEQ ID NO: 1919709 - RNA, 23 nt, Human
gccccuucugcucagcucugggc

SEQ ID NO: 1919710 - RNA, 19 nt, Human
gccccuucugcucagcucu

SEQ ID NO: 1919711 - RNA, 20 nt, Human
gccccuucugcucagcucug

SEQ ID NO: 1919712 - RNA, 15 nt, Human
gccccuuuacggaca

SEQ ID NO: 1919713 - RNA, 20 nt, Human
gccccuuuacggacaccccc

SEQ ID NO: 1919714 - RNA, 22 nt, Human
gccccuuuacggacacccccuc

SEQ ID NO: 1919715 - RNA, 17 nt, Human
gccccuguucuggcaga

SEQ ID NO: 1919716 - RNA, 14 nt, Human
gccccuucugcuca

SEQ ID NO: 1919717 - RNA, 15 nt, Human
gccccuucugcucag

SEQ ID NO: 1919718 - RNA, 17 nt, Human
gccccuucugcucagcu

SEQ ID NO: 1919719 - RNA, 18 nt, Human
gccccuucugcucagcuc

SEQ ID NO: 1919720 - RNA, 18 nt, Human
gccccugucuagagaggg

SEQ ID NO: 1919721 - RNA, 19 nt, Human
gccccugucuagagaggga

SEQ ID NO: 1919722 - RNA, 20 nt, Human
gccccugagaucucugcagg

SEQ ID NO: 1919723 - RNA, 16 nt, Human
gccccugagaucucug

SEQ ID NO: 1919724 - RNA, 23 nt, Human
gcccccacaauggucccaaacag

SEQ ID NO: 1919725 - RNA, 12 nt, Human
gcccccugcccu

SEQ ID NO: 1919726 - RNA, 14 nt, Human
gcccccugcccucc

SEQ ID NO: 1919727 - RNA, 19 nt, Human
gcccccugcccuccccucu

SEQ ID NO: 1919728 - RNA, 13 nt, Human
gcccccuggccuc

SEQ ID NO: 1919729 - RNA, 14 nt, Human
gcccccuggccucu

SEQ ID NO: 1919730 - RNA, 15 nt, Human
gcccccuggccucug

SEQ ID NO: 1919731 - RNA, 16 nt, Human
gcccccuggccucugu

SEQ ID NO: 1919732 - RNA, 17 nt, Human
gcccccuggccucugug

SEQ ID NO: 1919733 - RNA, 19 nt, Human
gcccccuggccucugugcc

SEQ ID NO: 1919734 - RNA, 14 nt, Human
gccccauucugccu

SEQ ID NO: 1919735 - RNA, 15 nt, Human
gccccauucugccug

SEQ ID NO: 1919736 - RNA, 23 nt, Human
gccccauucuuuuguaauuuaaa

SEQ ID NO: 1919737 - RNA, 13 nt, Human
gccccauccucug

SEQ ID NO: 1919738 - RNA, 14 nt, Human
gccccauccucugu

SEQ ID NO: 1919739 - RNA, 22 nt, Human
gccccauccucuguacagagcc

SEQ ID NO: 1919740 - RNA, 12 nt, Human
gccccagugccc

SEQ ID NO: 1919741 - RNA, 18 nt, Human
gccccaucccaaacccuu

SEQ ID NO: 1919742 - RNA, 14 nt, Human
gccccauccuccag

SEQ ID NO: 1919743 - RNA, 16 nt, Human
gccccauccuccagca

SEQ ID NO: 1919744 - RNA, 17 nt, Human
gccccauccuccagcag

SEQ ID NO: 1919745 - RNA, 18 nt, Human
gccccauccuccagcagg

SEQ ID NO: 1919746 - RNA, 14 nt, Human
gccccagugcccac

SEQ ID NO: 1919747 - RNA, 13 nt, Human
gccccagugccca

SEQ ID NO: 1919748 - RNA, 10 nt, Human
gcccaggccu

SEQ ID NO: 1919749 - RNA, 13 nt, Human
gcccagagcccag

SEQ ID NO: 1919750 - RNA, 15 nt, Human
gcccaggcuggagug

SEQ ID NO: 1919751 - RNA, 13 nt, Human
gcccaggccuccu

SEQ ID NO: 1919752 - RNA, 23 nt, Human
gcccaggccccugccacccuggg

SEQ ID NO: 1919753 - RNA, 21 nt, Human
gcccagagaggguggugaccu

SEQ ID NO: 1919754 - RNA, 12 nt, Human
gcccaggcuggc

SEQ ID NO: 1919755 - RNA, 19 nt, Human
gcccaggcuggagugcagu

SEQ ID NO: 1919756 - RNA, 20 nt, Human
gcccaggcuggagugcagug

SEQ ID NO: 1919757 - RNA, 15 nt, Human
gccaggacaccgggc

SEQ ID NO: 1919758 - RNA, 23 nt, Human
gccaggaauuucccaggacccug

SEQ ID NO: 1919759 - RNA, 21 nt, Human
gccaggaauuucccaggaccc

SEQ ID NO: 1919760 - RNA, 22 nt, Human
gccaggaauuucccaggacccu

SEQ ID NO: 1919761 - RNA, 20 nt, Human
gccaggacaccgggcagggc

SEQ ID NO: 1919762 - RNA, 13 nt, Human
gccagcuggagaa

SEQ ID NO: 1919763 - RNA, 15 nt, Human
gccaggaagccagca

SEQ ID NO: 1919764 - RNA, 17 nt, Human
gccaggaauuucccagg

SEQ ID NO: 1919765 - RNA, 18 nt, Human
gccaggaauuucccagga

SEQ ID NO: 1919766 - RNA, 19 nt, Human
gccaggaauuucccaggac

SEQ ID NO: 1919767 - RNA, 20 nt, Human
gccaggaauuucccaggacc

SEQ ID NO: 1919768 - RNA, 19 nt, Human
gccaggagccuccugcccu

SEQ ID NO: 1919769 - RNA, 20 nt, Human
gccaggagccuccugcccuu

SEQ ID NO: 1919770 - RNA, 14 nt, Human
gccaggagccuccu

SEQ ID NO: 1919771 - RNA, 16 nt, Human
gccaggagccuccugc

SEQ ID NO: 1919772 - RNA, 17 nt, Human
gccagcugcuugggcuu

SEQ ID NO: 1919773 - RNA, 18 nt, Human
gccagcugcuugggcuuc

SEQ ID NO: 1919774 - RNA, 13 nt, Human
gccagcugccucc

SEQ ID NO: 1919775 - RNA, 20 nt, Human
gccagcugcuugggcuucau

SEQ ID NO: 1919776 - RNA, 12 nt, Human
gccaggaagcca

SEQ ID NO: 1919777 - RNA, 13 nt, Human
gccaggaagccag

SEQ ID NO: 1919778 - RNA, 14 nt, Human
gccaggaagccagc

SEQ ID NO: 1919779 - RNA, 14 nt, Human
gccagcugaugacu

SEQ ID NO: 1919780 - RNA, 16 nt, Human
gccagcugaugacuca

SEQ ID NO: 1919781 - RNA, 17 nt, Human
gccagcugaugacucaa

SEQ ID NO: 1919782 - RNA, 14 nt, Human
gccagcugcacuga

SEQ ID NO: 1919783 - RNA, 18 nt, Human
gccagcugaugacucaag

SEQ ID NO: 1919784 - RNA, 19 nt, Human
gccagcugaugacucaaga

SEQ ID NO: 1919785 - RNA, 20 nt, Human
gccagcugcacugaugcugc

SEQ ID NO: 1919786 - RNA, 21 nt, Human
gccagagagccuggugcugcu

SEQ ID NO: 1919787 - RNA, 13 nt, Human
gccagagauccaa

SEQ ID NO: 1919788 - RNA, 16 nt, Human
gccagagauccaaaag

SEQ ID NO: 1919789 - RNA, 20 nt, Human
gccagagauccaaaagaagc

SEQ ID NO: 1919790 - RNA, 13 nt, Human
gccagaggcaccu

SEQ ID NO: 1919791 - RNA, 21 nt, Human
gccagagauccaaaagaagcc

SEQ ID NO: 1919792 - RNA, 22 nt, Human
gccagagauccaaaagaagccc

SEQ ID NO: 1919793 - RNA, 17 nt, Human
gccagagggagugacag

SEQ ID NO: 1919794 - RNA, 15 nt, Human
gccagauccagccug

SEQ ID NO: 1919795 - RNA, 16 nt, Human
gccagauccagccugg

SEQ ID NO: 1919796 - RNA, 17 nt, Human
gccagauccagccuggg

SEQ ID NO: 1919797 - RNA, 20 nt, Human
gccagauccagccugggguc

SEQ ID NO: 1919798 - RNA, 14 nt, Human
gccagaugcaccag

SEQ ID NO: 1919799 - RNA, 15 nt, Human
gccagaugcaccagc

SEQ ID NO: 1919800 - RNA, 20 nt, Human
gccagauucuuuccugaggc

SEQ ID NO: 1919801 - RNA, 24 nt, Human
gccagauucuuuccugaggcuggg

SEQ ID NO: 1919802 - RNA, 13 nt, Human
gccagauuucacu

SEQ ID NO: 1919803 - RNA, 22 nt, Human
gccagccgagauagccaaggcc

SEQ ID NO: 1919804 - RNA, 19 nt, Human
gccagauucuuuccugagg

SEQ ID NO: 1919805 - RNA, 22 nt, Human
gccacugcaccgggccacagag

SEQ ID NO: 1919806 - RNA, 21 nt, Human
gccagagacacaagccuucgg

SEQ ID NO: 1919807 - RNA, 22 nt, Human
gccagagacacaagccuucggc

SEQ ID NO: 1919808 - RNA, 21 nt, Human
gccacugcaccgggccacaga

SEQ ID NO: 1919809 - RNA, 20 nt, Human
gccacugcaccgggccacag

SEQ ID NO: 1919810 - RNA, 20 nt, Human
gccaaggccaaaggaagcac

SEQ ID NO: 1919811 - RNA, 21 nt, Human
gccaacacgcaccugccucag

SEQ ID NO: 1919812 - RNA, 23 nt, Human
gccaacacgcaccugccucagga

SEQ ID NO: 1919813 - RNA, 17 nt, Human
gccaacagaagcuucca

SEQ ID NO: 1919814 - RNA, 17 nt, Human
gccaacacgcaccugcc

SEQ ID NO: 1919815 - RNA, 20 nt, Human
gccaacacgcaccugccuca

SEQ ID NO: 1919816 - RNA, 17 nt, Human
gccaaggcucuguuuau

SEQ ID NO: 1919817 - RNA, 24 nt, Human
gccaaggccaaaggaagcacaugc

SEQ ID NO: 1919818 - RNA, 19 nt, Human
gccaacagaagcuuccauu

SEQ ID NO: 1919819 - RNA, 23 nt, Human
gccaucugguuaggauggcagga

SEQ ID NO: 1919820 - RNA, 21 nt, Human
gccaucugggcuccuccaggg

SEQ ID NO: 1919821 - RNA, 14 nt, Human
gccauccagguuca

SEQ ID NO: 1919822 - RNA, 21 nt, Human
gccaucauguuuacagaggac

SEQ ID NO: 1919823 - RNA, 17 nt, Human
gccaucauguuuacaga

SEQ ID NO: 1919824 - RNA, 14 nt, Human
gccaugcuccuggc

SEQ ID NO: 1919825 - RNA, 17 nt, Human
gccaugccucagcccug

SEQ ID NO: 1919826 - RNA, 21 nt, Human
gccaugccucagcccugaccc

SEQ ID NO: 1919827 - RNA, 13 nt, Human
gccaugccucagc

SEQ ID NO: 1919828 - RNA, 14 nt, Human
gccaugccucagcc

SEQ ID NO: 1919829 - RNA, 17 nt, Human
gccaugauggcaacaga

SEQ ID NO: 1919830 - RNA, 19 nt, Human
gccaugauggcaacagauc

SEQ ID NO: 1919831 - RNA, 21 nt, Human
gccaugauggcaacagaucug

SEQ ID NO: 1919832 - RNA, 23 nt, Human
gccaugauggcaacagaucugga

SEQ ID NO: 1919833 - RNA, 23 nt, Human
gccaugaagaggaugcugugaaa

SEQ ID NO: 1919834 - RNA, 21 nt, Human
gccagucaccccggccaccug

SEQ ID NO: 1919835 - RNA, 22 nt, Human
gccagucccugaggcagguccc

SEQ ID NO: 1919836 - RNA, 16 nt, Human
gccagucccugaggca

SEQ ID NO: 1919837 - RNA, 15 nt, Human
gccaggcuggucuca

SEQ ID NO: 1919838 - RNA, 18 nt, Human
gccaggcugaccacagca

SEQ ID NO: 1919839 - RNA, 19 nt, Human
gccaggcugaccacagcac

SEQ ID NO: 1919840 - RNA, 20 nt, Human
gccaggcugaccacagcaca

SEQ ID NO: 1919841 - RNA, 23 nt, Human
gccaguaaaugggggugcauuug

SEQ ID NO: 1919842 - RNA, 13 nt, Human
gccaggcuggucu

SEQ ID NO: 1919843 - RNA, 23 nt, Human
gccaggcugggucgcccuggacu

SEQ ID NO: 1919844 - RNA, 17 nt, Human
gccaggcugggucgccc

SEQ ID NO: 1919845 - RNA, 15 nt, Human
gccaggcugaccaca

SEQ ID NO: 1919846 - RNA, 16 nt, Human
gccaggcugaccacag

SEQ ID NO: 1919847 - RNA, 17 nt, Human
gccaggcugaccacagc

SEQ ID NO: 1919848 - RNA, 16 nt, Human
gccaugggccuccugu

SEQ ID NO: 1919849 - RNA, 15 nt, Human
gccaugggccuccug

SEQ ID NO: 1919850 - RNA, 24 nt, Human
gccaugcuccuggcccacugcauc

SEQ ID NO: 1919851 - RNA, 20 nt, Human
gcccaagguuaaaaaguuca

SEQ ID NO: 1919852 - RNA, 15 nt, Human
gcccaagggaucugg

SEQ ID NO: 1919853 - RNA, 18 nt, Human
gcccaagggaucuggucc

SEQ ID NO: 1919854 - RNA, 19 nt, Human
gcccaagggaucugguccu

SEQ ID NO: 1919855 - RNA, 17 nt, Human
gcccaccuuggcucaag

SEQ ID NO: 1919856 - RNA, 16 nt, Human
gcccaccuuggcucaa

SEQ ID NO: 1919857 - RNA, 15 nt, Human
gcccaccuuggcuca

SEQ ID NO: 1919858 - RNA, 13 nt, Human
gcccaccuuggcu

SEQ ID NO: 1919859 - RNA, 14 nt, Human
gcccacuucugcca

SEQ ID NO: 1919860 - RNA, 16 nt, Human
gcccagaaugaggcug

SEQ ID NO: 1919861 - RNA, 17 nt, Human
gcccagaaugaggcugc

SEQ ID NO: 1919862 - RNA, 15 nt, Human
gcccaccuggccucu

SEQ ID NO: 1919863 - RNA, 16 nt, Human
gcccaccuggccucug

SEQ ID NO: 1919864 - RNA, 17 nt, Human
gcccaccuggccucugc

SEQ ID NO: 1919865 - RNA, 20 nt, Human
gcccaccuggccucugcacu

SEQ ID NO: 1919866 - RNA, 21 nt, Human
gcccaccuggccucugcacuc

SEQ ID NO: 1919867 - RNA, 24 nt, Human
gcccaccuggccucugcacucccc

SEQ ID NO: 1919868 - RNA, 23 nt, Human
uuuuaauuauuauuuauauaugu

SEQ ID NO: 1919869 - RNA, 20 nt, Human
uuuuaauuauuauuuauaua

SEQ ID NO: 1919870 - RNA, 17 nt, Human
uuuuaauuauuauucuu

SEQ ID NO: 1919871 - RNA, 16 nt, Human
uuuuaauuauuauucu

SEQ ID NO: 1919872 - RNA, 11 nt, Human
uuuuaauuauu

SEQ ID NO: 1919873 - RNA, 18 nt, Human
uuuucuaaaguaaaaaca

SEQ ID NO: 1919874 - RNA, 21 nt, Human
uuuugguccaaguugugcuua

SEQ ID NO: 1919875 - RNA, 15 nt, Human
uuuuggucuguguga

SEQ ID NO: 1919876 - RNA, 14 nt, Human
uuuuggcugcugaa

SEQ ID NO: 1919877 - RNA, 20 nt, Human
uuuugacaaggggcaguggu

SEQ ID NO: 1919878 - RNA, 16 nt, Human
uuuuggauuguauauu

SEQ ID NO: 1919879 - RNA, 19 nt, Human
uuuuguagagccagggucu

SEQ ID NO: 1919880 - RNA, 14 nt, Human
uuuuguaauuuaaa

SEQ ID NO: 1919881 - RNA, 15 nt, Human
uuuuguaacaaauga

SEQ ID NO: 1919882 - RNA, 18 nt, Human
uuuuguaacuuccaugug

SEQ ID NO: 1919883 - RNA, 19 nt, Human
uuuugguuaagcuuugaca

SEQ ID NO: 1919884 - RNA, 21 nt, Human
uuuugguuaagcuuugacacu

SEQ ID NO: 1919885 - RNA, 22 nt, Human
uuuugguuaagcuuugacacug

SEQ ID NO: 1919886 - RNA, 14 nt, Human
uuuugguuuuguuc

SEQ ID NO: 1919887 - RNA, 16 nt, Human
uuuugguuuuguuccc

SEQ ID NO: 1919888 - RNA, 20 nt, Human
uuuugguuuuguuccccucc

SEQ ID NO: 1919889 - RNA, 16 nt, Human
uuuugucauauaagau

SEQ ID NO: 1919890 - RNA, 13 nt, Human
uuuugucuugugu

SEQ ID NO: 1919891 - RNA, 11 nt, Human
uuuuuaaaagu

SEQ ID NO: 1919892 - RNA, 18 nt, Human
uuuuuaaaaacuaaaaaa

SEQ ID NO: 1919893 - RNA, 17 nt, Human
uuuuuaaagacagaguc

SEQ ID NO: 1919894 - RNA, 20 nt, Human
uuuuuaaagaaaaguuuugu

SEQ ID NO: 1919895 - RNA, 12 nt, Human
uuuuuaaagaaa

SEQ ID NO: 1919896 - RNA, 16 nt, Human
uuuuuaaaauauuuau

SEQ ID NO: 1919897 - RNA, 12 nt, Human
uuuuuaaagacu

SEQ ID NO: 1919898 - RNA, 13 nt, Human
uuuuuaaagacuu

SEQ ID NO: 1919899 - RNA, 18 nt, Human
uuuuuaaagacuuuuaug

SEQ ID NO: 1919900 - RNA, 15 nt, Human
uuuuuaaagcuacaa

SEQ ID NO: 1919901 - RNA, 11 nt, Human
uuuuuccuuca

SEQ ID NO: 1919902 - RNA, 15 nt, Human
uuuuuccuuaaucca

SEQ ID NO: 1919903 - RNA, 20 nt, Human
uuuuuccuuaauccagcuga

SEQ ID NO: 1919904 - RNA, 11 nt, Human
uuuuuaaaugc

SEQ ID NO: 1919905 - RNA, 18 nt, Human
uuuuuaagcuguuuccau

SEQ ID NO: 1919906 - RNA, 15 nt, Human
uuuuuccuucucugg

SEQ ID NO: 1919907 - RNA, 19 nt, Human
uuuuuccuucagugccuua

SEQ ID NO: 1919908 - RNA, 23 nt, Human
uuuuucucugauacagaaaaguu

SEQ ID NO: 1919909 - RNA, 13 nt, Human
uuuuuuguuucau

SEQ ID NO: 1919910 - RNA, 12 nt, Human
uuuuuuguuuca

SEQ ID NO: 1919911 - RNA, 21 nt, Human
uuuuugaaaaagaaaacacuu

SEQ ID NO: 1919912 - RNA, 18 nt, Human
uuugaaucaucaagucuu

SEQ ID NO: 1919913 - RNA, 22 nt, Human
uuugaagaugccgcauuuggau

SEQ ID NO: 1919914 - RNA, 19 nt, Human
uuugaacugauaaagauga

SEQ ID NO: 1919915 - RNA, 17 nt, Human
uuugaacugauaaagau

SEQ ID NO: 1919916 - RNA, 12 nt, Human
uuucuugccucu

SEQ ID NO: 1919917 - RNA, 17 nt, Human
uuugaagaacaugugag

SEQ ID NO: 1919918 - RNA, 18 nt, Human
uuugaagaacaugugaga

SEQ ID NO: 1919919 - RNA, 15 nt, Human
uuugaacugauaaag

SEQ ID NO: 1919920 - RNA, 14 nt, Human
uuugaacucuucaa

SEQ ID NO: 1919921 - RNA, 21 nt, Human
uuucuugaucaacaucuuuuc

SEQ ID NO: 1919922 - RNA, 23 nt, Human
uuucuucaccucugcuacucaag

SEQ ID NO: 1919923 - RNA, 13 nt, Human
uuucuucucccuc

SEQ ID NO: 1919924 - RNA, 12 nt, Human
uuucuucucccu

SEQ ID NO: 1919925 - RNA, 23 nt, Human
uuucuuagggaaggauacaaaag

SEQ ID NO: 1919926 - RNA, 18 nt, Human
uuucuuagggaaggauac

SEQ ID NO: 1919927 - RNA, 23 nt, Human
uuucuuaucacaaaaaagaaaau

SEQ ID NO: 1919928 - RNA, 16 nt, Human
uuucuuaaacaaaugu

SEQ ID NO: 1919929 - RNA, 17 nt, Human
uuaccacagacauacua

SEQ ID NO: 1919930 - RNA, 14 nt, Human
uuaccacagacaua

SEQ ID NO: 1919931 - RNA, 14 nt, Human
uuaccaaucauauu

SEQ ID NO: 1919932 - RNA, 16 nt, Human
uuuccugaggcugggc

SEQ ID NO: 1919933 - RNA, 19 nt, Human
uuuccucccuucugcuacu

SEQ ID NO: 1919934 - RNA, 11 nt, Human
uuuccucccuu

SEQ ID NO: 1919935 - RNA, 12 nt, Human
uuuccucccuuc

SEQ ID NO: 1919936 - RNA, 13 nt, Human
uuuccucccuucu

SEQ ID NO: 1919937 - RNA, 14 nt, Human
uuuccucccuucug

SEQ ID NO: 1919938 - RNA, 17 nt, Human
uuuccucccuucugcua

SEQ ID NO: 1919939 - RNA, 23 nt, Human
uuucuacucgaguuacagacaaa

SEQ ID NO: 1919940 - RNA, 19 nt, Human
uuucuacuuguuauaaacu

SEQ ID NO: 1919941 - RNA, 12 nt, Human
uuucuaaaguaa

SEQ ID NO: 1919942 - RNA, 14 nt, Human
uuucuaaaguaaaa

SEQ ID NO: 1919943 - RNA, 21 nt, Human
uuucuaaaggcuaccuuugua

SEQ ID NO: 1919944 - RNA, 20 nt, Human
uuucuaaaggcuaccuuugu

SEQ ID NO: 1919945 - RNA, 20 nt, Human
uuucuguucuuucuggcuau

SEQ ID NO: 1919946 - RNA, 18 nt, Human
uuucugaagcuuuaccag

SEQ ID NO: 1919947 - RNA, 15 nt, Human
uuucugaagcuuuac

SEQ ID NO: 1919948 - RNA, 19 nt, Human
uuucugaaauuuccuggga

SEQ ID NO: 1919949 - RNA, 21 nt, Human
uuucugaaauuuccugggagc

SEQ ID NO: 1919950 - RNA, 18 nt, Human
uuucucugauacagaaaa

SEQ ID NO: 1919951 - RNA, 17 nt, Human
uuucucugauacagaaa

SEQ ID NO: 1919952 - RNA, 16 nt, Human
uuucucugauacagaa

SEQ ID NO: 1919953 - RNA, 15 nt, Human
uuucucugauacaga

SEQ ID NO: 1919954 - RNA, 18 nt, Human
uuuggagaguuuccugaa

SEQ ID NO: 1919955 - RNA, 21 nt, Human
uuuggaauuuugugcccccau

SEQ ID NO: 1919956 - RNA, 22 nt, Human
uuuggugaacauugcaauagaa

SEQ ID NO: 1919957 - RNA, 23 nt, Human
uuuggugaacauugcaauagaaa

SEQ ID NO: 1919958 - RNA, 19 nt, Human
uuugguuuucacauuggaa

SEQ ID NO: 1919959 - RNA, 15 nt, Human
uuugguuuuguuccc

SEQ ID NO: 1919960 - RNA, 14 nt, Human
uuugguuuuguucc

SEQ ID NO: 1919961 - RNA, 21 nt, Human
uuugguuuuguuccccuccuc

SEQ ID NO: 1919962 - RNA, 19 nt, Human
uuugguuuuguuccccucc

SEQ ID NO: 1919963 - RNA, 16 nt, Human
uuugguuuuguucccc

SEQ ID NO: 1919964 - RNA, 15 nt, Human
uuugcaucugaaaau

SEQ ID NO: 1919965 - RNA, 20 nt, Human
uuugaaucuauuuaucuuca

SEQ ID NO: 1919966 - RNA, 17 nt, Human
uuugaauguaugcuuca

SEQ ID NO: 1919967 - RNA, 22 nt, Human
uuugaauguaugcuucauacag

SEQ ID NO: 1919968 - RNA, 16 nt, Human
uuugcuuugugauuuu

SEQ ID NO: 1919969 - RNA, 15 nt, Human
uuugcuuugugauuu

SEQ ID NO: 1919970 - RNA, 14 nt, Human
uuuggaauuuugug

SEQ ID NO: 1919971 - RNA, 15 nt, Human
uuugcuuugcuuucu

SEQ ID NO: 1919972 - RNA, 18 nt, Human
uuugcuuugcuuucugcu

SEQ ID NO: 1919973 - RNA, 21 nt, Human
uuuguucuggcucuuccaggc

SEQ ID NO: 1919974 - RNA, 14 nt, Human
uuuguucuuuuuau

SEQ ID NO: 1919975 - RNA, 20 nt, Human
uuuguucgcauggucacaca

SEQ ID NO: 1919976 - RNA, 19 nt, Human
uuuguuccccuccuccacu

SEQ ID NO: 1919977 - RNA, 15 nt, Human
uuuuaaagaaaaguu

SEQ ID NO: 1919978 - RNA, 18 nt, Human
uuuuaaagacuuuuauga

SEQ ID NO: 1919979 - RNA, 14 nt, Human
uuuuaaagaaaagu

SEQ ID NO: 1919980 - RNA, 18 nt, Human
uuuuaaaaguaaauguac

SEQ ID NO: 1919981 - RNA, 22 nt, Human
uuuuaaaaguuacuccuuuuag

SEQ ID NO: 1919982 - RNA, 17 nt, Human
uuuuaaagaaugcucuu

SEQ ID NO: 1919983 - RNA, 20 nt, Human
uuuuaaaagaugcaauguag

SEQ ID NO: 1919984 - RNA, 21 nt, Human
uuuuaaaugcaccuggaauau

SEQ ID NO: 1919985 - RNA, 12 nt, Human
uuuuaaaugcac

SEQ ID NO: 1919986 - RNA, 11 nt, Human
uuuuaaaugca

SEQ ID NO: 1919987 - RNA, 21 nt, Human
uuuuaaagaccugacaccuuu

SEQ ID NO: 1919988 - RNA, 13 nt, Human
uuuuaauuaaaua

SEQ ID NO: 1919989 - RNA, 13 nt, Human
guauuaaagacag

SEQ ID NO: 1919990 - RNA, 23 nt, Human
guauguuuuuguguauuuguuaa

SEQ ID NO: 1919991 - RNA, 19 nt, Human
guauguuuuuguguauuug

SEQ ID NO: 1919992 - RNA, 20 nt, Human
guaugaucacggcucacugc

SEQ ID NO: 1919993 - RNA, 20 nt, Human
guaugaggcauuuguuugaa

SEQ ID NO: 1919994 - RNA, 17 nt, Human
guaugaggcauuuguuu

SEQ ID NO: 1919995 - RNA, 21 nt, Human
guaugaucacggcucacugca

SEQ ID NO: 1919996 - RNA, 15 nt, Human
guaugaggcauuugu

SEQ ID NO: 1919997 - RNA, 13 nt, Human
guaugaggcauuu

SEQ ID NO: 1919998 - RNA, 12 nt, Human
guaucugagcag

SEQ ID NO: 1919999 - RNA, 12 nt, Human
guaucuggugac

SEQ ID NO: 1920000 - RNA, 19 nt, Human
guaucuggugacuuuccuc

SEQ ID NO: 1920001 - RNA, 20 nt, Human
guaucuagacccaucuucuu

SEQ ID NO: 1920002 - RNA, 18 nt, Human
guaucuacuuuaauaaau

SEQ ID NO: 1920003 - RNA, 18 nt, Human
guauccugggggacccaa

SEQ ID NO: 1920004 - RNA, 22 nt, Human
guauaugucaagccauaauugu

SEQ ID NO: 1920005 - RNA, 21 nt, Human
guauauauuuuuuaaaaaucu

SEQ ID NO: 1920006 - RNA, 23 nt, Human
guauagaaaugcugguuuuucag

SEQ ID NO: 1920007 - RNA, 13 nt, Human
guauacuuccuua

SEQ ID NO: 1920008 - RNA, 14 nt, Human
guauagaaaugcug

SEQ ID NO: 1920009 - RNA, 19 nt, Human
guauacuuccuuaugcuuc

SEQ ID NO: 1920010 - RNA, 22 nt, Human
guauagaaaugcugguuuuuca

SEQ ID NO: 1920011 - RNA, 15 nt, Human
guauagaaaugcugg

SEQ ID NO: 1920012 - RNA, 13 nt, Human
guauauacuuuuu

SEQ ID NO: 1920013 - RNA, 12 nt, Human
guauauacuuuu

SEQ ID NO: 1920014 - RNA, 15 nt, Human
guauauagcccagcc

SEQ ID NO: 1920015 - RNA, 16 nt, Human
guaggguuauaauaau

SEQ ID NO: 1920016 - RNA, 14 nt, Human
guagucaggugccu

SEQ ID NO: 1920017 - RNA, 14 nt, Human
guagguugggagaa

SEQ ID NO: 1920018 - RNA, 15 nt, Human
guaguaauugacaug

SEQ ID NO: 1920019 - RNA, 17 nt, Human
guauaauucacauugua

SEQ ID NO: 1920020 - RNA, 22 nt, Human
guagucagaauuagcugcuucu

SEQ ID NO: 1920021 - RNA, 21 nt, Human
guagucagaauuagcugcuuc

SEQ ID NO: 1920022 - RNA, 22 nt, Human
guaguccucauaaaaagcaaaa

SEQ ID NO: 1920023 - RNA, 16 nt, Human
guaguccgugcugaca

SEQ ID NO: 1920024 - RNA, 22 nt, Human
guaguccgugcugacagcugcu

SEQ ID NO: 1920025 - RNA, 23 nt, Human
guaguccgugcugacagcugcuc

SEQ ID NO: 1920026 - RNA, 12 nt, Human
guagucuugaug

SEQ ID NO: 1920027 - RNA, 16 nt, Human
guagucuugaugacca

SEQ ID NO: 1920028 - RNA, 15 nt, Human
guagagugugccuga

SEQ ID NO: 1920029 - RNA, 17 nt, Human
guagaugggagggaggc

SEQ ID NO: 1920030 - RNA, 21 nt, Human
guagaugggagggaggcucag

SEQ ID NO: 1920031 - RNA, 16 nt, Human
guagauguucuacuuu

SEQ ID NO: 1920032 - RNA, 16 nt, Human
guagcauccuggaaua

SEQ ID NO: 1920033 - RNA, 15 nt, Human
guagcaguagaugca

SEQ ID NO: 1920034 - RNA, 16 nt, Human
guagcacauguaugcu

SEQ ID NO: 1920035 - RNA, 16 nt, Human
guagggcgggaggaug

SEQ ID NO: 1920036 - RNA, 23 nt, Human
guagcccccuggccucugugccu

SEQ ID NO: 1920037 - RNA, 18 nt, Human
guagcccccuggccucug

SEQ ID NO: 1920038 - RNA, 19 nt, Human
guagcccccuggccucugu

SEQ ID NO: 1920039 - RNA, 22 nt, Human
guagggcgggaggauguucugg

SEQ ID NO: 1920040 - RNA, 21 nt, Human
guagggcgggaggauguucug

SEQ ID NO: 1920041 - RNA, 23 nt, Human
guagggcgggaggauguucuggg

SEQ ID NO: 1920042 - RNA, 16 nt, Human
guagcccccuggccuc

SEQ ID NO: 1920043 - RNA, 17 nt, Human
guagcccccuggccucu

SEQ ID NO: 1920044 - RNA, 19 nt, Human
guagccagcacacagggca

SEQ ID NO: 1920045 - RNA, 21 nt, Human
guagccagcacacagggcagu

SEQ ID NO: 1920046 - RNA, 21 nt, Human
guagcauuuguguugaagagg

SEQ ID NO: 1920047 - RNA, 20 nt, Human
guagcauuuacugugucuuu

SEQ ID NO: 1920048 - RNA, 14 nt, Human
guagcauuuacugu

SEQ ID NO: 1920049 - RNA, 15 nt, Human
guagccagcacacag

SEQ ID NO: 1920050 - RNA, 18 nt, Human
guagccagcacacagggc

SEQ ID NO: 1920051 - RNA, 13 nt, Human
guccacagggcac

SEQ ID NO: 1920052 - RNA, 13 nt, Human
guccacccaggag

SEQ ID NO: 1920053 - RNA, 12 nt, Human
guccacccagga

SEQ ID NO: 1920054 - RNA, 23 nt, Human
guccacccaggagccccgaggcc

SEQ ID NO: 1920055 - RNA, 21 nt, Human
gucccaccuuggcugcaggga

SEQ ID NO: 1920056 - RNA, 18 nt, Human
guccaggggaggccuucc

SEQ ID NO: 1920057 - RNA, 15 nt, Human
gucauucaauaaauu

SEQ ID NO: 1920058 - RNA, 21 nt, Human
gucauucagauaugauucaaa

SEQ ID NO: 1920059 - RNA, 16 nt, Human
gucauucguucugugg

SEQ ID NO: 1920060 - RNA, 21 nt, Human
guccacaguggaaccagccca

SEQ ID NO: 1920061 - RNA, 19 nt, Human
guccacaguggaaccagcc

SEQ ID NO: 1920062 - RNA, 16 nt, Human
guccacaguggaacca

SEQ ID NO: 1920063 - RNA, 23 nt, Human
gucccaccuuggcugcagggagu

SEQ ID NO: 1920064 - RNA, 20 nt, Human
gucccaccuuggcugcaggg

SEQ ID NO: 1920065 - RNA, 16 nt, Human
gucccuaauaaagcug

SEQ ID NO: 1920066 - RNA, 17 nt, Human
gucccuaauaaagcugu

SEQ ID NO: 1920067 - RNA, 17 nt, Human
guccccaccgcagacag

SEQ ID NO: 1920068 - RNA, 21 nt, Human
gucccugcacuugcagacucu

SEQ ID NO: 1920069 - RNA, 19 nt, Human
gucccugcacuugcagacu

SEQ ID NO: 1920070 - RNA, 16 nt, Human
gucccugcacuugcag

SEQ ID NO: 1920071 - RNA, 22 nt, Human
gucccugaggcagguccccaga

SEQ ID NO: 1920072 - RNA, 16 nt, Human
gucccugaagagaagg

SEQ ID NO: 1920073 - RNA, 18 nt, Human
gucccugaggcagguccc

SEQ ID NO: 1920074 - RNA, 11 nt, Human
gucccucugcc

SEQ ID NO: 1920075 - RNA, 14 nt, Human
gucccucugcccca

SEQ ID NO: 1920076 - RNA, 20 nt, Human
gucccucugccccauccucc

SEQ ID NO: 1920077 - RNA, 21 nt, Human
gucccucugccccauccucca

SEQ ID NO: 1920078 - RNA, 18 nt, Human
gucccuaauaaagcugug

SEQ ID NO: 1920079 - RNA, 20 nt, Human
gucccuaauaaagcugugug

SEQ ID NO: 1920080 - RNA, 14 nt, Human
gucagauuuccagu

SEQ ID NO: 1920081 - RNA, 21 nt, Human
gucagauuuccagucuccacc

SEQ ID NO: 1920082 - RNA, 14 nt, Human
gucagagccugcag

SEQ ID NO: 1920083 - RNA, 16 nt, Human
gucagagccugcaguu

SEQ ID NO: 1920084 - RNA, 15 nt, Human
gucagagccugcagu

SEQ ID NO: 1920085 - RNA, 22 nt, Human
gucacucuggcagcucagagag

SEQ ID NO: 1920086 - RNA, 17 nt, Human
gucacucuggcagcuca

SEQ ID NO: 1920087 - RNA, 19 nt, Human
gucacucuggcagcucaga

SEQ ID NO: 1920088 - RNA, 12 nt, Human
gucacucuggca

SEQ ID NO: 1920089 - RNA, 13 nt, Human
gucacucuggcag

SEQ ID NO: 1920090 - RNA, 14 nt, Human
gucacucuggcagc

SEQ ID NO: 1920091 - RNA, 16 nt, Human
gucacucuggcagcuc

SEQ ID NO: 1920092 - RNA, 22 nt, Human
gucaccccggccaccugcggug

SEQ ID NO: 1920093 - RNA, 17 nt, Human
gucaccccggccaccug

SEQ ID NO: 1920094 - RNA, 18 nt, Human
gucaccccggccaccugc

SEQ ID NO: 1920095 - RNA, 14 nt, Human
gucacucauugcug

SEQ ID NO: 1920096 - RNA, 18 nt, Human
gucacucauugcugagcc

SEQ ID NO: 1920097 - RNA, 19 nt, Human
gucacucauugcugagccu

SEQ ID NO: 1920098 - RNA, 20 nt, Human
gucacucauugcugagccuc

SEQ ID NO: 1920099 - RNA, 21 nt, Human
gucacucauugcugagccucu

SEQ ID NO: 1920100 - RNA, 22 nt, Human
gucacucauugcugagccucug

SEQ ID NO: 1920101 - RNA, 23 nt, Human
gucacucauugcugagccucugc

SEQ ID NO: 1920102 - RNA, 24 nt, Human
gucacucauugcugagccucugcu

SEQ ID NO: 1920103 - RNA, 13 nt, Human
guauuuuaaucac

SEQ ID NO: 1920104 - RNA, 22 nt, Human
guauuaaguuguuaauaaaagu

SEQ ID NO: 1920105 - RNA, 14 nt, Human
guauuuuacuaaua

SEQ ID NO: 1920106 - RNA, 21 nt, Human
guauuuuaguaagagauuccu

SEQ ID NO: 1920107 - RNA, 23 nt, Human
guauuuuaucuuugauucuccuu

SEQ ID NO: 1920108 - RNA, 22 nt, Human
guauuuuaucuuugauucuccu

SEQ ID NO: 1920109 - RNA, 19 nt, Human
guauuuuauaauucuggga

SEQ ID NO: 1920110 - RNA, 13 nt, Human
guauuuugaaaau

SEQ ID NO: 1920111 - RNA, 20 nt, Human
guauuuucuucaccucugcu

SEQ ID NO: 1920112 - RNA, 15 nt, Human
gucaaugcagccccc

SEQ ID NO: 1920113 - RNA, 15 nt, Human
gucaagugaaaaagg

SEQ ID NO: 1920114 - RNA, 19 nt, Human
guauuuuguuuuugucuua

SEQ ID NO: 1920115 - RNA, 19 nt, Human
gucucuucugggcacccuc

SEQ ID NO: 1920116 - RNA, 21 nt, Human
gucucuggauuauauuaugaa

SEQ ID NO: 1920117 - RNA, 17 nt, Human
gucucuggaauuugaaa

SEQ ID NO: 1920118 - RNA, 22 nt, Human
gucucacucugucgcccagucu

SEQ ID NO: 1920119 - RNA, 19 nt, Human
gucucacucugucgcccag

SEQ ID NO: 1920120 - RNA, 18 nt, Human
gucucacucugucgccca

SEQ ID NO: 1920121 - RNA, 16 nt, Human
gucucacucugucgcc

SEQ ID NO: 1920122 - RNA, 15 nt, Human
gucucacucugucgc

SEQ ID NO: 1920123 - RNA, 19 nt, Human
gucucgugguaggacugua

SEQ ID NO: 1920124 - RNA, 18 nt, Human
gucgucaaagcugaaaug

SEQ ID NO: 1920125 - RNA, 19 nt, Human
gucucacuauguugcccag

SEQ ID NO: 1920126 - RNA, 11 nt, Human
gucucacucug

SEQ ID NO: 1920127 - RNA, 18 nt, Human
gucucacuauguugccca

SEQ ID NO: 1920128 - RNA, 15 nt, Human
gucccugccaaugga

SEQ ID NO: 1920129 - RNA, 11 nt, Human
gucccugccaa

SEQ ID NO: 1920130 - RNA, 14 nt, Human
gucccugccaaugg

SEQ ID NO: 1920131 - RNA, 21 nt, Human
guccuuaccagcagagcaccu

SEQ ID NO: 1920132 - RNA, 15 nt, Human
guccuuagaacauuu

SEQ ID NO: 1920133 - RNA, 18 nt, Human
guccuuaccagcagagca

SEQ ID NO: 1920134 - RNA, 19 nt, Human
guccuuaccagcagagcac

SEQ ID NO: 1920135 - RNA, 21 nt, Human
gucggaaaacaugcuacacac

SEQ ID NO: 1920136 - RNA, 17 nt, Human
guccuuagaacauuuua

SEQ ID NO: 1920137 - RNA, 16 nt, Human
gucgggcaugacacga

SEQ ID NO: 1920138 - RNA, 18 nt, Human
gucuuggacacuguacaa

SEQ ID NO: 1920139 - RNA, 16 nt, Human
gucuugguuccagccu

SEQ ID NO: 1920140 - RNA, 16 nt, Human
gucuuuuuucacuaca

SEQ ID NO: 1920141 - RNA, 19 nt, Human
gucuugguuccagccugcc

SEQ ID NO: 1920142 - RNA, 17 nt, Human
gucuugguuccagccug

SEQ ID NO: 1920143 - RNA, 15 nt, Human
gucuuggacacugua

SEQ ID NO: 1920144 - RNA, 14 nt, Human
gucuuggacacugu

SEQ ID NO: 1920145 - RNA, 21 nt, Human
gucuugcaauggcagccuugg

SEQ ID NO: 1920146 - RNA, 20 nt, Human
gucuugcaauggcagccuug

SEQ ID NO: 1920147 - RNA, 23 nt, Human
gucuugcaauggcagccuuggca

SEQ ID NO: 1920148 - RNA, 18 nt, Human
gucuugaugaccaaaguc

SEQ ID NO: 1920149 - RNA, 17 nt, Human
gucuugaacuccuggcc

SEQ ID NO: 1920150 - RNA, 16 nt, Human
gucuugaacuccuggc

SEQ ID NO: 1920151 - RNA, 21 nt, Human
gucuuaaaaaguggaaaaaua

SEQ ID NO: 1920152 - RNA, 14 nt, Human
gucuguuuuguaaa

SEQ ID NO: 1920153 - RNA, 15 nt, Human
gucuguuuuguaaag

SEQ ID NO: 1920154 - RNA, 19 nt, Human
gucuugcaauggcagccuu

SEQ ID NO: 1920155 - RNA, 18 nt, Human
gucuugcaauggcagccu

SEQ ID NO: 1920156 - RNA, 17 nt, Human
gucuugcaauggcagcc

SEQ ID NO: 1920157 - RNA, 16 nt, Human
gucuugcaauggcagc

SEQ ID NO: 1920158 - RNA, 20 nt, Human
gucuugaacuccuggccuca

SEQ ID NO: 1920159 - RNA, 18 nt, Human
gucuugaacuccuggccu

SEQ ID NO: 1920160 - RNA, 21 nt, Human
gucuugaacuccuggccucaa

SEQ ID NO: 1920161 - RNA, 17 nt, Human
gucuguucuuuccaaag

SEQ ID NO: 1920162 - RNA, 14 nt, Human
gucuguucuuucca

SEQ ID NO: 1920163 - RNA, 23 nt, Human
gucuguuuuguaaaguccccaga

SEQ ID NO: 1920164 - RNA, 20 nt, Human
gucuguguguguguaugugg

SEQ ID NO: 1920165 - RNA, 16 nt, Human
gucuguguguguguau

SEQ ID NO: 1920166 - RNA, 12 nt, Human
gucugugugugu

SEQ ID NO: 1920167 - RNA, 11 nt, Human
gucugugugug

SEQ ID NO: 1920168 - RNA, 14 nt, Human
gucuguguuuuaau

SEQ ID NO: 1920169 - RNA, 20 nt, Human
gucuguguuuuuuuggcagu

SEQ ID NO: 1920170 - RNA, 22 nt, Human
gucuguguguuuaugugugugu

SEQ ID NO: 1920171 - RNA, 21 nt, Human
gucuguguguuuaugugugug

SEQ ID NO: 1920172 - RNA, 11 nt, Human
gucuguguguu

SEQ ID NO: 1920173 - RNA, 21 nt, Human
gucugugagaugcuagaacuc

SEQ ID NO: 1920174 - RNA, 17 nt, Human
gucugugagaugcuaga

SEQ ID NO: 1920175 - RNA, 16 nt, Human
gucugugagaugcuag

SEQ ID NO: 1920176 - RNA, 15 nt, Human
gucugugagaugcua

SEQ ID NO: 1920177 - RNA, 18 nt, Human
gucugugccauuuuguau

SEQ ID NO: 1920178 - RNA, 23 nt, Human
gucugugagaugcuagaacuccc

SEQ ID NO: 1920179 - RNA, 22 nt, Human
gucugugagaugcuagaacucc

SEQ ID NO: 1920180 - RNA, 11 nt, Human
gucugccaggg

SEQ ID NO: 1920181 - RNA, 12 nt, Human
gucugccagggc

SEQ ID NO: 1920182 - RNA, 13 nt, Human
gucugccagggcc

SEQ ID NO: 1920183 - RNA, 22 nt, Human
gugaaugaaagucuugugacua

SEQ ID NO: 1920184 - RNA, 21 nt, Human
gugaaugaugauccuaggcau

SEQ ID NO: 1920185 - RNA, 20 nt, Human
gugacaaggauugcuacugu

SEQ ID NO: 1920186 - RNA, 14 nt, Human
gugaauuguuugaa

SEQ ID NO: 1920187 - RNA, 17 nt, Human
gugaauuguuugaaccu

SEQ ID NO: 1920188 - RNA, 15 nt, Human
gucuuguacaugugu

SEQ ID NO: 1920189 - RNA, 19 nt, Human
gugaacaagcaaacccaga

SEQ ID NO: 1920190 - RNA, 18 nt, Human
gugaacaaagcagccacg

SEQ ID NO: 1920191 - RNA, 17 nt, Human
gugaacaaagcagccac

SEQ ID NO: 1920192 - RNA, 21 nt, Human
gugaacaaauuuacagagaca

SEQ ID NO: 1920193 - RNA, 13 nt, Human
gugaaugaacacu

SEQ ID NO: 1920194 - RNA, 15 nt, Human
gugaccucugccuga

SEQ ID NO: 1920195 - RNA, 22 nt, Human
gugaccuuccaagagccugaga

SEQ ID NO: 1920196 - RNA, 21 nt, Human
gugaccuuccaagagccugag

SEQ ID NO: 1920197 - RNA, 22 nt, Human
gugacagagcaagacucugucu

SEQ ID NO: 1920198 - RNA, 14 nt, Human
gugaccucugccug

SEQ ID NO: 1920199 - RNA, 13 nt, Human
gugaccucugccu

SEQ ID NO: 1920200 - RNA, 15 nt, Human
gugacagaggcagcc

SEQ ID NO: 1920201 - RNA, 12 nt, Human
gugaccucugcc

SEQ ID NO: 1920202 - RNA, 14 nt, Human
gugacagaggcagc

SEQ ID NO: 1920203 - RNA, 13 nt, Human
gugacagaggcag

SEQ ID NO: 1920204 - RNA, 12 nt, Human
gugacagaggca

SEQ ID NO: 1920205 - RNA, 20 nt, Human
gugaucagaccauaauguua

SEQ ID NO: 1920206 - RNA, 22 nt, Human
gugauccacccaccucagccuc

SEQ ID NO: 1920207 - RNA, 13 nt, Human
gugaucaaagcca

SEQ ID NO: 1920208 - RNA, 19 nt, Human
gugauauaaguguguguuu

SEQ ID NO: 1920209 - RNA, 13 nt, Human
gugauagcacuuu

SEQ ID NO: 1920210 - RNA, 14 nt, Human
gugauagcacuuuc

SEQ ID NO: 1920211 - RNA, 13 nt, Human
gugauauauuuaa

SEQ ID NO: 1920212 - RNA, 17 nt, Human
gugauacaaugcugugc

SEQ ID NO: 1920213 - RNA, 15 nt, Human
gugauacaaugcugu

SEQ ID NO: 1920214 - RNA, 17 nt, Human
gugaguugauagcacag

SEQ ID NO: 1920215 - RNA, 22 nt, Human
gugacuagugcugaagcuuauu

SEQ ID NO: 1920216 - RNA, 18 nt, Human
gugacuagugcugaagcu

SEQ ID NO: 1920217 - RNA, 17 nt, Human
gugacuagugcugaagc

SEQ ID NO: 1920218 - RNA, 15 nt, Human
gugacuagugcugaa

SEQ ID NO: 1920219 - RNA, 14 nt, Human
gugacuagugcuga

SEQ ID NO: 1920220 - RNA, 13 nt, Human
gugacuagugcug

SEQ ID NO: 1920221 - RNA, 11 nt, Human
gugacuagugc

SEQ ID NO: 1920222 - RNA, 21 nt, Human
gugacuagugcugaagcuuau

SEQ ID NO: 1920223 - RNA, 21 nt, Human
gugacuauggagcugagcagg

SEQ ID NO: 1920224 - RNA, 20 nt, Human
gugagccacugcaccgggcc

SEQ ID NO: 1920225 - RNA, 15 nt, Human
gugagccacugcacc

SEQ ID NO: 1920226 - RNA, 15 nt, Human
gugagcccagcuggg

SEQ ID NO: 1920227 - RNA, 18 nt, Human
gugagcccagcuggguca

SEQ ID NO: 1920228 - RNA, 20 nt, Human
gugagcccagcugggucagg

SEQ ID NO: 1920229 - RNA, 19 nt, Human
gugagccgagaucacgcca

SEQ ID NO: 1920230 - RNA, 13 nt, Human
gugaggagcuggg

SEQ ID NO: 1920231 - RNA, 18 nt, Human
gugaggagcuugaaaccc

SEQ ID NO: 1920232 - RNA, 17 nt, Human
gugaggaugaaaaaaua

SEQ ID NO: 1920233 - RNA, 15 nt, Human
gugaggaugucuggg

SEQ ID NO: 1920234 - RNA, 17 nt, Human
gugcccucaccacccac

SEQ ID NO: 1920235 - RNA, 21 nt, Human
gugcgaucuggguucacugca

SEQ ID NO: 1920236 - RNA, 14 nt, Human
gugccuuuugccau

SEQ ID NO: 1920237 - RNA, 16 nt, Human
gugccaugugccaggu

SEQ ID NO: 1920238 - RNA, 14 nt, Human
gugccaugugccag

SEQ ID NO: 1920239 - RNA, 21 nt, Human
gugccaggauggaaugauggg

SEQ ID NO: 1920240 - RNA, 17 nt, Human
gugccauuuugcauuuu

SEQ ID NO: 1920241 - RNA, 14 nt, Human
gugcgccuacagga

SEQ ID NO: 1920242 - RNA, 14 nt, Human
gugcggccuuuggc

SEQ ID NO: 1920243 - RNA, 12 nt, Human
gugcagccagag

SEQ ID NO: 1920244 - RNA, 13 nt, Human
gugcagccagagg

SEQ ID NO: 1920245 - RNA, 14 nt, Human
gugcagccagaggc

SEQ ID NO: 1920246 - RNA, 23 nt, Human
gugcaguggugcgaucuggguuc

SEQ ID NO: 1920247 - RNA, 20 nt, Human
gugcaguggugcgaucuggg

SEQ ID NO: 1920248 - RNA, 22 nt, Human
gugcauaccacuuuuguucuug

SEQ ID NO: 1920249 - RNA, 20 nt, Human
gugcagaccccuuggccagc

SEQ ID NO: 1920250 - RNA, 22 nt, Human
gugcacuaauguguaagacaaa

SEQ ID NO: 1920251 - RNA, 15 nt, Human
gugcacugcccaugg

SEQ ID NO: 1920252 - RNA, 21 nt, Human
gugcacugcccauggacaggc

SEQ ID NO: 1920253 - RNA, 19 nt, Human
gugcacugcccauggacag

SEQ ID NO: 1920254 - RNA, 20 nt, Human
gugcacugcccauggacagg

SEQ ID NO: 1920255 - RNA, 12 nt, Human
gugauuuucauu

SEQ ID NO: 1920256 - RNA, 18 nt, Human
gugauuuuuguaauuuuu

SEQ ID NO: 1920257 - RNA, 13 nt, Human
gugauuuuuguaa

SEQ ID NO: 1920258 - RNA, 24 nt, Human
gugauccacccaccucagccuccc

SEQ ID NO: 1920259 - RNA, 23 nt, Human
gugauccacccaccucagccucc

SEQ ID NO: 1920260 - RNA, 14 nt, Human
gugucugcccccuc

SEQ ID NO: 1920261 - RNA, 14 nt, Human
gugucuggcugcag

SEQ ID NO: 1920262 - RNA, 22 nt, Human
gugucucuugguccugcugcag

SEQ ID NO: 1920263 - RNA, 17 nt, Human
gugucugaguggcuuca

SEQ ID NO: 1920264 - RNA, 21 nt, Human
gugucucggagggauuccccu

SEQ ID NO: 1920265 - RNA, 18 nt, Human
gugucucuugguccugcu

SEQ ID NO: 1920266 - RNA, 19 nt, Human
gugucucuugguccugcug

SEQ ID NO: 1920267 - RNA, 20 nt, Human
gugucucuugguccugcugc

SEQ ID NO: 1920268 - RNA, 21 nt, Human
gugucucuugguccugcugca

SEQ ID NO: 1920269 - RNA, 20 nt, Human
gugugagucaccaagcccag

SEQ ID NO: 1920270 - RNA, 16 nt, Human
gugugauugacagcuu

SEQ ID NO: 1920271 - RNA, 21 nt, Human
gugugauugacagcuuugcug

SEQ ID NO: 1920272 - RNA, 23 nt, Human
gugugauugacagcuuugcugcu

SEQ ID NO: 1920273 - RNA, 17 nt, Human
gugugcacuaaggggcc

SEQ ID NO: 1920274 - RNA, 19 nt, Human
gugugcaaugucugaguga

SEQ ID NO: 1920275 - RNA, 23 nt, Human
gugugcacuaaggggcccggcca

SEQ ID NO: 1920276 - RNA, 21 nt, Human
guguccuguaguugcguggac

SEQ ID NO: 1920277 - RNA, 16 nt, Human
guguccuuagaacauu

SEQ ID NO: 1920278 - RNA, 15 nt, Human
gugucgggcaugaca

SEQ ID NO: 1920279 - RNA, 23 nt, Human
gugucccugcacuugcagacucu

SEQ ID NO: 1920280 - RNA, 14 nt, Human
guguccggucccug

SEQ ID NO: 1920281 - RNA, 19 nt, Human
gugucuaggcaggaccugu

SEQ ID NO: 1920282 - RNA, 17 nt, Human
gugucgagucaaaaugu

SEQ ID NO: 1920283 - RNA, 17 nt, Human
gugucucccuucauccu

SEQ ID NO: 1920284 - RNA, 17 nt, Human
gugucuccaacccccca

SEQ ID NO: 1920285 - RNA, 13 nt, Human
gugucuccaaccc

SEQ ID NO: 1920286 - RNA, 14 nt, Human
gugucucuuggucc

SEQ ID NO: 1920287 - RNA, 21 nt, Human
gugucuccaaccccccagcac

SEQ ID NO: 1920288 - RNA, 19 nt, Human
gugucuccaaccccccagc

SEQ ID NO: 1920289 - RNA, 18 nt, Human
gugucuccaaccccccag

SEQ ID NO: 1920290 - RNA, 22 nt, Human
gugugcucugaucauccacugu

SEQ ID NO: 1920291 - RNA, 15 nt, Human
gugugcucugaucau

SEQ ID NO: 1920292 - RNA, 15 nt, Human
gugugcucugcuuca

SEQ ID NO: 1920293 - RNA, 18 nt, Human
gugugcuuuaugcugaaa

SEQ ID NO: 1920294 - RNA, 22 nt, Human
gugugcuuuaugcugaaacaga

SEQ ID NO: 1920295 - RNA, 12 nt, Human
gugugcucugau

SEQ ID NO: 1920296 - RNA, 18 nt, Human
gugugcucaggagcccug

SEQ ID NO: 1920297 - RNA, 19 nt, Human
gugugcucaggagcccugg

SEQ ID NO: 1920298 - RNA, 16 nt, Human
gugugcucaggagccc

SEQ ID NO: 1920299 - RNA, 17 nt, Human
gugugcucaggagcccu

SEQ ID NO: 1920300 - RNA, 15 nt, Human
guguguuuaugugug

SEQ ID NO: 1920301 - RNA, 14 nt, Human
guguguuuaugugu

SEQ ID NO: 1920302 - RNA, 12 nt, Human
guguguuuuaaa

SEQ ID NO: 1920303 - RNA, 16 nt, Human
guguguuuaugugugu

SEQ ID NO: 1920304 - RNA, 15 nt, Human
guguguugccacagg

SEQ ID NO: 1920305 - RNA, 17 nt, Human
guguguuguguguggga

SEQ ID NO: 1920306 - RNA, 14 nt, Human
guguguugugugug

SEQ ID NO: 1920307 - RNA, 12 nt, Human
guguguugugug

SEQ ID NO: 1920308 - RNA, 21 nt, Human
guguggagaagcggcuggcag

SEQ ID NO: 1920309 - RNA, 22 nt, Human
guguggagaagccacaggccug

SEQ ID NO: 1920310 - RNA, 23 nt, Human
guguggagaagccacaggccuga

SEQ ID NO: 1920311 - RNA, 13 nt, Human
guguggagaagcg

SEQ ID NO: 1920312 - RNA, 17 nt, Human
gugugggaguguguaau

SEQ ID NO: 1920313 - RNA, 16 nt, Human
guguuaaucauuucau

SEQ ID NO: 1920314 - RNA, 14 nt, Human
guguguuuuucaua

SEQ ID NO: 1920315 - RNA, 13 nt, Human
guguguuuuaaaa

SEQ ID NO: 1920316 - RNA, 16 nt, Human
guguguuuuaaaauga

SEQ ID NO: 1920317 - RNA, 19 nt, Human
guguguuuuaaaaugagaa

SEQ ID NO: 1920318 - RNA, 14 nt, Human
guguuacuaaguuu

SEQ ID NO: 1920319 - RNA, 12 nt, Human
guguuacuaagu

SEQ ID NO: 1920320 - RNA, 18 nt, Human
guguuaugacuccagaau

SEQ ID NO: 1920321 - RNA, 19 nt, Human
guguuacuguaauuccuca

SEQ ID NO: 1920322 - RNA, 15 nt, Human
guguuacuguaauuc

SEQ ID NO: 1920323 - RNA, 18 nt, Human
guguuuuucauaaagcag

SEQ ID NO: 1920324 - RNA, 15 nt, Human
guguuuuuaacucaa

SEQ ID NO: 1920325 - RNA, 19 nt, Human
guguuccuggcaguuuaaa

SEQ ID NO: 1920326 - RNA, 23 nt, Human
guguucaaggccauccuucccug

SEQ ID NO: 1920327 - RNA, 19 nt, Human
guuaaacuuacuuaguguu

SEQ ID NO: 1920328 - RNA, 17 nt, Human
guuaaacucgcucacug

SEQ ID NO: 1920329 - RNA, 13 nt, Human
guuaaaggaaaaa

SEQ ID NO: 1920330 - RNA, 22 nt, Human
guuaaaauaccagccaguaaau

SEQ ID NO: 1920331 - RNA, 16 nt, Human
guuacacauuuuucag

SEQ ID NO: 1920332 - RNA, 15 nt, Human
guuacacuaaaaggu

SEQ ID NO: 1920333 - RNA, 16 nt, Human
guuacacuaaaaggug

SEQ ID NO: 1920334 - RNA, 17 nt, Human
guuacacauuuuucaga

SEQ ID NO: 1920335 - RNA, 13 nt, Human
guuacagacaaag

SEQ ID NO: 1920336 - RNA, 21 nt, Human
guuaacuauuuuauuuucuaa

SEQ ID NO: 1920337 - RNA, 14 nt, Human
guguagccugugca

SEQ ID NO: 1920338 - RNA, 22 nt, Human
guguacauggaauaacauguaa

SEQ ID NO: 1920339 - RNA, 17 nt, Human
guguaccauuugccucc

SEQ ID NO: 1920340 - RNA, 21 nt, Human
guguacucccagggcuuacgg

SEQ ID NO: 1920341 - RNA, 13 nt, Human
guguacucccagg

SEQ ID NO: 1920342 - RNA, 22 nt, Human
guguacagucuuguauuaaguu

SEQ ID NO: 1920343 - RNA, 16 nt, Human
guguacagucuuguau

SEQ ID NO: 1920344 - RNA, 13 nt, Human
guguacagucuug

SEQ ID NO: 1920345 - RNA, 17 nt, Human
guguacauggaauaaca

SEQ ID NO: 1920346 - RNA, 20 nt, Human
guguaauuuaaaauugugau

SEQ ID NO: 1920347 - RNA, 23 nt, Human
guguaauuuaaaauugugaugug

SEQ ID NO: 1920348 - RNA, 22 nt, Human
guguaauuuaaaauugugaugu

SEQ ID NO: 1920349 - RNA, 18 nt, Human
gugucccugcacuugcag

SEQ ID NO: 1920350 - RNA, 16 nt, Human
gugucccugcacuugc

SEQ ID NO: 1920351 - RNA, 13 nt, Human
gugucccugcacu

SEQ ID NO: 1920352 - RNA, 20 nt, Human
guguauggagagaaaacaga

SEQ ID NO: 1920353 - RNA, 14 nt, Human
gugguauagaaaug

SEQ ID NO: 1920354 - RNA, 19 nt, Human
gugguaugaucacggcuca

SEQ ID NO: 1920355 - RNA, 17 nt, Human
gugguagagugugccug

SEQ ID NO: 1920356 - RNA, 14 nt, Human
guggucccacccca

SEQ ID NO: 1920357 - RNA, 15 nt, Human
guggucccaccccac

SEQ ID NO: 1920358 - RNA, 16 nt, Human
guggucccaccccaca

SEQ ID NO: 1920359 - RNA, 17 nt, Human
guggucccaccccacac

SEQ ID NO: 1920360 - RNA, 18 nt, Human
gugguccuaaucuucuga

SEQ ID NO: 1920361 - RNA, 18 nt, Human
guggucuccacuggggau

SEQ ID NO: 1920362 - RNA, 17 nt, Human
guggugaccucugccug

SEQ ID NO: 1920363 - RNA, 14 nt, Human
guggugaccucugc

SEQ ID NO: 1920364 - RNA, 21 nt, Human
guggugagaggcauccaguau

SEQ ID NO: 1920365 - RNA, 19 nt, Human
guggugcgaucuggguuca

SEQ ID NO: 1920366 - RNA, 17 nt, Human
guguaagacaaaaagcu

SEQ ID NO: 1920367 - RNA, 21 nt, Human
guguaaguauucuuauuuaau

SEQ ID NO: 1920368 - RNA, 23 nt, Human
guggguuucuaaagcugccagcc

SEQ ID NO: 1920369 - RNA, 12 nt, Human
gugguaacccug

SEQ ID NO: 1920370 - RNA, 17 nt, Human
guggggcagcuugaggg

SEQ ID NO: 1920371 - RNA, 13 nt, Human
guggggcagcuug

SEQ ID NO: 1920372 - RNA, 15 nt, Human
guggggaccucaggc

SEQ ID NO: 1920373 - RNA, 18 nt, Human
guggggaccucaggccug

SEQ ID NO: 1920374 - RNA, 16 nt, Human
guggggaggaaauaga

SEQ ID NO: 1920375 - RNA, 14 nt, Human
gugggcuugauucu

SEQ ID NO: 1920376 - RNA, 17 nt, Human
guggggaagugaucuuu

SEQ ID NO: 1920377 - RNA, 15 nt, Human
gugggcuaguugggc

SEQ ID NO: 1920378 - RNA, 12 nt, Human
gugggcuaagca

SEQ ID NO: 1920379 - RNA, 23 nt, Human
gugggcgggcaggggagggucag

SEQ ID NO: 1920380 - RNA, 17 nt, Human
gugggcccaaugcacuu

SEQ ID NO: 1920381 - RNA, 15 nt, Human
gugggcauucaaaug

SEQ ID NO: 1920382 - RNA, 17 nt, Human
gugggccaacaaagaac

SEQ ID NO: 1920383 - RNA, 13 nt, Human
gugggccuggcca

SEQ ID NO: 1920384 - RNA, 22 nt, Human
guggcuuaaaacaacacucaca

SEQ ID NO: 1920385 - RNA, 16 nt, Human
guggcuucacuccugc

SEQ ID NO: 1920386 - RNA, 17 nt, Human
guggcuucacuccugcu

SEQ ID NO: 1920387 - RNA, 23 nt, Human
guggcuucacuccugcuguaaau

SEQ ID NO: 1920388 - RNA, 13 nt, Human
gugggcaggaaaa

SEQ ID NO: 1920389 - RNA, 14 nt, Human
gugggcaggaaaag

SEQ ID NO: 1920390 - RNA, 16 nt, Human
gugggcacccacccug

SEQ ID NO: 1920391 - RNA, 20 nt, Human
gugggcacccacccugggac

SEQ ID NO: 1920392 - RNA, 19 nt, Human
guggcuggguuggagggug

SEQ ID NO: 1920393 - RNA, 23 nt, Human
guggcugcuucaaggauccugag

SEQ ID NO: 1920394 - RNA, 17 nt, Human
guggcuggaucugugag

SEQ ID NO: 1920395 - RNA, 15 nt, Human
guggcugcuucaagg

SEQ ID NO: 1920396 - RNA, 16 nt, Human
guggcugcuucaagga

SEQ ID NO: 1920397 - RNA, 19 nt, Human
guggcugcuucaaggaucc

SEQ ID NO: 1920398 - RNA, 22 nt, Human
guggcugcuucaaggauccuga

SEQ ID NO: 1920399 - RNA, 15 nt, Human
guggcucagccagca

SEQ ID NO: 1920400 - RNA, 17 nt, Human
guggcuauuaaaacucu

SEQ ID NO: 1920401 - RNA, 19 nt, Human
guggcuauuaaaacucuuu

SEQ ID NO: 1920402 - RNA, 20 nt, Human
guggcuauuaaaacucuuuu

SEQ ID NO: 1920403 - RNA, 12 nt, Human
guggcugcuuca

SEQ ID NO: 1920404 - RNA, 14 nt, Human
guggcugcuucaag

SEQ ID NO: 1920405 - RNA, 16 nt, Human
guggcugccucauuua

SEQ ID NO: 1920406 - RNA, 20 nt, Human
guggcugccucauuuagaga

SEQ ID NO: 1920407 - RNA, 13 nt, Human
gugcuaauuuuga

SEQ ID NO: 1920408 - RNA, 15 nt, Human
gugcuaauuuugaaa

SEQ ID NO: 1920409 - RNA, 14 nt, Human
guggcucacgccug

SEQ ID NO: 1920410 - RNA, 19 nt, Human
guggcuagucaagcuccuc

SEQ ID NO: 1920411 - RNA, 20 nt, Human
guggcuagucaagcuccucc

SEQ ID NO: 1920412 - RNA, 21 nt, Human
guggcuagucaagcuccuccu

SEQ ID NO: 1920413 - RNA, 22 nt, Human
guggcuagucaagcuccuccuc

SEQ ID NO: 1920414 - RNA, 23 nt, Human
guggcuagucaagcuccuccucc

SEQ ID NO: 1920415 - RNA, 18 nt, Human
guggcuagucaagcuccu

SEQ ID NO: 1920416 - RNA, 17 nt, Human
guuauuauauuuacaaa

SEQ ID NO: 1920417 - RNA, 19 nt, Human
guucaagcgauucuucugc

SEQ ID NO: 1920418 - RNA, 19 nt, Human
guuauuaaaaaucucaaau

SEQ ID NO: 1920419 - RNA, 22 nt, Human
guuaugcaagggacuguguguu

SEQ ID NO: 1920420 - RNA, 19 nt, Human
guucaaggccauccuuccc

SEQ ID NO: 1920421 - RNA, 20 nt, Human
guucaagcgauucuucugcu

SEQ ID NO: 1920422 - RNA, 18 nt, Human
guucaaggccauccuucc

SEQ ID NO: 1920423 - RNA, 16 nt, Human
guucaauucucauuug

SEQ ID NO: 1920424 - RNA, 23 nt, Human
guucaauucucauuugucacaca

SEQ ID NO: 1920425 - RNA, 13 nt, Human
guucaauuagaau

SEQ ID NO: 1920426 - RNA, 21 nt, Human
guuaugacuccagaauuuccc

SEQ ID NO: 1920427 - RNA, 19 nt, Human
guuauccauuuaaaaaugg

SEQ ID NO: 1920428 - RNA, 15 nt, Human
guuaucuaaaagaaa

SEQ ID NO: 1920429 - RNA, 16 nt, Human
guuaucuaaaagaaau

SEQ ID NO: 1920430 - RNA, 14 nt, Human
guuacuaucugcuu

SEQ ID NO: 1920431 - RNA, 20 nt, Human
guuacuagguaacuucauau

SEQ ID NO: 1920432 - RNA, 15 nt, Human
guuacucagaauucu

SEQ ID NO: 1920433 - RNA, 22 nt, Human
guuacuaaguuuuuauggcuuu

SEQ ID NO: 1920434 - RNA, 16 nt, Human
guuacuagguaacuuc

SEQ ID NO: 1920435 - RNA, 13 nt, Human
guuacuauaugcc

SEQ ID NO: 1920436 - RNA, 22 nt, Human
guuaguuucuccaagcaggaca

SEQ ID NO: 1920437 - RNA, 16 nt, Human
guuaguuucuccaagc

SEQ ID NO: 1920438 - RNA, 19 nt, Human
guuaguuucuccaagcagg

SEQ ID NO: 1920439 - RNA, 23 nt, Human
guuaccauuuugggguacccacu

SEQ ID NO: 1920440 - RNA, 16 nt, Human
guuacccaaauuaaga

SEQ ID NO: 1920441 - RNA, 21 nt, Human
guuacauuuuuaagugcugca

SEQ ID NO: 1920442 - RNA, 15 nt, Human
guuacagacaaagcg

SEQ ID NO: 1920443 - RNA, 17 nt, Human
guuacagacaaagcgug

SEQ ID NO: 1920444 - RNA, 18 nt, Human
guuacagccuguuaguaa

SEQ ID NO: 1920445 - RNA, 21 nt, Human
guuacagccuguuaguaacau

SEQ ID NO: 1920446 - RNA, 18 nt, Human
guuacauaagauaaaugu

SEQ ID NO: 1920447 - RNA, 19 nt, Human
guuacauaagauaaaugug

SEQ ID NO: 1920448 - RNA, 22 nt, Human
guucaccuugaagaaccucuca

SEQ ID NO: 1920449 - RNA, 19 nt, Human
guucacugcaaccuccgcc

SEQ ID NO: 1920450 - RNA, 24 nt, Human
guucacucuuggagccugcagagc

SEQ ID NO: 1920451 - RNA, 20 nt, Human
guucacucuuggagccugca

SEQ ID NO: 1920452 - RNA, 17 nt, Human
guucacucuuggagccu

SEQ ID NO: 1920453 - RNA, 19 nt, Human
guucacucuuggagccugc

SEQ ID NO: 1920454 - RNA, 18 nt, Human
guucacucuuggagccug

SEQ ID NO: 1920455 - RNA, 13 nt, Human
guucacucuucuc

SEQ ID NO: 1920456 - RNA, 20 nt, Human
guucacucuucucagccacu

SEQ ID NO: 1920457 - RNA, 14 nt, Human
guucagaagaaauu

SEQ ID NO: 1920458 - RNA, 17 nt, Human
guucaucauccuaagcu

SEQ ID NO: 1920459 - RNA, 16 nt, Human
guucaucaaugaauga

SEQ ID NO: 1920460 - RNA, 23 nt, Human
guucagccacccugaggccucug

SEQ ID NO: 1920461 - RNA, 18 nt, Human
guucaucuugaauuguaa

SEQ ID NO: 1920462 - RNA, 20 nt, Human
guucauccuauucuuucgaa

SEQ ID NO: 1920463 - RNA, 12 nt, Human
guucaugaaaga

SEQ ID NO: 1920464 - RNA, 12 nt, Human
guucaucuugaa

SEQ ID NO: 1920465 - RNA, 13 nt, Human
guucaucuugaau

SEQ ID NO: 1920466 - RNA, 12 nt, Human
guucaugacaau

SEQ ID NO: 1920467 - RNA, 14 nt, Human
guuccucguucucc

SEQ ID NO: 1920468 - RNA, 17 nt, Human
guuccucguucucccug

SEQ ID NO: 1920469 - RNA, 20 nt, Human
guuccucguucucccuggga

SEQ ID NO: 1920470 - RNA, 18 nt, Human
guuccucguucucccugg

SEQ ID NO: 1920471 - RNA, 23 nt, Human
guuccuggcaguuuaaaaaaauu

SEQ ID NO: 1920472 - RNA, 14 nt, Human
guuccuggcaguuu

SEQ ID NO: 1920473 - RNA, 14 nt, Human
guuccuaauccucu

SEQ ID NO: 1920474 - RNA, 15 nt, Human
guuccagccugccac

SEQ ID NO: 1920475 - RNA, 22 nt, Human
guuccucauuagcauuuugcua

SEQ ID NO: 1920476 - RNA, 15 nt, Human
guuccuagaguagag

SEQ ID NO: 1920477 - RNA, 16 nt, Human
guuccuagccaccgcc

SEQ ID NO: 1920478 - RNA, 14 nt, Human
guuccagcaccaca

SEQ ID NO: 1920479 - RNA, 14 nt, Human
guuccagccugcca

SEQ ID NO: 1920480 - RNA, 13 nt, Human
guuccagccugcc

SEQ ID NO: 1920481 - RNA, 17 nt, Human
guuccaccaucaagcca

SEQ ID NO: 1920482 - RNA, 20 nt, Human
guuccaccaucaagccacca

SEQ ID NO: 1920483 - RNA, 19 nt, Human
guucuaaaaauugugauca

SEQ ID NO: 1920484 - RNA, 14 nt, Human
guucuaaagaugga

SEQ ID NO: 1920485 - RNA, 20 nt, Human
guucuaaagauggaaaaacc

SEQ ID NO: 1920486 - RNA, 17 nt, Human
guucuaaagauggaaaa

SEQ ID NO: 1920487 - RNA, 23 nt, Human
guucuaaagauggaaaaaccacc

SEQ ID NO: 1920488 - RNA, 18 nt, Human
guucgacagugaauauuc

SEQ ID NO: 1920489 - RNA, 20 nt, Human
guucgagaccagccuggcca

SEQ ID NO: 1920490 - RNA, 16 nt, Human
guucgagaccagccug

SEQ ID NO: 1920491 - RNA, 18 nt, Human
guucggauuuggggugga

SEQ ID NO: 1920492 - RNA, 16 nt, Human
guucgggugugcaaug

SEQ ID NO: 1920493 - RNA, 14 nt, Human
guucgcauggucac

SEQ ID NO: 1920494 - RNA, 20 nt, Human
guucgcauggucacacacug

SEQ ID NO: 1920495 - RNA, 16 nt, Human
guucugcaaaaauauu

SEQ ID NO: 1920496 - RNA, 19 nt, Human
guucugauccuaguuccac

SEQ ID NO: 1920497 - RNA, 13 nt, Human
guucugccugcca

SEQ ID NO: 1920498 - RNA, 15 nt, Human
guucugccugccagc

SEQ ID NO: 1920499 - RNA, 17 nt, Human
guucugccugccagcug

SEQ ID NO: 1920500 - RNA, 19 nt, Human
guucugccugccagcugca

SEQ ID NO: 1920501 - RNA, 22 nt, Human
guucugccugccagcugcacug

SEQ ID NO: 1920502 - RNA, 23 nt, Human
guucugccugccagcugcacuga

SEQ ID NO: 1920503 - RNA, 16 nt, Human
guucucuuaaaaggua

SEQ ID NO: 1920504 - RNA, 17 nt, Human
guucugagagaaaaaga

SEQ ID NO: 1920505 - RNA, 23 nt, Human
guucugggacacaguucaauucu

SEQ ID NO: 1920506 - RNA, 18 nt, Human
guucuuucacccuuuucu

SEQ ID NO: 1920507 - RNA, 16 nt, Human
guucugggacacaguu

SEQ ID NO: 1920508 - RNA, 15 nt, Human
guucugggacacagu

SEQ ID NO: 1920509 - RNA, 14 nt, Human
guucugggacacag

SEQ ID NO: 1920510 - RNA, 12 nt, Human
guucugggacac

SEQ ID NO: 1920511 - RNA, 11 nt, Human
guucugggaca

SEQ ID NO: 1920512 - RNA, 16 nt, Human
guucuggccagaaugc

SEQ ID NO: 1920513 - RNA, 23 nt, Human
guucuggcagaguugaagacaga

SEQ ID NO: 1920514 - RNA, 22 nt, Human
guucugcaaaaauauuuauaaa

SEQ ID NO: 1920515 - RNA, 12 nt, Human
guucuggcucuu

SEQ ID NO: 1920516 - RNA, 12 nt, Human
guucuggccaga

SEQ ID NO: 1920517 - RNA, 13 nt, Human
guucuggccagaa

SEQ ID NO: 1920518 - RNA, 16 nt, Human
guucuggcucuuccag

SEQ ID NO: 1920519 - RNA, 20 nt, Human
guucuggcucuuccaggcug

SEQ ID NO: 1920520 - RNA, 20 nt, Human
guucuuuccaaaguacacug

SEQ ID NO: 1920521 - RNA, 18 nt, Human
guucuuuccaaaguacac

SEQ ID NO: 1920522 - RNA, 14 nt, Human
guucuuuccaaagu

SEQ ID NO: 1920523 - RNA, 13 nt, Human
guucuuuccaaag

SEQ ID NO: 1920524 - RNA, 17 nt, Human
guugaaaaacagcugag

SEQ ID NO: 1920525 - RNA, 15 nt, Human
guucuuugggccaga

SEQ ID NO: 1920526 - RNA, 16 nt, Human
guucuuugggccagac

SEQ ID NO: 1920527 - RNA, 17 nt, Human
guucuuugggccagaca

SEQ ID NO: 1920528 - RNA, 22 nt, Human
guucuuugggccagacaugcca

SEQ ID NO: 1920529 - RNA, 16 nt, Human
guugcaacuuuguaua

SEQ ID NO: 1920530 - RNA, 23 nt, Human
guugauuucagcaccuacagugu

SEQ ID NO: 1920531 - RNA, 14 nt, Human
guugcaacuuugua

SEQ ID NO: 1920532 - RNA, 15 nt, Human
guugcaggaccucag

SEQ ID NO: 1920533 - RNA, 19 nt, Human
guugcacuuaugauuucau

SEQ ID NO: 1920534 - RNA, 15 nt, Human
guugcagugagcuga

SEQ ID NO: 1920535 - RNA, 16 nt, Human
guugaagacagagcua

SEQ ID NO: 1920536 - RNA, 15 nt, Human
guugaaccuauuucu

SEQ ID NO: 1920537 - RNA, 16 nt, Human
guugaaccuauuucuc

SEQ ID NO: 1920538 - RNA, 18 nt, Human
guugaagagguuuuaaag

SEQ ID NO: 1920539 - RNA, 18 nt, Human
guugaaccuauuucucuu

SEQ ID NO: 1920540 - RNA, 13 nt, Human
guugaauacuuuu

SEQ ID NO: 1920541 - RNA, 17 nt, Human
guugaauacuuuuuaca

SEQ ID NO: 1920542 - RNA, 14 nt, Human
guuggauuuuuguc

SEQ ID NO: 1920543 - RNA, 14 nt, Human
guuggcaaaaaggc

SEQ ID NO: 1920544 - RNA, 20 nt, Human
guuggauuuuugucuugugu

SEQ ID NO: 1920545 - RNA, 18 nt, Human
guuggcaaaaaggcagga

SEQ ID NO: 1920546 - RNA, 23 nt, Human
guuggccaaagccaaagcuaggc

SEQ ID NO: 1920547 - RNA, 14 nt, Human
guuggccaguguga

SEQ ID NO: 1920548 - RNA, 19 nt, Human
guuggccaggcuggucuca

SEQ ID NO: 1920549 - RNA, 17 nt, Human
guuggccaggcuggucu

SEQ ID NO: 1920550 - RNA, 14 nt, Human
guuggccaggcugg

SEQ ID NO: 1920551 - RNA, 15 nt, Human
guuggccaggcuggu

SEQ ID NO: 1920552 - RNA, 13 nt, Human
guuggccaggcug

SEQ ID NO: 1920553 - RNA, 14 nt, Human
guugcccaggcagg

SEQ ID NO: 1920554 - RNA, 15 nt, Human
guugcccaggcaggu

SEQ ID NO: 1920555 - RNA, 12 nt, Human
guugcccaggca

SEQ ID NO: 1920556 - RNA, 13 nt, Human
guugccagucacc

SEQ ID NO: 1920557 - RNA, 14 nt, Human
guugccagucaccc

SEQ ID NO: 1920558 - RNA, 13 nt, Human
guugccacaggac

SEQ ID NO: 1920559 - RNA, 14 nt, Human
guugccacaggaca

SEQ ID NO: 1920560 - RNA, 15 nt, Human
guugccacaggacac

SEQ ID NO: 1920561 - RNA, 16 nt, Human
guugccacaggacaca

SEQ ID NO: 1920562 - RNA, 16 nt, Human
guugccagucaccccg

SEQ ID NO: 1920563 - RNA, 17 nt, Human
guugccagucaccccgg

SEQ ID NO: 1920564 - RNA, 18 nt, Human
guugccagucaccccggc

SEQ ID NO: 1920565 - RNA, 23 nt, Human
guugccagucaccccggccaccu

SEQ ID NO: 1920566 - RNA, 20 nt, Human
guuuccccaccagugaauga

SEQ ID NO: 1920567 - RNA, 15 nt, Human
guuuccccaccagug

SEQ ID NO: 1920568 - RNA, 17 nt, Human
guuuccccaccagugaa

SEQ ID NO: 1920569 - RNA, 14 nt, Human
guuucuguuuaacu

SEQ ID NO: 1920570 - RNA, 19 nt, Human
guuucuguuuaacuucuua

SEQ ID NO: 1920571 - RNA, 16 nt, Human
guuucuuuaguuuuug

SEQ ID NO: 1920572 - RNA, 18 nt, Human
guuucuuuguaaugaaaa

SEQ ID NO: 1920573 - RNA, 16 nt, Human
guuucuuuagcaguuu

SEQ ID NO: 1920574 - RNA, 19 nt, Human
guuucuuuguaaugaaaac

SEQ ID NO: 1920575 - RNA, 17 nt, Human
guuugagaucagccugg

SEQ ID NO: 1920576 - RNA, 16 nt, Human
guuugacuagaugaug

SEQ ID NO: 1920577 - RNA, 18 nt, Human
guuugacuagaugaugga

SEQ ID NO: 1920578 - RNA, 23 nt, Human
guuugauuaaauucuugcaaagu

SEQ ID NO: 1920579 - RNA, 18 nt, Human
guuugagaucagccuggg

SEQ ID NO: 1920580 - RNA, 19 nt, Human
guuugacuagaugauggau

SEQ ID NO: 1920581 - RNA, 18 nt, Human
guuuguuucugaaaggga

SEQ ID NO: 1920582 - RNA, 22 nt, Human
guuuguguauuuacgcuuugau

SEQ ID NO: 1920583 - RNA, 15 nt, Human
guuuguggcuauuaa

SEQ ID NO: 1920584 - RNA, 18 nt, Human
guuuguggcuauuaaaac

SEQ ID NO: 1920585 - RNA, 20 nt, Human
guuuguaaauuaacuuuuau

SEQ ID NO: 1920586 - RNA, 16 nt, Human
guuugguccagccugg

SEQ ID NO: 1920587 - RNA, 16 nt, Human
guuugauucagacagc

SEQ ID NO: 1920588 - RNA, 20 nt, Human
guuugauucagacagcugcc

SEQ ID NO: 1920589 - RNA, 21 nt, Human
guuugauucagacagcugccu

SEQ ID NO: 1920590 - RNA, 20 nt, Human
guuugagaagaaaacaucua

SEQ ID NO: 1920591 - RNA, 12 nt, Human
guuuucacucuu

SEQ ID NO: 1920592 - RNA, 11 nt, Human
guuuucacucu

SEQ ID NO: 1920593 - RNA, 24 nt, Human
guuuucaggaguggguugauuuca

SEQ ID NO: 1920594 - RNA, 17 nt, Human
guuuuaaaaugagaaau

SEQ ID NO: 1920595 - RNA, 13 nt, Human
guuuucaagucaa

SEQ ID NO: 1920596 - RNA, 15 nt, Human
guuuucaagucaaau

SEQ ID NO: 1920597 - RNA, 17 nt, Human
guuuucaagucaaauua

SEQ ID NO: 1920598 - RNA, 18 nt, Human
guuuucaagucaaauuaa

SEQ ID NO: 1920599 - RNA, 20 nt, Human
guuuucaaaauuguuacaaa

SEQ ID NO: 1920600 - RNA, 17 nt, Human
guuuucaaaauaaaaau

SEQ ID NO: 1920601 - RNA, 20 nt, Human
guuuguuucugaaagggacg

SEQ ID NO: 1920602 - RNA, 13 nt, Human
guuuguuuuccuu

SEQ ID NO: 1920603 - RNA, 18 nt, Human
guuuguuuuccuuuuauu

SEQ ID NO: 1920604 - RNA, 15 nt, Human
guuuuaaaaugagaa

SEQ ID NO: 1920605 - RNA, 16 nt, Human
guuuuaaaaugagaaa

SEQ ID NO: 1920606 - RNA, 14 nt, Human
guuuuguaaauuuc

SEQ ID NO: 1920607 - RNA, 12 nt, Human
guuuuguaaauu

SEQ ID NO: 1920608 - RNA, 13 nt, Human
guuuuguaaaguc

SEQ ID NO: 1920609 - RNA, 17 nt, Human
guuuuguaaagucccca

SEQ ID NO: 1920610 - RNA, 17 nt, Human
guuuuguuccccuccuc

SEQ ID NO: 1920611 - RNA, 16 nt, Human
guuuuguuccccuccu

SEQ ID NO: 1920612 - RNA, 15 nt, Human
guuuuguuccccucc

SEQ ID NO: 1920613 - RNA, 14 nt, Human
guuuuguuccccuc

SEQ ID NO: 1920614 - RNA, 21 nt, Human
guuuuguuccccuccuccacu

SEQ ID NO: 1920615 - RNA, 20 nt, Human
guuuuguuccccuccuccac

SEQ ID NO: 1920616 - RNA, 22 nt, Human
guuuuguuccccuccuccacuc

SEQ ID NO: 1920617 - RNA, 13 nt, Human
guuuuccugaaga

SEQ ID NO: 1920618 - RNA, 14 nt, Human
guuuuccucccuuc

SEQ ID NO: 1920619 - RNA, 13 nt, Human
guuuuccucccuu

SEQ ID NO: 1920620 - RNA, 15 nt, Human
guuuuccucccuucu

SEQ ID NO: 1920621 - RNA, 18 nt, Human
guuuuccucccuucugcu

SEQ ID NO: 1920622 - RNA, 22 nt, Human
guuuuccucccuucugcuacug

SEQ ID NO: 1920623 - RNA, 21 nt, Human
guuuucccugaccucccucua

SEQ ID NO: 1920624 - RNA, 20 nt, Human
guuuucccuugaggaaacaa

SEQ ID NO: 1920625 - RNA, 20 nt, Human
guuuuccagguuuaagcugu

SEQ ID NO: 1920626 - RNA, 19 nt, Human
guuuucagcauugauauuu

SEQ ID NO: 1920627 - RNA, 19 nt, Human
guuuuccaugaguccccug

SEQ ID NO: 1920628 - RNA, 20 nt, Human
guuuuccaugaguccccugu

SEQ ID NO: 1920629 - RNA, 12 nt, Human
guuggcuggggg

SEQ ID NO: 1920630 - RNA, 14 nt, Human
guuggccccugccc

SEQ ID NO: 1920631 - RNA, 13 nt, Human
guuggccccugcc

SEQ ID NO: 1920632 - RNA, 20 nt, Human
guuggccccugcccggcugc

SEQ ID NO: 1920633 - RNA, 19 nt, Human
guuggcugggggccucagu

SEQ ID NO: 1920634 - RNA, 14 nt, Human
guugucaccuucac

SEQ ID NO: 1920635 - RNA, 12 nt, Human
guugucagcuga

SEQ ID NO: 1920636 - RNA, 12 nt, Human
guugucccugca

SEQ ID NO: 1920637 - RNA, 15 nt, Human
guuguuaauaaaagu

SEQ ID NO: 1920638 - RNA, 22 nt, Human
guugugugugggaguguguaau

SEQ ID NO: 1920639 - RNA, 16 nt, Human
guugugugugggagug

SEQ ID NO: 1920640 - RNA, 14 nt, Human
guugugugugggag

SEQ ID NO: 1920641 - RNA, 13 nt, Human
guuguguguggga

SEQ ID NO: 1920642 - RNA, 12 nt, Human
guuguguguggg

SEQ ID NO: 1920643 - RNA, 22 nt, Human
guuguggauuuaacagaaaugu

SEQ ID NO: 1920644 - RNA, 14 nt, Human
guugugguuaaucu

SEQ ID NO: 1920645 - RNA, 19 nt, Human
guugucugcaacucugaag

SEQ ID NO: 1920646 - RNA, 23 nt, Human
guugugacaacuuccugagggau

SEQ ID NO: 1920647 - RNA, 16 nt, Human
guugugccucccuggu

SEQ ID NO: 1920648 - RNA, 18 nt, Human
guugugccucccugguga

SEQ ID NO: 1920649 - RNA, 15 nt, Human
guuuagauaauacac

SEQ ID NO: 1920650 - RNA, 14 nt, Human
guuuagauaauaca

SEQ ID NO: 1920651 - RNA, 16 nt, Human
guuuagaagaagugug

SEQ ID NO: 1920652 - RNA, 20 nt, Human
guuguuugauucagacagcu

SEQ ID NO: 1920653 - RNA, 15 nt, Human
guuguuacauuuuua

SEQ ID NO: 1920654 - RNA, 14 nt, Human
guuguuacauuuuu

SEQ ID NO: 1920655 - RNA, 19 nt, Human
guuuaggaacuacugagga

SEQ ID NO: 1920656 - RNA, 18 nt, Human
guuucauguaauccucaa

SEQ ID NO: 1920657 - RNA, 14 nt, Human
uaaaagauugagaa

SEQ ID NO: 1920658 - RNA, 21 nt, Human
uaaaagauacaguuacucaga

SEQ ID NO: 1920659 - RNA, 20 nt, Human
uaaaagauacaguuacucag

SEQ ID NO: 1920660 - RNA, 17 nt, Human
uaaaagauacaguuacu

SEQ ID NO: 1920661 - RNA, 14 nt, Human
uaaaagauacaguu

SEQ ID NO: 1920662 - RNA, 17 nt, Human
uaaaagauaaauauuau

SEQ ID NO: 1920663 - RNA, 22 nt, Human
uaaaacagguagaauuaucuaa

SEQ ID NO: 1920664 - RNA, 18 nt, Human
uaaaacauuuucacacaa

SEQ ID NO: 1920665 - RNA, 15 nt, Human
uaaaacauuuucaca

SEQ ID NO: 1920666 - RNA, 17 nt, Human
uaaaacauuuucacaca

SEQ ID NO: 1920667 - RNA, 21 nt, Human
uaaaagguaugcaaucaaauc

SEQ ID NO: 1920668 - RNA, 12 nt, Human
uaaaaggagcca

SEQ ID NO: 1920669 - RNA, 14 nt, Human
uaaaaggaagccaa

SEQ ID NO: 1920670 - RNA, 19 nt, Human
uaaaaggaagccaaagagu

SEQ ID NO: 1920671 - RNA, 11 nt, Human
uaaaagcacac

SEQ ID NO: 1920672 - RNA, 19 nt, Human
uaaaaggugaccaaugaug

SEQ ID NO: 1920673 - RNA, 12 nt, Human
uaaaaggugacc

SEQ ID NO: 1920674 - RNA, 19 nt, Human
uaaaacaagaaaguuuccc

SEQ ID NO: 1920675 - RNA, 18 nt, Human
uaaaacaagaaaguuucc

SEQ ID NO: 1920676 - RNA, 20 nt, Human
uaaaacaagaaaguuucccc

SEQ ID NO: 1920677 - RNA, 17 nt, Human
uaaaacacaacaucuuu

SEQ ID NO: 1920678 - RNA, 22 nt, Human
uaaaacacaacaucuuuuucua

SEQ ID NO: 1920679 - RNA, 23 nt, Human
uaaaacacaacaucuuuuucuac

SEQ ID NO: 1920680 - RNA, 14 nt, Human
uaaaacagaagccu

SEQ ID NO: 1920681 - RNA, 23 nt, Human
uaaaacaccuaaauaaccaaucu

SEQ ID NO: 1920682 - RNA, 21 nt, Human
uaaaacagguagaauuaucua

SEQ ID NO: 1920683 - RNA, 17 nt, Human
uaaaaauugugaucaga

SEQ ID NO: 1920684 - RNA, 22 nt, Human
uaaaacaagcacuaaacaaaga

SEQ ID NO: 1920685 - RNA, 17 nt, Human
uaaaacaagaaaguuuc

SEQ ID NO: 1920686 - RNA, 15 nt, Human
uaaaacaacacucac

SEQ ID NO: 1920687 - RNA, 19 nt, Human
uaaaaaugguuuaaauggu

SEQ ID NO: 1920688 - RNA, 18 nt, Human
uaaaaaugguuuaaaugg

SEQ ID NO: 1920689 - RNA, 17 nt, Human
guuuuuaauaaagacag

SEQ ID NO: 1920690 - RNA, 13 nt, Human
guuuuuaagcugu

SEQ ID NO: 1920691 - RNA, 14 nt, Human
guuuuuaagcuguu

SEQ ID NO: 1920692 - RNA, 15 nt, Human
guuuuuaagcuguuu

SEQ ID NO: 1920693 - RNA, 19 nt, Human
guuuuuaagcuguuuccau

SEQ ID NO: 1920694 - RNA, 21 nt, Human
uaaaaacaaagaaauuaugug

SEQ ID NO: 1920695 - RNA, 17 nt, Human
uaaaaacaaagaaauua

SEQ ID NO: 1920696 - RNA, 13 nt, Human
uaaagcagccagc

SEQ ID NO: 1920697 - RNA, 18 nt, Human
uaaagcaggcagaacuca

SEQ ID NO: 1920698 - RNA, 19 nt, Human
uaaagcagcguuucuauga

SEQ ID NO: 1920699 - RNA, 17 nt, Human
uaaagcagcguuucuau

SEQ ID NO: 1920700 - RNA, 16 nt, Human
uaaagcagcguuucua

SEQ ID NO: 1920701 - RNA, 12 nt, Human
uaaagaaaacug

SEQ ID NO: 1920702 - RNA, 22 nt, Human
uaaagaaaaguuuuguaaauuu

SEQ ID NO: 1920703 - RNA, 18 nt, Human
uaaagaaaaucucuguga

SEQ ID NO: 1920704 - RNA, 16 nt, Human
uaaagaaaaguuuugu

SEQ ID NO: 1920705 - RNA, 19 nt, Human
uaaagcuugcaacaaaauu

SEQ ID NO: 1920706 - RNA, 20 nt, Human
uaaagccugaguuugcuuuc

SEQ ID NO: 1920707 - RNA, 15 nt, Human
uaaaggcuaccuuug

SEQ ID NO: 1920708 - RNA, 21 nt, Human
uaaaggcccuaucuguuuaca

SEQ ID NO: 1920709 - RNA, 14 nt, Human
uaaaguguuugaaa

SEQ ID NO: 1920710 - RNA, 17 nt, Human
uaaaggcuaccuuugua

SEQ ID NO: 1920711 - RNA, 19 nt, Human
uaaaguuauucuugaaguc

SEQ ID NO: 1920712 - RNA, 13 nt, Human
uaaaguuauucuu

SEQ ID NO: 1920713 - RNA, 14 nt, Human
uaaaguuauucuug

SEQ ID NO: 1920714 - RNA, 18 nt, Human
uaaacacucuugaaaaau

SEQ ID NO: 1920715 - RNA, 20 nt, Human
uaaacauccaauauuuucuu

SEQ ID NO: 1920716 - RNA, 17 nt, Human
uaaacauccaauauuuu

SEQ ID NO: 1920717 - RNA, 15 nt, Human
uaaacacucuugaaa

SEQ ID NO: 1920718 - RNA, 17 nt, Human
uaaacacucuugaaaaa

SEQ ID NO: 1920719 - RNA, 20 nt, Human
uaaacaagaccacguuucua

SEQ ID NO: 1920720 - RNA, 22 nt, Human
uaaacaagaccacguuucuaaa

SEQ ID NO: 1920721 - RNA, 21 nt, Human
uaaacaagaccacguuucuaa

SEQ ID NO: 1920722 - RNA, 22 nt, Human
uaaacuugguuuuuaaaaaacu

SEQ ID NO: 1920723 - RNA, 18 nt, Human
uaaacuuccccaucuucu

SEQ ID NO: 1920724 - RNA, 16 nt, Human
uaaaccaaaaacugaa

SEQ ID NO: 1920725 - RNA, 18 nt, Human
uaacaccugauuaacuga

SEQ ID NO: 1920726 - RNA, 19 nt, Human
uaacaccugauuaacugag

SEQ ID NO: 1920727 - RNA, 14 nt, Human
uaacaccagcauug

SEQ ID NO: 1920728 - RNA, 18 nt, Human
uaacaccaugauuaacca

SEQ ID NO: 1920729 - RNA, 14 nt, Human
uaaauuuggcuucu

SEQ ID NO: 1920730 - RNA, 17 nt, Human
uaaauuuggcuucuguu

SEQ ID NO: 1920731 - RNA, 23 nt, Human
uaaauugacacuuaaaaaugguu

SEQ ID NO: 1920732 - RNA, 22 nt, Human
uaaauuuaguauuuuguuucag

SEQ ID NO: 1920733 - RNA, 13 nt, Human
uaaauuuauguga

SEQ ID NO: 1920734 - RNA, 20 nt, Human
uaaauugacacuuaaaaaug

SEQ ID NO: 1920735 - RNA, 13 nt, Human
uaaauucuuucau

SEQ ID NO: 1920736 - RNA, 19 nt, Human
uaaauugaaucaguauaaa

SEQ ID NO: 1920737 - RNA, 22 nt, Human
uaaauugaaucaguauaaacaa

SEQ ID NO: 1920738 - RNA, 12 nt, Human
uaaaugucuguu

SEQ ID NO: 1920739 - RNA, 11 nt, Human
uaaauuauuuu

SEQ ID NO: 1920740 - RNA, 18 nt, Human
uaaauucacaaacuuuua

SEQ ID NO: 1920741 - RNA, 16 nt, Human
uaaauucacaaacuuu

SEQ ID NO: 1920742 - RNA, 16 nt, Human
uaaauucuugcaaagu

SEQ ID NO: 1920743 - RNA, 20 nt, Human
uaaauuccucuuugcuuugc

SEQ ID NO: 1920744 - RNA, 16 nt, Human
uaaauuccucuuugcu

SEQ ID NO: 1920745 - RNA, 17 nt, Human
uaaauuccucuuugcuu

SEQ ID NO: 1920746 - RNA, 18 nt, Human
uaaauuccucuuugcuuu

SEQ ID NO: 1920747 - RNA, 19 nt, Human
uaaauuccucuuugcuuug

SEQ ID NO: 1920748 - RNA, 12 nt, Human
uaaauuccucuu

SEQ ID NO: 1920749 - RNA, 14 nt, Human
uaaauuccucuuug

SEQ ID NO: 1920750 - RNA, 22 nt, Human
uaaauucuugcaaaguaucccu

SEQ ID NO: 1920751 - RNA, 18 nt, Human
uaaauucuugcaaaguau

SEQ ID NO: 1920752 - RNA, 17 nt, Human
uaaauucuugcaaagua

SEQ ID NO: 1920753 - RNA, 22 nt, Human
uaaaugucucuuuaaugucaca

SEQ ID NO: 1920754 - RNA, 20 nt, Human
uaaaugucuaguuguaacac

SEQ ID NO: 1920755 - RNA, 19 nt, Human
uaaauguaucuuauucaca

SEQ ID NO: 1920756 - RNA, 15 nt, Human
uaaauguagaaagug

SEQ ID NO: 1920757 - RNA, 21 nt, Human
uaaauguaccuucagaauaag

SEQ ID NO: 1920758 - RNA, 17 nt, Human
uaaaugggggugcauuu

SEQ ID NO: 1920759 - RNA, 14 nt, Human
uaaaugggggugca

SEQ ID NO: 1920760 - RNA, 11 nt, Human
uaaauggcugc

SEQ ID NO: 1920761 - RNA, 22 nt, Human
uaaauggaaacugaaacuacug

SEQ ID NO: 1920762 - RNA, 19 nt, Human
uaaaugggggugcauuuga

SEQ ID NO: 1920763 - RNA, 18 nt, Human
uaaaugggggugcauuug

SEQ ID NO: 1920764 - RNA, 17 nt, Human
uaaaguugguaaaccuu

SEQ ID NO: 1920765 - RNA, 16 nt, Human
uaaaguugguaaaccu

SEQ ID NO: 1920766 - RNA, 13 nt, Human
uaaaugcccagcc

SEQ ID NO: 1920767 - RNA, 17 nt, Human
uaaaugcugcuuuuucu

SEQ ID NO: 1920768 - RNA, 11 nt, Human
uaaaugcugcu

SEQ ID NO: 1920769 - RNA, 16 nt, Human
uaaauggaaccacucu

SEQ ID NO: 1920770 - RNA, 16 nt, Human
uaaauggaaacugaaa

SEQ ID NO: 1920771 - RNA, 18 nt, Human
uaaauggaaacugaaacu

SEQ ID NO: 1920772 - RNA, 14 nt, Human
uaaaugcccagccc

SEQ ID NO: 1920773 - RNA, 15 nt, Human
uaaaugcccagcccc

SEQ ID NO: 1920774 - RNA, 16 nt, Human
uaaaugcccagccccu

SEQ ID NO: 1920775 - RNA, 17 nt, Human
uaaaugcccagccccuu

SEQ ID NO: 1920776 - RNA, 18 nt, Human
uaacccccacuggacuga

SEQ ID NO: 1920777 - RNA, 16 nt, Human
uaaccccgucaacaaa

SEQ ID NO: 1920778 - RNA, 17 nt, Human
uaaccccgucaacaaau

SEQ ID NO: 1920779 - RNA, 18 nt, Human
uaaccccgucaacaaauc

SEQ ID NO: 1920780 - RNA, 20 nt, Human
uaacccuggugguugcuguu

SEQ ID NO: 1920781 - RNA, 22 nt, Human
uaacucaauauuuuccaugaaa

SEQ ID NO: 1920782 - RNA, 14 nt, Human
uaacucaauauuuu

SEQ ID NO: 1920783 - RNA, 19 nt, Human
uaacuauuuuauuuucuaa

SEQ ID NO: 1920784 - RNA, 17 nt, Human
uaacuccucaauuccaa

SEQ ID NO: 1920785 - RNA, 11 nt, Human
uaacagaaaug

SEQ ID NO: 1920786 - RNA, 12 nt, Human
uaacagaaaugu

SEQ ID NO: 1920787 - RNA, 13 nt, Human
uaaccagaucauu

SEQ ID NO: 1920788 - RNA, 16 nt, Human
uaaccacuucagcuga

SEQ ID NO: 1920789 - RNA, 23 nt, Human
uaaccaguguuguggauuuaaca

SEQ ID NO: 1920790 - RNA, 17 nt, Human
uaaccaucacugguugc

SEQ ID NO: 1920791 - RNA, 17 nt, Human
uaaccauggugcuuguu

SEQ ID NO: 1920792 - RNA, 22 nt, Human
uaaccaugugaaaaggcaaaaa

SEQ ID NO: 1920793 - RNA, 13 nt, Human
uaacccagauuuu

SEQ ID NO: 1920794 - RNA, 23 nt, Human
uaagaaaaaggaugcacagaguu

SEQ ID NO: 1920795 - RNA, 19 nt, Human
uaagaaaaaggaugcacag

SEQ ID NO: 1920796 - RNA, 18 nt, Human
uaagaaaaaggaugcaca

SEQ ID NO: 1920797 - RNA, 16 nt, Human
uaagaaaaaggaugca

SEQ ID NO: 1920798 - RNA, 19 nt, Human
uaagaaccuuuugagugcc

SEQ ID NO: 1920799 - RNA, 14 nt, Human
uaagaaccuggaac

SEQ ID NO: 1920800 - RNA, 21 nt, Human
uaagaggacauaauggggucc

SEQ ID NO: 1920801 - RNA, 24 nt, Human
uaagaaagacuaucuaaauguuga

SEQ ID NO: 1920802 - RNA, 12 nt, Human
uaagaaaagauu

SEQ ID NO: 1920803 - RNA, 14 nt, Human
uaagaaaagauuuu

SEQ ID NO: 1920804 - RNA, 19 nt, Human
uaagaaaagauuuuaauca

SEQ ID NO: 1920805 - RNA, 18 nt, Human
uaauguuguuauuuaaag

SEQ ID NO: 1920806 - RNA, 14 nt, Human
uaauguuguuauuu

SEQ ID NO: 1920807 - RNA, 15 nt, Human
uaaugggguccuggc

SEQ ID NO: 1920808 - RNA, 17 nt, Human
uaaugggguccuggcca

SEQ ID NO: 1920809 - RNA, 18 nt, Human
uaaugggguccuggccau

SEQ ID NO: 1920810 - RNA, 22 nt, Human
uaaugggguccuggccauccca

SEQ ID NO: 1920811 - RNA, 11 nt, Human
uaauguuuccu

SEQ ID NO: 1920812 - RNA, 23 nt, Human
uaauguuguuccuuuugaaagaa

SEQ ID NO: 1920813 - RNA, 14 nt, Human
uaauuaaguacuau

SEQ ID NO: 1920814 - RNA, 17 nt, Human
uaauuaaguacuaugua

SEQ ID NO: 1920815 - RNA, 20 nt, Human
uaauuaaguacuauguauca

SEQ ID NO: 1920816 - RNA, 16 nt, Human
uaauuagcaucucagg

SEQ ID NO: 1920817 - RNA, 15 nt, Human
uaauggggcggugag

SEQ ID NO: 1920818 - RNA, 14 nt, Human
uaaugcuuuuauau

SEQ ID NO: 1920819 - RNA, 13 nt, Human
uaaugcuccuugu

SEQ ID NO: 1920820 - RNA, 18 nt, Human
uaaugcuccuuguuccua

SEQ ID NO: 1920821 - RNA, 23 nt, Human
uaaugcgugcauaccacuuuugu

SEQ ID NO: 1920822 - RNA, 22 nt, Human
uaaugcgugcauaccacuuuug

SEQ ID NO: 1920823 - RNA, 19 nt, Human
uaaugcgugcauaccacuu

SEQ ID NO: 1920824 - RNA, 15 nt, Human
uaaugcgugcauacc

SEQ ID NO: 1920825 - RNA, 19 nt, Human
uaauaugcacacauuuuuu

SEQ ID NO: 1920826 - RNA, 22 nt, Human
uaauauggccacaguagucuug

SEQ ID NO: 1920827 - RNA, 18 nt, Human
uaauaugcacacauuuuu

SEQ ID NO: 1920828 - RNA, 17 nt, Human
uaauaugcacacauuuu

SEQ ID NO: 1920829 - RNA, 16 nt, Human
uaauaugcacacauuu

SEQ ID NO: 1920830 - RNA, 15 nt, Human
uaauaugcacacauu

SEQ ID NO: 1920831 - RNA, 14 nt, Human
uaauaugaaaacuu

SEQ ID NO: 1920832 - RNA, 15 nt, Human
uaauaugaaaacuua

SEQ ID NO: 1920833 - RNA, 16 nt, Human
uaauaugaaaacuuau

SEQ ID NO: 1920834 - RNA, 20 nt, Human
uaauaaucuuauuagggaga

SEQ ID NO: 1920835 - RNA, 23 nt, Human
uaauaaucauuggauucugagag

SEQ ID NO: 1920836 - RNA, 23 nt, Human
uaauaaucuuauuagggagaaaa

SEQ ID NO: 1920837 - RNA, 20 nt, Human
uaauauuaaggaagacaaug

SEQ ID NO: 1920838 - RNA, 13 nt, Human
uaaucuaaaugga

SEQ ID NO: 1920839 - RNA, 12 nt, Human
uaaucuaaaugg

SEQ ID NO: 1920840 - RNA, 20 nt, Human
uaauccucuaggaggucucu

SEQ ID NO: 1920841 - RNA, 15 nt, Human
uaaggugugcucuga

SEQ ID NO: 1920842 - RNA, 20 nt, Human
uaagguggguacgggagggu

SEQ ID NO: 1920843 - RNA, 18 nt, Human
uaaggugauauauuuaaa

SEQ ID NO: 1920844 - RNA, 20 nt, Human
uaaggugauauauuuaaaaa

SEQ ID NO: 1920845 - RNA, 17 nt, Human
uaaggguaucuggugac

SEQ ID NO: 1920846 - RNA, 18 nt, Human
uaaggucauuaccacagg

SEQ ID NO: 1920847 - RNA, 16 nt, Human
uaaggggcccggccag

SEQ ID NO: 1920848 - RNA, 14 nt, Human
uaagcuauucagua

SEQ ID NO: 1920849 - RNA, 16 nt, Human
uaaggauguucuagca

SEQ ID NO: 1920850 - RNA, 14 nt, Human
uaaggcaaucaugg

SEQ ID NO: 1920851 - RNA, 21 nt, Human
uaaggcugcaagguuuaggcu

SEQ ID NO: 1920852 - RNA, 15 nt, Human
uaagaggcagggucu

SEQ ID NO: 1920853 - RNA, 12 nt, Human
uaagaggcaggg

SEQ ID NO: 1920854 - RNA, 15 nt, Human
uaagccaugggagac

SEQ ID NO: 1920855 - RNA, 16 nt, Human
uaagccuaaaaguggg

SEQ ID NO: 1920856 - RNA, 12 nt, Human
uaauaaagcugu

SEQ ID NO: 1920857 - RNA, 23 nt, Human
uaaguguauuuuucaauaaagca

SEQ ID NO: 1920858 - RNA, 12 nt, Human
uaauaaauauuu

SEQ ID NO: 1920859 - RNA, 18 nt, Human
uaaguguauuuuucaaua

SEQ ID NO: 1920860 - RNA, 20 nt, Human
uaaguguauuuuucaauaaa

SEQ ID NO: 1920861 - RNA, 13 nt, Human
uaaguguauuuuu

SEQ ID NO: 1920862 - RNA, 22 nt, Human
uaagugcugcauuuaaaagaua

SEQ ID NO: 1920863 - RNA, 18 nt, Human
uaagugcugcauuuaaaa

SEQ ID NO: 1920864 - RNA, 16 nt, Human
uaagugcugcauuuaa

SEQ ID NO: 1920865 - RNA, 15 nt, Human
uaagugcugcauuua

SEQ ID NO: 1920866 - RNA, 13 nt, Human
uaagugaaauaag

SEQ ID NO: 1920867 - RNA, 22 nt, Human
uaagugauugcugguuuuaguu

SEQ ID NO: 1920868 - RNA, 12 nt, Human
uaagugagagag

SEQ ID NO: 1920869 - RNA, 23 nt, Human
uaagugaggaugaaaaaauaaca

SEQ ID NO: 1920870 - RNA, 14 nt, Human
uaagugcugcauuu

SEQ ID NO: 1920871 - RNA, 22 nt, Human
uaagugccaggauggaaugaug

SEQ ID NO: 1920872 - RNA, 22 nt, Human
uaucagucauaacuaaauaaag

SEQ ID NO: 1920873 - RNA, 20 nt, Human
uaucagucaauauuuuuaga

SEQ ID NO: 1920874 - RNA, 21 nt, Human
uaucagucaauauuuuuagau

SEQ ID NO: 1920875 - RNA, 20 nt, Human
uaucaggugcugccauccag

SEQ ID NO: 1920876 - RNA, 19 nt, Human
uaucaggugcugccaucca

SEQ ID NO: 1920877 - RNA, 14 nt, Human
uaucaaaagaaaga

SEQ ID NO: 1920878 - RNA, 17 nt, Human
uaucaugacaaagacug

SEQ ID NO: 1920879 - RNA, 12 nt, Human
uaucauggucuc

SEQ ID NO: 1920880 - RNA, 18 nt, Human
uaucaugccccuguacuc

SEQ ID NO: 1920881 - RNA, 14 nt, Human
uaucaugcccugug

SEQ ID NO: 1920882 - RNA, 17 nt, Human
uaucauggucucaguca

SEQ ID NO: 1920883 - RNA, 19 nt, Human
uaucaaaacuuucuuuucu

SEQ ID NO: 1920884 - RNA, 20 nt, Human
uauauuuuuuucugaaauuu

SEQ ID NO: 1920885 - RNA, 19 nt, Human
uauauuuuuuucugaaauu

SEQ ID NO: 1920886 - RNA, 16 nt, Human
uauauuuuuuucugaa

SEQ ID NO: 1920887 - RNA, 21 nt, Human
uauauuuuuuguuaaaugauu

SEQ ID NO: 1920888 - RNA, 22 nt, Human
uauauuugugauagcacuuucu

SEQ ID NO: 1920889 - RNA, 21 nt, Human
uauauuugugauagcacuuuc

SEQ ID NO: 1920890 - RNA, 22 nt, Human
uauauuugggccugcuccagac

SEQ ID NO: 1920891 - RNA, 20 nt, Human
uauauuuguaaauuuaugug

SEQ ID NO: 1920892 - RNA, 11 nt, Human
uauagaaaugc

SEQ ID NO: 1920893 - RNA, 15 nt, Human
uauagaauauuuauu

SEQ ID NO: 1920894 - RNA, 21 nt, Human
uauagaauauuuauuaccucu

SEQ ID NO: 1920895 - RNA, 11 nt, Human
uauagacucua

SEQ ID NO: 1920896 - RNA, 11 nt, Human
uauacuuuuuu

SEQ ID NO: 1920897 - RNA, 12 nt, Human
uagguucuaaaa

SEQ ID NO: 1920898 - RNA, 18 nt, Human
uaguaugaggcauuuguu

SEQ ID NO: 1920899 - RNA, 17 nt, Human
uaguaugaggcauuugu

SEQ ID NO: 1920900 - RNA, 23 nt, Human
uaguagauguucuacuuuguucu

SEQ ID NO: 1920901 - RNA, 23 nt, Human
uaggugugacugaauuucuuuug

SEQ ID NO: 1920902 - RNA, 21 nt, Human
uaggugugacugaauuucuuu

SEQ ID NO: 1920903 - RNA, 19 nt, Human
uaggugugacugaauuucu

SEQ ID NO: 1920904 - RNA, 13 nt, Human
uagguguggggga

SEQ ID NO: 1920905 - RNA, 17 nt, Human
uaggugugggggaagca

SEQ ID NO: 1920906 - RNA, 16 nt, Human
uaggugacagagugag

SEQ ID NO: 1920907 - RNA, 11 nt, Human
uaggugacaga

SEQ ID NO: 1920908 - RNA, 11 nt, Human
uagggaaaaac

SEQ ID NO: 1920909 - RNA, 22 nt, Human
uagcuggucuuauuuguaaagc

SEQ ID NO: 1920910 - RNA, 20 nt, Human
uagcugggggugggccaggc

SEQ ID NO: 1920911 - RNA, 15 nt, Human
uaggcugguggccca

SEQ ID NO: 1920912 - RNA, 16 nt, Human
uaggcugguggcccag

SEQ ID NO: 1920913 - RNA, 18 nt, Human
uaggcugguggcccagga

SEQ ID NO: 1920914 - RNA, 19 nt, Human
uaggcugguggcccaggac

SEQ ID NO: 1920915 - RNA, 20 nt, Human
uaguggcuuaaaacaacacu

SEQ ID NO: 1920916 - RNA, 16 nt, Human
uaguaugguggcuggg

SEQ ID NO: 1920917 - RNA, 15 nt, Human
uaguaugaggcauuu

SEQ ID NO: 1920918 - RNA, 21 nt, Human
uaguuguuugauucagacagc

SEQ ID NO: 1920919 - RNA, 22 nt, Human
uaguuguuugauucagacagcu

SEQ ID NO: 1920920 - RNA, 20 nt, Human
uaguuguuugauucagacag

SEQ ID NO: 1920921 - RNA, 19 nt, Human
uaguugaaacgcagacacu

SEQ ID NO: 1920922 - RNA, 17 nt, Human
uaguugaaccuauuucu

SEQ ID NO: 1920923 - RNA, 15 nt, Human
uaguuugauuaaauu

SEQ ID NO: 1920924 - RNA, 21 nt, Human
uaguuugauuaaauucuugca

SEQ ID NO: 1920925 - RNA, 16 nt, Human
uaguuugauuaaauuc

SEQ ID NO: 1920926 - RNA, 22 nt, Human
uauaaacaugcuugcauuauau

SEQ ID NO: 1920927 - RNA, 14 nt, Human
uauaaacacuauau

SEQ ID NO: 1920928 - RNA, 11 nt, Human
uauaaacuuua

SEQ ID NO: 1920929 - RNA, 18 nt, Human
uauaaaccgaacugaugu

SEQ ID NO: 1920930 - RNA, 14 nt, Human
uauaaacuuuaccu

SEQ ID NO: 1920931 - RNA, 13 nt, Human
uauaaacuuuacc

SEQ ID NO: 1920932 - RNA, 17 nt, Human
uauaaacuuuaccuuuu

SEQ ID NO: 1920933 - RNA, 16 nt, Human
uauaaacuuuaccuuu

SEQ ID NO: 1920934 - RNA, 15 nt, Human
uauaaacuuuaccuu

SEQ ID NO: 1920935 - RNA, 12 nt, Human
uagacuaaaaga

SEQ ID NO: 1920936 - RNA, 13 nt, Human
uagacuaaaugaa

SEQ ID NO: 1920937 - RNA, 14 nt, Human
uagaccugucuccu

SEQ ID NO: 1920938 - RNA, 16 nt, Human
uagaccugucuccugg

SEQ ID NO: 1920939 - RNA, 14 nt, Human
uagacuaaaugaaa

SEQ ID NO: 1920940 - RNA, 15 nt, Human
uagacccaucuucuu

SEQ ID NO: 1920941 - RNA, 17 nt, Human
uagaguugauacuacag

SEQ ID NO: 1920942 - RNA, 14 nt, Human
uagaguugauacua

SEQ ID NO: 1920943 - RNA, 12 nt, Human
uagagugggagc

SEQ ID NO: 1920944 - RNA, 15 nt, Human
uagagguucaaagau

SEQ ID NO: 1920945 - RNA, 14 nt, Human
uagagguucaaaga

SEQ ID NO: 1920946 - RNA, 11 nt, Human
uagagacaggg

SEQ ID NO: 1920947 - RNA, 14 nt, Human
uacuuguggacaca

SEQ ID NO: 1920948 - RNA, 14 nt, Human
uacuuguuauaaac

SEQ ID NO: 1920949 - RNA, 12 nt, Human
uagaauauuuau

SEQ ID NO: 1920950 - RNA, 15 nt, Human
uagaauauuuauuac

SEQ ID NO: 1920951 - RNA, 19 nt, Human
uagaauauuuauuaccucu

SEQ ID NO: 1920952 - RNA, 20 nt, Human
uagaauauuuauuaccucug

SEQ ID NO: 1920953 - RNA, 14 nt, Human
uagaauccaaacuu

SEQ ID NO: 1920954 - RNA, 16 nt, Human
uagaauaauaaauauu

SEQ ID NO: 1920955 - RNA, 17 nt, Human
uagaauaauaaauauuu

SEQ ID NO: 1920956 - RNA, 23 nt, Human
uagaauaguguucugcaaaaaua

SEQ ID NO: 1920957 - RNA, 23 nt, Human
uagaauuaguggcacuugcuuuu

SEQ ID NO: 1920958 - RNA, 18 nt, Human
uagaauuaacacaugauc

SEQ ID NO: 1920959 - RNA, 16 nt, Human
uagaauuaacacauga

SEQ ID NO: 1920960 - RNA, 15 nt, Human
uagaauuaacacaug

SEQ ID NO: 1920961 - RNA, 23 nt, Human
uagaauuaucuaauuuauaaaaa

SEQ ID NO: 1920962 - RNA, 22 nt, Human
uagaauuaucuaauuuauaaaa

SEQ ID NO: 1920963 - RNA, 21 nt, Human
uagaauuaucuaauuuauaaa

SEQ ID NO: 1920964 - RNA, 19 nt, Human
uagaauuaucuaauuuaua

SEQ ID NO: 1920965 - RNA, 16 nt, Human
uagaauuaucuaauuu

SEQ ID NO: 1920966 - RNA, 15 nt, Human
uagaauuaucuaauu

SEQ ID NO: 1920967 - RNA, 15 nt, Human
uagaauccaaacuug

SEQ ID NO: 1920968 - RNA, 23 nt, Human
uagaauccaaacuuggauuuuug

SEQ ID NO: 1920969 - RNA, 19 nt, Human
uagcugggacuacaggcac

SEQ ID NO: 1920970 - RNA, 17 nt, Human
uagcugggacuacaggc

SEQ ID NO: 1920971 - RNA, 15 nt, Human
uagcugggacuacag

SEQ ID NO: 1920972 - RNA, 21 nt, Human
uagcugacccagccccuugag

SEQ ID NO: 1920973 - RNA, 23 nt, Human
uagcugacccagccccuugagaa

SEQ ID NO: 1920974 - RNA, 16 nt, Human
uagcugcaaaggacag

SEQ ID NO: 1920975 - RNA, 17 nt, Human
uagcugcaaaggacaga

SEQ ID NO: 1920976 - RNA, 21 nt, Human
uagcucaggugucccugcacu

SEQ ID NO: 1920977 - RNA, 20 nt, Human
uagcucaggugucccugcac

SEQ ID NO: 1920978 - RNA, 12 nt, Human
uagcucauucuc

SEQ ID NO: 1920979 - RNA, 18 nt, Human
uagccugugccucuggga

SEQ ID NO: 1920980 - RNA, 20 nt, Human
uagccugugccucugggacu

SEQ ID NO: 1920981 - RNA, 14 nt, Human
uagccugggguggg

SEQ ID NO: 1920982 - RNA, 16 nt, Human
uagccuaggugacaga

SEQ ID NO: 1920983 - RNA, 16 nt, Human
uagccggccacuuugg

SEQ ID NO: 1920984 - RNA, 16 nt, Human
uagccccucuccugga

SEQ ID NO: 1920985 - RNA, 15 nt, Human
uagcccccuggccuc

SEQ ID NO: 1920986 - RNA, 18 nt, Human
uagcccccuggccucugu

SEQ ID NO: 1920987 - RNA, 16 nt, Human
uagcccccuggccucu

SEQ ID NO: 1920988 - RNA, 17 nt, Human
uagcccccuggccucug

SEQ ID NO: 1920989 - RNA, 15 nt, Human
uagcaugacauuucu

SEQ ID NO: 1920990 - RNA, 16 nt, Human
uagcaugacauuucuu

SEQ ID NO: 1920991 - RNA, 16 nt, Human
uagauacuguaucaug

SEQ ID NO: 1920992 - RNA, 20 nt, Human
uagauacuuugcuagccggc

SEQ ID NO: 1920993 - RNA, 16 nt, Human
uagauuauggagcuuu

SEQ ID NO: 1920994 - RNA, 17 nt, Human
uagauuauggagcuuuu

SEQ ID NO: 1920995 - RNA, 11 nt, Human
uagcagggaaa

SEQ ID NO: 1920996 - RNA, 19 nt, Human
uagcauacguacacauuuu

SEQ ID NO: 1920997 - RNA, 18 nt, Human
uagcauacguacacauuu

SEQ ID NO: 1920998 - RNA, 17 nt, Human
uagcauacguacacauu

SEQ ID NO: 1920999 - RNA, 16 nt, Human
uagcauacguacacau

SEQ ID NO: 1921000 - RNA, 18 nt, Human
uagcauauaauucuauau

SEQ ID NO: 1921001 - RNA, 18 nt, Human
uagcauccuggaauaucu

SEQ ID NO: 1921002 - RNA, 16 nt, Human
uagcauccuggaauau

SEQ ID NO: 1921003 - RNA, 15 nt, Human
uagcauccuggaaua

SEQ ID NO: 1921004 - RNA, 13 nt, Human
uagcauccuggaa

SEQ ID NO: 1921005 - RNA, 14 nt, Human
uaccucugugugcu

SEQ ID NO: 1921006 - RNA, 12 nt, Human
uaccucugugug

SEQ ID NO: 1921007 - RNA, 21 nt, Human
uaccucuugagccuugaacuu

SEQ ID NO: 1921008 - RNA, 17 nt, Human
uaccucucuuauagaau

SEQ ID NO: 1921009 - RNA, 21 nt, Human
uaccucucuuauagaauauuu

SEQ ID NO: 1921010 - RNA, 23 nt, Human
uaccucucuuauagaauauuuau

SEQ ID NO: 1921011 - RNA, 14 nt, Human
uaccucugauaccu

SEQ ID NO: 1921012 - RNA, 15 nt, Human
uaccucugauaccuc

SEQ ID NO: 1921013 - RNA, 17 nt, Human
uaccucugauaccucaa

SEQ ID NO: 1921014 - RNA, 18 nt, Human
uaccucggugccuuccuc

SEQ ID NO: 1921015 - RNA, 22 nt, Human
uaccuuuuuuagaguugauacu

SEQ ID NO: 1921016 - RNA, 19 nt, Human
uaccuuuuuuagaguugau

SEQ ID NO: 1921017 - RNA, 13 nt, Human
uaccuuuuuuaga

SEQ ID NO: 1921018 - RNA, 16 nt, Human
uaccuucauaugcagu

SEQ ID NO: 1921019 - RNA, 14 nt, Human
uacuaaggaaucuu

SEQ ID NO: 1921020 - RNA, 21 nt, Human
uacuaauagacaauuuauuau

SEQ ID NO: 1921021 - RNA, 20 nt, Human
uacuaauagacaauuuauua

SEQ ID NO: 1921022 - RNA, 17 nt, Human
uaccuuuuuuauacaua

SEQ ID NO: 1921023 - RNA, 16 nt, Human
uaccuuuuuuauacau

SEQ ID NO: 1921024 - RNA, 13 nt, Human
uaccuuuuuuaua

SEQ ID NO: 1921025 - RNA, 18 nt, Human
uacgaaaagaggggaaga

SEQ ID NO: 1921026 - RNA, 21 nt, Human
uacgaaaagaggggaagagac

SEQ ID NO: 1921027 - RNA, 15 nt, Human
uaccuacauacaauu

SEQ ID NO: 1921028 - RNA, 22 nt, Human
uaccucaacccccauuucuauu

SEQ ID NO: 1921029 - RNA, 22 nt, Human
uaccuaacgaaguauccuucag

SEQ ID NO: 1921030 - RNA, 15 nt, Human
uacccacugcucugg

SEQ ID NO: 1921031 - RNA, 23 nt, Human
uacauuuuuaagugcugcauuua

SEQ ID NO: 1921032 - RNA, 16 nt, Human
uacucuacccucuuag

SEQ ID NO: 1921033 - RNA, 14 nt, Human
uacugcaagaaaau

SEQ ID NO: 1921034 - RNA, 20 nt, Human
uacugcaccauuuaaaaaca

SEQ ID NO: 1921035 - RNA, 15 nt, Human
uacugcaagaaaaug

SEQ ID NO: 1921036 - RNA, 21 nt, Human
uacugccuauuuuaauaaaca

SEQ ID NO: 1921037 - RNA, 14 nt, Human
uacugccuauuuua

SEQ ID NO: 1921038 - RNA, 23 nt, Human
uacugcccuccagcucuuuccuc

SEQ ID NO: 1921039 - RNA, 22 nt, Human
uacugcccuccagcucuuuccu

SEQ ID NO: 1921040 - RNA, 15 nt, Human
uacuccccuccuuga

SEQ ID NO: 1921041 - RNA, 23 nt, Human
uacucccagggcuuacggcccug

SEQ ID NO: 1921042 - RNA, 22 nt, Human
uacucgaguuacagacaaagcg

SEQ ID NO: 1921043 - RNA, 18 nt, Human
uacucgaguuacagacaa

SEQ ID NO: 1921044 - RNA, 14 nt, Human
uacuacaguuuguu

SEQ ID NO: 1921045 - RNA, 13 nt, Human
uacuacaguuugu

SEQ ID NO: 1921046 - RNA, 17 nt, Human
uacucauuuaaaguauu

SEQ ID NO: 1921047 - RNA, 22 nt, Human
uacuacaguccucccaucucac

SEQ ID NO: 1921048 - RNA, 16 nt, Human
uacuaauuccacaccu

SEQ ID NO: 1921049 - RNA, 13 nt, Human
uacuaauuccaca

SEQ ID NO: 1921050 - RNA, 13 nt, Human
uacuuguggacac

SEQ ID NO: 1921051 - RNA, 20 nt, Human
uacuugcucuugaugccugg

SEQ ID NO: 1921052 - RNA, 18 nt, Human
uacuugaagggccagagc

SEQ ID NO: 1921053 - RNA, 19 nt, Human
uacuugaagggccagagcc

SEQ ID NO: 1921054 - RNA, 20 nt, Human
uacuugaagggccagagcca

SEQ ID NO: 1921055 - RNA, 13 nt, Human
uacuugcucuuga

SEQ ID NO: 1921056 - RNA, 14 nt, Human
uacuugcucuugau

SEQ ID NO: 1921057 - RNA, 18 nt, Human
uacuugcucuugaugccu

SEQ ID NO: 1921058 - RNA, 19 nt, Human
uacuugcucuugaugccug

SEQ ID NO: 1921059 - RNA, 11 nt, Human
uacuugaaggg

SEQ ID NO: 1921060 - RNA, 12 nt, Human
uacuugaagggc

SEQ ID NO: 1921061 - RNA, 14 nt, Human
uacuugaagggcca

SEQ ID NO: 1921062 - RNA, 15 nt, Human
uacuugaagggccag

SEQ ID NO: 1921063 - RNA, 16 nt, Human
uacuugaagggccaga

SEQ ID NO: 1921064 - RNA, 17 nt, Human
uacuugaagggccagag

SEQ ID NO: 1921065 - RNA, 16 nt, Human
uacuguccuacccacc

SEQ ID NO: 1921066 - RNA, 15 nt, Human
uacugcuacuguaau

SEQ ID NO: 1921067 - RNA, 20 nt, Human
uacugcuacuguaauuuuau

SEQ ID NO: 1921068 - RNA, 21 nt, Human
uacugucuucaguaagccgug

SEQ ID NO: 1921069 - RNA, 22 nt, Human
uacugugugugugaaugaacac

SEQ ID NO: 1921070 - RNA, 23 nt, Human
uacugugugugugaaugaacacu

SEQ ID NO: 1921071 - RNA, 18 nt, Human
uacuguggaaaagaaaca

SEQ ID NO: 1921072 - RNA, 15 nt, Human
uacuguuaaaggaaa

SEQ ID NO: 1921073 - RNA, 16 nt, Human
uacuguuaaaggaaaa

SEQ ID NO: 1921074 - RNA, 16 nt, Human
uacacucuuuguaaga

SEQ ID NO: 1921075 - RNA, 21 nt, Human
uacacugugcugagucugaag

SEQ ID NO: 1921076 - RNA, 11 nt, Human
uacacagugug

SEQ ID NO: 1921077 - RNA, 22 nt, Human
uacacagugugaauaaagugcu

SEQ ID NO: 1921078 - RNA, 15 nt, Human
uacacacugcauguu

SEQ ID NO: 1921079 - RNA, 16 nt, Human
uacacaaugugucuuu

SEQ ID NO: 1921080 - RNA, 13 nt, Human
uacacaauguguc

SEQ ID NO: 1921081 - RNA, 11 nt, Human
uacacacacac

SEQ ID NO: 1921082 - RNA, 23 nt, Human
uacaacugccucgaaacacagaa

SEQ ID NO: 1921083 - RNA, 23 nt, Human
uacaacccgguucacucuucuca

SEQ ID NO: 1921084 - RNA, 15 nt, Human
uacaacacaaagaga

SEQ ID NO: 1921085 - RNA, 17 nt, Human
uacaacacaaagagaaa

SEQ ID NO: 1921086 - RNA, 21 nt, Human
uacaaauggacauaggacuca

SEQ ID NO: 1921087 - RNA, 13 nt, Human
uacaaauuagaaa

SEQ ID NO: 1921088 - RNA, 15 nt, Human
uacaaauuagaaaau

SEQ ID NO: 1921089 - RNA, 14 nt, Human
uacaaauuagaaaa

SEQ ID NO: 1921090 - RNA, 18 nt, Human
uaauucuaaaugaauguu

SEQ ID NO: 1921091 - RNA, 11 nt, Human
uaauucuaaau

SEQ ID NO: 1921092 - RNA, 19 nt, Human
uaauuccuuuccagguauu

SEQ ID NO: 1921093 - RNA, 18 nt, Human
uacaaacaaaauuucuau

SEQ ID NO: 1921094 - RNA, 19 nt, Human
uacaaagaaccaagaaaaa

SEQ ID NO: 1921095 - RNA, 17 nt, Human
uacaaacaugugguuaa

SEQ ID NO: 1921096 - RNA, 14 nt, Human
uacaaaguagaagu

SEQ ID NO: 1921097 - RNA, 18 nt, Human
uacaaaguagaagucuua

SEQ ID NO: 1921098 - RNA, 12 nt, Human
uacaaauacucu

SEQ ID NO: 1921099 - RNA, 17 nt, Human
uacaaauacucuuagga

SEQ ID NO: 1921100 - RNA, 19 nt, Human
uacaaauacucuuaggaag

SEQ ID NO: 1921101 - RNA, 23 nt, Human
uacaaauacucuuaggaagagaa

SEQ ID NO: 1921102 - RNA, 16 nt, Human
uacaaaucaaguauuu

SEQ ID NO: 1921103 - RNA, 23 nt, Human
uacaguucggugagcuacaaaug

SEQ ID NO: 1921104 - RNA, 20 nt, Human
uacaggaugaugacuaugga

SEQ ID NO: 1921105 - RNA, 15 nt, Human
uacaggagugagcac

SEQ ID NO: 1921106 - RNA, 22 nt, Human
uacaggaaguacuggagaaaau

SEQ ID NO: 1921107 - RNA, 14 nt, Human
uacaggaaguacug

SEQ ID NO: 1921108 - RNA, 15 nt, Human
uacaggaaguacugg

SEQ ID NO: 1921109 - RNA, 18 nt, Human
uacaguuuguuaguauga

SEQ ID NO: 1921110 - RNA, 20 nt, Human
uacaguugaaaaacagcuga

SEQ ID NO: 1921111 - RNA, 17 nt, Human
uacaguugaaaaacagc

SEQ ID NO: 1921112 - RNA, 19 nt, Human
uacaguugaaaaacagcug

SEQ ID NO: 1921113 - RNA, 22 nt, Human
uacacuguuucaaacuuuacua

SEQ ID NO: 1921114 - RNA, 16 nt, Human
uacacuuacacuuuau

SEQ ID NO: 1921115 - RNA, 20 nt, Human
uacacuguuucaaacuuuac

SEQ ID NO: 1921116 - RNA, 22 nt, Human
uacacugugcugagucugaagg

SEQ ID NO: 1921117 - RNA, 23 nt, Human
uacacugugcugagucugaaggc

SEQ ID NO: 1921118 - RNA, 20 nt, Human
uacagcuugaccgugaggcc

SEQ ID NO: 1921119 - RNA, 18 nt, Human
uacaggaagguagaaaua

SEQ ID NO: 1921120 - RNA, 13 nt, Human
uacaggaaguacu

SEQ ID NO: 1921121 - RNA, 16 nt, Human
uacauaaacaaguccu

SEQ ID NO: 1921122 - RNA, 21 nt, Human
uacaguuuguuaguaugaggc

SEQ ID NO: 1921123 - RNA, 19 nt, Human
uacaguuuguuaguaugag

SEQ ID NO: 1921124 - RNA, 23 nt, Human
uacaugaaaacacauuuuucuua

SEQ ID NO: 1921125 - RNA, 19 nt, Human
uacaugaaaacacauuuuu

SEQ ID NO: 1921126 - RNA, 18 nt, Human
uacaugaaaacacauuuu

SEQ ID NO: 1921127 - RNA, 17 nt, Human
uacaugaaaacacauuu

SEQ ID NO: 1921128 - RNA, 16 nt, Human
uacaugaaaacacauu

SEQ ID NO: 1921129 - RNA, 16 nt, Human
uacauaagauaaaugu

SEQ ID NO: 1921130 - RNA, 17 nt, Human
uacauaagauaaaugug

SEQ ID NO: 1921131 - RNA, 14 nt, Human
uacauuuuuaagug

SEQ ID NO: 1921132 - RNA, 21 nt, Human
uacauggcuggagcuagaauu

SEQ ID NO: 1921133 - RNA, 22 nt, Human
uacauuuuuaagugcugcauuu

SEQ ID NO: 1921134 - RNA, 19 nt, Human
uacauuuuuaagugcugca

SEQ ID NO: 1921135 - RNA, 14 nt, Human
uacauggaauaaca

SEQ ID NO: 1921136 - RNA, 18 nt, Human
uacauggaauaacaugua

SEQ ID NO: 1921137 - RNA, 19 nt, Human
uacauggaauaacauguaa

SEQ ID NO: 1921138 - RNA, 22 nt, Human
uacauggaauaacauguaauua

SEQ ID NO: 1921139 - RNA, 19 nt, Human
ugacaaccaugagaccacu

SEQ ID NO: 1921140 - RNA, 15 nt, Human
ugacaacuacagaaa

SEQ ID NO: 1921141 - RNA, 16 nt, Human
ugacaacuacagaaaa

SEQ ID NO: 1921142 - RNA, 22 nt, Human
ugacaacuacagaaaaaccaga

SEQ ID NO: 1921143 - RNA, 23 nt, Human
ugacaaggauugcuacuguccua

SEQ ID NO: 1921144 - RNA, 13 nt, Human
ugacagacacagg

SEQ ID NO: 1921145 - RNA, 16 nt, Human
ugacagacacaggccc

SEQ ID NO: 1921146 - RNA, 14 nt, Human
ugacagacacaggc

SEQ ID NO: 1921147 - RNA, 15 nt, Human
ugacacacagcucug

SEQ ID NO: 1921148 - RNA, 17 nt, Human
ugacacaaguggaccuu

SEQ ID NO: 1921149 - RNA, 19 nt, Human
ugacacaaguggaccuuag

SEQ ID NO: 1921150 - RNA, 14 nt, Human
ugacacacagcucu

SEQ ID NO: 1921151 - RNA, 16 nt, Human
ugacacaaguggaccu

SEQ ID NO: 1921152 - RNA, 21 nt, Human
ugaauuguaaggaaugauuaa

SEQ ID NO: 1921153 - RNA, 13 nt, Human
ugaauuguaagga

SEQ ID NO: 1921154 - RNA, 20 nt, Human
ugacaaagguaaaucagacu

SEQ ID NO: 1921155 - RNA, 16 nt, Human
ugaauuuaaauagcuu

SEQ ID NO: 1921156 - RNA, 15 nt, Human
ugaauuguuugaacc

SEQ ID NO: 1921157 - RNA, 13 nt, Human
ugacaacacucau

SEQ ID NO: 1921158 - RNA, 12 nt, Human
ugacaacaucug

SEQ ID NO: 1921159 - RNA, 23 nt, Human
ugacaacacucauugaccugagg

SEQ ID NO: 1921160 - RNA, 18 nt, Human
ugacagacacaggcccgg

SEQ ID NO: 1921161 - RNA, 17 nt, Human
ugacagacacaggcccg

SEQ ID NO: 1921162 - RNA, 18 nt, Human
ugacagagcaagacucug

SEQ ID NO: 1921163 - RNA, 22 nt, Human
ugacagagcaagugagacccug

SEQ ID NO: 1921164 - RNA, 21 nt, Human
ugacagagcaagacucugucu

SEQ ID NO: 1921165 - RNA, 22 nt, Human
ugacagagcaagacucugucua

SEQ ID NO: 1921166 - RNA, 23 nt, Human
ugacaucaacugcaucaagaugu

SEQ ID NO: 1921167 - RNA, 15 nt, Human
ugacaugauuccuuc

SEQ ID NO: 1921168 - RNA, 14 nt, Human
ugacaucuggaauc

SEQ ID NO: 1921169 - RNA, 19 nt, Human
ugacaugauuccuuccugu

SEQ ID NO: 1921170 - RNA, 16 nt, Human
ugacaugauuccuucc

SEQ ID NO: 1921171 - RNA, 18 nt, Human
ugacaugauuccuuccug

SEQ ID NO: 1921172 - RNA, 22 nt, Human
ugacaugauuccuuccuguucu

SEQ ID NO: 1921173 - RNA, 18 nt, Human
ugacaugcacucagcucu

SEQ ID NO: 1921174 - RNA, 11 nt, Human
ugaccagcagc

SEQ ID NO: 1921175 - RNA, 14 nt, Human
ugaccagcagcgcc

SEQ ID NO: 1921176 - RNA, 15 nt, Human
ugaccagcagcgccu

SEQ ID NO: 1921177 - RNA, 13 nt, Human
ugacauguuuuau

SEQ ID NO: 1921178 - RNA, 18 nt, Human
ugaccacugcagaagaca

SEQ ID NO: 1921179 - RNA, 17 nt, Human
ugaccacugcagaagac

SEQ ID NO: 1921180 - RNA, 16 nt, Human
ugaccacugcagaaga

SEQ ID NO: 1921181 - RNA, 22 nt, Human
ugaauguuuacacucuuuguaa

SEQ ID NO: 1921182 - RNA, 22 nt, Human
ugaaugcagucuguccaggcuc

SEQ ID NO: 1921183 - RNA, 19 nt, Human
ugaauguuuacacucuuug

SEQ ID NO: 1921184 - RNA, 23 nt, Human
ugaaugcagucuguccaggcucg

SEQ ID NO: 1921185 - RNA, 20 nt, Human
ugaaugaauggcuaagcaaa

SEQ ID NO: 1921186 - RNA, 15 nt, Human
ugaaugaauggcuaa

SEQ ID NO: 1921187 - RNA, 11 nt, Human
ugaaugaacac

SEQ ID NO: 1921188 - RNA, 12 nt, Human
ugaaugaacacu

SEQ ID NO: 1921189 - RNA, 15 nt, Human
ugaaugaacacucuu

SEQ ID NO: 1921190 - RNA, 15 nt, Human
ugaaugaaccuucug

SEQ ID NO: 1921191 - RNA, 16 nt, Human
ugaaugaaccuucugg

SEQ ID NO: 1921192 - RNA, 18 nt, Human
ugaaucuauuuaucuuca

SEQ ID NO: 1921193 - RNA, 14 nt, Human
ugaaucuauuuaag

SEQ ID NO: 1921194 - RNA, 16 nt, Human
ugaaucuauuuaagua

SEQ ID NO: 1921195 - RNA, 20 nt, Human
ugaaggcuggguucugaucc

SEQ ID NO: 1921196 - RNA, 21 nt, Human
ugaaggcuggguucugauccu

SEQ ID NO: 1921197 - RNA, 23 nt, Human
ugaaucacguaaagcuagaaaug

SEQ ID NO: 1921198 - RNA, 16 nt, Human
ugaaucaguauaaaca

SEQ ID NO: 1921199 - RNA, 19 nt, Human
ugaaucaguauaaacaaag

SEQ ID NO: 1921200 - RNA, 20 nt, Human
ugaaucaguauaaacaaagu

SEQ ID NO: 1921201 - RNA, 21 nt, Human
ugaaucaguauaaacaaaguu

SEQ ID NO: 1921202 - RNA, 22 nt, Human
ugaaucaguauaaacaaaguua

SEQ ID NO: 1921203 - RNA, 17 nt, Human
ugaaucacguaaagcua

SEQ ID NO: 1921204 - RNA, 14 nt, Human
ugaaguuuuacauu

SEQ ID NO: 1921205 - RNA, 15 nt, Human
ugaaguuuuacauug

SEQ ID NO: 1921206 - RNA, 16 nt, Human
ugaaguuuuacauugu

SEQ ID NO: 1921207 - RNA, 17 nt, Human
ugaaguuuuacauuguu

SEQ ID NO: 1921208 - RNA, 21 nt, Human
ugaagauaaguguauuuuuca

SEQ ID NO: 1921209 - RNA, 20 nt, Human
ugaagacucauucuucugua

SEQ ID NO: 1921210 - RNA, 19 nt, Human
ugaagacucauucuucugu

SEQ ID NO: 1921211 - RNA, 13 nt, Human
ugaaacauguuuc

SEQ ID NO: 1921212 - RNA, 16 nt, Human
ugaaacacuuugcaua

SEQ ID NO: 1921213 - RNA, 19 nt, Human
ugaaggccccgcccaggcu

SEQ ID NO: 1921214 - RNA, 20 nt, Human
ugaaggccccgcccaggcuu

SEQ ID NO: 1921215 - RNA, 16 nt, Human
ugaaggaaccaaagcg

SEQ ID NO: 1921216 - RNA, 16 nt, Human
ugaaggccucgcagga

SEQ ID NO: 1921217 - RNA, 18 nt, Human
ugaaggccucgcaggaag

SEQ ID NO: 1921218 - RNA, 21 nt, Human
ugaagcuuuuaugugaaacau

SEQ ID NO: 1921219 - RNA, 16 nt, Human
ugaagcuuuuauguga

SEQ ID NO: 1921220 - RNA, 18 nt, Human
ugaaggccccgcccaggc

SEQ ID NO: 1921221 - RNA, 23 nt, Human
ugaagaguccucugaaugaaccu

SEQ ID NO: 1921222 - RNA, 17 nt, Human
ugaagaguccucugaau

SEQ ID NO: 1921223 - RNA, 19 nt, Human
ugaagagguuuuaaagcuu

SEQ ID NO: 1921224 - RNA, 21 nt, Human
ugaagagguuuuaaagcuucc

SEQ ID NO: 1921225 - RNA, 20 nt, Human
ugaagagguuuuaaagcuuc

SEQ ID NO: 1921226 - RNA, 15 nt, Human
ugaagacuggaagcu

SEQ ID NO: 1921227 - RNA, 17 nt, Human
ugaagacuggaagcuaa

SEQ ID NO: 1921228 - RNA, 22 nt, Human
ugaagagaagggcagggcugag

SEQ ID NO: 1921229 - RNA, 20 nt, Human
ugaagagaagggcagggcug

SEQ ID NO: 1921230 - RNA, 13 nt, Human
ugagaccacagag

SEQ ID NO: 1921231 - RNA, 14 nt, Human
ugagaccaaccugg

SEQ ID NO: 1921232 - RNA, 14 nt, Human
ugagaggggaacag

SEQ ID NO: 1921233 - RNA, 18 nt, Human
ugagaggggaacagacug

SEQ ID NO: 1921234 - RNA, 19 nt, Human
ugagaggggaacagacugg

SEQ ID NO: 1921235 - RNA, 14 nt, Human
ugagagggccgggc

SEQ ID NO: 1921236 - RNA, 17 nt, Human
ugagagggccgggcaga

SEQ ID NO: 1921237 - RNA, 22 nt, Human
ugacuuuucuguccgagcuuug

SEQ ID NO: 1921238 - RNA, 11 nt, Human
ugacuuugucu

SEQ ID NO: 1921239 - RNA, 14 nt, Human
ugagaaaaaaagaa

SEQ ID NO: 1921240 - RNA, 15 nt, Human
ugagaaauaaaguuu

SEQ ID NO: 1921241 - RNA, 23 nt, Human
ugagaaaccuuauuguaccucuc

SEQ ID NO: 1921242 - RNA, 15 nt, Human
ugagaaauauggaca

SEQ ID NO: 1921243 - RNA, 17 nt, Human
ugagaaauauggacacu

SEQ ID NO: 1921244 - RNA, 21 nt, Human
ugagaaauauggacacuuaau

SEQ ID NO: 1921245 - RNA, 14 nt, Human
ugaccauucuccac

SEQ ID NO: 1921246 - RNA, 13 nt, Human
ugaccauucucca

SEQ ID NO: 1921247 - RNA, 15 nt, Human
ugacuaauucuugca

SEQ ID NO: 1921248 - RNA, 17 nt, Human
ugacuaauucuugcaua

SEQ ID NO: 1921249 - RNA, 22 nt, Human
ugacuaauucuugcauauuuug

SEQ ID NO: 1921250 - RNA, 23 nt, Human
ugacuaauucuugcauauuuugu

SEQ ID NO: 1921251 - RNA, 14 nt, Human
ugacucuuggcaca

SEQ ID NO: 1921252 - RNA, 19 nt, Human
ugacucuuggcacagcaug

SEQ ID NO: 1921253 - RNA, 21 nt, Human
ugacucuuucuauuguuucuu

SEQ ID NO: 1921254 - RNA, 16 nt, Human
ugacuuuccucuuugg

SEQ ID NO: 1921255 - RNA, 15 nt, Human
ugacuuucauuggaa

SEQ ID NO: 1921256 - RNA, 17 nt, Human
ugacuuucauuggaaau

SEQ ID NO: 1921257 - RNA, 15 nt, Human
ugagcucuuugcacu

SEQ ID NO: 1921258 - RNA, 16 nt, Human
ugagcucuuugcacua

SEQ ID NO: 1921259 - RNA, 11 nt, Human
ugagcucagga

SEQ ID NO: 1921260 - RNA, 19 nt, Human
ugagcucaggaguuugaga

SEQ ID NO: 1921261 - RNA, 22 nt, Human
ugagccgagaucacgccacugc

SEQ ID NO: 1921262 - RNA, 23 nt, Human
ugagcagggcucagcggggacag

SEQ ID NO: 1921263 - RNA, 22 nt, Human
ugagcagggcucagcggggaca

SEQ ID NO: 1921264 - RNA, 20 nt, Human
ugagcagggcucagcgggga

SEQ ID NO: 1921265 - RNA, 23 nt, Human
ugagccgagaucacgccacugca

SEQ ID NO: 1921266 - RNA, 16 nt, Human
ugagcuauugcuguuc

SEQ ID NO: 1921267 - RNA, 13 nt, Human
ugaggaucagagu

SEQ ID NO: 1921268 - RNA, 17 nt, Human
ugaggaucagaguaauc

SEQ ID NO: 1921269 - RNA, 19 nt, Human
ugaggaucagaguaaucca

SEQ ID NO: 1921270 - RNA, 22 nt, Human
ugaggaugaaaaaauaacacug

SEQ ID NO: 1921271 - RNA, 14 nt, Human
ugaggcaagagaau

SEQ ID NO: 1921272 - RNA, 11 nt, Human
ugagcuguuuu

SEQ ID NO: 1921273 - RNA, 12 nt, Human
ugagcugucacu

SEQ ID NO: 1921274 - RNA, 20 nt, Human
ugagcugugcacaaaguggc

SEQ ID NO: 1921275 - RNA, 14 nt, Human
ugagcugcagaaac

SEQ ID NO: 1921276 - RNA, 15 nt, Human
ugagcugcagaaacg

SEQ ID NO: 1921277 - RNA, 17 nt, Human
ugagcugcagaaacgaa

SEQ ID NO: 1921278 - RNA, 15 nt, Human
ugagcuucucuguga

SEQ ID NO: 1921279 - RNA, 16 nt, Human
ugagcuucucugugaa

SEQ ID NO: 1921280 - RNA, 19 nt, Human
ugaggucagagccugcagu

SEQ ID NO: 1921281 - RNA, 18 nt, Human
ugaggucagagccugcag

SEQ ID NO: 1921282 - RNA, 21 nt, Human
ugaggcugggcucccuuccca

SEQ ID NO: 1921283 - RNA, 18 nt, Human
ugaggucauagcagugcu

SEQ ID NO: 1921284 - RNA, 16 nt, Human
ugaggucaggaguucc

SEQ ID NO: 1921285 - RNA, 16 nt, Human
ugaggcucugcccuug

SEQ ID NO: 1921286 - RNA, 15 nt, Human
ugaggcucugcccuu

SEQ ID NO: 1921287 - RNA, 18 nt, Human
ugaggcucugcccuuggu

SEQ ID NO: 1921288 - RNA, 15 nt, Human
ugaggcugggcuccc

SEQ ID NO: 1921289 - RNA, 16 nt, Human
ugaggcugggcucccu

SEQ ID NO: 1921290 - RNA, 13 nt, Human
ugaggcagguccc

SEQ ID NO: 1921291 - RNA, 24 nt, Human
ucuuguacauguguagccugugca

SEQ ID NO: 1921292 - RNA, 19 nt, Human
ucuuguacauguguagccu

SEQ ID NO: 1921293 - RNA, 16 nt, Human
ucuuguauuaaacucu

SEQ ID NO: 1921294 - RNA, 19 nt, Human
ucuuguauuaaacucuuca

SEQ ID NO: 1921295 - RNA, 17 nt, Human
ucuuguacauguguagc

SEQ ID NO: 1921296 - RNA, 14 nt, Human
ucuuguacaugugu

SEQ ID NO: 1921297 - RNA, 23 nt, Human
ucuugcucugcugacagacacag

SEQ ID NO: 1921298 - RNA, 15 nt, Human
ucuugcucugcugac

SEQ ID NO: 1921299 - RNA, 19 nt, Human
ucuugccaaauauaaauaa

SEQ ID NO: 1921300 - RNA, 14 nt, Human
ucuugcucugcuga

SEQ ID NO: 1921301 - RNA, 21 nt, Human
ucuucuuuuugaaaucagcau

SEQ ID NO: 1921302 - RNA, 21 nt, Human
ucuucuuuuagcaguaaaaua

SEQ ID NO: 1921303 - RNA, 16 nt, Human
ucuucuuggucucagu

SEQ ID NO: 1921304 - RNA, 13 nt, Human
ucuugaagacuuu

SEQ ID NO: 1921305 - RNA, 22 nt, Human
ucuugaagacuuuucuuucagc

SEQ ID NO: 1921306 - RNA, 21 nt, Human
ucuugaaauuaagaaggcaaa

SEQ ID NO: 1921307 - RNA, 18 nt, Human
ucuugaacugagcuugga

SEQ ID NO: 1921308 - RNA, 21 nt, Human
ucuugaaauauaggaacuuaa

SEQ ID NO: 1921309 - RNA, 20 nt, Human
ucuugaaauauaggaacuua

SEQ ID NO: 1921310 - RNA, 22 nt, Human
ucuugaaauuaagaaggcaaaa

SEQ ID NO: 1921311 - RNA, 17 nt, Human
ucuugaacugagcuugg

SEQ ID NO: 1921312 - RNA, 14 nt, Human
ucuugaaauuaaga

SEQ ID NO: 1921313 - RNA, 20 nt, Human
ucuugaaauuaagaaggcaa

SEQ ID NO: 1921314 - RNA, 14 nt, Human
ucuuauaauuuaaa

SEQ ID NO: 1921315 - RNA, 13 nt, Human
ucuuauaauuuaa

SEQ ID NO: 1921316 - RNA, 20 nt, Human
ucuuagguuggcaaaaaggc

SEQ ID NO: 1921317 - RNA, 23 nt, Human
ucuuagguuggcaaaaaggcagg

SEQ ID NO: 1921318 - RNA, 20 nt, Human
ucugugucagguggggcagc

SEQ ID NO: 1921319 - RNA, 17 nt, Human
ucugugucagguggggc

SEQ ID NO: 1921320 - RNA, 15 nt, Human
ucuuagauguauaua

SEQ ID NO: 1921321 - RNA, 13 nt, Human
ucugugugugugu

SEQ ID NO: 1921322 - RNA, 11 nt, Human
ucugugugugu

SEQ ID NO: 1921323 - RNA, 20 nt, Human
ucuucauaacaauuuuagga

SEQ ID NO: 1921324 - RNA, 22 nt, Human
ucuucauuaccucagugagaag

SEQ ID NO: 1921325 - RNA, 20 nt, Human
ucuucauuugaaugucuucu

SEQ ID NO: 1921326 - RNA, 15 nt, Human
ucuucagaucucuaa

SEQ ID NO: 1921327 - RNA, 14 nt, Human
ucuucagaucucua

SEQ ID NO: 1921328 - RNA, 21 nt, Human
ucuucagagacuccugcaggc

SEQ ID NO: 1921329 - RNA, 20 nt, Human
ucuuaucauggucucaguca

SEQ ID NO: 1921330 - RNA, 22 nt, Human
ucuuauccaacaucaacaucuu

SEQ ID NO: 1921331 - RNA, 21 nt, Human
ucuuaucacaaaaaagaaaau

SEQ ID NO: 1921332 - RNA, 23 nt, Human
ucuuaucaagaguugugacaacu

SEQ ID NO: 1921333 - RNA, 16 nt, Human
ucuuagcuccccucca

SEQ ID NO: 1921334 - RNA, 14 nt, Human
ucuuagcuccccuc

SEQ ID NO: 1921335 - RNA, 13 nt, Human
ucuuagcuccccu

SEQ ID NO: 1921336 - RNA, 18 nt, Human
ucuuugaauacaaagaac

SEQ ID NO: 1921337 - RNA, 13 nt, Human
ucuuucccucccu

SEQ ID NO: 1921338 - RNA, 23 nt, Human
ucuuucccucccuuccucuuucc

SEQ ID NO: 1921339 - RNA, 12 nt, Human
ucuuucccuccc

SEQ ID NO: 1921340 - RNA, 23 nt, Human
ucuugugacuagugcugaagcuu

SEQ ID NO: 1921341 - RNA, 22 nt, Human
ucuuguggcuuugcaaccauuu

SEQ ID NO: 1921342 - RNA, 23 nt, Human
ucuuuccaaaguacacuguuuca

SEQ ID NO: 1921343 - RNA, 13 nt, Human
ucuuguguguuua

SEQ ID NO: 1921344 - RNA, 13 nt, Human
ucuuuggacccug

SEQ ID NO: 1921345 - RNA, 11 nt, Human
ucuuugcuuug

SEQ ID NO: 1921346 - RNA, 16 nt, Human
ucuuuggacccugagg

SEQ ID NO: 1921347 - RNA, 14 nt, Human
ucuuuggacccuga

SEQ ID NO: 1921348 - RNA, 15 nt, Human
ucuuuggacccugag

SEQ ID NO: 1921349 - RNA, 13 nt, Human
ucuuugcagacag

SEQ ID NO: 1921350 - RNA, 23 nt, Human
ucuuugagugaagcugggagaac

SEQ ID NO: 1921351 - RNA, 17 nt, Human
ucuuugcagacaggcaa

SEQ ID NO: 1921352 - RNA, 14 nt, Human
ucuuugcagacagg

SEQ ID NO: 1921353 - RNA, 21 nt, Human
ugaaaacacauuuuucuuagg

SEQ ID NO: 1921354 - RNA, 20 nt, Human
ucuuuuguucgcauggucac

SEQ ID NO: 1921355 - RNA, 16 nt, Human
ucuuuucauugaacag

SEQ ID NO: 1921356 - RNA, 17 nt, Human
ugaaaacacuguucucu

SEQ ID NO: 1921357 - RNA, 20 nt, Human
ugaaaacacuguucucugcc

SEQ ID NO: 1921358 - RNA, 21 nt, Human
ugaaaacacuguucucugccc

SEQ ID NO: 1921359 - RNA, 22 nt, Human
ugaaaacacuguucucugcccu

SEQ ID NO: 1921360 - RNA, 23 nt, Human
ugaaaacacuguucucugcccuc

SEQ ID NO: 1921361 - RNA, 18 nt, Human
ugaaaaccacauuggaga

SEQ ID NO: 1921362 - RNA, 20 nt, Human
ugaaaacggagcugaacaau

SEQ ID NO: 1921363 - RNA, 19 nt, Human
ugaaaagaaaaaugagccu

SEQ ID NO: 1921364 - RNA, 20 nt, Human
ugaaaagaaaaaugagccug

SEQ ID NO: 1921365 - RNA, 22 nt, Human
ugaaaagaaaaaugagccuggc

SEQ ID NO: 1921366 - RNA, 14 nt, Human
ugaaaauucagugg

SEQ ID NO: 1921367 - RNA, 12 nt, Human
ugaaaauuuuga

SEQ ID NO: 1921368 - RNA, 15 nt, Human
ugaaacacuuugcau

SEQ ID NO: 1921369 - RNA, 22 nt, Human
ucuggaauguaaucaauguuuc

SEQ ID NO: 1921370 - RNA, 18 nt, Human
ucuggaauguaaucaaug

SEQ ID NO: 1921371 - RNA, 16 nt, Human
ucuggaauguaaucaa

SEQ ID NO: 1921372 - RNA, 15 nt, Human
ucuggaauguaauca

SEQ ID NO: 1921373 - RNA, 23 nt, Human
ucugcuggaguuucauguacaag

SEQ ID NO: 1921374 - RNA, 19 nt, Human
ucugcuggaguuucaugua

SEQ ID NO: 1921375 - RNA, 14 nt, Human
ucuggaauuugaaa

SEQ ID NO: 1921376 - RNA, 18 nt, Human
ucuggacagccccacccu

SEQ ID NO: 1921377 - RNA, 19 nt, Human
ucuggacagccccacccug

SEQ ID NO: 1921378 - RNA, 17 nt, Human
ucugcugcuggcugguu

SEQ ID NO: 1921379 - RNA, 13 nt, Human
ucugcuggaguuu

SEQ ID NO: 1921380 - RNA, 14 nt, Human
ucugcugcuggcug

SEQ ID NO: 1921381 - RNA, 15 nt, Human
ucugcugcuggcugg

SEQ ID NO: 1921382 - RNA, 20 nt, Human
ucuggacagccccacccugg

SEQ ID NO: 1921383 - RNA, 12 nt, Human
ucuggaccugcc

SEQ ID NO: 1921384 - RNA, 13 nt, Human
ucuggaccugccc

SEQ ID NO: 1921385 - RNA, 20 nt, Human
ucugccugcccaggccccug

SEQ ID NO: 1921386 - RNA, 18 nt, Human
ucugccugcccaggcccc

SEQ ID NO: 1921387 - RNA, 17 nt, Human
ucugccugcccaggccc

SEQ ID NO: 1921388 - RNA, 18 nt, Human
ucugccugccagcugcac

SEQ ID NO: 1921389 - RNA, 21 nt, Human
ucugccugccagcugcacuga

SEQ ID NO: 1921390 - RNA, 22 nt, Human
ucugccugccagcugcacugau

SEQ ID NO: 1921391 - RNA, 20 nt, Human
ucugcucuccuuccuggagc

SEQ ID NO: 1921392 - RNA, 19 nt, Human
ucugcucuccuuccuggag

SEQ ID NO: 1921393 - RNA, 15 nt, Human
ucugcucuccuuccu

SEQ ID NO: 1921394 - RNA, 14 nt, Human
ucugcucuccuucc

SEQ ID NO: 1921395 - RNA, 13 nt, Human
ucugcucuccuuc

SEQ ID NO: 1921396 - RNA, 12 nt, Human
ucugcucuccuu

SEQ ID NO: 1921397 - RNA, 11 nt, Human
ucugcugcugg

SEQ ID NO: 1921398 - RNA, 13 nt, Human
ucugcugcuggcu

SEQ ID NO: 1921399 - RNA, 13 nt, Human
ucuguacacgugu

SEQ ID NO: 1921400 - RNA, 15 nt, Human
ucuguacagagccca

SEQ ID NO: 1921401 - RNA, 14 nt, Human
ucuguacagagccc

SEQ ID NO: 1921402 - RNA, 17 nt, Human
ucuguaauuguguguga

SEQ ID NO: 1921403 - RNA, 17 nt, Human
ucuguacacguguccug

SEQ ID NO: 1921404 - RNA, 13 nt, Human
ucuguccucagcc

SEQ ID NO: 1921405 - RNA, 14 nt, Human
ucuguccucagccu

SEQ ID NO: 1921406 - RNA, 15 nt, Human
ucuguccucagccuu

SEQ ID NO: 1921407 - RNA, 19 nt, Human
ucuguccucagccuugcca

SEQ ID NO: 1921408 - RNA, 21 nt, Human
ucuguccucagccuugccaga

SEQ ID NO: 1921409 - RNA, 23 nt, Human
ucuguccucagccuugccagaga

SEQ ID NO: 1921410 - RNA, 17 nt, Human
ucugucgcccagucugg

SEQ ID NO: 1921411 - RNA, 12 nt, Human
ucuguccuggga

SEQ ID NO: 1921412 - RNA, 14 nt, Human
ucugucucagucca

SEQ ID NO: 1921413 - RNA, 13 nt, Human
ucugucuaggaau

SEQ ID NO: 1921414 - RNA, 21 nt, Human
ucugucucaaaaaauaaaaau

SEQ ID NO: 1921415 - RNA, 14 nt, Human
ucugucuaaaaaac

SEQ ID NO: 1921416 - RNA, 15 nt, Human
ucugucuaaaaaaca

SEQ ID NO: 1921417 - RNA, 16 nt, Human
ucuggugacuuuccuc

SEQ ID NO: 1921418 - RNA, 23 nt, Human
ucuggugaccuuccaagagccug

SEQ ID NO: 1921419 - RNA, 18 nt, Human
ucuggugaccuuccaaga

SEQ ID NO: 1921420 - RNA, 16 nt, Human
ucuggugaccuuccaa

SEQ ID NO: 1921421 - RNA, 12 nt, Human
ucuggagcccac

SEQ ID NO: 1921422 - RNA, 16 nt, Human
ucuggagcccacugua

SEQ ID NO: 1921423 - RNA, 22 nt, Human
ucuggagcccacuguacuugcu

SEQ ID NO: 1921424 - RNA, 15 nt, Human
ucuggcugcagagca

SEQ ID NO: 1921425 - RNA, 20 nt, Human
ucugccucacauagcuuaca

SEQ ID NO: 1921426 - RNA, 18 nt, Human
ucugccucugacacacag

SEQ ID NO: 1921427 - RNA, 15 nt, Human
ucugccucugacaca

SEQ ID NO: 1921428 - RNA, 16 nt, Human
ucugccucccaucacc

SEQ ID NO: 1921429 - RNA, 17 nt, Human
ucugccucccaucaccc

SEQ ID NO: 1921430 - RNA, 20 nt, Human
ucugccucccaucacccgcu

SEQ ID NO: 1921431 - RNA, 21 nt, Human
ucugccucccaucacccgcua

SEQ ID NO: 1921432 - RNA, 20 nt, Human
ucugccugaagucacacagu

SEQ ID NO: 1921433 - RNA, 16 nt, Human
ucugccugccagcugc

SEQ ID NO: 1921434 - RNA, 17 nt, Human
ucugccugccagcugca

SEQ ID NO: 1921435 - RNA, 19 nt, Human
ucugccugaagucacacag

SEQ ID NO: 1921436 - RNA, 22 nt, Human
ucugccucugacacacagcucu

SEQ ID NO: 1921437 - RNA, 21 nt, Human
ucugccucugacacacagcuc

SEQ ID NO: 1921438 - RNA, 23 nt, Human
ucugccucugacacacagcucug

SEQ ID NO: 1921439 - RNA, 18 nt, Human
ucugccauauucuguugg

SEQ ID NO: 1921440 - RNA, 15 nt, Human
ucugcauauguugaa

SEQ ID NO: 1921441 - RNA, 16 nt, Human
ucugcauauguugaau

SEQ ID NO: 1921442 - RNA, 18 nt, Human
ucugcauauguugaauac

SEQ ID NO: 1921443 - RNA, 23 nt, Human
ucugccauauucuguuggccagu

SEQ ID NO: 1921444 - RNA, 22 nt, Human
ucugccauauucuguuggccag

SEQ ID NO: 1921445 - RNA, 12 nt, Human
ucugcccacucc

SEQ ID NO: 1921446 - RNA, 12 nt, Human
ucugcccaaccc

SEQ ID NO: 1921447 - RNA, 19 nt, Human
ucugcauauguugaauacu

SEQ ID NO: 1921448 - RNA, 21 nt, Human
ucugcauauguugaauacuuu

SEQ ID NO: 1921449 - RNA, 13 nt, Human
ucugccucccauc

SEQ ID NO: 1921450 - RNA, 15 nt, Human
ucugccucccaucac

SEQ ID NO: 1921451 - RNA, 12 nt, Human
ucugccucccau

SEQ ID NO: 1921452 - RNA, 13 nt, Human
ucugcccacuccc

SEQ ID NO: 1921453 - RNA, 14 nt, Human
ucugcccacucccu

SEQ ID NO: 1921454 - RNA, 16 nt, Human
ucugcccacucccugc

SEQ ID NO: 1921455 - RNA, 21 nt, Human
ucugaggaauccagacccggc

SEQ ID NO: 1921456 - RNA, 18 nt, Human
ucugaggaauccagaccc

SEQ ID NO: 1921457 - RNA, 22 nt, Human
ucugaggaauccagacccggcu

SEQ ID NO: 1921458 - RNA, 14 nt, Human
ucugcaaaaauauu

SEQ ID NO: 1921459 - RNA, 19 nt, Human
ucugcaaaaauauuuauaa

SEQ ID NO: 1921460 - RNA, 20 nt, Human
ucugcaaaaauauuuauaaa

SEQ ID NO: 1921461 - RNA, 13 nt, Human
ucugcacuccccu

SEQ ID NO: 1921462 - RNA, 16 nt, Human
ucugcaguaaaucuuu

SEQ ID NO: 1921463 - RNA, 18 nt, Human
ucugcaccguacugugga

SEQ ID NO: 1921464 - RNA, 19 nt, Human
ucugacccaugcugcccug

SEQ ID NO: 1921465 - RNA, 20 nt, Human
ucugacccaugcugcccugu

SEQ ID NO: 1921466 - RNA, 22 nt, Human
ucugacccaugcugcccuguga

SEQ ID NO: 1921467 - RNA, 23 nt, Human
ucugacccaugcugcccugugag

SEQ ID NO: 1921468 - RNA, 18 nt, Human
ucugagaggacuuuucuu

SEQ ID NO: 1921469 - RNA, 24 nt, Human
ucugagaucaaaacgguuuuacug

SEQ ID NO: 1921470 - RNA, 18 nt, Human
ucaggaccuccaagccac

SEQ ID NO: 1921471 - RNA, 20 nt, Human
ucaggaccuccaagccacug

SEQ ID NO: 1921472 - RNA, 15 nt, Human
ucaggacagaugcca

SEQ ID NO: 1921473 - RNA, 14 nt, Human
ucaggacagaugcc

SEQ ID NO: 1921474 - RNA, 15 nt, Human
ucagcugcuacuacu

SEQ ID NO: 1921475 - RNA, 17 nt, Human
ucaggaggcaggaccuu

SEQ ID NO: 1921476 - RNA, 23 nt, Human
ucaggaggaaggcuuacacccac

SEQ ID NO: 1921477 - RNA, 16 nt, Human
ucaggaggaaggcuua

SEQ ID NO: 1921478 - RNA, 22 nt, Human
ucagcuccagcucaccagcccc

SEQ ID NO: 1921479 - RNA, 21 nt, Human
ucagcuccagcucaccagccc

SEQ ID NO: 1921480 - RNA, 18 nt, Human
ucagcuccagcucaccag

SEQ ID NO: 1921481 - RNA, 20 nt, Human
ucagccucccgaauagcugg

SEQ ID NO: 1921482 - RNA, 12 nt, Human
ucagccucccga

SEQ ID NO: 1921483 - RNA, 22 nt, Human
ucagccucccaaagugcuggga

SEQ ID NO: 1921484 - RNA, 20 nt, Human
ucagccucccaaguagcugg

SEQ ID NO: 1921485 - RNA, 16 nt, Human
ucagccugcuccagcu

SEQ ID NO: 1921486 - RNA, 13 nt, Human
uaucauucagcaa

SEQ ID NO: 1921487 - RNA, 14 nt, Human
uaucauucagcaac

SEQ ID NO: 1921488 - RNA, 12 nt, Human
uaucauucagca

SEQ ID NO: 1921489 - RNA, 18 nt, Human
ucagauaugauucaaaug

SEQ ID NO: 1921490 - RNA, 16 nt, Human
ucagauaugauucaaa

SEQ ID NO: 1921491 - RNA, 17 nt, Human
ucagauaugauucaaau

SEQ ID NO: 1921492 - RNA, 19 nt, Human
ucagcacaaggccaucugg

SEQ ID NO: 1921493 - RNA, 20 nt, Human
ucagaucauuaucagccugu

SEQ ID NO: 1921494 - RNA, 14 nt, Human
ucagauccagggac

SEQ ID NO: 1921495 - RNA, 15 nt, Human
ucagauccagggaca

SEQ ID NO: 1921496 - RNA, 16 nt, Human
ucagauccagggacag

SEQ ID NO: 1921497 - RNA, 23 nt, Human
ucagaucaguguaccauuugccu

SEQ ID NO: 1921498 - RNA, 18 nt, Human
ucagcauccuggcacccg

SEQ ID NO: 1921499 - RNA, 17 nt, Human
ucagcauccuggcaccc

SEQ ID NO: 1921500 - RNA, 16 nt, Human
ucagcauccuggcacc

SEQ ID NO: 1921501 - RNA, 15 nt, Human
ucagcauccuggcac

SEQ ID NO: 1921502 - RNA, 13 nt, Human
ucagccucccaaa

SEQ ID NO: 1921503 - RNA, 12 nt, Human
ucagccucccaa

SEQ ID NO: 1921504 - RNA, 17 nt, Human
ucagcacgauuucuguu

SEQ ID NO: 1921505 - RNA, 22 nt, Human
ucagcaccuacaguguacaguc

SEQ ID NO: 1921506 - RNA, 21 nt, Human
ucagcaccuacaguguacagu

SEQ ID NO: 1921507 - RNA, 20 nt, Human
ucagcaccuacaguguacag

SEQ ID NO: 1921508 - RNA, 16 nt, Human
ucagcacgauuucugu

SEQ ID NO: 1921509 - RNA, 15 nt, Human
ucagcacgauuucug

SEQ ID NO: 1921510 - RNA, 24 nt, Human
ucauggacuucugccagcauaaua

SEQ ID NO: 1921511 - RNA, 23 nt, Human
ucauggaugggggaacucagauc

SEQ ID NO: 1921512 - RNA, 15 nt, Human
ucaugaaagauucaa

SEQ ID NO: 1921513 - RNA, 13 nt, Human
ucaugaaagauuc

SEQ ID NO: 1921514 - RNA, 22 nt, Human
ucaucuuucuugaucaacaucu

SEQ ID NO: 1921515 - RNA, 14 nt, Human
ucaucuuugugaag

SEQ ID NO: 1921516 - RNA, 13 nt, Human
ucaucuuucuuga

SEQ ID NO: 1921517 - RNA, 14 nt, Human
ucaucauuuuuccu

SEQ ID NO: 1921518 - RNA, 17 nt, Human
ucaucaacccuaaaaag

SEQ ID NO: 1921519 - RNA, 19 nt, Human
ucauagaaagugccagaaa

SEQ ID NO: 1921520 - RNA, 16 nt, Human
ucauacuuaagcaaaa

SEQ ID NO: 1921521 - RNA, 17 nt, Human
ucaguucucuucacuca

SEQ ID NO: 1921522 - RNA, 14 nt, Human
ucaguucucuucac

SEQ ID NO: 1921523 - RNA, 15 nt, Human
ucaguccauagcaga

SEQ ID NO: 1921524 - RNA, 18 nt, Human
ucaguccaugaagaugua

SEQ ID NO: 1921525 - RNA, 21 nt, Human
ucagguggggucacucuggca

SEQ ID NO: 1921526 - RNA, 13 nt, Human
ucagguggccaug

SEQ ID NO: 1921527 - RNA, 17 nt, Human
ucagguggggucacucu

SEQ ID NO: 1921528 - RNA, 20 nt, Human
ucagguggggucacucuggc

SEQ ID NO: 1921529 - RNA, 17 nt, Human
ucagguggggcagcuug

SEQ ID NO: 1921530 - RNA, 21 nt, Human
ucagguggggcagcuugaggg

SEQ ID NO: 1921531 - RNA, 16 nt, Human
ucagguggggcagcuu

SEQ ID NO: 1921532 - RNA, 15 nt, Human
ucagguggggcagcu

SEQ ID NO: 1921533 - RNA, 20 nt, Human
ucaggugcugccauccaggu

SEQ ID NO: 1921534 - RNA, 18 nt, Human
ucaggugcugccauccag

SEQ ID NO: 1921535 - RNA, 14 nt, Human
ucagguggggcagc

SEQ ID NO: 1921536 - RNA, 11 nt, Human
ucagguggcca

SEQ ID NO: 1921537 - RNA, 19 nt, Human
ucagucugauucccaagcu

SEQ ID NO: 1921538 - RNA, 17 nt, Human
ucagucugauucccaag

SEQ ID NO: 1921539 - RNA, 18 nt, Human
ucagugugacugaucucu

SEQ ID NO: 1921540 - RNA, 18 nt, Human
ucaguuaaguuuuucccu

SEQ ID NO: 1921541 - RNA, 17 nt, Human
ucaguuaaguuuuuccc

SEQ ID NO: 1921542 - RNA, 22 nt, Human
uccacccuggccgaguccaagc

SEQ ID NO: 1921543 - RNA, 21 nt, Human
uccacccugcucuccgaccag

SEQ ID NO: 1921544 - RNA, 14 nt, Human
uccacccugcucuc

SEQ ID NO: 1921545 - RNA, 13 nt, Human
uccacccugcucu

SEQ ID NO: 1921546 - RNA, 22 nt, Human
uccacugugccaugugccaggu

SEQ ID NO: 1921547 - RNA, 15 nt, Human
uccacuuuaucuuga

SEQ ID NO: 1921548 - RNA, 15 nt, Human
uccagaugcagggca

SEQ ID NO: 1921549 - RNA, 17 nt, Human
uccacuuuaucuugaau

SEQ ID NO: 1921550 - RNA, 14 nt, Human
uccacuuucuagcc

SEQ ID NO: 1921551 - RNA, 18 nt, Human
uccacuuucagugaaagc

SEQ ID NO: 1921552 - RNA, 18 nt, Human
uccaggaaccacaccaca

SEQ ID NO: 1921553 - RNA, 17 nt, Human
uccagggcccccaucuc

SEQ ID NO: 1921554 - RNA, 20 nt, Human
uccaggacuauauuugggcc

SEQ ID NO: 1921555 - RNA, 23 nt, Human
uccaggacuauauuugggccugc

SEQ ID NO: 1921556 - RNA, 18 nt, Human
uccagauguuuccagacu

SEQ ID NO: 1921557 - RNA, 19 nt, Human
uccagauguuuccagacuu

SEQ ID NO: 1921558 - RNA, 16 nt, Human
uccagaugcagggcag

SEQ ID NO: 1921559 - RNA, 17 nt, Human
uccagaugcagggcagu

SEQ ID NO: 1921560 - RNA, 18 nt, Human
uccagaugcagggcaguc

SEQ ID NO: 1921561 - RNA, 19 nt, Human
uccagaugcagggcaguca

SEQ ID NO: 1921562 - RNA, 17 nt, Human
uccaagccacugagcaa

SEQ ID NO: 1921563 - RNA, 23 nt, Human
uccaagcagccugagcaacucuu

SEQ ID NO: 1921564 - RNA, 15 nt, Human
uccaagccagcggga

SEQ ID NO: 1921565 - RNA, 22 nt, Human
uccaagcccaguucagcuuggg

SEQ ID NO: 1921566 - RNA, 21 nt, Human
uccacaagagcccaggccucc

SEQ ID NO: 1921567 - RNA, 20 nt, Human
uccacaagagcccaggccuc

SEQ ID NO: 1921568 - RNA, 19 nt, Human
uccacaagagcccaggccu

SEQ ID NO: 1921569 - RNA, 19 nt, Human
uccacagcaaccccaggcu

SEQ ID NO: 1921570 - RNA, 23 nt, Human
uccacacucaccucuaaaacagu

SEQ ID NO: 1921571 - RNA, 20 nt, Human
uccacagcaaccccaggcug

SEQ ID NO: 1921572 - RNA, 15 nt, Human
uccacaccuuuuauu

SEQ ID NO: 1921573 - RNA, 21 nt, Human
uccacaccuuuuauugacaca

SEQ ID NO: 1921574 - RNA, 15 nt, Human
uccaagcaaauguga

SEQ ID NO: 1921575 - RNA, 17 nt, Human
uccaagcaaaugugaau

SEQ ID NO: 1921576 - RNA, 14 nt, Human
uccaagcaggacau

SEQ ID NO: 1921577 - RNA, 22 nt, Human
uccaagcaggacauggacaagg

SEQ ID NO: 1921578 - RNA, 19 nt, Human
uccaagaagcccaggaaag

SEQ ID NO: 1921579 - RNA, 20 nt, Human
uccaagaccuucuccuucac

SEQ ID NO: 1921580 - RNA, 12 nt, Human
uccaagagcuga

SEQ ID NO: 1921581 - RNA, 14 nt, Human
uccaagagccugag

SEQ ID NO: 1921582 - RNA, 13 nt, Human
uccaagagccuga

SEQ ID NO: 1921583 - RNA, 14 nt, Human
uccaagaagcccag

SEQ ID NO: 1921584 - RNA, 19 nt, Human
ucauguauguucagaagaa

SEQ ID NO: 1921585 - RNA, 21 nt, Human
ucauguauguucagaagaaau

SEQ ID NO: 1921586 - RNA, 15 nt, Human
uccaagaagcccagg

SEQ ID NO: 1921587 - RNA, 16 nt, Human
uccaagaagcccagga

SEQ ID NO: 1921588 - RNA, 22 nt, Human
ucauguauguucagaagaaauu

SEQ ID NO: 1921589 - RNA, 16 nt, Human
ucauguacaagaugaa

SEQ ID NO: 1921590 - RNA, 17 nt, Human
ucauguacaagaugaag

SEQ ID NO: 1921591 - RNA, 18 nt, Human
ucauguacaagaugaagg

SEQ ID NO: 1921592 - RNA, 12 nt, Human
uccaugauucua

SEQ ID NO: 1921593 - RNA, 21 nt, Human
uccaugugaggguuuucagca

SEQ ID NO: 1921594 - RNA, 14 nt, Human
ucccaacucuagcu

SEQ ID NO: 1921595 - RNA, 15 nt, Human
ucccaacucuagcug

SEQ ID NO: 1921596 - RNA, 16 nt, Human
ucccaacucuagcugg

SEQ ID NO: 1921597 - RNA, 17 nt, Human
ucccaacucuagcuggg

SEQ ID NO: 1921598 - RNA, 19 nt, Human
ucccaacucaccccagccc

SEQ ID NO: 1921599 - RNA, 21 nt, Human
ucccaacucaccccagcccca

SEQ ID NO: 1921600 - RNA, 17 nt, Human
ucccaacucaccccagc

SEQ ID NO: 1921601 - RNA, 18 nt, Human
ucccaacucaccccagcc

SEQ ID NO: 1921602 - RNA, 20 nt, Human
uccauagagagcaagacgcu

SEQ ID NO: 1921603 - RNA, 23 nt, Human
uccagggcuggacugaggccuga

SEQ ID NO: 1921604 - RNA, 22 nt, Human
uccagggcuggacugaggccug

SEQ ID NO: 1921605 - RNA, 21 nt, Human
uccagggcuggacugaggccu

SEQ ID NO: 1921606 - RNA, 19 nt, Human
uccagggcuggacugaggc

SEQ ID NO: 1921607 - RNA, 17 nt, Human
uccagggcuggacugag

SEQ ID NO: 1921608 - RNA, 14 nt, Human
uccagggcuggacu

SEQ ID NO: 1921609 - RNA, 17 nt, Human
uccauagagagcaagac

SEQ ID NO: 1921610 - RNA, 14 nt, Human
ucccacucagucca

SEQ ID NO: 1921611 - RNA, 21 nt, Human
ucccaccuuggcugcagggag

SEQ ID NO: 1921612 - RNA, 19 nt, Human
ucccaccuuggcugcaggg

SEQ ID NO: 1921613 - RNA, 20 nt, Human
ucccaccucucucacuccuu

SEQ ID NO: 1921614 - RNA, 18 nt, Human
ucccaccucagccucccg

SEQ ID NO: 1921615 - RNA, 16 nt, Human
ucccaccucagccucc

SEQ ID NO: 1921616 - RNA, 14 nt, Human
ucccaccucucuca

SEQ ID NO: 1921617 - RNA, 17 nt, Human
ucccaccucucucacuc

SEQ ID NO: 1921618 - RNA, 18 nt, Human
ucccaccucucucacucc

SEQ ID NO: 1921619 - RNA, 16 nt, Human
ucccaugagccucagc

SEQ ID NO: 1921620 - RNA, 15 nt, Human
ucccaugagccucag

SEQ ID NO: 1921621 - RNA, 14 nt, Human
ucccagggcuuacg

SEQ ID NO: 1921622 - RNA, 19 nt, Human
ucccaggcauuccccagga

SEQ ID NO: 1921623 - RNA, 17 nt, Human
ucccaggcauuccccag

SEQ ID NO: 1921624 - RNA, 18 nt, Human
ucccaggcauuccccagg

SEQ ID NO: 1921625 - RNA, 22 nt, Human
ucccacugggguccagggagca

SEQ ID NO: 1921626 - RNA, 14 nt, Human
ucuagguucuaaaa

SEQ ID NO: 1921627 - RNA, 23 nt, Human
ucuagguucuaaaaauugugauc

SEQ ID NO: 1921628 - RNA, 13 nt, Human
ucuauauuuuaca

SEQ ID NO: 1921629 - RNA, 20 nt, Human
ucuaggccuccuggcccagg

SEQ ID NO: 1921630 - RNA, 19 nt, Human
ucuagggaaaaaccagcgu

SEQ ID NO: 1921631 - RNA, 12 nt, Human
ucuagggaaaaa

SEQ ID NO: 1921632 - RNA, 15 nt, Human
ucuagguaaauuaca

SEQ ID NO: 1921633 - RNA, 18 nt, Human
ucuaggaggucucuaaga

SEQ ID NO: 1921634 - RNA, 18 nt, Human
ucuacucuagggaaaaac

SEQ ID NO: 1921635 - RNA, 20 nt, Human
ucuacucuccucaucucuaa

SEQ ID NO: 1921636 - RNA, 20 nt, Human
ucuacucgaguuacagacaa

SEQ ID NO: 1921637 - RNA, 21 nt, Human
ucuacucgaguuacagacaaa

SEQ ID NO: 1921638 - RNA, 18 nt, Human
ucuacuaauuccacaccu

SEQ ID NO: 1921639 - RNA, 22 nt, Human
ucuacucauuuaaaguauuuua

SEQ ID NO: 1921640 - RNA, 15 nt, Human
ucuacuaauuccaca

SEQ ID NO: 1921641 - RNA, 19 nt, Human
ucuacuaaaaauacaaaaa

SEQ ID NO: 1921642 - RNA, 15 nt, Human
ucuacuaaaaauaca

SEQ ID NO: 1921643 - RNA, 12 nt, Human
ucuacuaaaaau

SEQ ID NO: 1921644 - RNA, 22 nt, Human
ucuaauuuaucuugucucuggg

SEQ ID NO: 1921645 - RNA, 23 nt, Human
ucuaauuuaucuugucucugggc

SEQ ID NO: 1921646 - RNA, 14 nt, Human
ucuaauuuauaaaa

SEQ ID NO: 1921647 - RNA, 13 nt, Human
ucuaauuuauaaa

SEQ ID NO: 1921648 - RNA, 16 nt, Human
ucuaaugauggcccau

SEQ ID NO: 1921649 - RNA, 22 nt, Human
ucuaaugauggcccauucuacu

SEQ ID NO: 1921650 - RNA, 23 nt, Human
ucuaaugauggcccauucuacuu

SEQ ID NO: 1921651 - RNA, 12 nt, Human
ucguccagggag

SEQ ID NO: 1921652 - RNA, 23 nt, Human
ucucacucugucgcccagucugg

SEQ ID NO: 1921653 - RNA, 21 nt, Human
ucucacacaugagcaucaggc

SEQ ID NO: 1921654 - RNA, 20 nt, Human
ucucacugccaugccagcuu

SEQ ID NO: 1921655 - RNA, 23 nt, Human
ucucacacaugagcaucaggcca

SEQ ID NO: 1921656 - RNA, 16 nt, Human
ucucacacaugagcau

SEQ ID NO: 1921657 - RNA, 12 nt, Human
ucucacaaacau

SEQ ID NO: 1921658 - RNA, 18 nt, Human
ucucaaauuucuaaaucu

SEQ ID NO: 1921659 - RNA, 16 nt, Human
ucucaaauuucuaaau

SEQ ID NO: 1921660 - RNA, 14 nt, Human
ucucaaauuucuaa

SEQ ID NO: 1921661 - RNA, 13 nt, Human
ucucaaauuucua

SEQ ID NO: 1921662 - RNA, 15 nt, Human
ucucacuguugccca

SEQ ID NO: 1921663 - RNA, 14 nt, Human
ucucacuguugccc

SEQ ID NO: 1921664 - RNA, 17 nt, Human
ucucacuguugcccagg

SEQ ID NO: 1921665 - RNA, 18 nt, Human
uccuuggugccuggccug

SEQ ID NO: 1921666 - RNA, 22 nt, Human
uccuuggugucgggcaugacac

SEQ ID NO: 1921667 - RNA, 17 nt, Human
uccuuugugaggaagcc

SEQ ID NO: 1921668 - RNA, 13 nt, Human
uccuuuguacuuu

SEQ ID NO: 1921669 - RNA, 18 nt, Human
uccuuuguacuuugugcu

SEQ ID NO: 1921670 - RNA, 18 nt, Human
uccuuugugaggaagccg

SEQ ID NO: 1921671 - RNA, 22 nt, Human
uccuuugugaggaagccgcugg

SEQ ID NO: 1921672 - RNA, 14 nt, Human
uccuuggugccugg

SEQ ID NO: 1921673 - RNA, 18 nt, Human
uccuuggugucgggcaug

SEQ ID NO: 1921674 - RNA, 21 nt, Human
uccuuggugucgggcaugaca

SEQ ID NO: 1921675 - RNA, 21 nt, Human
uccuuaccagcagagcaccuu

SEQ ID NO: 1921676 - RNA, 17 nt, Human
uccuguccagcuccaac

SEQ ID NO: 1921677 - RNA, 19 nt, Human
uccugucccucauccauag

SEQ ID NO: 1921678 - RNA, 16 nt, Human
uccugaggcuuuggau

SEQ ID NO: 1921679 - RNA, 17 nt, Human
uccugaggcuuuggauu

SEQ ID NO: 1921680 - RNA, 18 nt, Human
uccugaggcuuuggauuu

SEQ ID NO: 1921681 - RNA, 13 nt, Human
uccuguccagcuc

SEQ ID NO: 1921682 - RNA, 14 nt, Human
uccuguccagcucc

SEQ ID NO: 1921683 - RNA, 15 nt, Human
uccuguccagcucca

SEQ ID NO: 1921684 - RNA, 16 nt, Human
uccuguccagcuccaa

SEQ ID NO: 1921685 - RNA, 22 nt, Human
uccuugaaaacacuguucucug

SEQ ID NO: 1921686 - RNA, 23 nt, Human
uccuugaaaacacuguucucugc

SEQ ID NO: 1921687 - RNA, 22 nt, Human
uccuuuucgcaggauucuuccu

SEQ ID NO: 1921688 - RNA, 17 nt, Human
ucgcaggauucuuccuc

SEQ ID NO: 1921689 - RNA, 20 nt, Human
ucgcaggaagacccaacaca

SEQ ID NO: 1921690 - RNA, 17 nt, Human
ucgauucauauugaaua

SEQ ID NO: 1921691 - RNA, 15 nt, Human
ucgauucauauugaa

SEQ ID NO: 1921692 - RNA, 21 nt, Human
ucgcaggauucuuccucccuc

SEQ ID NO: 1921693 - RNA, 23 nt, Human
ucgcaggauucuuccucccuccc

SEQ ID NO: 1921694 - RNA, 19 nt, Human
ucgcauggucacacacuga

SEQ ID NO: 1921695 - RNA, 20 nt, Human
ucgcauggucacacacugau

SEQ ID NO: 1921696 - RNA, 17 nt, Human
ucggccuccauccugag

SEQ ID NO: 1921697 - RNA, 16 nt, Human
ucggccuccauccuga

SEQ ID NO: 1921698 - RNA, 15 nt, Human
ucggccuccauccug

SEQ ID NO: 1921699 - RNA, 12 nt, Human
ucggaggaagcc

SEQ ID NO: 1921700 - RNA, 13 nt, Human
ucggaggaagccc

SEQ ID NO: 1921701 - RNA, 23 nt, Human
ucgcccagucuggaaugcagugg

SEQ ID NO: 1921702 - RNA, 19 nt, Human
ucgcccagucuggaaugca

SEQ ID NO: 1921703 - RNA, 14 nt, Human
ucgcccagucugga

SEQ ID NO: 1921704 - RNA, 18 nt, Human
ucggaaaacaugcuacac

SEQ ID NO: 1921705 - RNA, 15 nt, Human
ucggaaaacaugcua

SEQ ID NO: 1921706 - RNA, 21 nt, Human
ucgccagcugaugacucaaga

SEQ ID NO: 1921707 - RNA, 16 nt, Human
ucgccagcugaugacu

SEQ ID NO: 1921708 - RNA, 18 nt, Human
ucgccagcugaugacuca

SEQ ID NO: 1921709 - RNA, 19 nt, Human
ucgccagcugaugacucaa

SEQ ID NO: 1921710 - RNA, 20 nt, Human
ucgccagcugaugacucaag

SEQ ID NO: 1921711 - RNA, 22 nt, Human
ucccaugagccucagcauccug

SEQ ID NO: 1921712 - RNA, 17 nt, Human
ucccaugagccucagca

SEQ ID NO: 1921713 - RNA, 18 nt, Human
ucccucccuuccucuuuc

SEQ ID NO: 1921714 - RNA, 22 nt, Human
ucccucuacugggagccuaccc

SEQ ID NO: 1921715 - RNA, 18 nt, Human
ucccucuacugggagccu

SEQ ID NO: 1921716 - RNA, 20 nt, Human
ucccugcacuugcagacucu

SEQ ID NO: 1921717 - RNA, 17 nt, Human
ucccucuggggcuguuc

SEQ ID NO: 1921718 - RNA, 13 nt, Human
ucccucuggggcu

SEQ ID NO: 1921719 - RNA, 14 nt, Human
ucccugccaaugga

SEQ ID NO: 1921720 - RNA, 16 nt, Human
ucccugccaauggacu

SEQ ID NO: 1921721 - RNA, 22 nt, Human
ucccugcaucugaccagcagcg

SEQ ID NO: 1921722 - RNA, 16 nt, Human
ucccugcaucugacca

SEQ ID NO: 1921723 - RNA, 18 nt, Human
ucccugcaucugaccagc

SEQ ID NO: 1921724 - RNA, 20 nt, Human
ucccugcaucugaccagcag

SEQ ID NO: 1921725 - RNA, 21 nt, Human
ucccugcaucugaccagcagc

SEQ ID NO: 1921726 - RNA, 13 nt, Human
ucccucugcccca

SEQ ID NO: 1921727 - RNA, 13 nt, Human
ucccucuauuuau

SEQ ID NO: 1921728 - RNA, 19 nt, Human
ucccucuauuuauguuugc

SEQ ID NO: 1921729 - RNA, 23 nt, Human
ucccucuacugggagccuaccca

SEQ ID NO: 1921730 - RNA, 17 nt, Human
ucccuucccaccucucu

SEQ ID NO: 1921731 - RNA, 21 nt, Human
ucccuucccacuggaggcaug

SEQ ID NO: 1921732 - RNA, 14 nt, Human
ucccuucugcuacu

SEQ ID NO: 1921733 - RNA, 15 nt, Human
ucccuucugcuacug

SEQ ID NO: 1921734 - RNA, 13 nt, Human
ucccuucugcuac

SEQ ID NO: 1921735 - RNA, 20 nt, Human
ucccuggggcuagggggagc

SEQ ID NO: 1921736 - RNA, 16 nt, Human
ucccuucccaccucuc

SEQ ID NO: 1921737 - RNA, 21 nt, Human
uccgcuuucuacccagcgagc

SEQ ID NO: 1921738 - RNA, 21 nt, Human
uccgaaagggacuuggaagcu

SEQ ID NO: 1921739 - RNA, 20 nt, Human
ucccuucugcuacuggcaaa

SEQ ID NO: 1921740 - RNA, 22 nt, Human
uccgaaagggacuuggaagcuc

SEQ ID NO: 1921741 - RNA, 22 nt, Human
uccuaguuccaccaucaagcca

SEQ ID NO: 1921742 - RNA, 21 nt, Human
uccuaguuccaccaucaagcc

SEQ ID NO: 1921743 - RNA, 14 nt, Human
uccuauuuagaugg

SEQ ID NO: 1921744 - RNA, 16 nt, Human
uccuaagcuauucagu

SEQ ID NO: 1921745 - RNA, 18 nt, Human
uccuaagcuauucaguaa

SEQ ID NO: 1921746 - RNA, 14 nt, Human
uccuaagccuaaaa

SEQ ID NO: 1921747 - RNA, 14 nt, Human
uccuaguuccacca

SEQ ID NO: 1921748 - RNA, 17 nt, Human
uccuaguuccaccauca

SEQ ID NO: 1921749 - RNA, 12 nt, Human
uccuccucagau

SEQ ID NO: 1921750 - RNA, 19 nt, Human
uccuauuuugcauaauaaa

SEQ ID NO: 1921751 - RNA, 14 nt, Human
uccuccaggugcac

SEQ ID NO: 1921752 - RNA, 18 nt, Human
uccuccaggugcacaagc

SEQ ID NO: 1921753 - RNA, 20 nt, Human
uccuccaggugcacaagcuc

SEQ ID NO: 1921754 - RNA, 22 nt, Human
uccuccaggugcacaagcucca

SEQ ID NO: 1921755 - RNA, 12 nt, Human
uccuccaggugc

SEQ ID NO: 1921756 - RNA, 13 nt, Human
uccuccaggugca

SEQ ID NO: 1921757 - RNA, 20 nt, Human
uccucaaaacuucagacaua

SEQ ID NO: 1921758 - RNA, 21 nt, Human
uccuccuuuucacaguucucu

SEQ ID NO: 1921759 - RNA, 17 nt, Human
uccucuaggaggucucu

SEQ ID NO: 1921760 - RNA, 21 nt, Human
uccucuaggaggucucuaaga

SEQ ID NO: 1921761 - RNA, 15 nt, Human
uccucuguacagagc

SEQ ID NO: 1921762 - RNA, 13 nt, Human
uccucuguacaga

SEQ ID NO: 1921763 - RNA, 15 nt, Human
uccucuggccugugu

SEQ ID NO: 1921764 - RNA, 17 nt, Human
uccucugcugcuggcug

SEQ ID NO: 1921765 - RNA, 15 nt, Human
uccugaggcugggcu

SEQ ID NO: 1921766 - RNA, 16 nt, Human
uccugaggcugggcuc

SEQ ID NO: 1921767 - RNA, 17 nt, Human
uccugaggcugggcucc

SEQ ID NO: 1921768 - RNA, 19 nt, Human
uccugaggcugggcucccu

SEQ ID NO: 1921769 - RNA, 12 nt, Human
uccugaggcugg

SEQ ID NO: 1921770 - RNA, 17 nt, Human
uccugaggcuccacuug

SEQ ID NO: 1921771 - RNA, 16 nt, Human
uccugaggcuccacuu

SEQ ID NO: 1921772 - RNA, 21 nt, Human
uccucugucagucacagccac

SEQ ID NO: 1921773 - RNA, 22 nt, Human
uccucugucagucacagccacc

SEQ ID NO: 1921774 - RNA, 17 nt, Human
uccugagccagauuuca

SEQ ID NO: 1921775 - RNA, 23 nt, Human
uccucuguacagagcccacgccc

SEQ ID NO: 1921776 - RNA, 19 nt, Human
uccucugucagucacagcc

SEQ ID NO: 1921777 - RNA, 19 nt, Human
uccucuguacagagcccac

SEQ ID NO: 1921778 - RNA, 18 nt, Human
uccugagccagauuucac

SEQ ID NO: 1921779 - RNA, 19 nt, Human
uccugagccagauuucacu

SEQ ID NO: 1921780 - RNA, 21 nt, Human
uccugagccagauuucacucu

SEQ ID NO: 1921781 - RNA, 15 nt, Human
uccugaggcuccacu

SEQ ID NO: 1921782 - RNA, 13 nt, Human
uggaaccaggcuu

SEQ ID NO: 1921783 - RNA, 21 nt, Human
uggaacguuuuuccuguucuu

SEQ ID NO: 1921784 - RNA, 14 nt, Human
uggaauaacaugua

SEQ ID NO: 1921785 - RNA, 15 nt, Human
uggaauaacauguaa

SEQ ID NO: 1921786 - RNA, 19 nt, Human
uggaauaacauguaauuaa

SEQ ID NO: 1921787 - RNA, 22 nt, Human
uggaauaauccuaaacauauga

SEQ ID NO: 1921788 - RNA, 17 nt, Human
uggaauaaggagaauga

SEQ ID NO: 1921789 - RNA, 16 nt, Human
uggaauauauaaccag

SEQ ID NO: 1921790 - RNA, 15 nt, Human
uggaauauauaacca

SEQ ID NO: 1921791 - RNA, 13 nt, Human
uggacaugcacag

SEQ ID NO: 1921792 - RNA, 19 nt, Human
uggacaugcacagcuaaca

SEQ ID NO: 1921793 - RNA, 12 nt, Human
uggacagcccca

SEQ ID NO: 1921794 - RNA, 14 nt, Human
uggacagccccacc

SEQ ID NO: 1921795 - RNA, 21 nt, Human
uggacuagagggaccucuccc

SEQ ID NO: 1921796 - RNA, 17 nt, Human
uggacagaagcagcucu

SEQ ID NO: 1921797 - RNA, 18 nt, Human
uggacagaagcagcucuu

SEQ ID NO: 1921798 - RNA, 15 nt, Human
uggacagaagcagcu

SEQ ID NO: 1921799 - RNA, 16 nt, Human
uggacagaagcagcuc

SEQ ID NO: 1921800 - RNA, 12 nt, Human
uggacagaagaa

SEQ ID NO: 1921801 - RNA, 20 nt, Human
uggaaugaugggucaguugu

SEQ ID NO: 1921802 - RNA, 18 nt, Human
uggaaacauucaggagcu

SEQ ID NO: 1921803 - RNA, 21 nt, Human
uggaaagacuuuuccaacccu

SEQ ID NO: 1921804 - RNA, 19 nt, Human
uggaaagacagcuucucau

SEQ ID NO: 1921805 - RNA, 17 nt, Human
uggaaacaagucaguca

SEQ ID NO: 1921806 - RNA, 14 nt, Human
uggaaagaguacuc

SEQ ID NO: 1921807 - RNA, 20 nt, Human
uggaaagaguaggaagacuu

SEQ ID NO: 1921808 - RNA, 23 nt, Human
uggaaagacagcuucucauccug

SEQ ID NO: 1921809 - RNA, 18 nt, Human
uggaaagauaacuaggaa

SEQ ID NO: 1921810 - RNA, 23 nt, Human
uggaaagauaacuaggaaaucca

SEQ ID NO: 1921811 - RNA, 12 nt, Human
uggaaagcaaag

SEQ ID NO: 1921812 - RNA, 15 nt, Human
uggaaagcaaagggc

SEQ ID NO: 1921813 - RNA, 17 nt, Human
uggaaaaauagccugcc

SEQ ID NO: 1921814 - RNA, 23 nt, Human
ugcuuugaaagccccagaaauca

SEQ ID NO: 1921815 - RNA, 20 nt, Human
uggaaaaauagccugccucu

SEQ ID NO: 1921816 - RNA, 22 nt, Human
ugcuuugaaagccccagaaauc

SEQ ID NO: 1921817 - RNA, 12 nt, Human
ugcuuucugcuc

SEQ ID NO: 1921818 - RNA, 13 nt, Human
ugcuuucugcuca

SEQ ID NO: 1921819 - RNA, 14 nt, Human
ugcuuucugcucag

SEQ ID NO: 1921820 - RNA, 15 nt, Human
ugcuuucugcucagc

SEQ ID NO: 1921821 - RNA, 19 nt, Human
ugcuuucugcucagcuucu

SEQ ID NO: 1921822 - RNA, 20 nt, Human
ugcuuucugcucagcuucuc

SEQ ID NO: 1921823 - RNA, 16 nt, Human
ugcuggacaguaucac

SEQ ID NO: 1921824 - RNA, 20 nt, Human
uggcaggacgugggcugggc

SEQ ID NO: 1921825 - RNA, 13 nt, Human
uggcaggacagga

SEQ ID NO: 1921826 - RNA, 13 nt, Human
uggcagcugcuuu

SEQ ID NO: 1921827 - RNA, 21 nt, Human
uggcacccggccccugcuggu

SEQ ID NO: 1921828 - RNA, 22 nt, Human
uggcaacagaucuggaaccuca

SEQ ID NO: 1921829 - RNA, 20 nt, Human
uggcaccuaauccaggcaga

SEQ ID NO: 1921830 - RNA, 13 nt, Human
uggcagugggagc

SEQ ID NO: 1921831 - RNA, 17 nt, Human
uggcagucacugaauuc

SEQ ID NO: 1921832 - RNA, 21 nt, Human
uggcagggguggcugccucau

SEQ ID NO: 1921833 - RNA, 23 nt, Human
uggcagggguggcugccucauuu

SEQ ID NO: 1921834 - RNA, 16 nt, Human
uggccacgcagccagg

SEQ ID NO: 1921835 - RNA, 15 nt, Human
uggccacgcagccag

SEQ ID NO: 1921836 - RNA, 14 nt, Human
uggccacgcagcca

SEQ ID NO: 1921837 - RNA, 20 nt, Human
uggccacgcagccaggacac

SEQ ID NO: 1921838 - RNA, 12 nt, Human
uggccacuaagc

SEQ ID NO: 1921839 - RNA, 19 nt, Human
uggccacgcagccaggaca

SEQ ID NO: 1921840 - RNA, 17 nt, Human
uggccacgcagccagga

SEQ ID NO: 1921841 - RNA, 18 nt, Human
uggccacuaagcagagga

SEQ ID NO: 1921842 - RNA, 19 nt, Human
uggccacuaagcagaggag

SEQ ID NO: 1921843 - RNA, 21 nt, Human
uggccagaugcaccagcccuu

SEQ ID NO: 1921844 - RNA, 20 nt, Human
uggccagaugcaccagcccu

SEQ ID NO: 1921845 - RNA, 14 nt, Human
uggacucugcacau

SEQ ID NO: 1921846 - RNA, 13 nt, Human
uggacucugcaca

SEQ ID NO: 1921847 - RNA, 20 nt, Human
uggaggaaggaaacccagcu

SEQ ID NO: 1921848 - RNA, 12 nt, Human
uggaggaaggaa

SEQ ID NO: 1921849 - RNA, 18 nt, Human
uggaggaaggaaacccag

SEQ ID NO: 1921850 - RNA, 22 nt, Human
uggagggacaaguggacucagg

SEQ ID NO: 1921851 - RNA, 19 nt, Human
uggaggagcucaggacacu

SEQ ID NO: 1921852 - RNA, 24 nt, Human
uggauuuaacagaaauguacagca

SEQ ID NO: 1921853 - RNA, 20 nt, Human
uggauuuaacagaaauguac

SEQ ID NO: 1921854 - RNA, 23 nt, Human
uggauuucccauccccuguggga

SEQ ID NO: 1921855 - RNA, 20 nt, Human
uggauccugaaauagaggcu

SEQ ID NO: 1921856 - RNA, 13 nt, Human
uggauuugacauu

SEQ ID NO: 1921857 - RNA, 14 nt, Human
uggauuugacauug

SEQ ID NO: 1921858 - RNA, 22 nt, Human
uggauuuugguuuuguuccccu

SEQ ID NO: 1921859 - RNA, 13 nt, Human
uggcaacagaucu

SEQ ID NO: 1921860 - RNA, 15 nt, Human
uggcaacagaucugg

SEQ ID NO: 1921861 - RNA, 16 nt, Human
uggcaacagaucugga

SEQ ID NO: 1921862 - RNA, 17 nt, Human
uggcaacagaucuggaa

SEQ ID NO: 1921863 - RNA, 18 nt, Human
uggcaacagaucuggaac

SEQ ID NO: 1921864 - RNA, 20 nt, Human
uggcaacagaucuggaaccu

SEQ ID NO: 1921865 - RNA, 22 nt, Human
ugguaucuagacccaucuucuu

SEQ ID NO: 1921866 - RNA, 18 nt, Human
ugguaugaucacggcuca

SEQ ID NO: 1921867 - RNA, 23 nt, Human
ugguauuggcuagagguucaaag

SEQ ID NO: 1921868 - RNA, 19 nt, Human
ugguauucgcuugagaaaa

SEQ ID NO: 1921869 - RNA, 13 nt, Human
ugguauagaaaug

SEQ ID NO: 1921870 - RNA, 16 nt, Human
ugguauagaaaugcug

SEQ ID NO: 1921871 - RNA, 14 nt, Human
ugguauagaaaugc

SEQ ID NO: 1921872 - RNA, 22 nt, Human
ugguauagaaaugcugguuuuu

SEQ ID NO: 1921873 - RNA, 21 nt, Human
uggguuucuaaagcugccagc

SEQ ID NO: 1921874 - RNA, 16 nt, Human
uggguucugccugcca

SEQ ID NO: 1921875 - RNA, 19 nt, Human
uggguucugccugccagcu

SEQ ID NO: 1921876 - RNA, 17 nt, Human
uggguuucuaaagcugc

SEQ ID NO: 1921877 - RNA, 18 nt, Human
uggguuucuaaagcugcc

SEQ ID NO: 1921878 - RNA, 16 nt, Human
uggguaacuagggaag

SEQ ID NO: 1921879 - RNA, 19 nt, Human
ugggguuuaucagaauucu

SEQ ID NO: 1921880 - RNA, 18 nt, Human
uggguggggggcuucaua

SEQ ID NO: 1921881 - RNA, 21 nt, Human
uggguggggggcuucauacac

SEQ ID NO: 1921882 - RNA, 20 nt, Human
uggguggggggcuucauaca

SEQ ID NO: 1921883 - RNA, 14 nt, Human
uggguucugccugc

SEQ ID NO: 1921884 - RNA, 22 nt, Human
uggguucuacccaggugcuagg

SEQ ID NO: 1921885 - RNA, 15 nt, Human
uggguucuacccagg

SEQ ID NO: 1921886 - RNA, 16 nt, Human
uggguucuacccaggu

SEQ ID NO: 1921887 - RNA, 20 nt, Human
uggguguuccuggcaguuua

SEQ ID NO: 1921888 - RNA, 19 nt, Human
uggguguuccuggcaguuu

SEQ ID NO: 1921889 - RNA, 15 nt, Human
uggguguuccuggca

SEQ ID NO: 1921890 - RNA, 17 nt, Human
ugggcuucaguggcagc

SEQ ID NO: 1921891 - RNA, 15 nt, Human
ugggcuucaguggca

SEQ ID NO: 1921892 - RNA, 17 nt, Human
ugggcuggugucaccug

SEQ ID NO: 1921893 - RNA, 23 nt, Human
ugggcuggguucuacccaggugc

SEQ ID NO: 1921894 - RNA, 16 nt, Human
ugggcuaguugggcuu

SEQ ID NO: 1921895 - RNA, 22 nt, Human
ugggcuaagugauccucccacc

SEQ ID NO: 1921896 - RNA, 16 nt, Human
ugggcagaggaaagca

SEQ ID NO: 1921897 - RNA, 15 nt, Human
ugggggugcauuuga

SEQ ID NO: 1921898 - RNA, 12 nt, Human
ugggggugcauu

SEQ ID NO: 1921899 - RNA, 19 nt, Human
ugggggcugggcagaggaa

SEQ ID NO: 1921900 - RNA, 15 nt, Human
ugggggucugugugu

SEQ ID NO: 1921901 - RNA, 18 nt, Human
ugggggucuguguguuua

SEQ ID NO: 1921902 - RNA, 17 nt, Human
ugggggcugggcagagg

SEQ ID NO: 1921903 - RNA, 18 nt, Human
ugggggcugggcagagga

SEQ ID NO: 1921904 - RNA, 21 nt, Human
ugggggcggggugggaaagau

SEQ ID NO: 1921905 - RNA, 11 nt, Human
ugggggaugua

SEQ ID NO: 1921906 - RNA, 21 nt, Human
ugggggaucacagccucugaa

SEQ ID NO: 1921907 - RNA, 20 nt, Human
uggggauugggccccugcca

SEQ ID NO: 1921908 - RNA, 23 nt, Human
uggggauugggugggcaggaaaa

SEQ ID NO: 1921909 - RNA, 20 nt, Human
ugggggaucacagccucuga

SEQ ID NO: 1921910 - RNA, 21 nt, Human
uggcuugaguuuaaauuguaa

SEQ ID NO: 1921911 - RNA, 14 nt, Human
uggcuuuaaugaau

SEQ ID NO: 1921912 - RNA, 14 nt, Human
uggcuuuugugcau

SEQ ID NO: 1921913 - RNA, 17 nt, Human
uggcuuuggcuucuugg

SEQ ID NO: 1921914 - RNA, 19 nt, Human
uggcuucuguugucaccuu

SEQ ID NO: 1921915 - RNA, 15 nt, Human
uggcuugagaaauau

SEQ ID NO: 1921916 - RNA, 15 nt, Human
uggcuucucugagga

SEQ ID NO: 1921917 - RNA, 16 nt, Human
uggcuucucugaggaa

SEQ ID NO: 1921918 - RNA, 18 nt, Human
uggcuucucugaggaagc

SEQ ID NO: 1921919 - RNA, 17 nt, Human
uggcucucccauuuccu

SEQ ID NO: 1921920 - RNA, 23 nt, Human
uggcccauucuacuugcucugga

SEQ ID NO: 1921921 - RNA, 17 nt, Human
uggcccauucuacuugc

SEQ ID NO: 1921922 - RNA, 20 nt, Human
uggcccauucuacuugcucu

SEQ ID NO: 1921923 - RNA, 21 nt, Human
uggcccauucuacuugcucug

SEQ ID NO: 1921924 - RNA, 22 nt, Human
uggcccauucuacuugcucugg

SEQ ID NO: 1921925 - RNA, 14 nt, Human
uggcccagggccca

SEQ ID NO: 1921926 - RNA, 15 nt, Human
uggcccagggcccag

SEQ ID NO: 1921927 - RNA, 16 nt, Human
uggcccagggcccaga

SEQ ID NO: 1921928 - RNA, 15 nt, Human
uggcccauucuacuu

SEQ ID NO: 1921929 - RNA, 16 nt, Human
uggcccauucuacuug

SEQ ID NO: 1921930 - RNA, 21 nt, Human
uggcugggggccucagugcca

SEQ ID NO: 1921931 - RNA, 21 nt, Human
uggcugcuucaaggauccuga

SEQ ID NO: 1921932 - RNA, 14 nt, Human
ugggaguacaaaag

SEQ ID NO: 1921933 - RNA, 22 nt, Human
ugggagcugccuguucagcucc

SEQ ID NO: 1921934 - RNA, 21 nt, Human
ugggagcugccuguucagcuc

SEQ ID NO: 1921935 - RNA, 17 nt, Human
ugggagcugccuguuca

SEQ ID NO: 1921936 - RNA, 15 nt, Human
ugggagugagcuggu

SEQ ID NO: 1921937 - RNA, 15 nt, Human
ugggauccuccaggu

SEQ ID NO: 1921938 - RNA, 21 nt, Human
ugggagugaggaugucugggc

SEQ ID NO: 1921939 - RNA, 16 nt, Human
ugggauuacaggugug

SEQ ID NO: 1921940 - RNA, 18 nt, Human
ugggauccuccaggugca

SEQ ID NO: 1921941 - RNA, 13 nt, Human
ugggauccuggag

SEQ ID NO: 1921942 - RNA, 21 nt, Human
ugggauuacagggaugagcca

SEQ ID NO: 1921943 - RNA, 15 nt, Human
ugggcagaggaaagc

SEQ ID NO: 1921944 - RNA, 23 nt, Human
ugggaccucaguuuuaucauuuu

SEQ ID NO: 1921945 - RNA, 24 nt, Human
ugggaccuccaccguugguguuca

SEQ ID NO: 1921946 - RNA, 19 nt, Human
ugggaccuaggggcgccgc

SEQ ID NO: 1921947 - RNA, 23 nt, Human
ugggaccuauaacugcccagcgg

SEQ ID NO: 1921948 - RNA, 13 nt, Human
ugggacacccugu

SEQ ID NO: 1921949 - RNA, 15 nt, Human
ugggacguggcucag

SEQ ID NO: 1921950 - RNA, 12 nt, Human
ugggacacccug

SEQ ID NO: 1921951 - RNA, 20 nt, Human
ugggaauguuacauuguuug

SEQ ID NO: 1921952 - RNA, 14 nt, Human
ugggagcugccugu

SEQ ID NO: 1921953 - RNA, 13 nt, Human
ugggagcugccug

SEQ ID NO: 1921954 - RNA, 12 nt, Human
ugggagcugccu

SEQ ID NO: 1921955 - RNA, 23 nt, Human
ugggagauucaagggacccauga

SEQ ID NO: 1921956 - RNA, 20 nt, Human
ugggagcugaggccacacuc

SEQ ID NO: 1921957 - RNA, 22 nt, Human
ugggagcugaggccacacucag

SEQ ID NO: 1921958 - RNA, 13 nt, Human
ugggagcaaaaga

SEQ ID NO: 1921959 - RNA, 14 nt, Human
ugggagauguggaa

SEQ ID NO: 1921960 - RNA, 16 nt, Human
ugggacguggcucagc

SEQ ID NO: 1921961 - RNA, 20 nt, Human
ugggacguggcucagccagc

SEQ ID NO: 1921962 - RNA, 18 nt, Human
ugccaaauauaaauaaaa

SEQ ID NO: 1921963 - RNA, 17 nt, Human
ugccaaauauaaauaaa

SEQ ID NO: 1921964 - RNA, 20 nt, Human
ugcauauuuauaaaaauaaa

SEQ ID NO: 1921965 - RNA, 13 nt, Human
ugcauauguugaa

SEQ ID NO: 1921966 - RNA, 21 nt, Human
ugcauauuuauaaaaauaaaa

SEQ ID NO: 1921967 - RNA, 15 nt, Human
ugcauauguugaaua

SEQ ID NO: 1921968 - RNA, 17 nt, Human
ugcauauguugaauacu

SEQ ID NO: 1921969 - RNA, 24 nt, Human
ugcauauuuuguaacuuccaugug

SEQ ID NO: 1921970 - RNA, 22 nt, Human
ugccaaauauaaauaaaaauaa

SEQ ID NO: 1921971 - RNA, 19 nt, Human
ugccaaauauaaauaaaaa

SEQ ID NO: 1921972 - RNA, 19 nt, Human
ugcaucaagaugugacaug

SEQ ID NO: 1921973 - RNA, 14 nt, Human
ugcaucaagaugug

SEQ ID NO: 1921974 - RNA, 20 nt, Human
ugccacccuggggagaaagu

SEQ ID NO: 1921975 - RNA, 22 nt, Human
ugccacuacggaauaguuggcu

SEQ ID NO: 1921976 - RNA, 19 nt, Human
ugccacccuggggagaaag

SEQ ID NO: 1921977 - RNA, 20 nt, Human
ugccacuaaauugacacuua

SEQ ID NO: 1921978 - RNA, 13 nt, Human
ugccacccaccuc

SEQ ID NO: 1921979 - RNA, 16 nt, Human
ugccacccaccucccu

SEQ ID NO: 1921980 - RNA, 22 nt, Human
ugccagguuuuuggucugaccc

SEQ ID NO: 1921981 - RNA, 19 nt, Human
ugccagguuuuuggucuga

SEQ ID NO: 1921982 - RNA, 18 nt, Human
ugccagguuuuuggucug

SEQ ID NO: 1921983 - RNA, 10 nt, Human
ugccaggcau

SEQ ID NO: 1921984 - RNA, 18 nt, Human
ugccaggauggaaugaug

SEQ ID NO: 1921985 - RNA, 20 nt, Human
ugccauccagguucagcuug

SEQ ID NO: 1921986 - RNA, 21 nt, Human
ugccauccagguucagcuugu

SEQ ID NO: 1921987 - RNA, 17 nt, Human
ugcccacccuccacucu

SEQ ID NO: 1921988 - RNA, 13 nt, Human
ugcccaccuggcc

SEQ ID NO: 1921989 - RNA, 14 nt, Human
ugcccaccuggccu

SEQ ID NO: 1921990 - RNA, 13 nt, Human
ugcccaggcuggc

SEQ ID NO: 1921991 - RNA, 20 nt, Human
ugcccaggcuggagugcaau

SEQ ID NO: 1921992 - RNA, 18 nt, Human
ugcccaggcuggagugca

SEQ ID NO: 1921993 - RNA, 13 nt, Human
ugcccaggcugga

SEQ ID NO: 1921994 - RNA, 21 nt, Human
ugcccacucccugcaaccuga

SEQ ID NO: 1921995 - RNA, 11 nt, Human
ugcccaggcug

SEQ ID NO: 1921996 - RNA, 16 nt, Human
ugcccacucccugcaa

SEQ ID NO: 1921997 - RNA, 14 nt, Human
ugcccacucccugc

SEQ ID NO: 1921998 - RNA, 15 nt, Human
ugcccacucccugca

SEQ ID NO: 1921999 - RNA, 23 nt, Human
ugccccucaacucuccuccagag

SEQ ID NO: 1922000 - RNA, 14 nt, Human
ugccccaggaccag

SEQ ID NO: 1922001 - RNA, 18 nt, Human
ugccccaggaccagcuca

SEQ ID NO: 1922002 - RNA, 19 nt, Human
ugccccaggaccagcucag

SEQ ID NO: 1922003 - RNA, 20 nt, Human
ugccccaggaccagcucagg

SEQ ID NO: 1922004 - RNA, 17 nt, Human
ugccccuggcagccccu

SEQ ID NO: 1922005 - RNA, 17 nt, Human
ugccccauccuccagca

SEQ ID NO: 1922006 - RNA, 18 nt, Human
ugccccauccuccagcag

SEQ ID NO: 1922007 - RNA, 19 nt, Human
ugccccauccuccagcagg

SEQ ID NO: 1922008 - RNA, 24 nt, Human
ugcccauggacaggcuggcuccag

SEQ ID NO: 1922009 - RNA, 13 nt, Human
ugccccaggacca

SEQ ID NO: 1922010 - RNA, 15 nt, Human
ugcaguugccaguca

SEQ ID NO: 1922011 - RNA, 17 nt, Human
ugcauauauacauauau

SEQ ID NO: 1922012 - RNA, 13 nt, Human
ugcaguugccagu

SEQ ID NO: 1922013 - RNA, 14 nt, Human
ugcaguugccaguc

SEQ ID NO: 1922014 - RNA, 22 nt, Human
ugcagugguaugaucacggcuc

SEQ ID NO: 1922015 - RNA, 16 nt, Human
ugcagugcuuccaagg

SEQ ID NO: 1922016 - RNA, 15 nt, Human
ugcaggccaggccag

SEQ ID NO: 1922017 - RNA, 15 nt, Human
ugcaggcagccaggc

SEQ ID NO: 1922018 - RNA, 13 nt, Human
ugcaggcagccag

SEQ ID NO: 1922019 - RNA, 14 nt, Human
ugcaggcagccagg

SEQ ID NO: 1922020 - RNA, 14 nt, Human
ugcagcagggaugc

SEQ ID NO: 1922021 - RNA, 16 nt, Human
ugcagcagggaugccc

SEQ ID NO: 1922022 - RNA, 17 nt, Human
ugcagcagggaugcccu

SEQ ID NO: 1922023 - RNA, 18 nt, Human
ugcagcagggaugcccug

SEQ ID NO: 1922024 - RNA, 19 nt, Human
ugcagcagggaugcccugg

SEQ ID NO: 1922025 - RNA, 22 nt, Human
ugcagcagggaugcccuggagg

SEQ ID NO: 1922026 - RNA, 15 nt, Human
ugcaccgggccacag

SEQ ID NO: 1922027 - RNA, 14 nt, Human
ugcaccgggccaca

SEQ ID NO: 1922028 - RNA, 19 nt, Human
ugaguccccuguuuguuuc

SEQ ID NO: 1922029 - RNA, 23 nt, Human
ugcaccggcuggccuggccccuc

SEQ ID NO: 1922030 - RNA, 22 nt, Human
ugcaccgggccacagagaaagu

SEQ ID NO: 1922031 - RNA, 17 nt, Human
ugcaccgggccacagag

SEQ ID NO: 1922032 - RNA, 20 nt, Human
ugaguccccuguuuguuucu

SEQ ID NO: 1922033 - RNA, 19 nt, Human
ugcacugcccauggacagg

SEQ ID NO: 1922034 - RNA, 21 nt, Human
ugcacugcccauggacaggcu

SEQ ID NO: 1922035 - RNA, 16 nt, Human
ugcacugaugcugccc

SEQ ID NO: 1922036 - RNA, 17 nt, Human
ugcacugaugcugcccc

SEQ ID NO: 1922037 - RNA, 21 nt, Human
ugcacugaugcugccccucau

SEQ ID NO: 1922038 - RNA, 22 nt, Human
ugcacugaugcugccccucauc

SEQ ID NO: 1922039 - RNA, 14 nt, Human
ugcacugaugcugc

SEQ ID NO: 1922040 - RNA, 22 nt, Human
ugcagagcagugggccuggcca

SEQ ID NO: 1922041 - RNA, 11 nt, Human
ugcagagcugc

SEQ ID NO: 1922042 - RNA, 23 nt, Human
ugcagcaauaaagcagcguuucu

SEQ ID NO: 1922043 - RNA, 20 nt, Human
ugcagcaauaaagcagcguu

SEQ ID NO: 1922044 - RNA, 12 nt, Human
ugcacuuuguuc

SEQ ID NO: 1922045 - RNA, 14 nt, Human
ugcacuuuguucug

SEQ ID NO: 1922046 - RNA, 22 nt, Human
ugcacuuucucaugauuuacag

SEQ ID NO: 1922047 - RNA, 16 nt, Human
ugccuucuacuuuuaa

SEQ ID NO: 1922048 - RNA, 15 nt, Human
ugccuucuaaaggug

SEQ ID NO: 1922049 - RNA, 16 nt, Human
ugccuucuaaaggugu

SEQ ID NO: 1922050 - RNA, 16 nt, Human
ugccuucuuuugauua

SEQ ID NO: 1922051 - RNA, 21 nt, Human
ugcgaucuggguucacugcaa

SEQ ID NO: 1922052 - RNA, 20 nt, Human
ugcgaucuggguucacugca

SEQ ID NO: 1922053 - RNA, 19 nt, Human
ugcgaucuggguucacugc

SEQ ID NO: 1922054 - RNA, 15 nt, Human
ugcgaucuggguuca

SEQ ID NO: 1922055 - RNA, 14 nt, Human
ugcgaucuggguuc

SEQ ID NO: 1922056 - RNA, 22 nt, Human
ugcgccuacaggagugagcacu

SEQ ID NO: 1922057 - RNA, 16 nt, Human
ugcgccuacaggagug

SEQ ID NO: 1922058 - RNA, 14 nt, Human
ugcgccuacaggag

SEQ ID NO: 1922059 - RNA, 15 nt, Human
ugcuaaaugugaaug

SEQ ID NO: 1922060 - RNA, 17 nt, Human
ugcuaaagccuuccuau

SEQ ID NO: 1922061 - RNA, 16 nt, Human
ugccugguggcagcug

SEQ ID NO: 1922062 - RNA, 18 nt, Human
ugccuguaaucacagcua

SEQ ID NO: 1922063 - RNA, 15 nt, Human
ugccugguggcagcu

SEQ ID NO: 1922064 - RNA, 14 nt, Human
ugccugguggcagc

SEQ ID NO: 1922065 - RNA, 15 nt, Human
ugccuggcggggugg

SEQ ID NO: 1922066 - RNA, 21 nt, Human
ugccugggaucccucauccuc

SEQ ID NO: 1922067 - RNA, 18 nt, Human
ugccugggcagaaggaag

SEQ ID NO: 1922068 - RNA, 19 nt, Human
ugccucgaacuggcugcaa

SEQ ID NO: 1922069 - RNA, 18 nt, Human
ugccucgaacuggcugca

SEQ ID NO: 1922070 - RNA, 20 nt, Human
ugccucgaacuggcugcaaa

SEQ ID NO: 1922071 - RNA, 14 nt, Human
ugccucucacagcu

SEQ ID NO: 1922072 - RNA, 17 nt, Human
ugccucucacagcugag

SEQ ID NO: 1922073 - RNA, 18 nt, Human
ugccccuggcagccccug

SEQ ID NO: 1922074 - RNA, 13 nt, Human
ugccccuggcugg

SEQ ID NO: 1922075 - RNA, 23 nt, Human
ugccucgaaacacagaaaccuuu

SEQ ID NO: 1922076 - RNA, 9 nt, Human
ugccucucu

SEQ ID NO: 1922077 - RNA, 18 nt, Human
ugccucucacagcugagu

SEQ ID NO: 1922078 - RNA, 21 nt, Human
ugccucucacagcugaguugu

SEQ ID NO: 1922079 - RNA, 19 nt, Human
ugcugaagcuuauuaaugc

SEQ ID NO: 1922080 - RNA, 18 nt, Human
ugcugaagcuuauuaaug

SEQ ID NO: 1922081 - RNA, 13 nt, Human
ugcugaagcuuau

SEQ ID NO: 1922082 - RNA, 23 nt, Human
ugcugaagcuuauuaaugcuaag

SEQ ID NO: 1922083 - RNA, 22 nt, Human
ugcugaagcuuauuaaugcuaa

SEQ ID NO: 1922084 - RNA, 21 nt, Human
ugcugaagcuuauuaaugcua

SEQ ID NO: 1922085 - RNA, 20 nt, Human
ugcugaagcuuauuaaugcu

SEQ ID NO: 1922086 - RNA, 12 nt, Human
ugcugaaggcuc

SEQ ID NO: 1922087 - RNA, 23 nt, Human
ugcugacagacacaggcccggcu

SEQ ID NO: 1922088 - RNA, 22 nt, Human
ugcugacagacacaggcccggc

SEQ ID NO: 1922089 - RNA, 13 nt, Human
ugcugaaggcucg

SEQ ID NO: 1922090 - RNA, 21 nt, Human
ugcugaaggcucgagcaugcc

SEQ ID NO: 1922091 - RNA, 18 nt, Human
ugcugauggugcaaugac

SEQ ID NO: 1922092 - RNA, 18 nt, Human
ugcugauuuggugaccaa

SEQ ID NO: 1922093 - RNA, 13 nt, Human
ugcugauggugca

SEQ ID NO: 1922094 - RNA, 14 nt, Human
ugcugacagcugcu

SEQ ID NO: 1922095 - RNA, 15 nt, Human
ugcugacagcugcuc

SEQ ID NO: 1922096 - RNA, 16 nt, Human
ugcugacagcugcucc

SEQ ID NO: 1922097 - RNA, 17 nt, Human
ugcugacagcugcuccu

SEQ ID NO: 1922098 - RNA, 18 nt, Human
ugcugacagcugcuccua

SEQ ID NO: 1922099 - RNA, 15 nt, Human
ugcugauggugcaau

SEQ ID NO: 1922100 - RNA, 17 nt, Human
ugcugauggugcaauga

SEQ ID NO: 1922101 - RNA, 23 nt, Human
ugcugcaguugccagucaccccg

SEQ ID NO: 1922102 - RNA, 14 nt, Human
ugcugcauacauuc

SEQ ID NO: 1922103 - RNA, 18 nt, Human
ugcugcaguugccaguca

SEQ ID NO: 1922104 - RNA, 15 nt, Human
ugcugcggagcaaga

SEQ ID NO: 1922105 - RNA, 16 nt, Human
ugcugcggagcaagag

SEQ ID NO: 1922106 - RNA, 20 nt, Human
ugcugcggagcaagaggagg

SEQ ID NO: 1922107 - RNA, 23 nt, Human
ugcugcgucauuacagggcacag

SEQ ID NO: 1922108 - RNA, 13 nt, Human
ugcugcuggcugg

SEQ ID NO: 1922109 - RNA, 13 nt, Human
ugcugcuggacag

SEQ ID NO: 1922110 - RNA, 23 nt, Human
ugcugcuggacaguaucacuguc

SEQ ID NO: 1922111 - RNA, 23 nt, Human
ugcuccuccuuggugccuggccu

SEQ ID NO: 1922112 - RNA, 19 nt, Human
ugcucagugucuggcugca

SEQ ID NO: 1922113 - RNA, 14 nt, Human
ugcuccucucccca

SEQ ID NO: 1922114 - RNA, 21 nt, Human
ugcucagggaaaagcagcucu

SEQ ID NO: 1922115 - RNA, 22 nt, Human
ugcucagggaaaagcagcucuc

SEQ ID NO: 1922116 - RNA, 17 nt, Human
ugcucagcucugggcca

SEQ ID NO: 1922117 - RNA, 16 nt, Human
ugcucacauaucuguc

SEQ ID NO: 1922118 - RNA, 15 nt, Human
ugcucacauaucugu

SEQ ID NO: 1922119 - RNA, 17 nt, Human
ugcucagagcaguguuu

SEQ ID NO: 1922120 - RNA, 16 nt, Human
ugcucagaccagcucu

SEQ ID NO: 1922121 - RNA, 17 nt, Human
ugcucagaccagcucuu

SEQ ID NO: 1922122 - RNA, 18 nt, Human
ugcuccucuccccagcaa

SEQ ID NO: 1922123 - RNA, 17 nt, Human
ugcuccuuguuccuaga

SEQ ID NO: 1922124 - RNA, 17 nt, Human
ugcuccucuccccagca

SEQ ID NO: 1922125 - RNA, 18 nt, Human
ugcuccuuucuuguuuua

SEQ ID NO: 1922126 - RNA, 14 nt, Human
ugcucgccccagca

SEQ ID NO: 1922127 - RNA, 16 nt, Human
ugcucgccccagcagg

SEQ ID NO: 1922128 - RNA, 23 nt, Human
ugcuccuuguuccuagaguagag

SEQ ID NO: 1922129 - RNA, 13 nt, Human
ugcucgcccugcg

SEQ ID NO: 1922130 - RNA, 14 nt, Human
ugcucgcccugcgg

SEQ ID NO: 1922131 - RNA, 17 nt, Human
ugcucuccaagcccagu

SEQ ID NO: 1922132 - RNA, 17 nt, Human
ugcucuccuuccuggag

SEQ ID NO: 1922133 - RNA, 12 nt, Human
ugcucuccuucc

SEQ ID NO: 1922134 - RNA, 23 nt, Human
ugcucuccuuccuggagcccaga

SEQ ID NO: 1922135 - RNA, 18 nt, Human
ugcucuccuuccuggagc

SEQ ID NO: 1922136 - RNA, 21 nt, Human
ugucuguacacguguccugua

SEQ ID NO: 1922137 - RNA, 20 nt, Human
ugucuguacacguguccugu

SEQ ID NO: 1922138 - RNA, 19 nt, Human
ugucuguacacguguccug

SEQ ID NO: 1922139 - RNA, 15 nt, Human
ugucuguacacgugu

SEQ ID NO: 1922140 - RNA, 13 nt, Human
ugucuguacacgu

SEQ ID NO: 1922141 - RNA, 13 nt, Human
ugucuuuccuaga

SEQ ID NO: 1922142 - RNA, 14 nt, Human
ugucuuuggacccu

SEQ ID NO: 1922143 - RNA, 16 nt, Human
ugucuuuggacccuga

SEQ ID NO: 1922144 - RNA, 21 nt, Human
ugucuuuucuugcaugaggcu

SEQ ID NO: 1922145 - RNA, 13 nt, Human
ugugaaggacccu

SEQ ID NO: 1922146 - RNA, 14 nt, Human
ugugaaggacccuu

SEQ ID NO: 1922147 - RNA, 23 nt, Human
ugugaaaagaaaaaugagccugg

SEQ ID NO: 1922148 - RNA, 23 nt, Human
ugucuuuucuugcaugaggcuag

SEQ ID NO: 1922149 - RNA, 18 nt, Human
uguccucagguggccaug

SEQ ID NO: 1922150 - RNA, 19 nt, Human
uguccucagguggccaugc

SEQ ID NO: 1922151 - RNA, 17 nt, Human
uguccucagccuugcca

SEQ ID NO: 1922152 - RNA, 20 nt, Human
uguccucagccuugccagag

SEQ ID NO: 1922153 - RNA, 21 nt, Human
uguccucagccuugccagaga

SEQ ID NO: 1922154 - RNA, 22 nt, Human
uguccucagccuugccagagau

SEQ ID NO: 1922155 - RNA, 14 nt, Human
uguccucagguggc

SEQ ID NO: 1922156 - RNA, 15 nt, Human
ugugaucagaccaua

SEQ ID NO: 1922157 - RNA, 13 nt, Human
ugugcacaucucu

SEQ ID NO: 1922158 - RNA, 14 nt, Human
ugugcacaucucug

SEQ ID NO: 1922159 - RNA, 15 nt, Human
ugugcacaucucugc

SEQ ID NO: 1922160 - RNA, 19 nt, Human
ugugcacaucucugcuuga

SEQ ID NO: 1922161 - RNA, 16 nt, Human
ugugauauaagugugu

SEQ ID NO: 1922162 - RNA, 21 nt, Human
ugugagucaccaagcccaguu

SEQ ID NO: 1922163 - RNA, 19 nt, Human
ugugagucaccaagcccag

SEQ ID NO: 1922164 - RNA, 17 nt, Human
ugugagucaccaagccc

SEQ ID NO: 1922165 - RNA, 15 nt, Human
ugugagucaccaagc

SEQ ID NO: 1922166 - RNA, 12 nt, Human
ugugaggaagcc

SEQ ID NO: 1922167 - RNA, 20 nt, Human
ugugaggaagccgcuggggc

SEQ ID NO: 1922168 - RNA, 13 nt, Human
ugugaggaagccg

SEQ ID NO: 1922169 - RNA, 18 nt, Human
ugugaggaagccgcuggg

SEQ ID NO: 1922170 - RNA, 18 nt, Human
ugugaauugagcugcaga

SEQ ID NO: 1922171 - RNA, 23 nt, Human
uguguagccugugcauguauguc

SEQ ID NO: 1922172 - RNA, 16 nt, Human
uguguagccugugcau

SEQ ID NO: 1922173 - RNA, 15 nt, Human
uguguagccugugca

SEQ ID NO: 1922174 - RNA, 12 nt, Human
uguguagggcgg

SEQ ID NO: 1922175 - RNA, 16 nt, Human
uguguagggcgggagg

SEQ ID NO: 1922176 - RNA, 23 nt, Human
uguguaauuuaaaauugugaugu

SEQ ID NO: 1922177 - RNA, 22 nt, Human
uguguaauuuaaaauugugaug

SEQ ID NO: 1922178 - RNA, 19 nt, Human
uguguaauuuaaaauugug

SEQ ID NO: 1922179 - RNA, 22 nt, Human
ugugggcuaguugggcuuccuc

SEQ ID NO: 1922180 - RNA, 18 nt, Human
uguguaauuuaaaauugu

SEQ ID NO: 1922181 - RNA, 11 nt, Human
uguguaauuua

SEQ ID NO: 1922182 - RNA, 23 nt, Human
uguggcgcagcauauucaggaag

SEQ ID NO: 1922183 - RNA, 11 nt, Human
uguggccugca

SEQ ID NO: 1922184 - RNA, 17 nt, Human
uguggccugcacaguga

SEQ ID NO: 1922185 - RNA, 22 nt, Human
uguggcuauuaaaacucuuuua

SEQ ID NO: 1922186 - RNA, 15 nt, Human
ugugggaguguguaa

SEQ ID NO: 1922187 - RNA, 14 nt, Human
ugugggagugugua

SEQ ID NO: 1922188 - RNA, 19 nt, Human
uguggacacagcucuucuc

SEQ ID NO: 1922189 - RNA, 18 nt, Human
uguggacacagcucuucu

SEQ ID NO: 1922190 - RNA, 15 nt, Human
uguggaagugugggu

SEQ ID NO: 1922191 - RNA, 19 nt, Human
ugugcgccuacaggaguga

SEQ ID NO: 1922192 - RNA, 14 nt, Human
ugugcgccuacagg

SEQ ID NO: 1922193 - RNA, 16 nt, Human
ugugccuuuugccauc

SEQ ID NO: 1922194 - RNA, 17 nt, Human
ugugcucaggagcccug

SEQ ID NO: 1922195 - RNA, 15 nt, Human
ugugcucaggagccc

SEQ ID NO: 1922196 - RNA, 16 nt, Human
ugugcucaggagcccu

SEQ ID NO: 1922197 - RNA, 13 nt, Human
ugugcuuuaugcu

SEQ ID NO: 1922198 - RNA, 17 nt, Human
ugugcuuuaugcugaaa

SEQ ID NO: 1922199 - RNA, 18 nt, Human
ugugcuuuaugcugaaac

SEQ ID NO: 1922200 - RNA, 20 nt, Human
ugugcuuuaugcugaaacag

SEQ ID NO: 1922201 - RNA, 19 nt, Human
ugugcuuuaugcugaaaca

SEQ ID NO: 1922202 - RNA, 14 nt, Human
ugugcacguacaca

SEQ ID NO: 1922203 - RNA, 20 nt, Human
ugugcacaucucugcuugag

SEQ ID NO: 1922204 - RNA, 13 nt, Human
ugugcacaucuuc

SEQ ID NO: 1922205 - RNA, 12 nt, Human
ugugcacuaagg

SEQ ID NO: 1922206 - RNA, 13 nt, Human
ugugcacugccca

SEQ ID NO: 1922207 - RNA, 16 nt, Human
ugugcacuaaggggcc

SEQ ID NO: 1922208 - RNA, 17 nt, Human
ugugcacuaaggggccc

SEQ ID NO: 1922209 - RNA, 23 nt, Human
ugugcacuaaggggcccggccag

SEQ ID NO: 1922210 - RNA, 21 nt, Human
ugugcacugcccauggacagg

SEQ ID NO: 1922211 - RNA, 19 nt, Human
ugugcauuaucuagauacu

SEQ ID NO: 1922212 - RNA, 16 nt, Human
ugugcauuaucuagau

SEQ ID NO: 1922213 - RNA, 14 nt, Human
ugugcauuaucuag

SEQ ID NO: 1922214 - RNA, 23 nt, Human
ugugcauuuggugguuucagaaa

SEQ ID NO: 1922215 - RNA, 17 nt, Human
ugugccuuggugugcug

SEQ ID NO: 1922216 - RNA, 16 nt, Human
ugugccuucuuuugau

SEQ ID NO: 1922217 - RNA, 23 nt, Human
ugugcauuaucuagauacuguau

SEQ ID NO: 1922218 - RNA, 21 nt, Human
ugugcauuaucuagauacugu

SEQ ID NO: 1922219 - RNA, 20 nt, Human
ugugcauuaucuagauacug

SEQ ID NO: 1922220 - RNA, 15 nt, Human
uguagccugugcaug

SEQ ID NO: 1922221 - RNA, 14 nt, Human
uguagccugugcau

SEQ ID NO: 1922222 - RNA, 13 nt, Human
uguagccugugca

SEQ ID NO: 1922223 - RNA, 20 nt, Human
uguagccugugcauguaugu

SEQ ID NO: 1922224 - RNA, 16 nt, Human
uguagccugugcaugu

SEQ ID NO: 1922225 - RNA, 22 nt, Human
uguagccugugcauguaugucu

SEQ ID NO: 1922226 - RNA, 18 nt, Human
uguagccccucuccugga

SEQ ID NO: 1922227 - RNA, 19 nt, Human
uguagcccccuggccucug

SEQ ID NO: 1922228 - RNA, 20 nt, Human
uguagcccccuggccucugu

SEQ ID NO: 1922229 - RNA, 16 nt, Human
uguagcccccuggccu

SEQ ID NO: 1922230 - RNA, 17 nt, Human
uguagcccccuggccuc

SEQ ID NO: 1922231 - RNA, 18 nt, Human
uguagcccccuggccucu

SEQ ID NO: 1922232 - RNA, 18 nt, Human
uguagccuuuugacuuuc

SEQ ID NO: 1922233 - RNA, 15 nt, Human
uguacgucugacagg

SEQ ID NO: 1922234 - RNA, 14 nt, Human
uguaccucugccuc

SEQ ID NO: 1922235 - RNA, 19 nt, Human
uguacugcauaugaaagga

SEQ ID NO: 1922236 - RNA, 15 nt, Human
uguacugggccaugu

SEQ ID NO: 1922237 - RNA, 18 nt, Human
uguagcauccuggaauau

SEQ ID NO: 1922238 - RNA, 17 nt, Human
uguagcauccuggaaua

SEQ ID NO: 1922239 - RNA, 16 nt, Human
uguagcauccuggaau

SEQ ID NO: 1922240 - RNA, 14 nt, Human
uguagcauccugga

SEQ ID NO: 1922241 - RNA, 14 nt, Human
uguaaucaauguuu

SEQ ID NO: 1922242 - RNA, 20 nt, Human
uguaaucaauguuucuucua

SEQ ID NO: 1922243 - RNA, 14 nt, Human
uguaaucacagcua

SEQ ID NO: 1922244 - RNA, 22 nt, Human
uguaaucccagcuacuugggag

SEQ ID NO: 1922245 - RNA, 19 nt, Human
uguaaucccagcuacucgg

SEQ ID NO: 1922246 - RNA, 20 nt, Human
uguaaucccagcuacucggg

SEQ ID NO: 1922247 - RNA, 17 nt, Human
uggucacaggaaguaga

SEQ ID NO: 1922248 - RNA, 14 nt, Human
uggucacacacuga

SEQ ID NO: 1922249 - RNA, 15 nt, Human
uggucacacacugau

SEQ ID NO: 1922250 - RNA, 16 nt, Human
uggucacacacugaug

SEQ ID NO: 1922251 - RNA, 17 nt, Human
uguaauuaaguacuaug

SEQ ID NO: 1922252 - RNA, 16 nt, Human
uguacagagcccacgc

SEQ ID NO: 1922253 - RNA, 17 nt, Human
uguacagagcccacgcc

SEQ ID NO: 1922254 - RNA, 13 nt, Human
uguacagagccca

SEQ ID NO: 1922255 - RNA, 18 nt, Human
uguacagagcccacgccc

SEQ ID NO: 1922256 - RNA, 21 nt, Human
uguacagucuuguauuaaguu

SEQ ID NO: 1922257 - RNA, 16 nt, Human
uguaccgcaaugugac

SEQ ID NO: 1922258 - RNA, 20 nt, Human
uguaguugcguggacucugc

SEQ ID NO: 1922259 - RNA, 15 nt, Human
uguaguugcguggac

SEQ ID NO: 1922260 - RNA, 21 nt, Human
uguaguugcguggacucugca

SEQ ID NO: 1922261 - RNA, 22 nt, Human
uguauaaaagggacugagaaau

SEQ ID NO: 1922262 - RNA, 22 nt, Human
uguauucucuccuguaccucuu

SEQ ID NO: 1922263 - RNA, 17 nt, Human
ugucacacacuuuggcu

SEQ ID NO: 1922264 - RNA, 22 nt, Human
uguauuuucuucaccucugcua

SEQ ID NO: 1922265 - RNA, 12 nt, Human
ugucacaggcag

SEQ ID NO: 1922266 - RNA, 13 nt, Human
ugucacaggcagg

SEQ ID NO: 1922267 - RNA, 22 nt, Human
ugucacccuuaggccagcacca

SEQ ID NO: 1922268 - RNA, 16 nt, Human
uguauuuaaaaaaauc

SEQ ID NO: 1922269 - RNA, 19 nt, Human
ugucauguuguaaacauuu

SEQ ID NO: 1922270 - RNA, 13 nt, Human
ugucaccugaaga

SEQ ID NO: 1922271 - RNA, 14 nt, Human
ugucaccuucaccu

SEQ ID NO: 1922272 - RNA, 13 nt, Human
ugucaccuucacc

SEQ ID NO: 1922273 - RNA, 13 nt, Human
ugucaucugugca

SEQ ID NO: 1922274 - RNA, 16 nt, Human
ugucauuugagcaggg

SEQ ID NO: 1922275 - RNA, 19 nt, Human
ugucauuugagcagggcuc

SEQ ID NO: 1922276 - RNA, 18 nt, Human
uguccccaccgcagacag

SEQ ID NO: 1922277 - RNA, 19 nt, Human
uguccccaccgcagacagg

SEQ ID NO: 1922278 - RNA, 22 nt, Human
uguccccaccgcagacaggacc

SEQ ID NO: 1922279 - RNA, 20 nt, Human
uguccuacccacccuccuuu

SEQ ID NO: 1922280 - RNA, 17 nt, Human
uguccccgacccuugcc

SEQ ID NO: 1922281 - RNA, 16 nt, Human
uguccccgacccuugc

SEQ ID NO: 1922282 - RNA, 17 nt, Human
uguccuacucuguguca

SEQ ID NO: 1922283 - RNA, 12 nt, Human
uguccuacucug

SEQ ID NO: 1922284 - RNA, 12 nt, Human
uguccucagccu

SEQ ID NO: 1922285 - RNA, 13 nt, Human
uguccucagccuu

SEQ ID NO: 1922286 - RNA, 16 nt, Human
uguccucagccuugcc

SEQ ID NO: 1922287 - RNA, 14 nt, Human
uuaagauaauuaua

SEQ ID NO: 1922288 - RNA, 16 nt, Human
uuaagauaauuauaau

SEQ ID NO: 1922289 - RNA, 12 nt, Human
uuaagaguaaaa

SEQ ID NO: 1922290 - RNA, 14 nt, Human
uuaacuuuuauaaa

SEQ ID NO: 1922291 - RNA, 16 nt, Human
uuaacuugucaaaaaa

SEQ ID NO: 1922292 - RNA, 13 nt, Human
uuaacuuuuauaa

SEQ ID NO: 1922293 - RNA, 12 nt, Human
uuaacuuuuaua

SEQ ID NO: 1922294 - RNA, 22 nt, Human
uuaacuugucaaaaaacaaaaa

SEQ ID NO: 1922295 - RNA, 15 nt, Human
uuaaauguagaaagu

SEQ ID NO: 1922296 - RNA, 20 nt, Human
uuaauagcgucauaacuaga

SEQ ID NO: 1922297 - RNA, 15 nt, Human
uuaauacuaccuuga

SEQ ID NO: 1922298 - RNA, 17 nt, Human
uuaauacuaccuugaaa

SEQ ID NO: 1922299 - RNA, 21 nt, Human
uuaauacaaugaugcuauuug

SEQ ID NO: 1922300 - RNA, 15 nt, Human
uuacacucuuuguaa

SEQ ID NO: 1922301 - RNA, 14 nt, Human
uuacacucuuugua

SEQ ID NO: 1922302 - RNA, 23 nt, Human
uuacacauuuuucagauauaaaa

SEQ ID NO: 1922303 - RNA, 17 nt, Human
uuacacauuuuucagau

SEQ ID NO: 1922304 - RNA, 13 nt, Human
uuacacuuuaugc

SEQ ID NO: 1922305 - RNA, 20 nt, Human
uuacacuuuaugcacaaaau

SEQ ID NO: 1922306 - RNA, 19 nt, Human
uuacauuauuaucaacaau

SEQ ID NO: 1922307 - RNA, 13 nt, Human
uuacauuguucaa

SEQ ID NO: 1922308 - RNA, 17 nt, Human
uuacauuguuugucugu

SEQ ID NO: 1922309 - RNA, 17 nt, Human
uuacauuuuuaagugcu

SEQ ID NO: 1922310 - RNA, 12 nt, Human
uuacauuuuuaa

SEQ ID NO: 1922311 - RNA, 16 nt, Human
uuacauuguucaauua

SEQ ID NO: 1922312 - RNA, 22 nt, Human
uuaauuaaaacacaacaucuuu

SEQ ID NO: 1922313 - RNA, 15 nt, Human
uuaauuaaauagcuu

SEQ ID NO: 1922314 - RNA, 19 nt, Human
uuaauuaaauagcuuuugu

SEQ ID NO: 1922315 - RNA, 20 nt, Human
uuaauuaaauagcuuuugug

SEQ ID NO: 1922316 - RNA, 15 nt, Human
uuacacauuuuucag

SEQ ID NO: 1922317 - RNA, 17 nt, Human
uuacacagugugaauaa

SEQ ID NO: 1922318 - RNA, 22 nt, Human
uuacaacugccucgaaacacag

SEQ ID NO: 1922319 - RNA, 23 nt, Human
uuacaacugccucgaaacacaga

SEQ ID NO: 1922320 - RNA, 19 nt, Human
uuacaacccgguucacucu

SEQ ID NO: 1922321 - RNA, 15 nt, Human
uguuuccuggcacug

SEQ ID NO: 1922322 - RNA, 16 nt, Human
uguuuccugcaggcca

SEQ ID NO: 1922323 - RNA, 21 nt, Human
uguuuccaguacaccuuucag

SEQ ID NO: 1922324 - RNA, 22 nt, Human
uguuuagaacacugguuuaaag

SEQ ID NO: 1922325 - RNA, 16 nt, Human
uguuuuaagaggcagg

SEQ ID NO: 1922326 - RNA, 14 nt, Human
uguuuguguauuua

SEQ ID NO: 1922327 - RNA, 11 nt, Human
uguuugugugu

SEQ ID NO: 1922328 - RNA, 12 nt, Human
uguuuguguauu

SEQ ID NO: 1922329 - RNA, 17 nt, Human
uguuuuaagaggcaggg

SEQ ID NO: 1922330 - RNA, 23 nt, Human
uguuuuaaggaugcuuguacaua

SEQ ID NO: 1922331 - RNA, 22 nt, Human
uguuuuaaggaugcuuguacau

SEQ ID NO: 1922332 - RNA, 12 nt, Human
uguuuuuaacuc

SEQ ID NO: 1922333 - RNA, 14 nt, Human
uguuuuuaagcugu

SEQ ID NO: 1922334 - RNA, 12 nt, Human
uguuuuuaaaag

SEQ ID NO: 1922335 - RNA, 22 nt, Human
uuaaaaaaaaaccugagcccca

SEQ ID NO: 1922336 - RNA, 13 nt, Human
uuaaaaaaaaaga

SEQ ID NO: 1922337 - RNA, 15 nt, Human
uguuuuuaagcuguu

SEQ ID NO: 1922338 - RNA, 17 nt, Human
uguuuuuaagcuguuuc

SEQ ID NO: 1922339 - RNA, 20 nt, Human
uguuuuuaagcuguuuccau

SEQ ID NO: 1922340 - RNA, 22 nt, Human
uguuuuuaagcuguuuccauag

SEQ ID NO: 1922341 - RNA, 14 nt, Human
uuaaaacccaagug

SEQ ID NO: 1922342 - RNA, 18 nt, Human
uuaaaaaaaaagaucugu

SEQ ID NO: 1922343 - RNA, 20 nt, Human
uuaaacuaaggcccucuuga

SEQ ID NO: 1922344 - RNA, 11 nt, Human
uuaaaugcacc

SEQ ID NO: 1922345 - RNA, 14 nt, Human
uuaaaugcccagcc

SEQ ID NO: 1922346 - RNA, 15 nt, Human
uuaaaugcccagccc

SEQ ID NO: 1922347 - RNA, 16 nt, Human
uuaaaugcccagcccc

SEQ ID NO: 1922348 - RNA, 18 nt, Human
uuaaagaaaaguuuugua

SEQ ID NO: 1922349 - RNA, 22 nt, Human
uuaaagccacaaccacauacaa

SEQ ID NO: 1922350 - RNA, 17 nt, Human
uguugacaguucauaug

SEQ ID NO: 1922351 - RNA, 16 nt, Human
uguugacacaggucuu

SEQ ID NO: 1922352 - RNA, 13 nt, Human
uguugaauacuuu

SEQ ID NO: 1922353 - RNA, 18 nt, Human
uguugaauacuuuuuaca

SEQ ID NO: 1922354 - RNA, 22 nt, Human
uguugagaaucccaaauuugau

SEQ ID NO: 1922355 - RNA, 23 nt, Human
uguugagaaucccaaauuugauu

SEQ ID NO: 1922356 - RNA, 14 nt, Human
uguugacaugugcu

SEQ ID NO: 1922357 - RNA, 21 nt, Human
uguucuggcucuuccaggcug

SEQ ID NO: 1922358 - RNA, 17 nt, Human
uguucuggcucuuccag

SEQ ID NO: 1922359 - RNA, 20 nt, Human
uguucuggcucuuccaggcu

SEQ ID NO: 1922360 - RNA, 23 nt, Human
uguucuuucuggcuaugcauuug

SEQ ID NO: 1922361 - RNA, 13 nt, Human
uguucuuugggga

SEQ ID NO: 1922362 - RNA, 16 nt, Human
uguucuuuugucccag

SEQ ID NO: 1922363 - RNA, 14 nt, Human
uguucuuuuuauug

SEQ ID NO: 1922364 - RNA, 17 nt, Human
uguucuuuuuauugaau

SEQ ID NO: 1922365 - RNA, 15 nt, Human
uguucucucuucucc

SEQ ID NO: 1922366 - RNA, 16 nt, Human
uguucucucuucucca

SEQ ID NO: 1922367 - RNA, 19 nt, Human
uguucaucauccuaagcua

SEQ ID NO: 1922368 - RNA, 14 nt, Human
uguucaugaaagau

SEQ ID NO: 1922369 - RNA, 13 nt, Human
uguucaugaaaga

SEQ ID NO: 1922370 - RNA, 14 nt, Human
uguucugcuguucu

SEQ ID NO: 1922371 - RNA, 18 nt, Human
uguucugcuguucucuag

SEQ ID NO: 1922372 - RNA, 12 nt, Human
uguucuggcucu

SEQ ID NO: 1922373 - RNA, 13 nt, Human
uguucuggcucuu

SEQ ID NO: 1922374 - RNA, 16 nt, Human
uguucuggcucuucca

SEQ ID NO: 1922375 - RNA, 13 nt, Human
uguucucugcccu

SEQ ID NO: 1922376 - RNA, 14 nt, Human
uguucucugcccuc

SEQ ID NO: 1922377 - RNA, 15 nt, Human
uguucucugcccucc

SEQ ID NO: 1922378 - RNA, 16 nt, Human
uguucucugcccucca

SEQ ID NO: 1922379 - RNA, 16 nt, Human
uguuggccaggcuggu

SEQ ID NO: 1922380 - RNA, 15 nt, Human
uguuggccaggcugg

SEQ ID NO: 1922381 - RNA, 15 nt, Human
uguuggccaaagcca

SEQ ID NO: 1922382 - RNA, 19 nt, Human
uguuggcugggggccucag

SEQ ID NO: 1922383 - RNA, 17 nt, Human
uguuggcugggggccuc

SEQ ID NO: 1922384 - RNA, 12 nt, Human
uguuuaagagac

SEQ ID NO: 1922385 - RNA, 12 nt, Human
uguuuacagugu

SEQ ID NO: 1922386 - RNA, 16 nt, Human
uguuuaacuucuuaua

SEQ ID NO: 1922387 - RNA, 16 nt, Human
uguuacuaucugcuuu

SEQ ID NO: 1922388 - RNA, 15 nt, Human
uguuacuaucugcuu

SEQ ID NO: 1922389 - RNA, 14 nt, Human
uguuacuaaguuuu

SEQ ID NO: 1922390 - RNA, 21 nt, Human
uguuagcccaagguuaaaaag

SEQ ID NO: 1922391 - RNA, 12 nt, Human
uguuacuguaau

SEQ ID NO: 1922392 - RNA, 14 nt, Human
uguuagcagacagg

SEQ ID NO: 1922393 - RNA, 14 nt, Human
uguuacuguaauuc

SEQ ID NO: 1922394 - RNA, 15 nt, Human
uguuagucauuugcu

SEQ ID NO: 1922395 - RNA, 15 nt, Human
uguucagaagaaauu

SEQ ID NO: 1922396 - RNA, 22 nt, Human
uguucagaagaaauucugucau

SEQ ID NO: 1922397 - RNA, 20 nt, Human
uguuaguaugaggcauuugu

SEQ ID NO: 1922398 - RNA, 19 nt, Human
uguuaguaugaggcauuug

SEQ ID NO: 1922399 - RNA, 17 nt, Human
uguuaguaugaggcauu

SEQ ID NO: 1922400 - RNA, 13 nt, Human
uguuaguaacaug

SEQ ID NO: 1922401 - RNA, 22 nt, Human
uguucagcuccagcucaccagc

SEQ ID NO: 1922402 - RNA, 21 nt, Human
uguucagcuccagcucaccag

SEQ ID NO: 1922403 - RNA, 20 nt, Human
uguucagcuccagcucacca

SEQ ID NO: 1922404 - RNA, 17 nt, Human
uguucauaaauaaaguu

SEQ ID NO: 1922405 - RNA, 19 nt, Human
ugugugcacguacacacac

SEQ ID NO: 1922406 - RNA, 15 nt, Human
ugugugauugacagc

SEQ ID NO: 1922407 - RNA, 18 nt, Human
ugugugauugacagcuuu

SEQ ID NO: 1922408 - RNA, 19 nt, Human
ugugugauugacagcuuug

SEQ ID NO: 1922409 - RNA, 21 nt, Human
ugugugauugacagcuuugcu

SEQ ID NO: 1922410 - RNA, 13 nt, Human
ugugugcucucca

SEQ ID NO: 1922411 - RNA, 22 nt, Human
uguguggagcucgcuaaaguca

SEQ ID NO: 1922412 - RNA, 11 nt, Human
uguguggccug

SEQ ID NO: 1922413 - RNA, 15 nt, Human
ugugugggagugugu

SEQ ID NO: 1922414 - RNA, 14 nt, Human
ugugugggagugug

SEQ ID NO: 1922415 - RNA, 13 nt, Human
uguguaugugggg

SEQ ID NO: 1922416 - RNA, 12 nt, Human
uguguauguggg

SEQ ID NO: 1922417 - RNA, 11 nt, Human
uguguaugugg

SEQ ID NO: 1922418 - RNA, 16 nt, Human
ugugugugaaugaaca

SEQ ID NO: 1922419 - RNA, 20 nt, Human
ugugugugaaugaacacucu

SEQ ID NO: 1922420 - RNA, 22 nt, Human
ugugugucuaggcaggaccugu

SEQ ID NO: 1922421 - RNA, 16 nt, Human
ugugugggagugugua

SEQ ID NO: 1922422 - RNA, 18 nt, Human
ugugugugcagacuucag

SEQ ID NO: 1922423 - RNA, 15 nt, Human
uguguuucaaguuca

SEQ ID NO: 1922424 - RNA, 16 nt, Human
uguguuuauugucaaa

SEQ ID NO: 1922425 - RNA, 15 nt, Human
uguguuuuuaauaaa

SEQ ID NO: 1922426 - RNA, 15 nt, Human
uguguuuuucauaaa

SEQ ID NO: 1922427 - RNA, 20 nt, Human
uguguuuuuaauaaagacag

SEQ ID NO: 1922428 - RNA, 14 nt, Human
uguguuuuuaaaag

SEQ ID NO: 1922429 - RNA, 18 nt, Human
uguguuuuucauaaagca

SEQ ID NO: 1922430 - RNA, 13 nt, Human
uguguuugaagca

SEQ ID NO: 1922431 - RNA, 17 nt, Human
aaaacacauuuuucuua

SEQ ID NO: 1922432 - RNA, 19 nt, Human
aaaacacuguucucugccc

SEQ ID NO: 1922433 - RNA, 13 nt, Human
aaaacagaagccu

SEQ ID NO: 1922434 - RNA, 11 nt, Human
aaaagaaaaag

SEQ ID NO: 1922435 - RNA, 17 nt, Human
aaaacuuuuuauauuuu

SEQ ID NO: 1922436 - RNA, 20 nt, Human
aaaacuuuuuauauuuuaua

SEQ ID NO: 1922437 - RNA, 17 nt, Human
aaaacagguagaauuau

SEQ ID NO: 1922438 - RNA, 12 nt, Human
aaaacagguaga

SEQ ID NO: 1922439 - RNA, 13 nt, Human
aaaacaggcagcu

SEQ ID NO: 1922440 - RNA, 20 nt, Human
aaaagacaaggaaaaaauaa

SEQ ID NO: 1922441 - RNA, 13 nt, Human
aaaagacagggcu

SEQ ID NO: 1922442 - RNA, 17 nt, Human
aaaagaaagaaaaucag

SEQ ID NO: 1922443 - RNA, 12 nt, Human
aaaagaaaugaa

SEQ ID NO: 1922444 - RNA, 17 nt, Human
aaaagaacaauauugac

SEQ ID NO: 1922445 - RNA, 17 nt, Human
aaaagauaaauauuaua

SEQ ID NO: 1922446 - RNA, 23 nt, Human
aaaagaucuguuuugaaggcaaa

SEQ ID NO: 1922447 - RNA, 19 nt, Human
aaaagagaugaugaaaaua

SEQ ID NO: 1922448 - RNA, 16 nt, Human
aaaagagaugaugaaa

SEQ ID NO: 1922449 - RNA, 12 nt, Human
aaaagagggggg

SEQ ID NO: 1922450 - RNA, 14 nt, Human
aaaagauaaauauu

SEQ ID NO: 1922451 - RNA, 16 nt, Human
aaaauaaaacuuuuua

SEQ ID NO: 1922452 - RNA, 13 nt, Human
aaaaucagccugc

SEQ ID NO: 1922453 - RNA, 17 nt, Human
aaaaucagccugcucca

SEQ ID NO: 1922454 - RNA, 21 nt, Human
aaaaucagccugcuccagcug

SEQ ID NO: 1922455 - RNA, 14 nt, Human
aaaauaaaacuuuu

SEQ ID NO: 1922456 - RNA, 18 nt, Human
aaaaguugaauuuuacau

SEQ ID NO: 1922457 - RNA, 22 nt, Human
aaaagucauaaaauguaucuuc

SEQ ID NO: 1922458 - RNA, 22 nt, Human
aaaccgaacugauguaaguaaa

SEQ ID NO: 1922459 - RNA, 12 nt, Human
aaacccagcucu

SEQ ID NO: 1922460 - RNA, 16 nt, Human
aaacccagcucugguc

SEQ ID NO: 1922461 - RNA, 15 nt, Human
aaaccgccaaggcug

SEQ ID NO: 1922462 - RNA, 16 nt, Human
aaaccgccaaggcugg

SEQ ID NO: 1922463 - RNA, 19 nt, Human
aaacucuguugcaagugca

SEQ ID NO: 1922464 - RNA, 12 nt, Human
aaacucuuaaaa

SEQ ID NO: 1922465 - RNA, 23 nt, Human
aaacucuuaaaacccaagugccu

SEQ ID NO: 1922466 - RNA, 22 nt, Human
aaacugauuuuuuuuuccuuca

SEQ ID NO: 1922467 - RNA, 23 nt, Human
aaacugauuuuuuuuuccuucag

SEQ ID NO: 1922468 - RNA, 20 nt, Human
aaacucuguugcaagugcaa

SEQ ID NO: 1922469 - RNA, 15 nt, Human
aaacccaauccaaau

SEQ ID NO: 1922470 - RNA, 12 nt, Human
aaaccagggagc

SEQ ID NO: 1922471 - RNA, 18 nt, Human
aaaaucucaaauuucuaa

SEQ ID NO: 1922472 - RNA, 16 nt, Human
aaaaucucaaauuucu

SEQ ID NO: 1922473 - RNA, 15 nt, Human
aaaaucucaaauuuc

SEQ ID NO: 1922474 - RNA, 15 nt, Human
aaaaucuauauuuug

SEQ ID NO: 1922475 - RNA, 15 nt, Human
aaagcccaaaguggu

SEQ ID NO: 1922476 - RNA, 16 nt, Human
aaagccauuuuaggcu

SEQ ID NO: 1922477 - RNA, 18 nt, Human
aaagaucuguccucagcc

SEQ ID NO: 1922478 - RNA, 19 nt, Human
aaagaucuguccucagccu

SEQ ID NO: 1922479 - RNA, 20 nt, Human
aaagaucuguccucagccuu

SEQ ID NO: 1922480 - RNA, 16 nt, Human
aaagaucuguuuugaa

SEQ ID NO: 1922481 - RNA, 21 nt, Human
aaagaucuguccucagccuug

SEQ ID NO: 1922482 - RNA, 13 nt, Human
aaagaucuguuuu

SEQ ID NO: 1922483 - RNA, 20 nt, Human
aaauguuauuuuuuaauuau

SEQ ID NO: 1922484 - RNA, 21 nt, Human
aaauguuauuuuuuaauuauu

SEQ ID NO: 1922485 - RNA, 13 nt, Human
aaauguucaucaa

SEQ ID NO: 1922486 - RNA, 17 nt, Human
aaauguucaucaaugaa

SEQ ID NO: 1922487 - RNA, 19 nt, Human
aaauguugagaaucccaaa

SEQ ID NO: 1922488 - RNA, 10 nt, Human
aaaugcugcu

SEQ ID NO: 1922489 - RNA, 23 nt, Human
aaaugcugcuuuuucucaaaaug

SEQ ID NO: 1922490 - RNA, 11 nt, Human
aaaucuuuuac

SEQ ID NO: 1922491 - RNA, 14 nt, Human
aaaugaaaaaauau

SEQ ID NO: 1922492 - RNA, 22 nt, Human
aaaugcugguuuuucaguuuuc

SEQ ID NO: 1922493 - RNA, 19 nt, Human
aaaugcuguaacuuucuga

SEQ ID NO: 1922494 - RNA, 14 nt, Human
aaaugcuuuagaaa

SEQ ID NO: 1922495 - RNA, 18 nt, Human
aaaugcuuuuuauuucug

SEQ ID NO: 1922496 - RNA, 19 nt, Human
aaaucuccaaaauaaaacu

SEQ ID NO: 1922497 - RNA, 13 nt, Human
aaaucuuuuugcu

SEQ ID NO: 1922498 - RNA, 14 nt, Human
aaaucuuuuugcuu

SEQ ID NO: 1922499 - RNA, 12 nt, Human
aaauauuuuugg

SEQ ID NO: 1922500 - RNA, 19 nt, Human
aaauauuuauaaaacuucu

SEQ ID NO: 1922501 - RNA, 12 nt, Human
aaauauuuaucu

SEQ ID NO: 1922502 - RNA, 22 nt, Human
aaauauuuugaucuucaacaaa

SEQ ID NO: 1922503 - RNA, 23 nt, Human
aaauauuuugaucuucaacaaau

SEQ ID NO: 1922504 - RNA, 17 nt, Human
aaauauuuugaucuuca

SEQ ID NO: 1922505 - RNA, 20 nt, Human
aaauagauggauuuguauca

SEQ ID NO: 1922506 - RNA, 20 nt, Human
aaaggaugcccaaagaugca

SEQ ID NO: 1922507 - RNA, 14 nt, Human
aaaggaugcacaga

SEQ ID NO: 1922508 - RNA, 13 nt, Human
aaaggaugugauu

SEQ ID NO: 1922509 - RNA, 22 nt, Human
aacauggccuuugcuugaaaga

SEQ ID NO: 1922510 - RNA, 21 nt, Human
aacaugaggggacauuuuggu

SEQ ID NO: 1922511 - RNA, 18 nt, Human
aacaugaggggacauuuu

SEQ ID NO: 1922512 - RNA, 15 nt, Human
aacaugaacaaauuu

SEQ ID NO: 1922513 - RNA, 15 nt, Human
aacaucuuuucuugc

SEQ ID NO: 1922514 - RNA, 11 nt, Human
aacaucuuuuc

SEQ ID NO: 1922515 - RNA, 12 nt, Human
aacagccugugu

SEQ ID NO: 1922516 - RNA, 11 nt, Human
aacaggcagau

SEQ ID NO: 1922517 - RNA, 18 nt, Human
aacagccacuacauuacu

SEQ ID NO: 1922518 - RNA, 18 nt, Human
aaauucuugcaaaguauc

SEQ ID NO: 1922519 - RNA, 15 nt, Human
aaauucuugcaaagu

SEQ ID NO: 1922520 - RNA, 23 nt, Human
aaauucuucuccacuuucuagcc

SEQ ID NO: 1922521 - RNA, 23 nt, Human
aacauggccuuugcuugaaagaa

SEQ ID NO: 1922522 - RNA, 22 nt, Human
aacaugguaaacgcugucccua

SEQ ID NO: 1922523 - RNA, 22 nt, Human
aaccuaaauuugguucuaggcc

SEQ ID NO: 1922524 - RNA, 17 nt, Human
aaccguuuugaagcuac

SEQ ID NO: 1922525 - RNA, 18 nt, Human
aaccguuuugaagcuacu

SEQ ID NO: 1922526 - RNA, 18 nt, Human
aaccuuuguuugcaucug

SEQ ID NO: 1922527 - RNA, 16 nt, Human
aaccuuuugagugccu

SEQ ID NO: 1922528 - RNA, 23 nt, Human
aaccuuuugagugccuuacacaa

SEQ ID NO: 1922529 - RNA, 12 nt, Human
aaccuuuuuaaa

SEQ ID NO: 1922530 - RNA, 20 nt, Human
aaugaauacuuuauaaagga

SEQ ID NO: 1922531 - RNA, 22 nt, Human
aaugauggcccauucuacuugc

SEQ ID NO: 1922532 - RNA, 13 nt, Human
aaugauggcccau

SEQ ID NO: 1922533 - RNA, 14 nt, Human
aaugauggcccauu

SEQ ID NO: 1922534 - RNA, 20 nt, Human
aaugauggcccauucuacuu

SEQ ID NO: 1922535 - RNA, 21 nt, Human
aaugauggcccauucuacuug

SEQ ID NO: 1922536 - RNA, 20 nt, Human
aaugaugccaugaggaacaa

SEQ ID NO: 1922537 - RNA, 19 nt, Human
aaugaugcuauuugcaauu

SEQ ID NO: 1922538 - RNA, 14 nt, Human
aaugaagcaaugcu

SEQ ID NO: 1922539 - RNA, 21 nt, Human
aaugaaagacuguacaaagua

SEQ ID NO: 1922540 - RNA, 20 nt, Human
aaugaagauacugaaauaaa

SEQ ID NO: 1922541 - RNA, 18 nt, Human
aaugaaagacuguacaaa

SEQ ID NO: 1922542 - RNA, 20 nt, Human
aaugaaagacuguacaaagu

SEQ ID NO: 1922543 - RNA, 12 nt, Human
aaucugacccag

SEQ ID NO: 1922544 - RNA, 13 nt, Human
aaucugacccagu

SEQ ID NO: 1922545 - RNA, 14 nt, Human
aaucugacccagug

SEQ ID NO: 1922546 - RNA, 15 nt, Human
aaucugacccagugc

SEQ ID NO: 1922547 - RNA, 17 nt, Human
aaucugacccagugccc

SEQ ID NO: 1922548 - RNA, 20 nt, Human
aaucugauauguauuguuug

SEQ ID NO: 1922549 - RNA, 23 nt, Human
aauauguggaguucaucuugaau

SEQ ID NO: 1922550 - RNA, 13 nt, Human
aauauuaagaaag

SEQ ID NO: 1922551 - RNA, 13 nt, Human
aauauuaaaucug

SEQ ID NO: 1922552 - RNA, 21 nt, Human
aauauuaaaucugcuggaguu

SEQ ID NO: 1922553 - RNA, 15 nt, Human
aaucacguaaagcua

SEQ ID NO: 1922554 - RNA, 23 nt, Human
aaucaccgaaaacguggcugcuu

SEQ ID NO: 1922555 - RNA, 21 nt, Human
aaucaccgaaaacguggcugc

SEQ ID NO: 1922556 - RNA, 12 nt, Human
aauaaagacagg

SEQ ID NO: 1922557 - RNA, 11 nt, Human
aauaaagacag

SEQ ID NO: 1922558 - RNA, 22 nt, Human
aauaaugugaaacuggauuaaa

SEQ ID NO: 1922559 - RNA, 17 nt, Human
aauaaugugaaacugga

SEQ ID NO: 1922560 - RNA, 14 nt, Human
aauaaagcagcguu

SEQ ID NO: 1922561 - RNA, 11 nt, Human
aauaaagcccu

SEQ ID NO: 1922562 - RNA, 19 nt, Human
aauaauguuaacauggaca

SEQ ID NO: 1922563 - RNA, 15 nt, Human
aauaaagcccuggga

SEQ ID NO: 1922564 - RNA, 12 nt, Human
aagugcugggau

SEQ ID NO: 1922565 - RNA, 17 nt, Human
aaguggacucagggcag

SEQ ID NO: 1922566 - RNA, 22 nt, Human
aaguggaccuuaggccuuccuc

SEQ ID NO: 1922567 - RNA, 16 nt, Human
aaguggaggcacuuua

SEQ ID NO: 1922568 - RNA, 14 nt, Human
aaguggcauaaaaa

SEQ ID NO: 1922569 - RNA, 23 nt, Human
aaguugaauugaggggauuaaua

SEQ ID NO: 1922570 - RNA, 22 nt, Human
aagugcugcauuuaaaagauac

SEQ ID NO: 1922571 - RNA, 13 nt, Human
aagugcugcggag

SEQ ID NO: 1922572 - RNA, 19 nt, Human
aagugcugcggagcaagag

SEQ ID NO: 1922573 - RNA, 22 nt, Human
aagugcuggcaaccacuaagaa

SEQ ID NO: 1922574 - RNA, 23 nt, Human
aagugcuggcaaccacuaagaau

SEQ ID NO: 1922575 - RNA, 21 nt, Human
aagugcugcggagcaagagga

SEQ ID NO: 1922576 - RNA, 22 nt, Human
aaguuguaggcauaaagucagg

SEQ ID NO: 1922577 - RNA, 16 nt, Human
aaguugggacucugga

SEQ ID NO: 1922578 - RNA, 19 nt, Human
aauaaacacucuugaaaaa

SEQ ID NO: 1922579 - RNA, 11 nt, Human
aauaaacacuc

SEQ ID NO: 1922580 - RNA, 16 nt, Human
aauaaacacucuugaa

SEQ ID NO: 1922581 - RNA, 18 nt, Human
aagcgaucacuuccuaua

SEQ ID NO: 1922582 - RNA, 14 nt, Human
aagcgauucuccug

SEQ ID NO: 1922583 - RNA, 14 nt, Human
aagcggcuggcagc

SEQ ID NO: 1922584 - RNA, 15 nt, Human
aagcgugagccacug

SEQ ID NO: 1922585 - RNA, 16 nt, Human
aagcgugagccacugc

SEQ ID NO: 1922586 - RNA, 13 nt, Human
aagcuagaaauga

SEQ ID NO: 1922587 - RNA, 23 nt, Human
aagcuacugugugugugaaugaa

SEQ ID NO: 1922588 - RNA, 13 nt, Human
aagcuacuuauug

SEQ ID NO: 1922589 - RNA, 22 nt, Human
aagcuacugugugugugaauga

SEQ ID NO: 1922590 - RNA, 19 nt, Human
aagcuacugugugugugaa

SEQ ID NO: 1922591 - RNA, 16 nt, Human
aagccagggugugucu

SEQ ID NO: 1922592 - RNA, 24 nt, Human
aagccaggaauuucccaggacccu

SEQ ID NO: 1922593 - RNA, 12 nt, Human
aagauaauuaua

SEQ ID NO: 1922594 - RNA, 23 nt, Human
aagauacaguuacucagaauucu

SEQ ID NO: 1922595 - RNA, 23 nt, Human
aagccaggaauuucccaggaccc

SEQ ID NO: 1922596 - RNA, 17 nt, Human
aagauacaguuacucag

SEQ ID NO: 1922597 - RNA, 19 nt, Human
aagauaauauuaaggaaga

SEQ ID NO: 1922598 - RNA, 21 nt, Human
aagauaauauuaaggaagaca

SEQ ID NO: 1922599 - RNA, 21 nt, Human
aagauaaguguauuuuucaau

SEQ ID NO: 1922600 - RNA, 13 nt, Human
aaggcaaggcugu

SEQ ID NO: 1922601 - RNA, 12 nt, Human
aaggcaacuggg

SEQ ID NO: 1922602 - RNA, 16 nt, Human
aaggcaaggcugucaa

SEQ ID NO: 1922603 - RNA, 15 nt, Human
aaggcaaggcuguca

SEQ ID NO: 1922604 - RNA, 22 nt, Human
aagcuagacgagcaggcuucuu

SEQ ID NO: 1922605 - RNA, 13 nt, Human
aagcugcacccuc

SEQ ID NO: 1922606 - RNA, 19 nt, Human
aagcugcacccucaggcag

SEQ ID NO: 1922607 - RNA, 21 nt, Human
aagacaaggaaaaaauaacaa

SEQ ID NO: 1922608 - RNA, 22 nt, Human
aagacaaugacuuacuguacau

SEQ ID NO: 1922609 - RNA, 19 nt, Human
aagacaaugugaaaagaaa

SEQ ID NO: 1922610 - RNA, 20 nt, Human
aagacaaugugaaaagaaaa

SEQ ID NO: 1922611 - RNA, 23 nt, Human
aagacaauggcuuacuccaggag

SEQ ID NO: 1922612 - RNA, 14 nt, Human
aagacacugaaaua

SEQ ID NO: 1922613 - RNA, 21 nt, Human
aagacacugaaauauacacac

SEQ ID NO: 1922614 - RNA, 22 nt, Human
aagacacugaaauauacacaca

SEQ ID NO: 1922615 - RNA, 21 nt, Human
aagaacuacaaacaaaauuuc

SEQ ID NO: 1922616 - RNA, 20 nt, Human
aagaacuacaaacaaaauuu

SEQ ID NO: 1922617 - RNA, 23 nt, Human
aagaacggggcucuucucauuuc

SEQ ID NO: 1922618 - RNA, 22 nt, Human
aagaacggggcucuucucauuu

SEQ ID NO: 1922619 - RNA, 21 nt, Human
aagaacggggcucuucucauu

SEQ ID NO: 1922620 - RNA, 18 nt, Human
aagaacggggcucuucuc

SEQ ID NO: 1922621 - RNA, 14 nt, Human
aagaaccuggaacu

SEQ ID NO: 1922622 - RNA, 17 nt, Human
aagaacggggcucuucu

SEQ ID NO: 1922623 - RNA, 11 nt, Human
aagaacaugug

SEQ ID NO: 1922624 - RNA, 17 nt, Human
aagaaccagucccccca

SEQ ID NO: 1922625 - RNA, 20 nt, Human
aagaaccaguccccccaccc

SEQ ID NO: 1922626 - RNA, 17 nt, Human
aacgccuccccugcccc

SEQ ID NO: 1922627 - RNA, 18 nt, Human
aacgccuccccugcccca

SEQ ID NO: 1922628 - RNA, 20 nt, Human
aagaacuguguuucaaguuc

SEQ ID NO: 1922629 - RNA, 17 nt, Human
aagaacuucuauaauug

SEQ ID NO: 1922630 - RNA, 17 nt, Human
aagacuuuuccaacccu

SEQ ID NO: 1922631 - RNA, 17 nt, Human
aagagaaaaagaaaugc

SEQ ID NO: 1922632 - RNA, 23 nt, Human
aagaccagagauaguggggagac

SEQ ID NO: 1922633 - RNA, 18 nt, Human
aagagaaaaagaaaugca

SEQ ID NO: 1922634 - RNA, 12 nt, Human
aagacagagucu

SEQ ID NO: 1922635 - RNA, 16 nt, Human
aagacagagcugggau

SEQ ID NO: 1922636 - RNA, 15 nt, Human
aagacagagcuggga

SEQ ID NO: 1922637 - RNA, 23 nt, Human
aagacagauacuccuccaagguu

SEQ ID NO: 1922638 - RNA, 14 nt, Human
aagacaugauuucc

SEQ ID NO: 1922639 - RNA, 15 nt, Human
aagacaugauuuccu

SEQ ID NO: 1922640 - RNA, 16 nt, Human
aagacaugauuuccuu

SEQ ID NO: 1922641 - RNA, 20 nt, Human
aagacaugauuuccuugaau

SEQ ID NO: 1922642 - RNA, 17 nt, Human
aagaccacguuucuaaa

SEQ ID NO: 1922643 - RNA, 15 nt, Human
aagaccacguuucua

SEQ ID NO: 1922644 - RNA, 21 nt, Human
aagacaugauuuccuugaaug

SEQ ID NO: 1922645 - RNA, 18 nt, Human
aagaccaccacuucgaaa

SEQ ID NO: 1922646 - RNA, 21 nt, Human
aagacuuuuccaacccucauc

SEQ ID NO: 1922647 - RNA, 12 nt, Human
aagacuuuucuu

SEQ ID NO: 1922648 - RNA, 19 nt, Human
aagacuuuucuuucagcca

SEQ ID NO: 1922649 - RNA, 13 nt, Human
aagagaaaaaaua

SEQ ID NO: 1922650 - RNA, 12 nt, Human
aagaguguggca

SEQ ID NO: 1922651 - RNA, 22 nt, Human
aagaguguggagucauucucau

SEQ ID NO: 1922652 - RNA, 23 nt, Human
aagaguguggagucauucucauu

SEQ ID NO: 1922653 - RNA, 21 nt, Human
aagaguguggagucauucuca

SEQ ID NO: 1922654 - RNA, 15 nt, Human
aagaguccucugaau

SEQ ID NO: 1922655 - RNA, 18 nt, Human
acugaucaggaccuccaa

SEQ ID NO: 1922656 - RNA, 17 nt, Human
acugauccagcccugag

SEQ ID NO: 1922657 - RNA, 16 nt, Human
acugauccagcccuga

SEQ ID NO: 1922658 - RNA, 23 nt, Human
acugaugggcaacccccagccug

SEQ ID NO: 1922659 - RNA, 20 nt, Human
acugauguaugaggaauuuc

SEQ ID NO: 1922660 - RNA, 14 nt, Human
acugauuacugccu

SEQ ID NO: 1922661 - RNA, 17 nt, Human
acugauuuuuuuuuccu

SEQ ID NO: 1922662 - RNA, 18 nt, Human
acugauuuuuuuuuccuu

SEQ ID NO: 1922663 - RNA, 19 nt, Human
acugauuuuuuuuuccuuc

SEQ ID NO: 1922664 - RNA, 20 nt, Human
acugauuuuuuuuuccuuca

SEQ ID NO: 1922665 - RNA, 16 nt, Human
acugauuuuuuuuucc

SEQ ID NO: 1922666 - RNA, 22 nt, Human
acugauuuccccuuuugcauuc

SEQ ID NO: 1922667 - RNA, 20 nt, Human
acugauuuccccuuuugcau

SEQ ID NO: 1922668 - RNA, 21 nt, Human
acugauuuccccuuuugcauu

SEQ ID NO: 1922669 - RNA, 23 nt, Human
acugauuuccccuuuugcauucu

SEQ ID NO: 1922670 - RNA, 12 nt, Human
acugauuucccc

SEQ ID NO: 1922671 - RNA, 17 nt, Human
acugauuuccccuuuug

SEQ ID NO: 1922672 - RNA, 19 nt, Human
acugauuuccccuuuugca

SEQ ID NO: 1922673 - RNA, 19 nt, Human
acucuacccauauuacaga

SEQ ID NO: 1922674 - RNA, 17 nt, Human
acucuacccauauuaca

SEQ ID NO: 1922675 - RNA, 12 nt, Human
acugaauuucuu

SEQ ID NO: 1922676 - RNA, 20 nt, Human
acugaauuaugaaacuuuug

SEQ ID NO: 1922677 - RNA, 15 nt, Human
acugaauuaugaaac

SEQ ID NO: 1922678 - RNA, 14 nt, Human
acugaauuaugaaa

SEQ ID NO: 1922679 - RNA, 13 nt, Human
acugaauuaugaa

SEQ ID NO: 1922680 - RNA, 18 nt, Human
acugacauuguuggccaa

SEQ ID NO: 1922681 - RNA, 17 nt, Human
acugacauuguuggcca

SEQ ID NO: 1922682 - RNA, 23 nt, Human
acugaauuucuuuugccguuauu

SEQ ID NO: 1922683 - RNA, 15 nt, Human
acucuacagaggcca

SEQ ID NO: 1922684 - RNA, 14 nt, Human
acucccuuucaaca

SEQ ID NO: 1922685 - RNA, 13 nt, Human
acuccggcccucc

SEQ ID NO: 1922686 - RNA, 22 nt, Human
acucccauuccugaagaaccag

SEQ ID NO: 1922687 - RNA, 22 nt, Human
acucccaucugugaaaggaaag

SEQ ID NO: 1922688 - RNA, 13 nt, Human
acucccauuccug

SEQ ID NO: 1922689 - RNA, 16 nt, Human
acucccauuccugaag

SEQ ID NO: 1922690 - RNA, 20 nt, Human
acucccauuccugaagaacc

SEQ ID NO: 1922691 - RNA, 14 nt, Human
acuccggcccuccu

SEQ ID NO: 1922692 - RNA, 15 nt, Human
acuccggcccuccua

SEQ ID NO: 1922693 - RNA, 17 nt, Human
acuguaaaauaauaacu

SEQ ID NO: 1922694 - RNA, 15 nt, Human
acugccuauuuuaau

SEQ ID NO: 1922695 - RNA, 12 nt, Human
acuggaacucuc

SEQ ID NO: 1922696 - RNA, 14 nt, Human
acugccaugccagc

SEQ ID NO: 1922697 - RNA, 16 nt, Human
acugcccauggacagg

SEQ ID NO: 1922698 - RNA, 16 nt, Human
acugcccagcggacag

SEQ ID NO: 1922699 - RNA, 23 nt, Human
acugcccagcggacaguggcagg

SEQ ID NO: 1922700 - RNA, 14 nt, Human
acugcccagcggac

SEQ ID NO: 1922701 - RNA, 18 nt, Human
acugugccaugugccagg

SEQ ID NO: 1922702 - RNA, 17 nt, Human
acugugccaugugccag

SEQ ID NO: 1922703 - RNA, 21 nt, Human
acugucuuuuuuucccuacca

SEQ ID NO: 1922704 - RNA, 22 nt, Human
acugucuuuuuucuaaaguaaa

SEQ ID NO: 1922705 - RNA, 23 nt, Human
acugucuuuuuucuaaaguaaaa

SEQ ID NO: 1922706 - RNA, 16 nt, Human
acugugaagagaacca

SEQ ID NO: 1922707 - RNA, 16 nt, Human
acugucuuuuuucuaa

SEQ ID NO: 1922708 - RNA, 18 nt, Human
acuguaaauaaaaagaaa

SEQ ID NO: 1922709 - RNA, 19 nt, Human
acuguuucaaacuuuacua

SEQ ID NO: 1922710 - RNA, 18 nt, Human
acuguuucaaacuuuacu

SEQ ID NO: 1922711 - RNA, 15 nt, Human
acuguuucaaacuuu

SEQ ID NO: 1922712 - RNA, 22 nt, Human
acuuaaaaaugguuuaaauggu

SEQ ID NO: 1922713 - RNA, 21 nt, Human
acuucagacauagaauuaaca

SEQ ID NO: 1922714 - RNA, 16 nt, Human
acuucaaacugagauc

SEQ ID NO: 1922715 - RNA, 20 nt, Human
acuucuugaaggugcugacg

SEQ ID NO: 1922716 - RNA, 22 nt, Human
acuucuuggcuuggugaggaaa

SEQ ID NO: 1922717 - RNA, 12 nt, Human
acuugaaaauua

SEQ ID NO: 1922718 - RNA, 14 nt, Human
acuugaaaauuaac

SEQ ID NO: 1922719 - RNA, 23 nt, Human
acuuggggggcugaggugggagg

SEQ ID NO: 1922720 - RNA, 13 nt, Human
acuuggucuguga

SEQ ID NO: 1922721 - RNA, 17 nt, Human
accuccaagccacugag

SEQ ID NO: 1922722 - RNA, 21 nt, Human
accucaggugauccacccacc

SEQ ID NO: 1922723 - RNA, 20 nt, Human
accucaggugauccacccac

SEQ ID NO: 1922724 - RNA, 11 nt, Human
accucaggccu

SEQ ID NO: 1922725 - RNA, 11 nt, Human
accucagccug

SEQ ID NO: 1922726 - RNA, 13 nt, Human
accucagccuggc

SEQ ID NO: 1922727 - RNA, 14 nt, Human
accucagccuggcc

SEQ ID NO: 1922728 - RNA, 15 nt, Human
accucagccuggcca

SEQ ID NO: 1922729 - RNA, 16 nt, Human
accucagccuggccag

SEQ ID NO: 1922730 - RNA, 17 nt, Human
accucagccuggccaga

SEQ ID NO: 1922731 - RNA, 19 nt, Human
accucagccuggccagaca

SEQ ID NO: 1922732 - RNA, 20 nt, Human
accucagccuggccagacac

SEQ ID NO: 1922733 - RNA, 21 nt, Human
accucagccuggccagacaca

SEQ ID NO: 1922734 - RNA, 16 nt, Human
accgggcacucagaag

SEQ ID NO: 1922735 - RNA, 20 nt, Human
accgggccacagagaaagua

SEQ ID NO: 1922736 - RNA, 14 nt, Human
accgggcacucaga

SEQ ID NO: 1922737 - RNA, 12 nt, Human
accgggcacuca

SEQ ID NO: 1922738 - RNA, 17 nt, Human
acccugugauggggccc

SEQ ID NO: 1922739 - RNA, 19 nt, Human
acccugugauggggcccug

SEQ ID NO: 1922740 - RNA, 20 nt, Human
acccugugauggggcccugc

SEQ ID NO: 1922741 - RNA, 21 nt, Human
acccugugauggggcccugcc

SEQ ID NO: 1922742 - RNA, 11 nt, Human
accucagccuc

SEQ ID NO: 1922743 - RNA, 12 nt, Human
accucagccucc

SEQ ID NO: 1922744 - RNA, 23 nt, Human
accgugaggccagagacacaagc

SEQ ID NO: 1922745 - RNA, 18 nt, Human
accgugaggccagagaca

SEQ ID NO: 1922746 - RNA, 23 nt, Human
acccuauauuuugcauaguacca

SEQ ID NO: 1922747 - RNA, 13 nt, Human
acccuauugcugc

SEQ ID NO: 1922748 - RNA, 21 nt, Human
acccucaaccucuucuggcuc

SEQ ID NO: 1922749 - RNA, 14 nt, Human
acccuauugcugcu

SEQ ID NO: 1922750 - RNA, 19 nt, Human
acccuauugcugcuugagg

SEQ ID NO: 1922751 - RNA, 19 nt, Human
acccuaaaaagcagagcuu

SEQ ID NO: 1922752 - RNA, 22 nt, Human
acccuaaggucauuaccacagg

SEQ ID NO: 1922753 - RNA, 21 nt, Human
acccuaauagacuaaaugaaa

SEQ ID NO: 1922754 - RNA, 13 nt, Human
acccuggagccca

SEQ ID NO: 1922755 - RNA, 23 nt, Human
acccuggcacuauaauguaagcu

SEQ ID NO: 1922756 - RNA, 23 nt, Human
acccucaucaccaacgucugugc

SEQ ID NO: 1922757 - RNA, 13 nt, Human
acccucaggcagg

SEQ ID NO: 1922758 - RNA, 14 nt, Human
acccucaggcaggu

SEQ ID NO: 1922759 - RNA, 13 nt, Human
acccucaucacca

SEQ ID NO: 1922760 - RNA, 15 nt, Human
acccucaggcaggug

SEQ ID NO: 1922761 - RNA, 16 nt, Human
acccucaggcaggugg

SEQ ID NO: 1922762 - RNA, 15 nt, Human
acccugggccuggca

SEQ ID NO: 1922763 - RNA, 22 nt, Human
acccugggccuggcagcucagc

SEQ ID NO: 1922764 - RNA, 16 nt, Human
acccuggggagaaagu

SEQ ID NO: 1922765 - RNA, 18 nt, Human
acccuggccgaguccaag

SEQ ID NO: 1922766 - RNA, 21 nt, Human
acccuggccgaguccaagcug

SEQ ID NO: 1922767 - RNA, 22 nt, Human
acccuggccgaguccaagcugg

SEQ ID NO: 1922768 - RNA, 16 nt, Human
acccuggccugagaag

SEQ ID NO: 1922769 - RNA, 23 nt, Human
acccugggaccuaggggcgccgc

SEQ ID NO: 1922770 - RNA, 12 nt, Human
acccugggaccu

SEQ ID NO: 1922771 - RNA, 16 nt, Human
acccugugauggggcc

SEQ ID NO: 1922772 - RNA, 21 nt, Human
acccugucucuacuaaaaaua

SEQ ID NO: 1922773 - RNA, 15 nt, Human
acccuggugggccaa

SEQ ID NO: 1922774 - RNA, 17 nt, Human
acccuggugguugcugu

SEQ ID NO: 1922775 - RNA, 18 nt, Human
acccuggugguugcuguu

SEQ ID NO: 1922776 - RNA, 19 nt, Human
acccuggugguugcuguuu

SEQ ID NO: 1922777 - RNA, 20 nt, Human
acccuguauauagcccagcc

SEQ ID NO: 1922778 - RNA, 15 nt, Human
acccuguauauagcc

SEQ ID NO: 1922779 - RNA, 18 nt, Human
acccuguauauagcccag

SEQ ID NO: 1922780 - RNA, 11 nt, Human
accuguaauca

SEQ ID NO: 1922781 - RNA, 14 nt, Human
accuguaaucccag

SEQ ID NO: 1922782 - RNA, 15 nt, Human
accuguaaucccagc

SEQ ID NO: 1922783 - RNA, 16 nt, Human
accuguaaucccagca

SEQ ID NO: 1922784 - RNA, 19 nt, Human
accuguaaucccagcacuu

SEQ ID NO: 1922785 - RNA, 19 nt, Human
accuguaaucccagcuacu

SEQ ID NO: 1922786 - RNA, 20 nt, Human
accuguaaucccagcuacuu

SEQ ID NO: 1922787 - RNA, 17 nt, Human
accuguggccaaguucu

SEQ ID NO: 1922788 - RNA, 21 nt, Human
accugccaggaagccagcagg

SEQ ID NO: 1922789 - RNA, 22 nt, Human
accugccaggaagccagcaggc

SEQ ID NO: 1922790 - RNA, 23 nt, Human
accugccaggaagccagcaggcu

SEQ ID NO: 1922791 - RNA, 12 nt, Human
accugccccuca

SEQ ID NO: 1922792 - RNA, 15 nt, Human
accugccccucaacu

SEQ ID NO: 1922793 - RNA, 20 nt, Human
accugccccucaacucuccu

SEQ ID NO: 1922794 - RNA, 12 nt, Human
accucugugugc

SEQ ID NO: 1922795 - RNA, 11 nt, Human
accucugugug

SEQ ID NO: 1922796 - RNA, 15 nt, Human
accucugugugcucc

SEQ ID NO: 1922797 - RNA, 23 nt, Human
accucugccugaagucacacagu

SEQ ID NO: 1922798 - RNA, 20 nt, Human
accucugccugaagucacac

SEQ ID NO: 1922799 - RNA, 12 nt, Human
accucugccuga

SEQ ID NO: 1922800 - RNA, 22 nt, Human
accuuggcaccagacacccagg

SEQ ID NO: 1922801 - RNA, 14 nt, Human
accuuggcaccaga

SEQ ID NO: 1922802 - RNA, 16 nt, Human
accuuggcaccagaca

SEQ ID NO: 1922803 - RNA, 17 nt, Human
accuuggcaccagacac

SEQ ID NO: 1922804 - RNA, 18 nt, Human
accuuggcaccagacacc

SEQ ID NO: 1922805 - RNA, 15 nt, Human
acgcacaugcgaccc

SEQ ID NO: 1922806 - RNA, 18 nt, Human
acgcaaacuuugagccuu

SEQ ID NO: 1922807 - RNA, 19 nt, Human
acgauuucuguuuagauaa

SEQ ID NO: 1922808 - RNA, 23 nt, Human
acgauuucuguuuagauaauaca

SEQ ID NO: 1922809 - RNA, 20 nt, Human
acgauuucuguuuagauaau

SEQ ID NO: 1922810 - RNA, 19 nt, Human
acggaauaguuggcuagga

SEQ ID NO: 1922811 - RNA, 17 nt, Human
acggacacucaaaagcu

SEQ ID NO: 1922812 - RNA, 19 nt, Human
acggacacucaaaagcugg

SEQ ID NO: 1922813 - RNA, 15 nt, Human
acggacacccccucg

SEQ ID NO: 1922814 - RNA, 16 nt, Human
acggacacccccucgc

SEQ ID NO: 1922815 - RNA, 12 nt, Human
acgucugugcca

SEQ ID NO: 1922816 - RNA, 13 nt, Human
acgucugugccau

SEQ ID NO: 1922817 - RNA, 14 nt, Human
acgucuuaaauauu

SEQ ID NO: 1922818 - RNA, 13 nt, Human
acgucuuaaauau

SEQ ID NO: 1922819 - RNA, 12 nt, Human
acgucuucuaaa

SEQ ID NO: 1922820 - RNA, 14 nt, Human
acgcaccugccuca

SEQ ID NO: 1922821 - RNA, 15 nt, Human
acgcaccugccucag

SEQ ID NO: 1922822 - RNA, 16 nt, Human
acgcaccugccucagg

SEQ ID NO: 1922823 - RNA, 15 nt, Human
acgcagccaggacac

SEQ ID NO: 1922824 - RNA, 22 nt, Human
acgcugugcugcccugcccacc

SEQ ID NO: 1922825 - RNA, 19 nt, Human
acgcugugcugcccugccc

SEQ ID NO: 1922826 - RNA, 18 nt, Human
acuaauggggcggugaga

SEQ ID NO: 1922827 - RNA, 20 nt, Human
acuaauguguaagacaaaaa

SEQ ID NO: 1922828 - RNA, 13 nt, Human
acuaauuccacac

SEQ ID NO: 1922829 - RNA, 13 nt, Human
acaggcagagcug

SEQ ID NO: 1922830 - RNA, 23 nt, Human
acagugaucaaguuauuuuuaau

SEQ ID NO: 1922831 - RNA, 23 nt, Human
acaggcacccaccaucaugucug

SEQ ID NO: 1922832 - RNA, 19 nt, Human
acagugauuaccagggacu

SEQ ID NO: 1922833 - RNA, 18 nt, Human
acaguggaaccagcccag

SEQ ID NO: 1922834 - RNA, 12 nt, Human
acaguggcagga

SEQ ID NO: 1922835 - RNA, 13 nt, Human
acaguggcaggac

SEQ ID NO: 1922836 - RNA, 18 nt, Human
acaguggcaggacaggaa

SEQ ID NO: 1922837 - RNA, 20 nt, Human
acaguggcaggacaggaaaa

SEQ ID NO: 1922838 - RNA, 17 nt, Human
acaggcaaugcuggcug

SEQ ID NO: 1922839 - RNA, 14 nt, Human
acaggcacccacca

SEQ ID NO: 1922840 - RNA, 16 nt, Human
acaggcaaugcuggcu

SEQ ID NO: 1922841 - RNA, 15 nt, Human
acaggcaaugcuggc

SEQ ID NO: 1922842 - RNA, 20 nt, Human
acagcucuucuccaggcugu

SEQ ID NO: 1922843 - RNA, 16 nt, Human
acagcugaauuaucua

SEQ ID NO: 1922844 - RNA, 19 nt, Human
acagcucuucuccaggcug

SEQ ID NO: 1922845 - RNA, 14 nt, Human
acaugcgaccccga

SEQ ID NO: 1922846 - RNA, 20 nt, Human
acaugccucucucaggccaa

SEQ ID NO: 1922847 - RNA, 17 nt, Human
acaugcgguagccagca

SEQ ID NO: 1922848 - RNA, 22 nt, Human
acaugugccagggcaaugauga

SEQ ID NO: 1922849 - RNA, 23 nt, Human
acaugugguuacacagugugaau

SEQ ID NO: 1922850 - RNA, 13 nt, Human
acaugcacgugug

SEQ ID NO: 1922851 - RNA, 18 nt, Human
acaugcacucagcucuug

SEQ ID NO: 1922852 - RNA, 17 nt, Human
acaugcacucagcucuu

SEQ ID NO: 1922853 - RNA, 19 nt, Human
acauccaaagcagacagcu

SEQ ID NO: 1922854 - RNA, 18 nt, Human
acauccccccgccaaaag

SEQ ID NO: 1922855 - RNA, 16 nt, Human
acauacaauuccaaac

SEQ ID NO: 1922856 - RNA, 20 nt, Human
acauacaggaagguagaaau

SEQ ID NO: 1922857 - RNA, 13 nt, Human
acauacaccagca

SEQ ID NO: 1922858 - RNA, 14 nt, Human
acauacaccagcau

SEQ ID NO: 1922859 - RNA, 15 nt, Human
acauacaccagcauu

SEQ ID NO: 1922860 - RNA, 21 nt, Human
acauccaaaauaguuaagaca

SEQ ID NO: 1922861 - RNA, 15 nt, Human
acauccaaagcagac

SEQ ID NO: 1922862 - RNA, 16 nt, Human
acauccaaagcagaca

SEQ ID NO: 1922863 - RNA, 17 nt, Human
acauccaaagcagacag

SEQ ID NO: 1922864 - RNA, 18 nt, Human
acauccaaagcagacagc

SEQ ID NO: 1922865 - RNA, 20 nt, Human
acauaaguauuuaauucaug

SEQ ID NO: 1922866 - RNA, 15 nt, Human
acauaagauaaaugu

SEQ ID NO: 1922867 - RNA, 20 nt, Human
acauaaauuuaguauuuugu

SEQ ID NO: 1922868 - RNA, 18 nt, Human
acauguguagccugugca

SEQ ID NO: 1922869 - RNA, 17 nt, Human
acauguguagccugugc

SEQ ID NO: 1922870 - RNA, 20 nt, Human
acauguguagccugugcaug

SEQ ID NO: 1922871 - RNA, 17 nt, Human
acauguuaaacuuacuu

SEQ ID NO: 1922872 - RNA, 19 nt, Human
acauguuuuucuucucccu

SEQ ID NO: 1922873 - RNA, 14 nt, Human
accaacgucugugc

SEQ ID NO: 1922874 - RNA, 17 nt, Human
accaacgucugugccau

SEQ ID NO: 1922875 - RNA, 19 nt, Human
acauuucuuugugcuuugg

SEQ ID NO: 1922876 - RNA, 16 nt, Human
accacgcuggaccuug

SEQ ID NO: 1922877 - RNA, 14 nt, Human
accacgcuggaccu

SEQ ID NO: 1922878 - RNA, 18 nt, Human
accacgcuggaccuugaa

SEQ ID NO: 1922879 - RNA, 14 nt, Human
accacguuucuaaa

SEQ ID NO: 1922880 - RNA, 13 nt, Human
accacguuucuaa

SEQ ID NO: 1922881 - RNA, 21 nt, Human
accaacgucugugccauuuug

SEQ ID NO: 1922882 - RNA, 17 nt, Human
accaccagaagcccaga

SEQ ID NO: 1922883 - RNA, 16 nt, Human
accaccagaagcccag

SEQ ID NO: 1922884 - RNA, 15 nt, Human
accaccagaagccca

SEQ ID NO: 1922885 - RNA, 18 nt, Human
accaagccuggucagccc

SEQ ID NO: 1922886 - RNA, 13 nt, Human
accagagcugcca

SEQ ID NO: 1922887 - RNA, 12 nt, Human
accagagcugcc

SEQ ID NO: 1922888 - RNA, 14 nt, Human
accagagcugccac

SEQ ID NO: 1922889 - RNA, 16 nt, Human
accagagcugccaccu

SEQ ID NO: 1922890 - RNA, 13 nt, Human
aauucuaaaugaa

SEQ ID NO: 1922891 - RNA, 19 nt, Human
aauucuaaaugaauguuua

SEQ ID NO: 1922892 - RNA, 14 nt, Human
aauucuaacuuuuu

SEQ ID NO: 1922893 - RNA, 14 nt, Human
aauucuacuuugag

SEQ ID NO: 1922894 - RNA, 19 nt, Human
aauucucagaaucucaaau

SEQ ID NO: 1922895 - RNA, 22 nt, Human
aauucuauaaggccauaaaaca

SEQ ID NO: 1922896 - RNA, 16 nt, Human
aauucuauaaggccau

SEQ ID NO: 1922897 - RNA, 21 nt, Human
aauucucauuugucacacacu

SEQ ID NO: 1922898 - RNA, 17 nt, Human
aauucucuaguuugauu

SEQ ID NO: 1922899 - RNA, 15 nt, Human
aauucucuaguuuga

SEQ ID NO: 1922900 - RNA, 15 nt, Human
aauucucuuauccaa

SEQ ID NO: 1922901 - RNA, 14 nt, Human
aauucuguuuuucu

SEQ ID NO: 1922902 - RNA, 18 nt, Human
aauucuguuuuucuaggc

SEQ ID NO: 1922903 - RNA, 22 nt, Human
aauuggauacgacaacuugcac

SEQ ID NO: 1922904 - RNA, 13 nt, Human
aauucuuaaauau

SEQ ID NO: 1922905 - RNA, 22 nt, Human
aauuguaaggaaugauuaauua

SEQ ID NO: 1922906 - RNA, 19 nt, Human
aauuaucaagcuaauaaaa

SEQ ID NO: 1922907 - RNA, 19 nt, Human
aauuaucuaauuuauaaaa

SEQ ID NO: 1922908 - RNA, 14 nt, Human
aauuaucuauacau

SEQ ID NO: 1922909 - RNA, 16 nt, Human
aauuaucuauacauau

SEQ ID NO: 1922910 - RNA, 18 nt, Human
aauuaucuaauuuauaaa

SEQ ID NO: 1922911 - RNA, 15 nt, Human
aauuaucuaauuuau

SEQ ID NO: 1922912 - RNA, 14 nt, Human
aauuaucuaauuua

SEQ ID NO: 1922913 - RNA, 19 nt, Human
aauuaugaguuauuuuuau

SEQ ID NO: 1922914 - RNA, 18 nt, Human
aauuaugaaacuuuugga

SEQ ID NO: 1922915 - RNA, 15 nt, Human
aauuaugaaacuuuu

SEQ ID NO: 1922916 - RNA, 13 nt, Human
aauuaugaaacuu

SEQ ID NO: 1922917 - RNA, 12 nt, Human
aauuaugaaacu

SEQ ID NO: 1922918 - RNA, 17 nt, Human
aauuccucuuugcuuug

SEQ ID NO: 1922919 - RNA, 18 nt, Human
aauuccucuuugcuuugc

SEQ ID NO: 1922920 - RNA, 19 nt, Human
aauuccucuuugcuuugcu

SEQ ID NO: 1922921 - RNA, 22 nt, Human
aauuaucuauacauaucuuuau

SEQ ID NO: 1922922 - RNA, 16 nt, Human
aauuaucaagcuaaua

SEQ ID NO: 1922923 - RNA, 15 nt, Human
aauuaucaagcuaau

SEQ ID NO: 1922924 - RNA, 11 nt, Human
aauuguaauag

SEQ ID NO: 1922925 - RNA, 21 nt, Human
aauuuccacucaggucuguuu

SEQ ID NO: 1922926 - RNA, 15 nt, Human
aauuucccaaagcag

SEQ ID NO: 1922927 - RNA, 17 nt, Human
aauuucccaaagcagug

SEQ ID NO: 1922928 - RNA, 12 nt, Human
aauuucccagga

SEQ ID NO: 1922929 - RNA, 14 nt, Human
aauuucccaggacc

SEQ ID NO: 1922930 - RNA, 15 nt, Human
aauuucccaggaccc

SEQ ID NO: 1922931 - RNA, 16 nt, Human
aauuucccaggacccu

SEQ ID NO: 1922932 - RNA, 17 nt, Human
aauuucccaggacccug

SEQ ID NO: 1922933 - RNA, 21 nt, Human
aauuucccaggacccugaagg

SEQ ID NO: 1922934 - RNA, 22 nt, Human
aauuucccaggacccugaaggg

SEQ ID NO: 1922935 - RNA, 15 nt, Human
aauuuccugggagcu

SEQ ID NO: 1922936 - RNA, 12 nt, Human
aauuuccuggga

SEQ ID NO: 1922937 - RNA, 13 nt, Human
acacgcaggagca

SEQ ID NO: 1922938 - RNA, 14 nt, Human
acacgcaggagcac

SEQ ID NO: 1922939 - RNA, 15 nt, Human
acacgcaggagcaca

SEQ ID NO: 1922940 - RNA, 13 nt, Human
acacgcaccugcc

SEQ ID NO: 1922941 - RNA, 19 nt, Human
acaccagcauuccuuuuga

SEQ ID NO: 1922942 - RNA, 14 nt, Human
acaccagcauuccu

SEQ ID NO: 1922943 - RNA, 16 nt, Human
acaccagcauuccuuu

SEQ ID NO: 1922944 - RNA, 14 nt, Human
acacgcaccugccu

SEQ ID NO: 1922945 - RNA, 16 nt, Human
acacgcaccugccuca

SEQ ID NO: 1922946 - RNA, 17 nt, Human
acacgcaccugccucag

SEQ ID NO: 1922947 - RNA, 12 nt, Human
acacguguccug

SEQ ID NO: 1922948 - RNA, 13 nt, Human
acaccagagccca

SEQ ID NO: 1922949 - RNA, 15 nt, Human
acaccaauauucaua

SEQ ID NO: 1922950 - RNA, 23 nt, Human
acaccagagcccaccuuggcuca

SEQ ID NO: 1922951 - RNA, 18 nt, Human
acaccagagcccaccuug

SEQ ID NO: 1922952 - RNA, 18 nt, Human
acacagcucuucuccagg

SEQ ID NO: 1922953 - RNA, 16 nt, Human
acaccaagcacagcag

SEQ ID NO: 1922954 - RNA, 18 nt, Human
acaccaagcacagcagcc

SEQ ID NO: 1922955 - RNA, 19 nt, Human
acaccaagcacagcagccu

SEQ ID NO: 1922956 - RNA, 20 nt, Human
acaccaagcacagcagccug

SEQ ID NO: 1922957 - RNA, 21 nt, Human
acaccaagcacagcagccugg

SEQ ID NO: 1922958 - RNA, 16 nt, Human
acacagcucuucucca

SEQ ID NO: 1922959 - RNA, 14 nt, Human
acacagcucuucuc

SEQ ID NO: 1922960 - RNA, 18 nt, Human
acacagaaaauguugaga

SEQ ID NO: 1922961 - RNA, 19 nt, Human
acacagaaaauguugagaa

SEQ ID NO: 1922962 - RNA, 20 nt, Human
acacagaaaauguugagaau

SEQ ID NO: 1922963 - RNA, 21 nt, Human
acaagguaccccuuucuggcu

SEQ ID NO: 1922964 - RNA, 23 nt, Human
acaagguccucugucagucacag

SEQ ID NO: 1922965 - RNA, 15 nt, Human
acaaguuaaauaaau

SEQ ID NO: 1922966 - RNA, 18 nt, Human
acaaguggcaaccugcuu

SEQ ID NO: 1922967 - RNA, 13 nt, Human
acaagugguggua

SEQ ID NO: 1922968 - RNA, 18 nt, Human
acaaguggacucagggca

SEQ ID NO: 1922969 - RNA, 19 nt, Human
acaaguggacucagggcag

SEQ ID NO: 1922970 - RNA, 15 nt, Human
acaaguggacucagg

SEQ ID NO: 1922971 - RNA, 16 nt, Human
acaaggcaaggcuguc

SEQ ID NO: 1922972 - RNA, 17 nt, Human
acaaggcaaggcuguca

SEQ ID NO: 1922973 - RNA, 19 nt, Human
acaaggcaaggcugucaau

SEQ ID NO: 1922974 - RNA, 20 nt, Human
acaaggcaaggcugucaauu

SEQ ID NO: 1922975 - RNA, 22 nt, Human
acaacugccucgaaacacagaa

SEQ ID NO: 1922976 - RNA, 21 nt, Human
acaacugccucgaaacacaga

SEQ ID NO: 1922977 - RNA, 22 nt, Human
acaacauguauaauauuuuuaa

SEQ ID NO: 1922978 - RNA, 18 nt, Human
acaaccacauacaacaca

SEQ ID NO: 1922979 - RNA, 15 nt, Human
acaaacucucugaac

SEQ ID NO: 1922980 - RNA, 22 nt, Human
acaaacucucugaaccccuccc

SEQ ID NO: 1922981 - RNA, 13 nt, Human
acaaacuguaaau

SEQ ID NO: 1922982 - RNA, 19 nt, Human
acaaacaugugguuaaugc

SEQ ID NO: 1922983 - RNA, 14 nt, Human
acaaacauaagugc

SEQ ID NO: 1922984 - RNA, 21 nt, Human
aucaaaacuuucuuuucugga

SEQ ID NO: 1922985 - RNA, 15 nt, Human
aucaaaacuuucuuu

SEQ ID NO: 1922986 - RNA, 14 nt, Human
aucaaaagaaagaa

SEQ ID NO: 1922987 - RNA, 19 nt, Human
auauuuuuuucugaaauuu

SEQ ID NO: 1922988 - RNA, 18 nt, Human
auauuuuuuucuuuucuu

SEQ ID NO: 1922989 - RNA, 18 nt, Human
auauuuuuuucugaaauu

SEQ ID NO: 1922990 - RNA, 16 nt, Human
auauuuuuuucugaaa

SEQ ID NO: 1922991 - RNA, 14 nt, Human
auauuuuuuucuga

SEQ ID NO: 1922992 - RNA, 24 nt, Human
aucaaaagguuaauaaaguaauua

SEQ ID NO: 1922993 - RNA, 20 nt, Human
aucaaaagguuaauaaagua

SEQ ID NO: 1922994 - RNA, 19 nt, Human
aucaaagagguuuuaaaaa

SEQ ID NO: 1922995 - RNA, 14 nt, Human
auagcacagacccu

SEQ ID NO: 1922996 - RNA, 14 nt, Human
aucauccagaaguu

SEQ ID NO: 1922997 - RNA, 15 nt, Human
aucauccuaagcuau

SEQ ID NO: 1922998 - RNA, 20 nt, Human
aucaugacaaagacugagua

SEQ ID NO: 1922999 - RNA, 12 nt, Human
aucauccuacug

SEQ ID NO: 1923000 - RNA, 19 nt, Human
aucauggagguuugaagau

SEQ ID NO: 1923001 - RNA, 17 nt, Human
aucaugaccagcaaaua

SEQ ID NO: 1923002 - RNA, 12 nt, Human
aucaugcccugu

SEQ ID NO: 1923003 - RNA, 14 nt, Human
auccacuucuuuca

SEQ ID NO: 1923004 - RNA, 22 nt, Human
auccacuucuuucagcagacug

SEQ ID NO: 1923005 - RNA, 23 nt, Human
auccacuuuaucuugaauaaugu

SEQ ID NO: 1923006 - RNA, 21 nt, Human
auccacugugccaugugccag

SEQ ID NO: 1923007 - RNA, 12 nt, Human
auccagccuggg

SEQ ID NO: 1923008 - RNA, 21 nt, Human
auccagcccugaguuccuagc

SEQ ID NO: 1923009 - RNA, 12 nt, Human
auccagggacag

SEQ ID NO: 1923010 - RNA, 13 nt, Human
auccagggacaga

SEQ ID NO: 1923011 - RNA, 14 nt, Human
auccagggacagag

SEQ ID NO: 1923012 - RNA, 16 nt, Human
auccagggacagaggc

SEQ ID NO: 1923013 - RNA, 19 nt, Human
auccagggacagaggcccc

SEQ ID NO: 1923014 - RNA, 20 nt, Human
auccagggacagaggcccca

SEQ ID NO: 1923015 - RNA, 21 nt, Human
auccagggacagaggccccag

SEQ ID NO: 1923016 - RNA, 17 nt, Human
auccagccuggggucug

SEQ ID NO: 1923017 - RNA, 22 nt, Human
auccaggcagauccaggacuau

SEQ ID NO: 1923018 - RNA, 19 nt, Human
auccaggcagauccaggac

SEQ ID NO: 1923019 - RNA, 18 nt, Human
aucgaaucuacuaauucc

SEQ ID NO: 1923020 - RNA, 20 nt, Human
aucgaaucuacuaauuccac

SEQ ID NO: 1923021 - RNA, 13 nt, Human
auccuuuuuuaaa

SEQ ID NO: 1923022 - RNA, 22 nt, Human
auccuuuuuuaaaaguaaaugu

SEQ ID NO: 1923023 - RNA, 16 nt, Human
auccuuuuuuaaaagu

SEQ ID NO: 1923024 - RNA, 15 nt, Human
aucgaaccguuuuga

SEQ ID NO: 1923025 - RNA, 19 nt, Human
aucccccccaccucucccu

SEQ ID NO: 1923026 - RNA, 17 nt, Human
auccuuccucacaccag

SEQ ID NO: 1923027 - RNA, 18 nt, Human
auccccgcagugugcacu

SEQ ID NO: 1923028 - RNA, 22 nt, Human
aucuaggaagacuuuggaaaga

SEQ ID NO: 1923029 - RNA, 15 nt, Human
auggaguucuugugc

SEQ ID NO: 1923030 - RNA, 15 nt, Human
augggacagggagga

SEQ ID NO: 1923031 - RNA, 22 nt, Human
augggacaaaguuccaaaaugc

SEQ ID NO: 1923032 - RNA, 13 nt, Human
augggaaaguauu

SEQ ID NO: 1923033 - RNA, 21 nt, Human
augggaaaguauucuguacuc

SEQ ID NO: 1923034 - RNA, 16 nt, Human
augcuuugaucccuuc

SEQ ID NO: 1923035 - RNA, 18 nt, Human
auggagagaaaacagacc

SEQ ID NO: 1923036 - RNA, 22 nt, Human
augcuuucugaagcuuuaccag

SEQ ID NO: 1923037 - RNA, 11 nt, Human
auggagccagc

SEQ ID NO: 1923038 - RNA, 20 nt, Human
auggagauucaguuuucauu

SEQ ID NO: 1923039 - RNA, 23 nt, Human
auggagccagcucccucuauuua

SEQ ID NO: 1923040 - RNA, 15 nt, Human
auggagccagcuccc

SEQ ID NO: 1923041 - RNA, 18 nt, Human
auggagccagcucccucu

SEQ ID NO: 1923042 - RNA, 19 nt, Human
auggagauucaguuuucau

SEQ ID NO: 1923043 - RNA, 23 nt, Human
auggagauagccccacaggaggu

SEQ ID NO: 1923044 - RNA, 14 nt, Human
augcuucuucagag

SEQ ID NO: 1923045 - RNA, 17 nt, Human
augcuucuucagagacu

SEQ ID NO: 1923046 - RNA, 20 nt, Human
augcuucuucagagacuccu

SEQ ID NO: 1923047 - RNA, 22 nt, Human
augcuucuucagagacuccugc

SEQ ID NO: 1923048 - RNA, 18 nt, Human
augcucugcauguuacau

SEQ ID NO: 1923049 - RNA, 19 nt, Human
augcucugcauguuacaua

SEQ ID NO: 1923050 - RNA, 24 nt, Human
augcauauuauuuuauguugcaua

SEQ ID NO: 1923051 - RNA, 16 nt, Human
augcauggugccccag

SEQ ID NO: 1923052 - RNA, 17 nt, Human
augcauggugccccagg

SEQ ID NO: 1923053 - RNA, 18 nt, Human
augcauggugccccagga

SEQ ID NO: 1923054 - RNA, 19 nt, Human
augcauggugccccaggac

SEQ ID NO: 1923055 - RNA, 20 nt, Human
augcauggugccccaggacc

SEQ ID NO: 1923056 - RNA, 14 nt, Human
augcaucuagauua

SEQ ID NO: 1923057 - RNA, 21 nt, Human
augccugguggcagcugcggu

SEQ ID NO: 1923058 - RNA, 18 nt, Human
augccugguggcagcugc

SEQ ID NO: 1923059 - RNA, 19 nt, Human
augccugguggcagcugcg

SEQ ID NO: 1923060 - RNA, 14 nt, Human
augccugguggcag

SEQ ID NO: 1923061 - RNA, 13 nt, Human
augccugguggca

SEQ ID NO: 1923062 - RNA, 12 nt, Human
augccugguggc

SEQ ID NO: 1923063 - RNA, 11 nt, Human
augccuggugg

SEQ ID NO: 1923064 - RNA, 21 nt, Human
augcauggugccccaggacca

SEQ ID NO: 1923065 - RNA, 22 nt, Human
augcauggugccccaggaccag

SEQ ID NO: 1923066 - RNA, 23 nt, Human
augaaguuuuuuuuauacaggau

SEQ ID NO: 1923067 - RNA, 21 nt, Human
augaaguaauaugcacacauu

SEQ ID NO: 1923068 - RNA, 14 nt, Human
augaaguaauaugc

SEQ ID NO: 1923069 - RNA, 23 nt, Human
augaaguaauaugcacacauuuu

SEQ ID NO: 1923070 - RNA, 13 nt, Human
augaaguacucau

SEQ ID NO: 1923071 - RNA, 23 nt, Human
augaagcauuuacuuuguguuca

SEQ ID NO: 1923072 - RNA, 12 nt, Human
augaaagacugu

SEQ ID NO: 1923073 - RNA, 16 nt, Human
augaaacuuuuggaag

SEQ ID NO: 1923074 - RNA, 13 nt, Human
augaaacuuggau

SEQ ID NO: 1923075 - RNA, 19 nt, Human
augagccucagcauccugg

SEQ ID NO: 1923076 - RNA, 21 nt, Human
augagccucagcauccuggca

SEQ ID NO: 1923077 - RNA, 11 nt, Human
augagccuggc

SEQ ID NO: 1923078 - RNA, 12 nt, Human
augagccuggca

SEQ ID NO: 1923079 - RNA, 13 nt, Human
augaccuuucaau

SEQ ID NO: 1923080 - RNA, 18 nt, Human
augaccuucuaggaagcu

SEQ ID NO: 1923081 - RNA, 17 nt, Human
augaccuucuaggaagc

SEQ ID NO: 1923082 - RNA, 15 nt, Human
augaccuuucaauag

SEQ ID NO: 1923083 - RNA, 18 nt, Human
augaccuuucaauaggaa

SEQ ID NO: 1923084 - RNA, 18 nt, Human
augagcugugcacaaagu

SEQ ID NO: 1923085 - RNA, 22 nt, Human
augagcugugcacaaaguggca

SEQ ID NO: 1923086 - RNA, 22 nt, Human
augaggcugcuuuccaaagcca

SEQ ID NO: 1923087 - RNA, 19 nt, Human
aucuaggauuuuaagggaa

SEQ ID NO: 1923088 - RNA, 11 nt, Human
aucuaggauuu

SEQ ID NO: 1923089 - RNA, 23 nt, Human
aucuaggaagacuuuggaaagag

SEQ ID NO: 1923090 - RNA, 22 nt, Human
agucauuugcugagcauguacu

SEQ ID NO: 1923091 - RNA, 19 nt, Human
agucauuugcugagcaugu

SEQ ID NO: 1923092 - RNA, 12 nt, Human
aguccucugaau

SEQ ID NO: 1923093 - RNA, 14 nt, Human
aguccucugaauga

SEQ ID NO: 1923094 - RNA, 14 nt, Human
aguccucuuuucug

SEQ ID NO: 1923095 - RNA, 16 nt, Human
aguccuuaccagcaga

SEQ ID NO: 1923096 - RNA, 18 nt, Human
aguccuuaccagcagagc

SEQ ID NO: 1923097 - RNA, 15 nt, Human
agucuguccaggcuc

SEQ ID NO: 1923098 - RNA, 18 nt, Human
agucuggcccuuccuuuu

SEQ ID NO: 1923099 - RNA, 16 nt, Human
agucgaggacagggag

SEQ ID NO: 1923100 - RNA, 16 nt, Human
aguccuuuuuuuccau

SEQ ID NO: 1923101 - RNA, 21 nt, Human
aguccuuuuuuuccaucuuua

SEQ ID NO: 1923102 - RNA, 22 nt, Human
agucugauucccaagcucugcu

SEQ ID NO: 1923103 - RNA, 21 nt, Human
agucugauucccaagcucugc

SEQ ID NO: 1923104 - RNA, 19 nt, Human
aguaucaugcccugugcaa

SEQ ID NO: 1923105 - RNA, 15 nt, Human
aguaucaugcccugu

SEQ ID NO: 1923106 - RNA, 13 nt, Human
aguaucacugucu

SEQ ID NO: 1923107 - RNA, 17 nt, Human
aguaucacugucuuucc

SEQ ID NO: 1923108 - RNA, 22 nt, Human
aguaucacugucuuuccuagau

SEQ ID NO: 1923109 - RNA, 20 nt, Human
agugauucuccugccucagc

SEQ ID NO: 1923110 - RNA, 19 nt, Human
agugauucuccugccucag

SEQ ID NO: 1923111 - RNA, 18 nt, Human
agugauucuccugccuca

SEQ ID NO: 1923112 - RNA, 19 nt, Human
agugccuuauggaacacuc

SEQ ID NO: 1923113 - RNA, 20 nt, Human
agugccuuauggaacacucu

SEQ ID NO: 1923114 - RNA, 21 nt, Human
agugccuuauggaacacucug

SEQ ID NO: 1923115 - RNA, 22 nt, Human
agugccuuauggaacacucuga

SEQ ID NO: 1923116 - RNA, 16 nt, Human
agugccuucuaaaggu

SEQ ID NO: 1923117 - RNA, 13 nt, Human
agugauuaccagg

SEQ ID NO: 1923118 - RNA, 23 nt, Human
agugauccucccaccucagccuc

SEQ ID NO: 1923119 - RNA, 22 nt, Human
agugauccucccaccucagccu

SEQ ID NO: 1923120 - RNA, 20 nt, Human
agugauccucccaccucagc

SEQ ID NO: 1923121 - RNA, 19 nt, Human
agugauccucccaccucag

SEQ ID NO: 1923122 - RNA, 14 nt, Human
agugacagaggcag

SEQ ID NO: 1923123 - RNA, 12 nt, Human
agugaauauuca

SEQ ID NO: 1923124 - RNA, 18 nt, Human
agugaauaacugcaaagu

SEQ ID NO: 1923125 - RNA, 19 nt, Human
agugacagaggcagcccca

SEQ ID NO: 1923126 - RNA, 16 nt, Human
agugacagaggcagcc

SEQ ID NO: 1923127 - RNA, 20 nt, Human
aguaacccccacuggacuga

SEQ ID NO: 1923128 - RNA, 21 nt, Human
aguaaaugggggugcauuuga

SEQ ID NO: 1923129 - RNA, 20 nt, Human
aguaaaugggggugcauuug

SEQ ID NO: 1923130 - RNA, 19 nt, Human
aguaaaugggggugcauuu

SEQ ID NO: 1923131 - RNA, 17 nt, Human
aguaacuuacuuaggug

SEQ ID NO: 1923132 - RNA, 17 nt, Human
aguaacuucuuauggaa

SEQ ID NO: 1923133 - RNA, 19 nt, Human
aguaacuucuuauggaauu

SEQ ID NO: 1923134 - RNA, 22 nt, Human
aguacuucuccacccugcucuc

SEQ ID NO: 1923135 - RNA, 21 nt, Human
aguacuucuccacccugcucu

SEQ ID NO: 1923136 - RNA, 19 nt, Human
aguacuucuccacccugcu

SEQ ID NO: 1923137 - RNA, 20 nt, Human
aguacuucuccacccugcuc

SEQ ID NO: 1923138 - RNA, 22 nt, Human
aguauauugauccagaaagaaa

SEQ ID NO: 1923139 - RNA, 15 nt, Human
aguacuggagaaaau

SEQ ID NO: 1923140 - RNA, 13 nt, Human
aggggccagaaga

SEQ ID NO: 1923141 - RNA, 17 nt, Human
aggggccagaagaugaa

SEQ ID NO: 1923142 - RNA, 13 nt, Human
auaaguaaguuug

SEQ ID NO: 1923143 - RNA, 18 nt, Human
auaaguggaggcacuuua

SEQ ID NO: 1923144 - RNA, 19 nt, Human
auaaguggaggcacuuuag

SEQ ID NO: 1923145 - RNA, 20 nt, Human
auaaguggaggcacuuuagg

SEQ ID NO: 1923146 - RNA, 23 nt, Human
auacaaugcugugcccuaaagug

SEQ ID NO: 1923147 - RNA, 12 nt, Human
auaauguuaaca

SEQ ID NO: 1923148 - RNA, 15 nt, Human
auacaccacuacauu

SEQ ID NO: 1923149 - RNA, 21 nt, Human
auaagcuaacaccagacagac

SEQ ID NO: 1923150 - RNA, 21 nt, Human
auaaagaugagugagcaugcc

SEQ ID NO: 1923151 - RNA, 19 nt, Human
auacuugaaaauuaacaug

SEQ ID NO: 1923152 - RNA, 15 nt, Human
auacuguugugcgca

SEQ ID NO: 1923153 - RNA, 17 nt, Human
auacugucucuuucaug

SEQ ID NO: 1923154 - RNA, 16 nt, Human
auacuugaagggccag

SEQ ID NO: 1923155 - RNA, 17 nt, Human
auacuugaagggccaga

SEQ ID NO: 1923156 - RNA, 22 nt, Human
auacuugaagggccagagccag

SEQ ID NO: 1923157 - RNA, 18 nt, Human
auacuugaagggccagag

SEQ ID NO: 1923158 - RNA, 19 nt, Human
auacuugaagggccagagc

SEQ ID NO: 1923159 - RNA, 20 nt, Human
auacuugaagggccagagcc

SEQ ID NO: 1923160 - RNA, 21 nt, Human
auacuugaagggccagagcca

SEQ ID NO: 1923161 - RNA, 13 nt, Human
auacuuuuuacaa

SEQ ID NO: 1923162 - RNA, 20 nt, Human
auacuuuuuacaauuaaaaa

SEQ ID NO: 1923163 - RNA, 21 nt, Human
auacuuuuuuuucuuuaaaaa

SEQ ID NO: 1923164 - RNA, 17 nt, Human
auacaccagcauuccuu

SEQ ID NO: 1923165 - RNA, 18 nt, Human
auacaccagcauuccuuu

SEQ ID NO: 1923166 - RNA, 17 nt, Human
auacaccacuacauucu

SEQ ID NO: 1923167 - RNA, 17 nt, Human
aguuucugggaccucag

SEQ ID NO: 1923168 - RNA, 14 nt, Human
aguuugauuaaauu

SEQ ID NO: 1923169 - RNA, 11 nt, Human
aguuugcaguu

SEQ ID NO: 1923170 - RNA, 15 nt, Human
auaaaagacagugaa

SEQ ID NO: 1923171 - RNA, 16 nt, Human
auaaaagacagugaaa

SEQ ID NO: 1923172 - RNA, 12 nt, Human
auaaaacaggua

SEQ ID NO: 1923173 - RNA, 17 nt, Human
auaaaaaaaagaaauga

SEQ ID NO: 1923174 - RNA, 19 nt, Human
auaaaaaaaagaaaugaaa

SEQ ID NO: 1923175 - RNA, 22 nt, Human
aguucauauguaccauguacau

SEQ ID NO: 1923176 - RNA, 18 nt, Human
aguucauauguaccaugu

SEQ ID NO: 1923177 - RNA, 18 nt, Human
aguuccaccaucaagcca

SEQ ID NO: 1923178 - RNA, 21 nt, Human
aguuccaccaucaagccacca

SEQ ID NO: 1923179 - RNA, 14 nt, Human
aguucauacccugu

SEQ ID NO: 1923180 - RNA, 19 nt, Human
aguuacacauuuuucagau

SEQ ID NO: 1923181 - RNA, 16 nt, Human
aguuacacauuuuuca

SEQ ID NO: 1923182 - RNA, 13 nt, Human
aguuacacauuuu

SEQ ID NO: 1923183 - RNA, 17 nt, Human
aguugaaaaacagcuga

SEQ ID NO: 1923184 - RNA, 21 nt, Human
aguucuuugggccagacaugc

SEQ ID NO: 1923185 - RNA, 16 nt, Human
aguugaagacagagcu

SEQ ID NO: 1923186 - RNA, 17 nt, Human
aguugaagacagagcua

SEQ ID NO: 1923187 - RNA, 18 nt, Human
aguugaaaaacagcugag

SEQ ID NO: 1923188 - RNA, 13 nt, Human
aguguuuucuggg

SEQ ID NO: 1923189 - RNA, 20 nt, Human
aguguuuuaagauaaauuau

SEQ ID NO: 1923190 - RNA, 15 nt, Human
aguguuuucugggau

SEQ ID NO: 1923191 - RNA, 12 nt, Human
agugcuccagcc

SEQ ID NO: 1923192 - RNA, 14 nt, Human
aguggccacuaagc

SEQ ID NO: 1923193 - RNA, 19 nt, Human
aguggccacuaagcagagg

SEQ ID NO: 1923194 - RNA, 20 nt, Human
aguggccacuaagcagagga

SEQ ID NO: 1923195 - RNA, 22 nt, Human
aguggccacuaagcagaggagg

SEQ ID NO: 1923196 - RNA, 17 nt, Human
aguuguuagugugucuu

SEQ ID NO: 1923197 - RNA, 22 nt, Human
aguuguuagugugucuuagugu

SEQ ID NO: 1923198 - RNA, 17 nt, Human
agaucucugcagggccg

SEQ ID NO: 1923199 - RNA, 21 nt, Human
agaucugacaugauuccuucc

SEQ ID NO: 1923200 - RNA, 16 nt, Human
agaucucugcagggcc

SEQ ID NO: 1923201 - RNA, 17 nt, Human
agaugggugaaggcugg

SEQ ID NO: 1923202 - RNA, 21 nt, Human
agaugggugaaggcuggcaug

SEQ ID NO: 1923203 - RNA, 20 nt, Human
agaugggugcuuggaggaag

SEQ ID NO: 1923204 - RNA, 22 nt, Human
agaugggugcuuggaggaagga

SEQ ID NO: 1923205 - RNA, 14 nt, Human
agauucuuuccuga

SEQ ID NO: 1923206 - RNA, 18 nt, Human
agaugacaucugucuagg

SEQ ID NO: 1923207 - RNA, 23 nt, Human
agaucugacaugauuccuuccug

SEQ ID NO: 1923208 - RNA, 19 nt, Human
agcaaauucuguuuuucua

SEQ ID NO: 1923209 - RNA, 19 nt, Human
agauugcaacaggcugggc

SEQ ID NO: 1923210 - RNA, 17 nt, Human
agauugcaacaggcugg

SEQ ID NO: 1923211 - RNA, 16 nt, Human
agauugcaccacugca

SEQ ID NO: 1923212 - RNA, 16 nt, Human
agauugcaacaggcug

SEQ ID NO: 1923213 - RNA, 17 nt, Human
agauugagauguguuca

SEQ ID NO: 1923214 - RNA, 18 nt, Human
agauucuuuccugaggcu

SEQ ID NO: 1923215 - RNA, 15 nt, Human
agauucuuuccugag

SEQ ID NO: 1923216 - RNA, 16 nt, Human
agauucuuuccugagg

SEQ ID NO: 1923217 - RNA, 20 nt, Human
agauagauaggucagugcaa

SEQ ID NO: 1923218 - RNA, 20 nt, Human
agauagccaaggccaaagga

SEQ ID NO: 1923219 - RNA, 19 nt, Human
agauagccccacaggaggu

SEQ ID NO: 1923220 - RNA, 15 nt, Human
agauauaaaagacug

SEQ ID NO: 1923221 - RNA, 14 nt, Human
agaguugaagacag

SEQ ID NO: 1923222 - RNA, 15 nt, Human
agaguugaagacaga

SEQ ID NO: 1923223 - RNA, 13 nt, Human
agaguugagcucu

SEQ ID NO: 1923224 - RNA, 13 nt, Human
agaguugaagaca

SEQ ID NO: 1923225 - RNA, 23 nt, Human
agaggggguggccucccaacuca

SEQ ID NO: 1923226 - RNA, 20 nt, Human
agagggucugaggaauccag

SEQ ID NO: 1923227 - RNA, 19 nt, Human
agagugggguagguuggga

SEQ ID NO: 1923228 - RNA, 16 nt, Human
agauaugauucaaaug

SEQ ID NO: 1923229 - RNA, 15 nt, Human
agauaugauucaaau

SEQ ID NO: 1923230 - RNA, 14 nt, Human
agauaugauucaaa

SEQ ID NO: 1923231 - RNA, 16 nt, Human
agcaucuaugugagac

SEQ ID NO: 1923232 - RNA, 22 nt, Human
agccagcaggcucucaggccag

SEQ ID NO: 1923233 - RNA, 21 nt, Human
agccagcaggcucucaggcca

SEQ ID NO: 1923234 - RNA, 23 nt, Human
agccagcaggcucucaggccagc

SEQ ID NO: 1923235 - RNA, 22 nt, Human
agcccaaaccaccagaagccca

SEQ ID NO: 1923236 - RNA, 20 nt, Human
agcccaaaccaccagaagcc

SEQ ID NO: 1923237 - RNA, 19 nt, Human
agcccaaaccaccagaagc

SEQ ID NO: 1923238 - RNA, 17 nt, Human
agcccaaaccaccagaa

SEQ ID NO: 1923239 - RNA, 13 nt, Human
agcccaccuuggc

SEQ ID NO: 1923240 - RNA, 23 nt, Human
agcccaccccucaacaccucugc

SEQ ID NO: 1923241 - RNA, 14 nt, Human
agcccaaagaagga

SEQ ID NO: 1923242 - RNA, 13 nt, Human
agcccaaagaagg

SEQ ID NO: 1923243 - RNA, 15 nt, Human
agccauuuuuacugu

SEQ ID NO: 1923244 - RNA, 17 nt, Human
agcccacgcccccacug

SEQ ID NO: 1923245 - RNA, 18 nt, Human
agcccacgcccccacugg

SEQ ID NO: 1923246 - RNA, 19 nt, Human
agcccacgcccccacuggu

SEQ ID NO: 1923247 - RNA, 20 nt, Human
agcccacgcccccacuggug

SEQ ID NO: 1923248 - RNA, 17 nt, Human
agccaacuauggccugu

SEQ ID NO: 1923249 - RNA, 13 nt, Human
agcaucucccagu

SEQ ID NO: 1923250 - RNA, 14 nt, Human
agccagauuucacu

SEQ ID NO: 1923251 - RNA, 17 nt, Human
agccagauuucacucuc

SEQ ID NO: 1923252 - RNA, 20 nt, Human
agccagauuucacucuccuu

SEQ ID NO: 1923253 - RNA, 22 nt, Human
agccagauuucacucuccuugg

SEQ ID NO: 1923254 - RNA, 15 nt, Human
agccaagaggcugca

SEQ ID NO: 1923255 - RNA, 14 nt, Human
agccaagaggcugc

SEQ ID NO: 1923256 - RNA, 16 nt, Human
agcagccuggacccug

SEQ ID NO: 1923257 - RNA, 21 nt, Human
agcacugaggaagaacggggc

SEQ ID NO: 1923258 - RNA, 10 nt, Human
agcacugagg

SEQ ID NO: 1923259 - RNA, 14 nt, Human
agcacugaggaaga

SEQ ID NO: 1923260 - RNA, 11 nt, Human
agcacugagga

SEQ ID NO: 1923261 - RNA, 13 nt, Human
agcagugcaugcu

SEQ ID NO: 1923262 - RNA, 16 nt, Human
agcagugcaugcuguc

SEQ ID NO: 1923263 - RNA, 16 nt, Human
agcagccuuuaaugca

SEQ ID NO: 1923264 - RNA, 18 nt, Human
agcagccuuuaaugcauc

SEQ ID NO: 1923265 - RNA, 20 nt, Human
agcagccuggacccugugga

SEQ ID NO: 1923266 - RNA, 23 nt, Human
agcagccugagcaacucuugauu

SEQ ID NO: 1923267 - RNA, 18 nt, Human
agcagcguuucuaugaca

SEQ ID NO: 1923268 - RNA, 19 nt, Human
agcagcguuucuaugacac

SEQ ID NO: 1923269 - RNA, 17 nt, Human
agcagugcaugcugucc

SEQ ID NO: 1923270 - RNA, 14 nt, Human
agcagugggccugg

SEQ ID NO: 1923271 - RNA, 21 nt, Human
agcacagacccugcccugugg

SEQ ID NO: 1923272 - RNA, 19 nt, Human
agaagggagcuagccagag

SEQ ID NO: 1923273 - RNA, 18 nt, Human
agaagggagcuagccaga

SEQ ID NO: 1923274 - RNA, 19 nt, Human
agaagauggcacuuauaac

SEQ ID NO: 1923275 - RNA, 18 nt, Human
agaagaugaaugagcaaa

SEQ ID NO: 1923276 - RNA, 14 nt, Human
agaagucacacagu

SEQ ID NO: 1923277 - RNA, 17 nt, Human
agaagucuuagauguau

SEQ ID NO: 1923278 - RNA, 19 nt, Human
agaagucuuagauguauau

SEQ ID NO: 1923279 - RNA, 16 nt, Human
agaaccagucccccca

SEQ ID NO: 1923280 - RNA, 19 nt, Human
agaaccaguccccccaccc

SEQ ID NO: 1923281 - RNA, 20 nt, Human
agaaccaguccccccacccu

SEQ ID NO: 1923282 - RNA, 21 nt, Human
agaaccaaaaagaggcuaugu

SEQ ID NO: 1923283 - RNA, 19 nt, Human
agaacauugguauucgcuu

SEQ ID NO: 1923284 - RNA, 13 nt, Human
agaacauuuuaau

SEQ ID NO: 1923285 - RNA, 16 nt, Human
agaacauuuuaauuca

SEQ ID NO: 1923286 - RNA, 15 nt, Human
agaagagaaugcaca

SEQ ID NO: 1923287 - RNA, 23 nt, Human
agaagagaaugcacaaacagagg

SEQ ID NO: 1923288 - RNA, 11 nt, Human
agaagagccac

SEQ ID NO: 1923289 - RNA, 13 nt, Human
agaagagccacag

SEQ ID NO: 1923290 - RNA, 14 nt, Human
agaagagccacagu

SEQ ID NO: 1923291 - RNA, 22 nt, Human
agaagagccacagugagggaga

SEQ ID NO: 1923292 - RNA, 13 nt, Human
agaaucucuuucg

SEQ ID NO: 1923293 - RNA, 17 nt, Human
agaaucucaaauaacua

SEQ ID NO: 1923294 - RNA, 16 nt, Human
agaaugaaagggccca

SEQ ID NO: 1923295 - RNA, 18 nt, Human
agaaugcucuuuacuuca

SEQ ID NO: 1923296 - RNA, 23 nt, Human
agaaugcacaaacagaggccgcc

SEQ ID NO: 1923297 - RNA, 20 nt, Human
agaaugaggcugcuuuccaa

SEQ ID NO: 1923298 - RNA, 14 nt, Human
agaaugaggcugcu

SEQ ID NO: 1923299 - RNA, 13 nt, Human
agaaugaggcugc

SEQ ID NO: 1923300 - RNA, 12 nt, Human
agaaugaggcug

SEQ ID NO: 1923301 - RNA, 22 nt, Human
agaacagugauuaccagggacu

SEQ ID NO: 1923302 - RNA, 14 nt, Human
agaacauaaagcaa

SEQ ID NO: 1923303 - RNA, 16 nt, Human
agaacauaaagcaaau

SEQ ID NO: 1923304 - RNA, 17 nt, Human
agaacauaaagcaaaua

SEQ ID NO: 1923305 - RNA, 13 nt, Human
agaacaucccucc

SEQ ID NO: 1923306 - RNA, 17 nt, Human
agaacaucccuccuggg

SEQ ID NO: 1923307 - RNA, 17 nt, Human
agaaccaaaaagaggcu

SEQ ID NO: 1923308 - RNA, 18 nt, Human
agaaccaaaaagaggcua

SEQ ID NO: 1923309 - RNA, 14 nt, Human
agaacauguagaaa

SEQ ID NO: 1923310 - RNA, 17 nt, Human
agaacauguagaaaaca

SEQ ID NO: 1923311 - RNA, 13 nt, Human
agaacaugugaga

SEQ ID NO: 1923312 - RNA, 18 nt, Human
agaacauguagaaaacaa

SEQ ID NO: 1923313 - RNA, 19 nt, Human
agaacauguagaaaacaaa

SEQ ID NO: 1923314 - RNA, 22 nt, Human
agaacaugugagagguuugacu

SEQ ID NO: 1923315 - RNA, 15 nt, Human
agaacacccucuaaa

SEQ ID NO: 1923316 - RNA, 11 nt, Human
agaacacuggu

SEQ ID NO: 1923317 - RNA, 20 nt, Human
agaacaauauugacuuuguc

SEQ ID NO: 1923318 - RNA, 21 nt, Human
agaacaauauugacuuugucu

SEQ ID NO: 1923319 - RNA, 16 nt, Human
agaacacaaggucauu

SEQ ID NO: 1923320 - RNA, 17 nt, Human
agaacaaccaaaaucuu

SEQ ID NO: 1923321 - RNA, 17 nt, Human
agaacaauauugacuuu

SEQ ID NO: 1923322 - RNA, 19 nt, Human
agaacaauauugacuuugu

SEQ ID NO: 1923323 - RNA, 19 nt, Human
agacaaggaaaaaauaaca

SEQ ID NO: 1923324 - RNA, 20 nt, Human
agacaaugugaaaagaaaaa

SEQ ID NO: 1923325 - RNA, 18 nt, Human
agacgaaacauuuguucu

SEQ ID NO: 1923326 - RNA, 16 nt, Human
agaccuuucaaagcca

SEQ ID NO: 1923327 - RNA, 19 nt, Human
agaccuuucaaagccauuu

SEQ ID NO: 1923328 - RNA, 19 nt, Human
agaccuuuuaacuccucaa

SEQ ID NO: 1923329 - RNA, 14 nt, Human
agaccacguuucua

SEQ ID NO: 1923330 - RNA, 23 nt, Human
agaccaucccugaaggccccgcc

SEQ ID NO: 1923331 - RNA, 17 nt, Human
agacagcuccacccugg

SEQ ID NO: 1923332 - RNA, 21 nt, Human
agacagcccgggcucugccuc

SEQ ID NO: 1923333 - RNA, 14 nt, Human
agacaauuuauuau

SEQ ID NO: 1923334 - RNA, 22 nt, Human
agacagcccgggcucugccucc

SEQ ID NO: 1923335 - RNA, 23 nt, Human
agacagcccgggcucugccuccc

SEQ ID NO: 1923336 - RNA, 15 nt, Human
agacuaucuaaaugu

SEQ ID NO: 1923337 - RNA, 17 nt, Human
agacuauauuguacaca

SEQ ID NO: 1923338 - RNA, 17 nt, Human
agacgcugugcugcccu

SEQ ID NO: 1923339 - RNA, 15 nt, Human
agacgagaggacgag

SEQ ID NO: 1923340 - RNA, 18 nt, Human
agacgcugugcugcccug

SEQ ID NO: 1923341 - RNA, 19 nt, Human
agacgcugugcugcccugc

SEQ ID NO: 1923342 - RNA, 20 nt, Human
agacgcugugcugcccugcc

SEQ ID NO: 1923343 - RNA, 18 nt, Human
agagcccacgcccccacu

SEQ ID NO: 1923344 - RNA, 15 nt, Human
agagaggcaauggcu

SEQ ID NO: 1923345 - RNA, 22 nt, Human
agagaggcagaagaacccuggc

SEQ ID NO: 1923346 - RNA, 11 nt, Human
agagagcaaga

SEQ ID NO: 1923347 - RNA, 19 nt, Human
agagagcaagacgcugugc

SEQ ID NO: 1923348 - RNA, 23 nt, Human
agagagcaagacgcugugcugcc

SEQ ID NO: 1923349 - RNA, 14 nt, Human
agagcccagcucca

SEQ ID NO: 1923350 - RNA, 12 nt, Human
agagcccagcuc

SEQ ID NO: 1923351 - RNA, 13 nt, Human
agagcccagcucc

SEQ ID NO: 1923352 - RNA, 12 nt, Human
agacugaccaau

SEQ ID NO: 1923353 - RNA, 21 nt, Human
agacugaccaauauuguacag

SEQ ID NO: 1923354 - RNA, 14 nt, Human
agagaaauauggaa

SEQ ID NO: 1923355 - RNA, 16 nt, Human
agacucuuuggacacu

SEQ ID NO: 1923356 - RNA, 18 nt, Human
aggaaaaaauaacaauga

SEQ ID NO: 1923357 - RNA, 13 nt, Human
aggaaaaacaggu

SEQ ID NO: 1923358 - RNA, 22 nt, Human
aggaaaaaaaucguccagggag

SEQ ID NO: 1923359 - RNA, 23 nt, Human
agcuuuuuucucugauacagaaa

SEQ ID NO: 1923360 - RNA, 21 nt, Human
agcuuuuuuccuuaauccagc

SEQ ID NO: 1923361 - RNA, 21 nt, Human
aggaaaaaaaucguccaggga

SEQ ID NO: 1923362 - RNA, 22 nt, Human
agcuuuuuucucugauacagaa

SEQ ID NO: 1923363 - RNA, 20 nt, Human
agcuuuuuucucugauacag

SEQ ID NO: 1923364 - RNA, 19 nt, Human
agcuuuuuucucugauaca

SEQ ID NO: 1923365 - RNA, 22 nt, Human
agcuuuguuuguugucagcuga

SEQ ID NO: 1923366 - RNA, 21 nt, Human
agcuuuguuuguugucagcug

SEQ ID NO: 1923367 - RNA, 15 nt, Human
aggaacacuccuuca

SEQ ID NO: 1923368 - RNA, 18 nt, Human
aggaacuugagaacuuua

SEQ ID NO: 1923369 - RNA, 14 nt, Human
aggaacuuccaggu

SEQ ID NO: 1923370 - RNA, 12 nt, Human
aggaacacuccu

SEQ ID NO: 1923371 - RNA, 11 nt, Human
aggaaguacug

SEQ ID NO: 1923372 - RNA, 15 nt, Human
aggaaguacuggaga

SEQ ID NO: 1923373 - RNA, 14 nt, Human
aggaagguagaaau

SEQ ID NO: 1923374 - RNA, 18 nt, Human
aggaagacccaacacaug

SEQ ID NO: 1923375 - RNA, 22 nt, Human
aggaagaacggggcucuucuca

SEQ ID NO: 1923376 - RNA, 18 nt, Human
aggaagaacggggcucuu

SEQ ID NO: 1923377 - RNA, 12 nt, Human
aggaagaacggg

SEQ ID NO: 1923378 - RNA, 21 nt, Human
aggaagaacacccucuaaaug

SEQ ID NO: 1923379 - RNA, 15 nt, Human
agcuguauuuugaaa

SEQ ID NO: 1923380 - RNA, 15 nt, Human
agcuggucccacuca

SEQ ID NO: 1923381 - RNA, 15 nt, Human
agcugcgggcugggu

SEQ ID NO: 1923382 - RNA, 20 nt, Human
agcugguaaucuugcucugc

SEQ ID NO: 1923383 - RNA, 16 nt, Human
agcugguugagguuuc

SEQ ID NO: 1923384 - RNA, 21 nt, Human
agcuggugguaucugaguuga

SEQ ID NO: 1923385 - RNA, 14 nt, Human
agcugccuuggcuc

SEQ ID NO: 1923386 - RNA, 16 nt, Human
agcugccuuggcucag

SEQ ID NO: 1923387 - RNA, 17 nt, Human
agcugccuuggcucaga

SEQ ID NO: 1923388 - RNA, 19 nt, Human
agcugccuuggcucagaca

SEQ ID NO: 1923389 - RNA, 20 nt, Human
agcugccuuggcucagacau

SEQ ID NO: 1923390 - RNA, 15 nt, Human
agcugacuuuucugu

SEQ ID NO: 1923391 - RNA, 21 nt, Human
agcugacuuuucuguccgagc

SEQ ID NO: 1923392 - RNA, 13 nt, Human
agcugacucacac

SEQ ID NO: 1923393 - RNA, 22 nt, Human
agcucuuuccuccuuccaugga

SEQ ID NO: 1923394 - RNA, 23 nt, Human
agcucuuuccuccuuccauggaa

SEQ ID NO: 1923395 - RNA, 14 nt, Human
agcucuuugcacua

SEQ ID NO: 1923396 - RNA, 12 nt, Human
agcucuuuccuc

SEQ ID NO: 1923397 - RNA, 13 nt, Human
agcucuuuccucc

SEQ ID NO: 1923398 - RNA, 15 nt, Human
agcucuuuccuccuu

SEQ ID NO: 1923399 - RNA, 17 nt, Human
agcucuuuccuccuucc

SEQ ID NO: 1923400 - RNA, 16 nt, Human
agcucuuggcuccacu

SEQ ID NO: 1923401 - RNA, 16 nt, Human
agcuccucuccccagc

SEQ ID NO: 1923402 - RNA, 17 nt, Human
agcuccucuccccagcc

SEQ ID NO: 1923403 - RNA, 18 nt, Human
agcuccucuccccagccc

SEQ ID NO: 1923404 - RNA, 19 nt, Human
agcuccucuccccagccca

SEQ ID NO: 1923405 - RNA, 20 nt, Human
agcuccucuccccagcccag

SEQ ID NO: 1923406 - RNA, 21 nt, Human
agcuccucuccccagcccaga

SEQ ID NO: 1923407 - RNA, 22 nt, Human
agcuccucuccccagcccagag

SEQ ID NO: 1923408 - RNA, 23 nt, Human
agcuccucuccccagcccagaga

SEQ ID NO: 1923409 - RNA, 24 nt, Human
agcuccucuccccagcccagagac

SEQ ID NO: 1923410 - RNA, 23 nt, Human
agcucaccagccccagugcccac

SEQ ID NO: 1923411 - RNA, 22 nt, Human
agcucaccagccccagugccca

SEQ ID NO: 1923412 - RNA, 23 nt, Human
agccuggccacgcagccaggaca

SEQ ID NO: 1923413 - RNA, 22 nt, Human
agccuggccacgcagccaggac

SEQ ID NO: 1923414 - RNA, 21 nt, Human
agccuggccacgcagccagga

SEQ ID NO: 1923415 - RNA, 20 nt, Human
agccuggccacgcagccagg

SEQ ID NO: 1923416 - RNA, 12 nt, Human
agccuggccaga

SEQ ID NO: 1923417 - RNA, 13 nt, Human
agccuggccagac

SEQ ID NO: 1923418 - RNA, 16 nt, Human
agccuggccacgcagc

SEQ ID NO: 1923419 - RNA, 14 nt, Human
agccuggacccugu

SEQ ID NO: 1923420 - RNA, 17 nt, Human
agccugcugccugcuuu

SEQ ID NO: 1923421 - RNA, 11 nt, Human
agccuggcucc

SEQ ID NO: 1923422 - RNA, 18 nt, Human
agccugggcaaugugaua

SEQ ID NO: 1923423 - RNA, 21 nt, Human
agccuggccagacacaggccc

SEQ ID NO: 1923424 - RNA, 22 nt, Human
agccuggccagacacaggcccu

SEQ ID NO: 1923425 - RNA, 14 nt, Human
agccuggccagaca

SEQ ID NO: 1923426 - RNA, 15 nt, Human
agccuggccagacac

SEQ ID NO: 1923427 - RNA, 16 nt, Human
agccuggccagacaca

SEQ ID NO: 1923428 - RNA, 18 nt, Human
agccuggccagacacagg

SEQ ID NO: 1923429 - RNA, 15 nt, Human
agccuuucuuuugga

SEQ ID NO: 1923430 - RNA, 13 nt, Human
agccuuuaaugca

SEQ ID NO: 1923431 - RNA, 15 nt, Human
agccuuuaaugcauc

SEQ ID NO: 1923432 - RNA, 14 nt, Human
agccuuuaaugcau

SEQ ID NO: 1923433 - RNA, 13 nt, Human
agcuaaauccuuu

SEQ ID NO: 1923434 - RNA, 18 nt, Human
agcuaaacggauuccaaa

SEQ ID NO: 1923435 - RNA, 19 nt, Human
agcuaacauggaaguacua

SEQ ID NO: 1923436 - RNA, 20 nt, Human
agcuaacauggaaguacuau

SEQ ID NO: 1923437 - RNA, 12 nt, Human
agcuaagaaccu

SEQ ID NO: 1923438 - RNA, 13 nt, Human
agcuaagaaccug

SEQ ID NO: 1923439 - RNA, 14 nt, Human
agcuaagaaaagau

SEQ ID NO: 1923440 - RNA, 15 nt, Human
agcgauucuucugcu

SEQ ID NO: 1923441 - RNA, 17 nt, Human
agcgacagugagacucu

SEQ ID NO: 1923442 - RNA, 19 nt, Human
agcgauucuucugcuucag

SEQ ID NO: 1923443 - RNA, 17 nt, Human
agcgauucuucugcuuc

SEQ ID NO: 1923444 - RNA, 15 nt, Human
agcgacagugagacu

SEQ ID NO: 1923445 - RNA, 13 nt, Human
agcgacagugaga

SEQ ID NO: 1923446 - RNA, 16 nt, Human
agcgaauuuuaaaaga

SEQ ID NO: 1923447 - RNA, 15 nt, Human
agcgaauuuuaaaag

SEQ ID NO: 1923448 - RNA, 13 nt, Human
agcgaauuuuaaa

SEQ ID NO: 1923449 - RNA, 13 nt, Human
agcuacaaaugca

SEQ ID NO: 1923450 - RNA, 22 nt, Human
agcuacaccuuucuccuuugua

SEQ ID NO: 1923451 - RNA, 21 nt, Human
agcuacaccuuucuccuuugu

SEQ ID NO: 1923452 - RNA, 21 nt, Human
agcucaccagccccagugccc

SEQ ID NO: 1923453 - RNA, 15 nt, Human
agcucaccagcccca

SEQ ID NO: 1923454 - RNA, 14 nt, Human
agcucaccagcccc

SEQ ID NO: 1923455 - RNA, 13 nt, Human
agcucaccagccc

SEQ ID NO: 1923456 - RNA, 12 nt, Human
agcuacaaaugc

SEQ ID NO: 1923457 - RNA, 15 nt, Human
agcuaaugggacacu

SEQ ID NO: 1923458 - RNA, 14 nt, Human
agcuaaugggacac

SEQ ID NO: 1923459 - RNA, 13 nt, Human
agcuaaugggaca

SEQ ID NO: 1923460 - RNA, 17 nt, Human
agcuaagaaccuggaac

SEQ ID NO: 1923461 - RNA, 14 nt, Human
agcuaagaaccugg

SEQ ID NO: 1923462 - RNA, 16 nt, Human
agcuaagaaccuggaa

SEQ ID NO: 1923463 - RNA, 15 nt, Human
aggauggcaggacgu

SEQ ID NO: 1923464 - RNA, 22 nt, Human
aggauggcaggacgugggcugg

SEQ ID NO: 1923465 - RNA, 15 nt, Human
aggaguucugcucau

SEQ ID NO: 1923466 - RNA, 18 nt, Human
aggaguuucguuuucaaa

SEQ ID NO: 1923467 - RNA, 14 nt, Human
aggaguucugcuca

SEQ ID NO: 1923468 - RNA, 21 nt, Human
aggagugccguguguugcaug

SEQ ID NO: 1923469 - RNA, 23 nt, Human
aggaguucagggucauagcaugc

SEQ ID NO: 1923470 - RNA, 19 nt, Human
aggaguuccuaaccagccu

SEQ ID NO: 1923471 - RNA, 14 nt, Human
aggagugagcacua

SEQ ID NO: 1923472 - RNA, 12 nt, Human
aggagugagcac

SEQ ID NO: 1923473 - RNA, 15 nt, Human
aggaggucucuaaga

SEQ ID NO: 1923474 - RNA, 21 nt, Human
aggagaccuggcacuggaugc

SEQ ID NO: 1923475 - RNA, 14 nt, Human
aggagacccacagg

SEQ ID NO: 1923476 - RNA, 13 nt, Human
aggagacaggcag

SEQ ID NO: 1923477 - RNA, 18 nt, Human
aggagacaggcagagcug

SEQ ID NO: 1923478 - RNA, 19 nt, Human
aggaaguacuggagaaaau

SEQ ID NO: 1923479 - RNA, 13 nt, Human
aggaaguagagga

SEQ ID NO: 1923480 - RNA, 14 nt, Human
aggaggucucuaag

SEQ ID NO: 1923481 - RNA, 14 nt, Human
aggagggcagcaga

SEQ ID NO: 1923482 - RNA, 21 nt, Human
aggaugguaauucuuauucuu

SEQ ID NO: 1923483 - RNA, 13 nt, Human
aggaugucugggc

SEQ ID NO: 1923484 - RNA, 20 nt, Human
aggaugugauuguggaaugg

SEQ ID NO: 1923485 - RNA, 23 nt, Human
aggccagggggccagucccugag

SEQ ID NO: 1923486 - RNA, 19 nt, Human
aggccagggggccaguccc

SEQ ID NO: 1923487 - RNA, 17 nt, Human
aggccaugggccuccug

SEQ ID NO: 1923488 - RNA, 17 nt, Human
aggcccucugcccacuc

SEQ ID NO: 1923489 - RNA, 16 nt, Human
aggccaugggccuccu

SEQ ID NO: 1923490 - RNA, 14 nt, Human
aggccaugggccuc

SEQ ID NO: 1923491 - RNA, 13 nt, Human
aggccagcugcuu

SEQ ID NO: 1923492 - RNA, 14 nt, Human
aggccagcugcuug

SEQ ID NO: 1923493 - RNA, 16 nt, Human
aggccagcugcuuggg

SEQ ID NO: 1923494 - RNA, 16 nt, Human
aggccaggcccucugc

SEQ ID NO: 1923495 - RNA, 17 nt, Human
aggccaggcccucugcc

SEQ ID NO: 1923496 - RNA, 18 nt, Human
aggccaggcccucugccc

SEQ ID NO: 1923497 - RNA, 19 nt, Human
aggccaggcccucugccca

SEQ ID NO: 1923498 - RNA, 23 nt, Human
aggccaggcccucugcccacucc

SEQ ID NO: 1923499 - RNA, 22 nt, Human
aggcauguucucugaggacacu

SEQ ID NO: 1923500 - RNA, 20 nt, Human
aggcauguucucugaggaca

SEQ ID NO: 1923501 - RNA, 21 nt, Human
aggcauuccccaggaggccag

SEQ ID NO: 1923502 - RNA, 22 nt, Human
aggcauuccccaggaggccagc

SEQ ID NO: 1923503 - RNA, 23 nt, Human
aggcauuccccaggaggccagcc

SEQ ID NO: 1923504 - RNA, 12 nt, Human
aggcauguucuc

SEQ ID NO: 1923505 - RNA, 22 nt, Human
aggcaugugccacccacccaac

SEQ ID NO: 1923506 - RNA, 23 nt, Human
aggcaugugaugagaggaaauca

SEQ ID NO: 1923507 - RNA, 24 nt, Human
aggcaugugaugagaggaaaucac

SEQ ID NO: 1923508 - RNA, 17 nt, Human
aggcagauccaggacua

SEQ ID NO: 1923509 - RNA, 13 nt, Human
aggcagauacagg

SEQ ID NO: 1923510 - RNA, 20 nt, Human
aggcagagguugcagugagc

SEQ ID NO: 1923511 - RNA, 22 nt, Human
aggcagaacucaucuagguaaa

SEQ ID NO: 1923512 - RNA, 14 nt, Human
aggcagccaggcca

SEQ ID NO: 1923513 - RNA, 11 nt, Human
aggcagaucca

SEQ ID NO: 1923514 - RNA, 15 nt, Human
aggcagauccaggac

SEQ ID NO: 1923515 - RNA, 16 nt, Human
aggcagauccaggacu

SEQ ID NO: 1923516 - RNA, 15 nt, Human
aggcagccaggccac

SEQ ID NO: 1923517 - RNA, 16 nt, Human
aggcagccaggccaca

SEQ ID NO: 1923518 - RNA, 22 nt, Human
aggcacuuuagggcuguaaaau

SEQ ID NO: 1923519 - RNA, 20 nt, Human
aggcacuuuagggcuguaaa

SEQ ID NO: 1923520 - RNA, 23 nt, Human
aggcuguaucccaugagccucag

SEQ ID NO: 1923521 - RNA, 17 nt, Human
aggcugcagugagccga

SEQ ID NO: 1923522 - RNA, 19 nt, Human
aggcugcagugagccgaga

SEQ ID NO: 1923523 - RNA, 24 nt, Human
aggcuguaucccaugagccucagc

SEQ ID NO: 1923524 - RNA, 19 nt, Human
aggcugucaauuacaggaa

SEQ ID NO: 1923525 - RNA, 20 nt, Human
aggcuguucccauguagccc

SEQ ID NO: 1923526 - RNA, 12 nt, Human
aggcugucaauu

SEQ ID NO: 1923527 - RNA, 14 nt, Human
aggcuuacacccac

SEQ ID NO: 1923528 - RNA, 14 nt, Human
aggcuuaaacccau

SEQ ID NO: 1923529 - RNA, 18 nt, Human
aggcugaggcaagagaau

SEQ ID NO: 1923530 - RNA, 22 nt, Human
aggcucuggagcccacuguacu

SEQ ID NO: 1923531 - RNA, 16 nt, Human
aggcucuguuuaugcu

SEQ ID NO: 1923532 - RNA, 18 nt, Human
aggcucuguuuaugcuuu

SEQ ID NO: 1923533 - RNA, 21 nt, Human
aggcccucugcccacucccug

SEQ ID NO: 1923534 - RNA, 19 nt, Human
aggcccucugcccacuccc

SEQ ID NO: 1923535 - RNA, 20 nt, Human
aggcccucugcccacucccu

SEQ ID NO: 1923536 - RNA, 13 nt, Human
agggccuggcuca

SEQ ID NO: 1923537 - RNA, 14 nt, Human
agggccuggcucag

SEQ ID NO: 1923538 - RNA, 17 nt, Human
agggauuguuucuguuu

SEQ ID NO: 1923539 - RNA, 22 nt, Human
agggauuuggggcucagagugg

SEQ ID NO: 1923540 - RNA, 18 nt, Human
agggccuggcucaggugg

SEQ ID NO: 1923541 - RNA, 19 nt, Human
agggcguggaaaggggcag

SEQ ID NO: 1923542 - RNA, 13 nt, Human
aggggcaugggaa

SEQ ID NO: 1923543 - RNA, 14 nt, Human
agggaugguguuca

SEQ ID NO: 1923544 - RNA, 15 nt, Human
agggaugcccuggag

SEQ ID NO: 1923545 - RNA, 17 nt, Human
agggaugcccuggaggu

SEQ ID NO: 1923546 - RNA, 19 nt, Human
agggaugcccuggaggugg

SEQ ID NO: 1923547 - RNA, 20 nt, Human
agggaugcccuggagguggc

SEQ ID NO: 1923548 - RNA, 15 nt, Human
agggaugcauggaga

SEQ ID NO: 1923549 - RNA, 21 nt, Human
agggaugcccuggagguggcu

SEQ ID NO: 1923550 - RNA, 19 nt, Human
agggaucuauacuugcuuu

SEQ ID NO: 1923551 - RNA, 22 nt, Human
agggaucugguccuacccaucc

SEQ ID NO: 1923552 - RNA, 18 nt, Human
agggaucuauacuugcuu

SEQ ID NO: 1923553 - RNA, 17 nt, Human
agggacugagaaauuua

SEQ ID NO: 1923554 - RNA, 14 nt, Human
agggacugaagcca

SEQ ID NO: 1923555 - RNA, 15 nt, Human
agggacugagaaauu

SEQ ID NO: 1923556 - RNA, 13 nt, Human
agggacugagaaa

SEQ ID NO: 1923557 - RNA, 14 nt, Human
agggacugagaaau

SEQ ID NO: 1923558 - RNA, 15 nt, Human
gcccuaaaagcacac

SEQ ID NO: 1923559 - RNA, 15 nt, Human
gcccuaaugucugua

SEQ ID NO: 1923560 - RNA, 14 nt, Human
gcccuacuauucag

SEQ ID NO: 1923561 - RNA, 15 nt, Human
gccccugcccggcug

SEQ ID NO: 1923562 - RNA, 16 nt, Human
gccccuggaugcagcc

SEQ ID NO: 1923563 - RNA, 18 nt, Human
gccccuggaugcagccuc

SEQ ID NO: 1923564 - RNA, 22 nt, Human
gccccuggaugcagccucacag

SEQ ID NO: 1923565 - RNA, 22 nt, Human
gcccuaaaguguauuuuuuuac

SEQ ID NO: 1923566 - RNA, 18 nt, Human
gccccaaaacucuccucu

SEQ ID NO: 1923567 - RNA, 19 nt, Human
gccccaaaacucuccucug

SEQ ID NO: 1923568 - RNA, 18 nt, Human
gcccccaggacugggcca

SEQ ID NO: 1923569 - RNA, 14 nt, Human
gccccugcccggcu

SEQ ID NO: 1923570 - RNA, 13 nt, Human
gccccugcccggc

SEQ ID NO: 1923571 - RNA, 13 nt, Human
gcccccaucucau

SEQ ID NO: 1923572 - RNA, 19 nt, Human
gcccacucccugcaaccug

SEQ ID NO: 1923573 - RNA, 14 nt, Human
gcccacucccugca

SEQ ID NO: 1923574 - RNA, 15 nt, Human
gcccacucccugcaa

SEQ ID NO: 1923575 - RNA, 13 nt, Human
gcccacucccugc

SEQ ID NO: 1923576 - RNA, 16 nt, Human
gcccugccuccuuugu

SEQ ID NO: 1923577 - RNA, 22 nt, Human
gcccugccuccuuugugaggaa

SEQ ID NO: 1923578 - RNA, 16 nt, Human
gcccuguugacacagg

SEQ ID NO: 1923579 - RNA, 19 nt, Human
gcccuguugacacaggucu

SEQ ID NO: 1923580 - RNA, 21 nt, Human
gcccuguugacacaggucuuu

SEQ ID NO: 1923581 - RNA, 16 nt, Human
gccgccaugcuccugg

SEQ ID NO: 1923582 - RNA, 14 nt, Human
gccgcccaaggccc

SEQ ID NO: 1923583 - RNA, 16 nt, Human
gcccuuaccugccagg

SEQ ID NO: 1923584 - RNA, 20 nt, Human
gcccuuaccugccaggaagc

SEQ ID NO: 1923585 - RNA, 15 nt, Human
gccgccaugcuccug

SEQ ID NO: 1923586 - RNA, 20 nt, Human
gcccuguugacacaggucuu

SEQ ID NO: 1923587 - RNA, 12 nt, Human
gccggccagccc

SEQ ID NO: 1923588 - RNA, 14 nt, Human
gccggccagccccu

SEQ ID NO: 1923589 - RNA, 12 nt, Human
gccgcugccacc

SEQ ID NO: 1923590 - RNA, 14 nt, Human
gccgcugccaccca

SEQ ID NO: 1923591 - RNA, 17 nt, Human
gccgcugccacccaccu

SEQ ID NO: 1923592 - RNA, 13 nt, Human
gccgccugguacu

SEQ ID NO: 1923593 - RNA, 15 nt, Human
gccgccugguacuca

SEQ ID NO: 1923594 - RNA, 18 nt, Human
gccgccugguacucaagc

SEQ ID NO: 1923595 - RNA, 17 nt, Human
gccgcgucgcccuccca

SEQ ID NO: 1923596 - RNA, 15 nt, Human
gccuggccccucagg

SEQ ID NO: 1923597 - RNA, 16 nt, Human
gccuggccccucaggg

SEQ ID NO: 1923598 - RNA, 17 nt, Human
gccuggccccucagggu

SEQ ID NO: 1923599 - RNA, 21 nt, Human
gccugggaggucaaggcugca

SEQ ID NO: 1923600 - RNA, 22 nt, Human
gccugggaggucaaggcugcag

SEQ ID NO: 1923601 - RNA, 14 nt, Human
gccugggaucccuc

SEQ ID NO: 1923602 - RNA, 13 nt, Human
gccugugucuuua

SEQ ID NO: 1923603 - RNA, 22 nt, Human
gccugugucuuuaaaugcugcu

SEQ ID NO: 1923604 - RNA, 21 nt, Human
gccugggaucccucauccuca

SEQ ID NO: 1923605 - RNA, 18 nt, Human
gccugggaucccucaucc

SEQ ID NO: 1923606 - RNA, 20 nt, Human
gccuggccccucaggguccc

SEQ ID NO: 1923607 - RNA, 22 nt, Human
gccuggccccucagggucccug

SEQ ID NO: 1923608 - RNA, 10 nt, Human
gccuggccug

SEQ ID NO: 1923609 - RNA, 14 nt, Human
gccugcgagggcag

SEQ ID NO: 1923610 - RNA, 21 nt, Human
gccugcgccaccgcccagaga

SEQ ID NO: 1923611 - RNA, 16 nt, Human
gccugccucuucucua

SEQ ID NO: 1923612 - RNA, 18 nt, Human
gccugccuccagggcugg

SEQ ID NO: 1923613 - RNA, 17 nt, Human
gccugccuccagggcug

SEQ ID NO: 1923614 - RNA, 22 nt, Human
gccugccuccagggcuggacug

SEQ ID NO: 1923615 - RNA, 17 nt, Human
gccuacccacccccagg

SEQ ID NO: 1923616 - RNA, 16 nt, Human
gccuacccacccccag

SEQ ID NO: 1923617 - RNA, 19 nt, Human
gccuccuggcccaggugag

SEQ ID NO: 1923618 - RNA, 15 nt, Human
gccuccuggcccagg

SEQ ID NO: 1923619 - RNA, 13 nt, Human
gccuccugugugu

SEQ ID NO: 1923620 - RNA, 15 nt, Human
gccucuggaaagcaa

SEQ ID NO: 1923621 - RNA, 14 nt, Human
gccucugggacugg

SEQ ID NO: 1923622 - RNA, 12 nt, Human
gccucugugccu

SEQ ID NO: 1923623 - RNA, 17 nt, Human
gccucuggaaagcaaag

SEQ ID NO: 1923624 - RNA, 12 nt, Human
gccucugggacu

SEQ ID NO: 1923625 - RNA, 13 nt, Human
gccuccuccagcc

SEQ ID NO: 1923626 - RNA, 18 nt, Human
gccuccugcccuuaccug

SEQ ID NO: 1923627 - RNA, 20 nt, Human
gccugcccaggccccugcca

SEQ ID NO: 1923628 - RNA, 19 nt, Human
gccugcccaggccccugcc

SEQ ID NO: 1923629 - RNA, 16 nt, Human
gccugccuccagggcu

SEQ ID NO: 1923630 - RNA, 11 nt, Human
gccugccucca

SEQ ID NO: 1923631 - RNA, 18 nt, Human
gccugcccaggccccugc

SEQ ID NO: 1923632 - RNA, 17 nt, Human
gccugcccaggccccug

SEQ ID NO: 1923633 - RNA, 12 nt, Human
gccucuucucua

SEQ ID NO: 1923634 - RNA, 23 nt, Human
gccucuucucuacucuagggaaa

SEQ ID NO: 1923635 - RNA, 15 nt, Human
gccaggcccucugcc

SEQ ID NO: 1923636 - RNA, 19 nt, Human
gccaggccacuggccccug

SEQ ID NO: 1923637 - RNA, 13 nt, Human
gccaggccagagg

SEQ ID NO: 1923638 - RNA, 16 nt, Human
gccaggcccucugccc

SEQ ID NO: 1923639 - RNA, 17 nt, Human
gccaggcccucugccca

SEQ ID NO: 1923640 - RNA, 21 nt, Human
gccaggcccucugcccacucc

SEQ ID NO: 1923641 - RNA, 19 nt, Human
gccaggcccucugcccacu

SEQ ID NO: 1923642 - RNA, 20 nt, Human
gccaggcccucugcccacuc

SEQ ID NO: 1923643 - RNA, 12 nt, Human
gccaggccagag

SEQ ID NO: 1923644 - RNA, 20 nt, Human
gccaggauggaacacggcca

SEQ ID NO: 1923645 - RNA, 22 nt, Human
gccaggauggaacacggccaca

SEQ ID NO: 1923646 - RNA, 23 nt, Human
gccaggccacaagacccuugugg

SEQ ID NO: 1923647 - RNA, 13 nt, Human
gccagcaggcucu

SEQ ID NO: 1923648 - RNA, 16 nt, Human
gccagcaggcucucag

SEQ ID NO: 1923649 - RNA, 14 nt, Human
gccagcacuugucc

SEQ ID NO: 1923650 - RNA, 19 nt, Human
gccagcacuuguccagcug

SEQ ID NO: 1923651 - RNA, 20 nt, Human
gccagcacuuguccagcuga

SEQ ID NO: 1923652 - RNA, 17 nt, Human
gccagcaggcucucagg

SEQ ID NO: 1923653 - RNA, 18 nt, Human
gccagcaggcucucaggc

SEQ ID NO: 1923654 - RNA, 19 nt, Human
gccagcaggcucucaggcc

SEQ ID NO: 1923655 - RNA, 20 nt, Human
gccagcaggcucucaggcca

SEQ ID NO: 1923656 - RNA, 21 nt, Human
gccagcaggcucucaggccag

SEQ ID NO: 1923657 - RNA, 23 nt, Human
gccagcaggcucucaggccagcu

SEQ ID NO: 1923658 - RNA, 16 nt, Human
gccagacacaggcccu

SEQ ID NO: 1923659 - RNA, 17 nt, Human
gccagacacaggcccuc

SEQ ID NO: 1923660 - RNA, 22 nt, Human
gccagacaucaacagauaaaua

SEQ ID NO: 1923661 - RNA, 18 nt, Human
gccagacaugccacaagg

SEQ ID NO: 1923662 - RNA, 19 nt, Human
gccagaagaugaacagacu

SEQ ID NO: 1923663 - RNA, 20 nt, Human
gccagaagaugaacagacug

SEQ ID NO: 1923664 - RNA, 13 nt, Human
gccagaccugcag

SEQ ID NO: 1923665 - RNA, 14 nt, Human
gccagaccugcaga

SEQ ID NO: 1923666 - RNA, 21 nt, Human
gccagaccugcagacgcccag

SEQ ID NO: 1923667 - RNA, 17 nt, Human
gccagacccccuggaga

SEQ ID NO: 1923668 - RNA, 12 nt, Human
gccagcacacag

SEQ ID NO: 1923669 - RNA, 13 nt, Human
gccagcacacagg

SEQ ID NO: 1923670 - RNA, 15 nt, Human
gccagcacacagggc

SEQ ID NO: 1923671 - RNA, 16 nt, Human
gccagcacacagggca

SEQ ID NO: 1923672 - RNA, 17 nt, Human
gccagcacacagggcag

SEQ ID NO: 1923673 - RNA, 18 nt, Human
gccagcacacagggcagu

SEQ ID NO: 1923674 - RNA, 22 nt, Human
gccagcacacagggcagugagg

SEQ ID NO: 1923675 - RNA, 20 nt, Human
gccauauucuguuggccagu

SEQ ID NO: 1923676 - RNA, 19 nt, Human
gccauauucuguuggccag

SEQ ID NO: 1923677 - RNA, 14 nt, Human
gccauguuggccag

SEQ ID NO: 1923678 - RNA, 18 nt, Human
gccauguuggccaggcug

SEQ ID NO: 1923679 - RNA, 17 nt, Human
gccauguuggccaggcu

SEQ ID NO: 1923680 - RNA, 16 nt, Human
gccauguuggccaggc

SEQ ID NO: 1923681 - RNA, 15 nt, Human
gccauguuggccagg

SEQ ID NO: 1923682 - RNA, 24 nt, Human
gccauguuggccaggcuggucuca

SEQ ID NO: 1923683 - RNA, 22 nt, Human
gccauguuggccaggcuggucu

SEQ ID NO: 1923684 - RNA, 20 nt, Human
gccauguuggccaggcuggu

SEQ ID NO: 1923685 - RNA, 19 nt, Human
gccauguuggccaggcugg

SEQ ID NO: 1923686 - RNA, 19 nt, Human
gccauguugugccucccug

SEQ ID NO: 1923687 - RNA, 20 nt, Human
gccauguugugccucccugg

SEQ ID NO: 1923688 - RNA, 21 nt, Human
gccauguugugccucccuggu

SEQ ID NO: 1923689 - RNA, 22 nt, Human
gccauguugugccucccuggug

SEQ ID NO: 1923690 - RNA, 23 nt, Human
gccauguugugccucccugguga

SEQ ID NO: 1923691 - RNA, 17 nt, Human
gcccacgcuggagugca

SEQ ID NO: 1923692 - RNA, 16 nt, Human
gcccacgcuggagugc

SEQ ID NO: 1923693 - RNA, 15 nt, Human
gcccacgcuggagug

SEQ ID NO: 1923694 - RNA, 18 nt, Human
gcccaccuuggcucaagu

SEQ ID NO: 1923695 - RNA, 17 nt, Human
gccauucuccacagcaa

SEQ ID NO: 1923696 - RNA, 13 nt, Human
gcccacgccccca

SEQ ID NO: 1923697 - RNA, 14 nt, Human
gcccacgcccccac

SEQ ID NO: 1923698 - RNA, 16 nt, Human
gccacauuccugaugc

SEQ ID NO: 1923699 - RNA, 20 nt, Human
gccacauuccugaugcuucu

SEQ ID NO: 1923700 - RNA, 14 nt, Human
gccacauuuggaau

SEQ ID NO: 1923701 - RNA, 22 nt, Human
gccacauuuggaauacuuuuug

SEQ ID NO: 1923702 - RNA, 19 nt, Human
gccacauuuggaauacuuu

SEQ ID NO: 1923703 - RNA, 22 nt, Human
gccaccaacauacucccaucug

SEQ ID NO: 1923704 - RNA, 19 nt, Human
gccaccaacauacucccau

SEQ ID NO: 1923705 - RNA, 20 nt, Human
gccaccaacauacucccauc

SEQ ID NO: 1923706 - RNA, 21 nt, Human
gccaccaacauacucccaucu

SEQ ID NO: 1923707 - RNA, 23 nt, Human
gccaccccagccuggccacgcag

SEQ ID NO: 1923708 - RNA, 16 nt, Human
gccacccaccucccug

SEQ ID NO: 1923709 - RNA, 17 nt, Human
gccacccaccucccugc

SEQ ID NO: 1923710 - RNA, 18 nt, Human
gccacccaccucccugcc

SEQ ID NO: 1923711 - RNA, 21 nt, Human
gccacccaccucccugccucc

SEQ ID NO: 1923712 - RNA, 18 nt, Human
gccacccugaggccucug

SEQ ID NO: 1923713 - RNA, 23 nt, Human
gccacugcaccgggccacagaga

SEQ ID NO: 1923714 - RNA, 16 nt, Human
gccaccgccuccuaca

SEQ ID NO: 1923715 - RNA, 19 nt, Human
gccacccuggggagaaagu

SEQ ID NO: 1923716 - RNA, 13 nt, Human
gccacccugggga

SEQ ID NO: 1923717 - RNA, 21 nt, Human
gccacugcacuauagccuagg

SEQ ID NO: 1923718 - RNA, 19 nt, Human
gccacugcauaccaaccug

SEQ ID NO: 1923719 - RNA, 23 nt, Human
gccacuucuggguggggcagugg

SEQ ID NO: 1923720 - RNA, 20 nt, Human
gccacuucuggguggggcag

SEQ ID NO: 1923721 - RNA, 14 nt, Human
gccacuucugggug

SEQ ID NO: 1923722 - RNA, 23 nt, Human
gccacuuuuuuuuuuaaucucca

SEQ ID NO: 1923723 - RNA, 18 nt, Human
gccacugugaagagaacc

SEQ ID NO: 1923724 - RNA, 19 nt, Human
gccacugugaagagaacca

SEQ ID NO: 1923725 - RNA, 18 nt, Human
gcuaggaacacuccuuca

SEQ ID NO: 1923726 - RNA, 19 nt, Human
gcuaggaacacuccuucac

SEQ ID NO: 1923727 - RNA, 21 nt, Human
gcuaggaacacuccuucacag

SEQ ID NO: 1923728 - RNA, 15 nt, Human
gcuaggccuggccag

SEQ ID NO: 1923729 - RNA, 14 nt, Human
gcuaggccuggcca

SEQ ID NO: 1923730 - RNA, 16 nt, Human
gcuaguaucaaaagaa

SEQ ID NO: 1923731 - RNA, 16 nt, Human
gcuagucaagcuccuc

SEQ ID NO: 1923732 - RNA, 18 nt, Human
gcuagucaagcuccuccu

SEQ ID NO: 1923733 - RNA, 19 nt, Human
gcuagucaagcuccuccuc

SEQ ID NO: 1923734 - RNA, 21 nt, Human
gcuagucaagcuccuccuccc

SEQ ID NO: 1923735 - RNA, 23 nt, Human
gcuagucaagcuccuccucccug

SEQ ID NO: 1923736 - RNA, 21 nt, Human
gcuauggggauagaugugugg

SEQ ID NO: 1923737 - RNA, 19 nt, Human
gcuauggggauagaugugu

SEQ ID NO: 1923738 - RNA, 14 nt, Human
gccugugucuuuaa

SEQ ID NO: 1923739 - RNA, 19 nt, Human
gccuguucagcuccagcuc

SEQ ID NO: 1923740 - RNA, 20 nt, Human
gccuguucagcuccagcuca

SEQ ID NO: 1923741 - RNA, 14 nt, Human
gccuguucagcucc

SEQ ID NO: 1923742 - RNA, 21 nt, Human
gcucagguggggucacucugg

SEQ ID NO: 1923743 - RNA, 22 nt, Human
gcucagguggggucacucuggc

SEQ ID NO: 1923744 - RNA, 19 nt, Human
gcucaggucccuggggcua

SEQ ID NO: 1923745 - RNA, 17 nt, Human
gcucagggccuggcuca

SEQ ID NO: 1923746 - RNA, 15 nt, Human
gcucaggucccuggg

SEQ ID NO: 1923747 - RNA, 13 nt, Human
gcucagggccugg

SEQ ID NO: 1923748 - RNA, 16 nt, Human
gcucagggccuggcuc

SEQ ID NO: 1923749 - RNA, 21 nt, Human
gcucaggagcccugggaggcu

SEQ ID NO: 1923750 - RNA, 12 nt, Human
gcucagggccug

SEQ ID NO: 1923751 - RNA, 15 nt, Human
gcucaggagcccugg

SEQ ID NO: 1923752 - RNA, 18 nt, Human
gcucaggagcccugggag

SEQ ID NO: 1923753 - RNA, 14 nt, Human
gcucaggagcccug

SEQ ID NO: 1923754 - RNA, 22 nt, Human
gcucagagagggugggaguggg

SEQ ID NO: 1923755 - RNA, 18 nt, Human
gcucagagagggugggag

SEQ ID NO: 1923756 - RNA, 20 nt, Human
gcucagagagggugggagug

SEQ ID NO: 1923757 - RNA, 15 nt, Human
gcucagagagggugg

SEQ ID NO: 1923758 - RNA, 13 nt, Human
gcucaccuuuguu

SEQ ID NO: 1923759 - RNA, 13 nt, Human
gcucucaggccag

SEQ ID NO: 1923760 - RNA, 14 nt, Human
gcucucaggccagc

SEQ ID NO: 1923761 - RNA, 15 nt, Human
gcucucaggccagcu

SEQ ID NO: 1923762 - RNA, 16 nt, Human
gcucucaggccagcug

SEQ ID NO: 1923763 - RNA, 20 nt, Human
gcucccaggcauuccccagg

SEQ ID NO: 1923764 - RNA, 21 nt, Human
gcucccaggcauuccccagga

SEQ ID NO: 1923765 - RNA, 22 nt, Human
gcucccaggcauuccccaggag

SEQ ID NO: 1923766 - RNA, 14 nt, Human
gcuccccagcccca

SEQ ID NO: 1923767 - RNA, 12 nt, Human
gcuccccuccaa

SEQ ID NO: 1923768 - RNA, 17 nt, Human
gcuccugccgcagagcu

SEQ ID NO: 1923769 - RNA, 15 nt, Human
gcuccugccgcagag

SEQ ID NO: 1923770 - RNA, 15 nt, Human
gcucggaggaagccc

SEQ ID NO: 1923771 - RNA, 22 nt, Human
gcuccugccgcagagcuggccg

SEQ ID NO: 1923772 - RNA, 19 nt, Human
gcuccugccgcagagcugg

SEQ ID NO: 1923773 - RNA, 18 nt, Human
gcuccugccgcagagcug

SEQ ID NO: 1923774 - RNA, 23 nt, Human
gcucuggagcccacuguacuugc

SEQ ID NO: 1923775 - RNA, 21 nt, Human
gcugaagcuuauuaaugcuaa

SEQ ID NO: 1923776 - RNA, 22 nt, Human
gcugaagcuuauuaaugcuaag

SEQ ID NO: 1923777 - RNA, 12 nt, Human
gcugaaggcucg

SEQ ID NO: 1923778 - RNA, 20 nt, Human
gcugaaggcucgagcaugcc

SEQ ID NO: 1923779 - RNA, 17 nt, Human
gcugaaugguuuucaaa

SEQ ID NO: 1923780 - RNA, 22 nt, Human
gcugaauacagaggcaacugca

SEQ ID NO: 1923781 - RNA, 15 nt, Human
gcugacagacacagg

SEQ ID NO: 1923782 - RNA, 14 nt, Human
gcugacagacacag

SEQ ID NO: 1923783 - RNA, 14 nt, Human
gcugaauuaucuau

SEQ ID NO: 1923784 - RNA, 16 nt, Human
gcugacagacacaggc

SEQ ID NO: 1923785 - RNA, 14 nt, Human
gcugagcgccagga

SEQ ID NO: 1923786 - RNA, 12 nt, Human
gcucuuccaggc

SEQ ID NO: 1923787 - RNA, 15 nt, Human
gcucuuccaggcugg

SEQ ID NO: 1923788 - RNA, 16 nt, Human
gcucuuccaggcuggg

SEQ ID NO: 1923789 - RNA, 14 nt, Human
gcucuguccuggga

SEQ ID NO: 1923790 - RNA, 15 nt, Human
gcucuguccugggag

SEQ ID NO: 1923791 - RNA, 17 nt, Human
gcucuggccuccaaguc

SEQ ID NO: 1923792 - RNA, 15 nt, Human
gcucuggccuccaag

SEQ ID NO: 1923793 - RNA, 16 nt, Human
gcucuguccugggagu

SEQ ID NO: 1923794 - RNA, 21 nt, Human
gcucugggauagcugacccag

SEQ ID NO: 1923795 - RNA, 20 nt, Human
gcuucacggaagagccuugc

SEQ ID NO: 1923796 - RNA, 15 nt, Human
gcuucacuccugcug

SEQ ID NO: 1923797 - RNA, 16 nt, Human
gcuucacuccugcugu

SEQ ID NO: 1923798 - RNA, 17 nt, Human
gcuucacuccugcugua

SEQ ID NO: 1923799 - RNA, 18 nt, Human
gcuucacuccugcuguaa

SEQ ID NO: 1923800 - RNA, 20 nt, Human
gcuucacuccugcuguaaau

SEQ ID NO: 1923801 - RNA, 17 nt, Human
gcuucagaauuaaaacu

SEQ ID NO: 1923802 - RNA, 22 nt, Human
gcuucaaggauccugagccaga

SEQ ID NO: 1923803 - RNA, 22 nt, Human
gcuuaaacccauauuguaaaac

SEQ ID NO: 1923804 - RNA, 14 nt, Human
gcuuaacuucacau

SEQ ID NO: 1923805 - RNA, 20 nt, Human
gcuucaccccaaucccagcu

SEQ ID NO: 1923806 - RNA, 19 nt, Human
gcuucaccccaaucccagc

SEQ ID NO: 1923807 - RNA, 21 nt, Human
gcugugcucuggacaggcaug

SEQ ID NO: 1923808 - RNA, 12 nt, Human
gcugugcugccc

SEQ ID NO: 1923809 - RNA, 13 nt, Human
gcugugcugcccu

SEQ ID NO: 1923810 - RNA, 19 nt, Human
gcugugcugcccugcccac

SEQ ID NO: 1923811 - RNA, 22 nt, Human
gcugugcugcccugcccaccug

SEQ ID NO: 1923812 - RNA, 22 nt, Human
gcuguuggcugggggccucagu

SEQ ID NO: 1923813 - RNA, 21 nt, Human
gcuguuggcugggggccucag

SEQ ID NO: 1923814 - RNA, 14 nt, Human
gcugguuuuucagu

SEQ ID NO: 1923815 - RNA, 15 nt, Human
gcugguuuuucaguu

SEQ ID NO: 1923816 - RNA, 22 nt, Human
gcuguaaauuuggcuucuguug

SEQ ID NO: 1923817 - RNA, 20 nt, Human
gcuguaaauuuggcuucugu

SEQ ID NO: 1923818 - RNA, 16 nt, Human
gcuguaaaaugcauga

SEQ ID NO: 1923819 - RNA, 20 nt, Human
gcuguaaaaugcaugauuuu

SEQ ID NO: 1923820 - RNA, 17 nt, Human
gcuguaaauuuggcuuc

SEQ ID NO: 1923821 - RNA, 18 nt, Human
gcuguaaauuuggcuucu

SEQ ID NO: 1923822 - RNA, 19 nt, Human
gcuguaaauuuggcuucug

SEQ ID NO: 1923823 - RNA, 23 nt, Human
gcuguaucccaugagccucagca

SEQ ID NO: 1923824 - RNA, 20 nt, Human
gcuguaucccaugagccuca

SEQ ID NO: 1923825 - RNA, 21 nt, Human
gcuggguuggaggguguccca

SEQ ID NO: 1923826 - RNA, 14 nt, Human
gcuggguuggaggg

SEQ ID NO: 1923827 - RNA, 15 nt, Human
gcuggguucuaccca

SEQ ID NO: 1923828 - RNA, 15 nt, Human
gcuggguucugaucc

SEQ ID NO: 1923829 - RNA, 19 nt, Human
gcuugaaacccguggcgcu

SEQ ID NO: 1923830 - RNA, 13 nt, Human
gcuucuuugccaa

SEQ ID NO: 1923831 - RNA, 19 nt, Human
gcuugggcuucauccuccu

SEQ ID NO: 1923832 - RNA, 16 nt, Human
gcuuguacauaaugcg

SEQ ID NO: 1923833 - RNA, 14 nt, Human
gcuuguacauaaug

SEQ ID NO: 1923834 - RNA, 16 nt, Human
gcuuggggcuuccuaa

SEQ ID NO: 1923835 - RNA, 14 nt, Human
gcuggagcucugcc

SEQ ID NO: 1923836 - RNA, 19 nt, Human
gcuggacugaggccugagc

SEQ ID NO: 1923837 - RNA, 18 nt, Human
gcuggacugaggccugag

SEQ ID NO: 1923838 - RNA, 17 nt, Human
gcuggacugaggccuga

SEQ ID NO: 1923839 - RNA, 16 nt, Human
gcuggacugaggccug

SEQ ID NO: 1923840 - RNA, 14 nt, Human
gcuggacugaggcc

SEQ ID NO: 1923841 - RNA, 13 nt, Human
gcuggacugaggc

SEQ ID NO: 1923842 - RNA, 12 nt, Human
gcuggagugcag

SEQ ID NO: 1923843 - RNA, 17 nt, Human
gcuggagcucugcccau

SEQ ID NO: 1923844 - RNA, 19 nt, Human
gcugggauuacagguguga

SEQ ID NO: 1923845 - RNA, 20 nt, Human
gcugggcacacgccucccac

SEQ ID NO: 1923846 - RNA, 22 nt, Human
gcugggcacacgccucccacug

SEQ ID NO: 1923847 - RNA, 18 nt, Human
gcugggauuacaggugug

SEQ ID NO: 1923848 - RNA, 17 nt, Human
gcugggauuacagggau

SEQ ID NO: 1923849 - RNA, 13 nt, Human
gcugggcagagga

SEQ ID NO: 1923850 - RNA, 14 nt, Human
gcugggcagaggaa

SEQ ID NO: 1923851 - RNA, 15 nt, Human
gcugggcagaggaaa

SEQ ID NO: 1923852 - RNA, 16 nt, Human
gcugggauuacaggug

SEQ ID NO: 1923853 - RNA, 18 nt, Human
gcuggccuggccccucag

SEQ ID NO: 1923854 - RNA, 19 nt, Human
gcuggccuggccccucagg

SEQ ID NO: 1923855 - RNA, 15 nt, Human
gcuggagugcaguga

SEQ ID NO: 1923856 - RNA, 14 nt, Human
gcuggagugcagug

SEQ ID NO: 1923857 - RNA, 16 nt, Human
gcuggccuggccccuc

SEQ ID NO: 1923858 - RNA, 17 nt, Human
gcuggccuggccccuca

SEQ ID NO: 1923859 - RNA, 19 nt, Human
gcugggucgcccuggacug

SEQ ID NO: 1923860 - RNA, 15 nt, Human
gcuggguguggcgca

SEQ ID NO: 1923861 - RNA, 17 nt, Human
gcugggucgcccuggac

SEQ ID NO: 1923862 - RNA, 18 nt, Human
gcugggucgcccuggacu

SEQ ID NO: 1923863 - RNA, 16 nt, Human
gcugggucgcccugga

SEQ ID NO: 1923864 - RNA, 14 nt, Human
gcugggcagguugg

SEQ ID NO: 1923865 - RNA, 16 nt, Human
gcugggcagaggaaag

SEQ ID NO: 1923866 - RNA, 17 nt, Human
gcugggcagaggaaagc

SEQ ID NO: 1923867 - RNA, 19 nt, Human
gcugggcagaggaaagcaa

SEQ ID NO: 1923868 - RNA, 12 nt, Human
gcugggcucccu

SEQ ID NO: 1923869 - RNA, 16 nt, Human
gcugggcucccuuccc

SEQ ID NO: 1923870 - RNA, 17 nt, Human
gcugggcucccuuccca

SEQ ID NO: 1923871 - RNA, 20 nt, Human
gcugggcucccuucccaccu

SEQ ID NO: 1923872 - RNA, 14 nt, Human
gcugcaccggcugg

SEQ ID NO: 1923873 - RNA, 16 nt, Human
gcugcaccggcuggcc

SEQ ID NO: 1923874 - RNA, 17 nt, Human
gcugcaccggcuggccu

SEQ ID NO: 1923875 - RNA, 18 nt, Human
gcugcaccggcuggccug

SEQ ID NO: 1923876 - RNA, 19 nt, Human
gcugcaccggcuggccugg

SEQ ID NO: 1923877 - RNA, 22 nt, Human
gcugcaccggcuggccuggccc

SEQ ID NO: 1923878 - RNA, 23 nt, Human
gcugccaucucaccuccugcugg

SEQ ID NO: 1923879 - RNA, 22 nt, Human
gcugccaucucaccuccugcug

SEQ ID NO: 1923880 - RNA, 23 nt, Human
gcugccauccagguucagcuugu

SEQ ID NO: 1923881 - RNA, 21 nt, Human
gcugccauccagguucagcuu

SEQ ID NO: 1923882 - RNA, 19 nt, Human
gcugccagccgagauagcc

SEQ ID NO: 1923883 - RNA, 21 nt, Human
gcugccagccgagauagccaa

SEQ ID NO: 1923884 - RNA, 18 nt, Human
gcugagggugagugggug

SEQ ID NO: 1923885 - RNA, 18 nt, Human
gcugaggcuggcacagga

SEQ ID NO: 1923886 - RNA, 15 nt, Human
gcugaggcuggcaca

SEQ ID NO: 1923887 - RNA, 16 nt, Human
gcugaggcuggcacag

SEQ ID NO: 1923888 - RNA, 12 nt, Human
gcugcugcugcu

SEQ ID NO: 1923889 - RNA, 19 nt, Human
gcugccugggaucccucau

SEQ ID NO: 1923890 - RNA, 19 nt, Human
gcugcuccuagagggaggg

SEQ ID NO: 1923891 - RNA, 21 nt, Human
gcugcuccuagagggaggggc

SEQ ID NO: 1923892 - RNA, 23 nt, Human
gcugcuccuagagggaggggccu

SEQ ID NO: 1923893 - RNA, 16 nt, Human
gcugccugggaucccu

SEQ ID NO: 1923894 - RNA, 18 nt, Human
gcugccugggaucccuca

SEQ ID NO: 1923895 - RNA, 13 nt, Human
gcugccugggauc

SEQ ID NO: 1923896 - RNA, 19 nt, Human
gcuuguacauaaugcgugc

SEQ ID NO: 1923897 - RNA, 21 nt, Human
ggaccccgagccuggcuccaa

SEQ ID NO: 1923898 - RNA, 18 nt, Human
ggaccccuggugguucac

SEQ ID NO: 1923899 - RNA, 20 nt, Human
ggaccggguggaagggaugg

SEQ ID NO: 1923900 - RNA, 19 nt, Human
ggacccugaggcccagagg

SEQ ID NO: 1923901 - RNA, 14 nt, Human
ggacccugaggccc

SEQ ID NO: 1923902 - RNA, 15 nt, Human
ggacccugaggccca

SEQ ID NO: 1923903 - RNA, 18 nt, Human
ggacccugaggcccagag

SEQ ID NO: 1923904 - RNA, 15 nt, Human
ggagagcuagcagca

SEQ ID NO: 1923905 - RNA, 13 nt, Human
ggagagccuucca

SEQ ID NO: 1923906 - RNA, 16 nt, Human
ggagagccuuccaggg

SEQ ID NO: 1923907 - RNA, 22 nt, Human
ggagagccuuccagggguggga

SEQ ID NO: 1923908 - RNA, 17 nt, Human
ggagagccuuccagggg

SEQ ID NO: 1923909 - RNA, 18 nt, Human
ggagagccuuccaggggu

SEQ ID NO: 1923910 - RNA, 15 nt, Human
ggacuuuuauuuugg

SEQ ID NO: 1923911 - RNA, 19 nt, Human
ggagaaaauggacguguua

SEQ ID NO: 1923912 - RNA, 17 nt, Human
ggacuuggaagcuccgc

SEQ ID NO: 1923913 - RNA, 16 nt, Human
ggacuuggagguagcu

SEQ ID NO: 1923914 - RNA, 15 nt, Human
ggacuuggaagcucc

SEQ ID NO: 1923915 - RNA, 23 nt, Human
ggacuuccuguccagcuccaacc

SEQ ID NO: 1923916 - RNA, 18 nt, Human
ggagaaaugaaaaaauau

SEQ ID NO: 1923917 - RNA, 20 nt, Human
ggagaaaauucaauuguaaa

SEQ ID NO: 1923918 - RNA, 22 nt, Human
ggagaaccaaaaagaggcuaug

SEQ ID NO: 1923919 - RNA, 22 nt, Human
ggacucaaugcacugacauugu

SEQ ID NO: 1923920 - RNA, 16 nt, Human
ggacuagagcuuucuu

SEQ ID NO: 1923921 - RNA, 20 nt, Human
ggacuauauuugggccugcu

SEQ ID NO: 1923922 - RNA, 20 nt, Human
ggacuacaggugugagucac

SEQ ID NO: 1923923 - RNA, 12 nt, Human
ggaccucaggcc

SEQ ID NO: 1923924 - RNA, 18 nt, Human
ggacuagagggaccucuc

SEQ ID NO: 1923925 - RNA, 19 nt, Human
ggacuagagggaccucucc

SEQ ID NO: 1923926 - RNA, 21 nt, Human
ggacuagagggaccucuccca

SEQ ID NO: 1923927 - RNA, 11 nt, Human
ggacuuccugu

SEQ ID NO: 1923928 - RNA, 18 nt, Human
ggacuuccuguccagcuc

SEQ ID NO: 1923929 - RNA, 19 nt, Human
ggacuuccuguccagcucc

SEQ ID NO: 1923930 - RNA, 20 nt, Human
ggacuuccuguccagcucca

SEQ ID NO: 1923931 - RNA, 21 nt, Human
ggacuuccuguccagcuccaa

SEQ ID NO: 1923932 - RNA, 22 nt, Human
ggacugugugcucaggagcccu

SEQ ID NO: 1923933 - RNA, 23 nt, Human
ggacugugugcucaggagcccug

SEQ ID NO: 1923934 - RNA, 13 nt, Human
ggagcagccacau

SEQ ID NO: 1923935 - RNA, 21 nt, Human
ggagcagccacauuccugaug

SEQ ID NO: 1923936 - RNA, 15 nt, Human
ggagcccacuguacu

SEQ ID NO: 1923937 - RNA, 21 nt, Human
ggagcaggcggugggcaccca

SEQ ID NO: 1923938 - RNA, 19 nt, Human
ggagguugaucagaucuga

SEQ ID NO: 1923939 - RNA, 18 nt, Human
ggaggucgaggcaggagg

SEQ ID NO: 1923940 - RNA, 16 nt, Human
ggaggugucuguauca

SEQ ID NO: 1923941 - RNA, 15 nt, Human
ggaggucgaggcagg

SEQ ID NO: 1923942 - RNA, 16 nt, Human
ggaggucgaggcagga

SEQ ID NO: 1923943 - RNA, 21 nt, Human
ggaggcucuggagcccacugu

SEQ ID NO: 1923944 - RNA, 19 nt, Human
ggaggcccaguucacccug

SEQ ID NO: 1923945 - RNA, 19 nt, Human
ggaggcugagaugggagaa

SEQ ID NO: 1923946 - RNA, 15 nt, Human
ggaggcugagauggg

SEQ ID NO: 1923947 - RNA, 19 nt, Human
ggagcuuccuguccuccca

SEQ ID NO: 1923948 - RNA, 18 nt, Human
ggagcuggccccgccgcc

SEQ ID NO: 1923949 - RNA, 15 nt, Human
ggagcuggccccgcc

SEQ ID NO: 1923950 - RNA, 16 nt, Human
ggagcuggccccgccg

SEQ ID NO: 1923951 - RNA, 18 nt, Human
ggagcugccuuggcucag

SEQ ID NO: 1923952 - RNA, 21 nt, Human
ggagcugccuuggcucagaca

SEQ ID NO: 1923953 - RNA, 18 nt, Human
ggagcugcuauagccugg

SEQ ID NO: 1923954 - RNA, 19 nt, Human
ggagcugcuauagccuggg

SEQ ID NO: 1923955 - RNA, 12 nt, Human
ggagcuggcccc

SEQ ID NO: 1923956 - RNA, 22 nt, Human
ggagcugccuguucagcuccag

SEQ ID NO: 1923957 - RNA, 17 nt, Human
ggagcugccuuggcuca

SEQ ID NO: 1923958 - RNA, 16 nt, Human
ggagcugaguggggga

SEQ ID NO: 1923959 - RNA, 18 nt, Human
ggagcccacuguacuugc

SEQ ID NO: 1923960 - RNA, 22 nt, Human
ggagcccacuguacuugcucuu

SEQ ID NO: 1923961 - RNA, 12 nt, Human
ggagcccacugu

SEQ ID NO: 1923962 - RNA, 16 nt, Human
ggaggccagugagcca

SEQ ID NO: 1923963 - RNA, 17 nt, Human
ggaggccagugagccac

SEQ ID NO: 1923964 - RNA, 13 nt, Human
ggaggcccaguuc

SEQ ID NO: 1923965 - RNA, 17 nt, Human
ggaggcucuggagccca

SEQ ID NO: 1923966 - RNA, 20 nt, Human
ggaggcucuggagcccacug

SEQ ID NO: 1923967 - RNA, 13 nt, Human
ggaggccagccuu

SEQ ID NO: 1923968 - RNA, 18 nt, Human
ggaggccaaggugggagg

SEQ ID NO: 1923969 - RNA, 20 nt, Human
ggaggccaaggugggaggau

SEQ ID NO: 1923970 - RNA, 12 nt, Human
ggaggaagagaa

SEQ ID NO: 1923971 - RNA, 21 nt, Human
ggagcuuuuuuccuuaaucca

SEQ ID NO: 1923972 - RNA, 21 nt, Human
ggaggcaugugaugagaggaa

SEQ ID NO: 1923973 - RNA, 11 nt, Human
ggaggaagccc

SEQ ID NO: 1923974 - RNA, 15 nt, Human
ggccaaagccaaagc

SEQ ID NO: 1923975 - RNA, 12 nt, Human
ggccaaaggaag

SEQ ID NO: 1923976 - RNA, 13 nt, Human
ggccaaaggaagc

SEQ ID NO: 1923977 - RNA, 21 nt, Human
ggccaaaggaagcacaugccu

SEQ ID NO: 1923978 - RNA, 12 nt, Human
ggcauuguggga

SEQ ID NO: 1923979 - RNA, 14 nt, Human
ggcauuucccccac

SEQ ID NO: 1923980 - RNA, 20 nt, Human
ggccagaugcaccagcccuu

SEQ ID NO: 1923981 - RNA, 19 nt, Human
ggccagaugcaccagcccu

SEQ ID NO: 1923982 - RNA, 12 nt, Human
ggccagauccag

SEQ ID NO: 1923983 - RNA, 13 nt, Human
ggccagauccagc

SEQ ID NO: 1923984 - RNA, 16 nt, Human
ggccagauccagccug

SEQ ID NO: 1923985 - RNA, 18 nt, Human
ggccagcaccaucucuuu

SEQ ID NO: 1923986 - RNA, 23 nt, Human
ggccagagggagugacagaggca

SEQ ID NO: 1923987 - RNA, 16 nt, Human
ggccaaggagggugag

SEQ ID NO: 1923988 - RNA, 16 nt, Human
ggccaaggagcugcua

SEQ ID NO: 1923989 - RNA, 23 nt, Human
ggccaacccuucuccucuuguaa

SEQ ID NO: 1923990 - RNA, 14 nt, Human
ggccaaggagcugc

SEQ ID NO: 1923991 - RNA, 15 nt, Human
ggccaaggagcugcu

SEQ ID NO: 1923992 - RNA, 13 nt, Human
ggccaagguggga

SEQ ID NO: 1923993 - RNA, 14 nt, Human
ggccaacaaagaac

SEQ ID NO: 1923994 - RNA, 13 nt, Human
ggccaacauggua

SEQ ID NO: 1923995 - RNA, 16 nt, Human
ggccaacccuucuccu

SEQ ID NO: 1923996 - RNA, 20 nt, Human
ggccaacccuucuccucuug

SEQ ID NO: 1923997 - RNA, 23 nt, Human
ggcccucccuguuccccagagaa

SEQ ID NO: 1923998 - RNA, 13 nt, Human
ggccucccaaagu

SEQ ID NO: 1923999 - RNA, 16 nt, Human
ggccucccaaagugcu

SEQ ID NO: 1924000 - RNA, 14 nt, Human
ggcccuuccuuuuc

SEQ ID NO: 1924001 - RNA, 13 nt, Human
ggccucccaacuc

SEQ ID NO: 1924002 - RNA, 14 nt, Human
ggccucccaacuca

SEQ ID NO: 1924003 - RNA, 11 nt, Human
ggcccaggccu

SEQ ID NO: 1924004 - RNA, 14 nt, Human
ggcccagggcccag

SEQ ID NO: 1924005 - RNA, 19 nt, Human
ggcccucccuguuccccag

SEQ ID NO: 1924006 - RNA, 20 nt, Human
ggcccucccuguuccccaga

SEQ ID NO: 1924007 - RNA, 21 nt, Human
ggcccucccuguuccccagag

SEQ ID NO: 1924008 - RNA, 22 nt, Human
ggcccucccuguuccccagaga

SEQ ID NO: 1924009 - RNA, 16 nt, Human
ggccccaggaccuggc

SEQ ID NO: 1924010 - RNA, 21 nt, Human
ggccccaggaccuggcugcca

SEQ ID NO: 1924011 - RNA, 18 nt, Human
ggccccaggaaaggccca

SEQ ID NO: 1924012 - RNA, 21 nt, Human
ggcccauucuacuugcucugg

SEQ ID NO: 1924013 - RNA, 22 nt, Human
ggcccauucuacuugcucugga

SEQ ID NO: 1924014 - RNA, 23 nt, Human
ggcccauucuacuugcucuggac

SEQ ID NO: 1924015 - RNA, 14 nt, Human
ggcccauucuacuu

SEQ ID NO: 1924016 - RNA, 15 nt, Human
ggcccauucuacuug

SEQ ID NO: 1924017 - RNA, 18 nt, Human
ggcccauucuacuugcuc

SEQ ID NO: 1924018 - RNA, 19 nt, Human
ggcccauucuacuugcucu

SEQ ID NO: 1924019 - RNA, 12 nt, Human
ggcagaaggaag

SEQ ID NO: 1924020 - RNA, 18 nt, Human
ggcaggacgugggcuggg

SEQ ID NO: 1924021 - RNA, 23 nt, Human
ggcaggaccuucgggcugugccc

SEQ ID NO: 1924022 - RNA, 21 nt, Human
ggcaggaccuucgggcugugc

SEQ ID NO: 1924023 - RNA, 14 nt, Human
ggcagccucccauc

SEQ ID NO: 1924024 - RNA, 21 nt, Human
ggcagccucccauccagggcc

SEQ ID NO: 1924025 - RNA, 22 nt, Human
ggcagccucccauccagggccc

SEQ ID NO: 1924026 - RNA, 14 nt, Human
ggcaggacaggaaa

SEQ ID NO: 1924027 - RNA, 10 nt, Human
ggcagagcag

SEQ ID NO: 1924028 - RNA, 15 nt, Human
ggcagccaggccaca

SEQ ID NO: 1924029 - RNA, 17 nt, Human
ggcagccaggccacaag

SEQ ID NO: 1924030 - RNA, 16 nt, Human
ggcaaccacuaagaau

SEQ ID NO: 1924031 - RNA, 19 nt, Human
ggcaaccacuaagaauuca

SEQ ID NO: 1924032 - RNA, 19 nt, Human
ggcaacagaucuggaaccu

SEQ ID NO: 1924033 - RNA, 14 nt, Human
ggcaacagaucugg

SEQ ID NO: 1924034 - RNA, 15 nt, Human
ggcaacagaucugga

SEQ ID NO: 1924035 - RNA, 19 nt, Human
ggcaaaggguccagaagga

SEQ ID NO: 1924036 - RNA, 12 nt, Human
ggcaaauaaaag

SEQ ID NO: 1924037 - RNA, 22 nt, Human
ggcaaagcacgaaauguuauuu

SEQ ID NO: 1924038 - RNA, 18 nt, Human
ggcaaagcuuuuagaaau

SEQ ID NO: 1924039 - RNA, 13 nt, Human
ggcaaacaggcag

SEQ ID NO: 1924040 - RNA, 23 nt, Human
ggcaaacaggcaguuggccagag

SEQ ID NO: 1924041 - RNA, 23 nt, Human
ggauuaaacuuaaucuaaaugga

SEQ ID NO: 1924042 - RNA, 23 nt, Human
ggauguuucugucacaucagcuc

SEQ ID NO: 1924043 - RNA, 14 nt, Human
ggauuaauaugaaa

SEQ ID NO: 1924044 - RNA, 15 nt, Human
ggauuaauaugaaaa

SEQ ID NO: 1924045 - RNA, 16 nt, Human
ggauuaauaugaaaac

SEQ ID NO: 1924046 - RNA, 11 nt, Human
ggcaaaauaau

SEQ ID NO: 1924047 - RNA, 13 nt, Human
ggcaaaauugcaa

SEQ ID NO: 1924048 - RNA, 21 nt, Human
ggauuuugauccaagcugguc

SEQ ID NO: 1924049 - RNA, 13 nt, Human
ggauguucuggga

SEQ ID NO: 1924050 - RNA, 18 nt, Human
ggaugugauuguggaaug

SEQ ID NO: 1924051 - RNA, 22 nt, Human
ggaugagaaagguugaagcacc

SEQ ID NO: 1924052 - RNA, 12 nt, Human
ggaugagaaagg

SEQ ID NO: 1924053 - RNA, 21 nt, Human
ggaugaauuccaaauucugcu

SEQ ID NO: 1924054 - RNA, 21 nt, Human
ggaugacaugcacucagcucu

SEQ ID NO: 1924055 - RNA, 13 nt, Human
aaaaaaaaaccaa

SEQ ID NO: 1924056 - RNA, 13 nt, Human
aaaaaaacacaaa

SEQ ID NO: 1924057 - RNA, 12 nt, Human
aaaaaagaaaug

SEQ ID NO: 1924058 - RNA, 11 nt, Human
aaaaaaaagag

SEQ ID NO: 1924059 - RNA, 11 nt, Human
aaaaaaaaugg

SEQ ID NO: 1924060 - RNA, 19 nt, Human
aaaaagcuuccaugauucu

SEQ ID NO: 1924061 - RNA, 23 nt, Human
gggaaaaucagccugcuccagcu

SEQ ID NO: 1924062 - RNA, 13 nt, Human
gggaaaagcagcu

SEQ ID NO: 1924063 - RNA, 13 nt, Human
gggaaaaucagcc

SEQ ID NO: 1924064 - RNA, 16 nt, Human
ggcuucaguggcagcu

SEQ ID NO: 1924065 - RNA, 23 nt, Human
ggcuguaucccaugagccucagc

SEQ ID NO: 1924066 - RNA, 15 nt, Human
ggcugucaauuacag

SEQ ID NO: 1924067 - RNA, 22 nt, Human
ggcuguaucccaugagccucag

SEQ ID NO: 1924068 - RNA, 20 nt, Human
ggcuguaucccaugagccuc

SEQ ID NO: 1924069 - RNA, 15 nt, Human
ggcuucaguggcagc

SEQ ID NO: 1924070 - RNA, 14 nt, Human
ggcugucaucugug

SEQ ID NO: 1924071 - RNA, 17 nt, Human
ggcugucaucugugcac

SEQ ID NO: 1924072 - RNA, 16 nt, Human
ggcuggugucaccuga

SEQ ID NO: 1924073 - RNA, 16 nt, Human
ggcugguggcccagga

SEQ ID NO: 1924074 - RNA, 19 nt, Human
ggcuguaucccaugagccu

SEQ ID NO: 1924075 - RNA, 13 nt, Human
ggcugguggccca

SEQ ID NO: 1924076 - RNA, 14 nt, Human
ggcugguggcccag

SEQ ID NO: 1924077 - RNA, 13 nt, Human
ggcugggagagcc

SEQ ID NO: 1924078 - RNA, 18 nt, Human
ggcugggacguggcucag

SEQ ID NO: 1924079 - RNA, 19 nt, Human
ggcugggacguggcucagc

SEQ ID NO: 1924080 - RNA, 23 nt, Human
ggcugggacguggcucagccagc

SEQ ID NO: 1924081 - RNA, 24 nt, Human
ggcuggcuccagaugcagggcagu

SEQ ID NO: 1924082 - RNA, 22 nt, Human
ggcuggcuccagaugcagggca

SEQ ID NO: 1924083 - RNA, 23 nt, Human
ggcugccaucucaccuccugcug

SEQ ID NO: 1924084 - RNA, 21 nt, Human
ggcugccaucucaccuccugc

SEQ ID NO: 1924085 - RNA, 22 nt, Human
ggcugccaucucaccuccugcu

SEQ ID NO: 1924086 - RNA, 17 nt, Human
ggcuggaucugugaggg

SEQ ID NO: 1924087 - RNA, 13 nt, Human
ggcuggcacagga

SEQ ID NO: 1924088 - RNA, 14 nt, Human
ggcuggcacaggac

SEQ ID NO: 1924089 - RNA, 15 nt, Human
ggcuggcacaggaca

SEQ ID NO: 1924090 - RNA, 20 nt, Human
ggcuggcgugcaguggugcg

SEQ ID NO: 1924091 - RNA, 16 nt, Human
ggcuggcgugcagugg

SEQ ID NO: 1924092 - RNA, 14 nt, Human
ggcuggcgugcagu

SEQ ID NO: 1924093 - RNA, 17 nt, Human
ggcuggccuggccccuc

SEQ ID NO: 1924094 - RNA, 22 nt, Human
ggcuggccuggccccucagggu

SEQ ID NO: 1924095 - RNA, 17 nt, Human
ggcucccuucccaccuc

SEQ ID NO: 1924096 - RNA, 18 nt, Human
ggcucccuucccaccucu

SEQ ID NO: 1924097 - RNA, 16 nt, Human
ggcucccuucccaccu

SEQ ID NO: 1924098 - RNA, 19 nt, Human
ggcuccugagggagcucca

SEQ ID NO: 1924099 - RNA, 12 nt, Human
ggcuccucucag

SEQ ID NO: 1924100 - RNA, 20 nt, Human
ggcucccuucccaccucucu

SEQ ID NO: 1924101 - RNA, 22 nt, Human
ggcucccuucccaccucucuca

SEQ ID NO: 1924102 - RNA, 21 nt, Human
ggcugcauacccgggcagggc

SEQ ID NO: 1924103 - RNA, 22 nt, Human
ggcugcaugcgggcuuccuccu

SEQ ID NO: 1924104 - RNA, 20 nt, Human
ggcugcaugcgggcuuccuc

SEQ ID NO: 1924105 - RNA, 17 nt, Human
ggcugcagggaguccga

SEQ ID NO: 1924106 - RNA, 18 nt, Human
ggcucgagcaugccugga

SEQ ID NO: 1924107 - RNA, 23 nt, Human
ggcucuuccaggcugggagagcc

SEQ ID NO: 1924108 - RNA, 24 nt, Human
ggcucuuccaggcugggagagccu

SEQ ID NO: 1924109 - RNA, 20 nt, Human
ggcucuuccaggcugggaga

SEQ ID NO: 1924110 - RNA, 12 nt, Human
ggcucuucucau

SEQ ID NO: 1924111 - RNA, 22 nt, Human
ggcucuucucauuucaccccuc

SEQ ID NO: 1924112 - RNA, 20 nt, Human
ggcucuucucauuucacccc

SEQ ID NO: 1924113 - RNA, 13 nt, Human
ggcucuucucauu

SEQ ID NO: 1924114 - RNA, 15 nt, Human
gggcaaacaggcagu

SEQ ID NO: 1924115 - RNA, 14 nt, Human
gggcaaacaggcag

SEQ ID NO: 1924116 - RNA, 23 nt, Human
gggcagagcagagaccaucccug

SEQ ID NO: 1924117 - RNA, 15 nt, Human
gggauuuccaugaug

SEQ ID NO: 1924118 - RNA, 22 nt, Human
gggauuucaccacucaaaggcc

SEQ ID NO: 1924119 - RNA, 14 nt, Human
gggaggggccuagg

SEQ ID NO: 1924120 - RNA, 18 nt, Human
aaaagggaacugaacauu

SEQ ID NO: 1924121 - RNA, 16 nt, Human
aaaagggacugagaaa

SEQ ID NO: 1924122 - RNA, 20 nt, Human
gggcagcagaaggggguggu

SEQ ID NO: 1924123 - RNA, 15 nt, Human
aaaauaccagccagu

SEQ ID NO: 1924124 - RNA, 14 nt, Human
aaaauaccaaggaa

SEQ ID NO: 1924125 - RNA, 14 nt, Human
aaaauaccagccag

SEQ ID NO: 1924126 - RNA, 23 nt, Human
aaaauaaauauugucuuuuugua

SEQ ID NO: 1924127 - RNA, 12 nt, Human
aaaauaaauuau

SEQ ID NO: 1924128 - RNA, 21 nt, Human
aaaauaaauauugucuuuuug

SEQ ID NO: 1924129 - RNA, 13 nt, Human
aaaauaaaguugg

SEQ ID NO: 1924130 - RNA, 15 nt, Human
aaaaguaaauguaca

SEQ ID NO: 1924131 - RNA, 18 nt, Human
aaaauauauaucaaauau

SEQ ID NO: 1924132 - RNA, 18 nt, Human
aaaauaguggugugauuu

SEQ ID NO: 1924133 - RNA, 23 nt, Human
aaaauaguuaagacaugauuucc

SEQ ID NO: 1924134 - RNA, 12 nt, Human
aaaauagccugc

SEQ ID NO: 1924135 - RNA, 13 nt, Human
gggagaccuggac

SEQ ID NO: 1924136 - RNA, 12 nt, Human
gggacugugugu

SEQ ID NO: 1924137 - RNA, 11 nt, Human
gggaggcagag

SEQ ID NO: 1924138 - RNA, 11 nt, Human
gggagggcucc

SEQ ID NO: 1924139 - RNA, 13 nt, Human
gggagggcuccag

SEQ ID NO: 1924140 - RNA, 19 nt, Human
gggaggccaaggugggagg

SEQ ID NO: 1924141 - RNA, 20 nt, Human
gggaggcagagguugcagug

SEQ ID NO: 1924142 - RNA, 22 nt, Human
aaaagcuccauuuuuagugaaa

SEQ ID NO: 1924143 - RNA, 20 nt, Human
aaaagcuacaguuuugugaa

SEQ ID NO: 1924144 - RNA, 14 nt, Human
aaaagcugggcagg

SEQ ID NO: 1924145 - RNA, 18 nt, Human
aaaagcuguauuuugaaa

SEQ ID NO: 1924146 - RNA, 14 nt, Human
aaaagcuuccauga

SEQ ID NO: 1924147 - RNA, 13 nt, Human
aaaagcugcucag

SEQ ID NO: 1924148 - RNA, 16 nt, Human
aaaagccuguuuaaga

SEQ ID NO: 1924149 - RNA, 18 nt, Human
aaaagccuguuuaagaga

SEQ ID NO: 1924150 - RNA, 21 nt, Human
aaaacuuuaugcuaagugaaa

SEQ ID NO: 1924151 - RNA, 22 nt, Human
aaaacuugauguguuaucucuu

SEQ ID NO: 1924152 - RNA, 22 nt, Human
gggaacagacuggaagcacagc

SEQ ID NO: 1924153 - RNA, 17 nt, Human
aaaaaucucaaauuucu

SEQ ID NO: 1924154 - RNA, 20 nt, Human
aaaaaucucaaauuucuaaa

SEQ ID NO: 1924155 - RNA, 19 nt, Human
aaaaaucucaaauuucuaa

SEQ ID NO: 1924156 - RNA, 14 nt, Human
gggaacagacugga

SEQ ID NO: 1924157 - RNA, 12 nt, Human
aaaaaucuguuu

SEQ ID NO: 1924158 - RNA, 19 nt, Human
aaaacugcucauaugaugu

SEQ ID NO: 1924159 - RNA, 20 nt, Human
aaaacugcugacuguuuucu

SEQ ID NO: 1924160 - RNA, 18 nt, Human
aaaacugauuuuuuuuuc

SEQ ID NO: 1924161 - RNA, 22 nt, Human
aaaacugauuuuuuuuuccuuc

SEQ ID NO: 1924162 - RNA, 21 nt, Human
aaaacguggcugcuucaagga

SEQ ID NO: 1924163 - RNA, 21 nt, Human
aaaacuacaaaucaaguauuu

SEQ ID NO: 1924164 - RNA, 14 nt, Human
aaaacguggcugcu

SEQ ID NO: 1924165 - RNA, 16 nt, Human
aaaacguggcugcuuc

SEQ ID NO: 1924166 - RNA, 17 nt, Human
aaaacguggcugcuuca

SEQ ID NO: 1924167 - RNA, 18 nt, Human
aaaacguggcugcuucaa

SEQ ID NO: 1924168 - RNA, 15 nt, Human
aaaaccaauguucuc

SEQ ID NO: 1924169 - RNA, 19 nt, Human
aaaacauuuucacacaaua

SEQ ID NO: 1924170 - RNA, 22 nt, Human
ggggucgacuucgggcuggcca

SEQ ID NO: 1924171 - RNA, 22 nt, Human
ggggcgccgcaaaccacacugg

SEQ ID NO: 1924172 - RNA, 21 nt, Human
ggggcgaucgcggcggagcug

SEQ ID NO: 1924173 - RNA, 20 nt, Human
ggggucuggaguugaucugg

SEQ ID NO: 1924174 - RNA, 21 nt, Human
ggggucuggaguugaucugga

SEQ ID NO: 1924175 - RNA, 18 nt, Human
gggucagaaacaggaccg

SEQ ID NO: 1924176 - RNA, 16 nt, Human
gggucagaaacaggac

SEQ ID NO: 1924177 - RNA, 16 nt, Human
gggucagccagggccu

SEQ ID NO: 1924178 - RNA, 18 nt, Human
gggucagccagggccugc

SEQ ID NO: 1924179 - RNA, 20 nt, Human
ggguaucaggugcugccauc

SEQ ID NO: 1924180 - RNA, 23 nt, Human
ggggucuguguguuuaugugugu

SEQ ID NO: 1924181 - RNA, 23 nt, Human
gggucucacuauguugcccaggc

SEQ ID NO: 1924182 - RNA, 12 nt, Human
gggucucacucu

SEQ ID NO: 1924183 - RNA, 22 nt, Human
gggucucacuauguugcccagg

SEQ ID NO: 1924184 - RNA, 19 nt, Human
aaacauguuucuuuguaau

SEQ ID NO: 1924185 - RNA, 22 nt, Human
aaacauguuucuuuguaaugaa

SEQ ID NO: 1924186 - RNA, 23 nt, Human
aaacauguuucuuuguaaugaaa

SEQ ID NO: 1924187 - RNA, 20 nt, Human
aaacauuuaccaaucauauu

SEQ ID NO: 1924188 - RNA, 21 nt, Human
aaacauuuaccaaucauauua

SEQ ID NO: 1924189 - RNA, 19 nt, Human
aaacgcucucuacucugcu

SEQ ID NO: 1924190 - RNA, 21 nt, Human
aaaccacauuggagauguuua

SEQ ID NO: 1924191 - RNA, 14 nt, Human
aaaccaccagaagc

SEQ ID NO: 1924192 - RNA, 15 nt, Human
aaacgucuuaaauau

SEQ ID NO: 1924193 - RNA, 16 nt, Human
aaacguggcugcuuca

SEQ ID NO: 1924194 - RNA, 17 nt, Human
aaacguggcugcuucaa

SEQ ID NO: 1924195 - RNA, 20 nt, Human
aaacguggcugcuucaagga

SEQ ID NO: 1924196 - RNA, 18 nt, Human
aaacuaaggcccucuuga

SEQ ID NO: 1924197 - RNA, 17 nt, Human
aaacuacaaaaauuaac

SEQ ID NO: 1924198 - RNA, 11 nt, Human
aaacuccugac

SEQ ID NO: 1924199 - RNA, 16 nt, Human
aaacuggauuaaacuu

SEQ ID NO: 1924200 - RNA, 20 nt, Human
aaacuggggccuccagaacu

SEQ ID NO: 1924201 - RNA, 16 nt, Human
aaacugguauuuuauc

SEQ ID NO: 1924202 - RNA, 22 nt, Human
aaacugguauuuuaucuuugau

SEQ ID NO: 1924203 - RNA, 13 nt, Human
aaacuggcuuugg

SEQ ID NO: 1924204 - RNA, 14 nt, Human
aaacuggcuuuggc

SEQ ID NO: 1924205 - RNA, 17 nt, Human
aaacuggggccuccaga

SEQ ID NO: 1924206 - RNA, 18 nt, Human
aaacuggggccuccagaa

SEQ ID NO: 1924207 - RNA, 15 nt, Human
aaacaagaaaguuuc

SEQ ID NO: 1924208 - RNA, 18 nt, Human
aaacaagaaaguuucccc

SEQ ID NO: 1924209 - RNA, 17 nt, Human
aaacaagaaaguuuccc

SEQ ID NO: 1924210 - RNA, 16 nt, Human
aaacaagaaaguuucc

SEQ ID NO: 1924211 - RNA, 18 nt, Human
aaacaagaccacguuucu

SEQ ID NO: 1924212 - RNA, 13 nt, Human
aaacaaagaaauu

SEQ ID NO: 1924213 - RNA, 15 nt, Human
aaacaaaauuucuau

SEQ ID NO: 1924214 - RNA, 14 nt, Human
aaacaaaauuucua

SEQ ID NO: 1924215 - RNA, 13 nt, Human
aaaauugugauca

SEQ ID NO: 1924216 - RNA, 16 nt, Human
aaaauugugauguguc

SEQ ID NO: 1924217 - RNA, 16 nt, Human
aaaauugguuggagaa

SEQ ID NO: 1924218 - RNA, 17 nt, Human
aaaauugguuggagaau

SEQ ID NO: 1924219 - RNA, 15 nt, Human
aaaauuuuuaaucuu

SEQ ID NO: 1924220 - RNA, 16 nt, Human
aaaauuuuuaaucuuu

SEQ ID NO: 1924221 - RNA, 19 nt, Human
aaaauuuuuaaucuuuaau

SEQ ID NO: 1924222 - RNA, 21 nt, Human
aaaauguaggguuauaauaau

SEQ ID NO: 1924223 - RNA, 21 nt, Human
aaaauggacguguuaugacuc

SEQ ID NO: 1924224 - RNA, 12 nt, Human
aaaauggaauac

SEQ ID NO: 1924225 - RNA, 19 nt, Human
gggcuggacugaggccuga

SEQ ID NO: 1924226 - RNA, 15 nt, Human
gggcuggacugaggc

SEQ ID NO: 1924227 - RNA, 14 nt, Human
gggcuggacugagg

SEQ ID NO: 1924228 - RNA, 22 nt, Human
aaacaugcuacacacugcaugu

SEQ ID NO: 1924229 - RNA, 16 nt, Human
aaacaugcuacacacu

SEQ ID NO: 1924230 - RNA, 19 nt, Human
aaacaagucagucauucag

SEQ ID NO: 1924231 - RNA, 14 nt, Human
aaacauaagugcaa

SEQ ID NO: 1924232 - RNA, 13 nt, Human
ggggaccucaggc

SEQ ID NO: 1924233 - RNA, 15 nt, Human
ggggaccucaggccu

SEQ ID NO: 1924234 - RNA, 16 nt, Human
ggggaccucaggccug

SEQ ID NO: 1924235 - RNA, 17 nt, Human
ggggaccucaggccugg

SEQ ID NO: 1924236 - RNA, 22 nt, Human
ggggaaaggcaagguccggccc

SEQ ID NO: 1924237 - RNA, 17 nt, Human
ggggaaaggcaaggucc

SEQ ID NO: 1924238 - RNA, 18 nt, Human
ggggaacucagauccagg

SEQ ID NO: 1924239 - RNA, 21 nt, Human
ggggaacucagauccagggac

SEQ ID NO: 1924240 - RNA, 24 nt, Human
ggggaaaaucagccugcuccagcu

SEQ ID NO: 1924241 - RNA, 13 nt, Human
ggggccaggcugg

SEQ ID NO: 1924242 - RNA, 14 nt, Human
ggggccaggcuggg

SEQ ID NO: 1924243 - RNA, 16 nt, Human
ggggccaggcuggguc

SEQ ID NO: 1924244 - RNA, 17 nt, Human
ggggccaguuggucccc

SEQ ID NO: 1924245 - RNA, 19 nt, Human
ggggccaguuggucccccu

SEQ ID NO: 1924246 - RNA, 16 nt, Human
ggggcccugccuccuu

SEQ ID NO: 1924247 - RNA, 19 nt, Human
ggggcccugccuccuuugu

SEQ ID NO: 1924248 - RNA, 23 nt, Human
ggggcccugccuccuuugugagg

SEQ ID NO: 1924249 - RNA, 20 nt, Human
gguccagaaggagacaggca

SEQ ID NO: 1924250 - RNA, 20 nt, Human
ggucccaaacagcugccucu

SEQ ID NO: 1924251 - RNA, 22 nt, Human
gguccacccaggagccccgagg

SEQ ID NO: 1924252 - RNA, 20 nt, Human
gguccacccaggagccccga

SEQ ID NO: 1924253 - RNA, 12 nt, Human
ggucccacccca

SEQ ID NO: 1924254 - RNA, 14 nt, Human
aaacuuuaccuuuu

SEQ ID NO: 1924255 - RNA, 23 nt, Human
gguauuggcuagagguucaaaga

SEQ ID NO: 1924256 - RNA, 18 nt, Human
gguauucgcuugagaaaa

SEQ ID NO: 1924257 - RNA, 19 nt, Human
gguccacccaggagccccg

SEQ ID NO: 1924258 - RNA, 20 nt, Human
ggucaugcccuccucuccca

SEQ ID NO: 1924259 - RNA, 15 nt, Human
ggucaugcccuccuc

SEQ ID NO: 1924260 - RNA, 16 nt, Human
ggucaugcccuccucu

SEQ ID NO: 1924261 - RNA, 17 nt, Human
ggucaugcccuccucuc

SEQ ID NO: 1924262 - RNA, 19 nt, Human
aaagaugggugaaggcugg

SEQ ID NO: 1924263 - RNA, 14 nt, Human
aaagaugcaaugua

SEQ ID NO: 1924264 - RNA, 22 nt, Human
aaagauuacuuuuucuuuaugu

SEQ ID NO: 1924265 - RNA, 15 nt, Human
aaagaugagugagca

SEQ ID NO: 1924266 - RNA, 13 nt, Human
aaagaggcuaugu

SEQ ID NO: 1924267 - RNA, 18 nt, Human
aaagaggcuaugugagca

SEQ ID NO: 1924268 - RNA, 15 nt, Human
aaagacuguacaaag

SEQ ID NO: 1924269 - RNA, 19 nt, Human
aaagacuuuuccaacccuc

SEQ ID NO: 1924270 - RNA, 17 nt, Human
aaagagaaaaagaaaug

SEQ ID NO: 1924271 - RNA, 21 nt, Human
aaagagaauugggggcuuagg

SEQ ID NO: 1924272 - RNA, 19 nt, Human
aaagcuugcaacaaaauuc

SEQ ID NO: 1924273 - RNA, 17 nt, Human
aaagcuugaguaaaaua

SEQ ID NO: 1924274 - RNA, 19 nt, Human
aaagcuugaguaaaauaaa

SEQ ID NO: 1924275 - RNA, 17 nt, Human
aaagcuuccaugauucu

SEQ ID NO: 1924276 - RNA, 18 nt, Human
aaagcuuccaugauucua

SEQ ID NO: 1924277 - RNA, 20 nt, Human
aaagcuuccaugauucuauu

SEQ ID NO: 1924278 - RNA, 13 nt, Human
aaaggaauuuaaa

SEQ ID NO: 1924279 - RNA, 11 nt, Human
aaaggaaagag

SEQ ID NO: 1924280 - RNA, 17 nt, Human
aaagcagugcaugcugu

SEQ ID NO: 1924281 - RNA, 20 nt, Human
ggugcccagaaugaggcugc

SEQ ID NO: 1924282 - RNA, 13 nt, Human
ggugcccacaggc

SEQ ID NO: 1924283 - RNA, 14 nt, Human
ggugcccacaggcc

SEQ ID NO: 1924284 - RNA, 20 nt, Human
aaagcacacucauccccuca

SEQ ID NO: 1924285 - RNA, 18 nt, Human
aaagcuaggccuggccag

SEQ ID NO: 1924286 - RNA, 13 nt, Human
aaagcuagaaaug

SEQ ID NO: 1924287 - RNA, 17 nt, Human
aaagcuacuuauuguag

SEQ ID NO: 1924288 - RNA, 16 nt, Human
aaagcuacuuauugua

SEQ ID NO: 1924289 - RNA, 21 nt, Human
aaagcagugcaugcugucccu

SEQ ID NO: 1924290 - RNA, 22 nt, Human
aaagcagugcaugcugucccuu

SEQ ID NO: 1924291 - RNA, 19 nt, Human
aaagcggacaucagcuggu

SEQ ID NO: 1924292 - RNA, 22 nt, Human
ggucuugaacuccuggccucaa

SEQ ID NO: 1924293 - RNA, 21 nt, Human
ggucuugaacuccuggccuca

SEQ ID NO: 1924294 - RNA, 19 nt, Human
ggucuguucuuuccaaagu

SEQ ID NO: 1924295 - RNA, 17 nt, Human
ggucuguucuuuccaaa

SEQ ID NO: 1924296 - RNA, 12 nt, Human
ggucuguucuuu

SEQ ID NO: 1924297 - RNA, 24 nt, Human
ggucugugagaugcuagaacuccc

SEQ ID NO: 1924298 - RNA, 14 nt, Human
ggucugugagaugc

SEQ ID NO: 1924299 - RNA, 16 nt, Human
aaagcaaaaagugaug

SEQ ID NO: 1924300 - RNA, 15 nt, Human
ggucuggcagccucc

SEQ ID NO: 1924301 - RNA, 22 nt, Human
ggucuggcagccucccauccag

SEQ ID NO: 1924302 - RNA, 16 nt, Human
ggugcacaagcuccaa

SEQ ID NO: 1924303 - RNA, 22 nt, Human
ggugcacaagcuccaagcuccc

SEQ ID NO: 1924304 - RNA, 21 nt, Human
ggucuugguuccagccugcca

SEQ ID NO: 1924305 - RNA, 20 nt, Human
ggucuugguuccagccugcc

SEQ ID NO: 1924306 - RNA, 18 nt, Human
ggucuuuccuaaggcugc

SEQ ID NO: 1924307 - RNA, 19 nt, Human
ggucuuuccuaaggcugca

SEQ ID NO: 1924308 - RNA, 24 nt, Human
gaccaugcgacacugggaggccag

SEQ ID NO: 1924309 - RNA, 20 nt, Human
gaccaucccugaaggccccg

SEQ ID NO: 1924310 - RNA, 14 nt, Human
gaccucugcagcaa

SEQ ID NO: 1924311 - RNA, 14 nt, Human
gaccucucccaggg

SEQ ID NO: 1924312 - RNA, 12 nt, Human
gaccucucccag

SEQ ID NO: 1924313 - RNA, 11 nt, Human
gaccugaggcc

SEQ ID NO: 1924314 - RNA, 13 nt, Human
gaccugaggcccu

SEQ ID NO: 1924315 - RNA, 14 nt, Human
gaccugaggcccuu

SEQ ID NO: 1924316 - RNA, 16 nt, Human
gacgccaucccagccc

SEQ ID NO: 1924317 - RNA, 19 nt, Human
gacgccaucccagccccaa

SEQ ID NO: 1924318 - RNA, 17 nt, Human
gacgccaucccagcccc

SEQ ID NO: 1924319 - RNA, 18 nt, Human
gacgccaucccagcccca

SEQ ID NO: 1924320 - RNA, 16 nt, Human
gacgcuacccgggaag

SEQ ID NO: 1924321 - RNA, 18 nt, Human
gacgcuacccgggaaggg

SEQ ID NO: 1924322 - RNA, 19 nt, Human
gacgcuacccgggaagggg

SEQ ID NO: 1924323 - RNA, 15 nt, Human
gacgcucucuggccu

SEQ ID NO: 1924324 - RNA, 17 nt, Human
gacgcucucuggccuuc

SEQ ID NO: 1924325 - RNA, 16 nt, Human
gacgcucucuggccuu

SEQ ID NO: 1924326 - RNA, 22 nt, Human
gacuuuaucuaauaccucugug

SEQ ID NO: 1924327 - RNA, 21 nt, Human
gacuuuaucuaauaccucugu

SEQ ID NO: 1924328 - RNA, 15 nt, Human
gacuuucauuggaaa

SEQ ID NO: 1924329 - RNA, 20 nt, Human
gacucugcacaugucuugua

SEQ ID NO: 1924330 - RNA, 19 nt, Human
gacucugucucaaaaaaac

SEQ ID NO: 1924331 - RNA, 22 nt, Human
gacugugugcucaggagcccug

SEQ ID NO: 1924332 - RNA, 21 nt, Human
gacuguguguugccacaggac

SEQ ID NO: 1924333 - RNA, 22 nt, Human
gacuguguguugccacaggaca

SEQ ID NO: 1924334 - RNA, 20 nt, Human
gacuguugucccugcacucu

SEQ ID NO: 1924335 - RNA, 13 nt, Human
gacuguugucccu

SEQ ID NO: 1924336 - RNA, 14 nt, Human
gacuguugucccug

SEQ ID NO: 1924337 - RNA, 16 nt, Human
gacuguugucccugca

SEQ ID NO: 1924338 - RNA, 11 nt, Human
gacuguagaaa

SEQ ID NO: 1924339 - RNA, 20 nt, Human
gacugaauuaugaaacuuuu

SEQ ID NO: 1924340 - RNA, 14 nt, Human
gacugaauuucuuu

SEQ ID NO: 1924341 - RNA, 14 nt, Human
gacugaauuaugaa

SEQ ID NO: 1924342 - RNA, 15 nt, Human
gacagaagcagcucu

SEQ ID NO: 1924343 - RNA, 17 nt, Human
gacagcccgggcucugc

SEQ ID NO: 1924344 - RNA, 21 nt, Human
gacagaaagcagaacagugau

SEQ ID NO: 1924345 - RNA, 13 nt, Human
gacagaacacugu

SEQ ID NO: 1924346 - RNA, 15 nt, Human
gacagaacacugucu

SEQ ID NO: 1924347 - RNA, 14 nt, Human
gacagaacacuguc

SEQ ID NO: 1924348 - RNA, 13 nt, Human
gacacagcucuuc

SEQ ID NO: 1924349 - RNA, 11 nt, Human
gacacagaaaa

SEQ ID NO: 1924350 - RNA, 16 nt, Human
gacacagaaaauguug

SEQ ID NO: 1924351 - RNA, 18 nt, Human
gacacagaaaauguugag

SEQ ID NO: 1924352 - RNA, 16 nt, Human
gacacagcucuucucc

SEQ ID NO: 1924353 - RNA, 14 nt, Human
gacacagcucuucu

SEQ ID NO: 1924354 - RNA, 16 nt, Human
gacacaggaugaagca

SEQ ID NO: 1924355 - RNA, 12 nt, Human
gacacaggcccg

SEQ ID NO: 1924356 - RNA, 23 nt, Human
gacacagcucuucuccaggcugu

SEQ ID NO: 1924357 - RNA, 22 nt, Human
gacacagcucuucuccaggcug

SEQ ID NO: 1924358 - RNA, 17 nt, Human
gacacagcucuucucca

SEQ ID NO: 1924359 - RNA, 19 nt, Human
gacauuguuggccaaagcc

SEQ ID NO: 1924360 - RNA, 18 nt, Human
gacauuuaccuuuuugaa

SEQ ID NO: 1924361 - RNA, 16 nt, Human
gacauuucuuugugcu

SEQ ID NO: 1924362 - RNA, 15 nt, Human
gacauugcggacagc

SEQ ID NO: 1924363 - RNA, 14 nt, Human
gacauugcggacag

SEQ ID NO: 1924364 - RNA, 18 nt, Human
gacauuguuaaaauaaag

SEQ ID NO: 1924365 - RNA, 21 nt, Human
gacagugagacucugucucag

SEQ ID NO: 1924366 - RNA, 18 nt, Human
gacauucaccugccccaa

SEQ ID NO: 1924367 - RNA, 21 nt, Human
gacauucaccugccccaacuc

SEQ ID NO: 1924368 - RNA, 23 nt, Human
gacauucaguauauaaaauaugu

SEQ ID NO: 1924369 - RNA, 16 nt, Human
gacagaagcagcucuu

SEQ ID NO: 1924370 - RNA, 20 nt, Human
gacagcccgggcucugccuc

SEQ ID NO: 1924371 - RNA, 13 nt, Human
gacagaagaaggc

SEQ ID NO: 1924372 - RNA, 16 nt, Human
gacagugaauauucaa

SEQ ID NO: 1924373 - RNA, 18 nt, Human
gacagcccgggcucugcc

SEQ ID NO: 1924374 - RNA, 19 nt, Human
gacagcccgggcucugccu

SEQ ID NO: 1924375 - RNA, 20 nt, Human
gaccauaauguuacauuauu

SEQ ID NO: 1924376 - RNA, 20 nt, Human
gaccagggauuuccaugaug

SEQ ID NO: 1924377 - RNA, 14 nt, Human
gaccagggagccuu

SEQ ID NO: 1924378 - RNA, 15 nt, Human
gaccagggagccuuu

SEQ ID NO: 1924379 - RNA, 22 nt, Human
gaccagggagccuuugguucug

SEQ ID NO: 1924380 - RNA, 12 nt, Human
gaccaucccuga

SEQ ID NO: 1924381 - RNA, 13 nt, Human
gaccaucccugaa

SEQ ID NO: 1924382 - RNA, 18 nt, Human
gaccaucccugaaggccc

SEQ ID NO: 1924383 - RNA, 19 nt, Human
gaccaucccugaaggcccc

SEQ ID NO: 1924384 - RNA, 18 nt, Human
gaccagggauuuccauga

SEQ ID NO: 1924385 - RNA, 13 nt, Human
gaccagcucagga

SEQ ID NO: 1924386 - RNA, 14 nt, Human
gaccagcucaggac

SEQ ID NO: 1924387 - RNA, 22 nt, Human
gaccagcucaggacagaugcca

SEQ ID NO: 1924388 - RNA, 12 nt, Human
gaccagcucagg

SEQ ID NO: 1924389 - RNA, 21 nt, Human
gaagcacaugccucucucagg

SEQ ID NO: 1924390 - RNA, 15 nt, Human
gaagcagaggaagga

SEQ ID NO: 1924391 - RNA, 15 nt, Human
gaagcacaugccucu

SEQ ID NO: 1924392 - RNA, 17 nt, Human
gaagcacaugccucucu

SEQ ID NO: 1924393 - RNA, 20 nt, Human
gaagcacaugccucucucag

SEQ ID NO: 1924394 - RNA, 20 nt, Human
gaagcaaugcuucaucccuu

SEQ ID NO: 1924395 - RNA, 23 nt, Human
gaagcaacccaaauguucaucaa

SEQ ID NO: 1924396 - RNA, 17 nt, Human
gaagcaaacacauuaag

SEQ ID NO: 1924397 - RNA, 22 nt, Human
gaagacaaugacuuacuguaca

SEQ ID NO: 1924398 - RNA, 23 nt, Human
gaagacaaugugaaaagaaaaau

SEQ ID NO: 1924399 - RNA, 16 nt, Human
gaagacaaugacuuac

SEQ ID NO: 1924400 - RNA, 13 nt, Human
gaagcaaacacau

SEQ ID NO: 1924401 - RNA, 15 nt, Human
gaagcaaacacauua

SEQ ID NO: 1924402 - RNA, 12 nt, Human
gaacuggcugca

SEQ ID NO: 1924403 - RNA, 11 nt, Human
gaacuggcugc

SEQ ID NO: 1924404 - RNA, 18 nt, Human
gaacuggagccaugggca

SEQ ID NO: 1924405 - RNA, 17 nt, Human
gaacuggagccaugggc

SEQ ID NO: 1924406 - RNA, 20 nt, Human
gaacugcugggcuuggcagc

SEQ ID NO: 1924407 - RNA, 17 nt, Human
gaacugcugggcuuggc

SEQ ID NO: 1924408 - RNA, 21 nt, Human
gaacugccuuuggcagaguuc

SEQ ID NO: 1924409 - RNA, 12 nt, Human
gaacugaacuca

SEQ ID NO: 1924410 - RNA, 23 nt, Human
gaacugaacaccauugaaggcuu

SEQ ID NO: 1924411 - RNA, 22 nt, Human
gaacugaacaccauugaaggcu

SEQ ID NO: 1924412 - RNA, 21 nt, Human
gaacugaacaccauugaaggc

SEQ ID NO: 1924413 - RNA, 12 nt, Human
gaacugaacacc

SEQ ID NO: 1924414 - RNA, 19 nt, Human
gaauauuuauuaccucuga

SEQ ID NO: 1924415 - RNA, 21 nt, Human
gaauauuuauuaccucugaua

SEQ ID NO: 1924416 - RNA, 13 nt, Human
gaauauuuauuac

SEQ ID NO: 1924417 - RNA, 15 nt, Human
gaauauuuauuaccu

SEQ ID NO: 1924418 - RNA, 17 nt, Human
gaauauuuauuaccucu

SEQ ID NO: 1924419 - RNA, 18 nt, Human
gaauauuuauuaccucug

SEQ ID NO: 1924420 - RNA, 19 nt, Human
gaauauugcugauggugca

SEQ ID NO: 1924421 - RNA, 20 nt, Human
gaauauugcugauggugcaa

SEQ ID NO: 1924422 - RNA, 10 nt, Human
gaauauuuau

SEQ ID NO: 1924423 - RNA, 12 nt, Human
gaauauuuauua

SEQ ID NO: 1924424 - RNA, 14 nt, Human
gaauauugcugaug

SEQ ID NO: 1924425 - RNA, 15 nt, Human
gaauauugcugaugg

SEQ ID NO: 1924426 - RNA, 20 nt, Human
gaauauaauauauuugugua

SEQ ID NO: 1924427 - RNA, 16 nt, Human
gaauauaauacuguau

SEQ ID NO: 1924428 - RNA, 19 nt, Human
gaauauaauauauuugugu

SEQ ID NO: 1924429 - RNA, 14 nt, Human
gaauauaaacacua

SEQ ID NO: 1924430 - RNA, 23 nt, Human
gaauagucuagauggcuccucuc

SEQ ID NO: 1924431 - RNA, 21 nt, Human
gaauauaaacacuauauggca

SEQ ID NO: 1924432 - RNA, 22 nt, Human
gaaggggagauaaggguaucug

SEQ ID NO: 1924433 - RNA, 21 nt, Human
gaaggggacccccgcccccug

SEQ ID NO: 1924434 - RNA, 18 nt, Human
gaaggggacccccgcccc

SEQ ID NO: 1924435 - RNA, 20 nt, Human
gaaggggacccccgcccccu

SEQ ID NO: 1924436 - RNA, 24 nt, Human
gaagugugggucugugugugugua

SEQ ID NO: 1924437 - RNA, 21 nt, Human
gaagugugggucugugugugu

SEQ ID NO: 1924438 - RNA, 13 nt, Human
gaauauaaacacu

SEQ ID NO: 1924439 - RNA, 23 nt, Human
gaauaguugaaccuauuucucuu

SEQ ID NO: 1924440 - RNA, 17 nt, Human
gaaguugcagugagcug

SEQ ID NO: 1924441 - RNA, 13 nt, Human
gaaguuaugggaa

SEQ ID NO: 1924442 - RNA, 14 nt, Human
gaaggcuggcauga

SEQ ID NO: 1924443 - RNA, 18 nt, Human
gaaggcuggcaugaucca

SEQ ID NO: 1924444 - RNA, 18 nt, Human
gaaggccucgcaggaaga

SEQ ID NO: 1924445 - RNA, 15 nt, Human
gaaggcuggguucug

SEQ ID NO: 1924446 - RNA, 19 nt, Human
gaaggcuggguucugaucc

SEQ ID NO: 1924447 - RNA, 21 nt, Human
gaaggcucgagcaugccugga

SEQ ID NO: 1924448 - RNA, 14 nt, Human
gaaggccucgcagg

SEQ ID NO: 1924449 - RNA, 15 nt, Human
gaaggccucgcagga

SEQ ID NO: 1924450 - RNA, 18 nt, Human
gaaggccccgcccaggcu

SEQ ID NO: 1924451 - RNA, 19 nt, Human
gaaggccccgcccaggcuu

SEQ ID NO: 1924452 - RNA, 20 nt, Human
gaaggcuggguucugauccu

SEQ ID NO: 1924453 - RNA, 22 nt, Human
gaaggcuggguucugauccuag

SEQ ID NO: 1924454 - RNA, 14 nt, Human
gaagggccagagcc

SEQ ID NO: 1924455 - RNA, 15 nt, Human
gaagggccagagcca

SEQ ID NO: 1924456 - RNA, 16 nt, Human
gaagggccagagccag

SEQ ID NO: 1924457 - RNA, 17 nt, Human
gaagggccagagccagg

SEQ ID NO: 1924458 - RNA, 18 nt, Human
gaagggccagagccaggg

SEQ ID NO: 1924459 - RNA, 21 nt, Human
gaagggcuuggacucaagcaa

SEQ ID NO: 1924460 - RNA, 16 nt, Human
gaaggggacccccgcc

SEQ ID NO: 1924461 - RNA, 19 nt, Human
gaagcucucgggcuaggaa

SEQ ID NO: 1924462 - RNA, 20 nt, Human
gaagcuccucuccccagccc

SEQ ID NO: 1924463 - RNA, 21 nt, Human
gaagcuccucuccccagccca

SEQ ID NO: 1924464 - RNA, 22 nt, Human
gaagcuccucuccccagcccag

SEQ ID NO: 1924465 - RNA, 23 nt, Human
gaagcuccucuccccagcccaga

SEQ ID NO: 1924466 - RNA, 22 nt, Human
gaagcuccgcuuucuacccagc

SEQ ID NO: 1924467 - RNA, 17 nt, Human
gaagcuccucuccccag

SEQ ID NO: 1924468 - RNA, 19 nt, Human
gaagcuccucuccccagcc

SEQ ID NO: 1924469 - RNA, 17 nt, Human
gaaggccccgcccaggc

SEQ ID NO: 1924470 - RNA, 22 nt, Human
gaagcugaggcaggugaauugu

SEQ ID NO: 1924471 - RNA, 18 nt, Human
gaagcucuugaagacacu

SEQ ID NO: 1924472 - RNA, 19 nt, Human
gaagcuccgcuuucuaccc

SEQ ID NO: 1924473 - RNA, 19 nt, Human
gaagcuauaaauuccucuu

SEQ ID NO: 1924474 - RNA, 20 nt, Human
gaagcuaucguaaaauuaag

SEQ ID NO: 1924475 - RNA, 20 nt, Human
gagccuuccaggggugggac

SEQ ID NO: 1924476 - RNA, 18 nt, Human
gagcugccuuggcucaga

SEQ ID NO: 1924477 - RNA, 13 nt, Human
gagccuugaacuu

SEQ ID NO: 1924478 - RNA, 23 nt, Human
gagccuuccaggggugggacacc

SEQ ID NO: 1924479 - RNA, 21 nt, Human
gagcugccuuggcucagacau

SEQ ID NO: 1924480 - RNA, 22 nt, Human
gagcugccuuggcucagacaug

SEQ ID NO: 1924481 - RNA, 18 nt, Human
gagcugcuauagccuggg

SEQ ID NO: 1924482 - RNA, 20 nt, Human
gagcugcuauagccuggggu

SEQ ID NO: 1924483 - RNA, 21 nt, Human
gagcugcuauagccuggggug

SEQ ID NO: 1924484 - RNA, 14 nt, Human
gaggcagggucuca

SEQ ID NO: 1924485 - RNA, 15 nt, Human
gaggacgcucucugg

SEQ ID NO: 1924486 - RNA, 22 nt, Human
gaggacgagcgauugaggugua

SEQ ID NO: 1924487 - RNA, 15 nt, Human
gaggcagggucucac

SEQ ID NO: 1924488 - RNA, 12 nt, Human
gaggcagguccc

SEQ ID NO: 1924489 - RNA, 16 nt, Human
gaggcagguccccaga

SEQ ID NO: 1924490 - RNA, 13 nt, Human
gaggcaggucccc

SEQ ID NO: 1924491 - RNA, 17 nt, Human
gaggccaaggugggagg

SEQ ID NO: 1924492 - RNA, 22 nt, Human
gaggccaaggugggaggauugc

SEQ ID NO: 1924493 - RNA, 14 nt, Human
gaggcauaaagacu

SEQ ID NO: 1924494 - RNA, 18 nt, Human
gaggccacacucagcaca

SEQ ID NO: 1924495 - RNA, 21 nt, Human
gaggccacacucagcacaagg

SEQ ID NO: 1924496 - RNA, 13 nt, Human
gaggccagagaca

SEQ ID NO: 1924497 - RNA, 14 nt, Human
gaggccagagacac

SEQ ID NO: 1924498 - RNA, 19 nt, Human
gaggccagagacacaagcc

SEQ ID NO: 1924499 - RNA, 22 nt, Human
gaggcuagugugguguuuccug

SEQ ID NO: 1924500 - RNA, 23 nt, Human
gaggcuccacuuggucugugaga

SEQ ID NO: 1924501 - RNA, 12 nt, Human
gaggcuccacuu

SEQ ID NO: 1924502 - RNA, 12 nt, Human
gaggcucagguc

SEQ ID NO: 1924503 - RNA, 18 nt, Human
gaggcuacuguaaggcaa

SEQ ID NO: 1924504 - RNA, 10 nt, Human
gaggcucagg

SEQ ID NO: 1924505 - RNA, 18 nt, Human
gaggcuccacuuggucug

SEQ ID NO: 1924506 - RNA, 19 nt, Human
gaggcuccacuuggucugu

SEQ ID NO: 1924507 - RNA, 12 nt, Human
gaggggccucuu

SEQ ID NO: 1924508 - RNA, 17 nt, Human
gaggggccuaggccuca

SEQ ID NO: 1924509 - RNA, 19 nt, Human
gaggggccuaggccucagc

SEQ ID NO: 1924510 - RNA, 22 nt, Human
gaggggccuaggccucagccag

SEQ ID NO: 1924511 - RNA, 23 nt, Human
gaggggccuaggccucagccaga

SEQ ID NO: 1924512 - RNA, 20 nt, Human
gaggcugaggcuggcacagg

SEQ ID NO: 1924513 - RNA, 19 nt, Human
gaggcugcagccaggccac

SEQ ID NO: 1924514 - RNA, 18 nt, Human
gaggcugcagccaggcca

SEQ ID NO: 1924515 - RNA, 15 nt, Human
gaggcugaggcuggc

SEQ ID NO: 1924516 - RNA, 16 nt, Human
gaggcugaggcuggca

SEQ ID NO: 1924517 - RNA, 19 nt, Human
gaggcugaggcuggcacag

SEQ ID NO: 1924518 - RNA, 23 nt, Human
gaggugaacaagcaaacccagac

SEQ ID NO: 1924519 - RNA, 23 nt, Human
gaggugaccccagguuucuaugu

SEQ ID NO: 1924520 - RNA, 15 nt, Human
gaggucgaggcagga

SEQ ID NO: 1924521 - RNA, 20 nt, Human
gagugacagaggcagcccca

SEQ ID NO: 1924522 - RNA, 19 nt, Human
gagugcaaugacacagucu

SEQ ID NO: 1924523 - RNA, 21 nt, Human
gagugcaagccccugcuccag

SEQ ID NO: 1924524 - RNA, 23 nt, Human
gagugcagccguuugagaagaaa

SEQ ID NO: 1924525 - RNA, 16 nt, Human
gagugcagccguuuga

SEQ ID NO: 1924526 - RNA, 15 nt, Human
gaguugauucagcuc

SEQ ID NO: 1924527 - RNA, 17 nt, Human
gaguugaucuggaaccc

SEQ ID NO: 1924528 - RNA, 19 nt, Human
gaguugaucuggaacccag

SEQ ID NO: 1924529 - RNA, 20 nt, Human
gaguugaucuggaacccaga

SEQ ID NO: 1924530 - RNA, 21 nt, Human
gaguugaucuggaacccagac

SEQ ID NO: 1924531 - RNA, 16 nt, Human
gaguugauucagcucu

SEQ ID NO: 1924532 - RNA, 17 nt, Human
gaguugauucagcucug

SEQ ID NO: 1924533 - RNA, 14 nt, Human
gaguugaucuggaa

SEQ ID NO: 1924534 - RNA, 16 nt, Human
gaguugaucuggaacc

SEQ ID NO: 1924535 - RNA, 18 nt, Human
gagugacagaggcagccc

SEQ ID NO: 1924536 - RNA, 12 nt, Human
gagucccaccuu

SEQ ID NO: 1924537 - RNA, 22 nt, Human
gagucagaaguuucugccgcag

SEQ ID NO: 1924538 - RNA, 18 nt, Human
gagucagggagagcugaa

SEQ ID NO: 1924539 - RNA, 16 nt, Human
gagucaccaagcccag

SEQ ID NO: 1924540 - RNA, 17 nt, Human
gagucaccaagcccagu

SEQ ID NO: 1924541 - RNA, 20 nt, Human
gagguggaagagggcugcaa

SEQ ID NO: 1924542 - RNA, 17 nt, Human
gagguggaagagggcug

SEQ ID NO: 1924543 - RNA, 16 nt, Human
gaguuuaaauuguaau

SEQ ID NO: 1924544 - RNA, 18 nt, Human
gaguugauucagcucugc

SEQ ID NO: 1924545 - RNA, 22 nt, Human
gaguuguuacauuuuuaagugc

SEQ ID NO: 1924546 - RNA, 13 nt, Human
gaguuggcuggga

SEQ ID NO: 1924547 - RNA, 17 nt, Human
gauucuccugccucagc

SEQ ID NO: 1924548 - RNA, 15 nt, Human
gauucuccugccuca

SEQ ID NO: 1924549 - RNA, 18 nt, Human
gauucuccugccucagcc

SEQ ID NO: 1924550 - RNA, 15 nt, Human
gauucugcaguaaau

SEQ ID NO: 1924551 - RNA, 16 nt, Human
gauucugcaguaaauc

SEQ ID NO: 1924552 - RNA, 17 nt, Human
gauucuuccucccuccc

SEQ ID NO: 1924553 - RNA, 18 nt, Human
gauucuuccucccucccu

SEQ ID NO: 1924554 - RNA, 18 nt, Human
gauucugcaguaaaucuu

SEQ ID NO: 1924555 - RNA, 19 nt, Human
gauucugcaguaaaucuuu

SEQ ID NO: 1924556 - RNA, 21 nt, Human
gauucugcaguaaaucuuuua

SEQ ID NO: 1924557 - RNA, 19 nt, Human
gauucuucccauucuccau

SEQ ID NO: 1924558 - RNA, 20 nt, Human
gauuuaggagaagccaggaa

SEQ ID NO: 1924559 - RNA, 16 nt, Human
gauuuagauaugcaaa

SEQ ID NO: 1924560 - RNA, 12 nt, Human
gauuauuggaaa

SEQ ID NO: 1924561 - RNA, 14 nt, Human
gauuauauuaugaa

SEQ ID NO: 1924562 - RNA, 14 nt, Human
gauuauggagcuuu

SEQ ID NO: 1924563 - RNA, 16 nt, Human
gaugagugagcaugcc

SEQ ID NO: 1924564 - RNA, 15 nt, Human
gaugaucuaggaaga

SEQ ID NO: 1924565 - RNA, 21 nt, Human
gaugaucuaggaagacuuugg

SEQ ID NO: 1924566 - RNA, 18 nt, Human
gauguaaaagacuuuuuu

SEQ ID NO: 1924567 - RNA, 18 nt, Human
gauguagaggagaaacug

SEQ ID NO: 1924568 - RNA, 17 nt, Human
gauguagaggagaaacu

SEQ ID NO: 1924569 - RNA, 18 nt, Human
gaugauacauccaaagca

SEQ ID NO: 1924570 - RNA, 12 nt, Human
gaugcugccccu

SEQ ID NO: 1924571 - RNA, 13 nt, Human
gaugcugccccuc

SEQ ID NO: 1924572 - RNA, 12 nt, Human
gauggacagacu

SEQ ID NO: 1924573 - RNA, 14 nt, Human
gcaccgggccacag

SEQ ID NO: 1924574 - RNA, 23 nt, Human
gcacaucagcacgauuucuguuu

SEQ ID NO: 1924575 - RNA, 22 nt, Human
gcacaucagcacgauuucuguu

SEQ ID NO: 1924576 - RNA, 23 nt, Human
gcaccgggccacagagaaaguac

SEQ ID NO: 1924577 - RNA, 13 nt, Human
gcacaucucugcu

SEQ ID NO: 1924578 - RNA, 17 nt, Human
gcacucagaagacacug

SEQ ID NO: 1924579 - RNA, 17 nt, Human
gcacuccccugcugggu

SEQ ID NO: 1924580 - RNA, 16 nt, Human
gcacucagaagacacu

SEQ ID NO: 1924581 - RNA, 13 nt, Human
gcacucagaagac

SEQ ID NO: 1924582 - RNA, 22 nt, Human
gcacuccccugcuggguguggc

SEQ ID NO: 1924583 - RNA, 16 nt, Human
gcacuccccugcuggg

SEQ ID NO: 1924584 - RNA, 19 nt, Human
gauuuuuugcauuccugac

SEQ ID NO: 1924585 - RNA, 18 nt, Human
gcaagucagaauagaaau

SEQ ID NO: 1924586 - RNA, 13 nt, Human
gcaagucaggguu

SEQ ID NO: 1924587 - RNA, 14 nt, Human
gcacaccgggcacu

SEQ ID NO: 1924588 - RNA, 15 nt, Human
gcacacccagguuug

SEQ ID NO: 1924589 - RNA, 14 nt, Human
gcacacauuuuuua

SEQ ID NO: 1924590 - RNA, 22 nt, Human
gcacaagcugcacccucaggca

SEQ ID NO: 1924591 - RNA, 20 nt, Human
cuucuucagagacuccugca

SEQ ID NO: 1924592 - RNA, 21 nt, Human
cuucuucagagacuccugcag

SEQ ID NO: 1924593 - RNA, 22 nt, Human
cuucuucagagacuccugcagg

SEQ ID NO: 1924594 - RNA, 20 nt, Human
cuugaaugaugccaugagga

SEQ ID NO: 1924595 - RNA, 12 nt, Human
cuugacagggca

SEQ ID NO: 1924596 - RNA, 20 nt, Human
cuugccgucuaccugagggg

SEQ ID NO: 1924597 - RNA, 23 nt, Human
cuugccgucuaccugaggggccu

SEQ ID NO: 1924598 - RNA, 23 nt, Human
cuugaaugaugccaugaggaaca

SEQ ID NO: 1924599 - RNA, 14 nt, Human
cuugacaacaucug

SEQ ID NO: 1924600 - RNA, 17 nt, Human
cuugacagaacacuguc

SEQ ID NO: 1924601 - RNA, 16 nt, Human
cuugacagaacacugu

SEQ ID NO: 1924602 - RNA, 14 nt, Human
cuugacagaacacu

SEQ ID NO: 1924603 - RNA, 12 nt, Human
cuugcucugcug

SEQ ID NO: 1924604 - RNA, 23 nt, Human
cuugccucuguccccuucucuca

SEQ ID NO: 1924605 - RNA, 19 nt, Human
cuugccucuguccccuucu

SEQ ID NO: 1924606 - RNA, 15 nt, Human
cuuuucaaaacauuu

SEQ ID NO: 1924607 - RNA, 20 nt, Human
cuuuuagggagcuggucuga

SEQ ID NO: 1924608 - RNA, 15 nt, Human
cuuuggugaacauug

SEQ ID NO: 1924609 - RNA, 20 nt, Human
cuuuggucuacacugugcug

SEQ ID NO: 1924610 - RNA, 16 nt, Human
cuuuggucuacacugu

SEQ ID NO: 1924611 - RNA, 21 nt, Human
cuuuggggcuuuuacaccagu

SEQ ID NO: 1924612 - RNA, 20 nt, Human
cuuuggggcuuuuacaccag

SEQ ID NO: 1924613 - RNA, 16 nt, Human
cuuuuaggccaaaaaa

SEQ ID NO: 1924614 - RNA, 16 nt, Human
cuuuuagcaguaaaau

SEQ ID NO: 1924615 - RNA, 15 nt, Human
cuuuuagaaauacug

SEQ ID NO: 1924616 - RNA, 19 nt, Human
cuuuuagaaauacugcaag

SEQ ID NO: 1924617 - RNA, 21 nt, Human
cuuuuagaaauacugcaagaa

SEQ ID NO: 1924618 - RNA, 23 nt, Human
cuuuuagaaauacugcaagaaaa

SEQ ID NO: 1924619 - RNA, 18 nt, Human
cuuuuaggccaaaaaaau

SEQ ID NO: 1924620 - RNA, 15 nt, Human
cuuuuauaaacuuua

SEQ ID NO: 1924621 - RNA, 18 nt, Human
cuuuuauaaacuuuaccu

SEQ ID NO: 1924622 - RNA, 16 nt, Human
cuuuuauaaacuuuac

SEQ ID NO: 1924623 - RNA, 17 nt, Human
cuuuuauuucuuaaaca

SEQ ID NO: 1924624 - RNA, 23 nt, Human
cuuucuagcuguugagcuguuuu

SEQ ID NO: 1924625 - RNA, 24 nt, Human
cuuucuccccugcccccaggacug

SEQ ID NO: 1924626 - RNA, 23 nt, Human
cuuucuccccugcccccaggacu

SEQ ID NO: 1924627 - RNA, 22 nt, Human
cuuucuccccugcccccaggac

SEQ ID NO: 1924628 - RNA, 23 nt, Human
cuuucuccuuuguacuuugugcu

SEQ ID NO: 1924629 - RNA, 19 nt, Human
cuuucuccccugcccccag

SEQ ID NO: 1924630 - RNA, 18 nt, Human
cuuucuccccugccccca

SEQ ID NO: 1924631 - RNA, 14 nt, Human
cuuucuccccugcc

SEQ ID NO: 1924632 - RNA, 14 nt, Human
cuuugagguggaag

SEQ ID NO: 1924633 - RNA, 17 nt, Human
cuuugagguggaagagg

SEQ ID NO: 1924634 - RNA, 16 nt, Human
cuuugagguggaagag

SEQ ID NO: 1924635 - RNA, 18 nt, Human
cuuugacgccaucccagc

SEQ ID NO: 1924636 - RNA, 19 nt, Human
cuuugacgccaucccagcc

SEQ ID NO: 1924637 - RNA, 21 nt, Human
cuuugacgccaucccagcccc

SEQ ID NO: 1924638 - RNA, 22 nt, Human
cuuugacgccaucccagcccca

SEQ ID NO: 1924639 - RNA, 15 nt, Human
cuuugauucuccuuc

SEQ ID NO: 1924640 - RNA, 14 nt, Human
cuuugauucuccuu

SEQ ID NO: 1924641 - RNA, 13 nt, Human
cuuugauucuccu

SEQ ID NO: 1924642 - RNA, 21 nt, Human
cuuugauucauaguaacuucu

SEQ ID NO: 1924643 - RNA, 12 nt, Human
cuuugauucaua

SEQ ID NO: 1924644 - RNA, 19 nt, Human
cuuugauucauaguaacuu

SEQ ID NO: 1924645 - RNA, 22 nt, Human
cuuugagguggaagagggcugc

SEQ ID NO: 1924646 - RNA, 17 nt, Human
cuuugagguugcuuugu

SEQ ID NO: 1924647 - RNA, 15 nt, Human
cuuugagguugcuuu

SEQ ID NO: 1924648 - RNA, 22 nt, Human
cuugugacuagugcugaagcuu

SEQ ID NO: 1924649 - RNA, 15 nt, Human
cuugugauuauuuau

SEQ ID NO: 1924650 - RNA, 17 nt, Human
cuugugauuauuuauua

SEQ ID NO: 1924651 - RNA, 13 nt, Human
cuuguggacacag

SEQ ID NO: 1924652 - RNA, 15 nt, Human
cuuguggacacagcu

SEQ ID NO: 1924653 - RNA, 14 nt, Human
cuuguggacacagc

SEQ ID NO: 1924654 - RNA, 14 nt, Human
cuuuaaaugcugcu

SEQ ID NO: 1924655 - RNA, 15 nt, Human
cuuuaaaugcugcuu

SEQ ID NO: 1924656 - RNA, 16 nt, Human
cuuguggacacagcuc

SEQ ID NO: 1924657 - RNA, 20 nt, Human
cuuucaauaggaaaaacuga

SEQ ID NO: 1924658 - RNA, 21 nt, Human
cuuucaauaggaaaaacugau

SEQ ID NO: 1924659 - RNA, 22 nt, Human
cuuucaauaggaaaaacugauu

SEQ ID NO: 1924660 - RNA, 22 nt, Human
cuuuacaagauggguccaggau

SEQ ID NO: 1924661 - RNA, 12 nt, Human
cuuuaauauaaa

SEQ ID NO: 1924662 - RNA, 19 nt, Human
cuuaccucggugccuuccu

SEQ ID NO: 1924663 - RNA, 21 nt, Human
cuuaccucggugccuuccucu

SEQ ID NO: 1924664 - RNA, 13 nt, Human
cuuaccugccagg

SEQ ID NO: 1924665 - RNA, 20 nt, Human
cuuagauguuccaguaaucu

SEQ ID NO: 1924666 - RNA, 13 nt, Human
cuuaccucggugc

SEQ ID NO: 1924667 - RNA, 19 nt, Human
cuuacccucauguucuuaa

SEQ ID NO: 1924668 - RNA, 18 nt, Human
cuuacccucauguucuua

SEQ ID NO: 1924669 - RNA, 17 nt, Human
cuuacccucauguucuu

SEQ ID NO: 1924670 - RNA, 21 nt, Human
cuuaaagaguguggcaaaaua

SEQ ID NO: 1924671 - RNA, 15 nt, Human
cuuaaagaguguggc

SEQ ID NO: 1924672 - RNA, 14 nt, Human
cuuaaacaaaugua

SEQ ID NO: 1924673 - RNA, 13 nt, Human
cuuacacaauggu

SEQ ID NO: 1924674 - RNA, 11 nt, Human
cuuacacccac

SEQ ID NO: 1924675 - RNA, 20 nt, Human
cuuacacccacaguggaaag

SEQ ID NO: 1924676 - RNA, 11 nt, Human
cuuaaaaugau

SEQ ID NO: 1924677 - RNA, 16 nt, Human
cuguugggccaggagc

SEQ ID NO: 1924678 - RNA, 17 nt, Human
cuguugggccaggagcc

SEQ ID NO: 1924679 - RNA, 20 nt, Human
cuguugggccaggagccucc

SEQ ID NO: 1924680 - RNA, 14 nt, Human
cuguucagcuccag

SEQ ID NO: 1924681 - RNA, 16 nt, Human
cugugucuguguuuua

SEQ ID NO: 1924682 - RNA, 13 nt, Human
cuguucagcucca

SEQ ID NO: 1924683 - RNA, 19 nt, Human
cugugucuugcaauggcag

SEQ ID NO: 1924684 - RNA, 16 nt, Human
cugugucuugcaaugg

SEQ ID NO: 1924685 - RNA, 20 nt, Human
cugugucuugcaauggcagc

SEQ ID NO: 1924686 - RNA, 19 nt, Human
cugugucugaguggcuuca

SEQ ID NO: 1924687 - RNA, 13 nt, Human
cugugucuguguu

SEQ ID NO: 1924688 - RNA, 18 nt, Human
cugugacuuaagaagccu

SEQ ID NO: 1924689 - RNA, 18 nt, Human
cugugaccuugagaagau

SEQ ID NO: 1924690 - RNA, 14 nt, Human
cugugucuugcaau

SEQ ID NO: 1924691 - RNA, 15 nt, Human
cugugucugaguggc

SEQ ID NO: 1924692 - RNA, 18 nt, Human
cugugucugaguggcuuc

SEQ ID NO: 1924693 - RNA, 14 nt, Human
cugugucucccuuc

SEQ ID NO: 1924694 - RNA, 19 nt, Human
cugugucucccuucauccu

SEQ ID NO: 1924695 - RNA, 19 nt, Human
cugugucagguggggcagc

SEQ ID NO: 1924696 - RNA, 20 nt, Human
cugugucagcauagaaguaa

SEQ ID NO: 1924697 - RNA, 21 nt, Human
cugugucagguggggcagcuu

SEQ ID NO: 1924698 - RNA, 11 nt, Human
cugugcugccc

SEQ ID NO: 1924699 - RNA, 20 nt, Human
cugugcugagucugaaggcu

SEQ ID NO: 1924700 - RNA, 22 nt, Human
cugugcugagucugaaggcugg

SEQ ID NO: 1924701 - RNA, 21 nt, Human
cuuagcagggaaacagcuaau

SEQ ID NO: 1924702 - RNA, 18 nt, Human
cuuagcagggaaacagcu

SEQ ID NO: 1924703 - RNA, 14 nt, Human
cuuauggaauugau

SEQ ID NO: 1924704 - RNA, 14 nt, Human
cuuaugggcugggu

SEQ ID NO: 1924705 - RNA, 21 nt, Human
cuuaugggcuggguucuaccc

SEQ ID NO: 1924706 - RNA, 16 nt, Human
cuuauggaauugauuu

SEQ ID NO: 1924707 - RNA, 17 nt, Human
cuuauggaauugauuug

SEQ ID NO: 1924708 - RNA, 19 nt, Human
cuuauggaauugauuugca

SEQ ID NO: 1924709 - RNA, 20 nt, Human
cuuauggaauugauuugcau

SEQ ID NO: 1924710 - RNA, 21 nt, Human
cuuauggaauugauuugcauu

SEQ ID NO: 1924711 - RNA, 23 nt, Human
cuuauggaauugauuugcauuga

SEQ ID NO: 1924712 - RNA, 19 nt, Human
cuuauuaaugcuaagggca

SEQ ID NO: 1924713 - RNA, 15 nt, Human
cuuauuaaugcuaag

SEQ ID NO: 1924714 - RNA, 19 nt, Human
cuuauuaaauggaaacuga

SEQ ID NO: 1924715 - RNA, 14 nt, Human
cuuauuaaugcuaa

SEQ ID NO: 1924716 - RNA, 13 nt, Human
cuuauugcccacg

SEQ ID NO: 1924717 - RNA, 12 nt, Human
cuuauugcccac

SEQ ID NO: 1924718 - RNA, 22 nt, Human
cuuaugggcuggguucuaccca

SEQ ID NO: 1924719 - RNA, 23 nt, Human
cuuaugggcuggguucuacccag

SEQ ID NO: 1924720 - RNA, 14 nt, Human
cuuccaugugaggg

SEQ ID NO: 1924721 - RNA, 14 nt, Human
cuuccaugauucua

SEQ ID NO: 1924722 - RNA, 17 nt, Human
cuuccaugauucuauuu

SEQ ID NO: 1924723 - RNA, 16 nt, Human
cuuccauggacuuugu

SEQ ID NO: 1924724 - RNA, 17 nt, Human
cuuccauggacuuuguu

SEQ ID NO: 1924725 - RNA, 18 nt, Human
cuuccagugaggcucugc

SEQ ID NO: 1924726 - RNA, 17 nt, Human
cuuccagugaggcucug

SEQ ID NO: 1924727 - RNA, 19 nt, Human
cuuccagugaggcucugcc

SEQ ID NO: 1924728 - RNA, 20 nt, Human
cuuccagugaggcucugccc

SEQ ID NO: 1924729 - RNA, 11 nt, Human
cuucauccucu

SEQ ID NO: 1924730 - RNA, 15 nt, Human
cuucaucgaaucuac

SEQ ID NO: 1924731 - RNA, 17 nt, Human
cuucaucgaaucuacua

SEQ ID NO: 1924732 - RNA, 16 nt, Human
cuucauccuccucaga

SEQ ID NO: 1924733 - RNA, 13 nt, Human
cuucaucucccac

SEQ ID NO: 1924734 - RNA, 19 nt, Human
cuucaucucccaccuagca

SEQ ID NO: 1924735 - RNA, 20 nt, Human
cuucaucucccaccuagcag

SEQ ID NO: 1924736 - RNA, 13 nt, Human
cuucauggauggg

SEQ ID NO: 1924737 - RNA, 18 nt, Human
cuucaguggcagcugcuu

SEQ ID NO: 1924738 - RNA, 23 nt, Human
cuucagagacuccugcaggcagc

SEQ ID NO: 1924739 - RNA, 24 nt, Human
cuucagagacuccugcaggcagcc

SEQ ID NO: 1924740 - RNA, 13 nt, Human
cuucaucccucug

SEQ ID NO: 1924741 - RNA, 15 nt, Human
cuucauccuccucag

SEQ ID NO: 1924742 - RNA, 16 nt, Human
cuuauuaaugcuaagg

SEQ ID NO: 1924743 - RNA, 18 nt, Human
cuuauugcccacgcugga

SEQ ID NO: 1924744 - RNA, 14 nt, Human
cuucaccuuugucc

SEQ ID NO: 1924745 - RNA, 16 nt, Human
cuucaccuccuuucaa

SEQ ID NO: 1924746 - RNA, 14 nt, Human
cuucaccucugcua

SEQ ID NO: 1924747 - RNA, 17 nt, Human
cuucaccuuugucccca

SEQ ID NO: 1924748 - RNA, 20 nt, Human
cuucaccuuuguccccaccg

SEQ ID NO: 1924749 - RNA, 18 nt, Human
cuucacuguccuccaagc

SEQ ID NO: 1924750 - RNA, 21 nt, Human
cuucacuguccuccaagccag

SEQ ID NO: 1924751 - RNA, 19 nt, Human
cuucacugugaccuugaga

SEQ ID NO: 1924752 - RNA, 16 nt, Human
cuucagagacuccugc

SEQ ID NO: 1924753 - RNA, 21 nt, Human
cuucagagacuccugcaggca

SEQ ID NO: 1924754 - RNA, 22 nt, Human
cuucagagacuccugcaggcag

SEQ ID NO: 1924755 - RNA, 11 nt, Human
cuucagacaua

SEQ ID NO: 1924756 - RNA, 20 nt, Human
cuucagaaagugugcuuuau

SEQ ID NO: 1924757 - RNA, 14 nt, Human
cugcauuuaaaaga

SEQ ID NO: 1924758 - RNA, 13 nt, Human
cugcauuggcuuu

SEQ ID NO: 1924759 - RNA, 12 nt, Human
cugcccuuaccu

SEQ ID NO: 1924760 - RNA, 16 nt, Human
cugcccuuaccugcca

SEQ ID NO: 1924761 - RNA, 17 nt, Human
cugcccuuaccugccag

SEQ ID NO: 1924762 - RNA, 19 nt, Human
cugcccugugggcccccaa

SEQ ID NO: 1924763 - RNA, 23 nt, Human
cugccagggacagaggggguggc

SEQ ID NO: 1924764 - RNA, 11 nt, Human
cugccagggcc

SEQ ID NO: 1924765 - RNA, 18 nt, Human
cugcauuuaaaagauaca

SEQ ID NO: 1924766 - RNA, 17 nt, Human
cugcauuuaaaagauac

SEQ ID NO: 1924767 - RNA, 20 nt, Human
cugccagggacagagggggu

SEQ ID NO: 1924768 - RNA, 22 nt, Human
cugccagggacagagggggugg

SEQ ID NO: 1924769 - RNA, 14 nt, Human
cugcccccgcaucc

SEQ ID NO: 1924770 - RNA, 15 nt, Human
cugcccccgcauccc

SEQ ID NO: 1924771 - RNA, 16 nt, Human
cugcccccgcaucccc

SEQ ID NO: 1924772 - RNA, 18 nt, Human
cugcccccgcauccccug

SEQ ID NO: 1924773 - RNA, 16 nt, Human
cugcccccaggacugg

SEQ ID NO: 1924774 - RNA, 15 nt, Human
cugcccccaggacug

SEQ ID NO: 1924775 - RNA, 14 nt, Human
cugcccccaggacu

SEQ ID NO: 1924776 - RNA, 13 nt, Human
cugcccccaggac

SEQ ID NO: 1924777 - RNA, 18 nt, Human
cugcccccaggacugggc

SEQ ID NO: 1924778 - RNA, 17 nt, Human
cugcccccaggacuggg

SEQ ID NO: 1924779 - RNA, 19 nt, Human
cugcccccaggacugggcc

SEQ ID NO: 1924780 - RNA, 20 nt, Human
cugcccccgcauccccugcc

SEQ ID NO: 1924781 - RNA, 21 nt, Human
cugcccccgcauccccugccu

SEQ ID NO: 1924782 - RNA, 22 nt, Human
cugcccccgcauccccugccuc

SEQ ID NO: 1924783 - RNA, 23 nt, Human
cugcccccgcauccccugccucc

SEQ ID NO: 1924784 - RNA, 19 nt, Human
cugccauccagguucagcu

SEQ ID NO: 1924785 - RNA, 18 nt, Human
cugccauccagguucagc

SEQ ID NO: 1924786 - RNA, 16 nt, Human
cugccauccagguuca

SEQ ID NO: 1924787 - RNA, 16 nt, Human
cugccauauucuguug

SEQ ID NO: 1924788 - RNA, 17 nt, Human
cugcaggccaggccagc

SEQ ID NO: 1924789 - RNA, 18 nt, Human
cugcaggccaggccagcu

SEQ ID NO: 1924790 - RNA, 23 nt, Human
cugcaggccaggccagcugccuc

SEQ ID NO: 1924791 - RNA, 12 nt, Human
cugcagcuuugu

SEQ ID NO: 1924792 - RNA, 17 nt, Human
cugcaggaaauggcugu

SEQ ID NO: 1924793 - RNA, 19 nt, Human
cugcaggacuugagaagac

SEQ ID NO: 1924794 - RNA, 23 nt, Human
cugcaggacuugagaagaccuca

SEQ ID NO: 1924795 - RNA, 13 nt, Human
cugcaggcagcca

SEQ ID NO: 1924796 - RNA, 14 nt, Human
cugcaggcagccag

SEQ ID NO: 1924797 - RNA, 15 nt, Human
cugcaggcagccagg

SEQ ID NO: 1924798 - RNA, 16 nt, Human
cugcaggcagccaggc

SEQ ID NO: 1924799 - RNA, 17 nt, Human
cugcaggcagccaggcc

SEQ ID NO: 1924800 - RNA, 18 nt, Human
cugcaggcagccaggcca

SEQ ID NO: 1924801 - RNA, 19 nt, Human
cugcaggcagccaggccac

SEQ ID NO: 1924802 - RNA, 20 nt, Human
cugcaggcagccaggccaca

SEQ ID NO: 1924803 - RNA, 23 nt, Human
cugcacuauagccuaggugacag

SEQ ID NO: 1924804 - RNA, 22 nt, Human
cugcacuauagccuaggugaca

SEQ ID NO: 1924805 - RNA, 13 nt, Human
cugcacuccagcc

SEQ ID NO: 1924806 - RNA, 15 nt, Human
cugcacuccagccug

SEQ ID NO: 1924807 - RNA, 16 nt, Human
cugcacuccagccuga

SEQ ID NO: 1924808 - RNA, 20 nt, Human
cugcacuccagccugagcga

SEQ ID NO: 1924809 - RNA, 17 nt, Human
cugcacuccagccugag

SEQ ID NO: 1924810 - RNA, 20 nt, Human
cugcacuauagccuagguga

SEQ ID NO: 1924811 - RNA, 18 nt, Human
cugcacuauagccuaggu

SEQ ID NO: 1924812 - RNA, 17 nt, Human
cugcacuauagccuagg

SEQ ID NO: 1924813 - RNA, 16 nt, Human
cugcacuauagccuag

SEQ ID NO: 1924814 - RNA, 23 nt, Human
cugcagccucaaccuccugggcu

SEQ ID NO: 1924815 - RNA, 19 nt, Human
cugcacuccagccugggug

SEQ ID NO: 1924816 - RNA, 24 nt, Human
cugcagccucaaccuccugggcua

SEQ ID NO: 1924817 - RNA, 18 nt, Human
cugcacuccagccugggu

SEQ ID NO: 1924818 - RNA, 16 nt, Human
cugcacuccagccugg

SEQ ID NO: 1924819 - RNA, 17 nt, Human
cugcacuccagccuggg

SEQ ID NO: 1924820 - RNA, 22 nt, Human
cugcaaaggguaucaggugcug

SEQ ID NO: 1924821 - RNA, 14 nt, Human
cugcaaaggacaga

SEQ ID NO: 1924822 - RNA, 16 nt, Human
cugcaaaggacagauc

SEQ ID NO: 1924823 - RNA, 23 nt, Human
cugcaaaggacagauccagggac

SEQ ID NO: 1924824 - RNA, 21 nt, Human
cugcaaaggguaucaggugcu

SEQ ID NO: 1924825 - RNA, 23 nt, Human
cugaugggcaacccccagccugc

SEQ ID NO: 1924826 - RNA, 22 nt, Human
cugaugggcaacccccagccug

SEQ ID NO: 1924827 - RNA, 24 nt, Human
cugaugggcaacccccagccugcu

SEQ ID NO: 1924828 - RNA, 21 nt, Human
cugaugggcaacccccagccu

SEQ ID NO: 1924829 - RNA, 18 nt, Human
cugaugggcaacccccag

SEQ ID NO: 1924830 - RNA, 18 nt, Human
cugaugcuucuucagaga

SEQ ID NO: 1924831 - RNA, 19 nt, Human
cugaugcuucuucagagac

SEQ ID NO: 1924832 - RNA, 20 nt, Human
cugaugcuucuucagagacu

SEQ ID NO: 1924833 - RNA, 14 nt, Human
cucuuaugggcugg

SEQ ID NO: 1924834 - RNA, 18 nt, Human
cucuuauaucuauauuuu

SEQ ID NO: 1924835 - RNA, 15 nt, Human
cucuuauaucuauau

SEQ ID NO: 1924836 - RNA, 22 nt, Human
cucuuauagaauauuuauuacc

SEQ ID NO: 1924837 - RNA, 15 nt, Human
cucuuaugggcuggg

SEQ ID NO: 1924838 - RNA, 14 nt, Human
cugaugacucaaga

SEQ ID NO: 1924839 - RNA, 15 nt, Human
cugaugacucaagau

SEQ ID NO: 1924840 - RNA, 18 nt, Human
cugaugacucaagauucc

SEQ ID NO: 1924841 - RNA, 20 nt, Human
cugaugacucaagauuccca

SEQ ID NO: 1924842 - RNA, 22 nt, Human
cugaugacucaagauucccagg

SEQ ID NO: 1924843 - RNA, 23 nt, Human
cugaugacucaagauucccagga

SEQ ID NO: 1924844 - RNA, 14 nt, Human
cugaugacuugcuu

SEQ ID NO: 1924845 - RNA, 16 nt, Human
cugaugcuucuucaga

SEQ ID NO: 1924846 - RNA, 17 nt, Human
cugaugcuucuucagag

SEQ ID NO: 1924847 - RNA, 12 nt, Human
cugaugcugaca

SEQ ID NO: 1924848 - RNA, 14 nt, Human
cugaugcugccccu

SEQ ID NO: 1924849 - RNA, 23 nt, Human
cugcaccgggccacagagaaagu

SEQ ID NO: 1924850 - RNA, 18 nt, Human
cugcaagguuuaggcugg

SEQ ID NO: 1924851 - RNA, 20 nt, Human
cugcaagguuuaggcuggug

SEQ ID NO: 1924852 - RNA, 22 nt, Human
cugcaagguuuaggcugguggc

SEQ ID NO: 1924853 - RNA, 23 nt, Human
cugcaagguuuaggcugguggcc

SEQ ID NO: 1924854 - RNA, 17 nt, Human
cugcaccguacugugga

SEQ ID NO: 1924855 - RNA, 12 nt, Human
cugcaagggagu

SEQ ID NO: 1924856 - RNA, 20 nt, Human
cugcaagaauugaagcagga

SEQ ID NO: 1924857 - RNA, 21 nt, Human
cugcaagaaaaugauguguac

SEQ ID NO: 1924858 - RNA, 22 nt, Human
cugcaaccuccgccucuugggu

SEQ ID NO: 1924859 - RNA, 14 nt, Human
cugcaaccugauug

SEQ ID NO: 1924860 - RNA, 19 nt, Human
cugcaaccugauugugucu

SEQ ID NO: 1924861 - RNA, 21 nt, Human
cugcaaccugauugugucucu

SEQ ID NO: 1924862 - RNA, 20 nt, Human
cugcaaccuccgccucuugg

SEQ ID NO: 1924863 - RNA, 19 nt, Human
cugcaaauccuugugggaa

SEQ ID NO: 1924864 - RNA, 16 nt, Human
cugcaaauccuugugg

SEQ ID NO: 1924865 - RNA, 22 nt, Human
cugcaaccugauugugucucuu

SEQ ID NO: 1924866 - RNA, 14 nt, Human
cugcaacuucugcc

SEQ ID NO: 1924867 - RNA, 15 nt, Human
cugcaacuucugccu

SEQ ID NO: 1924868 - RNA, 18 nt, Human
cugcaagaauugaagcag

SEQ ID NO: 1924869 - RNA, 22 nt, Human
cuggaugcagccucacaguccu

SEQ ID NO: 1924870 - RNA, 19 nt, Human
cuggacugugugcucagga

SEQ ID NO: 1924871 - RNA, 22 nt, Human
cuggacugugugcucaggagcc

SEQ ID NO: 1924872 - RNA, 14 nt, Human
cugcuuaaugaaaa

SEQ ID NO: 1924873 - RNA, 20 nt, Human
cugcuuagaauccaaacuug

SEQ ID NO: 1924874 - RNA, 23 nt, Human
cuggacugugugcucaggagccc

SEQ ID NO: 1924875 - RNA, 16 nt, Human
cuggaguucugguucc

SEQ ID NO: 1924876 - RNA, 17 nt, Human
cuggaguucugguuccu

SEQ ID NO: 1924877 - RNA, 14 nt, Human
cuggaucugugagg

SEQ ID NO: 1924878 - RNA, 15 nt, Human
cuggaguugaucugg

SEQ ID NO: 1924879 - RNA, 16 nt, Human
cuggaguugaucugga

SEQ ID NO: 1924880 - RNA, 17 nt, Human
cuggaguugaucuggaa

SEQ ID NO: 1924881 - RNA, 18 nt, Human
cuggaguugaucuggaac

SEQ ID NO: 1924882 - RNA, 15 nt, Human
cuggaguucugguuc

SEQ ID NO: 1924883 - RNA, 20 nt, Human
cugcuuaacuucacauauug

SEQ ID NO: 1924884 - RNA, 14 nt, Human
cugcucacauaucu

SEQ ID NO: 1924885 - RNA, 19 nt, Human
cugcucacauaucugucau

SEQ ID NO: 1924886 - RNA, 16 nt, Human
cugcucacauaucugu

SEQ ID NO: 1924887 - RNA, 12 nt, Human
cugcugaaggcu

SEQ ID NO: 1924888 - RNA, 12 nt, Human
cugcugacagug

SEQ ID NO: 1924889 - RNA, 15 nt, Human
cugcugaaggcucga

SEQ ID NO: 1924890 - RNA, 13 nt, Human
cugcugaaggcuc

SEQ ID NO: 1924891 - RNA, 14 nt, Human
cugcugaaggcucg

SEQ ID NO: 1924892 - RNA, 15 nt, Human
cugcugacaguguug

SEQ ID NO: 1924893 - RNA, 13 nt, Human
cugcugacagugu

SEQ ID NO: 1924894 - RNA, 16 nt, Human
cugcugaaggcucauu

SEQ ID NO: 1924895 - RNA, 12 nt, Human
cuggcccuuccu

SEQ ID NO: 1924896 - RNA, 13 nt, Human
cuggcccugugcc

SEQ ID NO: 1924897 - RNA, 14 nt, Human
cuggcuaugcauuu

SEQ ID NO: 1924898 - RNA, 13 nt, Human
cuggcuaugcauu

SEQ ID NO: 1924899 - RNA, 16 nt, Human
cuggcuaugcauuuga

SEQ ID NO: 1924900 - RNA, 15 nt, Human
cuggcuaugcauuug

SEQ ID NO: 1924901 - RNA, 22 nt, Human
cuggcuaugcauuugaaaauuu

SEQ ID NO: 1924902 - RNA, 16 nt, Human
cugggacuacaggcac

SEQ ID NO: 1924903 - RNA, 15 nt, Human
cugggacuacaggca

SEQ ID NO: 1924904 - RNA, 13 nt, Human
cugggacuacagg

SEQ ID NO: 1924905 - RNA, 20 nt, Human
cugggacguggcucagccag

SEQ ID NO: 1924906 - RNA, 16 nt, Human
cugggagaaaugaaaa

SEQ ID NO: 1924907 - RNA, 21 nt, Human
cugggacguggcucagccagc

SEQ ID NO: 1924908 - RNA, 23 nt, Human
cugggacguggcucagccagcac

SEQ ID NO: 1924909 - RNA, 17 nt, Human
cugggagaaaugaaaaa

SEQ ID NO: 1924910 - RNA, 22 nt, Human
cugggagaaccaaaaagaggcu

SEQ ID NO: 1924911 - RNA, 14 nt, Human
cugggacaugggaa

SEQ ID NO: 1924912 - RNA, 18 nt, Human
cugggacaugggaaaggg

SEQ ID NO: 1924913 - RNA, 22 nt, Human
cugggacaugggaaaggggaag

SEQ ID NO: 1924914 - RNA, 21 nt, Human
cuggugccucaccccuugcca

SEQ ID NO: 1924915 - RNA, 12 nt, Human
cuggugccucac

SEQ ID NO: 1924916 - RNA, 15 nt, Human
cuggguguggcgcag

SEQ ID NO: 1924917 - RNA, 14 nt, Human
cuggguguggcgca

SEQ ID NO: 1924918 - RNA, 21 nt, Human
cuggguggcaccagcagccug

SEQ ID NO: 1924919 - RNA, 17 nt, Human
cugggcccacaaaggca

SEQ ID NO: 1924920 - RNA, 22 nt, Human
cugggccauucuccacagcaac

SEQ ID NO: 1924921 - RNA, 19 nt, Human
cugggccauucuccacagc

SEQ ID NO: 1924922 - RNA, 19 nt, Human
cugggccauguugugccuc

SEQ ID NO: 1924923 - RNA, 20 nt, Human
cugggccauguugugccucc

SEQ ID NO: 1924924 - RNA, 20 nt, Human
cugggccauucuccacagca

SEQ ID NO: 1924925 - RNA, 21 nt, Human
cugggccauucuccacagcaa

SEQ ID NO: 1924926 - RNA, 20 nt, Human
cugggcagguuggugggggc

SEQ ID NO: 1924927 - RNA, 12 nt, Human
cugggcagagga

SEQ ID NO: 1924928 - RNA, 13 nt, Human
cugggcagaggaa

SEQ ID NO: 1924929 - RNA, 16 nt, Human
cugggcagaggaaagc

SEQ ID NO: 1924930 - RNA, 20 nt, Human
cugggcagaggaaagcaaag

SEQ ID NO: 1924931 - RNA, 13 nt, Human
cuggggagaaagu

SEQ ID NO: 1924932 - RNA, 18 nt, Human
cuggguggcaccagcagc

SEQ ID NO: 1924933 - RNA, 20 nt, Human
cuggguggcaccagcagccu

SEQ ID NO: 1924934 - RNA, 13 nt, Human
cugggugacagag

SEQ ID NO: 1924935 - RNA, 22 nt, Human
cugggugacagagcaagacucu

SEQ ID NO: 1924936 - RNA, 23 nt, Human
cugggugacagagcaagacucug

SEQ ID NO: 1924937 - RNA, 19 nt, Human
cugggugacagagcaagac

SEQ ID NO: 1924938 - RNA, 23 nt, Human
cacggacgcuggcuccccaaagg

SEQ ID NO: 1924939 - RNA, 16 nt, Human
cacggacgcuggcucc

SEQ ID NO: 1924940 - RNA, 19 nt, Human
cacggacgcuggcucccca

SEQ ID NO: 1924941 - RNA, 17 nt, Human
cacgcuuucuagcuguu

SEQ ID NO: 1924942 - RNA, 16 nt, Human
cacggaagagccuugc

SEQ ID NO: 1924943 - RNA, 22 nt, Human
cacggaagagccuugcggaagg

SEQ ID NO: 1924944 - RNA, 14 nt, Human
cacuacauucuguu

SEQ ID NO: 1924945 - RNA, 13 nt, Human
cacuacauucugu

SEQ ID NO: 1924946 - RNA, 15 nt, Human
cacuacauucuguua

SEQ ID NO: 1924947 - RNA, 15 nt, Human
cacuacauucauuua

SEQ ID NO: 1924948 - RNA, 15 nt, Human
cacgcuggagugcag

SEQ ID NO: 1924949 - RNA, 20 nt, Human
cacgcuggagugcagugagc

SEQ ID NO: 1924950 - RNA, 18 nt, Human
cacgcuggagugcaguga

SEQ ID NO: 1924951 - RNA, 17 nt, Human
cacgcuggagugcagug

SEQ ID NO: 1924952 - RNA, 16 nt, Human
cacgcuggagugcagu

SEQ ID NO: 1924953 - RNA, 21 nt, Human
cacgcuggagugcagugagcc

SEQ ID NO: 1924954 - RNA, 14 nt, Human
cacgcuuucuagcu

SEQ ID NO: 1924955 - RNA, 18 nt, Human
cacgcuuucagcgaauga

SEQ ID NO: 1924956 - RNA, 21 nt, Human
cacuccagugagacagcucug

SEQ ID NO: 1924957 - RNA, 16 nt, Human
cacuccagugagacag

SEQ ID NO: 1924958 - RNA, 12 nt, Human
cacccugcucuc

SEQ ID NO: 1924959 - RNA, 21 nt, Human
cacccuggccgaguccaagcu

SEQ ID NO: 1924960 - RNA, 22 nt, Human
cacccuggccgaguccaagcug

SEQ ID NO: 1924961 - RNA, 19 nt, Human
cacccugaggccucuggaa

SEQ ID NO: 1924962 - RNA, 22 nt, Human
cacccugauuuaggagaagcca

SEQ ID NO: 1924963 - RNA, 12 nt, Human
cacccuccuuuc

SEQ ID NO: 1924964 - RNA, 18 nt, Human
caccugccccucaacucu

SEQ ID NO: 1924965 - RNA, 21 nt, Human
caccugccccucaacucuccu

SEQ ID NO: 1924966 - RNA, 11 nt, Human
caccugccagg

SEQ ID NO: 1924967 - RNA, 12 nt, Human
caccugccaggg

SEQ ID NO: 1924968 - RNA, 15 nt, Human
cacccuggugggcca

SEQ ID NO: 1924969 - RNA, 16 nt, Human
cacccuggugggccaa

SEQ ID NO: 1924970 - RNA, 16 nt, Human
caccugcggugcuauc

SEQ ID NO: 1924971 - RNA, 17 nt, Human
caccugcggugcuaucu

SEQ ID NO: 1924972 - RNA, 19 nt, Human
caccugcggugcuaucucc

SEQ ID NO: 1924973 - RNA, 20 nt, Human
caccugcggugcuaucuccc

SEQ ID NO: 1924974 - RNA, 22 nt, Human
cacaucuugcucugcugacaga

SEQ ID NO: 1924975 - RNA, 21 nt, Human
cacaucuugcucugcugacag

SEQ ID NO: 1924976 - RNA, 20 nt, Human
cacaucuugcucugcugaca

SEQ ID NO: 1924977 - RNA, 15 nt, Human
cacaucuugcucugc

SEQ ID NO: 1924978 - RNA, 14 nt, Human
cacaucuugcucug

SEQ ID NO: 1924979 - RNA, 13 nt, Human
cacaucuugcucu

SEQ ID NO: 1924980 - RNA, 12 nt, Human
cacccagcccac

SEQ ID NO: 1924981 - RNA, 22 nt, Human
caccagccccagugcccacagg

SEQ ID NO: 1924982 - RNA, 21 nt, Human
caccagccccagugcccacag

SEQ ID NO: 1924983 - RNA, 18 nt, Human
caccagccccagugccca

SEQ ID NO: 1924984 - RNA, 19 nt, Human
caccagcccuuagcaggga

SEQ ID NO: 1924985 - RNA, 17 nt, Human
caccagccccagugccc

SEQ ID NO: 1924986 - RNA, 18 nt, Human
cacauuuauucugcucac

SEQ ID NO: 1924987 - RNA, 17 nt, Human
cacauuuauucugcuca

SEQ ID NO: 1924988 - RNA, 23 nt, Human
cacaucuugcucugcugacagac

SEQ ID NO: 1924989 - RNA, 22 nt, Human
caauuucacgacacacuuugau

SEQ ID NO: 1924990 - RNA, 14 nt, Human
caauuucagacucc

SEQ ID NO: 1924991 - RNA, 12 nt, Human
cacaaggacuuc

SEQ ID NO: 1924992 - RNA, 14 nt, Human
cacaaggacuuccu

SEQ ID NO: 1924993 - RNA, 16 nt, Human
cacaaggacuuccugu

SEQ ID NO: 1924994 - RNA, 22 nt, Human
cacaaggacuuccuguccagcu

SEQ ID NO: 1924995 - RNA, 17 nt, Human
cacaaggauagaugcug

SEQ ID NO: 1924996 - RNA, 18 nt, Human
cacaaggauagaugcugg

SEQ ID NO: 1924997 - RNA, 21 nt, Human
cacaaggauagaugcuggccc

SEQ ID NO: 1924998 - RNA, 22 nt, Human
cacaaggauagaugcuggccca

SEQ ID NO: 1924999 - RNA, 20 nt, Human
caauuuauuauggcacauca

SEQ ID NO: 1925000 - RNA, 17 nt, Human
caauuucaaauuacucu

SEQ ID NO: 1925001 - RNA, 13 nt, Human
caauuuauuaugg

SEQ ID NO: 1925002 - RNA, 15 nt, Human
cacaaggccaucugg

SEQ ID NO: 1925003 - RNA, 14 nt, Human
caaucaaaucugcu

SEQ ID NO: 1925004 - RNA, 15 nt, Human
caauggcagccuugg

SEQ ID NO: 1925005 - RNA, 14 nt, Human
caauggcagccuug

SEQ ID NO: 1925006 - RNA, 13 nt, Human
caauggcagccuu

SEQ ID NO: 1925007 - RNA, 14 nt, Human
caaugcugauuugg

SEQ ID NO: 1925008 - RNA, 16 nt, Human
caaugcugauuuggug

SEQ ID NO: 1925009 - RNA, 21 nt, Human
caaugcugauuuggugaccaa

SEQ ID NO: 1925010 - RNA, 16 nt, Human
caauggcagccuuggc

SEQ ID NO: 1925011 - RNA, 12 nt, Human
caaugcuggcug

SEQ ID NO: 1925012 - RNA, 20 nt, Human
caauuggauacgacaacuug

SEQ ID NO: 1925013 - RNA, 14 nt, Human
caauuguaaauuga

SEQ ID NO: 1925014 - RNA, 16 nt, Human
caauauuguacaguuu

SEQ ID NO: 1925015 - RNA, 15 nt, Human
caauauuguacaguu

SEQ ID NO: 1925016 - RNA, 18 nt, Human
caauauuguacaguuuuu

SEQ ID NO: 1925017 - RNA, 17 nt, Human
caauauuguacaguuuu

SEQ ID NO: 1925018 - RNA, 12 nt, Human
caauauuuauua

SEQ ID NO: 1925019 - RNA, 14 nt, Human
caauauuuauuauu

SEQ ID NO: 1925020 - RNA, 13 nt, Human
caauauuuauuau

SEQ ID NO: 1925021 - RNA, 15 nt, Human
caauauuuuccauga

SEQ ID NO: 1925022 - RNA, 13 nt, Human
caauauuuuccau

SEQ ID NO: 1925023 - RNA, 11 nt, Human
caauauuuucc

SEQ ID NO: 1925024 - RNA, 22 nt, Human
caauauuuuccaugaaaaugca

SEQ ID NO: 1925025 - RNA, 20 nt, Human
caauauuuuccaugaaaaug

SEQ ID NO: 1925026 - RNA, 19 nt, Human
caauauuuuccaugaaaau

SEQ ID NO: 1925027 - RNA, 16 nt, Human
caauauuuuccaugaa

SEQ ID NO: 1925028 - RNA, 14 nt, Human
caauauuuuuagau

SEQ ID NO: 1925029 - RNA, 16 nt, Human
caauauuuucuuuaau

SEQ ID NO: 1925030 - RNA, 19 nt, Human
caauauuuucuuuaaugcu

SEQ ID NO: 1925031 - RNA, 20 nt, Human
caauauuuucuuuaaugcuu

SEQ ID NO: 1925032 - RNA, 16 nt, Human
caagcucugcuccucu

SEQ ID NO: 1925033 - RNA, 23 nt, Human
caagcuccuccucccugcaucug

SEQ ID NO: 1925034 - RNA, 14 nt, Human
caagcuccuccucc

SEQ ID NO: 1925035 - RNA, 15 nt, Human
caagcuccuccuccc

SEQ ID NO: 1925036 - RNA, 16 nt, Human
caagcuccuccucccu

SEQ ID NO: 1925037 - RNA, 17 nt, Human
caagcuccuccucccug

SEQ ID NO: 1925038 - RNA, 15 nt, Human
caagcucugcuccuc

SEQ ID NO: 1925039 - RNA, 12 nt, Human
caagcucccagg

SEQ ID NO: 1925040 - RNA, 14 nt, Human
caagcucccaggca

SEQ ID NO: 1925041 - RNA, 15 nt, Human
caagcucccaggcau

SEQ ID NO: 1925042 - RNA, 17 nt, Human
caagcucccaggcauuc

SEQ ID NO: 1925043 - RNA, 19 nt, Human
caagcuccaagcucccagg

SEQ ID NO: 1925044 - RNA, 21 nt, Human
caagcuccaagcucccaggca

SEQ ID NO: 1925045 - RNA, 17 nt, Human
caagcuccaagcuccca

SEQ ID NO: 1925046 - RNA, 18 nt, Human
caagcuccaagcucccag

SEQ ID NO: 1925047 - RNA, 20 nt, Human
caaggauugcuacuguccua

SEQ ID NO: 1925048 - RNA, 19 nt, Human
caaggauugcuacuguccu

SEQ ID NO: 1925049 - RNA, 22 nt, Human
caagcuccuccucccugcaucu

SEQ ID NO: 1925050 - RNA, 14 nt, Human
caaggcaaggcugu

SEQ ID NO: 1925051 - RNA, 15 nt, Human
caaggccauccuucc

SEQ ID NO: 1925052 - RNA, 22 nt, Human
caaguauuauaccuuuuuuaga

SEQ ID NO: 1925053 - RNA, 17 nt, Human
caaguauuauaccuuuu

SEQ ID NO: 1925054 - RNA, 16 nt, Human
caaggcccagaugugg

SEQ ID NO: 1925055 - RNA, 14 nt, Human
caaggccaucuggg

SEQ ID NO: 1925056 - RNA, 17 nt, Human
caaggccaucugggcuc

SEQ ID NO: 1925057 - RNA, 17 nt, Human
caaggccauccuucccu

SEQ ID NO: 1925058 - RNA, 23 nt, Human
caaggccauccuucccugucugc

SEQ ID NO: 1925059 - RNA, 24 nt, Human
caagguuuaggcugguggcccagg

SEQ ID NO: 1925060 - RNA, 21 nt, Human
caagguuuaggcugguggccc

SEQ ID NO: 1925061 - RNA, 22 nt, Human
caagguuuaggcugguggccca

SEQ ID NO: 1925062 - RNA, 23 nt, Human
caagguuuaggcugguggcccag

SEQ ID NO: 1925063 - RNA, 20 nt, Human
caaguuauuuuuaauuuggu

SEQ ID NO: 1925064 - RNA, 19 nt, Human
caaguauuugggaagugaa

SEQ ID NO: 1925065 - RNA, 22 nt, Human
caaguauuugggaagugaagac

SEQ ID NO: 1925066 - RNA, 14 nt, Human
caagcaaacccaga

SEQ ID NO: 1925067 - RNA, 17 nt, Human
caagcaaacccagacgg

SEQ ID NO: 1925068 - RNA, 15 nt, Human
caagcaaaugugaau

SEQ ID NO: 1925069 - RNA, 17 nt, Human
caagcaaaugugaauca

SEQ ID NO: 1925070 - RNA, 19 nt, Human
caagcaaaugugaaucauu

SEQ ID NO: 1925071 - RNA, 14 nt, Human
caagcaagacugag

SEQ ID NO: 1925072 - RNA, 13 nt, Human
caagcaagacuga

SEQ ID NO: 1925073 - RNA, 16 nt, Human
caagaccacguuucua

SEQ ID NO: 1925074 - RNA, 14 nt, Human
caagaccacguuuc

SEQ ID NO: 1925075 - RNA, 19 nt, Human
caagaccaccacuucgaaa

SEQ ID NO: 1925076 - RNA, 18 nt, Human
caagaugaaggagaggca

SEQ ID NO: 1925077 - RNA, 13 nt, Human
caagcaccuccug

SEQ ID NO: 1925078 - RNA, 12 nt, Human
caagcacagcag

SEQ ID NO: 1925079 - RNA, 13 nt, Human
caagcacagcagc

SEQ ID NO: 1925080 - RNA, 14 nt, Human
caagcacagcagcc

SEQ ID NO: 1925081 - RNA, 17 nt, Human
caagcacagcagccugg

SEQ ID NO: 1925082 - RNA, 14 nt, Human
caagcaccuccugc

SEQ ID NO: 1925083 - RNA, 16 nt, Human
caaccccuucgcuccu

SEQ ID NO: 1925084 - RNA, 14 nt, Human
caaccccuucgcuc

SEQ ID NO: 1925085 - RNA, 17 nt, Human
caaccccuucgcuccug

SEQ ID NO: 1925086 - RNA, 13 nt, Human
caacuauggccug

SEQ ID NO: 1925087 - RNA, 14 nt, Human
caacccccagccug

SEQ ID NO: 1925088 - RNA, 13 nt, Human
caaccccaggcug

SEQ ID NO: 1925089 - RNA, 14 nt, Human
caacuauggccugu

SEQ ID NO: 1925090 - RNA, 16 nt, Human
caacuauggaucagaa

SEQ ID NO: 1925091 - RNA, 17 nt, Human
caacuauggaucagaau

SEQ ID NO: 1925092 - RNA, 15 nt, Human
caagaagcccaggaa

SEQ ID NO: 1925093 - RNA, 18 nt, Human
caagaagcccaggaaagg

SEQ ID NO: 1925094 - RNA, 17 nt, Human
caagaaggaugauucaa

SEQ ID NO: 1925095 - RNA, 15 nt, Human
auuugcacaaguuuu

SEQ ID NO: 1925096 - RNA, 21 nt, Human
auuucuguuuagauaauacac

SEQ ID NO: 1925097 - RNA, 21 nt, Human
auuucuuaaacaaauguauga

SEQ ID NO: 1925098 - RNA, 13 nt, Human
auuucuuaaacaa

SEQ ID NO: 1925099 - RNA, 13 nt, Human
auuucugcauaug

SEQ ID NO: 1925100 - RNA, 19 nt, Human
auuucuguuuagauaauac

SEQ ID NO: 1925101 - RNA, 20 nt, Human
auuucuguuuagauaauaca

SEQ ID NO: 1925102 - RNA, 16 nt, Human
auuucucuuucuuuac

SEQ ID NO: 1925103 - RNA, 18 nt, Human
auuucucuuucuuuacaa

SEQ ID NO: 1925104 - RNA, 15 nt, Human
auuuaagauaauuau

SEQ ID NO: 1925105 - RNA, 16 nt, Human
auuuaaguaacuuuaa

SEQ ID NO: 1925106 - RNA, 22 nt, Human
auuuaauagguuuggacaaaau

SEQ ID NO: 1925107 - RNA, 15 nt, Human
auuuauauauguauu

SEQ ID NO: 1925108 - RNA, 14 nt, Human
auuuauauauguau

SEQ ID NO: 1925109 - RNA, 15 nt, Human
auuuauauaaauuuu

SEQ ID NO: 1925110 - RNA, 12 nt, Human
auuucacucucc

SEQ ID NO: 1925111 - RNA, 20 nt, Human
auuucaccccucccuuucuc

SEQ ID NO: 1925112 - RNA, 15 nt, Human
auuucaccccucccu

SEQ ID NO: 1925113 - RNA, 21 nt, Human
auuucaccccucccuuucucc

SEQ ID NO: 1925114 - RNA, 21 nt, Human
auuucaccacucaaaggccag

SEQ ID NO: 1925115 - RNA, 23 nt, Human
auuucaccacucaaaggccagac

SEQ ID NO: 1925116 - RNA, 14 nt, Human
auuucacucuccuu

SEQ ID NO: 1925117 - RNA, 21 nt, Human
auuucaauuuccaagagcuga

SEQ ID NO: 1925118 - RNA, 17 nt, Human
auugaggggauuaauau

SEQ ID NO: 1925119 - RNA, 22 nt, Human
auugaggggauuaauaugaaaa

SEQ ID NO: 1925120 - RNA, 19 nt, Human
auuuucuauaauuuaaaua

SEQ ID NO: 1925121 - RNA, 13 nt, Human
auuuuauaaacaa

SEQ ID NO: 1925122 - RNA, 18 nt, Human
auuuucuauaauuuaaau

SEQ ID NO: 1925123 - RNA, 17 nt, Human
auuuucuauaauuuaaa

SEQ ID NO: 1925124 - RNA, 13 nt, Human
auuuugaaaaacu

SEQ ID NO: 1925125 - RNA, 15 nt, Human
auuuugaaaaacugc

SEQ ID NO: 1925126 - RNA, 19 nt, Human
auuuguucuauagcuuuuc

SEQ ID NO: 1925127 - RNA, 12 nt, Human
auuuguuaaugg

SEQ ID NO: 1925128 - RNA, 14 nt, Human
auuuguuauaauga

SEQ ID NO: 1925129 - RNA, 22 nt, Human
auuuguguugaagagguuuuaa

SEQ ID NO: 1925130 - RNA, 18 nt, Human
auuuguguugaagagguu

SEQ ID NO: 1925131 - RNA, 15 nt, Human
auuuguguugaagag

SEQ ID NO: 1925132 - RNA, 14 nt, Human
auuuguguugaaga

SEQ ID NO: 1925133 - RNA, 20 nt, Human
caaaagguuaauaaaguaau

SEQ ID NO: 1925134 - RNA, 13 nt, Human
caaaagcauguga

SEQ ID NO: 1925135 - RNA, 19 nt, Human
caaaagcaucuaugugaga

SEQ ID NO: 1925136 - RNA, 21 nt, Human
caaaagguauuuuaaucacca

SEQ ID NO: 1925137 - RNA, 15 nt, Human
auuuuuuuuguuuca

SEQ ID NO: 1925138 - RNA, 15 nt, Human
auuuuuuuuaaacaa

SEQ ID NO: 1925139 - RNA, 16 nt, Human
auuuuuauuaaauuau

SEQ ID NO: 1925140 - RNA, 15 nt, Human
auuuuuuucugaauu

SEQ ID NO: 1925141 - RNA, 17 nt, Human
auuuuuuucugaaauuu

SEQ ID NO: 1925142 - RNA, 16 nt, Human
auuuuuuucugaaauu

SEQ ID NO: 1925143 - RNA, 22 nt, Human
auuuuguuuuugucuuaaaaag

SEQ ID NO: 1925144 - RNA, 12 nt, Human
auuuuuauccau

SEQ ID NO: 1925145 - RNA, 17 nt, Human
caaaccaucauugaaau

SEQ ID NO: 1925146 - RNA, 14 nt, Human
caaaccaucauuga

SEQ ID NO: 1925147 - RNA, 16 nt, Human
caaaccaucauugaaa

SEQ ID NO: 1925148 - RNA, 18 nt, Human
caaacaugugguuaaugc

SEQ ID NO: 1925149 - RNA, 23 nt, Human
auuaaugcuaagggcaggcccaa

SEQ ID NO: 1925150 - RNA, 15 nt, Human
auuaaugcuaagggc

SEQ ID NO: 1925151 - RNA, 14 nt, Human
auuaaugcuaaggg

SEQ ID NO: 1925152 - RNA, 22 nt, Human
auuacaagcgugagccacugca

SEQ ID NO: 1925153 - RNA, 15 nt, Human
auuacaggcuugagc

SEQ ID NO: 1925154 - RNA, 15 nt, Human
auuacagggcacagg

SEQ ID NO: 1925155 - RNA, 16 nt, Human
auuacagggcacaggc

SEQ ID NO: 1925156 - RNA, 21 nt, Human
auuaacaugaauauuuagugu

SEQ ID NO: 1925157 - RNA, 11 nt, Human
auuaacacugc

SEQ ID NO: 1925158 - RNA, 14 nt, Human
auucauauuuacuu

SEQ ID NO: 1925159 - RNA, 17 nt, Human
auucauggccuggggga

SEQ ID NO: 1925160 - RNA, 14 nt, Human
auucauauugaaua

SEQ ID NO: 1925161 - RNA, 17 nt, Human
auucauauugaauauaa

SEQ ID NO: 1925162 - RNA, 13 nt, Human
auucauauugaau

SEQ ID NO: 1925163 - RNA, 19 nt, Human
auucauaguaacuucuuau

SEQ ID NO: 1925164 - RNA, 13 nt, Human
auuaugugccaga

SEQ ID NO: 1925165 - RNA, 21 nt, Human
auuaugugccagauuuaugca

SEQ ID NO: 1925166 - RNA, 23 nt, Human
auuaugugccagauuuaugcaua

SEQ ID NO: 1925167 - RNA, 12 nt, Human
auucaauaaaaa

SEQ ID NO: 1925168 - RNA, 18 nt, Human
auucaauaaaaaaaagaa

SEQ ID NO: 1925169 - RNA, 21 nt, Human
auucaauaaaaaaaagaaaug

SEQ ID NO: 1925170 - RNA, 20 nt, Human
auuagaucuucaaacagaau

SEQ ID NO: 1925171 - RNA, 18 nt, Human
auuagaucuucaaacaga

SEQ ID NO: 1925172 - RNA, 19 nt, Human
auuagaucuucaaacagaa

SEQ ID NO: 1925173 - RNA, 22 nt, Human
auucaauaaaaaaaagaaauga

SEQ ID NO: 1925174 - RNA, 20 nt, Human
auucucuaguuugauuaaau

SEQ ID NO: 1925175 - RNA, 13 nt, Human
auucguucugugg

SEQ ID NO: 1925176 - RNA, 23 nt, Human
auucgguguggugcagugugaaa

SEQ ID NO: 1925177 - RNA, 23 nt, Human
auucucuaguuugauuaaauucu

SEQ ID NO: 1925178 - RNA, 14 nt, Human
auucucuccaaaaa

SEQ ID NO: 1925179 - RNA, 15 nt, Human
auucucuccaaaaau

SEQ ID NO: 1925180 - RNA, 19 nt, Human
auucucuccaaaaaugcac

SEQ ID NO: 1925181 - RNA, 12 nt, Human
auucucuuaucc

SEQ ID NO: 1925182 - RNA, 14 nt, Human
auucucuuauccaa

SEQ ID NO: 1925183 - RNA, 14 nt, Human
auucgcuugagaaa

SEQ ID NO: 1925184 - RNA, 15 nt, Human
auucucuuauccaac

SEQ ID NO: 1925185 - RNA, 19 nt, Human
auugagcugcagaaacgaa

SEQ ID NO: 1925186 - RNA, 17 nt, Human
caggaccuccaagccac

SEQ ID NO: 1925187 - RNA, 19 nt, Human
caggaccuccaagccacug

SEQ ID NO: 1925188 - RNA, 20 nt, Human
caggaccuccaagccacuga

SEQ ID NO: 1925189 - RNA, 23 nt, Human
caggaccuccaagccacugagca

SEQ ID NO: 1925190 - RNA, 16 nt, Human
caggaccucaggugag

SEQ ID NO: 1925191 - RNA, 23 nt, Human
caggaccucaggugagaagcaga

SEQ ID NO: 1925192 - RNA, 13 nt, Human
caggaccagcuca

SEQ ID NO: 1925193 - RNA, 12 nt, Human
caggaccagcuc

SEQ ID NO: 1925194 - RNA, 14 nt, Human
caggaccagcucag

SEQ ID NO: 1925195 - RNA, 22 nt, Human
caggaggccagccuugaccauu

SEQ ID NO: 1925196 - RNA, 18 nt, Human
caggaggccagccuugac

SEQ ID NO: 1925197 - RNA, 19 nt, Human
caggaggccagccuugacc

SEQ ID NO: 1925198 - RNA, 19 nt, Human
caggaggaucacuugaguc

SEQ ID NO: 1925199 - RNA, 17 nt, Human
caggcaaugcuggcugu

SEQ ID NO: 1925200 - RNA, 16 nt, Human
caggcaaugcuggcug

SEQ ID NO: 1925201 - RNA, 15 nt, Human
caggcaaugcuggcu

SEQ ID NO: 1925202 - RNA, 14 nt, Human
caggcaaugcuggc

SEQ ID NO: 1925203 - RNA, 11 nt, Human
caggccaggcc

SEQ ID NO: 1925204 - RNA, 12 nt, Human
caggccaggccc

SEQ ID NO: 1925205 - RNA, 14 nt, Human
caggccaggccagc

SEQ ID NO: 1925206 - RNA, 21 nt, Human
cagggagaccuggacacaggc

SEQ ID NO: 1925207 - RNA, 20 nt, Human
cagggagaccuggacacagg

SEQ ID NO: 1925208 - RNA, 19 nt, Human
cagggagacccguccauuu

SEQ ID NO: 1925209 - RNA, 22 nt, Human
caggcugggagagccuuccagg

SEQ ID NO: 1925210 - RNA, 23 nt, Human
caggcugggagagccuuccaggg

SEQ ID NO: 1925211 - RNA, 19 nt, Human
cagggagcauuuuccucca

SEQ ID NO: 1925212 - RNA, 21 nt, Human
cagggagcaggcggugggcac

SEQ ID NO: 1925213 - RNA, 16 nt, Human
cagggcuuacggcccu

SEQ ID NO: 1925214 - RNA, 18 nt, Human
cagggcuuacggcccugg

SEQ ID NO: 1925215 - RNA, 20 nt, Human
cagggcuuacggcccuggcc

SEQ ID NO: 1925216 - RNA, 23 nt, Human
cagggcuuacggcccuggccuug

SEQ ID NO: 1925217 - RNA, 17 nt, Human
caggggaaaaucagccu

SEQ ID NO: 1925218 - RNA, 14 nt, Human
caggggaaaagagg

SEQ ID NO: 1925219 - RNA, 16 nt, Human
caggggaaaagaggag

SEQ ID NO: 1925220 - RNA, 12 nt, Human
caggccuccuac

SEQ ID NO: 1925221 - RNA, 14 nt, Human
caggccuccuacag

SEQ ID NO: 1925222 - RNA, 16 nt, Human
caggccuuaucuccaa

SEQ ID NO: 1925223 - RNA, 17 nt, Human
caggccuuaucuccaag

SEQ ID NO: 1925224 - RNA, 22 nt, Human
caggccuuaucuccaagaccag

SEQ ID NO: 1925225 - RNA, 21 nt, Human
caggcugggagagccuuccag

SEQ ID NO: 1925226 - RNA, 23 nt, Human
caggcuaaacauccaauauuuuc

SEQ ID NO: 1925227 - RNA, 19 nt, Human
caggaaaggcuccaggagc

SEQ ID NO: 1925228 - RNA, 20 nt, Human
caggaaaggcuccaggagca

SEQ ID NO: 1925229 - RNA, 16 nt, Human
caggaaaggcuccagg

SEQ ID NO: 1925230 - RNA, 17 nt, Human
caggaaaggcuccagga

SEQ ID NO: 1925231 - RNA, 21 nt, Human
cagcugacuuuucuguccgag

SEQ ID NO: 1925232 - RNA, 18 nt, Human
cagcugagcgccaggaug

SEQ ID NO: 1925233 - RNA, 14 nt, Human
cagcugagcgccag

SEQ ID NO: 1925234 - RNA, 16 nt, Human
cagcugagcgccagga

SEQ ID NO: 1925235 - RNA, 17 nt, Human
cagccugcuccagcugu

SEQ ID NO: 1925236 - RNA, 19 nt, Human
cagccugcuccagcuguuc

SEQ ID NO: 1925237 - RNA, 14 nt, Human
cagcgccuuuccca

SEQ ID NO: 1925238 - RNA, 22 nt, Human
cagcgccuuucccaacucuagc

SEQ ID NO: 1925239 - RNA, 16 nt, Human
cagccugcuccagcug

SEQ ID NO: 1925240 - RNA, 15 nt, Human
cagcuaacauggaag

SEQ ID NO: 1925241 - RNA, 21 nt, Human
cagcggaaagcccugugcucc

SEQ ID NO: 1925242 - RNA, 20 nt, Human
cagcgcuggccgggaccccg

SEQ ID NO: 1925243 - RNA, 19 nt, Human
cagacaguguuuucuggga

SEQ ID NO: 1925244 - RNA, 19 nt, Human
cagacucccauuccugaag

SEQ ID NO: 1925245 - RNA, 20 nt, Human
cagacucccauuccugaaga

SEQ ID NO: 1925246 - RNA, 23 nt, Human
cagacuccugacugucucccggg

SEQ ID NO: 1925247 - RNA, 17 nt, Human
cagacucuacagaggcc

SEQ ID NO: 1925248 - RNA, 22 nt, Human
cagacucgauucauauugaaua

SEQ ID NO: 1925249 - RNA, 23 nt, Human
cagacaggcaagcaccuccugcc

SEQ ID NO: 1925250 - RNA, 22 nt, Human
cagacaggcaagcaccuccugc

SEQ ID NO: 1925251 - RNA, 18 nt, Human
cagacaggcaaauaaaag

SEQ ID NO: 1925252 - RNA, 15 nt, Human
cagacaggccccgug

SEQ ID NO: 1925253 - RNA, 20 nt, Human
cagacaggccccgugaggca

SEQ ID NO: 1925254 - RNA, 21 nt, Human
cagacucuacagaggccaugg

SEQ ID NO: 1925255 - RNA, 20 nt, Human
cagacucuacagaggccaug

SEQ ID NO: 1925256 - RNA, 19 nt, Human
cagacucuacagaggccau

SEQ ID NO: 1925257 - RNA, 18 nt, Human
cagacucuacagaggcca

SEQ ID NO: 1925258 - RNA, 23 nt, Human
cagacucuacagaggccaugggc

SEQ ID NO: 1925259 - RNA, 13 nt, Human
cagacugaccuug

SEQ ID NO: 1925260 - RNA, 22 nt, Human
cagacugaccuugaugagcugu

SEQ ID NO: 1925261 - RNA, 17 nt, Human
cagacugaucaggaccu

SEQ ID NO: 1925262 - RNA, 16 nt, Human
cagacugaucaggacc

SEQ ID NO: 1925263 - RNA, 13 nt, Human
cagacuggaagca

SEQ ID NO: 1925264 - RNA, 18 nt, Human
cagacuggaagcacagcu

SEQ ID NO: 1925265 - RNA, 17 nt, Human
cagacuggaagcacagc

SEQ ID NO: 1925266 - RNA, 16 nt, Human
cagacuggaagcacag

SEQ ID NO: 1925267 - RNA, 14 nt, Human
cagacuggaagcac

SEQ ID NO: 1925268 - RNA, 21 nt, Human
cagacuggaagcacagcuuca

SEQ ID NO: 1925269 - RNA, 20 nt, Human
cagacuggaagcacagcuuc

SEQ ID NO: 1925270 - RNA, 21 nt, Human
cagacaggcaagcaccuccug

SEQ ID NO: 1925271 - RNA, 20 nt, Human
cagacaggcaagcaccuccu

SEQ ID NO: 1925272 - RNA, 18 nt, Human
cagacaggcaagcaccuc

SEQ ID NO: 1925273 - RNA, 13 nt, Human
cagacaggcaagc

SEQ ID NO: 1925274 - RNA, 11 nt, Human
cagacaggcaa

SEQ ID NO: 1925275 - RNA, 17 nt, Human
cagacaggaccagggau

SEQ ID NO: 1925276 - RNA, 24 nt, Human
cagacaggaccagggauuuccaug

SEQ ID NO: 1925277 - RNA, 13 nt, Human
cagacaggaccag

SEQ ID NO: 1925278 - RNA, 21 nt, Human
cagacagcuccacccuggccg

SEQ ID NO: 1925279 - RNA, 15 nt, Human
cagacaggaccaggg

SEQ ID NO: 1925280 - RNA, 16 nt, Human
cagacaggaccaggga

SEQ ID NO: 1925281 - RNA, 15 nt, Human
cagacagcugccugg

SEQ ID NO: 1925282 - RNA, 16 nt, Human
cagacagcugccuggg

SEQ ID NO: 1925283 - RNA, 17 nt, Human
cagacagcugccuggga

SEQ ID NO: 1925284 - RNA, 18 nt, Human
cagacagcugccugggau

SEQ ID NO: 1925285 - RNA, 13 nt, Human
cagacagcugccu

SEQ ID NO: 1925286 - RNA, 14 nt, Human
cagacagcugccug

SEQ ID NO: 1925287 - RNA, 16 nt, Human
cagacuguugucccug

SEQ ID NO: 1925288 - RNA, 18 nt, Human
cagacuguugucccugca

SEQ ID NO: 1925289 - RNA, 15 nt, Human
cagauccagggacug

SEQ ID NO: 1925290 - RNA, 14 nt, Human
cagauaugauucaa

SEQ ID NO: 1925291 - RNA, 12 nt, Human
cagauccaggac

SEQ ID NO: 1925292 - RNA, 13 nt, Human
cagauccaggacu

SEQ ID NO: 1925293 - RNA, 13 nt, Human
cagauccagggac

SEQ ID NO: 1925294 - RNA, 14 nt, Human
cagauccagggaca

SEQ ID NO: 1925295 - RNA, 15 nt, Human
cagauccagggacag

SEQ ID NO: 1925296 - RNA, 23 nt, Human
cagauccagggacagaggcccca

SEQ ID NO: 1925297 - RNA, 22 nt, Human
cagauauaaaagacugaccaau

SEQ ID NO: 1925298 - RNA, 19 nt, Human
cagauagauauaugcucug

SEQ ID NO: 1925299 - RNA, 14 nt, Human
cagaggggguggcc

SEQ ID NO: 1925300 - RNA, 16 nt, Human
cagaggggguggccuc

SEQ ID NO: 1925301 - RNA, 19 nt, Human
cagauacuuggggggcuga

SEQ ID NO: 1925302 - RNA, 20 nt, Human
cagaggaaagcaaaggagau

SEQ ID NO: 1925303 - RNA, 13 nt, Human
cagaggggguggc

SEQ ID NO: 1925304 - RNA, 17 nt, Human
cagaggaaagcaaagga

SEQ ID NO: 1925305 - RNA, 19 nt, Human
cagaggaaagcaaaggaga

SEQ ID NO: 1925306 - RNA, 23 nt, Human
cagagaggguggugaccucugcc

SEQ ID NO: 1925307 - RNA, 23 nt, Human
cagagagggugggagugggccca

SEQ ID NO: 1925308 - RNA, 20 nt, Human
cagagagguuaaggugggua

SEQ ID NO: 1925309 - RNA, 13 nt, Human
cagagcugccacc

SEQ ID NO: 1925310 - RNA, 22 nt, Human
cagagaggguggugaccucugc

SEQ ID NO: 1925311 - RNA, 20 nt, Human
cagagaggguggugaccucu

SEQ ID NO: 1925312 - RNA, 17 nt, Human
cagagaggguggugacc

SEQ ID NO: 1925313 - RNA, 13 nt, Human
cagagaggguggg

SEQ ID NO: 1925314 - RNA, 12 nt, Human
cagagagggugg

SEQ ID NO: 1925315 - RNA, 17 nt, Human
cagcacguguggccugu

SEQ ID NO: 1925316 - RNA, 15 nt, Human
cagcacgauuucugu

SEQ ID NO: 1925317 - RNA, 14 nt, Human
cagcacgauuucug

SEQ ID NO: 1925318 - RNA, 18 nt, Human
cagccaggccacuggccc

SEQ ID NO: 1925319 - RNA, 15 nt, Human
cagccaggccccagg

SEQ ID NO: 1925320 - RNA, 18 nt, Human
cagauugcaacaggcugg

SEQ ID NO: 1925321 - RNA, 20 nt, Human
cagauugcaacaggcugggc

SEQ ID NO: 1925322 - RNA, 19 nt, Human
cagauugcaacaggcuggg

SEQ ID NO: 1925323 - RNA, 22 nt, Human
cagauuggcucacacugagaau

SEQ ID NO: 1925324 - RNA, 21 nt, Human
cagauuggcucacacugagaa

SEQ ID NO: 1925325 - RNA, 13 nt, Human
cagauuuaugcau

SEQ ID NO: 1925326 - RNA, 13 nt, Human
cagauuucacucu

SEQ ID NO: 1925327 - RNA, 20 nt, Human
cagauuucacucuccuuggu

SEQ ID NO: 1925328 - RNA, 19 nt, Human
cagauuugaacucuucaau

SEQ ID NO: 1925329 - RNA, 17 nt, Human
cagcaccaucucuccuc

SEQ ID NO: 1925330 - RNA, 19 nt, Human
cagauuucacucuccuugg

SEQ ID NO: 1925331 - RNA, 16 nt, Human
cagauuuccagucucc

SEQ ID NO: 1925332 - RNA, 24 nt, Human
cagauuuccagucuccaccaggaa

SEQ ID NO: 1925333 - RNA, 19 nt, Human
cagcaccaucucuccuccu

SEQ ID NO: 1925334 - RNA, 18 nt, Human
caguuugagacaggagac

SEQ ID NO: 1925335 - RNA, 16 nt, Human
caguuugagacaggag

SEQ ID NO: 1925336 - RNA, 15 nt, Human
caguuugagacagga

SEQ ID NO: 1925337 - RNA, 24 nt, Human
caguuugaaugcagucuguccagg

SEQ ID NO: 1925338 - RNA, 23 nt, Human
caguuuguuaguaugaggcauuu

SEQ ID NO: 1925339 - RNA, 21 nt, Human
caguuuguuaguaugaggcau

SEQ ID NO: 1925340 - RNA, 16 nt, Human
caguuuuaacuagaau

SEQ ID NO: 1925341 - RNA, 18 nt, Human
caguuguuagugugucuu

SEQ ID NO: 1925342 - RNA, 22 nt, Human
caguuguuagugugucuuagug

SEQ ID NO: 1925343 - RNA, 17 nt, Human
cauaauguuacauuauu

SEQ ID NO: 1925344 - RNA, 22 nt, Human
cauaaugggguccuggccaucc

SEQ ID NO: 1925345 - RNA, 14 nt, Human
cauaaugggguccu

SEQ ID NO: 1925346 - RNA, 23 nt, Human
cauaaugcgugcauaccacuuuu

SEQ ID NO: 1925347 - RNA, 15 nt, Human
caguuuuaucauuuu

SEQ ID NO: 1925348 - RNA, 23 nt, Human
caguuuucaagucaaauuaauaa

SEQ ID NO: 1925349 - RNA, 11 nt, Human
caguuuuccuu

SEQ ID NO: 1925350 - RNA, 22 nt, Human
caguuuucaagucaaauuaaua

SEQ ID NO: 1925351 - RNA, 18 nt, Human
cauaauguuacauuauua

SEQ ID NO: 1925352 - RNA, 18 nt, Human
cauaauuauuauuuggcc

SEQ ID NO: 1925353 - RNA, 23 nt, Human
cauacaggaagguagaaauaucu

SEQ ID NO: 1925354 - RNA, 16 nt, Human
cauacagggauggugu

SEQ ID NO: 1925355 - RNA, 16 nt, Human
cauacaguuugcacuu

SEQ ID NO: 1925356 - RNA, 19 nt, Human
cauacagggaugguguuca

SEQ ID NO: 1925357 - RNA, 21 nt, Human
cauauguaccauguacaugaa

SEQ ID NO: 1925358 - RNA, 15 nt, Human
cauauguaccaugua

SEQ ID NO: 1925359 - RNA, 22 nt, Human
cauauuaccacagacauacuaa

SEQ ID NO: 1925360 - RNA, 18 nt, Human
cauauguugaauacuuuu

SEQ ID NO: 1925361 - RNA, 19 nt, Human
cauauguugaauacuuuuu

SEQ ID NO: 1925362 - RNA, 16 nt, Human
cauauguugaauacuu

SEQ ID NO: 1925363 - RNA, 17 nt, Human
cauauguugaauacuuu

SEQ ID NO: 1925364 - RNA, 21 nt, Human
cauauuauuuuauguugcaua

SEQ ID NO: 1925365 - RNA, 16 nt, Human
cauagguuuaauaauu

SEQ ID NO: 1925366 - RNA, 23 nt, Human
cauagcagagaaugaaagggccc

SEQ ID NO: 1925367 - RNA, 19 nt, Human
cauagcagcuuauucacaa

SEQ ID NO: 1925368 - RNA, 20 nt, Human
cauagcagcuuauucacaag

SEQ ID NO: 1925369 - RNA, 16 nt, Human
cauagcagauuuuaau

SEQ ID NO: 1925370 - RNA, 17 nt, Human
cauagcagauuuuaauu

SEQ ID NO: 1925371 - RNA, 18 nt, Human
cauagcagauuuuaauuu

SEQ ID NO: 1925372 - RNA, 17 nt, Human
caucugguuaggauggc

SEQ ID NO: 1925373 - RNA, 17 nt, Human
caucuguaccucugccu

SEQ ID NO: 1925374 - RNA, 22 nt, Human
caucguuuucuucacuguccuc

SEQ ID NO: 1925375 - RNA, 19 nt, Human
cauccugaggcuccacuug

SEQ ID NO: 1925376 - RNA, 18 nt, Human
cauccugaggcuccacuu

SEQ ID NO: 1925377 - RNA, 12 nt, Human
cauccugcaggc

SEQ ID NO: 1925378 - RNA, 18 nt, Human
caucagcuaaacaccacg

SEQ ID NO: 1925379 - RNA, 20 nt, Human
caucagcuaaacaccacguc

SEQ ID NO: 1925380 - RNA, 19 nt, Human
caucccaaacccuucagug

SEQ ID NO: 1925381 - RNA, 21 nt, Human
caucagcacgauuucuguuua

SEQ ID NO: 1925382 - RNA, 20 nt, Human
caucccaaacccuucagugc

SEQ ID NO: 1925383 - RNA, 13 nt, Human
caucccaacuguc

SEQ ID NO: 1925384 - RNA, 15 nt, Human
caucccacaaguggu

SEQ ID NO: 1925385 - RNA, 11 nt, Human
caucccagccc

SEQ ID NO: 1925386 - RNA, 12 nt, Human
caucccagcccc

SEQ ID NO: 1925387 - RNA, 22 nt, Human
cauccucuguacagagcccacg

SEQ ID NO: 1925388 - RNA, 23 nt, Human
caguucauauguaccauguacau

SEQ ID NO: 1925389 - RNA, 22 nt, Human
caguucauguauguucagaaga

SEQ ID NO: 1925390 - RNA, 15 nt, Human
caguucagcuugggg

SEQ ID NO: 1925391 - RNA, 14 nt, Human
caguucagcuuggg

SEQ ID NO: 1925392 - RNA, 22 nt, Human
caguuauuauauuuacaaaugg

SEQ ID NO: 1925393 - RNA, 13 nt, Human
caguucacccuga

SEQ ID NO: 1925394 - RNA, 21 nt, Human
caguuauuauauuuacaaaug

SEQ ID NO: 1925395 - RNA, 17 nt, Human
caguuauuauauuuaca

SEQ ID NO: 1925396 - RNA, 19 nt, Human
caguggugcgaucuggguu

SEQ ID NO: 1925397 - RNA, 21 nt, Human
cagugguaugaucacggcuca

SEQ ID NO: 1925398 - RNA, 20 nt, Human
caguuacucagaauucucua

SEQ ID NO: 1925399 - RNA, 23 nt, Human
cagucugauucccaagcucugcu

SEQ ID NO: 1925400 - RNA, 22 nt, Human
cagugauuaccagggacugagg

SEQ ID NO: 1925401 - RNA, 22 nt, Human
cagugcccacaggaucagucug

SEQ ID NO: 1925402 - RNA, 18 nt, Human
cagugcccacaggaucag

SEQ ID NO: 1925403 - RNA, 21 nt, Human
cagugcccacaggaucagucu

SEQ ID NO: 1925404 - RNA, 15 nt, Human
cagugcaacacugaa

SEQ ID NO: 1925405 - RNA, 18 nt, Human
cagugggagcugccuguu

SEQ ID NO: 1925406 - RNA, 17 nt, Human
cagugggagcugccugu

SEQ ID NO: 1925407 - RNA, 16 nt, Human
cagugggagcugccug

SEQ ID NO: 1925408 - RNA, 20 nt, Human
cagugguaugaucacggcuc

SEQ ID NO: 1925409 - RNA, 22 nt, Human
cagucugauucccaagcucugc

SEQ ID NO: 1925410 - RNA, 21 nt, Human
cagucugauucccaagcucug

SEQ ID NO: 1925411 - RNA, 16 nt, Human
cagucuauuugagacu

SEQ ID NO: 1925412 - RNA, 21 nt, Human
caugaaucccacccacaugug

SEQ ID NO: 1925413 - RNA, 21 nt, Human
caugaauauuuaguguucaua

SEQ ID NO: 1925414 - RNA, 16 nt, Human
caugaauuugugaagg

SEQ ID NO: 1925415 - RNA, 13 nt, Human
caugacaaagacu

SEQ ID NO: 1925416 - RNA, 15 nt, Human
caugaugcgggccag

SEQ ID NO: 1925417 - RNA, 20 nt, Human
caugaugcgggccagugcuc

SEQ ID NO: 1925418 - RNA, 14 nt, Human
caugaugcgggcca

SEQ ID NO: 1925419 - RNA, 15 nt, Human
caugauggcaacaga

SEQ ID NO: 1925420 - RNA, 19 nt, Human
caugauggcaacagaucug

SEQ ID NO: 1925421 - RNA, 15 nt, Human
caugcaaggucauuu

SEQ ID NO: 1925422 - RNA, 12 nt, Human
caugcaagguca

SEQ ID NO: 1925423 - RNA, 16 nt, Human
cauggccuaugcacau

SEQ ID NO: 1925424 - RNA, 21 nt, Human
cauggccucuucagaucucua

SEQ ID NO: 1925425 - RNA, 19 nt, Human
cauggccuaugcacauaug

SEQ ID NO: 1925426 - RNA, 17 nt, Human
cauggccuaugcacaua

SEQ ID NO: 1925427 - RNA, 22 nt, Human
cauggccucuucagaucucuaa

SEQ ID NO: 1925428 - RNA, 16 nt, Human
caugggaaggugggcg

SEQ ID NO: 1925429 - RNA, 18 nt, Human
caugggaaaggggaaguu

SEQ ID NO: 1925430 - RNA, 20 nt, Human
caugcuccuggcccacugca

SEQ ID NO: 1925431 - RNA, 17 nt, Human
caugcuccuggcccacu

SEQ ID NO: 1925432 - RNA, 14 nt, Human
caugcuccuggccc

SEQ ID NO: 1925433 - RNA, 16 nt, Human
caugcuccuggcccac

SEQ ID NO: 1925434 - RNA, 22 nt, Human
cauguaugucuuggacacugua

SEQ ID NO: 1925435 - RNA, 21 nt, Human
cauguaugucuuggacacugu

SEQ ID NO: 1925436 - RNA, 18 nt, Human
cauguaugucuuggacac

SEQ ID NO: 1925437 - RNA, 17 nt, Human
cauguaugucuuggaca

SEQ ID NO: 1925438 - RNA, 13 nt, Human
cauguaugucuug

SEQ ID NO: 1925439 - RNA, 19 nt, Human
cauguuggccaggcugguc

SEQ ID NO: 1925440 - RNA, 17 nt, Human
cauguuggccaggcugg

SEQ ID NO: 1925441 - RNA, 18 nt, Human
cauguuggccaggcuggu

SEQ ID NO: 1925442 - RNA, 18 nt, Human
cauguucuuaauucuuag

SEQ ID NO: 1925443 - RNA, 14 nt, Human
cauguucugcuuuc

SEQ ID NO: 1925444 - RNA, 21 nt, Human
cauguuacauaagauaaaugu

SEQ ID NO: 1925445 - RNA, 16 nt, Human
cauguucuuaauucuu

SEQ ID NO: 1925446 - RNA, 13 nt, Human
cauguucuuaauu

SEQ ID NO: 1925447 - RNA, 15 nt, Human
cauguccaagaagcc

SEQ ID NO: 1925448 - RNA, 16 nt, Human
cauguccaagaagccc

SEQ ID NO: 1925449 - RNA, 16 nt, Human
cauguuacauaagaua

SEQ ID NO: 1925450 - RNA, 17 nt, Human
cauguuacauaagauaa

SEQ ID NO: 1925451 - RNA, 13 nt, Human
cauuauuaucaac

SEQ ID NO: 1925452 - RNA, 17 nt, Human
cauucuccaccugccag

SEQ ID NO: 1925453 - RNA, 18 nt, Human
cauucuccaccugccagg

SEQ ID NO: 1925454 - RNA, 19 nt, Human
cauucuccaccugccaggg

SEQ ID NO: 1925455 - RNA, 21 nt, Human
cauucuccaccugccagggac

SEQ ID NO: 1925456 - RNA, 20 nt, Human
cauucuccuuguguuacuaa

SEQ ID NO: 1925457 - RNA, 14 nt, Human
ccaacucagaaggg

SEQ ID NO: 1925458 - RNA, 21 nt, Human
ccaacucaccccagccccaaa

SEQ ID NO: 1925459 - RNA, 15 nt, Human
ccaagcucugcuccu

SEQ ID NO: 1925460 - RNA, 14 nt, Human
ccaagcucugcucc

SEQ ID NO: 1925461 - RNA, 16 nt, Human
ccaagcucugcuccuc

SEQ ID NO: 1925462 - RNA, 16 nt, Human
ccaaaucauaguggcu

SEQ ID NO: 1925463 - RNA, 23 nt, Human
ccaaaucagcugcuacuacuccu

SEQ ID NO: 1925464 - RNA, 15 nt, Human
ccaaaucagcugcua

SEQ ID NO: 1925465 - RNA, 14 nt, Human
ccaacuauggccug

SEQ ID NO: 1925466 - RNA, 15 nt, Human
ccaacuauggccugu

SEQ ID NO: 1925467 - RNA, 16 nt, Human
ccaacuauggccugug

SEQ ID NO: 1925468 - RNA, 13 nt, Human
ccaacucacccca

SEQ ID NO: 1925469 - RNA, 23 nt, Human
ccaauggacuaacuugucuuugg

SEQ ID NO: 1925470 - RNA, 14 nt, Human
ccaaugggagcuca

SEQ ID NO: 1925471 - RNA, 11 nt, Human
ccaauucuuac

SEQ ID NO: 1925472 - RNA, 19 nt, Human
ccaauucgaacuuuuucca

SEQ ID NO: 1925473 - RNA, 14 nt, Human
ccaauucagacagg

SEQ ID NO: 1925474 - RNA, 16 nt, Human
ccaauucagacaggca

SEQ ID NO: 1925475 - RNA, 20 nt, Human
ccaaggagggugagugcaag

SEQ ID NO: 1925476 - RNA, 23 nt, Human
ccaaggagaugaagcaaacacau

SEQ ID NO: 1925477 - RNA, 14 nt, Human
ccaaggagaugaag

SEQ ID NO: 1925478 - RNA, 12 nt, Human
ccaaggagcugc

SEQ ID NO: 1925479 - RNA, 13 nt, Human
ccaaggagcugcu

SEQ ID NO: 1925480 - RNA, 14 nt, Human
ccaaggagcugcua

SEQ ID NO: 1925481 - RNA, 15 nt, Human
ccaaggagcugcuau

SEQ ID NO: 1925482 - RNA, 16 nt, Human
ccaaggagcugcuaua

SEQ ID NO: 1925483 - RNA, 22 nt, Human
ccaaggagcugcuauagccugg

SEQ ID NO: 1925484 - RNA, 14 nt, Human
ccaaagugcuggga

SEQ ID NO: 1925485 - RNA, 22 nt, Human
ccaaaguacacuguuucaaacu

SEQ ID NO: 1925486 - RNA, 21 nt, Human
cauuuggugguuucagaaaug

SEQ ID NO: 1925487 - RNA, 21 nt, Human
cauuuggcagggguggcugcc

SEQ ID NO: 1925488 - RNA, 23 nt, Human
cauuuuuuuuaagaaaaaggaug

SEQ ID NO: 1925489 - RNA, 14 nt, Human
ccaaaaggcagaag

SEQ ID NO: 1925490 - RNA, 14 nt, Human
ccaaaagcugcuca

SEQ ID NO: 1925491 - RNA, 23 nt, Human
ccaaaaaagcuguauuuugaaaa

SEQ ID NO: 1925492 - RNA, 22 nt, Human
ccaaaaaagcuguauuuugaaa

SEQ ID NO: 1925493 - RNA, 20 nt, Human
ccaaaaaagcuguauuuuga

SEQ ID NO: 1925494 - RNA, 18 nt, Human
cauuuaggugaggaagca

SEQ ID NO: 1925495 - RNA, 16 nt, Human
cauuuaggugaggaag

SEQ ID NO: 1925496 - RNA, 20 nt, Human
cauugggugagguaauaaac

SEQ ID NO: 1925497 - RNA, 16 nt, Human
cauuggagauguuuag

SEQ ID NO: 1925498 - RNA, 20 nt, Human
cauuggauucugagagcugu

SEQ ID NO: 1925499 - RNA, 15 nt, Human
cauuggauucugaga

SEQ ID NO: 1925500 - RNA, 19 nt, Human
cccugaagcugugcggagc

SEQ ID NO: 1925501 - RNA, 17 nt, Human
cccugaaggggccauga

SEQ ID NO: 1925502 - RNA, 14 nt, Human
cccugacaacacuc

SEQ ID NO: 1925503 - RNA, 20 nt, Human
cccugaaggccccgcccagg

SEQ ID NO: 1925504 - RNA, 22 nt, Human
cccugaaggccccgcccaggcu

SEQ ID NO: 1925505 - RNA, 16 nt, Human
cccugacaacacucau

SEQ ID NO: 1925506 - RNA, 22 nt, Human
cccugacaacacucauugaccu

SEQ ID NO: 1925507 - RNA, 20 nt, Human
cccugaauuuaaauagcuuu

SEQ ID NO: 1925508 - RNA, 17 nt, Human
cccugaagcugugcgga

SEQ ID NO: 1925509 - RNA, 14 nt, Human
cccugaaggaacca

SEQ ID NO: 1925510 - RNA, 12 nt, Human
cccugaaggccc

SEQ ID NO: 1925511 - RNA, 13 nt, Human
cccugaaggcccc

SEQ ID NO: 1925512 - RNA, 14 nt, Human
cccugaaggccccg

SEQ ID NO: 1925513 - RNA, 16 nt, Human
cccugaaggccccgcc

SEQ ID NO: 1925514 - RNA, 19 nt, Human
cccugaaggccccgcccag

SEQ ID NO: 1925515 - RNA, 18 nt, Human
cccugaaagcccugagcu

SEQ ID NO: 1925516 - RNA, 21 nt, Human
cccucgcuuggacggcugggc

SEQ ID NO: 1925517 - RNA, 23 nt, Human
cccucgcuuggacggcugggcac

SEQ ID NO: 1925518 - RNA, 17 nt, Human
cccuccuacccugcgcc

SEQ ID NO: 1925519 - RNA, 18 nt, Human
cccuccuacccugcgccc

SEQ ID NO: 1925520 - RNA, 22 nt, Human
cccucgaggcggaucuuuggac

SEQ ID NO: 1925521 - RNA, 23 nt, Human
cccucgaggcggaucuuuggaca

SEQ ID NO: 1925522 - RNA, 14 nt, Human
cccuccucucccau

SEQ ID NO: 1925523 - RNA, 13 nt, Human
cccuccucuccca

SEQ ID NO: 1925524 - RNA, 20 nt, Human
cccugcccaccuggccucug

SEQ ID NO: 1925525 - RNA, 16 nt, Human
cccugagcuuucugcu

SEQ ID NO: 1925526 - RNA, 20 nt, Human
cccugaccugugagcccagc

SEQ ID NO: 1925527 - RNA, 18 nt, Human
cccugagaucucugcagg

SEQ ID NO: 1925528 - RNA, 12 nt, Human
cccugacccugu

SEQ ID NO: 1925529 - RNA, 19 nt, Human
cccugacccuguggaagca

SEQ ID NO: 1925530 - RNA, 16 nt, Human
cccugacccuguauau

SEQ ID NO: 1925531 - RNA, 15 nt, Human
cccugacccugugga

SEQ ID NO: 1925532 - RNA, 16 nt, Human
cccugaccugugagcc

SEQ ID NO: 1925533 - RNA, 17 nt, Human
cccugaccucccucuaa

SEQ ID NO: 1925534 - RNA, 17 nt, Human
cccugcccggcugcgga

SEQ ID NO: 1925535 - RNA, 14 nt, Human
cccugcccggcugc

SEQ ID NO: 1925536 - RNA, 14 nt, Human
cccugcccuccccu

SEQ ID NO: 1925537 - RNA, 22 nt, Human
cccugcccaccuggccucugca

SEQ ID NO: 1925538 - RNA, 23 nt, Human
cccugcccccaggacugggccac

SEQ ID NO: 1925539 - RNA, 22 nt, Human
cccugcccccaggacugggcca

SEQ ID NO: 1925540 - RNA, 20 nt, Human
cccugcccccaggacugggc

SEQ ID NO: 1925541 - RNA, 18 nt, Human
cccugcccccaggacugg

SEQ ID NO: 1925542 - RNA, 17 nt, Human
cccugcccccaggacug

SEQ ID NO: 1925543 - RNA, 16 nt, Human
cccugcccccaggacu

SEQ ID NO: 1925544 - RNA, 14 nt, Human
cccugcccccagga

SEQ ID NO: 1925545 - RNA, 13 nt, Human
cccugcccccagg

SEQ ID NO: 1925546 - RNA, 13 nt, Human
cccuggccucugu

SEQ ID NO: 1925547 - RNA, 15 nt, Human
cccuggccucugugc

SEQ ID NO: 1925548 - RNA, 18 nt, Human
cccuggccucugugccuu

SEQ ID NO: 1925549 - RNA, 19 nt, Human
cccuggccucugugccuuc

SEQ ID NO: 1925550 - RNA, 21 nt, Human
cccuggccucugugccuucuu

SEQ ID NO: 1925551 - RNA, 15 nt, Human
cccugcccuccccuc

SEQ ID NO: 1925552 - RNA, 13 nt, Human
cccuggagguggc

SEQ ID NO: 1925553 - RNA, 13 nt, Human
cccuggaugcagc

SEQ ID NO: 1925554 - RNA, 17 nt, Human
cccuggaugcagccuca

SEQ ID NO: 1925555 - RNA, 21 nt, Human
cccuggaugcagccucacagu

SEQ ID NO: 1925556 - RNA, 20 nt, Human
cccuggccgaguccaagcug

SEQ ID NO: 1925557 - RNA, 14 nt, Human
ccuaaucuucugaa

SEQ ID NO: 1925558 - RNA, 21 nt, Human
ccuaauccaggcagauccagg

SEQ ID NO: 1925559 - RNA, 19 nt, Human
ccuaauccaggcagaucca

SEQ ID NO: 1925560 - RNA, 20 nt, Human
ccuaauccaggcagauccag

SEQ ID NO: 1925561 - RNA, 18 nt, Human
ccuaauccaggcagaucc

SEQ ID NO: 1925562 - RNA, 20 nt, Human
ccuagccugugccucuggga

SEQ ID NO: 1925563 - RNA, 17 nt, Human
ccuagcacuuugggagg

SEQ ID NO: 1925564 - RNA, 12 nt, Human
ccuagcagcacc

SEQ ID NO: 1925565 - RNA, 19 nt, Human
ccuagcauacguacacauu

SEQ ID NO: 1925566 - RNA, 20 nt, Human
ccuagcagcaccguucugug

SEQ ID NO: 1925567 - RNA, 21 nt, Human
ccuagcagcaccguucugugc

SEQ ID NO: 1925568 - RNA, 23 nt, Human
ccuagcagcaccguucugugcac

SEQ ID NO: 1925569 - RNA, 14 nt, Human
ccggcuccaggcuc

SEQ ID NO: 1925570 - RNA, 13 nt, Human
ccggcuccaggcu

SEQ ID NO: 1925571 - RNA, 12 nt, Human
ccggcuccaggc

SEQ ID NO: 1925572 - RNA, 15 nt, Human
ccggcuccaggcucc

SEQ ID NO: 1925573 - RNA, 14 nt, Human
ccgucuaccugagg

SEQ ID NO: 1925574 - RNA, 15 nt, Human
ccgucuaccugaggg

SEQ ID NO: 1925575 - RNA, 17 nt, Human
ccgucuaccugaggggc

SEQ ID NO: 1925576 - RNA, 12 nt, Human
ccgugaggccag

SEQ ID NO: 1925577 - RNA, 13 nt, Human
ccgugaggccaga

SEQ ID NO: 1925578 - RNA, 14 nt, Human
ccgugaggccagag

SEQ ID NO: 1925579 - RNA, 16 nt, Human
ccgugaggccagagac

SEQ ID NO: 1925580 - RNA, 20 nt, Human
ccuaacgaaguauccuucag

SEQ ID NO: 1925581 - RNA, 15 nt, Human
ccggccccugcuggu

SEQ ID NO: 1925582 - RNA, 16 nt, Human
ccggccaccugcggug

SEQ ID NO: 1925583 - RNA, 21 nt, Human
ccggcccuccuacccugcgcc

SEQ ID NO: 1925584 - RNA, 18 nt, Human
ccggcaggguccuagaaa

SEQ ID NO: 1925585 - RNA, 13 nt, Human
cccugucuaauga

SEQ ID NO: 1925586 - RNA, 23 nt, Human
cccugugauggggcccugccucc

SEQ ID NO: 1925587 - RNA, 22 nt, Human
cccugugcaaccucuuggccug

SEQ ID NO: 1925588 - RNA, 21 nt, Human
cccugugauggggcccugccu

SEQ ID NO: 1925589 - RNA, 22 nt, Human
cccugugauggggcccugccuc

SEQ ID NO: 1925590 - RNA, 12 nt, Human
ccgcccaggcuu

SEQ ID NO: 1925591 - RNA, 22 nt, Human
ccgcccagagacccaagcugcc

SEQ ID NO: 1925592 - RNA, 16 nt, Human
ccgcagacaggaccag

SEQ ID NO: 1925593 - RNA, 17 nt, Human
ccgcagacaggaccagg

SEQ ID NO: 1925594 - RNA, 15 nt, Human
cccuuccucuuucca

SEQ ID NO: 1925595 - RNA, 19 nt, Human
ccgaaagggacuuggaagc

SEQ ID NO: 1925596 - RNA, 16 nt, Human
ccgaaaacguggcugc

SEQ ID NO: 1925597 - RNA, 17 nt, Human
ccgaaaacguggcugcu

SEQ ID NO: 1925598 - RNA, 17 nt, Human
ccgaccagacaccuuga

SEQ ID NO: 1925599 - RNA, 13 nt, Human
ccgaccagacacc

SEQ ID NO: 1925600 - RNA, 18 nt, Human
ccgaccagacaccuugac

SEQ ID NO: 1925601 - RNA, 17 nt, Human
ccgaauagcugggacua

SEQ ID NO: 1925602 - RNA, 16 nt, Human
ccgaauagcugggacu

SEQ ID NO: 1925603 - RNA, 23 nt, Human
ccgaaggugaggagcuugaaacc

SEQ ID NO: 1925604 - RNA, 13 nt, Human
ccgaagucuuuug

SEQ ID NO: 1925605 - RNA, 20 nt, Human
ccucugccugaagucacaca

SEQ ID NO: 1925606 - RNA, 11 nt, Human
ccucugccuga

SEQ ID NO: 1925607 - RNA, 23 nt, Human
ccucugccucugacacacagcuc

SEQ ID NO: 1925608 - RNA, 21 nt, Human
ccucugccucugacacacagc

SEQ ID NO: 1925609 - RNA, 20 nt, Human
ccucugccucugacacacag

SEQ ID NO: 1925610 - RNA, 16 nt, Human
ccucucugcagguccc

SEQ ID NO: 1925611 - RNA, 17 nt, Human
ccucucugcaggucccu

SEQ ID NO: 1925612 - RNA, 18 nt, Human
ccucucugcaggucccua

SEQ ID NO: 1925613 - RNA, 19 nt, Human
ccucucugcaggucccuaa

SEQ ID NO: 1925614 - RNA, 12 nt, Human
ccucucucacuc

SEQ ID NO: 1925615 - RNA, 15 nt, Human
ccucuccuuccugug

SEQ ID NO: 1925616 - RNA, 13 nt, Human
ccucuccuuccug

SEQ ID NO: 1925617 - RNA, 16 nt, Human
ccuccuacccugcgcc

SEQ ID NO: 1925618 - RNA, 15 nt, Human
ccucgaacuggcugc

SEQ ID NO: 1925619 - RNA, 16 nt, Human
ccucgaacuggcugca

SEQ ID NO: 1925620 - RNA, 16 nt, Human
ccucgagguuucucaa

SEQ ID NO: 1925621 - RNA, 13 nt, Human
ccucgaauuuugu

SEQ ID NO: 1925622 - RNA, 18 nt, Human
ccucgaauuuuguuuucu

SEQ ID NO: 1925623 - RNA, 18 nt, Human
ccuccuuugugaggaagc

SEQ ID NO: 1925624 - RNA, 19 nt, Human
ccuccuuugugaggaagcc

SEQ ID NO: 1925625 - RNA, 20 nt, Human
ccuccuuugugaggaagccg

SEQ ID NO: 1925626 - RNA, 20 nt, Human
ccucccuggugagagggccg

SEQ ID NO: 1925627 - RNA, 18 nt, Human
ccucccuguuccccagag

SEQ ID NO: 1925628 - RNA, 19 nt, Human
ccucccuguuccccagaga

SEQ ID NO: 1925629 - RNA, 20 nt, Human
ccucccuguuccccagagaa

SEQ ID NO: 1925630 - RNA, 15 nt, Human
ccucagccuccugag

SEQ ID NO: 1925631 - RNA, 11 nt, Human
ccucagccugg

SEQ ID NO: 1925632 - RNA, 12 nt, Human
ccucagccuggc

SEQ ID NO: 1925633 - RNA, 13 nt, Human
ccucagccuggcc

SEQ ID NO: 1925634 - RNA, 14 nt, Human
ccucagccuggcca

SEQ ID NO: 1925635 - RNA, 19 nt, Human
ccucaggaggcaggaccuu

SEQ ID NO: 1925636 - RNA, 19 nt, Human
ccucagccuggccagacac

SEQ ID NO: 1925637 - RNA, 15 nt, Human
ccucagccuggccag

SEQ ID NO: 1925638 - RNA, 16 nt, Human
ccucagccuggccaga

SEQ ID NO: 1925639 - RNA, 17 nt, Human
ccucagccuggccagac

SEQ ID NO: 1925640 - RNA, 18 nt, Human
ccucagccuggccagaca

SEQ ID NO: 1925641 - RNA, 11 nt, Human
ccucaggcagg

SEQ ID NO: 1925642 - RNA, 17 nt, Human
ccucccaacucacccca

SEQ ID NO: 1925643 - RNA, 20 nt, Human
ccucccaacucaccccagcc

SEQ ID NO: 1925644 - RNA, 21 nt, Human
ccucccaacucaccccagccc

SEQ ID NO: 1925645 - RNA, 23 nt, Human
ccucccaacucaccccagcccca

SEQ ID NO: 1925646 - RNA, 15 nt, Human
ccucccacugggguc

SEQ ID NO: 1925647 - RNA, 13 nt, Human
ccucccacugggg

SEQ ID NO: 1925648 - RNA, 17 nt, Human
ccugaggcugggcuccc

SEQ ID NO: 1925649 - RNA, 19 nt, Human
ccugaggcugggcucccuu

SEQ ID NO: 1925650 - RNA, 21 nt, Human
ccugaggcugggcucccuucc

SEQ ID NO: 1925651 - RNA, 22 nt, Human
ccugaccugugagcccagcugg

SEQ ID NO: 1925652 - RNA, 21 nt, Human
ccucuuugcuuugcuuucugc

SEQ ID NO: 1925653 - RNA, 14 nt, Human
ccugaccugugagc

SEQ ID NO: 1925654 - RNA, 18 nt, Human
ccugaccugugagcccag

SEQ ID NO: 1925655 - RNA, 19 nt, Human
ccugaccugugagcccagc

SEQ ID NO: 1925656 - RNA, 20 nt, Human
ccugaccugugagcccagcu

SEQ ID NO: 1925657 - RNA, 21 nt, Human
ccugaccugugagcccagcug

SEQ ID NO: 1925658 - RNA, 12 nt, Human
ccugaggggccu

SEQ ID NO: 1925659 - RNA, 16 nt, Human
ccugaggggccucuua

SEQ ID NO: 1925660 - RNA, 15 nt, Human
ccugcaggcagccag

SEQ ID NO: 1925661 - RNA, 12 nt, Human
ccugcagagggc

SEQ ID NO: 1925662 - RNA, 16 nt, Human
ccugcaggcagccagg

SEQ ID NO: 1925663 - RNA, 17 nt, Human
ccugcaggcagccaggc

SEQ ID NO: 1925664 - RNA, 18 nt, Human
ccugaguuccuagccacc

SEQ ID NO: 1925665 - RNA, 14 nt, Human
ccugaguuccuagc

SEQ ID NO: 1925666 - RNA, 17 nt, Human
ccugcagagcugcgggc

SEQ ID NO: 1925667 - RNA, 14 nt, Human
ccugcagagcugcg

SEQ ID NO: 1925668 - RNA, 13 nt, Human
ccugcagagcugc

SEQ ID NO: 1925669 - RNA, 12 nt, Human
ccugcagagcug

SEQ ID NO: 1925670 - RNA, 14 nt, Human
ccugcagagggcac

SEQ ID NO: 1925671 - RNA, 23 nt, Human
ccugcaggcagccaggccacaag

SEQ ID NO: 1925672 - RNA, 18 nt, Human
ccugcaggcagccaggcc

SEQ ID NO: 1925673 - RNA, 19 nt, Human
ccugcaggcagccaggcca

SEQ ID NO: 1925674 - RNA, 20 nt, Human
ccugcaggcagccaggccac

SEQ ID NO: 1925675 - RNA, 21 nt, Human
ccugcaggcagccaggccaca

SEQ ID NO: 1925676 - RNA, 21 nt, Human
ccucugccugaagucacacag

SEQ ID NO: 1925677 - RNA, 13 nt, Human
ccucugcucccca

SEQ ID NO: 1925678 - RNA, 16 nt, Human
ccucuuugagugaagc

SEQ ID NO: 1925679 - RNA, 11 nt, Human
ccucuuugcuu

SEQ ID NO: 1925680 - RNA, 19 nt, Human
ccucuuuggucuacacugu

SEQ ID NO: 1925681 - RNA, 13 nt, Human
ccucuuugcuuug

SEQ ID NO: 1925682 - RNA, 14 nt, Human
ccucuuugcuuugc

SEQ ID NO: 1925683 - RNA, 15 nt, Human
ccucuuugcuuugcu

SEQ ID NO: 1925684 - RNA, 17 nt, Human
ccucuuugcuuugcuuu

SEQ ID NO: 1925685 - RNA, 15 nt, Human
ccucuuggcugccuu

SEQ ID NO: 1925686 - RNA, 13 nt, Human
ccucuuggccuga

SEQ ID NO: 1925687 - RNA, 15 nt, Human
ccucuucuggcucaa

SEQ ID NO: 1925688 - RNA, 22 nt, Human
ccugcugcaguugccagucacc

SEQ ID NO: 1925689 - RNA, 11 nt, Human
ccugcugcagu

SEQ ID NO: 1925690 - RNA, 12 nt, Human
ccugcugcaguu

SEQ ID NO: 1925691 - RNA, 16 nt, Human
ccugcugcaguugcca

SEQ ID NO: 1925692 - RNA, 20 nt, Human
ccugccucucugcagguccc

SEQ ID NO: 1925693 - RNA, 21 nt, Human
ccugccucucugcaggucccu

SEQ ID NO: 1925694 - RNA, 15 nt, Human
ccugccucuucucua

SEQ ID NO: 1925695 - RNA, 17 nt, Human
ccugccucucugcaggu

SEQ ID NO: 1925696 - RNA, 23 nt, Human
ccugccuccuuugugaggaagcc

SEQ ID NO: 1925697 - RNA, 21 nt, Human
ccugccuccuuugugaggaag

SEQ ID NO: 1925698 - RNA, 22 nt, Human
ccugccuccuuugugaggaagc

SEQ ID NO: 1925699 - RNA, 13 nt, Human
ccugccuccuuug

SEQ ID NO: 1925700 - RNA, 15 nt, Human
ccugccuccuuugug

SEQ ID NO: 1925701 - RNA, 19 nt, Human
ccugccuccuuugugagga

SEQ ID NO: 1925702 - RNA, 20 nt, Human
ccugccuccuuugugaggaa

SEQ ID NO: 1925703 - RNA, 22 nt, Human
ccagagagccuggugcugcugc

SEQ ID NO: 1925704 - RNA, 21 nt, Human
ccagagagccuggugcugcug

SEQ ID NO: 1925705 - RNA, 13 nt, Human
ccagagagggugg

SEQ ID NO: 1925706 - RNA, 14 nt, Human
ccagaugcaccagc

SEQ ID NO: 1925707 - RNA, 13 nt, Human
ccagaugcaccag

SEQ ID NO: 1925708 - RNA, 23 nt, Human
ccagaucuacuugguugucaagu

SEQ ID NO: 1925709 - RNA, 16 nt, Human
ccagagacacaagccu

SEQ ID NO: 1925710 - RNA, 18 nt, Human
ccagagacacaagccuuc

SEQ ID NO: 1925711 - RNA, 17 nt, Human
ccagagacauacuugaa

SEQ ID NO: 1925712 - RNA, 18 nt, Human
ccagagacauacuugaag

SEQ ID NO: 1925713 - RNA, 20 nt, Human
ccagagacauacuugaaggg

SEQ ID NO: 1925714 - RNA, 22 nt, Human
ccagagacauacuugaagggcc

SEQ ID NO: 1925715 - RNA, 23 nt, Human
ccagagacauacuugaagggcca

SEQ ID NO: 1925716 - RNA, 15 nt, Human
ccagacuuccuugag

SEQ ID NO: 1925717 - RNA, 13 nt, Human
ccagacuuccuug

SEQ ID NO: 1925718 - RNA, 14 nt, Human
ccagacuuccuuga

SEQ ID NO: 1925719 - RNA, 20 nt, Human
ccagacuccugacugucucc

SEQ ID NO: 1925720 - RNA, 21 nt, Human
ccagacuccugacugucuccc

SEQ ID NO: 1925721 - RNA, 16 nt, Human
ccagagaaaggggagc

SEQ ID NO: 1925722 - RNA, 16 nt, Human
ccagagaaagcgcaga

SEQ ID NO: 1925723 - RNA, 19 nt, Human
ccagagaaaggggagccca

SEQ ID NO: 1925724 - RNA, 20 nt, Human
ccagagaaaggggagcccac

SEQ ID NO: 1925725 - RNA, 23 nt, Human
ccagagaaaggggagcccacugu

SEQ ID NO: 1925726 - RNA, 12 nt, Human
ccagagaagcua

SEQ ID NO: 1925727 - RNA, 15 nt, Human
ccagacggcuccacu

SEQ ID NO: 1925728 - RNA, 20 nt, Human
ccagacggcuccacuaggac

SEQ ID NO: 1925729 - RNA, 18 nt, Human
ccagacuccaccaagccu

SEQ ID NO: 1925730 - RNA, 14 nt, Human
ccagacuccaccaa

SEQ ID NO: 1925731 - RNA, 24 nt, Human
ccagaccugauccuggaggcccag

SEQ ID NO: 1925732 - RNA, 14 nt, Human
ccagaccugcagac

SEQ ID NO: 1925733 - RNA, 16 nt, Human
ccagaccugcagacgc

SEQ ID NO: 1925734 - RNA, 20 nt, Human
ccagaccugcagacgcccag

SEQ ID NO: 1925735 - RNA, 21 nt, Human
ccagaccugcagacgcccaga
